(19) United States
(12) Patent Application Publication
(10) Pub. No.: US 2012/0295819 A1
(43) Pub. Date: Nov. 22, 2012

(54) METHODS AND COMPOSITIONS FOR MULTIPLEX PCR

(75) Inventors: John LEAMON, Guilford, CT (US); Mark ANDERSEN, Carlsbad, CA (US); Michael THORNTON, San Francisco, CA (US)

(73) Assignee: LIFE TECHNOLOGIES CORPORATION, Carlsbad, CA (US)

(21) Appl. No.: 13/458,739

(22) Filed: Apr. 27, 2012

Related U.S. Application Data
(60) Provisional application No. 61/479,952, filed on Apr. 28, 2011.
(60) Provisional application No. 61/531,583, filed on Sep. 6, 2011.
(60) Provisional application No. 61/531,574, filed on Sep. 6, 2011.
(60) Provisional application No. 61/538,079, filed on Sep. 22, 2011.
(60) Provisional application No. 61/564,763, filed on Nov. 29, 2011.
(60) Provisional application No. 61/578,192, filed on Dec. 20, 2011.
(60) Provisional application No. 61/594,160, filed on Feb. 2, 2012.
(60) Provisional application No. 61/598,881, filed on Feb. 14, 2012.
(60) Provisional application No. 61/598,892, filed on Feb. 14, 2012.
(60) Provisional application No. 61/625,596, filed on Apr. 17, 2012.
(60) Provisional application No. 61/639,017, filed on Apr. 26, 2012.

(51) Int. Cl. C40B 50/06

(52) U.S. Cl. 506/26

(57) ABSTRACT

The present invention provides methods, compositions, kits, systems and apparatus that are useful for multiplex PCR of one or more nucleic acids present in a sample. In particular, various target-specific primers are provided that allow for the selective amplification of one or more target sequences. In one aspect, the invention relates to target-specific primers useful for the selective amplification of one or more target sequences associated with cancer or inherited disease. In some aspects, amplified target sequences obtained using the disclosed methods, kits, systems and apparatuses can be used in various downstream processes including nucleic acid sequencing and used to detect the presence of genetic variants.

### CROSS REFERENCE TO RELATED APPLICATIONS

[0001] This application claims benefit of priority under 35 U.S.C. §119(e) to U.S. Provisional Application No. 61/479,952, filed Apr. 28, 2011, U.S. Provisional Application No. 61/531,583, filed Sep. 6, 2011, U.S. Provisional Application No. 61/531,574, filed Sep. 6, 2011, U.S. Provisional Application No. 61/538,079, filed Sep. 22, 2011, U.S. Provisional Application No. 61/564,763, filed Nov. 29, 2011, U.S. Provisional Application No. 61/578,192, filed Dec. 20, 2011, U.S. Provisional Application No. 61/594,160 filed Feb. 2, 2012, U.S. Provisional Application No. 61/598,881 filed Feb. 14, 2012, U.S. Provisional Application No. 61/598,892 filed Feb. 14, 2012, U.S. Provisional Application No. 61/625,596 filed Apr. 17, 2012, and U.S. Provisional Application No. 61/639,017 filed Apr. 26, 2012 entitled “METHODS AND COMPOSITIONS FOR MULTIPLEX PCR”, the disclosures of which are incorporated herein by reference in their entireties.

### SEQUENCE LISTING

[0002] This application hereby incorporates by reference the material of the electronic Sequence Listing filed concurrently herewith. The material in the electronic Sequence Listing is submitted as a text (.txt) file entitled “2012_{—}04_{—}25 LT00503 US_ST25.txt” created on Apr. 25, 2012, which has a file size of 18943 KB, and is herein incorporated by reference in its entirety.

### TECHNICAL FIELD

[0003] In some embodiments, the disclosure relates generally to methods, compositions, systems, apparatuses and kits for amplifying one or more target sequences within a sample containing a plurality of target sequences. Optionally, a plurality of target sequences, for example at least 10, 50, 100, 500, 1000, 2500, 5000, 7500, 10000, 25000, 50000 or 100000, are amplified within a single amplification reaction. In some embodiments, the disclosure relates generally to methods, compositions, systems, apparatuses and kits for amplifying one or more target sequences from a single source, such as genomic DNA or formalin-fixed paraffin-embedded (FFPE) DNA. In particular, methods, kits, systems apparatuses and compositions useful for amplifying one or more target sequences using primers having a cleavable group are disclosed.

### BACKGROUND

[0004] Several biological applications involve the selective amplification of nucleic acid molecules within a population. For example, next-generation sequencing methods can involve the analysis of selected targets within a large population of nucleic acid molecules. For such applications, it can be useful to increase the total number of targets that can be selectively amplified from a population within a single amplification reaction. Such selective amplification is typically achieved through use of one or more primers that can selectively hybridize to, or selectively promote the amplification of, a particular target nucleic acid molecule. Such selective amplification can be complicated by the formation of amplification artifacts, such as primer-dimers and the like. The formation of such amplification artifacts (also referred to herein as nonspecific amplification products) can consume critical amplification reagents, e.g., nucleotides, polymerase, primers, etc. Furthermore, such artifacts can frequently have shorter length relative to the intended product and in such situations can amplify more efficiently than the intended products and dominate the reaction output. Selective amplification can also be complicated by the formation of ‘superamplicons’, i.e., the formation of a extended amplicon, which can occur when extension of a first primer is extended through an adjacent target nucleic acid sequence, thereby creating a long non-specific amplification product, which can act as a template for extension with a second primer. The formation of such artifacts in amplification reactions, even when only a single pair of primers is employed, can complicate downstream applications such as qPCR, cloning, gene expression analysis and sample preparation for next-generation sequencing. In some downstream applications, including several next-generation sequencing methods, this problem can be compounded by the requirement to practice a secondary amplification step, since the artifacts can be further amplified during the secondary amplification. For example, downstream sequencing applications can involve the generation of clonally amplified nucleic acid populations that are individually attached to separate supports, such as beads, using emulsion PCR (“emPCR”) and enrichment for clonal amplicons performed via positive selection. In such applications, the artifacts can be carried all the way through the library generation process to the emPCR stage, producing DNA capture beads that include non-specific amplification products. These artifact-containing beads can be selected for during the enrichment process with the template containing beads but are genetically non-informative.

[0005] Nucleic acid molecules amplified in a multiplex PCR reaction can be used in many downstream analysis or assays with, or without, further purification or manipulation. For example, the products of a multiplex PCR reaction (amplicons) when obtained in sufficient yield can be used for single nucleotide polymorphism (SNP) analysis, genotyping, copy number variation analysis, epigenetic analysis, gene expression analysis, hybridization arrays, analysis of gene mutations including but not limited to detection, prognosis and/or diagnosis of disease states, detection and analysis of rare or low frequency allele mutations, nucleic acid sequencing including but not limited to de novo sequencing or targeted resequencing, and the like.

[0006] Exemplary next-generation sequencing systems include the Ion Torrent PGM™ sequencer (Life Technologies) and the Ion Torrent Proton™ Sequencer (Life Technologies), which are ion-based sequencing systems that sequence nucleic acid templates by detecting ions produced as a byproduct of nucleotide incorporation. Typically, hydrogen ions are released as byproducts of nucleotide incorporations occurring during template-dependent nucleic acid synthesis by a polymerase. The Ion Torrent PGM™ sequencer and Ion Proton™ Sequencer detect the nucleotide incorporations by detecting the hydrogen ion byproducts of the nucleotide incorporations. The Ion Torrent PGM™ sequencer and Ion Torrent Proton™ sequencer include a plurality of nucleic acid templates to be sequenced, each template disposed within a respective sequencing reaction well in an array. The wells of the array are each coupled to at least one ion sensor that can detect the release of H⁺ ions or changes in solution pH produced as a byproduct of nucleotide incorporation. The ion sensor comprises a field effect transistor (FET) coupled to an ion-sensitive detection layer that can sense the presence of H⁺ ions or changes in solution pH. The ion sensor provides output signals indicative of nucleotide incorporation which can be represented as voltage changes whose magnitude correlates with the H⁺ ion concentration in a respective well or reaction chamber. Different nucleotide types are flowed serially into the reaction chamber, and are incorporated by the polymerase into an extending primer (or polymerization site) in an order determined by the sequence of the template. Each nucleotide incorporation is accompanied by the release of H⁺ ions in the reaction well, along with a concomitant change in the localized pH. The release of H⁺ ions is registered by the FET of the sensor, which produces signals indicating the occurrence of the nucleotide incorporation. Nucleotides that are not incorporated during a particular nucleotide flow will not produce signals. The amplitude of the signals from the FET may also be correlated with the number of nucleotides of a particular type incorporated into the extending nucleic acid molecule thereby permitting homopolymer regions to be resolved. Thus, during a run of the sequencer multiple nucleotide flows into the reaction chamber along with incorporation monitoring across a multiplicity of wells or reaction chambers permit the instrument to resolve the sequence of many nucleic acid templates simultaneously. Further details regarding the compositions, design and operation of the Ion Torrent PGM™ sequencer can be found, for example, in U.S. patent application Ser. No. 12/002,781, now published as U.S. Patent Publication No. 2009/0026082; U.S. patent application Ser. No. 12/474,897, now published as U.S. Patent Publication No. 2010/0137143; and U.S. patent application Ser. No. 12/492,844, now published as U.S. Patent Publication No. 2010/0282617, all of which applications are incorporated by reference herein in their entireties. In some embodiments, amplicons can be manipulated or amplified through bridge amplification or emPCR to generate a plurality of clonal templates that are suitable for a variety of downstream processes including nucleic acid sequencing. In one embodiment, nucleic acid templates to be sequenced using the Ion Torrent PGM™ or Ion Torrent Proton™ system can be prepared from a population of nucleic acid molecules using one or more of the target-specific amplification techniques outlined herein. Optionally, following target-specific amplification a secondary and/or tertiary amplification process including, but not limited to a library amplification step and/or a clonal amplification step such as emPCR can be performed.

[0007] As the number of nucleic acid targets desired to be amplified within a sample nucleic acid population increases, the challenge of selectively amplifying these targets while avoiding the formation of undesirable amplification artifacts can correspondingly increase. For example, the formation of artifacts including primer-dimers and superamplicons can be a greater issue in multiplex PCR reactions where PCR primer pairs for multiple targets are combined in a single reaction tube and co-amplified. In multiplex PCR, the presence of additional primer pairs at elevated concentrations relative to the template DNA makes primer-primer interactions, and the formation of primer-dimers and other artifacts, more likely.

[0008] Current methods for avoiding or reducing the formation of artifacts, such as primer-dimers, during nucleic acid amplification center around the primer design process and often utilize dedicated software packages (e.g., DNAsoftwares's Visual OMP, MultiPLX, ABI's Primer Express, etc.) to design primer pairs that are predicted to exhibit minimal interaction between the other primers in the pool during amplification. Through the use of such software, primers can be designed to be as target-specific or amplicon-specific as possible, and often are grouped into subsets to minimize primer-primer interactions, primer-dimer formation and superamplicons. Stringent design parameters, however, limit the number of amplicons that can be co-amplified simultaneously and in some cases may prevent the amplification of some amplicons altogether. Other current methods require the use of multiple PCR primer pools to segregate primers into non-overlapping pools to minimize or prevent primer artifacts during the amplification step. Other methods include the use of multiple primer pools or single plex reactions to enhance the overall yield of amplification product per reaction. In a multiplex PCR reaction, each primer pair competes in the amplification reaction with additional primer pairs for a finite amount of dNTPs, polymerase and other reagents. There is therefore a need for improved methods, compositions, systems, apparatuses and kits that allow for the selective amplification of multiple target nucleic acid molecules within a population of nucleic acid molecules while avoiding, or minimizing, the formation of artifacts (also referred to as non-specific amplification products), including primer dimers. There is also a need for improved methods, compositions, systems, apparatuses and kits that allow for the selective amplification of multiple target nucleic acid molecules from a single nucleic acid sample, such as genomic DNA and/or formalin-fixed paraffin embedded (FFPE) DNA while avoiding, or minimizing, the formation of artifacts. There is also a need in the art for improved methods, compositions, systems and kits that allow for the simultaneous amplification of thousands of target-specific nucleic acid molecules in a single reaction, which can be used in any applicable downstream assay or analysis.

[0009] The practice of the present subject matter may employ, unless otherwise indicated, conventional techniques and descriptions of organic chemistry, molecular biology (including recombinant techniques), cell biology, and biochemistry, which are within the skill of the art. Such conventional techniques include, but are not limited to, preparation of synthetic polynucleotides, polymerization techniques, chemical and physical analysis of polymer particles, preparation of nucleic acid libraries, nucleic acid sequencing and analysis, and the like. Specific illustrations of suitable techniques can be used by reference to the examples provided herein. Other equivalent conventional procedures can also be used. Such conventional techniques and descriptions can be found in standard laboratory manuals such as Genome Analysis: A Laboratory Manual Series (Vols. I-IV), PCR Primer: A Laboratory Manual, and Molecular Cloning: A Laboratory Manual (all from Cold Spring Harbor Laboratory Press), Hermanson, Bioconjugate Techniques, Second Edition (Academic Press, 2008); Merkus, Particle Size Measurements (Springer, 2009); Rubinstein and Colby, Polymer Physics (Oxford University Press, 2003); and the like.

[0010] Unless defined otherwise, all technical and scientific terms used herein have the same meaning as is commonly understood by one of ordinary skill in the art to which these inventions belong. All patents, patent applications, published applications, treatises and other publications referred to herein, both supra and infra, are incorporated by reference in their entirety. If a definition and/or description is set forth herein that is contrary to or otherwise inconsistent with any definition set forth in the patents, patent applications, published applications, and other publications that are herein incorporated by reference, the definition and/or description set forth herein prevails over the definition that is incorporated by reference.

[0011] As used herein, the terms “comprises,” “comprising,” “includes,” “including,” “has,” “having” or any other variation thereof, are intended to cover a non-exclusive inclusion. For example, a process, method, article, or apparatus that comprises a list of features is not necessarily limited only to those features but may include other features not expressly listed or inherent to such process, method, article, or apparatus. Further, unless expressly stated to the contrary, “or” refers to an inclusive-or and not to an exclusive-or. For example, a condition A or B is satisfied by any one of the following: A is true (or present) and B is false (or not present), A is false (or not present) and B is true (or present), and both A and B are true (or present).

### BRIEF DESCRIPTION OF THE DRAWINGS

[0012] The accompanying drawings, which are incorporated into and form a part of the specification, illustrate one or more exemplary embodiments and serve to explain the principles of various exemplary embodiments. The drawings are exemplary and explanatory only and are not to be construed as limiting or restrictive in any way.

[0013] FIG. 1A-FIG. 1E₂ are schematic outlining an exemplary embodiment of a method utilizing degradable amplification primers according to the disclosure.

[0014] FIG. 2 is a schematic outlining an exemplary embodiment of a method obtaining a target-specific amplicon library according to the disclosure.

[0015] FIG. 3A-FIG. 3B show examples of elution profiles for exemplary unmodified and modified primer pools. FIG. 3A shows a significant and predominant production of primer-dimers when using an exemplary set of standard multiplex primers. FIG. 3B shows a decrease in primer-dimers and an overall increase in expected amplicon product (104 bp) when using an exemplary set of modified multiplex primers as exemplified by the application.

[0016] FIG. 4A-FIG. 4H show the effect of increasing amplicon GC content in both an exemplary 94-plex and an exemplary 380-plex reaction.

[0017] FIG. 5 shows quantification of the abundance and reproducibility of an exemplary multiplex reaction on genomic DNA using primer set HSMv12. The data is averaged across individual 3 runs performed on an Ion Torrent PGM™ Sequencer (Life Technologies). The level of coverage per amplicon is provided as Log of Counts.

[0018] FIG. 6A-6B show quantification of the abundance and reproducibility of an exemplary multiplex reaction on genomic DNA when analyzed using an Ion Torrent PGM™ Sequencer (Life Technologies). The data shows the number of reads per amplicon for both the forward (FIG. 6A) and reverse primers (FIG. 6B) in the primer pool.

[0019] FIG. 7 shows quantification of the abundance and reproducibility of an exemplary 384-plex reaction on a genomic DNA sample across 7 individual runs on an Ion Torrent PGM™ Sequencer (Life Technologies). The average number of reads per amplicon is 400.

[0020] FIG. 8 shows quantification of the abundance and reproducibility of an exemplary 411-plex PCR of genomic DNA across 7 individual runs on an Ion Torrent PGM™ Sequencer (Life Technologies). The average number of reads per amplicon is 400.

[0021] FIG. 9 shows an image of agarose gel electrophoresis visualizing exemplary amplification products (lanes 2 and 4) after performing a multiplex PCR and library amplification on an FFPE sample according to an exemplary embodiment.

[0022] FIG. 10 shows quantification of the abundance and reproducibility of data obtained from an FFPE DNA sample (10 ng) in an exemplary 384-plex PCR obtained using an Ion Torrent PGM™ Sequencer (Life Technologies). The average number of reads per amplicon is 400.

[0023] FIG. 11A-11B show quantification of the abundance and reproducibility of data obtained from a FFPE DNA sample (10 ng) after an exemplary 94-plex reaction. The data shows the number of reads per amplicon for both the forward (FIG. 11A) and reverse primers (FIG. 11B) in the primer pool.

[0024] FIG. 12 shows a graph reporting the detection of mutations in codon 12 and codon 13 of the KRAS gene obtained by performing multiplex PCR and library amplification of control DNA and sequencing on an Ion Torrent PGM™ Sequencer (Life Technologies).

[0025] FIG. 13 (Part 1)-FIG. 13 (Part 3) show sequencing alignment data identifying 6 mutations of the cystic fibrosis (CFTR) gene in a sample when using exemplary modified multiplex primers and exemplary library amplification process according to the disclosure.

[0026] FIG. 14 shows the frequencies of twelve different amplicons obtained for a region of the CLTCL1 gene in several DNA samples containing known copy number variation. The amplicons were obtained according to exemplary embodiments of the disclosure.

[0027] FIG. 15 shows the frequencies of four different amplicons obtained for a region of the IKZF1 gene in several DNA samples containing known copy number variation. The amplicons were obtained according to exemplary embodiments of the multiplex PCR methods disclosed herein.

[0028] FIG. 17 illustrates a system for designing primers or assays according to an exemplary embodiment.

[0029] FIG. 18 illustrates a system for designing primers or assays according to an exemplary embodiment.

[0030] FIG. 19 illustrates an amplicon sequence including an insert sequence surrounded by a pair of primers designed according to an exemplary embodiment.

[0031] FIG. 20 illustrates PCR amplification of an amplicon sequence (which may be referred to as “tile” herein) including an insert surrounded by a pair of primers designed according to an exemplary embodiment.

[0032] FIG. 21 (Part 1)-FIG. 21 (Part 3) illustrate a set of candidate amplicons for a given target region, each including an insert surrounded by a pair of primers, for tiling and pooling according to an exemplary embodiment.

[0033] FIG. 22 illustrates a method according to an exemplary embodiment.

[0034] FIG. 23 illustrates a method for tiling a plurality of amplicons for one or more given targets according to an exemplary embodiment.

[0035] FIG. 24 illustrates a method for determining tiles for one or more given targets and candidate amplicons according to an exemplary embodiment.

[0036] FIG. 25A illustrates a set of candidate amplicons for covering a given target region, each including an insert surrounded by a pair of primers, for tiling and pooling according to an exemplary embodiment.

[0037] FIG. 25B illustrates a set of vertices for generating a graph according to an exemplary embodiment.

[0038] FIG. 26A illustrates the 15 candidate amplicons of FIG. 25A, except that three “initial” amplicons having at least some overlap between their insert and the beginning of the target region are highlighted.

[0039] FIG. 26B illustrates the connection of a source vertex to three vertices corresponding to the initial amplicons of FIG. 26A with edges.

[0040] FIG. 27A illustrates the 15 candidate amplicons of FIG. 25A, except that three “terminal” amplicons having at least some overlap between their insert and the end of the target region are highlighted.

[0041] FIG. 27B illustrates the connection of a sink vertex to three vertices corresponding to the terminal amplicons of FIG. 27A with edges.

[0042] FIG. 28A illustrates the 15 candidate amplicons of FIG. 25A, except that various amplicons for building internal edges are highlighted.

[0043] FIG. 28B illustrates the connection of some amplicon insert vertices to subsequent, proper, overlaps according to an exemplary embodiment.

[0044] FIG. 29A illustrates the connection of additional amplicon insert vertices to subsequent, proper, overlaps according to an exemplary embodiment.

[0045] FIG. 29B illustrates the 15 candidate amplicons of FIG. 25A, along with the basis for the gap shown in FIG. 29A according to an exemplary embodiment.

[0046] FIG. 30A illustrates three possible additional edges that could be used from source to sink to tile the target in this example according to an exemplary embodiment.

[0047] FIG. 30B illustrates an exemplary definition of an edge cost function assigning a cost to each one of the graph's edges linking amplicon vertices according to an exemplary embodiment.

[0048] FIG. 30C illustrates the least-cost path from source to sink in the example of FIG. 30B according to an exemplary embodiment.

[0049] FIG. 31 illustrates the 15 candidate amplicons of FIG. 25A, except that the five amplicons corresponding to the vertices forming the least-cost path shown in FIG. 30C are highlighted.

[0050] FIG. 32 illustrates three amplicons assigned to a first pool and two amplicons assigned to a second pool according to an exemplary embodiment.

[0051] FIG. 33A illustrates a minimal distance between amplicons according to an exemplary embodiment.

[0052] FIGS. 33B-D illustrate several problems, including primer “race condition,” preferential amplification of sub amplicons, and super amplicons that may be ameliorated by using a minimal distance as illustrated in FIG. 33A.

[0053] FIG. 34 illustrates a method for pooling amplicons across a plurality of pools according to an exemplary embodiment.

[0054] FIG. 35 illustrates a method according to an exemplary embodiment.

### SUMMARY

[0055] In some embodiments, the disclosure relates generally to methods, compositions, systems, apparatuses and kits for performing multiplex amplification of nucleic acids. In some embodiments, the method includes amplifying a plurality of target sequences within a sample including two or more target sequences. Optionally, multiple target sequences of interest from a sample can be amplified using one or more target-specific primers in the presence of a polymerase under amplification conditions to produce a plurality of amplified target sequences. The amplifying optionally includes contacting a nucleic acid molecule including at least one target sequence with one or more target-specific primers and at least one polymerase under amplification conditions. The contacting can produce one or more amplified target sequences.

[0056] In some embodiments, the disclosed methods (and related compositions, systems, apparatuses and kits) can include ligating at least one adapter to at least one of the amplified target sequences to produce one or more adapter-ligated amplified target sequences. The adapter can include at least one sequence that is substantially non-complementary to the target sequence, to the amplified target sequence, and/or to the nucleic acid molecule.

[0057] In some embodiments, the amplifying can produce least two amplified target sequences that are less than 50% complementary to each other. In some embodiments, at least one amplified target sequence is substantially non-complementary to another target sequence in the sample. In some embodiments, an amplified target sequence can be substantially noncomplementary to any one or more nucleic acid molecules in the sample that does not include the target sequence.

[0058] In some embodiments, the disclosed methods (as well as related compositions, systems, apparatuses and kits) can involve reamplifying at least one of the amplified target sequences c. For example, an adapter-ligated amplified target sequence can be reamplified to produce at least one reamplified adapter-ligated amplified target sequence. In some embodiments, at least one of the adapter-ligated amplified target sequences can be contacted with one or more adapters or their complement, and a polymerase under amplification conditions to produce at least one reamplified adapter-ligated amplified target sequence. In some embodiments, at least one adapter or its complement is substantially non-complementary to at least one amplified target sequence.

[0059] In some embodiments, the disclosure relates generally to compositions (as well as related methods, kits, apparatuses and systems using such compositions) comprising one or more target-specific primers useful for hybridizing to, and optionally amplifying, at least one target sequence in a sample. In some embodiments, the composition can include a plurality of target-specific primers useful for amplifying one, two or more target sequences in a sample. The compositions can further include one or more adapters.

[0060] In some embodiments, a target sequence includes one or more mutational hotspots, single nucleotide polymorphisms (SNPs), short tandem repeats (STRs), coding regions, exons and genes. In some embodiments, the number of target sequences amplified by one or more of the methods using the compositions (and related kits, apparatuses and systems) disclosed herein can be dozens, hundreds or thousands of target sequences in a single reaction. In some embodiments, the number of different targets amplified in a single multiplex amplification can be at least 100, 300, 500, 750, 1000, 2500, 5000, 7500, 10000, 12500, 15000 or greater.

[0061] In some embodiments, a target-specific primer, adapter, amplified target sequence or nucleic acid molecule can include one or more cleavable moieties, also referred to herein as cleavable groups. Optionally, the methods can further include cleaving at least one cleavable group of the target-specific primer, adapter, amplified target sequence or nucleic acid molecule. The cleaving can be performed before or after any of the other steps of the disclosed methods. In some embodiments, the cleavage step occurs after the amplifying and prior to the ligating. In one embodiment, the cleaving includes cleaving at least one amplified target sequence prior to the ligating. The cleavable moiety can be present in a modified nucleotide, nucleoside or nucleobase. In some embodiments, the cleavable moiety can include a nucleobase not naturally occurring in the target sequence of interest. In some embodiments, uracil or uridine can be incorporated into a DNA-based nucleic acid as a cleavable group. In one exemplary embodiment, a uracil DNA glycosylase can be used to cleave the cleavable group from the nucleic acid. In another embodiment, inosine can be incorporated into a DNA-based nucleic acid as a cleavable group. In one exemplary embodiment, EndoV can be used to cleave near the inosine residue and a further enzyme such as Klenow can be used to create blunt-ended fragments capable of blunt-ended ligation. In another exemplary embodiment, the enzyme hAAG can be used to cleave inosine residues from a nucleic acid creating abasic sites that can be further processed by one or more enzymes such as Klenow to create blunt-ended fragments capable of blunt-ended ligation.

[0062] In some embodiments, the methods disclosed herein (as well as related kits, compositions, apparatuses and systems) can include amplifying at least two target sequences of the sample (e.g., a first target sequence and a second target sequence) that are different from each other. In some embodiments, the methods disclosed herein (as well as related kits, compositions, apparatuses and systems) include simultaneously amplifying a first target sequence and a second target sequence that are less than 50% complementary to each other. In some embodiments, the first target sequence and a second target sequence are substantially non-complementary to each other.

[0063] In some embodiments, the methods disclosed herein (as well as related kits, compositions, apparatuses and systems) can include amplifying using at least two target-specific primers (e.g., a first target-specific primer and a second target-specific primer) that are different from each other. In some embodiments, a first target-specific primer can be at least 50% complementary to at least some portion of a first target sequence. In some embodiments, the first target-specific primer can be substantially noncomplementary to another target sequence in the sample. For example, the first target-specific primer can be substantially noncomplementary to a second target sequence. Optionally, the first target-specific primer can be substantially complementary to a first target sequence within a sample and can be substantially noncomplementary to any portion of any other nucleic acid molecule within the sample other than the first target sequence.

[0064] Optionally, methods of multiplex amplification disclosed herein include amplifying at least a portion of a target sequence in a sample using at least one target-specific primer that is substantially complementary to at least some portion of a nucleic acid molecule that includes a corresponding target sequence. In some embodiments, the at least one target-specific primer is substantially complementary to at least some portion of the corresponding target sequence. In some embodiments, the amplifying can include using a primer pair including a target-specific forward primer and a target-specific reverse primer. In some embodiments, the target-specific primer can include at least one sequence that is substantially complementary or substantially identical to at least some portion of a nucleic acid molecule that includes the corresponding target sequence or its complement. Optionally, the target-specific primer is not substantially complementary to any other nucleic acid molecule present in the sample. In some embodiments, the target-specific primer can include at least one sequence that is substantially complementary or substantially identical to at least some portion of a corresponding target sequence or its complement. In some embodiments, the target-specific primer can include at least one sequence that is complementary or identical to at least some portion of a corresponding target sequence or its complement. In some embodiments, a target-specific primer does not include any nucleic acid sequence that is at least 5 contiguous nucleotides, 8 nucleotides, 10 contiguous nucleotides, or 15 contiguous nucleotides in length, and that is substantially noncomplementary to at least some portion of its corresponding target sequence. In some embodiments, a target-specific primer can hybridize under stringent conditions to at least some portion of a corresponding target sequence in the sample. In some embodiments, at least one of the target-specific primers is not substantially complementary to any nucleic acid sequence present in the sample other than its corresponding target sequence.

[0065] In some embodiments, one or more target-specific primers can be designed to exclude one or more sequence motifs. For example, at least one of the target-specific primers may be designed to not include a triplet nucleotide motif that is repeated 5 or more times in the target-specific primer. Optionally, at least one of the target-specific primers may be designed to not include the nucleotide sequence “ACA”, repeated 3 or more times. Further, at least one of the target-specific primers may be designed to not include a homopolymer greater than 8 nucleotides in length. Optionally, at least one of the target-specific primers of the methods disclosed herein may be designed to possess a GC content of less than 85%.

[0066] In some embodiments, one or more of the methods of amplifying disclosed herein includes performing a target-specific amplification. Performing the target-specific amplification can include amplifying one or more target sequences using one or more exclusively target-specific primers, i.e., primers that do not include any shared or universal sequence motifs. Typically, one or more of the target-specific primers are substantially complementary to at least some portion of their corresponding target sequence, or to some portion of the nucleic acid molecule including the corresponding target sequence. In some embodiments, one, some or all of the target-specific primers are substantially complementary to at least some portion of their corresponding target sequence, or to some portion of the nucleic acid molecule including the corresponding target sequence, across their (i.e., the primers') entire length.

[0067] In some embodiments, a nucleic acid molecule in a sample, an amplified target sequence, an adapter or a target-specific primer includes a 5′ end and a 3′ end. The 5′ end can include a free 5′ phosphate group or its equivalent; the 3′ end can include a free 3′ hydroxyl group or its equivalent. Optionally, the ends of an amplified target sequence can be substantially non-complementary to the ends of another amplified target sequence. In some embodiments, the 3′ end can include about 30 nucleotides, or about 15 nucleotides from the 3′ hydroxyl group. In some embodiments, the 5′ end can include about 30 nucleotides, or about 15 nucleotides, from the 5′ phosphate group. In some embodiments, any one amplified target sequence having a 3′ end and 5′ end can be substantially non-complementary to any portion of any other amplified target sequence.

[0068] Optionally, the disclosed methods can further include ligating one or more adapters including a universal priming sequence to the amplified product formed as a result of such target-specific amplification. For example, in some embodiments, one or more adapters can be ligated to an amplified target sequence. Optionally, an adapter that is ligated to an amplified target sequence is susceptible to exonuclease digestion. In some embodiments, an adapter susceptible to exonuclease digestion can be ligated to the 3′ end of an amplified target sequence. In some embodiments, an adapter ligated to an amplified target sequence does not include a protecting group. In some embodiments, the adapter does not include a protecting group that can prevent nucleic acid degradation or digestion under degrading or digesting conditions. Subsequent enzymatic digestion of the adapter-ligated amplified target sequence in the presence of nucleic acids that do not include a protecting group, offers a means for selective digestion of the unprotected nucleic acids. In some embodiments, an adapter can include a DNA barcode or tagging sequence.

[0069] In some embodiments, the methods disclosed herein (as well as related kits, systems, apparatuses and compositions) can include contacting an amplified target sequence having a 3′ end and a 5′ end with a ligation reaction mixture. In some embodiments, a ligation reaction mixture can include one or more adapters and a ligase to produce at least one adapter-ligated amplified target sequence. In some embodiments, none of the adapters in a ligation mixture, prior to the ligating, includes a target-specific sequence. In some embodiments, none of the adapters in the ligation mixture, prior to ligating, includes a sequence that is substantially complementary to a 3′ end or a 5′ end of an amplified target sequence. Optionally, the 3′ end or the 5′ end of an amplified target sequence includes about 30 nucleotides, and in some instances refers to about 15 nucleotides from the 3′ end or the 5′ end of an amplified target sequence. In some embodiments, none of the adapters in a ligation mixture, prior to ligating, can hybridize under high stringency, to some portion of an amplified target sequence. In some embodiments, ligating can include direct ligation of one or more adapters to one or more amplified target sequences. In one embodiment, ligating can include performing a blunt-ended ligation. For example, the process of blunt-ended ligation can include ligating a substantially blunt-end double-stranded amplified target sequence to a substantially blunt-ended double-stranded adapter. In some embodiments, ligating does not include one or more additional oligonucleotide adapters prior to ligating an adapter to an amplified target sequence.

[0070] In some embodiments, the disclosure relates generally to methods for performing amplification of a target sequence (as well as related compositions, systems, apparatuses and kits using the disclosed methods) and can include a digestion step. In some embodiments, the methods also include a ligating step, and the digestion step is performed prior to a ligating step. In some embodiments, an amplified target sequence can be partially digested prior to performing a ligation step. For example, an amplified target sequence can be digested by enzymatic, thermal or chemical means. In some embodiments, an amplified target sequence can be digested prior to ligating to produce a blunt-end amplified target sequence. In some embodiments, a blunt-ended amplified target sequence can include a 5′ phosphate group at the 5′ end of the digested amplified target sequence.

[0071] In some embodiments, the disclosure relates generally to methods, compositions, systems, apparatuses and kits for performing multiplex nucleic acid amplification. In some embodiments, the methods (as well as related compositions, kits, apparatuses and systems using such methods) include amplifying one or more target sequences using one or more target-specific primers in the presence of polymerase under amplification conditions to produce an amplified target sequence and, ligating an adapter to the amplified target sequence. Further, the method can include reamplifying an adapter-ligated amplified target sequence to form a reamplified adapter-ligated amplified target sequence. In some embodiments, a reamplified adapter-ligated amplified target sequence can be produced using no more than two rounds of target-specific selection.

[0072] In some embodiments, one or more target-specific primers, target sequences or adapters can include a cleavable group. Furthermore, a cleavable group can be located at a nucleotide position at, or near, the terminus of a target-specific primer, target sequence or adapter. In some embodiments, a cleavable group can be located within 15 nucleotides of the 3′ end or 5′ end of the nucleic acid having the cleavable group. In some embodiments, a cleavable group can be located at or near a central nucleotide in a target-specific primer. In some embodiments, one or more cleavable groups can be present in a target-specific primer or adapter. In some embodiments, cleavage of one or more cleavable groups in a target-specific primer or an adapter can generate a plurality of nucleic acid fragments with differing melting temperatures. In one embodiment, the placement of one or more cleavable groups in a target-specific primer or adapter can be regulated or manipulated by determining a comparable maximal minimum melting temperature for each nucleic acid fragment, after cleavage of the cleavable group. In some embodiments the cleavable group can be a uracil or uridine moiety. In some embodiments the cleavable group can be an inosine moiety. In some embodiments, at least 50% of the target-specific primers can include at least one cleavable group. In some embodiments, each target-specific primer includes at least one cleavable group.

[0073] In one embodiment, a multiplex nucleic acid amplification method is disclosed herein that includes a) amplifying one or more target sequences using one or more target-specific primers in the presence of polymerase to produce an amplified target sequence, and b) ligating an adapter to the amplified target sequence to form an adapter-ligated amplified target sequence. In some embodiments, amplifying can be performed in solution such that an amplified target sequence or a target-specific primer is not linked to a solid support or surface. In some embodiments, ligating can be performed in solution such that an amplified target sequence or an adapter is not linked to a solid support or surface. In another embodiment, amplifying and ligating can be performed in solution such that an amplified target sequence, a target-specific primer or an adapter is not linked to a solid support or surface.

[0074] In some embodiments, the disclosure relates generally to methods, compositions, systems, apparatuses and kits for synthesizing two or more target sequences within a sample. In one embodiment, the synthesizing method includes a) synthesizing two or more target sequences using a plurality of target-specific primers in the presence of polymerase under polymerizing conditions to produce a plurality of synthesized target sequences. In some embodiments, the method further includes ligating one or more adapters to the synthesized target sequences. In some embodiments, a target sequence of interest includes one or more mutational hotspots, single nucleotide polymorphisms (SNPs), short tandem repeats (STRs), coding regions, exons and genes. In some embodiments, the number of target sequences that can be synthesized in a multiplex reaction using the compositions (and related methods, kits, apparatuses and systems) disclosed herein can be dozens, hundreds or thousands of target sequences in a single sample. Optionally, multiple target sequences of interest from a sample can be synthesized using one or more target-specific primers in the presence of a polymerase under polymerizing conditions to produce a plurality of synthesized target sequences. In some embodiments, a synthesized target sequence can be less than 50% complementary to another synthesized target sequence. In some embodiments, a synthesized target sequence can be substantially non-complementary to another target sequence in the sample. In some embodiments, a synthesized target sequence can be substantially noncomplementary to any one or more nucleic acid molecules in the sample that is not a target sequence of interest. In some embodiments, synthesizing a target sequence can include ligating an adapter to a synthesized target sequence, thereby producing an adapter-ligated synthesized target sequence.

[0075] In some embodiments, the disclosure relates generally to synthesizing a target sequence from a plurality of target sequences. For example, a method of synthesizing can include synthesizing a target sequence using a plurality of target-specific primers in the presence of polymerase under polymerizing conditions to produce a plurality of synthesized target sequences. Synthesizing can further include resynthesizing at least one adapter-ligated synthesized target sequence. In some embodiments, resynthesizing can include contacting at least one adapter-ligated synthesized target sequence with at least one adapter or its complement and a polymerase under polymerizing conditions to produce a plurality of resynthesized adapter-ligated synthesized target sequences. In some embodiments, a resynthesized adapter-ligated synthesized target sequence can be produced using no more than two rounds of target-specific selection.

[0076] In some embodiments, a method for synthesizing target sequences can include a synthesizing and a ligating step. In some embodiments, ligating does not include an adapter that is substantially complementary to a portion of a synthesized target sequence. In some embodiments, an adapter is not substantially complementary to about 30 contiguous nucleotides, or about 20 contiguous nucleotides, from a 3′ end or a 5′ end of a synthesized target sequence. In some embodiments, an adapter can include at least one sequence that is substantially complementary, or substantially identical, to at least a portion of a universal primer.

[0077] In some embodiments, the disclosure relates generally to methods, compositions, systems, apparatuses and kits for performing multiplex nucleic acid amplification. In one embodiment, the method includes amplifying one or more target sequences using one or more target-specific primers in the presence of polymerase under amplification conditions to produce an amplified target sequence; ligating an adapter to the amplified target sequence; and reamplifying at least one adapter-ligated amplified target sequence. In some embodiments, reamplifying includes contacting an adapter-ligated amplified target sequence with one or more adapters (or their complements) and a polymerase under amplification conditions to produce at least one reamplified adapter-ligated amplified target sequence. In some embodiments, an amplified target sequence can be less than 50% complementary to another amplified target sequence. In some embodiments, an amplified target sequence can be substantially non-complementary to another target sequence in the sample. In some embodiments, an amplified target sequence can be substantially noncomplementary to any one or more nucleic acid molecules in the sample that is not a target sequence of interest. In some embodiments, an amplified target sequence can be ligated to at least one adapter, or their complement, to produce one or more adapter-ligated amplified target sequences. In some embodiments, an adapter-ligated amplified target sequence can be reamplified to produce at least one reamplified adapter-ligated amplified target sequence. In some embodiments, an adapter or their complement is not substantially complementary to any portion of any other nucleic acid molecule within the sample. In some embodiments, an adapter or their complement is not substantially complementary to at least one amplified target sequence. In one embodiment, one or more of the adapters or their complement during the reamplifying step can be a universal primer. In one embodiment, the ligating step can further include ligating a DNA barcode or DNA tagging sequence to an amplified target sequence prior to ligating an adapter to an amplified target sequence.

[0078] In some embodiments, amplifying and synthesizing methods of the disclosure can be performed as “addition-only” processes. In some embodiments, an addition-only process excludes the removal of all, or a portion of a first reaction mixture including the amplifying or synthesizing compositions, for further manipulation during the amplification or synthesizing steps. In some embodiments, an addition-only process can be automated for example for use in high-throughput processing.

[0079] In some embodiments, the disclosure generally relates to compositions (as well as related kits, methods, systems and apparatuses using the disclosed compositions) for performing nucleic acid amplification and nucleic acid synthesis. In some embodiments, one or more of the compositions disclosed herein (as well as related methods, kits, systems and apparatuses) can include at least one target-specific primer and/or at least one adapter. In some embodiments, the compositions include a plurality of target-specific primers or adapters that are about 15 to about 40 nucleotides in length. In some embodiments, the compositions include one or more target-specific primers or adapters that include one or more cleavable groups. In some embodiments, one or more types of cleavable groups can be incorporated into a target-specific primer or adapter. In some embodiments, a cleavable group can be located at, or near, the 3′ end of a target-specific primer or adapter. In some embodiments, a cleavable group can be located at a terminal nucleotide, a penultimate nucleotide, or any location that corresponds to less than 50% of the nucleotide length of the target-specific primer or adapter. In some embodiments, a cleavable group can be incorporated at, or near, the nucleotide that is central to the target-specific primer or the adapter. For example, a target specific primer of 40 bases can include a cleavage group at nucleotide positions 15-25. Accordingly, a target-specific primer or an adapter can include a plurality of cleavable groups within its 3′ end, its 5′ end or at a central location. In some embodiments, the 5′ end of a target-specific primer includes only non-cleavable nucleotides. In some embodiments, the cleavable group can include a modified nucleobase or modified nucleotide. In some embodiments, the cleavable group can include a nucleotide or nucleobase that is not naturally occurring in the corresponding nucleic acid. For example, a DNA nucleic acid can include a RNA nucleotide or nucleobase. In one example, a DNA based nucleic acid can include uracil or uridine. In another example, a DNA based nucleic acid can include inosine. In some embodiments, the cleavable group can include a moiety that can be cleaved from the target-specific primer or adapter by enzymatic, chemical or thermal means. In some embodiments, a uracil or uridine moiety can be cleaved from a target-specific primer or adapter using a uracil DNA glycosylase. In some embodiments, a inosine moiety can be cleaved from a target-specific primer or adapter using hAAG or EndoV.

[0080] In some embodiments, the disclosure relates generally to compositions including a target-specific primer of about 15 to about 40 nucleotides in length having a cleavable group located near the terminus of the target-specific primer, hybridized to a first strand of a double-stranded target sequence. In some embodiments, the primer is substantially complementary to the first strand of the double-stranded target sequence. In some embodiments, the disclosure relates generally to compositions including a target-specific primer of about 15 to about 40 nucleotides in length having a cleavable group located near the terminus of the target-specific primer, hybridized to a first strand of a double-stranded target sequence, and a second target-specific primer of about 15 to about 40 nucleotides in length having a cleavable group located near the terminus of the second target-specific primer, hybridized to a second strand of the double-stranded target sequence. In some embodiments, the second target-specific primer is substantially complementary to the second strand of the double-stranded target sequence.

[0081] In some embodiments, the disclosure generally relates to compositions (as well as related kits, methods, systems and apparatuses using the disclosed compositions) for performing nucleic acid amplification and nucleic acid synthesis. In some embodiments, the compositions include a target-specific primer of about 15 to about 40 nucleotides in length having a uracil nucleotide located near the terminus of the target-specific primer and a second uracil nucleotide located near the central nucleotide of the target-specific primer. In some embodiments, the disclosure generally relates to compositions (as well as related kits, methods, systems and apparatuses using the disclosed compositions) for performing nucleic acid amplification and nucleic acid synthesis. In some embodiments, the compositions include a target-specific primer of about 15 to about 40 nucleotides in length having an inosine nucleotide located near the 3′ terminus of the target-specific primer and at least a second inosine nucleotide located near the central nucleotide of the target-specific primer.

[0082] In some embodiments, the disclosure relates generally to a composition comprising at least one target-specific primer or at least one target-specific primer pair. In some embodiments, the disclosure relates generally to a composition comprising a plurality of target-specific primers. Optionally, the composition can include at least 100, 200, 300, 500, 750, 1000, 1250, 1500, 1750, 2000, 2500, 3000, 4000, 5000, 7500 or 10,000 target-specific primers or target-specific primer pairs. In some embodiments, the composition comprising a plurality of target-specific primers includes at least one of the target-specific primers disclosed herein. In some embodiments, the composition comprising a plurality of target-specific primers includes at least one target-specific primer that is at least 90% identical to any one of the nucleic acid sequences provided herein or in the concurrently filed sequencing listing. In some embodiments, the composition comprising a plurality of target-specific primers includes one or more target-specific primer pairs disclosed herein or one or more primer pairs having at least 90% identity to any one of the primer pair nucleic acid sequences provided herein. In some embodiments, the composition comprising a plurality of target-specific primers can include a percentage identity of at least 91%, 92%, 93%, 94%, 95%, 96%, 97%, 98% or 99% identity to any one or more of the nucleic acid sequences disclosed herein or in the concurrently filed sequence listing. In some embodiments, the composition comprising a plurality of target-specific primers can include any one or more target-specific primers selected from Tables 2, 3, 13, 14, 15, 17 and 19. In some embodiments, the composition comprising a plurality of target-specific primers can include any one or more target-specific primer pairs selected from Tables 2, 3, 13, 14, 15, 17 and 19. In some embodiments, the composition comprising a plurality of target-specific primers generally relates to any one or more nucleic acid sequences selected from SEQ ID NOs: 1-103,143 or includes at least 15 contiguous nucleotides from any one nucleic acid sequence selected from SEQ ID NOs: 1-103,143. In some embodiments, the composition is generally directed to an isolated nucleic acid sequence consisting of any one or more of the nucleic acid sequences set forth in SEQ ID NOs: 1-103,143.

[0083] In some embodiments, the disclosure relates generally to a composition comprising a target-specific primer of about 15 nucleotides to about 40 nucleotides in length. In some embodiments, the disclosure relates generally to a composition comprising a plurality of at least 2 target-specific primers of about 15 nucleotides to about 40 nucleotides in length. In some embodiments, the composition comprises a plurality of target-specific primer pairs of about 15 nucleotides to about 40 nucleotides in length designed using the primer selection criteria or primer selection methods outlined herein.

[0084] In some embodiments, the composition includes at least one target-specific primer that is substantially complementary across its entire length to at least one target sequence in a sample. In some embodiments, the composition includes a plurality of target-specific primers, where substantially all of the plurality of target-specific primers include a complementary nucleic acid sequence across their entire primer lengths to one or more target sequences in a sample. In some embodiments, the composition includes at least one target-specific primer that is complementary across its entire length to at least one target sequence in a sample. In some embodiments, the composition includes a plurality of target-specific primers, where substantially all of the plurality of target-specific primers include a complementary nucleic acid sequence across their entire primer lengths to one or more target sequences in a sample.

[0085] In some embodiments, the disclosure relates generally to a composition comprising a plurality of target-specific primers having a cleavable group located at a 3′ end of at least one of the plurality of the target-specific primers. In some embodiments, the composition includes a cleavable group located at a 3′ end of substantially all of the plurality of target-specific primers. In some embodiments, the cleavable group can include a uracil nucleobase, an inosine nucleoside or an analog thereof. In some embodiments, the 3′ end of one or more target-specific primers can include more than one cleavable group and/or more than one species of cleavable group. For example, a composition having a cleavable group at the 3′ end of one target-specific primer can include one uracil moiety and an inosine moiety in the 3′ end of the same target-specific primer. In some embodiments, the composition can include at least one target-specific primer that includes a non-cleavable at the 3′ terminal nucleotide. For example, a target-specific primer can include a cleavable group at the 3′ end of the target-specific primer except for the terminal nucleotide at the 3′ end of the target-specific primer. In some embodiments, the composition can include a plurality of target-specific primers where substantially all of the target-specific primers include a cleavable group at the 3′ end except for the terminal nucleotide location.

[0086] In some embodiments, the disclosure relates generally to a composition comprising a plurality of target-specific primers having a cleavable group located near or about a central nucleotide of at least one of the target-specific primers. In some embodiments, the composition includes a cleavable group located near or about a central nucleotide of substantially all of the plurality of the target-specific primers. For example, in a target-specific primer of 40 nucleotides, a cleavable group can be located near the central nucleotide, for example at the 15th nucleotide through the 25th nucleotide. In some instances, ‘near’ a central nucleotide can refer to a percentage of the length of the entire target-specific primer. For example in a 40 nucleotide target-specific primer, the location of a central cleavable group can include any location from about 40% to about 60% of the length of the target-specific primer. In some embodiments, a central nucleotide of an odd numbered target-specific primer includes the central nucleotide of the target-specific primer. In an even numbered target-specific primer a central nucleotide can include one nucleotide either side of the central nucleotide location. For example, in a 20 nucleotide target-specific primer, the central nucleotide can include nucleotide position 10, nucleotide position 11, or both.

[0087] In some embodiments, the disclosure relates generally to a composition comprising a plurality of target-specific primers having at a 5′ end only non-cleavable nucleotides. In some embodiments, the composition can include substantially all of the plurality of target-specific primers having only non-cleavable nucleotides at the 5′ end. In some embodiments, the 5′ end of the plurality of target-specific primers having only non-cleavable nucleotides can include fewer than 10 nucleotides from the 5′ end. In some embodiments, the 5′ end can include fewer than 8, 7, 6, 5, 4, 3 or 2 nucleotides from the 5′ end. In some embodiments, the 5′ end having non-cleavable nucleotides can include less than 50% of the length of the target specific primer, less than 40% of the length of the target specific primer, less than 30% of the length of the target specific primer, less than 20% of the length of the target specific primer, or less than 10% of the length of the target-specific primer from the 5′ end.

[0088] In some embodiments, the disclosure relates generally to a composition comprising a plurality of target-specific primers where at least one of the target-specific primers includes less than 20% of the nucleotides across the primer's entire length containing a cleavable group. In some embodiments, the composition comprises a plurality of target-specific primers where substantially all of the target-specific primers include less than 20% of the nucleotides across each primer's entire length containing a cleavable group. For example, a target-specific primer of 20 nucleotides in length can include 4 or fewer cleavage groups. In some embodiments, the disclosure relates generally to a composition comprising a plurality of target-specific primers where at least one of the target-specific primers includes less than 10% of the nucleotides across the primer's entire length containing a cleavable group. In some embodiments, the composition comprises a plurality of target-specific primers where substantially all of the target-specific primers include less than 10% of the nucleotides across each primer's entire length containing a cleavable group. For example, a target-specific primer of 20 nucleotides in length can include 2 or fewer cleavage groups.

[0089] In some embodiments, the disclosure relates generally to a composition comprising a plurality of target-specific primers having minimal cross-hybridization to at least one of the target-specific primers in the plurality of primers. In some embodiments, the disclosure relates generally to a composition comprising a plurality of target-specific primers having minimal cross-hybridization to substantially all of the target-specific primers in the plurality of primers. In some embodiments, minimal cross-hybridization to one or more target-specific primers in the plurality of primers can be evaluated by the formation of primer-dimers or dimer-dimers. In some embodiments, the composition can include fewer primer-dimers in a multiplex PCR amplification reaction as compared to a multiplex PCR amplification reaction of the prior art under corresponding amplification conditions.

[0090] In some embodiments, the disclosure relates generally to a composition comprising a plurality of target-specific primers, where at least one of the target-specific primers includes minimal cross-hybridization to non-specific sequences present in a sample. In some embodiments, the composition comprises a plurality of target-specific primers where substantially all of the target-specific primers include minimal cross-hybridization to non-specific sequences present in a sample. In some embodiments, minimal cross-hybridization to non-specific sequences present in a sample can be evaluated by the presence of ‘percent of reads off-target’ or a decrease in ‘percent of reads on target’. In some embodiments, the compositions as disclosed herein can provide fewer ‘percent of reads off-target’ or an increase in ‘percent of reads on target’ in multiplex PCR amplification reactions as compared to multiplex PCR amplification reactions of the prior art under corresponding amplification conditions. The “plex” of a given multiplex amplification refers generally to the number of different target-specific sequences that are amplified during a single multiplex amplification according to the disclosure. In some embodiments, the plex can be about 12-plex, 24-plex, 48-plex, 96-plex, 192-plex, 384-plex, 768-plex, 1536-plex, 3072-plex, 6144-plex or higher. In some embodiments, minimal cross-hybridization to non-specific sequences present in a sample can include less than 15%, less than 12%, or fewer than 10% reads off target. In some embodiments, the percent of reads on target per multiplex amplification can be greater than 85%, 88%, 90%, 92%, 94%, 95%, 96%, 97%, 98%, or more.

[0091] In some embodiments, the disclosure relates generally to a composition comprising a plurality of target-specific primers having minimal self-complementarity. In some embodiments, the composition includes at least one target-specific primer that does not form a secondary structure, such as loops or hairpins. In some embodiments, the composition includes a plurality of target-specific primers where a majority (i.e., greater than 50%), or substantially all of the plurality of target-specific primers fail to form a secondary structure. The “plex” of a given multiplex amplification refers generally to the number of different target-specific sequences that are amplified during a single multiplex amplification according to the disclosure. In some embodiments, the plex can be about 12-plex, 24-plex, 48-plex, 96-plex, 192-plex, 384-plex, 768-plex, 1536-plex, 3072-plex, 6144-plex or higher. In some embodiments, minimal self-complementarity can include less than 10%, less than 8%, less than 5% or less than 3% of the plurality of target-specific primers possessing self-complementarity that allows a target-specific primer to form a secondary structure.

[0092] In some embodiments, the disclosure relates generally to a composition comprising a plurality of target-specific primers having minimal nucleotide sequence overlap at a 3′ end or a 5′ end. In some embodiments, the composition can include minimal overlap of nucleotide sequence in the 3′ end of at least one target-specific primer. In some embodiments, the composition can include minimal overlap of nucleotide sequence in the 3′ end of substantially all of the plurality of target-specific primers. In some embodiments, the composition can include minimal overlap of nucleotide sequence in the 5′ end of at least one target-specific primer. In some embodiments, the composition can include minimal overlap of nucleotide sequence in the 5′ end of substantially all of the plurality of target-specific primers. In some embodiments, the composition can include minimal overlap of nucleotide sequence in the 3′ end and the 5′ end of at least one target-specific primer. In some embodiments, the composition can include minimal overlap of nucleotide sequence in the 3′ end and the 5′ end of substantially all of the plurality of target-specific primers. In some embodiments, the amount of nucleotide sequence overlap between one or more target-specific primers is less than 8 nucleotides. In some embodiments, the amount of nucleotide sequence overlap between one or more target-specific primers is less than 5 nucleotides. In some embodiments, the amount of nucleotide sequence between one or more target-specific primers of the plurality of primers is less than 8, 7, 6, 5, 4, 3, 2 or 1 nucleotide. In some embodiments, the composition can include a plurality of target-specific primers including a nucleotide sequence gap of one or more nucleotides. In some embodiments, the composition can include a nucleotide sequence gap of 1, 2, 3, 4, 5, 10, 15, 20 or more nucleotides between two or more of the plurality of target-specific primers. In some embodiments, the composition can include a nucleotide sequence gap of about 50 nucleotides between two or more target-specific primers in the plurality of target-specific primers. In some embodiments, the composition can include a nucleotide sequence gap of about 10, 20, 30, 40, or 50 nucleotides between substantially all of the target-specific primers in the plurality of target-specific primers.

[0093] In some embodiments, the disclosure relates generally to a composition comprising a plurality of target-specific primers of about 15 nucleotides to about 40 nucleotides in length having at least two or more following criteria: a cleavable group located at a 3′ end of substantially all of the plurality of primers, a cleavable group located near or about a central nucleotide of substantially all of the plurality of primers, substantially all of the plurality of primers at a 5′ end including only non-cleavable nucleotides, minimal cross-hybridization to substantially all of the primers in the plurality of primers, minimal cross-hybridization to non-specific sequences present in a sample, minimal self-complementarity, and minimal nucleotide sequence overlap at a 3′ end or a 5′ end of substantially all of the primers in the plurality of primers. In some embodiments, the composition can include any 3, 4, 5, 6 or 7 of the above criteria.

[0094] In some embodiments, the disclosure relates generally to a composition comprising a plurality of at least 2 target-specific primers of about 15 nucleotides to about 40 nucleotides in length having two or more of the following criteria, a cleavable group located near or about a central nucleotide of substantially all of the plurality of primers, substantially all of the plurality of primers at a 5′ end including only non-cleavable nucleotides, substantially all of the plurality of primers having less than 20% of the nucleotides across the primer's entire length containing a cleavable group, at least one primer having a complementary nucleic acid sequence across its entire length to a target sequence present in a sample, minimal cross-hybridization to substantially all of the primers in the plurality of primers, minimal cross-hybridization to non-specific sequences present in a sample, and minimal nucleotide sequence overlap at a 3′ end or a 5′ end of substantially all of the primers in the plurality of primers. In some embodiments, the composition can include any 3, 4, 5, 6 or 7 of the above criteria.

[0095] In some embodiments, the disclosure relates generally to a composition comprising a plurality of target-specific primers designed according to the criteria disclosed here or including any one or more of the target-specific primers disclosed herein, where at least one of the plurality of target-specific primers is substantially complementary across its entire length to at last a portion of one or more genes selected from ABI1; ABL1; ABL2; ACSL3; ACSL6; AFF1; AFF3; AFF4; AKAP9; AKT1; AKT2; ALK; APC; ARHGAP26; ARHGEF12; ARID1A; ARNT; ASPSCR1; ASXL1; ATF1; ATIC; ATM; AXIN2; BAP1; BARD1; BCAR3; BCL10; BCL11A; BCL11B; BCL2; BCL3; BCL6; BCL7A; BCL9; BCR; BIRC3; BLM; BMPR1A; BRAF; BRCA1; BRCA2; BRD3; BRD4; BRIP1; BUB1B; CARD11; CARS; CASC5; CBFA2T3; CBFB; CBL; CBLB; CBLC; CCDC6; CCNB1IP1; CCND1; CCND2; CD74; CD79A; CDC73; CDH1; CDH11; CDK4; CDK6; CDKN2A; CDKN2B; CDKN2C; CDX2; CEBPA; CEP110; CHEK1; CHEK2; CHIC2; CHN1; CIC; CIITA; CLP1; CLTC; CLTCL1; COL1A1; CREB1; CREB3L2; CREBBP; CRTC1; CRTC3; CSF1R; CTNNB1; CXCR7; CYLD; CYTSB; DCLK3; DDB2; DD1T3; DDR2; DDX10; DDX5; DDX6; DEK; DGKG; DICER1; DNMT3A; EGFR; EIF4A2; ELF4; ELL; ELN; EML4; EP300; EPS15; ERBB2; ERBB4; ERC1; ERCC2; ERCC3; ERCC4; ERCC5; ERG; ETV1; ETV4; ETV5; ETV6; EWSR1; EXT1; EXT2; EZH2; FAM123B; FANCA; FANCC; FANCD2; FANCE; FANCF; FANCG; FAS; FBXW7; FCRL4; FGFR1; FGFR10P; FGFR2; FGFR3; FH; FIP1L1; FLCN; FLI1; FLT1; FLT3; FNBP1; FOXL2; FOXO1; FOXO3; FOXO4; FOXP1; FUS; GAS7; GATA1; GATA2; GATA3; GMPS; GNAQ; GNAS; GOLGA5; GOPC; GPC3; GPHNGPR124; HIP1; HIST1H4I; HLF; HNF1A; HNRNPA2B1; HOOK3; HOXA11; HOXA13; HOXA9; HOXC11; HOXC13; HOXD13; HRAS; HSP90AA1; HSP90AB1; IDH1; IDH2; IKZF1; IL2; IL21R; IL6ST; IRF4; ITGA10; ITGA9; ITK; JAK1; JAK2; JAK3; KDM5A; KDM5C; KDM6A; KDR; KDSR; KIAA1549; KIT; KLF6; KLK2; KRAS; KTN1; LASP1; LCK; LCP1; LHFP; LIFR; LMO2; LPP; MAF; MALT1; MAML2; MAP2K1; MAP2K4; MDM2; MDM4; MECOM; MEN1; MET; MITF; MKL1; MLH1; MLL; MLLT1; MLLT10; MLLT3; MLLT4; MLLT6; MN1; MPL; MRE11A; MSH2; MSH6; MSI2; MSN; MTCP1; MTOR; MUC1; MYB; MYC; MYCL1; MYCN; MYH11; MYH9; MYST3; MYST4; NACA; NBN; NCOA1; NCOA2; NCOA4; NEK9; NF1; NF2; NFE2L2; NFKB2; NIN; NKX2-1; NLRP1; NONO; NOTCH1; NOTCH2; NPM1; NR4A3; NRAS; NSD1; NTRK1; NTRK3; NUMA1; NUP214; NUP98; OLIG2; OMD; PAFAH1B2; PALB2; PATZ1; PAX3; PAX5; PAX7; PAX8; PBRM1; PBX1; PCM1; PDE4DIP; PDGFB; PDGFRA; PDGFRB; PER1; PHOX2B; PICALM; PIK3CA; PIK3R1; PIM1; PLAG1; PML; PMS1; PMS2; POU2AF1; POU5F1; PPARG; PPP2R1A; PRCC; PRDM16; PRF1; PRKAR1A; PRRX1; PSIP1; PTCH1; PTEN; PTPN11; RABEP1; RAD50; RAD51L1; RAF1; RANBP17; RAP1GDS1; RARA; RB1; RBM15; RECQL4; REL; RET; RHOH; RNF213; ROS1; RPN1; RPS6KA2; RUNX1; RUNX1T1; SBDS; SDHAF2; SDHB; SETD2; SFPQ; SFRS3; SH3GL1; SLC45A3; SMAD4; SMARCA4; SMARCB1; SMO; SOCS1; SRC; SRGAP3; SS18; SS18L1; STIL; STK11; STK36; SUFU; SYK; TAF15; TAF1L; TAL1; TAL2; TCF12; TCF3; TCL1A; TET1; TET2; TEX14; TFE3; TFEB; TFG; TFRC; THRAP3; TLX1; TLX3; TMPRSS2; TNFAIP3; TOP1; TP53; TPM3; TPM4; TPR; TRIM27; TRIM33; TRIP11; TSC1; TSC2; TSHR; USP6; VHL; WAS; WHSC1L1; WRN; WT1; XPA; XPC; ZBTB16; ZMYM2; ZNF331; ZNF384; and ZNF521.

[0096] In some embodiments, the disclosure relates generally to a composition comprising a plurality of target-specific primers designed according to the criteria disclosed here or including any one or more of the target-specific primers disclosed herein, where at least one of the plurality of target-specific primers is substantially complementary across its entire length to at last a portion of one or more genes selected from ABL1; AKT1; ALK; APC; ATM; BRAF; CDH1; CDKN2A; CSF1R; CTNNB1; EGFR; ERBB2; ERBB4; FBXW7; FGFR1; FGFR2; FGFR3; FLT3; GNAS; HNF1A; HRAS; IDH1; JAK2; JAK3; KDR; KIT; KRAS; MET; MLH1; MPL; NOTCH1; NPM1; NRAS; PDGFRA; PIK3CA; PTEN; PTPN11; RB1; RET; SMAD4; SMARCB1; SMO; SRC; STK11; TP53; and VHL.

[0097] In some embodiments, the disclosure relates generally to a composition comprising a plurality of target-specific primers designed according to the criteria disclosed here or including any one or more of the target-specific primers disclosed herein, where at least one of the plurality of target-specific primers is substantially complementary across its entire length to at last a portion of one or more genes selected from ABCA4; ABCC8; ABCD1; ACADVL; ACTA2; ACTC; ACTC1; ACVRL1; ADA; AIPL1; AIRE; ALK1; ALPL; AMT; APC; APP; APTX; AR; ARL6; ARSA; ASL; ASPA; ASS; ASS1; ATL; ATM; ATP2A2; ATP7A; ATP7B; ATXN1; ATXN2; ATXN3; ATXN7; BBS6; BCKDHA; BCKDHB; BEST1; BMPR1A; BRCA1; BRCA2; BRIP1; BTD; BTK; C2orf25; CA4; CALR3; CAPN3; CAV3; CCDC39; CCDC40; CDH23; CEP290; CERKL; CFTR; CHAT; CHD7; CHEK2; CHM; CHRNA1; CHRNB1; CHRND; CHRNE; CLCN1; CNBP; CNGB1; COH1; COL11A1; COL11A2; COL1A1; COL1A2; COL2A1; COL3A1; COL4A5; COL5A1; COL5A2; COL7A1; COL9A1; CRB1; CRX; CTDP1; CTNS; CYP21A2; CYP27A1; DAX1; DBT; DCX; DES; DHCR7; DJ1; DKC1; DLD; DMD; DMPK; DNAAF1; DNAAF2; DNAH11; DNAH5; DNA11; DNAI2; DNAL1; DNM2; DOK7; DSC2; DSG2; DSP; DYSF; DYT1; EMD; ENG; EYA1; EYS; F8; F9; FANCA; FANCC; FANCF; FANCG; FANCJ; FANDC2; FBN1; FBXO7; FGFR1; FGFR3; FMO3; FMR1; FOXL2; FRG1; FRMD7; FSCN2; FXN; GAA; GALT; GBA; GBE1; GCSH; GDF5; GJB2; GJB3; GJB6; GLA; GLDC; GNE; GNPTAB; GPC3; GPR143; GUCY2D; HBA1; HBA2; HBB; HD; HERG; HEXA; HFE; HHF; HIBCH; HLA-B27; HMBS; HPLH1; HPRP3; HR; HTNB; HTT; IKBKAP; IKBKG; IL2RG; IMPDH1; ITGB4; JAG1; JPH3; KCNE1; KCNE2; KCNH2; KCNQ1; KCNQ4; KIAA0196; KLHL7; KRAS; KRT14; KRT5; L1CAM; LAMB3; LAMP2; LDB3; LMNA; LMX18; LRAT; LRRK2; MAPT; MC1R; MECP2; MED12; MEN1; MERTK; MFN2; MKKS; MLH1; MMAA; MMAB; MMACHC; MMADHC; MPZ; MSH2; MTM1; MTND5; MTTG; MTTI; MTTK; MTTL1; MTTQ; MUT; MYBPC3; MYH11; MYH6; MYH7; MYL2; MYL3; MYLK2; MYO7A; ND5; ND6; NEMO; NF1; NF2; NIPBL; NR0B1; NR2E3; NRAS; NSD1; OCA2; OCRL; OPA1; OTC; PABPN1; PAFAH1B1; PAH; PARK2; PARK7; PARKIN; PAX3; PAX6; PCDH15; PEX1; PEX2; PEX10; PEX13; PEX14; PEX19; PEX26; PEX3; PEX5; PINK1; PKD1; PKD2; PKD3; PKHD1; PKP2; PLEC1; PLOD1; PMM2; PMP22; POLG; PPT1; PRCD; PRKAG2; PRNP; PROM1; PRPF3; PRPF8; PRPH2; PRPN; PSEN1; PSEN2; PTCH1; PTPN11; RAB7A; RAF1; RA11; RAPSN; RBI; RDH12; RDS; RECQL3; RET; RHO; ROR2; RP1; RP2; RP9; RPE65; RPGR; RPGRIP1; RPL11; RPL35A; RPS10; RPS17; RPS19; RPS24; RPS26; RPS6KA3; RPS7; RPSL5; RS1; RSPH4A; RSPH9; RYR1; RYR2; SALL4; SCA3; SCN5A; SCN9A; SEMA4A; SERPINA1; SERPING1; SGCD; SH3BP2; SHOX; SIX1; SIX5; SLC25A13; SLC25A4; SLC26A4; SMAD4; SMN1; SNCA; SNRNP200; SOD1; SOS1; SOX9; SP110; SPAST; SPATA7; SPG3A; SPG4; SPG7; TAF1; TBX5; TCOF1; TGFBR1; TGFBR2; TNFRSC13C; TNNC1; TNNI3; TNNT1; TNNT2; TNXB; TOPORS; TOR1A; TP53; TPM1; TRNG; TRNI; TRNK; TRNL1; TRNQ; TSC1; TSC2; TTN; TTPA; TTR; TULP1; TWIST1; TXNDC3; TYR; USH1C; USH1H; USH2A; VCL; VHL; VPS13B; WAS; WRN; WT1; and ZNF9.

[0098] In some embodiments, the disclosure relates generally to a composition comprising a plurality of target-specific primers designed according to the criteria disclosed here or including any one or more of the target-specific primers disclosed herein, where at least one of the plurality of target-specific primers is substantially complementary across its entire length to at last a portion of one or more genes associated with breast cancer selected from AIM1, AR, ATM, BARD1, BCAS1, BRIP1, CCND1, CCND2, CCNE1, CDH1, CDK3, CDK4, CDKN2A, CDKN2B, CAMK1D, CHEK2, DIRAS3, EGFR, ERBB2, EPHA3, ERBB4, ETV6, GNRH1, KCTD9, CDCA2, EBF2, EMSY, BNIP3L, PNMA2, DPYSL2, ADRA1A, STMN4, TRIM35, PAK1, AQP11, CLSN1A, RSF1, KCTD14, THRSP, NDUFC2, ALG8, KCTD21, USP35, GAB2, DNAH9, ZNF18, MYOCD, STK11, TP53, JAK1, JAK2, MET, PDGFRA, PML, PTEN, RET, TMPRSS2, WNK1, FGFR1, IGF1R, PPP1R12B, PTPRT, GSTM1, IPO8, MYC, ZNF703, MDM1, MDM2, MDM4, MKK4, P14 KB, NCOR1, NBN, PALB2, RAD50, RAD51, PAK1, RSF1, INTS4, ZMIZ1, SEPHS1, FOXM1, SDCCAG1, IGF1R, TSHZ2, RPSK6K1, PPP2R2A, MTAP, MAP2K4, AURKB, BCL2, BUB1, CDCA3, CDCA4, CDC20, CDC45, CHEK1, FOXM1, HDAC2, IGF1R, KIF2C, KIFC1, KRAS, RBI, SMAD4, NCOR1, UTX, MTHDFD1L, RAD51AP1, TTK and UBE2C.

[0099] In some embodiments, the disclosure is generally related to a combination of polynucleotides, where the combination of polynucleotides includes at least one polynucleotide selected from Tables 2, 3, 13, 14, 15, 17 and 19, and one or more additional polynucleotides independent of the polynucleotides disclosed herein. In some embodiments, the disclosure is generally related to a combination of polynucleotides, where the combination of polynucleotides includes a polynucleotide having at least 90% identity to one or more polynucleotides selected from Tables 2, 3, 13, 14, 15, 17 and 19. In some embodiments, the disclosure relates to 2, 3, 4, 5, 6, 7, 8, 9, 10, 20, 30, 40, 50, 60, 70, 80, 90, 100, 200, 500, 1000, 2000, 3000, 4000, 5000, 6000, 7000, 8000, 9000, 10,000 or more polynucleotides selected from Tables 2, 3, 13, 14, 15, 17 and 19.

[0100] In some embodiments, the disclosure is generally related to a combination of polynucleotides, where the combination of polynucleotides includes at least one polynucleotide selected from Tables 2, 3, 13, 14, 15, 17 and 19, and one or more additional polynucleotides independent of the polynucleotides disclosed herein. In some embodiments, the disclosure is generally related to a combination of polynucleotides, where the combination of polynucleotides includes at least one polynucleotide having at least 90% identity to one or more polynucleotides selected from Tables 2, 3, 13, 14, 15, 17 and 19. In some embodiments, the disclosure relates to 2, 3, 4, 5, 6, 7, 8, 9, 10, 20, 30, 40, 50, 60, 70, 80, 90, 100, 200, 500, 1000, 2000, 3000, 4000, 5000, 6000, 7000, 8000, 9000, 10,000 or more polynucleotides selected from Tables 2, 3, 13, 14, 15, 17 and 19 or one or more polynucleotides having at least 90% identity thereto.

[0101] In some embodiments, the disclosure is generally related to a pair of polynucleotides that specifically anneal to a portion of at least one gene selected from EGFR, BRAF or KRAS. In one embodiment, a pair of polynucleotides that specifically anneal to a portion of the EGFR gene includes any one or more of the following Amplicon IDs: 229910389, 227801665, 229055506, 230397881, 230175199, 230195609, 228630698, 230632980, 227722022, 232978808, 231616816, 230481741, 231198336, 229919273, 227816834, 228030652, 230679876, 229747025, 228741519, 228636601, 230635054, 230738160, 232984355, 228941652, 230495367, 231212482, 229608278, 230461276, 228035285, 230683371, 230173849, 330137554, 228857751, 230742871, 232237229, 228956984, 228732632, 231222418, 231493149, 229630617, 229052979, 230392156, 230683680, 230187475, 228709018, 230628101, 227716821, 227830783, 232260099, 230075336, 231314233, and 231239581. In one embodiment, a pair of polynucleotides that specifically anneal to a portion of the BRAF gene includes any one or more of the following Amplicon IDs: 222636793, 223460541, 223967627, 326913823, 223739184, 223944056, 224404546, 222922922, 224119138, 223519358, 223465859, 223971374, 222680486, 223741661, 223950351, 224410546, 222935598, 224119999, 222629880, 223175118, 223719489, 225222024, 222684242, 223700378, 222258987, 222895407, 223103332, 222635553, 223177865, 223960162, 326889377, 223588249, 223708886, 222259284, 222903910, and 223104608. In one embodiment, a pair of polynucleotides that specifically anneal to a portion of the KRAS gene includes any one or more of the following Amplicon IDs: 233361228, 234355242, 234355242, 233466735, 233466735, 231132733, 231132733, 234764991, 234764991, 233467720, 233467720, 231133990, 231133990, 233356818, 326772204, and 326772204.

[0102] In some embodiments, the disclosure is generally related to kits (as well as related compositions, methods, apparatuses and systems using such kits) for amplifying one or more target sequences in a sample. In some embodiments, the kits for amplifying one or more target sequences in a sample include at least one target-specific primer that can amplify the at least one target sequence in the sample. In some embodiments, the kit can include at least two target-specific primers that can amplify at least one target sequence in the sample. In another embodiment, the kit can include a plurality of target-specific primers for amplifying at least two target sequences in a sample, where the kit includes a) a first target-specific primer having at least 90% identity to a nucleic acid sequence selected from SEQ ID NOs: 1-103,143 being substantially complementary to the first target sequence in a sense direction; b) a second target-specific primer having at least 90% identity to a nucleic acid sequence selected from SEQ ID NOs: 1-103,143 being substantially complementary to the first target sequence in a antisense direction; c) a third target-specific primer having at least 90% identity to a nucleic acid sequence selected from SEQ ID NOs: 1-103,143 being substantially complementary to the second target sequence in a sense direction; and, d) a fourth target-specific primer having at least 90% identity to a nucleic acid sequence selected from SEQ ID NOs: 1-103,143 being substantially complementary to the second target sequence in a antisense direction. In some embodiments, the sample can be an environmental, aquatic, microbiological, entomological, plant, fungi, animal or mammalian nucleic acid containing sample. In some embodiments, the sample can include a clinical, surgical, physician, forensic or laboratory obtained nucleic acid sample.

[0103] In some embodiments, the disclosure relates generally to a method for amplifying a plurality of target sequences in a sample comprising contacting at least some portion of the sample with at least one target-specific primer as disclosed herein, or designed using the primer selection criteria disclosed herein, and a polymerase under amplification conditions thereby producing at least one amplified target sequence. In some embodiments, the method further includes ligating at least one adapter to at least one amplified target sequence, thereby producing at least one adapter-ligated amplified target sequence. In some embodiments, the method includes any one or more of the target-specific primers provided in Tables 2, 3, 13, 14, 15, 17 and 19 or any nucleic acid sequence having at least 90% identity to any one or more of the target-specific primers provided in Tables 2, 3, 13, 14, 15, 17 and 19.

[0104] In some embodiments, the disclosure is generally related to an amplification product generated by amplifying at least one target sequence present in a sample with one or more target-specific primers disclosed herein or one or more target-specific primers designed using the primer selection criteria disclosed herein. In some embodiments, the disclosure is generally related to an amplification product generated by contacting at least one target sequence in a sample with one or more target-specific primers disclosed herein or one or more target-specific primers designed using the primer selection criteria disclosed herein under amplification conditions. In some embodiments, the amplification product can include one or more mutations associated with cancer or inherited disease. For example, a sample suspected of containing one or more mutations associated with at least one cancer can be subjected to any one of the amplification methods disclosed herein. The amplification products obtained from the selected amplification method can optionally be compared to a normal or matched sample known to be noncancerous with respect to the at least one cancer, and can therefore be used as a reference sample. In some embodiments, the amplification products obtained by the methods disclosed herein can be optionally sequenced using any suitable nucleic acid sequencing platform to determine the nucleic acid sequence of the amplification products, and optionally compared to sequencing information from the normal or non-cancerous sample. In some embodiments, amplification products can include one or more markers associated with antibiotic resistance, pathogenicity or genetic modification. In some embodiments, nucleic acid sequences of one or more amplification products obtained by contacting at least one target sequence with at least one target-specific primer under amplification conditions can be used to determine the presence or absence of a genetic variant within the one or more amplification products.

[0105] In some embodiments, the disclosure generally relates to compositions (as well as related kits, methods, systems and apparatuses using the disclosed compositions) for performing nucleic acid amplification and nucleic acid synthesis. In some embodiments, the composition includes a plurality of target-specific primer pairs, at least one target-specific primer pair including a target-specific forward primer and a target-specific reverse primer. In some embodiments, the composition includes at least 100, 200, 500, 750, 1000, 2500, 5000, 7500, 10000, 12000, 15000, 17500, 20000 or 50000 different primer pairs, some or all of which can be target-specific. Optionally at least two of the different target-specific primer pairs are directed to (i.e., are specific for) different target sequences.

[0106] In some embodiments, the composition includes at least one target-specific primer pair that can be specific for at least one amplified target sequence. In some embodiments, the composition includes a plurality of target-specific primer pairs, at least two target-specific primer pairs being specific for at different amplified target sequences. In some embodiments, the composition includes a target-specific primer pair, which each member of the primer pair includes a target-specific primer that can hybridize to at least a portion of a first amplified sequence or its complement, and that is substantially non-complementary to the 3′ end or the 5′ end of any other amplified sequence in the sample. In some embodiments, the composition includes at least one target-specific primer pair that can be substantially non-complementary to a portion of any other nucleic acid molecule in the sample. In some embodiments, the compositions include a plurality of target-specific primer pairs that include one or more cleavable groups at one or more locations within the target-specific primer pair.

[0107] In some embodiments, the composition includes one or more target-specific primer pairs that can amplify a short tandem repeat, single nucleotide polymorphism, gene, exon, coding region, exome, or portion thereof. For example, a plurality of target-specific primer pairs can uniformly amplify one gene, exon, coding region, exome or portion thereof. In some embodiments, the compositions include target-specific primer pairs designed to minimize overlap of nucleotide sequences amplified using the one or more target-specific primer pairs. In some embodiments, the nucleotide sequence overlap between one or more target-specific primers can be minimized at the 3′ end, the 5′ end, or both. In some embodiments, at least one primer in a plurality of target-specific primers includes less than 5 nucleotides of nucleotide sequence overlap at the 3′ end, 5′ end or both. In some embodiments, at least one target-specific primer of a plurality of target-specific primers includes a nucleotide sequence gap of at least one nucleotide, as compared to the plurality of target-specific primers. In some embodiments, the compositions include one or more target-specific primer pairs designed to comprehensively amplify one or more genes or exons. For example, a plurality of target-specific primer pairs can be designed to uniformly amplify (i.e., provide 100% representation of all nucleotides) in a single gene or exon.

[0108] In some embodiments, at least two pairs of target-specific primers are capable of hybridizing to locations on a template nucleic acid and serving as substrates for template-dependent primer extension by a polymerase. In some embodiments, the template-dependent primer extension can include amplification of the region of template located between the sites of hybridization of the primers of the at least two pairs of primers, resulting in formation of an amplified region or “amplicon”. Typically, the sequence of the amplicon includes the sequence of the template located between the sites of hybridization of the primers, as well as at least part of the sequence of the primers themselves. In some embodiments, the amplification reaction can include at least about 5, 10, 25, 50, 100, 150, 200, 250, 400, 500, 750, 1000, 1200, 1250, 1500, 1750, 2000, 2250, 2500, 2750, 3000, 5000, 7500 or 10,000 different primer pairs. In some embodiments, the amplification reaction can result in the generation of at least about 5, 10, 25, 50, 100, 150, 200, 250, 400, 500, 750, 1000, 1200, 1250, 1500, 1750, 2000, 2250, 2500, 2750, 3000, 5000, 7500 or 10,000 different amplicons. In some embodiments, at least about 75%, 80%, 90%, 95%, 97% or 99% of the amplicons generated during the amplification reaction are similarly sized, for example, the amplicons differ in size from each other by no more than 5, 10, 25, 50, 75, 100, 500, 1000 or 2000 nucleotides. In some embodiments, the difference in length between any two amplicons is no greater than 1%, 5%, or 10% of average amplicon length in the amplification reaction mixture. Optionally, the average amplicon length is about 50, 60, 70, 80, 90, 100, 110, 120, 130, 140, 150, 200, 250, 500, 1000, 2000, 10,000 nucleotides or greater. In some embodiments, the standard deviation in length among amplicons in a mixture is no greater than 0.1, 0.25, 0.4, 0.5, 0.75, 1, 1.5, 2.0, 2.4 or 3.0

[0109] In some embodiments, the compositions include target-specific primer pairs designed to generate amplified target sequences that overlap with an adjacent amplified target sequence by a single nucleotide. In some embodiments, the compositions include target-specific primer pairs designed to generate an amplified target sequence that does not overlap with an adjacent amplified target sequence. For example, target-specific primer pairs can be designed to generate amplified target sequences that are separated by one or more nucleotides. In some embodiments, the composition includes target-specific primer pairs designed to separate amplified target sequences by about 50 nucleotides.

[0110] In some embodiments, the composition includes a plurality of exon- or gene-specific, target-specific primer pairs that can be substantially complementary to an individual exon or gene. In some embodiments, the composition includes a plurality of exon- or gene-specific, target-specific primer pairs that can be substantially complementary to one or more exons or genes. In some embodiments, the composition includes a plurality of substantially complementary exon- or gene-specific, target-specific primer pairs and that no two primer pairs amplify greater than 10% of the same target sequence. In some embodiments, no two target-specific primer pairs amplify the same exon or gene. In some embodiments, the target-specific primer pairs amplify about 100 to about 600 nucleotides of a target sequence. In some embodiments, the target-specific primer pairs can be used to amplify about 25% to 100% of an exon, gene or coding region. In some embodiments, the compositions includes a plurality of target-specific primer pairs to generate a plurality of amplified target sequences and that no individual amplified target sequence is overexpressed by more than 50% as compared to the other amplified target sequences. In some embodiments, the compositions includes a plurality of target-specific primer pairs designed to generate a plurality of amplified target sequences that are substantially homogenous (i.e., homogenous with respect to GC content, melting temperature, or amplified target sequence length). In some embodiments, the plurality of target-specific primer pairs overlap in sequence by no more than five nucleotides.

[0111] In some embodiments, the disclosure generally relates to a method for preventing or eliminating non-specific amplification products in a multiplex PCR reaction. In some embodiments, the method includes (as well as related compositions, kits, systems and apparatuses used using the disclosed methods) hybridizing one or more target-specific primer pairs to a target sequence in a sample having a plurality of target sequences, extending the hybridized target-specific primers to form a plurality of amplified target sequences, denaturing and annealing the amplified target sequences to form a plurality of double-stranded amplified target sequences and performing a digesting step on the sample containing the double-stranded amplified target sequences to eliminate non-specific amplification products. In some embodiments, the method includes one or more cleavable groups at one or more locations in one or more target-specific primer pairs. In some embodiments, each target-specific primer pair includes at least one cleavable group. In some embodiments, each target-specific primer of the primer pairs includes a cleavable group. In some embodiments, the digestion is an enzymatic or chemical digestion. In some embodiments, the digestion step includes partial digestion of a target-specific primer of an amplified target sequence. In some embodiments, the method includes a thermostable polymerase. In some embodiments, the thermostable polymerase can be optionally reactivated by heat or chemical treatment.

[0112] In some embodiments, the composition includes a plurality of target-specific primer pairs directed to one or more diseases or disorders. In some embodiments, a target-specific primer pair can be substantially complementary to a target sequence correlated or associated with one or more cancers. In some embodiments, a target-specific primer pair can be substantially complementary to a target sequence correlated with or associated with one or more congenital or inherited disorders. In some embodiments, one or more target-specific primer pairs can be associated with one or more neurological, metabolic, neuromuscular, developmental, cardiovascular or autoimmune disorders. In some embodiments, one or more target-specific primer pairs can be associated with one or more genes or exons associated with one or more neurological, metabolic, neuromuscular, developmental, cardiovascular or autoimmune disorders. In some embodiments, the plurality of target-specific primers can include a gene or gene fragment associated with neoplastic development in mammals.

[0113] In some embodiments, the disclosure relates generally to compositions (as well as related kits, methods, systems and apparatuses using the disclosed compositions) comprising any, some or all of the primers disclosed herein, including in the Examples and in the related appendices, supplements and tables attached hereto. In some embodiments, the disclosure relates generally to compositions (as well as related kits, methods, systems and apparatuses using the disclosed compositions) comprising any of the primer pools used in the Examples, or any subset thereof. For example, in some embodiments the disclosure relates generally to compositions including one or more target-specific primers selected from the primers listed in Tables 2, 3, 13, 14, 15, 17 and 19, which include sets of primers designed and selected using the design methods and selection criteria of the disclosure, and which have been used to perform highly multiplex amplification according to the methods disclosed herein. It will be readily appreciated by one of ordinary skill in the art that any subsets of each of the primer sets set forth in Tables 2, 3, 13, 14, 15, 17 and 19 can also be expected to support multiplex amplification, since the entire set of primers of each table has been demonstrated to support such multiplex amplification and removal of particular primer pairs from the pool will not be expected to significantly alter the performance of the remaining primers for purposes of multiplex amplification. In some embodiments, the disclosure relates generally to compositions including any 1, 2, 5, 10, 25, 50, 100, 250, 500, 750, 1000, 2500, 5000, 7500, 10000, 12500, 50000, 100000 or more different target-specific primer pairs set forth in Tables 2, 3, 13, 14, 15, 17 and 19. In some embodiments, the disclosure relates to a composition including at least 1, 2, 5, 10, 25, 50, 100, 250, 500, 750, 1000, 2500, 5000, 7500, 10000, 12500, 50000, 100000 or more primers selected from Tables 2, 3, 13, 14, 15, 17 and 19, or their complements. In some embodiments, the disclosure relates to a composition including at least 1, 2, 5, 10, 25, 50, 100, 250, 500, 750, 1000, 2500, 5000, 7500, 10000, 12500, 50000, 100000 or more primers that are at least 85% identical or complementary to any primer of Tables 2, 3, 13, 14, 15, 17 and 19. In some embodiments, the composition includes at least one 1, 2, 5, 10, 25, 50, 100, 250, 500, 750, 1000, 2500, 5000, 7500, 10000, 12500, 50000, 100000 or more primers selected from Tables 2, 3, 13, 14, 15, 17 and 19, or their complements, wherein at least one primer includes at least one nucleotide substitution. A nucleotide substitution includes replacement of any nucleotide residue or nucleobase of any primer with any other nucleotide or nucleobase, and can include, for example, purine to purine substitutions, pyrimidine to pyrimidine substitutions, purine to pyrimidine substitutions, and pyrimidine to purine substitutions. In some embodiments, the at least one primer of the composition can include any one, two, three, four or more nucleotide substitutions. In some embodiments, the at least one primer of the composition includes at least one primer in which any one, some or all of the uracil-containing nucleotide residues or nucleobases of the primer are replaced with a thymine-containing nucleotide residue or nucleobase. In some embodiments, the at least one primer of the composition includes at least one primer in which any one, two, three, four, five or more uracil-containing nucleotide residues or nucleobases of the primer are replaced with a thymine-containing nucleotide residue or nucleobase.

[0114] In some embodiments, a target-specific primer pair can include a nucleic acid sequence including a somatic or germline mutation. In some embodiments, the germline or somatic mutation can be found in any one or more of the genes provided in Tables 1, 4, 16 or 18. In some embodiments, the target-specific primer pairs can be used to amplify a target sequence that can be used to detect the presence of mutations at less than 5% allele frequency. In some embodiments, the plurality of target-specific primers includes at least 500, at least 1000, at least 3000, at least 6000, at least 10000, at least 12000, or more target-specific primer pairs.

[0115] In some embodiments, the disclosure relates generally to a kit for performing multiplex nucleic acid amplification or multiplex nucleic acid synthesis. In some embodiments, the kit comprises a plurality of target-specific primers. In some embodiments, the kit can further include a polymerase, at least one adapter and/or a cleaving reagent. In some embodiments, the kit can also include dATP, dCTP, dGTP, dTTP and/or an antibody. In some embodiments, the cleaving reagent is any reagent that can cleave one or more cleaving groups present in one or more target-specific primers. In some embodiments the cleaving reagent can include an enzyme or chemical reagent. In some embodiments, the cleaving reagent can include an enzyme with an affinity for apurinic bases. In some embodiments, the cleaving reagent can include a first enzyme with an affinity for a first cleavable group and can further include a second enzyme with an affinity for a second cleavable group. In some embodiments, the kit can further include an enzyme with an affinity for abasic sites. In some embodiments, the polymerase is a thermostable polymerase. In some embodiments, the kits can include one or more preservatives, adjuvants or nucleic acid sequencing barcodes.

[0116] In some embodiments, the disclosure relates generally to methods (as well as related compositions, systems, kits and apparatuses) for determining copy number variation comprising performing any of the amplification methods disclosed herein.

### DETAILED DESCRIPTION

[0117] The following description of various exemplary embodiments is exemplary and explanatory only and is not to be construed as limiting or restrictive in any way. Other embodiments, features, objects, and advantages of the present teachings will be apparent from the description and accompanying drawings, and from the claims.

[0118] As used herein, “amplify”, “amplifying” or “amplification reaction” and their derivatives, refer generally to any action or process whereby at least a portion of a nucleic acid molecule (referred to as a template nucleic acid molecule) is replicated or copied into at least one additional nucleic acid molecule. The additional nucleic acid molecule optionally includes sequence that is substantially identical or substantially complementary to at least some portion of the template nucleic acid molecule. The template nucleic acid molecule can be single-stranded or double-stranded and the additional nucleic acid molecule can independently be single-stranded or double-stranded. In some embodiments, amplification includes a template-dependent in vitro enzyme-catalyzed reaction for the production of at least one copy of at least some portion of the nucleic acid molecule or the production of at least one copy of a nucleic acid sequence that is complementary to at least some portion of the nucleic acid molecule. Amplification optionally includes linear or exponential replication of a nucleic acid molecule. In some embodiments, such amplification is performed using isothermal conditions; in other embodiments, such amplification can include thermocycling. In some embodiments, the amplification is a multiplex amplification that includes the simultaneous amplification of a plurality of target sequences in a single amplification reaction. At least some of the target sequences can be situated on the same nucleic acid molecule or on different target nucleic acid molecules included in the single amplification reaction. In some embodiments, “amplification” includes amplification of at least some portion of DNA- and RNA-based nucleic acids alone, or in combination. The amplification reaction can include single or double-stranded nucleic acid substrates and can further including any of the amplification processes known to one of ordinary skill in the art. In some embodiments, the amplification reaction includes polymerase chain reaction (PCR).

[0119] As used herein, “amplification conditions” and its derivatives, generally refers to conditions suitable for amplifying one or more nucleic acid sequences. Such amplification can be linear or exponential. In some embodiments, the amplification conditions can include isothermal conditions or alternatively can include thermocyling conditions, or a combination of isothermal and themocycling conditions. In some embodiments, the conditions suitable for amplifying one or more nucleic acid sequences includes polymerase chain reaction (PCR) conditions. Typically, the amplification conditions refer to a reaction mixture that is sufficient to amplify nucleic acids such as one or more target sequences, or to amplify an amplified target sequence ligated to one or more adapters, e.g., an adapter-ligated amplified target sequence. Generally, the amplification conditions include a catalyst for amplification or for nucleic acid synthesis, for example a polymerase; a primer that possesses some degree of complementarity to the nucleic acid to be amplified; and nucleotides, such as deoxyribonucleotide triphosphates (dNTPs) to promote extension of the primer once hybridized to the nucleic acid. The amplification conditions can require hybridization or annealing of a primer to a nucleic acid, extension of the primer and a denaturing step in which the extended primer is separated from the nucleic acid sequence undergoing amplification. Typically, but not necessarily, amplification conditions can include thermocycling; in some embodiments, amplification conditions include a plurality of cycles where the steps of annealing, extending and separating are repeated. Typically, the amplification conditions include cations such as Mg⁺⁺ or Mn⁺⁺ (e.g., MgCl₂, etc) and can also include various modifiers of ionic strength.

[0120] As used herein, “target sequence” or “target sequence of interest” and its derivatives, refers generally to any single or double-stranded nucleic acid sequence that can be amplified or synthesized according to the disclosure, including any nucleic acid sequence suspected or expected to be present in a sample. In some embodiments, the target sequence is present in double-stranded form and includes at least a portion of the particular nucleotide sequence to be amplified or synthesized, or its complement, prior to the addition of target-specific primers or appended adapters. Target sequences can include the nucleic acids to which primers useful in the amplification or synthesis reaction can hybridize prior to extension by a polymerase. In some embodiments, the term refers to a nucleic acid sequence whose sequence identity, ordering or location of nucleotides is determined by one or more of the methods of the disclosure.

[0121] As defined herein, “sample” and its derivatives, is used in its broadest sense and includes any specimen, culture and the like that is suspected of including a target. In some embodiments, the sample comprises DNA, RNA, PNA, LNA, chimeric, hybrid, or multiplex-forms of nucleic acids. The sample can include any biological, clinical, surgical, agricultural, atmospheric or aquatic-based specimen containing one or more nucleic acids. The term also includes any isolated nucleic acid sample such a genomic DNA, fresh-frozen or formalin-fixed paraffin-embedded nucleic acid specimen.

[0122] As used herein, “contacting” and its derivatives, when used in reference to two or more components, refers generally to any process whereby the approach, proximity, mixture or commingling of the referenced components is promoted or achieved without necessarily requiring physical contact of such components, and includes mixing of solutions containing any one or more of the referenced components with each other. The referenced components may be contacted in any particular order or combination and the particular order of recitation of components is not limiting. For example, “contacting A with B and C” encompasses embodiments where A is first contacted with B then C, as well as embodiments where C is contacted with A then B, as well as embodiments where a mixture of A and C is contacted with B, and the like. Furthermore, such contacting does not necessarily require that the end result of the contacting process be a mixture including all of the referenced components, as long as at some point during the contacting process all of the referenced components are simultaneously present or simultaneously included in the same mixture or solution. For example, “contacting A with B and C” can include embodiments wherein C is first contacted with A to form a first mixture, which first mixture is then contacted with B to form a second mixture, following which C is removed from the second mixture; optionally A can then also be removed, leaving only B. Where one or more of the referenced components to be contacted includes a plurality (e.g, “contacting a target sequence with a plurality of target-specific primers and a polymerase”), then each member of the plurality can be viewed as an individual component of the contacting process, such that the contacting can include contacting of any one or more members of the plurality with any other member of the plurality and/or with any other referenced component (e.g., some but not all of the plurality of target specific primers can be contacted with a target sequence, then a polymerase, and then with other members of the plurality of target-specific primers) in any order or combination.

[0123] As used herein, the term “primer” and its derivatives refer generally to any polynucleotide that can hybridize to a target sequence of interest. In some embodiments, the primer can also serve to prime nucleic acid synthesis. Typically, the primer functions as a substrate onto which nucleotides can be polymerized by a polymerase; in some embodiments, however, the primer can become incorporated into the synthesized nucleic acid strand and provide a site to which another primer can hybridize to prime synthesis of a new strand that is complementary to the synthesized nucleic acid molecule. The primer may be comprised of any combination of nucleotides or analogs thereof, which may be optionally linked to form a linear polymer of any suitable length. In some embodiments, the primer is a single-stranded oligonucleotide or polynucleotide. (For purposes of this disclosure, the terms ‘polynucleotide” and “oligonucleotide” are used interchangeably herein and do not necessarily indicate any difference in length between the two). In some embodiments, the primer is single-stranded but it can also be double-stranded. The primer optionally occurs naturally, as in a purified restriction digest, or can be produced synthetically. In some embodiments, the primer acts as a point of initiation for amplification or synthesis when exposed to amplification or synthesis conditions; such amplification or synthesis can occur in a template-dependent fashion and optionally results in formation of a primer extension product that is complementary to at least a portion of the target sequence. Exemplary amplification or synthesis conditions can include contacting the primer with a polynucleotide template (e.g., a template including a target sequence), nucleotides and an inducing agent such as a polymerase at a suitable temperature and pH to induce polymerization of nucleotides onto an end of the target-specific primer. If double-stranded, the primer can optionally be treated to separate its strands before being used to prepare primer extension products. In some embodiments, the primer is an oligodeoxyribonucleotide or an oligoribonucleotide. In some embodiments, the primer can include one or more nucleotide analogs. The exact length and/or composition, including sequence, of the target-specific primer can influence many properties, including melting temperature (Tm), GC content, formation of secondary structures, repeat nucleotide motifs, length of predicted primer extension products, extent of coverage across a nucleic acid molecule of interest, number of primers present in a single amplification or synthesis reaction, presence of nucleotide analogs or modified nucleotides within the primers, and the like. In some embodiments, a primer can be paired with a compatible primer within an amplification or synthesis reaction to form a primer pair consisting or a forward primer and a reverse primer. In some embodiments, the forward primer of the primer pair includes a sequence that is substantially complementary to at least a portion of a strand of a nucleic acid molecule, and the reverse primer of the primer of the primer pair includes a sequence that is substantially identical to at least of portion of the strand. In some embodiments, the forward primer and the reverse primer are capable of hybridizing to opposite strands of a nucleic acid duplex. Optionally, the forward primer primes synthesis of a first nucleic acid strand, and the reverse primer primes synthesis of a second nucleic acid strand, wherein the first and second strands are substantially complementary to each other, or can hybridize to form a double-stranded nucleic acid molecule. In some embodiments, one end of an amplification or synthesis product is defined by the forward primer and the other end of the amplification or synthesis product is defined by the reverse primer. In some embodiments, where the amplification or synthesis of lengthy primer extension products is required, such as amplifying an exon, coding region, or gene, several primer pairs can be created than span the desired length to enable sufficient amplification of the region. In some embodiments, a primer can include one or more cleavable groups. In some embodiments, primer lengths are in the range of about 10 to about 60 nucleotides, about 12 to about 50 nucleotides and about 15 to about 40 nucleotides in length. Typically, a primer is capable of hybridizing to a corresponding target sequence and undergoing primer extension when exposed to amplification conditions in the presence of dNTPS and a polymerase. In some instances, the particular nucleotide sequence or a portion of the primer is known at the outset of the amplification reaction or can be determined by one or more of the methods disclosed herein. In some embodiments, the primer includes one or more cleavable groups at one or more locations within the primer.

[0124] As used herein, “target-specific primer” and its derivatives, refers generally to a single stranded or double-stranded polynucleotide, typically an oligonucleotide, that includes at least one sequence that is at least 50% complementary, typically at least 75% complementary or at least 85% complementary, more typically at least 90% complementary, more typically at least 95% complementary, more typically at least 98% or at least 99% complementary, or identical, to at least a portion of a nucleic acid molecule that includes a target sequence. In such instances, the target-specific primer and target sequence are described as “corresponding” to each other. In some embodiments, the target-specific primer is capable of hybridizing to at least a portion of its corresponding target sequence (or to a complement of the target sequence); such hybridization can optionally be performed under standard hybridization conditions or under stringent hybridization conditions. In some embodiments, the target-specific primer is not capable of hybridizing to the target sequence, or to its complement, but is capable of hybridizing to a portion of a nucleic acid strand including the target sequence, or to its complement. In some embodiments, the target-specific primer includes at least one sequence that is at least 75% complementary, typically at least 85% complementary, more typically at least 90% complementary, more typically at least 95% complementary, more typically at least 98% complementary, or more typically at least 99% complementary, to at least a portion of the target sequence itself; in other embodiments, the target-specific primer includes at least one sequence that is at least 75% complementary, typically at least 85% complementary, more typically at least 90% complementary, more typically at least 95% complementary, more typically at least 98% complementary, or more typically at least 99% complementary, to at least a portion of the nucleic acid molecule other than the target sequence. In some embodiments, the target-specific primer is substantially non-complementary to other target sequences present in the sample; optionally, the target-specific primer is substantially non-complementary to other nucleic acid molecules present in the sample. In some embodiments, nucleic acid molecules present in the sample that do not include or correspond to a target sequence (or to a complement of the target sequence) are referred to as “non-specific” sequences or “non-specific nucleic acids”. In some embodiments, the target-specific primer is designed to include a nucleotide sequence that is substantially complementary to at least a portion of its corresponding target sequence. In some embodiments, a target-specific primer is at least 95% complementary, or at least 99% complementary, or identical, across its entire length to at least a portion of a nucleic acid molecule that includes its corresponding target sequence. In some embodiments, a target-specific primer can be at least 90%, at least 95% complementary, at least 98% complementary or at least 99% complementary, or identical, across its entire length to at least a portion of its corresponding target sequence. In some embodiments, a forward target-specific primer and a reverse target-specific primer define a target-specific primer pair that can be used to amplify the target sequence via template-dependent primer extension. Typically, each primer of a target-specific primer pair includes at least one sequence that is substantially complementary to at least a portion of a nucleic acid molecule including a corresponding target sequence but that is less than 50% complementary to at least one other target sequence in the sample. In some embodiments, amplification can be performed using multiple target-specific primer pairs in a single amplification reaction, wherein each primer pair includes a forward target-specific primer and a reverse target-specific primer, each including at least one sequence that substantially complementary or substantially identical to a corresponding target sequence in the sample, and each primer pair having a different corresponding target sequence. In some embodiments, the target-specific primer can be substantially non-complementary at its 3′ end or its 5′ end to any other target-specific primer present in an amplification reaction. In some embodiments, the target-specific primer can include minimal cross hybridization to other target-specific primers in the amplification reaction. In some embodiments, target-specific primers include minimal cross-hybridization to non-specific sequences in the amplification reaction mixture. In some embodiments, the target-specific primers include minimal self-complementarity. In some embodiments, the target-specific primers can include one or more cleavable groups located at the 3′ end. In some embodiments, the target-specific primers can include one or more cleavable groups located near or about a central nucleotide of the target-specific primer. In some embodiments, one of more targets-specific primers includes only non-cleavable nucleotides at the 5′ end of the target-specific primer. In some embodiments, a target specific primer includes minimal nucleotide sequence overlap at the 3′ end or the 5′ end of the primer as compared to one or more different target-specific primers, optionally in the same amplification reaction. In some embodiments 1, 2, 3, 4, 5, 6, 7, 8, 9, 10 or more, target-specific primers in a single reaction mixture include one or more of the above embodiments. In some embodiments, substantially all of the plurality of target-specific primers in a single reaction mixture includes one or more of the above embodiments.

[0125] As used herein, “polymerase” and its derivatives, generally refers to any enzyme that can catalyze the polymerization of nucleotides (including analogs thereof) into a nucleic acid strand. Typically but not necessarily, such nucleotide polymerization can occur in a template-dependent fashion. Such polymerases can include without limitation naturally occurring polymerases and any subunits and truncations thereof, mutant polymerases, variant polymerases, recombinant, fusion or otherwise engineered polymerases, chemically modified polymerases, synthetic molecules or assemblies, and any analogs, derivatives or fragments thereof that retain the ability to catalyze such polymerization. Optionally, the polymerase can be a mutant polymerase comprising one or more mutations involving the replacement of one or more amino acids with other amino acids, the insertion or deletion of one or more amino acids from the polymerase, or the linkage of parts of two or more polymerases. Typically, the polymerase comprises one or more active sites at which nucleotide binding and/or catalysis of nucleotide polymerization can occur. Some exemplary polymerases include without limitation DNA polymerases and RNA polymerases. The term “polymerase” and its variants, as used herein, also refers to fusion proteins comprising at least two portions linked to each other, where the first portion comprises a peptide that can catalyze the polymerization of nucleotides into a nucleic acid strand and is linked to a second portion that comprises a second polypeptide. In some embodiments, the second polypeptide can include a reporter enzyme or a processivity-enhancing domain. Optionally, the polymerase can possess 5′ exonuclease activity or terminal transferase activity. In some embodiments, the polymerase can be optionally reactivated, for example through the use of heat, chemicals or re-addition of new amounts of polymerase into a reaction mixture. In some embodiments, the polymerase can include a hot-start polymerase or an aptamer based polymerase that optionally can be reactivated.

[0126] As used herein, the term “nucleotide” and its variants comprises any compound, including without limitation any naturally occurring nucleotide or analog thereof, which can bind selectively to, or can be polymerized by, a polymerase. Typically, but not necessarily, selective binding of the nucleotide to the polymerase is followed by polymerization of the nucleotide into a nucleic acid strand by the polymerase; occasionally however the nucleotide may dissociate from the polymerase without becoming incorporated into the nucleic acid strand, an event referred to herein as a “non-productive” event. Such nucleotides include not only naturally occurring nucleotides but also any analogs, regardless of their structure, that can bind selectively to, or can be polymerized by, a polymerase. While naturally occurring nucleotides typically comprise base, sugar and phosphate moieties, the nucleotides of the present disclosure can include compounds lacking any one, some or all of such moieties. In some embodiments, the nucleotide can optionally include a chain of phosphorus atoms comprising three, four, five, six, seven, eight, nine, ten or more phosphorus atoms. In some embodiments, the phosphorus chain can be attached to any carbon of a sugar ring, such as the 5′ carbon. The phosphorus chain can be linked to the sugar with an intervening O or S. In one embodiment, one or more phosphorus atoms in the chain can be part of a phosphate group having P and O. In another embodiment, the phosphorus atoms in the chain can be linked together with intervening O, NH, S, methylene, substituted methylene, ethylene, substituted ethylene, CNH₂, C(O), C(CH₂), CH₂CH₂, or C(OH)CH₂R (where R can be a 4-pyridine or 1-imidazole). In one embodiment, the phosphorus atoms in the chain can have side groups having O, BH₃, or S. In the phosphorus chain, a phosphorus atom with a side group other than O can be a substituted phosphate group. In the phosphorus chain, phosphorus atoms with an intervening atom other than O can be a substituted phosphate group. Some examples of nucleotide analogs are described in Xu, U.S. Pat. No. 7,405,281. In some embodiments, the nucleotide comprises a label and referred to herein as a “labeled nucleotide”; the label of the labeled nucleotide is referred to herein as a “nucleotide label”. In some embodiments, the label can be in the form of a fluorescent dye attached to the terminal phosphate group, i.e., the phosphate group most distal from the sugar. Some examples of nucleotides that can be used in the disclosed methods and compositions include, but are not limited to, ribonucleotides, deoxyribonucleotides, modified ribonucleotides, modified deoxyribonucleotides, ribonucleotide polyphosphates, deoxyribonucleotide polyphosphates, modified ribonucleotide polyphosphates, modified deoxyribonucleotide polyphosphates, peptide nucleotides, modified peptide nucleotides, metallonucleosides, phosphonate nucleosides, and modified phosphate-sugar backbone nucleotides, analogs, derivatives, or variants of the foregoing compounds, and the like. In some embodiments, the nucleotide can comprise non-oxygen moieties such as, for example, thio- or borano-moieties, in place of the oxygen moiety bridging the alpha phosphate and the sugar of the nucleotide, or the alpha and beta phosphates of the nucleotide, or the beta and gamma phosphates of the nucleotide, or between any other two phosphates of the nucleotide, or any combination thereof. “Nucleotide 5′-triphosphate” refers to a nucleotide with a triphosphate ester group at the 5′ position, and are sometimes denoted as “NTP”, or “dNTP” and “ddNTP” to particularly point out the structural features of the ribose sugar. The triphosphate ester group can include sulfur substitutions for the various oxygens, e.g. .alpha.-thio-nucleotide 5′-triphosphates. For a review of nucleic acid chemistry, see: Shabarova, Z. and Bogdanov, A. Advanced Organic Chemistry of Nucleic Acids, VCH, New York, 1994.

[0127] The term “extension” and its variants, as used herein, when used in reference to a given primer, comprises any in vivo or in vitro enzymatic activity characteristic of a given polymerase that relates to polymerization of one or more nucleotides onto an end of an existing nucleic acid molecule. Typically but not necessarily such primer extension occurs in a template-dependent fashion; during template-dependent extension, the order and selection of bases is driven by established base pairing rules, which can include Watson-Crick type base pairing rules or alternatively (and especially in the case of extension reactions involving nucleotide analogs) by some other type of base pairing paradigm. In one non-limiting example, extension occurs via polymerization of nucleotides on the 3′OH end of the nucleic acid molecule by the polymerase.

[0128] The term “portion” and its variants, as used herein, when used in reference to a given nucleic acid molecule, for example a primer or a template nucleic acid molecule, comprises any number of contiguous nucleotides within the length of the nucleic acid molecule, including the partial or entire length of the nucleic acid molecule.

[0129] The terms “identity” and “identical” and their variants, as used herein, when used in reference to two or more nucleic acid sequences, refer to similarity in sequence of the two or more sequences (e.g., nucleotide or polypeptide sequences). In the context of two or more homologous sequences, the percent identity or homology of the sequences or subsequences thereof indicates the percentage of all monomeric units (e.g., nucleotides or amino acids) that are the same (i.e., about 70% identity, preferably 75%, 80%, 85%, 90%, 95%, 98% or 99% identity). The percent identity can be over a specified region, when compared and aligned for maximum correspondence over a comparison window, or designated region as measured using a BLAST or BLAST 2.0 sequence comparison algorithms with default parameters described below, or by manual alignment and visual inspection. Sequences are said to be “substantially identical” when there is at least 85% identity at the amino acid level or at the nucleotide level. Preferably, the identity exists over a region that is at least about 25, 50, or 100 residues in length, or across the entire length of at least one compared sequence. A typical algorithm for determining percent sequence identity and sequence similarity are the BLAST and BLAST 2.0 algorithms, which are described in Altschul et al, Nuc. Acids Res. 25:3389-3402 (1977). Other methods include the algorithms of Smith & Waterman, Adv. Appl. Math. 2:482 (1981), and Needleman & Wunsch, J. Mol. Biol. 48:443 (1970), etc. Another indication that two nucleic acid sequences are substantially identical is that the two molecules or their complements hybridize to each other under stringent hybridization conditions.

[0130] The terms “complementary” and “complement” and their variants, as used herein, refer to any two or more nucleic acid sequences (e.g., portions or entireties of template nucleic acid molecules, target sequences and/or primers) that can undergo cumulative base pairing at two or more individual corresponding positions in antiparallel orientation, as in a hybridized duplex. Such base pairing can proceed according to any set of established rules, for example according to Watson-Crick base pairing rules or according, to some other base pairing paradigm. Optionally there can be “complete” or “total” complementarity between a first and second nucleic acid sequence where each nucleotide in the first nucleic acid sequence can undergo a stabilizing base pairing interaction with a nucleotide in the corresponding antiparallel position on the second nucleic acid sequence. “Partial” complementarity describes nucleic acid sequences in which at least 20%, but less than 100%, of the residues of one nucleic acid sequence are complementary to residues in the other nucleic acid sequence. In some embodiments, at least 50%, but less than 100%, of the residues of one nucleic acid sequence are complementary to residues in the other nucleic acid sequence. In some embodiments, at least 70%, 80%, 90%, 95% or 98%, but less than 100%, of the residues of one nucleic acid sequence are complementary to residues in the other nucleic acid sequence. Sequences are said to be “substantially complementary” when at least 85% of the residues of one nucleic acid sequence are complementary to residues in the other nucleic acid sequence. In some embodiments, two complementary or substantially complementary sequences are capable of hybridizing to each other under standard or stringent hybridization conditions. “Non-complementary” describes nucleic acid sequences in which less than 20% of the residues of one nucleic acid sequence are complementary to residues in the other nucleic acid sequence. Sequences are said to be “substantially non-complementary” when less than 15% of the residues of one nucleic acid sequence are complementary to residues in the other nucleic acid sequence. In some embodiments, two non-complementary or substantially non-complementary sequences cannot hybridize to each other under standard or stringent hybridization conditions. A “mismatch” is present at any position in the two opposed nucleotides are not complementary. Complementary nucleotides include nucleotides that are efficiently incorporated by DNA polymerases opposite each other during DNA replication under physiological conditions. In a typical embodiment, complementary nucleotides can form base pairs with each other, such as the A-T/U and G-C base pairs formed through specific Watson-Crick type hydrogen bonding, or base pairs formed through some other type of base pairing paradigm, between the nucleobases of nucleotides and/or polynucleotides in positions antiparallel to each other. The complementarity of other artificial base pairs can be based on other types of hydrogen bonding and/or hydrophobicity of bases and/or shape complementarity between bases.

[0131] As used herein, “amplified target sequences” and its derivatives, refers generally to a nucleic acid sequence produced by the amplification of/amplifying the target sequences using target-specific primers and the methods provided herein. The amplified target sequences may be either of the same sense (the positive strand produced in the second round and subsequent even-numbered rounds of amplification) or antisense (i.e., the negative strand produced during the first and subsequent odd-numbered rounds of amplification) with respect to the target sequences. For the purposes of this disclosure, the amplified target sequences are typically less than 50% complementary to any portion of another amplified target sequence in the reaction.

[0132] As used herein, the terms “ligating”, “ligation” and their derivatives refer generally to the act or process for covalently linking two or more molecules together, for example, covalently linking two or more nucleic acid molecules to each other. In some embodiments, ligation includes joining nicks between adjacent nucleotides of nucleic acids. In some embodiments, ligation includes forming a covalent bond between an end of a first and an end of a second nucleic acid molecule. In some embodiments, for example embodiments wherein the nucleic acid molecules to be ligated include conventional nucleotide residues, the ligation can include forming a covalent bond between a 5′ phosphate group of one nucleic acid and a 3′ hydroxyl group of a second nucleic acid thereby forming a ligated nucleic acid molecule. In some embodiments, any means for joining nicks or bonding a 5′ phosphate to a 3′ hydroxyl between adjacent nucleotides can be employed. In an exemplary embodiment, an enzyme such as a ligase can be used. Generally for the purposes of this disclosure, an amplified target sequence can be ligated to an adapter to generate an adapter-ligated amplified target sequence.

[0133] As used herein, “ligase” and its derivatives, refers generally to any agent capable of catalyzing the ligation of two substrate molecules. In some embodiments, the ligase includes an enzyme capable of catalyzing the joining of nicks between adjacent nucleotides of a nucleic acid. In some embodiments, the ligase includes an enzyme capable of catalyzing the formation of a covalent bond between a 5′ phosphate of one nucleic acid molecule to a 3′ hydroxyl of another nucleic acid molecule thereby forming a ligated nucleic acid molecule. Suitable ligases may include, but not limited to, T4 DNA ligase, T4 RNA ligase, and E. coli DNA ligase.

[0134] As used herein, “ligation conditions” and its derivatives, generally refers to conditions suitable for ligating two molecules to each other. In some embodiments, the ligation conditions are suitable for sealing nicks or gaps between nucleic acids. As defined herein, a “nick” or “gap” refers to a nucleic acid molecule that lacks a directly bound 5′ phosphate of a mononucleotide pentose ring to a 3′ hydroxyl of a neighboring mononucleotide pentose ring within internal nucleotides of a nucleic acid sequence. As used herein, the term nick or gap is consistent with the use of the term in the art. Typically, a nick or gap can be ligated in the presence of an enzyme, such as ligase at an appropriate temperature and pH. In some embodiments, T4 DNA ligase can join a nick between nucleic acids at a temperature of about 70-72° C.

[0135] As used herein, “blunt-end ligation” and its derivatives, refers generally to ligation of two blunt-end double-stranded nucleic acid molecules to each other. A “blunt end” refers to an end of a double-stranded nucleic acid molecule wherein substantially all of the nucleotides in the end of one strand of the nucleic acid molecule are base paired with opposing nucleotides in the other strand of the same nucleic acid molecule. A nucleic acid molecule is not blunt ended if it has an end that includes a single-stranded portion greater than two nucleotides in length, referred to herein as an “overhang”. In some embodiments, the end of nucleic acid molecule does not include any single stranded portion, such that every nucleotide in one strand of the end is based paired with opposing nucleotides in the other strand of the same nucleic acid molecule. In some embodiments, the ends of the two blunt ended nucleic acid molecules that become ligated to each other do not include any overlapping, shared or complementary sequence. Typically, blunted-end ligation excludes the use of additional oligonucleotide adapters to assist in the ligation of the double-stranded amplified target sequence to the double-stranded adapter, such as patch oligonucleotides as described in Mitra and Varley, US2010/0129874, published May 27, 2010. In some embodiments, blunt-ended ligation includes a nick translation reaction to seal a nick created during the ligation process.

[0136] As used herein, the terms “adapter” or “adapter and its complements” and their derivatives, refers generally to any linear oligonucleotide which can be ligated to a nucleic acid molecule of the disclosure. Optionally, the adapter includes a nucleic acid sequence that is not substantially complementary to the 3′ end or the 5′ end of at least one target sequences within the sample. In some embodiments, the adapter is substantially non-complementary to the 3′ end or the 5′ end of any target sequence present in the sample. In some embodiments, the adapter includes any single stranded or double-stranded linear oligonucleotide that is not substantially complementary to an amplified target sequence. In some embodiments, the adapter is substantially non-complementary to at least one, some or all of the nucleic acid molecules of the sample. In some embodiments, suitable adapter lengths are in the range of about 10-100 nucleotides, about 12-60 nucleotides and about 15-50 nucleotides in length. Generally, the adapter can include any combination of nucleotides and/or nucleic acids. In some aspects, the adapter can include one or more cleavable groups at one or more locations. In another aspect, the adapter can include a sequence that is substantially identical, or substantially complementary, to at least a portion of a primer, for example a universal primer. In some embodiments, the adapter can include a barcode or tag to assist with downstream cataloguing, identification or sequencing. In some embodiments, a single-stranded adapter can act as a substrate for amplification when ligated to an amplified target sequence, particularly in the presence of a polymerase and dNTPs under suitable temperature and pH.

[0137] As used herein, “reamplifying” or “reamplification” and their derivatives refer generally to any process whereby at least a portion of an amplified nucleic acid molecule is further amplified via any suitable amplification process (referred to in some embodiments as a “secondary” amplification or “reamplification”, thereby producing a reamplified nucleic acid molecule. The secondary amplification need not be identical to the original amplification process whereby the amplified nucleic acid molecule was produced; nor need the reamplified nucleic acid molecule be completely identical or completely complementary to the amplified nucleic acid molecule; all that is required is that the reamplified nucleic acid molecule include at least a portion of the amplified nucleic acid molecule or its complement. For example, the reamplification can involve the use of different amplification conditions and/or different primers, including different target-specific primers than the primary amplification.

[0138] As defined herein, a “cleavable group” generally refers to any moiety that once incorporated into a nucleic acid can be cleaved under appropriate conditions. For example, a cleavable group can be incorporated into a target-specific primer, an amplified sequence, an adapter or a nucleic acid molecule of the sample. In an exemplary embodiment, a target-specific primer can include a cleavable group that becomes incorporated into the amplified product and is subsequently cleaved after amplification, thereby removing a portion, or all, of the target-specific primer from the amplified product. The cleavable group can be cleaved or otherwise removed from a target-specific primer, an amplified sequence, an adapter or a nucleic acid molecule of the sample by any acceptable means. For example, a cleavable group can be removed from a target-specific primer, an amplified sequence, an adapter or a nucleic acid molecule of the sample by enzymatic, thermal, photo-oxidative or chemical treatment. In one aspect, a cleavable group can include a nucleobase that is not naturally occurring. For example, an oligodeoxyribonucleotide can include one or more RNA nucleobases, such as uracil that can be removed by a uracil glycosylase. In some embodiments, a cleavable group can include one or more modified nucleobases (such as 7-methylguanine, 8-oxo-guanine, xanthine, hypoxanthine, 5,6-dihydrouracil or 5-methylcytosine) or one or more modified nucleosides (i.e., 7-methylguanosine, 8-oxo-deoxyguanosine, xanthosine, inosine, dihydrouridine or 5-methylcytidine). The modified nucleobases or nucleotides can be removed from the nucleic acid by enzymatic, chemical or thermal means. In one embodiment, a cleavable group can include a moiety that can be removed from a primer after amplification (or synthesis) upon exposure to ultraviolet light (i.e., bromodeoxyuridine). In another embodiment, a cleavable group can include methylated cytosine. Typically, methylated cytosine can be cleaved from a primer for example, after induction of amplification (or synthesis), upon sodium bisulfite treatment. In some embodiments, a cleavable moiety can include a restriction site. For example, a primer or target sequence can include a nucleic acid sequence that is specific to one or more restriction enzymes, and following amplification (or synthesis), the primer or target sequence can be treated with the one or more restriction enzymes such that the cleavable group is removed. Typically, one or more cleavable groups can be included at one or more locations with a target-specific primer, an amplified sequence, an adapter or a nucleic acid molecule of the sample.

[0139] As used herein, “cleavage step” and its derivatives, generally refers to any process by which a cleavable group is cleaved or otherwise removed from a target-specific primer, an amplified sequence, an adapter or a nucleic acid molecule of the sample. In some embodiments, the cleavage steps involves a chemical, thermal, photo-oxidative or digestive process.

[0140] As used herein, the term “hybridization” is consistent with its use in the art, and generally refers to the process whereby two nucleic acid molecules undergo base pairing interactions. Two nucleic acid molecule molecules are said to be hybridized when any portion of one nucleic acid molecule is base paired with any portion of the other nucleic acid molecule; it is not necessarily required that the two nucleic acid molecules be hybridized across their entire respective lengths and in some embodiments, at least one of the nucleic acid molecules can include portions that are not hybridized to the other nucleic acid molecule. The phrase “hybridizing under stringent conditions” and its variants refers generally to conditions under which hybridization of a target-specific primer to a target sequence occurs in the presence of high hybridization temperature and low ionic strength. In one, exemplary embodiment, stringent hybridization conditions include an aqueous environment containing about 30 mM magnesium sulfate, about 300 mM Tris-sulfate at pH 8.9, and about 90 mM ammonium sulfate at about 60-68° C., or equivalents thereof. As used herein, the phrase “standard hybridization conditions” and its variants refers generally to conditions under which hybridization of a primer to an oligonucleotide (i.e., a target sequence), occurs in the presence of low hybridization temperature and high ionic strength. In one exemplary embodiment, standard hybridization conditions include an aqueous environment containing about 100 mM magnesium sulfate, about 500 mM Tris-sulfate at pH 8.9, and about 200 mM ammonium sulfate at about 50-55° C., or equivalents thereof.

[0141] As used herein, “triple nucleotide motif” and its derivatives, refers generally to any nucleotide sequence that is repeated contiguously over three nucleotides e.g., AAA or CCC. Generally, a triple nucleotide motif is not repeated more than five times in a target-specific primer (or adapter) of the disclosure.

[0142] As used herein, “an ACA nucleotide motif” and its derivatives, refers generally to the nucleotide sequence “ACA”. Generally, this motif is not repeated three or more times in a target-specific primer (or adapter) of the disclosure.

[0143] As used herein, “homopolymer” and its derivatives, refers generally to any repeating nucleotide sequence that is eight nucleotides or greater in length e.g., AAAAAAAA or CCCCCCCC. Generally, a homopolymer as defined herein is not present in a target-specific primer (or adapter) of the disclosure.

[0144] As used herein, “GC content” and its derivatives, refers generally to the cytosine and guanine content of a nucleic acid molecule. Generally, the GC content of a target-specific primer (or adapter) of the disclosure is 85% or lower. More typically, the GC content of a target-specific primer or adapter of the disclosure is between 15-85%.

[0145] As used herein, the term “end” and its variants, when used in reference to a nucleic acid molecule, for example a target sequence or amplified target sequence, can include the terminal 30 nucleotides, the terminal 20 and even more typically the terminal 15 nucleotides of the nucleic acid molecule. A linear nucleic acid molecule comprised of linked series of contiguous nucleotides typically includes at least two ends. In some embodiments, one end of the nucleic acid molecule can include a 3′ hydroxyl group or its equivalent, and can be referred to as the “3′ end” and its derivatives. Optionally, the 3′ end includes a 3′ hydroxyl group that is not linked to a 5′ phosphate group of a mononucleotide pentose ring. Typically, the 3′ end includes one or more 5′ linked nucleotides located adjacent to the nucleotide including the unlinked 3′ hydroxyl group, typically the 30 nucleotides located adjacent to the 3′ hydroxyl, typically the terminal 20 and even more typically the terminal 15 nucleotides. Generally, the one or more linked nucleotides can be represented as a percentage of the nucleotides present in the oligonucleotide or can be provided as a number of linked nucleotides adjacent to the unlinked 3′ hydroxyl. For example, the 3′ end can include less than 50% of the nucleotide length of the oligonucleotide. In some embodiments, the 3′ end does not include any unlinked 3′ hydroxyl group but can include any moiety capable of serving as a site for attachment of nucleotides via primer extension and/or nucleotide polymerization. In some embodiments, the term “3′ end” for example when referring to a target-specific primer, can include the terminal 10 nucleotides, the terminal 5 nucleotides, the terminal 4, 3, 2 or fewer nucleotides at the 3′ end. In some embodiments, the term “3′ end” when referring to a target-specific primer can include nucleotides located at nucleotide positions 10 or fewer from the 3′ terminus.

[0146] As used herein, “5′ end”, and its derivatives, generally refers to an end of a nucleic acid molecule, for example a target sequence or amplified target sequence, which includes a free 5′ phosphate group or its equivalent. In some embodiments, the 5′ end includes a 5′ phosphate group that is not linked to a 3′ hydroxyl of a neighboring mononucleotide pentose ring. Typically, the 5′ end includes to one or more linked nucleotides located adjacent to the 5′ phosphate, typically the 30 nucleotides located adjacent to the nucleotide including the 5′ phosphate group, typically the terminal 20 and even more typically the terminal 15 nucleotides. Generally, the one or more linked nucleotides can be represented as a percentage of the nucleotides present in the oligonucleotide or can be provided as a number of linked nucleotides adjacent to the 5′ phosphate. For example, the 5′ end can be less than 50% of the nucleotide length of an oligonucleotide. In another exemplary embodiment, the 5′ end can include about 15 nucleotides adjacent to the nucleotide including the terminal 5′ phosphate. In some embodiments, the 5′ end does not include any unlinked 5′ phosphate group but can include any moiety capable of serving as a site of attachment to a a 3′ hydroxyl group, or to the 3′ end of another nucleic acid molecule. In some embodiments, the term “5′ end” for example when referring to a target-specific primer, can include the terminal 10 nucleotides, the terminal 5 nucleotides, the terminal 4, 3, 2 or fewer nucleotides at the 5′ end. In some embodiments, the term “5′ end” when referring to a target-specific primer can include nucleotides located at positions 10 or fewer from the 5′ terminus. In some embodiments, the 5′ end of a target-specific primer can include only non-cleavable nucleotides, for example nucleotides that do not contain one or more cleavable groups as disclosed herein, or a cleavable nucleotide as would be readily determined by one of ordinary skill in the art.

[0147] As used herein, “protecting group” and its derivatives, refers generally to any moiety that can be incorporated into an adapter or target-specific primer that imparts chemical selectivity or protects the target-specific primer or adapter from digestion or chemical degradation. Typically, but not necessarily, a protecting group can include modification of an existing functional group in the target-specific primer r adapter to achieve chemical selectivity. Suitable types of protecting groups include alcohol, amine, phosphate, carbonyl, or carboxylic acid protecting groups. In an exemplary embodiment, the protecting group can include a spacer compound having a chain of carbon atoms.

[0148] As used herein, “DNA barcode” or “DNA tagging sequence” and its derivatives, refers generally to a unique short (6-14 nucleotide) nucleic acid sequence within an adapter that can act as a ‘key’ to distinguish or separate a plurality of amplified target sequences in a sample. For the purposes of this disclosure, a DNA barcode or DNA tagging sequence can be incorporated into the nucleotide sequence of an adapter.

[0149] As used herein, the phrases “two rounds of target-specific hybridization” or “two rounds of target-specific selection” and their derivatives refers generally to any process whereby the same target sequence is subjected to two consecutive rounds of hybridization-based target-specific selection, wherein a target sequence is hybridized to a target-specific sequence. Each round of hybridization based target-specific selection can include multiple target-specific hybridizations to at least some portion of a target-specific sequence. In one exemplary embodiment, a round of target-specific selection includes a first target-specific hybridization involving a first region of the target sequence and a second target-specific hybridization involving a second region of the target sequence. The first and second regions can be the same or different. In some embodiments, each round of hybridization-based target-specific selection can include use of two target specific oligonucleotides (e.g., a forward target-specific primer and a reverse target-specific primer), such that each round of selection includes two target-specific hybridizations.

[0150] As used herein, “comparable maximal minimum melting temperatures” and its derivatives, refers generally to the melting temperature (Tm) of each nucleic acid fragment for a single adapter or target-specific primer after cleavage of the cleavable groups. The hybridization temperature of each nucleic acid fragment generated by a single adapter or target-specific primer is compared to determine the maximal minimum temperature required preventing hybridization of any nucleic acid fragment from the target-specific primer or adapter to the target sequence. Once the maximal hybridization temperature is known, it is possible to manipulate the adapter or target-specific primer, for example by moving the location of the cleavable group along the length of the primer, to achieve a comparable maximal minimum melting temperature with respect to each nucleic acid fragment.

[0151] As used herein, “addition only” and its derivatives, refers generally to a series of steps in which reagents and components are added to a first or single reaction mixture. Typically, the series of steps excludes the removal of the reaction mixture from a first vessel to a second vessel in order to complete the series of steps. Generally, an addition only process excludes the manipulation of the reaction mixture outside the vessel containing the reaction mixture. Typically, an addition-only process is amenable to automation and high-throughput.

[0152] As used herein, “synthesizing” and its derivatives, refers generally to a reaction involving nucleotide polymerization by a polymerase, optionally in a template-dependent fashion. Polymerases synthesize an oligonucleotide via transfer of a nucleoside monophosphate from a nucleoside triphosphate (NTP), deoxynucleoside triphosphate (dNTP) or dideoxynucleoside triphosphate (ddNTP) to the 3′ hydroxyl of an extending oligonucleotide chain. For the purposes of this disclosure, synthesizing includes to the serial extension of a hybridized adapter or a target-specific primer via transfer of a nucleoside monophosphate from a deoxynucleoside triphosphate.

[0153] As used herein, “polymerizing conditions” and its derivatives, refers generally to conditions suitable for nucleotide polymerization. In typical embodiments, such nucleotide polymerization is catalyzed by a polymerase. In some embodiments, polymerizing conditions include conditions for primer extension, optionally in a template-dependent manner, resulting in the generation of a synthesized nucleic acid sequence. In some embodiments, the polymerizing conditions include polymerase chain reaction (PCR). Typically, the polymerizing conditions include use of a reaction mixture that is sufficient to synthesize nucleic acids and includes a polymerase and nucleotides. The polymerizing conditions can include conditions for annealing of a target-specific primer to a target sequence and extension of the primer in a template dependent manner in the presence of a polymerase. In some embodiments, polymerizing conditions can be practiced using thermocycling. Additionally, polymerizing conditions can include a plurality of cycles where the steps of annealing, extending, and separating the two nucleic strands are repeated. Typically, the polymerizing conditions include a cation such as MgCl₂. Generally, polymerization of one or more nucleotides to form a nucleic acid strand includes that the nucleotides be linked to each other via phosphodiester bonds, however, alternative linkages may be possible in the context of particular nucleotide analogs.

[0154] As used herein, the term “nucleic acid” refers to natural nucleic acids, artificial nucleic acids, analogs thereof, or combinations thereof, including polynucleotides and oligonucleotides. As used herein, the terms “polynucleotide” and “oligonucleotide” are used interchangeably and mean single-stranded and double-stranded polymers of nucleotides including, but not limited to, 2′-deoxyribonucleotides (nucleic acid) and ribonucleotides (RNA) linked by internucleotide phosphodiester bond linkages, e.g. 3′-5′ and 2′-5′, inverted linkages, e.g. 3′-3′ and 5′-5′, branched structures, or analog nucleic acids. Polynucleotides have associated counter ions, such as H⁺, NH₄⁺, trialkylammonium, Mg²⁺, Na⁺ and the like. An oligonucleotide can be composed entirely of deoxyribonucleotides, entirely of ribonucleotides, or chimeric mixtures thereof. Oligonucleotides can be comprised of nucleobase and sugar analogs. Polynucleotides typically range in size from a few monomeric units, e.g. 5-40, when they are more commonly frequently referred to in the art as oligonucleotides, to several thousands of monomeric nucleotide units, when they are more commonly referred to in the art as polynucleotides; for purposes of this disclosure, however, both oligonucleotides and polynucleotides may be of any suitable length. Unless denoted otherwise, whenever a oligonucleotide sequence is represented, it will be understood that the nucleotides are in 5′ to 3′ order from left to right and that “A” denotes deoxyadenosine, “C” denotes deoxycytidine, “G” denotes deoxyguanosine, “T” denotes thymidine, and “U’ denotes deoxyuridine. Oligonucleotides are said to have “5′ ends” and “3′ ends” because mononucleotides are typically reacted to form oligonucleotides via attachment of the 5′ phosphate or equivalent group of one nucleotide to the 3′ hydroxyl or equivalent group of its neighboring nucleotide, optionally via a phosphodiester or other suitable linkage.

[0155] As defined herein, the term “nick translation” and its variants comprise the translocation of one or more nicks or gaps within a nucleic acid strand to a new position along the nucleic acid strand. In some embodiments, a nick can be formed when a double stranded adapter is ligated to a double stranded amplified target sequence. In one example, the primer can include at its 5′ end, a phosphate group that can ligate to the double stranded amplified target sequence, leaving a nick between the adapter and the amplified target sequence in the complementary strand. In some embodiments, nick translation results in the movement of the nick to the 3′ end of the nucleic acid strand. In some embodiments, moving the nick can include performing a nick translation reaction on the adapter-ligated amplified target sequence. In some embodiments, the nick translation reaction can be a coupled 5′ to 3′ DNA polymerization/degradation reaction, or coupled to a 5′ to 3′ DNA polymerization/strand displacement reaction. In some embodiments, moving the nick can include performing a DNA strand extension reaction at the nick site. In some embodiments, moving the nick can include performing a single strand exonuclease reaction on the nick to form a single stranded portion of the adapter-ligated amplified target sequence and performing a DNA strand extension reaction on the single stranded portion of the adapter-ligated amplified target sequence to a new position. In some embodiments, a nick is formed in the nucleic acid strand opposite the site of ligation.

[0156] As used herein, the term “polymerase chain reaction” (“PCR”) refers to the method of K. B. Mullis U.S. Pat. Nos. 4,683,195 and 4,683,202, hereby incorporated by reference, which describe a method for increasing the concentration of a segment of a polynucleotide of interest in a mixture of genomic DNA without cloning or purification. This process for amplifying the polynucleotide of interest consists of introducing a large excess of two oligonucleotide primers to the DNA mixture containing the desired polynucleotide of interest, followed by a precise sequence of thermal cycling in the presence of a DNA polymerase. The two primers are complementary to their respective strands of the double stranded polynucleotide of interest. To effect amplification, the mixture is denatured and the primers then annealed to their complementary sequences within the polynucleotide of interest molecule. Following annealing, the primers are extended with a polymerase to form a new pair of complementary strands. The steps of denaturation, primer annealing and polymerase extension can be repeated many times (i.e., denaturation, annealing and extension constitute one “cycle”; there can be numerous “cycles”) to obtain a high concentration of an amplified segment of the desired polynucleotide of interest. The length of the amplified segment of the desired polynucleotide of interest (amplicon) is determined by the relative positions of the primers with respect to each other, and therefore, this length is a controllable parameter. By virtue of repeating the process, the method is referred to as the “polymerase chain reaction” (hereinafter “PCR”). Because the desired amplified segments of the polynucleotide of interest become the predominant nucleic acid sequences (in terms of concentration) in the mixture, they are said to be “PCR amplified”. As defined herein, target nucleic acid molecules within a sample including a plurality of target nucleic acid molecules are amplified via PCR. In a modification to the method discussed above, the target nucleic acid molecules can be PCR amplified using a plurality of different primer pairs, in some cases, one or more primer pairs per target nucleic acid molecule of interest, thereby forming a multiplex PCR reaction. Using multiplex PCR, it is possible to simultaneously amplify multiple nucleic acid molecules of interest from a sample to form amplified target sequences. It is also possible to detect the amplified target sequences by several different methodologies (e.g., quantitation with a bioanalyzer or qPCR, hybridization with a labeled probe; incorporation of biotinylated primers followed by avidin-enzyme conjugate detection; incorporation of ³²P-labeled deoxynucleotide triphosphates, such as dCTP or dATP, into the amplified target sequence). Any oligonucleotide sequence can be amplified with the appropriate set of primers, thereby allowing for the amplification of target nucleic acid molecules from genomic DNA, cDNA, formalin-fixed paraffin-embedded DNA, fine-needle biopsies and various other sources. In particular, the amplified target sequences created by the multiplex PCR process as disclosed herein, are themselves efficient substrates for subsequent PCR amplification or various downstream assays or manipulations.

[0157] As defined herein “multiplex amplification” refers to selective and non-random amplification of two or more target sequences within a sample using at least one target-specific primer. In some embodiments, multiplex amplification is performed such that some or all of the target sequences are amplified within a single reaction vessel. The “plexy” or “plex” of a given multiplex amplification refers generally to the number of different target-specific sequences that are amplified during that single multiplex amplification. In some embodiments, the plexy can be about 12-plex, 24-plex, 48-plex, 96-plex, 192-plex, 384-plex, 768-plex, 1536-plex, 3072-plex, 6144-plex or higher.

[0158] In some embodiments, the disclosure relates generally to methods, compositions, systems, apparatuses and kits for avoiding or reducing the formation of amplification artifacts (for example primer-dimers) during selective amplification of one or more target nucleic acid molecules in a population of nucleic acid molecules.

[0159] In some embodiments, the disclosure relates generally to the amplification of multiple target-specific sequences from a population of nucleic acid molecules. In some embodiments, the method comprises hybridizing one or more target-specific primer pairs to the target sequence, extending a first primer of the primer pair, denaturing the extended first primer product from the population of nucleic acid molecules, hybridizing to the extended first primer product the second primer of the primer pair, extending the second primer to form a double stranded product, and digesting the target-specific primer pair away from the double stranded product to generate a plurality of amplified target sequences. In some embodiments, the digesting includes partial digesting of one or more of the target-specific primers from the amplified target sequence. In some embodiments, the amplified target sequences can be ligated to one or more adapters. In some embodiments, the adapters can include one or more DNA barcodes or tagging sequences. In some embodiments, the amplified target sequences once ligated to an adapter can undergo a nick translation reaction and/or further amplification to generate a library of adapter-ligated amplified target sequences.

[0160] In some embodiments, the disclosure relates generally to the preparation and formation of multiple target-specific amplicons. In some embodiments, the method comprises hybridizing one or more target-specific primer pairs to a nucleic acid molecule, extending a first primer of the primer, pair, denaturing the extended first primer from the nucleic acid molecule, hybridizing to the extended first primer product, a second primer of the primer pair and extending the second primer, digesting the target-specific primer pairs to generate a plurality of target-specific amplicons. In some embodiments, adapters can be ligated to the ends of the target-specific amplicons prior to performing a nick translation reaction to generate a plurality of target-specific amplicons suitable for nucleic acid sequencing. In some embodiments, the one or more target specific amplicons can be amplified using bridge amplification or emPCR to generate a plurality of clonal templates suitable for nucleic acid sequencing. In some embodiments, the disclosure generally relates to methods for preparing a target-specific amplicon library, for use in a variety of downstream processes or assays such as nucleic acid sequencing or clonal amplification. In one embodiment, the disclosure relates to a method of performing target-specific multiplex PCR on a nucleic acid sample having a plurality of target sequences using primers having a cleavable group.

[0161] In one embodiment, nucleic acid templates to be sequenced using the Ion Torrent PGM™ or Ion Torrent Proton™ system can be prepared from a population of nucleic acid molecules using the target-specific amplification techniques as outlined herein. Optionally, following target-specific amplification a secondary and/or tertiary amplification process including, but not limited to, a library amplification step and/or a clonal amplification step such as emPCR can be performed.

[0162] In some embodiments, the disclosure relates to a composition comprising a plurality of target-specific primer pairs, each containing a forward primer and a reverse primer having at least one cleavable group located at either a) the 3′ end or the 5′ end, and/or b) at about the central nucleotide position of the target-specific primer, and wherein the target-specific primer pairs can be substantially non-complementary to other primer pairs in the composition. In some embodiments, the composition comprises at least 1000, 2000, 3000, 4000, 6000, 9000, 12000, or more target-specific primer pairs. In some embodiments, the target-specific primer pairs comprise about 15 nucleotides to about 40 nucleotides in length, wherein at least one nucleotide is replaced with a cleavable group. In some embodiments the cleavable group can be a uridine nucleotide. In some embodiments, the target-specific primer sets are designed to amplify an exon, gene, exome or region of the genome associated with a clinical or pathological condition, e.g., the amplification of one or more single nucleotide mutations (SNPs) associated with cancer, such as colon cancer, or the amplification of mutations associated with an inherited disease such as cystic fibrosis. In some embodiments, the target-specific primer pairs when hybridized to a target sequence and amplified as outlined herein can generate a library of adapter-ligated amplified target sequences that are about 100 to about 500 base pairs in length. In some embodiments, no one adapter-ligated amplified target sequence is overexpressed in the library by more than 30% as compared to the remainder of the adapter-ligated amplified target sequences in the library. In some embodiments, the adapter-ligated amplified target sequence library is substantially homogenous with respect to GC content, amplified target sequence length or melting temperature (Tm).

[0163] In some embodiments, the disclosure relates generally to a kit for performing multiplex PCR comprising a plurality of target-specific primers having a cleavable group, a DNA polymerase, an adapter, dATP, dCTP, dGTP and dTTP. In some embodiments, the cleavable group can be a uracil nucleotide. The kit can further include one or more antibodies, nucleic acid barcodes, purification solutions or columns.

[0164] In some embodiments, the disclosure relates to a kit for generating a target-specific amplicon library comprising a plurality of target-specific primers having a cleavable group, a DNA polymerase, an adapter, dATP, dCTP, dGTP, dTTP, and a cleaving reagent. In some embodiments, the kit further comprises one or more antibodies, nucleic acid barcodes, purification solutions or columns.

[0165] In one embodiment, the disclosure generally relates to the amplification of multiple target-specific sequences from a single nucleic acid source or sample. In another embodiment, the disclosure relates generally to the target-specific amplification of two or more target sequences from two or more nucleic acid sources, samples or species. For example, it is envisioned by the disclosure that a single nucleic acid sample can include genomic DNA or fixed-formalin paraffin-embedded (FFPE) DNA. It is also envisioned that the sample can be from a single individual, a collection of nucleic acid samples from genetically related members, multiple nucleic acid samples from genetically unrelated members, multiple nucleic acid samples (matched) from a single individual such as a tumor sample and normal tissue sample, or genetic material from a single source that contains two distinct forms of genetic material such as maternal and fetal DNA obtained from a maternal subject, or the presence of contaminating bacteria DNA in a sample that contains plant or animal DNA. In some embodiments, the source of nucleic acid material can include nucleic acids obtained from a newborn, for example as typically procured as a blood sample for newborn screening.

[0166] The nucleic acid sample can include high molecular weight material such as genomic DNA or cDNA. The sample can include low molecular weight material such as nucleic acid molecules obtained from FFPE or archived DNA samples. In another embodiment, low molecular weight material includes enzymatically or mechanically sheared DNA. The sample can include cell-free circulating DNA such as material obtained from a maternal subject. In some embodiments, the sample can include nucleic acid molecules obtained from biopsies, tumors, scrapings, swabs, blood, mucus, urine, plasma, semen, hair, laser capture micro-dissections, surgical resections, and other clinical or laboratory obtained samples. In some embodiments, the sample can be an epidemiological, agricultural, forensic or pathogenic sample.

[0167] In some embodiments, the sample can include nucleic acid molecules obtained from an animal such as a human or mammalian source. In another embodiment, the sample can include nucleic acid molecules obtained from a non-mammalian source such as a plant, bacteria, virus or fungus. In some embodiments, the source of the nucleic acid molecules may be an archived or extinct sample or species.

[0168] In some embodiments, the disclosure relates generally to the selective amplification of at least one target sequence in a normal or diseased containing tissue, biopsy, core, tumor or other sample. In some embodiments, the disclosure generally relates to the selective amplification of at least one target sequence and the detection and/or identification of mutations in the diseased tissue, core, biopsy or tumor sample. In some embodiments, the diseased or normal sample can include whole genomic DNA, formalin-fixed paraffin-embedded tissue (FFPE), sheared or enzymatically treated DNA. In some embodiments, the disclosure is directed to the selective amplification of at least one target sequence and detection and/or identification of clinically actionable mutations. In some embodiments, the disclosure is directed to the detection and/or identification of mutations associated with drug resistance or drug susceptibility. In some embodiments, the disclosure is generally directed to the identification and/or quantitation of genetic markers associated with organ transplantation or organ rejection.

[0169] In some embodiments, the disclosure relates generally to the selective amplification of at least one target sequence in cell-free circulating DNA. In some embodiments, the selective amplification of at least one target sequence in a sample includes a mixture of different nucleic acid molecules. The selective amplification can optionally be accompanied by detection and/or identification of mutations observed in circulating DNA. In some embodiments, the selective amplification can optionally be accompanied by detection and/or identification of mutations associated with cancer or an inherited disease such as metabolic, neuromuscular, developmental, cardiovascular, autoimmune or other inherited disorder.

[0170] In some embodiments, the target-specific primers and primer pairs are target-specific sequences that can amplify specific regions of a nucleic acid molecule. In some embodiments, the target-specific primers can amplify genomic DNA or cDNA. In some embodiments, the target-specific primers can amplify mammalian DNA, such as human DNA. In some embodiments, the amount of DNA required for selective amplification can be from about 1 ng to 1 microgram. In some embodiments, the amount of DNA required for selective amplification of one or more target sequences can be about 1 ng, about 5 ng or about 10 ng. In some embodiments, the amount of DNA required for selective amplification of target sequence is about 10 ng to about 200 ng.

[0171] In some embodiments, selective amplification of at least one target sequence further includes nucleic acid sequencing of the amplified target sequence. Optionally, the method further includes detecting and/or identifying mutations present in the sample identified through nucleic acid sequencing of the amplified target sequence.

[0172] In some embodiments, target sequences or amplified target sequences are directed to mutations associated with cancer. In some embodiments, the target sequences or amplified target sequences are directed to mutations associated with one or more cancers selected from the group consisting of head and neck cancers, brain cancer, breast cancer, ovarian cancer, cervical cancer, colorectal cancer, endometrial cancer, gallbladder cancer, gastric cancer, bladder cancer, prostate cancer, testicular cancer, liver cancer, lung cancer, kidney (renal cell) cancer, esophageal cancer, pancreatic cancer, thyroid cancer, bile duct cancer, pituitary tumor, wilms tumor, kaposi sarcoma, osteosarcoma, thymus cancer, skin cancer, heart cancer, oral and larynx cancer, leukemia, neuroblastoma and non-hodgkin lymphoma. In one embodiment, the mutations can include substitutions, insertions, inversions, point mutations, deletions, mismatches and translocations. In one embodiment, the mutations can include variation in copy number. In one embodiment, the mutations can include germline or somatic mutations. In one embodiment, the mutations associated with cancer are located in at least one of the genes provided in Tables 1 or 4, or provided in Table 7 of U.S. Application No. 61/598,881 hereby incorporated by reference in its entirety. In some embodiments, the mutations can be any of the genomic coordinates provided in Table 18, or provided in Table 7 of U.S. Application 61/598,881 hereby incorporated by reference in its entirety. In some embodiments, the target sequences directed to mutations associated with cancer can include any one or more of the mutations provided in Table 10. In some embodiments, the mutations can be found within any one or more of the genomic coordinates provided in Table 16 or Table 18.

[0173] In some embodiments, the mutations associated with cancer are located in at least one of the genes selected from ABI1; ABL1; ABL2; ACSL3; ACSL6; AFF1; AFF3; AFF4; AKAP9; AKT1; AKT2; ALK; APC; ARHGAP26; ARHGEF12; ARID1A; ARNT; ASPSCR1; ASXL1; ATF1; ATIC; ATM; AXIN2; BAP1; BARD1; BCAR3; BCL10; BCL11A; BCL11B; BCL2; BCL3; BCL6; BCL7A; BCL9; BCR; BIRC3; BLM; BMPR1A; BRAF; BRCA1; BRCA2; BRD3; BRD4; BRIP1; BUB1B; CARD11; CARS; CASC5; CBFA2T3; CBFB; CBL; CBLB; CBLC; CCDC6; CCNB1IP1; CCND1; CCND2; CD74; CD79A; CDC73; CDH1; CDH11; CDK4; CDK6; CDKN2A; CDKN2B; CDKN2C; CDX2; CEBPA; CEP110; CHEK1; CHEK2; CHIC2; CHN1; CIC; CITTA; CLP1; CLTC; CLTCL1; COL1A1; CREB1; CREB3L2; CREBBP; CRTC1; CRTC3; CSF1R; CTNNB1; CXCR7; CYLD; CYTSB; DCLK3; DDB2; DDIT3; DDR2; DDX10; DDX5; DDX6; DEK; DGKG; DICER1; DNMT3A; EGFR; EIF4A2; ELF4; ELL; ELN; EML4; EP300; EPS15; ERBB2; ERBB4; ERC1; ERCC2; ERCC3; ERCC4; ERCC5; ERG; ETV1; ETV4; ETV5; ETV6; EWSR1; EXT1; EXT2; EZH2; FAM123B; FANCA; FANCC; FANCD2; FANCE; FANCF; FANCG; FAS; FBXW7; FCRL4; FGFR1; FGFR10P; FGFR2; FGFR3; FH; FIP1L1; FLCN; FLI1; FLT1; FLT3; FNBP1; FOXL2; FOXO1; FOXO3; FOXO4; FOXP1; FUS; GAS7; GATA1; GATA2; GATA3; GMPS; GNAQ; GNAS; GOLGA5; GOPC; GPC3; GPHNGPR124; HIP1; HIST1H4I; HLF; HNF1A; HNRNPA2B1; HOOK3; HOXA11; HOXA13; HOXA9; HOXC11; HOXC13; HOXD13; HRAS; HSP90AA1; HSP90AB1; IDH1; IDH2; IKZF1; IL2; IL21R; IL6ST; IRF4; ITGA10; ITGA9; ITK; JAK1; JAK2; JAK3; KDM5A; KDM5C; KDM6A; KDR; KDSR; KIAA1549; KIT; KLF6; KLK2; KRAS; KTN1; LASP1; LCK; LCP1; LHFP; LIFR; LMO2; LPP; MAF; MALT1; MAML2; MAP2K1; MAP2K4; MDM2; MDM4; MECOM; MEN1; MET; MITF; MKL1; MLH1; MLL; MLLT1; MLLT10; MLLT3; MLLT4; MLLT6; MN1; MPL; MRE11A; MSH2; MSH6; MSI2; MSN; MTCP1; MTOR; MUC1; MYB; MYC; MYCL1; MYCN; MYH11; MYH9; MYST3; MYST4; NACA; NBN; NCOA1; NCOA2; NCOA4; NEK9; NF1; NF2; NFE2L2; NFKB2; NIN; NKX2-1; NLRP1; NONO; NOTCH1; NOTCH2; NPM1; NR4A3; NRAS; NSD1; NTRK1; NTRK3; NUMA1; NUP214; NUP98; OLIG2; OMD; PAFAH1B2; PALB2; PATZ1; PAX3; PAX5; PAX7; PAX8; PBRM1; PBX1; PCM1; PDE4DIP; PDGFB; PDGFRA; PDGFRB; PER1; PHOX2B; PICALM; PIK3CA; PIK3R1; PIM1; PLAG1; PML; PMS1; PMS2; POU2AF1; POU5F1; PPARG; PPP2R1A; PRCC; PRDM16; PRF1; PRKAR1A; PRRX1; PSIP1; PTCH1; PTEN; PTPN11; RABEP1; RAD50; RAD51L1; RAF1; RANBP17; RAP1GDS1; RARA; RBI; RBM15; RECQL4; REL; RET; RHOH; RNF213; ROS1; RPN1; RPS6KA2; RUNX1; RUNX1T1; SBDS; SDHAF2; SDHB; SETD2; SFPQ; SFRS3; SH3GL1; SLC45A3; SMAD4; SMARCA4; SMARCB1; SMO; SOCS1; SRC; SRGAP3; SS18; SS18L1; STIL; STK11; STK36; SUFU; SYK; TAF15; TAF1L; TAL1; TAL2; TCF12; TCF3; TCL1A; TET1; TET2; TEX14; TFE3; TFEB; TFG; TFRC; THRAP3; TLX1; TLX3; TMPRSS2; TNFAIP3; TOP1; TP53; TPM3; TPM4; TPR; TRIM27; TRIM33; TRIP11; TSC1; TSC2; TSHR; USP6; VHL; WAS; WHSC1L1; WRN; WT1; XPA; XPC; ZBTB16; ZMYM2; ZNF331; ZNF384; and ZNF521.

[0174] In some embodiments, the mutations associated with cancer are located in at least one of the genes selected from ABL1; AKT1; ALK; APC; ATM; BRAF; CDH1; CDKN2A; CSF1R; CTNNB1; EGFR; ERBB2; ERBB4; FBXW7; FGFR1; FGFR2; FGFR3; FLT3; GNAS; HNF1A; HRAS; IDH1; JAK2; JAK3; KDR; KIT; KRAS; MET; MLH1; MPL; NOTCH1; NPM1; NRAS; PDGFRA; PIK3CA; PTEN; PTPN11; RB1; RET; SMAD4; SMARCB1; SMO; SRC; STK11; TP53; and VHL.

[0175] In some embodiments, the amplified target sequences are directed to any one of more of the genomic coordinates provided in Table 18. In some embodiments, any one or more of the cancer target-specific primers provided in Tables 2, 3 or 17 can be used to amplify a target sequence present in a sample as disclosed by the methods described herein.

[0176] In some embodiments, the cancer target-specific primers from Tables 2, 3 or 17 can include 2, 3, 4, 5, 6, 7, 8, 9, 10, 20, 40, 60, 80, 100, 150, 200, 400, 500, 800, 1000, 2000, 3000, 4000, 5000, 6000, 7000, 8000, 9000, 10,000, 11,000, 12,000, 13,000 or more, target-specific primers. In some embodiments, the amplified target sequences can include any one or more of the amplified target sequences generated at the genomic coordinates (using amplicon ID target-specific primers) provided in Tables 10 or 18. In some embodiments, at least one of the target-specific primers associated with cancer is at least 90% identical to at least one nucleic acid sequence selected from SEQ ID NOs: 1-103,143. In some embodiments, at least one of the target-specific primers associated with cancer is complementary across its entire length to at least one target sequence in a sample. In some embodiments, at least one of the target-specific primers associated with cancer includes a non-cleavable nucleotide at the 3′ end. In some embodiments, the non-cleavable nucleotide at the 3′ end includes the terminal 3′ nucleotide. In one embodiment, the amplified target sequences are directed to individual exons having a mutation associated with cancer. In some embodiments, the disclosure relates generally to the selective amplification of more than one target sequences in a sample and the detection and/or identification of mutations associated with cancer. In some embodiments, the amplified target sequences include two or more nucleotide sequences provided in Table 2. In some embodiments, the amplified target sequences can include any one or more the amplified target sequences generated at the genomic coordinates using the amplicon ID target-specific primers provided in Table 18, or provided in Table 7 of U.S. Application 61/598,881 hereby incorporated by reference in its entirety. In one embodiment, the amplified target sequences include 100, 200, 500, 1000, 2000, 3000, 6000, 8000, 10,000, 12,000, or more amplicons from Tables 1-5, or Tables 6 and 7 of U.S. Application 61/598,881 hereby incorporated by reference in their entireties. In some embodiments, the disclosure relates generally to the detection and optionally, the identification of clinically actionable mutations. As defined herein, the term “clinically actionable mutations” includes mutations that are known or can be associated by one of ordinary skill in the art with, but not limited to, prognosis for the treatment of cancer. In one embodiment, prognosis for the treatment of cancer includes the identification of mutations associated with responsiveness or non-responsiveness of a cancer to a drug, drug combination, or treatment regime. In one embodiment, the disclosure relates generally to the amplification of a plurality of target sequences from a population of nucleic acid molecules linked to, or correlated with, the onset, progression or remission of cancer.

[0177] In some embodiments, target-specific primers are designed using the primer criteria disclosed herein. In some embodiments, target-specific primers are designed using the primer criteria disclosed herein and directed to one or more genes associated with breast cancer. In some embodiments, target-specific primers associated with breast cancer include at least one target-specific primer selected from one or more genes selected from the group consisting of AIM1, AR, ATM, BARD1, BCAS1, BRIP1, CCND1, CCND2, CCNE1, CDH1, CDK3, CDK4, CDKN2A, CDKN2B, CAMK1D, CHEK2, DIRAS3, EGFR, ERBB2, EPHA3, ERBB4, ETV6, GNRH1, KCTD9, CDCA2, EBF2, EMSY, BNIP3L, PNMA2, DPYSL2, ADRA1A, STMN4, TRIM35, PAK1, AQP11, CLSN1A, RSF1, KCTD14, THRSP, NDUFC2, ALG8, KCTD21, USP35, GAB2, DNAH9, ZNF18, MYOCD, STK11, TP53, JAK1, JAK2, MET, PDGFRA, PML, PTEN, RET, TMPRSS2, WNK1, FGFR1, IGF1R, PPP1R12B, PTPRT, GSTM1, IPO8, MYC, ZNF703, MDM1, MDM2, MDM4, MKK4, P14 KB, NCOR1, NBN, PALB2, RAD50, RAD51, PAK1, RSF1, INTS4, ZMIZ1, SEPHS1, FOXM1, SDCCAG1, IGF1R, TSHZ2, RPSK6K1, PPP2R2A, MTAP, MAP2K4, AURKB, BCL2, BUB1, CDCA3, CDCA4, CDC20, CDC45, CHEK1, FOXM1, HDAC2, IGF1R, KIF2C, KIFC1, KRAS, RB1, SMAD4, NCOR1, UTX, MTHDFD1L, RAD51AP1, TTK and UBE2C.

[0178] In some embodiments, the disclosure relates generally to the amplification of target sequences directed to mutations associated with a congenital or inherited disease. In some embodiments, the disclosure can include the amplification of target sequences directed to somatic or germline mutations. In some embodiments, the mutations can be autosomal dominant or autosomal recessive. In one embodiment, the mutations associated with a congenital or inherited disease are located in at least one of the genes or diseases provided in Table 4. In some embodiments, the disclosure relates to the amplification of target sequences in a sample associated with one or more inherited diseases selected from the group consisting of Adenosine Aminohydrolase Deficiency (ADA); Agammaglobulinemia, X-linked, Type 1; Alagille Syndrome; All Hypertrophic and Dilated Cardiomyopathy; Alopecia Universalis Congenita (ALUNC); Alpers Syndrome; Alpha-1-Antitrypsin Deficiency; Alpha-Thalassemia—Southeast Asia; Amyotrophic Lateral Sclerosis—Lou Gehrig's Disease; Androgen Insensitivity Syndrome; Aniridia; Ankylosing spondylitis; APC-Associated Polyposis Conditions; Argininosuccinate Lyase Deficiency; Arrhythmogenic Right Ventricular Dysplasia/Cardiomyopathy; Ataxia with Oculomotor Apraxia Type 2; Ataxia with Vitamin E Deficiency; Ataxia-Telangiectasia; Autoimmune Polyendocrine Syndrome; Beta-Hydroxyisobutyryl CoA Deacylase deficiency (HIBCH deficiency); Biotimidase Deficiency; Blepharophimosis-ptosis-epicanthus inversus; Bloom Syndrome; Brachydactyly; Brachydactyly—Hypertension Syndrome; Brachydactyly Type B1; Branchiootorenal Spectrum Disorders; BRCA1; Campomelic Dysplasia; Canavan; Cerebrotendinous Xanthomatosis; Ceroid-lipofuscinoses-Batton; Charcot-Marie-Tooth Disease Type 2B; Charcot-Marie-Tooth Neuropathy Type 1B; Charcot-Marie-Tooth Neuropathy Type 2A2; Charge Syndrome; Cherubism; Choroideremia; Citrin Deficiency; Citrullinemia Type I; Coffin-Lowry Syndrome; Cohen Syndrome; Collagen 4A5; Common Variable Immune Deficiency; Congenital Adrenal Hyperplasia; Congenital Cataracts, Facial Dysmorphism, and Neuropathy; Congenital Disorder of Glycosylation Type 1a; Congenital Myasthenic Syndromes; Cornelia de Lange Syndrome; Cystic fibrosis; Cystinosis; Darier Disease; Desmin Storage Myopathy; DFNA2 Nonsyndromic Hearing Loss; Diamond-Blackfan Anemia; Double Cortex Syndrome; Duane Syndrome; Duchenne/Becker muscular dystrophy; Dysferlinopathy; Dyskeratosis Congenita; Early-Onset Familial Alzheimer Disease; Early-Onset Primary Dystonia (DYT1); Ehlers Danlos; Ehlers-Danlos Syndrome, Classic Type; Ehlers-Danlos Syndrome, Hypermobility Type; Ehlers-Danlos Syndrome, Kyphoscoliotic Form; Emery-Dreifuss Muscular Dystrophy X linked; Epidermolysis Bullosa Simplex; Fabry Disease; Facioscapulohumeral Muscular Dystrophy; Familial Dysautonomia (HSAN III); Familial Hyperinsulinism (FHI); Familial Hypertrophic Cardiomyopathy; Familial Transthyretin Amyloidosis; Fanconi Anemia; Fragile X; Friedreich Ataxia; FRMD7-Related Infantile Nystagmus; Fryns Syndrome; Galactosemia; Gaucher Disease; Glycine Encephalopathy; Glycogen Storage Disease Type VI; Hemophagocytic Lymphohistiocytosis; Hemophilia A; Hemophilia B; Hepatic Veno-Occlusive Disease with Immunodeficiency; Hereditary Hemorrhagic Telangiectasia; Hereditary Neuropathy with Liability to Pressure Palsies; Hereditary Nonpolyposis Colon Cancer; Hexosaminidase A Deficiency; HFE-Associated Hereditary Hemochromatosis; Holt-Oram Syndrome; Huntington Disease; Hydroxymethylbilane Synthase (HMBS) Deficiency; Hypophosphatasia; Inclusion Body Myopathy 2; Incontinentia Pigmenti; Juvenile Polyposis Syndrome; Kallmann Syndrome; Leber Congenital Amaurosis; Leber congenital amaurosis 10; L1-Fraumeni Syndrome; Limb-Girdle Muscular Dystrophy Type 2A Calpainopathy; LIS1-Associated Lissencephaly; Long QT Syndrome; Lowe Syndrome; Malignant Hyperthermia Susceptibility; Maple Syrup Urine Disease; MAPT-Related Disorders; McKusick-Kaufman Syndrome; MECP2-Rett Syndrome; Menkes; Metachromatic Leukodystrophy; Methylmalonic Acidemia; Mucolipidosis II; Multiple Endocrine Neoplasia Type 1; Multiple Endocrine Neoplasia Type 2; Myotonia Congenita; Myotonic Dystrophy Type 1; Myotonic Dystrophy Type 2; Nail-Patella Syndrome; Nemaline Myopathy; Neurofibromatosis 1; Neurofibromatosis 2; Noonan Syndrome; Ocular Albinism, X-Linked; Oculocutaneous Albinism Type 1; Oculocutaneous Albinism Type 2; Oculopharyngeal Muscular Dystrophy; Optic Atrophy Type 1; Ornithine Transcarbamylase Deficiency; Osteogenesis Imperfecta; Parkinson Disease; Pendred Syndrome; Peroxisome Biogenesis, Zellweger; Phenylketonuria; Polycystic Kidney Disease; Pompe Disease-GSD II; Primary Ciliary Dyskinesia; Retinitis Pigmentosa; Retinoblastoma; Saethre-Chotzen Syndrome; SCN9A-Related Inherited Erythromelalgia; SHOX-Related Haploinsufficiency; Sickle Cell Disease; Smith-Lemli-Opitz Syndrome; Smith-Magenis Syndrome; Sotos Syndrome; Spastic Paraplegia 3A; Spastic Paraplegia 7; Spastic Paraplegia 8; Spastic Paraplegia Type 1; Spastic Paraplegia Type 4; Spinal Muscular Atrophy; Spinocerebellar Ataxia 2; Spinocerebellar Ataxia 3; Spinocerebellar Ataxia 7; Spinocerebellar Ataxia Type 1; Stickler Syndrome; Thanatophoric Dysplasia; Thoracic Aortic Aneurysms and Aortic Dissections; Treacher Collins Syndrome; Trimethylaminuria; Tuberous Sclerosis Complex; Udd Distal Myopathy; Usher Syndrome type 1; Very Long Chain Acyl-Coenzyme A Dehydrogenase Deficiency; von Hippel-Lindau; Waardenburg Syndrome, Type 1; Werner Syndrome; Wilms Tumor; Wilson Disease; Wiskott-Aldrich; X-Linked Adrenal Hypoplasia Congenita; X-Linked Adrenoleukodystrophy; X-Linked Dystonia-Parkinsonism; X-linked Juvenile Retinoschisis; X-linked myotubular Myopathy; X-Linked SCIDS; and Zellweger Syndrome.

[0179] In one embodiment, the mutations associated with a congenital or inherited disease can include substitutions, insertions, inversions, point mutations, deletions, mismatches and translocations. In some embodiments, the mutations associated with an inherited or congenital disease includes copy number variation. In some embodiments, the disclosure relates generally to the selective amplification of at least one target sequence and the detection and/or identification of mutations associated with an inherited disease. In some embodiments, the mutations associated with a congenital or inherited disease can be located in one or more of the genes selected from the group consisting of ABCA4; ABCC8; ABCD1; ACADVL; ACTA2; ACTC; ACTC1; ACVRL1; ADA; AIPL1; AIRE; ALK1; ALPL; AMT; APC; APP; APTX; AR; ARL6; ARSA; ASL; ASPA; ASS; ASS1; ATL; ATM; ATP2A2; ATP7A; ATP7B; ATXN1; ATXN2; ATXN3; ATXN7; BBS6; BCKDHA; BCKDHB; BEST1; BMPR1A; BRCA1; BRCA2; BRIP1; BTD; BTK; C2orf25; CA4; CALR3; CAPN3; CAV3; CCDC39; CCDC40; CDH23; CEP290; CERKL; CFTR; CHAT; CHD7; CHEK2; CHM; CHRNA1; CHRNB1; CHRND; CHRNE; CLCN1; CNBP; CNGB1; COH1; COL11A1; COL11A2; COL1A1; COL1A2; COL2A1; COL3A1; COL4A5; COL5A1; COL5A2; COL7A1; COL9A1; CRB1; CRX; CTDP1; CTNS; CYP21A2; CYP27A1; DAX1; DBT; DCX; DES; DHCR7; DJ1; DKC1; DLD; DMD; DMPK; DNAAF1; DNAAF2; DNAH11; DNAH5; DNA11; DNAI2; DNAL1; DNM12; DOK7; DSC2; DSG2; DSP; DYSF; DYT1; EMD; ENG; EYA1; EYS; F8; F9; FANCA; FANCC; FANCF; FANCG; FANCJ; FANDC2; FBN1; FBXO7; FGFR1; FGFR3; FMO3; FMR1; FOXL2; FRG1; FRMD7; FSCN2; FXN; GAA; GALT; GBA; GBE1; GCSH; GDF5; GJB2; GJB3; GJB6; GLA; GLDC; GNE; GNPTAB; GPC3; GPR143; GUCY2D; HBA1; HBA2; HBB; HD; HERG; HEXA; HFE; HHF; HIBCH; HLA-B27; HMBS; HPLH1; HPRP3; HR; HTNB; HTT; IKBKAP; IKBKG; IL2RG; IMPDH1; ITGB4; JAG1; JPH3; KCNE1; KCNE2; KCNH2; KCNQ1; KCNQ4; KIAA0196; KLHL7; KRAS; KRT14; KRT5; L1CAM; LAMB3; LAMP2; LDB3; LMNA; LMX18; LRAT; LRRK2; MAPT; MC1R; MECP2; MED12; MEN1; MERTK; MFN2; MKKS; MLH1; MMAA; MMAB; MMACHC; MMADHC; MPZ; MSH2; MTM1; MTND5; MTTG; MTTI; MTTK; MTTL1; MTTQ; MUT; MYBPC3; MYH11; MYH6; MYH7; MYL2; MYL3; MYLK2; MYO7A; ND5; ND6; NEMO; NF1; NF2; NIPBL; NR0B1; NR2E3; NRAS; NSD1; OCA2; OCRL; OPA1; OTC; PABPN1; PAFAH1B1; PAH; PARK2; PARK7; PARKIN; PAX3; PAX6; PCDH15; PEX1; PEX2; PEX10; PEX13; PEX14; PEX19; PEX26; PEX3; PEX5; PINK1; PKD1; PKD2; PKD3; PKHD1; PKP2; PLEC1; PLOD1; PMM2; PMP22; POLG; PPT1; PRCD; PRKAG2; PRNP; PROM1; PRPF3; PRPF8; PRPH2; PRPN; PSEN1; PSEN2; PTCH1; PTPN11; RAB7A; RAF1; RAI1; RAPSN; RB1; RDH12; RDS; RECQL3; RET; RHO; ROR2; RP1; RP2; RP9; RPE65; RPGR; RPGRIP1; RPL11; RPL35A; RPS10; RPS17; RPS19; RPS24; RPS26; RPS6KA3; RPS7; RPSL5; RS1; RSPH4A; RSPH9; RYR1; RYR2; SALL4; SCA3; SCN5A; SCN9A; SEMA4A; SERPINA1; SERPING1; SGCD; SH3BP2; SHOX; SIX1; SIX5; SLC25A13; SLC25A4; SLC26A4; SMAD4; SMN1; SNCA; SNRNP200; SOD1; SOS1; SOX9; SP110; SPAST; SPATA7; SPG3A; SPG4; SPG7; TAF1; TBX5; TCOF1; TGFBR1; TGFBR2; TNFRSC13C; TNNC1; TNNI3; TNNT1; TNNT2; TNXB; TOPORS; TOR1A; TP53; TPM1; TRNG; TRNI; TRNK; TRNL1; TRNQ; TSC1; TSC2; TTN; TTPA; TTR; TULP1; TWIST1; TXNDC3; TYR; USH1C; USH1H; USH2A; VCL; VHL; VPS13B; WAS; WRN; WT1; and ZNF9.

[0180] In some embodiments, target-specific primers directed to one or more inherited diseases or congenital disorders can be selected from any one or more of the target-specific primers provided in Table 15. In some embodiments, the target-specific primers from Table 15 can include 2, 3, 4, 5, 6, 7, 8, 9, 10, 20, 40, 60, 80, 100, 150, 200, 400, 500, 800, 1000, 2000, 3000, 4000, 5000, 6000, 7000, 8000, 9000, 10,000, 11,000, 12,000, 13,000 or more target-specific primers. In some embodiments, the amplified target sequences can include any one or more of the amplified target sequences generated at the genomic coordinates (using amplicon ID target-specific primers) provided in Table 16. In some embodiments, at least one of the target-specific primers associated with a congenital disease or disorder is at least 90% identical to at least one nucleic acid sequence selected from SEQ ID NOs: 1-103,143. In some embodiments, at least one of the target-specific primers associated with a congenital disease or disorder is complementary across its entire length to at least one target sequence in a sample. In some embodiments, at least one of the target-specific primers associated with a congenital disease or disorder includes a non-cleavable nucleotide at the 3′ end. In some embodiments, the non-cleavable nucleotide at the 3′ end includes the terminal 3′ nucleotide. In one embodiment, target sequences or resulting amplified target sequences are directed to individual exons having a mutation associated with an inherited disease. In some embodiments, congenital or inherited disease amplified target sequences can include two or more target-specific primers provided in Table 15 (or table 8 of U.S. Application 61/598,881 hereby incorporated by reference in its entirety). In some embodiments, the amplified target sequences can include any one or more of the amplified target sequences generated at the genomic coordinates using the amplicon ID target-specific primers provided in Table 16 (or table 9 of U.S. Application 61/598,881 hereby incorporated by reference in its entirety). In some embodiments, congenital or inherited disease amplified target sequences can include two or more target-specific primers provided in Table 15. In some embodiments, the amplified target sequences can include any one or more of the amplified target sequences generated at the genomic coordinates using the amplicon ID target-specific primers provided in Table 16. In one embodiment, the congenital or inherited disease target-specific primers can include any one or more of the target-specific primers provided in Table 8 of U.S. Application 61/598,881 hereby incorporated by reference in its entirety. In some embodiments, any one or more target-specific primers can be designed using the target-specific primer selection criteria outlined herein. In some embodiments, the disclosure relates generally to the selective amplification of more than one target sequence in a sample and the detection and/or identification of mutations associated with a congenital or inherited disease. In one embodiment, the disclosure relates generally to the amplification of a plurality of target sequences linked to, or correlated with a congenital or inherited disease.

[0181] In some embodiments, the target-specific primers are prepared to amplify regions or fragments of the human genome associated with a congenital or inherited disease. In some embodiments, the target-specific primers can be prepared to amplify regions of the human genome associated with heredity disorders, such as cystic fibrosis, Alagille syndrome, Alpers syndrome, Alpha-Thalassemia, Amyotrophic Lateral Sclerosis, Anklosing spondylitis, Ataxia-Telangiectasia, congenital Myasthenic syndromes, Darier disease, Diamond-Blackfan anemia, early onset familial Alzheimer disease, Ehlers-Danlos syndrome, Epidermolysis Bullosa Simplex, familial Hypertrophic Cardiomyopathy, Fanconi anemia, Glycine Encephalopathy, Hereditary Hemorrhagic Telangiectasia, Huntington Disease, Juvenile Polyposis syndrome, Leber Congenital Amaurosis, Long QT syndrome, Maple Syrup Urine Disease, Marfan syndrome, Mitochondrial Encephalomyopathy, Methylmalonic Acidemia, Multiple Endocrine Neoplasia Type 2, Noonan syndrome, Parkinson disease, Peroxisome Biogenesis, Primary Cilary Dyskineasia, Retinitis Pigmentosa, Stickler syndrome, Thoracic Aortic Aneurysms and Aortic Dissections, Tuberous Sclerosis Complex, Usher syndrome, Werner syndrome, Wilson disease and Zellweger syndrome. In some embodiments, the target-specific primers can be prepared from any one or more of the genes provided in Table 4.

[0182] In some embodiments, the disclosure relates generally to detecting the presence of a target sequence or amplified target sequence associated with one or more newborn disorders. In some embodiments, the disclosure relates generally to detecting the presence of an amplified target sequence obtained by amplifying a sample containing at least one target sequence associated with a newborn disorder with one or more target-specific primers disclosed herein. In some embodiments, the disclosure relates generally to detecting the presence of an amplified target sequence obtained by amplifying a sample containing at least one target sequence associated with a newborn disorder and a target-specific primer designed according to the primer criteria provided herein.

[0183] In some embodiments, the one or more newborn disorders can include 2-methyl-3-hydroxybutyric aciduria (2M3HBA); 2-methylbutyryl-CoA dehydrogenase (2 MBG); 3-methylglutaconic aciduria (3MGA); argininemia (ARG); defects of biopterin cofactor biosynthesis (BIOPT-BS); defects of biopterin cofactor regeneration (BIOPT-REG); carnitine acylcarnitine translocase (CACT); methylmalonic acidemia (CBL-C,D); citrullinemia type II (CIT-II); carnitine palmitoyltransferase I (CPT-Ia); carnitine palmitoyltransferase II (CPT-II); Dienoyl-CoA reductase (De-Red); Glutaric acidemia type II (GA-II); galactose epimerase (GALE); galactokinase (GALK); benign hyperphenylalaninemia (H-PHE); isobutyryl-CoA dehydrogenase (IBG); medium/short chain L-3-hydroxy acyl-CoA dehydrogenase (M/SCHAD); malonic acidemia (MAL); medium chain ketoacyl-CoA thiolase (MCKAT); hypermethioninemia (MET); short chain acyl-CoA dehydrogenase (SCAD); Tyrosinemia type II (TYR-II); tyrosinemia type III (TYR-III); Biotimidase (BIO); Cystic fibrosis (CF); Transferase deficient galactosemia (GALT); Sickle-C disease (HB S/C); Congenital adrenal hyperplasia (CAH); Congenital hypothyroidism (CH); Sickle cell anemia (HB S/S); S-βeta thalassemia (HB S/A); (SCID) Severe Combined Immunodeficiency; 5-oxoprolinuria (pyroglutamic aciduria) (5-OXO); Glucose 6 phosphate dehydrogenase (G6PD); Nonketotic hyperglycinemia (NKH); Carbamoylphosphate synthetase (CPS); Hyperammonemia/ornithinemia/citrullinemia (Ornithine transporter defect) (HHH); Prolinemia (PRO); Ethylmalonic encephalopathy (EMA); Human immunodeficiency virus (HIV); Toxoplasmosis (TOXO); 3-Methylcrotonyl-CoA carboxylase (3-MCC); Carnitine uptake defect (CUD); Long-chain L-3-hydroxyacyl-CoA dehydrogenase (LCHAD); Phenylketonuria/Hyperphenylalaninemia (PKU); Argininosuccinate aciduria (ASA); Glutaric acidemia type 1 (GA-1); Medium-chain acyl-CoA dehydrogenase (MCAD); Propionic acidemia (Propionyl-CoA carboxylase) (PROP); Beta ketothiolase (mitochondrial acetoacetyl-CoA thiolase; short-chain ketoacyl thiolase; T2) (BKT); Homocystinuria (cystathionine beta synthase) (HCY); Multiple carboxylase (Holocarboxylase synthetase) (MCD); Trifunctional protein deficiency (TFP); Methylmalonic academia (Vitamin B12 Disorders) (CBL A,B); 3-Hydroxy 3-methylglutaric aciduria (3-Hydroxy 3-methylglutaryl-CoA lyase) (HMG); Maple syrup urine disease (branched-chain ketoacid dehydrogenase) (MSUD); Tyrosinemia Type 1 (TYR-1); Citrullinemia type I (Argininosuccinate synthetase) (CIT I); Isovaleric acidemia (Isovaleryl-CoA dehydrogenase) (IVA); Methylmalonic Acidemia (methylmalonyl-CoA mutase) (MUT); and very long-chain acyl-CoA dehydrogenase (VLCAD).

[0184] In some embodiments, the disclosure relates generally to target-specific primers for the detection of newborn screening disorders. In some embodiments, target-specific primers for newborn disorders including the disorders provided above can be prepared using the primer criteria disclosed herein. In some embodiments, the disclosure relates generally to detecting a newborn disorder by contacting a sample that may contain one or more target sequences for one or more newborn disorders and amplifying the one or more target sequences in the sample, thereby obtaining at least one amplified target sequence associated with at least one newborn disorder. In some embodiments, a plurality of target-specific primers can be designed to amplify a plurality of target sequences from a sample, thereby providing a means to detect a plurality of newborn disorders optionally, in a single method or procedure. In some embodiments, target-specific primers designed to amplify a plurality of amplified target sequences associated with one or more newborn disorders can be pooled and provided as a newborn screening panel.

[0185] In some embodiments, target sequences or amplified target sequences are directed to nucleic acids obtained from a forensic sample. In one embodiment, forensic samples can include nucleic acids obtained from a crime scene, nucleic acids obtained from a missing persons DNA database, nucleic acids obtained from a laboratory associated with a forensic investigation or include forensic samples obtained by law enforcement agencies, one or more military services or any such personnel. In some embodiments, target sequences can be present in one or more bodily fluids including but not limited to, blood, sputum, plasma, semen, urine and serum. In some embodiments, target sequences can be obtained from hair, skin, tissue samples, autopsy or remains of a victim. In some embodiments, nucleic acids including one or more target sequences can be obtained from a deceased animal or human. In some embodiments, target sequences can include nucleic acids obtained from non-human DNA such a microbial, plant or entomological DNA. In some embodiments, target sequences or amplified target sequences are directed to purposes of human identification. In some embodiments, the disclosure relates generally to methods for identifying a nucleic acid sample from an animal, including a human. In some embodiments, the disclosure relates generally to methods for identifying characteristics of a forensic sample. In some embodiments, the disclosure relates generally to human identification methods using one or more target-specific primers disclosed herein or one or more target-specific primers prepared using the primer criteria outlined herein.

[0186] In one embodiment, a forensic or human identification sample containing at least one target sequence can be amplified using any one or more of the target-specific primers disclosed herein or using the primer criteria outlined herein. In some embodiments, a forensic or human identification sample containing one or more target sequences can be identified by amplifying the at least one or more target sequences with any one or more target-specific primers provided in Tables 13 and 14. Table 13 provides a plurality of target-specific primers, provided as primer pairs, directed to single nucleotide polymorphisms (SNPs) associated with human identification. Table 14 provides a plurality of target-specific primers, provided as primer pairs, directed to short tandem repeats (STRs) associated with human identification. An individual inherits one copy of an STR from each parent, which may or may not have similar repeat sizes. The number of repeats in STR markers can be highly variable among individuals, which makes STRs effective for human identification purposes. In some embodiments, targets-specific primers such as those provided in Table 14, or target-specific primers prepared as disclosed herein, that are directed to the gene amelogenin (AMG) can be used to determine the sex of the individual providing the sample. For example, primers to the amelogenin gene can be prepared using the criteria disclosed herein that are specific, for example, to intron 1. Once a sample is amplified using such target-specific primers, the amplification product from a male sample versus a female sample will generally result in amplification products (amplified target sequences) that differ by in length by several nucleotides and therefore provides a simple method by which to determine the sex of the individual providing the sample.

[0187] In one embodiment, a sample containing one or more target sequences can be amplified using any one or more of the target-specific primers disclosed herein. In another embodiment, amplified target sequences obtained using the methods (and associated compositions, systems, apparatuses and kits) disclosed herein, can be coupled to a downstream process, such as but not limited to, nucleic acid sequencing. For example, once the nucleic acid sequence of an amplified target sequence is known, the nucleic acid sequence can be compared to one or more reference samples such as Hg19 genome. The Hg19 genome is commonly used in the genomics field as a reference genome sample for humans. In some embodiments, a sample suspected of containing one or more SNPs and/or STRs can be identified by amplifying the sample suspected of containing the SNP or STR with any one or more of the target-specific primers provided in Tables 13 and 14. Consequently, the output from the amplification procedure can be optionally analyzed for example by nucleic acid sequencing to determine if the expected amplification product based on the target-specific primers is present in the amplification output. The identification of an appropriate SNP or STR amplification product can in some instances provide additional information regarding the source of the sample or it characteristics (e.g., a male or female sample or a sample of particular ancestral origin).

[0188] It is envisaged that one of ordinary skill in the art can readily prepare one or more target-specific primers using the primer criteria disclosed herein without undue experimentation. It is also envisaged that one of ordinary skill in the art can readily prepare one or more target-specific primers using the criteria disclosed herein, to identify at least one medically relevant polymorphism. In some instances, a medically relevant polymorphism can be used in forensic or human identification purposes. Generally, a medically relevant polymorphism includes a polymorphism that is associated with at least one disease state in multiple populations (e.g., a European Caucasian population). In some embodiments, a medically relevant polymorphism includes any one or more of the polymorphisms outlined below.

| Polymorphism | Caucasian MAF | Chromosome | Gene | Disease Associated with Polymorphism |
|---|---|---|---|---|
| rs1137101 | 0.449 | 1p31 | LEPR | Obesity, Insulin Resistance, Non- |
| | | | | Hodgkin's lymphoma |
| rs486907 | 0.408 | 1q25 | RNASEL | Prostate cancer |
| rs1042031 | 0.208 | 2p24 | APOB | Cardiovascular disease, Dislipidemia |
| rs231775 | 0.379 | 2q33 | CTLA4 | Multiple Sclerosis, Autoimmune |
| | | | | Disease |
| rs5186 | 0.348 | 3q21 | AGTR1 | Metabolic syndrome, Aortic |
| | | | | aneurism, Left-ventricular hypertrophy |
| rs6280 | 0.35 | 3q13.3 | DRD3 | Schizophrenia |
| rs1693482 | 0.477 | 4q21 | ADH1C | Alcohol dependence, Coronary heart |
| | | | | disease |
| rs1799883 | 0.373 | 4q28 | FABP2 | Metabolic syndrome, Type 2 diabetes |
| rs4444903 | 0.392 | 4q25 | EGF | Cancer |
| rs4961 | 0.208 | 4p16.3 | ADD1 | Hypertension, Coronary artery disease |
| rs1042714 | 0.467 | 5q31 | ADRB2 | Obesity, COPD |
| rs351855 | 0.283 | 5q35.1 | FGFR4 | Cancer |
| rs5370 | 0.242 | 6p24 | EDN1 | Asthma, sleep apnea |
| rs6296 | 0.322 | 6q13 | HTR1B | Substance abuse |
| rs2227983 | 0.25 | 7p12.3 | EGFR | Cancer |
| rs213950 | 0.492 | 7q31.2 | CFTR | Cystic fibrosis |
| rs7493 | 0.237 | 7q21.3 | PON2 | Myocardial infarction |
| rs328 | 0.273 | 8p22 | LPL | Left ventricular hypertrophy |
| rs2383206 | 0.475 | 9p21 | | Coronary artery disease |
| rs1800861 | 0.25 | 10q11.2 | RET | Hirschsprung disease, Thyroid cancer |
| rs1801253 | 0.283 | 10q24 | ADRB1 | Insulin Resistance |
| rs2227564 | 0.341 | 10q24 | PLAU | Alzheimer's disease, Asthma |
| rs1799750 | 0.433 | 11q22.3 | MMP1 | Endometriosis, Osteolysis, |
| | | | | Rheumatoid arthritis |
| rs1063856 | 0.342 | 12p13.3 | VWF | Hypertension |
| rs6313 | 0.438 | 13q14 | HTR2A | Psychiatric disorders |
| rs2236225 | 0.396 | 14q24 | MTHFD1 | Neural tube defects |
| rs1800588 | 0.333 | 15q21 | LIPC | Coronary artery disease |
| rs243865 | 0.198 | 16q13 | MMP2 | Cancer |
| rs4673 | 0.342 | 16q24 | CYBA | Coronary artery disease |
| rs708272 | 0.478 | 16q21 | CETP | Coronary artery disease |
| rs1800012 | 0.188 | 17q21.3 | COL1A1 | Osteoporosis |
| rs4291 | 0.354 | 17q23 | ACE | Depression, Alzheimer's disease |
| rs4792311 | 0.331 | 17p11 | ELAC2 | Prostate cancer |
| rs16430 | 0.37 | 18p11.3 | ENOSF1/TYMS | Cancer |
| rs601338 | 0.391 | 19q13.3 | FUT2 | Infection susceptibility |
| rs688 | 0.45 | 19p13.2 | LDLR | Alzheimer's disease, Coronary artery |
| | | | | disease |
| rs7121 | 0.458 | 20q13.3 | GNAS | Obesity, Cancer |
| rs234706 | 0.333 | 21q22 | CBS | Oral cleft defects |
| rs4680 | 0.483 | 22q11.21 | COMT | Schizophrenia, ADHD |
| AMG | 0.5 | Xp22.3 | AMG | Sex Marker |

[0189] In some embodiments, a medically relevant polymorphism can be present within a single exon of the corresponding disease associated gene. In some embodiments, the disclosure relates generally to the selective amplification of at least one target sequence in a sample and the detection and/or identification of a medically relevant polymorphism. In some embodiments, the disclosure relates generally to the selective amplification of at least one target sequence in a sample and the detection and/or identification of a SNP or STR. In some embodiments, amplified target sequences can be generated by amplifying a sample with one or more target-specific primers of Tables 13 or 14. In some embodiments, the amplified target sequences can include any one or more of the amplified target sequences generated at the genomic coordinates provided in the polymorphism table above. In one embodiment, an amplified target sequence can be prepared using one or more of the target-specific primers from Tables 13 or 14. In some embodiments, any one or more target-specific primers corresponding to SEQ ID NOs: 50354-50451 can be used to selectively amplify at least one target sequence present in a sample. In some embodiments, at least one target-specific primer selected from SEQ ID NOs: 50354-50451 can be used to amplify a target sequence from a sample for the purposes of forensic or human identification.

[0190] In some embodiments, target-specific primers directed to human identification can be selected from any one or more of the target-specific primers provided in Tables 13 or 14. In some embodiments, the target-specific primers from Tables 13 or 14 can include 1, 2, 3, 4, 5, 6, 7, 8, 9, 10, 15, 20, 22, 25, 27, 30, 35, 38, 40, 42, 45 or more target-specific primers. In some embodiments, at least one of the target-specific primers associated with human identification is at least 90% identical to at least one of the target-specific primers provided in Tables 13 or 14. In some embodiments, at least one of the target-specific primers associated with human identification is complementary across its entire length to at least one target sequence in a sample. In some embodiments, at least one of the target-specific primers associated with human identification includes a non-cleavable nucleotide at the 3′ end. In some embodiments, the non-cleavable nucleotide at the 3′ end includes the terminal 3′ nucleotide.

[0191] In some embodiments, the disclosure relates generally to methods (and associated compositions, systems, apparatuses and kits) for reducing the formation of amplification artifacts in a multiplex PCR. In some embodiments, primer-dimers or non-specific amplification products are obtained in lower number or yield as compared to standard multiplex PCR of the prior art. In some embodiments, the reduction in amplification artifacts is in part, governed by the use of target-specific primer pairs in the multiplex PCR reaction. In one embodiment, the number of target-specific primer pairs in the multiplex PCR reaction can be greater than 1000, 3000, 5000, 10000, 12000, or more. In some embodiments, the disclosure relates generally to methods (and associated compositions, systems, apparatuses and kits) for performing multiplex PCR using target-specific primers that contain a cleavable group. In one embodiment, target-specific primers containing a cleavable group can include one or more cleavable moieties per primer of each primer pair. In some embodiments, a target-specific primer containing a cleavable group includes an nucleotide neither normally present in a non-diseased sample nor native to the population of nucleic acids undergoing multiplex PCR. For example, a target-specific primer can include one or more non-native nucleic acid molecules such as, but not limited to thymine dimers, 8-oxo-2′-deoxyguanosine, inosine, deoxyuridine, bromodeoxyuridine, apurinic nucleotides, and the like.

[0192] In some embodiments, the disclosed methods (and associated compositions, systems, etc.) involve performing a primary amplification of target sequences from a population of nucleic acids, optionally using target-specific primers. In some embodiments, the disclosed methods involve amplifying target sequences using target-specific forward and reverse primer pairs. The target-specific forward and reverse primer pairs can optionally include one or more intron-specific and/or exon specific forward and reverse primer pairs. In some embodiments, each primer pair is directed to a single or discrete exon. In some embodiments, the disclosed methods involve amplifying target sequences using exon-specific forward and reverse primer pairs containing at least one cleavable group. In some embodiments, the target-specific forward and reverse primer pairs contain a uracil nucleotide as the one or more cleavable groups. In one embodiment, a target-specific primer pair can include a uracil nucleotide in each of the forward and reverse primers of each primer pair. In one embodiment, a target-specific forward or reverse primer contains one, two, three or more uracil nucleotides. In some embodiments, the disclosed methods involve amplifying at least 10, 50, 100, 200, 500, 1000, 2000, 3000, 5000, 6000, 8000, 10000, 12000 or more, target sequences from a population of nucleic acids having a plurality of target sequences using target-specific forward and reverse primer pairs containing at least two uracil nucleotides.

[0193] In some embodiments, target-specific primers (including but not limited to intron-specific and exon-specific primers, which can be forward and/or reverse primers) can be designed de novo using algorithms that generate oligonucleotide sequences according to specified design criteria. For example, the primers may be selected according to any one or more of criteria specified herein. In some embodiments, one or more of the target-specific primers are selected or designed to satisfy any one or more of the following criteria: (1) inclusion of two or more modified nucleotides within the primer sequence, at least one of which is included near or at the termini of the primer and at least one of which is included at, or about the center nucleotide position of the primer sequence; (2) primer length of about 15 to about 40 bases in length; (3) Tₘ of from about 60° C. to about 70° C.; (4) low cross-reactivity with non-target sequences present in the target genome or sample of interest; (5) for each primer in a given reaction, the sequence of at least the first four nucleotides (going from 3′ to 5′ direction) are not complementary to any sequence within any other primer present in the same reaction; and (6) no amplicon includes any consecutive stretch of at least 5 nucleotides that is complementary to any sequence within any other amplicon.

[0194] In some embodiments, the target-specific primers include one or more primer pairs designed to amplify target sequences from the sample that are about 100 base pairs to about 500 base pairs in length. In some embodiments, the target-specific primers include a plurality of primer pairs designed to amplify target sequences, where the amplified target sequences are predicted to vary in length from each other by no more than 50%, typically no more than 25%, even more typically by no more than 10%, or 5%. For example, if one target-specific primer pair is selected or predicted to amplify a product that is 100 nucleotides in length, then other primer pairs are selected or predicted to amplify products that are between 50-150 nucleotides in length, typically between 75-125 nucleotides in length, even more typically between 90-110 nucleotides, or 95-105 nucleotides, or 99-101 nucleotides in length.

[0195] In some embodiments, at least one primer pair in the amplification reaction is not designed de novo according to any predetermined selection criteria. For example, at least one primer pair can be an oligonucleotide sequence selected or generated at random, or previously selected or generated for other applications. In one exemplary embodiment, the amplification reaction can include at least one primer pair selected from the TaqMan® probe reagents (Roche Molecular Systems). The TaqMan® reagents include labeled probes and can be useful, inter alia, for measuring the amount of target sequence present in the sample, optionally in real time. Some examples of TaqMan technology are disclosed in U.S. Pat. Nos. 5,210,015, 5,487,972, 5,804,375, 6,214,979, 7,141,377 and 7,445,900, hereby incorporated by reference in their entireties.

[0196] In some embodiments, at least one primer within the amplification reaction can be labeled, for example with an optically detectable label, to facilitate a particular application of interest. For example, labeling may facilitate quantification of target template and/or amplification product, isolation of the target template and/or amplification, product, and the like.

[0197] In some embodiments, one or more of the primers within the amplification reaction can be useful in genotyping of a nucleic acid sample.

[0198] In some embodiments, the target-specific primers can be provided as a set of target-specific primer pairs in a single amplification vessel. In some embodiments, the target-specific primers can be provided in one or more aliquots of target-specific primer pairs that can be pooled prior to performing the multiplex PCR reaction in a single amplification vessel or reaction chamber. In one embodiment, the target-specific primers can be provided as a pool of target-specific forward primers and a separate pool of target-specific reverse primers. In another embodiment, target-specific primer pairs can be pooled into subsets such as non-overlapping target-specific primer pairs. In some embodiments, the pool of target-specific primer pairs can be provided in a single reaction chamber or microwell, for example on a PCR plate to perform multiplex PCR using a thermocycler. In some embodiments, the target-specific forward and reverse primer pairs can be substantially complementary to the target sequences.

[0199] In some embodiments, the method of performing multiplex PCR amplification includes contacting a plurality of target-specific primer pairs having a forward and reverse primer, with a population of target sequences to form a plurality of template/primer duplexes; adding a DNA polymerase and a mixture of dNTPs to the plurality of template/primer duplexes for sufficient time and at sufficient temperature to extend either (or both) the forward or reverse primer in each target-specific primer pair via template-dependent synthesis thereby generating a plurality of extended primer product/template duplexes; denaturing the extended primer product/template duplexes; annealing to the extended primer product the complementary primer from the target-specific primer pair; and extending the annealed primer in the presence of a DNA polymerase and dNTPs to form a plurality of target-specific double-stranded nucleic acid molecules. In some embodiments, the steps of the amplification PCR method can be performed in any order. In some instances, the methods disclosed herein can be further optimized to remove one or more steps and still obtain sufficient amplified target sequences to be used in a variety of downstream processes. For example, the number of purification or clean-up steps can be modified to include more or less steps than disclose herein, providing the amplified target sequences are generated in sufficient yield.

[0200] In some embodiments, the target-specific primer pairs do not contain a common extension (tail) at the 3′ or 5′ end of the primer. In another embodiment, the target-specific primers do not contain a Tag or universal sequence. In some embodiments, the target-specific primer pairs are designed to eliminate or reduce interactions that promote the formation of non-specific amplification.

[0201] In one embodiment, the target-specific primer pairs comprise at least one cleavable group per forward and reverse target-specific primer. In one embodiment, the cleavable group can be a uracil nucleotide. In one embodiment, the target-specific primer pairs are partially or substantially removed after generation of the amplified target sequence. In one embodiment, the removal can include enzymatic, heat or alkali treatment of the target-specific primer pairs as part of the amplified target sequence. In some embodiments, the amplified target sequences are further treated to form blunt-ended amplification products, referred to herein as, blunt-ended amplified target sequences.

[0202] In some embodiments, any one or more of the target-specific primers disclosed in the methods, compositions, kits, systems and apparatuses may be designed using the following primer selection criteria.

[0203] There is a need for new methods, computer readable media, and systems for identifying or designing products or kits that use PCR to enrich one or more genomic regions of interest (which may be, for example, cumulative regions of 1 kb to 1 Mb) for subsequent sequencing.

[0204] There is a need for new methods, computer readable media, and systems for identifying or designing products or kits including primers or assays that maximize coverage of one or more genomic regions or targets of interest while minimizing one or more of off-target hybridization, a number of primers, and a number of primer pools.

[0205] In accordance with the teachings and principles embodied in this application, new methods, computer readable media, and systems are provided that identify or design products or kits that use PCR to enrich one or more genomic regions or targets of interest for subsequent sequencing and/or that include primers or assays that maximize coverage of one or more genomic regions or targets of interest while minimizing one or more of off-target hybridization, a number of primers, and a number of primer pools.

[0206] FIG. 17 illustrates a system for designing primers or assays according to an exemplary embodiment. The system includes a data receiving module 1701, a primer providing module 1702, a scoring (in silico PCR) module 1703, a scoring (SNP overlap) module 1704, a filtering module 1705, a pooling module 1706, and a reporting module 1707. The system also includes a database 1708, which may include data regarding genetic annotations, SNP-related data, or other genetic data such as identification of a repeat, chromosome, position, direction, etc., for example, or any other type of information that could be related to a genomic region or target of interest, and a database 1709, which may include primer-related data such as a melting temperature (Tm), a chromosome, a position, a direction, and SNP overlap information, etc., for example, or any other type of information that could be related to primers. The system may be implemented in or using one or more computers and/or servers using one or more software components, which may not be accessible or released to customers who may be ordering custom primers or assays that may be designed using such a system. Customers may order custom primers or assays at least in part through a web-accessible data portal by providing one or more genomic regions or targets of interest in any suitable format. In an exemplary embodiment, there is provided a method performing steps including the general steps associated with modules 1701-1707 and databases 1708 and 1709 (e.g., receiving data, providing primers, scoring primers and/or amplicons, filtering primers and/or amplicons, pooling primers and/or amplicons, reporting results, and querying databases).

[0207] FIG. 18 illustrates a system for designing primers or assays according to an exemplary embodiment. The system includes a target generator module, which may generate one or more coordinate-based genomic regions or targets of interest and which may query and/or receive information from an annotation database (which may include data regarding genetic annotations, SNP-related data, or other genetic data such as identification of a repeat, chromosome, position, direction, etc., for example, as well as information regarding primers or any other type of information that could be related to a genomic region or target of interest); a designing module, which may design one or more primers or assays and determine and/or apply various scoring and filtering procedures for the primers or assays and which may perform various quality control procedures; a loader module, which may load the primers or assays and/or related information (such as quality control results, for example) to a primer database (which may be in communication with or comprised within the annotation database and which may include primer-related data such as a melting temperature (Tm), a chromosome, a position, a direction, and SNP overlap information, etc., for example, or any other type of information that could be related to primers); a SNP overlap/repeat overlap module; a driver module; a tiler module, which may determine a subset of amplicons or tiles maximizing a coverage of a genomic region or target of interest; a pooler module, which may determine a pooling of the amplicons or tiles into one or more pools of amplicons; and a report generator module. The system may be implemented in or using one or more computers and/or servers using one or more software components, which may not be accessible or released to customers who may be ordering custom primers or assays that may be designed using such a system. Customers may order custom primers or assays at least in part through a web-accessible data portal by providing one or more genomic regions or targets of interest in any suitable format. In an exemplary embodiment, there is provided a method performing steps including the general steps associated with these modules and databases.

[0208] FIG. 19 illustrates an amplicon sequence including an insert sequence surrounded by a pair of primers designed according to an exemplary embodiment. The amplicon may include a forward primer and a reverse primer surrounding the insert sequence. The two primers may together form an assay, which may be customized and ordered. The primer component of an amplicon may be a copy of a spiked-in primer, rather than the underlying sample, and one or more inserts may be selected to cover the target.

[0209] FIG. 20 illustrates PCR amplification of an amplicon sequence (which may be referred to as “tile” herein) including an insert surrounded by a pair of primers designed according to an exemplary embodiment. Shown are denaturation, annealing, and elongation steps ultimately leading to exponential growth of the amplicon.

[0210] FIG. 21 (Part 1-Part III) illustrates a set of candidate amplicons for a given target region, each including an insert surrounded by a pair of primers, for tiling and pooling according to an exemplary embodiment. The dotted lines indicate the boundaries of a target region (on chromosome 19 in this example). There are 112 candidate amplicons for covering the target region in this example, but the number of candidate amplicons could of course be different, including much lower or much higher, and may be selected by taking into account computational resources, the length of the target region, and any other relevant factor.

[0211] According to various exemplary embodiments, there are provided methods for designing primers using a design pipeline that allows design of oligonucleotide primers across genomic areas of interest while incorporating various design criteria and considerations including amplicon size, primer composition, potential off-target hybridization, and SNP overlap of the primers. In an embodiment, the design pipeline includes several functional modules that may be sequentially executed as discussed next.

[0212] First, in an embodiment, a sequence retrieval module may be configured to retrieve sequences based on instructions of an operator regarding a final product desired by a customer. The operator may request a design of primer pairs for genomic regions which may be specified by chromosome and genome coordinates or by a gene symbol designator. In the latter case, the sequence retrieval module may retrieve the sequence based on the exon coordinates. The operator may also specify whether to include a 5′ UTR sequence (untranslated sequence).

[0213] Second, in an embodiment, an assay design module may be configured to design primer pairs using a design engine, which may be a public tool such as Primer3 or another primer design software that can generate primer pairs across the entire sequence regions retrieved by the sequence retrieval module, for example. The primers pairs may be selected to tile densely across the nucleotide sequence. The primer design may be based on various parameters, including: (1) the melting temperature of the primer (which may be calculated using the nearest neighbor algorithm set forth in John SantaLucia, Jr., “A unified view of polymer, dumbbell, and oligonucleotide DNA nearest-neighbor thermodynamics,” Proc. Natl. Acad. Sci. USA, vol. 95, 1460-1465 (1998), the contents of which is incorporated by reference herein in its entirety), (2) the primer composition (e.g., nucleotide composition such as GC content may be determined and filtered and penalized by the software, as may be primer hairpin formation, composition of the GC content in the 3′ end of primer, and specific parameters that may be evaluated are stretches of homopolymeric nucleotides, hairpin formation, GC content, and amplicon size), (3) scores of forward primer, reverse primer and amplicon (the scores may be added up to obtain a probe set score, and the score may reflect how close the amplicon confirms with the intended parameters), and (4) conversion of some of the T's to U's (T's may be placed such that the predicted Tm of the T delimited fragments of a primer have a minimum average Tm.)

[0214] Third, in an embodiment, a primer mapping module may be configured to use a mapping software (e.g., e-PCR(NCBI), see Rotmistrovsky et al., “A web server for performing electronic PCR,” Nucleic Acids Research, vol. 32, W108-W112 (2004), and Schuler, “Sequence Mapping by Electronic PCR,” Genome Research, vol. 7, 541-550 (1997), which are both incorporated by reference herein in their entirety, or other similar software) to map primers to a genome. The primers mapping may be scored using a mismatch matrix. In an embodiment, a perfect match may receive a score of 0, and mismatched primers may receive a score of greater than 0. The mismatch matrix takes the position of the mismatch and the nature of the mismatch into account. For example, the mismatch matrix may assign a mismatch score to every combination of a particular motif (e.g., AA, AC, AG, CA, CC, CT, GA, GG, GT, TC, TG, TT, A-, C-, G-, T-, -A, -C, -G, and -T, where ‘-’ denotes an ambiguous base or gap) with a particular position (e.g., base at 3′ end, second base from 3′ end, third base from 3′ end, third base from 5′ end, second base from 5′ end, base at 5′ end, and positions therebetween), which may be derived empirically and may be selected to reflect that mismatches closer to the 3′ end tend to weaker PCR reactions more than mismatches closer to the 5′ end and may therefore be generally larger. The mismatch scores for motifs with an ambiguous base or gap may be assigned an average of scores of other motifs consistent therewith (e.g., A- may be assigned an average of the scores of AA, AC, and AG). Based on the number of hits with a certain score threshold, an amplicon cost may be calculated.

[0215] Fourth, in an embodiment, a SNP module may be configured to determine underlying SNPs and repeat regions: SNPs may be mapped to the primers and based on the distance of a SNP from the 3′ end, primers may be filtered as potential candidates. Similarly, if a primer overlaps to a certain percentage with a repeat region, the primer might be filtered.

[0216] Fifth, in an embodiment, a tiler module may be configured to use a function based on the amplicon cost (see primer mapping) and the number of primers necessary to select a set of primers covering the target while ensuring that selection of tiling primers for a target is independent of other targets that may be in a customer's request so that the same set of primers for a target will be selected whether the customer requested only that target or additional targets and whether amplicons are to help cover on that target or additional targets.

[0217] Sixth, in an embodiment, a pooler module may be configured to use a pooling algorithm that prevents amplicon overlaps, and ensures that the average number of primers in a pool does not deviate by more than a preset value.

[0218] FIG. 22 illustrates a method according to an exemplary embodiment. In step 2201, a module or other hardware and/or software component receives one or more genomic regions or sequences of interest. In step 2202, a module or other hardware and/or software component determines one or more target sequences for the received one or more genomic regions or sequences of interest. In step 2203, a module or other hardware and/or software component provides one or more primer pairs for each of the determined one or more target sequences. In step 2204, a module or other hardware and/or software component scores the one or more primer pairs, wherein the scoring comprises a penalty based on the performance of in silico PCR for the one or more primer pairs, and wherein the scoring further comprises an analysis of SNP overlap for the one or more primer pairs. In step 2205, a module or other hardware and/or software component filters the one or more primer pairs based on a plurality of factors, including at least the penalty and the analysis of SNP overlap, to identify a filtered set of primer pairs corresponding to one or more candidate amplicon sequences for the one or more genomic regions or sequences of interest.

[0219] According to an exemplary embodiment, there is provided a method, comprising: (1) receiving one or more genomic regions or sequences of interest; (2) determining one or more target sequences for the received one or more genomic regions or sequences of interest; (3) providing one or more primer pairs for each of the determined one or more target sequences; (4) scoring the one or more primer pairs, wherein the scoring comprises a penalty based on the performance of in silico PCR for the one or more primer pairs, and wherein the scoring further comprises an analysis of SNP overlap for the one or more primer pairs; and (5) filtering the one or more primer pairs based on a plurality of factors, including at least the penalty and the analysis of SNP overlap, to identify a filtered set of primer pairs corresponding to one or more candidate amplicon sequences for the one or more genomic regions or sequences of interest.

[0220] In various embodiments, receiving one or more genomic regions or sequences of interest may comprise receiving a list of one or more gene symbols or identifiers. Receiving one or more genomic regions or sequences of interest may comprise receiving a list of one or more genomic coordinates or other genomic location identifiers. Receiving one or more genomic regions or sequences of interest may comprise receiving a list of one or more BED coordinates.

[0221] In various embodiments, determining one or more target sequences may comprise determining one or more exons or coding regions that correspond to each of the one or more genomic regions or sequences of interest. Determining one or more target sequences may comprise querying an amplicon or other genomic sequence database for a presence therein of the one or more genomic regions or sequences of interest and information related thereto.

[0222] In various embodiments, providing one or more primer pairs may comprise designing one or more primer pairs. Providing one or more primer pairs may comprise querying an amplicon or other genomic sequence database for a presence therein of the one or more genomic regions or sequences of interest or of the one or more primer pairs and information related thereto.

[0223] In various embodiments, the performance of in silico PCR may comprise performing in silico PCR against a reference or previously sequenced genome of any species. The performance of in silico PCR may comprise performing in silico PCR against an hg19 reference genome. The performance of in silico PCR against a reference genome may comprise determining a number of off-target hybridizations for each of the one or more primer pairs. The performance of in silico PCR against a reference genome may comprise determining a worst case attribute or score for each of the one or more primer pairs. The performance of in silico PCR may comprise determining one or more genomic coordinates for each of the one or more primer pairs. The performance of in silico PCR may comprise determining one or more predicted amplicon sequences for each of the one or more primer pairs. The performance of in silico PCR may comprise querying an amplicon or other genomic sequence database for a presence therein of the one or more genomic regions or sequences of interest or of in silico PCR results for the one or more primer pairs and information related thereto.

[0224] In various embodiments, the analysis of SNP overlap may comprise determining a SNP class for each of the one or more primer pairs. The analysis of SNP overlap may comprise querying an amplicon or other genomic sequence database for a presence therein of the one or more genomic regions or sequences of interest or of SNP overlap results for the one or more primer pairs and information related thereto.

[0225] In various embodiments, the plurality of factors may include one or more of an indication of forward SNP overlap, an indication of a reverse SNP overlap, an indication of a frequency of forward repeats, an indication of a frequency of reverse repeats, an indication of an off-target hybridization of each of the one or more primer pairs, and a composition of each of the one or more primer pairs. The plurality of factors may include one or more of a forward triplet factor, a reverse triplet factor, a forward A run factor, a reverse A run factor, a forward C run factor, a reverse C run factor, a forward G run factor, a reverse G run factor, a forward T run factor, and a reverse T run factor. The plurality of factors may include one or more of an indication of an extent to which each of the one or more primer pairs includes one or more homopolymers. The plurality of factors may include an indication of an extent to which each of the one or more primer pairs includes one or more repeating sequences. The plurality of factors may include a length of the one or more primer pairs, wherein a score for the one or more primer pairs decreases as the length gets shorter than a minimal length threshold and decreases as the length gets longer than a maximal length threshold. The plurality of factors may include a maximal number of a given base in the one or more primer pairs, wherein a score for the one or more primer pairs decreases as the number of instances of the given base exceeds a maximal base inclusion threshold. The plurality of factors may include a maximal number of contiguous instances of a given base, wherein a score for the one or more primer pairs decreases as the number of contiguous instances of the given base exceeds a maximal contiguous base inclusion threshold.

[0226] The plurality of factors may include a maximal percentage of a set of two given bases, wherein a score for the one or more primer pairs decreases as the percentage of the two given bases increases. The plurality of factors may include a maximal percentage of G and C bases, wherein a score for the one or more primer pairs decreases as the percentage of G and C bases increases. The plurality of factors may include a deviation of a predicted melting temperature for the one or more primer pairs relative to minimal and maximal melting temperature thresholds. The plurality of factors may include a number of primer-dimer inclusions for the one or more primer pairs. The plurality of factors may include a level of local complementarity for the one or more primer pairs. The plurality of factors may include an indication of a complexity level of each of the one or more primer pairs. The plurality of factors may include an indication of SNP overlap of each of the one or more primer

[0227] In various embodiments, the method may comprise selecting a subset of the one or more candidate amplicon sequences that substantially covers the one or more genomic regions or sequences of interest while minimizing a cost function associated with the candidate amplicon sequences. Minimizing the cost function may include generating an overlap graph comprising a source vertex, one or more amplicon vertices, and a sink vertex.

[0228] In various embodiments, the method may comprise assembling the primer pairs in the filtered set of primer pairs that correspond with the selected subset of the one or more candidate amplicon sequences into a plurality of separate pools of primer pairs. Assembling the primer pairs may include limiting an inclusion of one or more primer pairs in the filtered set of primer pairs that correspond with the selected subset of the one or more candidate amplicon sequences into a given pool based at least on a minimal threshold distance between amplicon sequences in the given pool. The minimal threshold distance may be between about 5 base pairs and about 100 base pairs, or between about 15 base pairs and about 90 base pairs, or between about 25 base pairs and about 75 base pairs, or between about 40 base pairs and about 60 base pairs, for example. In some embodiments, the minimum threshold distance between amplicons may include any integer, including a negative one. For example, a value of 0 can mean that any two amplicons are allowed to “touch,” and a value of −8 can mean that any two amplicons can overlap by up to 8 bases.

[0229] In various embodiments, assembling the filtered set of primer pairs into a plurality of separate pools of primer pairs may comprise splitting the primer pairs between tubes so as to prevent amplicon overlap within any given tube. Assembling the primer pairs may include limiting an inclusion of one or more primer pairs in the filtered set of primer pairs that correspond with the selected subset of the one or more candidate amplicon sequences into a given pool based at least on a pre-determined amplicon capacity of the given pool. Assembling the primer pairs may include limiting an inclusion of one or more primer pairs in the filtered set of primer pairs that correspond with the selected subset of the one or more candidate amplicon sequences into a given pool based at least on an inequality relating a size of the given pool with a product between a balance factor and a maximum value of the sizes of the separate pools.

[0230] In various embodiments, the method may comprise providing a report reporting on any one or more element of information of data used or generated by any one or more of the receiving, providing, scoring, filtering, selecting, and assembling steps.

[0231] According to an exemplary embodiment, there is provided a non-transitory machine-readable storage medium comprising instructions which, when executed by a processor, cause the processor to perform a method comprising: (1) receiving one or more genomic regions or sequences of interest; (2) determining one or more target sequences for the received one or more genomic regions or sequences of interest; (3) providing one or more primer pairs for each of the determined one or more target sequences; (4) scoring the one or more primer pairs, wherein the scoring comprises a penalty based on the performance of in silico PCR for the one or more primer pairs, and wherein the scoring further comprises an analysis of SNP overlap for the one or more primer pairs; and (5) filtering the one or more primer pairs based on a plurality of factors, including at least the penalty and the analysis of SNP overlap, to identify a filtered set of primer pairs corresponding to one or more candidate amplicon sequences for the one or more genomic regions or sequences of interest.

[0232] In various embodiments, such a non-transitory machine-readable storage medium may comprise instructions which, when executed by a processor, cause the processor to perform a method further comprising: (6) selecting a subset of the one or more candidate amplicon sequences that substantially covers the one or more genomic regions or sequences of interest while minimizing a cost function associated with the candidate amplicon sequences; and (7) assembling the primer pairs in the filtered set of primer pairs that correspond with the selected subset of the one or more candidate amplicon sequences into a plurality of separate pools of primer pairs.

[0233] According to an exemplary embodiment, there is provided a system, comprising: (1) a machine-readable memory; and (2) a processor configured to execute machine-readable instructions, which, when executed by the processor, cause the system to perform steps including: (a) receiving one or more genomic regions or sequences of interest; (b) determining one or more target sequences for the received one or more genomic regions or sequences of interest; (c) providing one or more primer pairs for each of the determined one or more target sequences; (d) scoring the one or more primer pairs, wherein the scoring comprises a penalty based on the performance of in silico PCR for the one or more primer pairs, and wherein the scoring further comprises an analysis of SNP overlap for the one or more primer pairs; and (e) filtering the one or more primer pairs based on a plurality of factors, including at least the penalty and the analysis of SNP overlap, to identify a filtered set of primer pairs corresponding to one or more candidate amplicon sequences for the one or more genomic regions or sequences of interest.

[0234] In various embodiments, the processor of such a system may further be configured to execute machine-readable instructions, which, when executed by the processor, cause the system to perform steps including: (f) selecting a subset of the one or more candidate amplicon sequences that substantially covers the one or more genomic regions or sequences of interest while minimizing a cost function associated with the candidate amplicon sequences; and (g) assembling the primer pairs in the filtered set of primer pairs that correspond with the selected subset of the one or more candidate amplicon sequences into a plurality of separate pools of primer pairs.

[0235] According to various exemplary embodiment, various parameters or criteria may be used to select primers and/or amplicons.

[0236] In an embodiment, a forward SNP score may be used and may be given a numerical attribute/score of 1 if there is no SNP within a given length of base pairs of the forward primer (such as 4, for example) or a numerical attribute of 0 if there is one or more SNPs within a length of 4 base pairs. In one embodiment, the forward SNP score may be given a numerical attribute/score of 1 if there is no SNP within a given length of base pairs from the 3′ end of the forward primer. In some embodiments, a SNP can include one or more SNPs found on UCSC's Genome Browser Web Page including but not limited to, the SNP reference table referred to as “dbSNP132 common”. An attribute/score of 1 may be a minimal attribute/score such that failure to achieve that attribute/score would result in disqualification. The base length threshold for the attribute/score determination could be lower or higher than 4, and could be 5, 6, 7, 8, 9, 10, 15, 20, for example, or more generally any positive integer larger than 4. The attribute/score could be other than binary and could be a more complex linear or non-linear function of the number of SNPs within the given length of base pairs.

[0237] In an embodiment, a reverse SNP score may be used and may be given a numerical attribute/score of 1 if there is no SNP within a given length of base pairs of the reverse primer (such as 4, for example) or a numerical attribute of 0 if there is one or more SNPs within a length of 4 base pairs. In one embodiment, the reverse SNP score may be given a numerical attribute/score of 1 if there is no SNP within a given length of base pairs from the 3′ end of the reverse primer. In some embodiments, a SNP can include one or more SNPs found on UCSC's Genome Browser Web Page including but not limited to, the SNP reference table referred to as “dbSNP132 common”. An attribute/score of 1 may be a minimal attribute/score such that failure to achieve that attribute/score would result in disqualification. The base length threshold for the attribute/score determination could be lower or higher than 4, and could be 5, 6, 7, 8, 9, 10, 15, 20, for example, or more generally any positive integer larger than 4. The attribute/score could be other than binary and could be a more complex linear or non-linear function of the number of SNPs within the given length of base pairs.

[0238] In an embodiment, a forward repeat score may be used and may be given a numerical attribute/score of 1 if there is no repeat within a given length of base pairs of the forward primer (such as 4, for example) or a numerical attribute of 0 if there is one or more repeats within a length of 4 base pairs. In one embodiment, the forward repeat score may be given a numerical attribute/score of 1 if there is less than 30% overlap of the forward primer with known repeats. In some embodiments, known repeats may include one or more repeats reported by UCSC's Genome Browser, for example repeat regions as provided by the repeat masked hg19 genome from UCSC. An attribute/score of 1 may be a minimal attribute/score such that failure to achieve that attribute/score would result in disqualification. The base length threshold for the attribute/score determination could be lower or higher than 4, and could be 5, 6, 7, 8, 9, 10, 15, 20, for example, or more generally any positive integer larger than 4. The attribute/score could be other than binary and could be a more complex linear or non-linear function of the number of repeats within the given length of base pairs.

[0239] In an embodiment, a reverse repeat score may be used and may be given a numerical attribute/score of 1 if there is no repeat within a given length of base pairs of the reverse primer (such as 4, for example) or a numerical attribute of 0 if there is one or more repeats within a length of 4 base pairs. In one embodiment, the reverse repeat score may be given a numerical attribute/score of 1 if there is less than 30% overlap of the reverse primer with known repeats. In some embodiments, known repeats may include one or more repeats reported by UCSC's Genome Browser, for example repeat regions as provided by the repeat masked hg19 genome from UCSC. An attribute/score of 1 may be a minimal attribute/score such that failure to achieve that attribute/score would result in disqualification. The base length threshold for the attribute/score determination could be lower or higher than 4, and could be 5, 6, 7, 8, 9, 10, 15, 20, for example, or more generally any positive integer larger than 4. The attribute/score could be other than binary and could be a more complex linear or non-linear function of the number of repeats within the given length of base pairs.

[0240] In various embodiments, one or more of a forward triplet score, a reverse triplet score, a forward A run score, a reverse A run score, a forward C run score, a reverse C run score, a forward G run score, a reverse G run score, a forward T run score, and a reverse T run score, may be used and may be given a numerical attribute/score equal to the number of forward triplets, reverse triplets, forward A runs, reverse A runs, forward C runs, reverse C runs, forward G runs, reverse G runs, forward T runs, and reverse T runs within the entire primer. An attribute/score of 3 may be a maximal attribute/score for the triplets such that failure to remain at or below that attribute/score would result in disqualification. An attribute/score of 5 may be a maximal attribute/score for the runs such that failure to remain at or below that attribute/score would result in disqualification. The attribute/score could be other than binary and could be a more complex linear or non-linear function of the number of triplets/runs.

[0241] In an embodiment, a length of the primers may be limited by a minimum primer length threshold and a maximum primer length, and a length score for the primers may be set so as to decrease as the length gets shorter than the minimum primer length threshold and to decrease as the length gets longer than the maximum primer length threshold. In an embodiment, the minimum primer length threshold may be 16. In other embodiments, the minimum primer length threshold may be 15, 14, 13, 12, 11, 10, 9, 8, 7, 6, or 5, for example, and may also be 17, 18, 19, 20, 21, 22, 23, and 24, for example. In an embodiment, the maximum primer length threshold may be 28. In other embodiments, the maximum primer length threshold may be 29, 30, 31, 32, 33, 34, 35, 36, 37, 38, 39, and 40, for example, and may also be 27, 26, 25, 24, 23, 22, 21, and 20, for example. In an embodiment, the primer length criterion may be given a score of 1.0 if the length thresholds are satisfied, for example, and that score may go down to 0.0 as the primer length diverges from the minimum or maximum length threshold. For example, if the maximum primer length threshold were set to 28, then the score could be set to 1.0 if the length does not exceed 28, to 0.7 if the length is 29, to 0.6 if the length is 30, to 0.5 if the length is 31, to 0.3 if the length is 32, to 0.1 if the length is 33, and to 0.0 if the length is 34 or more. The attribute/score could be scaled between values other than 0.0 and 1.0, of course, and the function defining how the score varies with an increase difference relative to the threshold could be any other or more complex linear or non-linear function that does not lead to increases in score for primer that further diverge from length thresholds.

[0242] In an embodiment, a number of G bases (or of A, C, or T bases) in the primers may be limited by a maximum threshold, and corresponding score for the primers may be set so as to decrease as the number of G bases (or of A, C, or T bases) exceeds the maximum threshold. In an embodiment, the maximum threshold may be 3. In other embodiments, the maximum threshold may be 2, 4, 5, 6, 7, 8, 9, and 10, for example. In an embodiment, the number of G bases (or of A, C, or T bases) criterion may be given a score of 1.0 if the maximum threshold is satisfied, for example, and that score may go down to 0.0 as the number of G bases (or of A, C, or T bases) diverges from the maximum threshold. For example, if the maximum threshold were set to 4, then the score could be set to 1.0 if the number of G bases (or of A, C, or T bases) does not exceed 4, to 0.9 if the number is 5, to 0.8 if the number is 6, to 0.6 if the number is 7, to 0.4 if the number is 8, to 0.2 if the number is 9, and to 0.0 if the number is 10 or more. The score could be scaled between values other than 0.0 and 1.0, of course, and the function defining how the score varies with an increased difference between the number of G bases (or of A, C, or T bases) and the maximum threshold could be any other or more complex linear or non-linear function that does not lead to increases in score for primer that further diverge from the maximum threshold.

[0243] In an embodiment, the numbers of contiguous and total matches in a loop (e.g., hairpin) in the primers may be limited by a maximum threshold, and corresponding scores for the primers may be set so as to decrease as the numbers of contiguous and total matches in a loop exceed the maximum threshold. In an embodiment, the maximum threshold for contiguous matches may be 3 and the maximum threshold for total matches may be 5. In other embodiments, the maximum threshold for contiguous matches may be 2, 4, 5, 6, 7, 8, 9, and 10, for example, and the maximum threshold for total matches may be 3, 4, 6, 7, 8, 9, 10, 11, 12, 13, 14, and 15, for example. In an embodiment, the numbers of contiguous and total matches in a loop criteria may be given a score of 1.0 if the maximum threshold is satisfied, for example, and that score may go down to 0.0 as the number of the numbers of contiguous and total matches in a loop diverge from the corresponding maximum threshold. For example, if the maximum threshold for contiguous matches were set to 3, then the score could be set to 1.0 if the number of contiguous matches does not exceed 3, to 0.9 if the number is 4, to 0.7 if the number is 5, to 0.4 if the number is 6, to 0.2 if the number is 7, to 0.1 if the number is 8, and to 0.0 if the number is 9 or more. For example, if the maximum threshold for total matches were set to 5, then the score could be set to 1.0 if the number of total matches does not exceed 5, to 0.9 if the number is 6, to 0.8 if the number is 7, to 0.6 if the number is 8, to 0.4 if the number is 9, to 0.2 if the number is 10, to 0.1 if the number is 11, and to 0.0 if the number is 12 or more. The scores could be scaled between values other than 0.0 and 1.0, of course, and the function defining how the scores vary with an increased difference between the number of contiguous/total matches and the corresponding maximum thresholds could be any other or more complex linear or non-linear function that does not lead to increases in score for primer that further diverge from the maximum threshold.

[0244] In an embodiment, a number of G and C bases (or any two of the A, C, G, and T bases) in the last five bases of the primers may be limited by a maximum threshold, and corresponding score for the primers may be set so as to decrease as the number of G and C bases (or any two of the A, C, G, and T bases) exceeds the maximum threshold. In an embodiment, the maximum threshold may be 2. In other embodiments, the maximum threshold may be 3, 4, and 5, for example. In an embodiment, the number of G and C bases (or any two of the A, C, G, and T bases) criterion may be given a score of 1.0 if the maximum threshold is satisfied, for example, and that score may go down to 0.0 as the number of G and C bases (or any two of the A, C, G, and T bases) diverges from the maximum threshold. For example, if the maximum threshold were set to 2, then the score could be set to 1.0 if the number of G and C bases (or any two of the A, C, G, and T bases) does not exceed 2, to 0.8 if the number is 3, to 0.4 if the number is 4, and to 0.1 if the number is 5. The score could be scaled between values other than 0.0 and 1.0, of course, and the function defining how the score varies with an increased difference between the number of G and C bases (or any two of the A, C, G, and T bases) and the maximum threshold could be any other or more complex linear or non-linear function that does not lead to increases in score for primer that further diverge from the maximum threshold. In other embodiments, this criterion could consider the number of G and C bases (or any two of the A, C, G, and T bases) in a larger window of bases, such as in the last six bases, the last seven bases, the last eight bases, etc., for example.

[0245] In an embodiment, a percentage of G and C bases (or any two of the A, C, G, and T bases) in the primers may be limited by minimum and maximum thresholds, and corresponding score for the primers may be set so as to decrease as the percentage of G and C bases (or any two of the A, C, G, and T bases) diverges from the minimum or maximum threshold. In an embodiment, the minimum threshold may be 0.2 (20%) and the maximum threshold may be 0.8 (80%). In other embodiments, the minimum threshold may be any percentage between about 0.2 (20%) and about 0.5 (50%) and the maximum threshold may be any percentage between about 0.8 (80%) and 0.5 (50%), for example. In an embodiment, the percentage of G and C bases (or any two of the A, C, G, and T bases) criterion may be given a score of 1.0 if the minimum and maximum thresholds are satisfied, for example, and that score may go down to 0.0 if either of the thresholds is not satisfied. The score could be scaled between values other than 0.0 and 1.0, of course, and the function defining how the score varies with an increased difference between the percentage of G and C bases (or any two of the A, C, G, and T bases) and the minimum or maximum threshold could be any other or more complex linear or non-linear function that does not lead to increases in score for primer that further diverge from the minimum or maximum threshold.

[0246] In an embodiment, a melting temperature (Tm) of the primers may be limited by minimum and maximum thresholds, and corresponding score for the primers may be set so as to decrease as the melting temperature diverges from the minimum or maximum threshold. In an embodiment, the minimum threshold may be 60 and the maximum threshold may be 67 with a target melting temperature of 62. In other embodiments, the minimum threshold may be a value between about 55 and about 65 and the maximum threshold may be a value between about 62 and about 72, for example. In an embodiment, the melting temperature criterion may be given a score of 1.0 if the minimum and maximum thresholds are satisfied, for example, and that score may go down to 0.0 if either of the thresholds is not satisfied. The score could be scaled between values other than 0.0 and 1.0, of course, and the function defining how the score varies with an increased difference between the melting temperature and the minimum or maximum threshold could be any other or more complex linear or non-linear function that does not lead to increases in score for primer that further diverge from the minimum or maximum threshold. The melting temperature of a primer may be calculated using the teachings set forth in John SantaLucia, Jr., “A unified view of polymer, dumbbell, and oligonucleotide DNA nearest-neighbor thermodynamics,” Proc. Natl. Acad. Sci. USA, vol. 95, 1460-1465 (1998), the contents of which is incorporated by reference herein in its entirety.

[0247] In an embodiment, a primer-dimer propensity in the primers may be limited by a maximum threshold of contiguous primer-dimers at the 3′ end and a maximum threshold of total contiguous matches over the full length, and corresponding score for the primers may be set so as to decrease as the primer-dimer propensity diverges from the maximum thresholds. In an embodiment, the maximum threshold of contiguous primer-dimers at the 3′ end may be 4 and the maximum threshold of total contiguous matches over the full length may be 8. In other embodiments, the maximum threshold of contiguous primer-dimers at the 3′ end may be a value between about 2 and about 6 and the maximum threshold of total contiguous matches over the full length may be a value between about 4 and 10, for example. In an embodiment, the primer-dimer propensity criteria may be given a score of 1.0 if the threshold is satisfied, for example, and that score may go down to 0.0 if the threshold is not satisfied. The score could be scaled between values other than 0.0 and 1.0, of course, and the function defining how the score varies with an increased difference between the primer-dimer propensity and the maximum threshold could be any other or more complex linear or non-linear function that does not lead to increases in score for primer that further diverge from the maximum threshold.

[0248] In an embodiment, a percentage of G and C bases (or any two of the A, C, G, and T bases) in an amplicon sequence may be limited by minimum and maximum thresholds, and corresponding score for the amplicons may be set so as to decrease as the percentage of G and C bases (or any two of the A, C, G, and T bases) diverges from the minimum or maximum threshold. In an embodiment, the minimum threshold may be 0.0 (0%) and the maximum threshold may be 1.0 (100%). In other embodiments, the minimum threshold may be any percentage between about 0.1 (10%) and about 0.25 (25%) and the maximum threshold may be any percentage between about 0.75 (75%) and 0.9 (90%), for example. In an embodiment, the percentage of G and C bases (or any two of the A, C, G, and T bases) criterion may be given a score of 1.0 if the minimum and maximum thresholds are satisfied, for example, and that score may go down to 0.0 if either of the thresholds is not satisfied. The score could be scaled between values other than 0.0 and 1.0, of course, and the function defining how the score varies with an increased difference between the percentage of G and C bases (or any two of the A, C, G, and T bases) and the minimum or maximum threshold could be any other or more complex linear or non-linear function that does not lead to increases in score for amplicons that further diverge from the minimum or maximum threshold.

[0249] In an embodiment, a length of the amplicons may be limited by a minimum amplicon length threshold and a maximum amplicon length, and a length score for the amplicons may be set so as to decrease as the length gets shorter than the minimum amplicon length threshold and to decrease as the length gets longer than the maximum amplicon length threshold. In an embodiment, the minimum amplicon length threshold may be 110. In other embodiments, the minimum primer length threshold may be a value between about 80 and about 140, for example. In an embodiment, the maximum amplicon length threshold may be 240. In other embodiments, the maximum amplicon length threshold may be a value between about 200 and about 280, for example. In an embodiment, the amplicon length criterion may be given a score of 1.0 if the length thresholds are satisfied and of 0.0 if either is not satisfied. In another embodiment, that score may go down to 0.0 as the amplicon length diverges from the minimum or maximum length threshold. For example, if the maximum amplicon length threshold were set to 240, then the score could be set to 1.0 if the length does not exceed 240, to 0.8 if the length is at least 250, to 0.6 if the length is at least 260, to 0.4 if the length is at least 270, to 0.1 if the length is at least 280, and to 0.0 if the length is at least 290. The attribute/score could be scaled between values other than 0.0 and 1.0, of course, and the function defining how the score varies with an increase difference relative to the threshold could be any other or more complex linear or non-linear function that does not lead to increases in score for amplicons that further diverge from length thresholds.

[0250] According to an exemplary embodiment, there is provided a method for selecting a subset (which may be referred to as “tiling” herein) of amplicons (which may be referred to as “tiles” herein) from a plurality of candidate amplicons for covering one or more specific desired (e.g., customized) genomic regions or targets using one or more pools of amplicons. The method may include receiving as input a set of one or more targets and a set of candidate amplicons, and may include outputting as output a subset of the candidate amplicons and an assignment of each of the amplicons in the subset to a pool in which that amplicon can be multiplexed. Amplicons of any suitable sizes may be used. In an embodiment, an assay or primer design may accommodate 200 bp amplicons and 150 bp amplicons, for example, which may be especially useful for certain challenging samples such as FFPE, for example. In an embodiment, an assay or primer design may be adapted to be compatible with one or more specific library kits, such as, for example, the Ion AmpliSeq™ Library Kit 2.0.

[0251] According to an exemplary embodiment, there is provided a method for tiling and pooling, comprising (1) selecting a subset of amplicons (which may be referred to as “tiling” herein) from a set of input amplicons such that the subset of amplicons (i) covers as much of each target as do the amplicons in the set of input amplicons, (ii) has many fewer amplicons than the set of input amplicons, and (iii) maximizes a quality of the amplicons; and (2) assigns each amplicon or tile in the subset of amplicons or tiling to a pool so as to allow each pool to be multiplexed.

[0252] FIG. 23 illustrates a method for tiling a plurality of amplicons for one or more given targets according to an exemplary embodiment. In step 2301, a module or other hardware and/or software component sorts the one or more given targets by their start positions (or ensures that the given targets were already pre-sorted in such a manner when provided as input). In step 2302, a module or other hardware and/or software component sorts the amplicons by insert start (or ensures that the amplicons were already pre-sorted in such a manner when provided as input). In step 2303, a module or other hardware and/or software component merges overlapping targets present in the sorted one or more targets. In step 2304, for each merged overlapping target, a module or other hardware and/or software component (i) determines what amplicons have inserts overlapping the target and identifies such amplicons as candidate amplicons, and (ii) determines tiles using a function of the one or more given targets and the candidate amplicons. In step 2305, a module or other hardware and/or software component outputs the determined tiles. In some embodiments, targets may or may not be merged ahead of gathering any target amplicons, amplicons may be gathered for unmerged targets, and, if two targets share at least one amplicon, such two targets may be merged together (and one of the two targets may already represent a set of merged input amplicons).

[0253] According to an exemplary embodiment, there is provided a method for tiling a plurality of amplicons for one or more given targets, comprising: (1) sorting the one or more given targets by their start positions or ensuring that the given targets were already pre-sorted in such a manner when provided as input; (2) sorting the amplicons by insert start or ensuring that the amplicons were already pre-sorted in such a manner when provided as input; (3) merging overlapping targets present in the sorted one or more targets; (4) for each merged overlapping target, (i) determining what amplicons have inserts overlapping the target and identifying such amplicons as candidate amplicons and (ii) determining the tiles using a function of the one or more given targets and the candidate amplicons; and (5) outputting the tiles.

[0254] FIG. 24 illustrates a method for determining tiles for one or more given targets and candidate amplicons according to an exemplary embodiment. In step 2401, a module or other hardware and/or software component creates an overlap graph of candidate inserts, the graph including a source vertex, one or more amplicon vertices, and a sink vertex along with one or more edges linking vertices. In step 2402, a module or other hardware and/or software component defines an edge cost function or uses a defined edge cost function. In step 2403, a module or other hardware and/or software component finds a least cost path for such an edge cost function from the source vertex to the sink vertex. In step 2404, a module or other hardware and/or software component extracts the tiles from the least-cost path from source to sink. In step 2405, a module or other hardware and/or software component returns the extracted tiles.

[0255] According to an exemplary embodiment, there is provided a method for determining tiles for one or more given targets and candidate amplicons, comprising: (1) creating an overlap graph of candidate inserts, the overlap graph comprising a set of vertices V and a set of edges E (e.g., a graph G=(V,E)), such creating including (i) letting V equal the union of the set of candidate amplicons (each of which being assigned a corresponding vertex) and the set consisting of a source element and a sink element (e.g., V={amplicons}U{source,sink}), (ii) connecting the source vertex to all initial vertices and the sink vertex to all terminal vertices, (iii) connecting each amplicon vertex to all subsequent, proper, overlaps, and (iv) connecting rightmost vertices on the left of a gap to leftmost vertices on the right of that gap; (2) defining an edge cost function or using a defined edge cost function; (3) finding a least cost path for such an edge cost function from the source vertex to each vertex; (4) extracting the tiles from the least-cost path from source to sink; and (5) returning the extracted tiles.

[0256] FIG. 25A illustrates a set of candidate amplicons for covering a given target region, each including an insert surrounded by a pair of primers, for tiling and pooling according to an exemplary embodiment. The dotted lines indicate the boundaries of the target region (on chromosome 19 in this example).

[0257] FIG. 25B illustrates a set of vertices for generating a graph. The vertices V includes 15 amplicon vertices (white) corresponding to the 15 candidate amplicons illustrated in FIG. 25A together with a source vertex (light gray or green, left) and a sink vertex (dark grey or red, right). FIG. 26A illustrates the 15 candidate amplicons of FIG. 25A, except that three “initial” amplicons having at least some overlap between their insert and the beginning of the target region are highlighted.

[0258] FIG. 26B illustrates the connection of a source vertex to three vertices corresponding to the initial amplicons of FIG. 26A with edges.

[0259] FIG. 27A illustrates the 15 candidate amplicons of FIG. 25A, except that three “terminal” amplicons having at least some overlap between their insert and the end of the target region are highlighted.

[0260] FIG. 27B illustrates the connection of a sink vertex to three vertices corresponding to the terminal amplicons of FIG. 27A with edges.

[0261] FIG. 28A illustrates the 15 candidate amplicons of FIG. 25A, except that various amplicons for building internal edges are highlighted.

[0262] FIG. 28B illustrates the connection of some amplicon insert vertices to subsequent, proper, overlaps according to an exemplary embodiment. Shown are arrows linking the 9767127 amplicon vertex to the 9767463 and 9767519 amplicon vertices (whose inserts overlap the insert of the 9767127 amplicon vertex) and arrows linking the 9767610 amplicon vertex to the 9767780 and 9767756 amplicon vertices (whose inserts overlap the insert of the 9767610 amplicon vertex).

[0263] FIG. 29A illustrates the connection of additional amplicon insert vertices to subsequent, proper, overlaps according to an exemplary embodiment. Also shown is a disconnect or gap that may arise if the candidate amplicons do not fully cover the target.

[0264] FIG. 29B illustrates the 15 candidate amplicons of FIG. 25A, along with the basis for the gap shown in FIG. 29A according to an exemplary embodiment.

[0265] FIG. 30A illustrates three possible additional edges that could be used from source to ink to tile the target in this example according to an exemplary embodiment. In an embodiment, of the possible paths the one with a least cost may be selected.

[0266] FIG. 30B illustrates an exemplary definition of an edge cost function assigning a cost to each one of the graph's edges linking amplicon vertices according to an exemplary embodiment.

[0267] FIG. 30C illustrates the least-cost path from source to ink in the example of FIG. 30B according to an exemplary embodiment.

[0268] FIG. 31 illustrates the 15 candidate amplicons of FIG. 25A, except that the five amplicons corresponding to the vertices forming the least-cost path shown in FIG. 30C are highlighted.

[0269] According to an exemplary embodiment, the least-cost path may be determined using an O(|V|+|E|) algorithm. The least-cost path may be determined as follows: (1) for each vertex v, (i) initialize D[v] to infinity (the least cost so far in the process) from the source vertex to v and initialize D[source] to zero, and (ii) initialize Pred[v] to null (the predecessor of v in the least-cost path from the source vertex to v); and (2) for each vertex u in topological order, for each vertex v in adj[u], if D[u]+cost(u,v)<D[v], then let D[v]=D[u]+cost(u,v) and Pred[v]=u. More information regarding algorithms for constructing paths on graphs may be found in Dijkstra, “A Note on Two Problems in Connexion with Graphs,” Numerische Mathematik, vol. 1, 269-271 (1959), and Sniedovich, “Dijkstra's algorithm revisited: the dynamic programming connexion,” Control and Cybernetics, vol. 35, 599-620 (2006), which are both incorporated by reference herein in their entirety.

[0270] According to an exemplary embodiment, the cost of a path (e.g., amplicon plus “union” redundancy) may be the sum of the edges forming the path. In an embodiment, the cost of a path may be determined using Equation 1 below:

$$cost ( path ) = {\sum }_{( u , v ) ∈ path} cost ( u , v ) . \qquad Equation 1$$

[0271] According to an exemplary embodiment, the cost of an edge forming a path may be a sum of an amplicon cost and an overlap cost weighed using a factor α selected to blend the two costs, e.g., 0≦α≦1. In an embodiment, the cost of an edge forming the path may be determined using Equation 2 below:

cost(u,ν)=αcost(ν.amplicon)+(1−α)cost(overlap(u,ν)) Equation 2

[0272] According to an exemplary embodiment, there is provided a method for determining a cost associated with a tiling or subset of amplicons. In an embodiment, the cost of a tiling may be the sum of a cost of each amplicon in the tiling plus a cost of any one or more insert overlaps. The cost of an amplicon may be assigned any suitable value in any suitable predetermined range of values such that a low value imparts a low cost and a high value imparts a high cost so as to penalize various undesirable characteristics such as, for example, off-target amplification, primer-dimer propensity, etc. For example, the cost of an amplicon may be assigned a value from 1 to 10 such that a higher/lower cost is associated with a higher/lower level of undesirable characteristics (using any appropriate relationships, which may be linear/proportional or non-linear, for example). The cost of an insert overlap may also similarly be assigned any suitable value in any suitable predetermined range of values, for example, such that a low value imparts a low cost and a high value imparts a high cost so as to penalize various undesirable characteristics such as, for example, the redundancy introduced by overlapping inserts. For example, the cost of an insert overlap may also be assigned a value from 1 to 10. In an embodiment, one may opt to select a least-cost tiling from a set of candidate amplicons. In an embodiment, the cost of an insert overlap may be determined based on the redundancy introduced by overlapping inserts using Equation 3 below:

$$redundancy ( overlap ( u , v ) ) = \frac{numBP ( overlap ( u , v ) )}{numBP ( union ( u , v ) )} \qquad Equation 3$$

[0273] According to an exemplary embodiment, the costs for amplicon and specificity may be used by a tiling hardware or software component of tiler to calculate the cost of an edge. In an embodiment, a cost system may be used that allows a scaled cost calculation for a vertex in the tiler. The cost of an amplicon may be a composite of the amplicon cost and the specificity cost. The amplicon cost may reflect the quality of PCR amplification and the specificity cost may reflect the propensity of the amplicon to amplify off-target nucleotides.

[0274] In an embodiment, the cost of an amplicon may be determined as follows: Initially, a threshold may be used to filter primers that allow potential off-target amplification. The filter may be based on a program such as e-PCR2 (NCBI), see Rotmistrovsky et al., “A web server for performing electronic PCR,” Nucleic Acids Research, vol. 32, W108-W112 (2004), and Schuler, “Sequence Mapping by Electronic PCR,” Genome Research, vol. 7, 541-550 (1997), which are both incorporated by reference herein in their entirety, or other similar programs capable of being used for filtering primers. Various scoring strategies may be used for filtering. In various embodiments, the assays may be filtered that have a sum of score of forward and reverse primer less than a certain minimal score threshold (e.g., 150) or show more than 50 hits with a score less than some threshold (e.g., 200). Of course, numerical cut-offs may differ and will vary according to software used. In various embodiments, scores used for filtering may be converted to a cost using a conversion table such as illustrated below:

| | | |
|---|---|---|
| 0-19 | 170+ | 10 |
| 20-39 | 150-169 | 9 |
| 40-59 | 130-149 | 8 |
| 60-79 | 110-129 | 7 |
| 80-99 | 90-109 | 6 |
| 100-119 | 70-89 | 5 |
| 120-149 | 50-69 | 4 |
| 150-179 | 30-49 | 3 |
| 180-210 | 10-29 | 2 |
| 210+ | 0-9 | 1 |

In this exemplary table, the first column represents sp_score, which is a specificity score; the second column represents sp_hits, which is the number of matches for the forward and reverse primers facing each other; and the third column is a corresponding cost. The first perfect match is free, since it is the self match. In an embodiment, Acost is the cost based on binning the sp_score values, Bcost is the cost based on sp_hits values, and the amplicon cost may be calculated using the formula:

AmpliconCost=0.9*Acost+0.1*Bcost.

[0275] FIG. 32 illustrates three amplicons assigned to a first pool and two amplicons assigned to a second pool according to an exemplary embodiment. The dotted lines indicate the boundaries of a target region (on chromosome 19 in this example). As illustrated, the amplicons in the first and second pools substantially cover the target regions, with the exception of the gaps.

[0276] According to an exemplary embodiment, there is provided a method for pooling amplicons into one or more pools of amplicons. In an embodiment, the method may pool the amplicons using one or more pooling criteria, which may related at least in part to pool sizes. In an embodiment, a number of pools may be limited to a pre-determined maximum number of pools, which may be 10 pools, for example, or which may be 50, 40, 30, 20, 9, 8, 7, 6, 5, 4, 3, 2, or 1, for example, or any other positive integer. In an embodiment, a capacity of each pool (e.g, a maximal size of a pool) may also be limited to a pre-determined maximal value, which may be any fixed number of amplicons, and which may be about 10,000, about 7,500, about 5,000, about 2,500, about 2,000, about 1,500, about 1,000, and about 500, or any value between those examples, for example, and which may be a maximum of 768 or 1,536 amplicons, for example. In an embodiment, a balance factor may be used, which may be a percentage between about 60% and 100%, or between about 65% and 95%, or between about 70% and 90%, or about 90%, for example. In an embodiment, the size of a pool p may be constrained by the inequality set forth in Equation 4 below:

$$size ( p ) \geq ⌊ balance Factor \times {max}_{q ∈ pools} \{ size ( q ) \} ⌋ \qquad Equation 4$$

[0277] According to an exemplary embodiment, an intra pool distance may be limited by a minimal threshold distance, which may be, for example, an integer number of base pairs (e.g., 50 base pairs, or 5, 10, 15, 20, etc., or any predetermined number of base pairs).

[0278] FIG. 33A illustrates a minimal distance between amplicons according to an exemplary embodiment. FIGS. 33B-D illustrate several problems, including primer “race condition” (see FIG. 33B), preferential amplification of sub amplicons (see FIG. 33C), and super amplicons (see FIG. 33D) that may be ameliorated by using a minimal distance as illustrated in FIG. 33A. In an embodiment, the distance may be determined using equation 5, for example. Such an approach may prevent or reduces “race condition,” preferential amplification of sub amplicons, and super amplicons.

dist(a,b)=max(a.start,b.start)−min(a.end,b.end)−1 Equation 5

[0279] According to an exemplary embodiment, amplicons may be disqualified from being added to a pool in certain circumstances. For example, an amplicon amp may not be added to a pool p if one or more of the following criteria are met: (1) the size of the pool p equals or exceeds the pool capacity limit; (2) the size of the pool p equals the size of the largest pool (e.g., size(p)=size(largest pool)) and the size of the smallest pool is less than a floor (rounded down) value of the product of (i) the size of the pool p plus 1 and (ii) a balance factor (e.g., size(smallest pool)<floor((size(p)+1) balanceFactor)); and (3) the distance between amp and any other amplicon already in the pool is less than a minimum amplicon separation threshold (e.g., which distance may be determined using Equation 5, for example).

[0280] FIG. 34 illustrates a method for pooling amplicons across a plurality of pools according to an exemplary embodiment. In step 3401, a module or other hardware and/or software component sorts the amplicons by decreasing priority. In step 3402, a module or other hardware and/or software component starts a first available pool. In step 3403, a module or other hardware and/or software component empties all available pools. In step 3404, for each amplicon in the sorted amplicons, a module or other hardware and/or software component, (i) determines a list of compatible pools in which the amplicon could be multiplexed, (ii) if there is at least one compatible pool then places the amplicon in a first compatible pool that maximizes the minimum distance between the amplicon and any other amplicon in the compatible pool, (iii) if there is no compatible pool then if a new pool can be added adds a new pool and returns to step 3403, and (iv) if there is no compatible pool and none can be added then puts the amplicon in an overflow (unpooled) list of amplicons. In step 3405, a module or other hardware and/or software component outputs the pools.

[0281] According to an exemplary embodiment, a method for pooling amplicons across a plurality of pools comprises: (1) sorting the amplicons by decreasing priority; (2) starting a first available pool; (3) emptying all available pools; (4) for each amplicon in the sorted amplicons, (i) determining a list of compatible pools in which the amplicon could be multiplexed, (ii) if there is at least one compatible pool then placing the amplicon in a first compatible pool that maximizes the minimum distance between the amplicon and any other amplicon in the compatible pool, (iii) if there is no compatible pool then if a new pool can be added add a new pool and return to step (3), and (iv) if there is no compatible pool and none can be added then put the amplicon in an overflow (unpooled) list of amplicons. The method may further comprise outputting the amplicon pools.

[0282] Such a method may help ensure that the PCR pools cover as much of the targets as do the candidate amplicons supplied as input. It may generate a small number of PCR pools (e.g., 2, 4, etc.). The primers in a pool will not interact, which may help avoid undesired preferential amplification, “race condition” competition for primer hybridization, and super-amplicons. Further, such a method may run very quickly and using only a reasonable amount of memory.

[0283] FIG. 35 illustrates a method for tiling according to an exemplary embodiment. In step 3501, a module or other hardware and/or software component receives or provides as inputs a genomic target region and a set of candidate amplicons for the genomic target region. In step 3502, a module or other hardware and/or software component generates a graph comprising a source vertex, a set of amplicon vertices arranged in correspondence with the set of candidate amplicons, and a sink vertex. In step 3503, a module or other hardware and/or software component determines a cost associated with one or more paths across the graph from the source vertex to the sink vertex via amplicon vertices. In step 3504, a module or other hardware and/or software component extracts the amplicon vertices from the one of the one or more paths across the graph having a least cost associated therewith. In some embodiments, such a method may be extended to a method for pooling amplicons across a plurality of pools by using as input the amplicons corresponding to the extracted vertices. For example, various steps such as described in FIG. 34 may be performed on amplicons corresponding to the extracted vertices to pool the amplicons.

[0284] According to an exemplary embodiment, there is provided a method comprising: (1) receiving or providing as inputs a genomic target region and a set of candidate amplicons for the genomic target region; (2) generating a graph comprising a source vertex, a set of amplicon vertices arranged in correspondence with the set of candidate amplicons, and a sink vertex; (3) determining a cost associated with one or more paths across the graph from the source vertex to the sink vertex via amplicon vertices; and (4) extracting the amplicon vertices from the one of the one or more paths across the graph having a least cost associated therewith.

[0285] In various embodiments, the one or more paths may comprise a sequence of amplicons wherein an ending portion of an insert of a first amplicon in the sequence of amplicons overlaps a beginning portion of an insert of a second amplicon in the sequence of amplicons. An ending portion of an insert of the second amplicon in the sequence of amplicons may overlap a beginning portion of an insert of a third amplicon in the sequence of amplicons. An ending portion of an insert of the third amplicon in the sequence of amplicons may overlap a beginning portion of an insert of a fourth amplicon in the sequence of amplicons.

[0286] In various embodiments, the one or more paths may comprise a sequence of N amplicons, N being a positive integer, wherein an ending portion of an insert of an amplicon amp in the sequence of amplicons overlaps a beginning portion of an insert of an amplicon amp+1 in the sequence of amplicons, wherein amp is an integer taking values 1, . . . , N−1. The one or more paths may comprise a sequence of L=N+M amplicons, N and M being positive integers, wherein an ending portion of an insert of an amplicon amp in the sequence of amplicons overlaps (which may include merely touching) a beginning portion of an insert of an amplicon amp+1 in the sequence of amplicons where amp is an integer taking values 1, . . . , N−1; wherein an ending portion of an insert of an amplicon amp in the sequence of amplicons overlaps (which may include merely touching) a beginning portion of an insert of an amplicon amp+1 in the sequence of amplicons where amp is an integer taking values N+1, . . . , N+M−1; and wherein there is a gap between an ending portion of an insert of amplicon amp=N and a beginning portion of an insert of amplicon amp=N+1.

[0287] In various embodiments, the cost associated with each of the one or more paths may be a sum of the cost of every edge of the path linking two amplicon vertices. The cost associated with every edge of the path linking two amplicon vertices may be a sum of a first term related to the cost of the edge's destination amplicon vertex and a second term related to the cost of an overlap between an insert of the edge's destination amplicon and an insert of the edge's origin amplicon. The first term and the second term may be weighed by a blending factor such that the first term is multiplied by the blending factor or a function thereof and the second term is multiplied by one minus the blending factor or a function thereof. The cost of an amplicon vertex may be a numerical value along a scale between a first value representing a lower level of one or more undesirable characteristics selected from a group comprising at least a level of off-target amplification and a level of primer-dimer propensity and a second value representing a higher level of the one or more undesirable characteristics. The cost of an overlap between an insert of the edge's destination amplicon and an insert of the edge's origin amplicon may be determined based on a redundancy introduced by overlapping inserts. The cost of an overlap between an insert of the edge's destination amplicon and an insert of the edge's origin amplicon may be a function of a quotient between a number of base pairs in an overlap between the insert of the edge's destination amplicon and the insert of the edge's origin amplicon and a number of base pairs in a union of the insert of the edge's destination amplicon and the insert of the edge's origin amplicon.

[0288] In various embodiments, such a method may further comprise determining a pooling of amplicons corresponding to the extracted amplicons into one or more pools of amplicons. Determining a pooling of amplicons may comprise limiting a number of amplicon pools and a capacity of each amplicon pool. Determining a pooling of amplicons may comprise limiting the number of amplicon pools to a threshold number between about 2 and about 5 and limiting the capacity of each amplicon pool to a threshold capacity between about 500 amplicons and about 2,500 amplicons, for example. Determining a pooling of amplicons may comprise limiting a size of any of the one or more pools based on a maximum size of other pools.

[0289] In various embodiments, determining a pooling of amplicons may comprise limiting an inclusion of one or more into a given pool based at least on a minimal threshold distance between amplicon sequences in the given pool. The minimal threshold distance may be between about 5 base pairs and about 100 base pairs, for example.

[0290] According to an exemplary embodiment, there is provided a non-transitory machine-readable storage medium comprising instructions which, when executed by a processor, cause the processor to perform a method comprising: (1) receiving or providing as inputs a genomic target region and a set of candidate amplicons for the genomic target region; (2) generating a graph comprising a source vertex, a set of amplicon vertices arranged in correspondence with the set of candidate amplicons, and a sink vertex; (3) determining a cost associated with one or more paths across the graph from the source vertex to the sink vertex via amplicon vertices; and (4) extracting the amplicon vertices from the one of the one or more paths across the graph having a least cost associated therewith. In some embodiments, such a method may be extended to a method for pooling amplicons across a plurality of pools by using as input the amplicons corresponding to the extracted vertices. For example, various steps such as described in FIG. 34 may be performed on amplicons corresponding to the extracted vertices to pool the amplicons.

[0291] In various embodiments, such a non-transitory machine-readable storage medium may comprise instructions which, when executed by a processor, cause the processor to perform a method further comprising determining a pooling of amplicons corresponding to the extracted amplicons into one or more pools of amplicons.

[0292] According to an exemplary embodiment, there is provided a system, comprising: (1) a machine-readable memory; and (2) a processor configured to execute machine-readable instructions, which, when executed by the processor, cause the system to perform steps including: (a) receiving or providing as inputs a genomic target region and a set of candidate amplicons for the genomic target region; (b) generating a graph comprising a source vertex, a set of amplicon vertices arranged in correspondence with the set of candidate amplicons, and a sink vertex; (c) determining a cost associated with one or more paths across the graph from the source vertex to the sink vertex via amplicon vertices; and (d) extracting the amplicon vertices from the one of the one or more paths across the graph having a least cost associated therewith. In some embodiments, such a system may be extended to a system for pooling amplicons across a plurality of pools by using as input the amplicons corresponding to the extracted vertices. For example, various steps such as described in FIG. 34 may be performed on amplicons corresponding to the extracted vertices to pool the amplicons.

[0293] In various embodiments, the processor of such a system may further be configured to execute machine-readable instructions, which, when executed by the processor, cause the system to perform steps including determining a pooling of amplicons corresponding to the extracted amplicons into one or more pools of amplicons.

[0294] According to various exemplary embodiments, one or more features of any one or more of the above-discussed teachings and/or exemplary embodiments may be performed or implemented using appropriately configured and/or programmed hardware and/or software elements. Determining whether an embodiment is implemented using hardware and/or software elements may be based on any number of factors, such as desired computational rate, power levels, heat tolerances, processing cycle budget, input data rates, output data rates, memory resources, data bus speeds, etc., and other design or performance constraints.

[0295] Examples of hardware elements may include processors, microprocessors, input(s) and/or output(s) (I/O) device(s) (or peripherals) that are communicatively coupled via a local interface circuit, circuit elements (e.g., transistors, resistors, capacitors, inductors, and so forth), integrated circuits, application specific integrated circuits, (ASIC), programmable logic devices (PLD), digital signal processors (DSP), field programmable gate array (FPGA), logic gates, registers, semiconductor device, chips, microchips, chip sets, and so forth. The local interface may include, for example, one or more buses or other wired or wireless connections, controllers, buffers (caches), drivers, repeaters and receivers, etc., to allow appropriate communications between hardware components. A processor is a hardware device for executing software, particularly software stored in memory. The processor can be any custom made or commercially available processor, a central processing unit (CPU), an auxiliary processor among several processors associated with the computer, a semiconductor based microprocessor (e.g., in the form of a microchip or chip set), a macroprocessor, or generally any device for executing software instructions. A processor can also represent a distributed processing architecture. The I/O devices can include input devices, for example, a keyboard, a mouse, a scanner, a microphone, a touch screen, an interface for various medical devices and/or laboratory instruments, a bar code reader, a stylus, a laser reader, a radio-frequency device reader, etc. Furthermore, the I/O devices also can include output devices, for example, a printer, a bar code printer, a display, etc. Finally, the I/O devices further can include devices that communicate as both inputs and outputs, for example, a modulator/demodulator (modem; for accessing another device, system, or network), a radio frequency (RF) or other transceiver, a telephonic interface, a bridge, a router, etc.

[0296] Examples of software may include software components, programs, applications, computer programs, application programs, system programs, machine programs, operating system software, middleware, firmware, software modules, routines, subroutines, functions, methods, procedures, software interfaces, application program interfaces (API), instruction sets, computing code, computer code, code segments, computer code segments, words, values, symbols, or any combination thereof. A software in memory may include one or more separate programs, which may include ordered listings of executable instructions for implementing logical functions. The software in memory may include a system for identifying data streams in accordance with the present teachings and any suitable custom made or commercially available operating system (O/S), which may control the execution of other computer programs such as the system, and provides scheduling, input-output control, file and data management, memory management, communication control, etc.

[0297] According to various exemplary embodiments, one or more features of any one or more of the above-discussed teachings and/or exemplary embodiments may be performed or implemented using appropriately configured and/or programmed non-transitory machine-readable medium or article that may store an instruction or a set of instructions that, if executed by a machine, may cause the machine to perform a method and/or operations in accordance with the exemplary embodiments. Such a machine may include, for example, any suitable processing platform, computing platform, computing device, processing device, computing system, processing system, computer, processor, scientific or laboratory instrument, etc., and may be implemented using any suitable combination of hardware and/or software. The machine-readable medium or article may include, for example, any suitable type of memory unit, memory device, memory article, memory medium, storage device, storage article, storage medium and/or storage unit, for example, memory, removable or non-removable media, erasable or non-erasable media, writeable or re-writeable media, digital or analog media, hard disk, floppy disk, read-only memory compact disc (CD-ROM), recordable compact disc (CD-R), rewriteable compact disc (CD-RW), optical disk, magnetic media, magneto-optical media, removable memory cards or disks, various types of Digital Versatile Disc (DVD), a tape, a cassette, etc., including any medium suitable for use in a computer. Memory can include any one or a combination of volatile memory elements (e.g., random access, memory (RAM, such as DRAM, SRAM, SDRAM, etc.)) and nonvolatile memory elements (e.g., ROM, EPROM, EEROM, Flash memory, hard drive, tape, CDROM, etc.). Moreover, memory can incorporate electronic, magnetic, optical, and/or other types of storage media. Memory can have a distributed architecture where various components are situated remote from one another, but are still accessed by the processor. The instructions may include any suitable type of code, such as source code, compiled code, interpreted code, executable code, static code, dynamic code, encrypted code, etc., implemented using any suitable high-level, low-level, object-oriented, visual, compiled and/or interpreted programming language.

[0298] According to various exemplary embodiments, one or more features of any one or more of the above-discussed teachings and/or exemplary embodiments may be performed or implemented at least partly using a distributed, clustered, remote, or cloud computing resource.

[0299] According to various exemplary embodiments, one or more features of any one or more of the above-discussed teachings and/or exemplary embodiments may be performed or implemented using a source program, executable program (object code), script, or any other entity comprising a set of instructions to be performed. When a source program, the program can be translated via a compiler, assembler, interpreter, etc., which may or may not be included within the memory, so as to operate properly in connection with the O/S. The instructions may be written using (a) an object oriented programming language, which has classes of data and methods, or (b) a procedural programming language, which has routines, subroutines, and/or functions, which may include, for example, C, C++, Pascal, Basic, Fortran, Cobol, Perl, Java, and Ada.

[0300] According to various exemplary embodiments, one or more of the above-discussed exemplary embodiments may include transmitting, displaying, storing, printing or outputting to a user interface device, a computer readable storage medium, a local computer system or a remote computer system, information related to any information, signal, data, and/or intermediate or final results that may have been generated, accessed, or used by such exemplary embodiments. Such transmitted, displayed, stored, printed or outputted information can take the form of searchable and/or filterable lists of runs and reports, pictures, tables, charts, graphs, spreadsheets, correlations, sequences, and combinations thereof, for example.

[0301] Various additional exemplary embodiments may be derived by repeating, adding, or substituting any generically or specifically described features and/or components and/or substances and/or steps and/or operating conditions set forth in one or more of the above-described exemplary embodiments. Further, it should be understood that an order of steps or order for performing certain actions is immaterial so long as the objective of the steps or action remains achievable, unless specifically stated otherwise. Furthermore, two or more steps or actions can be conducted simultaneously so long as the objective of the steps or action remains achievable, unless specifically stated otherwise. Moreover, any one or more feature, component, aspect, step, or other characteristic mentioned in one of the above-discussed exemplary embodiments may be considered to be a potential optional feature, component, aspect, step, or other characteristic of any other of the above-discussed exemplary embodiments so long as the objective of such any other of the above-discussed exemplary embodiments remains achievable, unless specifically stated otherwise.

[0302] Various additional exemplary embodiments may be derived by incorporating in the above described exemplary embodiments one or more of the features described in U.S. Pat. Appl. Publ. No. 2008/0228589 A1, published Sep. 18, 2008, and U.S. Pat. Appl. Publ. No. 2004/0175733 A1, published Sep. 9, 2004, the contents of both of which are incorporated by reference herein in their entireties.

[0303] In some embodiments, the amplified target sequences generated by the methods disclosed herein represent at least 60%, 70%, 80%, 90%, or more, of one or more exons amplified from the plurality of target sequences. In one embodiment, amplified target sequences of the present invention are about 90 to about 140 base pairs in length, about 100 to about 200 base pairs in length, about 100 to about 300 base pairs in length, or about 100 to about 400 base pairs in length. In one embodiment, the amplified target sequence includes the length of the forward primer and the length of the complementary reverse primer for each primer pair. In another embodiment, the amplified target sequence length includes the length of the reverse primer and the length of the complementary forward primer. In some embodiments, the length of the amplified target sequence minus the forward and reverse primer lengths is about 40 base pairs to about 350 base pairs. In some embodiments, the length of the amplified target sequences generated in the multiplex PCR reaction is substantially the same. As defined herein, “substantially the same” with respect to length of amplified target sequences generated via the methods disclosed herein refers to no more than 30% deviation in nucleotide length across the total number of amplified target sequences. In one embodiment, the percent GC content of an amplicon is less than 85%, less than 75%, less than 65%, less than 60%, or less than 50%. In one embodiment, substantially all amplified target sequences within a reaction contain between 30% and less than 85% GC content. In one embodiment, where the nucleic acid molecules are obtained from an archived or FFPE DNA sample, the length of the amplified target sequence is typically about 100 to about 200 base pairs in length. In one embodiment, if the nucleic acid sample is derived or obtained from genomic DNA, the length of the amplified target sequence can be about 100 to about 500 base pairs in length.

[0304] In some embodiments, the amplified target sequences of the disclosed methods can be used in various downstream analysis or assays with, or without, further purification or manipulation. For example, the amplified target sequences can be clonally amplified by techniques known in the art, such a bridge amplification or emPCR to generate a template library that can be used in next generation sequencing. In some embodiments, the amplified target sequences of the disclosed methods or the resulting template libraries can be used for single nucleotide polymorphism (SNP) analysis, genotyping or epigenetic analysis, copy number variation analysis, gene expression analysis, analysis of gene mutations including but not limited to detection, prognosis and/or diagnosis, detection and analysis of rare or low frequency allele mutations, nucleic acid sequencing including but not limited to de novo sequencing, targeted resequencing and synthetic assembly analysis. In one embodiment, amplified target sequences can be used to detect mutations at less than 5% allele frequency. In some embodiments, the methods disclosed herein can be used to detect mutations in a population of nucleic acids at less than 4%, 3%, 2% or at about 1% allele frequency. In another embodiment, amplified target sequences prepared as described herein can be sequenced to detect and/or identify germline or somatic mutations from a population of nucleic acid molecules.

[0305] In some embodiments, the forward and/or reverse target-specific primers in the target-specific primer pairs can be “complementary” or “substantially complementary” to the population of nucleic acid molecules. As termed herein “substantially complementary to the population of nucleic acid molecules” refers to percentage complementarity between the primer and the nucleic acid molecule to which the primer will hybridize. Generally, the term “substantially complementary” as used herein refers to at least 70% complementarity. Therefore, substantially complementary refers to a range of complementarity of at least 70% but less than 100% complementarity between the primer and the nucleic acid molecule. A complementary primer is one that possesses 100% complementarity to the nucleic acid molecule. In one embodiment, each target-specific primer pair is designed to minimize cross-hybridization to another primer (or primer pair) in the same multiple PCR reaction (i.e., reduce the prevalence of primer-dimers). In another embodiment, each target-specific primer pair is designed to minimize cross-hybridization to non-specific nucleic acid sequences in the population of nucleic acid molecules (i.e., minimize off-target hybridization). In one embodiment, each target-specific primer is designed to minimize self-complementarity, formation of hairpin structures or other secondary structures.

[0306] In some embodiments, the amplified target sequences are formed via polymerase chain reaction. Extension of target-specific primers can be accomplished using one or more DNA polymerases. In one embodiment, the polymerase can be any Family A DNA polymerase (also known as pol I family) or any Family B DNA polymerase. In some embodiments, the DNA polymerase can be a recombinant form capable of extending target-specific primers with superior accuracy and yield as compared to a non-recombinant DNA polymerase. For example, the polymerase can include a high-fidelity polymerase or thermostable polymerase. In some embodiments, conditions for extension of target-specific primers can include ‘Hot Start’ conditions, for example Hot Start polymerases, such as Amplitaq Gold® DNA polymerase (Applied Biosciences), Platinum® Taq DNA Polymerase High Fidelity (Invitrogen) or KOD Hot Start DNA polymerase (EMD Biosciences). Generally, a ‘Hot Start’ polymerase includes a thermostable polymerase and one or more antibodies that inhibit DNA polymerase and 3′-5′ exonuclease activities at ambient temperature. In some instances, ‘Hot Start’ conditions can include an aptamer.

[0307] In some embodiments, the polymerase can be an enzyme such as Taq polymerase (from Thermus aquaticus), Tfi polymerase (from Thermus filiformis), Bst polymerase (from Bacillus stearothermophilus), Pfu polymerase (from Pyrococcus furiosus), Tth polymerase (from Thermus thermophilus), Pow polymerase (from Pyrococcus woesei), Tli polymerase (from Thermococcus litoralis), Ultima polymerase (from Thermotoga maritima), KOD polymerase (from Thermococcus kodakaraensis), Pol I and II polymerases (from Pyrococcus abyssi) and Pab (from Pyrococcus abyssi). In some embodiments, the DNA polymerase can include at least one polymerase such as Amplitaq Gold® DNA polymerase (Applied Biosciences), Stoffel fragment of Amplitaq® DNA Polymerase (Roche), KOD polymerase (EMD Biosciences), KOD Hot Start polymerase (EMD Biosciences), Deep Vent™ DNA polymerase (New England Biolabs), Phusion polymerase (New England Biolabs), Klentaq1 polymerase (DNA Polymerase Technology, Inc), Klentaq Long Accuracy polymerase (DNA Polymerase Technology, Inc), Omni KlenTaq™ DNA polymerase (DNA Polymerase Technology, Inc), Omni KlenTaq™ LA DNA polymerase (DNA Polymerase Technology, Inc), Platinum® Taq DNA Polymerase (Invitrogen), Hemo Klentaq™ (New England Biolabs), Platinum® Taq DNA Polymerase High Fidelity (Invitrogen), Platinum® Pfx (Invitrogen), Accuprime™ Pfx (Invitrogen), or Accuprime™ Taq DNA Polymerase High Fidelity (Invitrogen).

[0308] In some embodiments, the DNA polymerase can be a thermostable DNA polymerase. In some embodiments, the mixture of dNTPs can be applied concurrently, or sequentially, in a random or defined order. In some embodiments, the amount of DNA polymerase present in the multiplex reaction is significantly higher than the amount of DNA polymerase used in a corresponding single plex PCR reaction. As defined herein, the term “significantly higher” refers to an at least 3-fold greater concentration of DNA polymerase present in the multiplex PCR reaction as compared to a corresponding single plex PCR reaction.

[0309] In some embodiments, the amplification reaction does not include a circularization of amplification product, for example as disclosed by rolling circle amplification.

[0310] In some embodiments, the methods of the disclosure include selectively amplifying target sequences in a sample containing a plurality of nucleic acid molecules and ligating the amplified target sequences to at least one Adaptersadapters and/or barcode. Adapters and barcodes for use in molecular biology library preparation techniques are well known to those of skill in the art. The definitions of adapters and barcodes as used herein are consistent with the terms used in the art. For example, the use of barcodes allows for the detection and analysis of multiple samples, sources, tissues or populations of nucleic acid molecules per multiplex reaction. A barcoded and amplified target sequence contains a unique nucleic acid sequence, typically a short 6-15 nucleotide sequence, that identifies and distinguishes one amplified nucleic acid molecule from another amplified nucleic acid molecule, even when both nucleic acid molecules minus the barcode contain the same nucleic acid sequence. The use of adapters allows for the amplification of each amplified nucleic acid molecule in a uniformed manner and helps reduce strand bias. Adapters can include universal adapters or propriety adapters both of which can be used downstream to perform one or more distinct functions. For example, amplified target sequences prepared by the methods disclosed herein can be ligated to an adapter that may be used downstream as a platform for clonal amplification. The adapter can function as a template strand for subsequent amplification using a second set of primers and therefore allows universal amplification of the adapter-ligated amplified target sequence. In some embodiments, selective amplification of target nucleic acids to generate a pool of amplicons can further comprise ligating one or more barcodes and/or adapters to an amplified target sequence. The ability to incorporate barcodes enhances sample throughput and allows for analysis of multiple samples or sources of material concurrently. In one example, amplified target nucleic acid molecules prepared by the disclosed methods can be ligated to Ion Torrent™ Sequencing AdaptersAdapters (A and P1 Adaptersadapters, sold as a component of the Ion Fragment Library Kit, Life Technologies, Part No. 4466464) or Ion Torrent™ DNA Barcodes (Life Technologies, Part No. 4468654).

[0311] The methods disclosed herein are directed to the amplification of multiple target sequences via polymerase chain reaction (PCR). In some embodiments the multiplex PCR comprises hybridizing one or more target-specific primer pairs to a nucleic acid molecule, extending the primers of the target-specific primer pairs via template dependent synthesis in the presence of a DNA polymerase and dNTPs; repeating the hybridization and extension steps for sufficient time and sufficient temperature there generating a plurality of amplified target sequences. In some embodiments, the steps of the multiplex amplification reaction method can be performed in any order.

[0312] The amount of nucleic acid material required for successful multiplex amplification can be about 1 ng. In some embodiments, the amount of nucleic acid material can be about 10 ng to about 50 ng, about 10 ng to about 100 ng, or about 1 ng to about 200 ng of nucleic acid material. Higher amounts of input material can be used, however one aspect of the disclosure is to selectively amplify a plurality of target sequence from a low (ng) about of starting material.

[0313] The multiplex PCR amplification reactions disclosed herein can include a plurality of “cycles” typically performed on a thermocycler. Generally, each cycle includes at least one annealing step and at least one extension step. In one embodiment, a multiplex PCR amplification reaction is performed wherein target-specific primer pairs are hybridized to a target sequence; the hybridized primers are extended generating an extended primer product/nucleic acid duplex; the extended primer product/nucleic acid duplex is denatured allowing the complementary primer to hybridize to the extended primer product, wherein the complementary primer is extended to generate a plurality of amplified target sequences. In one embodiment, the methods disclosed herein have about 5 to about 18 cycles per preamplification reaction. The annealing temperature and/or annealing duration per cycle can be identical; can include incremental increases or decreases, or a combination of both. The extension temperature and/or extension duration per cycle can be identical; can include incremental increases or decreases, or a combination of both. For example, the annealing temperature or extension temperature can remain constant per cycle. In some embodiments, the annealing temperature can remain constant each cycle and the extension duration can incrementally increase per cycle. In some embodiments, increases or decreases in duration can occur in 15 second, 30 second, 1 minute, 2 minute or 4 minute increments. In some embodiments, increases or decrease in temperature can occur as 0.5, 1, 2, 3, or 4 Celsius deviations. In some embodiments, the amplification reaction can beconducted using hot-start PCR techniques. These techniques include the use of a heating step (>60° C.) before polymerization begins to reduce the formation of undesired PCR products. Other techniques such as the reversible inactivation or physical separation of one or more critical reagents of the reaction, for example the magnesium or DNA polymerase can be sequestered in a wax bead, which melts as the reaction is heated during the denaturation step, releasing the reagent only at higher temperatures. The DNA polymerase can also be kept in an active state by binding to an aptamer or an antibody. This binding is disrupted at higher temperatures, releasing the functional DNA polymerase that can proceed with the PCR unhindered.

[0314] In some embodiments, the disclosed methods can optionally include destroying one or more primer-containing amplification artifacts, e.g., primer-dimers, dimer-dimers or superamplicons. In some embodiments, the destroying can optionally include treating the primer and/or amplification product so as to cleave specific cleavable groups present in the primer and/or amplification product. In some embodiments, the treating can include partial or complete digestion of one or more target-specific primers. In one embodiment, the treating can include removing at least 40% of the target specific primer from the amplification product. The cleavble treatment can include enzymatic, acid, alkali, thermal, photo or chemical activity. The cleavable treatment can result in the cleavage or other destruction of the linkages between one or more nucleotides of the primer, or between one or more nucleotides of the amplification product. The primer and/or the amplification product can optionally include one or more modified nucleotides or nucleobases. In some embodiments, the cleavage can selectively occur at these sites, or adjacent to the modified nucleotides or nucleobases. In some embodiments, the cleavage or treatment of the amplified target sequence can result in the formation of a phosphorylated amplified target sequence. In some embodiments, the amplified target sequence is phosphorylated at the 5′ terminus.

[0315] In some embodiments, the template, primer and/or amplification product includes nucleotides or nucleobases that can be recognized by specific enzymes. In some embodiments, the nucleotides or nucleobases can be bound by specific enzymes. Optionally, the specific enzymes can also cleave the template, primer and/or amplification product at one or more sites. In some embodiments, such cleavage can occur at specific nucleotides within the template, primer and/or amplification product. For example, the template, primer and/or amplification product can include one or more nucleotides or nucleobases including uracil, which can be recognized and/or cleaved by enzymes such as uracil DNA glycosylase (UDG, also referred to as UNG) or formamidopyrimidine DNA glycosylase (Fpg). The template, primer and/or amplification product can include one or more nucleotides or nucleobases including RNA-specific bases, which can be recognized and/or cleaved by enzymes such as RNAseH. In some embodiments, the template, primer and/or amplification product can include one or more abasic sites, which can be recognized and/or cleaved using various proofreading polymerases or apyrase treatments. In some embodiments, the template, primer and/or amplification product can include 7,8-dihydro-8-oxoguanine (8-oxoG) nucleobases, which can be recognized or cleaved by enzymes such as Fpg. In some embodiments, one or more amplified target sequences can be partially digested by a FuPa reagent.

[0316] In some embodiments, the primer and/or amplification product includes one or more modified nucleotides including bases that bind, e.g., base pair, with other nucleotides, for example nucleotides in a complementary nucleic acid strand, via chemical linkages. In some embodiments, the chemical linkages are subject to specific chemical attack that selectively cleaves the modified nucleotides (or selectively cleaves one or more covalent linkages between the modified nucleotides and adjacent nucleotides within the primer and/or amplification product) but leaves the other nucleotides unaffected. For example, in some embodiments modified nucleotides can form disulfite linkages with other nucleotides in a complementary strand. Such disulfite linkages can be oxidized via suitable treatments. Similarly, certain modified nucleotides can base pair with other nucleotides in a complementary nucleic acid strand through linkages that can be selectively disrupted via alkali treatment. In some embodiments, the primer and/or amplification product includes one or more modified nucleotides that bind, e.g., base pair, with other nucleotides in a complementary nucleic acid strand through linkages exhibiting decreased thermal stability relative to typical base pairing linkages formed between natural bases. Such reduced-thermal stability linkages can be selectively disrupted through exposure of the primer and/or amplification product to elevated temperatures following amplification.

[0317] An exemplary embodiment is depicted in FIG. 1, which depicts a schematic of degradable amplification primers. The amplification primers are bisulfite in design, with either a 5′ universal forward amplification sequence linked to a 3′ target-specific forward primer, or a 5′ universal reverse amplification sequence linked to a 3′ target-specific reverse primer. Both primers contain modified nucleotides.

[0318] In some embodiments, primers are synthesized that are complementary to, and can hybridize with, discrete segments of a nucleic acid template strand, including: a primer that can hybridize to the 5′ region of the template, which encompasses a sequence that is complementary to either the forward or reverse amplification primer. In some embodiments, the forward primers, reverse primers, or both, share no common nucleic acid sequence, such that they hybridize to distinct nucleic acid sequences. For example, target-specific forward and reverse primers can be prepared that do not compete with other primer pairs within the primer pool to amplify the same nucleic acid sequence. In this example, primer pairs that do not compete with other primer pairs in the primer pool assist in the reduction of non-specific or spurious amplification products. In some embodiments, the forward and reverse primers of each primer pair are unique, in that the nucleotide sequence for each primer is non-complementary and non-identical to the other primer in the primer pair. In some embodiments, the primer pair can differ by at least 10%, at least 20%, at least 30%, at least 40%, at least 50%, at least 60%, at least 70%, at least 75%, at least 80%, at least 85%, or at least 90% nucleotide identity. In some embodiments, the forward and reverse primers in each primer pair are non-complementary or non-identical to other primer pairs in the primer pool or multiplex reaction. For example, the primer pairs within a primer pool or multiplex reaction can differ by at least 5%, at least 10%, at least 20%, at least 30%, at least 40%, at least 50%, at least 60%, or at least 70% nucleotide identity to other primer pairs within the primer pool or multiplex reaction. Generally, primers are designed to minimize the formation of primer-dimers, dimer-dimers or other non-specific amplification products. Typically, primers are optimized to reduce GC bias and low melting temperatures (Tₘ) during the amplification reaction. In some embodiments, the primers are designed to possess a Tₘ of about 55° C. to about 72° C. In some embodiments, the primers of a primer pool can possess a Tₘ of about 59° C. to about 70° C., 60° C. to about 68° C., or 60° C. to about 65° C. In some embodiments, the primer pool can possess a Tₘ that does not deviate by more than 5° C.

[0319] In some embodiments, the target-specific primers do not contain a carbon-spacer or terminal linker. In some embodiments, the target-specific primers or amplified target sequences do not contain an enzymatic, magnetic, optical or fluorescent label.

[0320] The template can include a 3′ region that contains the sequence for either the upstream or downstream regions surrounding a particular gene or region of interest, such that the region of interest is bracketed by a forward amplification/upstream gene-specific fusion, and a reverse amplification/downstream region of interest fusion primer. In some embodiments, an internal separator sequence can separate the template regions that can hybridize to the amplification and gene-specific primers, and this may act as a key or barcode for subsequent downstream applications such as sequencing, etc. In some embodiments, a barcode or key can be incorporated into each of the amplification products to assist with data analysis and for example, cataloging. In some embodiments, the barcodes can be Ion Torrent™ DNA barcodes (Life Technologies).

[0321] In some embodiments, the primer includes a sufficient number of modified nucleotides to allow functionally complete degradation of the primer by the cleavage treatment, but not so many as to interfere with the primer's specificity or functionality prior to such cleavage treatment, for example in the amplification reaction. In some embodiments, the primer includes at least one modified nucleotide, but no greater than 75% of nucleotides of the primer are modified.

[0322] In some embodiments, multiple different primers including at least one modified nucleotide can be used in a single amplification reaction. For example, multiplexed primers including modified nucleotides can be added to the amplification reaction mixture, where each primer (or set of primers) selectively hybridizes to, and promotes amplification of different target nucleic acid molecules within the nucleic acid population. In some embodiments, different primer combinations can be added to the amplification reaction at plexy of at least about 24, 96, 384, 768, 1000, 2000, 3000, 6000 or 10000, or more (where “plexy” indicates the total number of different targets that can theoretically be amplified in a sequence-specific manner in the amplification reaction). In some embodiments, the modified primers contain at least one modified nucleotide near or at the termini of the primer. In some embodiments, the modified primers contain two or more modified nucleotides within the primer sequence. In an exemplary embodiment, the primer sequence contains a uracil near, or at, the termini of the primer sequence. For the purposes of this disclosure “near” or “at the termini” of the primer sequences refers up to 10 nucleotides from the termini of the primer sequence. In some embodiments, the primer sequence contains a uracil located at, or about, the center nucleotide position of the primer sequence. For the purposes of this disclosure “at, or about the center nucleotide position of the primer sequence” refers to the incorporation of a uracil moiety at the center nucleotide of the primer sequence or within eight nucleotides, in either a 3′ or 5′ direction flanking the center nucleotide. In one embodiment, the target-specific primer sequence can contain a modified nucleobase at or about the center nucleotide position and contain a modified nucleobase at the 3′ and/or 5′ terminus. In some embodiments, the length of the forward or reverse primer sequence can be about 15 to about 40 bases in length. In some embodiments, the Tₘ of the primer sequence used in the multiplex reaction can be about 55° C. to about 72° C. In some embodiments, the primer pairs are designed to amplify sequences from the target nucleic acid molecules or amplicons that are about 100 base pairs to about 500 base pairs in length.

[0323] In some embodiments, the amplification reactions are conducted in parallel within a single reaction phase (for example, within the same amplification reaction mixture within a single tube). In some instances, an amplification reaction can generate a mixture of products including both the intended amplicon product as well as unintended, unwanted, nonspecific amplification artifacts such as primer-dimers. Post amplification, the reactions are then treated with any suitable agent that will selectively cleave or otherwise selectively destroy the nucleotide linkages of the modified nucleotides within the excess unincorporated primers and the amplification artifacts without cleaving or destroying the specification amplification products. For example, the primers can include uracil-containing nucleobases that can be selectively cleaved using UNG/UDG (optionally with heat and/or alkali). In some embodiments, the primers can include uracil-containing nucleotides that can be selectively cleaved using UNG and Fpg. In some embodiments, the cleavage treatment includes exposure to oxidizing conditions for selective cleavage of dithiols, treatment with RNAseH for selective cleavage of modified nucleotides including RNA-specific moieties (e.g., ribose sugars, etc.), and the like. This cleavage treatment can effectively fragment the original amplification primers and non-specific amplification products into small nucleic acid fragments that include relatively few nucleotides each. Such fragments are typically incapable of promoting further amplification at elevated temperatures. Such fragments can also be removed relatively easily from the reaction pool through the various post-amplification cleanup procedures known in the art (e.g., spin columns, NaEtOH precipitation, etc).

[0324] In some embodiments, amplification products following cleavage or other selective destruction of the nucleotide linkages of the modified nucleotides are optionally treated to generate amplification products that possess a phosphate at the 5′ termini. In some embodiments, the phosphorylation treatment includes enzymatic manipulation to produce 5′ phosphorylated amplification products. In one embodiment, enzymes such as polymerases can be used to generate 5′ phosphorylated amplification products. For example, T4 polymerase can be used to prepare 5′ phosphorylated amplicon products. Klenow can be used in conjunction with one or more other enzymes to produce amplification products with a 5′ phosphate. In some embodiments, other enzymes known in the art can be used to prepare amplification products with a 5′ phosphate group. For example, incubation of uracil nucleotide containing amplification products with the enzyme UDG, Fpg and T4 polymerase can be used to generate amplification products with a phosphate at the 5′ termini. It will be apparent to one of skill in the art that other techniques, other than those specifically described herein, can be applied to generate phosphorylated amplicons. It is understood that such variations and modifications that are applied to practice the methods, systems, kits, compositions and apparatuses disclosed herein, without resorting to undue experimentation are considered within the scope of the disclosure.

[0325] In some embodiments, primers that are incorporated in the intended (specific) amplification products, these primers are similarly cleaved or destroyed, resulting in the formation of “sticky ends” (e.g., 5′ or 3′ overhangs) within the specific amplification products. Such “sticky ends” can be addressed in several ways. For example, if the specific amplification products are to be cloned, the overhang regions can be designed to complement overhangs introduced into the cloning vector, thereby enabling sticky ended ligations that are more rapid and efficient than blunt ended ligations. Alternatively, the overhangs may need to be repaired (as with several next-generation sequencing methods). Such repair can be accomplished either through secondary amplification reactions using only forward and reverse amplification primers (in the embodiment shown in FIG. 1, this corresponds to A and P1 primers) comprised of only natural bases. In this manner, subsequent rounds of amplification rebuild the double-stranded templates, with nascent copies of the amplicon possessing the complete sequence of the original strands prior to primer destruction. Alternatively, the sticky ends can be removed using some forms of fill-in and ligation processing, wherein the forward and reverse primers are annealed to the templates. A polymerase can then be employed to extend the primers, and then a ligase, optionally a thermostable ligase, can be utilized to connect the resulting nucleic acid strands. This could obviously be also accomplished through various other reaction pathways, such as cyclical extend-ligation, etc. In some embodiments, the ligation step can be performed using one or more DNA ligases.

[0326] The amplification reaction can include any reaction that increases the copy number of a nucleic acid molecule, optionally in a cyclical fashion, and can include without limitation isothermal amplification (for example, rolling circle amplification or isothermal amplification as described in U.S. Provisional Application Nos. 61/424,599, 61/445,324 and 61/451,919, hereby incorporated by reference in their entireties), amplification using thermocycling, and the like.

[0327] In some embodiments, the disclosure generally relates to methods for single-tube multiplex PCR. In some embodiments, the method for single-tube multiplex PCR can include target-specific or exon-specific primers. In some embodiments, the exon-specific or target-specific primers can include at least one uracil nucleotide. In some embodiments, single-tube multiplex PCR can include selective amplification of at least 1000, 2000, 3000, 4000, 5000, 6000 or more target nucleic acid molecules using target-specific or exon-specific uracil based primers.

[0328] In some embodiments, the disclosure relates generally to methods for generating a target-specific or exon-specific amplicon library. In some embodiments, the amplicon library generated using target-specific or exon-specific primers can be associated with mutations of human cancers. In some embodiments, the mutations can be in the KRAS, BRAF and/or EGFR genes. In some embodiments, the amplicon library can be generated from genomic DNA or formalin-fixed, paraffin-embedded (FFPE) tissue. In some embodiments, the amplicons of the amplicon library prepared using the methods disclosed herein can be about 100 to about 300 base pairs in length, about 100 to about 250 base pairs in length, about 120 to about 220 base pairs in length or about 135 to about 205 base pairs in length. In some embodiments, the amplicon library can be prepared using primer pairs that are targeted to cancer specific mutations. In some embodiments, the primer pairs can be directed to non-cancer related mutations, such as inherited diseases, e.g., cystic fibrosis and the like. In some embodiments, the primer pairs can be used to generate amplicons that once sequenced by any sequencing platform, including semi-conductor sequencing technology can be used to detect genetic mutations such as inversion, deletions, point mutations and variations in copy number.

[0329] In some embodiments, the primer pairs used to produce an amplicon library can result in the amplification of target-specific nucleic acid molecules possessing one or more of the following metrics: greater than 97% target coverage at 20× if normalized to 100× average coverage depth; greater than 97% of bases with greater than 0.2× mean; greater than 90% base without strand bias; greater than 95% of all reads on target; greater than 99% of bases with greater than 0.01× mean; and greater than 99.5% per base accuracy.

[0330] In some embodiments, the amplicon library can be used to detect and/or identify known mutations or de novo mutations in a sample.

[0331] In some embodiments, the amplicon library prepared using target-specific primer pairs can be used in downstream enrichment applications such as emulsion PCR or bridge PCR. In some embodiments, the amplicon library can be used in an enrichment application and a sequencing application. For example, an amplicon library can be sequenced using any suitable DNA sequencing platform. In some embodiments, an amplicon library can be sequenced using an Ion Torrent PGM Sequencer (Life Technologies). In some embodiments, a PGM sequencer can be coupled to server that applies parameters or software to determine the sequence of the amplified target nucleic acid molecules. In some embodiments, the amplicon library can be prepared, enriched and sequenced in less than 24 hours. In some embodiments, the amplicon library can be prepared, enriched and sequenced in approximately 9 hours. In some embodiments, an amplicon library can be a paired library, that is, a library that contains amplicons from a tumor sample and amplicons from a non-diseased sample. Each pair can be aligned, to detect and/or identify mutations present in the target nucleic acid molecules.

[0332] In some embodiments, methods for generating an amplicon library can include: amplifying genomic DNA targets using exon-specific or target-specific primers to generate amplicons; purifying the amplicons from the input DNA and primers; phosphorylating the amplicons; ligating Adaptersadapters to the phosphorylated amplicons; purifying the ligated amplicons; nick-translating the amplified amplicons; and purifying the nick-translated amplicons to generate the amplicon library. In some embodiments, additional amplicon library manipulations can be conducted following the step of amplification of genomic DNA targets to generate the amplicons. In some embodiments, any combination of additional reactions can be conducted in any order, and can include: purifying; phosphorylating; ligating Adaptersadapters; nick-translating; amplification and/or sequencing. In some embodiments, any of these reactions can be omitted or can be repeated. It will be readily apparent to one of skill in the art that the method can repeat or omit any one or more of the above steps. It will also be apparent to one of skill in the art that the order and combination of steps may be modified to generate the required amplicon library, and is not therefore limited to the exemplary methods provided.

[0333] A phosphorylated amplicon can be joined to an adapter to conduct a nick translation reaction, subsequent downstream amplification (e.g., template preparation), or for attachment to particles (e.g., beads), or both. For example, an adapter that is joined to a phosphorylated amplicon can anneal to an oligonucleotide capture primer which is attached to a particle, and a primer extension reaction can be conducted to generate a complementary copy of the amplicon attached to the particle or surface, thereby attaching an amplicon to a surface or particle. AdaptersAdapters can have one or more amplification primer hybridization sites, sequencing primer hybridization sites, barcode sequences, and combinations thereof. In some embodiments, amplicons prepared by the methods disclosed herein can be joined to one or more Ion Torrent™ compatible Adaptersadapters to construct an amplicon library. Amplicons generated by such methods can be joined to one or more Adaptersadapters for library construction to be compatible with a next generation sequencing platform. For example, the amplicons produced by the teachings of the present disclosure can be attached to Adaptersadapters provided in the Ion Fragment Library Kit (Life Technologies, Catalog No. 4466464).

[0334] In some embodiments, amplification of genomic DNA targets (such as high molecular weight DNA) or FFPE samples can be conducted using a 2× AmpliSeq Hi Fi Master Mix. In some embodiments, the AmpliSeq Hi Fi Master Mix can include glycerol, dNTPs, and a DNA polymerase, such as Platinum® Taq DNA polymerase High Fidelity. In some embodiments, the 2× AmpliSeq Hi Fi Master Mix can further include at least one of the following: a preservative, magnesium sulfate, tris-sulfate and/or ammonium sulfate.

[0335] In some embodiments, amplification of genomic DNA targets (such as high molecular weight DNA) or FFPE samples can be conducted using a 5× Ion AmpliSeq Hi Fi Master Mix. In some embodiments, the 5× Ion AmpliSeq Hi Fi Master Mix can include glycerol, dNTPs, and a DNA polymerase such as Platinum® Taq DNA polymerase High Fidelity. In some embodiments, the 5× Ion AmpliSeq Hi Fi Master Mix can further include at least one of the following: a preservative, magnesium chloride, magnesium sulfate, tris-sulfate and/or ammonium sulfate.

[0336] In some embodiments, phosphorylation of the amplicons can be conducted using a FuP reagent. In some embodiments, the FuP reagent can include a DNA polymerase, a DNA ligase, at least one uracil cleaving or modifying enzyme, and/or a storage buffer. In some embodiments, the FuP reagent can further include at least one of the following: a preservative and/or a detergent.

[0337] In some embodiments, phosphorylation of the amplicons can be conducted using a FuPa reagent. In some embodiments, the FuPa reagent can include a DNA polymerase, at least one uracil cleaving or modifying enzyme, an antibody and/or a storage buffer. In some embodiments, the FuPa reagent can further include at least one of the following: a preservative and/or a detergent. In some embodiments, the antibody is provided to inhibit the DNA polymerase and 3′-5′ exonuclease activities at ambient temperature.

[0338] In some embodiments, the amplicon library produced by the teachings of the present disclosure are sufficient in yield to be used in a variety of downstream applications including the Ion Xpress™ Template Kit using an Ion Torrent™ PGM system (e.g., PCR-mediated addition of the nucleic acid fragment library onto Ion Sphere™ Particles) (Life Technologies, Part No. 4467389). For example, instructions to prepare a template library from the amplicon library can be found in the Ion Xpress Template Kit User Guide (Life Technologies, Part No. 4465884), hereby incorporated by reference in its entirety. Instructions for loading the subsequent template library onto the Ion Torrent™ Chip for nucleic acid sequencing are described in the Ion Sequencing User Guide (Part No. 4467391), hereby incorporated by reference in its entirety. In some embodiments, the amplicon library produced by the teachings of the present disclosure can be used in paired end sequencing (e.g., paired-end sequencing on the Ion Torrent™ PGM system (Life Technologies, Part No. MAN0006191), hereby incorporated by reference in its entirety.

[0339] It will be apparent to one of ordinary skill in the art that numerous other techniques, platforms or methods for clonal amplification such as wildfire PCR and bridge amplification can be used in conjunction with the amplified target sequences of the present disclosure. It is also envisaged that one of ordinary skill in art upon further refinement or optimization of the conditions provided herein can proceed directly to nucleic acid sequencing (for example using the Ion Torrent PGM™ or Proton™ sequencers, Life Technologies) without performing a clonal amplification step.

[0340] In some embodiments, at least one of the amplified targets sequences to be clonally amplified can be attached to a support or particle. The support can be comprised of any suitable material and have any suitable shape, including, for example, planar, spheroid or particulate. In some embodiments, the support is a scaffolded polymer particle as described in U.S. Published App. No. 20100304982, hereby incorporated by reference in its entirety.

[0341] In some embodiments, nucleic acid sequencing of the amplified target sequences produced by the teachings of this disclosure include de novo sequencing or targeted resequencing. In some embodiments, nucleic acid sequencing further includes comparing the nucleic acid sequencing results of the amplified target sequences against a reference nucleic acid sample. In some embodiments, the reference sample can be normal tissue or well documented tumor sample. In some embodiments, nucleic acid sequencing of the amplified target sequences further includes determining the presence or absence of a mutation within the nucleic acid sequence. In some embodiments, the method further includes correlating the presence of a mutation with drug susceptibly, prognosis of treatment and/or organ rejection. In some embodiments, nucleic acid sequencing includes the identification of genetic markers associated with cancer and/or inherited diseases. In some embodiments, nucleic acid sequencing includes the identification of copy number variation in a sample under investigation.

[0342] In some embodiments, a kit is provided for amplifying multiple target sequences from a population of nucleic acid molecules in a single reaction. In some embodiments, the kit includes a plurality of target-specific primer pairs containing one or more cleavable groups, one or more DNA polymerases, a mixture of dNTPs and at least one cleaving reagent. In one embodiment, the cleavable group can be 8-oxo-deoxyguanosine, deoxyuridine or bromodeoxyuridine. In some embodiments, the at least one cleaving reagent includes RNaseH, uracil DNA glycosylase, Fpg or alkali. In one embodiment, the cleaving reagent can be uracil DNA glycosylase. In some embodiments, the kit is provided to perform multiplex PCR in a single reaction chamber or vessel. In some embodiments, the kit includes at least one DNA polymerase, which can be a thermostable DNA polymerase. In some embodiments, the concentration of the one or more DNA polymerases is present in a 3-fold excess as compared to a single PCR reaction. In some embodiments, the final concentration of each target-specific primer pair is present at about 25 nM to about 50 nM. In one embodiment, the final concentration of each target-specific primer pair can be present at a concentration that is 50% lower than conventional single plex PCR reactions. In some embodiments, the kit provides amplification of at least 100, 500, 1000, 3000, 6000, 10000, 12000, or more, target sequences from a population of nucleic acid molecules in a single reaction chamber.

[0343] In some embodiments, the kit further comprises one or more adapters, barcodes, and/or antibodies.

[0344] The following description of various exemplary embodiments is exemplary and explanatory only and is not to be construed as limiting or restrictive in any way. Other embodiments, features, objects, and advantages of the present teachings will be apparent from the description and accompanying drawings, and from the claims.

[0345] Although the present description described in detail certain exemplary embodiments, other embodiments are also possible and within the scope of the present invention. Variations and modifications will be apparent to those skilled in the art from consideration of the specification and figures and practice of the teachings described in the specification and figures, and the claims.

### EXAMPLES

### Example 1

### Library Preparation

[0346] PCR Amplify Genomic DNA Targets

[0347] A multiplex polymerase chain reaction was performed to amplify 384 individual amplicons across a genomic DNA sample. A pool of greater than 32,000 primers was originally developed covering more than 300 genes. A representative list of genes that were incorporated for investigation while synthesizing the initial primer pool is provided in Table 1. A sub-set of the primer pool known as “HSMv12” was used to generate the data presented in FIG. 5 (primers from HSMv12 are presented in Table 2). Each primer pair in the primer pool was designed to contain at least one uracil nucleotide near the terminus of each forward and reverse primer. Each primer pair was also designed to selectively hybridize to, and promote amplification of a specific gene or gene fragment of the genomic DNA sample.

[0348] To a single well of a 96-well PCR plate was added 5 microliters of HSMv12 Primer Pool containing 384 primer pairs at a concentration of 15 μM in TE, 10-50 ng genomic DNA and 10 microliters of an amplification reaction mixture (2× AmpliSeq HiFi Master Mix) that can include glycerol, dNTPs, and Platinum® Taq High Fidelity DNA Polymerase (Invitrogen, Catalog No. 11304) to a final volume of 20 microliters with DNase/RNase Free Water (Life Technologies, CA, Part No. 600004).

[0349] The PCR plate was sealed and loaded into a thermal cycler (GeneAmp® PCR system 9700 Dual 96-well thermal cycler (Life Technologies, CA, Part No. N8050200 and 4314445)) and run on the following temperate profile to generate the preamplified amplicon library.

[0350] An initial holding stage was performed at 98° C. for 2 minutes, followed by 16 cycles of denaturing at 98° C. for 15 seconds and an annealing and extending stage at 60° C. for 4 minutes. After cycling, the preamplified amplicon library was held at 4° C. until proceeding to the purification step outlined below. A schematic of an exemplary library amplification process is shown in FIG. 2.

[0351] Purify the Amplicons from Input DNA and Primers

[0352] Two rounds of Agencourt® AMPure® XP Reagent (Beckman Coulter, CA) binding, wash, and elution at 0.6× and 1.2× volume ratios were found to remove genomic DNA and unbound or excess primers. The amplification and purification step outlined herein produces amplicons of about 100 bp to about 600 bp in length.

[0353] In a 1.5 ml LoBind tube (Eppendorf, Part No. 022431021), the preamplified amplicon library (20 microliters) was combined with 12 microliters (0.6× volumes) of Agencourt® AMPure® XP reagent (Beckman Coulter, CA). The bead suspension was pipetted up and down to thoroughly mix the bead suspension with the preamplified amplicon library. The sample was then pulse-spin and incubated for 5 minutes at room temperature.

[0354] The tube containing the sample was placed on a magnetic rack such as a DynaMag™-2 spin magnet (Life Technologies, CA, Part No. 123-21D) for 2 minutes to capture the beads. Once the solution cleared, the supernatant was transferred to a new tube, where 24 microliters (1.2× volume) of AgenCourt® AMPure® XP beads (Beckman Coulter, CA) were added to the supernatant. The mixture was pipetted to ensure the bead suspension mixed with the preamplified amplicon library. The sample was then pulse-spin and incubated at room temperature for 5 minutes. The tube containing the sample was placed on the magnetic rack for 2 minutes to capture the beads. Once the solution cleared, the supernatant was carefully discarded without disturbing the bead pellet. The desired preamplified amplicon library was now bound to the beads. Without removing the tube from the magnetic rack, 200 microliters of freshly prepared 70% ethanol was introduced into the sample. The sample was incubated for 30 seconds while gently rotating the tube on the magnetic rack. After the solution cleared, the supernatant was discarded without disturbing the pellet. A second ethanol wash was performed and the supernatant discarded. Any remaining ethanol was removed by pulse-spinning the tube and carefully removing residual ethanol while not disturbing the pellet. The pellet was air-dried for about 5 minutes at room temperature.

[0355] Once the tube was dry, the tube was removed from the magnetic rack and 20 microliters of DNase/RNase Free Water was added (Life Technologies, CA, Part No. 600004). The tube was vortexed and pipetted to ensure the sample was mixed thoroughly. The sample was pulse-spin and placed on the magnetic rack for two minutes. After the solution cleared, the supernatant containing the eluted DNA was transferred to a new tube.

[0356] Phosphorylate the Amplicons

[0357] To the eluted DNA (˜20 microliters), 3 microliters of DNA ligase buffer (Invitrogen, Catalog No. 15224041), 2 microliters dNTP mix, and 2 microliters of FuP reagent were added. The reaction mixture was mixed thoroughly to ensure uniformity and incubated at 37° C. for 10 minutes.

[0358] Ligate Adapters to the Amplicons and Purify the Ligated Amplicons

[0359] After incubation, the reaction mixture proceeded directly to a ligation step. Here, the reaction mixture now containing the phosphorylated amplicon library was combined with 1 microliter of A/P1 Adaptersadapters (20 μm each) (sold as a component of the Ion Fragment Library Kit, Life Technologies, Part No. 4466464) and 1 microliter of DNA ligase (sold as a component of the Ion Fragment Library Kit, Life Technologies, Part No. 4466464), and incubated at room temperature for 30 minutes.

[0360] After the incubation step, 52 microliters (1.8× sample volume) of AgenCourt® AMPure® Reagent (Beckman Coulter, CA) was added to the ligated DNA. The mixture was pipetted thoroughly to mix the bead suspension with the ligated DNA. The mixture was pulse-spin and incubated at room temperature for 5 minutes. The samples underwent another pulse-spin and were placed on a magnetic rack such as a DynaMag™-2 spin magnet (Life Technologies, CA, Part No. 123-21D) for two minutes. After the solution had cleared, the supernatant was discarded. Without removing the tube from the magnetic rack, 200 microliters of freshly prepared 70% ethanol was introduced into the sample. The sample was incubated for 30 seconds while gently rotating the tube on the magnetic rack. After the solution cleared, the supernatant was discarded without disturbing the pellet. A second ethanol wash was performed and the supernatant discarded. Any remaining ethanol was removed by pulse-spinning the tube and carefully removing residual ethanol while not disturbing the pellet. The pellet was air-dried for about 5 minutes at room temperature.

[0361] The pellet was resuspended in 20 microliters of DNase/RNase Free Water (Life Technologies, CA, Part No. 600004) and vortexed to ensure the sample was mixed thoroughly. The sample was pulse-spin and placed on the magnetic rack for two minutes. After the solution cleared, the supernatant containing the ligated DNA was transferred to a new Lobind tube (Eppendorf, Part No. 022431021).

[0362] Nick Translate and Amplify the Amplicon Library and Purify the Library

[0363] The ligated DNA (˜20 microliters) was combined with 76 microliters of Platinum® PCR SuperMix High Fidelity (Life Technologies, CA, Part No. 12532-016, sold as a component of the Ion Fragment Library Kit, Life Technologies, Part No. 4466464) and 4 microliters of Library Amplification Primer Mix (5 μM each) (Life Technologies, CA, Part No. 602-1068-01, sold as a component of the Ion Fragment Library Kit, Life Technologies, Part No. 4466464), the mixture was pipetted thoroughly to ensure a uniformed solution. The solution was applied to a single well of a 96-well PCR plate and sealed. The plate was loaded into a thermal cycler (GeneAmp® PCR system 9700 Dual 96-well thermal cycler (Life Technologies, CA, Part No. N8050200 and 4314445)) and run on the following temperate profile to generate the final amplicon library.

[0364] A nick-translation was performed at 72° C. for 1 minute, followed by an enzyme activation stage at 98° C. for 2 minutes, followed by 5-10 cycles of denaturing at 98° C. for 15 seconds and an annealing and extending stage at 60° C. for 1 minute. After cycling, the final amplicon library was held at 4° C. until proceeding to the final purification step outlined below.

[0365] In a 1.5 ml LoBind tube (Eppendorf, Part No. 022431021), the final amplicon library (˜100 microliters) was combined with 180 microliters (1.8× sample volume) of Agencourt® AMPure® XP reagent (Beckman Coulter, CA). The bead suspension was pipetted up and down to thoroughly mix the bead suspension with the final amplicon library. The sample was then pulse-spin and incubated for 5 minutes at room temperature.

[0366] The tube containing the final amplicon library was placed on a magnetic rack such as a DynaMag™-2 spin magnet (Life Technologies, CA, Part No. 123-21D) for 2 minutes to capture the beads. Once the solution cleared, the supernatant was carefully discarded without disturbing the bead pellet. Without removing the tube from the magnetic rack, 400 microliters of freshly prepared 70% ethanol was introduced into the sample. The sample was incubated for 30 seconds while gently rotating the tube on the magnetic rack. After the solution cleared, the supernatant was discarded without disturbing the pellet. A second ethanol wash was performed and the supernatant discarded. Any remaining ethanol was removed by pulse-spinning the tube and carefully removing residual ethanol while not disturbing the pellet. The pellet was air-dried for about 5 minutes at room temperature.

[0367] Once the tube was dry, the tube was removed from the magnetic rack and 20 microliters of Low TE was added (Life Technologies, CA, Part No. 602-1066-01). The tube was pipetted and vortexed to ensure the sample was mixed thoroughly. The sample was pulse-spin and placed on the magnetic rack for two minutes. After the solution cleared, the supernatant containing the final amplicon library was transferred to a new Lobind tube (Eppendorf, Part No. 022431021).

[0368] Assess the Library Size Distribution and Determine the Template Dilution Factor

[0369] The final amplicon library was quantitated to determine the library dilution (Template Dilution Factor) that results in a concentration within the optimized target range for Template Preparation (e.g., PCR-mediated addition of library molecules onto Ion Sphere™ Particles). The final amplicon library is typically quantitated for downstream Template Preparation procedure using an Ion Library Quantitation Kit (qPCR) (Life Technologies, Part No. 4468802) and/or a Bioanalyzer™ (Agilent Technologies, Agilent 2100 Bioanalyzer) to determine the molar concentration of the amplicon library, from which the Template Dilution Factor is calculated. For example, instructions to determine the Template Dilution Factor by quantitative real-time PCR (qPCR) can be found in the Ion Library Quantitation Kit User Guide (Life Technologies, Part No. 4468986), hereby incorporated by reference in its entirety.

[0370] In this example, 1 microliter of the final amplicon library preparation was analyzed on the 2100 Bioanalyzer™ with an Agilent High Sensitivity DNA Kit (Agilent Technologies, Part No. 5067-4626) to generate peaks in the 135-205 bp size range and at a concentration of about 5×10⁹ copies per microliter.

[0371] Proceed to Template Preparation

[0372] An aliquot of the final library was used to prepare DNA templates that were clonally amplified on Ion Sphere™ Particles using emulsion PCR (emPCR). The preparation of template in the instant example was prepared according to the manufacturer's instructions using an Ion Xpress Template Kit (Life Technologies, Part No. 4466457), hereby incorporated by reference in its entirety. Once template-positive Ion Sphere Particles were enriched, an aliquot of the Ion Spheres were loaded onto an Ion 314™ Chip (Life Technologies, Part No. 4462923) as described in the Ion Sequencing User Guide (Part No. 4467391), hereby incorporated in its entirety, and subjected to analysis and sequencing as described in the Ion Torrent PGM Sequencer User Guide (Life Technologies, Part No. 4462917), hereby incorporated in its entirety. The data obtained from this example is provided in FIG. 5.

### Example 2

### Optimizing Multiplex Reactions to Minimize GC Bias

[0373] This example demonstrates that optimizing multiplex PCR reactions performed under the guidance of the exemplary library amplification process described in Example 1 help to minimize GC bias.

[0374] In this example, a low-plex sample containing 94 primer pairs of target-specific primers and a high-plex sample containing 380 primer pairs of target-specific primers were prepared from across the human genome. Each low-plex and high plex sample was subjected to library amplification as described in Example 1. The melting temperature of amplicon products was observed to correlate with GC content of the amplicon assay (FIG. 4A-4H). The high multiplex (384-plex) sample with high GC content (i.e., 80%) was observed to have a higher melting temperature than the corresponding 94-plex sample (FIG. 4A-4H). Additionally, high-plex samples with highest GC content (75% and 80%) were observed to possess a single predominant peak, the amplicon product (connected to X-axis via dotted line), in contrast to other non-specific amplification products (observed as additional peaks and noise across the X-axis). The low-plex samples containing highest GC content (75% and 80%) were found to form multiple peaks along the X-axis suggesting the formation of a substantial amount of non-specific amplification products in addition to the desired amplicons. This example demonstrates that high-multiplex PCR reactions (394-plex) can be successfully optimized, for example through primer design, to increase the melting temperature of the desired amplicon product, increase the amount of amplicon specific product generated, and decrease the formation of amplification artifacts.

### Example 3

### Optimizing Primer Design to Reduce Non-Specific Amplification

[0375] This example demonstrates that target-specific primers containing modified nucleotides generated substantially fewer primer-dimers than a corresponding non-modified primer pool. In this example, a population of non-modified primer pairs were prepared using conventional methods and subjected to the library amplification process as described in Example 1. A corresponding primer set containing modified nucleotides were prepared and amplified as described in Example 1. The amount of amplicon product and non-specific amplification product generated for each primer pool was compared. The amount of primer-dimers observed in the non-modified primer pool was found to greatly exceed the amount of primer-dimers in the corresponding modified primer pool (FIGS. 3A and 3B). The production of amplification artifacts can cause significant, if not permanent, amplification issues in downstream amplification events such as those commonly used in next-generating sequencing assays. The use of modified primers as disclosed herein can be used to alleviate these issues and decrease the output of amplification artifacts per multiplex reaction.

[0376] Appendix A discloses the general state of the art for traditional multiplex PCR methods and highlights some of the disadvantages of these methods. Appendix A also discloses some of the high priority genes initially evaluated as targets for the HSM (hotspot mutation panel). Appendix A provides a schematic outlining the workflow of the multiplex PCR methods disclosed herein. The Appendix also provides a graph showing a reduction in non-specific amplification products using the methods and target-specific primers according to the disclosure as compared to standard multiplex primers (without a cleavable group). Appendix A also describes an exemplary method for obtaining DNA from an FFPE sample, for example using an Epicentre Quick Extract protocol. Results from studies performed using the exemplary methods and target-specific primers disclosed herein using Ion Torrent 314, 316, and 318 chips were performed generating exemplary data regarding number of reads, coverage and total number of amplicons amenable to each chip type are provided in Appendix A.

### Example 4

### Generation of a 384-Plex (Multiplex) PCR Reaction

[0377] In this example, a multiplex polymerase chain reaction was performed to amplify 384 amplicons across genomic DNA. A primer pool containing modified forward and reverse primer pairs was cycled with genomic DNA and subjected to library amplification as described in Example 1. The data obtained from 3 individual runs on an Ion Torrent PGM™ Sequencer was averaged and is presented in FIG. 5. The data shows an average read rate of 1000 per amplicon.

### Example 5

### Effect of Forward and Reverse Primers on the Coverage of a 384-Plex Multiplex PCR Reaction

[0378] In this example, a multiplex polymerase chain reaction was performed to amplify 411 amplicons across genomic DNA. The primer pool for the amplification reaction contained modified forward and reverse primers and was subjected to library amplification as described in Example 1. The data obtained from a single run on an Ion Torrent PGM™ Sequencer shows the average read rate of about 400 for both the reverse and forward modified primers (FIGS. 6A and 6B).

### Example 6

### Reproducibility of 384-Multiplex Reactions

[0379] In this example, a multiplex polymerase chain reaction was performed to amplify 384 amplicons across genomic DNA. The primer pool contained modified forward and reverse primer pairs and was subjected to library amplification as described in Example 1. The data obtained from 7 individual runs on the Ion Torrent PGM™ Sequencer was averaged and is presented in FIG. 7. The data shows an average read rate of about 400 per amplicon.

### Example 7

### Reproducibility of 411-Multiplex Reactions

[0380] In this example, a multiplex polymerase chain reaction was performed to amplify 411 amplicons across genomic DNA. The primer pool contained modified forward and reverse primer pairs and was subjected to library amplification as described in Example 1. The data obtained from 7 individual runs on the Ion Torrent PGM™ Sequencer was averaged and is presented in FIG. 8. The data shows an average read rate of about 400 per amplicon.

### Example 8

### FFPE Samples as Amendable Substrates for Low Multiplex PCR

[0381] In this example, a multiplex polymerase chain reaction was performed to amplify 96 amplicons from a Fresh-Frozen Paraffin-Embedded (FFPE) sample. Fresh-Frozen and FFPE samples are often problematic for amplification processes due to the small amount of DNA that can be extracted from such samples. Additionally, because of the harsh chemical treatment required to preserve these samples, the quality of DNA extracted from such a sample is generally very poor. DNA was extracted from a FFPE sample and loaded onto an agarose gel for visualization (lanes 1 and 3) or subjected to multiplex PCR and library amplification as described in Example 1 and then loaded onto the agarose gel for visualization (lanes 2 and 4). A 96-plex PCR reaction and library amplification was performed on 10 ng of FFPE DNA as described in Example 1. FIG. 9 shows a photograph of the agarose electrophoresis gel including FFPE DNA prior to and after library amplification as described in Example 1.

### Example 9

### FFPE Samples as Amenable Substrates for High Multiplex PCR

[0382] In this example, a multiplex polymerase chain reaction was performed to amplify 384 amplicons from a Fresh-Frozen Paraffin-Embedded (FFPE) sample. As discussed in Example 8, Fresh-Frozen and FFPE samples are often problematic for amplification due to low extracted DNA quantity and quality. In this example, 10 ng of DNA was extracted from a FFPE sample and subjected to a 384-plex PCR reaction and library amplification as described by Example 1. The data obtained from the Ion Torrent PGM™ Sequencer was averaged and is presented in FIG. 10. The data shows an average read rate of about 400 per amplicon. Further analysis of the read rate for some of the modified forward and reverse primer pairs used in the 384-plex reaction is presented in FIGS. 11A and 11B.

### Example 10

### Detection of Variants in Control Mix of KRAS Codon 12 and Codon 13 Mutants

[0383] In this example, a sample of DNA containing spiked amounts of mutations of the KRAS gene at codon 12 and codon 13 were provided as a blind test sample. The sample was amplified using target-specific modified primer pairs developed for the KRAS gene. The primer pool and samples were amplified as described in Example 1. The amplified library was prepared as a template and enriched. The enriched template was applied to an Ion 314™ Chip and analyzed using an Ion Torrent PGM™ Sequencer as described in Example 1. The data from 3 individual runs was averaged and is provided as FIG. 12. The amplicon products generated during the library amplification process correspond to the expected level of mutations present in the control DNA sample for the KRAS gene at codon 12 and codon 13.

### Example 11

### Resequencing the Cystic Fibrosis Transmembrane Conductance Regulator (CFTR) Gene Coding Region

[0384] The CFTR protein is encoded by the CFTR gene which is approximately 200 kbp, spanning 27 exons. CFTR is an ABC transporter-class ion channel that transports chloride and thiocyanate ions across epithelial cell membranes. Mutations of the CFTR gene affect functioning of the chloride ion channels in these cell membranes, leading to cystic fibrosis and congenital absence of the vas deferens. As a consequence, a male carrier of the mutation in the CFTR gene can be infertile so the detection of the defect is key in IVD considerations.

[0385] In this example, genomic DNA (gDNA) was obtained containing mutations of the CFTR gene. The gDNA was prepared for library amplification, template preparation and applied to Ion Torrent 314™ Chip as described in Example 1. Over 8947 bases were amplified during the multiplex PCR reaction. The resulting amplicon library contained 34 amplicons with an average amplicon length of 104 bp. Sequence analysis of the amplicon library was conducted against the CFTR gene sequence reference: NCBI gi|287325315|ref|NG_{—}016465.1|, 195703 bp

[0386] The generated amplicon library was used to evaluate detection of the CFTR gene mutations in the sample. It was found that the library amplification process detected and identified 5 point mutations and 1 insertion/deletion at low coverage (4,001 reads) (FIG. 13 (Part I-Part III). The naming system for the 6 mutations is as follows:

[0387] Naming system: CFMD (UMD)

[0388] c.869+11C>T (1001+11C/T)

[0389] c.1408A>G (M470V)

[0390] c.2562T>G (2694T/G)

[0391] c.4389G>A (4521G/A)

[0392] c.1-8G>C (125G/C)

[0393] c.1521_{—}1523deICTT (ΔF508)

[0394] Most resequencing assays are based on amplicons that are greater than 100 bp. This example demonstrates the applicability and amenability of the library amplification process exemplified in Example 1, to generate amplicons of a length necessary for resequencing assays. The example also shows the accuracy of the Ion Torrent PGM™ Sequencer to correctly identify point mutations and insertions/deletion mutations in a given sample.

### Example 12

### Generation of Target-Specific Primers

[0395] Table 2 provides a list of target-specific forward and reverse uracil containing primers that were used in the above examples to amplify target-specific regions of gDNA or DNA extracted from samples, such as FFPE samples. Table 2 provides the chromosome location of each primer pair, the nucleotide sequence of each forward and reverse primer in each primer pair. Table 2 also provides the coordinates of the 5′ end of the upstream/forward primer, the length of each amplicon, the corresponding amplicon nucleotide sequence, the length of each forward and reverse primer, and the Tₘ for each forward or reverse primer. Tables 3a-3d also provide a list of distinct target-specific forward and reverse primer pairs that were used in example 13 to amplify target-specific regions of gDNA or DNA extracted from FFPE samples from the genes of Table 1 that are associated with cancer. The following primer pair was also included for coverage of a mutation in the AKT1 gene (c.49G>A). Forward primer: GCCGCCAGGUCTTGATGUA and reverse primer: GCACAUCTGTCCUGGCACA.

### Example 13

### Alternate Library Protocol

[0396] PCR Amplify Genomic DNA Targets

[0397] In this example, a multiplex polymerase chain reaction was performed to amplify multiple individual amplicons across a genomic DNA sample or FFPE sample. A representative list of genes associated with cancers that were incorporated for investigation while synthesizing the primer pool is provided in Table 1. Each primer pair in the primer pool was designed to contain at least one uracil nucleotide in each of the forward and reverse primer (Tables 3a-3d). Each primer pair was also designed to selectively hybridize to, and promote amplification of a specific gene or gene fragment of the genomic DNA sample to reduce formation of non-specific amplification products.

[0398] To a single well of a 96-well PCR plate was added 4 microliters of 5× Primer Pool (containing the primer pairs) at a concentration of 250 nm each in TE, 10 ng of genomic DNA and 10 microliters of an amplification reaction mixture (2× Stoffel HiFi Master Mix) that can include glycerol, dNTPs and Stoffel fragment of Amplitaq® DNA Polymerase (Invitrogen, Catalog No. N8080038) to a final volume of 20 microliters with nuclease free water (Life Technologies, CA, Part No. 600004).

[0399] The PCR plate was sealed and loaded into a thermal cycler (GeneAmp® PCR system 9700 Dual 96-well thermal cycler (Life Technologies, CA, Part No. N8050200 and 4314445)) and run on the following temperature profile to generate the preamplified amplicon library. Variation to the number of cycles was performed based on the total plexy of the reaction mixture under investigation. For example, a plexy of 48-96 was run for 17 cycles; a plexy of 97-192 was run for 16 cycles; a plexy of 193-384 was run for 15 cycles; a plexy of 385-768 was run for 14 cycles; a plexy of 769-1536 was run for 13 cycles. Additionally, for reaction mixtures containing barcodes or pooled reaction mixtures the number of cycles was lowered by one or more additional cycles. For example, 2-3 barcodes per sample were subtracted by one cycle; 4-8 barcodes per sample were subtracted by 2 cycles, and 9-16 barcodes were subtracted by 3 cycles. An initial holding stage was performed at 99° C. for 2 minutes, followed by X cycles (as determined above) of denaturing at 99° C. for 15 seconds and an annealing and extending stage at 60° C. for 4 minutes. After cycling, the preamplified amplicon library was held at 4° C. until proceeding to the digestion and phosphorylation step outlined below.

[0400] Digest/Phosphorylate/Heat Kill the Amplicons

[0401] To the preamplified library (˜20 microliters), 2 microliters of FuPa reagent was added. Typically, the FuPa reagent comprises one or more uracil degradable enzymes such as UDG, FPG and the like, a DNA polymerase such as Pol I, T4PNK, Klenow and the like, and an antibody such as an anti-Taq antibody. In this example, the relative amount of each enzymatic component in the FuPa reagent was 1:1:1:1 but can be varied according to the number of required cycles, variations to the temperature profile, etc., as can be determined by one of ordinary skill in the art. The PCR place was sealed and loaded into a thermal cycler (GeneAmp® PCR system 9700 Dual 96-well thermal cycler (Life Technologies, CA, Part No. N8050200 and 4314445)) and run on the following temperature profile. An initial holding stage was performed at 37° C. for 5 minutes, followed by 55° C. for 10 minutes and then 60° C. for 20 minutes. After cycling, the preamplified amplicon library was held at 4° C. until proceeding to the ligation/nick translation step outlined below.

[0402] Ligate Adapters to the Amplicons and Nick Translate

[0403] After phosphorylation, the amplicon preamplification library (˜22 μl) proceeded directly to a ligation step. In this example, the preamplification library now containing the phosphorylated amplicon library was combined with 1 microliter of A/P1 Adaptersadapters (20 μm each) (sold as a component of the Ion Fragment Library Kit, Life Technologies, Part No. 4466464), 2 microliters of 10× ligation buffer and 1 microliter of DNA ligase (sold as components of the Ion Fragment Library Kit, Life Technologies, Part No. 4466464). The PCR plate was sealed and loaded into a thermal cycler (GeneAmp® PCR system 9700 Dual 96-well thermal cycler (Life Technologies, CA, Part No. N8050200 and 4314445)) and run on the following temperature profile. An initial holding stage was performed at 22° C. for 30 minutes, followed by 65° C. for 10 minutes and then held at 4° C. until proceeding to the next step.

[0404] If the amplicon library is to contain barcodes (for example Ion DNA Barcoding 1-16 kit, Life Technologies, Part No. 4468654, incorporated herein in its entirety), the barcodes can be added at this step to the PCR plate essentially according to the manufacturer's instructions prior to proceeding to the next step

[0405] 1.8× AMPure XP Purification

[0406] 1.8× sample volume of AgenCourt® AMPure® Reagent (Beckman Coulter, CA) was added to the ligated DNA. The mixture was mixed and incubated at room temperature for 5 minutes. After the solution had cleared, the supernatant was discarded. An ethanol wash was performed and the supernatant discarded. Any remaining ethanol was removed and the pellet was air-dried for about 5 minutes at room temperature. The pellet was resuspended in 20 microliters of DNase/RNase Free Water (Life Technologies, CA, Part No. 600004). In some instances, an optional library amplification step can be performed on the amplicon library, as outlined below.

[0407] Nick Translate and Amplify the Amplicon Library and Purify the Library

[0408] The ligated DNA (˜20 microliters) was combined with 78 microliters of Platinum® PCR SuperMix High Fidelity (Life Technologies, CA, Part No. 12532-016, sold as a component of the Ion Fragment Library Kit, Life Technologies, Part No. 4466464) and 4 microliters of Library Amplification Primer Mix (5 μM each) (Life Technologies, CA, Part No. 602-1068-01, sold as a component of the Ion Fragment Library Kit, Life Technologies, Part No. 4466464). The solution was applied to a single well of a 96-well PCR plate and sealed. The plate was loaded into a thermal cycler (GeneAmp® PCR system 9700 Dual 96-well thermal cycler (Life Technologies, CA, Part No. N8050200 and 4314445)) and run on the following temperate profile to generate the final amplicon library.

[0409] A nick-translation was performed at 72° C. for 1 minute, followed by an enzyme activation stage at 98° C. for 2 minutes, followed by 7 cycles of denaturing at 98° C. for 15 seconds and an annealing and extending stage at 60° C. for 1 minute. After cycling, the final amplicon library was held at 4° C. until proceeding to the final purification step outlined below.

[0410] The final amplicon library (˜100 microliters) was combined with 1.8× sample volume of Agencourt® AMPure® XP reagent (Beckman Coulter, CA). The mixture was then incubated for 5 minutes at room temperature. The PCR plate containing the final amplicon library was washed with 70% ethanol and the supernatant discarded. Any remaining ethanol was removed and air-dried for about 5 minutes at room temperature. Once dry, the library was resuspended in 20 microliters of Low TE (Life Technologies, CA, Part No. 602-1066-01).

[0411] Assess the Library Size Distribution and Determine the Template Dilution Factor

[0412] The final amplicon library was quantitated to determine the library dilution (Template Dilution Factor) that results in a concentration within the optimized target range for Template Preparation (e.g., PCR-mediated addition of library molecules onto Ion Sphere™ Particles). The final amplicon library is typically quantitated for downstream Template Preparation procedure using an Ion Library Quantitation Kit (qPCR) (Life Technologies, Part No. 4468802) and/or a Bioanalyzer™ (Agilent Technologies, Agilent 2100 Bioanalyzer) to determine the molar concentration of the amplicon library, from which the Template Dilution Factor is calculated. For example, instructions to determine the Template Dilution Factor by quantitative real-time PCR (qPCR) can be found in the Ion Library Quantitation Kit User Guide (Life Technologies, Part No. 4468986), hereby incorporated by reference in its entirety.

[0413] In this example, 1 microliter of the final amplicon library preparation was analyzed on the 2100 Bioanalyzer™ with an Agilent High Sensitivity DNA Kit (Agilent Technologies, Part No. 5067-4626) to generate peaks in the 135-205 bp size range and at a concentration of about 5×10⁹ copies per microliter.

[0414] Proceed to Template Preparation

[0415] An aliquot of the final library was used to prepare DNA templates that were clonally amplified on Ion Sphere™ Particles using emulsion PCR (emPCR). The preparation of template in the instant example was prepared according to the manufacturer's instructions using an Ion Xpress Template Kit (Life Technologies, Part No. 4466457), hereby incorporated by reference in its entirety. Once template-positive Ion Sphere Particles were enriched, an aliquot of the Ion Spheres were loaded onto an Ion 314™ Chip (Life Technologies, Part No. 4462923) as described in the Ion Sequencing User Guide (Part No. 4467391), hereby incorporated in its entirety, and subjected to analysis and sequencing as described in the Ion Torrent PGM Sequencer User Guide (Life Technologies, Part No. 4462917), hereby incorporated in its entirety.

### Example 14

### Alternate Library Protocol

[0416] PCR Amplify Genomic DNA Targets

[0417] In this example, a multiplex polymerase chain reaction was performed to amplify multiple individual amplicons across a genomic DNA sample. A representative list of genes associated with cancers that were incorporated for investigation while synthesizing the primer pool is provided in Table 1. Each primer pair in the primer pool was designed to contain at least one uracil nucleotide in each of the forward and reverse primer (Table 2). Each primer pair was also designed to selectively hybridize to, and promote amplification of a specific gene or gene fragment of the genomic DNA sample to reduce formation of non-specific amplification products.

[0418] To a single well of a 96-well PCR plate was added 5 microliters of 4×HSM Primer Pool (containing the primer pairs of Table 2) at a concentration of 250 nm each in TE, 50 ng of genomic DNA and 10 microliters of an amplification reaction mixture (2× PreAmp HiFi Master Mix) that can include glycerol, dNTPs and a DNA Polymerase (such as Taq DNA Polymerase, Invitrogen, Catalog No. N8080038) to a final volume of 20 microliters with nuclease free water (Life Technologies, CA, Part No. 600004).

[0419] The PCR plate was sealed and loaded into a thermal cycler (GeneAmp® PCR system 9700 Dual 96-well thermal cycler (Life Technologies, CA, Part No. N8050200 and 4314445)) and run on the following temperature profile to generate the preamplified amplicon library. An initial holding stage was performed at 98° C. for 2 minutes, followed by 16 cycles of denaturing at 98° C. for 15 seconds and an annealing and extending stage at 60° C. for 4 minutes. After cycling, the preamplified amplicon library was held at 4° C. until proceeding to the purification step outlined below.

[0420] Purify the Amplicons from Input DNA and Primers

[0421] Two rounds of Agencourt® AMPure® XP Reagent (Beckman Coulter, CA) binding, wash, and elution at 0.6× and 1.2× volume ratios were found to remove genomic DNA and unbound or excess primers. In a 1.5 ml LoBind tube (Eppendorf, Part No. 022431021), the preamplified amplicon library (20 microliters) was combined with 12 microliters (0.6× volumes) of Agencourt® AMPure® XP reagent (Beckman Coulter, CA). The bead suspension was pipetted up and down to thoroughly mix the bead suspension with the preamplified amplicon library. The sample was then pulse-spin and incubated for 5 minutes at room temperature.

[0422] The tube containing the sample was placed on a magnetic rack such as a DynaMag™-2 spin magnet (Life Technologies, CA, Part No. 123-21D) for 2 minutes to capture the beads. Once the solution cleared, the supernatant was transferred to a new tube, where 24 microliters (1.2× volume) of AgenCourt® AMPure® XP beads (Beckman Coulter, CA) were added to the supernatant. The mixture was pipetted to ensure the bead suspension mixed with the preamplified amplicon library. The sample was then pulse-spin and incubated at room temperature for 5 minutes. The tube containing the sample was placed on the magnetic rack for 2 minutes to capture the beads. Once the solution cleared, the supernatant was carefully discarded without disturbing the bead pellet. The desired preamplified amplicon library was now bound to the beads. Without removing the tube from the magnetic rack, 200 microliters of freshly prepared 70% ethanol was introduced into the sample. The sample was incubated for 30 seconds while gently rotating the tube on the magnetic rack. After the solution cleared, the supernatant was discarded without disturbing the pellet. A second ethanol wash was performed and the supernatant discarded. Any remaining ethanol was removed by pulse-spinning the tube and carefully removing residual ethanol while not disturbing the pellet. The pellet was air-dried for about 5 minutes at room temperature.

[0423] Once the tube was dry, the tube was removed from the magnetic rack and 20 microliters of DNase/RNase Free Water was added (Life Technologies, CA, Part No. 600004). The tube was vortexed and pipetted to ensure the sample was mixed thoroughly. The sample was pulse-spin and placed on the magnetic rack for two minutes. After the solution cleared, the supernatant containing the eluted DNA was transferred to a new tube.

[0424] Phosphorylate the Amplicons

[0425] To the eluted DNA (˜20 microliters), 3 microliters of DNA ligase buffer (Invitrogen, Catalog No. 15224041), 2 microliters dNTP mix (10 mm), and 2 microliters of FuP reagent were added. The reaction mixture was mixed thoroughly to ensure uniformity and incubated at 37° C. for 10 minutes.

[0426] Ligate Adapters to the Amplicons and Purify the Ligated Amplicons

[0427] After incubation, the reaction mixture proceeded directly to a ligation step. Here, the reaction mixture now containing the phosphorylated amplicon library was combined with 1 microliter of A/P1 adapters (20 μm each) (sold as a component of the Ion Fragment Library Kit, Life Technologies, Part No. 4466464) and 1 microliter of DNA ligase (sold as a component of the Ion Fragment Library Kit, Life Technologies, Part No. 4466464), and incubated at room temperature for 30 minutes.

[0428] After the incubation step, 52 microliters (1.8× sample volume) of AgenCourt® AMPure® Reagent (Beckman Coulter, CA) was added to the ligated DNA. The mixture was pipetted thoroughly to mix the bead suspension with the ligated DNA. The mixture was pulse-spin and incubated at room temperature for 5 minutes. The samples underwent another pulse-spin and were placed on a magnetic rack such as a DynaMag™-2 spin magnet (Life Technologies, CA, Part No. 123-21D) for two minutes. After the solution had cleared, the supernatant was discarded. Without removing the tube from the magnetic rack, 200 microliters of freshly prepared 70% ethanol was introduced into the sample. The sample was incubated for 30 seconds while gently rotating the tube on the magnetic rack. After the solution cleared, the supernatant was discarded without disturbing the pellet. A second ethanol wash was performed and the supernatant discarded. Any remaining ethanol was removed by pulse-spinning the tube and carefully removing residual ethanol while not disturbing the pellet. The pellet was air-dried for about 5 minutes at room temperature.

[0429] The pellet was resuspended in 20 microliters of DNase/RNase Free Water (Life Technologies, CA, Part No. 600004) and vortexed to ensure the sample was mixed thoroughly. The sample was pulse-spin and placed on the magnetic rack for two minutes. After the solution cleared, the supernatant containing the ligated DNA was transferred to a new Lobind tube (Eppendorf, Part No. 022431021).

[0430] Nick Translate and Amplify the Amplicon Library and Purify the Library

[0431] The ligated DNA (˜20 microliters) was combined with 76 microliters of Platinum® PCR SuperMix High Fidelity (Life Technologies, CA, Part No. 12532-016, sold as a component of the Ion Fragment Library Kit, Life Technologies, Part No. 4466464) and 4 microliters of Library Amplification Primer Mix (5 μM each) (Life Technologies, CA, Part No. 602-1068-01, sold as a component of the Ion Fragment Library Kit, Life Technologies, Part No. 4466464), the mixture was pipetted thoroughly to ensure a uniformed solution. The solution was applied to a single well of a 96-well PCR plate and sealed. The plate was loaded into a thermal cycler (GeneAmp® PCR system 9700 Dual 96-well thermal cycler (Life Technologies, CA, Part No. N8050200 and 4314445)) and run on the following temperate profile to generate the final amplicon library.

[0432] A nick-translation was performed at 72° C. for 1 minute, followed by an enzyme activation stage at 98° C. for 2 minutes, followed by 6 cycles of denaturing at 98° C. for 15 seconds and an annealing and extending stage at 60° C. for 1 minute. After cycling, the final amplicon library was held at 4° C. until proceeding to the final purification step outlined below.

[0433] In a 1.5 ml LoBind tube (Eppendorf, Part No. 022431021), the final amplicon library (˜100 microliters) was combined with 180 microliters (1.8× sample volume) of Agencourt® AMPure® XP reagent (Beckman Coulter, CA). The bead suspension was pipetted up and down to thoroughly mix the bead suspension with the final amplicon library. The sample was then pulse-spin and incubated for 5 minutes at room temperature.

[0434] The tube containing the final amplicon library was placed on a magnetic rack such as a DynaMag™-2 spin magnet (Life Technologies, CA, Part No. 123-21D) for 2 minutes to capture the beads. Once the solution cleared, the supernatant was carefully discarded without disturbing the bead pellet. Without removing the tube from the magnetic rack, 400 microliters of freshly prepared 70% ethanol was introduced into the sample. The sample was incubated for 30 seconds while gently rotating the tube on the magnetic rack. After the solution cleared, the supernatant was discarded without disturbing the pellet. A second ethanol wash was performed and the supernatant discarded. Any remaining ethanol was removed by pulse-spinning the tube and carefully removing residual ethanol while not disturbing the pellet. The pellet was air-dried for about 5 minutes at room temperature.

[0435] Once the tube was dry, the tube was removed from the magnetic rack and 20 microliters of Low TE was added (Life Technologies, CA, Part No. 602-1066-01). The tube was pipetted and vortexed to ensure the sample was mixed thoroughly. The sample was pulse-spin and placed on the magnetic rack for two minutes. After the solution cleared, the supernatant containing the final amplicon library was transferred to a new Lobind tube (Eppendorf, Part No. 022431021).

[0436] Assess the Library Size Distribution and Determine the Template Dilution Factor

[0437] The final amplicon library was quantitated to determine the library dilution (Template Dilution Factor) that results in a concentration within the optimized target range for Template Preparation (e.g., PCR-mediated addition of library molecules onto Ion Sphere™ Particles). The final amplicon library is typically quantitated for downstream Template Preparation procedure using an Ion Library Quantitation Kit (qPCR) (Life Technologies, Part No. 4468802) and/or a Bioanalyzer™ (Agilent Technologies, Agilent 2100 Bioanalyzer) to determine the molar concentration of the amplicon library, from which the Template Dilution Factor is calculated. For example, instructions to determine the Template Dilution Factor by quantitative real-time PCR (qPCR) can be found in the Ion Library Quantitation Kit User Guide (Life Technologies, Part No. 4468986), hereby incorporated by reference in its entirety.

[0438] In this example, 1 microliter of the final amplicon library preparation was analyzed on the 2100 Bioanalyzer™ with an Agilent High Sensitivity DNA Kit (Agilent Technologies, Part No. 5067-4626).

[0439] Proceed to Template Preparation

[0440] An aliquot of the final library was used to prepare DNA templates that were clonally amplified on Ion Sphere™ Particles using emulsion PCR (emPCR). The preparation of template in the instant example was prepared according to the manufacturer's instructions using an Ion Xpress Template Kit (Life Technologies, Part No. 4466457), hereby incorporated by reference in its entirety. Once template-positive Ion Sphere Particles were enriched, an aliquot of the Ion Spheres were loaded onto an Ion 314™ Chip (Life Technologies, Part No. 4462923) as described in the Ion Sequencing User Guide (Part No. 4467391), hereby incorporated in its entirety, and subjected to analysis and sequencing as described in the Ion Torrent PGM Sequencer User Guide (Life Technologies, Part No. 4462917), hereby incorporated in its entirety.

### Example 15

### Alternate Library Protocol

[0441] PCR Amplify Genomic DNA Targets

[0442] In this example, a multiplex polymerase chain reaction was performed to amplify multiple individual amplicons across a genomic DNA sample. A representative list of genes associated with cancers that were incorporated for investigation while synthesizing the primer pool is provided in Table 1. Each primer pair in the primer pool was designed to contain at least one uracil nucleotide in each of the forward and reverse primer (Table 2). Each primer pair was also designed to selectively hybridize to, and promote amplification of a specific gene or gene fragment of the genomic DNA sample to reduce formation of non-specific amplification products.

[0443] To a single well of a 96-well PCR plate was added 10 microliters of 2× Primer Pool (containing the primer pairs of Table 2) at a concentration of 250 nm each, 10 ng of genomic DNA and 4 microliters of an amplification reaction mixture (5× Ion Ampliseq Master Mix) that can include glycerol, dNTPs and a DNA polymerase (for example, Stoffel fragment of Amplitaq® DNA Polymerase (Invitrogen Catalog No. N8080038)) to a final volume of 20 microliters with nuclease free water (Life Technologies, CA, Part No. 600004).

[0444] The PCR plate was sealed and loaded into a thermal cycler (GeneAmp® PCR system 9700 Dual 96-well thermal cycler (Life Technologies, CA, Part No. N8050200 and 4314445)) and run on the following temperature profile to generate the preamplified amplicon library. Variation to the number of cycles was performed based on the total plexy of the reaction mixture under investigation. For example, a plexy of 48-96 was run for 17 cycles; a plexy of 97-192 was run for 16 cycles; a plexy of 193-384 was run for 15 cycles; a plexy of 385-768 was run for 14 cycles; a plexy of 769-1536 was run for 13 cycles. Additionally, for reaction mixtures containing barcodes or pooled reaction mixtures the number of cycles was lowered by one or more additional cycles. For example, 2-3 barcodes per sample were subtracted by one cycle; 4-8 barcodes per sample were subtracted by 2 cycles, and 9-16 barcodes were subtracted by 3 cycles. For samples that contain fragmented DNA, e.g., enzymatically digested DNA, the number of cycles can be increased for up to 3 cycles. For selective amplification of one or more DNA samples using a starting input of 1 ng or less DNA, the number of cycles was increased by an additional 3 cycles. An initial holding stage was performed at 99° C. for 2 minutes, followed by X cycles (as determined above) of denaturing at 99° C. for 15 seconds and an annealing and extending stage at 60° C. for 4 minutes. After cycling, the preamplified amplicon library was held at 4° C. until proceeding to the purification step outlined below.

[0445] Digest/Phosphorylate/Heat Kill the Amplicons

[0446] To the preamplified library (˜20 microliters), 2 microliters of FuPa reagent was added. Typically, the FuPa reagent comprises one or more uracil degradable enzymes such as UDG, FPG and the like, a DNA polymerase such as Klenow fragment, and an antibody such as an anti-Taq antibody. In this example, the relative amount of each enzymatic component in the FuPa reagent was 1:1:1:2 but can be varied according to the number of required cycles, variations to the temperature profile, etc., as can be determined by one of ordinary skill in the art. The PCR plate was sealed and loaded into a thermal cycler (GeneAmp® PCR system 9700 Dual 96-well thermal cycler (Life Technologies, CA, Part No. N8050200 and 4314445)) and run on the following temperature profile. An initial holding stage was performed at 37° C. for 10 minutes, followed by 55° C. for 10 minutes and then 60° C. for 20 minutes. After cycling, the preamplified amplicon library was held at 4° C. until proceeding to the ligation/nick translation step outlined below.

[0447] Ligate Adapters to the Amplicons and Nick Translate

[0448] After phosphorylation, the amplicon preamplification library (˜22 μl) proceeded directly to a ligation step. In this example, the preamplification library now containing the phosphorylated amplicon library was combined with 2 microliters of A/P1 Adaptersadapters (5 each) (sold as a component of the Ion Fragment Library Kit, Life Technologies, Part No. 4466464), 4 microliters of 7.5× ligation buffer and 2 microliters of T4 DNA ligase (5 u/μl). The PCR plate was sealed and loaded into a thermal cycler (GeneAmp® PCR system 9700 Dual 96-well thermal cycler (Life Technologies, CA, Part No. N8050200 and 4314445)) and run on the following temperature profile. An initial holding stage was performed at 22° C. for 30 minutes, followed by 60° C. for 5 minutes and then held at 4° C. until proceeding to the next step.

[0449] If the amplicon library is to contain barcodes (for example Ion DNA Barcoding 1-16 kit, Life Technologies, Part No. 4468654, incorporated herein in its entirety), the barcodes are added at this step to the PCR plate essentially according to the manufacturer's instructions prior to proceeding to the next step. Optionally, all the samples or barcodes can be pooled into a single tube at this step.

[0450] 1.6× AMPure XP Purification

[0451] 1.6× sample volume of AgenCourt® AMPure® Reagent (Beckman Coulter, CA) was added to the ligated DNA. The mixture was mixed and incubated at room temperature for 5 minutes. An ethanol wash was performed and the supernatant discarded. Any remaining ethanol was removed and air-dried for about 5 minutes at room temperature. The dry tube containing the library was resuspended in 20 microliters of Nuclease Free Water (Life Technologies, CA, Part No. 600004). In some instances, an optional nick translation/library amplification step can be performed on the amplicon library, as outlined below.

[0452] Nick Translate and Amplify the Amplicon Library and Purify the Library

[0453] The ligated DNA (˜20 microliters) was combined with 78 microliters of Platinum® PCR SuperMix High Fidelity (Life Technologies, CA, Part No. 12532-016, sold as a component of the Ion Fragment Library Kit, Life Technologies, Part No. 4466464) and 4 microliters of Library Amplification Primer Mix (5 μM each) (Life Technologies, CA, Part No. 602-1068-01, sold as a component of the Ion Fragment Library Kit, Life Technologies, Part No. 4466464). The solution was applied to a single well of a 96-well PCR plate and sealed. The plate was loaded into a thermal cycler (GeneAmp® PCR system 9700 Dual 96-well thermal cycler (Life Technologies, CA, Part No. N8050200 and 4314445)) and run on the following temperate profile to generate the final amplicon library.

[0454] A nick-translation was performed at 72° C. for 1 minute, followed by an enzyme activation stage at 98° C. for 2 minutes, followed by 7 cycles of denaturing at 98° C. for 15 seconds and an annealing and extending stage at 60° C. for 1 minute. After cycling, the final amplicon library was held at 4° C. until proceeding to the final purification step outlined below.

[0455] The final amplicon library (˜100 microliters) was combined with 1.8× sample volume of Agencourt® AMPure® XP reagent (Beckman Coulter, CA). The mixture was then incubated for 5 minutes at room temperature. The final amplicon library was washed with 70% ethanol and the supernatant discarded. Any remaining ethanol was removed and air-dried for about 5 minutes at room temperature. Once dry, the library was resuspended in 20 microliters of Low TE (Life Technologies, CA, Part No. 602-1066-01). In this example, 1 microliter of the final amplicon library preparation was analyzed on the 2100 Bioanalyzer™ with an Agilent High Sensitivity DNA Kit (Agilent Technologies, Part No. 5067-4626).

### Example 16

[0456] In this example, an amplicon library was prepared using 2946 target-specific primer pairs. The primer pairs were prepared from the list of genes in Tables 1 and 18. Each primer pair was designed to selectively hybridize and promote amplification of the selected targeted region. The libraries were prepared according to Example 14 except that the primer pool was pooled into a single PCR tube, evaporated and resuspended in low TE and supplemented with 0.25 mM magnesium chloride prior to incubating with DNA and the amplification reaction mixture. In this example, both high molecular weight DNA or mechanically sheared DNA were applied as input DNA (10 ng input). The results from this sequencing experiment are provided in the Table below and demonstrated approximately 91-98% of all reads were on target, greater than 99% target coverage at 1× when normalized to 100×, and greater than 98% base accuracy.

| | | |
|---|---|---|
| Plexity of PreAmp | 2946 | 2946 |
| Target DNA | Sheared | HMW |
| Percent greater than 0.01 mean | 99.40% | 99.29% |
| reads per base | | |
| Percent greater than 0.1 mean | 96.33% | 95.16% |
| reads per base | | |
| Percent greater than 0.2 mean | 92.26% | 89.40% |
| reads per base | | |
| Percent no strand bias of all Amps | 71.15% | 72.98% |
| Percent no strand bias of all Amps | 73.31% | 77.12% |
| >100 reads | | |
| Percent end to end read of on | −1.00% | −1.00% |
| target reads | | |
| Per base accuracy | 98.34% | 98.59% |
| Percent of total reads mapped | 99.10% | 99.14% |
| on target | | |
| Percent wells with read | 35.94% | 31.23% |
| Number of total reads | 2277968 | 1979529 |
| Number of mapped reads | 2257427 | 1962501 |
| Number of reads on target | 2094328 | 1941916 |
| Percent mapped reads on target | 92.78% | 98.95% |
| Percent reads off target | 7.16% | 1.04% |
| Percent reads unmapped | 0.90% | 0.86% |
| Bases in targeted reference | 327815 | 327815 |
| Bases covered (at least 1x) | 326642 | 326656 |
| Total base reads on target | 220235195 | 206585756 |
| Average base coverage depth | 671.83 | 630.19 |
| Maximum base read depth | 3070 | 2520 |
| Average base read depth | 674.23 | 632.43 |
| Std. Dev base read depth | 431.42 | 466.91 |
| Target coverage at 1x | 99.64% | 99.65% |
| Target coverage at 10x | 99.23% | 99.12% |
| Target coverage at 20x | 98.77% | 98.42% |
| Target coverage at 10x - norm 100 | 96.33% | 95.16% |
| Percent end to end read of on | −1.00% | −1.00% |
| target reads | | |
| Percent forward end to end read | −1.00% | −1.00% |
| of on target reads | | |
| Percent reverse end to end read | −1.00% | −1.00% |
| of on target reads | | |
| Coverage needed for 99 percentile | 52.2 | 48.96 |
| base with at least 1x coverage | | |
| Coverage needed for 98 percentile | 207.65 | 247.24 |
| base with at least 10x coverage | | |
| Coverage needed for 95 percentile | 145.33 | 203.58 |
| base with at least 20x coverage | | |

### Example 17

[0457] In this example, an amplicon library was prepared using 6110 target-specific primer pairs. The library corresponds to approximately 450 cancer genes. The primer pairs were prepared from the list of genes in Tables 1 and 18. Each primer pair was designed to selectively hybridize and promote amplification of the selected targeted region using the target-specific selection criteria outline herein. The libraries were prepared according to Example 14 except that the primer pools were prepared as two tubes (3188-plex and 2946-plex) and supplemented with 0.5 mM magnesium chloride. The PCR preamplification cycling steps were also modified to increase the denaturing temperature to 99° C., included an extending step of 72° C. for 5 minutes, after the 60° C. annealing step, which was also extended to 10 minutes. After cycling, each tube containing the amplicon library was combined into a single emulsion for emulsion PCR enrichment. The amplicon library was used to prepare DNA templates that were clonally amplified on Ion Sphere™ Particles using emulsion PCR (emPCR). The preparation of template in the instant example was prepared according to the manufacturer's instructions using an Ion Xpress Template Kit (Life Technologies, Part No. 4466457), hereby incorporated by reference in its entirety. Once template-positive Ion Sphere Particles were enriched, an aliquot of the Ion Spheres were loaded onto an Ion 316™ Chip (Life Technologies, Part No. 4466616) as described in the Ion Sequencing User Guide (Part No. 4467391), hereby incorporated in its entirety, and subjected to analysis and sequencing as described in the Ion Torrent PGM Sequencer User Guide (Life Technologies, Part No. 4462917), hereby incorporated in its entirety.

[0458] In this example, high molecular weight DNA was applied as the input DNA (10 ng). The results from this experiment are provided in the Table below and demonstrated approximately 95% of all reads were on target, approximately 95% of all reads (greater than 100 reads) showed no strand bias, and greater than 97% base accuracy.

| | |
|---|---|
| Percent greater than 0.01 mean reads per base | 81.58% |
| Percent greater than 0.1 mean reads per base | 75.40% |
| Percent greater than 0.2 mean reads per base | 69.73% |
| Percent no strand bias of all bases | 92.16% |
| Percent no strand bias of all Amps | 72.16% |
| Percent no strand bias of all Amps >100 reads | 95.06% |
| Percent end to end read of on target reads | −1.00% |
| Per base accuracy | 97.78% |
| Percent of total reads mapped to hg19 | 98.05% |
| Percent wells with read | 34.51% |
| Number of total reads | 2190638 |
| Number of mapped reads | 2147835 |
| Number of targets | 6110 |
| Number of reads on target | 2098176 |
| Percent all reads on target | 95.78% |
| Percent mapped reads on target | 97.69% |
| Percent reads off target | 2.27% |
| Percent reads unmapped | 1.95% |
| Bases in targeted reference | 677270 |
| Bases covered (at least 1x) | 556880 |
| Total base reads on target | 243058082 |
| Average base coverage depth | 358.88 |
| Maximum base read depth | 2402 |
| Average base read depth | 436.45 |
| Std. Dev base read depth | 371.45 |
| Target coverage at 1x | 82.22% |
| Target coverage at 10x | 80.45% |
| Target coverage at 20x | 78.41% |
| Target coverage at 100x | 66.15% |
| Target coverage at 500x | 29.11% |
| Target coverage at 1x - norm 100 | 81.58% |
| Target coverage at 10x - norm 100 | 75.40% |
| Target coverage at 20x - norm 100 | 69.73% |
| Target coverage at 100x - norm 100 | 40.40% |
| Target coverage at 500x - norm 100 | 0.34% |
| Percent end to end read of on target reads | −1.00% |
| Percent forward end to end read of on target reads | −1.00% |
| Percent reverse end to end read of on target reads | −1.00% |
| Coverage needed for 99 percentile base with at least | 865.36 |
| 1x coverage | |
| Coverage needed for 98 percentile base with at least | 8653.57 |
| 20x coverage | |
| Coverage needed for 95 percentile base with at least | 60574.98 |
| 350x coverage | |
| Percent priority 1 design covered | 0 |
| Percent priority 9 design covered | 0 |

### Example 18

[0459] In this example, an amplicon library was prepared using approximately 1500 target-specific primer pairs. The primer pairs were prepared from genes in Table 1. Each primer pair was designed to selectively hybridize and promote amplification of the selected targeted region using the target-specific primer selection criteria outlined herein. The libraries were prepared according to Example 15 except that the number of preamplification PCR cycles was amended as follows: Plexy: 12-24=18 cycles; 25-48=17 cycles; 48-96=16 cycles; 97-192=15 cycles; 193-384=14 cycles; 385-768=13 cycles; 769-1536=12 cycles; 1537-3072=11 cycles. When using fragmented DNA, up to 2 additional cycles were added to the preamplification PCR process. Additionally, the annealing temperature (60° C.) can be increased from 4 minutes to 8 minutes when using 1537+ plexy.

[0460] During the nick translation and library amplification step, the number of PCR cycles can be increased, for example to about 10, when necessary.

[0461] The amplicon library was used to prepare DNA templates that were clonally amplified on Ion Sphere™ Particles using emulsion PCR (emPCR). The preparation of template in the instant example was prepared according to the manufacturer's instructions using an Ion Xpress Template Kit (Life Technologies, Part No. 4466457), hereby incorporated by reference in its entirety. Once template-positive Ion Sphere Particles were enriched, an aliquot of the Ion Spheres were loaded onto an Ion 316™ Chip (Life Technologies, Part No. 4466616) as described in the Ion Sequencing User Guide (Part No. 4467391), hereby incorporated in its entirety, and subjected to analysis and sequencing as described in the Ion Torrent PGM Sequencer User Guide (Life Technologies, Part No. 4462917), hereby incorporated in its entirety.

[0462] In this example, 10 ng FFPE DNA was applied as the input DNA. The results from this experiment are provided in the Table below and demonstrated approximately 94% showed base without strand bias, greater than 98% per base accuracy, and 99% of bases with greater than 20× coverage when average coverage normalized to 100×.

| | |
|---|---|
| Number of targets | 1459 |
| Per Base Accuracy | 98.70% |
| Percent bases >0.2x mean | 99.20% |
| Target coverage at 20x if normalized to | 99.20% |
| 100x average coverage depth | |
| Base without Strand Bias | 94.12% |
| Percent of reads on target | 80.54% |
| Coverage needed for 98 percentile base | 65.07 |
| with at least 20x coverage | |
| Percent bases >0.01x mean | 99.77% |

### Example 19

### Multiplex PCR with 12,500 Target Specific Primers

[0463] In this example, several amplicon libraries were prepared using approximately 12,000 target-specific primer pairs in a single reaction. The target-specific primer pairs were prepared from genes associated with cancers, provided in Table 18. The target-specific primers were designed using the primer selection criteria outlined herein. In this example, primers from Table 6 of U.S. Application 61/598,881 hereby incorporated by reference in its entirety were used as target-specific primers in the reaction. Each target-specific primer pair was designed to promote amplification of the intended target sequence outlined in Table 18. Each amplicon library was prepared according to the section of Example 13 titled PCR amplify genomic DNA targets, except that the concentration of target-specific primers in the primer pool was amended to 25 nM and the number of target-specific primers was about 12,000. Additionally, the preamplification PCR cycles was amended as follows: An initial holding stage was performed at 99° C. for 2 minutes, followed by 11 cycles of denaturing at 99° C. for 15 seconds; a first annealing stage at 60° C. for 10 minutes; a second annealing stage at 63° C. for 5 minutes; a third annealing stage at 66° C. for 5 minutes; a fourth annealing stage at 69° C. for 5 minutes; and an extending stage at 72° C. for 5 minutes; followed by 5 cycles of denaturing at 99° C. for 15 seconds; a first annealing stage at 60° C. for 10 minutes; a second annealing stage at 63° C. for 6 minutes; a third annealing stage at 66° C. for 6 minutes; a fourth annealing stage at 69° C. for 6 minutes; and an extending stage at 72° C. for 6 minutes. After cycling, the preamplified amplicon library was held at 4° C. until proceeding to the next step as outlined below.

[0464] Purify the Amplicons from Input DNA and Primers

[0465] One round of Agencourt® AMPure® XP Reagent (Beckman Coulter, CA) binding, wash, and elution at 1.2× volume ratio was found to remove genomic DNA and unbound or excess primers.

[0466] In a 1.5 ml LoBind tube (Eppendorf, Part No. 022431021), the preamplified amplicon library (20 microliters) was combined with 24 microliters (1.2× volume) of Agencourt® AMPure® XP reagent (Beckman Coulter, CA). The bead suspension was pipetted up and down to thoroughly mix the bead suspension with the preamplified amplicon library. The sample was then pulse-spin and incubated for 5 minutes at room temperature.

[0467] The tube containing the sample was placed on a magnetic rack such as a DynaMag™-2 spin magnet (Life Technologies, CA, Part No. 123-21D) for 2 minutes to capture the beads. Once the solution cleared, the supernatant was transferred to a new tube, where 13.3 ul of nuclease free water was added. Then, 48 microliters of AgenCourt® AMPure® XP beads (Beckman Coulter, CA) were added to the diluted supernatant. The mixture was pipetted to ensure the bead suspension mixed with the preamplified amplicon library. The sample was then pulse-spin and incubated at room temperature for 5 minutes. The tube containing the sample was placed on the magnetic rack for 2 minutes to capture the beads. Once the solution cleared, the supernatant was carefully discarded without disturbing the bead pellet. The desired preamplified amplicon library was now bound to the beads. Without removing the tube from the magnetic rack, 200 microliters of freshly prepared 70% ethanol was introduced into the sample. The sample was incubated for 30 seconds while gently rotating the tube on the magnetic rack. After the solution cleared, the supernatant was discarded without disturbing the pellet. A second ethanol wash was performed and the supernatant discarded. Any remaining ethanol was removed by pulse-spinning the tube and carefully removing residual ethanol while not disturbing the pellet. The pellet was air-dried for about 5 minutes at room temperature.

[0468] Once the tube was dry, the tube was removed from the magnetic rack and 20 microliters of DNase/RNase Free Water was added (Life Technologies, CA, Part No. 600004). The tube was vortexed and pipetted to ensure the sample was mixed thoroughly. The sample was pulse-spin and placed on the magnetic rack for two minutes. After the solution cleared, the supernatant containing the eluted DNA was transferred to a new tube.

[0469] Phosphorylate the Amplicons

[0470] To the eluted DNA (˜20 microliters), 3 microliters of DNA ligase buffer (Invitrogen, Catalog No. 15224041), 2 microliters dNTP mix, and 2 microliters of FuP reagent were added. The reaction mixture was mixed thoroughly to ensure uniformity and incubated at 37° C. for 13 minutes.

[0471] Ligate Adapters to the Amplicons and Purify the Ligated Amplicons

[0472] After incubation, the reaction mixture proceeded directly to a ligation step. Here, the reaction mixture now containing the phosphorylated amplicon library was combined with 1.5 microliter of A/P1 adapters (20 μm each) (sold as a component of the Ion Fragment Library Kit, Life Technologies, Part No. 4466464) and 1 microliter of DNA ligase (sold as a component of the Ion Fragment Library Kit, Life Technologies, Part No. 4466464), and incubated at room temperature for 30 minutes.

[0473] After the incubation step, 52 microliters (1.8× sample volume) of AgenCourt® AMPure® Reagent (Beckman Coulter, CA) was added to the ligated DNA. The mixture was pipetted thoroughly to mix the bead suspension with the ligated DNA. The mixture was pulse-spin and incubated at room temperature for 5 minutes. The samples underwent another pulse-spin and were placed on a magnetic rack such as a DynaMag™-2 spin magnet (Life Technologies, CA, Part No. 123-21D) for two minutes. After the solution had cleared, the supernatant was discarded. Without removing the tube from the magnetic rack, 200 microliters of freshly prepared 70% ethanol was introduced into the sample. The sample was incubated for 30 seconds while gently rotating the tube on the magnetic rack. After the solution cleared, the supernatant was discarded without disturbing the pellet. A second ethanol wash was performed and the supernatant discarded. Any remaining ethanol was removed by pulse-spinning the tube and carefully removing residual ethanol while not disturbing the pellet. The pellet was air-dried for about 5 minutes at room temperature.

[0474] The pellet was resuspended in 20 microliters of DNase/RNase Free Water (Life Technologies, CA, Part No. 600004) and vortexed to ensure the sample was mixed thoroughly. The sample was pulse-spin and placed on the magnetic rack for two minutes. After the solution cleared, the supernatant containing the ligated DNA was transferred to a new Lobind tube (Eppendorf, Part No. 022431021).

[0475] Nick Translate and Amplify the Amplicon Library and Purify the Library

[0476] The ligated DNA (˜20 microliters) was combined with 76 microliters of Platinum® PCR SuperMix High Fidelity (Life Technologies, CA, Part No. 12532-016, sold as a component of the Ion Fragment Library Kit, Life Technologies, Part No. 4466464) and 4 microliters of Library Amplification Primer Mix (5 μM each) (Life Technologies, CA, Part No. 602-1068-01, sold as a component of the Ion Fragment Library Kit, Life Technologies, Part No. 4466464), the mixture was pipetted thoroughly to ensure a uniformed solution. The solution was applied to a single well of a 96-well PCR plate and sealed. The plate was loaded into a thermal cycler (GeneAmp® PCR system 9700 Dual 96-well thermal cycler (Life Technologies, CA, Part No. N8050200 and 4314445)) and run on the following temperate profile to generate the final amplicon library.

[0477] A nick-translation was performed at 72° C. for 1 minute, followed by an enzyme activation stage at 98° C. for 2 minutes, followed by 6 cycles of denaturing at 98° C. for 15 seconds and an annealing and extending stage at 60° C. for 1 minute. After cycling, the final amplicon library was held at 4° C. until proceeding to the final purification step outlined below.

[0478] In a 1.5 ml LoBind tube (Eppendorf, Part No. 022431021), the final amplicon library (˜100 microliters) was combined with 180 microliters (1.8× sample volume) of Agencourt® AMPure® XP reagent (Beckman Coulter, CA). The bead suspension was pipetted up and down to thoroughly mix the bead suspension with the final amplicon library. The sample was then pulse-spin and incubated for 5 minutes at room temperature.

[0479] The tube containing the final amplicon library was placed on a magnetic rack such as a DynaMag™-2 spin magnet (Life Technologies, CA, Part No. 123-21D) for 2 minutes to capture the beads. Once the solution cleared, the supernatant was carefully discarded without disturbing the bead pellet. Without removing the tube from the magnetic rack, 400 microliters of freshly prepared 70% ethanol was introduced into the sample. The sample was incubated for 30 seconds while gently rotating the tube on the magnetic rack. After the solution cleared, the supernatant was discarded without disturbing the pellet. A second ethanol wash was performed and the supernatant discarded. Any remaining ethanol was removed by pulse-spinning the tube and carefully removing residual ethanol while not disturbing the pellet. The pellet was air-dried for about 5 minutes at room temperature.

[0480] Once the tube was dry, the tube was removed from the magnetic rack and 20 microliters of Low TE was added (Life Technologies, CA, Part No. 602-1066-01). The tube was pipetted and vortexed to ensure the sample was mixed thoroughly. The sample was pulse-spin and placed on the magnetic rack for two minutes. After the solution cleared, the supernatant containing the final amplicon library was transferred to a new Lobind tube (Eppendorf, Part No. 022431021).

[0481] Assess the Library Size Distribution and Determine the Template Dilution Factor

[0482] The final amplicon library was quantitated to determine the library dilution (Template Dilution Factor) that results in a concentration within the optimized target range for Template Preparation (e.g., PCR-mediated addition of library molecules onto Ion Sphere™ Particles). The final amplicon library is typically quantitated for downstream Template Preparation procedure using an Ion Library Quantitation Kit (qPCR) (Life Technologies, Part No. 4468802) and/or a Bioanalyzer™ (Agilent Technologies, Agilent 2100 Bioanalyzer) to determine the molar concentration of the amplicon library, from which the Template Dilution Factor is calculated. For example, instructions to determine the Template Dilution Factor by quantitative real-time PCR (qPCR) can be found in the Ion Library Quantitation Kit User Guide (Life Technologies, Part No. 4468986), hereby incorporated by reference in its entirety.

[0483] In this example, 1 microliter of the final amplicon library preparation was analyzed on the 2100 Bioanalyzer™ with an Agilent High Sensitivity DNA Kit (Agilent Technologies, Part No. 5067-4626) to generate peaks in the 135-205 bp size range and at a concentration of about 5×10⁹ copies per microliter.

[0484] Proceed to Template Preparation

[0485] An aliquot of the final library was used to prepare DNA templates that were clonally amplified on Ion Sphere™ Particles using emulsion PCR (emPCR). The preparation of template in the instant example was prepared according to the manufacturer's instructions using an Ion Xpress Template Kit (Life Technologies, Part No. 4466457), hereby incorporated by reference in its entirety. Once template-positive Ion Sphere Particles were enriched, an aliquot of the Ion Spheres were loaded onto an Ion 314™ Chip (Life Technologies, Part No. 4462923) as described in the Ion Sequencing User Guide (Part No. 4467391), hereby incorporated in its entirety, and subjected to analysis and sequencing as described in the Ion Torrent PGM Sequencer User Guide (Life Technologies, Part No. 4462917), hereby incorporated in its entirety. The data obtained from this example is provided in the Table below.

Ampliseq 1.0 work flow mod

| Sample (50 ng NA12878) | | | | enrich unbound |
|---|---|---|---|---|
| Plexity | 6,000 | 12,000 | 12,000 | 12,000 |
| C450 oligo pool | pool 1 + 3 | pool 1 + 2 + 3 + 4 | pool 1 + 2 + 3 + 4 | pool 1 + 2 + 3 + 4 |
| PreAmp cycle (6 hr = PA1, 9 hr = PA2) | 6 hr | 6 hr | 9 hr | 9 hr |
| PA enzyme/load % | Taq/69% | Taq/82% | Stoffel/15% | Stoffel/43% |
| Percent greater than 0.01 mean reads per base | 97.72% | 79.15% | 82.08% | 78.42% |
| Percent greater than 0.1 mean reads per base | 84.32% | 54.28% | 82.08% | 54.22% |
| Percent greater than 0.2 mean reads per base | 73.79% | 44.86% | 68.80% | 45.45% |
| Percent no strand bias of all bases | 80.42% | 68.48% | 45.19% | 66.01% |
| Percent no strand bias of all Amps | 81.23% | 62.87% | 32.58% | 54.80% |
| Percent no strand bias of all Amps >100 reads | 139.07% | 229.75% | 8126.00% | 334.62% |
| Percent end to end read of on target reads | 71.40% | 69.05% | 53.32% | 77.87% |
| Per base accuracy | 97.38% | 97.47% | 97.18% | 98.87% |
| Percent of total reads mapped to hg19 | 98.17% | 97.86% | 97.85% | 97.10% |
| Percent wells with read | 25.93% | 30.24% | 1.62% | 12.97% |
| Number of total reads | 1643486 | 1916570 | 102466 | 821799 |
| Number of mapped reads | 1613458 | 1875619 | 100261 | 797953 |
| Number of targets | 6249 | 12469 | 12469 | 12469 |
| Number of reads on target | 1534973 | 1793835 | 93560 | 763982 |
| Percent all reads on target | 93.40% | 93.60% | 91.31% | 92.96% |
| Percent mapped reads on target | 95.14% | 95.64% | 93.32% | 95.74% |
| Percent reads off target | 4.78% | 4.27% | 6.54% | 4.13% |
| Percent reads unmapped | 1.83% | 2.14% | 2.15% | 2.90% |
| Bases in targeted reference | 668162 | 1249178 | 1249178 | 1249178 |
| Bases covered (at least 1x) | 661416 | 1076079 | 1025284 | 979564 |
| Total base reads on target | 156995237 | 189835759 | 9789500 | 80845870 |
| Average base coverage depth | 234.97 | 151.97 | 7.84 | 64.72 |
| Maximum base read depth | 2391 | 4284 | 339 | 3921 |
| Average base read depth | 237.32 | 176.23 | 9.52 | 82.46 |
| Std. Dev base read depth | 277.21 | 351.91 | 16.09 | 157.73 |
| Target coverage at 1x | 98.99% | 86.14% | 82.08% | 78.42% |
| Target coverage at 10x | 93.38% | 60.43% | 22.25% | 49.45% |
| Target coverage at 20x | 86.73% | 51.08% | 9.49% | 39.12% |
| Target coverage at 100x | 57.38% | 28.52% | 0.44% | 17.75% |
| Target coverage at 500x | 14.24% | 9.07% | 0.00% | 2.34% |
| Target coverage at 1x - norm 100 | 97.72% | 79.15% | 82.08% | 78.42% |
| Target coverage at 10x - norm 100 | 84.32% | 54.28% | 82.08% | 54.22% |
| Target coverage at 20x - norm 100 | 73.79% | 44.86% | 68.80% | 45.45% |
| Target coverage at 100x - norm 100 | 33.67% | 23.15% | 27.66% | 23.26% |
| Target coverage at 500x - norm 100 | 1.20% | 5.22% | 3.24% | 5.22% |
| Percent end to end read of on target reads | 71.40% | 69.05% | 53.32% | 77.87% |
| Percent forward end to end read of on target reads | 36.45% | 35.07% | 26.64% | 39.40% |
| Percent reverse end to end read of on target reads | 34.95% | 33.98% | 26.67% | 38.47% |
| Coverage needed for 99 percentile base with at least | 156.65 | 475.51 | 215.63 | 274.86 |
| 1x coverage | | | | |

### Example 20

### Assessment of Relative Copy Number Variation (CNV)

[0486] In this example, several DNA samples were amplified using 3000 target-specific primer pairs. The target-specific primers were designed using the target-specific primer selection criteria outlined herein. The sequences of the selected target-specific primers used in this experiment can be found in Table 17 (or Table 6 of U.S. Application 61/598,881 hereby incorporated by reference in its entirety). The DNA samples were barcoded during the library amplification process (as outlined in Example 13). In this example, the DNA samples were obtained from a commercial source (Coriell DNA) and contained known variations in copy number to demonstrate that the multiplex amplification methods disclosed herein can be used to assess copy number variation.

[0487] Four DNA samples were purchased from Coriell DNA that contained a 3 Mb deletion on chromosome 22 that was associated with DiGeorge Syndrome. An additional DNA sample was purchased from Coriell DNA that contained a 16 Mb deletion on chromosome 7 associated with Grieg Cephalopolysyndactyly Syndrome (GCPS). An amplicon library was prepared for each DNA sample including a barcode for the purposes of distinguishing one DNA sample from another. Each amplicon library was prepared according to the method outlined in Example 15, except in this example, 3000 target-specific primer pairs were used in a single preamplification reaction. The target-specific primer pairs were prepared from the genes in Table 18. Each amplicon library was prepared using 10 ng of DNA from the starting material. The libraries were prepared according to Example 15 except that the number of preamplification PCR cycles was amended as follows: Plexy: 12-24=18 cycles; 25-48=17 cycles; 48-96=16 cycles; 97-192=15 cycles; 193-384=14 cycles; 385-768=13 cycles; 769-1536=12 cycles; 1537-3072=11 cycles. When using fragmented DNA (e.g., FFPE DNA samples), up to 2 additional cycles can be added to the preamplification PCR process. Additionally, the annealing temperature (60° C.) can be increased from 4 minutes to 8 minutes when using 1537+ plexy, if a higher yield is necessary.

[0488] If required, the number of PCR cycles can be increased during the nick translation and library amplification step, for example to about 10 cycles.

[0489] The amplicon library was used to prepare DNA templates that were clonally amplified on Ion Sphere™ Particles using emulsion PCR (emPCR). The preparation of template in the instant example was prepared according to the manufacturer's instructions using an Ion Xpress Template Kit (Life Technologies, Part No. 4466457), hereby incorporated by reference in its entirety. One template-positive Ion Sphere Particles were enriched, an aliquot of the Ion Spheres were loaded onto an Ion 316™ Chip (Life Technologies, Part No. 4466616) as described in the Ion Sequencing User Guide (Part No. 4467391), hereby incorporated in its entirety, and subjected to analysis and sequencing as described in the Ion Torrent PGM Sequencer User Guide (Life Technologies, Part No. 4462917), hereby incorporated in its entirety.

[0490] In this example, 10 ng DNA was applied as the input DNA. The results from this experiment are provided in FIGS. 14-15.

[0491] FIG. 14 shows that the multiplex PCR amplification methods disclosed herein can be used to assess copy number variation. FIG. 14 shows the amplicon frequency data for 12 amplicons spanning part of the critical region of the gene CLTCL1 associated with DiGeorge Syndrome. The circles plotted at frequency 0 represent each amplicon of CLTCL1 amplified by the multiplex amplification method. The red (solo) circles are data points from a single DiGeorge Syndrome DNA sample obtained from Coriell DNA. Four DiGeorge Syndrome DNA samples were tested in this experiment and an average ratio of percent total reads filtered for DiGeorge samples compared to controls are plotted as circles with error bars. The dotted line at frequency 1.0 is the frequency expected for a normal sample (i.e., a sample not containing a variation in copy number). As is shown in FIG. 14, the frequencies of the tested DiGeorge Syndrome samples are about 0.5, indicating that a deletion within the CLTCL1 gene has occurred and can be observed and detected using the amplification methods disclosed herein.

[0492] FIG. 15 shows that the multiplex amplification methods disclosed herein can be used to assess copy number variation in a different chromosome. FIG. 15 shows the amplicon frequency data for 4 amplicons spanning part of the gene IKZF1, associated with Greig Cephalopolysyndactyly Syndrome (GCPS). The circles plotted at frequency 0 represent each of the four amplicons of IKZF1 that were amplified by the multiplex PCR amplification method outlined in this example. Ratios were obtained for a single GCPS sample as compared to four control samples and their frequencies are plotted in FIG. 15. GCPS DNA has only one copy of the GCPS gene, whereas normal (or control) DNA samples contain two copies of the gene. As noted in FIG. 15, the control samples show 2× for copy number as compared to the expected frequency (dotted line). As is demonstrated by FIG. 15, variation in copy number can be determined using the multiplex PCR amplification method disclosed herein.

### Example 21

### Mutiplex Amplification with an Inosine Cleavable Group

[0493] In this example, target-specific primers containing one or more cleavable groups denoted as an inosine were prepared according to the primer selection criteria disclosed herein. After an initial in silico evaluation of the primer pairs to proposed target sequences, the evaluated target-specific primers (disclosed in Table 19) were ordered from Integrated DNA Technologies (IDT) (Coravilla, Iowa). The inosine containing primers were received from IDT and subjected to multiplex amplification, performed according to the method of Example 15 with the following exceptions. The 2× Primer Pool (containing primer from Table 2) was replaced with the Inosine containing primers (disclosed on Table 19, corresponding to SEQ ID NOs: 103122-103143). Additionally, after performing PCR amplification of genomic DNA targets, the samples was subjected to digestion with EndoV and FuPa.

[0494] In this example, an aliquot of the final library was used to prepare DNA templates that were clonally amplified on Ion Sphere™ Particles using emulsion PCR (emPCR). The preparation of template in the instant example was prepared according to the manufacturer's instructions using an Ion Xpress Template Kit (Life Technologies, Part No. 4466457), hereby incorporated by reference in its entirety. Once template-positive Ion Sphere Particles were enriched, an aliquot of the Ion Spheres were loaded onto an Ion 314™ Chip (Life Technologies, Part No. 4462923) as described in the Ion Sequencing User Guide (Part No. 4467391), hereby incorporated in its entirety, and subjected to analysis and sequencing as described in the Ion Torrent PGM Sequencer User Guide (Life Technologies, Part No. 4462917), hereby incorporated in its entirety. The data obtained from this example included a per base accuracy percentage of 97.17% and percent of reads on target were observed as 96.83%.

### Example 22

### Alternative Multiplex PCR Protocol

[0495] In this example, various alternative embodiments are presented over one or more of the prior multiplex PCR methods.

[0496] PCR Amplify Genomic DNA Targets

[0497] In this example, a multiplex polymerase chain reaction was performed to amplify multiple individual amplicons (target sequences) across a genomic DNA sample and an FFPE sample. A representative list of genes associated with cancers and inherited diseases that were incorporated for investigation while synthesizing the primer pool is provided in at least Tables 1 and 4. Each primer pair in the primer pool was designed to contain at least one uracil nucleotide in each of the forward and reverse primer (Table 2) or designed to contain at least one inosine residue in each of the forward and reverse primer (Table 19). Each primer pair was also designed to selectively hybridize to, and promote amplification of a specific gene or gene fragment of the genomic DNA or FFPE sample to reduce formation of non-specific amplification products.

[0498] To a single well of a 96-well PCR plate was added 10 microliters of 2× Primer Pool (containing the primer pairs of Table 2), 4 microliters of 5× Cancer Primer pool (containing the primer pairs of Table 17), 4 microliters of 5×IDP Primer pool (containing the primer pairs of Table 15) or 10 microliters of 2×HID Primer Pool (containing the primer pairs of Tables 13 and 14), at a concentration of 200 nm each for plexy under 96, or at a concentration of 50 nm for plexy above 96. 10 ng of genomic DNA or FFPE DNA and 4 microliters of an amplification reaction mixture (5× Ion Ampliseq HiFi Master Mix) was added to a final volume of 20 microliters with nuclease free water (Life Technologies, CA, Part No. 600004).

[0499] The PCR plate was sealed and loaded into a thermal cycler (GeneAmp® PCR system 9700 Dual 96-well thermal cycler (Life Technologies, CA, Part No. N8050200 and 4314445)) and run on the following temperature profile to generate the preamplified amplicon library. Variation to the number of cycles was performed based on the total plexy of the reaction mixture under investigation. For example, a plexy of 12-24 was run for 20 cycles; a plexy of 25-48 was run for 19 cycles; a plexy of 48-96 was run for 18 cycles; a plexy of 97-192 was run for 17 cycles; a plexy of 193-384 was run for 16 cycles; a plexy of 385-768 was run for 15 cycles; a plexy of 769-1536 was run for 14 cycles; a plexy of 1537-3072 was run for 13 cycles; a plexy of 3073-6144 was run for 12 cycles. Additionally, for reaction mixtures containing barcodes or pooled reaction mixtures the number of cycles was lowered by one or more additional cycles. For example, 2-3 barcodes per sample were subtracted by one cycle; 4-8 barcodes per sample were subtracted by 2 cycles, and 9-16 barcodes were subtracted by 3 cycles. For samples that contain fragmented DNA, e.g., FFPE or enzymatically digested DNA, the number of cycles can be increased for up to 3 cycles.

[0500] An initial holding stage was performed at 99° C. for 2 minutes, followed by X cycles (as determined above) of denaturing at 99° C. for 15 seconds and an annealing and extending stage at 60° C. for 4 minutes. For plexy above 1536, the annealing and extending stage was increase to 8 minutes at 60° C. After cycling, the preamplified amplicon library was held at 10° C. until proceeding to the purification step outlined below.

[0501] Digest/Phosphorylate/Heat Kill the Amplicons

[0502] To the preamplified library (˜20 microliters), 2 microliters of FuPa reagent was added. The PCR plate was sealed and loaded into a thermal cycler (GeneAmp® PCR system 9700 Dual 96-well thermal cycler (Life Technologies, CA, Part No. N8050200 and 4314445)) and run on the following temperature profile. An initial holding stage was performed at 50° C. for 10 minutes, followed by 55° C. for 10 minutes and then 65° C. for 20 minutes. After cycling, the preamplified amplicon library was held at 10° C. until proceeding to the ligation/nick translation step outlined below.

[0503] Ligate Adapters to the Amplicons and Nick Translate

[0504] After phosphorylation, the amplicon preamplification library (˜22 μl) proceeded directly to a ligation step. In this example, the preamplification library now containing the phosphorylated amplicon library was combined with 2 microliters of A/P1 Adapter (5 μm each) (sold as a component of the Ion Fragment Library Kit, Life Technologies, Part No. 4466464), 4 microliters of Switch Solution and 2 microliters of DNA ligase (5 u/μl). The PCR plate was sealed and loaded into a thermal cycler (GeneAmp® PCR system 9700 Dual 96-well thermal cycler (Life Technologies, CA, Part No. N8050200 and 4314445)) and run on the following temperature profile. An initial holding stage was performed at 22° C. for 30 minutes, followed by 72° C. for 10 minutes and then held at 10° C. until proceeding to the next step.

[0505] If the amplicon library is to contain barcodes (for example Ion DNA Barcoding 1-16 kit, Life Technologies, Part No. 4468654, incorporated herein in its entirety), the barcodes are added at this step to the PCR plate essentially according to the manufacturer's instructions prior to proceeding to the next step. Optionally, all the samples or barcodes can be pooled into a single tube at this step.

[0506] 1.5× AMPure XP Purification

[0507] 1.5× sample volume (45 microliters) of AgenCourt® AMPure® Reagent (Beckman Coulter, CA) was added to the ligated DNA. The mixture was mixed and incubated at room temperature for 5 minutes and then transferred to a magnet plate. Sample was incubated on the magnet plate for 2 minutes, and the supernatant discarded. An ethanol wash was performed and the supernatant discarded. Any remaining ethanol was removed and air-dried for about 5 minutes at room temperature. The dry tube containing the library was resuspended in 20 microliters of Nuclease Free Water (Life Technologies, CA, Part No. 600004) or low Tris-EDTA buffer. In some instances, an optional nick translation/library amplification step can be performed on the amplicon library, as outlined below.

[0508] Nick Translate and Amplify the Amplicon Library and Purify the Library

[0509] The ligated DNA (˜20 microliters) was combined with 50 microliters of Platinum® PCR SuperMix High Fidelity (Life Technologies, CA, Part No. 12532-016, sold as a component of the Ion Fragment Library Kit, Life Technologies, Part No. 4466464) and placed on a magnet plate for 2 minutes. 48 ul of the eluted amplicons in the PCR supermix were transferred to a new well of a 96-well plate to which was added 2 microliters of Library Amplification Primer Mix (Life Technologies, CA, Part No. 602-1068-01, sold as a component of the Ion Fragment Library Kit, Life Technologies, Part No. 4466464). The PCR plate was sealed and loaded into a thermal cycler (GeneAmp® PCR system 9700 Dual 96-well thermal cycler (Life Technologies, CA, Part No. N8050200 and 4314445)) and run on the following temperate profile to generate the final amplicon library.

[0510] An enzyme activation stage at 98° C. for 2 minutes, followed by 5 cycles of denaturing at 98° C. for 15 seconds and an annealing and extending stage at 60° C. for 1 minute. After cycling, the final amplicon library was held at 4° C. until proceeding to the final purification step outlined below.

[0511] The final amplicon library (˜100 microliters) was combined with 0.5× sample volume of Agencourt® AMPure® XP reagent (Beckman Coulter, CA). The mixture was then incubated for 5 minutes at room temperature. The sample was transferred to a magnet plate for 2 minutes and the supernatant (˜75 microliters) removed to a new well. 1.2× volume of Agencourt® AMPure® XP reagent (Beckman Coulter, CA) was added and incubated at room temperature for 5 minutes. The sample was then placed on a magnet plate for 2 minutes and the supernatant discarded. The final amplicon library was washed with 70% ethanol and the supernatant discarded. Any remaining ethanol was removed and air-dried for about 5 minutes at room temperature. Once dry, the library was resuspended in 20 microliters of Low TE (Life Technologies, CA, Part No. 602-1066-01). In this example, 1 microliter of the final amplicon library preparation was analyzed on a 2100 Bioanalyzer™ with an Agilent High Sensitivity DNA Kit (Agilent Technologies, Part No. 5067-4626) or analyzed on a Qubit machine using the DSDNA HS Assay Kit (Part number Q32851).

Lengthy table referenced here
US20120295819A1-20121122-T00001
Please refer to the end of the specification for access instructions.

Lengthy table referenced here
US20120295819A1-20121122-T00002
Please refer to the end of the specification for access instructions.

Lengthy table referenced here
US20120295819A1-20121122-T00003
Please refer to the end of the specification for access instructions.

Lengthy table referenced here
US20120295819A1-20121122-T00004
Please refer to the end of the specification for access instructions.

Lengthy table referenced here
US20120295819A1-20121122-T00005
Please refer to the end of the specification for access instructions.

Lengthy table referenced here
US20120295819A1-20121122-T00006
Please refer to the end of the specification for access instructions.

Lengthy table referenced here
US20120295819A1-20121122-T00007
Please refer to the end of the specification for access instructions.

Lengthy table referenced here
US20120295819A1-20121122-T00008
Please refer to the end of the specification for access instructions.

Lengthy table referenced here
US20120295819A1-20121122-T00009
Please refer to the end of the specification for access instructions.

Lengthy table referenced here
US20120295819A1-20121122-T00010
Please refer to the end of the specification for access instructions.

Lengthy table referenced here
US20120295819A1-20121122-T00011
Please refer to the end of the specification for access instructions.

Lengthy table referenced here
US20120295819A1-20121122-T00012
Please refer to the end of the specification for access instructions.

LENGTHY TABLES
The patent application contains a lengthy table section. A copy of the table is available in electronic form from the USPTO web site (http://seqdata.uspto.gov/?pageRequest=docDetail&DocID=US20120295819A1). An electronic copy of the table will also be available from the USPTO upon request and payment of the fee set forth in 37 CFR 1.19(b)(3).

We claim:

1. A method for amplifying a plurality of different target sequences within a sample, comprising:
amplifying within a single amplification reaction mixture at least one hundred different target sequences from a sample including a plurality of different target sequences, wherein the amplifying includes contacting at least some portion of the sample with a plurality of target-specific primers, and a polymerase under amplification conditions, thereby producing at least one hundred different amplified target sequences, wherein at least two of the different amplified target sequences are less than 50% complementary to each other and wherein at least one of the plurality of target-specific primers and at least one of the amplified target sequences includes a cleavable group;
cleaving a cleavable group of at least one amplified target sequence;
ligating at least one adapter to at least one amplified target sequence in a blunt-ended ligation reaction, thereby producing one or more adapter-ligated amplified target sequences, and
reamplifying at least one of the adapter-ligated amplified target sequences.

2. The method of claim 1, wherein one or more of the at least one adapter is not substantially complementary to at least one amplified target sequence.

3. The method of claim 1, wherein the reamplifying includes contacting the at least one adapter-ligated amplified target sequence with one or more primers including a sequence that is complementary to at least one of the adapters or their complement, and a polymerase under amplification conditions, thereby producing at least one reamplified adapter-ligated amplified target sequence.

4. The method of claim 3, wherein at least one of the one or more adapters or their complements is not substantially complementary to at least one amplified target sequence.

5. The method of claim 1, wherein at least one target-specific primer is substantially complementary to at least a portion of a corresponding target sequence in the sample.

6. The method of claim 1, wherein an adapter that is ligated to at least one of the amplified target sequences is susceptible to exonuclease digestion.

7. The method of claim 1, wherein an adapter that is ligated to at least one of the amplified target sequences does not include a protecting group.

8. The method of claim 1, wherein the ligating includes contacting at least one amplified target sequence having a 3′ end and a 5′ end with a ligation reaction mixture including one or more adapters and a ligase under ligation conditions, wherein none of the adapters in the ligation reaction mixture includes, prior to the ligating, a target-specific sequence.

9. The method of claim 8, wherein the ligating includes contacting at least one amplified target sequence with a ligation reaction mixture including one or more adapters and a ligase under ligation conditions, wherein the ligation reaction mixture does not include one or more additional oligonucleotide adapters prior to ligating the one or more adapters to at least one amplified target sequence.

10. The method of claim 1, wherein the amplifying further includes a digestion step prior to the ligating, thereby producing a plurality of blunt-end amplified target sequences possessing a 5′ phosphate group.

The application's sequence listing, which the Patent Office published only in electronic form, follows.

SEQUENCE LISTING (103143 sequences)

SEQ ID NO: 1 - DNA, 22 bp, Artificial Sequence
  Synthetic
ttcgcctgucctcatgtatugg

SEQ ID NO: 2 - DNA, 28 bp, Artificial Sequence
  Synthetic
agtggttatagauggtgaaacctgttug

SEQ ID NO: 3 - DNA, 100 bp, Artificial Sequence
  Synthetic
ttcgcctgtcctcatgtattggtctctcatggcactgtactcttcttgtccagctgtatccagtatgtccaacaaacaggtttcaccatctataaccact

SEQ ID NO: 4 - DNA, 27 bp, Artificial Sequence
  Synthetic
catctacaaaguggttctggatuagct

SEQ ID NO: 5 - DNA, 26 bp, Artificial Sequence
  Synthetic
ctggtgtgaaaugactgaguacaaac

SEQ ID NO: 6 - DNA, 101 bp, Artificial Sequence
  Synthetic
catctacaaagtggttctggattagctggattgtcagtgcgcttttcccaacaccacctgctccaaccaccaccagtttgtactcagtcatttcacaccag

SEQ ID NO: 7 - DNA, 27 bp, Artificial Sequence
  Synthetic
ccaacatgactuacttgatccccauaa

SEQ ID NO: 8 - DNA, 28 bp, Artificial Sequence
  Synthetic
gagaagccatuatctgcaaaaatauccc

SEQ ID NO: 9 - DNA, 103 bp, Artificial Sequence
  Synthetic
ccaacatgacttacttgatccccataagcatgacgacctatgatgataggttttacccatccactcacaagccgggggatatttttgcagataatggcttctc

SEQ ID NO: 10 - DNA, 25 bp, Artificial Sequence
  Synthetic
tgtaaacgtcaauagtgcagauggg

SEQ ID NO: 11 - DNA, 25 bp, Artificial Sequence
  Synthetic
accttuggaggaaaaccctatgaug

SEQ ID NO: 12 - DNA, 109 bp, Artificial Sequence
  Synthetic
tgtaaacgtcaatagtgcagatgggaggctgaggcaaacgttctcctttctctaataaatcagggatttctcgcgttggaattccatcatagggttttcctccaaaggt

SEQ ID NO: 13 - DNA, 23 bp, Artificial Sequence
  Synthetic
catcgccacauaggguagaacat

SEQ ID NO: 14 - DNA, 22 bp, Artificial Sequence
  Synthetic
catggcctuccaacttgacuct

SEQ ID NO: 15 - DNA, 103 bp, Artificial Sequence
  Synthetic
catcgccacatagggtagaacattttgagaaattaaaaagaataattctacttacatcctgaactaccatttgttgacacaagagtcaagttggaaggccatg

SEQ ID NO: 16 - DNA, 25 bp, Artificial Sequence
  Synthetic
acttacguggacatttctugacaca

SEQ ID NO: 17 - DNA, 26 bp, Artificial Sequence
  Synthetic
caaaccuttgtctacaauccaaccac

SEQ ID NO: 18 - DNA, 100 bp, Artificial Sequence
  Synthetic
acttacgtggacatttcttgacacagaatgctccatatgtgtactttgcattgaaattgtgctccagttgaaaggtggttggattgtagacaaaggtttg

SEQ ID NO: 19 - DNA, 23 bp, Artificial Sequence
  Synthetic
ccaaugcagcgaacaatgttcug

SEQ ID NO: 20 - DNA, 24 bp, Artificial Sequence
  Synthetic
ccagtttaagauttgcccagacuc

SEQ ID NO: 21 - DNA, 100 bp, Artificial Sequence
  Synthetic
ccaatgcagcgaacaatgttctggtggttgaatttgctgcagagcagagagggatgtaaccaaaattaactgagctgagtctgggcaaatcttaaactgg

SEQ ID NO: 22 - DNA, 28 bp, Artificial Sequence
  Synthetic
gacagtaacccuacatatacaatugcct

SEQ ID NO: 23 - DNA, 27 bp, Artificial Sequence
  Synthetic
gaaactttggacutcaagaactuggat

SEQ ID NO: 24 - DNA, 117 bp, Artificial Sequence
  Synthetic
gacagtaaccctacatatacaattgccttatattgataatgaaagcatatttgccattttggatatattccttacctgtcaagttctttaatccaagttcttgaagtccaaagtttc

SEQ ID NO: 25 - DNA, 29 bp, Artificial Sequence
  Synthetic
ccagtgactagaaagaucaaattcccaut

SEQ ID NO: 26 - DNA, 21 bp, Artificial Sequence
  Synthetic
ggcatuggcacaggatcatug

SEQ ID NO: 27 - DNA, 110 bp, Artificial Sequence
  Synthetic
ccagtgactagaaagatcaaattcccattgatcttggtacagtttatgaatttgtcaatgttactggaatccacagtctgagctgacatcaatgatcctgtgccaatgcc

SEQ ID NO: 28 - DNA, 26 bp, Artificial Sequence
  Synthetic
aaucaaauagggaaggaaaggagagc

SEQ ID NO: 29 - DNA, 21 bp, Artificial Sequence
  Synthetic
tgactgcugccatcgagaaug

SEQ ID NO: 30 - DNA, 119 bp, Artificial Sequence
  Synthetic
aatcaaatagggaaggaaaggagagcaggataataaaagagagaaatcacagacatacaaagcagtctgtgtccttaggtcctgagcagcctccagcacattctcgatggcagcagtca

SEQ ID NO: 31 - DNA, 24 bp, Artificial Sequence
  Synthetic
gaggcagtcuttactcacctguag

SEQ ID NO: 32 - DNA, 22 bp, Artificial Sequence
  Synthetic
ccagaaacugcctcttgaccug

SEQ ID NO: 33 - DNA, 100 bp, Artificial Sequence
  Synthetic
gaggcagtctttactcacctgtagatgtctcgggccatcccgaagtctccaatcttggccactcttccagggcctggacaggtcaagaggcagtttctgg

SEQ ID NO: 34 - DNA, 25 bp, Artificial Sequence
  Synthetic
ggtttttgcccutccagtgtauact

SEQ ID NO: 35 - DNA, 21 bp, Artificial Sequence
  Synthetic
cctgacgaugtccagtcucct

SEQ ID NO: 36 - DNA, 100 bp, Artificial Sequence
  Synthetic
ggtttttgcccttccagtgtatactctgaaagagcgatgcctccaggttgtccggagcctagtcaagcctgagaattacaggagactggacatcgtcagg

SEQ ID NO: 37 - DNA, 26 bp, Artificial Sequence
  Synthetic
aaaaugacaaagaacagcucaaagca

SEQ ID NO: 38 - DNA, 26 bp, Artificial Sequence
  Synthetic
cattttagcacutacctgtgacucca

SEQ ID NO: 39 - DNA, 106 bp, Artificial Sequence
  Synthetic
aaaatgacaaagaacagctcaaagcaatttctacacgagatcctctctctgaaatcactgagcaggagaaagattttctatggagtcacaggtaagtgctaaaatg

SEQ ID NO: 40 - DNA, 29 bp, Artificial Sequence
  Synthetic
acattttcguaagtgttacucaagaagca

SEQ ID NO: 41 - DNA, 28 bp, Artificial Sequence
  Synthetic
ggttgcctacuggttcaattactttuaa

SEQ ID NO: 42 - DNA, 120 bp, Artificial Sequence
  Synthetic
acattttcgtaagtgttactcaagaagcagaaagggaagaattttttgatgaaacaagacgactttgtgaccttcggctttttcaaccctttttaaaagtaattgaaccagtaggcaacc

SEQ ID NO: 43 - DNA, 26 bp, Artificial Sequence
  Synthetic
gggaagaaaagugttttgaaatgugt

SEQ ID NO: 44 - DNA, 27 bp, Artificial Sequence
  Synthetic
caaacaagttuatatttccccaugcca

SEQ ID NO: 45 - DNA, 108 bp, Artificial Sequence
  Synthetic
gggaagaaaagtgttttgaaatgtgttttataatttagactagtgaatatttttctttgttttttaaggaacactgtccattggcatggggaaatataaacttgtttg

SEQ ID NO: 46 - DNA, 26 bp, Artificial Sequence
  Synthetic
tggatctuccacacaatuaaacagca

SEQ ID NO: 47 - DNA, 26 bp, Artificial Sequence
  Synthetic
gctgagagttautaacagtgcagugt

SEQ ID NO: 48 - DNA, 103 bp, Artificial Sequence
  Synthetic
tggatcttccacacaattaaacagcatgcattgaactgaaaagataactgagaaaatgaaagctcactctggattccacactgcactgttaataactctcagc

SEQ ID NO: 49 - DNA, 23 bp, Artificial Sequence
  Synthetic
tgacctcgucttctacttcugga

SEQ ID NO: 50 - DNA, 22 bp, Artificial Sequence
  Synthetic
agaggcugcagaaatgcaucaa

SEQ ID NO: 51 - DNA, 103 bp, Artificial Sequence
  Synthetic
tgacctcgtcttctacttctggaagtagtgataaggtctatgcccaccagatggttcgtacagattcccgggaacagaagcttgatgcatttctgcagcctct

SEQ ID NO: 52 - DNA, 26 bp, Artificial Sequence
  Synthetic
tgtctttgagtuccattccacttgut

SEQ ID NO: 53 - DNA, 28 bp, Artificial Sequence
  Synthetic
gatctcttgatacaucaatccgtgttug

SEQ ID NO: 54 - DNA, 105 bp, Artificial Sequence
  Synthetic
tgtctttgagttccattccacttgttaacgactggtgccctgttaacgtgtgaatgcaattccctgtctccacatcccaaacacggattgatgtatcaagagatc

SEQ ID NO: 55 - DNA, 24 bp, Artificial Sequence
  Synthetic
ccctccugccatcatatugaacac

SEQ ID NO: 56 - DNA, 21 bp, Artificial Sequence
  Synthetic
tctgcagagutgttagcggut

SEQ ID NO: 57 - DNA, 129 bp, Artificial Sequence
  Synthetic
ccctcctgccatcatattgaacacagcggactgctgcaacatgacccatcaaaacatgtaaacactggcctgtctcaatatcccaaaccctaagagtggcatctcgagaaccgctaacaactctgcaga

SEQ ID NO: 58 - DNA, 27 bp, Artificial Sequence
  Synthetic
accatgacaagautttcccttacctut

SEQ ID NO: 59 - DNA, 23 bp, Artificial Sequence
  Synthetic
actcaaagugtggaaugcagaga

SEQ ID NO: 60 - DNA, 116 bp, Artificial Sequence
  Synthetic
accatgacaagattttcccttaccttttttcatgaagatgcatacaacgcacagtggaagtatgcccatataaggtgtgtatacattctccagtctctgcattccacactttgagt

SEQ ID NO: 61 - DNA, 27 bp, Artificial Sequence
  Synthetic
actgctgaccaaacutttaaagtgtug

SEQ ID NO: 62 - DNA, 28 bp, Artificial Sequence
  Synthetic
ttcttataggtgcugaaaggacatgaug

SEQ ID NO: 63 - DNA, 113 bp, Artificial Sequence
  Synthetic
actgctgaccaaacttttaaagtgttgtcatcagaaccactaactattcggttaccacaaaactgtaagcatgtgatcacatgatcatcatgtcctttcagcacctataagaa

SEQ ID NO: 64 - DNA, 27 bp, Artificial Sequence
  Synthetic
cctcttuagggagcaatgaaaugaagt

SEQ ID NO: 65 - DNA, 28 bp, Artificial Sequence
  Synthetic
tgaactcautgatagttgugaaccaaca

SEQ ID NO: 66 - DNA, 101 bp, Artificial Sequence
  Synthetic
cctctttagggagcaatgaaatgaagtctcgttgaaactggggttctatcacttgcatcatatgttttacttgtgttggttcacaactatcaatgagttca

SEQ ID NO: 67 - DNA, 26 bp, Artificial Sequence
  Synthetic
tgggactttgguaattcaccagtuac

SEQ ID NO: 68 - DNA, 28 bp, Artificial Sequence
  Synthetic
ctgcatcggguccacataaatatatuca

SEQ ID NO: 69 - DNA, 129 bp, Artificial Sequence
  Synthetic
tgggactttggtaattcaccagttacctgtcctggtcatttatagaaaccgaggtatgaaattcgctggagggtcattgaatcaatcagcccagatggacatgaatatatttatgtggacccgatgcag

SEQ ID NO: 70 - DNA, 23 bp, Artificial Sequence
  Synthetic
cccatctccuaacggcttttguc

SEQ ID NO: 71 - DNA, 24 bp, Artificial Sequence
  Synthetic
ggctcaggaagcuatccctatuct

SEQ ID NO: 72 - DNA, 114 bp, Artificial Sequence
  Synthetic
cccatctcctaacggcttttgtccccataggccccatttacatcatcacagagtattgcttctatggagatttggtcaactatttgcataagaatagggatagcttcctgagcc

SEQ ID NO: 73 - DNA, 27 bp, Artificial Sequence
  Synthetic
caagctctcatguctgaactgaagaua

SEQ ID NO: 74 - DNA, 23 bp, Artificial Sequence
  Synthetic
aaaatcctcacuccaggtcagug

SEQ ID NO: 75 - DNA, 118 bp, Artificial Sequence
  Synthetic
caagctctcatgtctgaactgaagataatgactcacctggggccacatttgaacattgtaaacttgctgggagcctgcaccaagtcaggtgggctcactgacctggagtgaggatttt

SEQ ID NO: 76 - DNA, 27 bp, Artificial Sequence
  Synthetic
ccatccauccaggaaaatcagactuaa

SEQ ID NO: 77 - DNA, 28 bp, Artificial Sequence
  Synthetic
cttattctcattcguttcatccaggauc

SEQ ID NO: 78 - DNA, 122 bp, Artificial Sequence
  Synthetic
ccatccatccaggaaaatcagacttaatagtccgcgtgggcgacgagattaggctgttatgcactgatccgggctttgtcaaatggacttttgagatcctggatgaaacgaatgagaataag

SEQ ID NO: 79 - DNA, 23 bp, Artificial Sequence
  Synthetic
tttcgtaatcguagctggcauga

SEQ ID NO: 80 - DNA, 25 bp, Artificial Sequence
  Synthetic
tcagtcatuagagcactcuggagag

SEQ ID NO: 81 - DNA, 108 bp, Artificial Sequence
  Synthetic
tttcgtaatcgtagctggcatgatgtgcattattgtgatgattctgacctacaaatatttacaggtaaccatttatttgttctctctccagagtgctctaatgactga

SEQ ID NO: 82 - DNA, 21 bp, Artificial Sequence
  Synthetic
caacgatgugggcaagactuc

SEQ ID NO: 83 - DNA, 27 bp, Artificial Sequence
  Synthetic
agcctaaacauccccttaaattggaut

SEQ ID NO: 84 - DNA, 100 bp, Artificial Sequence
  Synthetic
caacgatgtgggcaagacttctgcctattttaactttgcatttaaaggtaacaacaaaggtatatttctttttaatccaatttaaggggatgtttaggct

SEQ ID NO: 85 - DNA, 22 bp, Artificial Sequence
  Synthetic
ggaagcccucatgtctgaacuc

SEQ ID NO: 86 - DNA, 23 bp, Artificial Sequence
  Synthetic
caauaaaaggcagctuggacacg

SEQ ID NO: 87 - DNA, 119 bp, Artificial Sequence
  Synthetic
ggaagccctcatgtctgaactcaaagtcctgagttaccttggtaatcacatgaatattgtgaatctacttggagcctgcaccattggaggtaaagccgtgtccaagctgccttttattg

SEQ ID NO: 88 - DNA, 26 bp, Artificial Sequence
  Synthetic
ccttctacatgucccacttgatucag

SEQ ID NO: 89 - DNA, 24 bp, Artificial Sequence
  Synthetic
gccttggtugggacaacauaagaa

SEQ ID NO: 90 - DNA, 117 bp, Artificial Sequence
  Synthetic
ccttctacatgtcccacttgattcagtcatgacttgtttcatctctcccagcagcgatagtactaatgagtacatggacatgaaacctggagtttcttatgttgtcccaaccaaggc

SEQ ID NO: 91 - DNA, 30 bp, Artificial Sequence
  Synthetic
accttctttctaaccutttcttatgtgcut

SEQ ID NO: 92 - DNA, 30 bp, Artificial Sequence
  Synthetic
ctgctttgaacaaauaaatgaatcacgtut

SEQ ID NO: 93 - DNA, 126 bp, Artificial Sequence
  Synthetic
accttctttctaaccttttcttatgtgcttttagggcccaccctggtcattacagaatattgttgctatggtgatcttttgaattttttgagaagaaaacgtgattcatttatttgttcaaagcag

SEQ ID NO: 94 - DNA, 25 bp, Artificial Sequence
  Synthetic
ccttactcauggtcggaucacaaag

SEQ ID NO: 95 - DNA, 22 bp, Artificial Sequence
  Synthetic
ggactgucaagcagagaauggg

SEQ ID NO: 96 - DNA, 117 bp, Artificial Sequence
  Synthetic
ccttactcatggtcggatcacaaagatttgtgattttggtctagccagagacatcaagaatgattctaattatgtggttaaaggaaacgtgagtacccattctctgcttgacagtcc

SEQ ID NO: 97 - DNA, 22 bp, Artificial Sequence
  Synthetic
ctcgacuacctgtgaaguggat

SEQ ID NO: 98 - DNA, 26 bp, Artificial Sequence
  Synthetic
acagcucccaaagaaaaatcccauag

SEQ ID NO: 99 - DNA, 102 bp, Artificial Sequence
  Synthetic
ctcgactacctgtgaagtggatggcacctgaaagcattttcaactgtgtatacacgtttgaaagtgacgtctggtcctatgggatttttctttgggagctgt

SEQ ID NO: 100 - DNA, 22 bp, Artificial Sequence
  Synthetic
gggtgtggaugcttcctttuaa

SEQ ID NO: 101 - DNA, 25 bp, Artificial Sequence
  Synthetic
agctgauagagattggagugcaaac

SEQ ID NO: 102 - DNA, 107 bp, Artificial Sequence
  Synthetic
gggtgtggatgcttccttttaaacaggaggagagctcagtgtggtccccgagtcaggctggagaatctgggctgtgctaccggtttgcactccaatctctatcagct

SEQ ID NO: 103 - DNA, 26 bp, Artificial Sequence
  Synthetic
agctttaaaagutctgcttccucact

SEQ ID NO: 104 - DNA, 21 bp, Artificial Sequence
  Synthetic
tggcatcugaaggcucaaacc

SEQ ID NO: 105 - DNA, 106 bp, Artificial Sequence
  Synthetic
agctttaaaagttctgcttcctcactggagtacacggtggtgtctgtgtcatcggagtgatatccggactggtagccgcttgtctggtttgagccttcagatgcca

SEQ ID NO: 106 - DNA, 23 bp, Artificial Sequence
  Synthetic
cagtacctgautcctgctgtgut

SEQ ID NO: 107 - DNA, 22 bp, Artificial Sequence
  Synthetic
gcauggaagaggattcuggact

SEQ ID NO: 108 - DNA, 115 bp, Artificial Sequence
  Synthetic
cagtacctgattcctgctgtgttgtcataatggaatttggggtcacatacttcctcctcctccatacaggaaacaggtgaggtaggcagagagagtccagaatcctcttccatgc

SEQ ID NO: 109 - DNA, 25 bp, Artificial Sequence
  Synthetic
ctgagcattagcutgcaagagatut

SEQ ID NO: 110 - DNA, 25 bp, Artificial Sequence
  Synthetic
gtgttttgcutctctagguaccaga

SEQ ID NO: 111 - DNA, 120 bp, Artificial Sequence
  Synthetic
ctgagcattagcttgcaagagatttcccaaatgttccaccaactctgaaaacgtgggtctctgactgggctccccgtgccagcagtccagcatggtctggtacctagagaagcaaaacac

SEQ ID NO: 112 - DNA, 26 bp, Artificial Sequence
  Synthetic
ccagtaccttccucttcttctacauc

SEQ ID NO: 113 - DNA, 21 bp, Artificial Sequence
  Synthetic
ttggagcaauccctgtggauc

SEQ ID NO: 114 - DNA, 124 bp, Artificial Sequence
  Synthetic
ccagtaccttcctcttcttctacatcactgagggacttctcctccacaaatccagagctggctgagctctggctactggtgatgctgtccaagcgccgtttcagatccacagggattgctccaa

SEQ ID NO: 115 - DNA, 24 bp, Artificial Sequence
  Synthetic
gaccacautgagatggugaccaat

SEQ ID NO: 116 - DNA, 27 bp, Artificial Sequence
  Synthetic
gtccatacctaugatttccctcttugt

SEQ ID NO: 117 - DNA, 123 bp, Artificial Sequence
  Synthetic
gaccacattgagatggtgaccaatatgaatgaggatcttgagttcagacatgagagctcgatgctcactgtgtgttgctccttctacaaatacagtacaaagagggaaatcataggtatggac

SEQ ID NO: 118 - DNA, 23 bp, Artificial Sequence
  Synthetic
cgaagaaggguattcccagtuga

SEQ ID NO: 119 - DNA, 28 bp, Artificial Sequence
  Synthetic
tctcatggaatugaactatctgtuggag

SEQ ID NO: 120 - DNA, 105 bp, Artificial Sequence
  Synthetic
cgaagaagggtattcccagttgaagtcaatccccacatttagttcagttcttgctgtacaatttaagacaagcttttctccaacagatagttcaattccatgaga

SEQ ID NO: 121 - DNA, 27 bp, Artificial Sequence
  Synthetic
cttcaattttauttcctcccuggaagt

SEQ ID NO: 122 - DNA, 26 bp, Artificial Sequence
  Synthetic
gcgctgttauctctttcttauagcca

SEQ ID NO: 123 - DNA, 106 bp, Artificial Sequence
  Synthetic
cttcaattttatttcctccctggaagtcctccacacttctccattcttcacaagggtatgggtttgtcactgagacagcttggctataagaaagagataacagcgc

SEQ ID NO: 124 - DNA, 28 bp, Artificial Sequence
  Synthetic
aaaaatttcutcatctcacucccagact

SEQ ID NO: 125 - DNA, 25 bp, Artificial Sequence
  Synthetic
tgctttggaagutcagtcaactcut

SEQ ID NO: 126 - DNA, 101 bp, Artificial Sequence
  Synthetic
aaaaatttcttcatctcactcccagactgggtttttaggtctcggtttacaagtttcttatgctgatgctgaaaaaaagagttgactgaacttccaaagca

SEQ ID NO: 127 - DNA, 25 bp, Artificial Sequence
  Synthetic
ggaattggtcuaggcaactaccauc

SEQ ID NO: 128 - DNA, 25 bp, Artificial Sequence
  Synthetic
acttcttccaugactttggcaauct

SEQ ID NO: 129 - DNA, 113 bp, Artificial Sequence
  Synthetic
ggaattggtctaggcaactaccatccagcaacagaaaatccaggaacttcttcaaagcgaggtttgcagatctccaccactgcagcccagattgccaaagtcatggaagaagt

SEQ ID NO: 130 - DNA, 23 bp, Artificial Sequence
  Synthetic
tgtgtttcuccatacaggucacg

SEQ ID NO: 131 - DNA, 27 bp, Artificial Sequence
  Synthetic
gacacaaagacuggcttacatttugat

SEQ ID NO: 132 - DNA, 100 bp, Artificial Sequence
  Synthetic
tgtgtttctccatacaggtcacggggagccaatggttcagaaacaaatcgagtgggttctaatcatggaattaatcaaaatgtaagccagtctttgtgtc

SEQ ID NO: 133 - DNA, 22 bp, Artificial Sequence
  Synthetic
caccatgacuttgaggtugagc

SEQ ID NO: 134 - DNA, 23 bp, Artificial Sequence
  Synthetic
gtgugttctgcttuccagagagt

SEQ ID NO: 135 - DNA, 104 bp, Artificial Sequence
  Synthetic
caccatgactttgaggttgagcccctcccccacggtcacctcctggatgaggttctgctcagagctcaagttcaagtaggcactctctggaaagcagaacacac

SEQ ID NO: 136 - DNA, 24 bp, Artificial Sequence
  Synthetic
caggttctuccagatgctgauact

SEQ ID NO: 137 - DNA, 24 bp, Artificial Sequence
  Synthetic
gtataaatggcucatcgaggcuca

SEQ ID NO: 138 - DNA, 112 bp, Artificial Sequence
  Synthetic
caggttcttccagatgctgatactttattacattttgccacggaaagtactccagatggattttcttgttcatccagcctgagtgctctgagcctcgatgagccatttatac

SEQ ID NO: 139 - DNA, 28 bp, Artificial Sequence
  Synthetic
gcagccuaaagaatcaaaugaaaaccaa

SEQ ID NO: 140 - DNA, 33 bp, Artificial Sequence
  Synthetic
agtatttcaatatcaucatcatctgaatcauct

SEQ ID NO: 141 - DNA, 105 bp, Artificial Sequence
  Synthetic
gcagcctaaagaatcaaatgaaaaccaagagaaagaggcagaaaaaactattgattctgaaaaggacctattagatgattcagatgatgatgatattgaaatact

SEQ ID NO: 142 - DNA, 21 bp, Artificial Sequence
  Synthetic
tggtacuccctgtcgucaact

SEQ ID NO: 143 - DNA, 21 bp, Artificial Sequence
  Synthetic
gagctctagugagcaccugac

SEQ ID NO: 144 - DNA, 108 bp, Artificial Sequence
  Synthetic
tggtactccctgtcgtcaactcctcagcagaactgatagttgttgggctgcagcaagggctgggcgatatccccttgctcgcagcaggtcaggtgctcactagagctc

SEQ ID NO: 145 - DNA, 21 bp, Artificial Sequence
  Synthetic
atacagucggaggttcacugc

SEQ ID NO: 146 - DNA, 24 bp, Artificial Sequence
  Synthetic
agttgaugaaccggtccttuacag

SEQ ID NO: 147 - DNA, 124 bp, Artificial Sequence
  Synthetic
atacagtcggaggttcactgcatattctccccacagatagaagagcccagccagtgtcctgactgtgtggtgagcgccctgggagccaaagtcctttcatctgtaaaggaccggttcatcaact

SEQ ID NO: 148 - DNA, 22 bp, Artificial Sequence
  Synthetic
gaaccaauggatcgatcugcca

SEQ ID NO: 149 - DNA, 26 bp, Artificial Sequence
  Synthetic
tgctggagacauctcacattgtttut

SEQ ID NO: 150 - DNA, 101 bp, Artificial Sequence
  Synthetic
gaaccaatggatcgatctgccatgtgtgcattccctatcaaatatgtcaacgacttcttcaacaagatcgtcaacaaaaacaatgtgagatgtctccagca

SEQ ID NO: 151 - DNA, 25 bp, Artificial Sequence
  Synthetic
agtgaattagutcgctacgaugcaa

SEQ ID NO: 152 - DNA, 27 bp, Artificial Sequence
  Synthetic
gaaaagtagcucggtagtctacagaut

SEQ ID NO: 153 - DNA, 127 bp, Artificial Sequence
  Synthetic
agtgaattagttcgctacgatgcaagagtacacactcctcatttggataggcttgtaagtgcccgaagtgtaagcccaactacagaaatggtttcaaatgaatctgtagactaccgagctacttttc

SEQ ID NO: 154 - DNA, 23 bp, Artificial Sequence
  Synthetic
gttacgcagugctaaccaagtuc

SEQ ID NO: 155 - DNA, 26 bp, Artificial Sequence
  Synthetic
gccacttacugttcaaggattucaca

SEQ ID NO: 156 - DNA, 127 bp, Artificial Sequence
  Synthetic
gttacgcagtgctaaccaagttctttcttttgcacagggcattttggttgtgtatatcatgggactttgttggacaatgatggcaagaaaattcactgtgctgtgaaatccttgaacagtaagtggc

SEQ ID NO: 157 - DNA, 24 bp, Artificial Sequence
  Synthetic
gtgggcuacaagaactaccgauac

SEQ ID NO: 158 - DNA, 21 bp, Artificial Sequence
  Synthetic
ttcacucacctcggaugagga

SEQ ID NO: 159 - DNA, 100 bp, Artificial Sequence
  Synthetic
gtgggctacaagaactaccgataccgtgcgggcttcgtgctggccccaatcggcctggtgctcatcgtgggaggctacttcctcatccgaggtgagtgaa

SEQ ID NO: 160 - DNA, 24 bp, Artificial Sequence
  Synthetic
gattttggtctugccagagacaug

SEQ ID NO: 161 - DNA, 24 bp, Artificial Sequence
  Synthetic
ttgagttugcagacttuccaaagc

SEQ ID NO: 162 - DNA, 111 bp, Artificial Sequence
  Synthetic
gattttggtcttgccagagacatgtatgataaagaatactatagtgtacacaacaaaacaggtgcaaagctgccagtgaagtggatggctttggaaagtctgcaaactcaa

SEQ ID NO: 163 - DNA, 28 bp, Artificial Sequence
  Synthetic
acattacatactuaccatgccacttucc

SEQ ID NO: 164 - DNA, 24 bp, Artificial Sequence
  Synthetic
gagtgatgatugggagattccuga

SEQ ID NO: 165 - DNA, 110 bp, Artificial Sequence
  Synthetic
acattacatacttaccatgccactttcccttgtagactgttccaaatgatccagatccaattctttgtcccactgtaatctgcccatcaggaatctcccaatcatcactc

SEQ ID NO: 166 - DNA, 23 bp, Artificial Sequence
  Synthetic
gttatgtccucattgcccucaac

SEQ ID NO: 167 - DNA, 28 bp, Artificial Sequence
  Synthetic
gctaaggcauaggaattttcgtaguaca

SEQ ID NO: 168 - DNA, 100 bp, Artificial Sequence
  Synthetic
gttatgtcctcattgccctcaacacagtggagcgaattcctttggaaaacctgcagatcatcagaggaaatatgtactacgaaaattcctatgccttagc

SEQ ID NO: 169 - DNA, 23 bp, Artificial Sequence
  Synthetic
gaccagacaacugtatccagugt

SEQ ID NO: 170 - DNA, 22 bp, Artificial Sequence
  Synthetic
ttccagaccagggugttgttut

SEQ ID NO: 171 - DNA, 103 bp, Artificial Sequence
  Synthetic
gaccagacaactgtatccagtgtgcccactacattgacggcccccactgcgtcaagacctgcccggcaggagtcatgggagaaaacaacaccctggtctggaa

SEQ ID NO: 172 - DNA, 22 bp, Artificial Sequence
  Synthetic
cctctuacacccaguggagaag

SEQ ID NO: 173 - DNA, 21 bp, Artificial Sequence
  Synthetic
acctuatacaccgugccgaac

SEQ ID NO: 174 - DNA, 116 bp, Artificial Sequence
  Synthetic
cctcttacacccagtggagaagctcccaaccaagctctcttgaggatcttgaaggaaactgaattcaaaaagatcaaagtgctgggctccggtgcgttcggcacggtgtataaggt

SEQ ID NO: 175 - DNA, 23 bp, Artificial Sequence
  Synthetic
ccacguaccagatggatgugaac

SEQ ID NO: 176 - DNA, 23 bp, Artificial Sequence
  Synthetic
caaggatgccugaccagtuagag

SEQ ID NO: 177 - DNA, 116 bp, Artificial Sequence
  Synthetic
ccacgtaccagatggatgtgaaccccgagggcaaatacagctttggtgccacctgcgtgaagaagtgtccccgtgagtcctcctctgtgggccctctaactggtcaggcatccttg

SEQ ID NO: 178 - DNA, 25 bp, Artificial Sequence
  Synthetic
tcttccttcuctctctgtcauaggg

SEQ ID NO: 179 - DNA, 23 bp, Artificial Sequence
  Synthetic
tcgaggattuccttgttggctut

SEQ ID NO: 180 - DNA, 121 bp, Artificial Sequence
  Synthetic
tcttccttctctctctgtcatagggactctggatcccagaaggtgagaaagttaaaattcccgtcgctatcaaggaattaagagaagcaacatctccgaaagccaacaaggaaatcctcga

SEQ ID NO: 181 - DNA, 26 bp, Artificial Sequence
  Synthetic
cagcatgtcaagaucacagatttugg

SEQ ID NO: 182 - DNA, 24 bp, Artificial Sequence
  Synthetic
acctaaagccaccuccttacttug

SEQ ID NO: 183 - DNA, 101 bp, Artificial Sequence
  Synthetic
cagcatgtcaagatcacagattttgggctggccaaactgctgggtgcggaagagaaagaataccatgcagaaggaggcaaagtaaggaggtggctttaggt

SEQ ID NO: 184 - DNA, 22 bp, Artificial Sequence
  Synthetic
acatgaacuccacgttgcuacc

SEQ ID NO: 185 - DNA, 22 bp, Artificial Sequence
  Synthetic
ctcctcucccatctuccacaga

SEQ ID NO: 186 - DNA, 105 bp, Artificial Sequence
  Synthetic
acatgaactccacgttgctacccagggccactgttttgttggcgggcaaccctgcttgcaggatgggccggtgaggggaccgctctgtggaagatgggagaggag

SEQ ID NO: 187 - DNA, 26 bp, Artificial Sequence
  Synthetic
ggtttggttuggtgttatctgttuct

SEQ ID NO: 188 - DNA, 23 bp, Artificial Sequence
  Synthetic
tgcccctucttcttcccauagat

SEQ ID NO: 189 - DNA, 105 bp, Artificial Sequence
  Synthetic
ggtttggtttggtgttatctgtttctttctcctctgaagaggagtcatcatcatcatcatcatcctccgaggaggggagagcatctatgggaagaagaaggggca

SEQ ID NO: 190 - DNA, 23 bp, Artificial Sequence
  Synthetic
cccacugaaaagcacttccugaa

SEQ ID NO: 191 - DNA, 25 bp, Artificial Sequence
  Synthetic
ctttcatgacugcagcttcttucaa

SEQ ID NO: 192 - DNA, 107 bp, Artificial Sequence
  Synthetic
cccactgaaaagcacttcctgaaataatttcaccttcgtttttttccttctgcaggaggacaccatggaggtggaagagttcttgaaagaagctgcagtcatgaaag

SEQ ID NO: 193 - DNA, 24 bp, Artificial Sequence
  Synthetic
tgttgaagtccucgttgtcttgut

SEQ ID NO: 194 - DNA, 21 bp, Artificial Sequence
  Synthetic
gtagtccaggaggutcccgua

SEQ ID NO: 195 - DNA, 100 bp, Artificial Sequence
  Synthetic
tgttgaagtcctcgttgtcttgttggcaggggtctgcacccgggagcccccgttctatatcatcactgagttcatgacctacgggaacctcctggactac

SEQ ID NO: 196 - DNA, 23 bp, Artificial Sequence
  Synthetic
ccaactacgacaagugggagaug

SEQ ID NO: 197 - DNA, 23 bp, Artificial Sequence
  Synthetic
ccgtcaggcugtatttctuccac

SEQ ID NO: 198 - DNA, 114 bp, Artificial Sequence
  Synthetic
ccaactacgacaagtgggagatggaacgcacggacatcaccatgaagcacaagctgggcgggggccagtacggggaggtgtacgagggcgtgtggaagaaatacagcctgacgg

SEQ ID NO: 199 - DNA, 23 bp, Artificial Sequence
  Synthetic
gcagcaaguatgaugagcaagct

SEQ ID NO: 200 - DNA, 28 bp, Artificial Sequence
  Synthetic
agaaaggcatuagaaagcctgtagttut

SEQ ID NO: 201 - DNA, 110 bp, Artificial Sequence
  Synthetic
gcagcaagtatgatgagcaagctttctcacaagcatttggttttaaattatggagtatgtgtctgtggagacgagagtaagtaaaactacaggctttctaatgcctttct

SEQ ID NO: 202 - DNA, 21 bp, Artificial Sequence
  Synthetic
gattttggccugagcaggtug

SEQ ID NO: 203 - DNA, 25 bp, Artificial Sequence
  Synthetic
cggacttgauggagaacttgttgua

SEQ ID NO: 204 - DNA, 121 bp, Artificial Sequence
  Synthetic
gattttggcctgagcaggttgatgacaggggacacctacacagcccatgctggagccaagttccccatcaaatggactgcacccgagagcctggcctacaacaagttctccatcaagtccg

SEQ ID NO: 205 - DNA, 25 bp, Artificial Sequence
  Synthetic
gagtatttgggcgaaugcagtttut

SEQ ID NO: 206 - DNA, 28 bp, Artificial Sequence
  Synthetic
tgaugaagatgatugggaaacacaagaa

SEQ ID NO: 207 - DNA, 100 bp, Artificial Sequence
  Synthetic
gagtatttgggcgaatgcagtttttcctcctactcaccatcctgtgtgcaggctccaagaagatttatgatattcttgtgtttcccaatcatcttcatca

SEQ ID NO: 208 - DNA, 22 bp, Artificial Sequence
  Synthetic
ttcttcatucggcacaggauga

SEQ ID NO: 209 - DNA, 22 bp, Artificial Sequence
  Synthetic
caatcuagcgccuggaagagaa

SEQ ID NO: 210 - DNA, 129 bp, Artificial Sequence
  Synthetic
ttcttcattcggcacaggatgactgttaccaccatacaggcgattaagaagacccctatgcagtaaatggctatctccaggtagtctggggaagctgtaatctccttttctcttccaggcgctagattg

SEQ ID NO: 211 - DNA, 26 bp, Artificial Sequence
  Synthetic
ccagttgtggguacctttagatucag

SEQ ID NO: 212 - DNA, 22 bp, Artificial Sequence
  Synthetic
gtggaucaagcacguggaaaag

SEQ ID NO: 213 - DNA, 110 bp, Artificial Sequence
  Synthetic
ccagttgtgggtacctttagattcagaaagtcctcaccttgagaaccttgaggtagggcagcccgtcgggcccgtatttactgccgttcttttccacgtgcttgatccac

SEQ ID NO: 214 - DNA, 20 bp, Artificial Sequence
  Synthetic
cttccaggagcgaucgttug

SEQ ID NO: 215 - DNA, 22 bp, Artificial Sequence
  Synthetic
ctgctucaggacgttgaacuct

SEQ ID NO: 216 - DNA, 104 bp, Artificial Sequence
  Synthetic
cttccaggagcgatcgtttgcaacctgctctgtgctgcatttcagagaacgcctccccgagtgagctgcgagacctgctgtcagagttcaacgtcctgaagcag

SEQ ID NO: 217 - DNA, 21 bp, Artificial Sequence
  Synthetic
gactuggcagccagaaacauc

SEQ ID NO: 218 - DNA, 24 bp, Artificial Sequence
  Synthetic
tcctcttcacguaggaatcctcut

SEQ ID NO: 219 - DNA, 106 bp, Artificial Sequence
  Synthetic
gacttggcagccagaaacatcctggtagctgaggggcggaagatgaagatttcggatttcggcttgtcccgagatgtttatgaagaggattcctacgtgaagagga

SEQ ID NO: 220 - DNA, 25 bp, Artificial Sequence
  Synthetic
catcttctcttuagggtcggatucc

SEQ ID NO: 221 - DNA, 23 bp, Artificial Sequence
  Synthetic
aacacccacacutacacaucact

SEQ ID NO: 222 - DNA, 100 bp, Artificial Sequence
  Synthetic
catcttctctttagggtcggattccagttaaatggatggcaattgaatccctttttgatcatatctacaccacgcaaagtgatgtgtaagtgtgggtgtt

SEQ ID NO: 223 - DNA, 24 bp, Artificial Sequence
  Synthetic
tttttctguccaccagggaguaac

SEQ ID NO: 224 - DNA, 26 bp, Artificial Sequence
  Synthetic
tgccactgguctataatccagaugat

SEQ ID NO: 225 - DNA, 100 bp, Artificial Sequence
  Synthetic
tttttctgtccaccagggagtaactattcccagtcagaggcgctatgtgtattattatagctacctgttaaagaatcatctggattatagaccagtggca

SEQ ID NO: 226 - DNA, 22 bp, Artificial Sequence
  Synthetic
cccagacaugacagccatcauc

SEQ ID NO: 227 - DNA, 23 bp, Artificial Sequence
  Synthetic
ccgcagaaauggatacaggucaa

SEQ ID NO: 228 - DNA, 102 bp, Artificial Sequence
  Synthetic
cccagacatgacagccatcatcaaagagatcgttagcagaaacaaaaggagatatcaagaggatggattcgacttagacttgacctgtatccatttctgcgg

SEQ ID NO: 229 - DNA, 26 bp, Artificial Sequence
  Synthetic
catttgaccguggagaagtagaauca

SEQ ID NO: 230 - DNA, 28 bp, Artificial Sequence
  Synthetic
tcgtttgcaucactaacactactaucag

SEQ ID NO: 231 - DNA, 127 bp, Artificial Sequence
  Synthetic
catttgaccgtggagaagtagaatcaatggaagatgatactaatggaaatctaatggaggtggaggatcagtcatccatgaatctatttaacgattaccctgatagtagtgttagtgatgcaaacga

SEQ ID NO: 232 - DNA, 26 bp, Artificial Sequence
  Synthetic
gacagtuaaaggcatttcctgugaaa

SEQ ID NO: 233 - DNA, 28 bp, Artificial Sequence
  Synthetic
ggtcctgaatuggaggaatatatctuca

SEQ ID NO: 234 - DNA, 112 bp, Artificial Sequence
  Synthetic
gacagttaaaggcatttcctgtgaaataatactggtatgtatttaaccatgcagatcctcagtttgtggtctgccagctaaaggtgaagatatattcctccaattcaggacc

SEQ ID NO: 235 - DNA, 28 bp, Artificial Sequence
  Synthetic
aggatttcguaatattgccgucaaagaa

SEQ ID NO: 236 - DNA, 29 bp, Artificial Sequence
  Synthetic
acaggaaattuctaaatgtgacaugacct

SEQ ID NO: 237 - DNA, 104 bp, Artificial Sequence
  Synthetic
aggatttcgtaatattgccgtcaaagaaaatttgattgaattgatggcagatatctgtcaccaggtacagtaagtaggtcatgtcacatttagaaatttcctgt

SEQ ID NO: 238 - DNA, 27 bp, Artificial Sequence
  Synthetic
gaagaaaauagaactaggcugggaagt

SEQ ID NO: 239 - DNA, 29 bp, Artificial Sequence
  Synthetic
gacactgaaugagaaaatggtaacactut

SEQ ID NO: 240 - DNA, 109 bp, Artificial Sequence
  Synthetic
gaagaaaatagaactaggctgggaagtaataaaagatcaccttcagaagtcacagaatgattttgatcttgtgccttggtaaagtgttaccattttctcattcagtgtc

SEQ ID NO: 241 - DNA, 26 bp, Artificial Sequence
  Synthetic
acatggctttuggtcttctaagugaa

SEQ ID NO: 242 - DNA, 28 bp, Artificial Sequence
  Synthetic
gcagcttuacagtttttcatagugagac

SEQ ID NO: 243 - DNA, 113 bp, Artificial Sequence
  Synthetic
acatggcttttggtcttctaagtgaagctttttgtttttctttgtagtaattttcctcatcttgtactggagaaaattcttgtgagtctcactatgaaaaactgtaaagctgc

SEQ ID NO: 244 - DNA, 22 bp, Artificial Sequence
  Synthetic
tgtcaaagutcgaucagcagct

SEQ ID NO: 245 - DNA, 23 bp, Artificial Sequence
  Synthetic
ctgtagauaggccagcatuggat

SEQ ID NO: 246 - DNA, 118 bp, Artificial Sequence
  Synthetic
tgtcaaagttcgatcagcagctgttacctgtttgaaaaacattttagccacaaagactggacatagtttctgggagatttataagatgacaacagatccaatgctggcctatctacag

SEQ ID NO: 247 - DNA, 28 bp, Artificial Sequence
  Synthetic
agtcattuaaagcagaatttcgctuagc

SEQ ID NO: 248 - DNA, 21 bp, Artificial Sequence
  Synthetic
agggaaggcucacctuaacaa

SEQ ID NO: 249 - DNA, 114 bp, Artificial Sequence
  Synthetic
agtcatttaaagcagaatttcgcttagcaggaggtgtaaatttaccaaaaataatagattgtgtaggttccgatggcaaggagaggagacagcttgttaaggtgagccttccct

SEQ ID NO: 250 - DNA, 27 bp, Artificial Sequence
  Synthetic
cttaattattcugaagggccgtgauga

SEQ ID NO: 251 - DNA, 23 bp, Artificial Sequence
  Synthetic
tcctagttuccgtgtttctcugc

SEQ ID NO: 252 - DNA, 104 bp, Artificial Sequence
  Synthetic
cttaattattctgaagggccgtgatgacctgagacaagatgctgtcatgcaacaggtcttccagatgtgtaatacattactgcagagaaacacggaaactagga

SEQ ID NO: 253 - DNA, 24 bp, Artificial Sequence
  Synthetic
cctatgaggguaccagagacagug

SEQ ID NO: 254 - DNA, 28 bp, Artificial Sequence
  Synthetic
gccatacctgtuttcccaataagtttuc

SEQ ID NO: 255 - DNA, 105 bp, Artificial Sequence
  Synthetic
cctatgagggtaccagagacagtgggatggcacagcaaagagagactgctaccaaggtctatgatatgcttaaaagtgaaaacttattgggaaaacaggtatggc

SEQ ID NO: 256 - DNA, 26 bp, Artificial Sequence
  Synthetic
ctatatgtagaggcugttggaagcug

SEQ ID NO: 257 - DNA, 25 bp, Artificial Sequence
  Synthetic
cttaagggccutggtataagaugca

SEQ ID NO: 258 - DNA, 108 bp, Artificial Sequence
  Synthetic
ctatatgtagaggctgttggaagctgcttgggagaagtgggtcctatagatttctctaccatagctatacaacatagtaaagatgcatcttataccaaggcccttaag

SEQ ID NO: 259 - DNA, 28 bp, Artificial Sequence
  Synthetic
gaaguacccagattugacaaagaaaacc

SEQ ID NO: 260 - DNA, 28 bp, Artificial Sequence
  Synthetic
cacaagtcagtguctttatccaaatguc

SEQ ID NO: 261 - DNA, 109 bp, Artificial Sequence
  Synthetic
gaagtacccagatttgacaaagaaaacccttttgaaggcctggatgatataaatctgtggattcctctaagtgaaaatcatgacatttggataaagacactgacttgtg

SEQ ID NO: 262 - DNA, 25 bp, Artificial Sequence
  Synthetic
gagcagucagcagaacttgtacaua

SEQ ID NO: 263 - DNA, 25 bp, Artificial Sequence
  Synthetic
gtaggcaaacaacautccatgauga

SEQ ID NO: 264 - DNA, 105 bp, Artificial Sequence
  Synthetic
gagcagtcagcagaacttgtacatatagatctaggtaagtaataaaatctatgtatctattctttttagtaaatatttggtcatcatggaatgttgtttgcctac

SEQ ID NO: 265 - DNA, 28 bp, Artificial Sequence
  Synthetic
ttctgttaaagtucatggcttttgtgut

SEQ ID NO: 266 - DNA, 23 bp, Artificial Sequence
  Synthetic
cagggctaautcatccaacucca

SEQ ID NO: 267 - DNA, 100 bp, Artificial Sequence
  Synthetic
ttctgttaaagttcatggcttttgtgttttaccttaattattctatgcaagatacacagtaaaggttcagcgagagctggagttggatgaattagccctg

SEQ ID NO: 268 - DNA, 26 bp, Artificial Sequence
  Synthetic
cctcactgaaaccuttgtgttttugt

SEQ ID NO: 269 - DNA, 23 bp, Artificial Sequence
  Synthetic
gccttcttccacucctttcagut

SEQ ID NO: 270 - DNA, 114 bp, Artificial Sequence
  Synthetic
cctcactgaaacctttgtgtttttgtccttagtgatattgaccagagtttcaacaaagtagctgaacgtgtcttaatgagactacaagagaaactgaaaggagtggaagaaggc

SEQ ID NO: 271 - DNA, 24 bp, Artificial Sequence
  Synthetic
gtccacaaaauggttctggaucag

SEQ ID NO: 272 - DNA, 24 bp, Artificial Sequence
  Synthetic
cctgaggagcgaugacggaataua

SEQ ID NO: 273 - DNA, 101 bp, Artificial Sequence
  Synthetic
gtccacaaaatggttctggatcagctggatggtcagcgcactcttgcccacaccgccggcgcccaccaccaccagcttatattccgtcatcgctcctcagg

SEQ ID NO: 274 - DNA, 24 bp, Artificial Sequence
  Synthetic
gatgctgugagaaaaccauggaag

SEQ ID NO: 275 - DNA, 28 bp, Artificial Sequence
  Synthetic
atgagatacacaguctacctgguaagaa

SEQ ID NO: 276 - DNA, 126 bp, Artificial Sequence
  Synthetic
gatgctgtgagaaaaccatggaagtgatgagaaactctcaggaaactctgttaaccattgtagaggtaaagtattttataaggaagactttattttttttcttaccaggtagactgtgtatctcat

SEQ ID NO: 277 - DNA, 25 bp, Artificial Sequence
  Synthetic
ggtggacaagugaatttgctcauac

SEQ ID NO: 278 - DNA, 28 bp, Artificial Sequence
  Synthetic
catatactgaagaucacacccaagctut

SEQ ID NO: 279 - DNA, 100 bp, Artificial Sequence
  Synthetic
ggtggacaagtgaatttgctcatacagcaggccatagaccccaaaaatctcagccgacttttcccaggatggaaagcttgggtgtgatcttcagtatatg

SEQ ID NO: 280 - DNA, 25 bp, Artificial Sequence
  Synthetic
gatgtttcctucgtaggtgtugact

SEQ ID NO: 281 - DNA, 26 bp, Artificial Sequence
  Synthetic
gataaatcgguactgtgcttctguct

SEQ ID NO: 282 - DNA, 111 bp, Artificial Sequence
  Synthetic
gatgtttccttcgtaggtgttgactgcgatattgacgttcccaaaaccatccagatggtgcggtctcagaggtcagggatggtccagacagaagcacagtaccgatttatc

SEQ ID NO: 283 - DNA, 21 bp, Artificial Sequence
  Synthetic
tcctcatguactggtcccuca

SEQ ID NO: 284 - DNA, 25 bp, Artificial Sequence
  Synthetic
tgtttctccctuctcaggattccua

SEQ ID NO: 285 - DNA, 126 bp, Artificial Sequence
  Synthetic
tcctcatgtactggtccctcattgcactgtactcctcttgacctgctgtgtcgagaatatccaagagacaggtttctccatcaattactacttgcttcctgtaggaatcctgagaagggagaaaca

SEQ ID NO: 286 - DNA, 25 bp, Artificial Sequence
  Synthetic
agtaggaaauagcagcctcacatug

SEQ ID NO: 287 - DNA, 22 bp, Artificial Sequence
  Synthetic
ccacgggaaaguggtgaagaua

SEQ ID NO: 288 - DNA, 103 bp, Artificial Sequence
  Synthetic
agtaggaaatagcagcctcacattgcccctgacaacatagttggaatcactcatgatatctcgagccaatccaaagtcacatatcttcaccactttcccgtgg

SEQ ID NO: 289 - DNA, 22 bp, Artificial Sequence
  Synthetic
ggugatgagcuaccaaccaaga

SEQ ID NO: 290 - DNA, 22 bp, Artificial Sequence
  Synthetic
gggttcttcugcctctcauagg

SEQ ID NO: 291 - DNA, 101 bp, Artificial Sequence
  Synthetic
ggtgatgagctaccaaccaagaaggggcggaggaaccgtttcaagtggggcccagcatcccagcagatcctgttccaggcctatgagaggcagaagaaccc

SEQ ID NO: 292 - DNA, 32 bp, Artificial Sequence
  Synthetic
gacauaacagttatgatttugcagaaaacaga

SEQ ID NO: 293 - DNA, 23 bp, Artificial Sequence
  Synthetic
caggcucaggactuagcaagaag

SEQ ID NO: 294 - DNA, 124 bp, Artificial Sequence
  Synthetic
gacataacagttatgattttgcagaaaacagatctgtatttatttcagtgttacttacctgtcttgtctttgctgatgtttcaataaaaggaattccataacttcttgctaagtcctgagcctg

SEQ ID NO: 295 - DNA, 22 bp, Artificial Sequence
  Synthetic
gaagtgggtuacctgacagugt

SEQ ID NO: 296 - DNA, 25 bp, Artificial Sequence
  Synthetic
tgaaagagaggcacucatgucagaa

SEQ ID NO: 297 - DNA, 107 bp, Artificial Sequence
  Synthetic
gaagtgggttacctgacagtgtgcacgcccccagcaggttcacaatattctcgtggcttcccagctgggtcatcatcttgagttctgacatgagtgcctctctttca

SEQ ID NO: 298 - DNA, 24 bp, Artificial Sequence
  Synthetic
gcagaaacauttggcacatuccat

SEQ ID NO: 299 - DNA, 23 bp, Artificial Sequence
  Synthetic
accggctccucagataatgagua

SEQ ID NO: 300 - DNA, 124 bp, Artificial Sequence
  Synthetic
gcagaaacatttggcacattccattcttaccaaactctaaattttctcttggaaactcccatttgagatcatattcatattctctgaaatcaacgtagaagtactcattatctgaggagccggt

SEQ ID NO: 301 - DNA, 25 bp, Artificial Sequence
  Synthetic
cttcttccagguccaagatgguaat

SEQ ID NO: 302 - DNA, 28 bp, Artificial Sequence
  Synthetic
acgttcttttcuatagggaaaccucaag

SEQ ID NO: 303 - DNA, 105 bp, Artificial Sequence
  Synthetic
cttcttccaggtccaagatggtaatgggtatccatccgagaaacaggacgcctgacttgccgatgcttctgcgagcacttgaggtttccctatagaaaagaacgt

SEQ ID NO: 304 - DNA, 23 bp, Artificial Sequence
  Synthetic
ggtcaccugtaccatctguagct

SEQ ID NO: 305 - DNA, 25 bp, Artificial Sequence
  Synthetic
ttctttcctcuatctgcagaacugc

SEQ ID NO: 306 - DNA, 102 bp, Artificial Sequence
  Synthetic
ggtcacctgtaccatctgtagctggctttcatacctaaattgcttcagagatgaaatgatgagtcagttaggaataggcagttctgcagatagaggaaagaa

SEQ ID NO: 307 - DNA, 24 bp, Artificial Sequence
  Synthetic
ggucgacaaaggacagcctattut

SEQ ID NO: 308 - DNA, 25 bp, Artificial Sequence
  Synthetic
gaccaagaaauggatctgtgggtua

SEQ ID NO: 309 - DNA, 117 bp, Artificial Sequence
  Synthetic
ggtcgacaaaggacagcctatttttccctcgacacccgattcaaagtgggcacagatggtgtgattacagtcaaaaggcctctacggtttcataacccacagatccatttcttggtc

SEQ ID NO: 310 - DNA, 21 bp, Artificial Sequence
  Synthetic
tggttcaagcugctgacctuc

SEQ ID NO: 311 - DNA, 25 bp, Artificial Sequence
  Synthetic
gaattaccguggtgggatugaagat

SEQ ID NO: 312 - DNA, 114 bp, Artificial Sequence
  Synthetic
tggttcaagctgctgaccttcaaggtgaggggttaagcacaacagcaacagctgtgatcacagtcactgacaccaacgataatcctccgatcttcaatcccaccacggtaattc

SEQ ID NO: 313 - DNA, 26 bp, Artificial Sequence
  Synthetic
tcttcctcagacautcaaacgtgtut

SEQ ID NO: 314 - DNA, 28 bp, Artificial Sequence
  Synthetic
ggtggaagcauactgcaaaatatttgut

SEQ ID NO: 315 - DNA, 121 bp, Artificial Sequence
  Synthetic
tcttcctcagacattcaaacgtgttttgatcaaagaagaggagtatgattctattatagtattctataactcggtcttcatgcagagactgaaaacaaatattttgcagtatgcttccacc

SEQ ID NO: 316 - DNA, 22 bp, Artificial Sequence
  Synthetic
ggctaacgucgtaaucaccaca

SEQ ID NO: 317 - DNA, 28 bp, Artificial Sequence
  Synthetic
gacaaattguccaccatcatcatucaat

SEQ ID NO: 318 - DNA, 109 bp, Artificial Sequence
  Synthetic
ggctaacgtcgtaatcaccacactgaaagtgactgatgctgatgcccccaataccccagcgtgggaggctgtatacaccatattgaatgatgatggtggacaatttgtc

SEQ ID NO: 319 - DNA, 33 bp, Artificial Sequence
  Synthetic
tattctttcctttguagtgtccataaattctut

SEQ ID NO: 320 - DNA, 28 bp, Artificial Sequence
  Synthetic
gctgaagagugcaaacaatacatcauac

SEQ ID NO: 321 - DNA, 126 bp, Artificial Sequence
  Synthetic
tattctttcctttgtagtgtccataaattctttaacttactaaaagaaattgataccagtaccaaagttgataatgctatgtcaagactgttgaagaagtatgatgtattgtttgcactcttcagc

SEQ ID NO: 322 - DNA, 26 bp, Artificial Sequence
  Synthetic
tctgcattggugctaaaagtttctug

SEQ ID NO: 323 - DNA, 30 bp, Artificial Sequence
  Synthetic
agtccaaaggaaugccaatttaattatuac

SEQ ID NO: 324 - DNA, 118 bp, Artificial Sequence
  Synthetic
tctgcattggtgctaaaagtttcttggatcacatttttattagctaaaggtaagttcattatatttattaaatgctaatatttcaaatgtaataattaaattggcattcctttggact

SEQ ID NO: 325 - DNA, 29 bp, Artificial Sequence
  Synthetic
ggcaactugacaagagaaatgauaaaaca

SEQ ID NO: 326 - DNA, 27 bp, Artificial Sequence
  Synthetic
ttgttagccauatgcacatgaaugaat

SEQ ID NO: 327 - DNA, 129 bp, Artificial Sequence
  Synthetic
ggcaacttgacaagagaaatgataaaacatttagaacgatgtgaacatcgaatcatggaatcccttgcatggctctcagtaagtagctaaataattgaagaaattcattcatgtgcatatggctaacaa

SEQ ID NO: 328 - DNA, 22 bp, Artificial Sequence
  Synthetic
gtctacatgggugcttcccaut

SEQ ID NO: 329 - DNA, 22 bp, Artificial Sequence
  Synthetic
tgacatggtugggactctugac

SEQ ID NO: 330 - DNA, 111 bp, Artificial Sequence
  Synthetic
gtctacatgggtgcttcccattccaggggatgagctacctggaggatgtgcggctcgtacacagggacttggccgctcggaacgtgctggtcaagagtcccaaccatgtca

SEQ ID NO: 331 - DNA, 21 bp, Artificial Sequence
  Synthetic
ccttguccccaggaagcauac

SEQ ID NO: 332 - DNA, 22 bp, Artificial Sequence
  Synthetic
gccatagggcauaagctgtguc

SEQ ID NO: 333 - DNA, 117 bp, Artificial Sequence
  Synthetic
ccttgtccccaggaagcatacgtgatggctggtgtgggctccccatatgtctcccgccttctgggcatctgcctgacatccacggtgcagctggtgacacagcttatgccctatggc

SEQ ID NO: 334 - DNA, 24 bp, Artificial Sequence
  Synthetic
ctggagtctuccagtgtgatgaug

SEQ ID NO: 335 - DNA, 22 bp, Artificial Sequence
  Synthetic
cctaggtuggctctgactguac

SEQ ID NO: 336 - DNA, 115 bp, Artificial Sequence
  Synthetic
ctggagtcttccagtgtgatgatggtgaggatgggcctccggttcatgccgcccatgcaggaactgttacacatgtagttgtagtggatggtggtacagtcagagccaacctagg

SEQ ID NO: 337 - DNA, 27 bp, Artificial Sequence
  Synthetic
tggcctgatctucacaaaaatgaacua

SEQ ID NO: 338 - DNA, 27 bp, Artificial Sequence
  Synthetic
caactcgttcguagtgatatggatuca

SEQ ID NO: 339 - DNA, 109 bp, Artificial Sequence
  Synthetic
tggcctgatcttcacaaaaatgaactaaaacatgttaaatattgtcagtatgcgtttgacttaaaatgtgatagtgtctgtgtgaatccatatcactacgaacgagttg

SEQ ID NO: 340 - DNA, 28 bp, Artificial Sequence
  Synthetic
gaaggatgaataugtgcatgacttugag

SEQ ID NO: 341 - DNA, 23 bp, Artificial Sequence
  Synthetic
cgatgcacgautacttgguggat

SEQ ID NO: 342 - DNA, 100 bp, Artificial Sequence
  Synthetic
gaaggatgaatatgtgcatgactttgagggacagccatcgttgtccactgaaggacattcaattcaaaccatccagcatccaccaagtaatcgtgcatcg

SEQ ID NO: 343 - DNA, 23 bp, Artificial Sequence
  Synthetic
ctctaggucagcctgccagtaua

SEQ ID NO: 344 - DNA, 24 bp, Artificial Sequence
  Synthetic
ccagtaaatccautctgctgcugt

SEQ ID NO: 345 - DNA, 103 bp, Artificial Sequence
  Synthetic
ctctaggtcagcctgccagtatactggggggcagccatagtgaaggactgttgcagatagcatcagggcctcagccaggacagcagcagaatggatttactgg

SEQ ID NO: 346 - DNA, 24 bp, Artificial Sequence
  Synthetic
gtctttgattugcgtcagtgucat

SEQ ID NO: 347 - DNA, 24 bp, Artificial Sequence
  Synthetic
gagctattccaccuactgatccug

SEQ ID NO: 348 - DNA, 130 bp, Artificial Sequence
  Synthetic
gtctttgatttgcgtcagtgtcatcgacagatgcagcagcaggcggctactgcacaagctgcagcagctgcccaggcagcagccgtggcaggaaacatccctggcccaggatcagtaggtggaatagctc

SEQ ID NO: 349 - DNA, 22 bp, Artificial Sequence
  Synthetic
ctctgaccutagcaggauccag

SEQ ID NO: 350 - DNA, 23 bp, Artificial Sequence
  Synthetic
acttagcutggaagcugacaagt

SEQ ID NO: 351 - DNA, 104 bp, Artificial Sequence
  Synthetic
ctctgaccttagcaggatccagggcactgatgggcatggtgacgccactaaacacttcccagaccgtggcgccgaagccccacttgtcagcttccaagctaagt

SEQ ID NO: 352 - DNA, 20 bp, Artificial Sequence
  Synthetic
agatgccgguacgacactug

SEQ ID NO: 353 - DNA, 27 bp, Artificial Sequence
  Synthetic
cacaaaattugggattattggagugga

SEQ ID NO: 354 - DNA, 117 bp, Artificial Sequence
  Synthetic
agatgccggtacgacacttggctcatcaagctcgctgcttccaggaatgactggggaaggtgggaagggagagaagatgcgtgggtttcttccactccaataatcccaaattttgtg

SEQ ID NO: 355 - DNA, 21 bp, Artificial Sequence
  Synthetic
aacaucaccacgggtctguac

SEQ ID NO: 356 - DNA, 22 bp, Artificial Sequence
  Synthetic
caccttucagcaggucagagag

SEQ ID NO: 357 - DNA, 127 bp, Artificial Sequence
  Synthetic
aacatcaccacgggtctgtaccccttcgaaggggacaacatctacaagttgtttgagaacatcgggaaggggagctacgccatcccgggcgactgtggccccccgctctctgacctgctgaaaggtg

SEQ ID NO: 358 - DNA, 28 bp, Artificial Sequence
  Synthetic
gagatccatugacctcaattttgttuca

SEQ ID NO: 359 - DNA, 24 bp, Artificial Sequence
  Synthetic
ggtaacagutggcttacuggaagt

SEQ ID NO: 360 - DNA, 120 bp, Artificial Sequence
  Synthetic
gagatccattgacctcaattttgtttcaggacctgcttcgctgccgtgtcctgacttctggaatctttgagaccaagttccaggtggacaaagtcaacttccagtaagccaactgttacc

SEQ ID NO: 361 - DNA, 23 bp, Artificial Sequence
  Synthetic
gtgggaaacuacctccgtatgut

SEQ ID NO: 362 - DNA, 28 bp, Artificial Sequence
  Synthetic
caactattttcutcctctctuccacagt

SEQ ID NO: 363 - DNA, 100 bp, Artificial Sequence
  Synthetic
gtgggaaactacctccgtatgttccgaggttctctgtacaagagatacccctcactctggaggcgactagccactgtggaagagaggaagaaaatagttg

SEQ ID NO: 364 - DNA, 23 bp, Artificial Sequence
  Synthetic
tgtgatccaugagaacgcatcuc

SEQ ID NO: 365 - DNA, 25 bp, Artificial Sequence
  Synthetic
tgtaccattcaugttccaggugaag

SEQ ID NO: 366 - DNA, 112 bp, Artificial Sequence
  Synthetic
tgtgatccatgagaacgcatctcagcccgaggtgctggtccccatccggctggacatggagatcgatgggcagaagctgcgagacgccttcacctggaacatgaatggtaca

SEQ ID NO: 367 - DNA, 22 bp, Artificial Sequence
  Synthetic
gcuccacaaccaucaacaggaa

SEQ ID NO: 368 - DNA, 22 bp, Artificial Sequence
  Synthetic
gagaacuaaggcggaaucagca

SEQ ID NO: 369 - DNA, 113 bp, Artificial Sequence
  Synthetic
gctccacaaccatcaacaggaaccgcatgggccgagacaagaagagaaccttccccctttggtgtggatgcatcgctgcactcaccctccgtgctgattccgccttagttctc

SEQ ID NO: 370 - DNA, 22 bp, Artificial Sequence
  Synthetic
tgagtuccaaggcctcatucag

SEQ ID NO: 371 - DNA, 28 bp, Artificial Sequence
  Synthetic
tgaaccatctttuaactcaggtactgug

SEQ ID NO: 372 - DNA, 122 bp, Artificial Sequence
  Synthetic
tgagttccaaggcctcattcagctctcggaacatctcgaagcgctcacgcccacggatctgcagcaacagaggagggggagaagtaagtatatacacagtacctgagttaaaagatggttca

SEQ ID NO: 373 - DNA, 24 bp, Artificial Sequence
  Synthetic
gaattggtgtugatgaccttcguc

SEQ ID NO: 374 - DNA, 20 bp, Artificial Sequence
  Synthetic
gggcccggugtaagtgaaut

SEQ ID NO: 375 - DNA, 132 bp, Artificial Sequence
  Synthetic
gaattggtgttgatgaccttcgtcgcttatgcatactcaggatgagttttgtgaaaggctggggaccggattacccaagacagagcatcaaagaaacaccttgctggattgaaattcacttacaccgggccc

SEQ ID NO: 376 - DNA, 22 bp, Artificial Sequence
  Synthetic
tcttgtccugcttgcttaccuc

SEQ ID NO: 377 - DNA, 23 bp, Artificial Sequence
  Synthetic
gguaatctacugggacggaacag

SEQ ID NO: 378 - DNA, 155 bp, Artificial Sequence
  Synthetic
tcttgtcctgcttgcttacctcgcttagtgctccctgggggcagctcgtggtgaggctcccctttcttgcggagattctcttcctctgtgcgccggtctctcccaggacaggcacaaacacgcacctcaaagctgttccgtcccagtagattacc

SEQ ID NO: 379 - DNA, 28 bp, Artificial Sequence
  Synthetic
gccagaactacaaucttttgatgacaut

SEQ ID NO: 380 - DNA, 24 bp, Artificial Sequence
  Synthetic
caatccauttttgttguccagcca

SEQ ID NO: 381 - DNA, 141 bp, Artificial Sequence
  Synthetic
gccagaactacaatcttttgatgacattgcatacattcgaaagaccctagccttagataaaactgagcaagaggctttggagtatttcatgaaacaaatgaatgatgcacatcatggtggctggacaacaaaaatggattg

SEQ ID NO: 382 - DNA, 23 bp, Artificial Sequence
  Synthetic
gutgttgauggcaaacacacaca

SEQ ID NO: 383 - DNA, 21 bp, Artificial Sequence
  Synthetic
gaagcagguggtcattgaugg

SEQ ID NO: 384 - DNA, 136 bp, Artificial Sequence
  Synthetic
gttgttgatggcaaacacacacaggaagccctccccggtgcgcatgtactggtcccgcatggcgctgtactcctcctggccggcggtatccaggatgtccaacaggcacgtctccccatcaatgaccacctgcttc

SEQ ID NO: 385 - DNA, 28 bp, Artificial Sequence
  Synthetic
gagtattggtgtuccattgcttacttug

SEQ ID NO: 386 - DNA, 23 bp, Artificial Sequence
  Synthetic
gacautggagagtugacccaaac

SEQ ID NO: 387 - DNA, 150 bp, Artificial Sequence
  Synthetic
gagtattggtgttccattgcttactttgaaatggatgttcaggtaggagagacatttaaggttccttcaagctgccctattgttactgttgatggatacgtggacccttctggaggagatcgcttttgtttgggtcaactctccaatgtc

SEQ ID NO: 388 - DNA, 21 bp, Artificial Sequence
  Synthetic
ctctcugcacagctccaauga

SEQ ID NO: 389 - DNA, 21 bp, Artificial Sequence
  Synthetic
ccagggcuttgaaggaagugt

SEQ ID NO: 390 - DNA, 131 bp, Artificial Sequence
  Synthetic
ctctctgcacagctccaatgagactctgtcctgcgtcatcatctttgtcatcgtgtactacgccctgatggctggtgtggtttggtttgtggtcctcacctatgcctggcacacttccttcaaagccctgg

SEQ ID NO: 391 - DNA, 24 bp, Artificial Sequence
  Synthetic
cagaatgaggugcagaacaucaag

SEQ ID NO: 392 - DNA, 20 bp, Artificial Sequence
  Synthetic
cctctgugaagagcgggtuc

SEQ ID NO: 393 - DNA, 139 bp, Artificial Sequence
  Synthetic
cagaatgaggtgcagaacatcaagttcaacagttcaggccagtgcgaagtgcccttggttcggacagacaaccccaagagctggtacgaggacgtggagggctgcggcatccagtgccagaacccgctcttcacagagg

SEQ ID NO: 394 - DNA, 19 bp, Artificial Sequence
  Synthetic
cgtctccuccgaccacugt

SEQ ID NO: 395 - DNA, 28 bp, Artificial Sequence
  Synthetic
gcttatttattgguctctcattcuccca

SEQ ID NO: 396 - DNA, 134 bp, Artificial Sequence
  Synthetic
cgtctcctccgaccactgtggaggcatttgccggcagtccggcttggaggatgggccggtgaggcgatcgctctggtggagagagggaagaaaggaggagtggggatgggagaatgagagaccaataaataagc

SEQ ID NO: 397 - DNA, 20 bp, Artificial Sequence
  Synthetic
cctccaggaagccuacguga

SEQ ID NO: 398 - DNA, 27 bp, Artificial Sequence
  Synthetic
aatattgtctttgugttcccggacaua

SEQ ID NO: 399 - DNA, 151 bp, Artificial Sequence
  Synthetic
cctccaggaagcctacgtgatggccagcgtggacaacccccacgtgtgccgcctgctgggcatctgcctcacctccaccgtgcagctcatcacgcagctcatgcccttcggctgcctcctggactatgtccgggaacacaaagacaatatt

SEQ ID NO: 400 - DNA, 21 bp, Artificial Sequence
  Synthetic
cagtgtgtaugcaggcaucct

SEQ ID NO: 401 - DNA, 19 bp, Artificial Sequence
  Synthetic
gggagaucttgugcacggt

SEQ ID NO: 402 - DNA, 137 bp, Artificial Sequence
  Synthetic
cagtgtgtatgcaggcatcctcagctacggggtgggcttcttcctgttcatcctggtggtggcggctgtgacgctctgccgcctgcgcagcccccccaagaaaggcctgggctcccccaccgtgcacaagatctccc

SEQ ID NO: 403 - DNA, 32 bp, Artificial Sequence
  Synthetic
ttaaatacagaaggcauaaatatuccagcaga

SEQ ID NO: 404 - DNA, 33 bp, Artificial Sequence
  Synthetic
tcaagagttaatugcaaattaccttaattucca

SEQ ID NO: 405 - DNA, 115 bp, Artificial Sequence
  Synthetic
ttaaatacagaaggcataaatattccagcagaccagccaattactaaacttaagaatttagaagatgttgttgtccctactatggaaattaaggtaatttgcaattaactcttga

SEQ ID NO: 406 - DNA, 21 bp, Artificial Sequence
  Synthetic
ccagauagcccuggacaaacc

SEQ ID NO: 407 - DNA, 24 bp, Artificial Sequence
  Synthetic
cagcatttacugcagcttgctuag

SEQ ID NO: 408 - DNA, 154 bp, Artificial Sequence
  Synthetic
ccagatagccctggacaaaccatgccaccaagcagaagtaaaacacctccaccacctcctcaaacagctcaaaccaagcgagaagtacctaaaaataaagcacctactgctgaaaagagagagagtggacctaagcaagctgcagtaaatgctg

SEQ ID NO: 409 - DNA, 33 bp, Artificial Sequence
  Synthetic
aacaaaaccatgtaauaaaattctgactactut

SEQ ID NO: 410 - DNA, 25 bp, Artificial Sequence
  Synthetic
gaggaagatccutgtatgctgtuac

SEQ ID NO: 411 - DNA, 144 bp, Artificial Sequence
  Synthetic
aacaaaaccatgtaataaaattctgactacttttacatcaatttatttactagattatgatgtgttccatgtatggcatatgcaaagtgaagaatatagaccttaaattcaaaatcattgtaacagcatacaaggatcttcctc

SEQ ID NO: 412 - DNA, 25 bp, Artificial Sequence
  Synthetic
ctauttttccctttcuccccacaga

SEQ ID NO: 413 - DNA, 23 bp, Artificial Sequence
  Synthetic
tgaccaaaacucagcctgttuct

SEQ ID NO: 414 - DNA, 155 bp, Artificial Sequence
  Synthetic
ctatttttccctttctccccacagaaacccatgtatgaagtacagtggaaggttgttgaggagataaatggaaacaattatgtttacatagacccaacacaacttccttatgatcacaaatgggagtttcccagaaacaggctgagttttggtca

SEQ ID NO: 415 - DNA, 22 bp, Artificial Sequence
  Synthetic
ctcaccaucgctatcugagcag

SEQ ID NO: 416 - DNA, 20 bp, Artificial Sequence
  Synthetic
gtgcagcugtgggttgatuc

SEQ ID NO: 417 - DNA, 138 bp, Artificial Sequence
  Synthetic
ctcaccatcgctatctgagcagcgctcatggtgggggcagcgcctcacaacctccgtcatgtgctgtgactgcttgtagatggccatggcgcggacgcgggtgccgggcgggggtgtggaatcaacccacagctgcac

SEQ ID NO: 418 - DNA, 21 bp, Artificial Sequence
  Synthetic
cttaccctugggtgcagttug

SEQ ID NO: 419 - DNA, 25 bp, Artificial Sequence
  Synthetic
gctcucattttaaagauggcccaaa

SEQ ID NO: 420 - DNA, 138 bp, Artificial Sequence
  Synthetic
cttacccttgggtgcagtttggatggcatgggtggcactcccgatctggatcagcatacttgaaaatgaaactgtttgccccctgtaagccatctggacatttttccacacagtttgggccatctttaaaatgagagc

SEQ ID NO: 421 - DNA, 21 bp, Artificial Sequence
  Synthetic
ccagtugcaaaccagaccuca

SEQ ID NO: 422 - DNA, 26 bp, Artificial Sequence
  Synthetic
ctgattcctcacugattgctctuagg

SEQ ID NO: 423 - DNA, 155 bp, Artificial Sequence
  Synthetic
ccagttgcaaaccagacctcaggcggctcatagggcaccaccacactatgtcgaaaagtgtttctgtcatccaaatactccacacgcaaatttccttccactcggataagatgctgaggaggggccagacctaagagcaatcagtgaggaatcag

SEQ ID NO: 424 - DNA, 24 bp, Artificial Sequence
  Synthetic
tutatcttcagaaucagccaggca

SEQ ID NO: 425 - DNA, 28 bp, Artificial Sequence
  Synthetic
ctgacagaaguacatctgctaaacauga

SEQ ID NO: 426 - DNA, 150 bp, Artificial Sequence
  Synthetic
tttatcttcagaatcagccaggcacaaagctgttgaattttcttcaggagcgaaatctccctccaaaagtggtgctcagacacccaaaagtccacctgaacactatgttcaggagaccccactcatgtttagcagatgtacttctgtcag

SEQ ID NO: 427 - DNA, 24 bp, Artificial Sequence
  Synthetic
gataggtcaccuttggctctucag

SEQ ID NO: 428 - DNA, 23 bp, Artificial Sequence
  Synthetic
agtaccuggcagtgtgatatugg

SEQ ID NO: 429 - DNA, 133 bp, Artificial Sequence
  Synthetic
gataggtcacctttggctcttcagagatgcagggacacacgatgggcttctggttaaccaaactgaattatttgtgccatctctcaatgttgacggacagcctatttttgccaatatcacactgccaggtact

SEQ ID NO: 430 - DNA, 20 bp, Artificial Sequence
  Synthetic
gcagtgtguccaccgtgauc

SEQ ID NO: 431 - DNA, 25 bp, Artificial Sequence
  Synthetic
gtacactgccuttcgacacatagut

SEQ ID NO: 432 - DNA, 131 bp, Artificial Sequence
  Synthetic
gcagtgtgtccaccgtgatctggctgctcgcaacgtcctcctggcacaaggaaaaattgtgaagatctgtgactttggcctggccagagacatcatgcatgattcgaactatgtgtcgaaaggcagtgtac

SEQ ID NO: 433 - DNA, 27 bp, Artificial Sequence
  Synthetic
gatgtctatgaagugttgtggttccut

SEQ ID NO: 434 - DNA, 29 bp, Artificial Sequence
  Synthetic
actgtuacagaaatgaaauaagacggaaa

SEQ ID NO: 435 - DNA, 153 bp, Artificial Sequence
  Synthetic
gatgtctatgaagtgttgtggttccttaaccacatttctttttttttttttccaggctattcaagatctctggcagtggaggaagtctctttaagaaaatagtttaaacaatttgttaaaaaattttccgtcttatttcatttctgtaacagt

SEQ ID NO: 436 - DNA, 33 bp, Artificial Sequence
  Synthetic
caaattgtaaatttucagtatgtgaatgactuc

SEQ ID NO: 437 - DNA, 28 bp, Artificial Sequence
  Synthetic
ggaaaattcataccuaactggagtgugt

SEQ ID NO: 438 - DNA, 140 bp, Artificial Sequence
  Synthetic
caaattgtaaattttcagtatgtgaatgacttcacttattgttatttagttttgaaacacagagaacaccacgaaaaagtaaccttgatgaagaggtgaatgtaattcctccacacactccagttaggtatgaattttcc

SEQ ID NO: 439 - DNA, 22 bp, Artificial Sequence
  Synthetic
ctgutcaaactgaugggaccca

SEQ ID NO: 440 - DNA, 27 bp, Artificial Sequence
  Synthetic
tgcttgctctgauaggaaaatgagauc

SEQ ID NO: 441 - DNA, 152 bp, Artificial Sequence
  Synthetic
ctgttcaaactgatgggacccactccatcgagatttcactgtagctagaccaaaatcacctatttttactgtgaggtcttcatgaagaaatatatctgaggtgtagtaagtaaaggaaaacagtagatctcattttcctatcagagcaagca

SEQ ID NO: 442 - DNA, 22 bp, Artificial Sequence
  Synthetic
gaagaaauggagctgucaccca

SEQ ID NO: 443 - DNA, 24 bp, Artificial Sequence
  Synthetic
cttttaatugcccgtgatgtucca

SEQ ID NO: 444 - DNA, 132 bp, Artificial Sequence
  Synthetic
gaagaaatggagctgtcacccacatcaagattcagaacactggtgattactatgacctgtatggaggggagaaatttgccactttggctgagttggtccagtattacatggaacatcacgggcaattaaaag

SEQ ID NO: 445 - DNA, 28 bp, Artificial Sequence
  Synthetic
cactcacagtutccataggtcugaaaat

SEQ ID NO: 446 - DNA, 21 bp, Artificial Sequence
  Synthetic
atccccacutttcctctugca

SEQ ID NO: 447 - DNA, 131 bp, Artificial Sequence
  Synthetic
cactcacagtttccataggtctgaaaatgtttcctgactcagagggggctcgacgctaggatctgactgcggctcctccatggcagtgacccggaaggcagtctggctgctgcaagaggaaaagtggggat

SEQ ID NO: 448 - DNA, 28 bp, Artificial Sequence
  Synthetic
gtcatcagcugaagatgaaataggaugt

SEQ ID NO: 449 - DNA, 21 bp, Artificial Sequence
  Synthetic
gctgtgacacugctggaacut

SEQ ID NO: 450 - DNA, 146 bp, Artificial Sequence
  Synthetic
gtcatcagctgaagatgaaataggatgtaatcagacgacacaggaagcagattctgctaataccctgcaaatagcagaaataaaagaaaagattggaactaggtcagctgaagatcctgtgagcgaagttccagcagtgtcacagc

SEQ ID NO: 451 - DNA, 21 bp, Artificial Sequence
  Synthetic
ccccaaauctgaaucccgaga

SEQ ID NO: 452 - DNA, 25 bp, Artificial Sequence
  Synthetic
cgctacttccucctcaagaatgaug

SEQ ID NO: 453 - DNA, 142 bp, Artificial Sequence
  Synthetic
ccccaaatctgaatcccgagaggccaaggggatacttacgcgccacagagaagttgttgaggggagcctcacgttggtccacatcctgcggccgctccttgtagccaatgaaggtgccatcattcttgaggaggaagtagcg

SEQ ID NO: 454 - DNA, 21 bp, Artificial Sequence
  Synthetic
cagaggttuggcctgctttug

SEQ ID NO: 455 - DNA, 27 bp, Artificial Sequence
  Synthetic
atccttcttctccugtttgagaatguc

SEQ ID NO: 456 - DNA, 132 bp, Artificial Sequence
  Synthetic
cagaggtttggcctgcttttggagtcctattgtcgtgcatgtgggatgtatttgaagcacctgaataggcaagtcgaggcaatggaaaagctcattaacttaactgacattctcaaacaggagaagaaggat

SEQ ID NO: 457 - DNA, 19 bp, Artificial Sequence
  Synthetic
gtgcgucacgctugaagac

SEQ ID NO: 458 - DNA, 20 bp, Artificial Sequence
  Synthetic
ggactgugcggagcatguac

SEQ ID NO: 459 - DNA, 155 bp, Artificial Sequence
  Synthetic
gtgcgtcacgcttgaagaccacgttggtgtgcagcacgcggctgagctcccgcaggaagtggaaggagctgttgcgcagctgctccggcggcatcagcaccaccaccaccagcgtgccggccgccagcctctcgggtacatgctccgcacagtcc

SEQ ID NO: 460 - DNA, 28 bp, Artificial Sequence
  Synthetic
caatttttaatgaugctttctggcugga

SEQ ID NO: 461 - DNA, 30 bp, Artificial Sequence
  Synthetic
catacttttcttauctgcatagatttcugc

SEQ ID NO: 462 - DNA, 125 bp, Artificial Sequence
  Synthetic
caatttttaatgatgctttctggctggatttaaattatctagaagttgccaaggtagctcagtcttgtgctgctcactttacagctttactctatgcagaaatctatgcagataagaaaagtatg

SEQ ID NO: 463 - DNA, 23 bp, Artificial Sequence
  Synthetic
cgaggacaacgugatgaagaucg

SEQ ID NO: 464 - DNA, 19 bp, Artificial Sequence
  Synthetic
ggcgtccuactggcaugac

SEQ ID NO: 465 - DNA, 132 bp, Artificial Sequence
  Synthetic
cgaggacaacgtgatgaagatcgcagacttcgggctggcccgggacgtgcacaacctcgactactacaagaagacgaccaacgtgagcccggccctggggtgcgggggtgggggtcatgccagtaggacgcc

SEQ ID NO: 466 - DNA, 31 bp, Artificial Sequence
  Synthetic
tgcttactaatguggttttaatttcatcaug

SEQ ID NO: 467 - DNA, 27 bp, Artificial Sequence
  Synthetic
gatuaagaggacaagcagatucaaggt

SEQ ID NO: 468 - DNA, 126 bp, Artificial Sequence
  Synthetic
tgcttactaatgtggttttaatttcatcatgtttcatataggattcacctttatttgatcttattaaacaatcaaaggaccgagaaggaccaactgatcaccttgaatctgcttgtcctcttaatc

SEQ ID NO: 469 - DNA, 26 bp, Artificial Sequence
  Synthetic
gcgtgcagauaatgacaaggaatauc

SEQ ID NO: 470 - DNA, 27 bp, Artificial Sequence
  Synthetic
gtcaacaacccccacaaaaugttuaat

SEQ ID NO: 471 - DNA, 142 bp, Artificial Sequence
  Synthetic
gcgtgcagataatgacaaggaatatctagtacttactttaacaaaaaatgatcttgacaaagcaaataaagacaaagccaaccgatacttttctccaaattttaaggtcagttaaattaaacattttgtgggggttgttgac

SEQ ID NO: 472 - DNA, 23 bp, Artificial Sequence
  Synthetic
cgacgggaagacaagutcatgua

SEQ ID NO: 473 - DNA, 30 bp, Artificial Sequence
  Synthetic
ttctcccaatgaaaguaaagtacaaaccut

SEQ ID NO: 474 - DNA, 132 bp, Artificial Sequence
  Synthetic
cgacgggaagacaagttcatgtactttgagttccctcagccgttacctgtgtgtggtgatatcaaagtagagttcttccacaaacagaacaagatgctaaaaaaggtttgtactttactttcattgggagaa

SEQ ID NO: 475 - DNA, 24 bp, Artificial Sequence
  Synthetic
gctgatttgauggagttggacaug

SEQ ID NO: 476 - DNA, 23 bp, Artificial Sequence
  Synthetic
caggattgccuttaccacucaga

SEQ ID NO: 477 - DNA, 145 bp, Artificial Sequence
  Synthetic
gctgatttgatggagttggacatggccatggaaccagacagaaaagcggctgttagtcactggcagcaacagtcttacctggactctggaatccattctggtgccactaccacagctccttctctgagtggtaaaggcaatcctg

SEQ ID NO: 478 - DNA, 27 bp, Artificial Sequence
  Synthetic
atggtggctttutgtttgtttgtttug

SEQ ID NO: 479 - DNA, 31 bp, Artificial Sequence
  Synthetic
caagcagataactutcacttaatagttgtut

SEQ ID NO: 480 - DNA, 152 bp, Artificial Sequence
  Synthetic
atggtggctttttgtttgtttgttttgttttaaggtttttggattcaaagcataaaaaccattacaagatatacaatctgtaagtatgttttcttatttgtatgcttgcaaatatcttctaaaacaactattaagtgaaagttatctgcttg

SEQ ID NO: 481 - DNA, 22 bp, Artificial Sequence
  Synthetic
caagaaucgcccgagccttcug

SEQ ID NO: 482 - DNA, 23 bp, Artificial Sequence
  Synthetic
caccagguacgcctccagaugag

SEQ ID NO: 483 - DNA, 123 bp, Artificial Sequence
  Synthetic
caagaatcgcccgagccttctggtggagaagatcaacctgtttgccatgtttggaactggcatcgccatgagcacctgggtctggaccaaggccacgctgctcatctggaggcgtacctggtg

SEQ ID NO: 484 - DNA, 18 bp, Artificial Sequence
  Synthetic
gaaugcggccacgucggt

SEQ ID NO: 485 - DNA, 22 bp, Artificial Sequence
  Synthetic
ggtcccagccccuctctgatug

SEQ ID NO: 486 - DNA, 119 bp, Artificial Sequence
  Synthetic
gaatgcggccacgtcggtggcactctggaagcactgcgaggaggcctgcacacactgccggttgtcaatctccaggtagacgatggagctgggcggacaatcagagaggggctgggacc

SEQ ID NO: 487 - DNA, 22 bp, Artificial Sequence
  Synthetic
gacacgttcauccaccgcaucg

SEQ ID NO: 488 - DNA, 22 bp, Artificial Sequence
  Synthetic
ccgaguccagcacctcctucac

SEQ ID NO: 489 - DNA, 142 bp, Artificial Sequence
  Synthetic
gacacgttcatccaccgcatcgactccaccgaggtcatctaccagccgcgccgcaagcgggccaagctcatcggcaagtacctgatgggggacctgctgggggaaggctcttacggcaaggtgaaggaggtgctggactcgg

SEQ ID NO: 490 - DNA, 20 bp, Artificial Sequence
  Synthetic
cacgggucgggtgagagugg

SEQ ID NO: 491 - DNA, 23 bp, Artificial Sequence
  Synthetic
caccctggcuctgaccattcugt

SEQ ID NO: 492 - DNA, 131 bp, Artificial Sequence
  Synthetic
cacgggtcgggtgagagtggcggggtcggcgcagttgggctccgcgccgtggagcagcagcagctccgccactcgggcgctgcccatcatcatgacctgccagagagaacagaatggtcagagccagggtg

SEQ ID NO: 493 - DNA, 22 bp, Artificial Sequence
  Synthetic
cactcctctuccaggcggauga

SEQ ID NO: 494 - DNA, 21 bp, Artificial Sequence
  Synthetic
gagaggcggcccaaucttcug

SEQ ID NO: 495 - DNA, 110 bp, Artificial Sequence
  Synthetic
cactcctcttccaggcggatgaggcgtcttgccaacacggccccggcctggtaaccagcccatcagcacacggctcccacggagcatctcagaagattgggccgcctctc

SEQ ID NO: 496 - DNA, 33 bp, Artificial Sequence
  Synthetic
cacttttggguaaatacattcttcauaccagga

SEQ ID NO: 497 - DNA, 27 bp, Artificial Sequence
  Synthetic
cacgctctauactgcaaatgctaucga

SEQ ID NO: 498 - DNA, 112 bp, Artificial Sequence
  Synthetic
cacttttgggtaaatacattcttcataccaggaccagaggaaacctcagaaaaagtagaaaatggaagtctatgtgatcaagaaatcgatagcatttgcagtatagagcgtg

SEQ ID NO: 499 - DNA, 28 bp, Artificial Sequence
  Synthetic
gagaatgtgaaaautccagtggccauca

SEQ ID NO: 500 - DNA, 23 bp, Artificial Sequence
  Synthetic
gggtcctucctgtcctccuagca

SEQ ID NO: 501 - DNA, 122 bp, Artificial Sequence
  Synthetic
gagaatgtgaaaattccagtggccatcaaagtgttgagggaaaacacatcccccaaagccaacaaagaaatcttagacgtaagcccctccaccctctcctgctaggaggacaggaaggaccc

SEQ ID NO: 502 - DNA, 23 bp, Artificial Sequence
  Synthetic
cagacttggcugtcccagaaugc

SEQ ID NO: 503 - DNA, 20 bp, Artificial Sequence
  Synthetic
cccugcaccagcagctccua

SEQ ID NO: 504 - DNA, 143 bp, Artificial Sequence
  Synthetic
cagacttggctgtcccagaatgcaagaagcccagacggaaaccgtagctgccctggtaggttttctgggaagggacagaagatgacaggggccaggagggggctggtgcaggggccgccggtgtaggagctgctggtgcaggg

SEQ ID NO: 505 - DNA, 19 bp, Artificial Sequence
  Synthetic
ccagugcccaucccaccga

SEQ ID NO: 506 - DNA, 26 bp, Artificial Sequence
  Synthetic
caccgtgaagucctgagtgtagauga

SEQ ID NO: 507 - DNA, 150 bp, Artificial Sequence
  Synthetic
ccagtgcccatcccaccgagcccagacaccaaggaccggtggcgcagcatgactgtggtgccgtacttggaggacctgcacggcgcggacgaggacgaggacctcttcgacatcgaggatgacatcatctacactcaggacttcacggtg

SEQ ID NO: 508 - DNA, 24 bp, Artificial Sequence
  Synthetic
acatggccacucagatctcgucag

SEQ ID NO: 509 - DNA, 21 bp, Artificial Sequence
  Synthetic
ctccacgcccugtgacuccat

SEQ ID NO: 510 - DNA, 110 bp, Artificial Sequence
  Synthetic
acatggccactcagatctcgtcagccatggagtacctggagaagaaaaacttcatccacaggtaggggcctggccaggcagcctgcgccatggagtcacagggcgtggag

SEQ ID NO: 511 - DNA, 21 bp, Artificial Sequence
  Synthetic
ccccacccacagauccacugt

SEQ ID NO: 512 - DNA, 22 bp, Artificial Sequence
  Synthetic
tgguagcagtggaugcagaagg

SEQ ID NO: 513 - DNA, 115 bp, Artificial Sequence
  Synthetic
ccccacccacagatccactgtgcgacgagctgtgccgcacggtgatcgcagccgctgtcctcttctccttcatcgtctcggtgctgctgtctgccttctgcatccactgctacca

SEQ ID NO: 514 - DNA, 23 bp, Artificial Sequence
  Synthetic
gcccagcaugtcaccaagauggt

SEQ ID NO: 515 - DNA, 26 bp, Artificial Sequence
  Synthetic
ccttccuccagaagcttgaactcuca

SEQ ID NO: 516 - DNA, 111 bp, Artificial Sequence
  Synthetic
gcccagcatgtcaccaagatggtggctcggagaggagccatactgccccaggatatttctgtcacccctgtggcaactccaggtatgagagttcaagcttctggaggaagg

SEQ ID NO: 517 - DNA, 21 bp, Artificial Sequence
  Synthetic
tcccctgcagcuggtccttug

SEQ ID NO: 518 - DNA, 20 bp, Artificial Sequence
  Synthetic
cagtuggcgggcttguccat

SEQ ID NO: 519 - DNA, 136 bp, Artificial Sequence
  Synthetic
tcccctgcagctggtcctttggggtcctgctctgggagatcttcacgctggggggctccccgtaccccggcatccctgtggaggagctcttcaagctgctgaaggagggccaccgcatggacaagcccgccaactg

SEQ ID NO: 520 - DNA, 21 bp, Artificial Sequence
  Synthetic
tccttggugaccgctcugcat

SEQ ID NO: 521 - DNA, 20 bp, Artificial Sequence
  Synthetic
cctgguccaccgccagtcuc

SEQ ID NO: 522 - DNA, 129 bp, Artificial Sequence
  Synthetic
tccttggtgaccgctctgcatctagtgctgggcctcagcgccgtcctgggcctgctgctgctgaggtggcagtttcctgcacactacaggtaccgcccccgccaggcaggagactggcggtggaccagg

SEQ ID NO: 523 - DNA, 21 bp, Artificial Sequence
  Synthetic
tgcauagccagggcattgugc

SEQ ID NO: 524 - DNA, 20 bp, Artificial Sequence
  Synthetic
ccccuagcacgtgccuacct

SEQ ID NO: 525 - DNA, 116 bp, Artificial Sequence
  Synthetic
tgcatagccagggcattgtgcacaaggacatcaagccggggaacctgctgctcaccaccggtggcaccctcaaaatctccgacctgggcgtggccgaggtaggcacgtgctagggg

SEQ ID NO: 526 - DNA, 23 bp, Artificial Sequence
  Synthetic
ggcugctggacatugacgagaca

SEQ ID NO: 527 - DNA, 23 bp, Artificial Sequence
  Synthetic
gttctcccaugggcuagacacca

SEQ ID NO: 528 - DNA, 110 bp, Artificial Sequence
  Synthetic
ggctgctggacattgacgagacagagtaccatgcagatgggggcaaggttaggtgaaggaccaaggagcagaggaggctgggtggagtggtgtctagcccatgggagaac

SEQ ID NO: 529 - DNA, 20 bp, Artificial Sequence
  Synthetic
gggacgacuccgtgttugcc

SEQ ID NO: 530 - DNA, 22 bp, Artificial Sequence
  Synthetic
ctgcuagggacccctcacatug

SEQ ID NO: 531 - DNA, 111 bp, Artificial Sequence
  Synthetic
gggacgactccgtgtttgcccacgacctgctgcccccggccccacccagcagtgggggctcgcggacgtgaagggccactggtccccaacaatgtgaggggtccctagcag

SEQ ID NO: 532 - DNA, 21 bp, Artificial Sequence
  Synthetic
tguccccaucacaggcacagg

SEQ ID NO: 533 - DNA, 20 bp, Artificial Sequence
  Synthetic
ggcccgcugtacgtguccat

SEQ ID NO: 534 - DNA, 130 bp, Artificial Sequence
  Synthetic
tgtccccatcacaggcacaggggctgggctccaacctcgtcacggaggtgcgtgtctacaactggtttgccaaccggcgcaaagaagaagccttccggcacaagctggccatggacacgtacagcgggcc

SEQ ID NO: 535 - DNA, 19 bp, Artificial Sequence
  Synthetic
ggtggccccugagcgucat

SEQ ID NO: 536 - DNA, 21 bp, Artificial Sequence
  Synthetic
gcagtggaacuccacgucgct

SEQ ID NO: 537 - DNA, 117 bp, Artificial Sequence
  Synthetic
ggtggcccctgagcgtcatctgcccccacagagcgctccccgcaccggcccatcctgcaggcggggctgccggccaaccagacggcggtgctgggcagcgacgtggagttccactgc

SEQ ID NO: 538 - DNA, 30 bp, Artificial Sequence
  Synthetic
cttttttcttccuaaggttgcacauaggca

SEQ ID NO: 539 - DNA, 23 bp, Artificial Sequence
  Synthetic
actctguacaaagaccgcguggt

SEQ ID NO: 540 - DNA, 110 bp, Artificial Sequence
  Synthetic
cttttttcttcctaaggttgcacataggcaaaggtgtgcagttggaatgtaaaggtgaaggtgatgtttgggtcaggtgccttagtgaccacgcggtctttgtacagagt

SEQ ID NO: 541 - DNA, 32 bp, Artificial Sequence
  Synthetic
gaatttttgttgtcttutctttagggcctgut

SEQ ID NO: 542 - DNA, 37 bp, Artificial Sequence
  Synthetic
ttcaatcaccactaaaucaatctaaatacaggaaauc

SEQ ID NO: 543 - DNA, 131 bp, Artificial Sequence
  Synthetic
gaatttttgttgtcttttctttagggcctgttcacaatgagcttgcattccagcctcccatttccaatcatcctggtaagtgtatttcaaaattgatttcctgtatttagattgatttagtggtgattgaa

SEQ ID NO: 544 - DNA, 32 bp, Artificial Sequence
  Synthetic
acctctattgtuggatcatattcguccacaaa

SEQ ID NO: 545 - DNA, 37 bp, Artificial Sequence
  Synthetic
tttttattataaggccugctgaaaatgactgaataua

SEQ ID NO: 546 - DNA, 137 bp, Artificial Sequence
  Synthetic
acctctattgttggatcatattcgtccacaaaatgattctgaattagctgtatcgtcaaggcactcttgcctacgccaccagctccaactaccacaagtttatattcagtcattttcagcaggccttataataaaaa

SEQ ID NO: 547 - DNA, 30 bp, Artificial Sequence
  Synthetic
aatggagaaacauctacaaaatcccttugg

SEQ ID NO: 548 - DNA, 37 bp, Artificial Sequence
  Synthetic
aaaataataagcatcagcauttgactttaccttauca

SEQ ID NO: 549 - DNA, 135 bp, Artificial Sequence
  Synthetic
aatggagaaacatctacaaaatccctttgggttataaatagtgcactcagaataaaaattctttgtgcaacctacgtgaatgtaaatattcgagacattgataaggtaaagtcaaatgctgatgcttattatttt

SEQ ID NO: 550 - DNA, 37 bp, Artificial Sequence
  Synthetic
agtaaaaatgactaattttucttattcccacagtgua

SEQ ID NO: 551 - DNA, 22 bp, Artificial Sequence
  Synthetic
gggtgtgcuggaaaagggucca

SEQ ID NO: 552 - DNA, 135 bp, Artificial Sequence
  Synthetic
agtaaaaatgactaatttttcttattcccacagtgtatcggctagcctatctccggctaaatacactttgtgaacgccttctgtctgagcacccagaattagaacatatcatctggacccttttccagcacaccc

SEQ ID NO: 553 - DNA, 25 bp, Artificial Sequence
  Synthetic
ggattaaagcuggctatggcaccug

SEQ ID NO: 554 - DNA, 22 bp, Artificial Sequence
  Synthetic
gtgctgtugagacctctguggg

SEQ ID NO: 555 - DNA, 139 bp, Artificial Sequence
  Synthetic
ggattaaagctggctatggcacctgcaactgcttccctgaggaggagaagtgcttctgcgagcccgaagacatccagggtgagtgggtggcggccgggaccaccaccacctcccagccccacagaggtctcaacagcac

SEQ ID NO: 556 - DNA, 19 bp, Artificial Sequence
  Synthetic
cgtcgtgcugcccgtaugg

SEQ ID NO: 557 - DNA, 20 bp, Artificial Sequence
  Synthetic
gcccgtaccucggtagcugt

SEQ ID NO: 558 - DNA, 103 bp, Artificial Sequence
  Synthetic
cgtcgtgctgcccgtatggctcaacttcgacggcgagccgcagccctacccaacgctgccgcctggcacgggccgccgcatccacagctaccgaggtacgggc

SEQ ID NO: 559 - DNA, 27 bp, Artificial Sequence
  Synthetic
ggcaaatgucagtgcaaggttuacaca

SEQ ID NO: 560 - DNA, 37 bp, Artificial Sequence
  Synthetic
ttttttttaatcagauaactttgtggtagatuccagt

SEQ ID NO: 561 - DNA, 122 bp, Artificial Sequence
  Synthetic
ggcaaatgtcagtgcaaggtttacacattttaatcccattttcttctacttccatcttggaactagggcaggcacgcacacaagaactggaatctaccacaaagttatctgattaaaaaaaa

SEQ ID NO: 562 - DNA, 20 bp, Artificial Sequence
  Synthetic
gagcggcccaccutcgagua

SEQ ID NO: 563 - DNA, 21 bp, Artificial Sequence
  Synthetic
ccgcctgugcctagaggtuct

SEQ ID NO: 564 - DNA, 100 bp, Artificial Sequence
  Synthetic
gagcggcccaccttcgagtacctgcaggccttcctggaggactacttcacgtccaccgagccccagtaccagcccggggagaacctctaggcacaggcgg

SEQ ID NO: 565 - DNA, 20 bp, Artificial Sequence
  Synthetic
ggcaggtcutggccagtugg

SEQ ID NO: 566 - DNA, 26 bp, Artificial Sequence
  Synthetic
ctgttcacttgugccctgacttucaa

SEQ ID NO: 567 - DNA, 100 bp, Artificial Sequence
  Synthetic
ggcaggtcttggccagttggcaaaacatcttgttgagggcaggggagtactgtaggaagaggaaggagacagagttgaaagtcagggcacaagtgaacag

SEQ ID NO: 568 - DNA, 22 bp, Artificial Sequence
  Synthetic
ttcgcctgucctcatgtatugg

SEQ ID NO: 569 - DNA, 27 bp, Artificial Sequence
  Synthetic
catctacaaaguggttctggatuagct

SEQ ID NO: 570 - DNA, 27 bp, Artificial Sequence
  Synthetic
ccaacatgactuacttgatccccauaa

SEQ ID NO: 571 - DNA, 25 bp, Artificial Sequence
  Synthetic
tgtaaacgtcaauagtgcagauggg

SEQ ID NO: 572 - DNA, 23 bp, Artificial Sequence
  Synthetic
catcgccacauaggguagaacat

SEQ ID NO: 573 - DNA, 25 bp, Artificial Sequence
  Synthetic
acttacguggacatttctugacaca

SEQ ID NO: 574 - DNA, 23 bp, Artificial Sequence
  Synthetic
ccaaugcagcgaacaatgttcug

SEQ ID NO: 575 - DNA, 28 bp, Artificial Sequence
  Synthetic
gacagtaacccuacatatacaatugcct

SEQ ID NO: 576 - DNA, 29 bp, Artificial Sequence
  Synthetic
ccagtgactagaaagaucaaattcccaut

SEQ ID NO: 577 - DNA, 26 bp, Artificial Sequence
  Synthetic
aaucaaauagggaaggaaaggagagc

SEQ ID NO: 578 - DNA, 24 bp, Artificial Sequence
  Synthetic
gaggcagtcuttactcacctguag

SEQ ID NO: 579 - DNA, 25 bp, Artificial Sequence
  Synthetic
ggtttttgcccutccagtgtauact

SEQ ID NO: 580 - DNA, 26 bp, Artificial Sequence
  Synthetic
aaaaugacaaagaacagcucaaagca

SEQ ID NO: 581 - DNA, 29 bp, Artificial Sequence
  Synthetic
acattttcguaagtgttacucaagaagca

SEQ ID NO: 582 - DNA, 26 bp, Artificial Sequence
  Synthetic
gggaagaaaagugttttgaaatgugt

SEQ ID NO: 583 - DNA, 26 bp, Artificial Sequence
  Synthetic
tggatctuccacacaatuaaacagca

SEQ ID NO: 584 - DNA, 23 bp, Artificial Sequence
  Synthetic
tgacctcgucttctacttcugga

SEQ ID NO: 585 - DNA, 26 bp, Artificial Sequence
  Synthetic
tgtctttgagtuccattccacttgut

SEQ ID NO: 586 - DNA, 24 bp, Artificial Sequence
  Synthetic
ccctccugccatcatatugaacac

SEQ ID NO: 587 - DNA, 27 bp, Artificial Sequence
  Synthetic
accatgacaagautttcccttacctut

SEQ ID NO: 588 - DNA, 27 bp, Artificial Sequence
  Synthetic
actgctgaccaaacutttaaagtgtug

SEQ ID NO: 589 - DNA, 27 bp, Artificial Sequence
  Synthetic
cctcttuagggagcaatgaaaugaagt

SEQ ID NO: 590 - DNA, 26 bp, Artificial Sequence
  Synthetic
tgggactttgguaattcaccagtuac

SEQ ID NO: 591 - DNA, 23 bp, Artificial Sequence
  Synthetic
cccatctccuaacggcttttguc

SEQ ID NO: 592 - DNA, 27 bp, Artificial Sequence
  Synthetic
caagctctcatguctgaactgaagaua

SEQ ID NO: 593 - DNA, 27 bp, Artificial Sequence
  Synthetic
ccatccauccaggaaaatcagactuaa

SEQ ID NO: 594 - DNA, 23 bp, Artificial Sequence
  Synthetic
tttcgtaatcguagctggcauga

SEQ ID NO: 595 - DNA, 21 bp, Artificial Sequence
  Synthetic
caacgatgugggcaagactuc

SEQ ID NO: 596 - DNA, 22 bp, Artificial Sequence
  Synthetic
ggaagcccucatgtctgaacuc

SEQ ID NO: 597 - DNA, 26 bp, Artificial Sequence
  Synthetic
ccttctacatgucccacttgatucag

SEQ ID NO: 598 - DNA, 30 bp, Artificial Sequence; identical to SEQ ID NO: 91
  Synthetic

SEQ ID NO: 599 - DNA, 25 bp, Artificial Sequence
  Synthetic
ccttactcauggtcggaucacaaag

SEQ ID NO: 600 - DNA, 22 bp, Artificial Sequence
  Synthetic
ctcgacuacctgtgaaguggat

SEQ ID NO: 601 - DNA, 22 bp, Artificial Sequence
  Synthetic
gggtgtggaugcttcctttuaa

SEQ ID NO: 602 - DNA, 26 bp, Artificial Sequence
  Synthetic
agctttaaaagutctgcttccucact

SEQ ID NO: 603 - DNA, 23 bp, Artificial Sequence
  Synthetic
cagtacctgautcctgctgtgut

SEQ ID NO: 604 - DNA, 25 bp, Artificial Sequence
  Synthetic
ctgagcattagcutgcaagagatut

SEQ ID NO: 605 - DNA, 26 bp, Artificial Sequence
  Synthetic
ccagtaccttccucttcttctacauc

SEQ ID NO: 606 - DNA, 24 bp, Artificial Sequence
  Synthetic
gaccacautgagatggugaccaat

SEQ ID NO: 607 - DNA, 23 bp, Artificial Sequence
  Synthetic
cgaagaaggguattcccagtuga

SEQ ID NO: 608 - DNA, 27 bp, Artificial Sequence
  Synthetic
cttcaattttauttcctcccuggaagt

SEQ ID NO: 609 - DNA, 28 bp, Artificial Sequence
  Synthetic
aaaaatttcutcatctcacucccagact

SEQ ID NO: 610 - DNA, 25 bp, Artificial Sequence
  Synthetic
ggaattggtcuaggcaactaccauc

SEQ ID NO: 611 - DNA, 23 bp, Artificial Sequence
  Synthetic
tgtgtttcuccatacaggucacg

SEQ ID NO: 612 - DNA, 22 bp, Artificial Sequence
  Synthetic
caccatgacuttgaggtugagc

SEQ ID NO: 613 - DNA, 24 bp, Artificial Sequence
  Synthetic
caggttctuccagatgctgauact

SEQ ID NO: 614 - DNA, 28 bp, Artificial Sequence
  Synthetic
gcagccuaaagaatcaaaugaaaaccaa

SEQ ID NO: 615 - DNA, 21 bp, Artificial Sequence
  Synthetic
tggtacuccctgtcgucaact

SEQ ID NO: 616 - DNA, 21 bp, Artificial Sequence
  Synthetic
atacagucggaggttcacugc

SEQ ID NO: 617 - DNA, 22 bp, Artificial Sequence
  Synthetic
gaaccaauggatcgatcugcca

SEQ ID NO: 618 - DNA, 25 bp, Artificial Sequence
  Synthetic
agtgaattagutcgctacgaugcaa

SEQ ID NO: 619 - DNA, 23 bp, Artificial Sequence
  Synthetic
gttacgcagugctaaccaagtuc

SEQ ID NO: 620 - DNA, 24 bp, Artificial Sequence
  Synthetic
gtgggcuacaagaactaccgauac

SEQ ID NO: 621 - DNA, 24 bp, Artificial Sequence
  Synthetic
gattttggtctugccagagacaug

SEQ ID NO: 622 - DNA, 28 bp, Artificial Sequence
  Synthetic
acattacatactuaccatgccacttucc

SEQ ID NO: 623 - DNA, 23 bp, Artificial Sequence
  Synthetic
gttatgtccucattgcccucaac

SEQ ID NO: 624 - DNA, 23 bp, Artificial Sequence
  Synthetic
gaccagacaacugtatccagugt

SEQ ID NO: 625 - DNA, 22 bp, Artificial Sequence
  Synthetic
cctctuacacccaguggagaag

SEQ ID NO: 626 - DNA, 23 bp, Artificial Sequence
  Synthetic
ccacguaccagatggatgugaac

SEQ ID NO: 627 - DNA, 25 bp, Artificial Sequence
  Synthetic
tcttccttcuctctctgtcauaggg

SEQ ID NO: 628 - DNA, 26 bp, Artificial Sequence
  Synthetic
cagcatgtcaagaucacagatttugg

SEQ ID NO: 629 - DNA, 22 bp, Artificial Sequence
  Synthetic
acatgaacuccacgttgcuacc

SEQ ID NO: 630 - DNA, 26 bp, Artificial Sequence
  Synthetic
ggtttggttuggtgttatctgttuct

SEQ ID NO: 631 - DNA, 23 bp, Artificial Sequence
  Synthetic
cccacugaaaagcacttccugaa

SEQ ID NO: 632 - DNA, 24 bp, Artificial Sequence
  Synthetic
tgttgaagtccucgttgtcttgut

SEQ ID NO: 633 - DNA, 23 bp, Artificial Sequence
  Synthetic
ccaactacgacaagugggagaug

SEQ ID NO: 634 - DNA, 23 bp, Artificial Sequence
  Synthetic
gcagcaaguatgaugagcaagct

SEQ ID NO: 635 - DNA, 21 bp, Artificial Sequence
  Synthetic
gattttggccugagcaggtug

SEQ ID NO: 636 - DNA, 25 bp, Artificial Sequence
  Synthetic
gagtatttgggcgaaugcagtttut

SEQ ID NO: 637 - DNA, 22 bp, Artificial Sequence
  Synthetic
ttcttcatucggcacaggauga

SEQ ID NO: 638 - DNA, 26 bp, Artificial Sequence
  Synthetic
ccagttgtggguacctttagatucag

SEQ ID NO: 639 - DNA, 20 bp, Artificial Sequence
  Synthetic
cttccaggagcgaucgttug

SEQ ID NO: 640 - DNA, 21 bp, Artificial Sequence
  Synthetic
gactuggcagccagaaacauc

SEQ ID NO: 641 - DNA, 25 bp, Artificial Sequence
  Synthetic
catcttctcttuagggtcggatucc

SEQ ID NO: 642 - DNA, 24 bp, Artificial Sequence
  Synthetic
tttttctguccaccagggaguaac

SEQ ID NO: 643 - DNA, 22 bp, Artificial Sequence
  Synthetic
cccagacaugacagccatcauc

SEQ ID NO: 644 - DNA, 26 bp, Artificial Sequence
  Synthetic
catttgaccguggagaagtagaauca

SEQ ID NO: 645 - DNA, 26 bp, Artificial Sequence
  Synthetic
gacagtuaaaggcatttcctgugaaa

SEQ ID NO: 646 - DNA, 28 bp, Artificial Sequence
  Synthetic
aggatttcguaatattgccgucaaagaa

SEQ ID NO: 647 - DNA, 27 bp, Artificial Sequence
  Synthetic
gaagaaaauagaactaggcugggaagt

SEQ ID NO: 648 - DNA, 26 bp, Artificial Sequence
  Synthetic
acatggctttuggtcttctaagugaa

SEQ ID NO: 649 - DNA, 22 bp, Artificial Sequence
  Synthetic
tgtcaaagutcgaucagcagct

SEQ ID NO: 650 - DNA, 28 bp, Artificial Sequence
  Synthetic
agtcattuaaagcagaatttcgctuagc

SEQ ID NO: 651 - DNA, 27 bp, Artificial Sequence
  Synthetic
cttaattattcugaagggccgtgauga

SEQ ID NO: 652 - DNA, 24 bp, Artificial Sequence
  Synthetic
cctatgaggguaccagagacagug

SEQ ID NO: 653 - DNA, 26 bp, Artificial Sequence
  Synthetic
ctatatgtagaggcugttggaagcug

SEQ ID NO: 654 - DNA, 28 bp, Artificial Sequence
  Synthetic
gaaguacccagattugacaaagaaaacc

SEQ ID NO: 655 - DNA, 25 bp, Artificial Sequence
  Synthetic
gagcagucagcagaacttgtacaua

SEQ ID NO: 656 - DNA, 28 bp, Artificial Sequence
  Synthetic
ttctgttaaagtucatggcttttgtgut

SEQ ID NO: 657 - DNA, 26 bp, Artificial Sequence
  Synthetic
cctcactgaaaccuttgtgttttugt

SEQ ID NO: 658 - DNA, 24 bp, Artificial Sequence
  Synthetic
gtccacaaaauggttctggaucag

SEQ ID NO: 659 - DNA, 24 bp, Artificial Sequence
  Synthetic
gatgctgugagaaaaccauggaag

SEQ ID NO: 660 - DNA, 25 bp, Artificial Sequence
  Synthetic
ggtggacaagugaatttgctcauac

SEQ ID NO: 661 - DNA, 25 bp, Artificial Sequence
  Synthetic
gatgtttcctucgtaggtgtugact

SEQ ID NO: 662 - DNA, 21 bp, Artificial Sequence
  Synthetic
tcctcatguactggtcccuca

SEQ ID NO: 663 - DNA, 25 bp, Artificial Sequence
  Synthetic
agtaggaaauagcagcctcacatug

SEQ ID NO: 664 - DNA, 22 bp, Artificial Sequence
  Synthetic
ggugatgagcuaccaaccaaga

SEQ ID NO: 665 - DNA, 32 bp, Artificial Sequence; identical to SEQ ID NO: 292
  Synthetic

SEQ ID NO: 666 - DNA, 22 bp, Artificial Sequence
  Synthetic
gaagtgggtuacctgacagugt

SEQ ID NO: 667 - DNA, 24 bp, Artificial Sequence
  Synthetic
gcagaaacauttggcacatuccat

SEQ ID NO: 668 - DNA, 25 bp, Artificial Sequence
  Synthetic
cttcttccagguccaagatgguaat

SEQ ID NO: 669 - DNA, 23 bp, Artificial Sequence
  Synthetic
ggtcaccugtaccatctguagct

SEQ ID NO: 670 - DNA, 24 bp, Artificial Sequence
  Synthetic
ggucgacaaaggacagcctattut

SEQ ID NO: 671 - DNA, 21 bp, Artificial Sequence
  Synthetic
tggttcaagcugctgacctuc

SEQ ID NO: 672 - DNA, 26 bp, Artificial Sequence
  Synthetic
tcttcctcagacautcaaacgtgtut

SEQ ID NO: 673 - DNA, 22 bp, Artificial Sequence
  Synthetic
ggctaacgucgtaaucaccaca

SEQ ID NO: 674 - DNA, 33 bp, Artificial Sequence; identical to SEQ ID NO: 319
  Synthetic

SEQ ID NO: 675 - DNA, 26 bp, Artificial Sequence
  Synthetic
tctgcattggugctaaaagtttctug

SEQ ID NO: 676 - DNA, 29 bp, Artificial Sequence
  Synthetic
ggcaactugacaagagaaatgauaaaaca

SEQ ID NO: 677 - DNA, 22 bp, Artificial Sequence
  Synthetic
gtctacatgggugcttcccaut

SEQ ID NO: 678 - DNA, 21 bp, Artificial Sequence
  Synthetic
ccttguccccaggaagcauac

SEQ ID NO: 679 - DNA, 24 bp, Artificial Sequence
  Synthetic
ctggagtctuccagtgtgatgaug

SEQ ID NO: 680 - DNA, 27 bp, Artificial Sequence
  Synthetic
tggcctgatctucacaaaaatgaacua

SEQ ID NO: 681 - DNA, 28 bp, Artificial Sequence
  Synthetic
gaaggatgaataugtgcatgacttugag

SEQ ID NO: 682 - DNA, 23 bp, Artificial Sequence
  Synthetic
ctctaggucagcctgccagtaua

SEQ ID NO: 683 - DNA, 24 bp, Artificial Sequence
  Synthetic
gtctttgattugcgtcagtgucat

SEQ ID NO: 684 - DNA, 22 bp, Artificial Sequence
  Synthetic
ctctgaccutagcaggauccag

SEQ ID NO: 685 - DNA, 20 bp, Artificial Sequence
  Synthetic
agatgccgguacgacactug

SEQ ID NO: 686 - DNA, 21 bp, Artificial Sequence
  Synthetic
aacaucaccacgggtctguac

SEQ ID NO: 687 - DNA, 28 bp, Artificial Sequence
  Synthetic
gagatccatugacctcaattttgttuca

SEQ ID NO: 688 - DNA, 23 bp, Artificial Sequence
  Synthetic
gtgggaaacuacctccgtatgut

SEQ ID NO: 689 - DNA, 23 bp, Artificial Sequence
  Synthetic
tgtgatccaugagaacgcatcuc

SEQ ID NO: 690 - DNA, 22 bp, Artificial Sequence
  Synthetic
gcuccacaaccaucaacaggaa

SEQ ID NO: 691 - DNA, 22 bp, Artificial Sequence
  Synthetic
tgagtuccaaggcctcatucag

SEQ ID NO: 692 - DNA, 24 bp, Artificial Sequence
  Synthetic
gaattggtgtugatgaccttcguc

SEQ ID NO: 693 - DNA, 22 bp, Artificial Sequence
  Synthetic
tcttgtccugcttgcttaccuc

SEQ ID NO: 694 - DNA, 28 bp, Artificial Sequence
  Synthetic
gccagaactacaaucttttgatgacaut

SEQ ID NO: 695 - DNA, 23 bp, Artificial Sequence
  Synthetic
gutgttgauggcaaacacacaca

SEQ ID NO: 696 - DNA, 28 bp, Artificial Sequence
  Synthetic
gagtattggtgtuccattgcttacttug

SEQ ID NO: 697 - DNA, 21 bp, Artificial Sequence
  Synthetic
ctctcugcacagctccaauga

SEQ ID NO: 698 - DNA, 24 bp, Artificial Sequence
  Synthetic
cagaatgaggugcagaacaucaag

SEQ ID NO: 699 - DNA, 19 bp, Artificial Sequence
  Synthetic
cgtctccuccgaccacugt

SEQ ID NO: 700 - DNA, 20 bp, Artificial Sequence
  Synthetic
cctccaggaagccuacguga

SEQ ID NO: 701 - DNA, 21 bp, Artificial Sequence
  Synthetic
cagtgtgtaugcaggcaucct

SEQ ID NO: 702 - DNA, 32 bp, Artificial Sequence; identical to SEQ ID NO: 403
  Synthetic

SEQ ID NO: 703 - DNA, 21 bp, Artificial Sequence
  Synthetic
ccagauagcccuggacaaacc

SEQ ID NO: 704 - DNA, 33 bp, Artificial Sequence; identical to SEQ ID NO: 409
  Synthetic

SEQ ID NO: 705 - DNA, 25 bp, Artificial Sequence
  Synthetic
ctauttttccctttcuccccacaga

SEQ ID NO: 706 - DNA, 22 bp, Artificial Sequence
  Synthetic
ctcaccaucgctatcugagcag

SEQ ID NO: 707 - DNA, 21 bp, Artificial Sequence
  Synthetic
cttaccctugggtgcagttug

SEQ ID NO: 708 - DNA, 21 bp, Artificial Sequence
  Synthetic
ccagtugcaaaccagaccuca

SEQ ID NO: 709 - DNA, 24 bp, Artificial Sequence
  Synthetic
tutatcttcagaaucagccaggca

SEQ ID NO: 710 - DNA, 24 bp, Artificial Sequence
  Synthetic
gataggtcaccuttggctctucag

SEQ ID NO: 711 - DNA, 20 bp, Artificial Sequence
  Synthetic
gcagtgtguccaccgtgauc

SEQ ID NO: 712 - DNA, 27 bp, Artificial Sequence
  Synthetic
gatgtctatgaagugttgtggttccut

SEQ ID NO: 713 - DNA, 33 bp, Artificial Sequence; identical to SEQ ID NO: 436
  Synthetic

SEQ ID NO: 714 - DNA, 22 bp, Artificial Sequence
  Synthetic
ctgutcaaactgaugggaccca

SEQ ID NO: 715 - DNA, 22 bp, Artificial Sequence
  Synthetic
gaagaaauggagctgucaccca

SEQ ID NO: 716 - DNA, 28 bp, Artificial Sequence
  Synthetic
cactcacagtutccataggtcugaaaat

SEQ ID NO: 717 - DNA, 28 bp, Artificial Sequence
  Synthetic
gtcatcagcugaagatgaaataggaugt

SEQ ID NO: 718 - DNA, 21 bp, Artificial Sequence
  Synthetic
ccccaaauctgaaucccgaga

SEQ ID NO: 719 - DNA, 21 bp, Artificial Sequence
  Synthetic
cagaggttuggcctgctttug

SEQ ID NO: 720 - DNA, 19 bp, Artificial Sequence
  Synthetic
gtgcgucacgctugaagac

SEQ ID NO: 721 - DNA, 28 bp, Artificial Sequence
  Synthetic
caatttttaatgaugctttctggcugga

SEQ ID NO: 722 - DNA, 23 bp, Artificial Sequence
  Synthetic
cgaggacaacgugatgaagaucg

SEQ ID NO: 723 - DNA, 31 bp, Artificial Sequence; identical to SEQ ID NO: 466
  Synthetic

SEQ ID NO: 724 - DNA, 26 bp, Artificial Sequence
  Synthetic
gcgtgcagauaatgacaaggaatauc

SEQ ID NO: 725 - DNA, 23 bp, Artificial Sequence
  Synthetic
cgacgggaagacaagutcatgua

SEQ ID NO: 726 - DNA, 24 bp, Artificial Sequence
  Synthetic
gctgatttgauggagttggacaug

SEQ ID NO: 727 - DNA, 27 bp, Artificial Sequence
  Synthetic
atggtggctttutgtttgtttgtttug

SEQ ID NO: 728 - DNA, 22 bp, Artificial Sequence
  Synthetic
caagaaucgcccgagccttcug

SEQ ID NO: 729 - DNA, 18 bp, Artificial Sequence
  Synthetic
gaaugcggccacgucggt

SEQ ID NO: 730 - DNA, 22 bp, Artificial Sequence
  Synthetic
gacacgttcauccaccgcaucg

SEQ ID NO: 731 - DNA, 20 bp, Artificial Sequence
  Synthetic
cacgggucgggtgagagugg

SEQ ID NO: 732 - DNA, 22 bp, Artificial Sequence
  Synthetic
cactcctctuccaggcggauga

SEQ ID NO: 733 - DNA, 33 bp, Artificial Sequence; identical to SEQ ID NO: 496
  Synthetic

SEQ ID NO: 734 - DNA, 28 bp, Artificial Sequence
  Synthetic
gagaatgtgaaaautccagtggccauca

SEQ ID NO: 735 - DNA, 23 bp, Artificial Sequence
  Synthetic
cagacttggcugtcccagaaugc

SEQ ID NO: 736 - DNA, 19 bp, Artificial Sequence
  Synthetic
ccagugcccaucccaccga

SEQ ID NO: 737 - DNA, 24 bp, Artificial Sequence
  Synthetic
acatggccacucagatctcgucag

SEQ ID NO: 738 - DNA, 21 bp, Artificial Sequence
  Synthetic
ccccacccacagauccacugt

SEQ ID NO: 739 - DNA, 23 bp, Artificial Sequence
  Synthetic
gcccagcaugtcaccaagauggt

SEQ ID NO: 740 - DNA, 21 bp, Artificial Sequence
  Synthetic
tcccctgcagcuggtccttug

SEQ ID NO: 741 - DNA, 21 bp, Artificial Sequence
  Synthetic
tccttggugaccgctcugcat

SEQ ID NO: 742 - DNA, 21 bp, Artificial Sequence
  Synthetic
tgcauagccagggcattgugc

SEQ ID NO: 743 - DNA, 23 bp, Artificial Sequence
  Synthetic
ggcugctggacatugacgagaca

SEQ ID NO: 744 - DNA, 20 bp, Artificial Sequence
  Synthetic
gggacgacuccgtgttugcc

SEQ ID NO: 745 - DNA, 21 bp, Artificial Sequence
  Synthetic
tguccccaucacaggcacagg

SEQ ID NO: 746 - DNA, 19 bp, Artificial Sequence
  Synthetic
ggtggccccugagcgucat

SEQ ID NO: 747 - DNA, 30 bp, Artificial Sequence; identical to SEQ ID NO: 538
  Synthetic

SEQ ID NO: 748 - DNA, 32 bp, Artificial Sequence; identical to SEQ ID NO: 541
  Synthetic

SEQ ID NO: 749 - DNA, 32 bp, Artificial Sequence; identical to SEQ ID NO: 544
  Synthetic

SEQ ID NO: 750 - DNA, 30 bp, Artificial Sequence; identical to SEQ ID NO: 547
  Synthetic

SEQ ID NO: 751 - DNA, 37 bp, Artificial Sequence; identical to SEQ ID NO: 550
  Synthetic

SEQ ID NO: 752 - DNA, 25 bp, Artificial Sequence
  Synthetic
ggattaaagcuggctatggcaccug

SEQ ID NO: 753 - DNA, 19 bp, Artificial Sequence
  Synthetic
cgtcgtgcugcccgtaugg

SEQ ID NO: 754 - DNA, 27 bp, Artificial Sequence
  Synthetic
ggcaaatgucagtgcaaggttuacaca

SEQ ID NO: 755 - DNA, 20 bp, Artificial Sequence
  Synthetic
gagcggcccaccutcgagua

SEQ ID NO: 756 - DNA, 20 bp, Artificial Sequence
  Synthetic
ggcaggtcutggccagtugg

SEQ ID NO: 757 - DNA, 28 bp, Artificial Sequence
  Synthetic
agtggttatagauggtgaaacctgttug

SEQ ID NO: 758 - DNA, 26 bp, Artificial Sequence
  Synthetic
ctggtgtgaaaugactgaguacaaac

SEQ ID NO: 759 - DNA, 28 bp, Artificial Sequence
  Synthetic
gagaagccatuatctgcaaaaatauccc

SEQ ID NO: 760 - DNA, 25 bp, Artificial Sequence
  Synthetic
accttuggaggaaaaccctatgaug

SEQ ID NO: 761 - DNA, 22 bp, Artificial Sequence
  Synthetic
catggcctuccaacttgacuct

SEQ ID NO: 762 - DNA, 26 bp, Artificial Sequence
  Synthetic
caaaccuttgtctacaauccaaccac

SEQ ID NO: 763 - DNA, 24 bp, Artificial Sequence
  Synthetic
ccagtttaagauttgcccagacuc

SEQ ID NO: 764 - DNA, 27 bp, Artificial Sequence
  Synthetic
gaaactttggacutcaagaactuggat

SEQ ID NO: 765 - DNA, 21 bp, Artificial Sequence
  Synthetic
ggcatuggcacaggatcatug

SEQ ID NO: 766 - DNA, 21 bp, Artificial Sequence
  Synthetic
tgactgcugccatcgagaaug

SEQ ID NO: 767 - DNA, 22 bp, Artificial Sequence
  Synthetic
ccagaaacugcctcttgaccug

SEQ ID NO: 768 - DNA, 21 bp, Artificial Sequence
  Synthetic
cctgacgaugtccagtcucct

SEQ ID NO: 769 - DNA, 26 bp, Artificial Sequence
  Synthetic
cattttagcacutacctgtgacucca

SEQ ID NO: 770 - DNA, 28 bp, Artificial Sequence
  Synthetic
ggttgcctacuggttcaattactttuaa

SEQ ID NO: 771 - DNA, 27 bp, Artificial Sequence
  Synthetic
caaacaagttuatatttccccaugcca

SEQ ID NO: 772 - DNA, 26 bp, Artificial Sequence
  Synthetic
gctgagagttautaacagtgcagugt

SEQ ID NO: 773 - DNA, 22 bp, Artificial Sequence
  Synthetic
agaggcugcagaaatgcaucaa

SEQ ID NO: 774 - DNA, 28 bp, Artificial Sequence
  Synthetic
gatctcttgatacaucaatccgtgttug

SEQ ID NO: 775 - DNA, 21 bp, Artificial Sequence
  Synthetic
tctgcagagutgttagcggut

SEQ ID NO: 776 - DNA, 23 bp, Artificial Sequence
  Synthetic
actcaaagugtggaaugcagaga

SEQ ID NO: 777 - DNA, 28 bp, Artificial Sequence
  Synthetic
ttcttataggtgcugaaaggacatgaug

SEQ ID NO: 778 - DNA, 28 bp, Artificial Sequence
  Synthetic
tgaactcautgatagttgugaaccaaca

SEQ ID NO: 779 - DNA, 28 bp, Artificial Sequence
  Synthetic
ctgcatcggguccacataaatatatuca

SEQ ID NO: 780 - DNA, 24 bp, Artificial Sequence
  Synthetic
ggctcaggaagcuatccctatuct

SEQ ID NO: 781 - DNA, 23 bp, Artificial Sequence
  Synthetic
aaaatcctcacuccaggtcagug

SEQ ID NO: 782 - DNA, 28 bp, Artificial Sequence
  Synthetic
cttattctcattcguttcatccaggauc

SEQ ID NO: 783 - DNA, 25 bp, Artificial Sequence
  Synthetic
tcagtcatuagagcactcuggagag

SEQ ID NO: 784 - DNA, 27 bp, Artificial Sequence
  Synthetic
agcctaaacauccccttaaattggaut

SEQ ID NO: 785 - DNA, 23 bp, Artificial Sequence
  Synthetic
caauaaaaggcagctuggacacg

SEQ ID NO: 786 - DNA, 24 bp, Artificial Sequence
  Synthetic
gccttggtugggacaacauaagaa

SEQ ID NO: 787 - DNA, 30 bp, Artificial Sequence; identical to SEQ ID NO: 92
  Synthetic

SEQ ID NO: 788 - DNA, 22 bp, Artificial Sequence
  Synthetic
ggactgucaagcagagaauggg

SEQ ID NO: 789 - DNA, 26 bp, Artificial Sequence
  Synthetic
acagcucccaaagaaaaatcccauag

SEQ ID NO: 790 - DNA, 25 bp, Artificial Sequence
  Synthetic
agctgauagagattggagugcaaac

SEQ ID NO: 791 - DNA, 21 bp, Artificial Sequence
  Synthetic
tggcatcugaaggcucaaacc

SEQ ID NO: 792 - DNA, 22 bp, Artificial Sequence
  Synthetic
gcauggaagaggattcuggact

SEQ ID NO: 793 - DNA, 25 bp, Artificial Sequence
  Synthetic
gtgttttgcutctctagguaccaga

SEQ ID NO: 794 - DNA, 21 bp, Artificial Sequence
  Synthetic
ttggagcaauccctgtggauc

SEQ ID NO: 795 - DNA, 27 bp, Artificial Sequence
  Synthetic
gtccatacctaugatttccctcttugt

SEQ ID NO: 796 - DNA, 28 bp, Artificial Sequence
  Synthetic
tctcatggaatugaactatctgtuggag

SEQ ID NO: 797 - DNA, 26 bp, Artificial Sequence
  Synthetic
gcgctgttauctctttcttauagcca

SEQ ID NO: 798 - DNA, 25 bp, Artificial Sequence
  Synthetic
tgctttggaagutcagtcaactcut

SEQ ID NO: 799 - DNA, 25 bp, Artificial Sequence
  Synthetic
acttcttccaugactttggcaauct

SEQ ID NO: 800 - DNA, 27 bp, Artificial Sequence
  Synthetic
gacacaaagacuggcttacatttugat

SEQ ID NO: 801 - DNA, 23 bp, Artificial Sequence
  Synthetic
gtgugttctgcttuccagagagt

SEQ ID NO: 802 - DNA, 24 bp, Artificial Sequence
  Synthetic
gtataaatggcucatcgaggcuca

SEQ ID NO: 803 - DNA, 33 bp, Artificial Sequence; identical to SEQ ID NO: 140
  Synthetic

SEQ ID NO: 804 - DNA, 21 bp, Artificial Sequence
  Synthetic
gagctctagugagcaccugac

SEQ ID NO: 805 - DNA, 24 bp, Artificial Sequence
  Synthetic
agttgaugaaccggtccttuacag

SEQ ID NO: 806 - DNA, 26 bp, Artificial Sequence
  Synthetic
tgctggagacauctcacattgtttut

SEQ ID NO: 807 - DNA, 27 bp, Artificial Sequence
  Synthetic
gaaaagtagcucggtagtctacagaut

SEQ ID NO: 808 - DNA, 26 bp, Artificial Sequence
  Synthetic
gccacttacugttcaaggattucaca

SEQ ID NO: 809 - DNA, 21 bp, Artificial Sequence
  Synthetic
ttcacucacctcggaugagga

SEQ ID NO: 810 - DNA, 24 bp, Artificial Sequence
  Synthetic
ttgagttugcagacttuccaaagc

SEQ ID NO: 811 - DNA, 24 bp, Artificial Sequence
  Synthetic
gagtgatgatugggagattccuga

SEQ ID NO: 812 - DNA, 28 bp, Artificial Sequence
  Synthetic
gctaaggcauaggaattttcgtaguaca

SEQ ID NO: 813 - DNA, 22 bp, Artificial Sequence
  Synthetic
ttccagaccagggugttgttut

SEQ ID NO: 814 - DNA, 21 bp, Artificial Sequence
  Synthetic
acctuatacaccgugccgaac

SEQ ID NO: 815 - DNA, 23 bp, Artificial Sequence
  Synthetic
caaggatgccugaccagtuagag

SEQ ID NO: 816 - DNA, 23 bp, Artificial Sequence
  Synthetic
tcgaggattuccttgttggctut

SEQ ID NO: 817 - DNA, 24 bp, Artificial Sequence
  Synthetic
acctaaagccaccuccttacttug

SEQ ID NO: 818 - DNA, 22 bp, Artificial Sequence
  Synthetic
ctcctcucccatctuccacaga

SEQ ID NO: 819 - DNA, 23 bp, Artificial Sequence
  Synthetic
tgcccctucttcttcccauagat

SEQ ID NO: 820 - DNA, 25 bp, Artificial Sequence
  Synthetic
ctttcatgacugcagcttcttucaa

SEQ ID NO: 821 - DNA, 21 bp, Artificial Sequence
  Synthetic
gtagtccaggaggutcccgua

SEQ ID NO: 822 - DNA, 23 bp, Artificial Sequence
  Synthetic
ccgtcaggcugtatttctuccac

SEQ ID NO: 823 - DNA, 28 bp, Artificial Sequence
  Synthetic
agaaaggcatuagaaagcctgtagttut

SEQ ID NO: 824 - DNA, 25 bp, Artificial Sequence
  Synthetic
cggacttgauggagaacttgttgua

SEQ ID NO: 825 - DNA, 28 bp, Artificial Sequence
  Synthetic
tgaugaagatgatugggaaacacaagaa

SEQ ID NO: 826 - DNA, 22 bp, Artificial Sequence
  Synthetic
caatcuagcgccuggaagagaa

SEQ ID NO: 827 - DNA, 22 bp, Artificial Sequence
  Synthetic
gtggaucaagcacguggaaaag

SEQ ID NO: 828 - DNA, 22 bp, Artificial Sequence
  Synthetic
ctgctucaggacgttgaacuct

SEQ ID NO: 829 - DNA, 24 bp, Artificial Sequence
  Synthetic
tcctcttcacguaggaatcctcut

SEQ ID NO: 830 - DNA, 23 bp, Artificial Sequence
  Synthetic
aacacccacacutacacaucact

SEQ ID NO: 831 - DNA, 26 bp, Artificial Sequence
  Synthetic
tgccactgguctataatccagaugat

SEQ ID NO: 832 - DNA, 23 bp, Artificial Sequence
  Synthetic
ccgcagaaauggatacaggucaa

SEQ ID NO: 833 - DNA, 28 bp, Artificial Sequence
  Synthetic
tcgtttgcaucactaacactactaucag

SEQ ID NO: 834 - DNA, 28 bp, Artificial Sequence
  Synthetic
ggtcctgaatuggaggaatatatctuca

SEQ ID NO: 835 - DNA, 29 bp, Artificial Sequence
  Synthetic
acaggaaattuctaaatgtgacaugacct

SEQ ID NO: 836 - DNA, 29 bp, Artificial Sequence
  Synthetic
gacactgaaugagaaaatggtaacactut

SEQ ID NO: 837 - DNA, 28 bp, Artificial Sequence
  Synthetic
gcagcttuacagtttttcatagugagac

SEQ ID NO: 838 - DNA, 23 bp, Artificial Sequence
  Synthetic
ctgtagauaggccagcatuggat

SEQ ID NO: 839 - DNA, 21 bp, Artificial Sequence
  Synthetic
agggaaggcucacctuaacaa

SEQ ID NO: 840 - DNA, 23 bp, Artificial Sequence
  Synthetic
tcctagttuccgtgtttctcugc

SEQ ID NO: 841 - DNA, 28 bp, Artificial Sequence
  Synthetic
gccatacctgtuttcccaataagtttuc

SEQ ID NO: 842 - DNA, 25 bp, Artificial Sequence
  Synthetic
cttaagggccutggtataagaugca

SEQ ID NO: 843 - DNA, 28 bp, Artificial Sequence
  Synthetic
cacaagtcagtguctttatccaaatguc

SEQ ID NO: 844 - DNA, 25 bp, Artificial Sequence
  Synthetic
gtaggcaaacaacautccatgauga

SEQ ID NO: 845 - DNA, 23 bp, Artificial Sequence
  Synthetic
cagggctaautcatccaacucca

SEQ ID NO: 846 - DNA, 23 bp, Artificial Sequence
  Synthetic
gccttcttccacucctttcagut

SEQ ID NO: 847 - DNA, 24 bp, Artificial Sequence
  Synthetic
cctgaggagcgaugacggaataua

SEQ ID NO: 848 - DNA, 28 bp, Artificial Sequence
  Synthetic
atgagatacacaguctacctgguaagaa

SEQ ID NO: 849 - DNA, 28 bp, Artificial Sequence
  Synthetic
catatactgaagaucacacccaagctut

SEQ ID NO: 850 - DNA, 26 bp, Artificial Sequence
  Synthetic
gataaatcgguactgtgcttctguct

SEQ ID NO: 851 - DNA, 25 bp, Artificial Sequence
  Synthetic
tgtttctccctuctcaggattccua

SEQ ID NO: 852 - DNA, 22 bp, Artificial Sequence
  Synthetic
ccacgggaaaguggtgaagaua

SEQ ID NO: 853 - DNA, 22 bp, Artificial Sequence
  Synthetic
gggttcttcugcctctcauagg

SEQ ID NO: 854 - DNA, 23 bp, Artificial Sequence
  Synthetic
caggcucaggactuagcaagaag

SEQ ID NO: 855 - DNA, 25 bp, Artificial Sequence
  Synthetic
tgaaagagaggcacucatgucagaa

SEQ ID NO: 856 - DNA, 23 bp, Artificial Sequence
  Synthetic
accggctccucagataatgagua

SEQ ID NO: 857 - DNA, 28 bp, Artificial Sequence
  Synthetic
acgttcttttcuatagggaaaccucaag

SEQ ID NO: 858 - DNA, 25 bp, Artificial Sequence
  Synthetic
ttctttcctcuatctgcagaacugc

SEQ ID NO: 859 - DNA, 25 bp, Artificial Sequence
  Synthetic
gaccaagaaauggatctgtgggtua

SEQ ID NO: 860 - DNA, 25 bp, Artificial Sequence
  Synthetic
gaattaccguggtgggatugaagat

SEQ ID NO: 861 - DNA, 28 bp, Artificial Sequence
  Synthetic
ggtggaagcauactgcaaaatatttgut

SEQ ID NO: 862 - DNA, 28 bp, Artificial Sequence
  Synthetic
gacaaattguccaccatcatcatucaat

SEQ ID NO: 863 - DNA, 28 bp, Artificial Sequence
  Synthetic
gctgaagagugcaaacaatacatcauac

SEQ ID NO: 864 - DNA, 30 bp, Artificial Sequence; identical to SEQ ID NO: 323
  Synthetic

SEQ ID NO: 865 - DNA, 27 bp, Artificial Sequence
  Synthetic
ttgttagccauatgcacatgaaugaat

SEQ ID NO: 866 - DNA, 22 bp, Artificial Sequence
  Synthetic
tgacatggtugggactctugac

SEQ ID NO: 867 - DNA, 22 bp, Artificial Sequence
  Synthetic
gccatagggcauaagctgtguc

SEQ ID NO: 868 - DNA, 22 bp, Artificial Sequence
  Synthetic
cctaggtuggctctgactguac

SEQ ID NO: 869 - DNA, 27 bp, Artificial Sequence
  Synthetic
caactcgttcguagtgatatggatuca

SEQ ID NO: 870 - DNA, 23 bp, Artificial Sequence
  Synthetic
cgatgcacgautacttgguggat

SEQ ID NO: 871 - DNA, 24 bp, Artificial Sequence
  Synthetic
ccagtaaatccautctgctgcugt

SEQ ID NO: 872 - DNA, 24 bp, Artificial Sequence
  Synthetic
gagctattccaccuactgatccug

SEQ ID NO: 873 - DNA, 23 bp, Artificial Sequence
  Synthetic
acttagcutggaagcugacaagt

SEQ ID NO: 874 - DNA, 27 bp, Artificial Sequence
  Synthetic
cacaaaattugggattattggagugga

SEQ ID NO: 875 - DNA, 22 bp, Artificial Sequence
  Synthetic
caccttucagcaggucagagag

SEQ ID NO: 876 - DNA, 24 bp, Artificial Sequence
  Synthetic
ggtaacagutggcttacuggaagt

SEQ ID NO: 877 - DNA, 28 bp, Artificial Sequence
  Synthetic
caactattttcutcctctctuccacagt

SEQ ID NO: 878 - DNA, 25 bp, Artificial Sequence
  Synthetic
tgtaccattcaugttccaggugaag

SEQ ID NO: 879 - DNA, 22 bp, Artificial Sequence
  Synthetic
gagaacuaaggcggaaucagca

SEQ ID NO: 880 - DNA, 28 bp, Artificial Sequence
  Synthetic
tgaaccatctttuaactcaggtactgug

SEQ ID NO: 881 - DNA, 20 bp, Artificial Sequence
  Synthetic
gggcccggugtaagtgaaut

SEQ ID NO: 882 - DNA, 23 bp, Artificial Sequence
  Synthetic
gguaatctacugggacggaacag

SEQ ID NO: 883 - DNA, 24 bp, Artificial Sequence
  Synthetic
caatccauttttgttguccagcca

SEQ ID NO: 884 - DNA, 21 bp, Artificial Sequence
  Synthetic
gaagcagguggtcattgaugg

SEQ ID NO: 885 - DNA, 23 bp, Artificial Sequence
  Synthetic
gacautggagagtugacccaaac

SEQ ID NO: 886 - DNA, 21 bp, Artificial Sequence
  Synthetic
ccagggcuttgaaggaagugt

SEQ ID NO: 887 - DNA, 20 bp, Artificial Sequence
  Synthetic
cctctgugaagagcgggtuc

SEQ ID NO: 888 - DNA, 28 bp, Artificial Sequence
  Synthetic
gcttatttattgguctctcattcuccca

SEQ ID NO: 889 - DNA, 27 bp, Artificial Sequence
  Synthetic
aatattgtctttgugttcccggacaua

SEQ ID NO: 890 - DNA, 19 bp, Artificial Sequence
  Synthetic
gggagaucttgugcacggt

SEQ ID NO: 891 - DNA, 33 bp, Artificial Sequence; identical to SEQ ID NO: 404
  Synthetic

SEQ ID NO: 892 - DNA, 24 bp, Artificial Sequence
  Synthetic
cagcatttacugcagcttgctuag

SEQ ID NO: 893 - DNA, 25 bp, Artificial Sequence
  Synthetic
gaggaagatccutgtatgctgtuac

SEQ ID NO: 894 - DNA, 23 bp, Artificial Sequence
  Synthetic
tgaccaaaacucagcctgttuct

SEQ ID NO: 895 - DNA, 20 bp, Artificial Sequence
  Synthetic
gtgcagcugtgggttgatuc

SEQ ID NO: 896 - DNA, 25 bp, Artificial Sequence
  Synthetic
gctcucattttaaagauggcccaaa

SEQ ID NO: 897 - DNA, 26 bp, Artificial Sequence
  Synthetic
ctgattcctcacugattgctctuagg

SEQ ID NO: 898 - DNA, 28 bp, Artificial Sequence
  Synthetic
ctgacagaaguacatctgctaaacauga

SEQ ID NO: 899 - DNA, 23 bp, Artificial Sequence
  Synthetic
agtaccuggcagtgtgatatugg

SEQ ID NO: 900 - DNA, 25 bp, Artificial Sequence
  Synthetic
gtacactgccuttcgacacatagut

SEQ ID NO: 901 - DNA, 29 bp, Artificial Sequence
  Synthetic
actgtuacagaaatgaaauaagacggaaa

SEQ ID NO: 902 - DNA, 28 bp, Artificial Sequence
  Synthetic
ggaaaattcataccuaactggagtgugt

SEQ ID NO: 903 - DNA, 27 bp, Artificial Sequence
  Synthetic
tgcttgctctgauaggaaaatgagauc

SEQ ID NO: 904 - DNA, 24 bp, Artificial Sequence
  Synthetic
cttttaatugcccgtgatgtucca

SEQ ID NO: 905 - DNA, 21 bp, Artificial Sequence
  Synthetic
atccccacutttcctctugca

SEQ ID NO: 906 - DNA, 21 bp, Artificial Sequence
  Synthetic
gctgtgacacugctggaacut

SEQ ID NO: 907 - DNA, 25 bp, Artificial Sequence
  Synthetic
cgctacttccucctcaagaatgaug

SEQ ID NO: 908 - DNA, 27 bp, Artificial Sequence
  Synthetic
atccttcttctccugtttgagaatguc

SEQ ID NO: 909 - DNA, 20 bp, Artificial Sequence
  Synthetic
ggactgugcggagcatguac

SEQ ID NO: 910 - DNA, 30 bp, Artificial Sequence; identical to SEQ ID NO: 461
  Synthetic

SEQ ID NO: 911 - DNA, 19 bp, Artificial Sequence
  Synthetic
ggcgtccuactggcaugac

SEQ ID NO: 912 - DNA, 27 bp, Artificial Sequence
  Synthetic
gatuaagaggacaagcagatucaaggt

SEQ ID NO: 913 - DNA, 27 bp, Artificial Sequence
  Synthetic
gtcaacaacccccacaaaaugttuaat

SEQ ID NO: 914 - DNA, 30 bp, Artificial Sequence; identical to SEQ ID NO: 473
  Synthetic

SEQ ID NO: 915 - DNA, 23 bp, Artificial Sequence
  Synthetic
caggattgccuttaccacucaga

SEQ ID NO: 916 - DNA, 31 bp, Artificial Sequence; identical to SEQ ID NO: 479
  Synthetic

SEQ ID NO: 917 - DNA, 23 bp, Artificial Sequence
  Synthetic
caccagguacgcctccagaugag

SEQ ID NO: 918 - DNA, 22 bp, Artificial Sequence
  Synthetic
ggtcccagccccuctctgatug

SEQ ID NO: 919 - DNA, 22 bp, Artificial Sequence
  Synthetic
ccgaguccagcacctcctucac

SEQ ID NO: 920 - DNA, 23 bp, Artificial Sequence
  Synthetic
caccctggcuctgaccattcugt

SEQ ID NO: 921 - DNA, 21 bp, Artificial Sequence
  Synthetic
gagaggcggcccaaucttcug

SEQ ID NO: 922 - DNA, 27 bp, Artificial Sequence
  Synthetic
cacgctctauactgcaaatgctaucga

SEQ ID NO: 923 - DNA, 23 bp, Artificial Sequence
  Synthetic
gggtcctucctgtcctccuagca

SEQ ID NO: 924 - DNA, 20 bp, Artificial Sequence
  Synthetic
cccugcaccagcagctccua

SEQ ID NO: 925 - DNA, 26 bp, Artificial Sequence
  Synthetic
caccgtgaagucctgagtgtagauga

SEQ ID NO: 926 - DNA, 21 bp, Artificial Sequence
  Synthetic
ctccacgcccugtgacuccat

SEQ ID NO: 927 - DNA, 22 bp, Artificial Sequence
  Synthetic
tgguagcagtggaugcagaagg

SEQ ID NO: 928 - DNA, 26 bp, Artificial Sequence
  Synthetic
ccttccuccagaagcttgaactcuca

SEQ ID NO: 929 - DNA, 20 bp, Artificial Sequence
  Synthetic
cagtuggcgggcttguccat

SEQ ID NO: 930 - DNA, 20 bp, Artificial Sequence
  Synthetic
cctgguccaccgccagtcuc

SEQ ID NO: 931 - DNA, 20 bp, Artificial Sequence
  Synthetic
ccccuagcacgtgccuacct

SEQ ID NO: 932 - DNA, 23 bp, Artificial Sequence
  Synthetic
gttctcccaugggcuagacacca

SEQ ID NO: 933 - DNA, 22 bp, Artificial Sequence
  Synthetic
ctgcuagggacccctcacatug

SEQ ID NO: 934 - DNA, 20 bp, Artificial Sequence
  Synthetic
ggcccgcugtacgtguccat

SEQ ID NO: 935 - DNA, 21 bp, Artificial Sequence
  Synthetic
gcagtggaacuccacgucgct

SEQ ID NO: 936 - DNA, 23 bp, Artificial Sequence
  Synthetic
actctguacaaagaccgcguggt

SEQ ID NO: 937 - DNA, 37 bp, Artificial Sequence; identical to SEQ ID NO: 542
  Synthetic

SEQ ID NO: 938 - DNA, 37 bp, Artificial Sequence; identical to SEQ ID NO: 545
  Synthetic

SEQ ID NO: 939 - DNA, 37 bp, Artificial Sequence; identical to SEQ ID NO: 548
  Synthetic

SEQ ID NO: 940 - DNA, 22 bp, Artificial Sequence
  Synthetic
gggtgtgcuggaaaagggucca

SEQ ID NO: 941 - DNA, 22 bp, Artificial Sequence
  Synthetic
gtgctgtugagacctctguggg

SEQ ID NO: 942 - DNA, 20 bp, Artificial Sequence
  Synthetic
gcccgtaccucggtagcugt

SEQ ID NO: 943 - DNA, 37 bp, Artificial Sequence; identical to SEQ ID NO: 560
  Synthetic

SEQ ID NO: 944 - DNA, 21 bp, Artificial Sequence
  Synthetic
ccgcctgugcctagaggtuct

SEQ ID NO: 945 - DNA, 26 bp, Artificial Sequence
  Synthetic
ctgttcacttgugccctgacttucaa

SEQ ID NO: 946 - DNA, 17 bp, Artificial Sequence
  Synthetic
cgcccucggagcugaag

SEQ ID NO: 947 - DNA, 19 bp, Artificial Sequence
  Synthetic
cctgcagcuccttucccag

SEQ ID NO: 948 - DNA, 17 bp, Artificial Sequence
  Synthetic
gccucctcacucagccg

SEQ ID NO: 949 - DNA, 21 bp, Artificial Sequence
  Synthetic
ttgttguccgccatgttgtug

SEQ ID NO: 950 - DNA, 17 bp, Artificial Sequence
  Synthetic
gcgacuacaguggcggg

SEQ ID NO: 951 - DNA, 19 bp, Artificial Sequence
  Synthetic
cgtggtggcucctttgtug

SEQ ID NO: 952 - DNA, 20 bp, Artificial Sequence
  Synthetic
gtacccgaugaccaugcagg

SEQ ID NO: 953 - DNA, 28 bp, Artificial Sequence
  Synthetic
attctatagcucacagatcagatttugg

SEQ ID NO: 954 - DNA, 21 bp, Artificial Sequence
  Synthetic
ccacaggcucagtctcctuac

SEQ ID NO: 955 - DNA, 22 bp, Artificial Sequence
  Synthetic
ggcaggagguagggauatctua

SEQ ID NO: 956 - DNA, 22 bp, Artificial Sequence
  Synthetic
tgagcacaucagggattuccag

SEQ ID NO: 957 - DNA, 19 bp, Artificial Sequence
  Synthetic
cgagaguggtccugagcga

SEQ ID NO: 958 - DNA, 19 bp, Artificial Sequence
  Synthetic
cagccttauctccgcguca

SEQ ID NO: 959 - DNA, 24 bp, Artificial Sequence
  Synthetic
aaggaactgutttctcctcucacc

SEQ ID NO: 960 - DNA, 27 bp, Artificial Sequence
  Synthetic
tccagttcaaauctaaaagcucagagt

SEQ ID NO: 961 - DNA, 26 bp, Artificial Sequence
  Synthetic
ggttgatcaugccagccatactatua

SEQ ID NO: 962 - DNA, 22 bp, Artificial Sequence
  Synthetic
acaggcuttgaatcugacccat

SEQ ID NO: 963 - DNA, 21 bp, Artificial Sequence
  Synthetic
cutctcctcagugaaggccag

SEQ ID NO: 964 - DNA, 27 bp, Artificial Sequence
  Synthetic
tgtttgtgtgagagutaaacactguca

SEQ ID NO: 965 - DNA, 23 bp, Artificial Sequence
  Synthetic
ggctttaaguctcctccttcugc

SEQ ID NO: 966 - DNA, 23 bp, Artificial Sequence
  Synthetic
agggtagatuaccaggcttguca

SEQ ID NO: 967 - DNA, 21 bp, Artificial Sequence
  Synthetic
tcccaucgccacatttccuag

SEQ ID NO: 968 - DNA, 20 bp, Artificial Sequence
  Synthetic
gcccacccuaatcctgtgut

SEQ ID NO: 969 - DNA, 20 bp, Artificial Sequence
  Synthetic
ccagtccautcccagcuacc

SEQ ID NO: 970 - DNA, 20 bp, Artificial Sequence
  Synthetic
tccautccagttuggccgag

SEQ ID NO: 971 - DNA, 28 bp, Artificial Sequence
  Synthetic
cctgttggcauaattataggtcatguca

SEQ ID NO: 972 - DNA, 20 bp, Artificial Sequence
  Synthetic
ccaauggagaaccgcaccuc

SEQ ID NO: 973 - DNA, 21 bp, Artificial Sequence
  Synthetic
ggtgataucccgccgaaucat

SEQ ID NO: 974 - DNA, 26 bp, Artificial Sequence
  Synthetic
agtcaataautctgttctuaggccac

SEQ ID NO: 975 - DNA, 23 bp, Artificial Sequence
  Synthetic
tgccaaagauctcaaucaggcat

SEQ ID NO: 976 - DNA, 25 bp, Artificial Sequence
  Synthetic
ttgacaagctuccagtaaagaucgt

SEQ ID NO: 977 - DNA, 22 bp, Artificial Sequence
  Synthetic
ctctgtctugctctcgaagugg

SEQ ID NO: 978 - DNA, 22 bp, Artificial Sequence
  Synthetic
acaguaaggaugagaccccact

SEQ ID NO: 979 - DNA, 24 bp, Artificial Sequence
  Synthetic
ttggacatcucaaagtcatugcct

SEQ ID NO: 980 - DNA, 20 bp, Artificial Sequence
  Synthetic
tggacggacucctacacugg

SEQ ID NO: 981 - DNA, 22 bp, Artificial Sequence
  Synthetic
acattgttgucctggatgcuga

SEQ ID NO: 982 - DNA, 20 bp, Artificial Sequence
  Synthetic
cccaccctutgagccaacua

SEQ ID NO: 983 - DNA, 23 bp, Artificial Sequence
  Synthetic
atcaacggtgauaccgagatguc

SEQ ID NO: 984 - DNA, 21 bp, Artificial Sequence
  Synthetic
cctaaagaauggccgagccut

SEQ ID NO: 985 - DNA, 27 bp, Artificial Sequence
  Synthetic
acttgtttuccccacctctcttaauac

SEQ ID NO: 986 - DNA, 20 bp, Artificial Sequence
  Synthetic
gtggagutcctggugaagca

SEQ ID NO: 987 - DNA, 25 bp, Artificial Sequence
  Synthetic
ccacgtttautgaagatttguggct

SEQ ID NO: 988 - DNA, 23 bp, Artificial Sequence
  Synthetic
ctctctctcacuttccctctugg

SEQ ID NO: 989 - DNA, 22 bp, Artificial Sequence
  Synthetic
cagagtcctucaggtgtcctut

SEQ ID NO: 990 - DNA, 23 bp, Artificial Sequence
  Synthetic
agaaaagccaugcagttgacuga

SEQ ID NO: 991 - DNA, 27 bp, Artificial Sequence
  Synthetic
ctgtcagcaacguagtgatuacaaaaa

SEQ ID NO: 992 - DNA, 29 bp, Artificial Sequence
  Synthetic
tgtattucaagaaacttgctuaggacact

SEQ ID NO: 993 - DNA, 25 bp, Artificial Sequence
  Synthetic
catcagactgtutcttcaggcaauc

SEQ ID NO: 994 - DNA, 28 bp, Artificial Sequence
  Synthetic
aaaaatccaagttugtatctgcaacugg

SEQ ID NO: 995 - DNA, 24 bp, Artificial Sequence
  Synthetic
aaagcatgtguatgacctgaaugt

SEQ ID NO: 996 - DNA, 23 bp, Artificial Sequence
  Synthetic
ctccgttuacaagaatgctgugt

SEQ ID NO: 997 - DNA, 25 bp, Artificial Sequence
  Synthetic
ggaggagggcguttttatgtuacat

SEQ ID NO: 998 - DNA, 28 bp, Artificial Sequence
  Synthetic
cacatttctttcugacttccttgagtug

SEQ ID NO: 999 - DNA, 30 bp, Artificial Sequence
  Synthetic
aagttcaaagggagaauactaatcugcaaa

SEQ ID NO: 1000 - DNA, 27 bp, Artificial Sequence
  Synthetic
cttaauagcagagaaatcugcaacagg

SEQ ID NO: 1001 - DNA, 28 bp, Artificial Sequence
  Synthetic
tgcaataccttatauctgcgtagagcut

SEQ ID NO: 1002 - DNA, 20 bp, Artificial Sequence
  Synthetic
acggaccuccaauccagaca

SEQ ID NO: 1003 - DNA, 28 bp, Artificial Sequence
  Synthetic
tggattgaaagagugacacttcaaagut

SEQ ID NO: 1004 - DNA, 25 bp, Artificial Sequence
  Synthetic
caaagagttauacatgctccuggca

SEQ ID NO: 1005 - DNA, 26 bp, Artificial Sequence
  Synthetic
gtgataaagugaaaccagtgttgcuc

SEQ ID NO: 1006 - DNA, 27 bp, Artificial Sequence
  Synthetic
cutggcttcaaaauacaagaaaaccct

SEQ ID NO: 1007 - DNA, 24 bp, Artificial Sequence
  Synthetic
auttgggattuagccgacacagat

SEQ ID NO: 1008 - DNA, 28 bp, Artificial Sequence
  Synthetic
atctacaggcauacaatcaagagtugac

SEQ ID NO: 1009 - DNA, 30 bp, Artificial Sequence
  Synthetic
tgtttatttcagtuatcaagtgggaaucct

SEQ ID NO: 1010 - DNA, 29 bp, Artificial Sequence
  Synthetic
ggaagtgtagtugaagagaagatggtaut

SEQ ID NO: 1011 - DNA, 23 bp, Artificial Sequence
  Synthetic
ctctgaaaaacugagggcaucca

SEQ ID NO: 1012 - DNA, 26 bp, Artificial Sequence
  Synthetic
ccctttttcuacttgatgtucgacaa

SEQ ID NO: 1013 - DNA, 30 bp, Artificial Sequence
  Synthetic
gccttagaaaattuacgtgtatacctgugt

SEQ ID NO: 1014 - DNA, 22 bp, Artificial Sequence
  Synthetic
attgacttgugcacctttgcug

SEQ ID NO: 1015 - DNA, 29 bp, Artificial Sequence
  Synthetic
ttttaacacatcutaggcagaacugaagt

SEQ ID NO: 1016 - DNA, 18 bp, Artificial Sequence
  Synthetic
ggtagccccaugctugct

SEQ ID NO: 1017 - DNA, 23 bp, Artificial Sequence
  Synthetic
tccaaaacaccaccuttctucca

SEQ ID NO: 1018 - DNA, 21 bp, Artificial Sequence
  Synthetic
gtccgugaggcaaggtaauga

SEQ ID NO: 1019 - DNA, 23 bp, Artificial Sequence
  Synthetic
cccacttccugatccagtgtaut

SEQ ID NO: 1020 - DNA, 21 bp, Artificial Sequence
  Synthetic
cctcattcugcttggctguga

SEQ ID NO: 1021 - DNA, 20 bp, Artificial Sequence
  Synthetic
gttccucaaggttcccucgt

SEQ ID NO: 1022 - DNA, 19 bp, Artificial Sequence
  Synthetic
cagaggaggcccugaccua

SEQ ID NO: 1023 - DNA, 20 bp, Artificial Sequence
  Synthetic
ccuggaggagcattauggca

SEQ ID NO: 1024 - DNA, 19 bp, Artificial Sequence
  Synthetic
ccugagagcagccgtguat

SEQ ID NO: 1025 - DNA, 24 bp, Artificial Sequence
  Synthetic
gagaaacugaagaaggagcuggag

SEQ ID NO: 1026 - DNA, 20 bp, Artificial Sequence
  Synthetic
ggtgcccaugtgacugaagt

SEQ ID NO: 1027 - DNA, 21 bp, Artificial Sequence
  Synthetic
catccauggaccttcugagca

SEQ ID NO: 1028 - DNA, 26 bp, Artificial Sequence
  Synthetic
ctcaggattucaatcaatgcatucca

SEQ ID NO: 1029 - DNA, 21 bp, Artificial Sequence
  Synthetic
tcatggtgugcctatggcauc

SEQ ID NO: 1030 - DNA, 23 bp, Artificial Sequence
  Synthetic
gaagtattuccgccgactcctut

SEQ ID NO: 1031 - DNA, 20 bp, Artificial Sequence
  Synthetic
cagaggccutcccucaggaa

SEQ ID NO: 1032 - DNA, 25 bp, Artificial Sequence
  Synthetic
aaacaagttcuagtgtgtgctguct

SEQ ID NO: 1033 - DNA, 22 bp, Artificial Sequence
  Synthetic
cgctgtgctuctctctgtctug

SEQ ID NO: 1034 - DNA, 18 bp, Artificial Sequence
  Synthetic
cuggaccgggagagucct

SEQ ID NO: 1035 - DNA, 24 bp, Artificial Sequence
  Synthetic
ttgggatctgcugaagagctatug

SEQ ID NO: 1036 - DNA, 20 bp, Artificial Sequence
  Synthetic
gggccaauacaggccaugat

SEQ ID NO: 1037 - DNA, 25 bp, Artificial Sequence
  Synthetic
gaaccauttcatcuggagaaaaggg

SEQ ID NO: 1038 - DNA, 24 bp, Artificial Sequence
  Synthetic
ggtacagagccautttctgauggt

SEQ ID NO: 1039 - DNA, 21 bp, Artificial Sequence
  Synthetic
ttcggcccutccattucagag

SEQ ID NO: 1040 - DNA, 25 bp, Artificial Sequence
  Synthetic
cagcatggagaugaacaggatgaut

SEQ ID NO: 1041 - DNA, 22 bp, Artificial Sequence
  Synthetic
ccaaacucaagtucccgaccag

SEQ ID NO: 1042 - DNA, 23 bp, Artificial Sequence
  Synthetic
cutgcggaatcucagagaaccaa

SEQ ID NO: 1043 - DNA, 24 bp, Artificial Sequence
  Synthetic
ccacagatatauccaagggctucc

SEQ ID NO: 1044 - DNA, 22 bp, Artificial Sequence
  Synthetic
caaaaccuccccttcagagucc

SEQ ID NO: 1045 - DNA, 23 bp, Artificial Sequence
  Synthetic
actatcagguctagcagtcucca

SEQ ID NO: 1046 - DNA, 27 bp, Artificial Sequence
  Synthetic
aggaatgggcautaatacacagaaucc

SEQ ID NO: 1047 - DNA, 20 bp, Artificial Sequence
  Synthetic
gggaccccaugaggagguat

SEQ ID NO: 1048 - DNA, 21 bp, Artificial Sequence
  Synthetic
ccccaaagutcagcagaugca

SEQ ID NO: 1049 - DNA, 26 bp, Artificial Sequence
  Synthetic
gcgggatagaucaaactcaggtatuc

SEQ ID NO: 1050 - DNA, 26 bp, Artificial Sequence
  Synthetic
atgatgucaccagcacaatcuacaat

SEQ ID NO: 1051 - DNA, 19 bp, Artificial Sequence
  Synthetic
ccatcaugccctgcaugga

SEQ ID NO: 1052 - DNA, 26 bp, Artificial Sequence
  Synthetic
ggaagggagaggaacutttattcugt

SEQ ID NO: 1053 - DNA, 25 bp, Artificial Sequence
  Synthetic
gatcagagcaacagcuacaacaaug

SEQ ID NO: 1054 - DNA, 27 bp, Artificial Sequence
  Synthetic
cgattttcctgutactctccttauggt

SEQ ID NO: 1055 - DNA, 22 bp, Artificial Sequence
  Synthetic
cgtactucccagtttggtgugg

SEQ ID NO: 1056 - DNA, 23 bp, Artificial Sequence
  Synthetic
ggccctguaaagcagcacataua

SEQ ID NO: 1057 - DNA, 22 bp, Artificial Sequence
  Synthetic
cccaacuccttttgguccacag

SEQ ID NO: 1058 - DNA, 21 bp, Artificial Sequence
  Synthetic
ctgggugactgcucaacagat

SEQ ID NO: 1059 - DNA, 25 bp, Artificial Sequence
  Synthetic
ctacactcuccaacacaauccagag

SEQ ID NO: 1060 - DNA, 27 bp, Artificial Sequence
  Synthetic
ttacauaatgtcaacauagccaaagga

SEQ ID NO: 1061 - DNA, 22 bp, Artificial Sequence
  Synthetic
atcucccgacacaacatugagg

SEQ ID NO: 1062 - DNA, 23 bp, Artificial Sequence
  Synthetic
gatctcugcaggtattuggccat

SEQ ID NO: 1063 - DNA, 27 bp, Artificial Sequence
  Synthetic
gggcagtctgautgcttttaatctcut

SEQ ID NO: 1064 - DNA, 23 bp, Artificial Sequence
  Synthetic
ttcaaaacaggagucacggaguc

SEQ ID NO: 1065 - DNA, 27 bp, Artificial Sequence
  Synthetic
tuctatttctttttctugcgcaggaac

SEQ ID NO: 1066 - DNA, 24 bp, Artificial Sequence
  Synthetic
gcttaatagcccuctggacaaugg

SEQ ID NO: 1067 - DNA, 26 bp, Artificial Sequence
  Synthetic
atactgatgauaagcaaggactguct

SEQ ID NO: 1068 - DNA, 25 bp, Artificial Sequence
  Synthetic
accatgtccuctcttttctcttugg

SEQ ID NO: 1069 - DNA, 24 bp, Artificial Sequence
  Synthetic
gggctttctugatgtaaccaucct

SEQ ID NO: 1070 - DNA, 30 bp, Artificial Sequence
  Synthetic
gatttaataccaccucttcactcattcuct

SEQ ID NO: 1071 - DNA, 25 bp, Artificial Sequence
  Synthetic
tccactctcauacacacattcaugg

SEQ ID NO: 1072 - DNA, 19 bp, Artificial Sequence
  Synthetic
ggcccggcuatgactaugt

SEQ ID NO: 1073 - DNA, 25 bp, Artificial Sequence
  Synthetic
tttgtgccuccttaaagaagtucca

SEQ ID NO: 1074 - DNA, 25 bp, Artificial Sequence
  Synthetic
aaaacactagcugtctgtcttcucc

SEQ ID NO: 1075 - DNA, 23 bp, Artificial Sequence
  Synthetic
cccccaguaagtcccttcaaaut

SEQ ID NO: 1076 - DNA, 23 bp, Artificial Sequence
  Synthetic
acctagugaacaaggguccaact

SEQ ID NO: 1077 - DNA, 22 bp, Artificial Sequence
  Synthetic
cttgctgagguttctccctuga

SEQ ID NO: 1078 - DNA, 25 bp, Artificial Sequence
  Synthetic
aagagtacugagacatctucaggag

SEQ ID NO: 1079 - DNA, 23 bp, Artificial Sequence
  Synthetic
ggcacugacatcuagggcaaaat

SEQ ID NO: 1080 - DNA, 31 bp, Artificial Sequence
  Synthetic
accctagtttgtugataccattttagaaugt

SEQ ID NO: 1081 - DNA, 28 bp, Artificial Sequence
  Synthetic
cggugaacaaaatuaagagaggaaaggt

SEQ ID NO: 1082 - DNA, 27 bp, Artificial Sequence
  Synthetic
gagacttucaccttttgucaagaacag

SEQ ID NO: 1083 - DNA, 24 bp, Artificial Sequence
  Synthetic
tgccattctccauccttcaaggua

SEQ ID NO: 1084 - DNA, 22 bp, Artificial Sequence
  Synthetic
acgtgagaacucagggatcuga

SEQ ID NO: 1085 - DNA, 22 bp, Artificial Sequence
  Synthetic
cagtgatguggtgcagagguag

SEQ ID NO: 1086 - DNA, 20 bp, Artificial Sequence
  Synthetic
aggucagcacatuccagcag

SEQ ID NO: 1087 - DNA, 20 bp, Artificial Sequence
  Synthetic
gtgatgccuccaccucaagt

SEQ ID NO: 1088 - DNA, 22 bp, Artificial Sequence
  Synthetic
cagcuggagtgtgttucagagt

SEQ ID NO: 1089 - DNA, 25 bp, Artificial Sequence
  Synthetic
caaggguaaagagaagaatgguggg

SEQ ID NO: 1090 - DNA, 22 bp, Artificial Sequence
  Synthetic
cagttccugggaagggtcatug

SEQ ID NO: 1091 - DNA, 24 bp, Artificial Sequence
  Synthetic
aggcttcttuacaccacgctuaat

SEQ ID NO: 1092 - DNA, 22 bp, Artificial Sequence
  Synthetic
cttcctauccctggugaagcat

SEQ ID NO: 1093 - DNA, 30 bp, Artificial Sequence
  Synthetic
agattcacttctugtcttttaagttacuga

SEQ ID NO: 1094 - DNA, 24 bp, Artificial Sequence
  Synthetic
tggaacatgguttcaaaagctugg

SEQ ID NO: 1095 - DNA, 27 bp, Artificial Sequence
  Synthetic
acaccactggauattgaatttcugcaa

SEQ ID NO: 1096 - DNA, 22 bp, Artificial Sequence
  Synthetic
actctctggugctgtccactua

SEQ ID NO: 1097 - DNA, 24 bp, Artificial Sequence
  Synthetic
cacattagggutctcttucccaca

SEQ ID NO: 1098 - DNA, 29 bp, Artificial Sequence
  Synthetic
caagtgatugagcacaaaagaaaaagaug

SEQ ID NO: 1099 - DNA, 22 bp, Artificial Sequence
  Synthetic
gcggtcaguatggagaggttua

SEQ ID NO: 1100 - DNA, 22 bp, Artificial Sequence
  Synthetic
ctactcucactttcucgcacca

SEQ ID NO: 1101 - DNA, 23 bp, Artificial Sequence
  Synthetic
gaagttcgcuctaagaaugggca

SEQ ID NO: 1102 - DNA, 22 bp, Artificial Sequence
  Synthetic
gtggttaucaagcctcccugaa

SEQ ID NO: 1103 - DNA, 22 bp, Artificial Sequence
  Synthetic
gtatggtccutgggacagtuct

SEQ ID NO: 1104 - DNA, 19 bp, Artificial Sequence
  Synthetic
ggctgtuagtgctgcugct

SEQ ID NO: 1105 - DNA, 18 bp, Artificial Sequence
  Synthetic
guactgucgcaggacgct

SEQ ID NO: 1106 - DNA, 22 bp, Artificial Sequence
  Synthetic
caggaaugcctgctgugaaaat

SEQ ID NO: 1107 - DNA, 30 bp, Artificial Sequence
  Synthetic
cagttatgtcatcauctagatcagtctuga

SEQ ID NO: 1108 - DNA, 26 bp, Artificial Sequence
  Synthetic
gcactccagcacautaaataagugac

SEQ ID NO: 1109 - DNA, 27 bp, Artificial Sequence
  Synthetic
tgccttctttucctttgaatcttucct

SEQ ID NO: 1110 - DNA, 27 bp, Artificial Sequence
  Synthetic
gaaacaaggttgucaacgagaaaauga

SEQ ID NO: 1111 - DNA, 26 bp, Artificial Sequence
  Synthetic
ccagtctugaggcataagttuaaggg

SEQ ID NO: 1112 - DNA, 29 bp, Artificial Sequence
  Synthetic
gtaaaaatgataacutctctccacccuct

SEQ ID NO: 1113 - DNA, 28 bp, Artificial Sequence
  Synthetic
aatgacgtttgugatagctgagttcuaa

SEQ ID NO: 1114 - DNA, 25 bp, Artificial Sequence
  Synthetic
gggaatggcaaaaaucacaataguc

SEQ ID NO: 1115 - DNA, 25 bp, Artificial Sequence
  Synthetic
ttccccagaccuacagaagacauaa

SEQ ID NO: 1116 - DNA, 23 bp, Artificial Sequence
  Synthetic
gagcgagagagugtgtgtactut

SEQ ID NO: 1117 - DNA, 26 bp, Artificial Sequence
  Synthetic
aaaggttatgtgugactgtcatguga

SEQ ID NO: 1118 - DNA, 21 bp, Artificial Sequence
  Synthetic
tcactgcucgtgaucacaagg

SEQ ID NO: 1119 - DNA, 27 bp, Artificial Sequence
  Synthetic
aatggaactuccagagaatttgucact

SEQ ID NO: 1120 - DNA, 21 bp, Artificial Sequence
  Synthetic
caaccgguggcttttuggaag

SEQ ID NO: 1121 - DNA, 28 bp, Artificial Sequence
  Synthetic
ctttgaactccuccaatgtaaagcttut

SEQ ID NO: 1122 - DNA, 24 bp, Artificial Sequence
  Synthetic
gttcttgtcuggaggttctctgua

SEQ ID NO: 1123 - DNA, 25 bp, Artificial Sequence
  Synthetic
guttaagctttugcaggcagaagag

SEQ ID NO: 1124 - DNA, 25 bp, Artificial Sequence
  Synthetic
aattcctttttcucttctgggugct

SEQ ID NO: 1125 - DNA, 18 bp, Artificial Sequence
  Synthetic
cctctucgctccgcugaa

SEQ ID NO: 1126 - DNA, 18 bp, Artificial Sequence
  Synthetic
ggtcaucccaccugcagt

SEQ ID NO: 1127 - DNA, 24 bp, Artificial Sequence
  Synthetic
tcttcaaaccguctcctgtttugt

SEQ ID NO: 1128 - DNA, 22 bp, Artificial Sequence
  Synthetic
ggttgacgauggagaggtcaut

SEQ ID NO: 1129 - DNA, 25 bp, Artificial Sequence
  Synthetic
tcaaaggactuctttgccaagtuca

SEQ ID NO: 1130 - DNA, 20 bp, Artificial Sequence
  Synthetic
ggcccagcacucacaaatuc

SEQ ID NO: 1131 - DNA, 21 bp, Artificial Sequence
  Synthetic
agaccccuggaactgcuacat

SEQ ID NO: 1132 - DNA, 23 bp, Artificial Sequence
  Synthetic
agagtucccaggcaacaaactua

SEQ ID NO: 1133 - DNA, 22 bp, Artificial Sequence
  Synthetic
caagaggtagutggcctgctuc

SEQ ID NO: 1134 - DNA, 22 bp, Artificial Sequence
  Synthetic
caatcaugggcttgttcugcac

SEQ ID NO: 1135 - DNA, 20 bp, Artificial Sequence
  Synthetic
ttccagccugtccugacaac

SEQ ID NO: 1136 - DNA, 18 bp, Artificial Sequence
  Synthetic
gaggagcuggcaguggaa

SEQ ID NO: 1137 - DNA, 17 bp, Artificial Sequence
  Synthetic
ggcuaccacgccugagc

SEQ ID NO: 1138 - DNA, 17 bp, Artificial Sequence
  Synthetic
agggcugcggagaucct

SEQ ID NO: 1139 - DNA, 21 bp, Artificial Sequence
  Synthetic
gcagctacutccagagctuca

SEQ ID NO: 1140 - DNA, 18 bp, Artificial Sequence
  Synthetic
caguagccuccaggccat

SEQ ID NO: 1141 - DNA, 19 bp, Artificial Sequence
  Synthetic
ggugagtccucagcaccag

SEQ ID NO: 1142 - DNA, 22 bp, Artificial Sequence
  Synthetic
agggtgugtaggatgugacact

SEQ ID NO: 1143 - DNA, 19 bp, Artificial Sequence
  Synthetic
gatccaccuctggccucac

SEQ ID NO: 1144 - DNA, 19 bp, Artificial Sequence
  Synthetic
gaagugagtgugcgaccga

SEQ ID NO: 1145 - DNA, 21 bp, Artificial Sequence
  Synthetic
ggctacgucacttcccttgug

SEQ ID NO: 1146 - DNA, 20 bp, Artificial Sequence
  Synthetic
ccutgtgcaacuccgaagga

SEQ ID NO: 1147 - DNA, 20 bp, Artificial Sequence
  Synthetic
cctaccaccucctcuggcaa

SEQ ID NO: 1148 - DNA, 23 bp, Artificial Sequence
  Synthetic
tccaaaatgauggcaaagtuggg

SEQ ID NO: 1149 - DNA, 20 bp, Artificial Sequence
  Synthetic
tcgcacccucaacgtatucg

SEQ ID NO: 1150 - DNA, 21 bp, Artificial Sequence
  Synthetic
gggtgaggcaguctttacuca

SEQ ID NO: 1151 - DNA, 31 bp, Artificial Sequence
  Synthetic
gtacactcatctucctagggataaaatuagg

SEQ ID NO: 1152 - DNA, 22 bp, Artificial Sequence
  Synthetic
agggtgtctcuctgtggcttua

SEQ ID NO: 1153 - DNA, 20 bp, Artificial Sequence
  Synthetic
gctgcagutctcagcucaca

SEQ ID NO: 1154 - DNA, 23 bp, Artificial Sequence
  Synthetic
acactattcagucctgcctucct

SEQ ID NO: 1155 - DNA, 21 bp, Artificial Sequence
  Synthetic
gctgatccuctctgtggugac

SEQ ID NO: 1156 - DNA, 24 bp, Artificial Sequence
  Synthetic
gaggactgaccuaagcaagttugt

SEQ ID NO: 1157 - DNA, 22 bp, Artificial Sequence
  Synthetic
ctctgctcuggtttgctacuca

SEQ ID NO: 1158 - DNA, 21 bp, Artificial Sequence
  Synthetic
ggtggaacgugtctgtctugg

SEQ ID NO: 1159 - DNA, 25 bp, Artificial Sequence
  Synthetic
agtcaggttgaauttaccagagcut

SEQ ID NO: 1160 - DNA, 24 bp, Artificial Sequence
  Synthetic
ggatgtacagcaugtcatcctuct

SEQ ID NO: 1161 - DNA, 20 bp, Artificial Sequence
  Synthetic
gggagccaacgutctttguc

SEQ ID NO: 1162 - DNA, 23 bp, Artificial Sequence
  Synthetic
gctccttgtutgggtttctcuca

SEQ ID NO: 1163 - DNA, 23 bp, Artificial Sequence
  Synthetic
ccctgaaaucaaccctcaccuaa

SEQ ID NO: 1164 - DNA, 21 bp, Artificial Sequence
  Synthetic
ccacaggcucaagccttcaua

SEQ ID NO: 1165 - DNA, 27 bp, Artificial Sequence
  Synthetic
aatcataccttgucctctgactctuct

SEQ ID NO: 1166 - DNA, 22 bp, Artificial Sequence
  Synthetic
catgctctcaugcctgggauaa

SEQ ID NO: 1167 - DNA, 20 bp, Artificial Sequence
  Synthetic
gaaugggacagtccuccagc

SEQ ID NO: 1168 - DNA, 25 bp, Artificial Sequence
  Synthetic
gtgtaaucaaaagccaaaucaccug

SEQ ID NO: 1169 - DNA, 22 bp, Artificial Sequence
  Synthetic
cagccctcuggaaggtacatug

SEQ ID NO: 1170 - DNA, 20 bp, Artificial Sequence
  Synthetic
cagctctggutcctgagguc

SEQ ID NO: 1171 - DNA, 22 bp, Artificial Sequence
  Synthetic
agaugaaggccaacctccuagt

SEQ ID NO: 1172 - DNA, 22 bp, Artificial Sequence
  Synthetic
ccagucccgaagatcuggaaga

SEQ ID NO: 1173 - DNA, 22 bp, Artificial Sequence
  Synthetic
cgagctgtucagttggtggaut

SEQ ID NO: 1174 - DNA, 18 bp, Artificial Sequence
  Synthetic
gcaguccagagcuagcga

SEQ ID NO: 1175 - DNA, 19 bp, Artificial Sequence
  Synthetic
cgggagccacucagcuact

SEQ ID NO: 1176 - DNA, 20 bp, Artificial Sequence
  Synthetic
ccuagagaacgagcggguca

SEQ ID NO: 1177 - DNA, 18 bp, Artificial Sequence
  Synthetic
gacuccccagccgtacuc

SEQ ID NO: 1178 - DNA, 25 bp, Artificial Sequence
  Synthetic
cccatgtccugtataaccaauggaa

SEQ ID NO: 1179 - DNA, 25 bp, Artificial Sequence
  Synthetic
gggagatcuctaccacatucagaca

SEQ ID NO: 1180 - DNA, 29 bp, Artificial Sequence
  Synthetic
cctucaacacccaaattaauaccaaaagt

SEQ ID NO: 1181 - DNA, 28 bp, Artificial Sequence
  Synthetic
aaccagacauacataactgtacaugcaa

SEQ ID NO: 1182 - DNA, 31 bp, Artificial Sequence
  Synthetic
ttcttcattgtaccutcctaattcctuaagt

SEQ ID NO: 1183 - DNA, 24 bp, Artificial Sequence
  Synthetic
ccggucggaagaaggtaaacatua

SEQ ID NO: 1184 - DNA, 24 bp, Artificial Sequence
  Synthetic
ggcattagtuctgtgtgctatugg

SEQ ID NO: 1185 - DNA, 23 bp, Artificial Sequence
  Synthetic
atcctacuccacgctcaaaagug

SEQ ID NO: 1186 - DNA, 27 bp, Artificial Sequence
  Synthetic
aatcttgcccuatcgttaattguaagt

SEQ ID NO: 1187 - DNA, 25 bp, Artificial Sequence
  Synthetic
tggtatttgcauctgttgggugaaa

SEQ ID NO: 1188 - DNA, 23 bp, Artificial Sequence
  Synthetic
agactcagguggagtcatgctua

SEQ ID NO: 1189 - DNA, 24 bp, Artificial Sequence
  Synthetic
tgttacacugcagctctttctcuc

SEQ ID NO: 1190 - DNA, 22 bp, Artificial Sequence
  Synthetic
gcacaaucagagctguagcaga

SEQ ID NO: 1191 - DNA, 28 bp, Artificial Sequence
  Synthetic
tcagttaacggtuaatatcacacagcut

SEQ ID NO: 1192 - DNA, 26 bp, Artificial Sequence
  Synthetic
acttcttaacagguggtttgttcugg

SEQ ID NO: 1193 - DNA, 24 bp, Artificial Sequence
  Synthetic
aattgcagtgaagugctgtgaaug

SEQ ID NO: 1194 - DNA, 26 bp, Artificial Sequence
  Synthetic
tcttcagcuaatttttctgcauccct

SEQ ID NO: 1195 - DNA, 28 bp, Artificial Sequence
  Synthetic
gggatacugaaacagatggacttuacaa

SEQ ID NO: 1196 - DNA, 22 bp, Artificial Sequence
  Synthetic
ccgtctctuccactgaaagugt

SEQ ID NO: 1197 - DNA, 22 bp, Artificial Sequence
  Synthetic
agtttgtuccaggctgttcucc

SEQ ID NO: 1198 - DNA, 19 bp, Artificial Sequence
  Synthetic
cuggaaggactcugcagga

SEQ ID NO: 1199 - DNA, 28 bp, Artificial Sequence
  Synthetic
agagcccttaagutctgagaaaattuga

SEQ ID NO: 1200 - DNA, 25 bp, Artificial Sequence
  Synthetic
tttcatgtgtttcuccagggtacug

SEQ ID NO: 1201 - DNA, 21 bp, Artificial Sequence
  Synthetic
ctatgcctgugcccagaguag

SEQ ID NO: 1202 - DNA, 18 bp, Artificial Sequence
  Synthetic
gatcccuccgtccagcuc

SEQ ID NO: 1203 - DNA, 21 bp, Artificial Sequence
  Synthetic
aggcagcucaaagatccctuc

SEQ ID NO: 1204 - DNA, 17 bp, Artificial Sequence
  Synthetic
gtggaaggccucgcuga

SEQ ID NO: 1205 - DNA, 17 bp, Artificial Sequence
  Synthetic
ctacggcutcgggcuga

SEQ ID NO: 1206 - DNA, 20 bp, Artificial Sequence
  Synthetic
gacgattugtgcatgugcgt

SEQ ID NO: 1207 - DNA, 19 bp, Artificial Sequence
  Synthetic
cugcggcaagacgtucaaa

SEQ ID NO: 1208 - DNA, 20 bp, Artificial Sequence
  Synthetic
gtcaaaggcacucgggugat

SEQ ID NO: 1209 - DNA, 24 bp, Artificial Sequence
  Synthetic
aggatcagtaucgagagaggctuc

SEQ ID NO: 1210 - DNA, 29 bp, Artificial Sequence
  Synthetic
ggacatttguagaagaaataaggcucaac

SEQ ID NO: 1211 - DNA, 25 bp, Artificial Sequence
  Synthetic
gctgtagtgcutgattttgggttuc

SEQ ID NO: 1212 - DNA, 23 bp, Artificial Sequence
  Synthetic
tgggttactuacgcgagaatucc

SEQ ID NO: 1213 - DNA, 17 bp, Artificial Sequence
  Synthetic
gugaaccgagccgucgt

SEQ ID NO: 1214 - DNA, 20 bp, Artificial Sequence
  Synthetic
gccctgtugggagtacugga

SEQ ID NO: 1215 - DNA, 22 bp, Artificial Sequence
  Synthetic
ctcaggauagcacaccuagcat

SEQ ID NO: 1216 - DNA, 27 bp, Artificial Sequence
  Synthetic
aggaacaattcugctcattcacuagac

SEQ ID NO: 1217 - DNA, 23 bp, Artificial Sequence
  Synthetic
gcttctgggccugtttctcttut

SEQ ID NO: 1218 - DNA, 25 bp, Artificial Sequence
  Synthetic
agctgcaguacacacataattugga

SEQ ID NO: 1219 - DNA, 29 bp, Artificial Sequence
  Synthetic
gttgcactuaagccataatgacgttuaat

SEQ ID NO: 1220 - DNA, 23 bp, Artificial Sequence
  Synthetic
ggtcggcuggaagaagttaaguc

SEQ ID NO: 1221 - DNA, 23 bp, Artificial Sequence
  Synthetic
tttccctgugctgactctguaac

SEQ ID NO: 1222 - DNA, 20 bp, Artificial Sequence
  Synthetic
tctcagaguccttgguggca

SEQ ID NO: 1223 - DNA, 24 bp, Artificial Sequence
  Synthetic
aacttctcucccctcuaaaggaca

SEQ ID NO: 1224 - DNA, 18 bp, Artificial Sequence
  Synthetic
ctcctgcucggacuccag

SEQ ID NO: 1225 - DNA, 18 bp, Artificial Sequence
  Synthetic
ctccgugaccugcgagaa

SEQ ID NO: 1226 - DNA, 23 bp, Artificial Sequence
  Synthetic
ttgatctccutctctcucaggct

SEQ ID NO: 1227 - DNA, 26 bp, Artificial Sequence
  Synthetic
tggcuaaacaaagttaauccccacaa

SEQ ID NO: 1228 - DNA, 23 bp, Artificial Sequence
  Synthetic
caccagguaactgttaccagugt

SEQ ID NO: 1229 - DNA, 28 bp, Artificial Sequence
  Synthetic
tctttgtacctcuttgttccttcttuca

SEQ ID NO: 1230 - DNA, 21 bp, Artificial Sequence
  Synthetic
ctccccugtatgatgugcagt

SEQ ID NO: 1231 - DNA, 25 bp, Artificial Sequence
  Synthetic
actgtgttcagaacuttcctccauc

SEQ ID NO: 1232 - DNA, 21 bp, Artificial Sequence
  Synthetic
gctgctggugtggaagttgua

SEQ ID NO: 1233 - DNA, 28 bp, Artificial Sequence
  Synthetic
tgatagatccaaucagagtcatctcgut

SEQ ID NO: 1234 - DNA, 26 bp, Artificial Sequence
  Synthetic
ggtcattgagaaugatttctgggcut

SEQ ID NO: 1235 - DNA, 26 bp, Artificial Sequence
  Synthetic
gtgtttcagctucttgtggtgttuat

SEQ ID NO: 1236 - DNA, 22 bp, Artificial Sequence
  Synthetic
gcgatgaguggtactccatgua

SEQ ID NO: 1237 - DNA, 29 bp, Artificial Sequence
  Synthetic
aggagtatctttucttctggagacuaaca

SEQ ID NO: 1238 - DNA, 23 bp, Artificial Sequence
  Synthetic
gtaagccatutcctgtgtgucct

SEQ ID NO: 1239 - DNA, 21 bp, Artificial Sequence
  Synthetic
cactccagugcttgctttuga

SEQ ID NO: 1240 - DNA, 22 bp, Artificial Sequence
  Synthetic
cctggaggaagcuccaagttut

SEQ ID NO: 1241 - DNA, 25 bp, Artificial Sequence
  Synthetic
tgtacaccaugaaccccaacaaaut

SEQ ID NO: 1242 - DNA, 22 bp, Artificial Sequence
  Synthetic
ttgtctgtucagcaaguggaca

SEQ ID NO: 1243 - DNA, 22 bp, Artificial Sequence
  Synthetic
ccattagcaccuactccaugct

SEQ ID NO: 1244 - DNA, 24 bp, Artificial Sequence
  Synthetic
tgtgggcttuaggtcaatgtugat

SEQ ID NO: 1245 - DNA, 29 bp, Artificial Sequence
  Synthetic
ttgagcacaguaacaagatttuaaaaccc

SEQ ID NO: 1246 - DNA, 24 bp, Artificial Sequence
  Synthetic
gaaagtctcugtgatgagcucagt

SEQ ID NO: 1247 - DNA, 21 bp, Artificial Sequence
  Synthetic
ggaggtaccugctggtcagua

SEQ ID NO: 1248 - DNA, 22 bp, Artificial Sequence
  Synthetic
gactctgaggaugcccaagaut

SEQ ID NO: 1249 - DNA, 24 bp, Artificial Sequence
  Synthetic
gcaccaaaguggatgaatauggag

SEQ ID NO: 1250 - DNA, 20 bp, Artificial Sequence
  Synthetic
ggtccgcucggtctctttug

SEQ ID NO: 1251 - DNA, 18 bp, Artificial Sequence
  Synthetic
cacaucacggcgccuaga

SEQ ID NO: 1252 - DNA, 28 bp, Artificial Sequence
  Synthetic
ttccaaggttcuctgcattcataagaut

SEQ ID NO: 1253 - DNA, 26 bp, Artificial Sequence
  Synthetic
tcttgttgutttagtgtucaagcaca

SEQ ID NO: 1254 - DNA, 24 bp, Artificial Sequence
  Synthetic
tggaattggcaaauccctgaagua

SEQ ID NO: 1255 - DNA, 28 bp, Artificial Sequence
  Synthetic
tcattcattaaaacagugctgtgaaucc

SEQ ID NO: 1256 - DNA, 30 bp, Artificial Sequence
  Synthetic
cctcttataactucacaactgactcaaucc

SEQ ID NO: 1257 - DNA, 23 bp, Artificial Sequence
  Synthetic
ttcctgacttugcccctctttut

SEQ ID NO: 1258 - DNA, 23 bp, Artificial Sequence
  Synthetic
ggttgtgtaucctacgtgcucat

SEQ ID NO: 1259 - DNA, 22 bp, Artificial Sequence
  Synthetic
ggagaaacgcuttgagtccauc

SEQ ID NO: 1260 - DNA, 24 bp, Artificial Sequence
  Synthetic
gcatccattuaccctgtctgtcut

SEQ ID NO: 1261 - DNA, 29 bp, Artificial Sequence
  Synthetic
tgagttatgttcugcacatttgcatttut

SEQ ID NO: 1262 - DNA, 24 bp, Artificial Sequence
  Synthetic
tugcctttaaagucacgaaagcac

SEQ ID NO: 1263 - DNA, 26 bp, Artificial Sequence
  Synthetic
ctgtcatttgtuggttttcagctuct

SEQ ID NO: 1264 - DNA, 23 bp, Artificial Sequence
  Synthetic
gaacgtucattcaaguaggccat

SEQ ID NO: 1265 - DNA, 26 bp, Artificial Sequence
  Synthetic
ctctccaaatcuaggacctaggacuc

SEQ ID NO: 1266 - DNA, 27 bp, Artificial Sequence
  Synthetic
aaaatccattggcutttagttgccaut

SEQ ID NO: 1267 - DNA, 25 bp, Artificial Sequence
  Synthetic
catcagtggtcugtgcatactguag

SEQ ID NO: 1268 - DNA, 27 bp, Artificial Sequence
  Synthetic
catttgcataatttutcccgtcctcut

SEQ ID NO: 1269 - DNA, 29 bp, Artificial Sequence
  Synthetic
cttttagctccucaatcaatgtcttgtut

SEQ ID NO: 1270 - DNA, 23 bp, Artificial Sequence
  Synthetic
caggtgtguctctccaccuaaaa

SEQ ID NO: 1271 - DNA, 22 bp, Artificial Sequence
  Synthetic
cggcctattguggcagagaauc

SEQ ID NO: 1272 - DNA, 25 bp, Artificial Sequence
  Synthetic
ttggatgcautgtgatatucgggat

SEQ ID NO: 1273 - DNA, 32 bp, Artificial Sequence
  Synthetic
aatattttccagaaacuagaggttagctgaua

SEQ ID NO: 1274 - DNA, 27 bp, Artificial Sequence
  Synthetic
aaacatgguaagcaaagaccgaaaauc

SEQ ID NO: 1275 - DNA, 32 bp, Artificial Sequence
  Synthetic
gcctcttattatauccatcattccattttuct

SEQ ID NO: 1276 - DNA, 22 bp, Artificial Sequence
  Synthetic
ggtcucgagccatcctugaaaa

SEQ ID NO: 1277 - DNA, 32 bp, Artificial Sequence
  Synthetic
atttcaactcctttcuagttacgaatatagug

SEQ ID NO: 1278 - DNA, 22 bp, Artificial Sequence
  Synthetic
ccaaacgtcacuctgatgggug

SEQ ID NO: 1279 - DNA, 24 bp, Artificial Sequence
  Synthetic
aaauatgatuaaggccagcccaaa

SEQ ID NO: 1280 - DNA, 23 bp, Artificial Sequence
  Synthetic
accutagctatcuggacacacca

SEQ ID NO: 1281 - DNA, 25 bp, Artificial Sequence
  Synthetic
agtatggatcauccacacctagucc

SEQ ID NO: 1282 - DNA, 30 bp, Artificial Sequence
  Synthetic
ctaaaacaaaacutaactaacgataugcgt

SEQ ID NO: 1283 - DNA, 26 bp, Artificial Sequence
  Synthetic
acccaatcaagcucaacttcgtatut

SEQ ID NO: 1284 - DNA, 30 bp, Artificial Sequence
  Synthetic
tttgttcatgataacuaggaaaggattuga

SEQ ID NO: 1285 - DNA, 29 bp, Artificial Sequence
  Synthetic
gaatgatgtttuctgttctgtaatugcct

SEQ ID NO: 1286 - DNA, 24 bp, Artificial Sequence
  Synthetic
gtccttcaaagcucatgaggugaa

SEQ ID NO: 1287 - DNA, 21 bp, Artificial Sequence
  Synthetic
gtgtgcaaccauctgtgtucc

SEQ ID NO: 1288 - DNA, 22 bp, Artificial Sequence
  Synthetic
gctgatttccutcagggacugg

SEQ ID NO: 1289 - DNA, 25 bp, Artificial Sequence
  Synthetic
ccttattttacuccggaatgcgtut

SEQ ID NO: 1290 - DNA, 29 bp, Artificial Sequence
  Synthetic
agaatctcttcagutttgtctacacttug

SEQ ID NO: 1291 - DNA, 30 bp, Artificial Sequence
  Synthetic
cattgacaaautcataaactguaccaagat

SEQ ID NO: 1292 - DNA, 32 bp, Artificial Sequence
  Synthetic
tttggttattcttautctgttacttacgugga

SEQ ID NO: 1293 - DNA, 22 bp, Artificial Sequence
  Synthetic
cagtguccccaaacctttguct

SEQ ID NO: 1294 - DNA, 23 bp, Artificial Sequence
  Synthetic
ccagaggcaugaaauggaccaat

SEQ ID NO: 1295 - DNA, 24 bp, Artificial Sequence
  Synthetic
cctttttcccutttcgtgttcugc

SEQ ID NO: 1296 - DNA, 24 bp, Artificial Sequence
  Synthetic
gccaaggcauatcgatcctcauaa

SEQ ID NO: 1297 - DNA, 30 bp, Artificial Sequence
  Synthetic
cagagtgacaaautcgttttauaacacagg

SEQ ID NO: 1298 - DNA, 18 bp, Artificial Sequence
  Synthetic
agaatcgcugggcuggac

SEQ ID NO: 1299 - DNA, 25 bp, Artificial Sequence
  Synthetic
gggatatgccauttggacatguaat

SEQ ID NO: 1300 - DNA, 20 bp, Artificial Sequence
  Synthetic
cacctgcagugacgagctua

SEQ ID NO: 1301 - DNA, 30 bp, Artificial Sequence
  Synthetic
tgaatacagtattutgatctgccttuaaca

SEQ ID NO: 1302 - DNA, 22 bp, Artificial Sequence
  Synthetic
ctaccccaccucccaaaatuca

SEQ ID NO: 1303 - DNA, 23 bp, Artificial Sequence
  Synthetic
tgtacttauaggcagtgggcugt

SEQ ID NO: 1304 - DNA, 27 bp, Artificial Sequence
  Synthetic
tgctttaucacacaccttgatucaaga

SEQ ID NO: 1305 - DNA, 25 bp, Artificial Sequence
  Synthetic
cgggtatcaaaaugactcaccacut

SEQ ID NO: 1306 - DNA, 24 bp, Artificial Sequence
  Synthetic
actagacaucactcgcctguaact

SEQ ID NO: 1307 - DNA, 31 bp, Artificial Sequence
  Synthetic
gaaaatataccatugcctgaatgttctucac

SEQ ID NO: 1308 - DNA, 23 bp, Artificial Sequence
  Synthetic
aggagccacutgctagtaaguct

SEQ ID NO: 1309 - DNA, 30 bp, Artificial Sequence
  Synthetic
actttagctgaaaucaaccaaaaauggaat

SEQ ID NO: 1310 - DNA, 32 bp, Artificial Sequence
  Synthetic
taactgatgaattuaactaagagagauaggga

SEQ ID NO: 1311 - DNA, 30 bp, Artificial Sequence
  Synthetic
ggcctggauacaagacttgaagataaauag

SEQ ID NO: 1312 - DNA, 18 bp, Artificial Sequence
  Synthetic
gcgaccauccggtuccat

SEQ ID NO: 1313 - DNA, 20 bp, Artificial Sequence
  Synthetic
ggttucccgaggcttcctug

SEQ ID NO: 1314 - DNA, 25 bp, Artificial Sequence
  Synthetic
ggagttgacagguagtaacttuagc

SEQ ID NO: 1315 - DNA, 28 bp, Artificial Sequence
  Synthetic
tgggtgtgagggutttatagagatcaua

SEQ ID NO: 1316 - DNA, 27 bp, Artificial Sequence
  Synthetic
tutggtcttcattuaagccagaagaga

SEQ ID NO: 1317 - DNA, 27 bp, Artificial Sequence
  Synthetic
aagtatugaaaacagaccaauggaagt

SEQ ID NO: 1318 - DNA, 26 bp, Artificial Sequence
  Synthetic
accacatagaacuaaagacgatguca

SEQ ID NO: 1319 - DNA, 26 bp, Artificial Sequence
  Synthetic
aacttcagtcaguttctcaacccaut

SEQ ID NO: 1320 - DNA, 22 bp, Artificial Sequence
  Synthetic
tcatacgaaccutcggctctuc

SEQ ID NO: 1321 - DNA, 29 bp, Artificial Sequence
  Synthetic
aactaccaaaaacuatggatccagtgaut

SEQ ID NO: 1322 - DNA, 25 bp, Artificial Sequence
  Synthetic
caaaccgaatuaaagcaaagccugt

SEQ ID NO: 1323 - DNA, 28 bp, Artificial Sequence
  Synthetic
cgtgttcccaagagucttttgttctuaa

SEQ ID NO: 1324 - DNA, 24 bp, Artificial Sequence
  Synthetic
tgaatatttgacuggctgctgcut

SEQ ID NO: 1325 - DNA, 29 bp, Artificial Sequence
  Synthetic
tcaccttcaactutgtttgtaagagtuct

SEQ ID NO: 1326 - DNA, 27 bp, Artificial Sequence
  Synthetic
attgttgatacagcugaatctcaugaa

SEQ ID NO: 1327 - DNA, 21 bp, Artificial Sequence
  Synthetic
cccttuggaagtcctguggat

SEQ ID NO: 1328 - DNA, 29 bp, Artificial Sequence
  Synthetic
catttaggaaatcauggatcggatcuaca

SEQ ID NO: 1329 - DNA, 25 bp, Artificial Sequence
  Synthetic
gcacagtggaguattacgtccttut

SEQ ID NO: 1330 - DNA, 29 bp, Artificial Sequence
  Synthetic
tggauactttaatactgauaagccacacc

SEQ ID NO: 1331 - DNA, 24 bp, Artificial Sequence
  Synthetic
gagccacctutgtccattttcauc

SEQ ID NO: 1332 - DNA, 29 bp, Artificial Sequence
  Synthetic
gcagatcguaaaaaggaccttguaaaact

SEQ ID NO: 1333 - DNA, 25 bp, Artificial Sequence
  Synthetic
ttccacgttctuacctgtttgcaua

SEQ ID NO: 1334 - DNA, 28 bp, Artificial Sequence
  Synthetic
acaccatttgcuaagaacttaaauacct

SEQ ID NO: 1335 - DNA, 23 bp, Artificial Sequence
  Synthetic
catctgucaccagaccagttuca

SEQ ID NO: 1336 - DNA, 24 bp, Artificial Sequence
  Synthetic
actcagtgtcuctccctctgatuc

SEQ ID NO: 1337 - DNA, 21 bp, Artificial Sequence
  Synthetic
gggttguggagcaggtaucat

SEQ ID NO: 1338 - DNA, 23 bp, Artificial Sequence
  Synthetic
atgttaaagagcucgtcctgguc

SEQ ID NO: 1339 - DNA, 22 bp, Artificial Sequence
  Synthetic
ggtctcagguttgcttgtguct

SEQ ID NO: 1340 - DNA, 19 bp, Artificial Sequence
  Synthetic
ggcuccgggaactucacac

SEQ ID NO: 1341 - DNA, 22 bp, Artificial Sequence
  Synthetic
aggacatgguggacagugagat

SEQ ID NO: 1342 - DNA, 22 bp, Artificial Sequence
  Synthetic
ctctgccuccttctcttcucct

SEQ ID NO: 1343 - DNA, 23 bp, Artificial Sequence
  Synthetic
ccaagaaggaccutgtggaagut

SEQ ID NO: 1344 - DNA, 21 bp, Artificial Sequence
  Synthetic
cattgggcccutccccatauc

SEQ ID NO: 1345 - DNA, 24 bp, Artificial Sequence
  Synthetic
agattgaaaagaccucgggugaaa

SEQ ID NO: 1346 - DNA, 22 bp, Artificial Sequence
  Synthetic
gggtacagutcttcuacagcca

SEQ ID NO: 1347 - DNA, 24 bp, Artificial Sequence
  Synthetic
ccgtgugaggaaactgttuaacct

SEQ ID NO: 1348 - DNA, 21 bp, Artificial Sequence
  Synthetic
gcugttagtcacuggcagcaa

SEQ ID NO: 1349 - DNA, 23 bp, Artificial Sequence
  Synthetic
gagaaaatcccugttcccacuca

SEQ ID NO: 1350 - DNA, 26 bp, Artificial Sequence
  Synthetic
gctgaaacaugcagttgtaaactuga

SEQ ID NO: 1351 - DNA, 23 bp, Artificial Sequence
  Synthetic
tctgaaacuactcccctugagca

SEQ ID NO: 1352 - DNA, 26 bp, Artificial Sequence
  Synthetic
tgggtaagaaaacaugtcagaaugct

SEQ ID NO: 1353 - DNA, 32 bp, Artificial Sequence
  Synthetic
ccattttagcuccttcttgatgtaauaaaagg

SEQ ID NO: 1354 - DNA, 30 bp, Artificial Sequence
  Synthetic
ccccaagcuttagtaaatataaugaggacc

SEQ ID NO: 1355 - DNA, 26 bp, Artificial Sequence
  Synthetic
agaacugcagatgctauacacaagac

SEQ ID NO: 1356 - DNA, 22 bp, Artificial Sequence
  Synthetic
ccatctgtgcucttcgtcauct

SEQ ID NO: 1357 - DNA, 29 bp, Artificial Sequence
  Synthetic
ctgcaacaaagguaaattctacttugaca

SEQ ID NO: 1358 - DNA, 28 bp, Artificial Sequence
  Synthetic
cgcatggaagaaauagttgaaggttgua

SEQ ID NO: 1359 - DNA, 32 bp, Artificial Sequence
  Synthetic
tttatggacataaaaccuagaacacttcacut

SEQ ID NO: 1360 - DNA, 22 bp, Artificial Sequence
  Synthetic
gctgctgtuttgttccgaaugt

SEQ ID NO: 1361 - DNA, 22 bp, Artificial Sequence
  Synthetic
caagctgccauacctgctcuag

SEQ ID NO: 1362 - DNA, 23 bp, Artificial Sequence
  Synthetic
gcctggtttgauactgacctgua

SEQ ID NO: 1363 - DNA, 31 bp, Artificial Sequence
  Synthetic
caaagtatatacctguttttgtggcagatut

SEQ ID NO: 1364 - DNA, 21 bp, Artificial Sequence
  Synthetic
ccagaucaggcaacuggagaa

SEQ ID NO: 1365 - DNA, 20 bp, Artificial Sequence
  Synthetic
ccgaucagaggtgcaaugct

SEQ ID NO: 1366 - DNA, 21 bp, Artificial Sequence
  Synthetic
ctgaugacaggacccagauca

SEQ ID NO: 1367 - DNA, 19 bp, Artificial Sequence
  Synthetic
ccuatccgcucagccaacc

SEQ ID NO: 1368 - DNA, 21 bp, Artificial Sequence
  Synthetic
tgggauccgaagcaccuagaa

SEQ ID NO: 1369 - DNA, 22 bp, Artificial Sequence
  Synthetic
accccagcaguactcagaugat

SEQ ID NO: 1370 - DNA, 21 bp, Artificial Sequence
  Synthetic
gcuctgagguccacaagaggt

SEQ ID NO: 1371 - DNA, 22 bp, Artificial Sequence
  Synthetic
cccacaaguctcaagagucaca

SEQ ID NO: 1372 - DNA, 21 bp, Artificial Sequence
  Synthetic
gtcccucccaaagtagguaca

SEQ ID NO: 1373 - DNA, 25 bp, Artificial Sequence
  Synthetic
gattccttgtcutggtctccacuag

SEQ ID NO: 1374 - DNA, 20 bp, Artificial Sequence
  Synthetic
gatgaaggcacugcagccua

SEQ ID NO: 1375 - DNA, 27 bp, Artificial Sequence
  Synthetic
gtatgggtgacuattcttggttucaca

SEQ ID NO: 1376 - DNA, 17 bp, Artificial Sequence
  Synthetic
cggucccctccucacct

SEQ ID NO: 1377 - DNA, 21 bp, Artificial Sequence
  Synthetic
gttgtctgugtgtgggacuga

SEQ ID NO: 1378 - DNA, 21 bp, Artificial Sequence
  Synthetic
ggcaaattcucggaggaugct

SEQ ID NO: 1379 - DNA, 22 bp, Artificial Sequence
  Synthetic
gcggcatuggaaaatgtcgaug

SEQ ID NO: 1380 - DNA, 23 bp, Artificial Sequence
  Synthetic
ttctttggcutttccctccuacc

SEQ ID NO: 1381 - DNA, 20 bp, Artificial Sequence
  Synthetic
atgctttugatgcccuccct

SEQ ID NO: 1382 - DNA, 25 bp, Artificial Sequence
  Synthetic
agtacaauggcatgaaatttugcct

SEQ ID NO: 1383 - DNA, 23 bp, Artificial Sequence
  Synthetic
ggaacacauggtccatctucaga

SEQ ID NO: 1384 - DNA, 24 bp, Artificial Sequence
  Synthetic
ctgagaaccuctcaaaaccacuct

SEQ ID NO: 1385 - DNA, 28 bp, Artificial Sequence
  Synthetic
ccttggaagugaagaatatgatgtucct

SEQ ID NO: 1386 - DNA, 25 bp, Artificial Sequence
  Synthetic
acaagcugattagucccaaacacat

SEQ ID NO: 1387 - DNA, 23 bp, Artificial Sequence
  Synthetic
tcccttaagagaucctccuccac

SEQ ID NO: 1388 - DNA, 25 bp, Artificial Sequence
  Synthetic
ggtcacaucaccttaacuaaaccca

SEQ ID NO: 1389 - DNA, 23 bp, Artificial Sequence
  Synthetic
tgatccaagagaugaaggcucca

SEQ ID NO: 1390 - DNA, 26 bp, Artificial Sequence
  Synthetic
ttcatgaatcauaagcactccaacut

SEQ ID NO: 1391 - DNA, 21 bp, Artificial Sequence
  Synthetic
agttgcacucgatugggacag

SEQ ID NO: 1392 - DNA, 27 bp, Artificial Sequence
  Synthetic
agaagaagggaauggatagacuaagca

SEQ ID NO: 1393 - DNA, 22 bp, Artificial Sequence
  Synthetic
tgagguccaccagattagcuct

SEQ ID NO: 1394 - DNA, 29 bp, Artificial Sequence
  Synthetic
ctgaaatattcttcutacctgtcctguga

SEQ ID NO: 1395 - DNA, 23 bp, Artificial Sequence
  Synthetic
acttgcccaacucagtgagaaug

SEQ ID NO: 1396 - DNA, 21 bp, Artificial Sequence
  Synthetic
caagtcttcuccacggtccug

SEQ ID NO: 1397 - DNA, 27 bp, Artificial Sequence
  Synthetic
aattccagauggcaaactcaatgaaug

SEQ ID NO: 1398 - DNA, 30 bp, Artificial Sequence
  Synthetic
cccttccatttauagctaattcatctcugg

SEQ ID NO: 1399 - DNA, 21 bp, Artificial Sequence
  Synthetic
cgaccaugcagaugagcagaa

SEQ ID NO: 1400 - DNA, 23 bp, Artificial Sequence
  Synthetic
gaactgctagcuctagggttugg

SEQ ID NO: 1401 - DNA, 21 bp, Artificial Sequence
  Synthetic
cgcugacccacttugaagaca

SEQ ID NO: 1402 - DNA, 29 bp, Artificial Sequence
  Synthetic
acaaaaagccucaatggaaatcuaaacaa

SEQ ID NO: 1403 - DNA, 22 bp, Artificial Sequence
  Synthetic
cttcttgaugacccagccaaug

SEQ ID NO: 1404 - DNA, 27 bp, Artificial Sequence
  Synthetic
gcaaagaauagcacaatttgatgcuga

SEQ ID NO: 1405 - DNA, 26 bp, Artificial Sequence
  Synthetic
cccctcagggautcaaacaagaauac

SEQ ID NO: 1406 - DNA, 23 bp, Artificial Sequence
  Synthetic
acccacctcugttctgatggaua

SEQ ID NO: 1407 - DNA, 19 bp, Artificial Sequence
  Synthetic
ctggcccagutcaaggugt

SEQ ID NO: 1408 - DNA, 27 bp, Artificial Sequence
  Synthetic
caatagttguagaggcacttttcucca

SEQ ID NO: 1409 - DNA, 25 bp, Artificial Sequence
  Synthetic
ttctctctctautcccctctcaucc

SEQ ID NO: 1410 - DNA, 23 bp, Artificial Sequence
  Synthetic
caacagaaagugaaggcucaagt

SEQ ID NO: 1411 - DNA, 25 bp, Artificial Sequence
  Synthetic
gggttttatgaucagcaagtcccut

SEQ ID NO: 1412 - DNA, 28 bp, Artificial Sequence
  Synthetic
agtgatttcauattaagtcagugcccaa

SEQ ID NO: 1413 - DNA, 22 bp, Artificial Sequence
  Synthetic
gtgttctcutggtgttcugggt

SEQ ID NO: 1414 - DNA, 22 bp, Artificial Sequence
  Synthetic
ccaagauccaggaagccttcuc

SEQ ID NO: 1415 - DNA, 23 bp, Artificial Sequence
  Synthetic
agacatctctcugctttgtgguc

SEQ ID NO: 1416 - DNA, 22 bp, Artificial Sequence
  Synthetic
tgttcccaggguaccaccatua

SEQ ID NO: 1417 - DNA, 24 bp, Artificial Sequence
  Synthetic
ttctctgttccuctgtgtgtctug

SEQ ID NO: 1418 - DNA, 21 bp, Artificial Sequence
  Synthetic
guagaacccaaaucccgtcut

SEQ ID NO: 1419 - DNA, 26 bp, Artificial Sequence
  Synthetic
agatgcttgtcuttcctttcttguca

SEQ ID NO: 1420 - DNA, 27 bp, Artificial Sequence
  Synthetic
cactctgguagcacttgatactttugt

SEQ ID NO: 1421 - DNA, 22 bp, Artificial Sequence
  Synthetic
ggacatggutctgccatttucc

SEQ ID NO: 1422 - DNA, 23 bp, Artificial Sequence
  Synthetic
acatgaagcccaaugttccugaa

SEQ ID NO: 1423 - DNA, 21 bp, Artificial Sequence
  Synthetic
ctgcaagggauggacuacgac

SEQ ID NO: 1424 - DNA, 30 bp, Artificial Sequence
  Synthetic
ccagtgtgttuaggaataatggauagaacc

SEQ ID NO: 1425 - DNA, 20 bp, Artificial Sequence
  Synthetic
gctcggaauccccagtggua

SEQ ID NO: 1426 - DNA, 20 bp, Artificial Sequence
  Synthetic
gtcagagguctcgtgtcugg

SEQ ID NO: 1427 - DNA, 22 bp, Artificial Sequence
  Synthetic
cccttcucagccgattagcuat

SEQ ID NO: 1428 - DNA, 18 bp, Artificial Sequence
  Synthetic
acccaccgutctucaccc

SEQ ID NO: 1429 - DNA, 23 bp, Artificial Sequence
  Synthetic
gctgctgtauacacttgagugct

SEQ ID NO: 1430 - DNA, 23 bp, Artificial Sequence
  Synthetic
ggttgtggaucttgaagcttugg

SEQ ID NO: 1431 - DNA, 22 bp, Artificial Sequence
  Synthetic
aggcttcucaaaaccguaagca

SEQ ID NO: 1432 - DNA, 24 bp, Artificial Sequence
  Synthetic
aaaagctgtuggcagaccagatua

SEQ ID NO: 1433 - DNA, 21 bp, Artificial Sequence
  Synthetic
caatgcaggcaugacaagugg

SEQ ID NO: 1434 - DNA, 28 bp, Artificial Sequence
  Synthetic
gccgtggtttuaaggatcaaatctauga

SEQ ID NO: 1435 - DNA, 26 bp, Artificial Sequence
  Synthetic
ggaacgauaacaaaacacaucagtug

SEQ ID NO: 1436 - DNA, 28 bp, Artificial Sequence
  Synthetic
tgaccatuacacaggctgttattttuct

SEQ ID NO: 1437 - DNA, 27 bp, Artificial Sequence
  Synthetic
gcacttagcagcuatattgtagtcuga

SEQ ID NO: 1438 - DNA, 21 bp, Artificial Sequence
  Synthetic
agtaaacagcagcuggtggut

SEQ ID NO: 1439 - DNA, 30 bp, Artificial Sequence
  Synthetic
agaatcctctugtcttcttcaguaacaaag

SEQ ID NO: 1440 - DNA, 22 bp, Artificial Sequence
  Synthetic
agcatcaacacuccatgctuca

SEQ ID NO: 1441 - DNA, 25 bp, Artificial Sequence
  Synthetic
gtaaccugcatttccgucacaaaag

SEQ ID NO: 1442 - DNA, 19 bp, Artificial Sequence
  Synthetic
aaatctggcuccgcaggut

SEQ ID NO: 1443 - DNA, 27 bp, Artificial Sequence
  Synthetic
ggtaataggugagaaaccctatcgtug

SEQ ID NO: 1444 - DNA, 20 bp, Artificial Sequence
  Synthetic
gccttccutctcccugacaa

SEQ ID NO: 1445 - DNA, 18 bp, Artificial Sequence
  Synthetic
gtcctgcggcuctcaguc

SEQ ID NO: 1446 - DNA, 20 bp, Artificial Sequence
  Synthetic
cccctcuggtttggcatuct

SEQ ID NO: 1447 - DNA, 21 bp, Artificial Sequence
  Synthetic
cacagagtccugcagcaguaa

SEQ ID NO: 1448 - DNA, 20 bp, Artificial Sequence
  Synthetic
ggcugtacucaccagggact

SEQ ID NO: 1449 - DNA, 20 bp, Artificial Sequence
  Synthetic
acaccgccagccucttatuc

SEQ ID NO: 1450 - DNA, 21 bp, Artificial Sequence
  Synthetic
gccaucacagccatgatgtug

SEQ ID NO: 1451 - DNA, 25 bp, Artificial Sequence
  Synthetic
accagttgaaaugcaaccttagugt

SEQ ID NO: 1452 - DNA, 23 bp, Artificial Sequence
  Synthetic
acaccacacgautctguagaacc

SEQ ID NO: 1453 - DNA, 26 bp, Artificial Sequence
  Synthetic
aagacaccgatutttcgaccagatua

SEQ ID NO: 1454 - DNA, 23 bp, Artificial Sequence
  Synthetic
caatucagaccccaacaguacga

SEQ ID NO: 1455 - DNA, 26 bp, Artificial Sequence
  Synthetic
agcagcugcaaaacaaagttttcuaa

SEQ ID NO: 1456 - DNA, 26 bp, Artificial Sequence
  Synthetic
tcctcctcttccucatagatttcguc

SEQ ID NO: 1457 - DNA, 17 bp, Artificial Sequence
  Synthetic
gcgacuccccucagcct

SEQ ID NO: 1458 - DNA, 27 bp, Artificial Sequence
  Synthetic
tgcutcgaatuagagagaaggaaagac

SEQ ID NO: 1459 - DNA, 27 bp, Artificial Sequence
  Synthetic
gggttcaacautgtgataaaucaggac

SEQ ID NO: 1460 - DNA, 26 bp, Artificial Sequence
  Synthetic
gcaacatuagccacaatccaaagaug

SEQ ID NO: 1461 - DNA, 22 bp, Artificial Sequence
  Synthetic
cagctcttcggucacctttcut

SEQ ID NO: 1462 - DNA, 22 bp, Artificial Sequence
  Synthetic
tctcagacauttccaccuccct

SEQ ID NO: 1463 - DNA, 21 bp, Artificial Sequence
  Synthetic
ggtctgctgucgatagtccuc

SEQ ID NO: 1464 - DNA, 27 bp, Artificial Sequence
  Synthetic
agaaagaagaaauccaccttgtaucgt

SEQ ID NO: 1465 - DNA, 22 bp, Artificial Sequence
  Synthetic
aggaactguctgagtcacuggt

SEQ ID NO: 1466 - DNA, 25 bp, Artificial Sequence
  Synthetic
ggagcattcugaatccaaagaucct

SEQ ID NO: 1467 - DNA, 21 bp, Artificial Sequence
  Synthetic
ttccaacgguttgcctttgug

SEQ ID NO: 1468 - DNA, 24 bp, Artificial Sequence
  Synthetic
cuccagugagaagaagaagcacaa

SEQ ID NO: 1469 - DNA, 17 bp, Artificial Sequence
  Synthetic
gcccuggctctcaguca

SEQ ID NO: 1470 - DNA, 28 bp, Artificial Sequence
  Synthetic
tctgttttgtcugtacaattatgtuggt

SEQ ID NO: 1471 - DNA, 29 bp, Artificial Sequence
  Synthetic
aggatgaagaugaagatgactgtgattug

SEQ ID NO: 1472 - DNA, 22 bp, Artificial Sequence
  Synthetic
aaaagugccagcaguaccaaga

SEQ ID NO: 1473 - DNA, 21 bp, Artificial Sequence
  Synthetic
tgggaacguaaagguacagca

SEQ ID NO: 1474 - DNA, 26 bp, Artificial Sequence
  Synthetic
actaaatcaagguttgtctucagcct

SEQ ID NO: 1475 - DNA, 21 bp, Artificial Sequence
  Synthetic
actggcttucagactctgugg

SEQ ID NO: 1476 - DNA, 24 bp, Artificial Sequence
  Synthetic
attttgaacauggcgatgttucgt

SEQ ID NO: 1477 - DNA, 23 bp, Artificial Sequence
  Synthetic
agagttaccutgcaatgcaugga

SEQ ID NO: 1478 - DNA, 29 bp, Artificial Sequence
  Synthetic
cagctacaagaatuaaccaaaacacctua

SEQ ID NO: 1479 - DNA, 21 bp, Artificial Sequence
  Synthetic
ggacaaatgucctggccauct

SEQ ID NO: 1480 - DNA, 28 bp, Artificial Sequence
  Synthetic
cctttcttuaaaaacaagcagccacuaa

SEQ ID NO: 1481 - DNA, 27 bp, Artificial Sequence
  Synthetic
ctagctcttgucgaagatttgagtuct

SEQ ID NO: 1482 - DNA, 22 bp, Artificial Sequence
  Synthetic
cgggaaggauctgtaucaagcc

SEQ ID NO: 1483 - DNA, 25 bp, Artificial Sequence
  Synthetic
tggaguacacaaggcaatgttuact

SEQ ID NO: 1484 - DNA, 25 bp, Artificial Sequence
  Synthetic
tgacataacccugagcttttaagug

SEQ ID NO: 1485 - DNA, 26 bp, Artificial Sequence
  Synthetic
cttgggactguaaaagctgtcgtaua

SEQ ID NO: 1486 - DNA, 29 bp, Artificial Sequence
  Synthetic
gtttatcauacagacacttcattuggagt

SEQ ID NO: 1487 - DNA, 20 bp, Artificial Sequence
  Synthetic
gaggtgcagagugtgtgcua

SEQ ID NO: 1488 - DNA, 27 bp, Artificial Sequence
  Synthetic
caatgacaaagacuctgtattgtuggg

SEQ ID NO: 1489 - DNA, 23 bp, Artificial Sequence
  Synthetic
tttcacaguaagcgcgtatcugt

SEQ ID NO: 1490 - DNA, 32 bp, Artificial Sequence
  Synthetic
ggtaccagtttgtuttattttagatgattguc

SEQ ID NO: 1491 - DNA, 31 bp, Artificial Sequence
  Synthetic
tcgtcttagtgtaauactgtagtggtcatua

SEQ ID NO: 1492 - DNA, 25 bp, Artificial Sequence
  Synthetic
ttgtctuggcgagcagatgtaaaua

SEQ ID NO: 1493 - DNA, 22 bp, Artificial Sequence
  Synthetic
cucatggcuaaaagaaggcagc

SEQ ID NO: 1494 - DNA, 28 bp, Artificial Sequence
  Synthetic
ttgttactgcauacacattgtgacctua

SEQ ID NO: 1495 - DNA, 26 bp, Artificial Sequence
  Synthetic
tcttgctgagagautccacaaagtuc

SEQ ID NO: 1496 - DNA, 24 bp, Artificial Sequence
  Synthetic
gcatcucatcgtaguaagcagaga

SEQ ID NO: 1497 - DNA, 22 bp, Artificial Sequence
  Synthetic
agaggagcugggtaacactgua

SEQ ID NO: 1498 - DNA, 29 bp, Artificial Sequence
  Synthetic
gcccatacacatucaaacacttacaatut

SEQ ID NO: 1499 - DNA, 25 bp, Artificial Sequence
  Synthetic
tcaatcgaggguttcatttgaccuc

SEQ ID NO: 1500 - DNA, 27 bp, Artificial Sequence
  Synthetic
tcctgtttatacugagagcactgauga

SEQ ID NO: 1501 - DNA, 29 bp, Artificial Sequence
  Synthetic
gacacaaagacuggcttacattttgatua

SEQ ID NO: 1502 - DNA, 23 bp, Artificial Sequence
  Synthetic
cagtgagaauacgtccacaccut

SEQ ID NO: 1503 - DNA, 32 bp, Artificial Sequence
  Synthetic
attggagtatcttcuacacaataagtctguat

SEQ ID NO: 1504 - DNA, 22 bp, Artificial Sequence
  Synthetic
tctucaggagcgaaatcuccct

SEQ ID NO: 1505 - DNA, 21 bp, Artificial Sequence
  Synthetic
ctggcaaucgaacgactcuca

SEQ ID NO: 1506 - DNA, 29 bp, Artificial Sequence
  Synthetic
ggaaagtactccagauggattttcttgut

SEQ ID NO: 1507 - DNA, 26 bp, Artificial Sequence
  Synthetic
tgattctttaggcugctctgattcug

SEQ ID NO: 1508 - DNA, 22 bp, Artificial Sequence
  Synthetic
cgggtguattgtgtugaaggga

SEQ ID NO: 1509 - DNA, 27 bp, Artificial Sequence
  Synthetic
ccttctgtaggaauggtatctcgttut

SEQ ID NO: 1510 - DNA, 28 bp, Artificial Sequence
  Synthetic
aaccaactucaccagtaaaacctauacc

SEQ ID NO: 1511 - DNA, 32 bp, Artificial Sequence
  Synthetic
gcttatcattgaagaccutggaattattttuc

SEQ ID NO: 1512 - DNA, 23 bp, Artificial Sequence
  Synthetic
gccaataaaucgaggtcagccua

SEQ ID NO: 1513 - DNA, 29 bp, Artificial Sequence
  Synthetic
tgagagaacucagagaggaattaugagaa

SEQ ID NO: 1514 - DNA, 30 bp, Artificial Sequence
  Synthetic
ccttcaagacucaagggtgataaugaaaaa

SEQ ID NO: 1515 - DNA, 24 bp, Artificial Sequence
  Synthetic
gcaccttccugaatagcttuccaa

SEQ ID NO: 1516 - DNA, 32 bp, Artificial Sequence
  Synthetic
ttgattactggaaaagutcgatctaatucaga

SEQ ID NO: 1517 - DNA, 26 bp, Artificial Sequence
  Synthetic
caggacttgtacutgaggagctatut

SEQ ID NO: 1518 - DNA, 22 bp, Artificial Sequence
  Synthetic
tctccuggccgaaactcaatut

SEQ ID NO: 1519 - DNA, 22 bp, Artificial Sequence
  Synthetic
tggctcauctgtctaccuggag

SEQ ID NO: 1520 - DNA, 24 bp, Artificial Sequence
  Synthetic
catctagaccagcutctcccacua

SEQ ID NO: 1521 - DNA, 28 bp, Artificial Sequence
  Synthetic
ctttgctggtcutccatcattatacuct

SEQ ID NO: 1522 - DNA, 25 bp, Artificial Sequence
  Synthetic
ccacaaauagtacttcucagaccgt

SEQ ID NO: 1523 - DNA, 25 bp, Artificial Sequence
  Synthetic
attacctgugggagatctuccagat

SEQ ID NO: 1524 - DNA, 22 bp, Artificial Sequence
  Synthetic
cuagcagcucaagcaaacacag

SEQ ID NO: 1525 - DNA, 26 bp, Artificial Sequence
  Synthetic
tggaatctcgcutctttgtgttgtua

SEQ ID NO: 1526 - DNA, 24 bp, Artificial Sequence
  Synthetic
ggacaggaaaaggcucagtcauaa

SEQ ID NO: 1527 - DNA, 27 bp, Artificial Sequence
  Synthetic
gaagagctttacucaatctccatguga

SEQ ID NO: 1528 - DNA, 30 bp, Artificial Sequence
  Synthetic
gtggtaccataaaacautcagtaaccttuc

SEQ ID NO: 1529 - DNA, 20 bp, Artificial Sequence
  Synthetic
ttgtgccugaccctgaagut

SEQ ID NO: 1530 - DNA, 20 bp, Artificial Sequence
  Synthetic
agcuccgtggtuccaaacat

SEQ ID NO: 1531 - DNA, 24 bp, Artificial Sequence
  Synthetic
gaagccatgguttttgtcccauag

SEQ ID NO: 1532 - DNA, 21 bp, Artificial Sequence
  Synthetic
gcaaggucacccgttggauac

SEQ ID NO: 1533 - DNA, 21 bp, Artificial Sequence
  Synthetic
ggagttugcagcaaagcguaa

SEQ ID NO: 1534 - DNA, 20 bp, Artificial Sequence
  Synthetic
acagagtgugcctcccugat

SEQ ID NO: 1535 - DNA, 22 bp, Artificial Sequence
  Synthetic
gtaagacacccaccugacugac

SEQ ID NO: 1536 - DNA, 19 bp, Artificial Sequence
  Synthetic
ggugaccagccagcaguag

SEQ ID NO: 1537 - DNA, 23 bp, Artificial Sequence
  Synthetic
ctcaagctgaucatcctcaugga

SEQ ID NO: 1538 - DNA, 21 bp, Artificial Sequence
  Synthetic
ccctgagugccagatcugaat

SEQ ID NO: 1539 - DNA, 28 bp, Artificial Sequence
  Synthetic
gacacaaggcuttcttatctctcuacag

SEQ ID NO: 1540 - DNA, 20 bp, Artificial Sequence
  Synthetic
cccatacucacgaggguggt

SEQ ID NO: 1541 - DNA, 20 bp, Artificial Sequence
  Synthetic
ccgtcagguctcttgcctua

SEQ ID NO: 1542 - DNA, 27 bp, Artificial Sequence
  Synthetic
cccttgaagttuatccagaaaccuacc

SEQ ID NO: 1543 - DNA, 23 bp, Artificial Sequence
  Synthetic
gcttctgcaaguggttctucagt

SEQ ID NO: 1544 - DNA, 25 bp, Artificial Sequence
  Synthetic
gcagaggcuagaacacagaaaacuc

SEQ ID NO: 1545 - DNA, 31 bp, Artificial Sequence
  Synthetic
ggtgaagtattctguttgtcatttgtttgut

SEQ ID NO: 1546 - DNA, 23 bp, Artificial Sequence
  Synthetic
agtcttcccutcggtcttctuct

SEQ ID NO: 1547 - DNA, 21 bp, Artificial Sequence
  Synthetic
gctgggccugttcctucaaaa

SEQ ID NO: 1548 - DNA, 26 bp, Artificial Sequence
  Synthetic
gcttttcuggcacatttttctttucc

SEQ ID NO: 1549 - DNA, 23 bp, Artificial Sequence
  Synthetic
gaacttcttucacccctcaguga

SEQ ID NO: 1550 - DNA, 25 bp, Artificial Sequence
  Synthetic
ttctttttctcugctgtaggucgag

SEQ ID NO: 1551 - DNA, 24 bp, Artificial Sequence
  Synthetic
tggaggccugaagatagaaaguga

SEQ ID NO: 1552 - DNA, 24 bp, Artificial Sequence
  Synthetic
tgatgggatgutactgtccacuga

SEQ ID NO: 1553 - DNA, 29 bp, Artificial Sequence
  Synthetic
agcatacatauttctctgttttucagcct

SEQ ID NO: 1554 - DNA, 25 bp, Artificial Sequence
  Synthetic
catgatcagtcaautgcttcacgua

SEQ ID NO: 1555 - DNA, 20 bp, Artificial Sequence
  Synthetic
agcacuacagcagccaaucc

SEQ ID NO: 1556 - DNA, 26 bp, Artificial Sequence
  Synthetic
catgagaccuggaatgactagagtut

SEQ ID NO: 1557 - DNA, 23 bp, Artificial Sequence
  Synthetic
actaacaguagtggucagaggca

SEQ ID NO: 1558 - DNA, 28 bp, Artificial Sequence
  Synthetic
aagcaaaaaugtcatgctaaugggaaaa

SEQ ID NO: 1559 - DNA, 24 bp, Artificial Sequence
  Synthetic
gaaaggcggaaucaggaaatucag

SEQ ID NO: 1560 - DNA, 27 bp, Artificial Sequence
  Synthetic
cctgatttttccugtctttttctugct

SEQ ID NO: 1561 - DNA, 30 bp, Artificial Sequence
  Synthetic
tgacttacctauacacatctcatcatcugt

SEQ ID NO: 1562 - DNA, 26 bp, Artificial Sequence
  Synthetic
gctgcttttatucctgcaacgtgtua

SEQ ID NO: 1563 - DNA, 29 bp, Artificial Sequence
  Synthetic
gctgagautctttcttttuggaagacaaa

SEQ ID NO: 1564 - DNA, 26 bp, Artificial Sequence
  Synthetic
gacctttgccuttcttccttcatuac

SEQ ID NO: 1565 - DNA, 25 bp, Artificial Sequence
  Synthetic
agataaaagaagccugtccctaugc

SEQ ID NO: 1566 - DNA, 27 bp, Artificial Sequence
  Synthetic
cttgggtgaagcacuactgtacatauc

SEQ ID NO: 1567 - DNA, 27 bp, Artificial Sequence
  Synthetic
tgttagccaagcaaaucaaacaucaaa

SEQ ID NO: 1568 - DNA, 22 bp, Artificial Sequence
  Synthetic
cctgaggutgatttccauggct

SEQ ID NO: 1569 - DNA, 28 bp, Artificial Sequence
  Synthetic
ccttctatgagaacaaugccatctgtua

SEQ ID NO: 1570 - DNA, 26 bp, Artificial Sequence
  Synthetic
gtacacgattugtctcattgguacct

SEQ ID NO: 1571 - DNA, 26 bp, Artificial Sequence
  Synthetic
tctgaaatttgaugtccatgauggct

SEQ ID NO: 1572 - DNA, 24 bp, Artificial Sequence
  Synthetic
agcaatagacugtccctaugcaat

SEQ ID NO: 1573 - DNA, 21 bp, Artificial Sequence
  Synthetic
gctgtaagcugctgcuggaat

SEQ ID NO: 1574 - DNA, 19 bp, Artificial Sequence
  Synthetic
cagtgtucagcctccucgt

SEQ ID NO: 1575 - DNA, 23 bp, Artificial Sequence
  Synthetic
cagcuttggauaaacgggaacag

SEQ ID NO: 1576 - DNA, 22 bp, Artificial Sequence
  Synthetic
cctcaccutcccaagttucaga

SEQ ID NO: 1577 - DNA, 24 bp, Artificial Sequence
  Synthetic
cccaacaacuatcagttctgcuga

SEQ ID NO: 1578 - DNA, 20 bp, Artificial Sequence
  Synthetic
ccctgggaucccttcgctua

SEQ ID NO: 1579 - DNA, 24 bp, Artificial Sequence
  Synthetic
cctcttaccugatcttggccttug

SEQ ID NO: 1580 - DNA, 23 bp, Artificial Sequence
  Synthetic
gtcattcaugatgtcccuagcca

SEQ ID NO: 1581 - DNA, 22 bp, Artificial Sequence
  Synthetic
cctcaggcucagguaggagaag

SEQ ID NO: 1582 - DNA, 27 bp, Artificial Sequence
  Synthetic
tcttctcgagguggatgttcttauagt

SEQ ID NO: 1583 - DNA, 20 bp, Artificial Sequence
  Synthetic
cacaccctuggctgctcuag

SEQ ID NO: 1584 - DNA, 21 bp, Artificial Sequence
  Synthetic
ccctgtgauaggaagctgugg

SEQ ID NO: 1585 - DNA, 27 bp, Artificial Sequence
  Synthetic
gctatgaggguaacagutatacttuca

SEQ ID NO: 1586 - DNA, 19 bp, Artificial Sequence
  Synthetic
cgaaggcuccctcucacct

SEQ ID NO: 1587 - DNA, 20 bp, Artificial Sequence
  Synthetic
catacccugaggtccugagc

SEQ ID NO: 1588 - DNA, 22 bp, Artificial Sequence
  Synthetic
ctcccaguacctacttcccugt

SEQ ID NO: 1589 - DNA, 18 bp, Artificial Sequence
  Synthetic
ggccgcuactccttccug

SEQ ID NO: 1590 - DNA, 20 bp, Artificial Sequence
  Synthetic
gcaggauccctaccgacugt

SEQ ID NO: 1591 - DNA, 22 bp, Artificial Sequence
  Synthetic
tgacccucaacctcgaucaagt

SEQ ID NO: 1592 - DNA, 18 bp, Artificial Sequence
  Synthetic
cactctucaggccuggct

SEQ ID NO: 1593 - DNA, 17 bp, Artificial Sequence
  Synthetic
ccctggcauggctucac

SEQ ID NO: 1594 - DNA, 19 bp, Artificial Sequence
  Synthetic
gctcagugcagcgauaggt

SEQ ID NO: 1595 - DNA, 19 bp, Artificial Sequence
  Synthetic
cggtgaccutgcgatgugt

SEQ ID NO: 1596 - DNA, 19 bp, Artificial Sequence
  Synthetic
caggcaccaggguctcaug

SEQ ID NO: 1597 - DNA, 21 bp, Artificial Sequence
  Synthetic
ctcaaccugctgcttctcuct

SEQ ID NO: 1598 - DNA, 22 bp, Artificial Sequence
  Synthetic
gctaaagcucccactccctgua

SEQ ID NO: 1599 - DNA, 25 bp, Artificial Sequence
  Synthetic
tgacctccaccuctatccgtatuag

SEQ ID NO: 1600 - DNA, 21 bp, Artificial Sequence
  Synthetic
gatgcggguctctgagtugag

SEQ ID NO: 1601 - DNA, 20 bp, Artificial Sequence
  Synthetic
accgccuacttcctguacca

SEQ ID NO: 1602 - DNA, 28 bp, Artificial Sequence
  Synthetic
agtgaatgcacguaagtatttagctuca

SEQ ID NO: 1603 - DNA, 21 bp, Artificial Sequence
  Synthetic
ctggccagugctaactuggaa

SEQ ID NO: 1604 - DNA, 19 bp, Artificial Sequence
  Synthetic
ggtggugctgctatcugct

SEQ ID NO: 1605 - DNA, 27 bp, Artificial Sequence
  Synthetic
ggatgggauagcattgaatctcaucaa

SEQ ID NO: 1606 - DNA, 27 bp, Artificial Sequence
  Synthetic
acgaatacugacagcaatgctgttaut

SEQ ID NO: 1607 - DNA, 28 bp, Artificial Sequence
  Synthetic
gaatttcttaatgcauccaaagcctuct

SEQ ID NO: 1608 - DNA, 29 bp, Artificial Sequence
  Synthetic
aaccatcatttucacaaatttaggcacut

SEQ ID NO: 1609 - DNA, 21 bp, Artificial Sequence
  Synthetic
guctcatcguggaaggcaaga

SEQ ID NO: 1610 - DNA, 22 bp, Artificial Sequence
  Synthetic
gcatttcgggutctttcucgga

SEQ ID NO: 1611 - DNA, 17 bp, Artificial Sequence
  Synthetic
tcctgccugcgggagua

SEQ ID NO: 1612 - DNA, 25 bp, Artificial Sequence
  Synthetic
ctactttatgaauggagaggcugct

SEQ ID NO: 1613 - DNA, 21 bp, Artificial Sequence
  Synthetic
catguacccgccatccaugat

SEQ ID NO: 1614 - DNA, 26 bp, Artificial Sequence
  Synthetic
cctctgatatcucaagctttccttut

SEQ ID NO: 1615 - DNA, 22 bp, Artificial Sequence
  Synthetic
ccctgaccaucgaaaaactgug

SEQ ID NO: 1616 - DNA, 19 bp, Artificial Sequence
  Synthetic
gtacguagcgctccuccag

SEQ ID NO: 1617 - DNA, 18 bp, Artificial Sequence
  Synthetic
ctgttcgcugcccgagua

SEQ ID NO: 1618 - DNA, 18 bp, Artificial Sequence
  Synthetic
cgcacccacugcatcuct

SEQ ID NO: 1619 - DNA, 17 bp, Artificial Sequence
  Synthetic
gctgcuccgcgttguca

SEQ ID NO: 1620 - DNA, 25 bp, Artificial Sequence
  Synthetic
cctcttgaugttcttcucacacacc

SEQ ID NO: 1621 - DNA, 18 bp, Artificial Sequence
  Synthetic
gcugaccaaagccgcugt

SEQ ID NO: 1622 - DNA, 18 bp, Artificial Sequence
  Synthetic
ctcugcaccagcgtctug

SEQ ID NO: 1623 - DNA, 17 bp, Artificial Sequence
  Synthetic
tcugaccgccacccuct

SEQ ID NO: 1624 - DNA, 17 bp, Artificial Sequence
  Synthetic
agatcccugccccugct

SEQ ID NO: 1625 - DNA, 19 bp, Artificial Sequence
  Synthetic
tgaggcucctctctucgct

SEQ ID NO: 1626 - DNA, 17 bp, Artificial Sequence
  Synthetic
acgguggagggagguct

SEQ ID NO: 1627 - DNA, 20 bp, Artificial Sequence
  Synthetic
aaacgctguctctgctcucc

SEQ ID NO: 1628 - DNA, 25 bp, Artificial Sequence
  Synthetic
gagaacttccugaacatgaggtuga

SEQ ID NO: 1629 - DNA, 19 bp, Artificial Sequence
  Synthetic
gccaccccuggtactgaug

SEQ ID NO: 1630 - DNA, 18 bp, Artificial Sequence
  Synthetic
ccggcucacagacccuct

SEQ ID NO: 1631 - DNA, 20 bp, Artificial Sequence
  Synthetic
tucttccaccucggaggagt

SEQ ID NO: 1632 - DNA, 17 bp, Artificial Sequence
  Synthetic
cugaaggagccgguggt

SEQ ID NO: 1633 - DNA, 20 bp, Artificial Sequence
  Synthetic
gacccugggaaaggactgug

SEQ ID NO: 1634 - DNA, 20 bp, Artificial Sequence
  Synthetic
gutcatcgttucccccaacc

SEQ ID NO: 1635 - DNA, 22 bp, Artificial Sequence
  Synthetic
aacuggagcgggagaaugaaat

SEQ ID NO: 1636 - DNA, 20 bp, Artificial Sequence
  Synthetic
gcgtagcgcauggctaagut

SEQ ID NO: 1637 - DNA, 22 bp, Artificial Sequence
  Synthetic
agaagaagcagaugacgcugac

SEQ ID NO: 1638 - DNA, 23 bp, Artificial Sequence
  Synthetic
ttcccagucaccagtttguacag

SEQ ID NO: 1639 - DNA, 21 bp, Artificial Sequence
  Synthetic
ccacagagacutgcgtuccat

SEQ ID NO: 1640 - DNA, 22 bp, Artificial Sequence
  Synthetic
ggataacagaugccgaguacct

SEQ ID NO: 1641 - DNA, 24 bp, Artificial Sequence
  Synthetic
tcutccttttcagaucccaagcac

SEQ ID NO: 1642 - DNA, 30 bp, Artificial Sequence
  Synthetic
gtggcgtttaaaguatgatgttcagatuaa

SEQ ID NO: 1643 - DNA, 27 bp, Artificial Sequence
  Synthetic
caggccagcuatgaactatgauaaact

SEQ ID NO: 1644 - DNA, 29 bp, Artificial Sequence
  Synthetic
agcgaaggtaaucactccatcttuaaaaa

SEQ ID NO: 1645 - DNA, 24 bp, Artificial Sequence
  Synthetic
ccacaggcugtatgttugaaaagg

SEQ ID NO: 1646 - DNA, 22 bp, Artificial Sequence
  Synthetic
cttaaagccutgtggugggaag

SEQ ID NO: 1647 - DNA, 27 bp, Artificial Sequence
  Synthetic
ccgtttcatcugaaacacactctctua

SEQ ID NO: 1648 - DNA, 25 bp, Artificial Sequence
  Synthetic
ctttaccugacattguacaggcact

SEQ ID NO: 1649 - DNA, 19 bp, Artificial Sequence
  Synthetic
tttcatggccugccacuga

SEQ ID NO: 1650 - DNA, 26 bp, Artificial Sequence
  Synthetic
gacactugcacttaaatctugaagca

SEQ ID NO: 1651 - DNA, 23 bp, Artificial Sequence
  Synthetic
tgtaccuccagagacctccuaga

SEQ ID NO: 1652 - DNA, 22 bp, Artificial Sequence
  Synthetic
tggtgaccaugtaaggcactug

SEQ ID NO: 1653 - DNA, 24 bp, Artificial Sequence
  Synthetic
ctaaaagccaucttgttccccuct

SEQ ID NO: 1654 - DNA, 26 bp, Artificial Sequence
  Synthetic
ctccagaggaugttcaataactguga

SEQ ID NO: 1655 - DNA, 21 bp, Artificial Sequence
  Synthetic
tcaaguggaattcugcccagg

SEQ ID NO: 1656 - DNA, 20 bp, Artificial Sequence
  Synthetic
caguggcgggacatagucag

SEQ ID NO: 1657 - DNA, 21 bp, Artificial Sequence
  Synthetic
gctgtagagcugtcccccaua

SEQ ID NO: 1658 - DNA, 21 bp, Artificial Sequence
  Synthetic
gtgtggcgcugagtgtactua

SEQ ID NO: 1659 - DNA, 21 bp, Artificial Sequence
  Synthetic
cacatccauctggtacguggt

SEQ ID NO: 1660 - DNA, 28 bp, Artificial Sequence
  Synthetic
tccctagctatucttaatccaacaaaug

SEQ ID NO: 1661 - DNA, 28 bp, Artificial Sequence
  Synthetic
ggaggtgcaguttttgaagtgtttaaua

SEQ ID NO: 1662 - DNA, 24 bp, Artificial Sequence
  Synthetic
aaaagaaactccuacgtggtgugt

SEQ ID NO: 1663 - DNA, 22 bp, Artificial Sequence
  Synthetic
ggctttggcugtggtcaactua

SEQ ID NO: 1664 - DNA, 20 bp, Artificial Sequence
  Synthetic
ctgactgcugtgacccacuc

SEQ ID NO: 1665 - DNA, 20 bp, Artificial Sequence
  Synthetic
ttgcacttguccacgcatuc

SEQ ID NO: 1666 - DNA, 21 bp, Artificial Sequence
  Synthetic
cagtgugcccactacatugac

SEQ ID NO: 1667 - DNA, 25 bp, Artificial Sequence
  Synthetic
tgttctgttcuccttcacttuccac

SEQ ID NO: 1668 - DNA, 25 bp, Artificial Sequence
  Synthetic
cttaggatggaucccttctcttcug

SEQ ID NO: 1669 - DNA, 21 bp, Artificial Sequence
  Synthetic
aacagacacgugaaggcauga

SEQ ID NO: 1670 - DNA, 19 bp, Artificial Sequence
  Synthetic
atcggccucttcaugcgaa

SEQ ID NO: 1671 - DNA, 18 bp, Artificial Sequence
  Synthetic
gctggcccutgttccugt

SEQ ID NO: 1672 - DNA, 24 bp, Artificial Sequence
  Synthetic
aaaattcccgucgctaucaaggaa

SEQ ID NO: 1673 - DNA, 22 bp, Artificial Sequence
  Synthetic
ggagaugagcagggtcuagagc

SEQ ID NO: 1674 - DNA, 23 bp, Artificial Sequence
  Synthetic
aggaacguactggugaaaacacc

SEQ ID NO: 1675 - DNA, 22 bp, Artificial Sequence
  Synthetic
caggaaaatgcuggctgaccua

SEQ ID NO: 1676 - DNA, 26 bp, Artificial Sequence
  Synthetic
ttcttccagtgutctaattgcacugt

SEQ ID NO: 1677 - DNA, 24 bp, Artificial Sequence
  Synthetic
tggaagcacagacugcaatttgua

SEQ ID NO: 1678 - DNA, 19 bp, Artificial Sequence
  Synthetic
cccugaccggagtaaccut

SEQ ID NO: 1679 - DNA, 22 bp, Artificial Sequence
  Synthetic
tgttuccagacaagccacucac

SEQ ID NO: 1680 - DNA, 22 bp, Artificial Sequence
  Synthetic
gcaggacutcttucccaaggaa

SEQ ID NO: 1681 - DNA, 25 bp, Artificial Sequence
  Synthetic
ttttagggcucatactatccuccgt

SEQ ID NO: 1682 - DNA, 23 bp, Artificial Sequence
  Synthetic
ccagcctaauagttctggcucct

SEQ ID NO: 1683 - DNA, 26 bp, Artificial Sequence
  Synthetic
gtgtgtggaaguttcatgtacgtuac

SEQ ID NO: 1684 - DNA, 24 bp, Artificial Sequence
  Synthetic
agtcttcataggugtggtagcuca

SEQ ID NO: 1685 - DNA, 20 bp, Artificial Sequence
  Synthetic
gucccaaagagcaccacuca

SEQ ID NO: 1686 - DNA, 20 bp, Artificial Sequence
  Synthetic
gccttccuacactcacugct

SEQ ID NO: 1687 - DNA, 21 bp, Artificial Sequence
  Synthetic
ccagaagguggttggagaguc

SEQ ID NO: 1688 - DNA, 22 bp, Artificial Sequence
  Synthetic
cagtggugatgtcugcacagat

SEQ ID NO: 1689 - DNA, 22 bp, Artificial Sequence
  Synthetic
agtgacgugaggctttcctuac

SEQ ID NO: 1690 - DNA, 21 bp, Artificial Sequence
  Synthetic
tgcatucaggaccaactguca

SEQ ID NO: 1691 - DNA, 20 bp, Artificial Sequence
  Synthetic
ccugggacaccaactacucc

SEQ ID NO: 1692 - DNA, 21 bp, Artificial Sequence
  Synthetic
ccaatccaucagcatcccuca

SEQ ID NO: 1693 - DNA, 20 bp, Artificial Sequence
  Synthetic
cuccgacuccgacaccaaag

SEQ ID NO: 1694 - DNA, 24 bp, Artificial Sequence
  Synthetic
ctcaatctugcagggttagtucct

SEQ ID NO: 1695 - DNA, 18 bp, Artificial Sequence
  Synthetic
acuccaccagggccaaug

SEQ ID NO: 1696 - DNA, 20 bp, Artificial Sequence
  Synthetic
gcatcccuggacttggagut

SEQ ID NO: 1697 - DNA, 21 bp, Artificial Sequence
  Synthetic
ggagggauctccttcccugag

SEQ ID NO: 1698 - DNA, 22 bp, Artificial Sequence
  Synthetic
ctttcugaccagcggagtcuaa

SEQ ID NO: 1699 - DNA, 27 bp, Artificial Sequence
  Synthetic
actcactgattucagaacaactcucac

SEQ ID NO: 1700 - DNA, 22 bp, Artificial Sequence
  Synthetic
gggatuagagccgaaacugaga

SEQ ID NO: 1701 - DNA, 21 bp, Artificial Sequence
  Synthetic
cgttgatgaggucgtgaguca

SEQ ID NO: 1702 - DNA, 22 bp, Artificial Sequence
  Synthetic
ttcttagctugcccagttucga

SEQ ID NO: 1703 - DNA, 27 bp, Artificial Sequence
  Synthetic
caatattcaaaucatggtgtgcugaca

SEQ ID NO: 1704 - DNA, 28 bp, Artificial Sequence
  Synthetic
atctctctcccuaaggaatattgcuaat

SEQ ID NO: 1705 - DNA, 25 bp, Artificial Sequence
  Synthetic
gccaactcacuttccatcatctcua

SEQ ID NO: 1706 - DNA, 29 bp, Artificial Sequence
  Synthetic
cagctugaagaacaagaucacttatuaga

SEQ ID NO: 1707 - DNA, 25 bp, Artificial Sequence
  Synthetic
gcttctacaagutagctgactucct

SEQ ID NO: 1708 - DNA, 30 bp, Artificial Sequence
  Synthetic
ggagaaatggagaaugctttaaggtcauat

SEQ ID NO: 1709 - DNA, 27 bp, Artificial Sequence
  Synthetic
gtcctagttcutccttgagttttucct

SEQ ID NO: 1710 - DNA, 31 bp, Artificial Sequence
  Synthetic
aggaacuagaattaaaacaugaagcagaagt

SEQ ID NO: 1711 - DNA, 28 bp, Artificial Sequence
  Synthetic
tggaaagctctucttcgtgactaaauag

SEQ ID NO: 1712 - DNA, 29 bp, Artificial Sequence
  Synthetic
gaagaaaaagaaaaggguacactugaaca

SEQ ID NO: 1713 - DNA, 27 bp, Artificial Sequence
  Synthetic
ttctctgctucaagttgtgcaaattut

SEQ ID NO: 1714 - DNA, 26 bp, Artificial Sequence
  Synthetic
ccaaagacuctgtgugggaaaaagaa

SEQ ID NO: 1715 - DNA, 29 bp, Artificial Sequence
  Synthetic
agcatactcctcutgtaactcttgauagt

SEQ ID NO: 1716 - DNA, 29 bp, Artificial Sequence
  Synthetic
ccaactacagugaaaatgaaaagttcugt

SEQ ID NO: 1717 - DNA, 24 bp, Artificial Sequence
  Synthetic
tctcgcttggutacctcaagttut

SEQ ID NO: 1718 - DNA, 27 bp, Artificial Sequence
  Synthetic
gggcagaaaatguacagtcatgtgaua

SEQ ID NO: 1719 - DNA, 30 bp, Artificial Sequence
  Synthetic
cttccaccautatttttgattctucaccaa

SEQ ID NO: 1720 - DNA, 28 bp, Artificial Sequence
  Synthetic
gtggatcaggutcgtgaatatauggaaa

SEQ ID NO: 1721 - DNA, 30 bp, Artificial Sequence
  Synthetic
gtctgtagttcuaactggtgtattttcuga

SEQ ID NO: 1722 - DNA, 24 bp, Artificial Sequence
  Synthetic
cctcttugcagcaacagtugaaag

SEQ ID NO: 1723 - DNA, 29 bp, Artificial Sequence
  Synthetic
actgttgaaugaagctataagcagaugaa

SEQ ID NO: 1724 - DNA, 28 bp, Artificial Sequence
  Synthetic
tgtgtgucagcaagaauaacattattut

SEQ ID NO: 1725 - DNA, 31 bp, Artificial Sequence
  Synthetic
catgttctcctaacuctttactaagtggtut

SEQ ID NO: 1726 - DNA, 25 bp, Artificial Sequence
  Synthetic
catcaacagguaacggaautgtuaa

SEQ ID NO: 1727 - DNA, 21 bp, Artificial Sequence
  Synthetic
gggacuacaagaccctuacct

SEQ ID NO: 1728 - DNA, 25 bp, Artificial Sequence
  Synthetic
gccatgtcctugggattctagauag

SEQ ID NO: 1729 - DNA, 29 bp, Artificial Sequence
  Synthetic
aactcagcagatutgttgaaatgattgut

SEQ ID NO: 1730 - DNA, 25 bp, Artificial Sequence
  Synthetic
ctctttgttuagcttgaacaugcga

SEQ ID NO: 1731 - DNA, 20 bp, Artificial Sequence
  Synthetic
gcccuggactcctcaugaag

SEQ ID NO: 1732 - DNA, 26 bp, Artificial Sequence
  Synthetic
caatgtcaagcugaaaaagtacguga

SEQ ID NO: 1733 - DNA, 28 bp, Artificial Sequence
  Synthetic
gcttggttttgcugtcttaaatccatua

SEQ ID NO: 1734 - DNA, 28 bp, Artificial Sequence
  Synthetic
ttgcctctuatatttcaggtugaacagt

SEQ ID NO: 1735 - DNA, 30 bp, Artificial Sequence
  Synthetic
ttctcttactcugaactccagtttctcuat

SEQ ID NO: 1736 - DNA, 24 bp, Artificial Sequence
  Synthetic
gccaugtctacucaagaccaacat

SEQ ID NO: 1737 - DNA, 27 bp, Artificial Sequence
  Synthetic
ctgttgtaatttuaagttgctgcugga

SEQ ID NO: 1738 - DNA, 28 bp, Artificial Sequence
  Synthetic
atcagctaacacaggaautattcagcut

SEQ ID NO: 1739 - DNA, 27 bp, Artificial Sequence
  Synthetic
gagcatcctctguaaggactacttcua

SEQ ID NO: 1740 - DNA, 28 bp, Artificial Sequence
  Synthetic
gaaaatagtugaagaaaaagtggcugct

SEQ ID NO: 1741 - DNA, 26 bp, Artificial Sequence
  Synthetic
tgaccccaacucatcttctcttagut

SEQ ID NO: 1742 - DNA, 25 bp, Artificial Sequence
  Synthetic
agctatuggagggcaaugagaaaaa

SEQ ID NO: 1743 - DNA, 26 bp, Artificial Sequence
  Synthetic
attagcaaucagcttagtttctuggg

SEQ ID NO: 1744 - DNA, 28 bp, Artificial Sequence
  Synthetic
cagaggcaaaagagaaautgtccattut

SEQ ID NO: 1745 - DNA, 25 bp, Artificial Sequence
  Synthetic
aatttgtggaguctgattgctgcua

SEQ ID NO: 1746 - DNA, 25 bp, Artificial Sequence
  Synthetic
gggtcagggaauttatctuacacac

SEQ ID NO: 1747 - DNA, 27 bp, Artificial Sequence
  Synthetic
aacatagaaacaacacuggctgagtua

SEQ ID NO: 1748 - DNA, 23 bp, Artificial Sequence
  Synthetic
ctcatgagagcutctcagacugg

SEQ ID NO: 1749 - DNA, 26 bp, Artificial Sequence
  Synthetic
accaactgcauctgtagtaccuagag

SEQ ID NO: 1750 - DNA, 31 bp, Artificial Sequence
  Synthetic
tggaatataatauacagcagaagcagtcuca

SEQ ID NO: 1751 - DNA, 22 bp, Artificial Sequence
  Synthetic
tgtgcaagcucactcttcagut

SEQ ID NO: 1752 - DNA, 29 bp, Artificial Sequence
  Synthetic
aatttgattttcucgtaccaggatcugaa

SEQ ID NO: 1753 - DNA, 25 bp, Artificial Sequence
  Synthetic
ctgggcatcauatagcattctcugt

SEQ ID NO: 1754 - DNA, 25 bp, Artificial Sequence
  Synthetic
gcaaatggaaaaagauaggcaggut

SEQ ID NO: 1755 - DNA, 29 bp, Artificial Sequence
  Synthetic
gctgtcctucaaggtctaacttauaaact

SEQ ID NO: 1756 - DNA, 29 bp, Artificial Sequence
  Synthetic
gggttcutcaacagaaaauagaaggagaa

SEQ ID NO: 1757 - DNA, 26 bp, Artificial Sequence
  Synthetic
gctacacatugaagcttttgtcugat

SEQ ID NO: 1758 - DNA, 29 bp, Artificial Sequence
  Synthetic
gcattattcacauccatttgtgctuaagt

SEQ ID NO: 1759 - DNA, 23 bp, Artificial Sequence
  Synthetic
cctgtcagcucagcattttguct

SEQ ID NO: 1760 - DNA, 27 bp, Artificial Sequence
  Synthetic
ggaacagagaaaaautgactcuccaga

SEQ ID NO: 1761 - DNA, 25 bp, Artificial Sequence
  Synthetic
cagctgugatgtttagaugggagat

SEQ ID NO: 1762 - DNA, 28 bp, Artificial Sequence
  Synthetic
gggctgtgaaautttatcttggaatcut

SEQ ID NO: 1763 - DNA, 28 bp, Artificial Sequence
  Synthetic
ctattttgactucaccttgattcagucc

SEQ ID NO: 1764 - DNA, 26 bp, Artificial Sequence
  Synthetic
tgttctcagcutcagaattacgaucc

SEQ ID NO: 1765 - DNA, 21 bp, Artificial Sequence
  Synthetic
ggtgcugccaagatgtggtua

SEQ ID NO: 1766 - DNA, 21 bp, Artificial Sequence
  Synthetic
ctccgcaggaucagctuaagg

SEQ ID NO: 1767 - DNA, 25 bp, Artificial Sequence
  Synthetic
ccagccaaaagaauatctgccuaca

SEQ ID NO: 1768 - DNA, 29 bp, Artificial Sequence
  Synthetic
tgtcagaggaaagucactgtaaatgttut

SEQ ID NO: 1769 - DNA, 25 bp, Artificial Sequence
  Synthetic
ttcttttaggccuctttttcgugga

SEQ ID NO: 1770 - DNA, 28 bp, Artificial Sequence
  Synthetic
tttcauaaggaaagaaagucattgctua

SEQ ID NO: 1771 - DNA, 27 bp, Artificial Sequence
  Synthetic
gtttgaacatgucgatcaagactugac

SEQ ID NO: 1772 - DNA, 17 bp, Artificial Sequence
  Synthetic
tgguggagagcggcaug

SEQ ID NO: 1773 - DNA, 17 bp, Artificial Sequence
  Synthetic
cgcgcugaccagcagua

SEQ ID NO: 1774 - DNA, 29 bp, Artificial Sequence
  Synthetic
ttattttccttttgutgctactctccuga

SEQ ID NO: 1775 - DNA, 21 bp, Artificial Sequence
  Synthetic
gaatcgggcuggttuccaaac

SEQ ID NO: 1776 - DNA, 26 bp, Artificial Sequence
  Synthetic
actggagcctugtatatagacgguaa

SEQ ID NO: 1777 - DNA, 32 bp, Artificial Sequence
  Synthetic
gatgtatatgcattuggaattgttctgtauga

SEQ ID NO: 1778 - DNA, 32 bp, Artificial Sequence
  Synthetic
acataaugtgaagacaaaaugcagaagaaaaa

SEQ ID NO: 1779 - DNA, 25 bp, Artificial Sequence
  Synthetic
gagtccttuagccctactcaggtua

SEQ ID NO: 1780 - DNA, 27 bp, Artificial Sequence
  Synthetic
ctggaaaagaguaattcacacaagcuc

SEQ ID NO: 1781 - DNA, 28 bp, Artificial Sequence
  Synthetic
tgacacttggaguaacaattgcctttua

SEQ ID NO: 1782 - DNA, 25 bp, Artificial Sequence
  Synthetic
ggagatttcugtaaggcttucacgt

SEQ ID NO: 1783 - DNA, 27 bp, Artificial Sequence
  Synthetic
agtctaaataucccccaaccttcuacc

SEQ ID NO: 1784 - DNA, 24 bp, Artificial Sequence
  Synthetic
gauccaaaagaaagcggtucaagt

SEQ ID NO: 1785 - DNA, 24 bp, Artificial Sequence
  Synthetic
ttcttugaacaccacccaauacca

SEQ ID NO: 1786 - DNA, 30 bp, Artificial Sequence
  Synthetic
tgtaaagatacauacaaagttgtgtgtugt

SEQ ID NO: 1787 - DNA, 26 bp, Artificial Sequence
  Synthetic
ccaagaaaggcutgtgtctacattut

SEQ ID NO: 1788 - DNA, 28 bp, Artificial Sequence
  Synthetic
cacatctgugggattttgaaaaacugaa

SEQ ID NO: 1789 - DNA, 30 bp, Artificial Sequence
  Synthetic
ccaacaaagagaauaacagutattggaauc

SEQ ID NO: 1790 - DNA, 23 bp, Artificial Sequence
  Synthetic
ccaccaaauttgtccaauagggc

SEQ ID NO: 1791 - DNA, 25 bp, Artificial Sequence
  Synthetic
gaacactggcagutactgtgatgua

SEQ ID NO: 1792 - DNA, 23 bp, Artificial Sequence
  Synthetic
ggagguagcagatgucaagggat

SEQ ID NO: 1793 - DNA, 24 bp, Artificial Sequence
  Synthetic
gctttgttgugttaagtcucagca

SEQ ID NO: 1794 - DNA, 33 bp, Artificial Sequence
  Synthetic
taaagtaaagttagtauatacaatgccaccuga

SEQ ID NO: 1795 - DNA, 23 bp, Artificial Sequence
  Synthetic
catctattgcuggcaccatcuga

SEQ ID NO: 1796 - DNA, 26 bp, Artificial Sequence
  Synthetic
gcaattgcaucaaagcaacaaauact

SEQ ID NO: 1797 - DNA, 25 bp, Artificial Sequence
  Synthetic
cggctccuctaaccatgttuacaac

SEQ ID NO: 1798 - DNA, 28 bp, Artificial Sequence
  Synthetic
aagaautttctttgttuggacaacgagt

SEQ ID NO: 1799 - DNA, 26 bp, Artificial Sequence
  Synthetic
ctcaatgttuagagtcctcatuggca

SEQ ID NO: 1800 - DNA, 22 bp, Artificial Sequence
  Synthetic
ttattgggaagccgucctctuc

SEQ ID NO: 1801 - DNA, 26 bp, Artificial Sequence
  Synthetic
tgagttttagaacuttgccctgaugt

SEQ ID NO: 1802 - DNA, 25 bp, Artificial Sequence
  Synthetic
agcgtatgaaaggagugtaagctut

SEQ ID NO: 1803 - DNA, 29 bp, Artificial Sequence
  Synthetic
atgtcagauataaagaacucaccgaacag

SEQ ID NO: 1804 - DNA, 27 bp, Artificial Sequence
  Synthetic
ctccagatcttuctgcttttcttcuct

SEQ ID NO: 1805 - DNA, 23 bp, Artificial Sequence
  Synthetic
tgcttctccugtgtgtttcugac

SEQ ID NO: 1806 - DNA, 24 bp, Artificial Sequence
  Synthetic
ctgaggucaatgatttccucccaa

SEQ ID NO: 1807 - DNA, 25 bp, Artificial Sequence
  Synthetic
agaauggaaacagcgaaggauacag

SEQ ID NO: 1808 - DNA, 21 bp, Artificial Sequence
  Synthetic
ccccgcucctcactgtaaaut

SEQ ID NO: 1809 - DNA, 25 bp, Artificial Sequence
  Synthetic
ggtgcatgaguttcttcacattuca

SEQ ID NO: 1810 - DNA, 23 bp, Artificial Sequence
  Synthetic
gacagggaaaggugttccactua

SEQ ID NO: 1811 - DNA, 25 bp, Artificial Sequence
  Synthetic
tgtgggtacugactaatttuaggct

SEQ ID NO: 1812 - DNA, 22 bp, Artificial Sequence
  Synthetic
ttgtgagggacagucacctgua

SEQ ID NO: 1813 - DNA, 29 bp, Artificial Sequence
  Synthetic
aactacgatgucatgaaagatttugagga

SEQ ID NO: 1814 - DNA, 30 bp, Artificial Sequence
  Synthetic
ttttgtcattctgcucatctaagttttugg

SEQ ID NO: 1815 - DNA, 24 bp, Artificial Sequence
  Synthetic
aaataccgagacautgagcgacut

SEQ ID NO: 1816 - DNA, 26 bp, Artificial Sequence
  Synthetic
gttcatgagaaugtcctcacaatugg

SEQ ID NO: 1817 - DNA, 24 bp, Artificial Sequence
  Synthetic
ctgtctcagaaguccacttgucat

SEQ ID NO: 1818 - DNA, 22 bp, Artificial Sequence
  Synthetic
gctccacaguggttccacauat

SEQ ID NO: 1819 - DNA, 23 bp, Artificial Sequence
  Synthetic
ctaatgagccccaucccttucag

SEQ ID NO: 1820 - DNA, 29 bp, Artificial Sequence
  Synthetic
ctccaggatgttugttccatattaaacug

SEQ ID NO: 1821 - DNA, 23 bp, Artificial Sequence
  Synthetic
ctactctgacugccaccatctut

SEQ ID NO: 1822 - DNA, 20 bp, Artificial Sequence
  Synthetic
gcttcggucctcagcccuat

SEQ ID NO: 1823 - DNA, 28 bp, Artificial Sequence
  Synthetic
atttgctgtttacucctcttctcttuct

SEQ ID NO: 1824 - DNA, 23 bp, Artificial Sequence
  Synthetic
cctgtccugggatgatcctuaga

SEQ ID NO: 1825 - DNA, 20 bp, Artificial Sequence
  Synthetic
ggcactuggcctgacuacac

SEQ ID NO: 1826 - DNA, 23 bp, Artificial Sequence
  Synthetic
gtgaaaucgaagcaggacuccat

SEQ ID NO: 1827 - DNA, 20 bp, Artificial Sequence
  Synthetic
cccttcgtuccttgggauca

SEQ ID NO: 1828 - DNA, 30 bp, Artificial Sequence
  Synthetic
ggcaggacattuttaaaagctctatttuct

SEQ ID NO: 1829 - DNA, 18 bp, Artificial Sequence
  Synthetic
gccctcugcagacauccc

SEQ ID NO: 1830 - DNA, 16 bp, Artificial Sequence
  Synthetic
caucgcgcacguccag

SEQ ID NO: 1831 - DNA, 17 bp, Artificial Sequence
  Synthetic
agctgcugctgcuccac

SEQ ID NO: 1832 - DNA, 19 bp, Artificial Sequence
  Synthetic
ctcuacccacctggaucgg

SEQ ID NO: 1833 - DNA, 17 bp, Artificial Sequence
  Synthetic
ggagccutcggcugact

SEQ ID NO: 1834 - DNA, 21 bp, Artificial Sequence
  Synthetic
ccucagtagcaucagcacgag

SEQ ID NO: 1835 - DNA, 20 bp, Artificial Sequence
  Synthetic
tcttggugaccctccggaut

SEQ ID NO: 1836 - DNA, 20 bp, Artificial Sequence
  Synthetic
cagacaggcutgcaggctua

SEQ ID NO: 1837 - DNA, 18 bp, Artificial Sequence
  Synthetic
cgacgtugcaggguacct

SEQ ID NO: 1838 - DNA, 21 bp, Artificial Sequence
  Synthetic
gcctgtttuacgcgtggaaug

SEQ ID NO: 1839 - DNA, 17 bp, Artificial Sequence
  Synthetic
gcgcgauccagguagct

SEQ ID NO: 1840 - DNA, 20 bp, Artificial Sequence
  Synthetic
ggcgcacuctctccttccua

SEQ ID NO: 1841 - DNA, 22 bp, Artificial Sequence
  Synthetic
gcttttucccagaagcaaucca

SEQ ID NO: 1842 - DNA, 28 bp, Artificial Sequence
  Synthetic
tgcaaugaagaaaggttcucaacaaaaa

SEQ ID NO: 1843 - DNA, 24 bp, Artificial Sequence
  Synthetic
caccactgucctccagaaugaaaa

SEQ ID NO: 1844 - DNA, 31 bp, Artificial Sequence
  Synthetic
tgtcaagtcatcugttgtgtaaagtatucat

SEQ ID NO: 1845 - DNA, 28 bp, Artificial Sequence
  Synthetic
gttcacgtaatuttaacagcttguccaa

SEQ ID NO: 1846 - DNA, 29 bp, Artificial Sequence
  Synthetic
tcatttcagcuccaagatataagcaagut

SEQ ID NO: 1847 - DNA, 21 bp, Artificial Sequence
  Synthetic
gagtggttacuggctgaccut

SEQ ID NO: 1848 - DNA, 28 bp, Artificial Sequence
  Synthetic
attaaaagaggaggccaugtuacagaaa

SEQ ID NO: 1849 - DNA, 25 bp, Artificial Sequence
  Synthetic
cccaagggcaaagaautatctguct

SEQ ID NO: 1850 - DNA, 23 bp, Artificial Sequence
  Synthetic
tgauaaagccccagaugaaagcc

SEQ ID NO: 1851 - DNA, 22 bp, Artificial Sequence
  Synthetic
gtgtggccuctcaagttcaugt

SEQ ID NO: 1852 - DNA, 27 bp, Artificial Sequence
  Synthetic
agauggaaaaguaaaagcaggaaatug

SEQ ID NO: 1853 - DNA, 28 bp, Artificial Sequence
  Synthetic
actctgatgcuaacaatgatgagacaug

SEQ ID NO: 1854 - DNA, 23 bp, Artificial Sequence
  Synthetic
gcaaaugaagcccugaagaagga

SEQ ID NO: 1855 - DNA, 21 bp, Artificial Sequence
  Synthetic
ggtctctcucctgctcgacut

SEQ ID NO: 1856 - DNA, 27 bp, Artificial Sequence
  Synthetic
gctgttttacacuttcatgtcatugct

SEQ ID NO: 1857 - DNA, 26 bp, Artificial Sequence
  Synthetic
tcttgctccttutcttctgagaacug

SEQ ID NO: 1858 - DNA, 27 bp, Artificial Sequence
  Synthetic
cacatttataccauttttcccccucct

SEQ ID NO: 1859 - DNA, 27 bp, Artificial Sequence
  Synthetic
gccatttcttcutggagttttctcuct

SEQ ID NO: 1860 - DNA, 26 bp, Artificial Sequence
  Synthetic
gcttacatcugaattcattccugcca

SEQ ID NO: 1861 - DNA, 28 bp, Artificial Sequence
  Synthetic
acggctttcttuagtttcttcagttcut

SEQ ID NO: 1862 - DNA, 26 bp, Artificial Sequence
  Synthetic
tgaattcatuggcaactttgtatgug

SEQ ID NO: 1863 - DNA, 26 bp, Artificial Sequence
  Synthetic
ctttgtcgtuccattgtctcatucag

SEQ ID NO: 1864 - DNA, 22 bp, Artificial Sequence
  Synthetic
agtgtgctcugctgtcattugt

SEQ ID NO: 1865 - DNA, 21 bp, Artificial Sequence
  Synthetic
ttgactgccutccttcccauc

SEQ ID NO: 1866 - DNA, 22 bp, Artificial Sequence
  Synthetic
ccaaacaauagccgacctcuca

SEQ ID NO: 1867 - DNA, 25 bp, Artificial Sequence
  Synthetic
ctaagttatggugttcagggacgut

SEQ ID NO: 1868 - DNA, 21 bp, Artificial Sequence
  Synthetic
cggcagucggagaaagaaaug

SEQ ID NO: 1869 - DNA, 26 bp, Artificial Sequence
  Synthetic
attacttttgcugttgacgtttcugg

SEQ ID NO: 1870 - DNA, 28 bp, Artificial Sequence
  Synthetic
caagagaagtttautgcaaactgaguca

SEQ ID NO: 1871 - DNA, 27 bp, Artificial Sequence
  Synthetic
tcccctuagaagcaaacttttcatuca

SEQ ID NO: 1872 - DNA, 23 bp, Artificial Sequence
  Synthetic
atagagauggcagaacgcaauga

SEQ ID NO: 1873 - DNA, 27 bp, Artificial Sequence
  Synthetic
tttttcaaggugtctattgccauacct

SEQ ID NO: 1874 - DNA, 28 bp, Artificial Sequence
  Synthetic
aagaacugagtttucagaaaggagaact

SEQ ID NO: 1875 - DNA, 26 bp, Artificial Sequence
  Synthetic
ccggttttaugtttagacatcugcct

SEQ ID NO: 1876 - DNA, 25 bp, Artificial Sequence
  Synthetic
gtgugttgagtgttugagcaaagaa

SEQ ID NO: 1877 - DNA, 26 bp, Artificial Sequence
  Synthetic
agtgtgtttataaugctttggccuga

SEQ ID NO: 1878 - DNA, 27 bp, Artificial Sequence
  Synthetic
agaaaaacgagaagcaguaaacucact

SEQ ID NO: 1879 - DNA, 26 bp, Artificial Sequence
  Synthetic
atttaaaccaauggtctgcauaccct

SEQ ID NO: 1880 - DNA, 27 bp, Artificial Sequence
  Synthetic
acucuagaaagagagagaaagugaaga

SEQ ID NO: 1881 - DNA, 21 bp, Artificial Sequence
  Synthetic
gcaccttugagagcactuggt

SEQ ID NO: 1882 - DNA, 25 bp, Artificial Sequence
  Synthetic
cctgaaggaagcacutaagauccag

SEQ ID NO: 1883 - DNA, 22 bp, Artificial Sequence
  Synthetic
tctctgtgtugaagtggtgtug

SEQ ID NO: 1884 - DNA, 28 bp, Artificial Sequence
  Synthetic
gaagacaaauggaaatcagtgaugcaat

SEQ ID NO: 1885 - DNA, 26 bp, Artificial Sequence
  Synthetic
caagctttccaautctccttcuaggt

SEQ ID NO: 1886 - DNA, 25 bp, Artificial Sequence
  Synthetic
gaggagacaaguagatgcttuaggg

SEQ ID NO: 1887 - DNA, 24 bp, Artificial Sequence
  Synthetic
acaacctcaggcuattgttttgut

SEQ ID NO: 1888 - DNA, 26 bp, Artificial Sequence
  Synthetic
gaagatctugaaccctcttcuggaaa

SEQ ID NO: 1889 - DNA, 20 bp, Artificial Sequence
  Synthetic
cccatgccucgatgatucct

SEQ ID NO: 1890 - DNA, 24 bp, Artificial Sequence
  Synthetic
cgaagctggtutccaaagctgaua

SEQ ID NO: 1891 - DNA, 22 bp, Artificial Sequence
  Synthetic
tttctccagacugttgacuggc

SEQ ID NO: 1892 - DNA, 24 bp, Artificial Sequence
  Synthetic
ccgagttggutcatcatcatucaa

SEQ ID NO: 1893 - DNA, 20 bp, Artificial Sequence
  Synthetic
tgatgtccgugcgttccauc

SEQ ID NO: 1894 - DNA, 19 bp, Artificial Sequence
  Synthetic
aggugaacgccgtggugct

SEQ ID NO: 1895 - DNA, 21 bp, Artificial Sequence
  Synthetic
ctccacgcccugtgacuccat

SEQ ID NO: 1896 - DNA, 22 bp, Artificial Sequence
  Synthetic
gaattgacctgucccaggtgua

SEQ ID NO: 1897 - DNA, 23 bp, Artificial Sequence
  Synthetic
cacactccugcacagttgaatut

SEQ ID NO: 1898 - DNA, 21 bp, Artificial Sequence
  Synthetic
ctggagtugtcagctctuccc

SEQ ID NO: 1899 - DNA, 23 bp, Artificial Sequence
  Synthetic
gcgctgaacaagutggtctttut

SEQ ID NO: 1900 - DNA, 19 bp, Artificial Sequence
  Synthetic
ggtcuccccacctguggaa

SEQ ID NO: 1901 - DNA, 19 bp, Artificial Sequence
  Synthetic
cctccacuccgtgtcctug

SEQ ID NO: 1902 - DNA, 25 bp, Artificial Sequence
  Synthetic
tcttcaaagacaucatggaguccag

SEQ ID NO: 1903 - DNA, 19 bp, Artificial Sequence
  Synthetic
ccctaaggcacugccctut

SEQ ID NO: 1904 - DNA, 20 bp, Artificial Sequence
  Synthetic
agccacgaguctggttgaug

SEQ ID NO: 1905 - DNA, 19 bp, Artificial Sequence
  Synthetic
ggatgctgauggcaacgug

SEQ ID NO: 1906 - DNA, 24 bp, Artificial Sequence
  Synthetic
gtgagctaugtggattccauccag

SEQ ID NO: 1907 - DNA, 23 bp, Artificial Sequence
  Synthetic
atttcctucaccgaacugaggag

SEQ ID NO: 1908 - DNA, 22 bp, Artificial Sequence
  Synthetic
ttctguccgaagccagttcaut

SEQ ID NO: 1909 - DNA, 17 bp, Artificial Sequence
  Synthetic
ggtgugcgagcgcauct

SEQ ID NO: 1910 - DNA, 23 bp, Artificial Sequence
  Synthetic
gtggtggguttcagagtcucaaa

SEQ ID NO: 1911 - DNA, 22 bp, Artificial Sequence
  Synthetic
cccaugagctacgaugaaaagc

SEQ ID NO: 1912 - DNA, 17 bp, Artificial Sequence
  Synthetic
ccagcaaucccgccuca

SEQ ID NO: 1913 - DNA, 17 bp, Artificial Sequence
  Synthetic
cgcugagagcagccgua

SEQ ID NO: 1914 - DNA, 17 bp, Artificial Sequence
  Synthetic
cgcggccacguacttuc

SEQ ID NO: 1915 - DNA, 22 bp, Artificial Sequence
  Synthetic
gggagaugctauccaagaagca

SEQ ID NO: 1916 - DNA, 18 bp, Artificial Sequence
  Synthetic
ccacccauccggacucag

SEQ ID NO: 1917 - DNA, 20 bp, Artificial Sequence
  Synthetic
cacccctguaccaaccauca

SEQ ID NO: 1918 - DNA, 28 bp, Artificial Sequence
  Synthetic
caatttgtaaacauggtgttgaagucct

SEQ ID NO: 1919 - DNA, 28 bp, Artificial Sequence
  Synthetic
atcttctggtaaugcctctgaaaatcuc

SEQ ID NO: 1920 - DNA, 24 bp, Artificial Sequence
  Synthetic
gcatgutctgaaaataugggcaca

SEQ ID NO: 1921 - DNA, 27 bp, Artificial Sequence
  Synthetic
ccctgggaacuatgttgaatcaaucat

SEQ ID NO: 1922 - DNA, 23 bp, Artificial Sequence
  Synthetic
aggatccccauctgcatauggat

SEQ ID NO: 1923 - DNA, 20 bp, Artificial Sequence
  Synthetic
accaccuccaccagaugaca

SEQ ID NO: 1924 - DNA, 26 bp, Artificial Sequence
  Synthetic
gtaaagtgagtucaatggctccaaug

SEQ ID NO: 1925 - DNA, 29 bp, Artificial Sequence
  Synthetic
agttttcttttctugtactctgaccugaa

SEQ ID NO: 1926 - DNA, 22 bp, Artificial Sequence
  Synthetic
agcctagcaggacuggtcauat

SEQ ID NO: 1927 - DNA, 24 bp, Artificial Sequence
  Synthetic
aagggagacucacatattttuggg

SEQ ID NO: 1928 - DNA, 19 bp, Artificial Sequence
  Synthetic
tgacaccauggcccacauc

SEQ ID NO: 1929 - DNA, 28 bp, Artificial Sequence
  Synthetic
gatattcauaaggagaaaguggcacgaa

SEQ ID NO: 1930 - DNA, 18 bp, Artificial Sequence
  Synthetic
cagtgggcuggtcacucc

SEQ ID NO: 1931 - DNA, 24 bp, Artificial Sequence
  Synthetic
gcugatcgagagtuaccagaacct

SEQ ID NO: 1932 - DNA, 28 bp, Artificial Sequence
  Synthetic
ccaacttgaaatucagactaagctcaug

SEQ ID NO: 1933 - DNA, 21 bp, Artificial Sequence
  Synthetic
cuccatcucccaacacacaga

SEQ ID NO: 1934 - DNA, 22 bp, Artificial Sequence
  Synthetic
gtgccaggaaucagtcacugaa

SEQ ID NO: 1935 - DNA, 25 bp, Artificial Sequence
  Synthetic
atcgtttcctccuctctcctctuag

SEQ ID NO: 1936 - DNA, 29 bp, Artificial Sequence
  Synthetic
acgcatcatatttuctggagaatcaauct

SEQ ID NO: 1937 - DNA, 24 bp, Artificial Sequence
  Synthetic
cctgccagcuagtatgttgtttug

SEQ ID NO: 1938 - DNA, 26 bp, Artificial Sequence
  Synthetic
agggaagaugagggaguagaaaagat

SEQ ID NO: 1939 - DNA, 31 bp, Artificial Sequence
  Synthetic
agcaggaagaagaautcattagtaacactut

SEQ ID NO: 1940 - DNA, 23 bp, Artificial Sequence
  Synthetic
tcattgtcaagugcttgcgauct

SEQ ID NO: 1941 - DNA, 28 bp, Artificial Sequence
  Synthetic
aacaaataggcucccaataatctgaugt

SEQ ID NO: 1942 - DNA, 26 bp, Artificial Sequence
  Synthetic
gttcacattcagacucaaatttcgut

SEQ ID NO: 1943 - DNA, 23 bp, Artificial Sequence
  Synthetic
gtggtttcuccctggtcatctuc

SEQ ID NO: 1944 - DNA, 24 bp, Artificial Sequence
  Synthetic
agtaaccaggcuacctagaatuga

SEQ ID NO: 1945 - DNA, 27 bp, Artificial Sequence
  Synthetic
agcaattaugcagacagccauagaaat

SEQ ID NO: 1946 - DNA, 24 bp, Artificial Sequence
  Synthetic
tgggtacaccaugctttttgauga

SEQ ID NO: 1947 - DNA, 26 bp, Artificial Sequence
  Synthetic
catacttctccauatcggccttuacc

SEQ ID NO: 1948 - DNA, 27 bp, Artificial Sequence
  Synthetic
aactcatcaacuggacaggtttcauag

SEQ ID NO: 1949 - DNA, 22 bp, Artificial Sequence
  Synthetic
ccaattuaagcagggctcuggt

SEQ ID NO: 1950 - DNA, 18 bp, Artificial Sequence
  Synthetic
gcucccgaagtgcuggac

SEQ ID NO: 1951 - DNA, 21 bp, Artificial Sequence
  Synthetic
tcaaacucccacctcctguga

SEQ ID NO: 1952 - DNA, 27 bp, Artificial Sequence
  Synthetic
cagttttgaagcuaatgtcagaaugct

SEQ ID NO: 1953 - DNA, 27 bp, Artificial Sequence
  Synthetic
tctagagtttcucctccgatggttuaa

SEQ ID NO: 1954 - DNA, 25 bp, Artificial Sequence
  Synthetic
acacgaaccuacatgaacacaacuc

SEQ ID NO: 1955 - DNA, 20 bp, Artificial Sequence
  Synthetic
gauggcccagaauggaagct

SEQ ID NO: 1956 - DNA, 24 bp, Artificial Sequence
  Synthetic
ctcaccccuaaacaaaaugcatua

SEQ ID NO: 1957 - DNA, 22 bp, Artificial Sequence
  Synthetic
ctagaccuctcacuccgagaga

SEQ ID NO: 1958 - DNA, 18 bp, Artificial Sequence
  Synthetic
gcaggacccugcatgcua

SEQ ID NO: 1959 - DNA, 19 bp, Artificial Sequence
  Synthetic
catctugccgcagctucag

SEQ ID NO: 1960 - DNA, 21 bp, Artificial Sequence
  Synthetic
cacctaucaccacugcacaag

SEQ ID NO: 1961 - DNA, 21 bp, Artificial Sequence
  Synthetic
cttcctcaugcactcguggaa

SEQ ID NO: 1962 - DNA, 23 bp, Artificial Sequence
  Synthetic
ctgcagtaugaacactgtgcuct

SEQ ID NO: 1963 - DNA, 20 bp, Artificial Sequence
  Synthetic
cataucgagtgcucggccat

SEQ ID NO: 1964 - DNA, 21 bp, Artificial Sequence
  Synthetic
cagcttcccauaggagtgcut

SEQ ID NO: 1965 - DNA, 21 bp, Artificial Sequence
  Synthetic
actgtcaucctgcugacacac

SEQ ID NO: 1966 - DNA, 20 bp, Artificial Sequence
  Synthetic
gctgtcugggagatgtguga

SEQ ID NO: 1967 - DNA, 22 bp, Artificial Sequence
  Synthetic
accacggaucccgauaaaaagc

SEQ ID NO: 1968 - DNA, 21 bp, Artificial Sequence
  Synthetic
tggatcccaauggctcugact

SEQ ID NO: 1969 - DNA, 27 bp, Artificial Sequence
  Synthetic
cctaacaaaggaagugttcataccuca

SEQ ID NO: 1970 - DNA, 27 bp, Artificial Sequence
  Synthetic
ttggtttttctuatttctctcccuggt

SEQ ID NO: 1971 - DNA, 27 bp, Artificial Sequence
  Synthetic
aggacaauggagaagagggtgatauag

SEQ ID NO: 1972 - DNA, 25 bp, Artificial Sequence
  Synthetic
cgggagtataaugaactgctcaugg

SEQ ID NO: 1973 - DNA, 21 bp, Artificial Sequence
  Synthetic
cgcttgtgcugtctcctugat

SEQ ID NO: 1974 - DNA, 25 bp, Artificial Sequence
  Synthetic
gactcagtaatucctgttcctcucc

SEQ ID NO: 1975 - DNA, 26 bp, Artificial Sequence
  Synthetic
tggactauagacaggaatgcugacat

SEQ ID NO: 1976 - DNA, 27 bp, Artificial Sequence
  Synthetic
agtttgtaatctcutgcctctttgugt

SEQ ID NO: 1977 - DNA, 27 bp, Artificial Sequence
  Synthetic
agucaagaactucagagaaaggcaaaa

SEQ ID NO: 1978 - DNA, 21 bp, Artificial Sequence
  Synthetic
gtggttcugggaagcgtacut

SEQ ID NO: 1979 - DNA, 21 bp, Artificial Sequence
  Synthetic
ctcatguggctagcacuggaa

SEQ ID NO: 1980 - DNA, 24 bp, Artificial Sequence
  Synthetic
ccagattctcuctggcccaaaauc

SEQ ID NO: 1981 - DNA, 22 bp, Artificial Sequence
  Synthetic
gctcgucagaggtcagcauaat

SEQ ID NO: 1982 - DNA, 29 bp, Artificial Sequence
  Synthetic
tcagctaaagggaacugctattttugaat

SEQ ID NO: 1983 - DNA, 23 bp, Artificial Sequence
  Synthetic
ccaccaggaagutcatggcaaua

SEQ ID NO: 1984 - DNA, 21 bp, Artificial Sequence
  Synthetic
tccccaacautggcagctuat

SEQ ID NO: 1985 - DNA, 19 bp, Artificial Sequence
  Synthetic
gtgggtuaggtgggugcat

SEQ ID NO: 1986 - DNA, 25 bp, Artificial Sequence
  Synthetic
agcagaaaaaccuttcgtgagatug

SEQ ID NO: 1987 - DNA, 19 bp, Artificial Sequence
  Synthetic
gagggtccugacgatgcug

SEQ ID NO: 1988 - DNA, 22 bp, Artificial Sequence
  Synthetic
cttugacaggagggctacaucc

SEQ ID NO: 1989 - DNA, 21 bp, Artificial Sequence
  Synthetic
ttcttuagcacgaccuggcat

SEQ ID NO: 1990 - DNA, 21 bp, Artificial Sequence
  Synthetic
ctagtagccgaauggtgguca

SEQ ID NO: 1991 - DNA, 21 bp, Artificial Sequence
  Synthetic
cagagaagagcucggtucagg

SEQ ID NO: 1992 - DNA, 24 bp, Artificial Sequence
  Synthetic
cagaagagcgagauccgagttuac

SEQ ID NO: 1993 - DNA, 22 bp, Artificial Sequence
  Synthetic
cctcatgaucacagcctcctuc

SEQ ID NO: 1994 - DNA, 21 bp, Artificial Sequence
  Synthetic
cccaggcuctgagagatuggt

SEQ ID NO: 1995 - DNA, 27 bp, Artificial Sequence
  Synthetic
cacaccttcttuagtgtctctcactuc

SEQ ID NO: 1996 - DNA, 22 bp, Artificial Sequence
  Synthetic
gagatcttuggcacagagcuga

SEQ ID NO: 1997 - DNA, 24 bp, Artificial Sequence
  Synthetic
tgtgtgagugttgagguaaagcaa

SEQ ID NO: 1998 - DNA, 24 bp, Artificial Sequence
  Synthetic
gtcgaagaggguttctctauccag

SEQ ID NO: 1999 - DNA, 24 bp, Artificial Sequence
  Synthetic
acttctccaguttcctacccugat

SEQ ID NO: 2000 - DNA, 23 bp, Artificial Sequence
  Synthetic
gggaatguagggatgagcgtauc

SEQ ID NO: 2001 - DNA, 26 bp, Artificial Sequence
  Synthetic
gattatccucttgagacaugcccaaa

SEQ ID NO: 2002 - DNA, 27 bp, Artificial Sequence
  Synthetic
ggatatccggtucatggatctgaagua

SEQ ID NO: 2003 - DNA, 28 bp, Artificial Sequence
  Synthetic
actttctactaguccacagtttacuggt

SEQ ID NO: 2004 - DNA, 20 bp, Artificial Sequence
  Synthetic
cuggagcccgugaaaaagag

SEQ ID NO: 2005 - DNA, 17 bp, Artificial Sequence
  Synthetic
cgggccggauggagtug

SEQ ID NO: 2006 - DNA, 24 bp, Artificial Sequence
  Synthetic
ccaacaactucctgtcctacuacc

SEQ ID NO: 2007 - DNA, 20 bp, Artificial Sequence
  Synthetic
tttccguggcactaggtguc

SEQ ID NO: 2008 - DNA, 18 bp, Artificial Sequence
  Synthetic
gcgggacguggacatcug

SEQ ID NO: 2009 - DNA, 24 bp, Artificial Sequence
  Synthetic
aacaaggagaaugaagcttuccct

SEQ ID NO: 2010 - DNA, 24 bp, Artificial Sequence
  Synthetic
gacaaggtcaaaugcttctgtugt

SEQ ID NO: 2011 - DNA, 25 bp, Artificial Sequence
  Synthetic
ctgagaggtagcutccaagttgtua

SEQ ID NO: 2012 - DNA, 22 bp, Artificial Sequence
  Synthetic
gctttgccugtggtggaaaaut

SEQ ID NO: 2013 - DNA, 30 bp, Artificial Sequence
  Synthetic
gctcagatuagaaactgtgtatctugaagt

SEQ ID NO: 2014 - DNA, 25 bp, Artificial Sequence
  Synthetic
gttgggaatcuggagatgatccaug

SEQ ID NO: 2015 - DNA, 26 bp, Artificial Sequence
  Synthetic
aacaactgattucaggtgaacacaua

SEQ ID NO: 2016 - DNA, 27 bp, Artificial Sequence
  Synthetic
ttcagagaaaaaucctagcaacuggag

SEQ ID NO: 2017 - DNA, 28 bp, Artificial Sequence
  Synthetic
acttgattcttttucctcagttgctcut

SEQ ID NO: 2018 - DNA, 33 bp, Artificial Sequence
  Synthetic
aaccttatttgtcauagtaatgctttttcttut

SEQ ID NO: 2019 - DNA, 22 bp, Artificial Sequence
  Synthetic
aaaggcaguttgcttctucagt

SEQ ID NO: 2020 - DNA, 27 bp, Artificial Sequence
  Synthetic
gatagagcuacagaacgaaaggtagua

SEQ ID NO: 2021 - DNA, 31 bp, Artificial Sequence
  Synthetic
ctgaatgccgatcuagatgtttaattgttuc

SEQ ID NO: 2022 - DNA, 32 bp, Artificial Sequence
  Synthetic
atacagtgaaagatucatctaatggtgctaut

SEQ ID NO: 2023 - DNA, 28 bp, Artificial Sequence
  Synthetic
augaggaaaaatucacaaacaacaacct

SEQ ID NO: 2024 - DNA, 24 bp, Artificial Sequence
  Synthetic
gactttggcugtcaacttucgaat

SEQ ID NO: 2025 - DNA, 32 bp, Artificial Sequence
  Synthetic
cggatgatggatauaaatttgcagttgaaaua

SEQ ID NO: 2026 - DNA, 32 bp, Artificial Sequence
  Synthetic
tttacaggtttttaaugaagataccagaucct

SEQ ID NO: 2027 - DNA, 32 bp, Artificial Sequence
  Synthetic
attctgtgacttcugaaggtgatcttttatua

SEQ ID NO: 2028 - DNA, 24 bp, Artificial Sequence
  Synthetic
cttacggaagutgcattgtgucaa

SEQ ID NO: 2029 - DNA, 24 bp, Artificial Sequence
  Synthetic
ctacccugaattatggcuccaagt

SEQ ID NO: 2030 - DNA, 29 bp, Artificial Sequence
  Synthetic
gctcttattctaucagttagagggugact

SEQ ID NO: 2031 - DNA, 27 bp, Artificial Sequence
  Synthetic
aaataaguggagagagcctgauaaaac

SEQ ID NO: 2032 - DNA, 32 bp, Artificial Sequence
  Synthetic
aagaactttcattcucagaagtagaagaacua

SEQ ID NO: 2033 - DNA, 22 bp, Artificial Sequence
  Synthetic
cagaagacagcgauccagugat

SEQ ID NO: 2034 - DNA, 33 bp, Artificial Sequence
  Synthetic
taattttaactggaatutgcatttttccttcua

SEQ ID NO: 2035 - DNA, 28 bp, Artificial Sequence
  Synthetic
ctgcatcatattuctcaaggaaccaaut

SEQ ID NO: 2036 - DNA, 22 bp, Artificial Sequence
  Synthetic
aggtggaggaucagtcauccat

SEQ ID NO: 2037 - DNA, 23 bp, Artificial Sequence
  Synthetic
ggcctcttauactgccaaaucaa

SEQ ID NO: 2038 - DNA, 27 bp, Artificial Sequence
  Synthetic
ccatgtccutcatgtagugaaaaacct

SEQ ID NO: 2039 - DNA, 24 bp, Artificial Sequence
  Synthetic
acaaaactugcattcgtauccaca

SEQ ID NO: 2040 - DNA, 31 bp, Artificial Sequence
  Synthetic
ttcttaatgtaaugggaaaagactttccugt

SEQ ID NO: 2041 - DNA, 22 bp, Artificial Sequence
  Synthetic
ttctactgccauctgcagcaut

SEQ ID NO: 2042 - DNA, 24 bp, Artificial Sequence
  Synthetic
cctatcugcgaaaaacaggcttug

SEQ ID NO: 2043 - DNA, 25 bp, Artificial Sequence
  Synthetic
agtgccacucagaaaatctagctut

SEQ ID NO: 2044 - DNA, 29 bp, Artificial Sequence
  Synthetic
agatcttgttauaaggttttgatuccaca

SEQ ID NO: 2045 - DNA, 28 bp, Artificial Sequence
  Synthetic
caagaatcttuggaaagcagtctgtuag

SEQ ID NO: 2046 - DNA, 27 bp, Artificial Sequence
  Synthetic
cccttgcagatugatcacttattcaut

SEQ ID NO: 2047 - DNA, 31 bp, Artificial Sequence
  Synthetic
acttgtgaagtuagagctagttctctaagut

SEQ ID NO: 2048 - DNA, 28 bp, Artificial Sequence
  Synthetic
agcaagcagcugaaacaaataatgttua

SEQ ID NO: 2049 - DNA, 32 bp, Artificial Sequence
  Synthetic
caaaguataaataacgtcucgaagaacaaagg

SEQ ID NO: 2050 - DNA, 32 bp, Artificial Sequence
  Synthetic
acagtaagttttgtuggcttactttaaaatua

SEQ ID NO: 2051 - DNA, 28 bp, Artificial Sequence
  Synthetic
acaacatggucaggaaaaggatcuaaaa

SEQ ID NO: 2052 - DNA, 24 bp, Artificial Sequence
  Synthetic
cttcgaagacaacuggaacuacat

SEQ ID NO: 2053 - DNA, 26 bp, Artificial Sequence
  Synthetic
tgagagtcugaactaagtctgugaca

SEQ ID NO: 2054 - DNA, 30 bp, Artificial Sequence
  Synthetic
gaagataaagaactucagtggaccttcaua

SEQ ID NO: 2055 - DNA, 28 bp, Artificial Sequence
  Synthetic
tgtgtgaagtaucattctccatgaaugt

SEQ ID NO: 2056 - DNA, 21 bp, Artificial Sequence
  Synthetic
ccctttugaaggcctggauga

SEQ ID NO: 2057 - DNA, 30 bp, Artificial Sequence
  Synthetic
cttacttcacacautggctttaataatuga

SEQ ID NO: 2058 - DNA, 22 bp, Artificial Sequence
  Synthetic
gtgtaagcaagaaugccuggga

SEQ ID NO: 2059 - DNA, 30 bp, Artificial Sequence
  Synthetic
ctaaacguaagaagcaauactcattacaut

SEQ ID NO: 2060 - DNA, 27 bp, Artificial Sequence
  Synthetic
caggagctuccaaatagtatgttcuca

SEQ ID NO: 2061 - DNA, 32 bp, Artificial Sequence
  Synthetic
cctgtaaacttatuccagtttcttctttacut

SEQ ID NO: 2062 - DNA, 28 bp, Artificial Sequence
  Synthetic
attctgtttaugaaggagttatgtgugt

SEQ ID NO: 2063 - DNA, 27 bp, Artificial Sequence
  Synthetic
ctgtttcgaggucatatgttacuaggg

SEQ ID NO: 2064 - DNA, 29 bp, Artificial Sequence
  Synthetic
tuctttgacttatcucacagcaaagaagt

SEQ ID NO: 2065 - DNA, 32 bp, Artificial Sequence
  Synthetic
gtaactttgtctttucataatacctggcauat

SEQ ID NO: 2066 - DNA, 31 bp, Artificial Sequence
  Synthetic
tcatttctcttgctuacatgaactctatguc

SEQ ID NO: 2067 - DNA, 29 bp, Artificial Sequence
  Synthetic
gataggctccugaaaactaaaatcacugt

SEQ ID NO: 2068 - DNA, 24 bp, Artificial Sequence
  Synthetic
ctggaagaagcacaaguattcugg

SEQ ID NO: 2069 - DNA, 30 bp, Artificial Sequence
  Synthetic
taacagtaaaacacuaatccagccaauaaa

SEQ ID NO: 2070 - DNA, 29 bp, Artificial Sequence
  Synthetic
gagctaagaaauggaaaaatgaaggcaut

SEQ ID NO: 2071 - DNA, 30 bp, Artificial Sequence
  Synthetic
gaattttatgttcccuaaggagacctacut

SEQ ID NO: 2072 - DNA, 27 bp, Artificial Sequence
  Synthetic
atgatatgtggguattccgactttgut

SEQ ID NO: 2073 - DNA, 28 bp, Artificial Sequence
  Synthetic
gctuatgtctaagttttucaagcacagg

SEQ ID NO: 2074 - DNA, 29 bp, Artificial Sequence
  Synthetic
ccttagcaaaugcaaacagagatgaatut

SEQ ID NO: 2075 - DNA, 31 bp, Artificial Sequence
  Synthetic
ggaaagactgaauatcacacttcuaaaaggt

SEQ ID NO: 2076 - DNA, 31 bp, Artificial Sequence
  Synthetic
ttttctttaagugcaaatagtgtatcugacc

SEQ ID NO: 2077 - DNA, 25 bp, Artificial Sequence
  Synthetic
aatttacaccucctgcuaagcgaaa

SEQ ID NO: 2078 - DNA, 27 bp, Artificial Sequence
  Synthetic
gatcatcaaatgcuctttaatggccut

SEQ ID NO: 2079 - DNA, 30 bp, Artificial Sequence
  Synthetic
tgtatcttttaugagcaccatcttcatugt

SEQ ID NO: 2080 - DNA, 37 bp, Artificial Sequence
  Synthetic
tggutatatattagaaagagauggaatcagtgattuc

SEQ ID NO: 2081 - DNA, 31 bp, Artificial Sequence
  Synthetic
caagttctgcugactgctcatttaucaagat

SEQ ID NO: 2082 - DNA, 32 bp, Artificial Sequence
  Synthetic
tggtgtgtaacaaaauccgtatttataatgug

SEQ ID NO: 2083 - DNA, 29 bp, Artificial Sequence
  Synthetic
tgagatacacaguctacctgguaagaaaa

SEQ ID NO: 2084 - DNA, 28 bp, Artificial Sequence
  Synthetic
agtagctgaacgugtcttaatgagacua

SEQ ID NO: 2085 - DNA, 23 bp, Artificial Sequence
  Synthetic
agatcacacccaagcuttccauc

SEQ ID NO: 2086 - DNA, 29 bp, Artificial Sequence
  Synthetic
gaacaaaatttagucattacacgccucaa

SEQ ID NO: 2087 - DNA, 26 bp, Artificial Sequence
  Synthetic
ccgaggtatugatatacaagctguga

SEQ ID NO: 2088 - DNA, 25 bp, Artificial Sequence
  Synthetic
tcatctgtttuactgggacucgaga

SEQ ID NO: 2089 - DNA, 27 bp, Artificial Sequence
  Synthetic
ccctatgagautaacctgauggaggaa

SEQ ID NO: 2090 - DNA, 23 bp, Artificial Sequence
  Synthetic
aaacacaagcagcutttgctuca

SEQ ID NO: 2091 - DNA, 27 bp, Artificial Sequence
  Synthetic
ccctgggagaaucctggatcttatuaa

SEQ ID NO: 2092 - DNA, 25 bp, Artificial Sequence
  Synthetic
tccaaggcugaaactcccattttua

SEQ ID NO: 2093 - DNA, 28 bp, Artificial Sequence
  Synthetic
tggtagggauatcttagcuagagcaaaa

SEQ ID NO: 2094 - DNA, 28 bp, Artificial Sequence
  Synthetic
cacttctagtuccccaccattattcuac

SEQ ID NO: 2095 - DNA, 29 bp, Artificial Sequence
  Synthetic
gtttactgtattcuctctagacctgguga

SEQ ID NO: 2096 - DNA, 17 bp, Artificial Sequence
  Synthetic
tgttcuggccgtgcuca

SEQ ID NO: 2097 - DNA, 21 bp, Artificial Sequence
  Synthetic
gtgcttgccugcattgcaaua

SEQ ID NO: 2098 - DNA, 26 bp, Artificial Sequence
  Synthetic
aaaaagggagcugtccttaaaatuct

SEQ ID NO: 2099 - DNA, 22 bp, Artificial Sequence
  Synthetic
cggagatgcuggtaggtatcug

SEQ ID NO: 2100 - DNA, 27 bp, Artificial Sequence
  Synthetic
tggcagaacuaaaaggaatcttuccaa

SEQ ID NO: 2101 - DNA, 30 bp, Artificial Sequence
  Synthetic
actcgtaagctutagtttttcatagtucaa

SEQ ID NO: 2102 - DNA, 22 bp, Artificial Sequence
  Synthetic
ctcatcctggcuacatggctut

SEQ ID NO: 2103 - DNA, 26 bp, Artificial Sequence
  Synthetic
agcagaagtcucaagataacgaaaut

SEQ ID NO: 2104 - DNA, 32 bp, Artificial Sequence
  Synthetic
caaaggaacaataugaattatactgtgagaug

SEQ ID NO: 2105 - DNA, 23 bp, Artificial Sequence
  Synthetic
gccaggatguaagacaggatgug

SEQ ID NO: 2106 - DNA, 22 bp, Artificial Sequence
  Synthetic
agaugccattuccccaaacgaa

SEQ ID NO: 2107 - DNA, 22 bp, Artificial Sequence
  Synthetic
ctugagggaacacatacucgct

SEQ ID NO: 2108 - DNA, 22 bp, Artificial Sequence
  Synthetic
ctgtcccuccagagacaaacug

SEQ ID NO: 2109 - DNA, 24 bp, Artificial Sequence
  Synthetic
gggcaatgaaaauggaagtgagug

SEQ ID NO: 2110 - DNA, 30 bp, Artificial Sequence
  Synthetic
tacttcaaagttuactggtttgttactuct

SEQ ID NO: 2111 - DNA, 23 bp, Artificial Sequence
  Synthetic
cctggaagagggagucatguact

SEQ ID NO: 2112 - DNA, 22 bp, Artificial Sequence
  Synthetic
cccgaggagucagaaaaugagg

SEQ ID NO: 2113 - DNA, 23 bp, Artificial Sequence
  Synthetic
acccaaagtaguctggagacuca

SEQ ID NO: 2114 - DNA, 21 bp, Artificial Sequence
  Synthetic
tcctgcccaugtagctaccua

SEQ ID NO: 2115 - DNA, 27 bp, Artificial Sequence
  Synthetic
aatcttggaaccacugatgtgataucc

SEQ ID NO: 2116 - DNA, 21 bp, Artificial Sequence
  Synthetic
tgtggttctugtgcaggtcut

SEQ ID NO: 2117 - DNA, 27 bp, Artificial Sequence
  Synthetic
ttttaaaatgccutgccttcttugaca

SEQ ID NO: 2118 - DNA, 31 bp, Artificial Sequence
  Synthetic
attttagcttcattutgtctatactggtugt

SEQ ID NO: 2119 - DNA, 26 bp, Artificial Sequence
  Synthetic
cctgtaaacagcccuacttctcatut

SEQ ID NO: 2120 - DNA, 22 bp, Artificial Sequence
  Synthetic
ctcatctccutttggtgugcct

SEQ ID NO: 2121 - DNA, 28 bp, Artificial Sequence
  Synthetic
gcactatcattgcauggatttcatacuc

SEQ ID NO: 2122 - DNA, 31 bp, Artificial Sequence
  Synthetic
ctgtttccagagcautgaattactaaaauct

SEQ ID NO: 2123 - DNA, 25 bp, Artificial Sequence
  Synthetic
ggcacatgaaucaacagaagaacuc

SEQ ID NO: 2124 - DNA, 24 bp, Artificial Sequence
  Synthetic
gccaautgtatgtugcccagaaca

SEQ ID NO: 2125 - DNA, 29 bp, Artificial Sequence
  Synthetic
gatggactctttcutgcatagtttggaua

SEQ ID NO: 2126 - DNA, 24 bp, Artificial Sequence
  Synthetic
tttattcuaccaaccctccctuct

SEQ ID NO: 2127 - DNA, 21 bp, Artificial Sequence
  Synthetic
tgctccaaauttcgaggcuct

SEQ ID NO: 2128 - DNA, 23 bp, Artificial Sequence
  Synthetic
atgaaggaacagacgcuggauac

SEQ ID NO: 2129 - DNA, 31 bp, Artificial Sequence
  Synthetic
gttagtgtgttugttttaaaatcttgaugct

SEQ ID NO: 2130 - DNA, 29 bp, Artificial Sequence
  Synthetic
gagaaagtcaaagugaggatgaacaatut

SEQ ID NO: 2131 - DNA, 26 bp, Artificial Sequence
  Synthetic
cactcaccatuaatcacttcctguct

SEQ ID NO: 2132 - DNA, 28 bp, Artificial Sequence
  Synthetic
cttgtataagcucagtttcccattcuct

SEQ ID NO: 2133 - DNA, 21 bp, Artificial Sequence
  Synthetic
cattuccagggcgaaaggtug

SEQ ID NO: 2134 - DNA, 27 bp, Artificial Sequence
  Synthetic
tctttcccauatttagaauggccaaca

SEQ ID NO: 2135 - DNA, 26 bp, Artificial Sequence
  Synthetic
gtcatcctguaccttcttgtttucct

SEQ ID NO: 2136 - DNA, 23 bp, Artificial Sequence
  Synthetic
ctggcatcuacagctgauagcaa

SEQ ID NO: 2137 - DNA, 29 bp, Artificial Sequence
  Synthetic
agtatcttatgcaacutcacaatgaauct

SEQ ID NO: 2138 - DNA, 28 bp, Artificial Sequence
  Synthetic
ctacctuttctattccatuggacagaca

SEQ ID NO: 2139 - DNA, 23 bp, Artificial Sequence
  Synthetic
tctcucagccacaaacagaucac

SEQ ID NO: 2140 - DNA, 23 bp, Artificial Sequence
  Synthetic
cuaggtttgacugagaagagcgt

SEQ ID NO: 2141 - DNA, 26 bp, Artificial Sequence
  Synthetic
gcaatgtcaccagutccagttcuaaa

SEQ ID NO: 2142 - DNA, 25 bp, Artificial Sequence
  Synthetic
ttttctaauggcagcactggtctua

SEQ ID NO: 2143 - DNA, 21 bp, Artificial Sequence
  Synthetic
gcugcagggtaagugaggaag

SEQ ID NO: 2144 - DNA, 28 bp, Artificial Sequence
  Synthetic
ctatgggttttauttcacagaaggugga

SEQ ID NO: 2145 - DNA, 29 bp, Artificial Sequence
  Synthetic
gtaggatgatuagtctagagtcuggaact

SEQ ID NO: 2146 - DNA, 28 bp, Artificial Sequence
  Synthetic
gccgtagacugtccagaaaatatuaaga

SEQ ID NO: 2147 - DNA, 28 bp, Artificial Sequence
  Synthetic
catacctattcugtcaaaaagctcucct

SEQ ID NO: 2148 - DNA, 33 bp, Artificial Sequence
  Synthetic
agagtgaatacatuacattaccaaattctagug

SEQ ID NO: 2149 - DNA, 27 bp, Artificial Sequence
  Synthetic
cttacccctttcauccaacagaagaut

SEQ ID NO: 2150 - DNA, 25 bp, Artificial Sequence
  Synthetic
gaaaatgtguttcttaccucaagcc

SEQ ID NO: 2151 - DNA, 27 bp, Artificial Sequence
  Synthetic
tggaatggtaatucttgctgatggaut

SEQ ID NO: 2152 - DNA, 29 bp, Artificial Sequence
  Synthetic
tgtatgtttctttcugtcttaatgccuca

SEQ ID NO: 2153 - DNA, 20 bp, Artificial Sequence
  Synthetic
gacaugtgggcugggaaaag

SEQ ID NO: 2154 - DNA, 28 bp, Artificial Sequence
  Synthetic
gtttattatctacucacccatgtggcut

SEQ ID NO: 2155 - DNA, 29 bp, Artificial Sequence
  Synthetic
ccggaagucaaccaatattttatcaucca

SEQ ID NO: 2156 - DNA, 27 bp, Artificial Sequence
  Synthetic
gggaccttcutctgattaacctuaaac

SEQ ID NO: 2157 - DNA, 19 bp, Artificial Sequence
  Synthetic
agagcgggcacutccauac

SEQ ID NO: 2158 - DNA, 25 bp, Artificial Sequence
  Synthetic
ggtaguagccccaatatagcuagca

SEQ ID NO: 2159 - DNA, 22 bp, Artificial Sequence
  Synthetic
ccttcagctgugtctgcagauc

SEQ ID NO: 2160 - DNA, 22 bp, Artificial Sequence
  Synthetic
ctcuccaggatgaatugcggat

SEQ ID NO: 2161 - DNA, 26 bp, Artificial Sequence
  Synthetic
cttucgaagaagaaauagctcttugg

SEQ ID NO: 2162 - DNA, 24 bp, Artificial Sequence
  Synthetic
ggctgtagugatcttttgcauaca

SEQ ID NO: 2163 - DNA, 23 bp, Artificial Sequence
  Synthetic
gttttggcagaaucaggagcaut

SEQ ID NO: 2164 - DNA, 28 bp, Artificial Sequence
  Synthetic
gacaagaagaagaccuaagtugacacat

SEQ ID NO: 2165 - DNA, 27 bp, Artificial Sequence
  Synthetic
caaagagguaaatctuacggcaaagac

SEQ ID NO: 2166 - DNA, 25 bp, Artificial Sequence
  Synthetic
actcctacatucttaggtggaugct

SEQ ID NO: 2167 - DNA, 21 bp, Artificial Sequence
  Synthetic
aaccttccgcuccttcacauc

SEQ ID NO: 2168 - DNA, 22 bp, Artificial Sequence
  Synthetic
tgccutgacaacttuggaggag

SEQ ID NO: 2169 - DNA, 21 bp, Artificial Sequence
  Synthetic
ttgugcccacagggatttcut

SEQ ID NO: 2170 - DNA, 26 bp, Artificial Sequence
  Synthetic
cttcacutttggatcugaaagagcat

SEQ ID NO: 2171 - DNA, 28 bp, Artificial Sequence
  Synthetic
caattgtgattccautttcagacacucc

SEQ ID NO: 2172 - DNA, 27 bp, Artificial Sequence
  Synthetic
gtgaaagaccagaauaagaagguagca

SEQ ID NO: 2173 - DNA, 25 bp, Artificial Sequence
  Synthetic
cttcacccgaucctttcagattcuc

SEQ ID NO: 2174 - DNA, 24 bp, Artificial Sequence
  Synthetic
ctcuggcagaaaaggaaacucact

SEQ ID NO: 2175 - DNA, 24 bp, Artificial Sequence
  Synthetic
gguaaaacacagagucagaagaug

SEQ ID NO: 2176 - DNA, 21 bp, Artificial Sequence
  Synthetic
gctaauggccgacaacuacga

SEQ ID NO: 2177 - DNA, 27 bp, Artificial Sequence
  Synthetic
tctcagaattugcaacatgctaguaca

SEQ ID NO: 2178 - DNA, 28 bp, Artificial Sequence
  Synthetic
ctttcagctucaggatgagtuagagaaa

SEQ ID NO: 2179 - DNA, 21 bp, Artificial Sequence
  Synthetic
ctcaggcutccccauaaagca

SEQ ID NO: 2180 - DNA, 17 bp, Artificial Sequence
  Synthetic
tgugccacgagguggac

SEQ ID NO: 2181 - DNA, 19 bp, Artificial Sequence
  Synthetic
tgcgcaugtagggtuggat

SEQ ID NO: 2182 - DNA, 22 bp, Artificial Sequence
  Synthetic
ccaggtcagccugtggaattua

SEQ ID NO: 2183 - DNA, 20 bp, Artificial Sequence
  Synthetic
ttgcgcaagaugtgcucaat

SEQ ID NO: 2184 - DNA, 23 bp, Artificial Sequence
  Synthetic
ctccgtaggaugctctatgucct

SEQ ID NO: 2185 - DNA, 22 bp, Artificial Sequence
  Synthetic
cagttcaucctccgactuggat

SEQ ID NO: 2186 - DNA, 21 bp, Artificial Sequence
  Synthetic
ccaccccgagauggtctcaua

SEQ ID NO: 2187 - DNA, 21 bp, Artificial Sequence
  Synthetic
aggcacuggaacatgaagugg

SEQ ID NO: 2188 - DNA, 21 bp, Artificial Sequence
  Synthetic
cttagctgcugctccguagat

SEQ ID NO: 2189 - DNA, 22 bp, Artificial Sequence
  Synthetic
tttccaggguggaagaatggug

SEQ ID NO: 2190 - DNA, 17 bp, Artificial Sequence
  Synthetic
ccggcugagagagcuca

SEQ ID NO: 2191 - DNA, 17 bp, Artificial Sequence
  Synthetic
gggcuggatggctucgg

SEQ ID NO: 2192 - DNA, 24 bp, Artificial Sequence
  Synthetic
ctggutagtgccucaacaagaaac

SEQ ID NO: 2193 - DNA, 28 bp, Artificial Sequence
  Synthetic
ggatccactauccggaatattttggaut

SEQ ID NO: 2194 - DNA, 26 bp, Artificial Sequence
  Synthetic
gaaaatggaatcucttacctccucca

SEQ ID NO: 2195 - DNA, 21 bp, Artificial Sequence
  Synthetic
ggtggacugttggttcctuca

SEQ ID NO: 2196 - DNA, 33 bp, Artificial Sequence
  Synthetic
aaaattatttttgugaagtcattcacatuacca

SEQ ID NO: 2197 - DNA, 26 bp, Artificial Sequence
  Synthetic
tccagaattttcuccgtctcctttuc

SEQ ID NO: 2198 - DNA, 28 bp, Artificial Sequence
  Synthetic
ggtacaacuattcttcagtaugcacaga

SEQ ID NO: 2199 - DNA, 29 bp, Artificial Sequence
  Synthetic
ggtaaacaagagugaatgagttagtuagt

SEQ ID NO: 2200 - DNA, 28 bp, Artificial Sequence
  Synthetic
gagttgcagtccuggaaaatcaaaauaa

SEQ ID NO: 2201 - DNA, 33 bp, Artificial Sequence
  Synthetic
ccactaggaaauccatttaatttttatgcaugt

SEQ ID NO: 2202 - DNA, 20 bp, Artificial Sequence
  Synthetic
cttcaugcgctgcttuccag

SEQ ID NO: 2203 - DNA, 19 bp, Artificial Sequence
  Synthetic
gucacaagcaccucccaga

SEQ ID NO: 2204 - DNA, 24 bp, Artificial Sequence
  Synthetic
ggaaugtcatuaaggcagcaaagt

SEQ ID NO: 2205 - DNA, 23 bp, Artificial Sequence
  Synthetic
aggatgaagguaatccggaguga

SEQ ID NO: 2206 - DNA, 22 bp, Artificial Sequence
  Synthetic
ggtucagcagaaagaggacuca

SEQ ID NO: 2207 - DNA, 28 bp, Artificial Sequence
  Synthetic
tgctaccttataucccttctcacctuag

SEQ ID NO: 2208 - DNA, 23 bp, Artificial Sequence
  Synthetic
ggaaacuaggcaccataccugaa

SEQ ID NO: 2209 - DNA, 23 bp, Artificial Sequence
  Synthetic
ctggtgtutgagcatguagacca

SEQ ID NO: 2210 - DNA, 22 bp, Artificial Sequence
  Synthetic
ggccttguacactgtcccauag

SEQ ID NO: 2211 - DNA, 25 bp, Artificial Sequence
  Synthetic
caggctcauaccatcctaactcugt

SEQ ID NO: 2212 - DNA, 25 bp, Artificial Sequence
  Synthetic
tcctctccaatuctgtaggacacut

SEQ ID NO: 2213 - DNA, 20 bp, Artificial Sequence
  Synthetic
caagggaucgggttaccgut

SEQ ID NO: 2214 - DNA, 18 bp, Artificial Sequence
  Synthetic
cggcgauctcgcctauca

SEQ ID NO: 2215 - DNA, 21 bp, Artificial Sequence
  Synthetic
ctctcttccuctcagcctucc

SEQ ID NO: 2216 - DNA, 20 bp, Artificial Sequence
  Synthetic
gggatgaagaguccccggua

SEQ ID NO: 2217 - DNA, 20 bp, Artificial Sequence
  Synthetic
ggaccagcccuccatacuca

SEQ ID NO: 2218 - DNA, 22 bp, Artificial Sequence
  Synthetic
tgaaaacagcucctgtcgtcut

SEQ ID NO: 2219 - DNA, 23 bp, Artificial Sequence
  Synthetic
gaggtaccugagagatugcagac

SEQ ID NO: 2220 - DNA, 21 bp, Artificial Sequence
  Synthetic
ctcctggcucccattttucct

SEQ ID NO: 2221 - DNA, 17 bp, Artificial Sequence
  Synthetic
ccaccgucacccaguga

SEQ ID NO: 2222 - DNA, 25 bp, Artificial Sequence
  Synthetic
ctgcagccagautttctaactcuca

SEQ ID NO: 2223 - DNA, 22 bp, Artificial Sequence
  Synthetic
ctggagcuggagaaggagttuc

SEQ ID NO: 2224 - DNA, 19 bp, Artificial Sequence
  Synthetic
ggutgagcgttugcagcag

SEQ ID NO: 2225 - DNA, 17 bp, Artificial Sequence
  Synthetic
cucacggccucaacggt

SEQ ID NO: 2226 - DNA, 20 bp, Artificial Sequence
  Synthetic
catgcucacgtccttgucca

SEQ ID NO: 2227 - DNA, 17 bp, Artificial Sequence
  Synthetic
agtccccucgcccctut

SEQ ID NO: 2228 - DNA, 28 bp, Artificial Sequence
  Synthetic
ctttcttcagaagcuccaccctataaut

SEQ ID NO: 2229 - DNA, 27 bp, Artificial Sequence
  Synthetic
ggagtugaagccagctgattauaagat

SEQ ID NO: 2230 - DNA, 30 bp, Artificial Sequence
  Synthetic
atccttaatgaucagggcatttctauaaaa

SEQ ID NO: 2231 - DNA, 29 bp, Artificial Sequence
  Synthetic
gctaaagaactugaccaagacataucagg

SEQ ID NO: 2232 - DNA, 30 bp, Artificial Sequence
  Synthetic
aaactgtttctaugagaaaggttgugagaa

SEQ ID NO: 2233 - DNA, 26 bp, Artificial Sequence
  Synthetic
tctaggacattuggcattgacttucc

SEQ ID NO: 2234 - DNA, 29 bp, Artificial Sequence
  Synthetic
gtggaaccaaaugatactgatccatuaga

SEQ ID NO: 2235 - DNA, 27 bp, Artificial Sequence
  Synthetic
ctccatttagaccugaaagggttagut

SEQ ID NO: 2236 - DNA, 25 bp, Artificial Sequence
  Synthetic
caguaaagcaggcaatatcuggaac

SEQ ID NO: 2237 - DNA, 27 bp, Artificial Sequence
  Synthetic
cactttcagaggcutcagtttctttut

SEQ ID NO: 2238 - DNA, 30 bp, Artificial Sequence
  Synthetic
tgcaggttuaatatccacttugaaaaagaa

SEQ ID NO: 2239 - DNA, 26 bp, Artificial Sequence
  Synthetic
ttgcaaatguaagtggtgctucaaaa

SEQ ID NO: 2240 - DNA, 29 bp, Artificial Sequence
  Synthetic
cagugtgaaaatgauccaaaaagcaaaaa

SEQ ID NO: 2241 - DNA, 30 bp, Artificial Sequence
  Synthetic
agtgctggcautttcatgatcatauaaaag

SEQ ID NO: 2242 - DNA, 28 bp, Artificial Sequence
  Synthetic
gcatcacctucaagaaaggtacaatuca

SEQ ID NO: 2243 - DNA, 30 bp, Artificial Sequence
  Synthetic
tagctactuggaagacaaaattattcucat

SEQ ID NO: 2244 - DNA, 32 bp, Artificial Sequence
  Synthetic
cggacatctccutgaatatagataaaauacca

SEQ ID NO: 2245 - DNA, 32 bp, Artificial Sequence
  Synthetic
ttcttaatgttatgtucagagagcttgattuc

SEQ ID NO: 2246 - DNA, 28 bp, Artificial Sequence
  Synthetic
gccaaaaggcagaaautacagaacttuc

SEQ ID NO: 2247 - DNA, 23 bp, Artificial Sequence
  Synthetic
ctgcattccucagaagtggtcut

SEQ ID NO: 2248 - DNA, 27 bp, Artificial Sequence
  Synthetic
cttctgcagagguacatccaataagut

SEQ ID NO: 2249 - DNA, 30 bp, Artificial Sequence
  Synthetic
gtgccagtagucatttcaatattatttugt

SEQ ID NO: 2250 - DNA, 30 bp, Artificial Sequence
  Synthetic
ttactgaucagcacaacatatgtctuaaat

SEQ ID NO: 2251 - DNA, 32 bp, Artificial Sequence
  Synthetic
gttctttatttgaaguattaccatgacaugct

SEQ ID NO: 2252 - DNA, 32 bp, Artificial Sequence
  Synthetic
ggaaacagacatagutaaacacaaaatacuga

SEQ ID NO: 2253 - DNA, 24 bp, Artificial Sequence
  Synthetic
ccgcuagctgtaugaaaacccaat

SEQ ID NO: 2254 - DNA, 21 bp, Artificial Sequence
  Synthetic
gagactguggtgccaccuaag

SEQ ID NO: 2255 - DNA, 30 bp, Artificial Sequence
  Synthetic
aggactttttgcugtttctttttctacaut

SEQ ID NO: 2256 - DNA, 29 bp, Artificial Sequence
  Synthetic
gacaaaaaucatctcuccgaaaaacaaga

SEQ ID NO: 2257 - DNA, 30 bp, Artificial Sequence
  Synthetic
actggctcaauaccagaatcaagtttatut

SEQ ID NO: 2258 - DNA, 21 bp, Artificial Sequence
  Synthetic
ggtagggccaccugcattuag

SEQ ID NO: 2259 - DNA, 25 bp, Artificial Sequence
  Synthetic
acaacctgccauaattttcgttugg

SEQ ID NO: 2260 - DNA, 32 bp, Artificial Sequence
  Synthetic
atgtaaatgtagtauagggaagcttcauaagt

SEQ ID NO: 2261 - DNA, 26 bp, Artificial Sequence
  Synthetic
tttcagaaaacacutgtcttgcgtut

SEQ ID NO: 2262 - DNA, 32 bp, Artificial Sequence
  Synthetic
agaggaatttgattuaatcagaactgagcaua

SEQ ID NO: 2263 - DNA, 26 bp, Artificial Sequence
  Synthetic
ttccatttcugagtttacacagugct

SEQ ID NO: 2264 - DNA, 32 bp, Artificial Sequence
  Synthetic
gatgttcctgugaaaacaaatatagaagttug

SEQ ID NO: 2265 - DNA, 23 bp, Artificial Sequence
  Synthetic
agagaatgtguggcatgactugg

SEQ ID NO: 2266 - DNA, 32 bp, Artificial Sequence
  Synthetic
gtcaataaacttatauattttctccccatugc

SEQ ID NO: 2267 - DNA, 27 bp, Artificial Sequence
  Synthetic
cctgaaacugctaaattgctugaagat

SEQ ID NO: 2268 - DNA, 28 bp, Artificial Sequence
  Synthetic
gatggacatggcuctgatgataguaaaa

SEQ ID NO: 2269 - DNA, 29 bp, Artificial Sequence
  Synthetic
ctaacugaaaggcaaaaattcaucacaca

SEQ ID NO: 2270 - DNA, 28 bp, Artificial Sequence
  Synthetic
aaggaaaguttatggacuggaaaaggaa

SEQ ID NO: 2271 - DNA, 28 bp, Artificial Sequence
  Synthetic
agacagtuaagagaagaaagagggauga

SEQ ID NO: 2272 - DNA, 29 bp, Artificial Sequence
  Synthetic
ttaaacagtggaatuctagagtcacacut

SEQ ID NO: 2273 - DNA, 28 bp, Artificial Sequence
  Synthetic
gctgtgtcatcccuttccattatcttut

SEQ ID NO: 2274 - DNA, 31 bp, Artificial Sequence
  Synthetic
aggcagttcuagaagaatgaaaactcttaug

SEQ ID NO: 2275 - DNA, 24 bp, Artificial Sequence
  Synthetic
aggaaaagguctagggucaggaaa

SEQ ID NO: 2276 - DNA, 32 bp, Artificial Sequence
  Synthetic
atctggattauacatatttcgcaaugaaagag

SEQ ID NO: 2277 - DNA, 27 bp, Artificial Sequence
  Synthetic
accttcatgttcutcaaattcctccug

SEQ ID NO: 2278 - DNA, 28 bp, Artificial Sequence
  Synthetic
aagagcagtuaagagccttgaataauca

SEQ ID NO: 2279 - DNA, 28 bp, Artificial Sequence
  Synthetic
acatcccttgauaaaccttgttccttut

SEQ ID NO: 2280 - DNA, 31 bp, Artificial Sequence
  Synthetic
gcttgttagtttauggaatctccatatgtug

SEQ ID NO: 2281 - DNA, 27 bp, Artificial Sequence
  Synthetic
acaaatcctatuaggtccaccucagaa

SEQ ID NO: 2282 - DNA, 28 bp, Artificial Sequence
  Synthetic
tgcaatttauaaagcagcttttccacut

SEQ ID NO: 2283 - DNA, 25 bp, Artificial Sequence
  Synthetic
ggccctgaaguacagtctttagtug

SEQ ID NO: 2284 - DNA, 23 bp, Artificial Sequence
  Synthetic
ctccacctgutagtcccattugt

SEQ ID NO: 2285 - DNA, 30 bp, Artificial Sequence
  Synthetic
gagtcatutgaggagaautcagttctttut

SEQ ID NO: 2286 - DNA, 28 bp, Artificial Sequence
  Synthetic
gccagtacggaagaaugtgagaaaaaua

SEQ ID NO: 2287 - DNA, 28 bp, Artificial Sequence
  Synthetic
tgtgcaacataaguactaatgtgtggut

SEQ ID NO: 2288 - DNA, 28 bp, Artificial Sequence
  Synthetic
ccatgggaacucaatagaaaatccucat

SEQ ID NO: 2289 - DNA, 26 bp, Artificial Sequence
  Synthetic
acgacactuaccaaagtctgtttcut

SEQ ID NO: 2290 - DNA, 23 bp, Artificial Sequence
  Synthetic
cgacctctaugttttgcctccut

SEQ ID NO: 2291 - DNA, 27 bp, Artificial Sequence
  Synthetic
aaatgttcacaugccttatcatguaga

SEQ ID NO: 2292 - DNA, 24 bp, Artificial Sequence
  Synthetic
caattgttcttugttccctgtugg

SEQ ID NO: 2293 - DNA, 23 bp, Artificial Sequence
  Synthetic
caagccttugagttggtactgug

SEQ ID NO: 2294 - DNA, 28 bp, Artificial Sequence
  Synthetic
catcttacuagaagcgtattgucacact

SEQ ID NO: 2295 - DNA, 25 bp, Artificial Sequence
  Synthetic
acatggagaugacttcacgucaaaa

SEQ ID NO: 2296 - DNA, 28 bp, Artificial Sequence
  Synthetic
gtgatgaaggacutaaagtgagagaugg

SEQ ID NO: 2297 - DNA, 21 bp, Artificial Sequence
  Synthetic
ccccacgugaacaagugacat

SEQ ID NO: 2298 - DNA, 25 bp, Artificial Sequence
  Synthetic
cgaattctgcutctgaagtcatugg

SEQ ID NO: 2299 - DNA, 24 bp, Artificial Sequence
  Synthetic
agattcagtgguctgctgttctug

SEQ ID NO: 2300 - DNA, 19 bp, Artificial Sequence
  Synthetic
ggacgacguggatggugag

SEQ ID NO: 2301 - DNA, 27 bp, Artificial Sequence
  Synthetic
ctcatccaccaacuccttaaaacucaa

SEQ ID NO: 2302 - DNA, 21 bp, Artificial Sequence
  Synthetic
agactuccggaaccatcacug

SEQ ID NO: 2303 - DNA, 28 bp, Artificial Sequence
  Synthetic
cccaattgattgugaaagtccacataut

SEQ ID NO: 2304 - DNA, 30 bp, Artificial Sequence
  Synthetic
ctcattgctgtguaagtaattgtttcctut

SEQ ID NO: 2305 - DNA, 18 bp, Artificial Sequence
  Synthetic
gguaggccucggcaacag

SEQ ID NO: 2306 - DNA, 27 bp, Artificial Sequence
  Synthetic
aggttgagctugttgatttggttuaga

SEQ ID NO: 2307 - DNA, 25 bp, Artificial Sequence
  Synthetic
agctctgtttaguctctggctctua

SEQ ID NO: 2308 - DNA, 25 bp, Artificial Sequence
  Synthetic
tgcctcucagaatcatctgauggat

SEQ ID NO: 2309 - DNA, 22 bp, Artificial Sequence
  Synthetic
cattctucacgggagcttccut

SEQ ID NO: 2310 - DNA, 28 bp, Artificial Sequence
  Synthetic
ctatgcgtggcucaaattctttttacut

SEQ ID NO: 2311 - DNA, 26 bp, Artificial Sequence
  Synthetic
gagatggagautttcagtucagacca

SEQ ID NO: 2312 - DNA, 24 bp, Artificial Sequence
  Synthetic
gatactgacgautgcgctccauaa

SEQ ID NO: 2313 - DNA, 31 bp, Artificial Sequence
  Synthetic
gaaacagauggagaagatatatacucagcaa

SEQ ID NO: 2314 - DNA, 24 bp, Artificial Sequence
  Synthetic
gactgagttcugtgcggacaauat

SEQ ID NO: 2315 - DNA, 23 bp, Artificial Sequence
  Synthetic
cgaaagtgucgcatcaaactcuc

SEQ ID NO: 2316 - DNA, 23 bp, Artificial Sequence
  Synthetic
ggtttcagcuattgggaaccuga

SEQ ID NO: 2317 - DNA, 25 bp, Artificial Sequence
  Synthetic
agagtcacugtggaagtaguaggaa

SEQ ID NO: 2318 - DNA, 23 bp, Artificial Sequence
  Synthetic
gtctccagugacatcccactauc

SEQ ID NO: 2319 - DNA, 27 bp, Artificial Sequence
  Synthetic
gtaaaaguggcctttttgctuacaagt

SEQ ID NO: 2320 - DNA, 24 bp, Artificial Sequence
  Synthetic
actttuacaaggccaacacgauga

SEQ ID NO: 2321 - DNA, 25 bp, Artificial Sequence
  Synthetic
gcttaccttcuccaggctttuacac

SEQ ID NO: 2322 - DNA, 24 bp, Artificial Sequence
  Synthetic
ccagugaacagaggaaaagcugag

SEQ ID NO: 2323 - DNA, 25 bp, Artificial Sequence
  Synthetic
tcagaagaaaacugtggtgtugaca

SEQ ID NO: 2324 - DNA, 26 bp, Artificial Sequence
  Synthetic
tcatcttcatagucagcctcttccut

SEQ ID NO: 2325 - DNA, 21 bp, Artificial Sequence
  Synthetic
gcagctatguttcccctccut

SEQ ID NO: 2326 - DNA, 23 bp, Artificial Sequence
  Synthetic
cuttaaaaaggagucgccaagca

SEQ ID NO: 2327 - DNA, 21 bp, Artificial Sequence
  Synthetic
ctcaagggcaggauggatuct

SEQ ID NO: 2328 - DNA, 28 bp, Artificial Sequence
  Synthetic
ccattggcgagautttgattguaagaaa

SEQ ID NO: 2329 - DNA, 25 bp, Artificial Sequence
  Synthetic
caaggtgctaauagaacctcctcuc

SEQ ID NO: 2330 - DNA, 24 bp, Artificial Sequence
  Synthetic
tcttagcucctctgcagucaaaag

SEQ ID NO: 2331 - DNA, 28 bp, Artificial Sequence
  Synthetic
tgcgctttgtatutatctgtccatttut

SEQ ID NO: 2332 - DNA, 30 bp, Artificial Sequence
  Synthetic
tggttaggtcaaggutgtactttgtttuat

SEQ ID NO: 2333 - DNA, 25 bp, Artificial Sequence
  Synthetic
gcaattttgaucagcctcatcgaut

SEQ ID NO: 2334 - DNA, 29 bp, Artificial Sequence
  Synthetic
tgatacagataaguttcataccaaagcug

SEQ ID NO: 2335 - DNA, 22 bp, Artificial Sequence
  Synthetic
tcggctugaaaaacctgcacua

SEQ ID NO: 2336 - DNA, 23 bp, Artificial Sequence
  Synthetic
gagcttccgccutctaaagtuga

SEQ ID NO: 2337 - DNA, 25 bp, Artificial Sequence
  Synthetic
agaggctaataugcttgagcaugac

SEQ ID NO: 2338 - DNA, 28 bp, Artificial Sequence
  Synthetic
ttcttctaaacutacaacaauggaggct

SEQ ID NO: 2339 - DNA, 28 bp, Artificial Sequence
  Synthetic
gattaccaagtgauccgtttactcauct

SEQ ID NO: 2340 - DNA, 21 bp, Artificial Sequence
  Synthetic
caatcugccggcacatgtuaa

SEQ ID NO: 2341 - DNA, 27 bp, Artificial Sequence
  Synthetic
cccacagaataucgatcctatgtucaa

SEQ ID NO: 2342 - DNA, 23 bp, Artificial Sequence
  Synthetic
cccaatgccaugtccagttauga

SEQ ID NO: 2343 - DNA, 26 bp, Artificial Sequence
  Synthetic
gcatguacttccatttuaaaggaggc

SEQ ID NO: 2344 - DNA, 28 bp, Artificial Sequence
  Synthetic
agtgcatgtattutccttaggaaagugt

SEQ ID NO: 2345 - DNA, 22 bp, Artificial Sequence
  Synthetic
cgtgccguattggtagttcugg

SEQ ID NO: 2346 - DNA, 32 bp, Artificial Sequence
  Synthetic
ctaatctcatuaaagctgagtcaaucagaagt

SEQ ID NO: 2347 - DNA, 28 bp, Artificial Sequence
  Synthetic
cattttgggacuaactgcttccatttua

SEQ ID NO: 2348 - DNA, 25 bp, Artificial Sequence
  Synthetic
cttggttccauctctcttttgucca

SEQ ID NO: 2349 - DNA, 24 bp, Artificial Sequence
  Synthetic
agagccaacuaggcaagatttcuc

SEQ ID NO: 2350 - DNA, 22 bp, Artificial Sequence
  Synthetic
gaaaggacccautggugaggaa

SEQ ID NO: 2351 - DNA, 26 bp, Artificial Sequence
  Synthetic
aaccctgcaugattgtgtaatgguat

SEQ ID NO: 2352 - DNA, 18 bp, Artificial Sequence
  Synthetic
gcgtgagcutgctgcuct

SEQ ID NO: 2353 - DNA, 18 bp, Artificial Sequence
  Synthetic
cagcgacacgugcgagua

SEQ ID NO: 2354 - DNA, 20 bp, Artificial Sequence
  Synthetic
ccactgcgaguacacgtuct

SEQ ID NO: 2355 - DNA, 17 bp, Artificial Sequence
  Synthetic
cctuccccgggctctuc

SEQ ID NO: 2356 - DNA, 17 bp, Artificial Sequence
  Synthetic
gccttgugcatgugcgt

SEQ ID NO: 2357 - DNA, 23 bp, Artificial Sequence
  Synthetic
ggcaagaccutcaagtuccagag

SEQ ID NO: 2358 - DNA, 18 bp, Artificial Sequence
  Synthetic
cgagtcgauggccauggg

SEQ ID NO: 2359 - DNA, 17 bp, Artificial Sequence
  Synthetic
cgccgccuctctucagt

SEQ ID NO: 2360 - DNA, 18 bp, Artificial Sequence
  Synthetic
gaagccgugcgtgttcug

SEQ ID NO: 2361 - DNA, 19 bp, Artificial Sequence
  Synthetic
ctcacgcugtctctgccut

SEQ ID NO: 2362 - DNA, 19 bp, Artificial Sequence
  Synthetic
gcaagcgcagcaucccaua

SEQ ID NO: 2363 - DNA, 20 bp, Artificial Sequence
  Synthetic
gagcucaggaaagtguccga

SEQ ID NO: 2364 - DNA, 18 bp, Artificial Sequence
  Synthetic
gcucgagaggacagcgug

SEQ ID NO: 2365 - DNA, 19 bp, Artificial Sequence
  Synthetic
ccccactucccccagtuct

SEQ ID NO: 2366 - DNA, 17 bp, Artificial Sequence
  Synthetic
catgcgugcgcgugaat

SEQ ID NO: 2367 - DNA, 20 bp, Artificial Sequence
  Synthetic
cactgtggccutgtttccug

SEQ ID NO: 2368 - DNA, 20 bp, Artificial Sequence
  Synthetic
cttgaucccctcctugcaca

SEQ ID NO: 2369 - DNA, 19 bp, Artificial Sequence
  Synthetic
tggtguaccgggaccucaa

SEQ ID NO: 2370 - DNA, 21 bp, Artificial Sequence
  Synthetic
aagacaggacaucgtccccua

SEQ ID NO: 2371 - DNA, 19 bp, Artificial Sequence
  Synthetic
cacccagcccugcttuaca

SEQ ID NO: 2372 - DNA, 21 bp, Artificial Sequence
  Synthetic
cctgagttgucactgggugag

SEQ ID NO: 2373 - DNA, 21 bp, Artificial Sequence
  Synthetic
ggtggagcucctgatctggua

SEQ ID NO: 2374 - DNA, 26 bp, Artificial Sequence
  Synthetic
ctgtgtgatcugatctttacctuccc

SEQ ID NO: 2375 - DNA, 24 bp, Artificial Sequence
  Synthetic
agacttaccuccatcugaagccat

SEQ ID NO: 2376 - DNA, 25 bp, Artificial Sequence
  Synthetic
ccatcatgccutcagtattctcucc

SEQ ID NO: 2377 - DNA, 20 bp, Artificial Sequence
  Synthetic
tttgagagggcucagcugac

SEQ ID NO: 2378 - DNA, 22 bp, Artificial Sequence
  Synthetic
gaccgcuccaaaattuccaagg

SEQ ID NO: 2379 - DNA, 27 bp, Artificial Sequence
  Synthetic
agccctagaauaattaatctccgguct

SEQ ID NO: 2380 - DNA, 23 bp, Artificial Sequence
  Synthetic
gctgaggagaugcagatucagaa

SEQ ID NO: 2381 - DNA, 21 bp, Artificial Sequence
  Synthetic
ccacggcucctgtcaaaatug

SEQ ID NO: 2382 - DNA, 27 bp, Artificial Sequence
  Synthetic
cttagtttcttcugtaaagcccctugt

SEQ ID NO: 2383 - DNA, 25 bp, Artificial Sequence
  Synthetic
caattaaggucaagggauctctcug

SEQ ID NO: 2384 - DNA, 24 bp, Artificial Sequence
  Synthetic
tgccttggaaagguttcttctuca

SEQ ID NO: 2385 - DNA, 20 bp, Artificial Sequence
  Synthetic
cctgtggagcugcaagtuct

SEQ ID NO: 2386 - DNA, 22 bp, Artificial Sequence
  Synthetic
gcaagucctgggatugcagaaa

SEQ ID NO: 2387 - DNA, 26 bp, Artificial Sequence
  Synthetic
gggaaggattcugatcataactcuga

SEQ ID NO: 2388 - DNA, 21 bp, Artificial Sequence
  Synthetic
gcagtgugattccctguggag

SEQ ID NO: 2389 - DNA, 22 bp, Artificial Sequence
  Synthetic
cctacggttucacagctctgut

SEQ ID NO: 2390 - DNA, 20 bp, Artificial Sequence
  Synthetic
ctccaacuaagggucagcga

SEQ ID NO: 2391 - DNA, 23 bp, Artificial Sequence
  Synthetic
ctttgggagucccagttgtguaa

SEQ ID NO: 2392 - DNA, 19 bp, Artificial Sequence
  Synthetic
gcuccctgcuggagcaaaa

SEQ ID NO: 2393 - DNA, 22 bp, Artificial Sequence
  Synthetic
ggtcgaactacucccagagcua

SEQ ID NO: 2394 - DNA, 20 bp, Artificial Sequence
  Synthetic
cugagccaggaaugcaggat

SEQ ID NO: 2395 - DNA, 21 bp, Artificial Sequence
  Synthetic
tccgagcggagccutctatua

SEQ ID NO: 2396 - DNA, 23 bp, Artificial Sequence
  Synthetic
cagaaugggtctuggagcaagaa

SEQ ID NO: 2397 - DNA, 26 bp, Artificial Sequence
  Synthetic
acatattactcuccttcccacctuga

SEQ ID NO: 2398 - DNA, 26 bp, Artificial Sequence
  Synthetic
tgggcagaagaauatgaagcuagaga

SEQ ID NO: 2399 - DNA, 30 bp, Artificial Sequence
  Synthetic
ttagagttaagacaagcuccaaagaaagut

SEQ ID NO: 2400 - DNA, 22 bp, Artificial Sequence
  Synthetic
gctgaugaggcttcuacagcag

SEQ ID NO: 2401 - DNA, 23 bp, Artificial Sequence
  Synthetic
tgtcagcaaagcacuggatcuaa

SEQ ID NO: 2402 - DNA, 25 bp, Artificial Sequence
  Synthetic
ggagatccuctacaaagggtucaga

SEQ ID NO: 2403 - DNA, 24 bp, Artificial Sequence
  Synthetic
cttcagcccgaauttctucaaagg

SEQ ID NO: 2404 - DNA, 22 bp, Artificial Sequence
  Synthetic
cautttctggaugggagggaca

SEQ ID NO: 2405 - DNA, 25 bp, Artificial Sequence
  Synthetic
agaactggauagagtcattccuggt

SEQ ID NO: 2406 - DNA, 24 bp, Artificial Sequence
  Synthetic
ccttgcagutctcaaaaccucaga

SEQ ID NO: 2407 - DNA, 29 bp, Artificial Sequence
  Synthetic
agcttttgtggutttgaataaacaaucca

SEQ ID NO: 2408 - DNA, 26 bp, Artificial Sequence
  Synthetic
gcccaattatugaagacagtcgugaa

SEQ ID NO: 2409 - DNA, 30 bp, Artificial Sequence
  Synthetic
gtggtatgtataucctacctgaagtcucat

SEQ ID NO: 2410 - DNA, 26 bp, Artificial Sequence
  Synthetic
ccttaaaccaggagguaaaagcuaca

SEQ ID NO: 2411 - DNA, 30 bp, Artificial Sequence
  Synthetic
ccacccagaataacutgtaatcttcacaua

SEQ ID NO: 2412 - DNA, 27 bp, Artificial Sequence
  Synthetic
agctgttatcaauatcaagatggcugt

SEQ ID NO: 2413 - DNA, 28 bp, Artificial Sequence
  Synthetic
ctaaattccuttgctaaauggagcacaa

SEQ ID NO: 2414 - DNA, 27 bp, Artificial Sequence
  Synthetic
gatagtggactuttcctacagtgtuga

SEQ ID NO: 2415 - DNA, 26 bp, Artificial Sequence
  Synthetic
aagaaaccctcuccatatttgcucag

SEQ ID NO: 2416 - DNA, 27 bp, Artificial Sequence
  Synthetic
ggaaggtagggaagutaactagtccug

SEQ ID NO: 2417 - DNA, 26 bp, Artificial Sequence
  Synthetic
acagcaatgguagtgcatctaaaugt

SEQ ID NO: 2418 - DNA, 23 bp, Artificial Sequence
  Synthetic
ggatgaacacautgctttcugct

SEQ ID NO: 2419 - DNA, 29 bp, Artificial Sequence
  Synthetic
atgccattatcatugaattgtgttttcug

SEQ ID NO: 2420 - DNA, 29 bp, Artificial Sequence
  Synthetic
cgtggatcaaaacacutcttcagaaaaua

SEQ ID NO: 2421 - DNA, 25 bp, Artificial Sequence
  Synthetic
gcauttgatgtguagaagaggcact

SEQ ID NO: 2422 - DNA, 28 bp, Artificial Sequence
  Synthetic
catttaaccacacuttgcagatctuacc

SEQ ID NO: 2423 - DNA, 29 bp, Artificial Sequence
  Synthetic
ggaaaggtctugaaaagcagtattttgut

SEQ ID NO: 2424 - DNA, 30 bp, Artificial Sequence
  Synthetic
ggagaaaaatttgcuaaagcatgacaguaa

SEQ ID NO: 2425 - DNA, 28 bp, Artificial Sequence
  Synthetic
tgtatgactctuggtaatgtccatgtuc

SEQ ID NO: 2426 - DNA, 25 bp, Artificial Sequence
  Synthetic
cuaaggaaagaauacagcagagcct

SEQ ID NO: 2427 - DNA, 21 bp, Artificial Sequence
  Synthetic
tggtactcuccggtgcuagat

SEQ ID NO: 2428 - DNA, 28 bp, Artificial Sequence
  Synthetic
tcatgggaacaauctttgttttcuacca

SEQ ID NO: 2429 - DNA, 26 bp, Artificial Sequence
  Synthetic
tgggattgcutaaacttttccucagt

SEQ ID NO: 2430 - DNA, 30 bp, Artificial Sequence
  Synthetic
agttgaaaaatguggtaaaagtcccauaga

SEQ ID NO: 2431 - DNA, 22 bp, Artificial Sequence
  Synthetic
tggtccaccaacacutttccut

SEQ ID NO: 2432 - DNA, 28 bp, Artificial Sequence
  Synthetic
agtcacacaacugccttagaatguaaaa

SEQ ID NO: 2433 - DNA, 29 bp, Artificial Sequence
  Synthetic
tgttctttcctttucttggtagtcaauga

SEQ ID NO: 2434 - DNA, 25 bp, Artificial Sequence
  Synthetic
aatcagccacutgcaaaaacaucaa

SEQ ID NO: 2435 - DNA, 30 bp, Artificial Sequence
  Synthetic
accatacaactcugggtaatatccatauca

SEQ ID NO: 2436 - DNA, 23 bp, Artificial Sequence
  Synthetic
tctggaagucaccgattcccaua

SEQ ID NO: 2437 - DNA, 24 bp, Artificial Sequence
  Synthetic
cagtgcttgtutttcagcgattuc

SEQ ID NO: 2438 - DNA, 26 bp, Artificial Sequence
  Synthetic
tgctgtttgtggauccagtgataaut

SEQ ID NO: 2439 - DNA, 26 bp, Artificial Sequence
  Synthetic
ctggcaaaaucatttgcauaagcaag

SEQ ID NO: 2440 - DNA, 29 bp, Artificial Sequence
  Synthetic
ttgatgacatutatgttattccucagcct

SEQ ID NO: 2441 - DNA, 28 bp, Artificial Sequence
  Synthetic
cacatatgggugcagaggaattttcuat

SEQ ID NO: 2442 - DNA, 24 bp, Artificial Sequence
  Synthetic
ggagaagcaccagaucctgtaaut

SEQ ID NO: 2443 - DNA, 29 bp, Artificial Sequence
  Synthetic
cattgtgtgccutatttcctaatucaagt

SEQ ID NO: 2444 - DNA, 28 bp, Artificial Sequence
  Synthetic
cagatuccagcagauacaactgatauaa

SEQ ID NO: 2445 - DNA, 28 bp, Artificial Sequence
  Synthetic
agagtctgaagaautgatctcaucagga

SEQ ID NO: 2446 - DNA, 27 bp, Artificial Sequence
  Synthetic
cagtttagtttugacttgttcgucacc

SEQ ID NO: 2447 - DNA, 28 bp, Artificial Sequence
  Synthetic
agaattttaacataccuccctcaagcuc

SEQ ID NO: 2448 - DNA, 26 bp, Artificial Sequence
  Synthetic
agattaaagcuttctgcaucgaacca

SEQ ID NO: 2449 - DNA, 28 bp, Artificial Sequence
  Synthetic
cgttcagaatgucttcactgattcucat

SEQ ID NO: 2450 - DNA, 29 bp, Artificial Sequence
  Synthetic
caaaaaccttatcuctctgaataccugct

SEQ ID NO: 2451 - DNA, 23 bp, Artificial Sequence
  Synthetic
atgcctgcauttccttaccucaa

SEQ ID NO: 2452 - DNA, 27 bp, Artificial Sequence
  Synthetic
gtgagccacuaagcattgaaatgttut

SEQ ID NO: 2453 - DNA, 30 bp, Artificial Sequence
  Synthetic
gttcattaggttauaatttggtccccauct

SEQ ID NO: 2454 - DNA, 24 bp, Artificial Sequence
  Synthetic
tcaggactgccauttctaccacua

SEQ ID NO: 2455 - DNA, 29 bp, Artificial Sequence
  Synthetic
acatcatcagaaggaautttactcagcut

SEQ ID NO: 2456 - DNA, 22 bp, Artificial Sequence
  Synthetic
cttgcagacuccgaaggaagut

SEQ ID NO: 2457 - DNA, 30 bp, Artificial Sequence
  Synthetic
gtatcaaagtcauccatatcatcccaauca

SEQ ID NO: 2458 - DNA, 28 bp, Artificial Sequence
  Synthetic
cccattgcugaagtgcatataaaugaag

SEQ ID NO: 2459 - DNA, 26 bp, Artificial Sequence
  Synthetic
catgactattcccaauggctagctut

SEQ ID NO: 2460 - DNA, 28 bp, Artificial Sequence
  Synthetic
acctcugauagaaaagaggatgttctua

SEQ ID NO: 2461 - DNA, 28 bp, Artificial Sequence
  Synthetic
tgtctaaaatatugcttgtaccgucaca

SEQ ID NO: 2462 - DNA, 21 bp, Artificial Sequence
  Synthetic
gtgatgccagucttctuggct

SEQ ID NO: 2463 - DNA, 23 bp, Artificial Sequence
  Synthetic
gggtggtagucagtaaacagucc

SEQ ID NO: 2464 - DNA, 31 bp, Artificial Sequence
  Synthetic
aattttgacatagaugactttgatgatgaug

SEQ ID NO: 2465 - DNA, 22 bp, Artificial Sequence
  Synthetic
ctgtcttggcugaggaaaguct

SEQ ID NO: 2466 - DNA, 26 bp, Artificial Sequence
  Synthetic
gaactaatcagcuagaggcgaucaat

SEQ ID NO: 2467 - DNA, 26 bp, Artificial Sequence
  Synthetic
tgatagaaatacugtgtaggtgguct

SEQ ID NO: 2468 - DNA, 28 bp, Artificial Sequence
  Synthetic
tctactcuggagaatctctaugagagga

SEQ ID NO: 2469 - DNA, 22 bp, Artificial Sequence
  Synthetic
ctcgttcacucagtgtgggtut

SEQ ID NO: 2470 - DNA, 25 bp, Artificial Sequence
  Synthetic
ttctcagtacucttggtttctuggc

SEQ ID NO: 2471 - DNA, 22 bp, Artificial Sequence
  Synthetic
aatccacttcugctgcactuca

SEQ ID NO: 2472 - DNA, 33 bp, Artificial Sequence
  Synthetic
ttctatgatatgcuctatttttcccctauaagt

SEQ ID NO: 2473 - DNA, 28 bp, Artificial Sequence
  Synthetic
tcctgcattccgutatattttcacagua

SEQ ID NO: 2474 - DNA, 28 bp, Artificial Sequence
  Synthetic
gactttttagccucttctattugagggt

SEQ ID NO: 2475 - DNA, 27 bp, Artificial Sequence
  Synthetic
tcgtgaauaagcagatcctttuccaaa

SEQ ID NO: 2476 - DNA, 23 bp, Artificial Sequence
  Synthetic
agtgtcucagagggaagagaugg

SEQ ID NO: 2477 - DNA, 24 bp, Artificial Sequence
  Synthetic
tgtgccacguaacaaaggauacat

SEQ ID NO: 2478 - DNA, 23 bp, Artificial Sequence
  Synthetic
gaagacagtuccccagggauaag

SEQ ID NO: 2479 - DNA, 25 bp, Artificial Sequence
  Synthetic
tggcatcttttucctcttccttuca

SEQ ID NO: 2480 - DNA, 28 bp, Artificial Sequence
  Synthetic
ccgaagcctauaaatagaccgtttctua

SEQ ID NO: 2481 - DNA, 30 bp, Artificial Sequence
  Synthetic
caagaataacagcuttatagtcacagaugg

SEQ ID NO: 2482 - DNA, 18 bp, Artificial Sequence
  Synthetic
tgctuctgagcugggcat

SEQ ID NO: 2483 - DNA, 20 bp, Artificial Sequence
  Synthetic
gcuctgacagguaggaccca

SEQ ID NO: 2484 - DNA, 25 bp, Artificial Sequence
  Synthetic
cttcttcauccaagggactttucct

SEQ ID NO: 2485 - DNA, 24 bp, Artificial Sequence
  Synthetic
tcttgccctugattgtcctttuct

SEQ ID NO: 2486 - DNA, 23 bp, Artificial Sequence
  Synthetic
cagtctcuaacacagcccactuc

SEQ ID NO: 2487 - DNA, 20 bp, Artificial Sequence
  Synthetic
ggttttcuccaggcgcauct

SEQ ID NO: 2488 - DNA, 25 bp, Artificial Sequence
  Synthetic
acccaagugcatttctggaaucaat

SEQ ID NO: 2489 - DNA, 19 bp, Artificial Sequence
  Synthetic
ggccgguctggagatgtug

SEQ ID NO: 2490 - DNA, 20 bp, Artificial Sequence
  Synthetic
cacugcaggacacgtauggt

SEQ ID NO: 2491 - DNA, 17 bp, Artificial Sequence
  Synthetic
gccgttcugcccagucc

SEQ ID NO: 2492 - DNA, 19 bp, Artificial Sequence
  Synthetic
tgaccgcgutctgctcauc

SEQ ID NO: 2493 - DNA, 19 bp, Artificial Sequence
  Synthetic
gugaggaggagggugcaac

SEQ ID NO: 2494 - DNA, 19 bp, Artificial Sequence
  Synthetic
cacgcucacgggactcuat

SEQ ID NO: 2495 - DNA, 18 bp, Artificial Sequence
  Synthetic
gcccaggucctcacguct

SEQ ID NO: 2496 - DNA, 17 bp, Artificial Sequence
  Synthetic
ctgccucgguggacagg

SEQ ID NO: 2497 - DNA, 20 bp, Artificial Sequence
  Synthetic
tgtaccacgugcugccaaat

SEQ ID NO: 2498 - DNA, 21 bp, Artificial Sequence
  Synthetic
gagaccaagcuactucaggca

SEQ ID NO: 2499 - DNA, 22 bp, Artificial Sequence
  Synthetic
cctacatgucctcaaccugcat

SEQ ID NO: 2500 - DNA, 22 bp, Artificial Sequence
  Synthetic
augcgctgagugagaacaagat

SEQ ID NO: 2501 - DNA, 19 bp, Artificial Sequence
  Synthetic
aagucagccggacttuggg

SEQ ID NO: 2502 - DNA, 22 bp, Artificial Sequence
  Synthetic
ctctctccuctaacctggcuct

SEQ ID NO: 2503 - DNA, 21 bp, Artificial Sequence
  Synthetic
cacagcugggatcatcucagg

SEQ ID NO: 2504 - DNA, 22 bp, Artificial Sequence
  Synthetic
ggctcctcuaccactttcucca

SEQ ID NO: 2505 - DNA, 19 bp, Artificial Sequence
  Synthetic
aggaggcccucaacacuct

SEQ ID NO: 2506 - DNA, 27 bp, Artificial Sequence
  Synthetic
aatgaatggcaautacctacctgtuct

SEQ ID NO: 2507 - DNA, 24 bp, Artificial Sequence
  Synthetic
cguttgtttttcuggcgaaagagg

SEQ ID NO: 2508 - DNA, 29 bp, Artificial Sequence
  Synthetic
aggttccatguagcagtaaactcatttut

SEQ ID NO: 2509 - DNA, 28 bp, Artificial Sequence
  Synthetic
ggcattttagtucctttagacatgcaut

SEQ ID NO: 2510 - DNA, 23 bp, Artificial Sequence
  Synthetic
ggatgacagccagutacgtaugt

SEQ ID NO: 2511 - DNA, 26 bp, Artificial Sequence
  Synthetic
gcatttataaacaucgaggtgcugga

SEQ ID NO: 2512 - DNA, 29 bp, Artificial Sequence
  Synthetic
ctaggaggacaagugaggtaataguaaca

SEQ ID NO: 2513 - DNA, 27 bp, Artificial Sequence
  Synthetic
gctatccttcucaaaggttttcctgua

SEQ ID NO: 2514 - DNA, 27 bp, Artificial Sequence
  Synthetic
cccggaagaaautaagcatgaagaaut

SEQ ID NO: 2515 - DNA, 21 bp, Artificial Sequence
  Synthetic
aaccacguatcttggcuccac

SEQ ID NO: 2516 - DNA, 26 bp, Artificial Sequence
  Synthetic
agaagtgtugacaatgttttcuccca

SEQ ID NO: 2517 - DNA, 21 bp, Artificial Sequence
  Synthetic
cctgacaaagugcaggacuca

SEQ ID NO: 2518 - DNA, 22 bp, Artificial Sequence
  Synthetic
cctagcaagccuttctctcuca

SEQ ID NO: 2519 - DNA, 23 bp, Artificial Sequence
  Synthetic
gtttcagcucctcaaacaacucc

SEQ ID NO: 2520 - DNA, 27 bp, Artificial Sequence
  Synthetic
agaagucgtaucaaaaggaaaagggaa

SEQ ID NO: 2521 - DNA, 26 bp, Artificial Sequence
  Synthetic
ttctggtccaccguacaatcatuaag

SEQ ID NO: 2522 - DNA, 27 bp, Artificial Sequence
  Synthetic
gccttcauaaccgtagatttgaaugga

SEQ ID NO: 2523 - DNA, 21 bp, Artificial Sequence
  Synthetic
cccgcaaagacaucaaaccug

SEQ ID NO: 2524 - DNA, 18 bp, Artificial Sequence
  Synthetic
gcgaggauggcgaucagg

SEQ ID NO: 2525 - DNA, 21 bp, Artificial Sequence
  Synthetic
tgcccatagugatcagcgaug

SEQ ID NO: 2526 - DNA, 26 bp, Artificial Sequence
  Synthetic
acacactctatutccaagtgcatugt

SEQ ID NO: 2527 - DNA, 22 bp, Artificial Sequence
  Synthetic
ggccattaggguccttgatguc

SEQ ID NO: 2528 - DNA, 22 bp, Artificial Sequence
  Synthetic
ggcttucccagaacctctugac

SEQ ID NO: 2529 - DNA, 21 bp, Artificial Sequence
  Synthetic
gccccaagutacauccacgaa

SEQ ID NO: 2530 - DNA, 22 bp, Artificial Sequence
  Synthetic
tcacccccucctgtgtttcaua

SEQ ID NO: 2531 - DNA, 22 bp, Artificial Sequence
  Synthetic
ccagaugtctgtgucagaagca

SEQ ID NO: 2532 - DNA, 21 bp, Artificial Sequence
  Synthetic
ggtcaggccugggacttctua

SEQ ID NO: 2533 - DNA, 21 bp, Artificial Sequence
  Synthetic
gcagaugaccccacttaugga

SEQ ID NO: 2534 - DNA, 28 bp, Artificial Sequence
  Synthetic
catgaatgtuccctgatttgtcaucaat

SEQ ID NO: 2535 - DNA, 22 bp, Artificial Sequence
  Synthetic
gtaagtgaguttccccacugct

SEQ ID NO: 2536 - DNA, 17 bp, Artificial Sequence
  Synthetic
ggcggucagtcggucag

SEQ ID NO: 2537 - DNA, 17 bp, Artificial Sequence
  Synthetic
ctcacacucgcggcuca

SEQ ID NO: 2538 - DNA, 27 bp, Artificial Sequence
  Synthetic
tgtcttaggtauatttgaaggcuccca

SEQ ID NO: 2539 - DNA, 26 bp, Artificial Sequence
  Synthetic
accatgctcaauaaagcctgatgtua

SEQ ID NO: 2540 - DNA, 25 bp, Artificial Sequence
  Synthetic
gtggtgatgaccucaaacttcgtua

SEQ ID NO: 2541 - DNA, 27 bp, Artificial Sequence
  Synthetic
gtgatgtctatuactgcctaaggtuga

SEQ ID NO: 2542 - DNA, 23 bp, Artificial Sequence
  Synthetic
ccacaagutcgctcttuggagaa

SEQ ID NO: 2543 - DNA, 22 bp, Artificial Sequence
  Synthetic
gtaaucacaccatctgugccca

SEQ ID NO: 2544 - DNA, 24 bp, Artificial Sequence
  Synthetic
ccucagaagauagaagagagacug

SEQ ID NO: 2545 - DNA, 23 bp, Artificial Sequence
  Synthetic
ctccttgguacttctcugccaaa

SEQ ID NO: 2546 - DNA, 26 bp, Artificial Sequence
  Synthetic
attttgatcacgguaaccgaucagaa

SEQ ID NO: 2547 - DNA, 22 bp, Artificial Sequence
  Synthetic
tttgggctuggacaacacttug

SEQ ID NO: 2548 - DNA, 24 bp, Artificial Sequence
  Synthetic
ctacgtauaccctggtggtucaag

SEQ ID NO: 2549 - DNA, 30 bp, Artificial Sequence
  Synthetic
ttctttggaaacccuctaaggagttauaga

SEQ ID NO: 2550 - DNA, 23 bp, Artificial Sequence
  Synthetic
ccttttgagguctctcucaccac

SEQ ID NO: 2551 - DNA, 23 bp, Artificial Sequence
  Synthetic
ctgggcagugtaggatgtgatut

SEQ ID NO: 2552 - DNA, 23 bp, Artificial Sequence
  Synthetic
caagctgccacautttctgtgua

SEQ ID NO: 2553 - DNA, 29 bp, Artificial Sequence
  Synthetic
tctcacagaagaauatagttcgaggtuct

SEQ ID NO: 2554 - DNA, 25 bp, Artificial Sequence
  Synthetic
ccagaauaaagaccaagugaccacc

SEQ ID NO: 2555 - DNA, 21 bp, Artificial Sequence
  Synthetic
tcacttgccagcuggactuac

SEQ ID NO: 2556 - DNA, 22 bp, Artificial Sequence
  Synthetic
gcctgaagugactcguaacgac

SEQ ID NO: 2557 - DNA, 22 bp, Artificial Sequence
  Synthetic
cacaactccucctgagctuaga

SEQ ID NO: 2558 - DNA, 18 bp, Artificial Sequence
  Synthetic
gccacacacguggtgaug

SEQ ID NO: 2559 - DNA, 17 bp, Artificial Sequence
  Synthetic
cctgacuggcccctcug

SEQ ID NO: 2560 - DNA, 17 bp, Artificial Sequence
  Synthetic
ccucccacagctcugct

SEQ ID NO: 2561 - DNA, 18 bp, Artificial Sequence
  Synthetic
cgtggcccaucctgtgug

SEQ ID NO: 2562 - DNA, 20 bp, Artificial Sequence
  Synthetic
gcgcatgugtgctcctguaa

SEQ ID NO: 2563 - DNA, 21 bp, Artificial Sequence
  Synthetic
actaccgccuggaggacauag

SEQ ID NO: 2564 - DNA, 20 bp, Artificial Sequence
  Synthetic
tcatgcugggccaagtacug

SEQ ID NO: 2565 - DNA, 18 bp, Artificial Sequence
  Synthetic
ccctctgcucggaccuga

SEQ ID NO: 2566 - DNA, 18 bp, Artificial Sequence
  Synthetic
gccaaacugctgcagugt

SEQ ID NO: 2567 - DNA, 20 bp, Artificial Sequence
  Synthetic
accaacagccaucaatggug

SEQ ID NO: 2568 - DNA, 19 bp, Artificial Sequence
  Synthetic
tgtgugtggcgugaaggag

SEQ ID NO: 2569 - DNA, 22 bp, Artificial Sequence
  Synthetic
cccaguggacaggaaagcuaag

SEQ ID NO: 2570 - DNA, 25 bp, Artificial Sequence
  Synthetic
aggttcaagtgauggagacatgtut

SEQ ID NO: 2571 - DNA, 21 bp, Artificial Sequence
  Synthetic
aacucttcaugccggaagagg

SEQ ID NO: 2572 - DNA, 21 bp, Artificial Sequence
  Synthetic
ccggtccuttctttgacugga

SEQ ID NO: 2573 - DNA, 19 bp, Artificial Sequence
  Synthetic
gtccugagtggtugcccat

SEQ ID NO: 2574 - DNA, 22 bp, Artificial Sequence
  Synthetic
cacucccactccuacgaaacac

SEQ ID NO: 2575 - DNA, 29 bp, Artificial Sequence
  Synthetic
ttgtatttcuttagttcactucgaagcct

SEQ ID NO: 2576 - DNA, 21 bp, Artificial Sequence
  Synthetic
gcagcugcccaacatccauaa

SEQ ID NO: 2577 - DNA, 21 bp, Artificial Sequence
  Synthetic
cuggcgacaaagaagcttugg

SEQ ID NO: 2578 - DNA, 23 bp, Artificial Sequence
  Synthetic
ccuttcatcagcaucgagagagg

SEQ ID NO: 2579 - DNA, 20 bp, Artificial Sequence
  Synthetic
tcttucaaagcggccctgut

SEQ ID NO: 2580 - DNA, 22 bp, Artificial Sequence
  Synthetic
cagagagcugcgaagtucaaga

SEQ ID NO: 2581 - DNA, 25 bp, Artificial Sequence
  Synthetic
accagtaaagagcugtctcttcuca

SEQ ID NO: 2582 - DNA, 26 bp, Artificial Sequence
  Synthetic
cataaggatgggcuctgacatttuca

SEQ ID NO: 2583 - DNA, 20 bp, Artificial Sequence
  Synthetic
aaccgggcautcttctccuc

SEQ ID NO: 2584 - DNA, 25 bp, Artificial Sequence
  Synthetic
gggatgtccuccatcttttcaauct

SEQ ID NO: 2585 - DNA, 21 bp, Artificial Sequence
  Synthetic
agtgactuaacggtggtugcc

SEQ ID NO: 2586 - DNA, 23 bp, Artificial Sequence
  Synthetic
agagctgcutctttgggaaugag

SEQ ID NO: 2587 - DNA, 21 bp, Artificial Sequence
  Synthetic
gaagcacucagcagtcttgug

SEQ ID NO: 2588 - DNA, 22 bp, Artificial Sequence
  Synthetic
gacaucaccaattucagcagca

SEQ ID NO: 2589 - DNA, 24 bp, Artificial Sequence
  Synthetic
aggactccugcatttctuagagga

SEQ ID NO: 2590 - DNA, 28 bp, Artificial Sequence
  Synthetic
cccaaatctacaaguactttgagacgua

SEQ ID NO: 2591 - DNA, 22 bp, Artificial Sequence
  Synthetic
tgttgguccacttggatugagc

SEQ ID NO: 2592 - DNA, 20 bp, Artificial Sequence
  Synthetic
tgcucatcgcucacaaccaa

SEQ ID NO: 2593 - DNA, 21 bp, Artificial Sequence
  Synthetic
gtggtattgutcagcggguct

SEQ ID NO: 2594 - DNA, 21 bp, Artificial Sequence
  Synthetic
tctcactgccugtctctggut

SEQ ID NO: 2595 - DNA, 22 bp, Artificial Sequence
  Synthetic
tgtatgacaccugcatuccacc

SEQ ID NO: 2596 - DNA, 21 bp, Artificial Sequence
  Synthetic
cccuggtcaccuacaacacag

SEQ ID NO: 2597 - DNA, 22 bp, Artificial Sequence
  Synthetic
acaaaccuccccaccaaaauga

SEQ ID NO: 2598 - DNA, 23 bp, Artificial Sequence
  Synthetic
cagtgccaauatccaggagttug

SEQ ID NO: 2599 - DNA, 23 bp, Artificial Sequence
  Synthetic
tctggatccucaggactctguct

SEQ ID NO: 2600 - DNA, 18 bp, Artificial Sequence
  Synthetic
ggacuggccctcauccac

SEQ ID NO: 2601 - DNA, 20 bp, Artificial Sequence
  Synthetic
acactgggcuccctgtctua

SEQ ID NO: 2602 - DNA, 23 bp, Artificial Sequence
  Synthetic
cccactauaaggaccctccctuc

SEQ ID NO: 2603 - DNA, 22 bp, Artificial Sequence
  Synthetic
gcagaaaagaccgutggacuca

SEQ ID NO: 2604 - DNA, 18 bp, Artificial Sequence
  Synthetic
ggugaagtccucccagcc

SEQ ID NO: 2605 - DNA, 22 bp, Artificial Sequence
  Synthetic
agatccaagcaccutcacctuc

SEQ ID NO: 2606 - DNA, 23 bp, Artificial Sequence
  Synthetic
ggtgacacagcutatgccctaug

SEQ ID NO: 2607 - DNA, 20 bp, Artificial Sequence
  Synthetic
gtttgcuccggagagaccug

SEQ ID NO: 2608 - DNA, 21 bp, Artificial Sequence
  Synthetic
cctgacccugtctctgcctua

SEQ ID NO: 2609 - DNA, 22 bp, Artificial Sequence
  Synthetic
agacatcaauggtgcagauggg

SEQ ID NO: 2610 - DNA, 19 bp, Artificial Sequence
  Synthetic
ccaccaucctgcctcucct

SEQ ID NO: 2611 - DNA, 22 bp, Artificial Sequence
  Synthetic
agatacucctcagcauccacca

SEQ ID NO: 2612 - DNA, 20 bp, Artificial Sequence
  Synthetic
gccctcuacagcgguacagt

SEQ ID NO: 2613 - DNA, 22 bp, Artificial Sequence
  Synthetic
tgcccatcaguctctctgctua

SEQ ID NO: 2614 - DNA, 18 bp, Artificial Sequence
  Synthetic
tctggacgugccagtgug

SEQ ID NO: 2615 - DNA, 19 bp, Artificial Sequence
  Synthetic
caggtucccctggaagugg

SEQ ID NO: 2616 - DNA, 23 bp, Artificial Sequence
  Synthetic
augcaaaaggaccccatauagca

SEQ ID NO: 2617 - DNA, 27 bp, Artificial Sequence
  Synthetic
tttgacactttgaaugctctttcctuc

SEQ ID NO: 2618 - DNA, 22 bp, Artificial Sequence
  Synthetic
aggaaaguggtgcattgaugga

SEQ ID NO: 2619 - DNA, 31 bp, Artificial Sequence
  Synthetic
ctgtatgtaaccugtcttttctatgatcuct

SEQ ID NO: 2620 - DNA, 22 bp, Artificial Sequence
  Synthetic
agctgtcaautctggcttcucc

SEQ ID NO: 2621 - DNA, 22 bp, Artificial Sequence
  Synthetic
tcgtgtuggcaacataccauct

SEQ ID NO: 2622 - DNA, 27 bp, Artificial Sequence
  Synthetic
aaataaagaugtcagauaccacagcat

SEQ ID NO: 2623 - DNA, 24 bp, Artificial Sequence
  Synthetic
ccctauaagccagaauccagaagg

SEQ ID NO: 2624 - DNA, 25 bp, Artificial Sequence
  Synthetic
aagggcagaagagucacttatgaug

SEQ ID NO: 2625 - DNA, 30 bp, Artificial Sequence
  Synthetic
gtatttcattttcutggtgccatttaucgt

SEQ ID NO: 2626 - DNA, 21 bp, Artificial Sequence
  Synthetic
tgtcacucagaccaacuccct

SEQ ID NO: 2627 - DNA, 27 bp, Artificial Sequence
  Synthetic
ggaacaucaccttagugaggaaacaaa

SEQ ID NO: 2628 - DNA, 22 bp, Artificial Sequence
  Synthetic
gctctccttuctggacgcttut

SEQ ID NO: 2629 - DNA, 24 bp, Artificial Sequence
  Synthetic
cctatgggaaguagtcatgcauct

SEQ ID NO: 2630 - DNA, 25 bp, Artificial Sequence
  Synthetic
tgcttgagcuggcttcttuaaaaac

SEQ ID NO: 2631 - DNA, 27 bp, Artificial Sequence
  Synthetic
tgctagaggaaaacuttgaggaacaut

SEQ ID NO: 2632 - DNA, 31 bp, Artificial Sequence
  Synthetic
gactcattctttccutgattttcttccttut

SEQ ID NO: 2633 - DNA, 21 bp, Artificial Sequence
  Synthetic
caaggttucaaagcgccaguc

SEQ ID NO: 2634 - DNA, 29 bp, Artificial Sequence
  Synthetic
actgctactctcuacagatctttcagtut

SEQ ID NO: 2635 - DNA, 30 bp, Artificial Sequence
  Synthetic
gtgaacttaaagaauttgtcaatccuagcc

SEQ ID NO: 2636 - DNA, 25 bp, Artificial Sequence
  Synthetic
ctacugactactagtucaagcgcat

SEQ ID NO: 2637 - DNA, 29 bp, Artificial Sequence
  Synthetic
tcactcgaaaaagaauctgcttucaaaac

SEQ ID NO: 2638 - DNA, 24 bp, Artificial Sequence
  Synthetic
gtggctcaguaacaaatgctccua

SEQ ID NO: 2639 - DNA, 32 bp, Artificial Sequence
  Synthetic
gaggctttaatatguaaaagtgaaagagtuca

SEQ ID NO: 2640 - DNA, 28 bp, Artificial Sequence
  Synthetic
ggcagtttctgcutattccattctttuc

SEQ ID NO: 2641 - DNA, 24 bp, Artificial Sequence
  Synthetic
gctuagcaaggagccaacauaaca

SEQ ID NO: 2642 - DNA, 28 bp, Artificial Sequence
  Synthetic
agtactgtatcuacccactctctttuca

SEQ ID NO: 2643 - DNA, 29 bp, Artificial Sequence
  Synthetic
gtttcttatuaggactctgtctttuccct

SEQ ID NO: 2644 - DNA, 28 bp, Artificial Sequence
  Synthetic
gcccatacttuggatgatagaaactuca

SEQ ID NO: 2645 - DNA, 30 bp, Artificial Sequence
  Synthetic
ttttctctaacugcaaacataatgtttucc

SEQ ID NO: 2646 - DNA, 28 bp, Artificial Sequence
  Synthetic
tgcataggagauaatcataggaauccca

SEQ ID NO: 2647 - DNA, 24 bp, Artificial Sequence
  Synthetic
gatttatctgcucttcgcgtugaa

SEQ ID NO: 2648 - DNA, 18 bp, Artificial Sequence
  Synthetic
agccagcuctgggaggua

SEQ ID NO: 2649 - DNA, 21 bp, Artificial Sequence
  Synthetic
gccctcttcuctttggcctuc

SEQ ID NO: 2650 - DNA, 23 bp, Artificial Sequence
  Synthetic
catttgutgggtcauccagcaag

SEQ ID NO: 2651 - DNA, 21 bp, Artificial Sequence
  Synthetic
ccccacaccucctatttucgt

SEQ ID NO: 2652 - DNA, 18 bp, Artificial Sequence
  Synthetic
ctggcccgccugttcaua

SEQ ID NO: 2653 - DNA, 19 bp, Artificial Sequence
  Synthetic
agcagccccuggacattug

SEQ ID NO: 2654 - DNA, 20 bp, Artificial Sequence
  Synthetic
ctaccctucaccagguccag

SEQ ID NO: 2655 - DNA, 21 bp, Artificial Sequence
  Synthetic
ccccacaguagcttuccacag

SEQ ID NO: 2656 - DNA, 22 bp, Artificial Sequence
  Synthetic
gcggtttgtcuctcttgctcut

SEQ ID NO: 2657 - DNA, 19 bp, Artificial Sequence
  Synthetic
agacuaagcgccucagggt

SEQ ID NO: 2658 - DNA, 23 bp, Artificial Sequence
  Synthetic
gggauggagggagttuacaggaa

SEQ ID NO: 2659 - DNA, 27 bp, Artificial Sequence
  Synthetic
gattgaauacaaaaccaucaagaccuc

SEQ ID NO: 2660 - DNA, 22 bp, Artificial Sequence
  Synthetic
agtggtaggugatgttcuggga

SEQ ID NO: 2661 - DNA, 22 bp, Artificial Sequence
  Synthetic
aggactagaggutcccgcauag

SEQ ID NO: 2662 - DNA, 19 bp, Artificial Sequence
  Synthetic
tggcauggcaggaguagga

SEQ ID NO: 2663 - DNA, 19 bp, Artificial Sequence
  Synthetic
cacccucaagagccugagc

SEQ ID NO: 2664 - DNA, 23 bp, Artificial Sequence
  Synthetic
acauacaacaggaccagcaucac

SEQ ID NO: 2665 - DNA, 22 bp, Artificial Sequence
  Synthetic
cttcuggcagcctttcucaaac

SEQ ID NO: 2666 - DNA, 22 bp, Artificial Sequence
  Synthetic
gcactgtcugcatctguagagt

SEQ ID NO: 2667 - DNA, 22 bp, Artificial Sequence
  Synthetic
caagagctcaugctttcctugc

SEQ ID NO: 2668 - DNA, 21 bp, Artificial Sequence
  Synthetic
cactccaagucctgtgauggt

SEQ ID NO: 2669 - DNA, 21 bp, Artificial Sequence
  Synthetic
gcctcaagguattgcuggaca

SEQ ID NO: 2670 - DNA, 21 bp, Artificial Sequence
  Synthetic
cccaaccuagagcaguggact

SEQ ID NO: 2671 - DNA, 24 bp, Artificial Sequence
  Synthetic
gttctccctcugactgttcctaug

SEQ ID NO: 2672 - DNA, 21 bp, Artificial Sequence
  Synthetic
ggtcccagucggtgaugaaaa

SEQ ID NO: 2673 - DNA, 22 bp, Artificial Sequence
  Synthetic
cgcatctcuccaatctgacucc

SEQ ID NO: 2674 - DNA, 24 bp, Artificial Sequence
  Synthetic
aaggagagaugctgagagatucaa

SEQ ID NO: 2675 - DNA, 21 bp, Artificial Sequence
  Synthetic
cttcagggaaugcctggugaa

SEQ ID NO: 2676 - DNA, 20 bp, Artificial Sequence
  Synthetic
ccctctggautccctgcauc

SEQ ID NO: 2677 - DNA, 26 bp, Artificial Sequence
  Synthetic
gattctaaacctuccctcccttctuc

SEQ ID NO: 2678 - DNA, 22 bp, Artificial Sequence
  Synthetic
ggctcttcauggatcctcacut

SEQ ID NO: 2679 - DNA, 22 bp, Artificial Sequence
  Synthetic
ctttcgtgccucccatcctuag

SEQ ID NO: 2680 - DNA, 21 bp, Artificial Sequence
  Synthetic
cgcaaggagaggutacctugg

SEQ ID NO: 2681 - DNA, 17 bp, Artificial Sequence
  Synthetic
tcccgcuccacccucat

SEQ ID NO: 2682 - DNA, 23 bp, Artificial Sequence
  Synthetic
cagaagggagaguttggtacuca

SEQ ID NO: 2683 - DNA, 20 bp, Artificial Sequence
  Synthetic
tttcccuctgctccuaggct

SEQ ID NO: 2684 - DNA, 19 bp, Artificial Sequence
  Synthetic
cucccattgucagccccaa

SEQ ID NO: 2685 - DNA, 21 bp, Artificial Sequence
  Synthetic
agtgcucagtggactuaacgg

SEQ ID NO: 2686 - DNA, 23 bp, Artificial Sequence
  Synthetic
gggagcutaaatgacucaaaggt

SEQ ID NO: 2687 - DNA, 23 bp, Artificial Sequence
  Synthetic
tgatgtgttcuaatggccctucc

SEQ ID NO: 2688 - DNA, 23 bp, Artificial Sequence
  Synthetic
catcccagucttcccuccaaaag

SEQ ID NO: 2689 - DNA, 24 bp, Artificial Sequence
  Synthetic
tttcctacagagggaucaccauga

SEQ ID NO: 2690 - DNA, 23 bp, Artificial Sequence
  Synthetic
ccaggtuagagaagggaggacug

SEQ ID NO: 2691 - DNA, 22 bp, Artificial Sequence
  Synthetic
ggagcagcautagcaaacctug

SEQ ID NO: 2692 - DNA, 21 bp, Artificial Sequence
  Synthetic
ggagguccacaaagcugaaca

SEQ ID NO: 2693 - DNA, 20 bp, Artificial Sequence
  Synthetic
gcagacgggaguttctccuc

SEQ ID NO: 2694 - DNA, 24 bp, Artificial Sequence
  Synthetic
ggcccagguggtaatcattgauat

SEQ ID NO: 2695 - DNA, 28 bp, Artificial Sequence
  Synthetic
ggaagagtttuaaggaaaacccacatuc

SEQ ID NO: 2696 - DNA, 28 bp, Artificial Sequence
  Synthetic
tgggtctucaaacgttattctcttugat

SEQ ID NO: 2697 - DNA, 27 bp, Artificial Sequence
  Synthetic
tctgcatttccutccatcttaaacugt

SEQ ID NO: 2698 - DNA, 29 bp, Artificial Sequence
  Synthetic
gcatctacaugaatagaatcaguggagaa

SEQ ID NO: 2699 - DNA, 22 bp, Artificial Sequence
  Synthetic
ggacaggatugttcccaacuca

SEQ ID NO: 2700 - DNA, 27 bp, Artificial Sequence
  Synthetic
cactttcgaagagcguttaacattuct

SEQ ID NO: 2701 - DNA, 24 bp, Artificial Sequence
  Synthetic
attcgtattugttgagctguccct

SEQ ID NO: 2702 - DNA, 28 bp, Artificial Sequence
  Synthetic
cuataaaattgaaactuaggagcagcgt

SEQ ID NO: 2703 - DNA, 22 bp, Artificial Sequence
  Synthetic
aacattugggcaaactgctguc

SEQ ID NO: 2704 - DNA, 21 bp, Artificial Sequence
  Synthetic
tgtgaaaaggcuggcctacug

SEQ ID NO: 2705 - DNA, 26 bp, Artificial Sequence
  Synthetic
accacaaacacautttcagtguacct

SEQ ID NO: 2706 - DNA, 27 bp, Artificial Sequence
  Synthetic
tcattctcaaaagugtgcctatgctua

SEQ ID NO: 2707 - DNA, 26 bp, Artificial Sequence
  Synthetic
ctacttctttgauttgcccagtctug

SEQ ID NO: 2708 - DNA, 30 bp, Artificial Sequence
  Synthetic
attacttgatgtugactgttctgaagaugt

SEQ ID NO: 2709 - DNA, 28 bp, Artificial Sequence
  Synthetic
ccctgttaaaatgguactacacctgtut

SEQ ID NO: 2710 - DNA, 23 bp, Artificial Sequence
  Synthetic
ctaaugagaggccaactuacgct

SEQ ID NO: 2711 - DNA, 24 bp, Artificial Sequence
  Synthetic
gagttcatuaggaaggtcugcagt

SEQ ID NO: 2712 - DNA, 24 bp, Artificial Sequence
  Synthetic
ccatcagcaaugagctgttugaag

SEQ ID NO: 2713 - DNA, 21 bp, Artificial Sequence
  Synthetic
ctcuattgccguagcaaccaa

SEQ ID NO: 2714 - DNA, 30 bp, Artificial Sequence
  Synthetic
ttgggtgaaagauaaactaggatgttagug

SEQ ID NO: 2715 - DNA, 26 bp, Artificial Sequence
  Synthetic
ttttagccagugcgaatatcagtuct

SEQ ID NO: 2716 - DNA, 23 bp, Artificial Sequence
  Synthetic
atgggaaagaautccgtctugct

SEQ ID NO: 2717 - DNA, 29 bp, Artificial Sequence
  Synthetic
cctgaacaagagaaaugtgcagtuaaaga

SEQ ID NO: 2718 - DNA, 29 bp, Artificial Sequence
  Synthetic
cagaactggtguttttgtatgacaaguat

SEQ ID NO: 2719 - DNA, 28 bp, Artificial Sequence
  Synthetic
gagctttctccutctgaatcctttauct

SEQ ID NO: 2720 - DNA, 25 bp, Artificial Sequence
  Synthetic
gttaaacagcuaccactggugaaac

SEQ ID NO: 2721 - DNA, 27 bp, Artificial Sequence
  Synthetic
gtgcaagaaucaaaaggttttaccuga

SEQ ID NO: 2722 - DNA, 27 bp, Artificial Sequence
  Synthetic
gcttgtctgttuacctgttacgatcut

SEQ ID NO: 2723 - DNA, 28 bp, Artificial Sequence
  Synthetic
catgcaaggaaacuagttctgaauacac

SEQ ID NO: 2724 - DNA, 21 bp, Artificial Sequence
  Synthetic
agutgatgcugacagcaggac

SEQ ID NO: 2725 - DNA, 21 bp, Artificial Sequence
  Synthetic
gtgactacaggaucagcgcut

SEQ ID NO: 2726 - DNA, 31 bp, Artificial Sequence
  Synthetic
cagttccagttcauttatccaagttgtttut

SEQ ID NO: 2727 - DNA, 28 bp, Artificial Sequence
  Synthetic
aaaagaagtagatucagccagagaagug

SEQ ID NO: 2728 - DNA, 32 bp, Artificial Sequence
  Synthetic
ctatttgaagtggacugtttatcttctucact

SEQ ID NO: 2729 - DNA, 22 bp, Artificial Sequence
  Synthetic
tcgtttggaucatgcccucaat

SEQ ID NO: 2730 - DNA, 22 bp, Artificial Sequence
  Synthetic
ggcttguggatctggaaaucac

SEQ ID NO: 2731 - DNA, 33 bp, Artificial Sequence
  Synthetic
attattttaaccuagcaattatgttagcuagga

SEQ ID NO: 2732 - DNA, 25 bp, Artificial Sequence
  Synthetic
ctttcaaaggutgaatggtgcugaa

SEQ ID NO: 2733 - DNA, 27 bp, Artificial Sequence
  Synthetic
aaaagcaagtguattaccttagcaugt

SEQ ID NO: 2734 - DNA, 26 bp, Artificial Sequence
  Synthetic
tcaccgaccaugaaataattuccagt

SEQ ID NO: 2735 - DNA, 27 bp, Artificial Sequence
  Synthetic
tttatggcataauctggagttggugaa

SEQ ID NO: 2736 - DNA, 26 bp, Artificial Sequence
  Synthetic
ctcccactucatcttggaacucaaat

SEQ ID NO: 2737 - DNA, 28 bp, Artificial Sequence
  Synthetic
ctaatttccatgccuttttcaggcauaa

SEQ ID NO: 2738 - DNA, 26 bp, Artificial Sequence
  Synthetic
cagttttctgucgtgaacgtttctua

SEQ ID NO: 2739 - DNA, 32 bp, Artificial Sequence
  Synthetic
gttttaaaagtttugccacttaattagcacut

SEQ ID NO: 2740 - DNA, 32 bp, Artificial Sequence
  Synthetic
ttccactccatattutacaagctgattcauaa

SEQ ID NO: 2741 - DNA, 28 bp, Artificial Sequence
  Synthetic
acagatcaacgcaugacaataatgauga

SEQ ID NO: 2742 - DNA, 28 bp, Artificial Sequence
  Synthetic
gtagggacaaaauatgatgtcagcauct

SEQ ID NO: 2743 - DNA, 30 bp, Artificial Sequence
  Synthetic
ggagttcauaaaattagtgaucagcacaca

SEQ ID NO: 2744 - DNA, 32 bp, Artificial Sequence
  Synthetic
gatttccctgtatgauccttcttaatggtaut

SEQ ID NO: 2745 - DNA, 28 bp, Artificial Sequence
  Synthetic
tgattccatgugaggtttgataacgtut

SEQ ID NO: 2746 - DNA, 28 bp, Artificial Sequence
  Synthetic
gggtcgaattcutttcttctctactuga

SEQ ID NO: 2747 - DNA, 29 bp, Artificial Sequence
  Synthetic
tgcctacctguaagttatttatgctgtut

SEQ ID NO: 2748 - DNA, 25 bp, Artificial Sequence
  Synthetic
taaggctaagcuttttccactucct

SEQ ID NO: 2749 - DNA, 30 bp, Artificial Sequence
  Synthetic
tgttctatutaaacttcagauggagagaga

SEQ ID NO: 2750 - DNA, 20 bp, Artificial Sequence
  Synthetic
tggagacccugcataugcct

SEQ ID NO: 2751 - DNA, 21 bp, Artificial Sequence
  Synthetic
catgauccagacgctgcugat

SEQ ID NO: 2752 - DNA, 23 bp, Artificial Sequence
  Synthetic
gattcgttcugggactctuccat

SEQ ID NO: 2753 - DNA, 22 bp, Artificial Sequence
  Synthetic
cccacguttcauagccaggaaa

SEQ ID NO: 2754 - DNA, 22 bp, Artificial Sequence
  Synthetic
gutctgtaccugagagcagcag

SEQ ID NO: 2755 - DNA, 17 bp, Artificial Sequence
  Synthetic
tgcagccggugcagtua

SEQ ID NO: 2756 - DNA, 26 bp, Artificial Sequence
  Synthetic
cttccgtattgcugagtgctatcaua

SEQ ID NO: 2757 - DNA, 23 bp, Artificial Sequence
  Synthetic
gaatggtguttacagtgcugcaa

SEQ ID NO: 2758 - DNA, 27 bp, Artificial Sequence
  Synthetic
gtcgctcacutgctttatgttatuagg

SEQ ID NO: 2759 - DNA, 21 bp, Artificial Sequence
  Synthetic
ccacacugcaacacctuacag

SEQ ID NO: 2760 - DNA, 22 bp, Artificial Sequence
  Synthetic
aaaatccacugctcgtgaucca

SEQ ID NO: 2761 - DNA, 30 bp, Artificial Sequence
  Synthetic
atgagtgagaaggagaauaaaaccattgut

SEQ ID NO: 2762 - DNA, 27 bp, Artificial Sequence
  Synthetic
tcttcagcaagcugtcttacttcttut

SEQ ID NO: 2763 - DNA, 29 bp, Artificial Sequence
  Synthetic
gtgatcaaactgaautgtgttttcacuct

SEQ ID NO: 2764 - DNA, 30 bp, Artificial Sequence
  Synthetic
caatacctaggauatttagcaccaaugaca

SEQ ID NO: 2765 - DNA, 23 bp, Artificial Sequence
  Synthetic
ttgtagagcaugtcgctugaagt

SEQ ID NO: 2766 - DNA, 23 bp, Artificial Sequence
  Synthetic
ctgagcttgaauagcagtgggut

SEQ ID NO: 2767 - DNA, 25 bp, Artificial Sequence
  Synthetic
gtgctactttucagttctaccuacc

SEQ ID NO: 2768 - DNA, 18 bp, Artificial Sequence
  Synthetic
agctcggcucccaaacuc

SEQ ID NO: 2769 - DNA, 19 bp, Artificial Sequence
  Synthetic
gccattuccagcgactugt

SEQ ID NO: 2770 - DNA, 22 bp, Artificial Sequence
  Synthetic
ctcccagauctccucaaacacc

SEQ ID NO: 2771 - DNA, 24 bp, Artificial Sequence
  Synthetic
tcctccatgutggtatgctttuct

SEQ ID NO: 2772 - DNA, 22 bp, Artificial Sequence
  Synthetic
gcttggatuggagaagggtgug

SEQ ID NO: 2773 - DNA, 28 bp, Artificial Sequence
  Synthetic
aggccaaataguaattttctgtctgcut

SEQ ID NO: 2774 - DNA, 25 bp, Artificial Sequence
  Synthetic
caaaaacagccautcccacaauacc

SEQ ID NO: 2775 - DNA, 19 bp, Artificial Sequence
  Synthetic
gagacaggucgcaggaugt

SEQ ID NO: 2776 - DNA, 28 bp, Artificial Sequence
  Synthetic
cttttgcattucgagtagcagtaauact

SEQ ID NO: 2777 - DNA, 20 bp, Artificial Sequence
  Synthetic
ggcaaaggcuttgugaccaa

SEQ ID NO: 2778 - DNA, 20 bp, Artificial Sequence
  Synthetic
ggtctugaggacccuggaca

SEQ ID NO: 2779 - DNA, 22 bp, Artificial Sequence
  Synthetic
ccttctgacgucttcccttuca

SEQ ID NO: 2780 - DNA, 23 bp, Artificial Sequence
  Synthetic
gatgacagacgautctggcuaag

SEQ ID NO: 2781 - DNA, 23 bp, Artificial Sequence
  Synthetic
ccaacgacagugagatauccagt

SEQ ID NO: 2782 - DNA, 25 bp, Artificial Sequence
  Synthetic
cccactccucacatattcgagguat

SEQ ID NO: 2783 - DNA, 21 bp, Artificial Sequence
  Synthetic
agauggcaucaagaagcagca

SEQ ID NO: 2784 - DNA, 20 bp, Artificial Sequence
  Synthetic
ccccaacccaucttcgtucc

SEQ ID NO: 2785 - DNA, 18 bp, Artificial Sequence
  Synthetic
agcttccgugaggaugcc

SEQ ID NO: 2786 - DNA, 29 bp, Artificial Sequence
  Synthetic
cagtgtttccgutttgagttaaaugaact

SEQ ID NO: 2787 - DNA, 21 bp, Artificial Sequence
  Synthetic
accgacgaccagaucattgug

SEQ ID NO: 2788 - DNA, 19 bp, Artificial Sequence
  Synthetic
gctguggaagccacacugt

SEQ ID NO: 2789 - DNA, 21 bp, Artificial Sequence
  Synthetic
tgaugtggugaacgagaaccc

SEQ ID NO: 2790 - DNA, 20 bp, Artificial Sequence
  Synthetic
accttguccccactgtcuga

SEQ ID NO: 2791 - DNA, 21 bp, Artificial Sequence
  Synthetic
acaatgacaccuacccccugt

SEQ ID NO: 2792 - DNA, 19 bp, Artificial Sequence
  Synthetic
attccgggugcucagacag

SEQ ID NO: 2793 - DNA, 22 bp, Artificial Sequence
  Synthetic
cttctggaaaagucagccucca

SEQ ID NO: 2794 - DNA, 24 bp, Artificial Sequence
  Synthetic
tttcttaaacagccugcagcttug

SEQ ID NO: 2795 - DNA, 20 bp, Artificial Sequence
  Synthetic
cctatcugggccacaaguga

SEQ ID NO: 2796 - DNA, 22 bp, Artificial Sequence
  Synthetic
gattttattucgccggcuccac

SEQ ID NO: 2797 - DNA, 21 bp, Artificial Sequence
  Synthetic
ggauccaggauaacggaggct

SEQ ID NO: 2798 - DNA, 17 bp, Artificial Sequence
  Synthetic
gcggagggucaggugga

SEQ ID NO: 2799 - DNA, 19 bp, Artificial Sequence
  Synthetic
cgggcaucttctccuccca

SEQ ID NO: 2800 - DNA, 31 bp, Artificial Sequence
  Synthetic
agagaaagaagaggagutataatccagcuat

SEQ ID NO: 2801 - DNA, 27 bp, Artificial Sequence
  Synthetic
gcctcaugaaataaagauccgaaagga

SEQ ID NO: 2802 - DNA, 17 bp, Artificial Sequence
  Synthetic
gccgctgaucccaccuc

SEQ ID NO: 2803 - DNA, 27 bp, Artificial Sequence
  Synthetic
accattgacaugaatttccagagugat

SEQ ID NO: 2804 - DNA, 17 bp, Artificial Sequence
  Synthetic
ggagctcugggcctgug

SEQ ID NO: 2805 - DNA, 17 bp, Artificial Sequence
  Synthetic
acgaggaugcgcuggag

SEQ ID NO: 2806 - DNA, 23 bp, Artificial Sequence
  Synthetic
ggctcctgtutctgtttgtccut

SEQ ID NO: 2807 - DNA, 19 bp, Artificial Sequence
  Synthetic
gcccaccggcugtttaugt

SEQ ID NO: 2808 - DNA, 22 bp, Artificial Sequence
  Synthetic
gctctggaacugtgacatcugg

SEQ ID NO: 2809 - DNA, 21 bp, Artificial Sequence
  Synthetic
cacgutttcctucccgacaat

SEQ ID NO: 2810 - DNA, 18 bp, Artificial Sequence
  Synthetic
ggacugcacctucacgga

SEQ ID NO: 2811 - DNA, 18 bp, Artificial Sequence
  Synthetic
ccccaagugctgcuggag

SEQ ID NO: 2812 - DNA, 18 bp, Artificial Sequence
  Synthetic
tggagugctgtgcucagg

SEQ ID NO: 2813 - DNA, 18 bp, Artificial Sequence
  Synthetic
cgcccccacccutcatug

SEQ ID NO: 2814 - DNA, 24 bp, Artificial Sequence
  Synthetic
ggagggaaaagutactcugagggt

SEQ ID NO: 2815 - DNA, 23 bp, Artificial Sequence
  Synthetic
cccgacgagautgaaatcgacut

SEQ ID NO: 2816 - DNA, 18 bp, Artificial Sequence
  Synthetic
tgctgucgctggaugagg

SEQ ID NO: 2817 - DNA, 18 bp, Artificial Sequence
  Synthetic
agccgucacagcatguct

SEQ ID NO: 2818 - DNA, 19 bp, Artificial Sequence
  Synthetic
tguagaagggccaggcgua

SEQ ID NO: 2819 - DNA, 20 bp, Artificial Sequence
  Synthetic
cggccugtgaaaccuccaaa

SEQ ID NO: 2820 - DNA, 18 bp, Artificial Sequence
  Synthetic
tgggtggguggctctgua

SEQ ID NO: 2821 - DNA, 19 bp, Artificial Sequence
  Synthetic
ggaccucatcguccagacc

SEQ ID NO: 2822 - DNA, 27 bp, Artificial Sequence
  Synthetic
actatcatgatcucggtttcttctgug

SEQ ID NO: 2823 - DNA, 21 bp, Artificial Sequence
  Synthetic
cctctgacuctacccctgugt

SEQ ID NO: 2824 - DNA, 21 bp, Artificial Sequence
  Synthetic
cagttggtuggtctgcctcut

SEQ ID NO: 2825 - DNA, 24 bp, Artificial Sequence
  Synthetic
gacgagautgagaaatcugccagt

SEQ ID NO: 2826 - DNA, 19 bp, Artificial Sequence
  Synthetic
agctcccauggctcactug

SEQ ID NO: 2827 - DNA, 25 bp, Artificial Sequence
  Synthetic
accactcaattugggtttcctguag

SEQ ID NO: 2828 - DNA, 19 bp, Artificial Sequence
  Synthetic
agtagucaggcgtcuccga

SEQ ID NO: 2829 - DNA, 26 bp, Artificial Sequence
  Synthetic
gcaaagtguacagttttcatgcaugt

SEQ ID NO: 2830 - DNA, 17 bp, Artificial Sequence
  Synthetic
gagcugagggtguccgt

SEQ ID NO: 2831 - DNA, 19 bp, Artificial Sequence
  Synthetic
tcaucgacccccuagccaa

SEQ ID NO: 2832 - DNA, 20 bp, Artificial Sequence
  Synthetic
tctgcggagaccacugguaa

SEQ ID NO: 2833 - DNA, 18 bp, Artificial Sequence
  Synthetic
ctggcacuacggcccuac

SEQ ID NO: 2834 - DNA, 20 bp, Artificial Sequence
  Synthetic
ttctgguaggagtcgucggt

SEQ ID NO: 2835 - DNA, 20 bp, Artificial Sequence
  Synthetic
cggatccuccctgcattguc

SEQ ID NO: 2836 - DNA, 17 bp, Artificial Sequence
  Synthetic
ccggacgutccccacug

SEQ ID NO: 2837 - DNA, 17 bp, Artificial Sequence
  Synthetic
agctacgggcugtcgug

SEQ ID NO: 2838 - DNA, 18 bp, Artificial Sequence
  Synthetic
gcagtugcccatggccut

SEQ ID NO: 2839 - DNA, 17 bp, Artificial Sequence
  Synthetic
ggtgcuggagcugacca

SEQ ID NO: 2840 - DNA, 18 bp, Artificial Sequence
  Synthetic
agugcgcgatcuggaact

SEQ ID NO: 2841 - DNA, 18 bp, Artificial Sequence
  Synthetic
gccgcuggtgaucaagca

SEQ ID NO: 2842 - DNA, 19 bp, Artificial Sequence
  Synthetic
gggccugaagaagaacugg

SEQ ID NO: 2843 - DNA, 17 bp, Artificial Sequence
  Synthetic
ccagcauccgcgaguga

SEQ ID NO: 2844 - DNA, 17 bp, Artificial Sequence
  Synthetic
tcccugagggtccugct

SEQ ID NO: 2845 - DNA, 19 bp, Artificial Sequence
  Synthetic
gtctcugcacaggctuggt

SEQ ID NO: 2846 - DNA, 23 bp, Artificial Sequence
  Synthetic
gtcccacagaaggutttcauggt

SEQ ID NO: 2847 - DNA, 20 bp, Artificial Sequence
  Synthetic
gcatgcaccugagatccgut

SEQ ID NO: 2848 - DNA, 25 bp, Artificial Sequence
  Synthetic
tgtaccagaagautagggctctcuc

SEQ ID NO: 2849 - DNA, 18 bp, Artificial Sequence
  Synthetic
ctcacccgcaguctguct

SEQ ID NO: 2850 - DNA, 21 bp, Artificial Sequence
  Synthetic
gccacacutgtagtccauggg

SEQ ID NO: 2851 - DNA, 20 bp, Artificial Sequence
  Synthetic
gcactcagcugttcgacuct

SEQ ID NO: 2852 - DNA, 23 bp, Artificial Sequence
  Synthetic
gcctctccutgtacccaaugaag

SEQ ID NO: 2853 - DNA, 22 bp, Artificial Sequence
  Synthetic
cctgggacaucactcaacctug

SEQ ID NO: 2854 - DNA, 24 bp, Artificial Sequence
  Synthetic
gcaacucaaacuaaccaacccact

SEQ ID NO: 2855 - DNA, 19 bp, Artificial Sequence
  Synthetic
cctgcccuttggccacaua

SEQ ID NO: 2856 - DNA, 22 bp, Artificial Sequence
  Synthetic
gaatgugaacaagagccauggg

SEQ ID NO: 2857 - DNA, 24 bp, Artificial Sequence
  Synthetic
ccccacutcaaagauaaaccgagt

SEQ ID NO: 2858 - DNA, 20 bp, Artificial Sequence
  Synthetic
ctgatgtucgctgcctcaut

SEQ ID NO: 2859 - DNA, 19 bp, Artificial Sequence
  Synthetic
ggtgucacggcttcuccag

SEQ ID NO: 2860 - DNA, 20 bp, Artificial Sequence
  Synthetic
ccttaguccccttccuggca

SEQ ID NO: 2861 - DNA, 18 bp, Artificial Sequence
  Synthetic
gctccuaggccaccugga

SEQ ID NO: 2862 - DNA, 20 bp, Artificial Sequence
  Synthetic
gagacauggccctcactguc

SEQ ID NO: 2863 - DNA, 22 bp, Artificial Sequence
  Synthetic
gcgtccauccttcucagaagat

SEQ ID NO: 2864 - DNA, 19 bp, Artificial Sequence
  Synthetic
ggtgggugagtgaagggut

SEQ ID NO: 2865 - DNA, 19 bp, Artificial Sequence
  Synthetic
gtctccttgugccctccug

SEQ ID NO: 2866 - DNA, 21 bp, Artificial Sequence
  Synthetic
agaacggcuacacacagtugg

SEQ ID NO: 2867 - DNA, 17 bp, Artificial Sequence
  Synthetic
ccugcccacccccacua

SEQ ID NO: 2868 - DNA, 20 bp, Artificial Sequence
  Synthetic
ccccatacugttcccuccac

SEQ ID NO: 2869 - DNA, 18 bp, Artificial Sequence
  Synthetic
gaugggacagcaccguga

SEQ ID NO: 2870 - DNA, 19 bp, Artificial Sequence
  Synthetic
ccggtucctcccaauggat

SEQ ID NO: 2871 - DNA, 22 bp, Artificial Sequence
  Synthetic
cctcttgcucctccttgttugg

SEQ ID NO: 2872 - DNA, 21 bp, Artificial Sequence
  Synthetic
gctgggtgucagcttagtgua

SEQ ID NO: 2873 - DNA, 23 bp, Artificial Sequence
  Synthetic
caccagtaggutagtgacagugg

SEQ ID NO: 2874 - DNA, 24 bp, Artificial Sequence
  Synthetic
aatcacccagguacagtacaucct

SEQ ID NO: 2875 - DNA, 20 bp, Artificial Sequence
  Synthetic
acttugccgttgguggaagt

SEQ ID NO: 2876 - DNA, 20 bp, Artificial Sequence
  Synthetic
cctatgggugcccttcucca

SEQ ID NO: 2877 - DNA, 23 bp, Artificial Sequence
  Synthetic
agtatgggcucagctgcaatuac

SEQ ID NO: 2878 - DNA, 19 bp, Artificial Sequence
  Synthetic
cgggcccuaacttggtcuc

SEQ ID NO: 2879 - DNA, 21 bp, Artificial Sequence
  Synthetic
gggcugccagagtaaaaugct

SEQ ID NO: 2880 - DNA, 18 bp, Artificial Sequence
  Synthetic
cagccaucgccagcatuc

SEQ ID NO: 2881 - DNA, 20 bp, Artificial Sequence
  Synthetic
gccccucaagctcagacuct

SEQ ID NO: 2882 - DNA, 18 bp, Artificial Sequence
  Synthetic
cagctguagcccctggug

SEQ ID NO: 2883 - DNA, 24 bp, Artificial Sequence
  Synthetic
cttgtccacagagucaaaggtcut

SEQ ID NO: 2884 - DNA, 22 bp, Artificial Sequence
  Synthetic
gcactgaguctgcttctgttug

SEQ ID NO: 2885 - DNA, 24 bp, Artificial Sequence
  Synthetic
cctgtacggucaaaggtgaagaug

SEQ ID NO: 2886 - DNA, 21 bp, Artificial Sequence
  Synthetic
ggtcacucgggtgggactuat

SEQ ID NO: 2887 - DNA, 22 bp, Artificial Sequence
  Synthetic
caacugcagacaaacctuggag

SEQ ID NO: 2888 - DNA, 22 bp, Artificial Sequence
  Synthetic
tgtcccttcuctgtcctccaut

SEQ ID NO: 2889 - DNA, 21 bp, Artificial Sequence
  Synthetic
cauggcgatgucagcagaaag

SEQ ID NO: 2890 - DNA, 18 bp, Artificial Sequence
  Synthetic
ctcctggugacagcuggt

SEQ ID NO: 2891 - DNA, 20 bp, Artificial Sequence
  Synthetic
tcataatugcgggccuccag

SEQ ID NO: 2892 - DNA, 20 bp, Artificial Sequence
  Synthetic
gctctatggucacgcccauc

SEQ ID NO: 2893 - DNA, 21 bp, Artificial Sequence
  Synthetic
ggaggtugggaacggtttcuc

SEQ ID NO: 2894 - DNA, 18 bp, Artificial Sequence
  Synthetic
ccccuccccggttctcua

SEQ ID NO: 2895 - DNA, 18 bp, Artificial Sequence
  Synthetic
gggcctcutcccactguc

SEQ ID NO: 2896 - DNA, 19 bp, Artificial Sequence
  Synthetic
cttcgagagguggcccaut

SEQ ID NO: 2897 - DNA, 18 bp, Artificial Sequence
  Synthetic
tcgtuggcactcctucgg

SEQ ID NO: 2898 - DNA, 21 bp, Artificial Sequence
  Synthetic
gaccctcccaucataggcuct

SEQ ID NO: 2899 - DNA, 20 bp, Artificial Sequence
  Synthetic
aggtgaggucaatggtggug

SEQ ID NO: 2900 - DNA, 23 bp, Artificial Sequence
  Synthetic
gggacuggaagtucacaaaaggg

SEQ ID NO: 2901 - DNA, 20 bp, Artificial Sequence
  Synthetic
cagggatgguctgcaggaug

SEQ ID NO: 2902 - DNA, 23 bp, Artificial Sequence
  Synthetic
aagauctgtgcugagagcaacaa

SEQ ID NO: 2903 - DNA, 22 bp, Artificial Sequence
  Synthetic
tgaggcauggagatcctttugg

SEQ ID NO: 2904 - DNA, 22 bp, Artificial Sequence
  Synthetic
ggaaagautggaugccgggaat

SEQ ID NO: 2905 - DNA, 22 bp, Artificial Sequence
  Synthetic
ggttagggaauggactcaccug

SEQ ID NO: 2906 - DNA, 22 bp, Artificial Sequence
  Synthetic
gactttcuggaggagaagcuca

SEQ ID NO: 2907 - DNA, 19 bp, Artificial Sequence
  Synthetic
ccaaccucaaccugaccgt

SEQ ID NO: 2908 - DNA, 23 bp, Artificial Sequence
  Synthetic
tcctccctugatcctaacacugt

SEQ ID NO: 2909 - DNA, 20 bp, Artificial Sequence
  Synthetic
ccagccacacutguaacccc

SEQ ID NO: 2910 - DNA, 19 bp, Artificial Sequence
  Synthetic
agctgacauagcggugcag

SEQ ID NO: 2911 - DNA, 20 bp, Artificial Sequence
  Synthetic
atcguggccttctucaccag

SEQ ID NO: 2912 - DNA, 19 bp, Artificial Sequence
  Synthetic
ggagggaggucagggacua

SEQ ID NO: 2913 - DNA, 21 bp, Artificial Sequence
  Synthetic
actgcccucatctctcuccag

SEQ ID NO: 2914 - DNA, 19 bp, Artificial Sequence
  Synthetic
ctctccugcaccacaugct

SEQ ID NO: 2915 - DNA, 17 bp, Artificial Sequence
  Synthetic
cgccgcugatagcguct

SEQ ID NO: 2916 - DNA, 20 bp, Artificial Sequence
  Synthetic
gggtccaggagguagtggua

SEQ ID NO: 2917 - DNA, 17 bp, Artificial Sequence
  Synthetic
agugacgggccagtgug

SEQ ID NO: 2918 - DNA, 21 bp, Artificial Sequence
  Synthetic
aggacutgtggtuggacgaaa

SEQ ID NO: 2919 - DNA, 25 bp, Artificial Sequence
  Synthetic
gcucaacttctaugagaagcaggag

SEQ ID NO: 2920 - DNA, 23 bp, Artificial Sequence
  Synthetic
gacgtccugcaatctgtctuagg

SEQ ID NO: 2921 - DNA, 21 bp, Artificial Sequence
  Synthetic
acatcuaccccgagcagtuct

SEQ ID NO: 2922 - DNA, 29 bp, Artificial Sequence
  Synthetic
tggatggauataaatggaaatugcacact

SEQ ID NO: 2923 - DNA, 28 bp, Artificial Sequence
  Synthetic
cctcatgtuaagcaacaagaacaauaca

SEQ ID NO: 2924 - DNA, 23 bp, Artificial Sequence
  Synthetic
agttgactugggctctctttugt

SEQ ID NO: 2925 - DNA, 27 bp, Artificial Sequence
  Synthetic
agcatcacaaccaugagtttacacaua

SEQ ID NO: 2926 - DNA, 22 bp, Artificial Sequence
  Synthetic
ggucaaaugaagcgcaacagag

SEQ ID NO: 2927 - DNA, 22 bp, Artificial Sequence
  Synthetic
tguctactucaggcaggaggaa

SEQ ID NO: 2928 - DNA, 24 bp, Artificial Sequence
  Synthetic
cccgaaugcacttacuagaagagg

SEQ ID NO: 2929 - DNA, 23 bp, Artificial Sequence
  Synthetic
gactcatagcuccaactgcctua

SEQ ID NO: 2930 - DNA, 23 bp, Artificial Sequence
  Synthetic
caaaatctguggcctcagatgut

SEQ ID NO: 2931 - DNA, 20 bp, Artificial Sequence
  Synthetic
ctcagccuggauccgagaag

SEQ ID NO: 2932 - DNA, 26 bp, Artificial Sequence
  Synthetic
ctagttttgcuttacagtcccuaggt

SEQ ID NO: 2933 - DNA, 18 bp, Artificial Sequence
  Synthetic
caggaggacuccgtggug

SEQ ID NO: 2934 - DNA, 22 bp, Artificial Sequence
  Synthetic
caactacugccgccttatccuc

SEQ ID NO: 2935 - DNA, 21 bp, Artificial Sequence
  Synthetic
tgagtccaacugtagcccuct

SEQ ID NO: 2936 - DNA, 28 bp, Artificial Sequence
  Synthetic
cactatgaaggaucctgtaaatgugacc

SEQ ID NO: 2937 - DNA, 22 bp, Artificial Sequence
  Synthetic
acgagagccutggtttucaagt

SEQ ID NO: 2938 - DNA, 24 bp, Artificial Sequence
  Synthetic
caggtggacautgaaaagcugaaa

SEQ ID NO: 2939 - DNA, 22 bp, Artificial Sequence
  Synthetic
ccaccgaagauccctttgucac

SEQ ID NO: 2940 - DNA, 20 bp, Artificial Sequence
  Synthetic
agttgcugcagggtagctug

SEQ ID NO: 2941 - DNA, 22 bp, Artificial Sequence
  Synthetic
tccatcaaccaugccactgtut

SEQ ID NO: 2942 - DNA, 24 bp, Artificial Sequence
  Synthetic
gacagtaatucaaatgctgcucca

SEQ ID NO: 2943 - DNA, 23 bp, Artificial Sequence
  Synthetic
agagccaaaaagcutcttcccut

SEQ ID NO: 2944 - DNA, 21 bp, Artificial Sequence
  Synthetic
acttggaagggaugcccttug

SEQ ID NO: 2945 - DNA, 21 bp, Artificial Sequence
  Synthetic
ctgguggaactcagtuggagt

SEQ ID NO: 2946 - DNA, 25 bp, Artificial Sequence
  Synthetic
gtgtattgtgccutgtggtgagaua

SEQ ID NO: 2947 - DNA, 18 bp, Artificial Sequence
  Synthetic
gcaagagugctccugcct

SEQ ID NO: 2948 - DNA, 18 bp, Artificial Sequence
  Synthetic
cttccccggcutcctucc

SEQ ID NO: 2949 - DNA, 20 bp, Artificial Sequence
  Synthetic
gccttctcauctgggcacut

SEQ ID NO: 2950 - DNA, 23 bp, Artificial Sequence
  Synthetic
catggacctuggtcatgatgtuc

SEQ ID NO: 2951 - DNA, 18 bp, Artificial Sequence
  Synthetic
gcaucaccugggaaggca

SEQ ID NO: 2952 - DNA, 21 bp, Artificial Sequence
  Synthetic
tgctgcugagcctgaatctuc

SEQ ID NO: 2953 - DNA, 28 bp, Artificial Sequence
  Synthetic
tgaccaaatcugttatagctaatugcct

SEQ ID NO: 2954 - DNA, 24 bp, Artificial Sequence
  Synthetic
cctctgaagcucaggtcauaagaa

SEQ ID NO: 2955 - DNA, 22 bp, Artificial Sequence
  Synthetic
gaugggaaggaactgugcaaga

SEQ ID NO: 2956 - DNA, 22 bp, Artificial Sequence
  Synthetic
aaugggaggucagggagagaaa

SEQ ID NO: 2957 - DNA, 20 bp, Artificial Sequence
  Synthetic
tccuccagcgactauggaca

SEQ ID NO: 2958 - DNA, 25 bp, Artificial Sequence
  Synthetic
tgttgacugacccctaattaacuga

SEQ ID NO: 2959 - DNA, 20 bp, Artificial Sequence
  Synthetic
gggcuggcttacugaaggac

SEQ ID NO: 2960 - DNA, 19 bp, Artificial Sequence
  Synthetic
cctggccuggcuagaggat

SEQ ID NO: 2961 - DNA, 24 bp, Artificial Sequence
  Synthetic
ctgagtgtguccttccaccatuaa

SEQ ID NO: 2962 - DNA, 21 bp, Artificial Sequence
  Synthetic
ggugaagagacaagcugcgaa

SEQ ID NO: 2963 - DNA, 21 bp, Artificial Sequence
  Synthetic
ggaugcccaagcaagcattug

SEQ ID NO: 2964 - DNA, 23 bp, Artificial Sequence
  Synthetic
ctgatagtccucctcctctguca

SEQ ID NO: 2965 - DNA, 22 bp, Artificial Sequence
  Synthetic
cctagtguccccauaacaagct

SEQ ID NO: 2966 - DNA, 23 bp, Artificial Sequence
  Synthetic
cacagcatugtcatactccucgt

SEQ ID NO: 2967 - DNA, 21 bp, Artificial Sequence
  Synthetic
tcccaaagguaccgtgtacuc

SEQ ID NO: 2968 - DNA, 22 bp, Artificial Sequence
  Synthetic
cctccagcucatctgcaugaat

SEQ ID NO: 2969 - DNA, 22 bp, Artificial Sequence
  Synthetic
gcaactgtgugccttgtaaguc

SEQ ID NO: 2970 - DNA, 17 bp, Artificial Sequence
  Synthetic
ggcauggcctaccugct

SEQ ID NO: 2971 - DNA, 21 bp, Artificial Sequence
  Synthetic
auttctgcagauggccaggaa

SEQ ID NO: 2972 - DNA, 22 bp, Artificial Sequence
  Synthetic
catgatguggcagaaggtgcua

SEQ ID NO: 2973 - DNA, 20 bp, Artificial Sequence
  Synthetic
gccgccuggacaactaugac

SEQ ID NO: 2974 - DNA, 22 bp, Artificial Sequence
  Synthetic
aaccagucactugagccacaat

SEQ ID NO: 2975 - DNA, 23 bp, Artificial Sequence
  Synthetic
gcuacctggtaugcagaaaggat

SEQ ID NO: 2976 - DNA, 25 bp, Artificial Sequence
  Synthetic
gattttagccagugcattgtgagug

SEQ ID NO: 2977 - DNA, 21 bp, Artificial Sequence
  Synthetic
ctggagtugccctcaagacut

SEQ ID NO: 2978 - DNA, 28 bp, Artificial Sequence
  Synthetic
cggtataaatauaggacaaggtcaugga

SEQ ID NO: 2979 - DNA, 21 bp, Artificial Sequence
  Synthetic
ccatgtgugcaatgaguccga

SEQ ID NO: 2980 - DNA, 21 bp, Artificial Sequence
  Synthetic
gtggtactuagaggccaccug

SEQ ID NO: 2981 - DNA, 23 bp, Artificial Sequence
  Synthetic
ctttagagtggugcatcgttgug

SEQ ID NO: 2982 - DNA, 21 bp, Artificial Sequence
  Synthetic
ccctcagcugggcgattatuc

SEQ ID NO: 2983 - DNA, 28 bp, Artificial Sequence
  Synthetic
gaaaacatactgagugaaaatgtggcut

SEQ ID NO: 2984 - DNA, 17 bp, Artificial Sequence
  Synthetic
gcgcagtucccggacuc

SEQ ID NO: 2985 - DNA, 22 bp, Artificial Sequence
  Synthetic
gcaacgtcugcaggtagaucat

SEQ ID NO: 2986 - DNA, 23 bp, Artificial Sequence
  Synthetic
ccttctacgugaacgtcgagtut

SEQ ID NO: 2987 - DNA, 19 bp, Artificial Sequence
  Synthetic
ccgtgcugggacttttugc

SEQ ID NO: 2988 - DNA, 17 bp, Artificial Sequence
  Synthetic
cccgcaggucctacucc

SEQ ID NO: 2989 - DNA, 19 bp, Artificial Sequence
  Synthetic
ggaacaugcggtagguggt

SEQ ID NO: 2990 - DNA, 23 bp, Artificial Sequence
  Synthetic
agtatggatgcucccttctcugt

SEQ ID NO: 2991 - DNA, 19 bp, Artificial Sequence
  Synthetic
atgaggagggcgagucauc

SEQ ID NO: 2992 - DNA, 23 bp, Artificial Sequence
  Synthetic
cagcagaucgagaccatcttcut

SEQ ID NO: 2993 - DNA, 18 bp, Artificial Sequence
  Synthetic
cggcccugggttacucac

SEQ ID NO: 2994 - DNA, 17 bp, Artificial Sequence
  Synthetic
gcccuccgcatcucaca

SEQ ID NO: 2995 - DNA, 18 bp, Artificial Sequence
  Synthetic
ccagcucagcaggauggg

SEQ ID NO: 2996 - DNA, 19 bp, Artificial Sequence
  Synthetic
ttgtguggagcgcuggaat

SEQ ID NO: 2997 - DNA, 22 bp, Artificial Sequence
  Synthetic
agacauaagcagcagcagugac

SEQ ID NO: 2998 - DNA, 23 bp, Artificial Sequence
  Synthetic
ggacaacagaagcugacctctut

SEQ ID NO: 2999 - DNA, 23 bp, Artificial Sequence
  Synthetic
ctccuccccaaaccagtactuac

SEQ ID NO: 3000 - DNA, 19 bp, Artificial Sequence
  Synthetic
actgtgccccutctcccua

SEQ ID NO: 3001 - DNA, 17 bp, Artificial Sequence
  Synthetic
caagccccuccccacuc

SEQ ID NO: 3002 - DNA, 19 bp, Artificial Sequence
  Synthetic
ggcacgcugaagctguact

SEQ ID NO: 3003 - DNA, 18 bp, Artificial Sequence
  Synthetic
agugcacguggaggagac

SEQ ID NO: 3004 - DNA, 21 bp, Artificial Sequence
  Synthetic
tgagccacucttctctuccct

SEQ ID NO: 3005 - DNA, 20 bp, Artificial Sequence
  Synthetic
caggagauggacugggacct

SEQ ID NO: 3006 - DNA, 20 bp, Artificial Sequence
  Synthetic
aagccacgggugtctuaagg

SEQ ID NO: 3007 - DNA, 25 bp, Artificial Sequence
  Synthetic
tctgaatgguggcctgttaattcug

SEQ ID NO: 3008 - DNA, 21 bp, Artificial Sequence
  Synthetic
agaactucaggcgccaaguag

SEQ ID NO: 3009 - DNA, 30 bp, Artificial Sequence
  Synthetic
attttatggcaagtucaacattattcccut

SEQ ID NO: 3010 - DNA, 27 bp, Artificial Sequence
  Synthetic
tattttgggaagutatgaagacgtgut

SEQ ID NO: 3011 - DNA, 29 bp, Artificial Sequence
  Synthetic
gagaggaaaacaugtaagaaaguagccat

SEQ ID NO: 3012 - DNA, 27 bp, Artificial Sequence
  Synthetic
caggacaaautttcctcctaugagaga

SEQ ID NO: 3013 - DNA, 27 bp, Artificial Sequence
  Synthetic
ggcaauggaacctttgtaaauacagag

SEQ ID NO: 3014 - DNA, 30 bp, Artificial Sequence
  Synthetic
tttctgaacaaaacgugatactauacaaca

SEQ ID NO: 3015 - DNA, 25 bp, Artificial Sequence
  Synthetic
agtgtccacucaggaactctatuct

SEQ ID NO: 3016 - DNA, 27 bp, Artificial Sequence
  Synthetic
ggagccttcuataattgtagagguggt

SEQ ID NO: 3017 - DNA, 28 bp, Artificial Sequence
  Synthetic
tggaggtgcagcuacatgtaattattut

SEQ ID NO: 3018 - DNA, 28 bp, Artificial Sequence
  Synthetic
tgttctgauaatgagtgtcuaggcagat

SEQ ID NO: 3019 - DNA, 20 bp, Artificial Sequence
  Synthetic
tggtggtgacugtagcagug

SEQ ID NO: 3020 - DNA, 21 bp, Artificial Sequence
  Synthetic
agtcactgcaccuccatccua

SEQ ID NO: 3021 - DNA, 28 bp, Artificial Sequence
  Synthetic
agataacataccutagctgaagaaguca

SEQ ID NO: 3022 - DNA, 23 bp, Artificial Sequence
  Synthetic
ccatggctuacagatgtgacuct

SEQ ID NO: 3023 - DNA, 22 bp, Artificial Sequence
  Synthetic
cacgatcaaauccccctctucc

SEQ ID NO: 3024 - DNA, 25 bp, Artificial Sequence
  Synthetic
ggcagcataaugaaaagtgggacua

SEQ ID NO: 3025 - DNA, 24 bp, Artificial Sequence
  Synthetic
cctcctcuggttcatuaccaaaca

SEQ ID NO: 3026 - DNA, 23 bp, Artificial Sequence
  Synthetic
gcccaccugtagatccagaugaa

SEQ ID NO: 3027 - DNA, 24 bp, Artificial Sequence
  Synthetic
gctctgtgguttaaagttcugcca

SEQ ID NO: 3028 - DNA, 23 bp, Artificial Sequence
  Synthetic
cttaaagtcucccttgcucggaa

SEQ ID NO: 3029 - DNA, 28 bp, Artificial Sequence
  Synthetic
caagtttcucaagggtatgaagtguact

SEQ ID NO: 3030 - DNA, 20 bp, Artificial Sequence
  Synthetic
cgccctgcuattctcaccut

SEQ ID NO: 3031 - DNA, 17 bp, Artificial Sequence
  Synthetic
ccaccucggtccaugcc

SEQ ID NO: 3032 - DNA, 22 bp, Artificial Sequence
  Synthetic
gggccgaagaagagauttccug

SEQ ID NO: 3033 - DNA, 21 bp, Artificial Sequence
  Synthetic
agggccggagaugagagttua

SEQ ID NO: 3034 - DNA, 23 bp, Artificial Sequence
  Synthetic
agaattgcugcgatctggtagut

SEQ ID NO: 3035 - DNA, 22 bp, Artificial Sequence
  Synthetic
catgtugggagaagucaagcct

SEQ ID NO: 3036 - DNA, 25 bp, Artificial Sequence
  Synthetic
ttgaaactguctttgtgaactugga

SEQ ID NO: 3037 - DNA, 23 bp, Artificial Sequence
  Synthetic
caatctgctguccaggattcuga

SEQ ID NO: 3038 - DNA, 23 bp, Artificial Sequence
  Synthetic
gcacauacagctgauccagagaa

SEQ ID NO: 3039 - DNA, 22 bp, Artificial Sequence
  Synthetic
ggcagtgtgucatgtggttuag

SEQ ID NO: 3040 - DNA, 29 bp, Artificial Sequence
  Synthetic
cttttgtcttctcuagcaattttgacugg

SEQ ID NO: 3041 - DNA, 26 bp, Artificial Sequence
  Synthetic
ctttctatggagcugggatcaatcug

SEQ ID NO: 3042 - DNA, 27 bp, Artificial Sequence
  Synthetic
tcagtgtcagcutgaattaaaugaggt

SEQ ID NO: 3043 - DNA, 25 bp, Artificial Sequence
  Synthetic
tgtttccgaatuccagtagtggaug

SEQ ID NO: 3044 - DNA, 23 bp, Artificial Sequence
  Synthetic
tctgttaccuggtggtagtucct

SEQ ID NO: 3045 - DNA, 27 bp, Artificial Sequence
  Synthetic
tctggtccttcguttttcttctagtuc

SEQ ID NO: 3046 - DNA, 30 bp, Artificial Sequence
  Synthetic
caatttcacaaaggcautcagatcuaacat

SEQ ID NO: 3047 - DNA, 22 bp, Artificial Sequence
  Synthetic
caactguccatggtgcugaaga

SEQ ID NO: 3048 - DNA, 28 bp, Artificial Sequence
  Synthetic
tccttaattctgutctgaattgctguct

SEQ ID NO: 3049 - DNA, 25 bp, Artificial Sequence
  Synthetic
ggtgaattctgaugaagagctggut

SEQ ID NO: 3050 - DNA, 19 bp, Artificial Sequence
  Synthetic
agcagcguctgttccuacc

SEQ ID NO: 3051 - DNA, 24 bp, Artificial Sequence
  Synthetic
aaaagagaauggaaauggcccaga

SEQ ID NO: 3052 - DNA, 29 bp, Artificial Sequence
  Synthetic
aacagaagagagaaguacugagtuaaaaa

SEQ ID NO: 3053 - DNA, 24 bp, Artificial Sequence
  Synthetic
ctgggtcttuggtttcttcagcua

SEQ ID NO: 3054 - DNA, 20 bp, Artificial Sequence
  Synthetic
gccctggcaguatgtcgaug

SEQ ID NO: 3055 - DNA, 24 bp, Artificial Sequence
  Synthetic
cctttcugccacaacagtauccaa

SEQ ID NO: 3056 - DNA, 24 bp, Artificial Sequence
  Synthetic
cctttggtuagaacagcagucaga

SEQ ID NO: 3057 - DNA, 25 bp, Artificial Sequence
  Synthetic
ccaaagcguactgactatucaaggg

SEQ ID NO: 3058 - DNA, 24 bp, Artificial Sequence
  Synthetic
agtcaggagaggucactgtuagag

SEQ ID NO: 3059 - DNA, 28 bp, Artificial Sequence
  Synthetic
acaacataactcautcagactggaauca

SEQ ID NO: 3060 - DNA, 25 bp, Artificial Sequence
  Synthetic
cctcgatagugttcatttctuccgt

SEQ ID NO: 3061 - DNA, 25 bp, Artificial Sequence
  Synthetic
ctatatcucaccagaatgccaugct

SEQ ID NO: 3062 - DNA, 31 bp, Artificial Sequence
  Synthetic
actgaagauagattaacaagugcaaaggaat

SEQ ID NO: 3063 - DNA, 25 bp, Artificial Sequence
  Synthetic
ctggtgtttucctctcgttttcuct

SEQ ID NO: 3064 - DNA, 28 bp, Artificial Sequence
  Synthetic
aaaagagactgtcugtttttcaggtcut

SEQ ID NO: 3065 - DNA, 19 bp, Artificial Sequence
  Synthetic
cctugccagcgugagaaac

SEQ ID NO: 3066 - DNA, 21 bp, Artificial Sequence
  Synthetic
ggagaaacuaggccttggcut

SEQ ID NO: 3067 - DNA, 20 bp, Artificial Sequence
  Synthetic
ggatggcagugagcaatugg

SEQ ID NO: 3068 - DNA, 18 bp, Artificial Sequence
  Synthetic
ctccugccacuccaacga

SEQ ID NO: 3069 - DNA, 19 bp, Artificial Sequence
  Synthetic
gccagcagcutgagtccug

SEQ ID NO: 3070 - DNA, 20 bp, Artificial Sequence
  Synthetic
gccaaggaggautgccucag

SEQ ID NO: 3071 - DNA, 24 bp, Artificial Sequence
  Synthetic
ttguaaggcttgtugagacacagt

SEQ ID NO: 3072 - DNA, 20 bp, Artificial Sequence
  Synthetic
gtccacuccaauccagccat

SEQ ID NO: 3073 - DNA, 21 bp, Artificial Sequence
  Synthetic
tgaaggcauggtgttgtggut

SEQ ID NO: 3074 - DNA, 22 bp, Artificial Sequence
  Synthetic
ccagtcuacaggcctaucagca

SEQ ID NO: 3075 - DNA, 21 bp, Artificial Sequence
  Synthetic
gagagcgcacutgatuggaga

SEQ ID NO: 3076 - DNA, 29 bp, Artificial Sequence
  Synthetic
ctctcacagaguacactagacatacacua

SEQ ID NO: 3077 - DNA, 21 bp, Artificial Sequence
  Synthetic
aacggctacugcacagttcut

SEQ ID NO: 3078 - DNA, 21 bp, Artificial Sequence
  Synthetic
aggagutttcctuggcccaaa

SEQ ID NO: 3079 - DNA, 26 bp, Artificial Sequence
  Synthetic
ccatgaatggaaaccuagccaaguag

SEQ ID NO: 3080 - DNA, 22 bp, Artificial Sequence
  Synthetic
tgtggcuggaggttauagcaag

SEQ ID NO: 3081 - DNA, 24 bp, Artificial Sequence
  Synthetic
ctgttgcauacctcctaugaccat

SEQ ID NO: 3082 - DNA, 21 bp, Artificial Sequence
  Synthetic
gtcuctgcagtgucgagagag

SEQ ID NO: 3083 - DNA, 28 bp, Artificial Sequence
  Synthetic
actatcacaaacaugccttcaacaacua

SEQ ID NO: 3084 - DNA, 23 bp, Artificial Sequence
  Synthetic
ctcaaccucctcttcctcuggat

SEQ ID NO: 3085 - DNA, 25 bp, Artificial Sequence
  Synthetic
ttatgaaggaaccugcuccaagaaa

SEQ ID NO: 3086 - DNA, 18 bp, Artificial Sequence
  Synthetic
cctggcauaggctuccct

SEQ ID NO: 3087 - DNA, 22 bp, Artificial Sequence
  Synthetic
ggaagaacggcuagtgaccauc

SEQ ID NO: 3088 - DNA, 24 bp, Artificial Sequence
  Synthetic
cactctgaggagucaaaagtuccc

SEQ ID NO: 3089 - DNA, 23 bp, Artificial Sequence
  Synthetic
ggaaacugcccaaatgtauccac

SEQ ID NO: 3090 - DNA, 25 bp, Artificial Sequence
  Synthetic
gctattatgucaccacaacctguca

SEQ ID NO: 3091 - DNA, 21 bp, Artificial Sequence
  Synthetic
tagccuagaggagccccauag

SEQ ID NO: 3092 - DNA, 20 bp, Artificial Sequence
  Synthetic
ccccagugaccttgctctuc

SEQ ID NO: 3093 - DNA, 24 bp, Artificial Sequence
  Synthetic
agacaggcuccagatguaagacat

SEQ ID NO: 3094 - DNA, 23 bp, Artificial Sequence
  Synthetic
gauacccttctugccaccaaaga

SEQ ID NO: 3095 - DNA, 21 bp, Artificial Sequence
  Synthetic
guacccgugaacaaacagcag

SEQ ID NO: 3096 - DNA, 25 bp, Artificial Sequence
  Synthetic
cctgaccccuttgcttatatgucat

SEQ ID NO: 3097 - DNA, 22 bp, Artificial Sequence
  Synthetic
gctgaactugagctctccucag

SEQ ID NO: 3098 - DNA, 17 bp, Artificial Sequence
  Synthetic
gggcugctgtagugcca

SEQ ID NO: 3099 - DNA, 18 bp, Artificial Sequence
  Synthetic
ctcccccaacutcuggct

SEQ ID NO: 3100 - DNA, 24 bp, Artificial Sequence
  Synthetic
ctatgtgaagacucatgcugacct

SEQ ID NO: 3101 - DNA, 22 bp, Artificial Sequence
  Synthetic
aaattcagcaugtcggtcucca

SEQ ID NO: 3102 - DNA, 23 bp, Artificial Sequence
  Synthetic
cgaggaggacuccttggactuaa

SEQ ID NO: 3103 - DNA, 21 bp, Artificial Sequence
  Synthetic
ggtggacuccaaagctgtguc

SEQ ID NO: 3104 - DNA, 24 bp, Artificial Sequence
  Synthetic
catacactcacuctcccccactua

SEQ ID NO: 3105 - DNA, 22 bp, Artificial Sequence
  Synthetic
aactacctgtutcctgcctcug

SEQ ID NO: 3106 - DNA, 23 bp, Artificial Sequence
  Synthetic
cacaaggucccgtctgttaugat

SEQ ID NO: 3107 - DNA, 21 bp, Artificial Sequence
  Synthetic
ctgggugggtcttgaaucaca

SEQ ID NO: 3108 - DNA, 20 bp, Artificial Sequence
  Synthetic
ccucggagcugaagaaagcc

SEQ ID NO: 3109 - DNA, 18 bp, Artificial Sequence
  Synthetic
tcctgcagcuccttuccc

SEQ ID NO: 3110 - DNA, 17 bp, Artificial Sequence
  Synthetic
ggctucgggcaacccua

SEQ ID NO: 3111 - DNA, 20 bp, Artificial Sequence
  Synthetic
tggtcgugagagttctgcug

SEQ ID NO: 3112 - DNA, 17 bp, Artificial Sequence
  Synthetic
tggccucgcagtgtugg

SEQ ID NO: 3113 - DNA, 18 bp, Artificial Sequence
  Synthetic
ccctccccacucagcugt

SEQ ID NO: 3114 - DNA, 30 bp, Artificial Sequence
  Synthetic
ggagagtcagugctaaaagtatatttucct

SEQ ID NO: 3115 - DNA, 18 bp, Artificial Sequence
  Synthetic
ggtcugggacggtggtug

SEQ ID NO: 3116 - DNA, 21 bp, Artificial Sequence
  Synthetic
gtgaagtaagccugcctggut

SEQ ID NO: 3117 - DNA, 24 bp, Artificial Sequence
  Synthetic
ctcaggtucatatcttctugccct

SEQ ID NO: 3118 - DNA, 22 bp, Artificial Sequence
  Synthetic
tctctcctcauacctccccuca

SEQ ID NO: 3119 - DNA, 22 bp, Artificial Sequence
  Synthetic
agtcaccttuccctctcccuaa

SEQ ID NO: 3120 - DNA, 25 bp, Artificial Sequence
  Synthetic
gctagtgagugactaaccaagtcut

SEQ ID NO: 3121 - DNA, 20 bp, Artificial Sequence
  Synthetic
gtccatgcauttgaccuccg

SEQ ID NO: 3122 - DNA, 22 bp, Artificial Sequence
  Synthetic
ggaccuccttauggacaaggga

SEQ ID NO: 3123 - DNA, 25 bp, Artificial Sequence
  Synthetic
aagtccagtaaguttagctgtgaug

SEQ ID NO: 3124 - DNA, 21 bp, Artificial Sequence
  Synthetic
gaagatgtggguggaccgtua

SEQ ID NO: 3125 - DNA, 18 bp, Artificial Sequence
  Synthetic
gcagucaagtgucaggcg

SEQ ID NO: 3126 - DNA, 21 bp, Artificial Sequence
  Synthetic
ccagucaaccagcagtuccat

SEQ ID NO: 3127 - DNA, 21 bp, Artificial Sequence
  Synthetic
gcaaggagtucccatgcacut

SEQ ID NO: 3128 - DNA, 19 bp, Artificial Sequence
  Synthetic
gggugacccctacagucgt

SEQ ID NO: 3129 - DNA, 21 bp, Artificial Sequence
  Synthetic
aggcagatugagcccactaua

SEQ ID NO: 3130 - DNA, 22 bp, Artificial Sequence
  Synthetic
gctttatguccctgagugcaga

SEQ ID NO: 3131 - DNA, 18 bp, Artificial Sequence
  Synthetic
caactgcugctgcugagg

SEQ ID NO: 3132 - DNA, 22 bp, Artificial Sequence
  Synthetic
catacaggcaucagctgaggut

SEQ ID NO: 3133 - DNA, 20 bp, Artificial Sequence
  Synthetic
ttggcccuctgatctgtgug

SEQ ID NO: 3134 - DNA, 21 bp, Artificial Sequence
  Synthetic
cagtaccugcctcgcacauag

SEQ ID NO: 3135 - DNA, 24 bp, Artificial Sequence
  Synthetic
caaccgaaugaggaagatctccut

SEQ ID NO: 3136 - DNA, 28 bp, Artificial Sequence
  Synthetic
ctagagctccutgtagaatattuccgac

SEQ ID NO: 3137 - DNA, 22 bp, Artificial Sequence
  Synthetic
ggacuagacaccttgcugaacc

SEQ ID NO: 3138 - DNA, 22 bp, Artificial Sequence
  Synthetic
gacaccacugagcatauccaga

SEQ ID NO: 3139 - DNA, 21 bp, Artificial Sequence
  Synthetic
tggtctgttguccctggtgua

SEQ ID NO: 3140 - DNA, 22 bp, Artificial Sequence
  Synthetic
attcgaagccugtcatttgugc

SEQ ID NO: 3141 - DNA, 25 bp, Artificial Sequence
  Synthetic
tttcataagttaguggtgcctgcut

SEQ ID NO: 3142 - DNA, 22 bp, Artificial Sequence
  Synthetic
ggtctuggaaacccucagcaaa

SEQ ID NO: 3143 - DNA, 22 bp, Artificial Sequence
  Synthetic
ggttcttucggtcacugaggaa

SEQ ID NO: 3144 - DNA, 22 bp, Artificial Sequence
  Synthetic
ctctgtacgaaucacggctgut

SEQ ID NO: 3145 - DNA, 22 bp, Artificial Sequence
  Synthetic
tcuaagttcuccacacacgcac

SEQ ID NO: 3146 - DNA, 25 bp, Artificial Sequence
  Synthetic
ctctgtagcauatgcactugaagga

SEQ ID NO: 3147 - DNA, 22 bp, Artificial Sequence
  Synthetic
ccagttcgguctttcaaaucgg

SEQ ID NO: 3148 - DNA, 23 bp, Artificial Sequence
  Synthetic
aatgaggttgutagcctgaugca

SEQ ID NO: 3149 - DNA, 28 bp, Artificial Sequence
  Synthetic
acattaaaagucaggagagctacucagt

SEQ ID NO: 3150 - DNA, 27 bp, Artificial Sequence
  Synthetic
agttaaaatgaugcaaactuggcagac

SEQ ID NO: 3151 - DNA, 26 bp, Artificial Sequence
  Synthetic
tgatccattcacutctgctacuacca

SEQ ID NO: 3152 - DNA, 28 bp, Artificial Sequence
  Synthetic
acttttgaccgaugtttcctcaaauaca

SEQ ID NO: 3153 - DNA, 28 bp, Artificial Sequence
  Synthetic
tctgaatgctacaugactaccacaatut

SEQ ID NO: 3154 - DNA, 23 bp, Artificial Sequence
  Synthetic
cttgaaguggcaaaaggaucagt

SEQ ID NO: 3155 - DNA, 26 bp, Artificial Sequence
  Synthetic
ctgatcataccutcaagtgaugggaa

SEQ ID NO: 3156 - DNA, 27 bp, Artificial Sequence
  Synthetic
gtcgagtucagaacaaacttttucagt

SEQ ID NO: 3157 - DNA, 28 bp, Artificial Sequence
  Synthetic
ggttatctttagucagttttctcugcca

SEQ ID NO: 3158 - DNA, 26 bp, Artificial Sequence
  Synthetic
ctaaaggauacagaggauccattuga

SEQ ID NO: 3159 - DNA, 20 bp, Artificial Sequence
  Synthetic
gcugagccgtcuacagcaag

SEQ ID NO: 3160 - DNA, 28 bp, Artificial Sequence
  Synthetic
tcagcaguggaacactaaattttauggt

SEQ ID NO: 3161 - DNA, 27 bp, Artificial Sequence
  Synthetic
cataccagctguagctgatgttcuaaa

SEQ ID NO: 3162 - DNA, 30 bp, Artificial Sequence
  Synthetic
cattcaggtttccutttaagctttctuacc

SEQ ID NO: 3163 - DNA, 23 bp, Artificial Sequence
  Synthetic
tgggaagcuttcaaaggaucagt

SEQ ID NO: 3164 - DNA, 22 bp, Artificial Sequence
  Synthetic
cgcacagagccugatatacuga

SEQ ID NO: 3165 - DNA, 29 bp, Artificial Sequence
  Synthetic
agtgggtggaugttaagtgcttttaauat

SEQ ID NO: 3166 - DNA, 28 bp, Artificial Sequence
  Synthetic
ccaaggatauccacaggtaactuagagt

SEQ ID NO: 3167 - DNA, 28 bp, Artificial Sequence
  Synthetic
ttttattguagcctgaagauaaggccaa

SEQ ID NO: 3168 - DNA, 28 bp, Artificial Sequence
  Synthetic
cttacttgtttgutcaggataccttugc

SEQ ID NO: 3169 - DNA, 22 bp, Artificial Sequence
  Synthetic
accagagagccugaggttguaa

SEQ ID NO: 3170 - DNA, 17 bp, Artificial Sequence
  Synthetic
agucggcgaagcugagg

SEQ ID NO: 3171 - DNA, 19 bp, Artificial Sequence
  Synthetic
tccttccccuccctugcat

SEQ ID NO: 3172 - DNA, 24 bp, Artificial Sequence
  Synthetic
tctccttcuggatggtacaugaca

SEQ ID NO: 3173 - DNA, 30 bp, Artificial Sequence
  Synthetic
attgtaggactaaaaugtagcagttgugaa

SEQ ID NO: 3174 - DNA, 25 bp, Artificial Sequence
  Synthetic
gttactcacguccttcttcactuca

SEQ ID NO: 3175 - DNA, 22 bp, Artificial Sequence
  Synthetic
ctctcctucttccccatuaccc

SEQ ID NO: 3176 - DNA, 27 bp, Artificial Sequence
  Synthetic
cgatacagtgtuagagaacagctuaca

SEQ ID NO: 3177 - DNA, 23 bp, Artificial Sequence
  Synthetic
gagctgugaaatcatgcugaacc

SEQ ID NO: 3178 - DNA, 25 bp, Artificial Sequence
  Synthetic
acatggcaugcagatctcttuacag

SEQ ID NO: 3179 - DNA, 25 bp, Artificial Sequence
  Synthetic
cactctgaguaagatcatccaggug

SEQ ID NO: 3180 - DNA, 23 bp, Artificial Sequence
  Synthetic
acccctagcucttaccaaaccut

SEQ ID NO: 3181 - DNA, 23 bp, Artificial Sequence
  Synthetic
tgagaauaagccccuggaaacag

SEQ ID NO: 3182 - DNA, 20 bp, Artificial Sequence
  Synthetic
cugagtugagccaggcagag

SEQ ID NO: 3183 - DNA, 17 bp, Artificial Sequence
  Synthetic
cccugagcccagcagug

SEQ ID NO: 3184 - DNA, 18 bp, Artificial Sequence
  Synthetic
cggcctucccttggugag

SEQ ID NO: 3185 - DNA, 17 bp, Artificial Sequence
  Synthetic
cgcugctacgugggcaa

SEQ ID NO: 3186 - DNA, 17 bp, Artificial Sequence
  Synthetic
gtccucgctgcucagga

SEQ ID NO: 3187 - DNA, 17 bp, Artificial Sequence
  Synthetic
ctggcauggcctggugt

SEQ ID NO: 3188 - DNA, 29 bp, Artificial Sequence
  Synthetic
catgtatagacacaucttgataggcauct

SEQ ID NO: 3189 - DNA, 23 bp, Artificial Sequence
  Synthetic
aatutgcaagcctucccagaaac

SEQ ID NO: 3190 - DNA, 26 bp, Artificial Sequence
  Synthetic
ctgtatctggtguctgatcttcctut

SEQ ID NO: 3191 - DNA, 26 bp, Artificial Sequence
  Synthetic
ccctgatuggagaatttggaauccag

SEQ ID NO: 3192 - DNA, 27 bp, Artificial Sequence
  Synthetic
tatgcugguagaagaaaggaaatttua

SEQ ID NO: 3193 - DNA, 20 bp, Artificial Sequence
  Synthetic
gggctguagcatttgauggg

SEQ ID NO: 3194 - DNA, 26 bp, Artificial Sequence
  Synthetic
gaaactatcguctctttccacaucca

SEQ ID NO: 3195 - DNA, 22 bp, Artificial Sequence
  Synthetic
cctttccttugcagtcactgua

SEQ ID NO: 3196 - DNA, 24 bp, Artificial Sequence
  Synthetic
cccaactcaacucccaacaauagg

SEQ ID NO: 3197 - DNA, 21 bp, Artificial Sequence
  Synthetic
ctccagcugctcctgagauag

SEQ ID NO: 3198 - DNA, 23 bp, Artificial Sequence
  Synthetic
ggcccucaaggacatagagaugt

SEQ ID NO: 3199 - DNA, 20 bp, Artificial Sequence
  Synthetic
ttcagccacgcuatctgcuc

SEQ ID NO: 3200 - DNA, 23 bp, Artificial Sequence
  Synthetic
ccctggattugcaggcatgauaa

SEQ ID NO: 3201 - DNA, 21 bp, Artificial Sequence
  Synthetic
cuggccaggaggaaaattucg

SEQ ID NO: 3202 - DNA, 24 bp, Artificial Sequence
  Synthetic
ggtgacttuccaaaaggaatuccc

SEQ ID NO: 3203 - DNA, 25 bp, Artificial Sequence
  Synthetic
agcctctctcaucttctgaggtauc

SEQ ID NO: 3204 - DNA, 21 bp, Artificial Sequence
  Synthetic
ctcaacacagcucctccagut

SEQ ID NO: 3205 - DNA, 20 bp, Artificial Sequence
  Synthetic
cccagcautggtgacuggac

SEQ ID NO: 3206 - DNA, 28 bp, Artificial Sequence
  Synthetic
aataccctucaaaaggaatctaatuccc

SEQ ID NO: 3207 - DNA, 23 bp, Artificial Sequence
  Synthetic
gctcuggaggcatggtauaaggt

SEQ ID NO: 3208 - DNA, 23 bp, Artificial Sequence
  Synthetic
ccaatcagaugccctcuccaaat

SEQ ID NO: 3209 - DNA, 20 bp, Artificial Sequence
  Synthetic
cgtcctugaggtaccaucgg

SEQ ID NO: 3210 - DNA, 21 bp, Artificial Sequence
  Synthetic
ccagatcugcaggaggtcauc

SEQ ID NO: 3211 - DNA, 21 bp, Artificial Sequence
  Synthetic
gcatgtgugaaaacccagguc

SEQ ID NO: 3212 - DNA, 20 bp, Artificial Sequence
  Synthetic
ggctcuccaggcatgaugat

SEQ ID NO: 3213 - DNA, 21 bp, Artificial Sequence
  Synthetic
ttgccagguccttggcuaaat

SEQ ID NO: 3214 - DNA, 28 bp, Artificial Sequence
  Synthetic
gggaaacatagtuagatcagggaatuct

SEQ ID NO: 3215 - DNA, 27 bp, Artificial Sequence
  Synthetic
aacttggtaagugtaagagaucaaggt

SEQ ID NO: 3216 - DNA, 22 bp, Artificial Sequence
  Synthetic
aggaggauggagtcugaaagct

SEQ ID NO: 3217 - DNA, 25 bp, Artificial Sequence
  Synthetic
tggtatgugcaatgatgttaaugct

SEQ ID NO: 3218 - DNA, 25 bp, Artificial Sequence
  Synthetic
catgcccaucagtaagtgatcuaaa

SEQ ID NO: 3219 - DNA, 27 bp, Artificial Sequence
  Synthetic
cttgagaagucagatggtttattugcc

SEQ ID NO: 3220 - DNA, 19 bp, Artificial Sequence
  Synthetic
gtccugagcccatcuccag

SEQ ID NO: 3221 - DNA, 20 bp, Artificial Sequence
  Synthetic
ccctcuccaccccctcttua

SEQ ID NO: 3222 - DNA, 24 bp, Artificial Sequence
  Synthetic
gcggtgauccacaaaagugaagat

SEQ ID NO: 3223 - DNA, 28 bp, Artificial Sequence
  Synthetic
cctcatttttauctcttcactcucaggt

SEQ ID NO: 3224 - DNA, 28 bp, Artificial Sequence
  Synthetic
tccttcctauaccaaatcacaatccuca

SEQ ID NO: 3225 - DNA, 24 bp, Artificial Sequence
  Synthetic
actgctctucacatcttcctucag

SEQ ID NO: 3226 - DNA, 24 bp, Artificial Sequence
  Synthetic
agagatucacccagatuccagact

SEQ ID NO: 3227 - DNA, 25 bp, Artificial Sequence
  Synthetic
cgaaaaccagacaagcuaaccauct

SEQ ID NO: 3228 - DNA, 19 bp, Artificial Sequence
  Synthetic
cttuagaggcgccccaguc

SEQ ID NO: 3229 - DNA, 20 bp, Artificial Sequence
  Synthetic
gggaguggcctttctttucc

SEQ ID NO: 3230 - DNA, 24 bp, Artificial Sequence
  Synthetic
ccagtaaacagcuctgtggttuca

SEQ ID NO: 3231 - DNA, 25 bp, Artificial Sequence
  Synthetic
aagtcaatcugcagaaactcctuca

SEQ ID NO: 3232 - DNA, 21 bp, Artificial Sequence
  Synthetic
tucattccagucaccgaccac

SEQ ID NO: 3233 - DNA, 24 bp, Artificial Sequence
  Synthetic
aggagtaactgaucccatccctut

SEQ ID NO: 3234 - DNA, 20 bp, Artificial Sequence
  Synthetic
cagggccaaccuatcacuca

SEQ ID NO: 3235 - DNA, 22 bp, Artificial Sequence
  Synthetic
ggutgacgtcauccaggacaag

SEQ ID NO: 3236 - DNA, 27 bp, Artificial Sequence
  Synthetic
ccagttcaguccctcatacttttacut

SEQ ID NO: 3237 - DNA, 23 bp, Artificial Sequence
  Synthetic
aggatgaugacaatgauggccag

SEQ ID NO: 3238 - DNA, 24 bp, Artificial Sequence
  Synthetic
tccugaagagatcuccaaagacac

SEQ ID NO: 3239 - DNA, 22 bp, Artificial Sequence
  Synthetic
ctgtcacuccttggaggtucac

SEQ ID NO: 3240 - DNA, 27 bp, Artificial Sequence
  Synthetic
ggagggaauggaaaaatucaaagacaa

SEQ ID NO: 3241 - DNA, 32 bp, Artificial Sequence
  Synthetic
cctaaaggaaaautcaaaatguagaccacaga

SEQ ID NO: 3242 - DNA, 22 bp, Artificial Sequence
  Synthetic
ccaaattgccuctggcaugaag

SEQ ID NO: 3243 - DNA, 24 bp, Artificial Sequence
  Synthetic
cggtaatagucaccactguacagg

SEQ ID NO: 3244 - DNA, 28 bp, Artificial Sequence
  Synthetic
ccgtctttgtaauattctctctctcuct

SEQ ID NO: 3245 - DNA, 22 bp, Artificial Sequence
  Synthetic
gtatctcttcuccagcagcuga

SEQ ID NO: 3246 - DNA, 24 bp, Artificial Sequence
  Synthetic
cctcagaaaugtgtgcatttuccc

SEQ ID NO: 3247 - DNA, 21 bp, Artificial Sequence
  Synthetic
gagcaaacuggaacucagcct

SEQ ID NO: 3248 - DNA, 22 bp, Artificial Sequence
  Synthetic
gagauggaagatgugggcagag

SEQ ID NO: 3249 - DNA, 22 bp, Artificial Sequence
  Synthetic
gacccuacagaagagccaacug

SEQ ID NO: 3250 - DNA, 20 bp, Artificial Sequence
  Synthetic
aactccagccaucccaaguc

SEQ ID NO: 3251 - DNA, 23 bp, Artificial Sequence
  Synthetic
cacagcucttcctcucagaacac

SEQ ID NO: 3252 - DNA, 23 bp, Artificial Sequence
  Synthetic
gctcguaagcccagtgtctttut

SEQ ID NO: 3253 - DNA, 19 bp, Artificial Sequence
  Synthetic
ggugccacccaagtgcuat

SEQ ID NO: 3254 - DNA, 25 bp, Artificial Sequence
  Synthetic
tgaaagtggacauaaaagccucaca

SEQ ID NO: 3255 - DNA, 24 bp, Artificial Sequence
  Synthetic
cacugaagaaacagguggagaaca

SEQ ID NO: 3256 - DNA, 27 bp, Artificial Sequence
  Synthetic
gaactgctagcutatgccttcaaaaut

SEQ ID NO: 3257 - DNA, 24 bp, Artificial Sequence
  Synthetic
cctgtctcagguctatgaccuact

SEQ ID NO: 3258 - DNA, 21 bp, Artificial Sequence
  Synthetic
ggcttcauggttggucagagg

SEQ ID NO: 3259 - DNA, 22 bp, Artificial Sequence
  Synthetic
catgccauacgggaatttgcug

SEQ ID NO: 3260 - DNA, 23 bp, Artificial Sequence
  Synthetic
cugtatttctuccagacgccaac

SEQ ID NO: 3261 - DNA, 22 bp, Artificial Sequence
  Synthetic
cuacccaguacccaagtguaat

SEQ ID NO: 3262 - DNA, 21 bp, Artificial Sequence
  Synthetic
tgaugtagttgctuggcaccc

SEQ ID NO: 3263 - DNA, 28 bp, Artificial Sequence
  Synthetic
ttgacagtacacugcttcagttgaaaua

SEQ ID NO: 3264 - DNA, 28 bp, Artificial Sequence
  Synthetic
gatctctgccauaactattagguggaag

SEQ ID NO: 3265 - DNA, 22 bp, Artificial Sequence
  Synthetic
ctctggccacugagtacaugag

SEQ ID NO: 3266 - DNA, 17 bp, Artificial Sequence
  Synthetic
aagauggcggacgugct

SEQ ID NO: 3267 - DNA, 19 bp, Artificial Sequence
  Synthetic
cacagccaugccggactua

SEQ ID NO: 3268 - DNA, 28 bp, Artificial Sequence
  Synthetic
gcaatcaaagccaaaautatggcuaaga

SEQ ID NO: 3269 - DNA, 28 bp, Artificial Sequence
  Synthetic
gtaagatagttgtucgtgtcctccauac

SEQ ID NO: 3270 - DNA, 24 bp, Artificial Sequence
  Synthetic
ccagctgccuataacagauacgat

SEQ ID NO: 3271 - DNA, 23 bp, Artificial Sequence
  Synthetic
tuacccttaaacaucaggccaca

SEQ ID NO: 3272 - DNA, 29 bp, Artificial Sequence
  Synthetic
gcactgcaattagugttacagtacctuat

SEQ ID NO: 3273 - DNA, 23 bp, Artificial Sequence
  Synthetic
aacgtcaucaacggcaauaacaa

SEQ ID NO: 3274 - DNA, 28 bp, Artificial Sequence
  Synthetic
caaatgttcagaaaugggatguaacagt

SEQ ID NO: 3275 - DNA, 28 bp, Artificial Sequence
  Synthetic
acacacacaagcauattttagaaucgga

SEQ ID NO: 3276 - DNA, 25 bp, Artificial Sequence
  Synthetic
ggttctctcatuccacaagtgcaua

SEQ ID NO: 3277 - DNA, 28 bp, Artificial Sequence
  Synthetic
gggttgagtaauaggatgataatgtgut

SEQ ID NO: 3278 - DNA, 29 bp, Artificial Sequence
  Synthetic
gagtgtgugtactttcttuaggaggaaat

SEQ ID NO: 3279 - DNA, 27 bp, Artificial Sequence
  Synthetic
agaaaggttatgugtgactgtcatgug

SEQ ID NO: 3280 - DNA, 24 bp, Artificial Sequence
  Synthetic
agactgaaucctggtcttuaggct

SEQ ID NO: 3281 - DNA, 21 bp, Artificial Sequence
  Synthetic
aaccucccagaacacctucac

SEQ ID NO: 3282 - DNA, 28 bp, Artificial Sequence
  Synthetic
cggctggattcucagtctttatcaatut

SEQ ID NO: 3283 - DNA, 23 bp, Artificial Sequence
  Synthetic
caaagaugtggagaauggaggga

SEQ ID NO: 3284 - DNA, 28 bp, Artificial Sequence
  Synthetic
cggctgagttugtcataattcatgtuag

SEQ ID NO: 3285 - DNA, 25 bp, Artificial Sequence
  Synthetic
ctcagaacaagcacaugatctgtug

SEQ ID NO: 3286 - DNA, 24 bp, Artificial Sequence
  Synthetic
ccctuacacacacgcaaaatacuc

SEQ ID NO: 3287 - DNA, 20 bp, Artificial Sequence
  Synthetic
gccctctcugccttttcucc

SEQ ID NO: 3288 - DNA, 22 bp, Artificial Sequence
  Synthetic
gaugagacaggaugaagcagca

SEQ ID NO: 3289 - DNA, 21 bp, Artificial Sequence
  Synthetic
gatgaucgccccttcttcugg

SEQ ID NO: 3290 - DNA, 26 bp, Artificial Sequence
  Synthetic
aaugaacaaaaugaaaggaggcaagg

SEQ ID NO: 3291 - DNA, 18 bp, Artificial Sequence
  Synthetic
ctccaucacggugggcat

SEQ ID NO: 3292 - DNA, 19 bp, Artificial Sequence
  Synthetic
agcccguaggtaccctugt

SEQ ID NO: 3293 - DNA, 22 bp, Artificial Sequence
  Synthetic
ctgagagtcucctctgcucact

SEQ ID NO: 3294 - DNA, 20 bp, Artificial Sequence
  Synthetic
cuccagaaguaggccaacua

SEQ ID NO: 3295 - DNA, 20 bp, Artificial Sequence
  Synthetic
gacatgtggguggaaccuga

SEQ ID NO: 3296 - DNA, 18 bp, Artificial Sequence
  Synthetic
cucccagcagggacacuc

SEQ ID NO: 3297 - DNA, 21 bp, Artificial Sequence
  Synthetic
agugtaagccucggcaaacaa

SEQ ID NO: 3298 - DNA, 19 bp, Artificial Sequence
  Synthetic
ttcttguccccagcaucgg

SEQ ID NO: 3299 - DNA, 20 bp, Artificial Sequence
  Synthetic
aagccaaggucatugcagga

SEQ ID NO: 3300 - DNA, 22 bp, Artificial Sequence
  Synthetic
gaaacugaggcccatcactuct

SEQ ID NO: 3301 - DNA, 22 bp, Artificial Sequence
  Synthetic
gggaccccuactacaucagcaa

SEQ ID NO: 3302 - DNA, 19 bp, Artificial Sequence
  Synthetic
gagccaaguccctgacuct

SEQ ID NO: 3303 - DNA, 19 bp, Artificial Sequence
  Synthetic
gagagggugcagcugagac

SEQ ID NO: 3304 - DNA, 17 bp, Artificial Sequence
  Synthetic
gcccgcugctcacctut

SEQ ID NO: 3305 - DNA, 25 bp, Artificial Sequence
  Synthetic
ccaaagaccacgauaattcctuccc

SEQ ID NO: 3306 - DNA, 22 bp, Artificial Sequence
  Synthetic
cctgttgcuggtagccgtaaut

SEQ ID NO: 3307 - DNA, 21 bp, Artificial Sequence
  Synthetic
ctggagggaagcugtactguc

SEQ ID NO: 3308 - DNA, 21 bp, Artificial Sequence
  Synthetic
ctgcagctgugggtttcttug

SEQ ID NO: 3309 - DNA, 23 bp, Artificial Sequence
  Synthetic
gaggaagagaaagugcctgugag

SEQ ID NO: 3310 - DNA, 28 bp, Artificial Sequence
  Synthetic
aactgcttagtaacuagcagaagtgtuc

SEQ ID NO: 3311 - DNA, 25 bp, Artificial Sequence
  Synthetic
ggauatatgccauaccccagcaaaa

SEQ ID NO: 3312 - DNA, 23 bp, Artificial Sequence
  Synthetic
acaggaagagcacagucacttug

SEQ ID NO: 3313 - DNA, 20 bp, Artificial Sequence
  Synthetic
ctgacaagcucctcgucagt

SEQ ID NO: 3314 - DNA, 20 bp, Artificial Sequence
  Synthetic
cuacagaguccgcaagccaa

SEQ ID NO: 3315 - DNA, 23 bp, Artificial Sequence
  Synthetic
cctcttgucttctccttugcaca

SEQ ID NO: 3316 - DNA, 23 bp, Artificial Sequence
  Synthetic
accaaucatgaugccggagaaag

SEQ ID NO: 3317 - DNA, 22 bp, Artificial Sequence
  Synthetic
ccaacucaaaggagacctggug

SEQ ID NO: 3318 - DNA, 23 bp, Artificial Sequence
  Synthetic
ggagugacacctugaacacgaat

SEQ ID NO: 3319 - DNA, 22 bp, Artificial Sequence
  Synthetic
gaaaatcttugcaggagggugc

SEQ ID NO: 3320 - DNA, 21 bp, Artificial Sequence
  Synthetic
tgaggcuctgacatugcagat

SEQ ID NO: 3321 - DNA, 29 bp, Artificial Sequence
  Synthetic
agaacaatgtgauagaagaagaaauccgt

SEQ ID NO: 3322 - DNA, 20 bp, Artificial Sequence
  Synthetic
agacuccaggcttctucgga

SEQ ID NO: 3323 - DNA, 20 bp, Artificial Sequence
  Synthetic
cacagugcaacaacgccuac

SEQ ID NO: 3324 - DNA, 20 bp, Artificial Sequence
  Synthetic
agtcaggcutaggcugagga

SEQ ID NO: 3325 - DNA, 18 bp, Artificial Sequence
  Synthetic
cagatggucgcatggugg

SEQ ID NO: 3326 - DNA, 29 bp, Artificial Sequence
  Synthetic
tgggaggagaaautagagaacuagagaaa

SEQ ID NO: 3327 - DNA, 26 bp, Artificial Sequence
  Synthetic
gcttgtgattctuttcctctctccua

SEQ ID NO: 3328 - DNA, 21 bp, Artificial Sequence
  Synthetic
cacagtccuggtggaagucac

SEQ ID NO: 3329 - DNA, 20 bp, Artificial Sequence
  Synthetic
gggccaugcaaactuaccat

SEQ ID NO: 3330 - DNA, 21 bp, Artificial Sequence
  Synthetic
gatctctctugcagcctcgut

SEQ ID NO: 3331 - DNA, 21 bp, Artificial Sequence
  Synthetic
gctgacuccaagcacaccauc

SEQ ID NO: 3332 - DNA, 27 bp, Artificial Sequence
  Synthetic
gcactatgaaucccaaactgaaacuca

SEQ ID NO: 3333 - DNA, 32 bp, Artificial Sequence
  Synthetic
ccttctcctgatuattttacatggaatcucac

SEQ ID NO: 3334 - DNA, 19 bp, Artificial Sequence
  Synthetic
catcaggcggauccucagt

SEQ ID NO: 3335 - DNA, 19 bp, Artificial Sequence
  Synthetic
ccaagcagutggtgcugga

SEQ ID NO: 3336 - DNA, 21 bp, Artificial Sequence
  Synthetic
gtcaacugccagactctucct

SEQ ID NO: 3337 - DNA, 18 bp, Artificial Sequence
  Synthetic
gcttuccacggcagcugt

SEQ ID NO: 3338 - DNA, 29 bp, Artificial Sequence
  Synthetic
ttgtaagtcttatgugggatggttttuct

SEQ ID NO: 3339 - DNA, 22 bp, Artificial Sequence
  Synthetic
tgttgctgaacucgtgacucaa

SEQ ID NO: 3340 - DNA, 25 bp, Artificial Sequence
  Synthetic
tgatcaaaguccacaaatucgagca

SEQ ID NO: 3341 - DNA, 24 bp, Artificial Sequence
  Synthetic
acaaccatuccctagctctguact

SEQ ID NO: 3342 - DNA, 28 bp, Artificial Sequence
  Synthetic
tctaggcauaaagatgtcatcaucaacc

SEQ ID NO: 3343 - DNA, 27 bp, Artificial Sequence
  Synthetic
tgaactgataaagugcactggaugaaa

SEQ ID NO: 3344 - DNA, 26 bp, Artificial Sequence
  Synthetic
tggttaucgaggaaaggactguagag

SEQ ID NO: 3345 - DNA, 25 bp, Artificial Sequence
  Synthetic
caaccattucacacagtctgtaugg

SEQ ID NO: 3346 - DNA, 25 bp, Artificial Sequence
  Synthetic
tccacactgcagautattggactug

SEQ ID NO: 3347 - DNA, 25 bp, Artificial Sequence
  Synthetic
caggautatcacttcauggccacat

SEQ ID NO: 3348 - DNA, 25 bp, Artificial Sequence
  Synthetic
caaatgaagtugttttggctgugga

SEQ ID NO: 3349 - DNA, 27 bp, Artificial Sequence
  Synthetic
tgattcttaccccaaaaautccctgut

SEQ ID NO: 3350 - DNA, 28 bp, Artificial Sequence
  Synthetic
aatcagcaaacaaaucaaagctcaugat

SEQ ID NO: 3351 - DNA, 30 bp, Artificial Sequence
  Synthetic
ccttacctctatutctctttcaggatucag

SEQ ID NO: 3352 - DNA, 26 bp, Artificial Sequence
  Synthetic
caaatagaaguacaggtaagctgugt

SEQ ID NO: 3353 - DNA, 24 bp, Artificial Sequence
  Synthetic
tgagcacatgucaagagcaaauct

SEQ ID NO: 3354 - DNA, 28 bp, Artificial Sequence
  Synthetic
agtattggctagcugttgaactgttuat

SEQ ID NO: 3355 - DNA, 29 bp, Artificial Sequence
  Synthetic
cagtacaatatttcauagtctcccgagut

SEQ ID NO: 3356 - DNA, 22 bp, Artificial Sequence
  Synthetic
gtgatagcugttgccgaugact

SEQ ID NO: 3357 - DNA, 28 bp, Artificial Sequence
  Synthetic
tcatggagaggaaucagtaacctataut

SEQ ID NO: 3358 - DNA, 27 bp, Artificial Sequence
  Synthetic
gtagaataagcagutctcccacactuc

SEQ ID NO: 3359 - DNA, 21 bp, Artificial Sequence
  Synthetic
tgcttatcucgttgcauggct

SEQ ID NO: 3360 - DNA, 23 bp, Artificial Sequence
  Synthetic
caaacuagcaggaugacagacca

SEQ ID NO: 3361 - DNA, 21 bp, Artificial Sequence
  Synthetic
cccagagagcucaagatgugt

SEQ ID NO: 3362 - DNA, 20 bp, Artificial Sequence
  Synthetic
ttcatgtgccuggtgagcut

SEQ ID NO: 3363 - DNA, 26 bp, Artificial Sequence
  Synthetic
tgtgggaaagucttcaagaactguag

SEQ ID NO: 3364 - DNA, 22 bp, Artificial Sequence
  Synthetic
tgtctggaguctccgaagcuaa

SEQ ID NO: 3365 - DNA, 22 bp, Artificial Sequence
  Synthetic
cttctcuaagcgcatcaagcuc

SEQ ID NO: 3366 - DNA, 18 bp, Artificial Sequence
  Synthetic
caccaugccctgcaugac

SEQ ID NO: 3367 - DNA, 20 bp, Artificial Sequence
  Synthetic
gagagcgagaggguggacua

SEQ ID NO: 3368 - DNA, 20 bp, Artificial Sequence
  Synthetic
caccaccaggutgctcugaa

SEQ ID NO: 3369 - DNA, 23 bp, Artificial Sequence
  Synthetic
caaaggttacugcaaccatucca

SEQ ID NO: 3370 - DNA, 21 bp, Artificial Sequence
  Synthetic
gtctcgguggtggacuaaaca

SEQ ID NO: 3371 - DNA, 23 bp, Artificial Sequence
  Synthetic
aggactaggugcagaatgtccut

SEQ ID NO: 3372 - DNA, 24 bp, Artificial Sequence
  Synthetic
acatgcaaacagcutttctcctug

SEQ ID NO: 3373 - DNA, 22 bp, Artificial Sequence
  Synthetic
ttcccctucaccaatcgagaug

SEQ ID NO: 3374 - DNA, 17 bp, Artificial Sequence
  Synthetic
cutgctugcggcgagac

SEQ ID NO: 3375 - DNA, 23 bp, Artificial Sequence
  Synthetic
tggatgucaaaaggcactgauga

SEQ ID NO: 3376 - DNA, 17 bp, Artificial Sequence
  Synthetic
gggtgugcgctcaccuc

SEQ ID NO: 3377 - DNA, 19 bp, Artificial Sequence
  Synthetic
gaccaucgtcagcauccca

SEQ ID NO: 3378 - DNA, 22 bp, Artificial Sequence
  Synthetic
ggcugctattcuaagcggagat

SEQ ID NO: 3379 - DNA, 22 bp, Artificial Sequence
  Synthetic
ctattcctccuccccgctttut

SEQ ID NO: 3380 - DNA, 22 bp, Artificial Sequence
  Synthetic
cctgagcagcutctgttctguc

SEQ ID NO: 3381 - DNA, 22 bp, Artificial Sequence
  Synthetic
aacattccccuccacaagucac

SEQ ID NO: 3382 - DNA, 22 bp, Artificial Sequence
  Synthetic
tctctccagcucacttccacut

SEQ ID NO: 3383 - DNA, 22 bp, Artificial Sequence
  Synthetic
acagggagaucaagaaguccca

SEQ ID NO: 3384 - DNA, 23 bp, Artificial Sequence
  Synthetic
cccagagagaccugatctcauca

SEQ ID NO: 3385 - DNA, 20 bp, Artificial Sequence
  Synthetic
cccctguaggctccaucaac

SEQ ID NO: 3386 - DNA, 17 bp, Artificial Sequence
  Synthetic
cccggcugaggtccuct

SEQ ID NO: 3387 - DNA, 22 bp, Artificial Sequence
  Synthetic
aguaaaggcgugaagcagaagt

SEQ ID NO: 3388 - DNA, 28 bp, Artificial Sequence
  Synthetic
tggctttcatuttggatcagaauaggag

SEQ ID NO: 3389 - DNA, 24 bp, Artificial Sequence
  Synthetic
ccccttttaagugagcctgtaaug

SEQ ID NO: 3390 - DNA, 23 bp, Artificial Sequence
  Synthetic
cccactagaaaugcctgcaugag

SEQ ID NO: 3391 - DNA, 30 bp, Artificial Sequence
  Synthetic
aatattgtttgtttutatcccgtcctucag

SEQ ID NO: 3392 - DNA, 21 bp, Artificial Sequence
  Synthetic
ccaggcugggttttgaagcua

SEQ ID NO: 3393 - DNA, 20 bp, Artificial Sequence
  Synthetic
ggagauggtgtuggcagaca

SEQ ID NO: 3394 - DNA, 20 bp, Artificial Sequence
  Synthetic
aaccccagguttgggaacuc

SEQ ID NO: 3395 - DNA, 26 bp, Artificial Sequence
  Synthetic
gttgtctctaacaauagcgtggaugt

SEQ ID NO: 3396 - DNA, 19 bp, Artificial Sequence
  Synthetic
acagtgacucgagguccca

SEQ ID NO: 3397 - DNA, 17 bp, Artificial Sequence
  Synthetic
ggcgccuttcgtugcag

SEQ ID NO: 3398 - DNA, 21 bp, Artificial Sequence
  Synthetic
ctggaaccucctcacccatut

SEQ ID NO: 3399 - DNA, 21 bp, Artificial Sequence
  Synthetic
aggaagacutggcgtttucga

SEQ ID NO: 3400 - DNA, 19 bp, Artificial Sequence
  Synthetic
gcagctcucacccctaucg

SEQ ID NO: 3401 - DNA, 24 bp, Artificial Sequence
  Synthetic
ctcattcagauctcatcccauggt

SEQ ID NO: 3402 - DNA, 23 bp, Artificial Sequence
  Synthetic
ttgatcagaaacuggcaagcuct

SEQ ID NO: 3403 - DNA, 26 bp, Artificial Sequence
  Synthetic
aaacttgtaaaaugacccctggtuct

SEQ ID NO: 3404 - DNA, 20 bp, Artificial Sequence
  Synthetic
ccaggaccutttggtggugt

SEQ ID NO: 3405 - DNA, 20 bp, Artificial Sequence
  Synthetic
agcaguggaaagcccagtuc

SEQ ID NO: 3406 - DNA, 23 bp, Artificial Sequence
  Synthetic
ctagcttcuaacagcagcucagt

SEQ ID NO: 3407 - DNA, 23 bp, Artificial Sequence
  Synthetic
ccacaggguaaatctgacauccc

SEQ ID NO: 3408 - DNA, 23 bp, Artificial Sequence
  Synthetic
tcaggtcctucccatatccctut

SEQ ID NO: 3409 - DNA, 27 bp, Artificial Sequence
  Synthetic
acctgttggaugttatctgtattugca

SEQ ID NO: 3410 - DNA, 22 bp, Artificial Sequence
  Synthetic
gcatttgcagccugtagtccut

SEQ ID NO: 3411 - DNA, 21 bp, Artificial Sequence
  Synthetic
gaaauccaggaagcggcacua

SEQ ID NO: 3412 - DNA, 30 bp, Artificial Sequence
  Synthetic
ccttcacttuaatctggttataugcccaaa

SEQ ID NO: 3413 - DNA, 24 bp, Artificial Sequence
  Synthetic
gtggagcugcttaucaaaaacgaa

SEQ ID NO: 3414 - DNA, 28 bp, Artificial Sequence
  Synthetic
tttggatgcaauacaagtgtaagacuca

SEQ ID NO: 3415 - DNA, 24 bp, Artificial Sequence
  Synthetic
gatgagcaatuggaaaccctucat

SEQ ID NO: 3416 - DNA, 28 bp, Artificial Sequence
  Synthetic
tggaacattgugaaaaacatacctcugt

SEQ ID NO: 3417 - DNA, 28 bp, Artificial Sequence
  Synthetic
tgaggagutaaaatcugaagaaaaggca

SEQ ID NO: 3418 - DNA, 26 bp, Artificial Sequence
  Synthetic
ggaatttgcucgttttcttucagagt

SEQ ID NO: 3419 - DNA, 22 bp, Artificial Sequence
  Synthetic
gcagcctugggaatgaaacugg

SEQ ID NO: 3420 - DNA, 25 bp, Artificial Sequence
  Synthetic
gtaaucaagccatcagucaccagat

SEQ ID NO: 3421 - DNA, 25 bp, Artificial Sequence
  Synthetic
acatcttucccatttcatugaggca

SEQ ID NO: 3422 - DNA, 23 bp, Artificial Sequence
  Synthetic
ccaagccacugaagaaggugaaa

SEQ ID NO: 3423 - DNA, 28 bp, Artificial Sequence
  Synthetic
tgacactttttguttctaccttcucaca

SEQ ID NO: 3424 - DNA, 22 bp, Artificial Sequence
  Synthetic
cagagtggagaugcagctguaa

SEQ ID NO: 3425 - DNA, 30 bp, Artificial Sequence
  Synthetic
acaactaaattcucttggaaacgtatucct

SEQ ID NO: 3426 - DNA, 32 bp, Artificial Sequence
  Synthetic
atttcagatttcaacuattgcagaaagugaag

SEQ ID NO: 3427 - DNA, 25 bp, Artificial Sequence
  Synthetic
caactaccuaagacttccuccacat

SEQ ID NO: 3428 - DNA, 20 bp, Artificial Sequence
  Synthetic
acucagccgggtacuaccat

SEQ ID NO: 3429 - DNA, 30 bp, Artificial Sequence
  Synthetic
agtattttgaagaauttaccacacctguga

SEQ ID NO: 3430 - DNA, 23 bp, Artificial Sequence
  Synthetic
cagagtggcagugcttgaaaauc

SEQ ID NO: 3431 - DNA, 25 bp, Artificial Sequence
  Synthetic
cagtccatuttccacctuaacaggt

SEQ ID NO: 3432 - DNA, 25 bp, Artificial Sequence
  Synthetic
cagggagaacucagagaggtatuca

SEQ ID NO: 3433 - DNA, 22 bp, Artificial Sequence
  Synthetic
caacccugactacuggaaccac

SEQ ID NO: 3434 - DNA, 21 bp, Artificial Sequence
  Synthetic
tcgaatggcgaucgtttcuga

SEQ ID NO: 3435 - DNA, 22 bp, Artificial Sequence
  Synthetic
catguccaagaggacaguagca

SEQ ID NO: 3436 - DNA, 33 bp, Artificial Sequence
  Synthetic
taattatttcttacccuattcgagtcaattcut

SEQ ID NO: 3437 - DNA, 22 bp, Artificial Sequence
  Synthetic
aagctucccagtccaaaugaca

SEQ ID NO: 3438 - DNA, 32 bp, Artificial Sequence
  Synthetic
tctgctattacttuactaagaatgatgauggt

SEQ ID NO: 3439 - DNA, 21 bp, Artificial Sequence
  Synthetic
atuccaacgcgagaaauccct

SEQ ID NO: 3440 - DNA, 30 bp, Artificial Sequence
  Synthetic
atactatatttucaagcaagattgctcuca

SEQ ID NO: 3441 - DNA, 28 bp, Artificial Sequence
  Synthetic
tcttagtgaaatcuccaaaccatgugaa

SEQ ID NO: 3442 - DNA, 25 bp, Artificial Sequence
  Synthetic
gcataagtugagtaaccagcuggat

SEQ ID NO: 3443 - DNA, 30 bp, Artificial Sequence
  Synthetic
gaaaatttgagtugaaatcatggtatugca

SEQ ID NO: 3444 - DNA, 24 bp, Artificial Sequence
  Synthetic
accctcttcagcucagtttcttuc

SEQ ID NO: 3445 - DNA, 23 bp, Artificial Sequence
  Synthetic
gagagaggacugactaucggact

SEQ ID NO: 3446 - DNA, 28 bp, Artificial Sequence
  Synthetic
ggtaccagggauaaagatacatguggat

SEQ ID NO: 3447 - DNA, 25 bp, Artificial Sequence
  Synthetic
gaaaaatguccagatggctuacagg

SEQ ID NO: 3448 - DNA, 27 bp, Artificial Sequence
  Synthetic
ctctatgcagauccttcctctacugaa

SEQ ID NO: 3449 - DNA, 31 bp, Artificial Sequence
  Synthetic
aagttttgacacaaucctctgttttattucc

SEQ ID NO: 3450 - DNA, 20 bp, Artificial Sequence
  Synthetic
tgcacacacaaugctccuct

SEQ ID NO: 3451 - DNA, 23 bp, Artificial Sequence
  Synthetic
gccaccaaacaugactgactuca

SEQ ID NO: 3452 - DNA, 29 bp, Artificial Sequence
  Synthetic
ccagtgactagaaagaucaaattcccaut

SEQ ID NO: 3453 - DNA, 28 bp, Artificial Sequence
  Synthetic
ggccaaaaataaguttctcaatccccua

SEQ ID NO: 3454 - DNA, 26 bp, Artificial Sequence
  Synthetic
attgaaattgugctccagtugaaagg

SEQ ID NO: 3455 - DNA, 25 bp, Artificial Sequence
  Synthetic
ttttggcagcguttcatuaacaagt

SEQ ID NO: 3456 - DNA, 21 bp, Artificial Sequence
  Synthetic
ctcattcaucgccacauaggg

SEQ ID NO: 3457 - DNA, 28 bp, Artificial Sequence
  Synthetic
caaattcctttgtuatgcagacaccaut

SEQ ID NO: 3458 - DNA, 22 bp, Artificial Sequence
  Synthetic
cugtatgcatcaugacgccact

SEQ ID NO: 3459 - DNA, 27 bp, Artificial Sequence
  Synthetic
cgcaagtactaugaaaactgtgaggut

SEQ ID NO: 3460 - DNA, 24 bp, Artificial Sequence
  Synthetic
aaacagtacaaugactgggctcuc

SEQ ID NO: 3461 - DNA, 18 bp, Artificial Sequence
  Synthetic
gtucggcagggcaaaguc

SEQ ID NO: 3462 - DNA, 23 bp, Artificial Sequence
  Synthetic
aagggcagaagutcttcctgaug

SEQ ID NO: 3463 - DNA, 29 bp, Artificial Sequence
  Synthetic
catgtcuacgaagaaaagtatgugaacag

SEQ ID NO: 3464 - DNA, 26 bp, Artificial Sequence
  Synthetic
cactgagcatuttctgttgttcugaa

SEQ ID NO: 3465 - DNA, 30 bp, Artificial Sequence
  Synthetic
atgtctttgtctagucgtctaatgttttua

SEQ ID NO: 3466 - DNA, 20 bp, Artificial Sequence
  Synthetic
cccattctuggctgcaucgt

SEQ ID NO: 3467 - DNA, 30 bp, Artificial Sequence
  Synthetic
ttgctctttcttaucacttctttcactuct

SEQ ID NO: 3468 - DNA, 25 bp, Artificial Sequence
  Synthetic
ccaccaactutacgtttgcaugaag

SEQ ID NO: 3469 - DNA, 23 bp, Artificial Sequence
  Synthetic
tggaaaacguggccatcacaaua

SEQ ID NO: 3470 - DNA, 28 bp, Artificial Sequence
  Synthetic
aattcaccatctuctttttctgcctcua

SEQ ID NO: 3471 - DNA, 29 bp, Artificial Sequence
  Synthetic
ctcagcaagacucatatgaatttgttucc

SEQ ID NO: 3472 - DNA, 25 bp, Artificial Sequence
  Synthetic
aaagttgaatcaugctgtccagtug

SEQ ID NO: 3473 - DNA, 27 bp, Artificial Sequence
  Synthetic
ttttggaattaaautctgctgaauggg

SEQ ID NO: 3474 - DNA, 19 bp, Artificial Sequence
  Synthetic
cctcggcugccgattaucc

SEQ ID NO: 3475 - DNA, 19 bp, Artificial Sequence
  Synthetic
gaagagctuggccggttuc

SEQ ID NO: 3476 - DNA, 21 bp, Artificial Sequence
  Synthetic
tctaaccaggugctgctgtug

SEQ ID NO: 3477 - DNA, 26 bp, Artificial Sequence
  Synthetic
ccaaatcaaaaagcccuatgagtcug

SEQ ID NO: 3478 - DNA, 21 bp, Artificial Sequence
  Synthetic
aggccccaugcaattuaccat

SEQ ID NO: 3479 - DNA, 21 bp, Artificial Sequence
  Synthetic
cgaguccaacagcccactuac

SEQ ID NO: 3480 - DNA, 25 bp, Artificial Sequence
  Synthetic
gutactcacugaggcagagaagaag

SEQ ID NO: 3481 - DNA, 28 bp, Artificial Sequence
  Synthetic
ttctgaaacagtutctacataatgcuca

SEQ ID NO: 3482 - DNA, 27 bp, Artificial Sequence
  Synthetic
tgaactaacgccuttctttttctucct

SEQ ID NO: 3483 - DNA, 29 bp, Artificial Sequence
  Synthetic
ggttgatggtatgutttagcttcatggua

SEQ ID NO: 3484 - DNA, 29 bp, Artificial Sequence
  Synthetic
ggcttcagtattauaccctggatgtgaua

SEQ ID NO: 3485 - DNA, 28 bp, Artificial Sequence
  Synthetic
tttccatttggutgtacttcatctucct

SEQ ID NO: 3486 - DNA, 28 bp, Artificial Sequence
  Synthetic
ttcatgcattaaaugaaacagaggugac

SEQ ID NO: 3487 - DNA, 23 bp, Artificial Sequence
  Synthetic
gggctcaugacactgaaaatuct

SEQ ID NO: 3488 - DNA, 31 bp, Artificial Sequence
  Synthetic
ctcagatatugcagtaatcatguacacaagt

SEQ ID NO: 3489 - DNA, 26 bp, Artificial Sequence
  Synthetic
tgacatacccuagttctggaatccut

SEQ ID NO: 3490 - DNA, 28 bp, Artificial Sequence
  Synthetic
tggatcggatcuacaaaaatgtcaugaa

SEQ ID NO: 3491 - DNA, 25 bp, Artificial Sequence
  Synthetic
aggagaaagaaggagguagagaguc

SEQ ID NO: 3492 - DNA, 20 bp, Artificial Sequence
  Synthetic
ggccaaagugtgacaauggg

SEQ ID NO: 3493 - DNA, 25 bp, Artificial Sequence
  Synthetic
tctttaagcauccatcgggtucaaa

SEQ ID NO: 3494 - DNA, 22 bp, Artificial Sequence
  Synthetic
aactgcagucaacacagtucac

SEQ ID NO: 3495 - DNA, 21 bp, Artificial Sequence
  Synthetic
agctccucccaagtcccttua

SEQ ID NO: 3496 - DNA, 28 bp, Artificial Sequence
  Synthetic
gacatugagcgaatgtauggaagaaaat

SEQ ID NO: 3497 - DNA, 28 bp, Artificial Sequence
  Synthetic
cagttaaaaauggtgacgtcaugagaag

SEQ ID NO: 3498 - DNA, 21 bp, Artificial Sequence
  Synthetic
acagatucccaaggtggugac

SEQ ID NO: 3499 - DNA, 21 bp, Artificial Sequence
  Synthetic
ggaucgaaacagcuggcaaga

SEQ ID NO: 3500 - DNA, 32 bp, Artificial Sequence
  Synthetic
aatgaaacatttgutagtaagggaacuagagt

SEQ ID NO: 3501 - DNA, 24 bp, Artificial Sequence
  Synthetic
gctgautttggactugcaaagcat

SEQ ID NO: 3502 - DNA, 23 bp, Artificial Sequence
  Synthetic
tgagagaggcuctggatgaucaa

SEQ ID NO: 3503 - DNA, 20 bp, Artificial Sequence
  Synthetic
cautatgagacuggccgggt

SEQ ID NO: 3504 - DNA, 20 bp, Artificial Sequence
  Synthetic
ccccucctctgugacaggaa

SEQ ID NO: 3505 - DNA, 22 bp, Artificial Sequence
  Synthetic
aggaatcccacucaagagcuga

SEQ ID NO: 3506 - DNA, 27 bp, Artificial Sequence
  Synthetic
atctgataattucacccgaggtcttut

SEQ ID NO: 3507 - DNA, 24 bp, Artificial Sequence
  Synthetic
gcuttcactagaugacagagcgag

SEQ ID NO: 3508 - DNA, 20 bp, Artificial Sequence
  Synthetic
tgtcaguggttcttugccca

SEQ ID NO: 3509 - DNA, 21 bp, Artificial Sequence
  Synthetic
agacgtucgagcagctctuag

SEQ ID NO: 3510 - DNA, 21 bp, Artificial Sequence
  Synthetic
tggataccucccaagtccugt

SEQ ID NO: 3511 - DNA, 28 bp, Artificial Sequence
  Synthetic
ttttagttcucaaaactgcattcugact

SEQ ID NO: 3512 - DNA, 26 bp, Artificial Sequence
  Synthetic
gaatgtctacccaauaccagtactug

SEQ ID NO: 3513 - DNA, 24 bp, Artificial Sequence
  Synthetic
caauagcagacaccatcugaggag

SEQ ID NO: 3514 - DNA, 27 bp, Artificial Sequence
  Synthetic
tgttttatgccautacaactcuccaca

SEQ ID NO: 3515 - DNA, 29 bp, Artificial Sequence
  Synthetic
gcagtctgtcguaatagccaagaattuaa

SEQ ID NO: 3516 - DNA, 29 bp, Artificial Sequence
  Synthetic
gctaatgacuagggccttatatcctttut

SEQ ID NO: 3517 - DNA, 27 bp, Artificial Sequence
  Synthetic
catggcaccaguttactcagaattuac

SEQ ID NO: 3518 - DNA, 29 bp, Artificial Sequence
  Synthetic
aaaatgattttgutgagttgtaugccagt

SEQ ID NO: 3519 - DNA, 23 bp, Artificial Sequence
  Synthetic
guatcctgatgugcacgaacaag

SEQ ID NO: 3520 - DNA, 21 bp, Artificial Sequence
  Synthetic
gaatgttugcaccacaguggg

SEQ ID NO: 3521 - DNA, 23 bp, Artificial Sequence
  Synthetic
caatagcttcugcagcttcctug

SEQ ID NO: 3522 - DNA, 30 bp, Artificial Sequence
  Synthetic
ttttcattttgctutctattcttcctugct

SEQ ID NO: 3523 - DNA, 32 bp, Artificial Sequence
  Synthetic
ctggagttaaucgagaaatatgagauacauac

SEQ ID NO: 3524 - DNA, 18 bp, Artificial Sequence
  Synthetic
catucccagggccuggac

SEQ ID NO: 3525 - DNA, 18 bp, Artificial Sequence
  Synthetic
aaacgctcucgccccuac

SEQ ID NO: 3526 - DNA, 22 bp, Artificial Sequence
  Synthetic
gccttacccuctgccaggatua

SEQ ID NO: 3527 - DNA, 20 bp, Artificial Sequence
  Synthetic
tggagaaggaggucguggaa

SEQ ID NO: 3528 - DNA, 23 bp, Artificial Sequence
  Synthetic
caaaaagcaccutggagatgugg

SEQ ID NO: 3529 - DNA, 22 bp, Artificial Sequence
  Synthetic
cccagcaaugagaguacagaca

SEQ ID NO: 3530 - DNA, 21 bp, Artificial Sequence
  Synthetic
agttggtgutctgcacgucat

SEQ ID NO: 3531 - DNA, 22 bp, Artificial Sequence
  Synthetic
ccgagcagcacutgtttguaac

SEQ ID NO: 3532 - DNA, 21 bp, Artificial Sequence
  Synthetic
gacttgttgcuggctgactug

SEQ ID NO: 3533 - DNA, 23 bp, Artificial Sequence
  Synthetic
tttaagguagaagcccgggtcua

SEQ ID NO: 3534 - DNA, 20 bp, Artificial Sequence
  Synthetic
ccccagcuccctaggaggua

SEQ ID NO: 3535 - DNA, 23 bp, Artificial Sequence
  Synthetic
cgttccacttugtcagctatgug

SEQ ID NO: 3536 - DNA, 20 bp, Artificial Sequence
  Synthetic
gcaucccacccuccaaacaa

SEQ ID NO: 3537 - DNA, 26 bp, Artificial Sequence
  Synthetic
tcttcctgutcaaatggaucgaagag

SEQ ID NO: 3538 - DNA, 20 bp, Artificial Sequence
  Synthetic
ctccagccagcccutatuca

SEQ ID NO: 3539 - DNA, 17 bp, Artificial Sequence
  Synthetic
cgacugggcccgttguc

SEQ ID NO: 3540 - DNA, 26 bp, Artificial Sequence
  Synthetic
cctctcccaugagttttgcaatttut

SEQ ID NO: 3541 - DNA, 22 bp, Artificial Sequence
  Synthetic
ctacacagauggtucacaggca

SEQ ID NO: 3542 - DNA, 28 bp, Artificial Sequence
  Synthetic
aggaggttttgaaugttcaatgagacua

SEQ ID NO: 3543 - DNA, 28 bp, Artificial Sequence
  Synthetic
attaatgaagttcugctgctgataucga

SEQ ID NO: 3544 - DNA, 28 bp, Artificial Sequence
  Synthetic
tgcttaagtcagggaugtttgatttcut

SEQ ID NO: 3545 - DNA, 25 bp, Artificial Sequence
  Synthetic
tactagttcccuctacctcucaagt

SEQ ID NO: 3546 - DNA, 21 bp, Artificial Sequence
  Synthetic
gcuagggaggagggtgguaac

SEQ ID NO: 3547 - DNA, 23 bp, Artificial Sequence
  Synthetic
gaatgguagagcagctatggcut

SEQ ID NO: 3548 - DNA, 22 bp, Artificial Sequence
  Synthetic
gattgguggaggtcttucaggt

SEQ ID NO: 3549 - DNA, 22 bp, Artificial Sequence
  Synthetic
tgtcagtgcauggtacaaccut

SEQ ID NO: 3550 - DNA, 21 bp, Artificial Sequence
  Synthetic
gggtcaaugatgcugcaacac

SEQ ID NO: 3551 - DNA, 27 bp, Artificial Sequence
  Synthetic
tgaacaaaaccaauccatgcatttuct

SEQ ID NO: 3552 - DNA, 22 bp, Artificial Sequence
  Synthetic
catccccagucacauagccaat

SEQ ID NO: 3553 - DNA, 27 bp, Artificial Sequence
  Synthetic
gcttggaagaaaccuaacaaattgtut

SEQ ID NO: 3554 - DNA, 26 bp, Artificial Sequence
  Synthetic
gttgatttuagagccattgctuccag

SEQ ID NO: 3555 - DNA, 23 bp, Artificial Sequence
  Synthetic
ttttgctgctucaaagggaggua

SEQ ID NO: 3556 - DNA, 27 bp, Artificial Sequence
  Synthetic
cccgttttgacuttttcataaggcuat

SEQ ID NO: 3557 - DNA, 28 bp, Artificial Sequence
  Synthetic
tttgcctgauacatatcagcattuacga

SEQ ID NO: 3558 - DNA, 19 bp, Artificial Sequence
  Synthetic
ccucgaccaccagggttuc

SEQ ID NO: 3559 - DNA, 26 bp, Artificial Sequence
  Synthetic
agttagtctcuagttttctggugggt

SEQ ID NO: 3560 - DNA, 24 bp, Artificial Sequence
  Synthetic
gctatacacagutgcatgtgcuca

SEQ ID NO: 3561 - DNA, 23 bp, Artificial Sequence
  Synthetic
aggtttccaguttgtttccucgt

SEQ ID NO: 3562 - DNA, 20 bp, Artificial Sequence
  Synthetic
cggtccatguccaggaggua

SEQ ID NO: 3563 - DNA, 21 bp, Artificial Sequence
  Synthetic
cctcttcuccatggcttuccc

SEQ ID NO: 3564 - DNA, 21 bp, Artificial Sequence
  Synthetic
cctguccaggcaatgaagugg

SEQ ID NO: 3565 - DNA, 27 bp, Artificial Sequence
  Synthetic
actaagctattgugtgatgtgtcctug

SEQ ID NO: 3566 - DNA, 22 bp, Artificial Sequence
  Synthetic
gggaccccaugttcatagagug

SEQ ID NO: 3567 - DNA, 23 bp, Artificial Sequence
  Synthetic
agccaggagutcctggagauaat

SEQ ID NO: 3568 - DNA, 20 bp, Artificial Sequence
  Synthetic
ccaggctcuggaagcgaaug

SEQ ID NO: 3569 - DNA, 23 bp, Artificial Sequence
  Synthetic
caagccatuaacccctccuacaa

SEQ ID NO: 3570 - DNA, 22 bp, Artificial Sequence
  Synthetic
gtgccaucaccagaaagguact

SEQ ID NO: 3571 - DNA, 28 bp, Artificial Sequence
  Synthetic
gcaagtttcauggatgtcctatttucca

SEQ ID NO: 3572 - DNA, 25 bp, Artificial Sequence
  Synthetic
acataaacttaccccugggaccaua

SEQ ID NO: 3573 - DNA, 25 bp, Artificial Sequence
  Synthetic
ccccctcutagttaaaatcucccaa

SEQ ID NO: 3574 - DNA, 21 bp, Artificial Sequence
  Synthetic
tgutgggugacaaagaggcat

SEQ ID NO: 3575 - DNA, 23 bp, Artificial Sequence
  Synthetic
actacttttgcugtctcgctcug

SEQ ID NO: 3576 - DNA, 21 bp, Artificial Sequence
  Synthetic
gcaggugaaaggcctctgtuc

SEQ ID NO: 3577 - DNA, 24 bp, Artificial Sequence
  Synthetic
caccaaggatcugctttgtctcut

SEQ ID NO: 3578 - DNA, 19 bp, Artificial Sequence
  Synthetic
ccctcucagcccatgctua

SEQ ID NO: 3579 - DNA, 23 bp, Artificial Sequence
  Synthetic
tttggcctutcttcttctuccca

SEQ ID NO: 3580 - DNA, 24 bp, Artificial Sequence
  Synthetic
atgtgaatgtcugaaagctgccua

SEQ ID NO: 3581 - DNA, 25 bp, Artificial Sequence
  Synthetic
caccgcaaaugtgaattaucaacgt

SEQ ID NO: 3582 - DNA, 22 bp, Artificial Sequence
  Synthetic
tggatgaggcaugcaguagaac

SEQ ID NO: 3583 - DNA, 22 bp, Artificial Sequence
  Synthetic
caagcaccugccttgactttut

SEQ ID NO: 3584 - DNA, 25 bp, Artificial Sequence
  Synthetic
gacccautcctguagagacacaaag

SEQ ID NO: 3585 - DNA, 27 bp, Artificial Sequence
  Synthetic
cacaaaccagauaatgcaagaugaaca

SEQ ID NO: 3586 - DNA, 23 bp, Artificial Sequence
  Synthetic
gtagcacacaacaucctucaggt

SEQ ID NO: 3587 - DNA, 28 bp, Artificial Sequence
  Synthetic
aatgtccttggaugttttccttttgtuc

SEQ ID NO: 3588 - DNA, 26 bp, Artificial Sequence
  Synthetic
ggagtcuccaagagggaaacaaatua

SEQ ID NO: 3589 - DNA, 30 bp, Artificial Sequence
  Synthetic
tgtctcttcagatucctccaagaagauaaa

SEQ ID NO: 3590 - DNA, 25 bp, Artificial Sequence
  Synthetic
ggatcacaautttgtagcugaccga

SEQ ID NO: 3591 - DNA, 21 bp, Artificial Sequence
  Synthetic
cugttataauccgcggagcca

SEQ ID NO: 3592 - DNA, 21 bp, Artificial Sequence
  Synthetic
agtctctccutcgtggcauct

SEQ ID NO: 3593 - DNA, 22 bp, Artificial Sequence
  Synthetic
gctagucccccagaggttacut

SEQ ID NO: 3594 - DNA, 23 bp, Artificial Sequence
  Synthetic
tggcactuggagactatauggga

SEQ ID NO: 3595 - DNA, 21 bp, Artificial Sequence
  Synthetic
tcaaacactcucccgggtgua

SEQ ID NO: 3596 - DNA, 29 bp, Artificial Sequence
  Synthetic
tgggtattaatgugtaagttgtgcuacaa

SEQ ID NO: 3597 - DNA, 25 bp, Artificial Sequence
  Synthetic
actgtttgatuccttcaagggucaa

SEQ ID NO: 3598 - DNA, 23 bp, Artificial Sequence
  Synthetic
gacgcttgguctcatacatgtug

SEQ ID NO: 3599 - DNA, 25 bp, Artificial Sequence
  Synthetic
cagtagtgaucagaacacgactuga

SEQ ID NO: 3600 - DNA, 23 bp, Artificial Sequence
  Synthetic
tgggaggaaaggugtggctauaa

SEQ ID NO: 3601 - DNA, 24 bp, Artificial Sequence
  Synthetic
catccaaaacuctcaucccaggaa

SEQ ID NO: 3602 - DNA, 22 bp, Artificial Sequence
  Synthetic
ggtattgcaccutggtgtuggt

SEQ ID NO: 3603 - DNA, 23 bp, Artificial Sequence
  Synthetic
gagcaaugacatctttctugggt

SEQ ID NO: 3604 - DNA, 23 bp, Artificial Sequence
  Synthetic
aattcgagugtgggtttucaggt

SEQ ID NO: 3605 - DNA, 23 bp, Artificial Sequence
  Synthetic
ggactgcagagaccutccttaut

SEQ ID NO: 3606 - DNA, 20 bp, Artificial Sequence
  Synthetic
gtggaggcacauctcugcat

SEQ ID NO: 3607 - DNA, 22 bp, Artificial Sequence
  Synthetic
ccaggtgcugaggctgttttua

SEQ ID NO: 3608 - DNA, 19 bp, Artificial Sequence
  Synthetic
cctggaggaugcaggcaut

SEQ ID NO: 3609 - DNA, 21 bp, Artificial Sequence
  Synthetic
agagacccucctcggaagaug

SEQ ID NO: 3610 - DNA, 20 bp, Artificial Sequence
  Synthetic
acagggagguggctguacat

SEQ ID NO: 3611 - DNA, 22 bp, Artificial Sequence
  Synthetic
cccaagacaucatggcctaucg

SEQ ID NO: 3612 - DNA, 27 bp, Artificial Sequence
  Synthetic
agggttgatcucaggatctagatugat

SEQ ID NO: 3613 - DNA, 28 bp, Artificial Sequence
  Synthetic
actgtaagggaucacagattcgataugt

SEQ ID NO: 3614 - DNA, 24 bp, Artificial Sequence
  Synthetic
aaugttatgucaccaccaggagag

SEQ ID NO: 3615 - DNA, 26 bp, Artificial Sequence
  Synthetic
tcttctcctttuacaggtcatccuca

SEQ ID NO: 3616 - DNA, 25 bp, Artificial Sequence
  Synthetic
gcaagacttgcutgtccacttcuaa

SEQ ID NO: 3617 - DNA, 23 bp, Artificial Sequence
  Synthetic
ctactttgtggcugcctttgtug

SEQ ID NO: 3618 - DNA, 20 bp, Artificial Sequence
  Synthetic
cgagagcagguagtcccgua

SEQ ID NO: 3619 - DNA, 18 bp, Artificial Sequence
  Synthetic
ccttgacugggcugccat

SEQ ID NO: 3620 - DNA, 22 bp, Artificial Sequence
  Synthetic
gacagcaaaaggugatgagcug

SEQ ID NO: 3621 - DNA, 25 bp, Artificial Sequence
  Synthetic
cggcttucccaacctatttucagaa

SEQ ID NO: 3622 - DNA, 20 bp, Artificial Sequence
  Synthetic
gggttcggcuctagtcauca

SEQ ID NO: 3623 - DNA, 23 bp, Artificial Sequence
  Synthetic
gaagagtttgcuggttggaaugt

SEQ ID NO: 3624 - DNA, 22 bp, Artificial Sequence
  Synthetic
atcccctgaacugaaaccacug

SEQ ID NO: 3625 - DNA, 24 bp, Artificial Sequence
  Synthetic
cgtctucgaattggaatuccccaa

SEQ ID NO: 3626 - DNA, 22 bp, Artificial Sequence
  Synthetic
ccagcagugcagagucagaaag

SEQ ID NO: 3627 - DNA, 24 bp, Artificial Sequence
  Synthetic
caaaggacagaaugctgccatcua

SEQ ID NO: 3628 - DNA, 20 bp, Artificial Sequence
  Synthetic
gucagaagtcuccggcacag

SEQ ID NO: 3629 - DNA, 19 bp, Artificial Sequence
  Synthetic
tctggtcucgggagccaua

SEQ ID NO: 3630 - DNA, 22 bp, Artificial Sequence
  Synthetic
cctgagcacuttgctcttgtuc

SEQ ID NO: 3631 - DNA, 20 bp, Artificial Sequence
  Synthetic
gagagcagcutggtgtcuct

SEQ ID NO: 3632 - DNA, 30 bp, Artificial Sequence
  Synthetic
ataacaagaaaaucagacuggagaaggaaa

SEQ ID NO: 3633 - DNA, 22 bp, Artificial Sequence
  Synthetic
tgucaagauccaagaagtgtug

SEQ ID NO: 3634 - DNA, 29 bp, Artificial Sequence
  Synthetic
aggacagtggtcutaaatgttagagtgua

SEQ ID NO: 3635 - DNA, 23 bp, Artificial Sequence
  Synthetic
ggcttcccuggtttagagtuacc

SEQ ID NO: 3636 - DNA, 23 bp, Artificial Sequence
  Synthetic
tgtccttcatugagtgcggaaut

SEQ ID NO: 3637 - DNA, 29 bp, Artificial Sequence
  Synthetic
aacaauaaaggugaggaaagaaaaggact

SEQ ID NO: 3638 - DNA, 24 bp, Artificial Sequence
  Synthetic
ttatctcttcucttccaccuccca

SEQ ID NO: 3639 - DNA, 27 bp, Artificial Sequence
  Synthetic
gaagatgtcauattctggatggugact

SEQ ID NO: 3640 - DNA, 22 bp, Artificial Sequence
  Synthetic
gcaagtugaggcactgaagaug

SEQ ID NO: 3641 - DNA, 29 bp, Artificial Sequence
  Synthetic
acaagagggaauactgaataaaaauggat

SEQ ID NO: 3642 - DNA, 27 bp, Artificial Sequence
  Synthetic
ctcttctgcaguctttattagcatugt

SEQ ID NO: 3643 - DNA, 26 bp, Artificial Sequence
  Synthetic
ttctgaagtugagcgtaataccaguc

SEQ ID NO: 3644 - DNA, 26 bp, Artificial Sequence
  Synthetic
cgaagaauagccagaatucagcaaat

SEQ ID NO: 3645 - DNA, 30 bp, Artificial Sequence
  Synthetic
aacuacctatttttauacccacaaacaaga

SEQ ID NO: 3646 - DNA, 26 bp, Artificial Sequence
  Synthetic
tgaaacagccagugttttgagttcua

SEQ ID NO: 3647 - DNA, 26 bp, Artificial Sequence
  Synthetic
aatgtctuagcaaagtagtcauggca

SEQ ID NO: 3648 - DNA, 26 bp, Artificial Sequence
  Synthetic
tgaaatccgaguccttcatctttugg

SEQ ID NO: 3649 - DNA, 26 bp, Artificial Sequence
  Synthetic
atttgcttugaaacatgcacuacgat

SEQ ID NO: 3650 - DNA, 25 bp, Artificial Sequence
  Synthetic
gtggactgtgaaaugtatgggctua

SEQ ID NO: 3651 - DNA, 32 bp, Artificial Sequence
  Synthetic
atgaaagtaaattaacucatacctgagctauc

SEQ ID NO: 3652 - DNA, 29 bp, Artificial Sequence
  Synthetic
gaagttaaugagagacaaattccaacuct

SEQ ID NO: 3653 - DNA, 31 bp, Artificial Sequence
  Synthetic
catatatcagctttautctcagtgcaatgug

SEQ ID NO: 3654 - DNA, 31 bp, Artificial Sequence
  Synthetic
tcatagtttgacaauagtcagtaatgcaugt

SEQ ID NO: 3655 - DNA, 21 bp, Artificial Sequence
  Synthetic
tgcagcacutcccauagcaat

SEQ ID NO: 3656 - DNA, 30 bp, Artificial Sequence
  Synthetic
acatgactgtccuttcaccatatttgaaua

SEQ ID NO: 3657 - DNA, 24 bp, Artificial Sequence
  Synthetic
ttcctggatuttctgttgcuggat

SEQ ID NO: 3658 - DNA, 30 bp, Artificial Sequence
  Synthetic
agtgtcagtaguagtgatggttatgguaaa

SEQ ID NO: 3659 - DNA, 32 bp, Artificial Sequence
  Synthetic
tagttctccatcatuatcatccatatgattug

SEQ ID NO: 3660 - DNA, 27 bp, Artificial Sequence
  Synthetic
caaatcgagugggttctaatcauggaa

SEQ ID NO: 3661 - DNA, 30 bp, Artificial Sequence
  Synthetic
tttatgctataattugttggtctctctuct

SEQ ID NO: 3662 - DNA, 32 bp, Artificial Sequence
  Synthetic
gccacttgcaaaguttcttctatuaaccaaga

SEQ ID NO: 3663 - DNA, 26 bp, Artificial Sequence
  Synthetic
cagaatctgctucctgtgtcgtcuga

SEQ ID NO: 3664 - DNA, 30 bp, Artificial Sequence
  Synthetic
gatgtacttctgucagttcacttgatagut

SEQ ID NO: 3665 - DNA, 24 bp, Artificial Sequence
  Synthetic
gtggaggtgutttacttctgctug

SEQ ID NO: 3666 - DNA, 27 bp, Artificial Sequence
  Synthetic
gttcaggaaaaugacaatgggaaugaa

SEQ ID NO: 3667 - DNA, 30 bp, Artificial Sequence
  Synthetic
ggcatggcagaaauaatacattcttcuagt

SEQ ID NO: 3668 - DNA, 21 bp, Artificial Sequence
  Synthetic
gggcacagucaggtgaattug

SEQ ID NO: 3669 - DNA, 27 bp, Artificial Sequence
  Synthetic
gcaagaatatcaccutcctctgcttua

SEQ ID NO: 3670 - DNA, 31 bp, Artificial Sequence
  Synthetic
cucagacaacaaagatucaaagaaacagaat

SEQ ID NO: 3671 - DNA, 30 bp, Artificial Sequence
  Synthetic
gaatcatttcgugaaaaacagtaaggagut

SEQ ID NO: 3672 - DNA, 26 bp, Artificial Sequence
  Synthetic
tgctattgaaaauactccggttugct

SEQ ID NO: 3673 - DNA, 25 bp, Artificial Sequence
  Synthetic
gtttacttggtuctccctgtgaguc

SEQ ID NO: 3674 - DNA, 29 bp, Artificial Sequence
  Synthetic
tggtctatccccugattcagaaaatttug

SEQ ID NO: 3675 - DNA, 27 bp, Artificial Sequence
  Synthetic
cagagagautcctgattucagggaaag

SEQ ID NO: 3676 - DNA, 28 bp, Artificial Sequence
  Synthetic
aggacaatgattcauattccaggagtuc

SEQ ID NO: 3677 - DNA, 22 bp, Artificial Sequence
  Synthetic
ctaggagaaguggtggctgtut

SEQ ID NO: 3678 - DNA, 29 bp, Artificial Sequence
  Synthetic
cctcaggttcuggaaaaatgtcatauaca

SEQ ID NO: 3679 - DNA, 31 bp, Artificial Sequence
  Synthetic
acctttttattggcuccattaccattatuca

SEQ ID NO: 3680 - DNA, 23 bp, Artificial Sequence
  Synthetic
cccacctaatcucagtcccacua

SEQ ID NO: 3681 - DNA, 24 bp, Artificial Sequence
  Synthetic
aggaagggaugatgaatgttugct

SEQ ID NO: 3682 - DNA, 28 bp, Artificial Sequence
  Synthetic
agaattgaggacugtcccattaacaauc

SEQ ID NO: 3683 - DNA, 21 bp, Artificial Sequence
  Synthetic
cgcatgggaacacugccatua

SEQ ID NO: 3684 - DNA, 23 bp, Artificial Sequence
  Synthetic
atctcagaucccaactccaguga

SEQ ID NO: 3685 - DNA, 32 bp, Artificial Sequence
  Synthetic
tagtttcattcttccuctcttttaaacagaug

SEQ ID NO: 3686 - DNA, 29 bp, Artificial Sequence
  Synthetic
ttcattacacugagaagaactttcctuga

SEQ ID NO: 3687 - DNA, 22 bp, Artificial Sequence
  Synthetic
aaaauggcttgcugacaccaac

SEQ ID NO: 3688 - DNA, 27 bp, Artificial Sequence
  Synthetic
tctgcatatgtuccttcaattcctcuc

SEQ ID NO: 3689 - DNA, 24 bp, Artificial Sequence
  Synthetic
aatgcatttgucatgactgtgtuc

SEQ ID NO: 3690 - DNA, 23 bp, Artificial Sequence
  Synthetic
ccacaggcaugaatggctaaauc

SEQ ID NO: 3691 - DNA, 26 bp, Artificial Sequence
  Synthetic
gaacactaacaaaugccatcttgcuc

SEQ ID NO: 3692 - DNA, 21 bp, Artificial Sequence
  Synthetic
gatgattccacuccggaccuc

SEQ ID NO: 3693 - DNA, 25 bp, Artificial Sequence
  Synthetic
gaaatgagacautcaggctcugaca

SEQ ID NO: 3694 - DNA, 22 bp, Artificial Sequence
  Synthetic
ggtcagtcaggugggtgtctua

SEQ ID NO: 3695 - DNA, 26 bp, Artificial Sequence
  Synthetic
tcagtgtttctutcctttctgtcucc

SEQ ID NO: 3696 - DNA, 23 bp, Artificial Sequence
  Synthetic
tctttcagggcutcttcgaaugg

SEQ ID NO: 3697 - DNA, 21 bp, Artificial Sequence
  Synthetic
catggccugactctcctugat

SEQ ID NO: 3698 - DNA, 17 bp, Artificial Sequence
  Synthetic
cuccaccccugccacac

SEQ ID NO: 3699 - DNA, 20 bp, Artificial Sequence
  Synthetic
ggcccucagctactuaccca

SEQ ID NO: 3700 - DNA, 26 bp, Artificial Sequence
  Synthetic
cacaugaaccaaugaggagaaaacua

SEQ ID NO: 3701 - DNA, 25 bp, Artificial Sequence
  Synthetic
ccaggaugccaagttgatatctuga

SEQ ID NO: 3702 - DNA, 22 bp, Artificial Sequence
  Synthetic
ggtggatcutctgtggaauggt

SEQ ID NO: 3703 - DNA, 25 bp, Artificial Sequence
  Synthetic
ccatgtccauatgaacaagctucct

SEQ ID NO: 3704 - DNA, 26 bp, Artificial Sequence
  Synthetic
tccttgauggaccagagaaataaugt

SEQ ID NO: 3705 - DNA, 28 bp, Artificial Sequence
  Synthetic
tcattgaatgugggaatgcatuagagaa

SEQ ID NO: 3706 - DNA, 23 bp, Artificial Sequence
  Synthetic
agagccaugctctgttttuggat

SEQ ID NO: 3707 - DNA, 24 bp, Artificial Sequence
  Synthetic
acccctguattactgtguggagaa

SEQ ID NO: 3708 - DNA, 26 bp, Artificial Sequence
  Synthetic
cacaataagugggtacctgtcaucag

SEQ ID NO: 3709 - DNA, 22 bp, Artificial Sequence
  Synthetic
aaguaccccgagagcaauagga

SEQ ID NO: 3710 - DNA, 22 bp, Artificial Sequence
  Synthetic
atgctgcuagccaagtcuacag

SEQ ID NO: 3711 - DNA, 23 bp, Artificial Sequence
  Synthetic
aaatctccugcacagagugacag

SEQ ID NO: 3712 - DNA, 20 bp, Artificial Sequence
  Synthetic
gacaucaccaaggacccuga

SEQ ID NO: 3713 - DNA, 25 bp, Artificial Sequence
  Synthetic
ctagtagccacaguggatcugaaag

SEQ ID NO: 3714 - DNA, 22 bp, Artificial Sequence
  Synthetic
gcttcagcucagtcatgctgut

SEQ ID NO: 3715 - DNA, 23 bp, Artificial Sequence
  Synthetic
ctttcccacccucattgatguca

SEQ ID NO: 3716 - DNA, 27 bp, Artificial Sequence
  Synthetic
tcccactatugttatatgacucacggt

SEQ ID NO: 3717 - DNA, 24 bp, Artificial Sequence
  Synthetic
agtagcaaauggactccaguagga

SEQ ID NO: 3718 - DNA, 25 bp, Artificial Sequence
  Synthetic
aactttguatggctcugcaaagaga

SEQ ID NO: 3719 - DNA, 24 bp, Artificial Sequence
  Synthetic
catagcaacaugaaccgugaagac

SEQ ID NO: 3720 - DNA, 29 bp, Artificial Sequence
  Synthetic
cggaagtttgcagautccttaaatgaaut

SEQ ID NO: 3721 - DNA, 24 bp, Artificial Sequence
  Synthetic
ggacacugaaggctaugacaaaca

SEQ ID NO: 3722 - DNA, 31 bp, Artificial Sequence
  Synthetic
agacagaaaaguattgtggcatctuagaaaa

SEQ ID NO: 3723 - DNA, 27 bp, Artificial Sequence
  Synthetic
ccacagcaucatgtacaaatugaacac

SEQ ID NO: 3724 - DNA, 28 bp, Artificial Sequence
  Synthetic
tttcatccuagacaagaaatcgcttuga

SEQ ID NO: 3725 - DNA, 22 bp, Artificial Sequence
  Synthetic
gcacguagaggtatcccuccat

SEQ ID NO: 3726 - DNA, 21 bp, Artificial Sequence
  Synthetic
cccattcuggcctcatctuga

SEQ ID NO: 3727 - DNA, 23 bp, Artificial Sequence
  Synthetic
ttgctccugagaaaagcatgcua

SEQ ID NO: 3728 - DNA, 21 bp, Artificial Sequence
  Synthetic
cttgtgttcugacgtgccuct

SEQ ID NO: 3729 - DNA, 19 bp, Artificial Sequence
  Synthetic
ccatccagggaccugccua

SEQ ID NO: 3730 - DNA, 23 bp, Artificial Sequence
  Synthetic
gaggccucaggaagaaacaguag

SEQ ID NO: 3731 - DNA, 22 bp, Artificial Sequence
  Synthetic
cccccagguacattcttcacug

SEQ ID NO: 3732 - DNA, 26 bp, Artificial Sequence
  Synthetic
tctcatcaaauccaaacagcatccut

SEQ ID NO: 3733 - DNA, 22 bp, Artificial Sequence
  Synthetic
attctagguggaatggcugacc

SEQ ID NO: 3734 - DNA, 22 bp, Artificial Sequence
  Synthetic
acucctgtttucacacagcaca

SEQ ID NO: 3735 - DNA, 21 bp, Artificial Sequence
  Synthetic
ccccgcccauatctttgugag

SEQ ID NO: 3736 - DNA, 26 bp, Artificial Sequence
  Synthetic
ccccatccauggaggagttgaagtut

SEQ ID NO: 3737 - DNA, 20 bp, Artificial Sequence
  Synthetic
accugacctgcugcgagcaa

SEQ ID NO: 3738 - DNA, 20 bp, Artificial Sequence
  Synthetic
cugggcacuaaacagcttug

SEQ ID NO: 3739 - DNA, 23 bp, Artificial Sequence
  Synthetic
ccagagagcauctttgactgugt

SEQ ID NO: 3740 - DNA, 18 bp, Artificial Sequence
  Synthetic
cacagaccugggtggcua

SEQ ID NO: 3741 - DNA, 17 bp, Artificial Sequence
  Synthetic
tgcccugacgcctctuc

SEQ ID NO: 3742 - DNA, 19 bp, Artificial Sequence
  Synthetic
ggcccugagatuccccaga

SEQ ID NO: 3743 - DNA, 23 bp, Artificial Sequence
  Synthetic
atgtccgagcugaagatcaugag

SEQ ID NO: 3744 - DNA, 23 bp, Artificial Sequence
  Synthetic
aactcccacutctcgttguaagg

SEQ ID NO: 3745 - DNA, 23 bp, Artificial Sequence
  Synthetic
tcagaaacaagguccaggaacug

SEQ ID NO: 3746 - DNA, 23 bp, Artificial Sequence
  Synthetic
ctctaagguctcaacagucagca

SEQ ID NO: 3747 - DNA, 22 bp, Artificial Sequence
  Synthetic
cctgaagctcugagccacatuc

SEQ ID NO: 3748 - DNA, 22 bp, Artificial Sequence
  Synthetic
ctcaaacgucagagctcuccag

SEQ ID NO: 3749 - DNA, 21 bp, Artificial Sequence
  Synthetic
gcucaccaauaccacctgaut

SEQ ID NO: 3750 - DNA, 20 bp, Artificial Sequence
  Synthetic
ttgccggcaugttggaaauc

SEQ ID NO: 3751 - DNA, 29 bp, Artificial Sequence
  Synthetic
tccctaaactaccutggtataacatcucc

SEQ ID NO: 3752 - DNA, 21 bp, Artificial Sequence
  Synthetic
aatgaactuggccctguggat

SEQ ID NO: 3753 - DNA, 19 bp, Artificial Sequence
  Synthetic
ggucgtgtucgaggaccag

SEQ ID NO: 3754 - DNA, 19 bp, Artificial Sequence
  Synthetic
ccattccacgcugccatug

SEQ ID NO: 3755 - DNA, 21 bp, Artificial Sequence
  Synthetic
cgcatccuagacctcactuct

SEQ ID NO: 3756 - DNA, 19 bp, Artificial Sequence
  Synthetic
gggatgagcugctggugac

SEQ ID NO: 3757 - DNA, 22 bp, Artificial Sequence
  Synthetic
tcaagugacaaacggactugct

SEQ ID NO: 3758 - DNA, 21 bp, Artificial Sequence
  Synthetic
gagagutcccaugcagggaaa

SEQ ID NO: 3759 - DNA, 24 bp, Artificial Sequence
  Synthetic
gctcttctugaaccatccttccug

SEQ ID NO: 3760 - DNA, 22 bp, Artificial Sequence
  Synthetic
gaggtgacugtcagtttgucca

SEQ ID NO: 3761 - DNA, 22 bp, Artificial Sequence
  Synthetic
ctgtggatccucctctgaccua

SEQ ID NO: 3762 - DNA, 28 bp, Artificial Sequence
  Synthetic
acctttttgcaaauctgtttcattguga

SEQ ID NO: 3763 - DNA, 28 bp, Artificial Sequence
  Synthetic
ctgaggatagtucagatgatgaacctut

SEQ ID NO: 3764 - DNA, 28 bp, Artificial Sequence
  Synthetic
gcagaaatattuaactctccccauggaa

SEQ ID NO: 3765 - DNA, 31 bp, Artificial Sequence
  Synthetic
ttctgtcagaugaatctagtagtgaugaaga

SEQ ID NO: 3766 - DNA, 22 bp, Artificial Sequence
  Synthetic
tgaucctcacttugccagaagg

SEQ ID NO: 3767 - DNA, 27 bp, Artificial Sequence
  Synthetic
ccttggtttctuccattttctgttuca

SEQ ID NO: 3768 - DNA, 25 bp, Artificial Sequence
  Synthetic
gacttgcattgucaacctctcuact

SEQ ID NO: 3769 - DNA, 30 bp, Artificial Sequence
  Synthetic
gggactttgttcuacatgtgtatctaauaa

SEQ ID NO: 3770 - DNA, 19 bp, Artificial Sequence
  Synthetic
gaccagaucccttgggcut

SEQ ID NO: 3771 - DNA, 24 bp, Artificial Sequence
  Synthetic
ctcctacagaugtcacagccauac

SEQ ID NO: 3772 - DNA, 20 bp, Artificial Sequence
  Synthetic
cagctctgugagctcauccc

SEQ ID NO: 3773 - DNA, 20 bp, Artificial Sequence
  Synthetic
atgctggccgutatcctuca

SEQ ID NO: 3774 - DNA, 19 bp, Artificial Sequence
  Synthetic
cagcguggtcggtguagat

SEQ ID NO: 3775 - DNA, 21 bp, Artificial Sequence
  Synthetic
acctggaucgctacctgtcut

SEQ ID NO: 3776 - DNA, 18 bp, Artificial Sequence
  Synthetic
gctccucgccgatctugt

SEQ ID NO: 3777 - DNA, 20 bp, Artificial Sequence
  Synthetic
cugagauggaggaggagtuc

SEQ ID NO: 3778 - DNA, 20 bp, Artificial Sequence
  Synthetic
gatcaucacggagggtccug

SEQ ID NO: 3779 - DNA, 25 bp, Artificial Sequence
  Synthetic
ccaucatctacucccgagagaagaa

SEQ ID NO: 3780 - DNA, 19 bp, Artificial Sequence
  Synthetic
gtgagggugaggcatgugt

SEQ ID NO: 3781 - DNA, 18 bp, Artificial Sequence
  Synthetic
gcggguccgcatcatcuc

SEQ ID NO: 3782 - DNA, 21 bp, Artificial Sequence
  Synthetic
gcctggtccuccatagacuca

SEQ ID NO: 3783 - DNA, 22 bp, Artificial Sequence
  Synthetic
gugacaccatguaccaggacag

SEQ ID NO: 3784 - DNA, 17 bp, Artificial Sequence
  Synthetic
gtugcagccaccuccct

SEQ ID NO: 3785 - DNA, 19 bp, Artificial Sequence
  Synthetic
tgaauggcgacagccucac

SEQ ID NO: 3786 - DNA, 19 bp, Artificial Sequence
  Synthetic
ccctctgugacccgtccua

SEQ ID NO: 3787 - DNA, 21 bp, Artificial Sequence
  Synthetic
cactcacaugcatgcttuccc

SEQ ID NO: 3788 - DNA, 23 bp, Artificial Sequence
  Synthetic
ggaagtacutgctgtctucaggt

SEQ ID NO: 3789 - DNA, 22 bp, Artificial Sequence
  Synthetic
caccacuaacgccagcttttuc

SEQ ID NO: 3790 - DNA, 22 bp, Artificial Sequence
  Synthetic
gttcatgcggugcttgtacaut

SEQ ID NO: 3791 - DNA, 23 bp, Artificial Sequence
  Synthetic
cgagcagagaacagcuttcaguc

SEQ ID NO: 3792 - DNA, 23 bp, Artificial Sequence
  Synthetic
agctcctgguttttggtctucag

SEQ ID NO: 3793 - DNA, 26 bp, Artificial Sequence
  Synthetic
cggttgaataagauggaggaggaaug

SEQ ID NO: 3794 - DNA, 21 bp, Artificial Sequence
  Synthetic
gtaccgcucctggaaggtuag

SEQ ID NO: 3795 - DNA, 23 bp, Artificial Sequence
  Synthetic
cacttcctgaugaacgaggucat

SEQ ID NO: 3796 - DNA, 21 bp, Artificial Sequence
  Synthetic
ctcccgcaaagagguccuaag

SEQ ID NO: 3797 - DNA, 20 bp, Artificial Sequence
  Synthetic
tggagtguaaccggcacaug

SEQ ID NO: 3798 - DNA, 27 bp, Artificial Sequence
  Synthetic
gattcagcaautctctgtatctugcag

SEQ ID NO: 3799 - DNA, 24 bp, Artificial Sequence
  Synthetic
ctttgaugagagcatggccuacat

SEQ ID NO: 3800 - DNA, 27 bp, Artificial Sequence
  Synthetic
gtttatcatagtucatagctggccugt

SEQ ID NO: 3801 - DNA, 24 bp, Artificial Sequence
  Synthetic
ggacatttutgtgggttuggaagt

SEQ ID NO: 3802 - DNA, 26 bp, Artificial Sequence
  Synthetic
ttgggatguctgattattcugaacgg

SEQ ID NO: 3803 - DNA, 28 bp, Artificial Sequence
  Synthetic
ctccagactctutttgaccaatattgut

SEQ ID NO: 3804 - DNA, 25 bp, Artificial Sequence
  Synthetic
ttctagaaaacuggtatcugcaggt

SEQ ID NO: 3805 - DNA, 25 bp, Artificial Sequence
  Synthetic
catcatgcatcuccaaactcaacuc

SEQ ID NO: 3806 - DNA, 23 bp, Artificial Sequence
  Synthetic
taagacaagacacuggacgugaa

SEQ ID NO: 3807 - DNA, 23 bp, Artificial Sequence
  Synthetic
ggtaccugacaatgaugagcagt

SEQ ID NO: 3808 - DNA, 26 bp, Artificial Sequence
  Synthetic
actgaagtgcuccttttctttuagca

SEQ ID NO: 3809 - DNA, 26 bp, Artificial Sequence
  Synthetic
guaacgagaaaucaacaaatgucagg

SEQ ID NO: 3810 - DNA, 18 bp, Artificial Sequence
  Synthetic
ccccugactccguccagt

SEQ ID NO: 3811 - DNA, 22 bp, Artificial Sequence
  Synthetic
acgccctuacctttctttucct

SEQ ID NO: 3812 - DNA, 26 bp, Artificial Sequence
  Synthetic
gttcctcaaaagagaaaucacgcaut

SEQ ID NO: 3813 - DNA, 27 bp, Artificial Sequence
  Synthetic
actgctaaggcauaggaattttcguag

SEQ ID NO: 3814 - DNA, 21 bp, Artificial Sequence
  Synthetic
agggcgucatcagtttcucat

SEQ ID NO: 3815 - DNA, 24 bp, Artificial Sequence
  Synthetic
gtctgaggcugttcactgactuac

SEQ ID NO: 3816 - DNA, 23 bp, Artificial Sequence
  Synthetic
cccccacucatgctcuacaaccc

SEQ ID NO: 3817 - DNA, 24 bp, Artificial Sequence
  Synthetic
gggacaaggaugcctgaccagtua

SEQ ID NO: 3818 - DNA, 26 bp, Artificial Sequence
  Synthetic
agactcactcuccataaatgcuacga

SEQ ID NO: 3819 - DNA, 29 bp, Artificial Sequence
  Synthetic
tgatcaccaauctctaccagtuaaaaagg

SEQ ID NO: 3820 - DNA, 25 bp, Artificial Sequence
  Synthetic
ttgtagtcaaucaaaggtggtcugg

SEQ ID NO: 3821 - DNA, 25 bp, Artificial Sequence
  Synthetic
acttatctcctugagggagcguaat

SEQ ID NO: 3822 - DNA, 19 bp, Artificial Sequence
  Synthetic
ccagggacugcgtctctug

SEQ ID NO: 3823 - DNA, 23 bp, Artificial Sequence
  Synthetic
aacaacaaccuggagccttatut

SEQ ID NO: 3824 - DNA, 30 bp, Artificial Sequence
  Synthetic
tgttagtggtcauttttctaatgtcttuct

SEQ ID NO: 3825 - DNA, 27 bp, Artificial Sequence
  Synthetic
gtgucaggactttattugaagcaaagg

SEQ ID NO: 3826 - DNA, 17 bp, Artificial Sequence
  Synthetic
gcctccucctgccacug

SEQ ID NO: 3827 - DNA, 24 bp, Artificial Sequence
  Synthetic
aaagggaguggaaggaaggaaaug

SEQ ID NO: 3828 - DNA, 21 bp, Artificial Sequence
  Synthetic
tgaggtgacccutgtctcugt

SEQ ID NO: 3829 - DNA, 23 bp, Artificial Sequence
  Synthetic
gcccagcacuttgatcttttuga

SEQ ID NO: 3830 - DNA, 19 bp, Artificial Sequence
  Synthetic
ccacacugacgtgcctcuc

SEQ ID NO: 3831 - DNA, 23 bp, Artificial Sequence
  Synthetic
tctttgtgtucccggacataguc

SEQ ID NO: 3832 - DNA, 28 bp, Artificial Sequence
  Synthetic
ttccaauagagggaaacuaatagttguc

SEQ ID NO: 3833 - DNA, 28 bp, Artificial Sequence
  Synthetic
ctcagtacaaacucattagcaucaggat

SEQ ID NO: 3834 - DNA, 22 bp, Artificial Sequence
  Synthetic
gccaagaaguggaatagcauct

SEQ ID NO: 3835 - DNA, 23 bp, Artificial Sequence
  Synthetic
cacgtcguccatgtcttctucat

SEQ ID NO: 3836 - DNA, 23 bp, Artificial Sequence
  Synthetic
gtctccttgutgaggacatucac

SEQ ID NO: 3837 - DNA, 25 bp, Artificial Sequence
  Synthetic
ggctgattgugatagacaggatuct

SEQ ID NO: 3838 - DNA, 27 bp, Artificial Sequence
  Synthetic
acaaagcagtgaauttattggagcaug

SEQ ID NO: 3839 - DNA, 24 bp, Artificial Sequence
  Synthetic
ctagtcggugtaaacgtugcaaaa

SEQ ID NO: 3840 - DNA, 19 bp, Artificial Sequence
  Synthetic
gccuggcagaaguaccgat

SEQ ID NO: 3841 - DNA, 22 bp, Artificial Sequence
  Synthetic
ctcaggtcugaggatgcatgug

SEQ ID NO: 3842 - DNA, 20 bp, Artificial Sequence
  Synthetic
gcctccccacugttcctuac

SEQ ID NO: 3843 - DNA, 20 bp, Artificial Sequence
  Synthetic
tgcatcagagutggcuccac

SEQ ID NO: 3844 - DNA, 24 bp, Artificial Sequence
  Synthetic
cagggctguagtgacagcttttua

SEQ ID NO: 3845 - DNA, 21 bp, Artificial Sequence
  Synthetic
gcaggctuggatgggatctug

SEQ ID NO: 3846 - DNA, 22 bp, Artificial Sequence
  Synthetic
ggagcactguttcaaggtcuct

SEQ ID NO: 3847 - DNA, 24 bp, Artificial Sequence
  Synthetic
agtaatgggaauggagaggcuagg

SEQ ID NO: 3848 - DNA, 19 bp, Artificial Sequence
  Synthetic
gagctgcugcaggctuagt

SEQ ID NO: 3849 - DNA, 18 bp, Artificial Sequence
  Synthetic
cccagcucaccuggaacc

SEQ ID NO: 3850 - DNA, 23 bp, Artificial Sequence
  Synthetic
gttggaggcautcctactuacgg

SEQ ID NO: 3851 - DNA, 20 bp, Artificial Sequence
  Synthetic
ccaggtgugactaaggcuca

SEQ ID NO: 3852 - DNA, 19 bp, Artificial Sequence
  Synthetic
ggctccuggagttggtgug

SEQ ID NO: 3853 - DNA, 17 bp, Artificial Sequence
  Synthetic
ttgcugcagcugaggga

SEQ ID NO: 3854 - DNA, 22 bp, Artificial Sequence
  Synthetic
cctgaccacuccccaactttuc

SEQ ID NO: 3855 - DNA, 24 bp, Artificial Sequence
  Synthetic
tutttctattgugaccaccccagt

SEQ ID NO: 3856 - DNA, 19 bp, Artificial Sequence
  Synthetic
ggcattccugagccgucat

SEQ ID NO: 3857 - DNA, 17 bp, Artificial Sequence
  Synthetic
gagggaggccugagcug

SEQ ID NO: 3858 - DNA, 22 bp, Artificial Sequence
  Synthetic
cttguggccggaagagaaaaug

SEQ ID NO: 3859 - DNA, 17 bp, Artificial Sequence
  Synthetic
ctgcccgutccctccug

SEQ ID NO: 3860 - DNA, 21 bp, Artificial Sequence
  Synthetic
agaaaagcucagtcggauggg

SEQ ID NO: 3861 - DNA, 28 bp, Artificial Sequence
  Synthetic
tcacagttgautctactctcugagaact

SEQ ID NO: 3862 - DNA, 21 bp, Artificial Sequence
  Synthetic
gcacaagacaguccgacucat

SEQ ID NO: 3863 - DNA, 24 bp, Artificial Sequence
  Synthetic
gugagtagcaaaucaaaagccaca

SEQ ID NO: 3864 - DNA, 21 bp, Artificial Sequence
  Synthetic
gggacagucgaagaactucag

SEQ ID NO: 3865 - DNA, 24 bp, Artificial Sequence
  Synthetic
ctatctgcugcccatacatcucat

SEQ ID NO: 3866 - DNA, 30 bp, Artificial Sequence
  Synthetic
actaactcucaaaaggaaaaacucaaggaa

SEQ ID NO: 3867 - DNA, 25 bp, Artificial Sequence
  Synthetic
tgtctgtctagcuctctgaatcugt

SEQ ID NO: 3868 - DNA, 25 bp, Artificial Sequence
  Synthetic
ctgaatuagagaggcugagaacaca

SEQ ID NO: 3869 - DNA, 29 bp, Artificial Sequence
  Synthetic
ccatctatctgcugtttatagtgaaugcc

SEQ ID NO: 3870 - DNA, 28 bp, Artificial Sequence
  Synthetic
agaaaagggtacacutgaacaagaagut

SEQ ID NO: 3871 - DNA, 29 bp, Artificial Sequence
  Synthetic
aacatgtctucaagggttttcttttcauc

SEQ ID NO: 3872 - DNA, 30 bp, Artificial Sequence
  Synthetic
cctcaaacaacaaugtattcagctaaauga

SEQ ID NO: 3873 - DNA, 27 bp, Artificial Sequence
  Synthetic
tcaucttttacttugagaaggcaagca

SEQ ID NO: 3874 - DNA, 26 bp, Artificial Sequence
  Synthetic
aatgggtgaggutgttgaaaaggaua

SEQ ID NO: 3875 - DNA, 29 bp, Artificial Sequence
  Synthetic
atctcaccatgtutctgtttcaattgtuc

SEQ ID NO: 3876 - DNA, 28 bp, Artificial Sequence
  Synthetic
ggtgctgaaggaucagtttctaaaguaa

SEQ ID NO: 3877 - DNA, 28 bp, Artificial Sequence
  Synthetic
cctttgttacagauggtaagtgauccaa

SEQ ID NO: 3878 - DNA, 26 bp, Artificial Sequence
  Synthetic
tgcucaagaggaaaagaucaaggaac

SEQ ID NO: 3879 - DNA, 22 bp, Artificial Sequence
  Synthetic
tggtgggcuctatccaatacut

SEQ ID NO: 3880 - DNA, 31 bp, Artificial Sequence
  Synthetic
gcatgaacacuaaagcacatatacaactcua

SEQ ID NO: 3881 - DNA, 24 bp, Artificial Sequence
  Synthetic
ttttcacacaacutccaggguaca

SEQ ID NO: 3882 - DNA, 28 bp, Artificial Sequence
  Synthetic
agacttttgagacaguggatgtgaaaut

SEQ ID NO: 3883 - DNA, 28 bp, Artificial Sequence
  Synthetic
cagtcctttgautctggtatatcauggg

SEQ ID NO: 3884 - DNA, 27 bp, Artificial Sequence
  Synthetic
aaugaaaacctggttucagagagagag

SEQ ID NO: 3885 - DNA, 22 bp, Artificial Sequence
  Synthetic
tggtgatccautgctccuaggt

SEQ ID NO: 3886 - DNA, 29 bp, Artificial Sequence
  Synthetic
ttctagttacagaugaatccattcccuct

SEQ ID NO: 3887 - DNA, 22 bp, Artificial Sequence
  Synthetic
gcaaaaccacucctcacaaguc

SEQ ID NO: 3888 - DNA, 23 bp, Artificial Sequence
  Synthetic
cccttaagugccaagaggaacut

SEQ ID NO: 3889 - DNA, 29 bp, Artificial Sequence
  Synthetic
gactgaaatttcuctacccttagttguca

SEQ ID NO: 3890 - DNA, 30 bp, Artificial Sequence
  Synthetic
cagtagguttatagagcuggaacaagaaaa

SEQ ID NO: 3891 - DNA, 28 bp, Artificial Sequence
  Synthetic
agtatacuagcaaagaacattccacuga

SEQ ID NO: 3892 - DNA, 29 bp, Artificial Sequence
  Synthetic
cagcutcaaagggatauacaagaaaggaa

SEQ ID NO: 3893 - DNA, 24 bp, Artificial Sequence
  Synthetic
ttagcccaaauaaaaugccacacc

SEQ ID NO: 3894 - DNA, 26 bp, Artificial Sequence
  Synthetic
gaactgauaagggatctugaaaccca

SEQ ID NO: 3895 - DNA, 26 bp, Artificial Sequence
  Synthetic
agcattcatugatgtcttctguccaa

SEQ ID NO: 3896 - DNA, 25 bp, Artificial Sequence
  Synthetic
tcatcugagcaaagacaaaccugaa

SEQ ID NO: 3897 - DNA, 29 bp, Artificial Sequence
  Synthetic
caagttgtagcaaccutgtttccaaatua

SEQ ID NO: 3898 - DNA, 29 bp, Artificial Sequence
  Synthetic
gttcaggaataugcaaaattctgucaaga

SEQ ID NO: 3899 - DNA, 26 bp, Artificial Sequence
  Synthetic
gcatttcaacaaccuggctttcuaat

SEQ ID NO: 3900 - DNA, 22 bp, Artificial Sequence
  Synthetic
gtgtttcttgugtttccgcugt

SEQ ID NO: 3901 - DNA, 22 bp, Artificial Sequence
  Synthetic
actggcaagutctgctttggua

SEQ ID NO: 3902 - DNA, 24 bp, Artificial Sequence
  Synthetic
agacagaugggactctgaagauca

SEQ ID NO: 3903 - DNA, 29 bp, Artificial Sequence
  Synthetic
gcatgtagttctugcatcttctcaattut

SEQ ID NO: 3904 - DNA, 27 bp, Artificial Sequence
  Synthetic
tgtgaagaagutgtcataattcuggct

SEQ ID NO: 3905 - DNA, 28 bp, Artificial Sequence
  Synthetic
tgaatagaatggucctctccatcacuat

SEQ ID NO: 3906 - DNA, 27 bp, Artificial Sequence
  Synthetic
tgccctucaacaagttttctuagaaga

SEQ ID NO: 3907 - DNA, 28 bp, Artificial Sequence
  Synthetic
acctgttctugtattctctgtuccaaac

SEQ ID NO: 3908 - DNA, 24 bp, Artificial Sequence
  Synthetic
agttctgagaaaauggtggtugct

SEQ ID NO: 3909 - DNA, 28 bp, Artificial Sequence
  Synthetic
acaaaattacucccactccttgtuacat

SEQ ID NO: 3910 - DNA, 25 bp, Artificial Sequence
  Synthetic
acuactgaacgaaucccagcaaaaa

SEQ ID NO: 3911 - DNA, 20 bp, Artificial Sequence
  Synthetic
gtgcaatucccgctcccuat

SEQ ID NO: 3912 - DNA, 22 bp, Artificial Sequence
  Synthetic
gctccaguccaaaguggaagat

SEQ ID NO: 3913 - DNA, 29 bp, Artificial Sequence
  Synthetic
tttctcgtttttcutctcgttctagtuct

SEQ ID NO: 3914 - DNA, 29 bp, Artificial Sequence
  Synthetic
ggaaccggcugtaatcatgaatuagaaat

SEQ ID NO: 3915 - DNA, 22 bp, Artificial Sequence
  Synthetic
gggtcuacccagcctaagaaua

SEQ ID NO: 3916 - DNA, 25 bp, Artificial Sequence
  Synthetic
tgtggctcatugactgaaagacuac

SEQ ID NO: 3917 - DNA, 22 bp, Artificial Sequence
  Synthetic
tcgataccaccugatctgcuct

SEQ ID NO: 3918 - DNA, 27 bp, Artificial Sequence
  Synthetic
ctagagagcagggugaatgttttctua

SEQ ID NO: 3919 - DNA, 26 bp, Artificial Sequence
  Synthetic
agcagcagguatttcttctgguaaat

SEQ ID NO: 3920 - DNA, 18 bp, Artificial Sequence
  Synthetic
ttggtucgacgguggcat

SEQ ID NO: 3921 - DNA, 25 bp, Artificial Sequence
  Synthetic
gggacctctgauttagagagtcaua

SEQ ID NO: 3922 - DNA, 28 bp, Artificial Sequence
  Synthetic
gtctgatacagguagcaatgtaattuga

SEQ ID NO: 3923 - DNA, 30 bp, Artificial Sequence
  Synthetic
gcacaaaagaaccautgattuacaaaagga

SEQ ID NO: 3924 - DNA, 22 bp, Artificial Sequence
  Synthetic
ctggaaguatgggugagacagg

SEQ ID NO: 3925 - DNA, 25 bp, Artificial Sequence
  Synthetic
atgcgctuaacatatgacagugaat

SEQ ID NO: 3926 - DNA, 27 bp, Artificial Sequence
  Synthetic
tcaaggaaagcagagugaaacaaaaug

SEQ ID NO: 3927 - DNA, 20 bp, Artificial Sequence
  Synthetic
cttggauccgcttgccatug

SEQ ID NO: 3928 - DNA, 26 bp, Artificial Sequence
  Synthetic
ggctctggaacuttatccaaguaagt

SEQ ID NO: 3929 - DNA, 28 bp, Artificial Sequence
  Synthetic
catacaggttacutctttgcttatugcc

SEQ ID NO: 3930 - DNA, 18 bp, Artificial Sequence
  Synthetic
ccgccacgcautcguact

SEQ ID NO: 3931 - DNA, 24 bp, Artificial Sequence
  Synthetic
caagtaaagcuagaccgatcuccg

SEQ ID NO: 3932 - DNA, 30 bp, Artificial Sequence
  Synthetic
gagaagcacaagcauatagactaaaaucct

SEQ ID NO: 3933 - DNA, 26 bp, Artificial Sequence
  Synthetic
tttgtagattcucgcctctatugagc

SEQ ID NO: 3934 - DNA, 29 bp, Artificial Sequence
  Synthetic
gtttgaataagguaactgtccagtcauca

SEQ ID NO: 3935 - DNA, 26 bp, Artificial Sequence
  Synthetic
tuctttgtatgttcuaacaggcacca

SEQ ID NO: 3936 - DNA, 23 bp, Artificial Sequence
  Synthetic
gcaauccaaaagaauagcagcca

SEQ ID NO: 3937 - DNA, 27 bp, Artificial Sequence
  Synthetic
caccatcuccatatcatugagaccaaa

SEQ ID NO: 3938 - DNA, 30 bp, Artificial Sequence
  Synthetic
aacatatcctattaugacttgtcacaaugt

SEQ ID NO: 3939 - DNA, 25 bp, Artificial Sequence
  Synthetic
gagtgatgatugggagattccugat

SEQ ID NO: 3940 - DNA, 31 bp, Artificial Sequence
  Synthetic
caaguataaaggaaauaagcagcaaagcaat

SEQ ID NO: 3941 - DNA, 28 bp, Artificial Sequence
  Synthetic
gctactctctgautatatgcttgctugg

SEQ ID NO: 3942 - DNA, 22 bp, Artificial Sequence
  Synthetic
gttagggcaguctctgcuaagg

SEQ ID NO: 3943 - DNA, 26 bp, Artificial Sequence
  Synthetic
ttttggtataugaagcttctgggtut

SEQ ID NO: 3944 - DNA, 28 bp, Artificial Sequence
  Synthetic
tcaattccctaggutttggtaaagaucc

SEQ ID NO: 3945 - DNA, 28 bp, Artificial Sequence
  Synthetic
cagtcuaaagaaagcactgatgaugaga

SEQ ID NO: 3946 - DNA, 28 bp, Artificial Sequence
  Synthetic
gcagagcuagaaacagaaaaatcagtuc

SEQ ID NO: 3947 - DNA, 25 bp, Artificial Sequence
  Synthetic
gtcaggacaaaguccggattgaaua

SEQ ID NO: 3948 - DNA, 25 bp, Artificial Sequence
  Synthetic
cuctttccaaaauaaacaccagcca

SEQ ID NO: 3949 - DNA, 18 bp, Artificial Sequence
  Synthetic
ggccaggcuctgtucaac

SEQ ID NO: 3950 - DNA, 26 bp, Artificial Sequence
  Synthetic
ttcacaatccaguagaaaaagcccut

SEQ ID NO: 3951 - DNA, 22 bp, Artificial Sequence
  Synthetic
acaccagugtgtctcttugcag

SEQ ID NO: 3952 - DNA, 27 bp, Artificial Sequence
  Synthetic
ctgcacaggauctttgataaaaauccc

SEQ ID NO: 3953 - DNA, 23 bp, Artificial Sequence
  Synthetic
agtctacttugtccccaguccat

SEQ ID NO: 3954 - DNA, 22 bp, Artificial Sequence
  Synthetic
cgtggatgaucacagggtugat

SEQ ID NO: 3955 - DNA, 29 bp, Artificial Sequence
  Synthetic
aagaatgtactcgugttaattgtgtauga

SEQ ID NO: 3956 - DNA, 27 bp, Artificial Sequence
  Synthetic
gcaatggcacagaaautgtcataguaa

SEQ ID NO: 3957 - DNA, 24 bp, Artificial Sequence
  Synthetic
tcttgaccagugcttacattuggt

SEQ ID NO: 3958 - DNA, 22 bp, Artificial Sequence
  Synthetic
ctgactugatcaccuccaccaa

SEQ ID NO: 3959 - DNA, 25 bp, Artificial Sequence
  Synthetic
caugcaacacucaacacttauaagc

SEQ ID NO: 3960 - DNA, 22 bp, Artificial Sequence
  Synthetic
tggctcauccgctacattgaut

SEQ ID NO: 3961 - DNA, 31 bp, Artificial Sequence
  Synthetic
ccttctgataaaauttttgaagccattucct

SEQ ID NO: 3962 - DNA, 26 bp, Artificial Sequence
  Synthetic
gtgtctctcaatuctttagcccctut

SEQ ID NO: 3963 - DNA, 30 bp, Artificial Sequence
  Synthetic
tgaagttttagaucaggatggtacttucat

SEQ ID NO: 3964 - DNA, 22 bp, Artificial Sequence
  Synthetic
acagaagucaggatgugcacag

SEQ ID NO: 3965 - DNA, 28 bp, Artificial Sequence
  Synthetic
aatgaacaatttcucctttcctctccut

SEQ ID NO: 3966 - DNA, 29 bp, Artificial Sequence
  Synthetic
tugtatttagaauccggaaggaaaaggaa

SEQ ID NO: 3967 - DNA, 26 bp, Artificial Sequence
  Synthetic
gtttcgtgccutacatgaaagtaucc

SEQ ID NO: 3968 - DNA, 26 bp, Artificial Sequence
  Synthetic
gcaaattacuggcaaatgatuagcat

SEQ ID NO: 3969 - DNA, 27 bp, Artificial Sequence
  Synthetic
ctctcaagattucatctctttctgcug

SEQ ID NO: 3970 - DNA, 25 bp, Artificial Sequence
  Synthetic
tctgaaagauaccagccttccucat

SEQ ID NO: 3971 - DNA, 31 bp, Artificial Sequence
  Synthetic
ctgaaaaataaactcuaatggatggttgcut

SEQ ID NO: 3972 - DNA, 19 bp, Artificial Sequence
  Synthetic
ccacucagccggattccuc

SEQ ID NO: 3973 - DNA, 20 bp, Artificial Sequence
  Synthetic
gccagcuggtttggcuacat

SEQ ID NO: 3974 - DNA, 28 bp, Artificial Sequence
  Synthetic
tgcagcagccaauataaaaagctatgua

SEQ ID NO: 3975 - DNA, 21 bp, Artificial Sequence
  Synthetic
cgcagccacutctgggauaac

SEQ ID NO: 3976 - DNA, 20 bp, Artificial Sequence
  Synthetic
ctctgtcaacutcccgcuca

SEQ ID NO: 3977 - DNA, 28 bp, Artificial Sequence
  Synthetic
ggctctactcucctttttatttcaggut

SEQ ID NO: 3978 - DNA, 23 bp, Artificial Sequence
  Synthetic
caagagccaaguggtctcactua

SEQ ID NO: 3979 - DNA, 26 bp, Artificial Sequence
  Synthetic
tcctatgtgtucaccttgtgtuacag

SEQ ID NO: 3980 - DNA, 21 bp, Artificial Sequence
  Synthetic
ccaacutcacaccuggaccaa

SEQ ID NO: 3981 - DNA, 21 bp, Artificial Sequence
  Synthetic
auggcaaagacuggcaaaagc

SEQ ID NO: 3982 - DNA, 20 bp, Artificial Sequence
  Synthetic
atgucaaaccccacgtccuc

SEQ ID NO: 3983 - DNA, 22 bp, Artificial Sequence
  Synthetic
gacagagaccagutgtcaccuc

SEQ ID NO: 3984 - DNA, 22 bp, Artificial Sequence
  Synthetic
cgctggaaucctcgtttuccaa

SEQ ID NO: 3985 - DNA, 21 bp, Artificial Sequence
  Synthetic
gcaguttagggcaucgaggag

SEQ ID NO: 3986 - DNA, 24 bp, Artificial Sequence
  Synthetic
gaccttcggugactgatgatcuaa

SEQ ID NO: 3987 - DNA, 19 bp, Artificial Sequence
  Synthetic
ttcaaugccgguagggacg

SEQ ID NO: 3988 - DNA, 19 bp, Artificial Sequence
  Synthetic
gtgcacgggucgggugaga

SEQ ID NO: 3989 - DNA, 23 bp, Artificial Sequence
  Synthetic
caccctggcuctgaccattcugt

SEQ ID NO: 3990 - DNA, 18 bp, Artificial Sequence
  Synthetic
gucagccgaaggcuccat

SEQ ID NO: 3991 - DNA, 17 bp, Artificial Sequence
  Synthetic
gcuggctggucaccaga

SEQ ID NO: 3992 - DNA, 22 bp, Artificial Sequence
  Synthetic
atgugaaccacgaaaacccuca

SEQ ID NO: 3993 - DNA, 19 bp, Artificial Sequence
  Synthetic
gctcaccuctggugccaaa

SEQ ID NO: 3994 - DNA, 17 bp, Artificial Sequence
  Synthetic
gggaaccuggcgucagt

SEQ ID NO: 3995 - DNA, 17 bp, Artificial Sequence
  Synthetic
tggacacgcuggtggug

SEQ ID NO: 3996 - DNA, 19 bp, Artificial Sequence
  Synthetic
gcgauctaggtuccagccc

SEQ ID NO: 3997 - DNA, 21 bp, Artificial Sequence
  Synthetic
ggactaguggagaaggugcga

SEQ ID NO: 3998 - DNA, 21 bp, Artificial Sequence
  Synthetic
cctgggcucagcttcatuacc

SEQ ID NO: 3999 - DNA, 18 bp, Artificial Sequence
  Synthetic
cgcgcuaggcgcttttuc

SEQ ID NO: 4000 - DNA, 27 bp, Artificial Sequence
  Synthetic
cacctttgatuggatcagagactcuac

SEQ ID NO: 4001 - DNA, 27 bp, Artificial Sequence
  Synthetic
tccatctctacutgaagtatgtgguca

SEQ ID NO: 4002 - DNA, 31 bp, Artificial Sequence
  Synthetic
tctaatagggaagautgaaaagtuggacaag

SEQ ID NO: 4003 - DNA, 27 bp, Artificial Sequence
  Synthetic
acctctcuaacaaagctatctgcaaug

SEQ ID NO: 4004 - DNA, 23 bp, Artificial Sequence
  Synthetic
cacctccgtucattggaaagtut

SEQ ID NO: 4005 - DNA, 28 bp, Artificial Sequence
  Synthetic
acttctgaaaauaaattcctcccucacc

SEQ ID NO: 4006 - DNA, 27 bp, Artificial Sequence
  Synthetic
atgagaactuaccatatcaucacacct

SEQ ID NO: 4007 - DNA, 25 bp, Artificial Sequence
  Synthetic
aattcctgtuccagctcatatugct

SEQ ID NO: 4008 - DNA, 28 bp, Artificial Sequence
  Synthetic
ggagccagaugaacaacttagaaaugat

SEQ ID NO: 4009 - DNA, 29 bp, Artificial Sequence
  Synthetic
aacaaaattggccuacatattcaatgtut

SEQ ID NO: 4010 - DNA, 28 bp, Artificial Sequence
  Synthetic
ggagtttaaggaacutggagttttgtug

SEQ ID NO: 4011 - DNA, 28 bp, Artificial Sequence
  Synthetic
ttccgtttccutagcaattcuagaaagt

SEQ ID NO: 4012 - DNA, 25 bp, Artificial Sequence
  Synthetic
agagacattgutgcagagatugaca

SEQ ID NO: 4013 - DNA, 24 bp, Artificial Sequence
  Synthetic
actgttaccucctccaactaacut

SEQ ID NO: 4014 - DNA, 23 bp, Artificial Sequence
  Synthetic
ctcaagaaugccctuggaaaagc

SEQ ID NO: 4015 - DNA, 24 bp, Artificial Sequence
  Synthetic
ggttgctaagugcctgacuaaaga

SEQ ID NO: 4016 - DNA, 25 bp, Artificial Sequence
  Synthetic
tgggaaagagaugaagcacaagtua

SEQ ID NO: 4017 - DNA, 21 bp, Artificial Sequence
  Synthetic
ccaaacactuccctccaggug

SEQ ID NO: 4018 - DNA, 27 bp, Artificial Sequence
  Synthetic
tctcaggagcaaguttttggttuagat

SEQ ID NO: 4019 - DNA, 22 bp, Artificial Sequence
  Synthetic
ctctgctcgcucctggttaaut

SEQ ID NO: 4020 - DNA, 28 bp, Artificial Sequence
  Synthetic
caaactcacaggucctagaaatugagaa

SEQ ID NO: 4021 - DNA, 29 bp, Artificial Sequence
  Synthetic
ttatgactacaaaaccacugccaaaaauc

SEQ ID NO: 4022 - DNA, 24 bp, Artificial Sequence
  Synthetic
gcctcaacucctgtuagaaaacca

SEQ ID NO: 4023 - DNA, 29 bp, Artificial Sequence
  Synthetic
gagaaatgcaacuttcctatgtgattuga

SEQ ID NO: 4024 - DNA, 24 bp, Artificial Sequence
  Synthetic
cttctccauccccttcatcccuat

SEQ ID NO: 4025 - DNA, 30 bp, Artificial Sequence
  Synthetic
agtatataaccttaucagtcacccauggaa

SEQ ID NO: 4026 - DNA, 27 bp, Artificial Sequence
  Synthetic
gggacttcatugatggaaatgtugaga

SEQ ID NO: 4027 - DNA, 22 bp, Artificial Sequence
  Synthetic
ctcugagcgacgttucagaaga

SEQ ID NO: 4028 - DNA, 23 bp, Artificial Sequence
  Synthetic
gcaatgtgcuttagatcgcucca

SEQ ID NO: 4029 - DNA, 27 bp, Artificial Sequence
  Synthetic
tctgtcagttttuccttcttcttgcut

SEQ ID NO: 4030 - DNA, 28 bp, Artificial Sequence
  Synthetic
cacaactaaatuatctccaggtuagcac

SEQ ID NO: 4031 - DNA, 23 bp, Artificial Sequence
  Synthetic
gaccatgcutccttggaguagat

SEQ ID NO: 4032 - DNA, 24 bp, Artificial Sequence
  Synthetic
tggaccaugctttgtttctauccc

SEQ ID NO: 4033 - DNA, 25 bp, Artificial Sequence
  Synthetic
agggtacacuggctttgttcatuac

SEQ ID NO: 4034 - DNA, 25 bp, Artificial Sequence
  Synthetic
tgtgaaaggauaacactgttccuca

SEQ ID NO: 4035 - DNA, 26 bp, Artificial Sequence
  Synthetic
ctgcagtttuctgacattcaatucca

SEQ ID NO: 4036 - DNA, 30 bp, Artificial Sequence
  Synthetic
atggctttattaguagtttccacttgtuct

SEQ ID NO: 4037 - DNA, 28 bp, Artificial Sequence
  Synthetic
tgttgttgttttguctcctcttcttuct

SEQ ID NO: 4038 - DNA, 28 bp, Artificial Sequence
  Synthetic
ggaatuaacagaucagaaaagcaaacug

SEQ ID NO: 4039 - DNA, 22 bp, Artificial Sequence
  Synthetic
ataccccauctcccagugagaa

SEQ ID NO: 4040 - DNA, 23 bp, Artificial Sequence
  Synthetic
gcaaaccacaccuccatgtgtua

SEQ ID NO: 4041 - DNA, 19 bp, Artificial Sequence
  Synthetic
cccgctcauggttgtccug

SEQ ID NO: 4042 - DNA, 31 bp, Artificial Sequence
  Synthetic
agauctagaagctatttuggaaagaaacgaa

SEQ ID NO: 4043 - DNA, 23 bp, Artificial Sequence
  Synthetic
tccuacgaacccagagaauagca

SEQ ID NO: 4044 - DNA, 22 bp, Artificial Sequence
  Synthetic
agccatcaugccatcactuagt

SEQ ID NO: 4045 - DNA, 29 bp, Artificial Sequence
  Synthetic
aggtagtggaggugttttccttgaataua

SEQ ID NO: 4046 - DNA, 25 bp, Artificial Sequence
  Synthetic
gcautttaucaaaggaguagggaag

SEQ ID NO: 4047 - DNA, 24 bp, Artificial Sequence
  Synthetic
tgaaggccuaagatgaatgcauga

SEQ ID NO: 4048 - DNA, 21 bp, Artificial Sequence
  Synthetic
gggucccaagcaactacauca

SEQ ID NO: 4049 - DNA, 21 bp, Artificial Sequence
  Synthetic
cucactcucacgcaccaagaa

SEQ ID NO: 4050 - DNA, 24 bp, Artificial Sequence
  Synthetic
ctatggtgtgucccccaacuacga

SEQ ID NO: 4051 - DNA, 19 bp, Artificial Sequence
  Synthetic
cccggcagucccagccuac

SEQ ID NO: 4052 - DNA, 21 bp, Artificial Sequence
  Synthetic
gctcagcaguggtggattugt

SEQ ID NO: 4053 - DNA, 20 bp, Artificial Sequence
  Synthetic
tgtgtaggugtcccctguca

SEQ ID NO: 4054 - DNA, 25 bp, Artificial Sequence
  Synthetic
gatctcatggaugatctgactuggg

SEQ ID NO: 4055 - DNA, 20 bp, Artificial Sequence
  Synthetic
ctttcaccccacugcaggua

SEQ ID NO: 4056 - DNA, 20 bp, Artificial Sequence
  Synthetic
ggcggccugaatgaagauga

SEQ ID NO: 4057 - DNA, 19 bp, Artificial Sequence
  Synthetic
cguccatcucccggaagga

SEQ ID NO: 4058 - DNA, 18 bp, Artificial Sequence
  Synthetic
ctcttgcuccgcctccug

SEQ ID NO: 4059 - DNA, 20 bp, Artificial Sequence
  Synthetic
gccggctuctcacttttgug

SEQ ID NO: 4060 - DNA, 20 bp, Artificial Sequence
  Synthetic
agaagcuggaaagggcagug

SEQ ID NO: 4061 - DNA, 21 bp, Artificial Sequence
  Synthetic
cgactcagaggagugcttgug

SEQ ID NO: 4062 - DNA, 20 bp, Artificial Sequence
  Synthetic
ccacuccaaagccacagucc

SEQ ID NO: 4063 - DNA, 21 bp, Artificial Sequence
  Synthetic
cgaagagacacucgggtugat

SEQ ID NO: 4064 - DNA, 20 bp, Artificial Sequence
  Synthetic
gccacucaggactucagcaa

SEQ ID NO: 4065 - DNA, 19 bp, Artificial Sequence
  Synthetic
agccactgucacgggtaug

SEQ ID NO: 4066 - DNA, 20 bp, Artificial Sequence
  Synthetic
gcctgcucgatgcucaaacc

SEQ ID NO: 4067 - DNA, 21 bp, Artificial Sequence
  Synthetic
gaaaagcgtcugcaggatguc

SEQ ID NO: 4068 - DNA, 21 bp, Artificial Sequence
  Synthetic
ggttgatguccaggcuaagct

SEQ ID NO: 4069 - DNA, 20 bp, Artificial Sequence
  Synthetic
ggcagguagacggagacuca

SEQ ID NO: 4070 - DNA, 20 bp, Artificial Sequence
  Synthetic
ccgaagagcuctcctcacug

SEQ ID NO: 4071 - DNA, 19 bp, Artificial Sequence
  Synthetic
cttcagggcagccuctgut

SEQ ID NO: 4072 - DNA, 21 bp, Artificial Sequence
  Synthetic
ggcatccacuggcttguagaa

SEQ ID NO: 4073 - DNA, 21 bp, Artificial Sequence
  Synthetic
caucaagccucccaagaagga

SEQ ID NO: 4074 - DNA, 18 bp, Artificial Sequence
  Synthetic
gaccgacgugacgttugc

SEQ ID NO: 4075 - DNA, 22 bp, Artificial Sequence
  Synthetic
ggtgtgtugaacatccctucct

SEQ ID NO: 4076 - DNA, 19 bp, Artificial Sequence
  Synthetic
agcagaacguggctctugg

SEQ ID NO: 4077 - DNA, 21 bp, Artificial Sequence
  Synthetic
caagaccaaccagcugcagua

SEQ ID NO: 4078 - DNA, 28 bp, Artificial Sequence
  Synthetic
gttctgtuaaccataatagucccacagt

SEQ ID NO: 4079 - DNA, 27 bp, Artificial Sequence
  Synthetic
agaagaatgaugatggctggtaugaag

SEQ ID NO: 4080 - DNA, 23 bp, Artificial Sequence
  Synthetic
catgctauaaggagacagccuct

SEQ ID NO: 4081 - DNA, 23 bp, Artificial Sequence
  Synthetic
cccatactgugttgttgcuacca

SEQ ID NO: 4082 - DNA, 27 bp, Artificial Sequence
  Synthetic
atgactaattuatttcagcctuccaca

SEQ ID NO: 4083 - DNA, 24 bp, Artificial Sequence
  Synthetic
tcgagaaaacaguggtagcaguag

SEQ ID NO: 4084 - DNA, 28 bp, Artificial Sequence
  Synthetic
cccatacacutacttaagucacagaaac

SEQ ID NO: 4085 - DNA, 23 bp, Artificial Sequence
  Synthetic
gcacactgucgagaacaaaucct

SEQ ID NO: 4086 - DNA, 28 bp, Artificial Sequence
  Synthetic
caggtgctattautttgtgagttctuga

SEQ ID NO: 4087 - DNA, 26 bp, Artificial Sequence
  Synthetic
ggtccagugtatatggauagcaaaca

SEQ ID NO: 4088 - DNA, 26 bp, Artificial Sequence
  Synthetic
gtagttgtttucacagtagtcugcca

SEQ ID NO: 4089 - DNA, 23 bp, Artificial Sequence
  Synthetic
cugtctcttuaacgcgagaggaa

SEQ ID NO: 4090 - DNA, 17 bp, Artificial Sequence
  Synthetic
ggagguggctggacugg

SEQ ID NO: 4091 - DNA, 21 bp, Artificial Sequence
  Synthetic
ccaagucaggctgtgtuaggt

SEQ ID NO: 4092 - DNA, 26 bp, Artificial Sequence
  Synthetic
caaaaacaaggcucataagacaugca

SEQ ID NO: 4093 - DNA, 23 bp, Artificial Sequence
  Synthetic
gaggaacgucacaugagagaaga

SEQ ID NO: 4094 - DNA, 26 bp, Artificial Sequence
  Synthetic
cccatacugaacagcaagacuaaaca

SEQ ID NO: 4095 - DNA, 25 bp, Artificial Sequence
  Synthetic
gcctgacactutggtaacactttut

SEQ ID NO: 4096 - DNA, 23 bp, Artificial Sequence
  Synthetic
ttctccttcugcaaagccugaat

SEQ ID NO: 4097 - DNA, 30 bp, Artificial Sequence
  Synthetic
ttcctgtttcctuaacatgtgttttgttut

SEQ ID NO: 4098 - DNA, 28 bp, Artificial Sequence
  Synthetic
caattgaacaaugcctcagctatacaut

SEQ ID NO: 4099 - DNA, 25 bp, Artificial Sequence
  Synthetic
gggaugagtugaaagaacagaagca

SEQ ID NO: 4100 - DNA, 24 bp, Artificial Sequence
  Synthetic
tggacattgcuttgccatcauaga

SEQ ID NO: 4101 - DNA, 21 bp, Artificial Sequence
  Synthetic
ctttcatauggcccctcccut

SEQ ID NO: 4102 - DNA, 21 bp, Artificial Sequence
  Synthetic
cattcgauggctggtttugct

SEQ ID NO: 4103 - DNA, 24 bp, Artificial Sequence
  Synthetic
gttaatggtttcugcaactggcut

SEQ ID NO: 4104 - DNA, 21 bp, Artificial Sequence
  Synthetic
gautcagatgguccggcaagt

SEQ ID NO: 4105 - DNA, 27 bp, Artificial Sequence
  Synthetic
ttggtagauttctgtttcucgaaacca

SEQ ID NO: 4106 - DNA, 28 bp, Artificial Sequence
  Synthetic
ctctctatgactucctgaaatgtgcuac

SEQ ID NO: 4107 - DNA, 25 bp, Artificial Sequence
  Synthetic
gctctttagguctcgatgagcaaut

SEQ ID NO: 4108 - DNA, 28 bp, Artificial Sequence
  Synthetic
tttagcaaaagaugcttactagatuggt

SEQ ID NO: 4109 - DNA, 22 bp, Artificial Sequence
  Synthetic
cacacacaaccucacgcatauc

SEQ ID NO: 4110 - DNA, 28 bp, Artificial Sequence
  Synthetic
caagatggttgaaucccaagatguaaaa

SEQ ID NO: 4111 - DNA, 20 bp, Artificial Sequence
  Synthetic
agcagccugtgaacacguag

SEQ ID NO: 4112 - DNA, 26 bp, Artificial Sequence
  Synthetic
agccactaguccacaatggttuaaaa

SEQ ID NO: 4113 - DNA, 23 bp, Artificial Sequence
  Synthetic
gccaagaagcugaagaagctcut

SEQ ID NO: 4114 - DNA, 28 bp, Artificial Sequence
  Synthetic
cgcttaagtcautttcactttacucacc

SEQ ID NO: 4115 - DNA, 21 bp, Artificial Sequence
  Synthetic
agagcccagacucttcucaca

SEQ ID NO: 4116 - DNA, 20 bp, Artificial Sequence
  Synthetic
tccacacaggcugagggaua

SEQ ID NO: 4117 - DNA, 21 bp, Artificial Sequence
  Synthetic
cttggucagtcagugcaacct

SEQ ID NO: 4118 - DNA, 22 bp, Artificial Sequence
  Synthetic
ccatggtgtugctggagtaguc

SEQ ID NO: 4119 - DNA, 24 bp, Artificial Sequence
  Synthetic
acatgtgtaauggctgtagcacuc

SEQ ID NO: 4120 - DNA, 20 bp, Artificial Sequence
  Synthetic
tccaucgaagccccuaggag

SEQ ID NO: 4121 - DNA, 26 bp, Artificial Sequence
  Synthetic
tgataagtgauaaaggccuggacaag

SEQ ID NO: 4122 - DNA, 19 bp, Artificial Sequence
  Synthetic
cccuagggaaggccctugt

SEQ ID NO: 4123 - DNA, 26 bp, Artificial Sequence
  Synthetic
aaaatcccaggacautctcatgtcut

SEQ ID NO: 4124 - DNA, 20 bp, Artificial Sequence
  Synthetic
gctgaatccgutcgagcauc

SEQ ID NO: 4125 - DNA, 29 bp, Artificial Sequence
  Synthetic
ttttctacctggaaucacctttatgaaut

SEQ ID NO: 4126 - DNA, 22 bp, Artificial Sequence
  Synthetic
accacgtcaccuttttcccauc

SEQ ID NO: 4127 - DNA, 28 bp, Artificial Sequence
  Synthetic
aaaatggtctcugttgaattgttuacac

SEQ ID NO: 4128 - DNA, 23 bp, Artificial Sequence
  Synthetic
aaugaagaccaaguaccgaauct

SEQ ID NO: 4129 - DNA, 20 bp, Artificial Sequence
  Synthetic
ccuaacaaccggcacaucac

SEQ ID NO: 4130 - DNA, 24 bp, Artificial Sequence
  Synthetic
cgaugtgctuaaccagaacacact

SEQ ID NO: 4131 - DNA, 23 bp, Artificial Sequence
  Synthetic
ccaacucaagagcagaagcatuc

SEQ ID NO: 4132 - DNA, 20 bp, Artificial Sequence
  Synthetic
ggactuaccggcaaggcuac

SEQ ID NO: 4133 - DNA, 22 bp, Artificial Sequence
  Synthetic
gctttgaugcccaccacacuaa

SEQ ID NO: 4134 - DNA, 23 bp, Artificial Sequence
  Synthetic
cggttgtcatugcagactccuat

SEQ ID NO: 4135 - DNA, 28 bp, Artificial Sequence
  Synthetic
tagttctugaaccagggtatacatuaca

SEQ ID NO: 4136 - DNA, 25 bp, Artificial Sequence
  Synthetic
tgacgatattgggucagccatatug

SEQ ID NO: 4137 - DNA, 22 bp, Artificial Sequence
  Synthetic
ctctctacucggtcgtagguga

SEQ ID NO: 4138 - DNA, 26 bp, Artificial Sequence
  Synthetic
gctgttctggccautgatgatgauat

SEQ ID NO: 4139 - DNA, 30 bp, Artificial Sequence
  Synthetic
tttuagaaaagauaagcagtcauaggaagt

SEQ ID NO: 4140 - DNA, 28 bp, Artificial Sequence
  Synthetic
aagcatgattttatugtccttgacacug

SEQ ID NO: 4141 - DNA, 23 bp, Artificial Sequence
  Synthetic
acttttggtuggaggctcactua

SEQ ID NO: 4142 - DNA, 20 bp, Artificial Sequence
  Synthetic
gcatgttuggcgggaagtug

SEQ ID NO: 4143 - DNA, 19 bp, Artificial Sequence
  Synthetic
ggcguttctugggagccat

SEQ ID NO: 4144 - DNA, 23 bp, Artificial Sequence
  Synthetic
agaagatgugactcagacugcct

SEQ ID NO: 4145 - DNA, 23 bp, Artificial Sequence
  Synthetic
acgtgtaaacccutgaggactug

SEQ ID NO: 4146 - DNA, 22 bp, Artificial Sequence
  Synthetic
cccatcatcacucactggctut

SEQ ID NO: 4147 - DNA, 23 bp, Artificial Sequence
  Synthetic
tgcctttaaagucttgcagccua

SEQ ID NO: 4148 - DNA, 19 bp, Artificial Sequence
  Synthetic
gttctgtguccccaccuga

SEQ ID NO: 4149 - DNA, 23 bp, Artificial Sequence
  Synthetic
gcaggtcccaaautttcactgut

SEQ ID NO: 4150 - DNA, 24 bp, Artificial Sequence
  Synthetic
cccccttgaucatgttctgtgtut

SEQ ID NO: 4151 - DNA, 22 bp, Artificial Sequence
  Synthetic
ctgagtttccaucgaacacguc

SEQ ID NO: 4152 - DNA, 22 bp, Artificial Sequence
  Synthetic
cautctcatcuggagccaggag

SEQ ID NO: 4153 - DNA, 19 bp, Artificial Sequence
  Synthetic
acccctgcuccaacccuaa

SEQ ID NO: 4154 - DNA, 26 bp, Artificial Sequence
  Synthetic
gcttatgtcuccaaggacactccuat

SEQ ID NO: 4155 - DNA, 22 bp, Artificial Sequence
  Synthetic
ctgtagacutgcccacaucagt

SEQ ID NO: 4156 - DNA, 26 bp, Artificial Sequence
  Synthetic
ggtttgtctgggugtttttgttctua

SEQ ID NO: 4157 - DNA, 21 bp, Artificial Sequence
  Synthetic
ctgguaaccagagccctugac

SEQ ID NO: 4158 - DNA, 23 bp, Artificial Sequence
  Synthetic
caccatcccagacucctgttuac

SEQ ID NO: 4159 - DNA, 22 bp, Artificial Sequence
  Synthetic
gacaggtuctcctctguaccct

SEQ ID NO: 4160 - DNA, 19 bp, Artificial Sequence
  Synthetic
agccauggaacaccagcuc

SEQ ID NO: 4161 - DNA, 19 bp, Artificial Sequence
  Synthetic
ggaccuccttcugcacaca

SEQ ID NO: 4162 - DNA, 18 bp, Artificial Sequence
  Synthetic
gccgcucaccctgtgtuc

SEQ ID NO: 4163 - DNA, 20 bp, Artificial Sequence
  Synthetic
gtttgttcucctccgccuct

SEQ ID NO: 4164 - DNA, 18 bp, Artificial Sequence
  Synthetic
cacctcuccccacccuct

SEQ ID NO: 4165 - DNA, 18 bp, Artificial Sequence
  Synthetic
tgugcaagccagguccac

SEQ ID NO: 4166 - DNA, 29 bp, Artificial Sequence
  Synthetic
aatttttcatttuggcttttcagccuagt

SEQ ID NO: 4167 - DNA, 23 bp, Artificial Sequence
  Synthetic
cgtgtuggcgcttttcaucaaat

SEQ ID NO: 4168 - DNA, 26 bp, Artificial Sequence
  Synthetic
cagattcgtucagagtctaaatuccg

SEQ ID NO: 4169 - DNA, 27 bp, Artificial Sequence
  Synthetic
ctctggagttuacaggatttgauggag

SEQ ID NO: 4170 - DNA, 29 bp, Artificial Sequence
  Synthetic
tgcccatttauagaaaatcagctucaaga

SEQ ID NO: 4171 - DNA, 28 bp, Artificial Sequence
  Synthetic
ctgctcaggautaactagaacacuagag

SEQ ID NO: 4172 - DNA, 33 bp, Artificial Sequence
  Synthetic
tattttctttacatttuaggtgtgagtactuga

SEQ ID NO: 4173 - DNA, 28 bp, Artificial Sequence
  Synthetic
gcaatttctctgauggcaaccaatatut

SEQ ID NO: 4174 - DNA, 23 bp, Artificial Sequence
  Synthetic
ctggaaggaaguttgugagcaga

SEQ ID NO: 4175 - DNA, 30 bp, Artificial Sequence
  Synthetic
tcttgttcattaauaattccggcagtuagt

SEQ ID NO: 4176 - DNA, 23 bp, Artificial Sequence
  Synthetic
cactgaagaagcaaacugcctut

SEQ ID NO: 4177 - DNA, 30 bp, Artificial Sequence
  Synthetic
aggaataaacactauggacacttctttguc

SEQ ID NO: 4178 - DNA, 23 bp, Artificial Sequence
  Synthetic
gttgctcttugtgatggcaugaa

SEQ ID NO: 4179 - DNA, 23 bp, Artificial Sequence
  Synthetic
ggcttgtgutgaggctgauacat

SEQ ID NO: 4180 - DNA, 26 bp, Artificial Sequence
  Synthetic
gaattgttcuctgtgtactucaggct

SEQ ID NO: 4181 - DNA, 29 bp, Artificial Sequence
  Synthetic
aatttggaatttaauccgtcagtcugaga

SEQ ID NO: 4182 - DNA, 32 bp, Artificial Sequence
  Synthetic
ggactcaacauaggcttaatgattcttuaaaa

SEQ ID NO: 4183 - DNA, 30 bp, Artificial Sequence
  Synthetic
gaatgaagaagcaaautcaaaacaguaaac

SEQ ID NO: 4184 - DNA, 26 bp, Artificial Sequence
  Synthetic
ggaagaaaauagaactaggcugggaa

SEQ ID NO: 4185 - DNA, 27 bp, Artificial Sequence
  Synthetic
gttgagaugaaaggattccacugaaag

SEQ ID NO: 4186 - DNA, 26 bp, Artificial Sequence
  Synthetic
gcaaatacaagcugaaaacttuggct

SEQ ID NO: 4187 - DNA, 27 bp, Artificial Sequence
  Synthetic
tctgtaagtcagacauaatgcatgcug

SEQ ID NO: 4188 - DNA, 29 bp, Artificial Sequence
  Synthetic
agtattctttacauggcttttggtctuct

SEQ ID NO: 4189 - DNA, 30 bp, Artificial Sequence
  Synthetic
attcattgcagcuttacagtttttcauagt

SEQ ID NO: 4190 - DNA, 23 bp, Artificial Sequence
  Synthetic
ctctguccaccagaatcucaagg

SEQ ID NO: 4191 - DNA, 30 bp, Artificial Sequence
  Synthetic
ccttcctaacaguttaccaaagttgaauca

SEQ ID NO: 4192 - DNA, 32 bp, Artificial Sequence
  Synthetic
tgcaggagaaagtaucactctgtttaaaaaua

SEQ ID NO: 4193 - DNA, 31 bp, Artificial Sequence
  Synthetic
agaagaagaaaatctuaccttggtacagtug

SEQ ID NO: 4194 - DNA, 24 bp, Artificial Sequence
  Synthetic
gactatatauggctgttgugccct

SEQ ID NO: 4195 - DNA, 24 bp, Artificial Sequence
  Synthetic
gacacagtatuggtctgagcagua

SEQ ID NO: 4196 - DNA, 27 bp, Artificial Sequence
  Synthetic
cagtgagttttcugagtgcttttauca

SEQ ID NO: 4197 - DNA, 27 bp, Artificial Sequence
  Synthetic
agtttuaaggcaatttacuagggccat

SEQ ID NO: 4198 - DNA, 26 bp, Artificial Sequence
  Synthetic
tggaatatgcttuggaaagtagggut

SEQ ID NO: 4199 - DNA, 27 bp, Artificial Sequence
  Synthetic
agtatgcatttucaaaagctgttugct

SEQ ID NO: 4200 - DNA, 30 bp, Artificial Sequence
  Synthetic
ttttcttaacacautgactttttggtucgt

SEQ ID NO: 4201 - DNA, 31 bp, Artificial Sequence
  Synthetic
tgaagatttagccautccaaaaccagauaat

SEQ ID NO: 4202 - DNA, 29 bp, Artificial Sequence
  Synthetic
gctaatcagautcaagaggacuggaaaag

SEQ ID NO: 4203 - DNA, 22 bp, Artificial Sequence
  Synthetic
cagtctcuctttgctgugccat

SEQ ID NO: 4204 - DNA, 26 bp, Artificial Sequence
  Synthetic
agttcactgguctatgaacaaaacut

SEQ ID NO: 4205 - DNA, 31 bp, Artificial Sequence
  Synthetic
ggttttatgacaautgctgatauaggcaaat

SEQ ID NO: 4206 - DNA, 22 bp, Artificial Sequence
  Synthetic
aaagtggctuaggaggagctug

SEQ ID NO: 4207 - DNA, 28 bp, Artificial Sequence
  Synthetic
aaacaggaagaacaggauagaaagacug

SEQ ID NO: 4208 - DNA, 32 bp, Artificial Sequence
  Synthetic
agtgatagataacaaggauaatgaaaaccuct

SEQ ID NO: 4209 - DNA, 29 bp, Artificial Sequence
  Synthetic
gtgaaaagggtccuctactgtatttgaut

SEQ ID NO: 4210 - DNA, 30 bp, Artificial Sequence
  Synthetic
aacaaaagtgttgucttcatgctagttuaa

SEQ ID NO: 4211 - DNA, 26 bp, Artificial Sequence
  Synthetic
cgcatgacugtagtttaccuagaact

SEQ ID NO: 4212 - DNA, 30 bp, Artificial Sequence
  Synthetic
acattcatcaagautaataactggtguact

SEQ ID NO: 4213 - DNA, 26 bp, Artificial Sequence
  Synthetic
ccagcattggauctgttgtcatctua

SEQ ID NO: 4214 - DNA, 27 bp, Artificial Sequence
  Synthetic
tggataaagacacugacttgtgcttut

SEQ ID NO: 4215 - DNA, 26 bp, Artificial Sequence
  Synthetic
tgtgaagatgaugtgcagtaucacag

SEQ ID NO: 4216 - DNA, 31 bp, Artificial Sequence
  Synthetic
gcagtcacuaccattgtattctataucaaca

SEQ ID NO: 4217 - DNA, 22 bp, Artificial Sequence
  Synthetic
actgagctaccutggcaactuc

SEQ ID NO: 4218 - DNA, 28 bp, Artificial Sequence
  Synthetic
ggaagccagaauacaactatttcuagct

SEQ ID NO: 4219 - DNA, 27 bp, Artificial Sequence
  Synthetic
ttcagtttaaaaaucacatggcatcug

SEQ ID NO: 4220 - DNA, 24 bp, Artificial Sequence
  Synthetic
cataugaacacgaagcaatguggg

SEQ ID NO: 4221 - DNA, 25 bp, Artificial Sequence
  Synthetic
ccaacatacugaaataaccucagca

SEQ ID NO: 4222 - DNA, 30 bp, Artificial Sequence
  Synthetic
tgctctacaatctcuaagagacagagaaut

SEQ ID NO: 4223 - DNA, 26 bp, Artificial Sequence
  Synthetic
caagtttucagaaaagaagccaugac

SEQ ID NO: 4224 - DNA, 23 bp, Artificial Sequence
  Synthetic
agaaacacucccagcttcucaag

SEQ ID NO: 4225 - DNA, 25 bp, Artificial Sequence
  Synthetic
agagttcuacaaggtgtttggugag

SEQ ID NO: 4226 - DNA, 21 bp, Artificial Sequence
  Synthetic
atgaagggcagutggguacag

SEQ ID NO: 4227 - DNA, 21 bp, Artificial Sequence
  Synthetic
ccgcaggautttcuaagcacg

SEQ ID NO: 4228 - DNA, 24 bp, Artificial Sequence
  Synthetic
gcuctccugaaaagagccaaagag

SEQ ID NO: 4229 - DNA, 25 bp, Artificial Sequence
  Synthetic
tctatgcaaaaacacucactcagut

SEQ ID NO: 4230 - DNA, 31 bp, Artificial Sequence
  Synthetic
ttgcttagatgugagaatatttgaaauacct

SEQ ID NO: 4231 - DNA, 28 bp, Artificial Sequence
  Synthetic
cattctagcagccaautggtacauaaga

SEQ ID NO: 4232 - DNA, 30 bp, Artificial Sequence
  Synthetic
tctaactctgagaaguttaaatgttgggua

SEQ ID NO: 4233 - DNA, 21 bp, Artificial Sequence
  Synthetic
agtgccucaacacttcugacc

SEQ ID NO: 4234 - DNA, 29 bp, Artificial Sequence
  Synthetic
ctggtgacuatacagtcattuaaagcaga

SEQ ID NO: 4235 - DNA, 25 bp, Artificial Sequence
  Synthetic
cactaaaacuctaagggcuaagcca

SEQ ID NO: 4236 - DNA, 25 bp, Artificial Sequence
  Synthetic
tgtccccatuggtgaatttcttgut

SEQ ID NO: 4237 - DNA, 23 bp, Artificial Sequence
  Synthetic
acagctgucagctttaauaagcc

SEQ ID NO: 4238 - DNA, 27 bp, Artificial Sequence
  Synthetic
tggacttggugatagacatguacagaa

SEQ ID NO: 4239 - DNA, 24 bp, Artificial Sequence
  Synthetic
atcttgguaggcaaacaacatucc

SEQ ID NO: 4240 - DNA, 30 bp, Artificial Sequence
  Synthetic
gactggcttatttguatgatactggttcua

SEQ ID NO: 4241 - DNA, 21 bp, Artificial Sequence
  Synthetic
cttccggccuctgctguaaat

SEQ ID NO: 4242 - DNA, 22 bp, Artificial Sequence
  Synthetic
aaatcucagccgactttuccca

SEQ ID NO: 4243 - DNA, 25 bp, Artificial Sequence
  Synthetic
ccctacutaaagtatgtuggcaggt

SEQ ID NO: 4244 - DNA, 24 bp, Artificial Sequence
  Synthetic
aacttgggagaaaaauacugggua

SEQ ID NO: 4245 - DNA, 28 bp, Artificial Sequence
  Synthetic
gggctgtataugagtgttaatcaaaugg

SEQ ID NO: 4246 - DNA, 26 bp, Artificial Sequence
  Synthetic
gtactgggttacucccttcagagtua

SEQ ID NO: 4247 - DNA, 26 bp, Artificial Sequence
  Synthetic
gtttaucggacagaaacgtauagggt

SEQ ID NO: 4248 - DNA, 26 bp, Artificial Sequence
  Synthetic
acatgatcaaccuttgctactcctut

SEQ ID NO: 4249 - DNA, 30 bp, Artificial Sequence
  Synthetic
aagcagcucaggactgtaatattauaaacc

SEQ ID NO: 4250 - DNA, 24 bp, Artificial Sequence
  Synthetic
tcaaguaagggaatgagguaggca

SEQ ID NO: 4251 - DNA, 28 bp, Artificial Sequence
  Synthetic
agtgtattucagagaggaatttgctugt

SEQ ID NO: 4252 - DNA, 27 bp, Artificial Sequence
  Synthetic
tcaacaccaaaguaacacaaatctugg

SEQ ID NO: 4253 - DNA, 25 bp, Artificial Sequence
  Synthetic
caacagaugaaccagcugaaaaaca

SEQ ID NO: 4254 - DNA, 17 bp, Artificial Sequence
  Synthetic
acgcccugcttctcucc

SEQ ID NO: 4255 - DNA, 21 bp, Artificial Sequence
  Synthetic
cgtccttcaugagcccaauca

SEQ ID NO: 4256 - DNA, 26 bp, Artificial Sequence
  Synthetic
gcccaccttataucttagacctgcua

SEQ ID NO: 4257 - DNA, 22 bp, Artificial Sequence
  Synthetic
cctcctugaagaggcttauggt

SEQ ID NO: 4258 - DNA, 32 bp, Artificial Sequence
  Synthetic
aattatctctgttauttcactttatgccucct

SEQ ID NO: 4259 - DNA, 32 bp, Artificial Sequence
  Synthetic
gaaatataatcatugcaggtcagatcaauagt

SEQ ID NO: 4260 - DNA, 26 bp, Artificial Sequence
  Synthetic
cttccaccguaataccagcataauct

SEQ ID NO: 4261 - DNA, 26 bp, Artificial Sequence
  Synthetic
agtgctuggaagagaggtttattgug

SEQ ID NO: 4262 - DNA, 32 bp, Artificial Sequence
  Synthetic
gtgctgaaaatgauaaggatgtaaagatugag

SEQ ID NO: 4263 - DNA, 29 bp, Artificial Sequence
  Synthetic
ccgaattttccaaggutattacatagcug

SEQ ID NO: 4264 - DNA, 20 bp, Artificial Sequence
  Synthetic
gccaccacgacutgacctuc

SEQ ID NO: 4265 - DNA, 25 bp, Artificial Sequence
  Synthetic
gtaaaaacccacuaguacacagcaa

SEQ ID NO: 4266 - DNA, 26 bp, Artificial Sequence
  Synthetic
ccuggacaggaagagaatuaaccaac

SEQ ID NO: 4267 - DNA, 28 bp, Artificial Sequence
  Synthetic
gcccacacatauttcttaacaggtuaga

SEQ ID NO: 4268 - DNA, 22 bp, Artificial Sequence
  Synthetic
caaugtgagggugaagaggaca

SEQ ID NO: 4269 - DNA, 24 bp, Artificial Sequence
  Synthetic
gaagggtgucaattacccacauaa

SEQ ID NO: 4270 - DNA, 25 bp, Artificial Sequence
  Synthetic
tgctgttgtuaaatgaggattuccc

SEQ ID NO: 4271 - DNA, 21 bp, Artificial Sequence
  Synthetic
aggaccacuaccttgcugaca

SEQ ID NO: 4272 - DNA, 27 bp, Artificial Sequence
  Synthetic
catggaagtattutgaaccgagaguca

SEQ ID NO: 4273 - DNA, 30 bp, Artificial Sequence
  Synthetic
gctctattattcugaacttcactactcuca

SEQ ID NO: 4274 - DNA, 28 bp, Artificial Sequence
  Synthetic
ctactttcgtttucttacaggtgaaugg

SEQ ID NO: 4275 - DNA, 27 bp, Artificial Sequence
  Synthetic
ctgctcctuactttaagggttucagaa

SEQ ID NO: 4276 - DNA, 26 bp, Artificial Sequence
  Synthetic
agttatugcaggaagatuacaaccga

SEQ ID NO: 4277 - DNA, 25 bp, Artificial Sequence
  Synthetic
gggtagcacutgtaatagtgaugct

SEQ ID NO: 4278 - DNA, 27 bp, Artificial Sequence
  Synthetic
tctttttctaaattugaccaccaggua

SEQ ID NO: 4279 - DNA, 30 bp, Artificial Sequence
  Synthetic
accaaaatcatcaucttctgctccaauaat

SEQ ID NO: 4280 - DNA, 28 bp, Artificial Sequence
  Synthetic
ggttcctcatuttgtctttttcatucct

SEQ ID NO: 4281 - DNA, 30 bp, Artificial Sequence
  Synthetic
gatcgatcuagaaagaactgatgaaacuca

SEQ ID NO: 4282 - DNA, 27 bp, Artificial Sequence
  Synthetic
aagaaaagagaagaccugagctcatuc

SEQ ID NO: 4283 - DNA, 31 bp, Artificial Sequence
  Synthetic
gaaattctatcuaccactaagctuaccgaaa

SEQ ID NO: 4284 - DNA, 31 bp, Artificial Sequence
  Synthetic
atgtatatgaagcauttgggagtaaaaguga

SEQ ID NO: 4285 - DNA, 26 bp, Artificial Sequence
  Synthetic
tgcaaccaaatguaaagaagcccuaa

SEQ ID NO: 4286 - DNA, 29 bp, Artificial Sequence
  Synthetic
actcttcaaatguctgacttttgtcuaca

SEQ ID NO: 4287 - DNA, 22 bp, Artificial Sequence
  Synthetic
ctcctgcacutggtctaaugga

SEQ ID NO: 4288 - DNA, 28 bp, Artificial Sequence
  Synthetic
tgattgatcccauggaattgttcuaagt

SEQ ID NO: 4289 - DNA, 24 bp, Artificial Sequence
  Synthetic
ctgagggugacagaattccttcuc

SEQ ID NO: 4290 - DNA, 25 bp, Artificial Sequence
  Synthetic
gagaaattgaaacaugctgctgcua

SEQ ID NO: 4291 - DNA, 30 bp, Artificial Sequence
  Synthetic
tttttcttacatgacucactcaactcacut

SEQ ID NO: 4292 - DNA, 20 bp, Artificial Sequence
  Synthetic
cttggtuccaccctgccuaa

SEQ ID NO: 4293 - DNA, 27 bp, Artificial Sequence
  Synthetic
cctgccagguctttagcaaattttaut

SEQ ID NO: 4294 - DNA, 25 bp, Artificial Sequence
  Synthetic
cctccccaggucatagtatuagagt

SEQ ID NO: 4295 - DNA, 29 bp, Artificial Sequence
  Synthetic
gctatagcaagguagccatatctgauaca

SEQ ID NO: 4296 - DNA, 24 bp, Artificial Sequence
  Synthetic
actgagtaccuctgggaaaucaga

SEQ ID NO: 4297 - DNA, 24 bp, Artificial Sequence
  Synthetic
gtgtgaatcugggattgcgattug

SEQ ID NO: 4298 - DNA, 24 bp, Artificial Sequence
  Synthetic
tcattctggugaaggacataugcc

SEQ ID NO: 4299 - DNA, 28 bp, Artificial Sequence
  Synthetic
gggtcataatcaugtggtccattacuaa

SEQ ID NO: 4300 - DNA, 23 bp, Artificial Sequence
  Synthetic
agagttccacagaugaggaggut

SEQ ID NO: 4301 - DNA, 20 bp, Artificial Sequence
  Synthetic
ctgcuggaccagaaatucgg

SEQ ID NO: 4302 - DNA, 24 bp, Artificial Sequence
  Synthetic
tcagtggctucactggtgatctua

SEQ ID NO: 4303 - DNA, 25 bp, Artificial Sequence
  Synthetic
cgaaggcaagcutaaaagaacucac

SEQ ID NO: 4304 - DNA, 31 bp, Artificial Sequence
  Synthetic
atccaatatttatttcuggagtactgtagug

SEQ ID NO: 4305 - DNA, 22 bp, Artificial Sequence
  Synthetic
cgaccaaauagcaugcccaaga

SEQ ID NO: 4306 - DNA, 32 bp, Artificial Sequence
  Synthetic
cttttggtttagauaacctcaaaatcucagac

SEQ ID NO: 4307 - DNA, 27 bp, Artificial Sequence
  Synthetic
ggttctgcaugaaattctcttctctuc

SEQ ID NO: 4308 - DNA, 27 bp, Artificial Sequence
  Synthetic
agctctgcugcataaaatcttagtuga

SEQ ID NO: 4309 - DNA, 26 bp, Artificial Sequence
  Synthetic
actttgcaautaccttttctuccaca

SEQ ID NO: 4310 - DNA, 28 bp, Artificial Sequence
  Synthetic
cagcccctcauacattgataaattggua

SEQ ID NO: 4311 - DNA, 28 bp, Artificial Sequence
  Synthetic
aaaattaaatuccctcacctgugaggat

SEQ ID NO: 4312 - DNA, 28 bp, Artificial Sequence
  Synthetic
gcttaaccttauttttgttgcctuaggt

SEQ ID NO: 4313 - DNA, 29 bp, Artificial Sequence
  Synthetic
acauaaaaatacctuagaaagccggaagt

SEQ ID NO: 4314 - DNA, 21 bp, Artificial Sequence
  Synthetic
cctttccugacctugcaacca

SEQ ID NO: 4315 - DNA, 20 bp, Artificial Sequence
  Synthetic
ctccaacacugctucccgaa

SEQ ID NO: 4316 - DNA, 25 bp, Artificial Sequence
  Synthetic
gtcaggcgagagauaacacaaucat

SEQ ID NO: 4317 - DNA, 21 bp, Artificial Sequence
  Synthetic
cagggcucgttccttctucag

SEQ ID NO: 4318 - DNA, 23 bp, Artificial Sequence
  Synthetic
aactttcagaggcutcatgcuga

SEQ ID NO: 4319 - DNA, 24 bp, Artificial Sequence
  Synthetic
tttgctcugcaacattuccagaag

SEQ ID NO: 4320 - DNA, 23 bp, Artificial Sequence
  Synthetic
caggagatgcaucgaaggttuga

SEQ ID NO: 4321 - DNA, 24 bp, Artificial Sequence
  Synthetic
acatgccatutcctaacacucaca

SEQ ID NO: 4322 - DNA, 29 bp, Artificial Sequence
  Synthetic
ttcatattttgugactcagatctgugaaa

SEQ ID NO: 4323 - DNA, 23 bp, Artificial Sequence
  Synthetic
gcgagtagtuctgtgtccttuct

SEQ ID NO: 4324 - DNA, 26 bp, Artificial Sequence
  Synthetic
gagatacatgaccucaaggacatgut

SEQ ID NO: 4325 - DNA, 25 bp, Artificial Sequence
  Synthetic
tgagcaagaaacuctgacagcatut

SEQ ID NO: 4326 - DNA, 28 bp, Artificial Sequence
  Synthetic
gcaaaagggaauttcttcacatgtugat

SEQ ID NO: 4327 - DNA, 28 bp, Artificial Sequence
  Synthetic
aggctgacttttuccttcaagtcttuaa

SEQ ID NO: 4328 - DNA, 21 bp, Artificial Sequence
  Synthetic
cccatugccacctgtgtguat

SEQ ID NO: 4329 - DNA, 25 bp, Artificial Sequence
  Synthetic
gggccttgcuagattcatctttgua

SEQ ID NO: 4330 - DNA, 26 bp, Artificial Sequence
  Synthetic
tcttaataaauaggctctcccugggt

SEQ ID NO: 4331 - DNA, 23 bp, Artificial Sequence
  Synthetic
catttcccgcuctgcagttauct

SEQ ID NO: 4332 - DNA, 24 bp, Artificial Sequence
  Synthetic
tgttggcatutgctttctttugca

SEQ ID NO: 4333 - DNA, 22 bp, Artificial Sequence
  Synthetic
tgctguaccagacgatcctuct

SEQ ID NO: 4334 - DNA, 24 bp, Artificial Sequence
  Synthetic
cagactgaccutgactttccucat

SEQ ID NO: 4335 - DNA, 20 bp, Artificial Sequence
  Synthetic
gtgaguccacggaggaucag

SEQ ID NO: 4336 - DNA, 20 bp, Artificial Sequence
  Synthetic
gcccuggaagagtcctctug

SEQ ID NO: 4337 - DNA, 20 bp, Artificial Sequence
  Synthetic
aacggugctggaaucacact

SEQ ID NO: 4338 - DNA, 27 bp, Artificial Sequence
  Synthetic
ctttttctctttugctgatgctaugct

SEQ ID NO: 4339 - DNA, 25 bp, Artificial Sequence
  Synthetic
caagaaacgguccaggtaattcaug

SEQ ID NO: 4340 - DNA, 22 bp, Artificial Sequence
  Synthetic
cagctgtcacucctcatgacut

SEQ ID NO: 4341 - DNA, 21 bp, Artificial Sequence
  Synthetic
ccggcucaagcctcatctuac

SEQ ID NO: 4342 - DNA, 19 bp, Artificial Sequence
  Synthetic
ccgucaggaccaacgugac

SEQ ID NO: 4343 - DNA, 23 bp, Artificial Sequence
  Synthetic
agattatggacgcguctctcuct

SEQ ID NO: 4344 - DNA, 20 bp, Artificial Sequence
  Synthetic
ccgagtuacgcttccucgac

SEQ ID NO: 4345 - DNA, 22 bp, Artificial Sequence
  Synthetic
gccatcaaucctctgtcccuct

SEQ ID NO: 4346 - DNA, 25 bp, Artificial Sequence
  Synthetic
gcagaggaaaccucggattctttut

SEQ ID NO: 4347 - DNA, 27 bp, Artificial Sequence
  Synthetic
aacttcctggauttgtctaaaccucag

SEQ ID NO: 4348 - DNA, 22 bp, Artificial Sequence
  Synthetic
gagaauaatcacugcccagcgt

SEQ ID NO: 4349 - DNA, 23 bp, Artificial Sequence
  Synthetic
ggacugtttgaaauccacggagt

SEQ ID NO: 4350 - DNA, 22 bp, Artificial Sequence
  Synthetic
cutcatccgaugggaggacaaa

SEQ ID NO: 4351 - DNA, 25 bp, Artificial Sequence
  Synthetic
agacagacgautatcctccaaucca

SEQ ID NO: 4352 - DNA, 31 bp, Artificial Sequence
  Synthetic
gctggatgaacaaauataccaagaagaugaa

SEQ ID NO: 4353 - DNA, 20 bp, Artificial Sequence
  Synthetic
ctgggucgcttcctttucca

SEQ ID NO: 4354 - DNA, 24 bp, Artificial Sequence
  Synthetic
ggagacggagaaaautctggagut

SEQ ID NO: 4355 - DNA, 31 bp, Artificial Sequence
  Synthetic
ggttttgtgtgtutataatgtggaaacugat

SEQ ID NO: 4356 - DNA, 28 bp, Artificial Sequence
  Synthetic
ttctgtcuacagaaagtctccuaacact

SEQ ID NO: 4357 - DNA, 23 bp, Artificial Sequence
  Synthetic
gtcacaggagaugtcaucaccac

SEQ ID NO: 4358 - DNA, 25 bp, Artificial Sequence
  Synthetic
acctttccutttgtctacuccaagc

SEQ ID NO: 4359 - DNA, 21 bp, Artificial Sequence
  Synthetic
gtgaatcugcaccaagcauga

SEQ ID NO: 4360 - DNA, 24 bp, Artificial Sequence
  Synthetic
tctgactggaauctggagagugag

SEQ ID NO: 4361 - DNA, 28 bp, Artificial Sequence
  Synthetic
ctatgttccctutcctcatttcctugaa

SEQ ID NO: 4362 - DNA, 22 bp, Artificial Sequence
  Synthetic
tggcagcutttcttcctuccat

SEQ ID NO: 4363 - DNA, 23 bp, Artificial Sequence
  Synthetic
atggttttcugacctttgccuct

SEQ ID NO: 4364 - DNA, 21 bp, Artificial Sequence
  Synthetic
ggtaguccagggtatgugggt

SEQ ID NO: 4365 - DNA, 27 bp, Artificial Sequence
  Synthetic
cccatccattcutcctattcccttuag

SEQ ID NO: 4366 - DNA, 25 bp, Artificial Sequence
  Synthetic
ccttgtccagauatgtccttagguc

SEQ ID NO: 4367 - DNA, 25 bp, Artificial Sequence
  Synthetic
aataatgagaggccaugttgggtua

SEQ ID NO: 4368 - DNA, 25 bp, Artificial Sequence
  Synthetic
acagctgugacatggtttaaatucc

SEQ ID NO: 4369 - DNA, 24 bp, Artificial Sequence
  Synthetic
acgagcccutccaaaaacuacaat

SEQ ID NO: 4370 - DNA, 28 bp, Artificial Sequence
  Synthetic
aggatccattttauggttgatgcgaaua

SEQ ID NO: 4371 - DNA, 20 bp, Artificial Sequence
  Synthetic
aatccgcagugggagcuaac

SEQ ID NO: 4372 - DNA, 19 bp, Artificial Sequence
  Synthetic
cgggtguagaagggaugca

SEQ ID NO: 4373 - DNA, 17 bp, Artificial Sequence
  Synthetic
ccccucacgccctcuct

SEQ ID NO: 4374 - DNA, 19 bp, Artificial Sequence
  Synthetic
gtgcgcacacacaugauct

SEQ ID NO: 4375 - DNA, 17 bp, Artificial Sequence
  Synthetic
gcaggccaugggcacuc

SEQ ID NO: 4376 - DNA, 19 bp, Artificial Sequence
  Synthetic
gtctggagacucgggtcug

SEQ ID NO: 4377 - DNA, 22 bp, Artificial Sequence
  Synthetic
agutccaatgguccaacgacaa

SEQ ID NO: 4378 - DNA, 21 bp, Artificial Sequence
  Synthetic
ctcatggcucagcctggaaut

SEQ ID NO: 4379 - DNA, 20 bp, Artificial Sequence
  Synthetic
gaagtgucccagagccctug

SEQ ID NO: 4380 - DNA, 22 bp, Artificial Sequence
  Synthetic
ggatggtgaugtagcgactgua

SEQ ID NO: 4381 - DNA, 25 bp, Artificial Sequence
  Synthetic
gaggtttgtcautacccatgacuga

SEQ ID NO: 4382 - DNA, 17 bp, Artificial Sequence
  Synthetic
ggcgcguagccatucca

SEQ ID NO: 4383 - DNA, 18 bp, Artificial Sequence
  Synthetic
ccggacuacggcggtuac

SEQ ID NO: 4384 - DNA, 26 bp, Artificial Sequence
  Synthetic
acataataaggaaugcatccctgugt

SEQ ID NO: 4385 - DNA, 28 bp, Artificial Sequence
  Synthetic
gttgcagcgugtcttaaaaattucaaaa

SEQ ID NO: 4386 - DNA, 32 bp, Artificial Sequence
  Synthetic
gaatctgaacauaaaaacaacaatuacgaacc

SEQ ID NO: 4387 - DNA, 18 bp, Artificial Sequence
  Synthetic
gguacagcggcagaguca

SEQ ID NO: 4388 - DNA, 22 bp, Artificial Sequence
  Synthetic
aaagtcuaggagctgaggugga

SEQ ID NO: 4389 - DNA, 28 bp, Artificial Sequence
  Synthetic
atgacaattatcaaccucatctgctcut

SEQ ID NO: 4390 - DNA, 29 bp, Artificial Sequence
  Synthetic
ggatttggaaaaacaucagggaattcaut

SEQ ID NO: 4391 - DNA, 32 bp, Artificial Sequence
  Synthetic
gaaaaactatcttcutcagaggtatcuacaac

SEQ ID NO: 4392 - DNA, 22 bp, Artificial Sequence
  Synthetic
gtctttggccugtgaatgguct

SEQ ID NO: 4393 - DNA, 30 bp, Artificial Sequence
  Synthetic
tctttctttctttugttctctgtgtcuaat

SEQ ID NO: 4394 - DNA, 30 bp, Artificial Sequence
  Synthetic
gactttcaatgcaaguttttcaggtcauat

SEQ ID NO: 4395 - DNA, 28 bp, Artificial Sequence
  Synthetic
ctggccagctuccattatcaattaaaut

SEQ ID NO: 4396 - DNA, 30 bp, Artificial Sequence
  Synthetic
tgatggtactttaautttgtcactttgugt

SEQ ID NO: 4397 - DNA, 32 bp, Artificial Sequence
  Synthetic
tttcatttctagaacauttcctcagaattguc

SEQ ID NO: 4398 - DNA, 29 bp, Artificial Sequence
  Synthetic
agtgatacugactttcaaucccagaaaag

SEQ ID NO: 4399 - DNA, 30 bp, Artificial Sequence
  Synthetic
ctttgagcttgtcugacattttgtatgaut

SEQ ID NO: 4400 - DNA, 27 bp, Artificial Sequence
  Synthetic
ccagactcugaagaacttttcucagac

SEQ ID NO: 4401 - DNA, 29 bp, Artificial Sequence
  Synthetic
gtgtctccatauaaaaccatggtagagut

SEQ ID NO: 4402 - DNA, 27 bp, Artificial Sequence
  Synthetic
aggtagctucagaacagcttcaaauaa

SEQ ID NO: 4403 - DNA, 28 bp, Artificial Sequence
  Synthetic
gaggcttgcucagtttcttttgattauc

SEQ ID NO: 4404 - DNA, 26 bp, Artificial Sequence
  Synthetic
gtgcctgaaaaccagaugactatcut

SEQ ID NO: 4405 - DNA, 22 bp, Artificial Sequence
  Synthetic
ggccagcaaacutccgttuaat

SEQ ID NO: 4406 - DNA, 30 bp, Artificial Sequence
  Synthetic
gtcatgattctgutgtttcaatgttuaaga

SEQ ID NO: 4407 - DNA, 28 bp, Artificial Sequence
  Synthetic
cagtaatttcutcaacaaaagugccagt

SEQ ID NO: 4408 - DNA, 23 bp, Artificial Sequence
  Synthetic
tttggaagtugcgaaagcucaag

SEQ ID NO: 4409 - DNA, 28 bp, Artificial Sequence
  Synthetic
attaaatgactcttuggcgacactaaua

SEQ ID NO: 4410 - DNA, 29 bp, Artificial Sequence
  Synthetic
acgtgatgaaaagaucaaagaacctacuc

SEQ ID NO: 4411 - DNA, 25 bp, Artificial Sequence
  Synthetic
cccattgauggctaaaactggugat

SEQ ID NO: 4412 - DNA, 30 bp, Artificial Sequence
  Synthetic
gtagacaaacugaaaatctcaaaacaucaa

SEQ ID NO: 4413 - DNA, 27 bp, Artificial Sequence
  Synthetic
caacttgtguaaaaagctaaggcugaa

SEQ ID NO: 4414 - DNA, 32 bp, Artificial Sequence
  Synthetic
ccattctgaugaggtatataatgatucaggat

SEQ ID NO: 4415 - DNA, 30 bp, Artificial Sequence
  Synthetic
tgcatcttttacautggatattacttugga

SEQ ID NO: 4416 - DNA, 30 bp, Artificial Sequence
  Synthetic
tcaguaaagtaatuaaggaaaacaacgaga

SEQ ID NO: 4417 - DNA, 28 bp, Artificial Sequence
  Synthetic
gcgtgctacautcatcattatcuagaga

SEQ ID NO: 4418 - DNA, 27 bp, Artificial Sequence
  Synthetic
ctgtccaggtaucagatgcttcatuac

SEQ ID NO: 4419 - DNA, 29 bp, Artificial Sequence
  Synthetic
gttctggagtacguatagcagtatttuct

SEQ ID NO: 4420 - DNA, 24 bp, Artificial Sequence
  Synthetic
ccucgtgttgauaagagaaaccca

SEQ ID NO: 4421 - DNA, 32 bp, Artificial Sequence
  Synthetic
cttgttgaaatugagagagatauggagaaact

SEQ ID NO: 4422 - DNA, 30 bp, Artificial Sequence
  Synthetic
ggaagatgaugaactgacagattcuaaact

SEQ ID NO: 4423 - DNA, 26 bp, Artificial Sequence
  Synthetic
tggcaacacgaaagguaaaaaugaac

SEQ ID NO: 4424 - DNA, 30 bp, Artificial Sequence
  Synthetic
tctcatttgtaugaacatctgacttuggaa

SEQ ID NO: 4425 - DNA, 23 bp, Artificial Sequence
  Synthetic
gtggaacaaagacuttggtuggt

SEQ ID NO: 4426 - DNA, 32 bp, Artificial Sequence
  Synthetic
tgatagatttaatuacaagtcttcagaaugcc

SEQ ID NO: 4427 - DNA, 22 bp, Artificial Sequence
  Synthetic
ctcctacugctgcttucagaga

SEQ ID NO: 4428 - DNA, 28 bp, Artificial Sequence
  Synthetic
tgttgaattcaguatcatcctatguggt

SEQ ID NO: 4429 - DNA, 32 bp, Artificial Sequence
  Synthetic
ccagtttccatatgauccatctatagtgatua

SEQ ID NO: 4430 - DNA, 30 bp, Artificial Sequence
  Synthetic
gaaattgauagaagcagaagatuggctaua

SEQ ID NO: 4431 - DNA, 29 bp, Artificial Sequence
  Synthetic
actttttgggtatcugcactactagttut

SEQ ID NO: 4432 - DNA, 30 bp, Artificial Sequence
  Synthetic
attaatttgtccagauttctgctaacagua

SEQ ID NO: 4433 - DNA, 26 bp, Artificial Sequence
  Synthetic
ccaacattucctccatcacugaaaag

SEQ ID NO: 4434 - DNA, 27 bp, Artificial Sequence
  Synthetic
tgggtgttttaugcttggttcttuagt

SEQ ID NO: 4435 - DNA, 25 bp, Artificial Sequence
  Synthetic
cttcataaagcuctgcaccatctug

SEQ ID NO: 4436 - DNA, 20 bp, Artificial Sequence
  Synthetic
ggaaggccauggaatcugct

SEQ ID NO: 4437 - DNA, 30 bp, Artificial Sequence
  Synthetic
aaacaaagcattuacatacttacctgaauc

SEQ ID NO: 4438 - DNA, 29 bp, Artificial Sequence
  Synthetic
aatttttagatccagacuttcagccauct

SEQ ID NO: 4439 - DNA, 30 bp, Artificial Sequence
  Synthetic
actggtagctccaacuaatcataagagaut

SEQ ID NO: 4440 - DNA, 23 bp, Artificial Sequence
  Synthetic
catgcaaatgaucccaagtgguc

SEQ ID NO: 4441 - DNA, 31 bp, Artificial Sequence
  Synthetic
acgatggcctccauatatacttcttataaua

SEQ ID NO: 4442 - DNA, 24 bp, Artificial Sequence
  Synthetic
gcaccaaauacgaaacacccauaa

SEQ ID NO: 4443 - DNA, 24 bp, Artificial Sequence
  Synthetic
gtugaaccagauaaaagagctugg

SEQ ID NO: 4444 - DNA, 28 bp, Artificial Sequence
  Synthetic
ggcttctgtattauttgccatctttgut

SEQ ID NO: 4445 - DNA, 18 bp, Artificial Sequence
  Synthetic
ctuccagagccccuggac

SEQ ID NO: 4446 - DNA, 28 bp, Artificial Sequence
  Synthetic
aatcacagcaatguttctagtggtcuaa

SEQ ID NO: 4447 - DNA, 23 bp, Artificial Sequence
  Synthetic
gaagcttctcugtcgttttccug

SEQ ID NO: 4448 - DNA, 27 bp, Artificial Sequence
  Synthetic
agaagaggaagaugaaaaagaauggca

SEQ ID NO: 4449 - DNA, 28 bp, Artificial Sequence
  Synthetic
tcaggaacttucacagtttgatauacct

SEQ ID NO: 4450 - DNA, 27 bp, Artificial Sequence
  Synthetic
ttttgcctttaggaguctgatgactut

SEQ ID NO: 4451 - DNA, 23 bp, Artificial Sequence
  Synthetic
cttcggatgugtcctgaatgtug

SEQ ID NO: 4452 - DNA, 19 bp, Artificial Sequence
  Synthetic
agcaaaaugcacggcaugt

SEQ ID NO: 4453 - DNA, 23 bp, Artificial Sequence
  Synthetic
cgattttcacuctccagctccuc

SEQ ID NO: 4454 - DNA, 25 bp, Artificial Sequence
  Synthetic
ccacagacucagtuccaaaagaaca

SEQ ID NO: 4455 - DNA, 21 bp, Artificial Sequence
  Synthetic
tgtcagtucccttccatucgg

SEQ ID NO: 4456 - DNA, 27 bp, Artificial Sequence
  Synthetic
agagcaugagaattttcuggaaaccat

SEQ ID NO: 4457 - DNA, 28 bp, Artificial Sequence
  Synthetic
atcctaccgutccagatttcuacaaaag

SEQ ID NO: 4458 - DNA, 29 bp, Artificial Sequence
  Synthetic
agcttattggtaauttcagtcagacuaaa

SEQ ID NO: 4459 - DNA, 25 bp, Artificial Sequence
  Synthetic
tcagtgaatuctgctgtgcuaagag

SEQ ID NO: 4460 - DNA, 25 bp, Artificial Sequence
  Synthetic
cgcggcatguctatagaaactttut

SEQ ID NO: 4461 - DNA, 28 bp, Artificial Sequence
  Synthetic
cttggaaagaaaacutccuaggacaaac

SEQ ID NO: 4462 - DNA, 21 bp, Artificial Sequence
  Synthetic
ctcaccccuggctttccuaac

SEQ ID NO: 4463 - DNA, 28 bp, Artificial Sequence
  Synthetic
aggtgttuccttctctttuaagaagcaa

SEQ ID NO: 4464 - DNA, 28 bp, Artificial Sequence
  Synthetic
caacaggagaaagaagaugctaaacgua

SEQ ID NO: 4465 - DNA, 29 bp, Artificial Sequence
  Synthetic
cttttgccttaucaagtagctcaaatuct

SEQ ID NO: 4466 - DNA, 23 bp, Artificial Sequence
  Synthetic
gcttcagatucgcagaacucagt

SEQ ID NO: 4467 - DNA, 26 bp, Artificial Sequence
  Synthetic
tcttttctucccaaacacagatcugg

SEQ ID NO: 4468 - DNA, 19 bp, Artificial Sequence
  Synthetic
ctgttgcugggttcaggug

SEQ ID NO: 4469 - DNA, 23 bp, Artificial Sequence
  Synthetic
tctgcccuaggtaacaacuccaa

SEQ ID NO: 4470 - DNA, 28 bp, Artificial Sequence
  Synthetic
gaggtcaattcuacatccttgctttgua

SEQ ID NO: 4471 - DNA, 25 bp, Artificial Sequence
  Synthetic
ttctttuggaaccaggtacaucagg

SEQ ID NO: 4472 - DNA, 20 bp, Artificial Sequence
  Synthetic
gcagugacccatgcauagcc

SEQ ID NO: 4473 - DNA, 27 bp, Artificial Sequence
  Synthetic
attgcaatttaacutacttggccttut

SEQ ID NO: 4474 - DNA, 29 bp, Artificial Sequence
  Synthetic
gtaactucgaccaauacctttaaattucc

SEQ ID NO: 4475 - DNA, 23 bp, Artificial Sequence
  Synthetic
tgagagugcacactaaatgcuga

SEQ ID NO: 4476 - DNA, 28 bp, Artificial Sequence
  Synthetic
tttttcaacatcgutttgaacagcacua

SEQ ID NO: 4477 - DNA, 25 bp, Artificial Sequence
  Synthetic
ggctguaaagtacgacuaccacaag

SEQ ID NO: 4478 - DNA, 26 bp, Artificial Sequence
  Synthetic
tgatagtautgtagtgguaggaggca

SEQ ID NO: 4479 - DNA, 29 bp, Artificial Sequence
  Synthetic
tgaagatuccaccaagatgtatgttugat

SEQ ID NO: 4480 - DNA, 24 bp, Artificial Sequence
  Synthetic
tcgtaagaaauggactgcttuccc

SEQ ID NO: 4481 - DNA, 30 bp, Artificial Sequence
  Synthetic
agtatgccatuttcatcagatttugaggat

SEQ ID NO: 4482 - DNA, 26 bp, Artificial Sequence
  Synthetic
ccgaaaagtaaauccctccagtuaca

SEQ ID NO: 4483 - DNA, 24 bp, Artificial Sequence
  Synthetic
gtggtgucaatatttgauccccct

SEQ ID NO: 4484 - DNA, 23 bp, Artificial Sequence
  Synthetic
gagtacccaauagaagggctcug

SEQ ID NO: 4485 - DNA, 26 bp, Artificial Sequence
  Synthetic
agcgatgaatguactctcctgaguaa

SEQ ID NO: 4486 - DNA, 28 bp, Artificial Sequence
  Synthetic
gttcacagacauttggtcatgatttuct

SEQ ID NO: 4487 - DNA, 28 bp, Artificial Sequence
  Synthetic
catctcaattuctaactcctctucagct

SEQ ID NO: 4488 - DNA, 32 bp, Artificial Sequence
  Synthetic
actcaaacaaatacuaagttatgctaguacaa

SEQ ID NO: 4489 - DNA, 26 bp, Artificial Sequence
  Synthetic
tgacaccucgacatttgaaucagaag

SEQ ID NO: 4490 - DNA, 22 bp, Artificial Sequence
  Synthetic
gcccgaccuagtgcatctttua

SEQ ID NO: 4491 - DNA, 30 bp, Artificial Sequence
  Synthetic
ggcattcccaguacaaagtauacaaaagaa

SEQ ID NO: 4492 - DNA, 27 bp, Artificial Sequence
  Synthetic
ctgaatcagcguctgtaggtttaaaut

SEQ ID NO: 4493 - DNA, 21 bp, Artificial Sequence
  Synthetic
acacacgcuctggagaggtua

SEQ ID NO: 4494 - DNA, 30 bp, Artificial Sequence
  Synthetic
acaaagtcagaaaugctaggtttttacuct

SEQ ID NO: 4495 - DNA, 22 bp, Artificial Sequence
  Synthetic
gaugccagtugggaaagagact

SEQ ID NO: 4496 - DNA, 28 bp, Artificial Sequence
  Synthetic
tgaataaaatguaccatcaggcaacuct

SEQ ID NO: 4497 - DNA, 30 bp, Artificial Sequence
  Synthetic
aatattttctcagtugtagattcagccuca

SEQ ID NO: 4498 - DNA, 22 bp, Artificial Sequence
  Synthetic
ggtgccctugctcttccttuag

SEQ ID NO: 4499 - DNA, 27 bp, Artificial Sequence
  Synthetic
ccaacctgctuattgcaacaagtatug

SEQ ID NO: 4500 - DNA, 26 bp, Artificial Sequence
  Synthetic
tgttctcatgugaaaggagtcaacut

SEQ ID NO: 4501 - DNA, 29 bp, Artificial Sequence
  Synthetic
ctgaggatgatgaugaggatgaagaaaut

SEQ ID NO: 4502 - DNA, 23 bp, Artificial Sequence
  Synthetic
cuactttatcugcacaccagggt

SEQ ID NO: 4503 - DNA, 25 bp, Artificial Sequence
  Synthetic
cagtuaaaccccacatgaaaaugct

SEQ ID NO: 4504 - DNA, 26 bp, Artificial Sequence
  Synthetic
caattcctcuggatcacattucccat

SEQ ID NO: 4505 - DNA, 27 bp, Artificial Sequence
  Synthetic
atgttttaatauggcgatgtctctcut

SEQ ID NO: 4506 - DNA, 22 bp, Artificial Sequence
  Synthetic
catccaauttccccugcacaac

SEQ ID NO: 4507 - DNA, 31 bp, Artificial Sequence
  Synthetic
ggaagacatttatugcagtactactcacuaa

SEQ ID NO: 4508 - DNA, 19 bp, Artificial Sequence
  Synthetic
ggugacacggaggcaaguc

SEQ ID NO: 4509 - DNA, 25 bp, Artificial Sequence
  Synthetic
acccuggagaaacacaugaaaaagt

SEQ ID NO: 4510 - DNA, 19 bp, Artificial Sequence
  Synthetic
acacctugccgcagtacuc

SEQ ID NO: 4511 - DNA, 17 bp, Artificial Sequence
  Synthetic
agccugcgcttcuccac

SEQ ID NO: 4512 - DNA, 17 bp, Artificial Sequence
  Synthetic
gccuaggcccacgtuct

SEQ ID NO: 4513 - DNA, 17 bp, Artificial Sequence
  Synthetic
gcccgagucgagctuca

SEQ ID NO: 4514 - DNA, 18 bp, Artificial Sequence
  Synthetic
gccggugcacgaugagat

SEQ ID NO: 4515 - DNA, 18 bp, Artificial Sequence
  Synthetic
gtccccgutccugagcac

SEQ ID NO: 4516 - DNA, 18 bp, Artificial Sequence
  Synthetic
ccatctccucggcacuga

SEQ ID NO: 4517 - DNA, 18 bp, Artificial Sequence
  Synthetic
auttccugggcgacagca

SEQ ID NO: 4518 - DNA, 17 bp, Artificial Sequence
  Synthetic
cgcggcgucgtctgtua

SEQ ID NO: 4519 - DNA, 21 bp, Artificial Sequence
  Synthetic
gtgatcacutcacctcugcgt

SEQ ID NO: 4520 - DNA, 21 bp, Artificial Sequence
  Synthetic
gacttggaucccgatcuccac

SEQ ID NO: 4521 - DNA, 28 bp, Artificial Sequence
  Synthetic
gacaucctggtttttauagagcacaaaa

SEQ ID NO: 4522 - DNA, 21 bp, Artificial Sequence
  Synthetic
tccatcccuccaagctaucgt

SEQ ID NO: 4523 - DNA, 21 bp, Artificial Sequence
  Synthetic
ggtcugagctgtcuacaccca

SEQ ID NO: 4524 - DNA, 20 bp, Artificial Sequence
  Synthetic
gaggtguagcctgtagcugg

SEQ ID NO: 4525 - DNA, 20 bp, Artificial Sequence
  Synthetic
cugcccttcuacaaccagga

SEQ ID NO: 4526 - DNA, 21 bp, Artificial Sequence
  Synthetic
cagcatgaggutctccagcua

SEQ ID NO: 4527 - DNA, 22 bp, Artificial Sequence
  Synthetic
gcttctauggcgctgagatugt

SEQ ID NO: 4528 - DNA, 18 bp, Artificial Sequence
  Synthetic
gggccaccucgtcctgua

SEQ ID NO: 4529 - DNA, 18 bp, Artificial Sequence
  Synthetic
cggcaaggugatccuggt

SEQ ID NO: 4530 - DNA, 25 bp, Artificial Sequence
  Synthetic
ccaaauctgaaucccgagaggccaa

SEQ ID NO: 4531 - DNA, 26 bp, Artificial Sequence
  Synthetic
ttcctcctcaagaaugatggcaccut

SEQ ID NO: 4532 - DNA, 22 bp, Artificial Sequence
  Synthetic
ctuccagacagccacagtuagt

SEQ ID NO: 4533 - DNA, 22 bp, Artificial Sequence
  Synthetic
tucctttaggucagcccagaga

SEQ ID NO: 4534 - DNA, 26 bp, Artificial Sequence
  Synthetic
tcautgtcaaagucaagacagaaggg

SEQ ID NO: 4535 - DNA, 26 bp, Artificial Sequence
  Synthetic
aatggtcttcacautagatgctguca

SEQ ID NO: 4536 - DNA, 26 bp, Artificial Sequence
  Synthetic
gatgtgttatugatgtaggtgucagg

SEQ ID NO: 4537 - DNA, 21 bp, Artificial Sequence
  Synthetic
ccctccuccagggtcatagug

SEQ ID NO: 4538 - DNA, 23 bp, Artificial Sequence
  Synthetic
gtggtttcugtgctactucccat

SEQ ID NO: 4539 - DNA, 21 bp, Artificial Sequence
  Synthetic
gcttctggugggatctcctug

SEQ ID NO: 4540 - DNA, 22 bp, Artificial Sequence
  Synthetic
cagauctgctguccccagaaaa

SEQ ID NO: 4541 - DNA, 21 bp, Artificial Sequence
  Synthetic
gccataucacccacgacagug

SEQ ID NO: 4542 - DNA, 20 bp, Artificial Sequence
  Synthetic
ggaugggaacactcugccat

SEQ ID NO: 4543 - DNA, 24 bp, Artificial Sequence
  Synthetic
ggccatccugatgtagagauacct

SEQ ID NO: 4544 - DNA, 22 bp, Artificial Sequence
  Synthetic
gagaugacagagguacccccat

SEQ ID NO: 4545 - DNA, 24 bp, Artificial Sequence
  Synthetic
ctcctctatttguacaggcagcuc

SEQ ID NO: 4546 - DNA, 24 bp, Artificial Sequence
  Synthetic
acccttgagguccaaagaaaauca

SEQ ID NO: 4547 - DNA, 21 bp, Artificial Sequence
  Synthetic
aaggagatugccttggcaugt

SEQ ID NO: 4548 - DNA, 25 bp, Artificial Sequence
  Synthetic
gctccttuacaagagagucaggagt

SEQ ID NO: 4549 - DNA, 23 bp, Artificial Sequence
  Synthetic
tgtctgcugacctgtgtgtttua

SEQ ID NO: 4550 - DNA, 21 bp, Artificial Sequence
  Synthetic
cactcaggagcucaactuggg

SEQ ID NO: 4551 - DNA, 19 bp, Artificial Sequence
  Synthetic
tgctcccuactggcuacga

SEQ ID NO: 4552 - DNA, 31 bp, Artificial Sequence
  Synthetic
tgagatttacatutgtttccttctucacagt

SEQ ID NO: 4553 - DNA, 28 bp, Artificial Sequence
  Synthetic
agagtattgtuacaggcagattcttgug

SEQ ID NO: 4554 - DNA, 23 bp, Artificial Sequence
  Synthetic
cagcuggacagagcagaactauc

SEQ ID NO: 4555 - DNA, 24 bp, Artificial Sequence
  Synthetic
actcagauggcactugagaaagac

SEQ ID NO: 4556 - DNA, 26 bp, Artificial Sequence
  Synthetic
tgagtctgguaaaatagtggucacct

SEQ ID NO: 4557 - DNA, 25 bp, Artificial Sequence
  Synthetic
tttagttcagcuagtgtgcttcgut

SEQ ID NO: 4558 - DNA, 26 bp, Artificial Sequence
  Synthetic
agccatggtcuatatatgctgtcuga

SEQ ID NO: 4559 - DNA, 24 bp, Artificial Sequence
  Synthetic
ccacatauggagtgaaacugggaa

SEQ ID NO: 4560 - DNA, 25 bp, Artificial Sequence
  Synthetic
ggagaagattuatgcaggaguaggg

SEQ ID NO: 4561 - DNA, 22 bp, Artificial Sequence
  Synthetic
tcagcucaacctucacacaact

SEQ ID NO: 4562 - DNA, 25 bp, Artificial Sequence
  Synthetic
caaattgctuccgagtcucagaaaa

SEQ ID NO: 4563 - DNA, 23 bp, Artificial Sequence
  Synthetic
gacttcaaggcacuagagaguca

SEQ ID NO: 4564 - DNA, 28 bp, Artificial Sequence
  Synthetic
tcaggatgaauttacaggaatugaaccc

SEQ ID NO: 4565 - DNA, 27 bp, Artificial Sequence
  Synthetic
tcatgaaaaggaguggauacaaaacga

SEQ ID NO: 4566 - DNA, 27 bp, Artificial Sequence
  Synthetic
tcctccatcaaaugtcttcaaatucct

SEQ ID NO: 4567 - DNA, 29 bp, Artificial Sequence
  Synthetic
aaaaagaaaaacauacagctcagttugct

SEQ ID NO: 4568 - DNA, 29 bp, Artificial Sequence
  Synthetic
gaggattacugcattaaacgagaauacct

SEQ ID NO: 4569 - DNA, 27 bp, Artificial Sequence
  Synthetic
gtaacaugaggacagttattgcuccaa

SEQ ID NO: 4570 - DNA, 27 bp, Artificial Sequence
  Synthetic
tctgccaaactugagaaatagtgagut

SEQ ID NO: 4571 - DNA, 22 bp, Artificial Sequence
  Synthetic
cttggacucaagtcaccaugga

SEQ ID NO: 4572 - DNA, 28 bp, Artificial Sequence
  Synthetic
ttttagctgatggugctttttgtgatut

SEQ ID NO: 4573 - DNA, 29 bp, Artificial Sequence
  Synthetic
cagagacccugacattcatcaatactuac

SEQ ID NO: 4574 - DNA, 22 bp, Artificial Sequence
  Synthetic
ctgccctuaggaatccaaugct

SEQ ID NO: 4575 - DNA, 29 bp, Artificial Sequence
  Synthetic
ttggtttgauacacaaaataccaguacct

SEQ ID NO: 4576 - DNA, 31 bp, Artificial Sequence
  Synthetic
tcaattatagaacauacccgugaaaggaaac

SEQ ID NO: 4577 - DNA, 28 bp, Artificial Sequence
  Synthetic
ggtggactttucacttatgggattauct

SEQ ID NO: 4578 - DNA, 29 bp, Artificial Sequence
  Synthetic
tgagauacctatttatuccaaggaaccga

SEQ ID NO: 4579 - DNA, 24 bp, Artificial Sequence
  Synthetic
ggctgtatgacacugggtgaaaut

SEQ ID NO: 4580 - DNA, 28 bp, Artificial Sequence
  Synthetic
aggttauggaactaaagctucaggaaat

SEQ ID NO: 4581 - DNA, 25 bp, Artificial Sequence
  Synthetic
ttctggcatccugattacaagtcug

SEQ ID NO: 4582 - DNA, 26 bp, Artificial Sequence
  Synthetic
ccagatgcuatgtcttctcucacaga

SEQ ID NO: 4583 - DNA, 31 bp, Artificial Sequence
  Synthetic
tgctatttgcacauttgattgatcttgttua

SEQ ID NO: 4584 - DNA, 23 bp, Artificial Sequence
  Synthetic
gtcaggttccucttgcagctuat

SEQ ID NO: 4585 - DNA, 25 bp, Artificial Sequence
  Synthetic
gtcggttaagcugtttttggctaut

SEQ ID NO: 4586 - DNA, 27 bp, Artificial Sequence
  Synthetic
ctgtacuaggccagaattctaaacugg

SEQ ID NO: 4587 - DNA, 26 bp, Artificial Sequence
  Synthetic
cagtgtggctcuttgttagatccaua

SEQ ID NO: 4588 - DNA, 22 bp, Artificial Sequence
  Synthetic
gggaaggaaaagugttggugga

SEQ ID NO: 4589 - DNA, 29 bp, Artificial Sequence
  Synthetic
caccaaatgacaaucacgtttctctaaua

SEQ ID NO: 4590 - DNA, 28 bp, Artificial Sequence
  Synthetic
actagaaatgacagagucccatactgut

SEQ ID NO: 4591 - DNA, 26 bp, Artificial Sequence
  Synthetic
aaaacactctccucagtaggaguaca

SEQ ID NO: 4592 - DNA, 29 bp, Artificial Sequence
  Synthetic
aagtuagagaagaaaaagccutaagcuaa

SEQ ID NO: 4593 - DNA, 23 bp, Artificial Sequence
  Synthetic
gttttagaagccccugccaaaug

SEQ ID NO: 4594 - DNA, 28 bp, Artificial Sequence
  Synthetic
cctttcctaaggauaatagctgtgtuca

SEQ ID NO: 4595 - DNA, 26 bp, Artificial Sequence
  Synthetic
gaccttttcauccatagcagcacuat

SEQ ID NO: 4596 - DNA, 25 bp, Artificial Sequence
  Synthetic
ccaattatugcccagtgcaaaauga

SEQ ID NO: 4597 - DNA, 29 bp, Artificial Sequence
  Synthetic
ggtactggttugaataacttcttcctuct

SEQ ID NO: 4598 - DNA, 25 bp, Artificial Sequence
  Synthetic
ccgaccaaccuccattaccuaaaaa

SEQ ID NO: 4599 - DNA, 20 bp, Artificial Sequence
  Synthetic
caggcugcagcaaaccatuc

SEQ ID NO: 4600 - DNA, 22 bp, Artificial Sequence
  Synthetic
tcatcuaccacccctuccagag

SEQ ID NO: 4601 - DNA, 28 bp, Artificial Sequence
  Synthetic
tggtttcagcuccattatgagactttut

SEQ ID NO: 4602 - DNA, 28 bp, Artificial Sequence
  Synthetic
ggtaaactgaaccuaagtccttcucaat

SEQ ID NO: 4603 - DNA, 29 bp, Artificial Sequence
  Synthetic
tggtgaaatctcuttttggtatgtcucaa

SEQ ID NO: 4604 - DNA, 27 bp, Artificial Sequence
  Synthetic
aaatcacatugaatggtcaugcaaact

SEQ ID NO: 4605 - DNA, 26 bp, Artificial Sequence
  Synthetic
acattttgccaagaaacugcactuac

SEQ ID NO: 4606 - DNA, 21 bp, Artificial Sequence
  Synthetic
aaagccuagccttccuagacc

SEQ ID NO: 4607 - DNA, 28 bp, Artificial Sequence
  Synthetic
gtgagtgaagacuttagtcatcttggua

SEQ ID NO: 4608 - DNA, 27 bp, Artificial Sequence
  Synthetic
acccttgcucaaatagactttaugcaa

SEQ ID NO: 4609 - DNA, 27 bp, Artificial Sequence
  Synthetic
tcaattgcuccaatcggttuaaacaac

SEQ ID NO: 4610 - DNA, 30 bp, Artificial Sequence
  Synthetic
ttgttgcatttttaautgtggatcttguct

SEQ ID NO: 4611 - DNA, 28 bp, Artificial Sequence
  Synthetic
gtggaaggtaauggtacagatggauaat

SEQ ID NO: 4612 - DNA, 29 bp, Artificial Sequence
  Synthetic
agtacctaacuccactgatttcttttucc

SEQ ID NO: 4613 - DNA, 25 bp, Artificial Sequence
  Synthetic
acagcaaaccagucaaaacactuac

SEQ ID NO: 4614 - DNA, 30 bp, Artificial Sequence
  Synthetic
gttcttcaccagautctttaagtaccauca

SEQ ID NO: 4615 - DNA, 27 bp, Artificial Sequence
  Synthetic
tgatttctgagcagugcttactctuac

SEQ ID NO: 4616 - DNA, 25 bp, Artificial Sequence
  Synthetic
gccctgttcuttctgtctcatuagt

SEQ ID NO: 4617 - DNA, 31 bp, Artificial Sequence
  Synthetic
tggaacaaaatccguatcataatcatcauca

SEQ ID NO: 4618 - DNA, 25 bp, Artificial Sequence
  Synthetic
acagataagttuacagcagcagcut

SEQ ID NO: 4619 - DNA, 23 bp, Artificial Sequence
  Synthetic
gataccttatgutccgctgcuga

SEQ ID NO: 4620 - DNA, 26 bp, Artificial Sequence
  Synthetic
ccttccctcaaautctgtttctccug

SEQ ID NO: 4621 - DNA, 25 bp, Artificial Sequence
  Synthetic
cccagttgcuacttacaaaggacut

SEQ ID NO: 4622 - DNA, 26 bp, Artificial Sequence
  Synthetic
ggtcggccaautaaatcagtaucaga

SEQ ID NO: 4623 - DNA, 30 bp, Artificial Sequence
  Synthetic
gggacagttttgutttcatataagcatuca

SEQ ID NO: 4624 - DNA, 28 bp, Artificial Sequence
  Synthetic
acttttacautcatgctcugaagacaga

SEQ ID NO: 4625 - DNA, 29 bp, Artificial Sequence
  Synthetic
gcttttggactugatctacgataagugat

SEQ ID NO: 4626 - DNA, 25 bp, Artificial Sequence
  Synthetic
gaaggaagcuccaagtagtcugaaa

SEQ ID NO: 4627 - DNA, 22 bp, Artificial Sequence
  Synthetic
tcaggatguccttctguaccct

SEQ ID NO: 4628 - DNA, 21 bp, Artificial Sequence
  Synthetic
gcctcagugattcugccagag

SEQ ID NO: 4629 - DNA, 24 bp, Artificial Sequence
  Synthetic
tgcattctacaugtgcatgttugg

SEQ ID NO: 4630 - DNA, 29 bp, Artificial Sequence
  Synthetic
aaccatcauacaagagaaactcactucaa

SEQ ID NO: 4631 - DNA, 27 bp, Artificial Sequence
  Synthetic
agcaattaucacaagaaacatcugggt

SEQ ID NO: 4632 - DNA, 28 bp, Artificial Sequence
  Synthetic
gtaagagtgcaaaaauccagtcagguat

SEQ ID NO: 4633 - DNA, 30 bp, Artificial Sequence
  Synthetic
cctggtcattggcautgatatataagtcut

SEQ ID NO: 4634 - DNA, 24 bp, Artificial Sequence
  Synthetic
tgaattcagugggttttctauggg

SEQ ID NO: 4635 - DNA, 22 bp, Artificial Sequence
  Synthetic
acugaaatcactuccgcaccat

SEQ ID NO: 4636 - DNA, 26 bp, Artificial Sequence
  Synthetic
ccactacuttgcaaguaaaaccagaa

SEQ ID NO: 4637 - DNA, 24 bp, Artificial Sequence
  Synthetic
gttgcacttutgtcctttctuccc

SEQ ID NO: 4638 - DNA, 22 bp, Artificial Sequence
  Synthetic
tgggattccuacacaatgcgut

SEQ ID NO: 4639 - DNA, 28 bp, Artificial Sequence
  Synthetic
gaatggtttctcugtttatctggaaugg

SEQ ID NO: 4640 - DNA, 20 bp, Artificial Sequence
  Synthetic
ctgcgctuttccttgtcugg

SEQ ID NO: 4641 - DNA, 19 bp, Artificial Sequence
  Synthetic
aaugcaggcugagccaaga

SEQ ID NO: 4642 - DNA, 18 bp, Artificial Sequence
  Synthetic
ctgccugcgctgtucaac

SEQ ID NO: 4643 - DNA, 22 bp, Artificial Sequence
  Synthetic
gtccctgccutagtgtcaacuc

SEQ ID NO: 4644 - DNA, 21 bp, Artificial Sequence
  Synthetic
tcccaguggattcactgucca

SEQ ID NO: 4645 - DNA, 22 bp, Artificial Sequence
  Synthetic
agtacctcucacaggcccuaag

SEQ ID NO: 4646 - DNA, 17 bp, Artificial Sequence
  Synthetic
ccuggagcgggaacugg

SEQ ID NO: 4647 - DNA, 20 bp, Artificial Sequence
  Synthetic
cccaatagcucttgcccuga

SEQ ID NO: 4648 - DNA, 22 bp, Artificial Sequence
  Synthetic
cctttuccagaagaagctgcuc

SEQ ID NO: 4649 - DNA, 22 bp, Artificial Sequence
  Synthetic
tgagctcucaaagtagcgcauc

SEQ ID NO: 4650 - DNA, 20 bp, Artificial Sequence
  Synthetic
caggaggaccagutcccauc

SEQ ID NO: 4651 - DNA, 22 bp, Artificial Sequence
  Synthetic
ttgtccttgauttcgccacuca

SEQ ID NO: 4652 - DNA, 17 bp, Artificial Sequence
  Synthetic
gcuggagctgcugcact

SEQ ID NO: 4653 - DNA, 19 bp, Artificial Sequence
  Synthetic
aaggcctugcccaguacat

SEQ ID NO: 4654 - DNA, 21 bp, Artificial Sequence
  Synthetic
catggguaagggctcagugac

SEQ ID NO: 4655 - DNA, 23 bp, Artificial Sequence
  Synthetic
aagacaauccacccctttgctua

SEQ ID NO: 4656 - DNA, 20 bp, Artificial Sequence
  Synthetic
gcatgcaaguttggtccuga

SEQ ID NO: 4657 - DNA, 19 bp, Artificial Sequence
  Synthetic
cagcaccugaccggtaucc

SEQ ID NO: 4658 - DNA, 22 bp, Artificial Sequence
  Synthetic
caccugcaacaacaggatucac

SEQ ID NO: 4659 - DNA, 22 bp, Artificial Sequence
  Synthetic
tgaaugccacctucacaaggac

SEQ ID NO: 4660 - DNA, 27 bp, Artificial Sequence
  Synthetic
ctgtgacctatuaaaaactgccctgua

SEQ ID NO: 4661 - DNA, 29 bp, Artificial Sequence
  Synthetic
actgttgcttgugatttcatttgtuacac

SEQ ID NO: 4662 - DNA, 27 bp, Artificial Sequence
  Synthetic
cgagtcttgucaagaagcattcatcut

SEQ ID NO: 4663 - DNA, 24 bp, Artificial Sequence
  Synthetic
gccacagauacagtttccucacaa

SEQ ID NO: 4664 - DNA, 28 bp, Artificial Sequence
  Synthetic
gctatacagacugctatactggacatut

SEQ ID NO: 4665 - DNA, 28 bp, Artificial Sequence
  Synthetic
actgtgctuaaaaggaaaaagaguacct

SEQ ID NO: 4666 - DNA, 26 bp, Artificial Sequence
  Synthetic
ttcgtattaggutggctgtttctuga

SEQ ID NO: 4667 - DNA, 29 bp, Artificial Sequence
  Synthetic
acacauttaaagactuaaccccacaagat

SEQ ID NO: 4668 - DNA, 21 bp, Artificial Sequence
  Synthetic
ggaggccutcttatugaggct

SEQ ID NO: 4669 - DNA, 25 bp, Artificial Sequence
  Synthetic
gggtctttaggucttttgtgagaut

SEQ ID NO: 4670 - DNA, 24 bp, Artificial Sequence
  Synthetic
tgctcugacaagggtactacauga

SEQ ID NO: 4671 - DNA, 25 bp, Artificial Sequence
  Synthetic
cctaaagaacugtgcaacugaaagc

SEQ ID NO: 4672 - DNA, 24 bp, Artificial Sequence
  Synthetic
ctttgagagtucttccccagugac

SEQ ID NO: 4673 - DNA, 24 bp, Artificial Sequence
  Synthetic
gatggatcagagauggaagcucac

SEQ ID NO: 4674 - DNA, 19 bp, Artificial Sequence
  Synthetic
cccuctcctcaugcaacgg

SEQ ID NO: 4675 - DNA, 25 bp, Artificial Sequence
  Synthetic
accccuggcattttuaacaagaagt

SEQ ID NO: 4676 - DNA, 27 bp, Artificial Sequence
  Synthetic
gtatcctctcugtaaaactttgccugt

SEQ ID NO: 4677 - DNA, 27 bp, Artificial Sequence
  Synthetic
ccaaagacacttutgatgacgattcut

SEQ ID NO: 4678 - DNA, 24 bp, Artificial Sequence
  Synthetic
ccaggtcuaggcatgtactgauac

SEQ ID NO: 4679 - DNA, 24 bp, Artificial Sequence
  Synthetic
gaggaagaagaugtccgugagaac

SEQ ID NO: 4680 - DNA, 19 bp, Artificial Sequence
  Synthetic
gctactcaugggcgggaug

SEQ ID NO: 4681 - DNA, 21 bp, Artificial Sequence
  Synthetic
ccgctgtgautccaatgguct

SEQ ID NO: 4682 - DNA, 23 bp, Artificial Sequence
  Synthetic
agcaaactugggagcattaucgt

SEQ ID NO: 4683 - DNA, 24 bp, Artificial Sequence
  Synthetic
ctctttcccaagaauatgccugga

SEQ ID NO: 4684 - DNA, 21 bp, Artificial Sequence
  Synthetic
cagcagcugcattttctugga

SEQ ID NO: 4685 - DNA, 23 bp, Artificial Sequence
  Synthetic
gcacaucgacccgaagtttauca

SEQ ID NO: 4686 - DNA, 28 bp, Artificial Sequence
  Synthetic
tggatctttagcuttcactcttccuact

SEQ ID NO: 4687 - DNA, 28 bp, Artificial Sequence
  Synthetic
agtcttacagcugccaaauaaaagagaa

SEQ ID NO: 4688 - DNA, 26 bp, Artificial Sequence
  Synthetic
gatactgtacacuaacttggcgcuat

SEQ ID NO: 4689 - DNA, 30 bp, Artificial Sequence
  Synthetic
cataatttgaaaauctgaggagatgtugct

SEQ ID NO: 4690 - DNA, 22 bp, Artificial Sequence
  Synthetic
tgggttggaaagcucaggatug

SEQ ID NO: 4691 - DNA, 21 bp, Artificial Sequence
  Synthetic
ttccaugggcaccaugagaag

SEQ ID NO: 4692 - DNA, 19 bp, Artificial Sequence
  Synthetic
cctgattucgggccgtcut

SEQ ID NO: 4693 - DNA, 20 bp, Artificial Sequence
  Synthetic
ggccagccgacutacgatut

SEQ ID NO: 4694 - DNA, 27 bp, Artificial Sequence
  Synthetic
gguatttcatgtattcugacagcagga

SEQ ID NO: 4695 - DNA, 24 bp, Artificial Sequence
  Synthetic
gctgtgaaacuctcacctccatut

SEQ ID NO: 4696 - DNA, 21 bp, Artificial Sequence
  Synthetic
gcggaagucagttcagacucc

SEQ ID NO: 4697 - DNA, 17 bp, Artificial Sequence
  Synthetic
gcgtcccucgcaaguca

SEQ ID NO: 4698 - DNA, 20 bp, Artificial Sequence
  Synthetic
cccucgacacccgatucaaa

SEQ ID NO: 4699 - DNA, 23 bp, Artificial Sequence
  Synthetic
cactgtatucagcgtgacttugg

SEQ ID NO: 4700 - DNA, 21 bp, Artificial Sequence
  Synthetic
cccagtgtugggatccttcut

SEQ ID NO: 4701 - DNA, 22 bp, Artificial Sequence
  Synthetic
caccttcagccaucctgttuct

SEQ ID NO: 4702 - DNA, 22 bp, Artificial Sequence
  Synthetic
gtcccaaagugcagcttgtcua

SEQ ID NO: 4703 - DNA, 25 bp, Artificial Sequence
  Synthetic
catatttttgucagggagcucagga

SEQ ID NO: 4704 - DNA, 29 bp, Artificial Sequence
  Synthetic
gtactttgtaaaugacacatctcttugct

SEQ ID NO: 4705 - DNA, 27 bp, Artificial Sequence
  Synthetic
gacaaattguccaccatcatcatucaa

SEQ ID NO: 4706 - DNA, 21 bp, Artificial Sequence
  Synthetic
tggaagtguccgaggacttug

SEQ ID NO: 4707 - DNA, 30 bp, Artificial Sequence
  Synthetic
aaatgatataaaauaaccagttgcugcaag

SEQ ID NO: 4708 - DNA, 21 bp, Artificial Sequence
  Synthetic
tgaaugacaacgcccccauac

SEQ ID NO: 4709 - DNA, 24 bp, Artificial Sequence
  Synthetic
gtuagttctgctgugaagggagat

SEQ ID NO: 4710 - DNA, 24 bp, Artificial Sequence
  Synthetic
tgcttctggccutctttatcttug

SEQ ID NO: 4711 - DNA, 21 bp, Artificial Sequence
  Synthetic
aataaacgttgucccgggugt

SEQ ID NO: 4712 - DNA, 21 bp, Artificial Sequence
  Synthetic
ggtgtgcccutcctttcacua

SEQ ID NO: 4713 - DNA, 22 bp, Artificial Sequence
  Synthetic
ctgactcugaggagtucaggga

SEQ ID NO: 4714 - DNA, 17 bp, Artificial Sequence
  Synthetic
gggaugggtgucagcgt

SEQ ID NO: 4715 - DNA, 19 bp, Artificial Sequence
  Synthetic
ggagcgugccaagauggag

SEQ ID NO: 4716 - DNA, 19 bp, Artificial Sequence
  Synthetic
gggcccutctttgtgucct

SEQ ID NO: 4717 - DNA, 22 bp, Artificial Sequence
  Synthetic
gcatcauggacatgguggagaa

SEQ ID NO: 4718 - DNA, 17 bp, Artificial Sequence
  Synthetic
gtctggguggcgguagg

SEQ ID NO: 4719 - DNA, 17 bp, Artificial Sequence
  Synthetic
cggccaugcacccugaa

SEQ ID NO: 4720 - DNA, 21 bp, Artificial Sequence
  Synthetic
gctggcaaggagugggatuaa

SEQ ID NO: 4721 - DNA, 24 bp, Artificial Sequence
  Synthetic
gagtttcautccaagctucaggag

SEQ ID NO: 4722 - DNA, 19 bp, Artificial Sequence
  Synthetic
gccattgcugaagccgtug

SEQ ID NO: 4723 - DNA, 21 bp, Artificial Sequence
  Synthetic
tctgggutgtgttgucaccat

SEQ ID NO: 4724 - DNA, 20 bp, Artificial Sequence
  Synthetic
ccttccccucgagcctctua

SEQ ID NO: 4725 - DNA, 19 bp, Artificial Sequence
  Synthetic
gttcagccucgggauccac

SEQ ID NO: 4726 - DNA, 20 bp, Artificial Sequence
  Synthetic
cuggaacccagccaucagag

SEQ ID NO: 4727 - DNA, 20 bp, Artificial Sequence
  Synthetic
ctggcccugtgcatttugat

SEQ ID NO: 4728 - DNA, 21 bp, Artificial Sequence
  Synthetic
tccuttctttgacuggagcgg

SEQ ID NO: 4729 - DNA, 19 bp, Artificial Sequence
  Synthetic
agacctggutccggaucct

SEQ ID NO: 4730 - DNA, 31 bp, Artificial Sequence
  Synthetic
cagaagucaaagcaaaagauagtgaaatuaa

SEQ ID NO: 4731 - DNA, 25 bp, Artificial Sequence
  Synthetic
agctcttatcauaggttccgtguca

SEQ ID NO: 4732 - DNA, 21 bp, Artificial Sequence
  Synthetic
ggctccucaagtagcgatgut

SEQ ID NO: 4733 - DNA, 24 bp, Artificial Sequence
  Synthetic
gacaattcacutacgctgttuggg

SEQ ID NO: 4734 - DNA, 23 bp, Artificial Sequence
  Synthetic
gagcagaagugcacaggtatuct

SEQ ID NO: 4735 - DNA, 29 bp, Artificial Sequence
  Synthetic
cagtttttcattttcutccttcagacgut

SEQ ID NO: 4736 - DNA, 25 bp, Artificial Sequence
  Synthetic
tugttgttaacugaccaaggaacct

SEQ ID NO: 4737 - DNA, 25 bp, Artificial Sequence
  Synthetic
gtctttgatcuctgcatcactcuct

SEQ ID NO: 4738 - DNA, 22 bp, Artificial Sequence
  Synthetic
cgugaagaggaaactgcuggag

SEQ ID NO: 4739 - DNA, 25 bp, Artificial Sequence
  Synthetic
ccccauacatagtgatugagaagca

SEQ ID NO: 4740 - DNA, 24 bp, Artificial Sequence
  Synthetic
tgtgtuagcagaacatcuccaaca

SEQ ID NO: 4741 - DNA, 30 bp, Artificial Sequence
  Synthetic
gggtggaguagagatagtagacataucaaa

SEQ ID NO: 4742 - DNA, 23 bp, Artificial Sequence
  Synthetic
tcacuagagtcacugagcagacc

SEQ ID NO: 4743 - DNA, 27 bp, Artificial Sequence
  Synthetic
ggaagaauaaaaggtgatuagcccgat

SEQ ID NO: 4744 - DNA, 27 bp, Artificial Sequence
  Synthetic
cagttgauattctttccuggcaaaagc

SEQ ID NO: 4745 - DNA, 23 bp, Artificial Sequence
  Synthetic
tgggtttgaugcctacacttuca

SEQ ID NO: 4746 - DNA, 21 bp, Artificial Sequence
  Synthetic
ccagtgtccuctgacccauct

SEQ ID NO: 4747 - DNA, 21 bp, Artificial Sequence
  Synthetic
aggtgagutccaggttuccct

SEQ ID NO: 4748 - DNA, 20 bp, Artificial Sequence
  Synthetic
cctggccgugctagacaaug

SEQ ID NO: 4749 - DNA, 23 bp, Artificial Sequence
  Synthetic
cctggucagctctgaauaaccaa

SEQ ID NO: 4750 - DNA, 19 bp, Artificial Sequence
  Synthetic
gggccagguagtctcccua

SEQ ID NO: 4751 - DNA, 18 bp, Artificial Sequence
  Synthetic
cagcacacugctcauggc

SEQ ID NO: 4752 - DNA, 20 bp, Artificial Sequence
  Synthetic
gcacggtaaugctgctcaug

SEQ ID NO: 4753 - DNA, 20 bp, Artificial Sequence
  Synthetic
acttcucacaccgctgtgut

SEQ ID NO: 4754 - DNA, 21 bp, Artificial Sequence
  Synthetic
agtgatguccaccctgtucct

SEQ ID NO: 4755 - DNA, 21 bp, Artificial Sequence
  Synthetic
cugcagaacaggaugcagaga

SEQ ID NO: 4756 - DNA, 19 bp, Artificial Sequence
  Synthetic
ggtccctucctcctcacug

SEQ ID NO: 4757 - DNA, 19 bp, Artificial Sequence
  Synthetic
ccctgcaguactcggcaut

SEQ ID NO: 4758 - DNA, 22 bp, Artificial Sequence
  Synthetic
aagagggtggutcccagaatug

SEQ ID NO: 4759 - DNA, 23 bp, Artificial Sequence
  Synthetic
gtgaagggcaaugaaggguacat

SEQ ID NO: 4760 - DNA, 20 bp, Artificial Sequence
  Synthetic
gcagaugcggatccugaaag

SEQ ID NO: 4761 - DNA, 19 bp, Artificial Sequence
  Synthetic
ctcttgccccucccaucag

SEQ ID NO: 4762 - DNA, 22 bp, Artificial Sequence
  Synthetic
ccaggcccucccagaaggtcua

SEQ ID NO: 4763 - DNA, 25 bp, Artificial Sequence
  Synthetic
gccagcccgaaguctgtaatttuga

SEQ ID NO: 4764 - DNA, 21 bp, Artificial Sequence
  Synthetic
gatcccugacctgcuggaaaa

SEQ ID NO: 4765 - DNA, 19 bp, Artificial Sequence
  Synthetic
cctggucccctttcaugcc

SEQ ID NO: 4766 - DNA, 20 bp, Artificial Sequence
  Synthetic
ctgcuggaggacgaugacat

SEQ ID NO: 4767 - DNA, 18 bp, Artificial Sequence
  Synthetic
gugaccgagggcacugac

SEQ ID NO: 4768 - DNA, 24 bp, Artificial Sequence
  Synthetic
cctaatgggucaccttctctugac

SEQ ID NO: 4769 - DNA, 23 bp, Artificial Sequence
  Synthetic
cgtcttugacgaccccattctuc

SEQ ID NO: 4770 - DNA, 28 bp, Artificial Sequence
  Synthetic
agtcctttucaggctgatgtacauaaaa

SEQ ID NO: 4771 - DNA, 19 bp, Artificial Sequence
  Synthetic
gaucccccacagccacuac

SEQ ID NO: 4772 - DNA, 21 bp, Artificial Sequence
  Synthetic
agucttgcucacaggagagaa

SEQ ID NO: 4773 - DNA, 30 bp, Artificial Sequence
  Synthetic
actgcagtgatuttacatctaaatguccat

SEQ ID NO: 4774 - DNA, 25 bp, Artificial Sequence
  Synthetic
caautctgaggtgtuaaagggagga

SEQ ID NO: 4775 - DNA, 30 bp, Artificial Sequence
  Synthetic
gttttcaacttctaaucctttgagtgttut

SEQ ID NO: 4776 - DNA, 23 bp, Artificial Sequence
  Synthetic
gggaactttcaaugcagaggtug

SEQ ID NO: 4777 - DNA, 30 bp, Artificial Sequence
  Synthetic
gttgtgtaaattaaacutctcccattccut

SEQ ID NO: 4778 - DNA, 24 bp, Artificial Sequence
  Synthetic
caccucaaacttgucagcagaaag

SEQ ID NO: 4779 - DNA, 28 bp, Artificial Sequence
  Synthetic
tgaautatcactaucagaacaaagcagt

SEQ ID NO: 4780 - DNA, 24 bp, Artificial Sequence
  Synthetic
auactactgaaugcaaaggacacc

SEQ ID NO: 4781 - DNA, 24 bp, Artificial Sequence
  Synthetic
gagagugaaacaagcgtctcugaa

SEQ ID NO: 4782 - DNA, 26 bp, Artificial Sequence
  Synthetic
tgugaagaaaacaagcuagcagaaca

SEQ ID NO: 4783 - DNA, 20 bp, Artificial Sequence
  Synthetic
aggcauagcaccgttgcuac

SEQ ID NO: 4784 - DNA, 24 bp, Artificial Sequence
  Synthetic
caucaggtgtcucagaacaaacct

SEQ ID NO: 4785 - DNA, 29 bp, Artificial Sequence
  Synthetic
cctggaagtaautgtaagcatccugaaat

SEQ ID NO: 4786 - DNA, 26 bp, Artificial Sequence
  Synthetic
ttcccatttctcuttcaggtgacaut

SEQ ID NO: 4787 - DNA, 29 bp, Artificial Sequence
  Synthetic
actggactcatuactccaaataaacaugg

SEQ ID NO: 4788 - DNA, 23 bp, Artificial Sequence
  Synthetic
ccuggattugaaaacggagcaaa

SEQ ID NO: 4789 - DNA, 30 bp, Artificial Sequence
  Synthetic
aatagaaaugacacagaaggutttaaguat

SEQ ID NO: 4790 - DNA, 32 bp, Artificial Sequence
  Synthetic
tttctagtttctcutctttttcttctctugga

SEQ ID NO: 4791 - DNA, 28 bp, Artificial Sequence
  Synthetic
gtaacaagccaaaugaacagacaaguaa

SEQ ID NO: 4792 - DNA, 29 bp, Artificial Sequence
  Synthetic
cttatactgctgcutataggttcagctut

SEQ ID NO: 4793 - DNA, 32 bp, Artificial Sequence
  Synthetic
agcagaatggucaagtgatgaatattacuaat

SEQ ID NO: 4794 - DNA, 32 bp, Artificial Sequence
  Synthetic
ttgtcttcaatatuactctctactgattugga

SEQ ID NO: 4795 - DNA, 27 bp, Artificial Sequence
  Synthetic
caaagtagctgaugtattggacgtuct

SEQ ID NO: 4796 - DNA, 24 bp, Artificial Sequence
  Synthetic
caugtttccttactuccagcccat

SEQ ID NO: 4797 - DNA, 26 bp, Artificial Sequence
  Synthetic
caaatactcaugccagctcatuacag

SEQ ID NO: 4798 - DNA, 29 bp, Artificial Sequence
  Synthetic
cctaccacaaauacaaattaugaccaaga

SEQ ID NO: 4799 - DNA, 23 bp, Artificial Sequence
  Synthetic
ggaactgugagaactcugaggac

SEQ ID NO: 4800 - DNA, 22 bp, Artificial Sequence
  Synthetic
tcatggacagcacutgagtguc

SEQ ID NO: 4801 - DNA, 29 bp, Artificial Sequence
  Synthetic
ttgctgagtgtguttctcaaacaattuaa

SEQ ID NO: 4802 - DNA, 24 bp, Artificial Sequence
  Synthetic
actcttgtgcugacttaccagaug

SEQ ID NO: 4803 - DNA, 30 bp, Artificial Sequence
  Synthetic
ttctaatgtgutaaagttcatuggaacaga

SEQ ID NO: 4804 - DNA, 21 bp, Artificial Sequence
  Synthetic
cttgagagcuggacgctgaut

SEQ ID NO: 4805 - DNA, 22 bp, Artificial Sequence
  Synthetic
ccccaccutaccccauacaaag

SEQ ID NO: 4806 - DNA, 24 bp, Artificial Sequence
  Synthetic
caatgaaacgugatgtgactccug

SEQ ID NO: 4807 - DNA, 21 bp, Artificial Sequence
  Synthetic
aacccccaauttccuccacaa

SEQ ID NO: 4808 - DNA, 22 bp, Artificial Sequence
  Synthetic
cctcccugagatgugaaggagt

SEQ ID NO: 4809 - DNA, 22 bp, Artificial Sequence
  Synthetic
atuccggagcccactcuaaaag

SEQ ID NO: 4810 - DNA, 22 bp, Artificial Sequence
  Synthetic
ctccttcttgaucctggtggug

SEQ ID NO: 4811 - DNA, 19 bp, Artificial Sequence
  Synthetic
acccagcuggtccucaaag

SEQ ID NO: 4812 - DNA, 17 bp, Artificial Sequence
  Synthetic
aggacuccgcugggact

SEQ ID NO: 4813 - DNA, 18 bp, Artificial Sequence
  Synthetic
cggauggagcggaggaug

SEQ ID NO: 4814 - DNA, 19 bp, Artificial Sequence
  Synthetic
gggccacaucgatgauggg

SEQ ID NO: 4815 - DNA, 21 bp, Artificial Sequence
  Synthetic
cttttuggccaggccatagug

SEQ ID NO: 4816 - DNA, 22 bp, Artificial Sequence
  Synthetic
ctccaggacutcatgtccctuc

SEQ ID NO: 4817 - DNA, 24 bp, Artificial Sequence
  Synthetic
agaacuggtacaucagcaagaacc

SEQ ID NO: 4818 - DNA, 21 bp, Artificial Sequence
  Synthetic
gctccggaugttctcgatcug

SEQ ID NO: 4819 - DNA, 22 bp, Artificial Sequence
  Synthetic
ctggttucgacttcagctucct

SEQ ID NO: 4820 - DNA, 25 bp, Artificial Sequence
  Synthetic
aagaggagagagaagguaugactua

SEQ ID NO: 4821 - DNA, 22 bp, Artificial Sequence
  Synthetic
tcaggctacauttgacgcucac

SEQ ID NO: 4822 - DNA, 21 bp, Artificial Sequence
  Synthetic
gaacuggagcccagctactua

SEQ ID NO: 4823 - DNA, 21 bp, Artificial Sequence
  Synthetic
ctgacccatautcccctgcuc

SEQ ID NO: 4824 - DNA, 20 bp, Artificial Sequence
  Synthetic
ccagggaagccuctctcucc

SEQ ID NO: 4825 - DNA, 19 bp, Artificial Sequence
  Synthetic
ctgctctcuggcaccucac

SEQ ID NO: 4826 - DNA, 17 bp, Artificial Sequence
  Synthetic
ccagcugccctcaccug

SEQ ID NO: 4827 - DNA, 21 bp, Artificial Sequence
  Synthetic
tgatgcctcugtgctctccua

SEQ ID NO: 4828 - DNA, 25 bp, Artificial Sequence
  Synthetic
gggtcttaacaggucttctgtacut

SEQ ID NO: 4829 - DNA, 25 bp, Artificial Sequence
  Synthetic
gggtcatcuactaggagtatucagg

SEQ ID NO: 4830 - DNA, 26 bp, Artificial Sequence
  Synthetic
ggttgaacttacuctgtcaccctuag

SEQ ID NO: 4831 - DNA, 23 bp, Artificial Sequence
  Synthetic
ctcactccagucttcttggtugt

SEQ ID NO: 4832 - DNA, 27 bp, Artificial Sequence
  Synthetic
gaagguttagaatcuggaagagaccaa

SEQ ID NO: 4833 - DNA, 23 bp, Artificial Sequence
  Synthetic
ccgtgactguagtgttctctcug

SEQ ID NO: 4834 - DNA, 18 bp, Artificial Sequence
  Synthetic
gggccagutttgccauca

SEQ ID NO: 4835 - DNA, 18 bp, Artificial Sequence
  Synthetic
aagggtcugccctcugga

SEQ ID NO: 4836 - DNA, 19 bp, Artificial Sequence
  Synthetic
cagugaacuccgcgacaca

SEQ ID NO: 4837 - DNA, 17 bp, Artificial Sequence
  Synthetic
ctggcccugcuggagag

SEQ ID NO: 4838 - DNA, 21 bp, Artificial Sequence
  Synthetic
gactgaagccuggcaggauac

SEQ ID NO: 4839 - DNA, 25 bp, Artificial Sequence
  Synthetic
tttgccactttcuaacctcagaguc

SEQ ID NO: 4840 - DNA, 19 bp, Artificial Sequence
  Synthetic
ctggccaguccctagagut

SEQ ID NO: 4841 - DNA, 25 bp, Artificial Sequence
  Synthetic
tgacttctctuggtttggttgucag

SEQ ID NO: 4842 - DNA, 22 bp, Artificial Sequence
  Synthetic
gtggacccagcucctaaaugaa

SEQ ID NO: 4843 - DNA, 24 bp, Artificial Sequence
  Synthetic
gatggtctttuctctccctcucag

SEQ ID NO: 4844 - DNA, 22 bp, Artificial Sequence
  Synthetic
ccacctccuctggatacccaut

SEQ ID NO: 4845 - DNA, 29 bp, Artificial Sequence
  Synthetic
ctcactctgactuctcttgtttgttcuag

SEQ ID NO: 4846 - DNA, 18 bp, Artificial Sequence
  Synthetic
gggcagutcttggtcucg

SEQ ID NO: 4847 - DNA, 22 bp, Artificial Sequence
  Synthetic
caccaaucacctgcguacagaa

SEQ ID NO: 4848 - DNA, 23 bp, Artificial Sequence
  Synthetic
ccagugacaggaggagaccauaa

SEQ ID NO: 4849 - DNA, 23 bp, Artificial Sequence
  Synthetic
tccatccttccuaccaccttcuc

SEQ ID NO: 4850 - DNA, 24 bp, Artificial Sequence
  Synthetic
agtgacagagcuagtctagguagg

SEQ ID NO: 4851 - DNA, 26 bp, Artificial Sequence
  Synthetic
tccatttccaaaaggugacatcauca

SEQ ID NO: 4852 - DNA, 22 bp, Artificial Sequence
  Synthetic
gaaggacaugcagctagcttug

SEQ ID NO: 4853 - DNA, 28 bp, Artificial Sequence
  Synthetic
tcataguagaaagccaaauacaagtuct

SEQ ID NO: 4854 - DNA, 27 bp, Artificial Sequence
  Synthetic
tgtatccaaaugaacacattgcagcua

SEQ ID NO: 4855 - DNA, 27 bp, Artificial Sequence
  Synthetic
cattctcagagccaaaucaggatttug

SEQ ID NO: 4856 - DNA, 28 bp, Artificial Sequence
  Synthetic
acttcagtactutggtatcctttuggac

SEQ ID NO: 4857 - DNA, 26 bp, Artificial Sequence
  Synthetic
tgcaaccaaagcaagautatgucaac

SEQ ID NO: 4858 - DNA, 25 bp, Artificial Sequence
  Synthetic
tgtaatgcgaaucagtccagaucag

SEQ ID NO: 4859 - DNA, 23 bp, Artificial Sequence
  Synthetic
cccccacuctccatttcaaucag

SEQ ID NO: 4860 - DNA, 26 bp, Artificial Sequence
  Synthetic
ttcataccaccaugaggttcaacaut

SEQ ID NO: 4861 - DNA, 23 bp, Artificial Sequence
  Synthetic
cagcatggcuctgagacattcua

SEQ ID NO: 4862 - DNA, 28 bp, Artificial Sequence
  Synthetic
gtgcactttaaatauattcaggcagcut

SEQ ID NO: 4863 - DNA, 25 bp, Artificial Sequence
  Synthetic
gtagaactgcuaacctggaauccaa

SEQ ID NO: 4864 - DNA, 24 bp, Artificial Sequence
  Synthetic
cctagatugaaactgcttcugcct

SEQ ID NO: 4865 - DNA, 24 bp, Artificial Sequence
  Synthetic
cgcgactgucatagtagggattut

SEQ ID NO: 4866 - DNA, 28 bp, Artificial Sequence
  Synthetic
aagtgtcagtaacugtaaaggcttucat

SEQ ID NO: 4867 - DNA, 30 bp, Artificial Sequence
  Synthetic
tgatgggccauaatttattaaagacugact

SEQ ID NO: 4868 - DNA, 29 bp, Artificial Sequence
  Synthetic
agcttaaatgtaautgctttggguaggat

SEQ ID NO: 4869 - DNA, 23 bp, Artificial Sequence
  Synthetic
tcattgcaacgutcagcaaacuc

SEQ ID NO: 4870 - DNA, 22 bp, Artificial Sequence
  Synthetic
gctcgagagucctatguggaga

SEQ ID NO: 4871 - DNA, 24 bp, Artificial Sequence
  Synthetic
accaagcuaatcaaguagcccaac

SEQ ID NO: 4872 - DNA, 28 bp, Artificial Sequence
  Synthetic
ctttaactgcacauttctcttgtucagg

SEQ ID NO: 4873 - DNA, 21 bp, Artificial Sequence
  Synthetic
ctccaggugctccctcattut

SEQ ID NO: 4874 - DNA, 27 bp, Artificial Sequence
  Synthetic
gatucagaaggagaaagutcatuagga

SEQ ID NO: 4875 - DNA, 20 bp, Artificial Sequence
  Synthetic
gtgtgauccaaccguggaga

SEQ ID NO: 4876 - DNA, 27 bp, Artificial Sequence
  Synthetic
caaaatactgatcuggcatttggaugg

SEQ ID NO: 4877 - DNA, 23 bp, Artificial Sequence
  Synthetic
cagcgatugttgccttugaagag

SEQ ID NO: 4878 - DNA, 24 bp, Artificial Sequence
  Synthetic
aaggcttttccacuttctgccaua

SEQ ID NO: 4879 - DNA, 29 bp, Artificial Sequence
  Synthetic
agcttgttcttctucttttctcagtgaut

SEQ ID NO: 4880 - DNA, 20 bp, Artificial Sequence
  Synthetic
cctggcuttggguacagcat

SEQ ID NO: 4881 - DNA, 27 bp, Artificial Sequence
  Synthetic
aaataaaggtuacaagaacacgtugcc

SEQ ID NO: 4882 - DNA, 28 bp, Artificial Sequence
  Synthetic
aactttgtatctaugcaatcctcagcut

SEQ ID NO: 4883 - DNA, 29 bp, Artificial Sequence
  Synthetic
ctgaaactgauagaggaaatagatuggct

SEQ ID NO: 4884 - DNA, 28 bp, Artificial Sequence
  Synthetic
gggtggcaucaatctttaatgaugaaat

SEQ ID NO: 4885 - DNA, 23 bp, Artificial Sequence
  Synthetic
ctagtccuccccgttucaaaaca

SEQ ID NO: 4886 - DNA, 30 bp, Artificial Sequence
  Synthetic
agacttctcuatcaaaggtaaaugggaaga

SEQ ID NO: 4887 - DNA, 27 bp, Artificial Sequence
  Synthetic
ccagaaaattutgtggaagaugaagca

SEQ ID NO: 4888 - DNA, 23 bp, Artificial Sequence
  Synthetic
actctaagcccagcugagatcut

SEQ ID NO: 4889 - DNA, 28 bp, Artificial Sequence
  Synthetic
ctggaaaactggauttatttccgatgut

SEQ ID NO: 4890 - DNA, 23 bp, Artificial Sequence
  Synthetic
ccctgtggutctacaatgacugt

SEQ ID NO: 4891 - DNA, 26 bp, Artificial Sequence
  Synthetic
agtcacatuggcttaaacaaaugaag

SEQ ID NO: 4892 - DNA, 26 bp, Artificial Sequence
  Synthetic
ggcacttcagguatcttctaactugt

SEQ ID NO: 4893 - DNA, 27 bp, Artificial Sequence
  Synthetic
accaatgaaauccttttcgucagaact

SEQ ID NO: 4894 - DNA, 25 bp, Artificial Sequence
  Synthetic
tgctagcauccaaattaggctatut

SEQ ID NO: 4895 - DNA, 26 bp, Artificial Sequence
  Synthetic
aggaggcaagagaaguacctgttaut

SEQ ID NO: 4896 - DNA, 32 bp, Artificial Sequence
  Synthetic
cagcacaaatacacuaatagacaaatcttcut

SEQ ID NO: 4897 - DNA, 23 bp, Artificial Sequence
  Synthetic
ctcgggaaucagcaagtuacagt

SEQ ID NO: 4898 - DNA, 23 bp, Artificial Sequence
  Synthetic
gcacatcccutggaaagtctgua

SEQ ID NO: 4899 - DNA, 33 bp, Artificial Sequence
  Synthetic
tttattccttctatgcuaatattggttcacaut

SEQ ID NO: 4900 - DNA, 27 bp, Artificial Sequence
  Synthetic
tgttcctctttugtcaaaaattggtut

SEQ ID NO: 4901 - DNA, 28 bp, Artificial Sequence
  Synthetic
acacaatttggaugcaaaagttgatuca

SEQ ID NO: 4902 - DNA, 23 bp, Artificial Sequence
  Synthetic
cagauatcaacugacccaggcaa

SEQ ID NO: 4903 - DNA, 22 bp, Artificial Sequence
  Synthetic
gtcatgtugttgtgcaugccat

SEQ ID NO: 4904 - DNA, 26 bp, Artificial Sequence
  Synthetic
cagaattcatcauagcaagctgugac

SEQ ID NO: 4905 - DNA, 28 bp, Artificial Sequence
  Synthetic
ggcgtgtcucaatatttgacatttucat

SEQ ID NO: 4906 - DNA, 25 bp, Artificial Sequence
  Synthetic
agauaggcacgatgaugaagaggat

SEQ ID NO: 4907 - DNA, 21 bp, Artificial Sequence
  Synthetic
gctgcccutgtaggccuaaaa

SEQ ID NO: 4908 - DNA, 25 bp, Artificial Sequence
  Synthetic
ctgttcatguagcagtgcatttuca

SEQ ID NO: 4909 - DNA, 21 bp, Artificial Sequence
  Synthetic
ggcacucaggaagaugccaag

SEQ ID NO: 4910 - DNA, 26 bp, Artificial Sequence
  Synthetic
cgaaaaagugcaccataattacugct

SEQ ID NO: 4911 - DNA, 27 bp, Artificial Sequence
  Synthetic
ccaatgccaacaggauattcccaauaa

SEQ ID NO: 4912 - DNA, 23 bp, Artificial Sequence
  Synthetic
ttccaaagcucccattggtguaa

SEQ ID NO: 4913 - DNA, 20 bp, Artificial Sequence
  Synthetic
accgucgggacagatacuct

SEQ ID NO: 4914 - DNA, 27 bp, Artificial Sequence
  Synthetic
gttaaauggagatcttcugggaaacca

SEQ ID NO: 4915 - DNA, 30 bp, Artificial Sequence
  Synthetic
acctagctagaatuctgctcagataatuga

SEQ ID NO: 4916 - DNA, 27 bp, Artificial Sequence
  Synthetic
catcacatcutcttttggttuccacaa

SEQ ID NO: 4917 - DNA, 23 bp, Artificial Sequence
  Synthetic
ctgaccataaaugtgtggcccua

SEQ ID NO: 4918 - DNA, 29 bp, Artificial Sequence
  Synthetic
gagtgaaaacacaautcagtttgaucaca

SEQ ID NO: 4919 - DNA, 23 bp, Artificial Sequence
  Synthetic
cctacctugtccttgaugaagca

SEQ ID NO: 4920 - DNA, 23 bp, Artificial Sequence
  Synthetic
gagcaccaccguagatacaagua

SEQ ID NO: 4921 - DNA, 29 bp, Artificial Sequence
  Synthetic
gcagtttaaaacuagtatccaggtttgug

SEQ ID NO: 4922 - DNA, 26 bp, Artificial Sequence
  Synthetic
ggtagguagaactgaaaaguagcact

SEQ ID NO: 4923 - DNA, 28 bp, Artificial Sequence
  Synthetic
ggtggttgtcaugaattttaagactgut

SEQ ID NO: 4924 - DNA, 21 bp, Artificial Sequence
  Synthetic
ggucactcgaauaacccgaca

SEQ ID NO: 4925 - DNA, 18 bp, Artificial Sequence
  Synthetic
agcttcggcuggtgucat

SEQ ID NO: 4926 - DNA, 23 bp, Artificial Sequence
  Synthetic
tcugagcaaacaaacugagagca

SEQ ID NO: 4927 - DNA, 26 bp, Artificial Sequence
  Synthetic
ccagtgagttggutgtcacttactut

SEQ ID NO: 4928 - DNA, 20 bp, Artificial Sequence
  Synthetic
aaacccaauccctgccucaa

SEQ ID NO: 4929 - DNA, 17 bp, Artificial Sequence
  Synthetic
ccaggacccugcgaugc

SEQ ID NO: 4930 - DNA, 18 bp, Artificial Sequence
  Synthetic
ccgcucactcuccagcat

SEQ ID NO: 4931 - DNA, 20 bp, Artificial Sequence
  Synthetic
gcagcagaggcaguacctug

SEQ ID NO: 4932 - DNA, 20 bp, Artificial Sequence
  Synthetic
gtggacaugcttcgtcguct

SEQ ID NO: 4933 - DNA, 21 bp, Artificial Sequence
  Synthetic
ccaccatucgcagtaccacuc

SEQ ID NO: 4934 - DNA, 21 bp, Artificial Sequence
  Synthetic
cacatgcgcauacacauacga

SEQ ID NO: 4935 - DNA, 21 bp, Artificial Sequence
  Synthetic
cctttgcagcugagctgauct

SEQ ID NO: 4936 - DNA, 20 bp, Artificial Sequence
  Synthetic
ggaaucatccgucagcgcat

SEQ ID NO: 4937 - DNA, 21 bp, Artificial Sequence
  Synthetic
tggtgagggucagtgacugaa

SEQ ID NO: 4938 - DNA, 25 bp, Artificial Sequence
  Synthetic
cctggtcaaacaugatggaaucaat

SEQ ID NO: 4939 - DNA, 23 bp, Artificial Sequence
  Synthetic
ggcagaugaacctgaaggauacc

SEQ ID NO: 4940 - DNA, 19 bp, Artificial Sequence
  Synthetic
ccttctucccctggcacug

SEQ ID NO: 4941 - DNA, 27 bp, Artificial Sequence
  Synthetic
aacuggaagaagaaaaatucccagact

SEQ ID NO: 4942 - DNA, 20 bp, Artificial Sequence
  Synthetic
gctgtccucctcggattuga

SEQ ID NO: 4943 - DNA, 17 bp, Artificial Sequence
  Synthetic
gccaaccugctgcugag

SEQ ID NO: 4944 - DNA, 20 bp, Artificial Sequence
  Synthetic
ttguagcccaccacctucac

SEQ ID NO: 4945 - DNA, 20 bp, Artificial Sequence
  Synthetic
ggccuaaggacactctgcut

SEQ ID NO: 4946 - DNA, 18 bp, Artificial Sequence
  Synthetic
cagccggugtcctttgug

SEQ ID NO: 4947 - DNA, 19 bp, Artificial Sequence
  Synthetic
ccatcctcuggctgctcug

SEQ ID NO: 4948 - DNA, 18 bp, Artificial Sequence
  Synthetic
gtccuggctgtugccgat

SEQ ID NO: 4949 - DNA, 18 bp, Artificial Sequence
  Synthetic
gctcggcgucacctucac

SEQ ID NO: 4950 - DNA, 29 bp, Artificial Sequence
  Synthetic
tgctttagtgaaccutttgcatatttgut

SEQ ID NO: 4951 - DNA, 23 bp, Artificial Sequence
  Synthetic
cggcctctguttgatttctccug

SEQ ID NO: 4952 - DNA, 22 bp, Artificial Sequence
  Synthetic
ctcacaucaccaagtgcaccua

SEQ ID NO: 4953 - DNA, 21 bp, Artificial Sequence
  Synthetic
tgtggccutctttgagtucgg

SEQ ID NO: 4954 - DNA, 17 bp, Artificial Sequence
  Synthetic
ggaugcggctggauggg

SEQ ID NO: 4955 - DNA, 25 bp, Artificial Sequence
  Synthetic
acgataaccgggagauagtgaugaa

SEQ ID NO: 4956 - DNA, 29 bp, Artificial Sequence
  Synthetic
gcatgagaugcaggaaatttttatuccaa

SEQ ID NO: 4957 - DNA, 21 bp, Artificial Sequence
  Synthetic
guacagggaaacgcaccugat

SEQ ID NO: 4958 - DNA, 27 bp, Artificial Sequence
  Synthetic
tgcgcucagaaaagattttctucaaat

SEQ ID NO: 4959 - DNA, 21 bp, Artificial Sequence
  Synthetic
gggtatgagggcutgtagcug

SEQ ID NO: 4960 - DNA, 17 bp, Artificial Sequence
  Synthetic
gacuggtguggccccaa

SEQ ID NO: 4961 - DNA, 19 bp, Artificial Sequence
  Synthetic
gacagctucgagcagtucc

SEQ ID NO: 4962 - DNA, 17 bp, Artificial Sequence
  Synthetic
cctgagcccuggctgug

SEQ ID NO: 4963 - DNA, 22 bp, Artificial Sequence
  Synthetic
aggagaagauccacucacccat

SEQ ID NO: 4964 - DNA, 22 bp, Artificial Sequence
  Synthetic
cttcuggcttccugaggacaaa

SEQ ID NO: 4965 - DNA, 21 bp, Artificial Sequence
  Synthetic
ccucagcaagtcauccagcac

SEQ ID NO: 4966 - DNA, 18 bp, Artificial Sequence
  Synthetic
gggcagguggctctucat

SEQ ID NO: 4967 - DNA, 19 bp, Artificial Sequence
  Synthetic
cacuaccccagcagccauc

SEQ ID NO: 4968 - DNA, 20 bp, Artificial Sequence
  Synthetic
agacccaacgucccaccuaa

SEQ ID NO: 4969 - DNA, 25 bp, Artificial Sequence
  Synthetic
cagagcctcacuaccttctctttuc

SEQ ID NO: 4970 - DNA, 18 bp, Artificial Sequence
  Synthetic
ggacggcutcagggtcuc

SEQ ID NO: 4971 - DNA, 25 bp, Artificial Sequence
  Synthetic
gcaagccuatgtcctaugaggagaa

SEQ ID NO: 4972 - DNA, 19 bp, Artificial Sequence
  Synthetic
cagaaguctgcucccacga

SEQ ID NO: 4973 - DNA, 25 bp, Artificial Sequence
  Synthetic
ccgattgatgtuctccaactgcuat

SEQ ID NO: 4974 - DNA, 20 bp, Artificial Sequence
  Synthetic
cgagacctugctgctctuct

SEQ ID NO: 4975 - DNA, 21 bp, Artificial Sequence
  Synthetic
caccatugaccccatucacga

SEQ ID NO: 4976 - DNA, 19 bp, Artificial Sequence
  Synthetic
gggaggcaccacugtcaug

SEQ ID NO: 4977 - DNA, 23 bp, Artificial Sequence
  Synthetic
ccacgguaccaaacacaacucaa

SEQ ID NO: 4978 - DNA, 20 bp, Artificial Sequence
  Synthetic
gacacccaccccuacatcuc

SEQ ID NO: 4979 - DNA, 28 bp, Artificial Sequence
  Synthetic
aaacgcctatggauatgggaacaauaaa

SEQ ID NO: 4980 - DNA, 24 bp, Artificial Sequence
  Synthetic
ggaagttuctagtccaucccccat

SEQ ID NO: 4981 - DNA, 22 bp, Artificial Sequence
  Synthetic
gcccatcugctgactgatauct

SEQ ID NO: 4982 - DNA, 17 bp, Artificial Sequence
  Synthetic
aagcucgtgguggcgat

SEQ ID NO: 4983 - DNA, 17 bp, Artificial Sequence
  Synthetic
ccgcatugagcgcauca

SEQ ID NO: 4984 - DNA, 18 bp, Artificial Sequence
  Synthetic
gacaccccaugaggguga

SEQ ID NO: 4985 - DNA, 18 bp, Artificial Sequence
  Synthetic
gcccagcutccagacugt

SEQ ID NO: 4986 - DNA, 24 bp, Artificial Sequence
  Synthetic
ctctctgagugaagtgcgataucc

SEQ ID NO: 4987 - DNA, 20 bp, Artificial Sequence
  Synthetic
ggcgtugggttttcuagcca

SEQ ID NO: 4988 - DNA, 17 bp, Artificial Sequence
  Synthetic
ggccguccttcugcagt

SEQ ID NO: 4989 - DNA, 19 bp, Artificial Sequence
  Synthetic
cccatcaacutggcgagug

SEQ ID NO: 4990 - DNA, 19 bp, Artificial Sequence
  Synthetic
tggcagggugaccucaaga

SEQ ID NO: 4991 - DNA, 17 bp, Artificial Sequence
  Synthetic
gcgcggacgutctccut

SEQ ID NO: 4992 - DNA, 18 bp, Artificial Sequence
  Synthetic
ccttgcugccgtcgcuaa

SEQ ID NO: 4993 - DNA, 21 bp, Artificial Sequence
  Synthetic
catgaataaugcagcgcguca

SEQ ID NO: 4994 - DNA, 18 bp, Artificial Sequence
  Synthetic
cgcaggcggucattguca

SEQ ID NO: 4995 - DNA, 23 bp, Artificial Sequence
  Synthetic
guggacaagaauagcaacgagua

SEQ ID NO: 4996 - DNA, 20 bp, Artificial Sequence
  Synthetic
gtcgatguaggcgctgaugt

SEQ ID NO: 4997 - DNA, 18 bp, Artificial Sequence
  Synthetic
ccgaugagcagccaccug

SEQ ID NO: 4998 - DNA, 17 bp, Artificial Sequence
  Synthetic
cuctgcgugggcagact

SEQ ID NO: 4999 - DNA, 18 bp, Artificial Sequence
  Synthetic
actggtccuccccaucca

SEQ ID NO: 5000 - DNA, 17 bp, Artificial Sequence
  Synthetic
cagcccucacctcugct

SEQ ID NO: 5001 - DNA, 19 bp, Artificial Sequence
  Synthetic
ccgccugcccttcuacaac

SEQ ID NO: 5002 - DNA, 20 bp, Artificial Sequence
  Synthetic
gagtcccaugtggtgugcat

SEQ ID NO: 5003 - DNA, 21 bp, Artificial Sequence
  Synthetic
gagcgugtctucacagaggag

SEQ ID NO: 5004 - DNA, 17 bp, Artificial Sequence
  Synthetic
cucgcgagcgcaatucc

SEQ ID NO: 5005 - DNA, 24 bp, Artificial Sequence
  Synthetic
cgactatcucaaactcctuggcaa

SEQ ID NO: 5006 - DNA, 21 bp, Artificial Sequence
  Synthetic
ccagggaaaauctcuccagct

SEQ ID NO: 5007 - DNA, 22 bp, Artificial Sequence
  Synthetic
cgacccaacaccuttgtcauac

SEQ ID NO: 5008 - DNA, 21 bp, Artificial Sequence
  Synthetic
ccagcgugggagaaagaauct

SEQ ID NO: 5009 - DNA, 19 bp, Artificial Sequence
  Synthetic
cctgagctgucccgagcua

SEQ ID NO: 5010 - DNA, 22 bp, Artificial Sequence
  Synthetic
gaaatgugtcaccauccccagt

SEQ ID NO: 5011 - DNA, 21 bp, Artificial Sequence
  Synthetic
ctattgugcgggcatuggaag

SEQ ID NO: 5012 - DNA, 21 bp, Artificial Sequence
  Synthetic
ccagggctcugagccatacua

SEQ ID NO: 5013 - DNA, 19 bp, Artificial Sequence
  Synthetic
cucacccugaacagcagca

SEQ ID NO: 5014 - DNA, 23 bp, Artificial Sequence
  Synthetic
agcctcaacauaggagatgucca

SEQ ID NO: 5015 - DNA, 23 bp, Artificial Sequence
  Synthetic
agaagggcugaaaggagaatguc

SEQ ID NO: 5016 - DNA, 19 bp, Artificial Sequence
  Synthetic
ggccuaggagccctcugat

SEQ ID NO: 5017 - DNA, 18 bp, Artificial Sequence
  Synthetic
ctcucagggcatguggct

SEQ ID NO: 5018 - DNA, 20 bp, Artificial Sequence
  Synthetic
cagugcccuacccaaggaac

SEQ ID NO: 5019 - DNA, 21 bp, Artificial Sequence
  Synthetic
gacagutaggaccuggcagac

SEQ ID NO: 5020 - DNA, 18 bp, Artificial Sequence
  Synthetic
guccagcucagaggccaa

SEQ ID NO: 5021 - DNA, 18 bp, Artificial Sequence
  Synthetic
gggtagcuggtggctcuc

SEQ ID NO: 5022 - DNA, 17 bp, Artificial Sequence
  Synthetic
gugggcagggaaccugt

SEQ ID NO: 5023 - DNA, 19 bp, Artificial Sequence
  Synthetic
gcugcaaagggtccuggag

SEQ ID NO: 5024 - DNA, 22 bp, Artificial Sequence
  Synthetic
gtgtctcccutcctttcaugca

SEQ ID NO: 5025 - DNA, 21 bp, Artificial Sequence
  Synthetic
ggaaccauagccttugccaaa

SEQ ID NO: 5026 - DNA, 18 bp, Artificial Sequence
  Synthetic
ccugcagacactggugct

SEQ ID NO: 5027 - DNA, 20 bp, Artificial Sequence
  Synthetic
cgcaccacautggugaccat

SEQ ID NO: 5028 - DNA, 17 bp, Artificial Sequence
  Synthetic
cctgcugggcactgugg

SEQ ID NO: 5029 - DNA, 17 bp, Artificial Sequence
  Synthetic
ccagcaccugctccuga

SEQ ID NO: 5030 - DNA, 19 bp, Artificial Sequence
  Synthetic
catccguttcacccuccca

SEQ ID NO: 5031 - DNA, 19 bp, Artificial Sequence
  Synthetic
gactatggccccuccccua

SEQ ID NO: 5032 - DNA, 22 bp, Artificial Sequence
  Synthetic
gcttacctcacucctccccaut

SEQ ID NO: 5033 - DNA, 21 bp, Artificial Sequence
  Synthetic
cctagagcuacagagctcgug

SEQ ID NO: 5034 - DNA, 18 bp, Artificial Sequence
  Synthetic
ccccggaggucctgucat

SEQ ID NO: 5035 - DNA, 19 bp, Artificial Sequence
  Synthetic
agaatgguggctgcaggug

SEQ ID NO: 5036 - DNA, 19 bp, Artificial Sequence
  Synthetic
ccaguccgagagccaacug

SEQ ID NO: 5037 - DNA, 19 bp, Artificial Sequence
  Synthetic
cgctcaccauggtcucagg

SEQ ID NO: 5038 - DNA, 20 bp, Artificial Sequence
  Synthetic
gcuggtacuggcaagaaggt

SEQ ID NO: 5039 - DNA, 17 bp, Artificial Sequence
  Synthetic
ctgcagcugcucccact

SEQ ID NO: 5040 - DNA, 19 bp, Artificial Sequence
  Synthetic
cccccaagagugccaagug

SEQ ID NO: 5041 - DNA, 22 bp, Artificial Sequence
  Synthetic
tctctcactcuctaaccgccut

SEQ ID NO: 5042 - DNA, 21 bp, Artificial Sequence
  Synthetic
gcccgctaugcagacatctut

SEQ ID NO: 5043 - DNA, 20 bp, Artificial Sequence
  Synthetic
guacagggagaggagucuca

SEQ ID NO: 5044 - DNA, 23 bp, Artificial Sequence
  Synthetic
cctacaccccuataccccaugat

SEQ ID NO: 5045 - DNA, 21 bp, Artificial Sequence
  Synthetic
tgtgttauggacggctgguct

SEQ ID NO: 5046 - DNA, 18 bp, Artificial Sequence
  Synthetic
gggccuaggttucaccga

SEQ ID NO: 5047 - DNA, 18 bp, Artificial Sequence
  Synthetic
gctcctagugcacgcuca

SEQ ID NO: 5048 - DNA, 22 bp, Artificial Sequence
  Synthetic
ccctctguctctcttcctucct

SEQ ID NO: 5049 - DNA, 18 bp, Artificial Sequence
  Synthetic
gaaggcggguggagaugg

SEQ ID NO: 5050 - DNA, 20 bp, Artificial Sequence
  Synthetic
gccctcucctttcactcugg

SEQ ID NO: 5051 - DNA, 18 bp, Artificial Sequence
  Synthetic
ttcuaggcgcugcagcat

SEQ ID NO: 5052 - DNA, 22 bp, Artificial Sequence
  Synthetic
catctaccuggccaatcuggag

SEQ ID NO: 5053 - DNA, 21 bp, Artificial Sequence
  Synthetic
ctcacuccagaggacuttgut

SEQ ID NO: 5054 - DNA, 18 bp, Artificial Sequence
  Synthetic
ccugccaccctguggaac

SEQ ID NO: 5055 - DNA, 18 bp, Artificial Sequence
  Synthetic
gcctuggccttcccugac

SEQ ID NO: 5056 - DNA, 22 bp, Artificial Sequence
  Synthetic
atcggctatgugagctcagaug

SEQ ID NO: 5057 - DNA, 26 bp, Artificial Sequence
  Synthetic
catgcaagatcuttccaaccagatut

SEQ ID NO: 5058 - DNA, 18 bp, Artificial Sequence
  Synthetic
gcucctcgtuggcccaag

SEQ ID NO: 5059 - DNA, 23 bp, Artificial Sequence
  Synthetic
accgtggaacuggtagatacuca

SEQ ID NO: 5060 - DNA, 28 bp, Artificial Sequence
  Synthetic
caaaatatctccatugcagagactccua

SEQ ID NO: 5061 - DNA, 22 bp, Artificial Sequence
  Synthetic
gggttagaugaggtcaccucca

SEQ ID NO: 5062 - DNA, 21 bp, Artificial Sequence
  Synthetic
caggaagtacutggccaccug

SEQ ID NO: 5063 - DNA, 20 bp, Artificial Sequence
  Synthetic
ctccccgaaugaccttcugt

SEQ ID NO: 5064 - DNA, 20 bp, Artificial Sequence
  Synthetic
gagctcugggaagacaccug

SEQ ID NO: 5065 - DNA, 20 bp, Artificial Sequence
  Synthetic
cctaactugcgtctcgguct

SEQ ID NO: 5066 - DNA, 22 bp, Artificial Sequence
  Synthetic
cggtgctcuccatgtactggua

SEQ ID NO: 5067 - DNA, 26 bp, Artificial Sequence
  Synthetic
cuagttcuaagauagagaagggagga

SEQ ID NO: 5068 - DNA, 21 bp, Artificial Sequence
  Synthetic
cacagagcautcacacccuca

SEQ ID NO: 5069 - DNA, 21 bp, Artificial Sequence
  Synthetic
gtaatcucacccctcctugcc

SEQ ID NO: 5070 - DNA, 17 bp, Artificial Sequence
  Synthetic
gcucacccugcagcact

SEQ ID NO: 5071 - DNA, 19 bp, Artificial Sequence
  Synthetic
cagccccagcucatctcuc

SEQ ID NO: 5072 - DNA, 18 bp, Artificial Sequence
  Synthetic
cuctgcccaucccaccag

SEQ ID NO: 5073 - DNA, 18 bp, Artificial Sequence
  Synthetic
cctggcacucttguccca

SEQ ID NO: 5074 - DNA, 26 bp, Artificial Sequence
  Synthetic
acctcagggugaatacacaagtttut

SEQ ID NO: 5075 - DNA, 20 bp, Artificial Sequence
  Synthetic
gggtttgugcctccaaugag

SEQ ID NO: 5076 - DNA, 20 bp, Artificial Sequence
  Synthetic
cgtttgagcucccgcatgua

SEQ ID NO: 5077 - DNA, 19 bp, Artificial Sequence
  Synthetic
cttcuctgggcucgacgac

SEQ ID NO: 5078 - DNA, 24 bp, Artificial Sequence
  Synthetic
accctcatccautcttttgtggut

SEQ ID NO: 5079 - DNA, 29 bp, Artificial Sequence
  Synthetic
tgcaccaaaagagagutcatatcactuac

SEQ ID NO: 5080 - DNA, 23 bp, Artificial Sequence
  Synthetic
aaaugagcttgtcugagagccat

SEQ ID NO: 5081 - DNA, 19 bp, Artificial Sequence
  Synthetic
gccuggccacgaauagcag

SEQ ID NO: 5082 - DNA, 23 bp, Artificial Sequence
  Synthetic
catgcctuaccatcacactucca

SEQ ID NO: 5083 - DNA, 33 bp, Artificial Sequence
  Synthetic
ccuaataaataaactuaaaagagaacagaagcc

SEQ ID NO: 5084 - DNA, 29 bp, Artificial Sequence
  Synthetic
catagaaataagagacaugtccactcugg

SEQ ID NO: 5085 - DNA, 23 bp, Artificial Sequence
  Synthetic
cugattctccugggacacacaag

SEQ ID NO: 5086 - DNA, 23 bp, Artificial Sequence
  Synthetic
ccgaattcccagutgagtctgug

SEQ ID NO: 5087 - DNA, 23 bp, Artificial Sequence
  Synthetic
gcctgcucaaaggatttcctcut

SEQ ID NO: 5088 - DNA, 21 bp, Artificial Sequence
  Synthetic
cagataugcccccggatcauc

SEQ ID NO: 5089 - DNA, 21 bp, Artificial Sequence
  Synthetic
tctctauggcagtggugacct

SEQ ID NO: 5090 - DNA, 24 bp, Artificial Sequence
  Synthetic
agaaaggaggaaagcugcctacua

SEQ ID NO: 5091 - DNA, 22 bp, Artificial Sequence
  Synthetic
ggctgcuccactaatctcucag

SEQ ID NO: 5092 - DNA, 30 bp, Artificial Sequence
  Synthetic
cctatgagggaaagugatacuagacaagaa

SEQ ID NO: 5093 - DNA, 25 bp, Artificial Sequence
  Synthetic
gctcaacagauggtatgtgttcuct

SEQ ID NO: 5094 - DNA, 22 bp, Artificial Sequence
  Synthetic
gaggctgacacuagagaagcug

SEQ ID NO: 5095 - DNA, 23 bp, Artificial Sequence
  Synthetic
tcccatcugtccttguaaccaga

SEQ ID NO: 5096 - DNA, 26 bp, Artificial Sequence
  Synthetic
catgggatcuttacatggtctuggaa

SEQ ID NO: 5097 - DNA, 21 bp, Artificial Sequence
  Synthetic
cucaatccuggcaagaccagt

SEQ ID NO: 5098 - DNA, 24 bp, Artificial Sequence
  Synthetic
ctgggtgaucagagcaatgtuaca

SEQ ID NO: 5099 - DNA, 22 bp, Artificial Sequence
  Synthetic
gtttgtgctuggtcccaactuc

SEQ ID NO: 5100 - DNA, 26 bp, Artificial Sequence
  Synthetic
gcaggcattttaugggaagctttcua

SEQ ID NO: 5101 - DNA, 23 bp, Artificial Sequence
  Synthetic
ccaaagttugctttgtggcucag

SEQ ID NO: 5102 - DNA, 21 bp, Artificial Sequence
  Synthetic
cctccgccagguctttaguag

SEQ ID NO: 5103 - DNA, 23 bp, Artificial Sequence
  Synthetic
ccccgtgacaucttccagtttut

SEQ ID NO: 5104 - DNA, 22 bp, Artificial Sequence
  Synthetic
cgtcatctugaactccccgtug

SEQ ID NO: 5105 - DNA, 22 bp, Artificial Sequence
  Synthetic
ctgtgcucactggagtttucct

SEQ ID NO: 5106 - DNA, 28 bp, Artificial Sequence
  Synthetic
gcaaaatcacagautaaccacagaaaut

SEQ ID NO: 5107 - DNA, 17 bp, Artificial Sequence
  Synthetic
tcagccuggaccgguca

SEQ ID NO: 5108 - DNA, 21 bp, Artificial Sequence
  Synthetic
ctctggaagucgtccttgguc

SEQ ID NO: 5109 - DNA, 22 bp, Artificial Sequence
  Synthetic
tgaatgtgtucccaccccttuc

SEQ ID NO: 5110 - DNA, 20 bp, Artificial Sequence
  Synthetic
cgtgggcucatctuggaagt

SEQ ID NO: 5111 - DNA, 29 bp, Artificial Sequence
  Synthetic
tcttgaattatgtguttctttgggcatuc

SEQ ID NO: 5112 - DNA, 20 bp, Artificial Sequence
  Synthetic
ggtccgggacaguctgaauc

SEQ ID NO: 5113 - DNA, 23 bp, Artificial Sequence
  Synthetic
attggtgaatugtgtcctgucct

SEQ ID NO: 5114 - DNA, 21 bp, Artificial Sequence
  Synthetic
gtaagggcagugggacttuga

SEQ ID NO: 5115 - DNA, 20 bp, Artificial Sequence
  Synthetic
gtgctttugcctcctugcag

SEQ ID NO: 5116 - DNA, 19 bp, Artificial Sequence
  Synthetic
tgugacccccaaagccauc

SEQ ID NO: 5117 - DNA, 20 bp, Artificial Sequence
  Synthetic
tgcatugcggcctatctgua

SEQ ID NO: 5118 - DNA, 28 bp, Artificial Sequence
  Synthetic
aaaggtgctatcautcagatgacttugt

SEQ ID NO: 5119 - DNA, 22 bp, Artificial Sequence
  Synthetic
actgctcaucaatgacctgcug

SEQ ID NO: 5120 - DNA, 20 bp, Artificial Sequence
  Synthetic
ctgccagacugcaaggagua

SEQ ID NO: 5121 - DNA, 21 bp, Artificial Sequence
  Synthetic
cacatgggcaugttcacugag

SEQ ID NO: 5122 - DNA, 19 bp, Artificial Sequence
  Synthetic
cactctgccguctgcagut

SEQ ID NO: 5123 - DNA, 20 bp, Artificial Sequence
  Synthetic
ggctgccaagcugctctaua

SEQ ID NO: 5124 - DNA, 24 bp, Artificial Sequence
  Synthetic
ctctatataggacucacggcccut

SEQ ID NO: 5125 - DNA, 24 bp, Artificial Sequence
  Synthetic
ctgagaacagaaugggaggaatug

SEQ ID NO: 5126 - DNA, 18 bp, Artificial Sequence
  Synthetic
cgatgcucgcgatgucca

SEQ ID NO: 5127 - DNA, 20 bp, Artificial Sequence
  Synthetic
ggtttgugcagccttcgtuc

SEQ ID NO: 5128 - DNA, 24 bp, Artificial Sequence
  Synthetic
gtcaattagcugtctcctggaugg

SEQ ID NO: 5129 - DNA, 23 bp, Artificial Sequence
  Synthetic
tcacacacaugagtgtgctcaut

SEQ ID NO: 5130 - DNA, 31 bp, Artificial Sequence
  Synthetic
gaatuagacagaaacaauaacagacacuaga

SEQ ID NO: 5131 - DNA, 28 bp, Artificial Sequence
  Synthetic
gtggattgttcugaggaagtgatuaaac

SEQ ID NO: 5132 - DNA, 19 bp, Artificial Sequence
  Synthetic
aucagcaagggcagcucat

SEQ ID NO: 5133 - DNA, 26 bp, Artificial Sequence
  Synthetic
caagacccagaugtgcatctgaaaua

SEQ ID NO: 5134 - DNA, 23 bp, Artificial Sequence
  Synthetic
gggagcaugtgacattaatugca

SEQ ID NO: 5135 - DNA, 20 bp, Artificial Sequence
  Synthetic
agcaagcacuggagcacuac

SEQ ID NO: 5136 - DNA, 20 bp, Artificial Sequence
  Synthetic
tgtccaaaacugccuacgct

SEQ ID NO: 5137 - DNA, 22 bp, Artificial Sequence
  Synthetic
gattggtgcucccttgcttcua

SEQ ID NO: 5138 - DNA, 19 bp, Artificial Sequence
  Synthetic
caucgagcaggagcuggag

SEQ ID NO: 5139 - DNA, 17 bp, Artificial Sequence
  Synthetic
ccatcgcugccggucat

SEQ ID NO: 5140 - DNA, 19 bp, Artificial Sequence
  Synthetic
ccaggccaugcagauggag

SEQ ID NO: 5141 - DNA, 22 bp, Artificial Sequence
  Synthetic
cgatcaggutgtcctucaggaa

SEQ ID NO: 5142 - DNA, 22 bp, Artificial Sequence
  Synthetic
tccaaugagaacctcaccucca

SEQ ID NO: 5143 - DNA, 20 bp, Artificial Sequence
  Synthetic
ctgucgaaggactgtugcga

SEQ ID NO: 5144 - DNA, 20 bp, Artificial Sequence
  Synthetic
caagatgggcugcccuacat

SEQ ID NO: 5145 - DNA, 18 bp, Artificial Sequence
  Synthetic
cgctucagggagccucac

SEQ ID NO: 5146 - DNA, 21 bp, Artificial Sequence
  Synthetic
gcacctgucccactctctcut

SEQ ID NO: 5147 - DNA, 22 bp, Artificial Sequence
  Synthetic
ctgaacggcaucaaggcatuac

SEQ ID NO: 5148 - DNA, 17 bp, Artificial Sequence
  Synthetic
accccagccutcccugt

SEQ ID NO: 5149 - DNA, 18 bp, Artificial Sequence
  Synthetic
gggccacaucgtcacuca

SEQ ID NO: 5150 - DNA, 18 bp, Artificial Sequence
  Synthetic
guggcatcuccccacaga

SEQ ID NO: 5151 - DNA, 17 bp, Artificial Sequence
  Synthetic
cgctcaccutgccgtug

SEQ ID NO: 5152 - DNA, 24 bp, Artificial Sequence
  Synthetic
gatgtggaaaagaccugtgaccut

SEQ ID NO: 5153 - DNA, 22 bp, Artificial Sequence
  Synthetic
gcccttguggaatcagttccuc

SEQ ID NO: 5154 - DNA, 22 bp, Artificial Sequence
  Synthetic
gggctgutaggacacugagaac

SEQ ID NO: 5155 - DNA, 17 bp, Artificial Sequence
  Synthetic
ggaugtccguggccaca

SEQ ID NO: 5156 - DNA, 21 bp, Artificial Sequence
  Synthetic
cgttgugaccccaaggaguaa

SEQ ID NO: 5157 - DNA, 19 bp, Artificial Sequence
  Synthetic
catgggagagcugggcuac

SEQ ID NO: 5158 - DNA, 23 bp, Artificial Sequence
  Synthetic
atcctgttcuccaccgaagtcua

SEQ ID NO: 5159 - DNA, 17 bp, Artificial Sequence
  Synthetic
ggctttgggucgctguc

SEQ ID NO: 5160 - DNA, 25 bp, Artificial Sequence
  Synthetic
accacagcacauacacatttuagca

SEQ ID NO: 5161 - DNA, 24 bp, Artificial Sequence
  Synthetic
tcacugaaggatcagaucaccagt

SEQ ID NO: 5162 - DNA, 30 bp, Artificial Sequence
  Synthetic
aaaagtttcugaacaagaatcuacaggaat

SEQ ID NO: 5163 - DNA, 22 bp, Artificial Sequence
  Synthetic
gtcatgccugcctttctgtgua

SEQ ID NO: 5164 - DNA, 26 bp, Artificial Sequence
  Synthetic
gcaaacttcctuttgctgatgatcut

SEQ ID NO: 5165 - DNA, 25 bp, Artificial Sequence
  Synthetic
cuaatacttgaaguggacccaggag

SEQ ID NO: 5166 - DNA, 22 bp, Artificial Sequence
  Synthetic
cggcgtttucctttcccuacaa

SEQ ID NO: 5167 - DNA, 30 bp, Artificial Sequence
  Synthetic
attttcccactauaaatctctgctatucaa

SEQ ID NO: 5168 - DNA, 22 bp, Artificial Sequence
  Synthetic
tcaggttcutggtccucaggaa

SEQ ID NO: 5169 - DNA, 20 bp, Artificial Sequence
  Synthetic
caaggctccucctcacaguc

SEQ ID NO: 5170 - DNA, 27 bp, Artificial Sequence
  Synthetic
aggaatgttttugattttggttcucca

SEQ ID NO: 5171 - DNA, 22 bp, Artificial Sequence
  Synthetic
gacatcagugggctgtccauag

SEQ ID NO: 5172 - DNA, 22 bp, Artificial Sequence
  Synthetic
ggcactggugcttatgauacca

SEQ ID NO: 5173 - DNA, 22 bp, Artificial Sequence
  Synthetic
agacugacgcatuaaggacacc

SEQ ID NO: 5174 - DNA, 22 bp, Artificial Sequence
  Synthetic
ctgtgtcacauggtgtgaaugt

SEQ ID NO: 5175 - DNA, 25 bp, Artificial Sequence
  Synthetic
tctgatcataacuagtcggctgugt

SEQ ID NO: 5176 - DNA, 21 bp, Artificial Sequence
  Synthetic
gcatgaguggccctgauaacc

SEQ ID NO: 5177 - DNA, 25 bp, Artificial Sequence
  Synthetic
agtcccttctutccactgaaaaucc

SEQ ID NO: 5178 - DNA, 18 bp, Artificial Sequence
  Synthetic
gccagugcccttctuccc

SEQ ID NO: 5179 - DNA, 24 bp, Artificial Sequence
  Synthetic
actcaaaaactuaccaccaggcut

SEQ ID NO: 5180 - DNA, 28 bp, Artificial Sequence
  Synthetic
atgtgagaaatuggtacttttccuggat

SEQ ID NO: 5181 - DNA, 22 bp, Artificial Sequence
  Synthetic
tgggctttccugtttccttguc

SEQ ID NO: 5182 - DNA, 28 bp, Artificial Sequence
  Synthetic
atgatttgctgtutcttgttgttctugt

SEQ ID NO: 5183 - DNA, 20 bp, Artificial Sequence
  Synthetic
tggacguttcctccuccaga

SEQ ID NO: 5184 - DNA, 17 bp, Artificial Sequence
  Synthetic
gagguggcttccguggt

SEQ ID NO: 5185 - DNA, 20 bp, Artificial Sequence
  Synthetic
agcugctttucaccagcact

SEQ ID NO: 5186 - DNA, 26 bp, Artificial Sequence
  Synthetic
aattaaaaauggccgagaatgtggug

SEQ ID NO: 5187 - DNA, 22 bp, Artificial Sequence
  Synthetic
aagaauaaaggcgcaccgagua

SEQ ID NO: 5188 - DNA, 22 bp, Artificial Sequence
  Synthetic
tggucaaaagcccaaugacaca

SEQ ID NO: 5189 - DNA, 21 bp, Artificial Sequence
  Synthetic
aggattcaugcccgcatucat

SEQ ID NO: 5190 - DNA, 27 bp, Artificial Sequence
  Synthetic
accccaatcctuatggttcaccataua

SEQ ID NO: 5191 - DNA, 23 bp, Artificial Sequence
  Synthetic
agtactcaccaugttgggcatuc

SEQ ID NO: 5192 - DNA, 23 bp, Artificial Sequence
  Synthetic
cactgucgcacaatgaagaaugt

SEQ ID NO: 5193 - DNA, 23 bp, Artificial Sequence
  Synthetic
cattttcctucttctcccuggct

SEQ ID NO: 5194 - DNA, 21 bp, Artificial Sequence
  Synthetic
cccccaaccuaagcactgtua

SEQ ID NO: 5195 - DNA, 24 bp, Artificial Sequence
  Synthetic
ctgattctgcuggttctttgctug

SEQ ID NO: 5196 - DNA, 21 bp, Artificial Sequence
  Synthetic
cctaugccaacagcagcucaa

SEQ ID NO: 5197 - DNA, 25 bp, Artificial Sequence
  Synthetic
cccaggagautgaaaacatgtugac

SEQ ID NO: 5198 - DNA, 29 bp, Artificial Sequence
  Synthetic
actaccaccttcuagctgagaaaatcuat

SEQ ID NO: 5199 - DNA, 17 bp, Artificial Sequence
  Synthetic
ttgcggcugtcccaugt

SEQ ID NO: 5200 - DNA, 19 bp, Artificial Sequence
  Synthetic
cccagcccccuattguacc

SEQ ID NO: 5201 - DNA, 26 bp, Artificial Sequence
  Synthetic
tcaaaauaccagguaaaggccaaaga

SEQ ID NO: 5202 - DNA, 21 bp, Artificial Sequence
  Synthetic
cacattcacugtccccagcut

SEQ ID NO: 5203 - DNA, 21 bp, Artificial Sequence
  Synthetic
gaattgttgutgctgguggct

SEQ ID NO: 5204 - DNA, 20 bp, Artificial Sequence
  Synthetic
ctgcgtgugtctcaccuact

SEQ ID NO: 5205 - DNA, 24 bp, Artificial Sequence
  Synthetic
cattttggccuccatcttcactuc

SEQ ID NO: 5206 - DNA, 28 bp, Artificial Sequence
  Synthetic
attgattcttgagaugcttttagagcut

SEQ ID NO: 5207 - DNA, 21 bp, Artificial Sequence
  Synthetic
tgacgguaaagtgccuccaaa

SEQ ID NO: 5208 - DNA, 23 bp, Artificial Sequence
  Synthetic
aaatugacccagtgaugcaaagc

SEQ ID NO: 5209 - DNA, 25 bp, Artificial Sequence
  Synthetic
gucaaagccagaaguaggatatuct

SEQ ID NO: 5210 - DNA, 27 bp, Artificial Sequence
  Synthetic
gcaagttttcauttggttaaggttugg

SEQ ID NO: 5211 - DNA, 24 bp, Artificial Sequence
  Synthetic
acaacgutaagactuacccagcag

SEQ ID NO: 5212 - DNA, 26 bp, Artificial Sequence
  Synthetic
gtggatccaaaautgctcatacaugg

SEQ ID NO: 5213 - DNA, 27 bp, Artificial Sequence
  Synthetic
accaucaatttctucaaaggcaaagag

SEQ ID NO: 5214 - DNA, 29 bp, Artificial Sequence
  Synthetic
tggtatctataucaactccaacttguggt

SEQ ID NO: 5215 - DNA, 28 bp, Artificial Sequence
  Synthetic
ggaggatggcaauggaagatataaucat

SEQ ID NO: 5216 - DNA, 25 bp, Artificial Sequence
  Synthetic
cautaaggaacuggaacaggaggaa

SEQ ID NO: 5217 - DNA, 30 bp, Artificial Sequence
  Synthetic
agtgcacttcuggattaaatattagaauca

SEQ ID NO: 5218 - DNA, 21 bp, Artificial Sequence
  Synthetic
gatctgauggatggucgggat

SEQ ID NO: 5219 - DNA, 23 bp, Artificial Sequence
  Synthetic
ccacatggugcttgcattcatug

SEQ ID NO: 5220 - DNA, 19 bp, Artificial Sequence
  Synthetic
tgctugccagtgucggaat

SEQ ID NO: 5221 - DNA, 20 bp, Artificial Sequence
  Synthetic
tgttctccuggcagtgctug

SEQ ID NO: 5222 - DNA, 23 bp, Artificial Sequence
  Synthetic
ccaatagcaugccaccctactug

SEQ ID NO: 5223 - DNA, 22 bp, Artificial Sequence
  Synthetic
cgctgctcuctgaatctgcaut

SEQ ID NO: 5224 - DNA, 21 bp, Artificial Sequence
  Synthetic
ggtaucagcccacucaaacca

SEQ ID NO: 5225 - DNA, 22 bp, Artificial Sequence
  Synthetic
gcutgatgaaugcagccaacag

SEQ ID NO: 5226 - DNA, 21 bp, Artificial Sequence
  Synthetic
ccaggcucagcagaugaacat

SEQ ID NO: 5227 - DNA, 23 bp, Artificial Sequence
  Synthetic
gttgctggaacuggttatggtug

SEQ ID NO: 5228 - DNA, 21 bp, Artificial Sequence
  Synthetic
ggccagcagauccctaatuct

SEQ ID NO: 5229 - DNA, 21 bp, Artificial Sequence
  Synthetic
ggaaacguggtguggagaagg

SEQ ID NO: 5230 - DNA, 28 bp, Artificial Sequence
  Synthetic
ccgtgtccctacuccagaattgataaua

SEQ ID NO: 5231 - DNA, 20 bp, Artificial Sequence
  Synthetic
ctcagcccacucactauggg

SEQ ID NO: 5232 - DNA, 27 bp, Artificial Sequence
  Synthetic
tgactctggcacugatagtgatatuga

SEQ ID NO: 5233 - DNA, 20 bp, Artificial Sequence
  Synthetic
ggcctatgautggcctgcut

SEQ ID NO: 5234 - DNA, 23 bp, Artificial Sequence
  Synthetic
caggccttgguagaatcgacuat

SEQ ID NO: 5235 - DNA, 24 bp, Artificial Sequence
  Synthetic
gggaaggcaagugtgaagagaauc

SEQ ID NO: 5236 - DNA, 22 bp, Artificial Sequence
  Synthetic
tgcaucaggcaggtacttugat

SEQ ID NO: 5237 - DNA, 20 bp, Artificial Sequence
  Synthetic
gggtaucagggacctcucag

SEQ ID NO: 5238 - DNA, 25 bp, Artificial Sequence
  Synthetic
agctcccaauacaacaactgttuct

SEQ ID NO: 5239 - DNA, 22 bp, Artificial Sequence
  Synthetic
aactctccaccuggagaugact

SEQ ID NO: 5240 - DNA, 24 bp, Artificial Sequence
  Synthetic
gatgguagcccaggttcatatugg

SEQ ID NO: 5241 - DNA, 23 bp, Artificial Sequence
  Synthetic
ccttgccagaugatgaugacgag

SEQ ID NO: 5242 - DNA, 23 bp, Artificial Sequence
  Synthetic
tgctactaccutctcccctgtut

SEQ ID NO: 5243 - DNA, 22 bp, Artificial Sequence
  Synthetic
ctccaauaccagaaccutcucc

SEQ ID NO: 5244 - DNA, 23 bp, Artificial Sequence
  Synthetic
aaacttcucagccacagcttuct

SEQ ID NO: 5245 - DNA, 22 bp, Artificial Sequence
  Synthetic
gtcagugaaggaactggctuct

SEQ ID NO: 5246 - DNA, 22 bp, Artificial Sequence
  Synthetic
tgccttgttcutggctccttut

SEQ ID NO: 5247 - DNA, 21 bp, Artificial Sequence
  Synthetic
cagctggacguacctcagtug

SEQ ID NO: 5248 - DNA, 21 bp, Artificial Sequence
  Synthetic
cacactaggcucagccaucag

SEQ ID NO: 5249 - DNA, 21 bp, Artificial Sequence
  Synthetic
cactuccaacccaggtggtut

SEQ ID NO: 5250 - DNA, 18 bp, Artificial Sequence
  Synthetic
gggttggucggacggtug

SEQ ID NO: 5251 - DNA, 22 bp, Artificial Sequence
  Synthetic
ccttcacttugcaggcctctut

SEQ ID NO: 5252 - DNA, 21 bp, Artificial Sequence
  Synthetic
cccaautccagacucgcagat

SEQ ID NO: 5253 - DNA, 19 bp, Artificial Sequence
  Synthetic
ctgtggccuctgccaguac

SEQ ID NO: 5254 - DNA, 24 bp, Artificial Sequence
  Synthetic
catgtcaggcutgtttttctgcut

SEQ ID NO: 5255 - DNA, 24 bp, Artificial Sequence
  Synthetic
catctatctgugggagttccucct

SEQ ID NO: 5256 - DNA, 21 bp, Artificial Sequence
  Synthetic
ccctcctggucactagtguca

SEQ ID NO: 5257 - DNA, 22 bp, Artificial Sequence
  Synthetic
cccaccucaggtctttcttcut

SEQ ID NO: 5258 - DNA, 23 bp, Artificial Sequence
  Synthetic
gctaactgugctctgttctcugg

SEQ ID NO: 5259 - DNA, 24 bp, Artificial Sequence
  Synthetic
cgttgucagctctcugaaaagaca

SEQ ID NO: 5260 - DNA, 18 bp, Artificial Sequence
  Synthetic
ccgcugggaaaggagcug

SEQ ID NO: 5261 - DNA, 23 bp, Artificial Sequence
  Synthetic
ctccgugaggttattgtucaggg

SEQ ID NO: 5262 - DNA, 17 bp, Artificial Sequence
  Synthetic
cgcctccucgtcgtcut

SEQ ID NO: 5263 - DNA, 17 bp, Artificial Sequence
  Synthetic
gguagccctgguagccc

SEQ ID NO: 5264 - DNA, 25 bp, Artificial Sequence
  Synthetic
gggutatatattcaguggccagagg

SEQ ID NO: 5265 - DNA, 19 bp, Artificial Sequence
  Synthetic
cctgacggagguccctgut

SEQ ID NO: 5266 - DNA, 21 bp, Artificial Sequence
  Synthetic
caaagtccucacccucagcag

SEQ ID NO: 5267 - DNA, 19 bp, Artificial Sequence
  Synthetic
ctgatguggaggcugggat

SEQ ID NO: 5268 - DNA, 22 bp, Artificial Sequence
  Synthetic
ccctcaaugacctccaguaagg

SEQ ID NO: 5269 - DNA, 28 bp, Artificial Sequence
  Synthetic
aactaactagttugcattggtttccuct

SEQ ID NO: 5270 - DNA, 26 bp, Artificial Sequence
  Synthetic
gcttatgtugttctttgtcuggagca

SEQ ID NO: 5271 - DNA, 20 bp, Artificial Sequence
  Synthetic
aaatgtcugccctagcuccc

SEQ ID NO: 5272 - DNA, 21 bp, Artificial Sequence
  Synthetic
gctggaggcauaaaccccaug

SEQ ID NO: 5273 - DNA, 20 bp, Artificial Sequence
  Synthetic
acatcccugacccaaccuga

SEQ ID NO: 5274 - DNA, 26 bp, Artificial Sequence
  Synthetic
ggatttctucaagagtcacaucacag

SEQ ID NO: 5275 - DNA, 25 bp, Artificial Sequence
  Synthetic
cccatctgccutgttgttcatttug

SEQ ID NO: 5276 - DNA, 20 bp, Artificial Sequence
  Synthetic
caggcgggagauataccucg

SEQ ID NO: 5277 - DNA, 26 bp, Artificial Sequence
  Synthetic
atcttgcatucaaaggcauagagaca

SEQ ID NO: 5278 - DNA, 25 bp, Artificial Sequence
  Synthetic
cgtgtccuttgttatatuggaggaa

SEQ ID NO: 5279 - DNA, 22 bp, Artificial Sequence
  Synthetic
ctgatacccaggguttggaguc

SEQ ID NO: 5280 - DNA, 21 bp, Artificial Sequence
  Synthetic
ccagcacccugaagctauagt

SEQ ID NO: 5281 - DNA, 23 bp, Artificial Sequence
  Synthetic
aggagaatacauccccgagtcug

SEQ ID NO: 5282 - DNA, 20 bp, Artificial Sequence
  Synthetic
tgtacagcgugccauacagc

SEQ ID NO: 5283 - DNA, 23 bp, Artificial Sequence
  Synthetic
ggataggcatugccatactggut

SEQ ID NO: 5284 - DNA, 22 bp, Artificial Sequence
  Synthetic
gcgugaaccgaacagaugaaat

SEQ ID NO: 5285 - DNA, 21 bp, Artificial Sequence
  Synthetic
gtgattcugcatgcttggugg

SEQ ID NO: 5286 - DNA, 20 bp, Artificial Sequence
  Synthetic
tgggctuggtggauagacga

SEQ ID NO: 5287 - DNA, 27 bp, Artificial Sequence
  Synthetic
catcatacagcaggaugttgatgguat

SEQ ID NO: 5288 - DNA, 22 bp, Artificial Sequence
  Synthetic
cagagaacgcuactggatccug

SEQ ID NO: 5289 - DNA, 22 bp, Artificial Sequence
  Synthetic
ttgtccttgccugaaaaggcua

SEQ ID NO: 5290 - DNA, 21 bp, Artificial Sequence
  Synthetic
ccucggaagcatgugacaaca

SEQ ID NO: 5291 - DNA, 23 bp, Artificial Sequence
  Synthetic
tgatggccuctgaactctuagct

SEQ ID NO: 5292 - DNA, 20 bp, Artificial Sequence
  Synthetic
tgaucctgcugcaccacaag

SEQ ID NO: 5293 - DNA, 21 bp, Artificial Sequence
  Synthetic
ccgagatgtuggcgagtguaa

SEQ ID NO: 5294 - DNA, 25 bp, Artificial Sequence
  Synthetic
agaagttgtauagcactatggugcg

SEQ ID NO: 5295 - DNA, 20 bp, Artificial Sequence
  Synthetic
ttgccgatacugcccttcug

SEQ ID NO: 5296 - DNA, 25 bp, Artificial Sequence
  Synthetic
gtactgttttugattggccagucat

SEQ ID NO: 5297 - DNA, 18 bp, Artificial Sequence
  Synthetic
gcuggacagcacagggua

SEQ ID NO: 5298 - DNA, 26 bp, Artificial Sequence
  Synthetic
ggagactgcuacttagaggtgcuaat

SEQ ID NO: 5299 - DNA, 27 bp, Artificial Sequence
  Synthetic
ggttcccttcautatcctcgatgtuaa

SEQ ID NO: 5300 - DNA, 28 bp, Artificial Sequence
  Synthetic
ttgtcacattuacaggaatcucaaacct

SEQ ID NO: 5301 - DNA, 27 bp, Artificial Sequence
  Synthetic
gcactcagcaaauctgagataucagaa

SEQ ID NO: 5302 - DNA, 25 bp, Artificial Sequence
  Synthetic
gcttggatcagccuctttattggua

SEQ ID NO: 5303 - DNA, 26 bp, Artificial Sequence
  Synthetic
atccagggaaaagauccaucaacaaa

SEQ ID NO: 5304 - DNA, 27 bp, Artificial Sequence
  Synthetic
gttcttttgguggaaacacagtatgut

SEQ ID NO: 5305 - DNA, 23 bp, Artificial Sequence
  Synthetic
catttuagccacagaccccttug

SEQ ID NO: 5306 - DNA, 25 bp, Artificial Sequence
  Synthetic
gggcttcaguttcagacctaaauaa

SEQ ID NO: 5307 - DNA, 27 bp, Artificial Sequence
  Synthetic
ttatcacaggtgaucctttcaaggaug

SEQ ID NO: 5308 - DNA, 22 bp, Artificial Sequence
  Synthetic
gatgaggcaaggccaugtatut

SEQ ID NO: 5309 - DNA, 26 bp, Artificial Sequence
  Synthetic
gccaacctuaatgaacatgtugaagg

SEQ ID NO: 5310 - DNA, 23 bp, Artificial Sequence
  Synthetic
cactctccuccaattctgctgut

SEQ ID NO: 5311 - DNA, 31 bp, Artificial Sequence
  Synthetic
tcttttaatccccauttcttctcattcacut

SEQ ID NO: 5312 - DNA, 26 bp, Artificial Sequence
  Synthetic
gaagaccagcaaacaaugcaagaaua

SEQ ID NO: 5313 - DNA, 26 bp, Artificial Sequence
  Synthetic
gagggtagaaaaauctgcccttcaut

SEQ ID NO: 5314 - DNA, 25 bp, Artificial Sequence
  Synthetic
acugattaagugaaaagccaaggca

SEQ ID NO: 5315 - DNA, 27 bp, Artificial Sequence
  Synthetic
aaagctgcataguggtactttttcuct

SEQ ID NO: 5316 - DNA, 28 bp, Artificial Sequence
  Synthetic
ggatgaacuaaaagaggaaattugcaca

SEQ ID NO: 5317 - DNA, 27 bp, Artificial Sequence
  Synthetic
gagttgagtgauattgaccatgaugga

SEQ ID NO: 5318 - DNA, 28 bp, Artificial Sequence
  Synthetic
gguagagagagagtagauaggaagcaat

SEQ ID NO: 5319 - DNA, 30 bp, Artificial Sequence
  Synthetic
tcaactcttgttgugctttactttcttcua

SEQ ID NO: 5320 - DNA, 27 bp, Artificial Sequence
  Synthetic
gatggcatctutctaaatttgcaucca

SEQ ID NO: 5321 - DNA, 23 bp, Artificial Sequence
  Synthetic
gatgctgcugctttccugaaaaa

SEQ ID NO: 5322 - DNA, 25 bp, Artificial Sequence
  Synthetic
ggcaataaagugtcattgtcgugaa

SEQ ID NO: 5323 - DNA, 24 bp, Artificial Sequence
  Synthetic
tcutcaactacactucccagacct

SEQ ID NO: 5324 - DNA, 29 bp, Artificial Sequence
  Synthetic
agtttcagcactucatctgtaatcttcug

SEQ ID NO: 5325 - DNA, 28 bp, Artificial Sequence
  Synthetic
aaaagggcuggaaaattgttagacuact

SEQ ID NO: 5326 - DNA, 23 bp, Artificial Sequence
  Synthetic
acgtccttcutcacttcagugag

SEQ ID NO: 5327 - DNA, 21 bp, Artificial Sequence
  Synthetic
cctccuctccttctuccccat

SEQ ID NO: 5328 - DNA, 19 bp, Artificial Sequence
  Synthetic
gaaucgcgctgtugccaaa

SEQ ID NO: 5329 - DNA, 23 bp, Artificial Sequence
  Synthetic
caatgtatcagucccactgcuga

SEQ ID NO: 5330 - DNA, 23 bp, Artificial Sequence
  Synthetic
ggaatagaggucccccauggaat

SEQ ID NO: 5331 - DNA, 20 bp, Artificial Sequence
  Synthetic
cctgaaccugaccgctgauc

SEQ ID NO: 5332 - DNA, 26 bp, Artificial Sequence
  Synthetic
acagttctttugcacgtttcaacaut

SEQ ID NO: 5333 - DNA, 20 bp, Artificial Sequence
  Synthetic
gcagcucagauggagaaggg

SEQ ID NO: 5334 - DNA, 20 bp, Artificial Sequence
  Synthetic
gtcugaggagacccuccgaa

SEQ ID NO: 5335 - DNA, 23 bp, Artificial Sequence
  Synthetic
ctccacacagaugagctttcuct

SEQ ID NO: 5336 - DNA, 20 bp, Artificial Sequence
  Synthetic
gaagatgauggcgccacuct

SEQ ID NO: 5337 - DNA, 22 bp, Artificial Sequence
  Synthetic
acctcgcucagcactucaaaat

SEQ ID NO: 5338 - DNA, 23 bp, Artificial Sequence
  Synthetic
ggaaatctacuacccagggucac

SEQ ID NO: 5339 - DNA, 28 bp, Artificial Sequence
  Synthetic
gcatcgtucccaaucattctcatattua

SEQ ID NO: 5340 - DNA, 21 bp, Artificial Sequence
  Synthetic
gctcagaagguccatggauga

SEQ ID NO: 5341 - DNA, 23 bp, Artificial Sequence
  Synthetic
aggaagtcagutcttgtgacuct

SEQ ID NO: 5342 - DNA, 22 bp, Artificial Sequence
  Synthetic
cagtgatguccccatcuggaaa

SEQ ID NO: 5343 - DNA, 20 bp, Artificial Sequence
  Synthetic
ccattctucagccccaugct

SEQ ID NO: 5344 - DNA, 23 bp, Artificial Sequence
  Synthetic
cacataaagucccaggatuccca

SEQ ID NO: 5345 - DNA, 21 bp, Artificial Sequence
  Synthetic
tggagtctuctgagcaggugt

SEQ ID NO: 5346 - DNA, 29 bp, Artificial Sequence
  Synthetic
attgcccttcugttcagtttactaaugat

SEQ ID NO: 5347 - DNA, 22 bp, Artificial Sequence
  Synthetic
gagttggcugcagtctggtaut

SEQ ID NO: 5348 - DNA, 21 bp, Artificial Sequence
  Synthetic
cactgggagagaaucccgaug

SEQ ID NO: 5349 - DNA, 21 bp, Artificial Sequence
  Synthetic
cccactttgugctcctgugaa

SEQ ID NO: 5350 - DNA, 22 bp, Artificial Sequence
  Synthetic
cgaccaccutgaccataugact

SEQ ID NO: 5351 - DNA, 22 bp, Artificial Sequence
  Synthetic
gctgatggaccaucatgtccug

SEQ ID NO: 5352 - DNA, 25 bp, Artificial Sequence
  Synthetic
agatgatgugccaaaaaucccagat

SEQ ID NO: 5353 - DNA, 21 bp, Artificial Sequence
  Synthetic
ggagacccagcugtttctcug

SEQ ID NO: 5354 - DNA, 23 bp, Artificial Sequence
  Synthetic
caacatgggauccaactcucaga

SEQ ID NO: 5355 - DNA, 20 bp, Artificial Sequence
  Synthetic
gtgctcaccaaauggcagug

SEQ ID NO: 5356 - DNA, 18 bp, Artificial Sequence
  Synthetic
gtcucccacgaugcacca

SEQ ID NO: 5357 - DNA, 19 bp, Artificial Sequence
  Synthetic
guggacaggugaagcagca

SEQ ID NO: 5358 - DNA, 23 bp, Artificial Sequence
  Synthetic
ccctggaagucttccctctagua

SEQ ID NO: 5359 - DNA, 22 bp, Artificial Sequence
  Synthetic
gagcuggccacagtcttgauag

SEQ ID NO: 5360 - DNA, 26 bp, Artificial Sequence
  Synthetic
ggcttgatgucacacaatcctaucat

SEQ ID NO: 5361 - DNA, 22 bp, Artificial Sequence
  Synthetic
ccattgugagggaauggaacct

SEQ ID NO: 5362 - DNA, 21 bp, Artificial Sequence
  Synthetic
ggaagtuccaggccguaaaca

SEQ ID NO: 5363 - DNA, 20 bp, Artificial Sequence
  Synthetic
tggcatggauggagctguac

SEQ ID NO: 5364 - DNA, 23 bp, Artificial Sequence
  Synthetic
ccccaacagaacaucatgauccc

SEQ ID NO: 5365 - DNA, 23 bp, Artificial Sequence
  Synthetic
tcatttugacaaggaucggcaca

SEQ ID NO: 5366 - DNA, 23 bp, Artificial Sequence
  Synthetic
accctttctcucccagcttcuaa

SEQ ID NO: 5367 - DNA, 25 bp, Artificial Sequence
  Synthetic
gcctcatcaucgttcaagttcuagt

SEQ ID NO: 5368 - DNA, 29 bp, Artificial Sequence
  Synthetic
aaaataauacacagggaauacacagauga

SEQ ID NO: 5369 - DNA, 23 bp, Artificial Sequence
  Synthetic
tgtaaccatugtccagccaucag

SEQ ID NO: 5370 - DNA, 30 bp, Artificial Sequence
  Synthetic
cgcattgatgtugtgatagatttcugaaaa

SEQ ID NO: 5371 - DNA, 28 bp, Artificial Sequence
  Synthetic
tttatcattgtatuccacaggtggtuca

SEQ ID NO: 5372 - DNA, 27 bp, Artificial Sequence
  Synthetic
acatacttcacautggtgttgguacag

SEQ ID NO: 5373 - DNA, 27 bp, Artificial Sequence
  Synthetic
tcagguagtgaaatuaaaaggccaagt

SEQ ID NO: 5374 - DNA, 26 bp, Artificial Sequence
  Synthetic
gaagauctgctctaatugaacgggaa

SEQ ID NO: 5375 - DNA, 23 bp, Artificial Sequence
  Synthetic
ggaggtccccgutaaacctttua

SEQ ID NO: 5376 - DNA, 28 bp, Artificial Sequence
  Synthetic
acaagaaaggacutctcattcattuccc

SEQ ID NO: 5377 - DNA, 22 bp, Artificial Sequence
  Synthetic
atggttuggcagcacactcuat

SEQ ID NO: 5378 - DNA, 20 bp, Artificial Sequence
  Synthetic
tgtgagaaacugccaugcgt

SEQ ID NO: 5379 - DNA, 23 bp, Artificial Sequence
  Synthetic
ggcttctcuttctttccaugcag

SEQ ID NO: 5380 - DNA, 19 bp, Artificial Sequence
  Synthetic
agtccuccgtctccucacc

SEQ ID NO: 5381 - DNA, 20 bp, Artificial Sequence
  Synthetic
gggaguggcctttctttucc

SEQ ID NO: 5382 - DNA, 24 bp, Artificial Sequence
  Synthetic
gagattccaguggaacctgaugac

SEQ ID NO: 5383 - DNA, 19 bp, Artificial Sequence
  Synthetic
gagtgccaucccgactgua

SEQ ID NO: 5384 - DNA, 21 bp, Artificial Sequence
  Synthetic
cttggctgugtttccttugca

SEQ ID NO: 5385 - DNA, 28 bp, Artificial Sequence
  Synthetic
agtggccaatutcccattctaauaaagt

SEQ ID NO: 5386 - DNA, 23 bp, Artificial Sequence
  Synthetic
gaacctaaugccatttcctuccc

SEQ ID NO: 5387 - DNA, 25 bp, Artificial Sequence
  Synthetic
ctgaacatcauccaggtatcugcaa

SEQ ID NO: 5388 - DNA, 24 bp, Artificial Sequence
  Synthetic
cttggtggccaucatctttaucct

SEQ ID NO: 5389 - DNA, 24 bp, Artificial Sequence
  Synthetic
aguggctuaagaaagaaaggagca

SEQ ID NO: 5390 - DNA, 21 bp, Artificial Sequence
  Synthetic
ccactaugcagaggcugacat

SEQ ID NO: 5391 - DNA, 29 bp, Artificial Sequence
  Synthetic
gcttctctttgaaagutaggagtttccug

SEQ ID NO: 5392 - DNA, 27 bp, Artificial Sequence
  Synthetic
gcattcttctcuctcttgattcugact

SEQ ID NO: 5393 - DNA, 25 bp, Artificial Sequence
  Synthetic
atcatacagagagggucatcaguga

SEQ ID NO: 5394 - DNA, 22 bp, Artificial Sequence
  Synthetic
gctgacuttggaaugagcagga

SEQ ID NO: 5395 - DNA, 21 bp, Artificial Sequence
  Synthetic
tcaugcatgugagcccacaag

SEQ ID NO: 5396 - DNA, 27 bp, Artificial Sequence
  Synthetic
gccatttgtccugactctgtgtauaag

SEQ ID NO: 5397 - DNA, 22 bp, Artificial Sequence
  Synthetic
ggtcttguagggaggaccugag

SEQ ID NO: 5398 - DNA, 23 bp, Artificial Sequence
  Synthetic
gctgcugaagaaacctgtagcuc

SEQ ID NO: 5399 - DNA, 21 bp, Artificial Sequence
  Synthetic
ggacaccagcugcttgacuac

SEQ ID NO: 5400 - DNA, 21 bp, Artificial Sequence
  Synthetic
gatgtggacugtcctgcagut

SEQ ID NO: 5401 - DNA, 24 bp, Artificial Sequence
  Synthetic
ctcttatcugagcatcaggucaca

SEQ ID NO: 5402 - DNA, 24 bp, Artificial Sequence
  Synthetic
tctguaatggctagauccccagag

SEQ ID NO: 5403 - DNA, 22 bp, Artificial Sequence
  Synthetic
ggccaaugacatgctuccaaaa

SEQ ID NO: 5404 - DNA, 25 bp, Artificial Sequence
  Synthetic
cattacagaggutcctctgugcaaa

SEQ ID NO: 5405 - DNA, 25 bp, Artificial Sequence
  Synthetic
agaaatggagaaucagccccauaag

SEQ ID NO: 5406 - DNA, 21 bp, Artificial Sequence
  Synthetic
tgtgccccutcaatgttcucc

SEQ ID NO: 5407 - DNA, 27 bp, Artificial Sequence
  Synthetic
gttctttttattgguccccttgtctuc

SEQ ID NO: 5408 - DNA, 26 bp, Artificial Sequence
  Synthetic
aggctgttccautcgatatcctttut

SEQ ID NO: 5409 - DNA, 32 bp, Artificial Sequence
  Synthetic
aataaataaucggagaagaaauactaagugct

SEQ ID NO: 5410 - DNA, 22 bp, Artificial Sequence
  Synthetic
cggttgcatuctcggagguaat

SEQ ID NO: 5411 - DNA, 27 bp, Artificial Sequence
  Synthetic
ttgtcaaattatucttggccaaagugg

SEQ ID NO: 5412 - DNA, 23 bp, Artificial Sequence
  Synthetic
ggacacaccauagactguaggct

SEQ ID NO: 5413 - DNA, 30 bp, Artificial Sequence
  Synthetic
agttgtttagctuttctccttttctuacca

SEQ ID NO: 5414 - DNA, 32 bp, Artificial Sequence
  Synthetic
cattaatgaaaacugaaaagtgaaaggaugct

SEQ ID NO: 5415 - DNA, 21 bp, Artificial Sequence
  Synthetic
agccacugagagtgacccuaa

SEQ ID NO: 5416 - DNA, 23 bp, Artificial Sequence
  Synthetic
ggtgaagatautgaagccgguct

SEQ ID NO: 5417 - DNA, 19 bp, Artificial Sequence
  Synthetic
guacgcgagaguagggaug

SEQ ID NO: 5418 - DNA, 29 bp, Artificial Sequence
  Synthetic
gcctgaagagutgaattagaattgucagt

SEQ ID NO: 5419 - DNA, 17 bp, Artificial Sequence
  Synthetic
agcugcacgucggacat

SEQ ID NO: 5420 - DNA, 24 bp, Artificial Sequence
  Synthetic
cccgagauattgucagcagagaga

SEQ ID NO: 5421 - DNA, 29 bp, Artificial Sequence
  Synthetic
accaattctauaaccacagatuaaacgca

SEQ ID NO: 5422 - DNA, 23 bp, Artificial Sequence
  Synthetic
tttcguagaaacggaaggctuca

SEQ ID NO: 5423 - DNA, 26 bp, Artificial Sequence
  Synthetic
gtgctacucacataaaatcccuggaa

SEQ ID NO: 5424 - DNA, 29 bp, Artificial Sequence
  Synthetic
ctaaagctcaaguttgaaataatcuccgt

SEQ ID NO: 5425 - DNA, 23 bp, Artificial Sequence
  Synthetic
acuggtgatccaucaggcaaaag

SEQ ID NO: 5426 - DNA, 26 bp, Artificial Sequence
  Synthetic
aggtacatgguaaagcataaaucgca

SEQ ID NO: 5427 - DNA, 28 bp, Artificial Sequence
  Synthetic
gaagcacaaagcaucaaataaggtctua

SEQ ID NO: 5428 - DNA, 24 bp, Artificial Sequence
  Synthetic
ctgccttttugcctctttctucat

SEQ ID NO: 5429 - DNA, 21 bp, Artificial Sequence
  Synthetic
cccttgcuctccagtauccac

SEQ ID NO: 5430 - DNA, 25 bp, Artificial Sequence
  Synthetic
gggtaacttucacatgacagucaca

SEQ ID NO: 5431 - DNA, 22 bp, Artificial Sequence
  Synthetic
gtagcttgcucgctctttaugg

SEQ ID NO: 5432 - DNA, 21 bp, Artificial Sequence
  Synthetic
tctgggugagaactcaguggt

SEQ ID NO: 5433 - DNA, 24 bp, Artificial Sequence
  Synthetic
ccaagcttuggagacattggttuc

SEQ ID NO: 5434 - DNA, 21 bp, Artificial Sequence
  Synthetic
caccaggcugaggtggttuat

SEQ ID NO: 5435 - DNA, 30 bp, Artificial Sequence
  Synthetic
gaagtttgtguacaagtttgtctcttaucc

SEQ ID NO: 5436 - DNA, 24 bp, Artificial Sequence
  Synthetic
ttctgccugcaaaagcttaaacug

SEQ ID NO: 5437 - DNA, 23 bp, Artificial Sequence
  Synthetic
tcagctcatugctatggacagug

SEQ ID NO: 5438 - DNA, 20 bp, Artificial Sequence
  Synthetic
gcacaacccggguaccttuc

SEQ ID NO: 5439 - DNA, 28 bp, Artificial Sequence
  Synthetic
gcttattcctctuttctcctcttcauct

SEQ ID NO: 5440 - DNA, 22 bp, Artificial Sequence
  Synthetic
ccauggccaccacattcucaaa

SEQ ID NO: 5441 - DNA, 21 bp, Artificial Sequence
  Synthetic
agctgauggctttctctuccg

SEQ ID NO: 5442 - DNA, 22 bp, Artificial Sequence
  Synthetic
cgtacatgatcutcccctggug

SEQ ID NO: 5443 - DNA, 21 bp, Artificial Sequence
  Synthetic
ctccaaguaacggtgctguct

SEQ ID NO: 5444 - DNA, 21 bp, Artificial Sequence
  Synthetic
ccagcuaaggagaccacugga

SEQ ID NO: 5445 - DNA, 18 bp, Artificial Sequence
  Synthetic
ccttcccgcugctgtcua

SEQ ID NO: 5446 - DNA, 20 bp, Artificial Sequence
  Synthetic
gcttctccgcugtgctctuc

SEQ ID NO: 5447 - DNA, 22 bp, Artificial Sequence
  Synthetic
tggagtttccugtcagcctgua

SEQ ID NO: 5448 - DNA, 21 bp, Artificial Sequence
  Synthetic
gccctgggaucaagaacctuc

SEQ ID NO: 5449 - DNA, 22 bp, Artificial Sequence
  Synthetic
gcattgtgucttggtggaugac

SEQ ID NO: 5450 - DNA, 23 bp, Artificial Sequence
  Synthetic
ctggttttctuccacagcatuca

SEQ ID NO: 5451 - DNA, 22 bp, Artificial Sequence
  Synthetic
aaacatgguccccttgagtguc

SEQ ID NO: 5452 - DNA, 17 bp, Artificial Sequence
  Synthetic
gccactcgucccgctug

SEQ ID NO: 5453 - DNA, 21 bp, Artificial Sequence
  Synthetic
cccacccuaatgccctaaugt

SEQ ID NO: 5454 - DNA, 22 bp, Artificial Sequence
  Synthetic
ttttccactgcucttgaggcut

SEQ ID NO: 5455 - DNA, 21 bp, Artificial Sequence
  Synthetic
caggcgccucagagctatuac

SEQ ID NO: 5456 - DNA, 18 bp, Artificial Sequence
  Synthetic
gcagagcugctggtgucc

SEQ ID NO: 5457 - DNA, 18 bp, Artificial Sequence
  Synthetic
ggcucaacaccgggauct

SEQ ID NO: 5458 - DNA, 21 bp, Artificial Sequence
  Synthetic
ctcccagutgcaacgtuaggt

SEQ ID NO: 5459 - DNA, 21 bp, Artificial Sequence
  Synthetic
cgtacggcucctggttuacag

SEQ ID NO: 5460 - DNA, 22 bp, Artificial Sequence
  Synthetic
gutttgcctgtugagagaccag

SEQ ID NO: 5461 - DNA, 20 bp, Artificial Sequence
  Synthetic
gcaggacccggaugtaauca

SEQ ID NO: 5462 - DNA, 24 bp, Artificial Sequence
  Synthetic
acaaactccagaacutcctggtug

SEQ ID NO: 5463 - DNA, 26 bp, Artificial Sequence
  Synthetic
gggtgtgtctauatccatctccaugt

SEQ ID NO: 5464 - DNA, 22 bp, Artificial Sequence
  Synthetic
caacaacugcagcaaagacugg

SEQ ID NO: 5465 - DNA, 22 bp, Artificial Sequence
  Synthetic
agaacattgtucgctgcatugg

SEQ ID NO: 5466 - DNA, 23 bp, Artificial Sequence
  Synthetic
tgataacatucagccccuacact

SEQ ID NO: 5467 - DNA, 21 bp, Artificial Sequence
  Synthetic
caugaccgacuacaaccccaa

SEQ ID NO: 5468 - DNA, 21 bp, Artificial Sequence
  Synthetic
catgggccaaauctcaggcua

SEQ ID NO: 5469 - DNA, 22 bp, Artificial Sequence
  Synthetic
actgcagucactgtgagguaga

SEQ ID NO: 5470 - DNA, 20 bp, Artificial Sequence
  Synthetic
ccacccccacutcttcaugg

SEQ ID NO: 5471 - DNA, 22 bp, Artificial Sequence
  Synthetic
gcuaattgaacctugccagcat

SEQ ID NO: 5472 - DNA, 21 bp, Artificial Sequence
  Synthetic
actcaugcacgcttctgtuca

SEQ ID NO: 5473 - DNA, 29 bp, Artificial Sequence
  Synthetic
tgtttttaagcauagaagttctgtcugct

SEQ ID NO: 5474 - DNA, 20 bp, Artificial Sequence
  Synthetic
cacgcucaggttggagtuct

SEQ ID NO: 5475 - DNA, 20 bp, Artificial Sequence
  Synthetic
ccacatgagugactgccuct

SEQ ID NO: 5476 - DNA, 25 bp, Artificial Sequence
  Synthetic
tggagauattgucaaaagccacgat

SEQ ID NO: 5477 - DNA, 21 bp, Artificial Sequence
  Synthetic
attcugagccaggtgaucagc

SEQ ID NO: 5478 - DNA, 22 bp, Artificial Sequence
  Synthetic
ccatctgtcuatgtgggcauga

SEQ ID NO: 5479 - DNA, 22 bp, Artificial Sequence
  Synthetic
tttgaagauggcttctguggct

SEQ ID NO: 5480 - DNA, 27 bp, Artificial Sequence
  Synthetic
gacacatcuaacacaataggcuaccaa

SEQ ID NO: 5481 - DNA, 22 bp, Artificial Sequence
  Synthetic
tccagacaacccauttcgagug

SEQ ID NO: 5482 - DNA, 19 bp, Artificial Sequence
  Synthetic
tgcucctcauccacggact

SEQ ID NO: 5483 - DNA, 26 bp, Artificial Sequence
  Synthetic
atctctgatttugatgccatttguct

SEQ ID NO: 5484 - DNA, 27 bp, Artificial Sequence
  Synthetic
gaaagggaaggaguctttcattaucca

SEQ ID NO: 5485 - DNA, 29 bp, Artificial Sequence
  Synthetic
ctgatattgagugacagcuaaaagacaca

SEQ ID NO: 5486 - DNA, 19 bp, Artificial Sequence
  Synthetic
cctccaagaucgcctccuc

SEQ ID NO: 5487 - DNA, 17 bp, Artificial Sequence
  Synthetic
ccgcugctcaggtugct

SEQ ID NO: 5488 - DNA, 18 bp, Artificial Sequence
  Synthetic
gcgaguagctgaguggct

SEQ ID NO: 5489 - DNA, 19 bp, Artificial Sequence
  Synthetic
gcagtguaaacggccucct

SEQ ID NO: 5490 - DNA, 23 bp, Artificial Sequence
  Synthetic
ctgatgttcaagaucgcctguca

SEQ ID NO: 5491 - DNA, 23 bp, Artificial Sequence
  Synthetic
ttcacugaggccacatgatctuc

SEQ ID NO: 5492 - DNA, 26 bp, Artificial Sequence
  Synthetic
aaggaaatgtuaattgctgctttugt

SEQ ID NO: 5493 - DNA, 28 bp, Artificial Sequence
  Synthetic
ggctatcatcugaattttcccaagaaut

SEQ ID NO: 5494 - DNA, 30 bp, Artificial Sequence
  Synthetic
cgtatgacttaacutttgtcttgtgttuca

SEQ ID NO: 5495 - DNA, 21 bp, Artificial Sequence
  Synthetic
aggcagtuccgttctgatguc

SEQ ID NO: 5496 - DNA, 22 bp, Artificial Sequence
  Synthetic
agagaacucagcgacacuacct

SEQ ID NO: 5497 - DNA, 25 bp, Artificial Sequence
  Synthetic
gagcttuccacaagaaatcacttuc

SEQ ID NO: 5498 - DNA, 30 bp, Artificial Sequence
  Synthetic
ctttcttagaatgutagccctatcagugaa

SEQ ID NO: 5499 - DNA, 24 bp, Artificial Sequence
  Synthetic
cttctgccagucccatacaguaag

SEQ ID NO: 5500 - DNA, 23 bp, Artificial Sequence
  Synthetic
ggagcggcaautcacuaacaaga

SEQ ID NO: 5501 - DNA, 26 bp, Artificial Sequence
  Synthetic
ttttcagtttuctttttgccaugaca

SEQ ID NO: 5502 - DNA, 29 bp, Artificial Sequence
  Synthetic
cuggaggagggaaagauagaaaaataaut

SEQ ID NO: 5503 - DNA, 28 bp, Artificial Sequence
  Synthetic
atgtgggacaaaauacctgagttuagag

SEQ ID NO: 5504 - DNA, 21 bp, Artificial Sequence
  Synthetic
gtcttgccacacauccctuca

SEQ ID NO: 5505 - DNA, 25 bp, Artificial Sequence
  Synthetic
gggaggttaauaatcacatccugct

SEQ ID NO: 5506 - DNA, 27 bp, Artificial Sequence
  Synthetic
acaagtaaacguggctagtttgaauca

SEQ ID NO: 5507 - DNA, 24 bp, Artificial Sequence
  Synthetic
gtccttacaauccgatcgatucct

SEQ ID NO: 5508 - DNA, 29 bp, Artificial Sequence
  Synthetic
aggcatgtcaagaaugagtttaatttucc

SEQ ID NO: 5509 - DNA, 26 bp, Artificial Sequence
  Synthetic
actgaatgaugctcatgtctttucca

SEQ ID NO: 5510 - DNA, 24 bp, Artificial Sequence
  Synthetic
gaccttggugagcctctttaugaa

SEQ ID NO: 5511 - DNA, 24 bp, Artificial Sequence
  Synthetic
gctgaaggaaaagagutgcacuga

SEQ ID NO: 5512 - DNA, 22 bp, Artificial Sequence
  Synthetic
ctcgagcutccauccgaaaact

SEQ ID NO: 5513 - DNA, 21 bp, Artificial Sequence
  Synthetic
ggccaagucacacctgtacut

SEQ ID NO: 5514 - DNA, 23 bp, Artificial Sequence
  Synthetic
cttctcctguggacagtgagaut

SEQ ID NO: 5515 - DNA, 21 bp, Artificial Sequence
  Synthetic
ggagcacgccccauattagug

SEQ ID NO: 5516 - DNA, 19 bp, Artificial Sequence
  Synthetic
ggcaggucgaactcctuct

SEQ ID NO: 5517 - DNA, 19 bp, Artificial Sequence
  Synthetic
cgagucggaccgcauagac

SEQ ID NO: 5518 - DNA, 17 bp, Artificial Sequence
  Synthetic
cucagcccgaagccgua

SEQ ID NO: 5519 - DNA, 17 bp, Artificial Sequence
  Synthetic
cgctcaaguccgtggug

SEQ ID NO: 5520 - DNA, 17 bp, Artificial Sequence
  Synthetic
gggcggcutgctaccug

SEQ ID NO: 5521 - DNA, 19 bp, Artificial Sequence
  Synthetic
cctcccgccauggattuct

SEQ ID NO: 5522 - DNA, 25 bp, Artificial Sequence
  Synthetic
gcaatatgaaucccatggagaggug

SEQ ID NO: 5523 - DNA, 24 bp, Artificial Sequence
  Synthetic
acgcacagaacacucatggatuaa

SEQ ID NO: 5524 - DNA, 22 bp, Artificial Sequence
  Synthetic
tccacgggautggatgctttut

SEQ ID NO: 5525 - DNA, 21 bp, Artificial Sequence
  Synthetic
gcagugccagatgaactuccc

SEQ ID NO: 5526 - DNA, 22 bp, Artificial Sequence
  Synthetic
cacatgcccugcaaaagaucat

SEQ ID NO: 5527 - DNA, 18 bp, Artificial Sequence
  Synthetic
agcgcccaccugtcauag

SEQ ID NO: 5528 - DNA, 17 bp, Artificial Sequence
  Synthetic
gccgccauctgguggat

SEQ ID NO: 5529 - DNA, 24 bp, Artificial Sequence
  Synthetic
tctggtttttcuacctctccccut

SEQ ID NO: 5530 - DNA, 23 bp, Artificial Sequence
  Synthetic
atagtgctuccacacattccuca

SEQ ID NO: 5531 - DNA, 23 bp, Artificial Sequence
  Synthetic
tguggaaatgcaauggaacaagg

SEQ ID NO: 5532 - DNA, 22 bp, Artificial Sequence
  Synthetic
caagtttcugcctcttgcaguc

SEQ ID NO: 5533 - DNA, 21 bp, Artificial Sequence
  Synthetic
ttcaccagguggccaattuct

SEQ ID NO: 5534 - DNA, 26 bp, Artificial Sequence
  Synthetic
cagtcttgaagagcugtctttctcuc

SEQ ID NO: 5535 - DNA, 28 bp, Artificial Sequence
  Synthetic
tgggaactcauaatacctcttgaaaucc

SEQ ID NO: 5536 - DNA, 19 bp, Artificial Sequence
  Synthetic
ccttggcgaugtcacuggt

SEQ ID NO: 5537 - DNA, 21 bp, Artificial Sequence
  Synthetic
gaguaccctctguccaaagca

SEQ ID NO: 5538 - DNA, 17 bp, Artificial Sequence
  Synthetic
gcctggugggcttctug

SEQ ID NO: 5539 - DNA, 18 bp, Artificial Sequence
  Synthetic
acaaggccccugggagua

SEQ ID NO: 5540 - DNA, 26 bp, Artificial Sequence
  Synthetic
tgctatcctcauagagacagaagugg

SEQ ID NO: 5541 - DNA, 18 bp, Artificial Sequence
  Synthetic
agctccuccagcgacuca

SEQ ID NO: 5542 - DNA, 28 bp, Artificial Sequence
  Synthetic
cctttctattuagagtctatgucccaca

SEQ ID NO: 5543 - DNA, 28 bp, Artificial Sequence
  Synthetic
ggtcatcaatctautccatcaggctuaa

SEQ ID NO: 5544 - DNA, 19 bp, Artificial Sequence
  Synthetic
cccaccuccacatugcaca

SEQ ID NO: 5545 - DNA, 23 bp, Artificial Sequence
  Synthetic
ccccctcauccttatcttccuct

SEQ ID NO: 5546 - DNA, 23 bp, Artificial Sequence
  Synthetic
cgucacagggagugagagaaaca

SEQ ID NO: 5547 - DNA, 30 bp, Artificial Sequence
  Synthetic
cgagaaagaagaaaucaagaaacucaacag

SEQ ID NO: 5548 - DNA, 21 bp, Artificial Sequence
  Synthetic
caagccctugatgcatctucc

SEQ ID NO: 5549 - DNA, 22 bp, Artificial Sequence
  Synthetic
gctctucaagcgcttuaggaaa

SEQ ID NO: 5550 - DNA, 23 bp, Artificial Sequence
  Synthetic
agagctgctgutgctcttcttut

SEQ ID NO: 5551 - DNA, 21 bp, Artificial Sequence
  Synthetic
gaagugaccaaagcaggugga

SEQ ID NO: 5552 - DNA, 28 bp, Artificial Sequence
  Synthetic
agaagatgaaaggucacuttacctttut

SEQ ID NO: 5553 - DNA, 26 bp, Artificial Sequence
  Synthetic
caacttgtttcugtaggtaggugaca

SEQ ID NO: 5554 - DNA, 24 bp, Artificial Sequence
  Synthetic
cccatgaggaaucgatctgaucac

SEQ ID NO: 5555 - DNA, 25 bp, Artificial Sequence
  Synthetic
aattttctgatugggcctaagcuct

SEQ ID NO: 5556 - DNA, 21 bp, Artificial Sequence
  Synthetic
cgtcaatgguggaccacauct

SEQ ID NO: 5557 - DNA, 22 bp, Artificial Sequence
  Synthetic
gggtgggatugcactcttgtut

SEQ ID NO: 5558 - DNA, 25 bp, Artificial Sequence
  Synthetic
gctcatagaagucaaacagguccat

SEQ ID NO: 5559 - DNA, 23 bp, Artificial Sequence
  Synthetic
tcacccautgcttgauaacagca

SEQ ID NO: 5560 - DNA, 21 bp, Artificial Sequence
  Synthetic
aattgctgguctcagctguca

SEQ ID NO: 5561 - DNA, 22 bp, Artificial Sequence
  Synthetic
ccaacccaugtgcatgaguaca

SEQ ID NO: 5562 - DNA, 24 bp, Artificial Sequence
  Synthetic
cgtcctctucatcatcctctucat

SEQ ID NO: 5563 - DNA, 20 bp, Artificial Sequence
  Synthetic
gcaggugaaatgcugccaag

SEQ ID NO: 5564 - DNA, 31 bp, Artificial Sequence
  Synthetic
tgcagctauaggagcaaautaaattactaua

SEQ ID NO: 5565 - DNA, 21 bp, Artificial Sequence
  Synthetic
gccatggcugcattgaaugat

SEQ ID NO: 5566 - DNA, 22 bp, Artificial Sequence
  Synthetic
ggtggcaguagtttcagtgcut

SEQ ID NO: 5567 - DNA, 29 bp, Artificial Sequence
  Synthetic
cacaagaatagaautcagtgaaccattug

SEQ ID NO: 5568 - DNA, 22 bp, Artificial Sequence
  Synthetic
gguactggtagugaacggagac

SEQ ID NO: 5569 - DNA, 24 bp, Artificial Sequence
  Synthetic
gccagacutgaagcatgucaaaaa

SEQ ID NO: 5570 - DNA, 25 bp, Artificial Sequence
  Synthetic
tcaatctctuctggcaataauggct

SEQ ID NO: 5571 - DNA, 25 bp, Artificial Sequence
  Synthetic
cagtccugaaagagacacatgauga

SEQ ID NO: 5572 - DNA, 23 bp, Artificial Sequence
  Synthetic
cacaguagtaatugcaggcccat

SEQ ID NO: 5573 - DNA, 22 bp, Artificial Sequence
  Synthetic
ggcaugatcuccagagaagcag

SEQ ID NO: 5574 - DNA, 18 bp, Artificial Sequence
  Synthetic
gggagacggcugcactua

SEQ ID NO: 5575 - DNA, 18 bp, Artificial Sequence
  Synthetic
tctcuccgaggtgugggt

SEQ ID NO: 5576 - DNA, 28 bp, Artificial Sequence
  Synthetic
tgtctgggatgauaattcttttctgugt

SEQ ID NO: 5577 - DNA, 24 bp, Artificial Sequence
  Synthetic
gtggagacugaataactgauggct

SEQ ID NO: 5578 - DNA, 28 bp, Artificial Sequence
  Synthetic
tttgaatgacutatcttctgaugcacca

SEQ ID NO: 5579 - DNA, 28 bp, Artificial Sequence
  Synthetic
ctatactgtccacugctagtttgguaaa

SEQ ID NO: 5580 - DNA, 29 bp, Artificial Sequence
  Synthetic
gaatcaagttgcaaugtttctgtctuaca

SEQ ID NO: 5581 - DNA, 23 bp, Artificial Sequence
  Synthetic
ggaggaugccataacaacuccag

SEQ ID NO: 5582 - DNA, 27 bp, Artificial Sequence
  Synthetic
ggacctttacugccacaaatcagatua

SEQ ID NO: 5583 - DNA, 23 bp, Artificial Sequence
  Synthetic
tctgtagttgcuttcaggcagut

SEQ ID NO: 5584 - DNA, 22 bp, Artificial Sequence
  Synthetic
gctgtactccugcaggtaguct

SEQ ID NO: 5585 - DNA, 22 bp, Artificial Sequence
  Synthetic
gtaccucaacaccttugccaac

SEQ ID NO: 5586 - DNA, 20 bp, Artificial Sequence
  Synthetic
ggtcagcacugtacctcugg

SEQ ID NO: 5587 - DNA, 20 bp, Artificial Sequence
  Synthetic
gcccuacagagccccaacua

SEQ ID NO: 5588 - DNA, 29 bp, Artificial Sequence
  Synthetic
catccatcatatcutccaaatcctctuca

SEQ ID NO: 5589 - DNA, 27 bp, Artificial Sequence
  Synthetic
agaatcatatutgtgtctgaugggcaa

SEQ ID NO: 5590 - DNA, 29 bp, Artificial Sequence
  Synthetic
aggcaaacgtuctcctttctctaauaaat

SEQ ID NO: 5591 - DNA, 25 bp, Artificial Sequence
  Synthetic
tggtatagugctggtttgtucaaca

SEQ ID NO: 5592 - DNA, 22 bp, Artificial Sequence
  Synthetic
tggcuagcccaaaatctgugat

SEQ ID NO: 5593 - DNA, 23 bp, Artificial Sequence
  Synthetic
atgggaaaaccugggcatuaact

SEQ ID NO: 5594 - DNA, 28 bp, Artificial Sequence
  Synthetic
gtaagttgtggaguttggttttgtttug

SEQ ID NO: 5595 - DNA, 27 bp, Artificial Sequence
  Synthetic
actgtgaagatucctgtggctatuaag

SEQ ID NO: 5596 - DNA, 26 bp, Artificial Sequence
  Synthetic
ccttctaaaccugatgaaaaucccca

SEQ ID NO: 5597 - DNA, 25 bp, Artificial Sequence
  Synthetic
gagtaattggugggctcttcatuct

SEQ ID NO: 5598 - DNA, 27 bp, Artificial Sequence
  Synthetic
gcatacttgaaaaugaaactgttugcc

SEQ ID NO: 5599 - DNA, 25 bp, Artificial Sequence
  Synthetic
cattccagaggaaaugacaccacut

SEQ ID NO: 5600 - DNA, 30 bp, Artificial Sequence
  Synthetic
ccggatgttatutttaattgtttgguccaa

SEQ ID NO: 5601 - DNA, 28 bp, Artificial Sequence
  Synthetic
cataccattaacuggacaacactctuca

SEQ ID NO: 5602 - DNA, 25 bp, Artificial Sequence
  Synthetic
accaatggucaccaggtuagaaaaa

SEQ ID NO: 5603 - DNA, 32 bp, Artificial Sequence
  Synthetic
caactttcaacacautttcaccatattucaag

SEQ ID NO: 5604 - DNA, 32 bp, Artificial Sequence
  Synthetic
tgaattaaaaaccttgutatataggcccagut

SEQ ID NO: 5605 - DNA, 21 bp, Artificial Sequence
  Synthetic
gcctgcccuagttccaagaug

SEQ ID NO: 5606 - DNA, 26 bp, Artificial Sequence
  Synthetic
gtatgccugaatcaaauagggaagga

SEQ ID NO: 5607 - DNA, 22 bp, Artificial Sequence
  Synthetic
gatgcuacggaccttacgucag

SEQ ID NO: 5608 - DNA, 24 bp, Artificial Sequence
  Synthetic
ggtuccgaacaatatctugccaat

SEQ ID NO: 5609 - DNA, 32 bp, Artificial Sequence
  Synthetic
ttaagagcaaatcacutttgttgattacctut

SEQ ID NO: 5610 - DNA, 22 bp, Artificial Sequence
  Synthetic
gttatctccaggutgcccauga

SEQ ID NO: 5611 - DNA, 30 bp, Artificial Sequence
  Synthetic
aaaggttatgtaatutcacgtgtatctuct

SEQ ID NO: 5612 - DNA, 25 bp, Artificial Sequence
  Synthetic
acagtctauaaaccagcucgaagga

SEQ ID NO: 5613 - DNA, 24 bp, Artificial Sequence
  Synthetic
ctcagaccaucaatacagucgcat

SEQ ID NO: 5614 - DNA, 28 bp, Artificial Sequence
  Synthetic
gtggacctucaggaatttcatactttuc

SEQ ID NO: 5615 - DNA, 27 bp, Artificial Sequence
  Synthetic
atgagagagatauagtgctcactugat

SEQ ID NO: 5616 - DNA, 28 bp, Artificial Sequence
  Synthetic
aatgtaagcaatuggtcaaatggaaaut

SEQ ID NO: 5617 - DNA, 28 bp, Artificial Sequence
  Synthetic
tgaaagtatgaaaucgctattgctgcua

SEQ ID NO: 5618 - DNA, 31 bp, Artificial Sequence
  Synthetic
acacagaaagaaugagaauaaaaaccagaca

SEQ ID NO: 5619 - DNA, 30 bp, Artificial Sequence
  Synthetic
ccttaatgcttttuaatttccgttttgtuc

SEQ ID NO: 5620 - DNA, 27 bp, Artificial Sequence
  Synthetic
catctctuagaaatgggacuggaaagt

SEQ ID NO: 5621 - DNA, 26 bp, Artificial Sequence
  Synthetic
tgagcaaatagaguctccagacacua

SEQ ID NO: 5622 - DNA, 23 bp, Artificial Sequence
  Synthetic
agaaacatcugcaggaggactug

SEQ ID NO: 5623 - DNA, 32 bp, Artificial Sequence
  Synthetic
caggaaacaagaagaautcaattaaaatgugg

SEQ ID NO: 5624 - DNA, 32 bp, Artificial Sequence
  Synthetic
atatacatcaaaccguaattacttaccuacag

SEQ ID NO: 5625 - DNA, 32 bp, Artificial Sequence
  Synthetic
gagatgtttatcuaacaatgactcaaatctug

SEQ ID NO: 5626 - DNA, 27 bp, Artificial Sequence
  Synthetic
atctgaccttacugatcctgcttagua

SEQ ID NO: 5627 - DNA, 22 bp, Artificial Sequence
  Synthetic
cctcctugagttcctucaccag

SEQ ID NO: 5628 - DNA, 26 bp, Artificial Sequence
  Synthetic
tgcaggtatcugatggtataatugcc

SEQ ID NO: 5629 - DNA, 27 bp, Artificial Sequence
  Synthetic
agcaaattaccgcutcaaacatgaaut

SEQ ID NO: 5630 - DNA, 26 bp, Artificial Sequence
  Synthetic
tcctttugagaagaaagtgtcttugg

SEQ ID NO: 5631 - DNA, 22 bp, Artificial Sequence
  Synthetic
catcgaaagcacutgtggaugg

SEQ ID NO: 5632 - DNA, 27 bp, Artificial Sequence
  Synthetic
tgcaggttttuacataaaatcgcgtut

SEQ ID NO: 5633 - DNA, 20 bp, Artificial Sequence
  Synthetic
atgatucccagttcgucgca

SEQ ID NO: 5634 - DNA, 26 bp, Artificial Sequence
  Synthetic
gaataaccacgugtctucaaaaccat

SEQ ID NO: 5635 - DNA, 27 bp, Artificial Sequence
  Synthetic
ttgatttttcutgtcttgacucggaga

SEQ ID NO: 5636 - DNA, 29 bp, Artificial Sequence
  Synthetic
tcttggacagtauaattggctttcctaug

SEQ ID NO: 5637 - DNA, 18 bp, Artificial Sequence
  Synthetic
acacgccugtgcagcuat

SEQ ID NO: 5638 - DNA, 24 bp, Artificial Sequence
  Synthetic
ttcttattcgcuaagctgctugaa

SEQ ID NO: 5639 - DNA, 22 bp, Artificial Sequence
  Synthetic
gtatgcacaaugatgccctugg

SEQ ID NO: 5640 - DNA, 21 bp, Artificial Sequence
  Synthetic
gggcacutttggcauagacga

SEQ ID NO: 5641 - DNA, 25 bp, Artificial Sequence
  Synthetic
acagacaagcucagcacttaatuct

SEQ ID NO: 5642 - DNA, 21 bp, Artificial Sequence
  Synthetic
ttccggaaagutcgaagctug

SEQ ID NO: 5643 - DNA, 19 bp, Artificial Sequence
  Synthetic
agtgagcccguatcccuga

SEQ ID NO: 5644 - DNA, 24 bp, Artificial Sequence
  Synthetic
aaaatggacaaagguggctctgua

SEQ ID NO: 5645 - DNA, 29 bp, Artificial Sequence
  Synthetic
gtgcttctugtgtaaactattucagaaac

SEQ ID NO: 5646 - DNA, 25 bp, Artificial Sequence
  Synthetic
acugaactagcucgaaagaaaggac

SEQ ID NO: 5647 - DNA, 25 bp, Artificial Sequence
  Synthetic
aatgcatguaagtactctctuccca

SEQ ID NO: 5648 - DNA, 25 bp, Artificial Sequence
  Synthetic
ctgcttctgucgtttcactgtatug

SEQ ID NO: 5649 - DNA, 24 bp, Artificial Sequence
  Synthetic
ctgcattcaucacattttccccut

SEQ ID NO: 5650 - DNA, 27 bp, Artificial Sequence
  Synthetic
cacacacaguaaatataggtcucacca

SEQ ID NO: 5651 - DNA, 26 bp, Artificial Sequence
  Synthetic
gcatggctgutgtttcattagtaucc

SEQ ID NO: 5652 - DNA, 21 bp, Artificial Sequence
  Synthetic
agcaaagutcccauccccaat

SEQ ID NO: 5653 - DNA, 23 bp, Artificial Sequence
  Synthetic
gagatgaccaaccugcaaagcua

SEQ ID NO: 5654 - DNA, 24 bp, Artificial Sequence
  Synthetic
gtcctctttctugtccatgctcut

SEQ ID NO: 5655 - DNA, 24 bp, Artificial Sequence
  Synthetic
gtatgatguggagaagctggugag

SEQ ID NO: 5656 - DNA, 19 bp, Artificial Sequence
  Synthetic
ccctcccccacutcttcug

SEQ ID NO: 5657 - DNA, 21 bp, Artificial Sequence
  Synthetic
caggctgtutagcaaggcuct

SEQ ID NO: 5658 - DNA, 28 bp, Artificial Sequence
  Synthetic
ccagtgactuaggagtattaaucaagct

SEQ ID NO: 5659 - DNA, 25 bp, Artificial Sequence
  Synthetic
gcagagccccaautcagtaacuaaa

SEQ ID NO: 5660 - DNA, 27 bp, Artificial Sequence
  Synthetic
agcaaatactuaggtaaatgcugaact

SEQ ID NO: 5661 - DNA, 23 bp, Artificial Sequence
  Synthetic
gcatgcccucatctaatgtcuca

SEQ ID NO: 5662 - DNA, 20 bp, Artificial Sequence
  Synthetic
ccagacacgcuatcaugcgt

SEQ ID NO: 5663 - DNA, 19 bp, Artificial Sequence
  Synthetic
gccaguaagcccucacgat

SEQ ID NO: 5664 - DNA, 24 bp, Artificial Sequence
  Synthetic
gutgccttgcucaacaaaacaaat

SEQ ID NO: 5665 - DNA, 24 bp, Artificial Sequence
  Synthetic
ttaggaacacugcatggaaugaca

SEQ ID NO: 5666 - DNA, 28 bp, Artificial Sequence
  Synthetic
gtgcttgtacugaccatctgtttttauc

SEQ ID NO: 5667 - DNA, 29 bp, Artificial Sequence
  Synthetic
ttggcagaccaucatcttgttcttauaat

SEQ ID NO: 5668 - DNA, 23 bp, Artificial Sequence
  Synthetic
gccattccacgacuagttcagut

SEQ ID NO: 5669 - DNA, 27 bp, Artificial Sequence
  Synthetic
accaaagaaagaagutcaggatcctut

SEQ ID NO: 5670 - DNA, 22 bp, Artificial Sequence
  Synthetic
gtcctctgugaacttgcucagg

SEQ ID NO: 5671 - DNA, 27 bp, Artificial Sequence
  Synthetic
ctgagacttcaaugtacacatctgcua

SEQ ID NO: 5672 - DNA, 24 bp, Artificial Sequence
  Synthetic
tcttgccuattttgtugacaccct

SEQ ID NO: 5673 - DNA, 20 bp, Artificial Sequence
  Synthetic
cagatcuggcagcccaucaa

SEQ ID NO: 5674 - DNA, 18 bp, Artificial Sequence
  Synthetic
cagtccucactggcgcut

SEQ ID NO: 5675 - DNA, 21 bp, Artificial Sequence
  Synthetic
cctgcucaagggtctcuacct

SEQ ID NO: 5676 - DNA, 20 bp, Artificial Sequence
  Synthetic
caccatccccgucttctcuc

SEQ ID NO: 5677 - DNA, 22 bp, Artificial Sequence
  Synthetic
acaaagtgucctgcactcugat

SEQ ID NO: 5678 - DNA, 19 bp, Artificial Sequence
  Synthetic
gcacugccgatcucagagg

SEQ ID NO: 5679 - DNA, 22 bp, Artificial Sequence
  Synthetic
cgtcttggcugagaagcucaaa

SEQ ID NO: 5680 - DNA, 27 bp, Artificial Sequence
  Synthetic
gagaatcaaguagagaatccugcaagg

SEQ ID NO: 5681 - DNA, 23 bp, Artificial Sequence
  Synthetic
acaaacccaagcuagtggugaag

SEQ ID NO: 5682 - DNA, 19 bp, Artificial Sequence
  Synthetic
ggaaugcagggagggtugg

SEQ ID NO: 5683 - DNA, 22 bp, Artificial Sequence
  Synthetic
cgaccgcaggaucaagtaugag

SEQ ID NO: 5684 - DNA, 20 bp, Artificial Sequence
  Synthetic
aaagagccggccugtgauag

SEQ ID NO: 5685 - DNA, 21 bp, Artificial Sequence
  Synthetic
tttttgggcccugactctgut

SEQ ID NO: 5686 - DNA, 24 bp, Artificial Sequence
  Synthetic
catccaccaagguagagaccttuc

SEQ ID NO: 5687 - DNA, 24 bp, Artificial Sequence
  Synthetic
aatgctgattgucttctcccctut

SEQ ID NO: 5688 - DNA, 17 bp, Artificial Sequence
  Synthetic
gcugcacucccaagcct

SEQ ID NO: 5689 - DNA, 24 bp, Artificial Sequence
  Synthetic
tccagtauccccacgtctaaauct

SEQ ID NO: 5690 - DNA, 27 bp, Artificial Sequence
  Synthetic
atgaauaagaaggtgttcugaaaagca

SEQ ID NO: 5691 - DNA, 27 bp, Artificial Sequence
  Synthetic
ctagaaggtuaccaggtgaaaatguca

SEQ ID NO: 5692 - DNA, 25 bp, Artificial Sequence
  Synthetic
aaggtttcaaccuaatggagggaug

SEQ ID NO: 5693 - DNA, 28 bp, Artificial Sequence
  Synthetic
aggttttgtgttaucctctaggagaugt

SEQ ID NO: 5694 - DNA, 24 bp, Artificial Sequence
  Synthetic
gcttaugcagatgtaaguggcaaa

SEQ ID NO: 5695 - DNA, 27 bp, Artificial Sequence
  Synthetic
cttucagagaaaauaagagacccagua

SEQ ID NO: 5696 - DNA, 25 bp, Artificial Sequence
  Synthetic
acttcccaaccutttatgctacuga

SEQ ID NO: 5697 - DNA, 21 bp, Artificial Sequence
  Synthetic
acagtagagugggctcugacc

SEQ ID NO: 5698 - DNA, 22 bp, Artificial Sequence
  Synthetic
tctacctttggugaacccgtug

SEQ ID NO: 5699 - DNA, 22 bp, Artificial Sequence
  Synthetic
agtcacaucaccaggatccuct

SEQ ID NO: 5700 - DNA, 30 bp, Artificial Sequence
  Synthetic
tcctaaaccautaagaaaacugaaaagaga

SEQ ID NO: 5701 - DNA, 28 bp, Artificial Sequence
  Synthetic
tctgtaagattugtgcagagaaugacaa

SEQ ID NO: 5702 - DNA, 24 bp, Artificial Sequence
  Synthetic
gcugacttactuaggaacaaacca

SEQ ID NO: 5703 - DNA, 30 bp, Artificial Sequence
  Synthetic
atatgatgaagtuaaagcacgacuacagaa

SEQ ID NO: 5704 - DNA, 22 bp, Artificial Sequence
  Synthetic
tccaacuggagggaggauacag

SEQ ID NO: 5705 - DNA, 24 bp, Artificial Sequence
  Synthetic
caaagcaatcuttcccaatgguca

SEQ ID NO: 5706 - DNA, 28 bp, Artificial Sequence
  Synthetic
ggcaagtttcuggttgtcatcatattua

SEQ ID NO: 5707 - DNA, 27 bp, Artificial Sequence
  Synthetic
tctttgttttuaggtaagactgugcca

SEQ ID NO: 5708 - DNA, 20 bp, Artificial Sequence
  Synthetic
aaccttuggccagugaagag

SEQ ID NO: 5709 - DNA, 26 bp, Artificial Sequence
  Synthetic
agcaagacaagugaagtcaactgtua

SEQ ID NO: 5710 - DNA, 30 bp, Artificial Sequence
  Synthetic
accagtcttgauactaacaaatacugaagt

SEQ ID NO: 5711 - DNA, 22 bp, Artificial Sequence
  Synthetic
tgcttcaagugtggacgatcug

SEQ ID NO: 5712 - DNA, 20 bp, Artificial Sequence
  Synthetic
aggaacggacgcuggttauc

SEQ ID NO: 5713 - DNA, 26 bp, Artificial Sequence
  Synthetic
acttaggaauacctcgttctctuccc

SEQ ID NO: 5714 - DNA, 22 bp, Artificial Sequence
  Synthetic
ctgacaccuccaaacctcuacc

SEQ ID NO: 5715 - DNA, 28 bp, Artificial Sequence
  Synthetic
acacagaatttgutaagcaacgtaguct

SEQ ID NO: 5716 - DNA, 23 bp, Artificial Sequence
  Synthetic
ctgacattugccgatggtaacug

SEQ ID NO: 5717 - DNA, 24 bp, Artificial Sequence
  Synthetic
ctagtccccagugctcaatcauag

SEQ ID NO: 5718 - DNA, 22 bp, Artificial Sequence
  Synthetic
gattctgaugggtgggugagag

SEQ ID NO: 5719 - DNA, 22 bp, Artificial Sequence
  Synthetic
tgcaaacuagctttctgcugga

SEQ ID NO: 5720 - DNA, 27 bp, Artificial Sequence
  Synthetic
gaaaataggacauccatgaaactugcc

SEQ ID NO: 5721 - DNA, 27 bp, Artificial Sequence
  Synthetic
tcttctcccuagcgaaagaaataucct

SEQ ID NO: 5722 - DNA, 19 bp, Artificial Sequence
  Synthetic
aaggguggctttgctucca

SEQ ID NO: 5723 - DNA, 25 bp, Artificial Sequence
  Synthetic
aaggaagagccgutcaaaagacuaa

SEQ ID NO: 5724 - DNA, 21 bp, Artificial Sequence
  Synthetic
caccugagggcacctacuact

SEQ ID NO: 5725 - DNA, 21 bp, Artificial Sequence
  Synthetic
gtacggaggcaccaauctcug

SEQ ID NO: 5726 - DNA, 24 bp, Artificial Sequence
  Synthetic
cgtutcccttccauacagaaaggt

SEQ ID NO: 5727 - DNA, 21 bp, Artificial Sequence
  Synthetic
cgctggcauctggaagtcauc

SEQ ID NO: 5728 - DNA, 27 bp, Artificial Sequence
  Synthetic
aggtaaagatugtgatctccauaccct

SEQ ID NO: 5729 - DNA, 27 bp, Artificial Sequence
  Synthetic
atgtgacttcucacgatgacatatucc

SEQ ID NO: 5730 - DNA, 22 bp, Artificial Sequence
  Synthetic
gggcagtaagaugtggtctcug

SEQ ID NO: 5731 - DNA, 28 bp, Artificial Sequence
  Synthetic
cttcatgtttgaugtttctttgcucact

SEQ ID NO: 5732 - DNA, 21 bp, Artificial Sequence
  Synthetic
accaugcgcagagcaagauag

SEQ ID NO: 5733 - DNA, 22 bp, Artificial Sequence
  Synthetic
cctggaccaugaagcactucaa

SEQ ID NO: 5734 - DNA, 21 bp, Artificial Sequence
  Synthetic
cctcccgucttagaagcucac

SEQ ID NO: 5735 - DNA, 28 bp, Artificial Sequence
  Synthetic
ggttgtctccutttgatattttcuccct

SEQ ID NO: 5736 - DNA, 23 bp, Artificial Sequence
  Synthetic
ttctccccaaggaugaggtatuc

SEQ ID NO: 5737 - DNA, 26 bp, Artificial Sequence
  Synthetic
gcctgggttgguctttaaatcttcut

SEQ ID NO: 5738 - DNA, 23 bp, Artificial Sequence
  Synthetic
tgggtcatatugtttgaggcucc

SEQ ID NO: 5739 - DNA, 22 bp, Artificial Sequence
  Synthetic
gcagcuccaacataaacauggt

SEQ ID NO: 5740 - DNA, 19 bp, Artificial Sequence
  Synthetic
ggcgcugagtggttttucg

SEQ ID NO: 5741 - DNA, 20 bp, Artificial Sequence
  Synthetic
ctccgugccatccactauca

SEQ ID NO: 5742 - DNA, 26 bp, Artificial Sequence
  Synthetic
tgttccaaauggaatacatggtguga

SEQ ID NO: 5743 - DNA, 23 bp, Artificial Sequence
  Synthetic
ctcaatcuccaactgtugcagga

SEQ ID NO: 5744 - DNA, 22 bp, Artificial Sequence
  Synthetic
cacccgggagagugtttgauat

SEQ ID NO: 5745 - DNA, 31 bp, Artificial Sequence
  Synthetic
aaagtcatactgucatttctagatctacuca

SEQ ID NO: 5746 - DNA, 26 bp, Artificial Sequence
  Synthetic
autcgaattctggugaaaaaggaaga

SEQ ID NO: 5747 - DNA, 24 bp, Artificial Sequence
  Synthetic
tgcaaaaaccaagacauggtccua

SEQ ID NO: 5748 - DNA, 21 bp, Artificial Sequence
  Synthetic
catgagggaautccggucagg

SEQ ID NO: 5749 - DNA, 21 bp, Artificial Sequence
  Synthetic
tccaaauagcccaagtuggca

SEQ ID NO: 5750 - DNA, 26 bp, Artificial Sequence
  Synthetic
cccatgaatguggctgaccttattua

SEQ ID NO: 5751 - DNA, 29 bp, Artificial Sequence
  Synthetic
tctgtatttctgauccgttatgagcatug

SEQ ID NO: 5752 - DNA, 19 bp, Artificial Sequence
  Synthetic
gucagagagcggccucaag

SEQ ID NO: 5753 - DNA, 24 bp, Artificial Sequence
  Synthetic
tgagaagcccuatccctgugaaat

SEQ ID NO: 5754 - DNA, 20 bp, Artificial Sequence
  Synthetic
tccctgtccugccccaauaa

SEQ ID NO: 5755 - DNA, 20 bp, Artificial Sequence
  Synthetic
cugcagacccacagugacaa

SEQ ID NO: 5756 - DNA, 23 bp, Artificial Sequence
  Synthetic
tcagacccagacaguctcugaaa

SEQ ID NO: 5757 - DNA, 21 bp, Artificial Sequence
  Synthetic
atggagccugagaacctugac

SEQ ID NO: 5758 - DNA, 20 bp, Artificial Sequence
  Synthetic
gctcgaaaugcagggcaauc

SEQ ID NO: 5759 - DNA, 24 bp, Artificial Sequence
  Synthetic
gcacgaagugatatgcacuacagt

SEQ ID NO: 5760 - DNA, 20 bp, Artificial Sequence
  Synthetic
gttcuccaccaccucacgac

SEQ ID NO: 5761 - DNA, 21 bp, Artificial Sequence
  Synthetic
ggccggtguctttcctcttut

SEQ ID NO: 5762 - DNA, 21 bp, Artificial Sequence
  Synthetic
caccaucaccccacttugact

SEQ ID NO: 5763 - DNA, 27 bp, Artificial Sequence
  Synthetic
atgttcttcucaaccttaatcgtcucc

SEQ ID NO: 5764 - DNA, 30 bp, Artificial Sequence
  Synthetic
taatcauggaaagaataagaucagaagcaa

SEQ ID NO: 5765 - DNA, 21 bp, Artificial Sequence
  Synthetic
gctgugcttgcatuggagact

SEQ ID NO: 5766 - DNA, 23 bp, Artificial Sequence
  Synthetic
ggccacatacugcaacctaaugt

SEQ ID NO: 5767 - DNA, 26 bp, Artificial Sequence
  Synthetic
aggtagcucctgaagaattuaaagcc

SEQ ID NO: 5768 - DNA, 18 bp, Artificial Sequence
  Synthetic
ggcuccgccaaatgguga

SEQ ID NO: 5769 - DNA, 23 bp, Artificial Sequence
  Synthetic
acgaacgcguttgaaaagttuct

SEQ ID NO: 5770 - DNA, 20 bp, Artificial Sequence
  Synthetic
ctcacacucatcgccuggat

SEQ ID NO: 5771 - DNA, 21 bp, Artificial Sequence
  Synthetic
gagtgtgaauggactgguggt

SEQ ID NO: 5772 - DNA, 21 bp, Artificial Sequence
  Synthetic
cagttcccccuttgtcaccua

SEQ ID NO: 5773 - DNA, 27 bp, Artificial Sequence
  Synthetic
gggtctctttaucatggactttcacug

SEQ ID NO: 5774 - DNA, 24 bp, Artificial Sequence
  Synthetic
agtaccatcacucttgactcuggt

SEQ ID NO: 5775 - DNA, 27 bp, Artificial Sequence
  Synthetic
tggatgtacgccuacctacttaaauat

SEQ ID NO: 5776 - DNA, 29 bp, Artificial Sequence
  Synthetic
tggtcagtuaacacttttctttcttucct

SEQ ID NO: 5777 - DNA, 19 bp, Artificial Sequence
  Synthetic
gctgcugcccttactcuct

SEQ ID NO: 5778 - DNA, 17 bp, Artificial Sequence
  Synthetic
gccagggcutctuccct

SEQ ID NO: 5779 - DNA, 24 bp, Artificial Sequence
  Synthetic
tcttgtgctucttcttctcacugg

SEQ ID NO: 5780 - DNA, 22 bp, Artificial Sequence
  Synthetic
caaagacagacucccatugcct

SEQ ID NO: 5781 - DNA, 26 bp, Artificial Sequence
  Synthetic
gctgtttatctuctgctttcctcugg

SEQ ID NO: 5782 - DNA, 22 bp, Artificial Sequence
  Synthetic
gaagccgcutgatgtgtactut

SEQ ID NO: 5783 - DNA, 21 bp, Artificial Sequence
  Synthetic
acctcttaagugcaggctugg

SEQ ID NO: 5784 - DNA, 23 bp, Artificial Sequence
  Synthetic
gaagggttctuccggagatacug

SEQ ID NO: 5785 - DNA, 29 bp, Artificial Sequence
  Synthetic
acaaaacagaguaagaagaaaucatcuga

SEQ ID NO: 5786 - DNA, 28 bp, Artificial Sequence
  Synthetic
ctgcctttgttuaaaacctgatgtacut

SEQ ID NO: 5787 - DNA, 28 bp, Artificial Sequence
  Synthetic
acaaaggaaaauacgcaccauaaaacag

SEQ ID NO: 5788 - DNA, 18 bp, Artificial Sequence
  Synthetic
gggtggcugccactauca

SEQ ID NO: 5789 - DNA, 28 bp, Artificial Sequence
  Synthetic
ccagtaatuaccaccauaaagccattua

SEQ ID NO: 5790 - DNA, 32 bp, Artificial Sequence
  Synthetic
tttaacaggaaguacttaaacaacuacaagga

SEQ ID NO: 5791 - DNA, 29 bp, Artificial Sequence
  Synthetic
cacctaaagaugacaatttgagctuaaaa

SEQ ID NO: 5792 - DNA, 29 bp, Artificial Sequence
  Synthetic
gcugatctugauaaagaagaaaaggaaaa

SEQ ID NO: 5793 - DNA, 30 bp, Artificial Sequence
  Synthetic
taaagtttcaaauaagttgtacugccaagt

SEQ ID NO: 5794 - DNA, 23 bp, Artificial Sequence
  Synthetic
ccttgggcuaagaaagccuacac

SEQ ID NO: 5795 - DNA, 23 bp, Artificial Sequence
  Synthetic
tcccactccutgaccttcatuct

SEQ ID NO: 5796 - DNA, 30 bp, Artificial Sequence
  Synthetic
ggcttttggatautaaagtcgtaatttugt

SEQ ID NO: 5797 - DNA, 23 bp, Artificial Sequence
  Synthetic
tgtcgcatggauatacagctguc

SEQ ID NO: 5798 - DNA, 30 bp, Artificial Sequence
  Synthetic
attgctcttcaaauaacaaagcattauggt

SEQ ID NO: 5799 - DNA, 27 bp, Artificial Sequence
  Synthetic
tgcatgtctaugctcttcatcaaauga

SEQ ID NO: 5800 - DNA, 32 bp, Artificial Sequence
  Synthetic
caagttgtcttttuaatgatcctctattcugt

SEQ ID NO: 5801 - DNA, 31 bp, Artificial Sequence
  Synthetic
ggtgaaattctaaauagtacctgctguaagt

SEQ ID NO: 5802 - DNA, 28 bp, Artificial Sequence
  Synthetic
cgtattgagtgccutatggaatttguca

SEQ ID NO: 5803 - DNA, 24 bp, Artificial Sequence
  Synthetic
acattccgtaauatcccaccucca

SEQ ID NO: 5804 - DNA, 29 bp, Artificial Sequence
  Synthetic
aagaaccucattcatucaaagcacaaaat

SEQ ID NO: 5805 - DNA, 24 bp, Artificial Sequence
  Synthetic
tgcttcuagggctttttgttucct

SEQ ID NO: 5806 - DNA, 23 bp, Artificial Sequence
  Synthetic
gcggaattgguctaggcaacuac

SEQ ID NO: 5807 - DNA, 24 bp, Artificial Sequence
  Synthetic
tggtagacccagaacutctgtcut

SEQ ID NO: 5808 - DNA, 26 bp, Artificial Sequence
  Synthetic
ccgaccuagcccataaaatacauagt

SEQ ID NO: 5809 - DNA, 27 bp, Artificial Sequence
  Synthetic
tcttctattatgugtttgggtctugcc

SEQ ID NO: 5810 - DNA, 27 bp, Artificial Sequence
  Synthetic
gttactcugaagaagaacagcaugaag

SEQ ID NO: 5811 - DNA, 31 bp, Artificial Sequence
  Synthetic
agatgaactcttugagaatgaaaatgacugt

SEQ ID NO: 5812 - DNA, 29 bp, Artificial Sequence
  Synthetic
gtcatcagctgaagaugaaataggatgua

SEQ ID NO: 5813 - DNA, 23 bp, Artificial Sequence
  Synthetic
gatttggttcuagggtgctguga

SEQ ID NO: 5814 - DNA, 21 bp, Artificial Sequence
  Synthetic
agcccuggacaaaccaugcca

SEQ ID NO: 5815 - DNA, 26 bp, Artificial Sequence
  Synthetic
gcagcatttacugcagcttgctuagg

SEQ ID NO: 5816 - DNA, 32 bp, Artificial Sequence
  Synthetic
ggacctattagatgautcagatgatgatgaua

SEQ ID NO: 5817 - DNA, 21 bp, Artificial Sequence
  Synthetic
tgtacacaggcagcugactug

SEQ ID NO: 5818 - DNA, 27 bp, Artificial Sequence
  Synthetic
ctgtaaccauacctgaattggaugaca

SEQ ID NO: 5819 - DNA, 21 bp, Artificial Sequence
  Synthetic
cttgctggaccuggtccatua

SEQ ID NO: 5820 - DNA, 26 bp, Artificial Sequence
  Synthetic
acctcatcatuacacgcctatugaag

SEQ ID NO: 5821 - DNA, 22 bp, Artificial Sequence
  Synthetic
ggctggtaacuttagcctcuga

SEQ ID NO: 5822 - DNA, 27 bp, Artificial Sequence
  Synthetic
aaatgaacctaucaaagagacugagcc

SEQ ID NO: 5823 - DNA, 26 bp, Artificial Sequence
  Synthetic
gcaacaggtcaucttcagagtcaaua

SEQ ID NO: 5824 - DNA, 25 bp, Artificial Sequence
  Synthetic
aagcttcguctgattcagatuccat

SEQ ID NO: 5825 - DNA, 25 bp, Artificial Sequence
  Synthetic
ccaatgtactttuctcccctggtut

SEQ ID NO: 5826 - DNA, 22 bp, Artificial Sequence
  Synthetic
ctccaaaagcccuagugaaggt

SEQ ID NO: 5827 - DNA, 24 bp, Artificial Sequence
  Synthetic
ctagaaggugctttactugaccca

SEQ ID NO: 5828 - DNA, 24 bp, Artificial Sequence
  Synthetic
tctgccuccaaaggactaaaucag

SEQ ID NO: 5829 - DNA, 23 bp, Artificial Sequence
  Synthetic
ggcttggagcutctttgaugaaa

SEQ ID NO: 5830 - DNA, 20 bp, Artificial Sequence
  Synthetic
ggaaccuggaaacgugagca

SEQ ID NO: 5831 - DNA, 29 bp, Artificial Sequence
  Synthetic
ctttgtttggtucctgaaatagagtucac

SEQ ID NO: 5832 - DNA, 30 bp, Artificial Sequence
  Synthetic
caaaagataaucaggcaaaacaaaatgugg

SEQ ID NO: 5833 - DNA, 28 bp, Artificial Sequence
  Synthetic
agtctctgauacagggacaggattatut

SEQ ID NO: 5834 - DNA, 23 bp, Artificial Sequence
  Synthetic
gccattctgggucttaccttgug

SEQ ID NO: 5835 - DNA, 32 bp, Artificial Sequence
  Synthetic
aaccctctaacaagaaucaaacctattuacaa

SEQ ID NO: 5836 - DNA, 26 bp, Artificial Sequence
  Synthetic
gtactctctcagcucaggtctctuag

SEQ ID NO: 5837 - DNA, 29 bp, Artificial Sequence
  Synthetic
ttcctgttaaagaugttttctgcattugg

SEQ ID NO: 5838 - DNA, 23 bp, Artificial Sequence
  Synthetic
taatctggguttttcagcaugcc

SEQ ID NO: 5839 - DNA, 22 bp, Artificial Sequence
  Synthetic
gtugcacccgagaagatugaga

SEQ ID NO: 5840 - DNA, 22 bp, Artificial Sequence
  Synthetic
ctggcugcttttacuccacagt

SEQ ID NO: 5841 - DNA, 25 bp, Artificial Sequence
  Synthetic
tgtggcttcugtgttttgttugaag

SEQ ID NO: 5842 - DNA, 21 bp, Artificial Sequence
  Synthetic
aagcaaataugcagccccuca

SEQ ID NO: 5843 - DNA, 22 bp, Artificial Sequence
  Synthetic
agggagatauccgccttctcuc

SEQ ID NO: 5844 - DNA, 22 bp, Artificial Sequence
  Synthetic
aggutgtccucaagagacacct

SEQ ID NO: 5845 - DNA, 27 bp, Artificial Sequence
  Synthetic
gcccttgaguttccaactaattugact

SEQ ID NO: 5846 - DNA, 17 bp, Artificial Sequence
  Synthetic
gggtggcagugggctua

SEQ ID NO: 5847 - DNA, 20 bp, Artificial Sequence
  Synthetic
cgccucatgtgtcuccacag

SEQ ID NO: 5848 - DNA, 23 bp, Artificial Sequence
  Synthetic
acccttcucacctgagatgcuaa

SEQ ID NO: 5849 - DNA, 20 bp, Artificial Sequence
  Synthetic
ctacctgccucagccaacut

SEQ ID NO: 5850 - DNA, 24 bp, Artificial Sequence
  Synthetic
tgtgacacagugttguggagaaaa

SEQ ID NO: 5851 - DNA, 29 bp, Artificial Sequence
  Synthetic
caagcatcaugacagatctagttcgtuat

SEQ ID NO: 5852 - DNA, 27 bp, Artificial Sequence
  Synthetic
accatactcauttcacttttatugcca

SEQ ID NO: 5853 - DNA, 28 bp, Artificial Sequence
  Synthetic
gtggtggttttugttgttgttaaguaca

SEQ ID NO: 5854 - DNA, 22 bp, Artificial Sequence
  Synthetic
gggatttggautcctgagcaut

SEQ ID NO: 5855 - DNA, 27 bp, Artificial Sequence
  Synthetic
tcttctgatgtutgtagccataguaga

SEQ ID NO: 5856 - DNA, 28 bp, Artificial Sequence
  Synthetic
catatatuaacaacactggcaugcaaca

SEQ ID NO: 5857 - DNA, 28 bp, Artificial Sequence
  Synthetic
atcagaccacgguttctatttttcauct

SEQ ID NO: 5858 - DNA, 22 bp, Artificial Sequence
  Synthetic
ctccacugaggagggttuaaca

SEQ ID NO: 5859 - DNA, 30 bp, Artificial Sequence
  Synthetic
agtcaacaagtaaaucttcccagaaaucaa

SEQ ID NO: 5860 - DNA, 24 bp, Artificial Sequence
  Synthetic
gcctacagtucttctctgtgtugt

SEQ ID NO: 5861 - DNA, 26 bp, Artificial Sequence
  Synthetic
gctacactgauacaagtggaccuaaa

SEQ ID NO: 5862 - DNA, 26 bp, Artificial Sequence
  Synthetic
tcactggaacuactttcactctcuga

SEQ ID NO: 5863 - DNA, 30 bp, Artificial Sequence
  Synthetic
catctcttttaguaactctgaacctucaca

SEQ ID NO: 5864 - DNA, 27 bp, Artificial Sequence
  Synthetic
cagtgggtttcugtaacattgaatugg

SEQ ID NO: 5865 - DNA, 19 bp, Artificial Sequence
  Synthetic
atcaccucgggacccugat

SEQ ID NO: 5866 - DNA, 24 bp, Artificial Sequence
  Synthetic
gaccgtttcugagactgagaagug

SEQ ID NO: 5867 - DNA, 23 bp, Artificial Sequence
  Synthetic
ttgcaatucccaagcctacagua

SEQ ID NO: 5868 - DNA, 17 bp, Artificial Sequence
  Synthetic
ccgcgugagtgctcugg

SEQ ID NO: 5869 - DNA, 20 bp, Artificial Sequence
  Synthetic
ttgagcgtcuctcggaagug

SEQ ID NO: 5870 - DNA, 22 bp, Artificial Sequence
  Synthetic
catgacacuccttccaccucat

SEQ ID NO: 5871 - DNA, 23 bp, Artificial Sequence
  Synthetic
actatcugggaccaagaguagcc

SEQ ID NO: 5872 - DNA, 23 bp, Artificial Sequence
  Synthetic
tcggaatgcuatccttggguagt

SEQ ID NO: 5873 - DNA, 25 bp, Artificial Sequence
  Synthetic
cctgcaccutgaagacatatuccag

SEQ ID NO: 5874 - DNA, 27 bp, Artificial Sequence
  Synthetic
aaaaagatgaaggagaaucccctugag

SEQ ID NO: 5875 - DNA, 25 bp, Artificial Sequence
  Synthetic
cttctagguaagaggcctgaguaca

SEQ ID NO: 5876 - DNA, 23 bp, Artificial Sequence
  Synthetic
caccaatcuctctacatguggca

SEQ ID NO: 5877 - DNA, 29 bp, Artificial Sequence
  Synthetic
ttgctctactuccctgaattgttactuac

SEQ ID NO: 5878 - DNA, 29 bp, Artificial Sequence
  Synthetic
ttgucttttcttcatttuagaccccaaga

SEQ ID NO: 5879 - DNA, 22 bp, Artificial Sequence
  Synthetic
cactcugccttgcaaauggaaa

SEQ ID NO: 5880 - DNA, 22 bp, Artificial Sequence
  Synthetic
cctgtttucttcccaguccaca

SEQ ID NO: 5881 - DNA, 22 bp, Artificial Sequence
  Synthetic
gtcacugctcttctuccgagac

SEQ ID NO: 5882 - DNA, 21 bp, Artificial Sequence
  Synthetic
ttccctgtgugctgacaagut

SEQ ID NO: 5883 - DNA, 20 bp, Artificial Sequence
  Synthetic
aaacccugcaacagaccuga

SEQ ID NO: 5884 - DNA, 23 bp, Artificial Sequence
  Synthetic
gccatctctuctcgctttctcuc

SEQ ID NO: 5885 - DNA, 26 bp, Artificial Sequence
  Synthetic
gataccatguaaagctcagcagtuct

SEQ ID NO: 5886 - DNA, 19 bp, Artificial Sequence
  Synthetic
caagggcugggcgataucc

SEQ ID NO: 5887 - DNA, 24 bp, Artificial Sequence
  Synthetic
ctgatggatcuggactgacagtut

SEQ ID NO: 5888 - DNA, 19 bp, Artificial Sequence
  Synthetic
accagacgucgctcugaac

SEQ ID NO: 5889 - DNA, 22 bp, Artificial Sequence
  Synthetic
tgtcaagggcaaugtaagugct

SEQ ID NO: 5890 - DNA, 25 bp, Artificial Sequence
  Synthetic
cccttctccutttcccttgttauca

SEQ ID NO: 5891 - DNA, 23 bp, Artificial Sequence
  Synthetic
ccccaacccuctctcctatguag

SEQ ID NO: 5892 - DNA, 23 bp, Artificial Sequence
  Synthetic
agaaggttgacgaugttctcgug

SEQ ID NO: 5893 - DNA, 23 bp, Artificial Sequence
  Synthetic
catttgguccccatgtatctgug

SEQ ID NO: 5894 - DNA, 23 bp, Artificial Sequence
  Synthetic
gtaccauccaaatctggcucact

SEQ ID NO: 5895 - DNA, 21 bp, Artificial Sequence
  Synthetic
ctcttcacaccaguggtgguc

SEQ ID NO: 5896 - DNA, 18 bp, Artificial Sequence
  Synthetic
cccucccacucacagggt

SEQ ID NO: 5897 - DNA, 24 bp, Artificial Sequence
  Synthetic
cgtcatauggacattcaucaacgg

SEQ ID NO: 5898 - DNA, 21 bp, Artificial Sequence
  Synthetic
cttgctgaagcauaccccauc

SEQ ID NO: 5899 - DNA, 22 bp, Artificial Sequence
  Synthetic
ccaggccugcaaggtttuaact

SEQ ID NO: 5900 - DNA, 20 bp, Artificial Sequence
  Synthetic
gacuccaccaugggaaacct

SEQ ID NO: 5901 - DNA, 18 bp, Artificial Sequence
  Synthetic
gagctggugcggatucga

SEQ ID NO: 5902 - DNA, 20 bp, Artificial Sequence
  Synthetic
gugagcagauagggcaguag

SEQ ID NO: 5903 - DNA, 24 bp, Artificial Sequence
  Synthetic
ctctgagctuccttgtcacctaug

SEQ ID NO: 5904 - DNA, 21 bp, Artificial Sequence
  Synthetic
gucttctccaucacaccccaa

SEQ ID NO: 5905 - DNA, 20 bp, Artificial Sequence
  Synthetic
gtagcugagagctctgugcc

SEQ ID NO: 5906 - DNA, 22 bp, Artificial Sequence
  Synthetic
ctagtcctucctggtcctcuga

SEQ ID NO: 5907 - DNA, 23 bp, Artificial Sequence
  Synthetic
ctatctgccacuccagtgctaug

SEQ ID NO: 5908 - DNA, 21 bp, Artificial Sequence
  Synthetic
ggtatacaggccutggagcut

SEQ ID NO: 5909 - DNA, 23 bp, Artificial Sequence
  Synthetic
ccttctgutacttccucccacag

SEQ ID NO: 5910 - DNA, 19 bp, Artificial Sequence
  Synthetic
caggatcggugtgccctut

SEQ ID NO: 5911 - DNA, 23 bp, Artificial Sequence
  Synthetic
gggaagaucagaagccagtcaug

SEQ ID NO: 5912 - DNA, 26 bp, Artificial Sequence
  Synthetic
tcattgtgacutcttccaagtuagca

SEQ ID NO: 5913 - DNA, 27 bp, Artificial Sequence
  Synthetic
aagtgagtcugaggatagttcagauga

SEQ ID NO: 5914 - DNA, 29 bp, Artificial Sequence
  Synthetic
atcatctgaagacucttccttgttttuct

SEQ ID NO: 5915 - DNA, 21 bp, Artificial Sequence
  Synthetic
gcagccatugccgaaatcuaa

SEQ ID NO: 5916 - DNA, 28 bp, Artificial Sequence
  Synthetic
ctggcccgaaugtgatttaacatuaaaa

SEQ ID NO: 5917 - DNA, 28 bp, Artificial Sequence
  Synthetic
ctcattaaagaagaaugtgggtcagtuc

SEQ ID NO: 5918 - DNA, 26 bp, Artificial Sequence
  Synthetic
ggtctgaaaaautcatcagtugggat

SEQ ID NO: 5919 - DNA, 22 bp, Artificial Sequence
  Synthetic
guccgagaaagaauccgaaaug

SEQ ID NO: 5920 - DNA, 18 bp, Artificial Sequence
  Synthetic
cctcuccagggcuacagg

SEQ ID NO: 5921 - DNA, 20 bp, Artificial Sequence
  Synthetic
agatcgaagcugcacucagg

SEQ ID NO: 5922 - DNA, 23 bp, Artificial Sequence
  Synthetic
gcaaaaatgugcatagggctcut

SEQ ID NO: 5923 - DNA, 24 bp, Artificial Sequence
  Synthetic
gctgtgatugcacatgatttccug

SEQ ID NO: 5924 - DNA, 17 bp, Artificial Sequence
  Synthetic
gcaacugcgccttucgg

SEQ ID NO: 5925 - DNA, 18 bp, Artificial Sequence
  Synthetic
cuccagacccagcaguga

SEQ ID NO: 5926 - DNA, 18 bp, Artificial Sequence
  Synthetic
gttccaccguggcguaca

SEQ ID NO: 5927 - DNA, 17 bp, Artificial Sequence
  Synthetic
cutgcagccuccccaca

SEQ ID NO: 5928 - DNA, 19 bp, Artificial Sequence
  Synthetic
gatgcatucgaacgcgtug

SEQ ID NO: 5929 - DNA, 20 bp, Artificial Sequence
  Synthetic
agugggatggucaacccaag

SEQ ID NO: 5930 - DNA, 18 bp, Artificial Sequence
  Synthetic
aggctcccuagcggacuc

SEQ ID NO: 5931 - DNA, 26 bp, Artificial Sequence
  Synthetic
tttagaaguggaagcaaaacagucct

SEQ ID NO: 5932 - DNA, 21 bp, Artificial Sequence
  Synthetic
ggtcauggtctgugaaagggt

SEQ ID NO: 5933 - DNA, 20 bp, Artificial Sequence
  Synthetic
tccggcugaacctgaacauc

SEQ ID NO: 5934 - DNA, 17 bp, Artificial Sequence
  Synthetic
agcagggugagcuggga

SEQ ID NO: 5935 - DNA, 20 bp, Artificial Sequence
  Synthetic
cttttcagcccagcugccua

SEQ ID NO: 5936 - DNA, 18 bp, Artificial Sequence
  Synthetic
aagcccagucctcccuca

SEQ ID NO: 5937 - DNA, 22 bp, Artificial Sequence
  Synthetic
cgtgtgtgugtctgtgtcugaa

SEQ ID NO: 5938 - DNA, 18 bp, Artificial Sequence
  Synthetic
ccacctgguccaggtugt

SEQ ID NO: 5939 - DNA, 28 bp, Artificial Sequence
  Synthetic
gcttaaucgaaaaggacaaguacaggaa

SEQ ID NO: 5940 - DNA, 20 bp, Artificial Sequence
  Synthetic
cctgcugacacacaccacug

SEQ ID NO: 5941 - DNA, 22 bp, Artificial Sequence
  Synthetic
aggagctggucaacaggatcua

SEQ ID NO: 5942 - DNA, 28 bp, Artificial Sequence
  Synthetic
gttttagagactgauttctctccagcut

SEQ ID NO: 5943 - DNA, 23 bp, Artificial Sequence
  Synthetic
cgttgccttutctgagtgttuct

SEQ ID NO: 5944 - DNA, 21 bp, Artificial Sequence
  Synthetic
caggtcctuggccttcatcug

SEQ ID NO: 5945 - DNA, 22 bp, Artificial Sequence
  Synthetic
cctcctutttccactucccagt

SEQ ID NO: 5946 - DNA, 21 bp, Artificial Sequence
  Synthetic
cagggttgauatagcggcuga

SEQ ID NO: 5947 - DNA, 24 bp, Artificial Sequence
  Synthetic
gctgttccagugagactgcttuat

SEQ ID NO: 5948 - DNA, 21 bp, Artificial Sequence
  Synthetic
cacgtagccutcgttguaggg

SEQ ID NO: 5949 - DNA, 24 bp, Artificial Sequence
  Synthetic
tccatggccuttccagataaucag

SEQ ID NO: 5950 - DNA, 30 bp, Artificial Sequence
  Synthetic
ctattaaactaaccucttcaggctcaauca

SEQ ID NO: 5951 - DNA, 20 bp, Artificial Sequence
  Synthetic
ccaacggcgaggaucactuc

SEQ ID NO: 5952 - DNA, 24 bp, Artificial Sequence
  Synthetic
aaatggtcaggagcuacctaguct

SEQ ID NO: 5953 - DNA, 24 bp, Artificial Sequence
  Synthetic
gctttcccccucctctgatgatua

SEQ ID NO: 5954 - DNA, 19 bp, Artificial Sequence
  Synthetic
ccggtcagguttcggtgua

SEQ ID NO: 5955 - DNA, 28 bp, Artificial Sequence
  Synthetic
gctccaaagaaagaaaugttctctctuc

SEQ ID NO: 5956 - DNA, 25 bp, Artificial Sequence
  Synthetic
actttcagccugatagtctgguaca

SEQ ID NO: 5957 - DNA, 25 bp, Artificial Sequence
  Synthetic
ctcagcccaagaagaucttactuga

SEQ ID NO: 5958 - DNA, 30 bp, Artificial Sequence
  Synthetic
catgagccagauctctgttaatgaatttuc

SEQ ID NO: 5959 - DNA, 28 bp, Artificial Sequence
  Synthetic
tgtgtgtgatcugaggtttacattctut

SEQ ID NO: 5960 - DNA, 22 bp, Artificial Sequence
  Synthetic
cguccagtattgaucgggagag

SEQ ID NO: 5961 - DNA, 22 bp, Artificial Sequence
  Synthetic
gagacacgcccutacctttcut

SEQ ID NO: 5962 - DNA, 26 bp, Artificial Sequence
  Synthetic
cctgcagatcaucagaggaaataugt

SEQ ID NO: 5963 - DNA, 23 bp, Artificial Sequence
  Synthetic
cggaactgcugtctgcatttaug

SEQ ID NO: 5964 - DNA, 21 bp, Artificial Sequence
  Synthetic
tccctgggaaaugatccuacc

SEQ ID NO: 5965 - DNA, 19 bp, Artificial Sequence
  Synthetic
cctgcagcacacuggtugt

SEQ ID NO: 5966 - DNA, 22 bp, Artificial Sequence
  Synthetic
ccaccgtcaucaccttccttuc

SEQ ID NO: 5967 - DNA, 22 bp, Artificial Sequence
  Synthetic
gcccttcgcacutcttacacut

SEQ ID NO: 5968 - DNA, 29 bp, Artificial Sequence
  Synthetic
tgatcaataatcacccugttgtttgttuc

SEQ ID NO: 5969 - DNA, 30 bp, Artificial Sequence
  Synthetic
gttctctctcuaaaacactgatttcccaut

SEQ ID NO: 5970 - DNA, 24 bp, Artificial Sequence
  Synthetic
cgtcagccugaacataacatccut

SEQ ID NO: 5971 - DNA, 22 bp, Artificial Sequence
  Synthetic
tuttggttttcugaccggaggt

SEQ ID NO: 5972 - DNA, 22 bp, Artificial Sequence
  Synthetic
gggtttccucttcctcctcuca

SEQ ID NO: 5973 - DNA, 23 bp, Artificial Sequence
  Synthetic
catgaaauggacgtggauagcag

SEQ ID NO: 5974 - DNA, 26 bp, Artificial Sequence
  Synthetic
ccaggcctcucacatattgaaatgua

SEQ ID NO: 5975 - DNA, 20 bp, Artificial Sequence
  Synthetic
gggacacgcugccatcatua

SEQ ID NO: 5976 - DNA, 30 bp, Artificial Sequence
  Synthetic
tatgccaaagaaguagaatgagaaaaaugt

SEQ ID NO: 5977 - DNA, 23 bp, Artificial Sequence
  Synthetic
cattctugacgaggtccatguga

SEQ ID NO: 5978 - DNA, 27 bp, Artificial Sequence
  Synthetic
ctcttgaggaucttgaaggaaacugaa

SEQ ID NO: 5979 - DNA, 26 bp, Artificial Sequence
  Synthetic
tggaaatatacagcutgcaaggacuc

SEQ ID NO: 5980 - DNA, 20 bp, Artificial Sequence
  Synthetic
cacgcagcucatgccctucg

SEQ ID NO: 5981 - DNA, 24 bp, Artificial Sequence
  Synthetic
ctccttatcucccctccccgtauc

SEQ ID NO: 5982 - DNA, 27 bp, Artificial Sequence
  Synthetic
aagggattgugattgttcattcaugat

SEQ ID NO: 5983 - DNA, 20 bp, Artificial Sequence
  Synthetic
aggauggaggagatcucgct

SEQ ID NO: 5984 - DNA, 21 bp, Artificial Sequence
  Synthetic
aacttctaccgugccctgaug

SEQ ID NO: 5985 - DNA, 29 bp, Artificial Sequence
  Synthetic
gagagagagagagagauagagauttcaua

SEQ ID NO: 5986 - DNA, 20 bp, Artificial Sequence
  Synthetic
accaguccgtucccaaaagg

SEQ ID NO: 5987 - DNA, 20 bp, Artificial Sequence
  Synthetic
tgtgctgtugacacaggugg

SEQ ID NO: 5988 - DNA, 23 bp, Artificial Sequence
  Synthetic
gacgaggcaacaautaggcttug

SEQ ID NO: 5989 - DNA, 19 bp, Artificial Sequence
  Synthetic
ccutaccuccaggccgaga

SEQ ID NO: 5990 - DNA, 29 bp, Artificial Sequence
  Synthetic
ggttggataagtaguagatggataagcug

SEQ ID NO: 5991 - DNA, 21 bp, Artificial Sequence
  Synthetic
ctccctcgcugtctctcaaug

SEQ ID NO: 5992 - DNA, 20 bp, Artificial Sequence
  Synthetic
aggagtguctgcagguacga

SEQ ID NO: 5993 - DNA, 19 bp, Artificial Sequence
  Synthetic
ccagggautccgcacugac

SEQ ID NO: 5994 - DNA, 21 bp, Artificial Sequence
  Synthetic
ctgggaccugaacttgctcuc

SEQ ID NO: 5995 - DNA, 20 bp, Artificial Sequence
  Synthetic
agtggugcatctugaaccgt

SEQ ID NO: 5996 - DNA, 22 bp, Artificial Sequence
  Synthetic
ggagggtccutgggaaacuaca

SEQ ID NO: 5997 - DNA, 20 bp, Artificial Sequence
  Synthetic
ccctgcugggacagatgtua

SEQ ID NO: 5998 - DNA, 21 bp, Artificial Sequence
  Synthetic
ggattccagutgtcccaggug

SEQ ID NO: 5999 - DNA, 26 bp, Artificial Sequence
  Synthetic
agggagaaugcaaaaatttuggcaat

SEQ ID NO: 6000 - DNA, 22 bp, Artificial Sequence
  Synthetic
ggcttcugagggtctctttcut

SEQ ID NO: 6001 - DNA, 20 bp, Artificial Sequence
  Synthetic
cagtttgcccugaggtugga

SEQ ID NO: 6002 - DNA, 22 bp, Artificial Sequence
  Synthetic
cctccatcuctaatcccccuct

SEQ ID NO: 6003 - DNA, 22 bp, Artificial Sequence
  Synthetic
cctaaccagcuctgagatcgut

SEQ ID NO: 6004 - DNA, 26 bp, Artificial Sequence
  Synthetic
tcagaaauggaacactcatttuccct

SEQ ID NO: 6005 - DNA, 24 bp, Artificial Sequence
  Synthetic
ggcactctguactggttagatucc

SEQ ID NO: 6006 - DNA, 21 bp, Artificial Sequence
  Synthetic
gcagggataucagggcctcut

SEQ ID NO: 6007 - DNA, 21 bp, Artificial Sequence
  Synthetic
gctgaggacuacguagcagag

SEQ ID NO: 6008 - DNA, 17 bp, Artificial Sequence
  Synthetic
cggaccgaaucggcuct

SEQ ID NO: 6009 - DNA, 22 bp, Artificial Sequence
  Synthetic
agcttcttcugtctctccucgt

SEQ ID NO: 6010 - DNA, 28 bp, Artificial Sequence
  Synthetic
gtcagcacaccaugatttgaatatugat

SEQ ID NO: 6011 - DNA, 29 bp, Artificial Sequence
  Synthetic
ctcatgactggtuatttctccactatgua

SEQ ID NO: 6012 - DNA, 28 bp, Artificial Sequence
  Synthetic
tctgttcccuaatacagtcactucagaa

SEQ ID NO: 6013 - DNA, 27 bp, Artificial Sequence
  Synthetic
tctgttgtttggcutgtagtaagtcug

SEQ ID NO: 6014 - DNA, 28 bp, Artificial Sequence
  Synthetic
guacaacgaauggaacaagaaacacaaa

SEQ ID NO: 6015 - DNA, 22 bp, Artificial Sequence
  Synthetic
atttcctccauctgtgccaugt

SEQ ID NO: 6016 - DNA, 27 bp, Artificial Sequence
  Synthetic
gaccttgtugaagaattgagctttuca

SEQ ID NO: 6017 - DNA, 28 bp, Artificial Sequence
  Synthetic
gcagaaacaatcucagctttcaaatcut

SEQ ID NO: 6018 - DNA, 31 bp, Artificial Sequence
  Synthetic
ccaaacugaaggaagatttagaaatugaaca

SEQ ID NO: 6019 - DNA, 26 bp, Artificial Sequence
  Synthetic
aaattgtccttutcaaactgcauggt

SEQ ID NO: 6020 - DNA, 28 bp, Artificial Sequence
  Synthetic
acaacttgaaguagagaauagcattcut

SEQ ID NO: 6021 - DNA, 28 bp, Artificial Sequence
  Synthetic
gtctttggattuggacttaatggaguct

SEQ ID NO: 6022 - DNA, 22 bp, Artificial Sequence
  Synthetic
gaggagtaugcttgccttcuca

SEQ ID NO: 6023 - DNA, 30 bp, Artificial Sequence
  Synthetic
acagaacttttcautttcactgtagtugga

SEQ ID NO: 6024 - DNA, 26 bp, Artificial Sequence
  Synthetic
ctgtcacagagacugtctgatcttuc

SEQ ID NO: 6025 - DNA, 29 bp, Artificial Sequence
  Synthetic
tgccctgttguggttaataatgatttcua

SEQ ID NO: 6026 - DNA, 28 bp, Artificial Sequence
  Synthetic
ggagaagaaaguaagcaagaacagtuga

SEQ ID NO: 6027 - DNA, 29 bp, Artificial Sequence
  Synthetic
atgaagaagtaaacauacctgttctgaut

SEQ ID NO: 6028 - DNA, 29 bp, Artificial Sequence
  Synthetic
gatgcagactttuactgtgaagtgaaaut

SEQ ID NO: 6029 - DNA, 23 bp, Artificial Sequence
  Synthetic
ccatcucacagaccttgctuagt

SEQ ID NO: 6030 - DNA, 28 bp, Artificial Sequence
  Synthetic
atgtagttttcuggtgaatttggaguga

SEQ ID NO: 6031 - DNA, 31 bp, Artificial Sequence
  Synthetic
aaggctcaaagggaauataaaccaagauaat

SEQ ID NO: 6032 - DNA, 30 bp, Artificial Sequence
  Synthetic
agagttaggagaacauggaaaggaaattut

SEQ ID NO: 6033 - DNA, 26 bp, Artificial Sequence
  Synthetic
aaggaggcatacutacagactgtcua

SEQ ID NO: 6034 - DNA, 30 bp, Artificial Sequence
  Synthetic
cttctcctctctucctttacacaaactuaa

SEQ ID NO: 6035 - DNA, 27 bp, Artificial Sequence
  Synthetic
cautagacaaaatcucaggaggcacat

SEQ ID NO: 6036 - DNA, 27 bp, Artificial Sequence
  Synthetic
aacatgtggucaaaagtaacugaggaa

SEQ ID NO: 6037 - DNA, 26 bp, Artificial Sequence
  Synthetic
gcttgtagucgagagctaatgtucag

SEQ ID NO: 6038 - DNA, 28 bp, Artificial Sequence
  Synthetic
tgtattataggcgucattgatggctaug

SEQ ID NO: 6039 - DNA, 22 bp, Artificial Sequence
  Synthetic
cctccaattcutgcaacctgut

SEQ ID NO: 6040 - DNA, 29 bp, Artificial Sequence
  Synthetic
agcttctctaaauactgtttcttcagcua

SEQ ID NO: 6041 - DNA, 26 bp, Artificial Sequence
  Synthetic
ctggaaucgaggaauaaccttaagut

SEQ ID NO: 6042 - DNA, 24 bp, Artificial Sequence
  Synthetic
agguagaggaucgaaaacacttug

SEQ ID NO: 6043 - DNA, 29 bp, Artificial Sequence
  Synthetic
tcaaaccacgcugtgtcatttaaaaauaa

SEQ ID NO: 6044 - DNA, 28 bp, Artificial Sequence
  Synthetic
tgaaaaactucaacaggaatuggcaaat

SEQ ID NO: 6045 - DNA, 29 bp, Artificial Sequence
  Synthetic
ggtcatttcttcautagcggtttctacut

SEQ ID NO: 6046 - DNA, 29 bp, Artificial Sequence
  Synthetic
ttttgaagaaaauggcaaaggttccauaa

SEQ ID NO: 6047 - DNA, 28 bp, Artificial Sequence
  Synthetic
gccttgttctugcatgtcttttattugt

SEQ ID NO: 6048 - DNA, 28 bp, Artificial Sequence
  Synthetic
gggtcagatataucagcattaacctuga

SEQ ID NO: 6049 - DNA, 30 bp, Artificial Sequence
  Synthetic
tgtagttctagcagcutcttttcttttuct

SEQ ID NO: 6050 - DNA, 23 bp, Artificial Sequence
  Synthetic
ctcgaggcucttagagctgaauc

SEQ ID NO: 6051 - DNA, 30 bp, Artificial Sequence
  Synthetic
ggtagaaatgagugaattaggagctatgut

SEQ ID NO: 6052 - DNA, 28 bp, Artificial Sequence
  Synthetic
gtgaatgttccucagaagaagttacuga

SEQ ID NO: 6053 - DNA, 28 bp, Artificial Sequence
  Synthetic
gcaacatagtgtuccctctttaaggtut

SEQ ID NO: 6054 - DNA, 23 bp, Artificial Sequence
  Synthetic
aggtgctttcuctcactgaguct

SEQ ID NO: 6055 - DNA, 30 bp, Artificial Sequence
  Synthetic
tttgcagttgcauctttgtaattaaaucct

SEQ ID NO: 6056 - DNA, 27 bp, Artificial Sequence
  Synthetic
tgtattgcctutacattgctctucact

SEQ ID NO: 6057 - DNA, 26 bp, Artificial Sequence
  Synthetic
gcagtgccugaatttcagauaacaaa

SEQ ID NO: 6058 - DNA, 25 bp, Artificial Sequence
  Synthetic
tgcttcgucaacatagctttaugga

SEQ ID NO: 6059 - DNA, 20 bp, Artificial Sequence
  Synthetic
gcgtcccaacutggcttuct

SEQ ID NO: 6060 - DNA, 27 bp, Artificial Sequence
  Synthetic
cgaattcgggaaaugagtagtacccua

SEQ ID NO: 6061 - DNA, 26 bp, Artificial Sequence
  Synthetic
ctgtgtttttccuctagctgtttcug

SEQ ID NO: 6062 - DNA, 25 bp, Artificial Sequence
  Synthetic
aggaatcaugcaggaatuccagaag

SEQ ID NO: 6063 - DNA, 22 bp, Artificial Sequence
  Synthetic
taatgaucaaagggctgcagug

SEQ ID NO: 6064 - DNA, 25 bp, Artificial Sequence
  Synthetic
ggtaguaaacacccccaatugagaa

SEQ ID NO: 6065 - DNA, 29 bp, Artificial Sequence
  Synthetic
ctggccagtuaatttctgtagttguaaaa

SEQ ID NO: 6066 - DNA, 28 bp, Artificial Sequence
  Synthetic
tgacttaaggaacauggttatgaagcug

SEQ ID NO: 6067 - DNA, 25 bp, Artificial Sequence
  Synthetic
acagcagaaaugataagcaugcact

SEQ ID NO: 6068 - DNA, 23 bp, Artificial Sequence
  Synthetic
gcagaaagttutcgaaaggcuct

SEQ ID NO: 6069 - DNA, 23 bp, Artificial Sequence
  Synthetic
cacctctagauccgtgaaagcug

SEQ ID NO: 6070 - DNA, 26 bp, Artificial Sequence
  Synthetic
tgggutactttaggugcagaaaagac

SEQ ID NO: 6071 - DNA, 27 bp, Artificial Sequence
  Synthetic
tccaggcaggutttctcatattctuac

SEQ ID NO: 6072 - DNA, 27 bp, Artificial Sequence
  Synthetic
tcaatttcatgcuggcatgagaagaua

SEQ ID NO: 6073 - DNA, 24 bp, Artificial Sequence
  Synthetic
agctgtgttcauattggtcccaut

SEQ ID NO: 6074 - DNA, 25 bp, Artificial Sequence
  Synthetic
gctactgaacugatatttgugccca

SEQ ID NO: 6075 - DNA, 27 bp, Artificial Sequence
  Synthetic
tttcattcaaaatcugcccaaccaaut

SEQ ID NO: 6076 - DNA, 29 bp, Artificial Sequence
  Synthetic
ggacagacugtcattcaaaauaggaaaaa

SEQ ID NO: 6077 - DNA, 27 bp, Artificial Sequence
  Synthetic
cgatcuaaaaccacagaacattcuggt

SEQ ID NO: 6078 - DNA, 17 bp, Artificial Sequence
  Synthetic
tcugccccgcaccttuc

SEQ ID NO: 6079 - DNA, 18 bp, Artificial Sequence
  Synthetic
caugccgctcuccaccat

SEQ ID NO: 6080 - DNA, 18 bp, Artificial Sequence
  Synthetic
acaggccguccttcucca

SEQ ID NO: 6081 - DNA, 22 bp, Artificial Sequence
  Synthetic
ggagcaaguaaagcuagaccga

SEQ ID NO: 6082 - DNA, 31 bp, Artificial Sequence
  Synthetic
tctgtctatgaatgutagtctgttctttugg

SEQ ID NO: 6083 - DNA, 24 bp, Artificial Sequence
  Synthetic
ccagatcucagtaagguacggagt

SEQ ID NO: 6084 - DNA, 30 bp, Artificial Sequence
  Synthetic
gttgagacctucaatgactttctaguaact

SEQ ID NO: 6085 - DNA, 28 bp, Artificial Sequence
  Synthetic
ggtgattttgguctagctacagugaaat

SEQ ID NO: 6086 - DNA, 32 bp, Artificial Sequence
  Synthetic
tcgtgcaatatcuataagtttgatcatcucaa

SEQ ID NO: 6087 - DNA, 28 bp, Artificial Sequence
  Synthetic
gtacaggaaaauacgacaugtgaatauc

SEQ ID NO: 6088 - DNA, 23 bp, Artificial Sequence
  Synthetic
tctttgucccactgtaatcugcc

SEQ ID NO: 6089 - DNA, 25 bp, Artificial Sequence
  Synthetic
tgtatccctcucaggcataagguaa

SEQ ID NO: 6090 - DNA, 31 bp, Artificial Sequence
  Synthetic
tttttagttctagcaaugctggatactuaca

SEQ ID NO: 6091 - DNA, 27 bp, Artificial Sequence
  Synthetic
tctccttcaaaauccattccaatucca

SEQ ID NO: 6092 - DNA, 27 bp, Artificial Sequence
  Synthetic
cagactttuagacatcgtagctucaca

SEQ ID NO: 6093 - DNA, 26 bp, Artificial Sequence
  Synthetic
tccgctgucaaacatgtggttauaaa

SEQ ID NO: 6094 - DNA, 22 bp, Artificial Sequence
  Synthetic
gcacagcacuctgggatuagac

SEQ ID NO: 6095 - DNA, 31 bp, Artificial Sequence
  Synthetic
aatgtaatttgcuccctttacctcttaucaa

SEQ ID NO: 6096 - DNA, 31 bp, Artificial Sequence
  Synthetic
cccacctccuaaaataatcaagattaucagt

SEQ ID NO: 6097 - DNA, 26 bp, Artificial Sequence
  Synthetic
acacaggaacauatagaggccctaut

SEQ ID NO: 6098 - DNA, 17 bp, Artificial Sequence
  Synthetic
cuccggaauggcagggt

SEQ ID NO: 6099 - DNA, 19 bp, Artificial Sequence
  Synthetic
gccccggcuctcggttaua

SEQ ID NO: 6100 - DNA, 24 bp, Artificial Sequence
  Synthetic
tccatcaucacaggacugaaaagg

SEQ ID NO: 6101 - DNA, 22 bp, Artificial Sequence
  Synthetic
ttcactgggcugtgcttactut

SEQ ID NO: 6102 - DNA, 26 bp, Artificial Sequence
  Synthetic
ccagctaaaucatctaaggcaaucct

SEQ ID NO: 6103 - DNA, 20 bp, Artificial Sequence
  Synthetic
gucttacttguggagccgct

SEQ ID NO: 6104 - DNA, 30 bp, Artificial Sequence
  Synthetic
ttgttaagctaauaatgagaggaauggaaa

SEQ ID NO: 6105 - DNA, 23 bp, Artificial Sequence
  Synthetic
ggauttgtagctucccgcagaaa

SEQ ID NO: 6106 - DNA, 26 bp, Artificial Sequence
  Synthetic
acaacacgaacuttcacagaacagua

SEQ ID NO: 6107 - DNA, 25 bp, Artificial Sequence
  Synthetic
gctggaaucaaaggauacagacagt

SEQ ID NO: 6108 - DNA, 26 bp, Artificial Sequence
  Synthetic
ttgtctagagcugtttctgtgttcut

SEQ ID NO: 6109 - DNA, 25 bp, Artificial Sequence
  Synthetic
agtggaacuggaagagugaaaaagt

SEQ ID NO: 6110 - DNA, 24 bp, Artificial Sequence
  Synthetic
gctgtgcccutatctggaaacaut

SEQ ID NO: 6111 - DNA, 33 bp, Artificial Sequence
  Synthetic
tagagacataatugggtagagaaaaugaaagat

SEQ ID NO: 6112 - DNA, 25 bp, Artificial Sequence
  Synthetic
ccccgtgtacuttcccatcataaut

SEQ ID NO: 6113 - DNA, 31 bp, Artificial Sequence
  Synthetic
ttcacatttgatactuagagtaaacctgcut

SEQ ID NO: 6114 - DNA, 24 bp, Artificial Sequence
  Synthetic
cctttacttcaucagctcgtcuga

SEQ ID NO: 6115 - DNA, 27 bp, Artificial Sequence
  Synthetic
gcutttagaataatcaugggccagact

SEQ ID NO: 6116 - DNA, 28 bp, Artificial Sequence
  Synthetic
ttttctgtcuaccctcaguaagaagact

SEQ ID NO: 6117 - DNA, 28 bp, Artificial Sequence
  Synthetic
cctgtttttccaacutaacactcaugaa

SEQ ID NO: 6118 - DNA, 24 bp, Artificial Sequence
  Synthetic
cggagtgaagccauttatgccuac

SEQ ID NO: 6119 - DNA, 28 bp, Artificial Sequence
  Synthetic
gggtgtacagucttaaatatuacagcaa

SEQ ID NO: 6120 - DNA, 23 bp, Artificial Sequence
  Synthetic
cuttatgacctucggcacaaagt

SEQ ID NO: 6121 - DNA, 23 bp, Artificial Sequence
  Synthetic
caaggacaguaactaccauggct

SEQ ID NO: 6122 - DNA, 22 bp, Artificial Sequence
  Synthetic
gcctcatcugagagtggaucag

SEQ ID NO: 6123 - DNA, 24 bp, Artificial Sequence
  Synthetic
catctcaccutgcacttctcucat

SEQ ID NO: 6124 - DNA, 20 bp, Artificial Sequence
  Synthetic
gtatccccaccgcucctuag

SEQ ID NO: 6125 - DNA, 29 bp, Artificial Sequence
  Synthetic
ttgacatttgtuaacactgttgattgcut

SEQ ID NO: 6126 - DNA, 23 bp, Artificial Sequence
  Synthetic
gcatggatgacugcagtgaatut

SEQ ID NO: 6127 - DNA, 21 bp, Artificial Sequence
  Synthetic
ggaacattugctccagcauga

SEQ ID NO: 6128 - DNA, 26 bp, Artificial Sequence
  Synthetic
gagctgacctuttggattcatctuct

SEQ ID NO: 6129 - DNA, 22 bp, Artificial Sequence
  Synthetic
ggatgggagutgccattctcug

SEQ ID NO: 6130 - DNA, 22 bp, Artificial Sequence
  Synthetic
tctgucacagcgagaatcctug

SEQ ID NO: 6131 - DNA, 22 bp, Artificial Sequence
  Synthetic
ctctcaggaaguacatgcuggt

SEQ ID NO: 6132 - DNA, 27 bp, Artificial Sequence
  Synthetic
actttggatcucaaattgtgcacauac

SEQ ID NO: 6133 - DNA, 26 bp, Artificial Sequence
  Synthetic
gagaaaaucgccgaaagtuaccaaaa

SEQ ID NO: 6134 - DNA, 22 bp, Artificial Sequence
  Synthetic
tcctaccgcugtgttcttcuct

SEQ ID NO: 6135 - DNA, 20 bp, Artificial Sequence
  Synthetic
caaucctctugacccaggca

SEQ ID NO: 6136 - DNA, 21 bp, Artificial Sequence
  Synthetic
gctttggaagcuctcagggua

SEQ ID NO: 6137 - DNA, 17 bp, Artificial Sequence
  Synthetic
gtctgcccguggaccug

SEQ ID NO: 6138 - DNA, 21 bp, Artificial Sequence
  Synthetic
cccctucagatcttcucagca

SEQ ID NO: 6139 - DNA, 22 bp, Artificial Sequence
  Synthetic
gcutcgattcuccggaaaaagg

SEQ ID NO: 6140 - DNA, 18 bp, Artificial Sequence
  Synthetic
gccagccccucctcttuc

SEQ ID NO: 6141 - DNA, 24 bp, Artificial Sequence
  Synthetic
gctaagtgcucggagttaauagca

SEQ ID NO: 6142 - DNA, 20 bp, Artificial Sequence
  Synthetic
ggagggucaccaagaaccug

SEQ ID NO: 6143 - DNA, 20 bp, Artificial Sequence
  Synthetic
tgggtcccaguctgcagtua

SEQ ID NO: 6144 - DNA, 18 bp, Artificial Sequence
  Synthetic
ctccucggccaaguccac

SEQ ID NO: 6145 - DNA, 18 bp, Artificial Sequence
  Synthetic
cagacccugccactcuca

SEQ ID NO: 6146 - DNA, 17 bp, Artificial Sequence
  Synthetic
cggctuccaggagcugt

SEQ ID NO: 6147 - DNA, 22 bp, Artificial Sequence
  Synthetic
tttacggccaacgguggatuat

SEQ ID NO: 6148 - DNA, 18 bp, Artificial Sequence
  Synthetic
gcgccuggattgcttcug

SEQ ID NO: 6149 - DNA, 19 bp, Artificial Sequence
  Synthetic
ccctuggcccagcugaaaa

SEQ ID NO: 6150 - DNA, 29 bp, Artificial Sequence
  Synthetic
catgtctttcctcuactgatgatgatcug

SEQ ID NO: 6151 - DNA, 28 bp, Artificial Sequence
  Synthetic
cgtctttagaaagugaaaggtucagaga

SEQ ID NO: 6152 - DNA, 23 bp, Artificial Sequence
  Synthetic
gcttuccagcaaaatugaaggca

SEQ ID NO: 6153 - DNA, 27 bp, Artificial Sequence
  Synthetic
ctttcaaattgaggacucgcaaagaut

SEQ ID NO: 6154 - DNA, 28 bp, Artificial Sequence
  Synthetic
attttcatuggcagaagagguagaaaga

SEQ ID NO: 6155 - DNA, 23 bp, Artificial Sequence
  Synthetic
ctgtttctguaacatggccucct

SEQ ID NO: 6156 - DNA, 27 bp, Artificial Sequence
  Synthetic
accatagaatuaacacgagcatgucag

SEQ ID NO: 6157 - DNA, 23 bp, Artificial Sequence
  Synthetic
cattccatcccaugtgggcttua

SEQ ID NO: 6158 - DNA, 26 bp, Artificial Sequence
  Synthetic
gagcatgguttttaaattugcagcac

SEQ ID NO: 6159 - DNA, 25 bp, Artificial Sequence
  Synthetic
ttagcattgcugctttgctttuaca

SEQ ID NO: 6160 - DNA, 26 bp, Artificial Sequence
  Synthetic
acaacttgaaagucgtttggaugaga

SEQ ID NO: 6161 - DNA, 31 bp, Artificial Sequence
  Synthetic
tttcttttaccagcaauaacactgattuacc

SEQ ID NO: 6162 - DNA, 24 bp, Artificial Sequence
  Synthetic
gcacagtgagggutccatagtuaa

SEQ ID NO: 6163 - DNA, 20 bp, Artificial Sequence
  Synthetic
gttuagccgagcctcuagct

SEQ ID NO: 6164 - DNA, 28 bp, Artificial Sequence
  Synthetic
cgttagtagtgaaaauatgctggcaugt

SEQ ID NO: 6165 - DNA, 23 bp, Artificial Sequence
  Synthetic
ttcuggacgaaccaaaccaucaa

SEQ ID NO: 6166 - DNA, 29 bp, Artificial Sequence
  Synthetic
tcacagaugaattttgauaagaggcaaca

SEQ ID NO: 6167 - DNA, 24 bp, Artificial Sequence
  Synthetic
ccttctcttcaucagcttccugaa

SEQ ID NO: 6168 - DNA, 26 bp, Artificial Sequence
  Synthetic
gaagtccctucatggaactgttauga

SEQ ID NO: 6169 - DNA, 26 bp, Artificial Sequence
  Synthetic
agcaagatcaauaatacaagtugcca

SEQ ID NO: 6170 - DNA, 26 bp, Artificial Sequence
  Synthetic
agacaacaaaggaggcuttgaaaaug

SEQ ID NO: 6171 - DNA, 28 bp, Artificial Sequence
  Synthetic
agaattcctacttutgatgatggtggug

SEQ ID NO: 6172 - DNA, 25 bp, Artificial Sequence
  Synthetic
tttctttgaagaugcagacagugga

SEQ ID NO: 6173 - DNA, 23 bp, Artificial Sequence
  Synthetic
ggguacaggagaaccaucaggaa

SEQ ID NO: 6174 - DNA, 25 bp, Artificial Sequence
  Synthetic
tgtgatgttucagcactgcatttut

SEQ ID NO: 6175 - DNA, 17 bp, Artificial Sequence
  Synthetic
tctccgacugccgctug

SEQ ID NO: 6176 - DNA, 29 bp, Artificial Sequence
  Synthetic
tgtagatgaaautgagtgcatugagaaga

SEQ ID NO: 6177 - DNA, 21 bp, Artificial Sequence
  Synthetic
guaagctgacucacccacact

SEQ ID NO: 6178 - DNA, 26 bp, Artificial Sequence
  Synthetic
agcaaaagacucagacttccaatgut

SEQ ID NO: 6179 - DNA, 21 bp, Artificial Sequence
  Synthetic
gcagatccuaagggacucgga

SEQ ID NO: 6180 - DNA, 24 bp, Artificial Sequence
  Synthetic
ttagggcauaaaaaggaggagcug

SEQ ID NO: 6181 - DNA, 23 bp, Artificial Sequence
  Synthetic
cactgtccuacgactctucagaa

SEQ ID NO: 6182 - DNA, 23 bp, Artificial Sequence
  Synthetic
aaugaacaaagccagtguaccct

SEQ ID NO: 6183 - DNA, 23 bp, Artificial Sequence
  Synthetic
tgccactctauttcccctttcug

SEQ ID NO: 6184 - DNA, 30 bp, Artificial Sequence
  Synthetic
agcaaaauggagcaatcaaactuagaaaag

SEQ ID NO: 6185 - DNA, 24 bp, Artificial Sequence
  Synthetic
cactttcactgutttgctgcctua

SEQ ID NO: 6186 - DNA, 24 bp, Artificial Sequence
  Synthetic
tgggcaaauaggtttgaagacugt

SEQ ID NO: 6187 - DNA, 22 bp, Artificial Sequence
  Synthetic
aggcucacaugagccacaaaat

SEQ ID NO: 6188 - DNA, 24 bp, Artificial Sequence
  Synthetic
gggtcttuggctaaacctacugaa

SEQ ID NO: 6189 - DNA, 21 bp, Artificial Sequence
  Synthetic
gtcaagaacuggtuccgcaga

SEQ ID NO: 6190 - DNA, 25 bp, Artificial Sequence
  Synthetic
ggaaatggcaacaautgaactggua

SEQ ID NO: 6191 - DNA, 20 bp, Artificial Sequence
  Synthetic
gagcccagugagtcctcuct

SEQ ID NO: 6192 - DNA, 25 bp, Artificial Sequence
  Synthetic
cttccatttguagcagcagatgaut

SEQ ID NO: 6193 - DNA, 24 bp, Artificial Sequence
  Synthetic
cccaatgugcccagtatctcauac

SEQ ID NO: 6194 - DNA, 23 bp, Artificial Sequence
  Synthetic
gaaaagaatgccucagccagaug

SEQ ID NO: 6195 - DNA, 25 bp, Artificial Sequence
  Synthetic
acaggcaaaguaaactacaguggag

SEQ ID NO: 6196 - DNA, 21 bp, Artificial Sequence
  Synthetic
ccccuttctctuccagaagcc

SEQ ID NO: 6197 - DNA, 27 bp, Artificial Sequence
  Synthetic
ccacaaaaucatacagugcaacgaaaa

SEQ ID NO: 6198 - DNA, 19 bp, Artificial Sequence
  Synthetic
gcugagcagcgggaucaat

SEQ ID NO: 6199 - DNA, 18 bp, Artificial Sequence
  Synthetic
ctgccaaggguccccuac

SEQ ID NO: 6200 - DNA, 29 bp, Artificial Sequence
  Synthetic
ccactgaaaagcacutcctgaaataatut

SEQ ID NO: 6201 - DNA, 17 bp, Artificial Sequence
  Synthetic
cccgggcutacucacca

SEQ ID NO: 6202 - DNA, 21 bp, Artificial Sequence
  Synthetic
gattttggccugagcaggtug

SEQ ID NO: 6203 - DNA, 22 bp, Artificial Sequence
  Synthetic
agucaggaaggaccactucagt

SEQ ID NO: 6204 - DNA, 24 bp, Artificial Sequence
  Synthetic
ggctgctggauttttgtttctguc

SEQ ID NO: 6205 - DNA, 19 bp, Artificial Sequence
  Synthetic
gcacgtcaguggtgtcuct

SEQ ID NO: 6206 - DNA, 21 bp, Artificial Sequence
  Synthetic
caacttgtucagcgcctugat

SEQ ID NO: 6207 - DNA, 17 bp, Artificial Sequence
  Synthetic
gtgccccgutgctgaug

SEQ ID NO: 6208 - DNA, 24 bp, Artificial Sequence
  Synthetic
gacagtttgacucgtccacattug

SEQ ID NO: 6209 - DNA, 24 bp, Artificial Sequence
  Synthetic
tgtcttugaagacctcaucagcag

SEQ ID NO: 6210 - DNA, 19 bp, Artificial Sequence
  Synthetic
gccgaggaguccagaguga

SEQ ID NO: 6211 - DNA, 18 bp, Artificial Sequence
  Synthetic
gggctttccuccagccut

SEQ ID NO: 6212 - DNA, 19 bp, Artificial Sequence
  Synthetic
accgcctucatccctcuca

SEQ ID NO: 6213 - DNA, 17 bp, Artificial Sequence
  Synthetic
ctggccauctgcucgga

SEQ ID NO: 6214 - DNA, 26 bp, Artificial Sequence
  Synthetic
gaaatcagtgacauagtgcagaggua

SEQ ID NO: 6215 - DNA, 17 bp, Artificial Sequence
  Synthetic
ctgggccaaggugcuga

SEQ ID NO: 6216 - DNA, 18 bp, Artificial Sequence
  Synthetic
cgccagcgguaccttucc

SEQ ID NO: 6217 - DNA, 22 bp, Artificial Sequence
  Synthetic
agtctgagugcccatttgtucc

SEQ ID NO: 6218 - DNA, 20 bp, Artificial Sequence
  Synthetic
caggagccutcttctgcuga

SEQ ID NO: 6219 - DNA, 22 bp, Artificial Sequence
  Synthetic
tcucaggccccaguaaacaaac

SEQ ID NO: 6220 - DNA, 19 bp, Artificial Sequence
  Synthetic
gcgctuaccccacacugag

SEQ ID NO: 6221 - DNA, 19 bp, Artificial Sequence
  Synthetic
tgctgatguccggctgaug

SEQ ID NO: 6222 - DNA, 18 bp, Artificial Sequence
  Synthetic
ccttctugcctgcgugct

SEQ ID NO: 6223 - DNA, 17 bp, Artificial Sequence
  Synthetic
gtcggccaucacugcca

SEQ ID NO: 6224 - DNA, 18 bp, Artificial Sequence
  Synthetic
ctgccccagcucccttua

SEQ ID NO: 6225 - DNA, 27 bp, Artificial Sequence
  Synthetic
ctaatggcccaagcuttagagaaaaut

SEQ ID NO: 6226 - DNA, 22 bp, Artificial Sequence
  Synthetic
tctucaccaccacattcugcat

SEQ ID NO: 6227 - DNA, 17 bp, Artificial Sequence
  Synthetic
gugagcugccggaggat

SEQ ID NO: 6228 - DNA, 21 bp, Artificial Sequence
  Synthetic
accagucactcgatugcagac

SEQ ID NO: 6229 - DNA, 27 bp, Artificial Sequence
  Synthetic
gtgcactcatgugatatttcaactgut

SEQ ID NO: 6230 - DNA, 21 bp, Artificial Sequence
  Synthetic
actgttgcugtatgccugcaa

SEQ ID NO: 6231 - DNA, 24 bp, Artificial Sequence
  Synthetic
aggcagatatcucgacacaacuct

SEQ ID NO: 6232 - DNA, 21 bp, Artificial Sequence
  Synthetic
cacagcaaugggaaugccaat

SEQ ID NO: 6233 - DNA, 22 bp, Artificial Sequence
  Synthetic
ttagtggccutgggtgatuaca

SEQ ID NO: 6234 - DNA, 21 bp, Artificial Sequence
  Synthetic
ggacttggcgguttctgagua

SEQ ID NO: 6235 - DNA, 28 bp, Artificial Sequence
  Synthetic
gtgtuaaaacacuaggagaacaattuga

SEQ ID NO: 6236 - DNA, 25 bp, Artificial Sequence
  Synthetic
tgcaggcuatttacttcttuggcat

SEQ ID NO: 6237 - DNA, 23 bp, Artificial Sequence
  Synthetic
gccaacaaugtactccagtugct

SEQ ID NO: 6238 - DNA, 21 bp, Artificial Sequence
  Synthetic
gtaacatcugcagctcugcca

SEQ ID NO: 6239 - DNA, 17 bp, Artificial Sequence
  Synthetic
gaggugccgucccacaa

SEQ ID NO: 6240 - DNA, 23 bp, Artificial Sequence
  Synthetic
agtcggtaccacuttcaggagua

SEQ ID NO: 6241 - DNA, 22 bp, Artificial Sequence
  Synthetic
caagtcacacggutggttucac

SEQ ID NO: 6242 - DNA, 21 bp, Artificial Sequence
  Synthetic
cttcctcuggagcctcaagut

SEQ ID NO: 6243 - DNA, 23 bp, Artificial Sequence
  Synthetic
ggctgaacugaagtctcctttut

SEQ ID NO: 6244 - DNA, 28 bp, Artificial Sequence
  Synthetic
agaacaagcugagaacgagaaaauacaa

SEQ ID NO: 6245 - DNA, 27 bp, Artificial Sequence
  Synthetic
gaacuagaacagcatctugaacaagag

SEQ ID NO: 6246 - DNA, 19 bp, Artificial Sequence
  Synthetic
cacucacgatggucacgct

SEQ ID NO: 6247 - DNA, 19 bp, Artificial Sequence
  Synthetic
gcattgtcauctcgccgut

SEQ ID NO: 6248 - DNA, 28 bp, Artificial Sequence
  Synthetic
tgaaaattgucacgaaacaatgagctut

SEQ ID NO: 6249 - DNA, 28 bp, Artificial Sequence
  Synthetic
tgctaaggttacuccattttctgactut

SEQ ID NO: 6250 - DNA, 28 bp, Artificial Sequence
  Synthetic
actcttcutttaggattcuccaaaagcc

SEQ ID NO: 6251 - DNA, 26 bp, Artificial Sequence
  Synthetic
acttttctcggcuaacctacctauga

SEQ ID NO: 6252 - DNA, 27 bp, Artificial Sequence
  Synthetic
agaacctcaagguttttcttagggtut

SEQ ID NO: 6253 - DNA, 26 bp, Artificial Sequence
  Synthetic
tccaactggaauaaatgcttcaucct

SEQ ID NO: 6254 - DNA, 28 bp, Artificial Sequence
  Synthetic
cggtgaaaguattctttaccacugaaga

SEQ ID NO: 6255 - DNA, 22 bp, Artificial Sequence
  Synthetic
ggcttccaccugtacctcacua

SEQ ID NO: 6256 - DNA, 24 bp, Artificial Sequence
  Synthetic
ccaccugcacacagaaatttaugg

SEQ ID NO: 6257 - DNA, 24 bp, Artificial Sequence
  Synthetic
caaagaaccacucacctgtugaat

SEQ ID NO: 6258 - DNA, 21 bp, Artificial Sequence
  Synthetic
accgagugatccgtcauacga

SEQ ID NO: 6259 - DNA, 26 bp, Artificial Sequence
  Synthetic
gtgagcagagaauatatttgguggca

SEQ ID NO: 6260 - DNA, 27 bp, Artificial Sequence
  Synthetic
agatattccttguagagcttctccuga

SEQ ID NO: 6261 - DNA, 21 bp, Artificial Sequence
  Synthetic
caggugcagaggagaccaaua

SEQ ID NO: 6262 - DNA, 22 bp, Artificial Sequence
  Synthetic
tctccttgugacacctcuccaa

SEQ ID NO: 6263 - DNA, 23 bp, Artificial Sequence
  Synthetic
gaactgctcugcttctccuacag

SEQ ID NO: 6264 - DNA, 20 bp, Artificial Sequence
  Synthetic
gctttccgggcugccataua

SEQ ID NO: 6265 - DNA, 25 bp, Artificial Sequence
  Synthetic
tgtgtttucaggtctgactucacat

SEQ ID NO: 6266 - DNA, 22 bp, Artificial Sequence
  Synthetic
cgagtgcuacagccatuacaca

SEQ ID NO: 6267 - DNA, 27 bp, Artificial Sequence
  Synthetic
ggctgcaaaaugtcaaagtcacuaaaa

SEQ ID NO: 6268 - DNA, 19 bp, Artificial Sequence
  Synthetic
cttcuaggccactcgcuca

SEQ ID NO: 6269 - DNA, 17 bp, Artificial Sequence
  Synthetic
tggcguccctcgtgtut

SEQ ID NO: 6270 - DNA, 28 bp, Artificial Sequence
  Synthetic
ccttgucaaaacaggaauttagaaauca

SEQ ID NO: 6271 - DNA, 23 bp, Artificial Sequence
  Synthetic
ctacactuggctgtgatgucact

SEQ ID NO: 6272 - DNA, 22 bp, Artificial Sequence
  Synthetic
gcaaagggcucggtttcuagag

SEQ ID NO: 6273 - DNA, 20 bp, Artificial Sequence
  Synthetic
cactccccaaugtctgccut

SEQ ID NO: 6274 - DNA, 20 bp, Artificial Sequence
  Synthetic
ccacggcauctgtgttcucc

SEQ ID NO: 6275 - DNA, 21 bp, Artificial Sequence
  Synthetic
gaccctgaucctgctctcuct

SEQ ID NO: 6276 - DNA, 28 bp, Artificial Sequence
  Synthetic
gtcctcaaaugactggaatguagagaag

SEQ ID NO: 6277 - DNA, 26 bp, Artificial Sequence
  Synthetic
acaccttgatttugttctttgggtug

SEQ ID NO: 6278 - DNA, 26 bp, Artificial Sequence
  Synthetic
gggatccttgauagttgttgtcuagt

SEQ ID NO: 6279 - DNA, 25 bp, Artificial Sequence
  Synthetic
catccagggcugtgttataatcugg

SEQ ID NO: 6280 - DNA, 24 bp, Artificial Sequence
  Synthetic
ccttgacuaacataccagcugcaa

SEQ ID NO: 6281 - DNA, 29 bp, Artificial Sequence
  Synthetic
gcatttatcgaguactaacactgactcuc

SEQ ID NO: 6282 - DNA, 24 bp, Artificial Sequence
  Synthetic
tgtgaagggcugtgtgtatguaaa

SEQ ID NO: 6283 - DNA, 21 bp, Artificial Sequence
  Synthetic
catgtcaccuccccaagacut

SEQ ID NO: 6284 - DNA, 20 bp, Artificial Sequence
  Synthetic
aagggtucaccgccataguc

SEQ ID NO: 6285 - DNA, 23 bp, Artificial Sequence
  Synthetic
tgagagaggcacuaaggcttcut

SEQ ID NO: 6286 - DNA, 24 bp, Artificial Sequence
  Synthetic
ttgctgtcugaattgggactugat

SEQ ID NO: 6287 - DNA, 23 bp, Artificial Sequence
  Synthetic
tgagcaccauggacacttcatuc

SEQ ID NO: 6288 - DNA, 30 bp, Artificial Sequence
  Synthetic
ttatctctcaaccucttgaacatactauct

SEQ ID NO: 6289 - DNA, 20 bp, Artificial Sequence
  Synthetic
ggucccgaagacugaagcaa

SEQ ID NO: 6290 - DNA, 22 bp, Artificial Sequence
  Synthetic
ctccctccaugatcttcgcaua

SEQ ID NO: 6291 - DNA, 21 bp, Artificial Sequence
  Synthetic
ggactccugctcctcttgtuc

SEQ ID NO: 6292 - DNA, 23 bp, Artificial Sequence
  Synthetic
atccaugaaggaggcagagatug

SEQ ID NO: 6293 - DNA, 30 bp, Artificial Sequence
  Synthetic
ccttttgtaatauccggtaagaauccagag

SEQ ID NO: 6294 - DNA, 21 bp, Artificial Sequence
  Synthetic
ccucctcaauggagggaacaa

SEQ ID NO: 6295 - DNA, 23 bp, Artificial Sequence
  Synthetic
taaggaaaugggatctggaugct

SEQ ID NO: 6296 - DNA, 19 bp, Artificial Sequence
  Synthetic
gccacagccuccgtagauc

SEQ ID NO: 6297 - DNA, 24 bp, Artificial Sequence
  Synthetic
ggagagatgagguctgggatauca

SEQ ID NO: 6298 - DNA, 26 bp, Artificial Sequence
  Synthetic
tgtaccccutatgaatugaggacgat

SEQ ID NO: 6299 - DNA, 27 bp, Artificial Sequence
  Synthetic
gtcacttttggucaataaggtaggtug

SEQ ID NO: 6300 - DNA, 24 bp, Artificial Sequence
  Synthetic
gccccatuggatgtttttguaaca

SEQ ID NO: 6301 - DNA, 28 bp, Artificial Sequence
  Synthetic
gtttctcgctcuagttcaaatttagugg

SEQ ID NO: 6302 - DNA, 20 bp, Artificial Sequence
  Synthetic
ggtccccgagugatgguagt

SEQ ID NO: 6303 - DNA, 20 bp, Artificial Sequence
  Synthetic
tgguaccagggauggacaca

SEQ ID NO: 6304 - DNA, 23 bp, Artificial Sequence
  Synthetic
gagtggcugtgtcatuaacacct

SEQ ID NO: 6305 - DNA, 22 bp, Artificial Sequence
  Synthetic
ggaggtcccguttcagttcaut

SEQ ID NO: 6306 - DNA, 22 bp, Artificial Sequence
  Synthetic
caccaccuactgagtgtuagca

SEQ ID NO: 6307 - DNA, 24 bp, Artificial Sequence
  Synthetic
gagaaggaagutcttaggcagugg

SEQ ID NO: 6308 - DNA, 20 bp, Artificial Sequence
  Synthetic
ccctcggugtcctactucaa

SEQ ID NO: 6309 - DNA, 22 bp, Artificial Sequence
  Synthetic
gggtgaguagcaaagaaacgug

SEQ ID NO: 6310 - DNA, 26 bp, Artificial Sequence
  Synthetic
cattgaacactucctctccaaaaugc

SEQ ID NO: 6311 - DNA, 19 bp, Artificial Sequence
  Synthetic
ggccagggucaccuaagga

SEQ ID NO: 6312 - DNA, 19 bp, Artificial Sequence
  Synthetic
cugccaggagcagaucgaa

SEQ ID NO: 6313 - DNA, 19 bp, Artificial Sequence
  Synthetic
gccctcagaugtccacguc

SEQ ID NO: 6314 - DNA, 26 bp, Artificial Sequence
  Synthetic
ctagtccctttucttccccattcaut

SEQ ID NO: 6315 - DNA, 27 bp, Artificial Sequence
  Synthetic
aaagtggaatacguagacattcgguac

SEQ ID NO: 6316 - DNA, 27 bp, Artificial Sequence
  Synthetic
ggatatttccguggctcttatucaaac

SEQ ID NO: 6317 - DNA, 27 bp, Artificial Sequence
  Synthetic
tcaatggccatguctgaaaagtaagua

SEQ ID NO: 6318 - DNA, 23 bp, Artificial Sequence
  Synthetic
gcagcccgcuttaaaacattcut

SEQ ID NO: 6319 - DNA, 28 bp, Artificial Sequence
  Synthetic
acttatgaauacacataattugcccact

SEQ ID NO: 6320 - DNA, 28 bp, Artificial Sequence
  Synthetic
agttatccautttgaaccuggagaagac

SEQ ID NO: 6321 - DNA, 28 bp, Artificial Sequence
  Synthetic
gctaggatttttcuctgaactgtctgut

SEQ ID NO: 6322 - DNA, 28 bp, Artificial Sequence
  Synthetic
acttgtgtaatuccaatcctggataguc

SEQ ID NO: 6323 - DNA, 30 bp, Artificial Sequence
  Synthetic
ggctgcaatatutccttttactaaaaucgt

SEQ ID NO: 6324 - DNA, 26 bp, Artificial Sequence
  Synthetic
aautgcggagacuacaagaagaaaga

SEQ ID NO: 6325 - DNA, 29 bp, Artificial Sequence
  Synthetic
aaauaggacactttctuaaagaaggagca

SEQ ID NO: 6326 - DNA, 27 bp, Artificial Sequence
  Synthetic
acagaaugtctgagaauagcaaaacca

SEQ ID NO: 6327 - DNA, 23 bp, Artificial Sequence
  Synthetic
acgcgacaguaatctgtuaagcc

SEQ ID NO: 6328 - DNA, 28 bp, Artificial Sequence
  Synthetic
tggctagaauaattcatgctgtuaccaa

SEQ ID NO: 6329 - DNA, 32 bp, Artificial Sequence
  Synthetic
cttgcaagaucaaaagtatttcaauacaaaac

SEQ ID NO: 6330 - DNA, 22 bp, Artificial Sequence
  Synthetic
tgtgggagcuagcagtguaaac

SEQ ID NO: 6331 - DNA, 33 bp, Artificial Sequence
  Synthetic
aagaatactttcctcuacttcctatatgactua

SEQ ID NO: 6332 - DNA, 33 bp, Artificial Sequence
  Synthetic
ccttttagtttgttaaugtgatggaatagttut

SEQ ID NO: 6333 - DNA, 23 bp, Artificial Sequence
  Synthetic
cagtaauggagacagcucacagt

SEQ ID NO: 6334 - DNA, 26 bp, Artificial Sequence
  Synthetic
tgatagataaaguctttgccccucca

SEQ ID NO: 6335 - DNA, 24 bp, Artificial Sequence
  Synthetic
cccattttuaccgttccuggaact

SEQ ID NO: 6336 - DNA, 29 bp, Artificial Sequence
  Synthetic
cttgtactggagaaaautcttgtgaguct

SEQ ID NO: 6337 - DNA, 21 bp, Artificial Sequence
  Synthetic
agaugcagctacuacccagct

SEQ ID NO: 6338 - DNA, 32 bp, Artificial Sequence
  Synthetic
ctttaagattacaaautcagaaactcttgucc

SEQ ID NO: 6339 - DNA, 29 bp, Artificial Sequence
  Synthetic
ccttggctttcuggaataattctgactua

SEQ ID NO: 6340 - DNA, 26 bp, Artificial Sequence
  Synthetic
atttctttgttgcutggttctttgut

SEQ ID NO: 6341 - DNA, 30 bp, Artificial Sequence
  Synthetic
aatatgauagcaaaauaggaagcatactua

SEQ ID NO: 6342 - DNA, 26 bp, Artificial Sequence
  Synthetic
gctcaagttctugtgtttgtgtguaa

SEQ ID NO: 6343 - DNA, 29 bp, Artificial Sequence
  Synthetic
tccaagagcttcutcatttaacgtaacuc

SEQ ID NO: 6344 - DNA, 30 bp, Artificial Sequence
  Synthetic
tcaggcatcuaacaaaggagaggaaataua

SEQ ID NO: 6345 - DNA, 30 bp, Artificial Sequence
  Synthetic
gactgctttaaaatuttcaatggagatcut

SEQ ID NO: 6346 - DNA, 26 bp, Artificial Sequence
  Synthetic
aggttacugaaagcacttccttugaa

SEQ ID NO: 6347 - DNA, 31 bp, Artificial Sequence
  Synthetic
tgggatattcauagcaagcatatgauaacag

SEQ ID NO: 6348 - DNA, 28 bp, Artificial Sequence
  Synthetic
acgtttagaagacuttatggcatcucat

SEQ ID NO: 6349 - DNA, 33 bp, Artificial Sequence
  Synthetic
tgtcatgtataaactuacctatagaaatccuca

SEQ ID NO: 6350 - DNA, 23 bp, Artificial Sequence
  Synthetic
ccuatgaggguaccagagacagt

SEQ ID NO: 6351 - DNA, 31 bp, Artificial Sequence
  Synthetic
gggaatgaaaaguacataaaaatugaagcca

SEQ ID NO: 6352 - DNA, 27 bp, Artificial Sequence
  Synthetic
attttccaucgcatgtgatuaaagcaa

SEQ ID NO: 6353 - DNA, 33 bp, Artificial Sequence
  Synthetic
agaaggaatgttcuattattaaactcatcaugt

SEQ ID NO: 6354 - DNA, 26 bp, Artificial Sequence
  Synthetic
tccagaacttacuggttgttgttgut

SEQ ID NO: 6355 - DNA, 29 bp, Artificial Sequence
  Synthetic
atgaagatggtttuctagagcatcctuac

SEQ ID NO: 6356 - DNA, 29 bp, Artificial Sequence
  Synthetic
agatccttttccugaccatgttgttttua

SEQ ID NO: 6357 - DNA, 30 bp, Artificial Sequence
  Synthetic
ctgctagagcautacagattttugaaaagt

SEQ ID NO: 6358 - DNA, 32 bp, Artificial Sequence
  Synthetic
ttatgtatgatctctuacctatgactctacug

SEQ ID NO: 6359 - DNA, 31 bp, Artificial Sequence
  Synthetic
gatgcatctttacuatgttgtatagctaugg

SEQ ID NO: 6360 - DNA, 26 bp, Artificial Sequence
  Synthetic
gactggacataguttctgggagatut

SEQ ID NO: 6361 - DNA, 25 bp, Artificial Sequence
  Synthetic
caauttaacagtcaugacccacagc

SEQ ID NO: 6362 - DNA, 30 bp, Artificial Sequence
  Synthetic
actcatttttacucaaactattggguggat

SEQ ID NO: 6363 - DNA, 23 bp, Artificial Sequence
  Synthetic
cagctggugaaaaatcccugaac

SEQ ID NO: 6364 - DNA, 32 bp, Artificial Sequence
  Synthetic
taatgatgctttcuggctggatttaaattauc

SEQ ID NO: 6365 - DNA, 32 bp, Artificial Sequence
  Synthetic
ctcttgatcatccauacttttcttatcugcat

SEQ ID NO: 6366 - DNA, 30 bp, Artificial Sequence
  Synthetic
ttccttcttcaatutttgttgtttccaugt

SEQ ID NO: 6367 - DNA, 32 bp, Artificial Sequence
  Synthetic
caatttacctagtaaugggttgtaacatctuc

SEQ ID NO: 6368 - DNA, 31 bp, Artificial Sequence
  Synthetic
ctctggttttcugttgatatctttgatuact

SEQ ID NO: 6369 - DNA, 28 bp, Artificial Sequence
  Synthetic
ctgcttggtaaugaagttcttctagtuc

SEQ ID NO: 6370 - DNA, 31 bp, Artificial Sequence
  Synthetic
tgaaaacctcttcuttattttcagagtguct

SEQ ID NO: 6371 - DNA, 23 bp, Artificial Sequence
  Synthetic
caatgcttuccagctctccaaug

SEQ ID NO: 6372 - DNA, 31 bp, Artificial Sequence
  Synthetic
acaacucacaaagagaatgtatuaaggacat

SEQ ID NO: 6373 - DNA, 32 bp, Artificial Sequence
  Synthetic
taataaaaggaaagucaagaggtaagaugaca

SEQ ID NO: 6374 - DNA, 21 bp, Artificial Sequence
  Synthetic
tgtggcaacuggtuagcagaa

SEQ ID NO: 6375 - DNA, 29 bp, Artificial Sequence
  Synthetic
tgaaaagatgaagcauattcatgcuaagt

SEQ ID NO: 6376 - DNA, 31 bp, Artificial Sequence
  Synthetic
tgtgtgattttguagttctgttaaagtucat

SEQ ID NO: 6377 - DNA, 24 bp, Artificial Sequence
  Synthetic
agcgtttacgaucctctttcagug

SEQ ID NO: 6378 - DNA, 26 bp, Artificial Sequence
  Synthetic
gtagagagacggaaugaagatuccaa

SEQ ID NO: 6379 - DNA, 29 bp, Artificial Sequence
  Synthetic
attgtggtttgautttcaggtttactuac

SEQ ID NO: 6380 - DNA, 28 bp, Artificial Sequence
  Synthetic
tgtactatcagaaguaggagaccucaga

SEQ ID NO: 6381 - DNA, 27 bp, Artificial Sequence
  Synthetic
atatctcuacagagaguaacacagcaa

SEQ ID NO: 6382 - DNA, 21 bp, Artificial Sequence
  Synthetic
tggtttgagugccctttgcua

SEQ ID NO: 6383 - DNA, 29 bp, Artificial Sequence
  Synthetic
cgtgtttctcugcagtaatgtatuacaca

SEQ ID NO: 6384 - DNA, 32 bp, Artificial Sequence
  Synthetic
tcttttgaagagaaauatgaagtcttcaugga

SEQ ID NO: 6385 - DNA, 21 bp, Artificial Sequence
  Synthetic
acacugcgcgtauaagccaat

SEQ ID NO: 6386 - DNA, 26 bp, Artificial Sequence
  Synthetic
catgtggttucttgcctttguaaagt

SEQ ID NO: 6387 - DNA, 29 bp, Artificial Sequence
  Synthetic
cacaatatctcuggtgagtcuaaaaggaa

SEQ ID NO: 6388 - DNA, 26 bp, Artificial Sequence
  Synthetic
ggaccatgaaucctttgaaagcttug

SEQ ID NO: 6389 - DNA, 29 bp, Artificial Sequence
  Synthetic
gccttgggaauaagaaaatcugaaaaact

SEQ ID NO: 6390 - DNA, 23 bp, Artificial Sequence
  Synthetic
cctcttagcugttctgucaggga

SEQ ID NO: 6391 - DNA, 27 bp, Artificial Sequence
  Synthetic
tgatcgctucaacctgaaaagtatuga

SEQ ID NO: 6392 - DNA, 29 bp, Artificial Sequence
  Synthetic
tgtgcaagttcuagttttatactcaccug

SEQ ID NO: 6393 - DNA, 25 bp, Artificial Sequence
  Synthetic
ctcagctucagataaaccagucgat

SEQ ID NO: 6394 - DNA, 24 bp, Artificial Sequence
  Synthetic
agcatactcaaaggucacaggaug

SEQ ID NO: 6395 - DNA, 23 bp, Artificial Sequence
  Synthetic
ctgucacaggattttgugcagat

SEQ ID NO: 6396 - DNA, 31 bp, Artificial Sequence
  Synthetic
cttgtgactaaaauaacagagagctacacua

SEQ ID NO: 6397 - DNA, 24 bp, Artificial Sequence
  Synthetic
acaggtcagucaaatttgcaucca

SEQ ID NO: 6398 - DNA, 28 bp, Artificial Sequence
  Synthetic
gcagaguaaaaagaaaacugtttaaugg

SEQ ID NO: 6399 - DNA, 28 bp, Artificial Sequence
  Synthetic
ctccacaaaaggaaaugagttugaagat

SEQ ID NO: 6400 - DNA, 26 bp, Artificial Sequence
  Synthetic
gctgagtgccautattgattgtgtug

SEQ ID NO: 6401 - DNA, 24 bp, Artificial Sequence
  Synthetic
cctgttataaugggtctguccagt

SEQ ID NO: 6402 - DNA, 21 bp, Artificial Sequence
  Synthetic
caacgugaagaagagctcugg

SEQ ID NO: 6403 - DNA, 23 bp, Artificial Sequence
  Synthetic
agcacttcuccaccatcttctug

SEQ ID NO: 6404 - DNA, 30 bp, Artificial Sequence
  Synthetic
tatggagaattugatgaagaaaacuaagca

SEQ ID NO: 6405 - DNA, 22 bp, Artificial Sequence
  Synthetic
tgttacccautcaggcagucac

SEQ ID NO: 6406 - DNA, 21 bp, Artificial Sequence
  Synthetic
ggaggccauggctctgaaauc

SEQ ID NO: 6407 - DNA, 23 bp, Artificial Sequence
  Synthetic
aaaagcuttctctucaccgaagt

SEQ ID NO: 6408 - DNA, 23 bp, Artificial Sequence
  Synthetic
gggaacatuctccagacaauccc

SEQ ID NO: 6409 - DNA, 29 bp, Artificial Sequence
  Synthetic
tgcagtttaagaaaccuggaataaaguca

SEQ ID NO: 6410 - DNA, 28 bp, Artificial Sequence
  Synthetic
gatgcatctgtuactatcttttgctuct

SEQ ID NO: 6411 - DNA, 20 bp, Artificial Sequence
  Synthetic
ctctgcuccttgccucaaca

SEQ ID NO: 6412 - DNA, 28 bp, Artificial Sequence
  Synthetic
cattactgcaguttttggattcttugct

SEQ ID NO: 6413 - DNA, 20 bp, Artificial Sequence
  Synthetic
gaatauggccggtcuggagg

SEQ ID NO: 6414 - DNA, 21 bp, Artificial Sequence
  Synthetic
cagaggcucagctgtgguaag

SEQ ID NO: 6415 - DNA, 23 bp, Artificial Sequence
  Synthetic
gcattggcagaugaggaaggtut

SEQ ID NO: 6416 - DNA, 27 bp, Artificial Sequence
  Synthetic
ttccaaagatcautatggcacttucct

SEQ ID NO: 6417 - DNA, 31 bp, Artificial Sequence
  Synthetic
caatgattttuaaagtagcagaauggcaact

SEQ ID NO: 6418 - DNA, 24 bp, Artificial Sequence
  Synthetic
gaatcaactcugaacggaaagcug

SEQ ID NO: 6419 - DNA, 23 bp, Artificial Sequence
  Synthetic
gttgttcugggcaaugaccaaag

SEQ ID NO: 6420 - DNA, 27 bp, Artificial Sequence
  Synthetic
tccccttacatugtctccatatttuct

SEQ ID NO: 6421 - DNA, 28 bp, Artificial Sequence
  Synthetic
caaggctgaatuagctacattagctuac

SEQ ID NO: 6422 - DNA, 21 bp, Artificial Sequence
  Synthetic
ccttcccutcccttttuccgt

SEQ ID NO: 6423 - DNA, 23 bp, Artificial Sequence
  Synthetic
aggagaugtcatgaugggagaca

SEQ ID NO: 6424 - DNA, 22 bp, Artificial Sequence
  Synthetic
tgtgcgcgugtttttcttucat

SEQ ID NO: 6425 - DNA, 21 bp, Artificial Sequence
  Synthetic
ctccactgcuacagtcagucc

SEQ ID NO: 6426 - DNA, 22 bp, Artificial Sequence
  Synthetic
caatcactugtcggaaguccct

SEQ ID NO: 6427 - DNA, 28 bp, Artificial Sequence
  Synthetic
gcaacaaatcagauattgcagaaaguaa

SEQ ID NO: 6428 - DNA, 29 bp, Artificial Sequence
  Synthetic
agctctgttatcuctattcagacctguat

SEQ ID NO: 6429 - DNA, 23 bp, Artificial Sequence
  Synthetic
gcaggaggacaauaattccaugt

SEQ ID NO: 6430 - DNA, 25 bp, Artificial Sequence
  Synthetic
tccccagaaugaggtagtttttcut

SEQ ID NO: 6431 - DNA, 23 bp, Artificial Sequence
  Synthetic
ctccaaagucaatcggtcctugt

SEQ ID NO: 6432 - DNA, 25 bp, Artificial Sequence
  Synthetic
cacccagccgcaauacagattatua

SEQ ID NO: 6433 - DNA, 21 bp, Artificial Sequence
  Synthetic
cttggcagagucctgaggtuc

SEQ ID NO: 6434 - DNA, 23 bp, Artificial Sequence
  Synthetic
cttagauggcacacctcgtacuc

SEQ ID NO: 6435 - DNA, 28 bp, Artificial Sequence
  Synthetic
agtaatgcccuaagcttctcuaagagat

SEQ ID NO: 6436 - DNA, 27 bp, Artificial Sequence
  Synthetic
gatcaagtgttcuatcagcgagtaucc

SEQ ID NO: 6437 - DNA, 29 bp, Artificial Sequence
  Synthetic
actcacaatcttutctctattggaaaugt

SEQ ID NO: 6438 - DNA, 29 bp, Artificial Sequence
  Synthetic
attttaggatgcugaaagtaatccacugt

SEQ ID NO: 6439 - DNA, 24 bp, Artificial Sequence
  Synthetic
tgctgtaccugtgtattuggcaat

SEQ ID NO: 6440 - DNA, 26 bp, Artificial Sequence
  Synthetic
gataatcatgtuactgagtgctugga

SEQ ID NO: 6441 - DNA, 30 bp, Artificial Sequence
  Synthetic
ccccaaaacuaaaagacaatatcagaccua

SEQ ID NO: 6442 - DNA, 27 bp, Artificial Sequence
  Synthetic
tggatttcttuccaactttcugaagct

SEQ ID NO: 6443 - DNA, 26 bp, Artificial Sequence
  Synthetic
cctactacaaugcaaaggaacacuca

SEQ ID NO: 6444 - DNA, 28 bp, Artificial Sequence
  Synthetic
ggacactaaaggaagutggagaagatua

SEQ ID NO: 6445 - DNA, 24 bp, Artificial Sequence
  Synthetic
gggatggcacaugagtgtcauact

SEQ ID NO: 6446 - DNA, 23 bp, Artificial Sequence
  Synthetic
caggauagccaggcaaguaacat

SEQ ID NO: 6447 - DNA, 27 bp, Artificial Sequence
  Synthetic
gatggattctcaucactatgtgctuca

SEQ ID NO: 6448 - DNA, 24 bp, Artificial Sequence
  Synthetic
tcctcagaauactcactccgaugg

SEQ ID NO: 6449 - DNA, 27 bp, Artificial Sequence
  Synthetic
cttatgaatguactccatgatcuggct

SEQ ID NO: 6450 - DNA, 29 bp, Artificial Sequence
  Synthetic
ttttggatgagucatgtttaatcttugga

SEQ ID NO: 6451 - DNA, 27 bp, Artificial Sequence
  Synthetic
gcttcatatcuacaatcttcacugcga

SEQ ID NO: 6452 - DNA, 28 bp, Artificial Sequence
  Synthetic
cttcaaatuaagaagctatgtggtugct

SEQ ID NO: 6453 - DNA, 26 bp, Artificial Sequence
  Synthetic
ccatgagttgauggaagaatctcuga

SEQ ID NO: 6454 - DNA, 29 bp, Artificial Sequence
  Synthetic
ttgaacaagatgtguggtactttaccaua

SEQ ID NO: 6455 - DNA, 20 bp, Artificial Sequence
  Synthetic
cucttaccuccagcgagcat

SEQ ID NO: 6456 - DNA, 22 bp, Artificial Sequence
  Synthetic
ttcaagtugccagttgggtuaa

SEQ ID NO: 6457 - DNA, 25 bp, Artificial Sequence
  Synthetic
cttagaaaatccacugggagacuct

SEQ ID NO: 6458 - DNA, 28 bp, Artificial Sequence
  Synthetic
ggccttcaugcaaaataattttaaguca

SEQ ID NO: 6459 - DNA, 28 bp, Artificial Sequence
  Synthetic
gataagatttguctgcatccaattuggt

SEQ ID NO: 6460 - DNA, 29 bp, Artificial Sequence
  Synthetic
tctaatatagggugatggattggagtuca

SEQ ID NO: 6461 - DNA, 26 bp, Artificial Sequence
  Synthetic
actatatucaccaggatuccccagag

SEQ ID NO: 6462 - DNA, 21 bp, Artificial Sequence
  Synthetic
tcaccgucgaaccaacaguac

SEQ ID NO: 6463 - DNA, 26 bp, Artificial Sequence
  Synthetic
gctuttaggtgtttcugaacccacat

SEQ ID NO: 6464 - DNA, 27 bp, Artificial Sequence
  Synthetic
aatgaatagcaucaagaccttcuggag

SEQ ID NO: 6465 - DNA, 26 bp, Artificial Sequence
  Synthetic
tcagccaataaagguaaacacacgua

SEQ ID NO: 6466 - DNA, 26 bp, Artificial Sequence
  Synthetic
aatgctcgggaugaatccatuaagaa

SEQ ID NO: 6467 - DNA, 26 bp, Artificial Sequence
  Synthetic
tgttctctttutccttctgcuccaaa

SEQ ID NO: 6468 - DNA, 28 bp, Artificial Sequence
  Synthetic
gttattcagcttutctgggtttttguga

SEQ ID NO: 6469 - DNA, 27 bp, Artificial Sequence
  Synthetic
tcttcttcccuttcctcagtacucaaa

SEQ ID NO: 6470 - DNA, 21 bp, Artificial Sequence
  Synthetic
ccaggugaaacaggagctguc

SEQ ID NO: 6471 - DNA, 24 bp, Artificial Sequence
  Synthetic
ttagcagucaaggactcctucaac

SEQ ID NO: 6472 - DNA, 25 bp, Artificial Sequence
  Synthetic
aaccctgagcuatctgtttucaaat

SEQ ID NO: 6473 - DNA, 24 bp, Artificial Sequence
  Synthetic
tttcaagctgcucatctgctttuc

SEQ ID NO: 6474 - DNA, 31 bp, Artificial Sequence
  Synthetic
agagaagcaagaggaaautgataacuacaaa

SEQ ID NO: 6475 - DNA, 24 bp, Artificial Sequence
  Synthetic
acaccaacauacagacacaugcaa

SEQ ID NO: 6476 - DNA, 23 bp, Artificial Sequence
  Synthetic
cactuggagagagagaucaccag

SEQ ID NO: 6477 - DNA, 22 bp, Artificial Sequence
  Synthetic
cctcauaagccccaatcagcut

SEQ ID NO: 6478 - DNA, 27 bp, Artificial Sequence
  Synthetic
ctggaagaagcacuaagagaaagtgua

SEQ ID NO: 6479 - DNA, 28 bp, Artificial Sequence
  Synthetic
cctaaactatacuggttgtgtgtuacct

SEQ ID NO: 6480 - DNA, 26 bp, Artificial Sequence
  Synthetic
cuaagaagaagauccaagaggaagug

SEQ ID NO: 6481 - DNA, 25 bp, Artificial Sequence
  Synthetic
agacctuaaagtacaagcuggcaaa

SEQ ID NO: 6482 - DNA, 20 bp, Artificial Sequence
  Synthetic
tggacaccugacaacccuct

SEQ ID NO: 6483 - DNA, 26 bp, Artificial Sequence
  Synthetic
tcacaggcucttttcaaagttugagt

SEQ ID NO: 6484 - DNA, 25 bp, Artificial Sequence
  Synthetic
ctattuagucaaaggaaggagguca

SEQ ID NO: 6485 - DNA, 17 bp, Artificial Sequence
  Synthetic
gtccaccucguggcaca

SEQ ID NO: 6486 - DNA, 21 bp, Artificial Sequence
  Synthetic
tgcgaagaagagguctuccct

SEQ ID NO: 6487 - DNA, 22 bp, Artificial Sequence
  Synthetic
cggtgtaaaugcacagcttcuc

SEQ ID NO: 6488 - DNA, 21 bp, Artificial Sequence
  Synthetic
ccctgaccutctgcctcucat

SEQ ID NO: 6489 - DNA, 21 bp, Artificial Sequence
  Synthetic
ggtgatctuagccagcagcuc

SEQ ID NO: 6490 - DNA, 17 bp, Artificial Sequence
  Synthetic
ggcugccgggagagaug

SEQ ID NO: 6491 - DNA, 21 bp, Artificial Sequence
  Synthetic
acacugagcaggagtcucaga

SEQ ID NO: 6492 - DNA, 24 bp, Artificial Sequence
  Synthetic
ccttctccctutattccagctguc

SEQ ID NO: 6493 - DNA, 26 bp, Artificial Sequence
  Synthetic
gttgctgucaattggcctuaaagaaa

SEQ ID NO: 6494 - DNA, 22 bp, Artificial Sequence
  Synthetic
gggtctgugattgtcttuccct

SEQ ID NO: 6495 - DNA, 21 bp, Artificial Sequence
  Synthetic
ggagaaggccggugatttguc

SEQ ID NO: 6496 - DNA, 21 bp, Artificial Sequence
  Synthetic
ccatcaugcaccctctgaucc

SEQ ID NO: 6497 - DNA, 23 bp, Artificial Sequence
  Synthetic
gatguggttcatguaagccaggt

SEQ ID NO: 6498 - DNA, 22 bp, Artificial Sequence
  Synthetic
gcagtgccutttctgaggtuca

SEQ ID NO: 6499 - DNA, 23 bp, Artificial Sequence
  Synthetic
cctggctccutcctgataatgut

SEQ ID NO: 6500 - DNA, 28 bp, Artificial Sequence
  Synthetic
gtugattatggaagatucccacaagagt

SEQ ID NO: 6501 - DNA, 23 bp, Artificial Sequence
  Synthetic
caagctcaguattttggccaguc

SEQ ID NO: 6502 - DNA, 25 bp, Artificial Sequence
  Synthetic
ggctttttgccacucctttgaatua

SEQ ID NO: 6503 - DNA, 23 bp, Artificial Sequence
  Synthetic
gaagtccctguactccatctgug

SEQ ID NO: 6504 - DNA, 23 bp, Artificial Sequence
  Synthetic
tcagcuacttctcugccacaaac

SEQ ID NO: 6505 - DNA, 30 bp, Artificial Sequence
  Synthetic
aaaacattacccatuctggtactacgatut

SEQ ID NO: 6506 - DNA, 22 bp, Artificial Sequence
  Synthetic
acttcugggaaaggtggguagt

SEQ ID NO: 6507 - DNA, 23 bp, Artificial Sequence
  Synthetic
ctgaagagaaugaacggcucaag

SEQ ID NO: 6508 - DNA, 25 bp, Artificial Sequence
  Synthetic
gaaaggtaacauccccctttagcut

SEQ ID NO: 6509 - DNA, 21 bp, Artificial Sequence
  Synthetic
ctttctcctucgggacacugt

SEQ ID NO: 6510 - DNA, 23 bp, Artificial Sequence
  Synthetic
gccctgcauactgctctattuct

SEQ ID NO: 6511 - DNA, 19 bp, Artificial Sequence
  Synthetic
gatgtatcccugccccgug

SEQ ID NO: 6512 - DNA, 24 bp, Artificial Sequence
  Synthetic
ccagaacccautttggtaccauct

SEQ ID NO: 6513 - DNA, 23 bp, Artificial Sequence
  Synthetic
tttccttcaugccaattgcaucg

SEQ ID NO: 6514 - DNA, 23 bp, Artificial Sequence
  Synthetic
cccacctauaggctgtctttucc

SEQ ID NO: 6515 - DNA, 21 bp, Artificial Sequence
  Synthetic
catcagcacagutcgugaggt

SEQ ID NO: 6516 - DNA, 30 bp, Artificial Sequence
  Synthetic
atccatccacagacuatatcttaaccugat

SEQ ID NO: 6517 - DNA, 22 bp, Artificial Sequence
  Synthetic
guagcacucaaaacagcaccaa

SEQ ID NO: 6518 - DNA, 20 bp, Artificial Sequence
  Synthetic
ggactcugacccagggaugt

SEQ ID NO: 6519 - DNA, 20 bp, Artificial Sequence
  Synthetic
cuccaagtttcuccgcacca

SEQ ID NO: 6520 - DNA, 18 bp, Artificial Sequence
  Synthetic
gtctgugcgcgagugagt

SEQ ID NO: 6521 - DNA, 17 bp, Artificial Sequence
  Synthetic
cggcucgaaccgaccug

SEQ ID NO: 6522 - DNA, 17 bp, Artificial Sequence
  Synthetic
cctacccgucctuggca

SEQ ID NO: 6523 - DNA, 20 bp, Artificial Sequence
  Synthetic
ctggagtugctgctgttcuc

SEQ ID NO: 6524 - DNA, 23 bp, Artificial Sequence
  Synthetic
cccattaaccugtgttcccctut

SEQ ID NO: 6525 - DNA, 23 bp, Artificial Sequence
  Synthetic
ggaacatggaucggaggcttuaa

SEQ ID NO: 6526 - DNA, 19 bp, Artificial Sequence
  Synthetic
cugaggctugcagggaaga

SEQ ID NO: 6527 - DNA, 26 bp, Artificial Sequence
  Synthetic
aaaucaacaagaagaagtugcagcag

SEQ ID NO: 6528 - DNA, 17 bp, Artificial Sequence
  Synthetic
ggcgcagccuctgctua

SEQ ID NO: 6529 - DNA, 18 bp, Artificial Sequence
  Synthetic
gcugcaaacgcucaaccc

SEQ ID NO: 6530 - DNA, 18 bp, Artificial Sequence
  Synthetic
gcgctguccaagtucgct

SEQ ID NO: 6531 - DNA, 20 bp, Artificial Sequence
  Synthetic
agcatguaccctagcuccgt

SEQ ID NO: 6532 - DNA, 31 bp, Artificial Sequence
  Synthetic
ggaatatcgtagguaaaaatgcctatuggat

SEQ ID NO: 6533 - DNA, 23 bp, Artificial Sequence
  Synthetic
tgtgacguactgggttttuagca

SEQ ID NO: 6534 - DNA, 33 bp, Artificial Sequence
  Synthetic
atccagagtatatacautctcactgaattatug

SEQ ID NO: 6535 - DNA, 28 bp, Artificial Sequence
  Synthetic
tttagaaguggacaggaaauatcatcug

SEQ ID NO: 6536 - DNA, 29 bp, Artificial Sequence
  Synthetic
atgtgcattgagaguttttatactaguga

SEQ ID NO: 6537 - DNA, 24 bp, Artificial Sequence
  Synthetic
cactgtctgucacagaagcgauaa

SEQ ID NO: 6538 - DNA, 32 bp, Artificial Sequence
  Synthetic
ccaaatgtccuagaagatgaagtataugaaac

SEQ ID NO: 6539 - DNA, 24 bp, Artificial Sequence
  Synthetic
atcagcguttgcttcauggaaaat

SEQ ID NO: 6540 - DNA, 32 bp, Artificial Sequence
  Synthetic
cttcatgugaccaaaatattucagaaaaagac

SEQ ID NO: 6541 - DNA, 28 bp, Artificial Sequence
  Synthetic
atgctgctctucatctctcttattuacc

SEQ ID NO: 6542 - DNA, 28 bp, Artificial Sequence
  Synthetic
ggaaatacauactgtttgcucacagaag

SEQ ID NO: 6543 - DNA, 30 bp, Artificial Sequence
  Synthetic
tctttttcaaaguggatattaaaccugcat

SEQ ID NO: 6544 - DNA, 28 bp, Artificial Sequence
  Synthetic
accaactttgtccutaactagctcttut

SEQ ID NO: 6545 - DNA, 23 bp, Artificial Sequence
  Synthetic
atgacagagaaucagcttcuggg

SEQ ID NO: 6546 - DNA, 29 bp, Artificial Sequence
  Synthetic
caaacctagucatgatttcuagaggcaaa

SEQ ID NO: 6547 - DNA, 30 bp, Artificial Sequence
  Synthetic
gcaacagcucaacgtttttataatttucat

SEQ ID NO: 6548 - DNA, 26 bp, Artificial Sequence
  Synthetic
gacttgtguaaacgaacccatttuca

SEQ ID NO: 6549 - DNA, 30 bp, Artificial Sequence
  Synthetic
ttgacctagagtcauttttatatgctgcut

SEQ ID NO: 6550 - DNA, 30 bp, Artificial Sequence
  Synthetic
ttgtgttgaaattguaaataccttggcaut

SEQ ID NO: 6551 - DNA, 30 bp, Artificial Sequence
  Synthetic
ttaaaatcctgctuggaaaataacatcuga

SEQ ID NO: 6552 - DNA, 25 bp, Artificial Sequence
  Synthetic
gcaagcaattugaaggtacagtuga

SEQ ID NO: 6553 - DNA, 27 bp, Artificial Sequence
  Synthetic
gcagagcttcaguagaaacattcagut

SEQ ID NO: 6554 - DNA, 30 bp, Artificial Sequence
  Synthetic
acaaaataatatugaaatgactacuggcac

SEQ ID NO: 6555 - DNA, 31 bp, Artificial Sequence
  Synthetic
aatcactgccaucaaattctaagttaugaga

SEQ ID NO: 6556 - DNA, 22 bp, Artificial Sequence
  Synthetic
tttcagacugcaagugggaaaa

SEQ ID NO: 6557 - DNA, 32 bp, Artificial Sequence
  Synthetic
ctgtttcctcataacutagaatgtccatttug

SEQ ID NO: 6558 - DNA, 29 bp, Artificial Sequence
  Synthetic
tttgatgaaaaagaguaagguactaguga

SEQ ID NO: 6559 - DNA, 30 bp, Artificial Sequence
  Synthetic
gagagaattctgcauttctttacacttugg

SEQ ID NO: 6560 - DNA, 29 bp, Artificial Sequence
  Synthetic
aaatcagtccccutattcagtcatugaaa

SEQ ID NO: 6561 - DNA, 32 bp, Artificial Sequence
  Synthetic
tcctacataatcugcagtatttattctttcug

SEQ ID NO: 6562 - DNA, 31 bp, Artificial Sequence
  Synthetic
gccagtatugaagaatgttgaagaucaaaaa

SEQ ID NO: 6563 - DNA, 22 bp, Artificial Sequence
  Synthetic
tttgcagggugaagagctaguc

SEQ ID NO: 6564 - DNA, 32 bp, Artificial Sequence
  Synthetic
gcattggatgatucagaggatattcttcauaa

SEQ ID NO: 6565 - DNA, 28 bp, Artificial Sequence
  Synthetic
actttctccaauccagacatatttuggt

SEQ ID NO: 6566 - DNA, 23 bp, Artificial Sequence
  Synthetic
acatucagaccagcucacaagag

SEQ ID NO: 6567 - DNA, 26 bp, Artificial Sequence
  Synthetic
tccacttgcugtactaaauccagaga

SEQ ID NO: 6568 - DNA, 32 bp, Artificial Sequence
  Synthetic
aggtggttctucagaaaataatcactctatua

SEQ ID NO: 6569 - DNA, 23 bp, Artificial Sequence
  Synthetic
gtgaagccugttctttucccaaa

SEQ ID NO: 6570 - DNA, 30 bp, Artificial Sequence
  Synthetic
aatatttcttttuaggagaaccctcaauca

SEQ ID NO: 6571 - DNA, 32 bp, Artificial Sequence
  Synthetic
accatacctauagagggagaacagatauaaat

SEQ ID NO: 6572 - DNA, 28 bp, Artificial Sequence
  Synthetic
aaaatgagacacutgattacuacaggca

SEQ ID NO: 6573 - DNA, 27 bp, Artificial Sequence
  Synthetic
tgcttttgtctgutttcctccaagtua

SEQ ID NO: 6574 - DNA, 23 bp, Artificial Sequence
  Synthetic
aaaacatccacuctgccucgaat

SEQ ID NO: 6575 - DNA, 32 bp, Artificial Sequence
  Synthetic
ataaaattacactcugtcataaaagccaucag

SEQ ID NO: 6576 - DNA, 31 bp, Artificial Sequence
  Synthetic
gtgtggatccaaagcutatttctagaattug

SEQ ID NO: 6577 - DNA, 21 bp, Artificial Sequence
  Synthetic
gaagcacccuttctgggctua

SEQ ID NO: 6578 - DNA, 29 bp, Artificial Sequence
  Synthetic
agcgcaaatauatctgaaacttcuagcaa

SEQ ID NO: 6579 - DNA, 28 bp, Artificial Sequence
  Synthetic
gaataatcttcugaccaactgtcaguct

SEQ ID NO: 6580 - DNA, 23 bp, Artificial Sequence
  Synthetic
ttcctgacccuagacctttucct

SEQ ID NO: 6581 - DNA, 33 bp, Artificial Sequence
  Synthetic
tatggtaagtttcaagaauacatcatacctgua

SEQ ID NO: 6582 - DNA, 22 bp, Artificial Sequence
  Synthetic
caagacagcaagutcgtgctut

SEQ ID NO: 6583 - DNA, 26 bp, Artificial Sequence
  Synthetic
aaacagcttcucaccttgaataauca

SEQ ID NO: 6584 - DNA, 26 bp, Artificial Sequence
  Synthetic
tcacttcttccautgcatctttcuca

SEQ ID NO: 6585 - DNA, 30 bp, Artificial Sequence
  Synthetic
actgtatgttagcuctttcagatttactut

SEQ ID NO: 6586 - DNA, 22 bp, Artificial Sequence
  Synthetic
tccattctaggacutgccccut

SEQ ID NO: 6587 - DNA, 26 bp, Artificial Sequence
  Synthetic
agtaagaaggccugatttggattcug

SEQ ID NO: 6588 - DNA, 32 bp, Artificial Sequence
  Synthetic
ttttatcagatgucttctcctaattgugagat

SEQ ID NO: 6589 - DNA, 28 bp, Artificial Sequence
  Synthetic
ctctttttgcagutcttttggtcaucaa

SEQ ID NO: 6590 - DNA, 28 bp, Artificial Sequence
  Synthetic
gctgacgaagaacutgcattgataaaua

SEQ ID NO: 6591 - DNA, 24 bp, Artificial Sequence
  Synthetic
agtacaacgucgtttcagtcugag

SEQ ID NO: 6592 - DNA, 29 bp, Artificial Sequence
  Synthetic
cgtcgtagaagaautagagtagaagtugt

SEQ ID NO: 6593 - DNA, 20 bp, Artificial Sequence
  Synthetic
ccaacgcggcgutaaggaua

SEQ ID NO: 6594 - DNA, 21 bp, Artificial Sequence
  Synthetic
aggactuagcgtccagugact

SEQ ID NO: 6595 - DNA, 27 bp, Artificial Sequence
  Synthetic
cgcaggaaaucaagacaaaaatcacut

SEQ ID NO: 6596 - DNA, 28 bp, Artificial Sequence
  Synthetic
catggtgcugtgattttatcttuacagg

SEQ ID NO: 6597 - DNA, 28 bp, Artificial Sequence
  Synthetic
cttggtgaacuctttcatatcagucaag

SEQ ID NO: 6598 - DNA, 27 bp, Artificial Sequence
  Synthetic
ccagcauatagaacatguccaaaagga

SEQ ID NO: 6599 - DNA, 24 bp, Artificial Sequence
  Synthetic
tgaagtgtctucagagaccacuct

SEQ ID NO: 6600 - DNA, 21 bp, Artificial Sequence
  Synthetic
cctgcugggaagtagcucaga

SEQ ID NO: 6601 - DNA, 24 bp, Artificial Sequence
  Synthetic
cagcacacacutttacatctucgt

SEQ ID NO: 6602 - DNA, 22 bp, Artificial Sequence
  Synthetic
ggutagacatagugacgcacct

SEQ ID NO: 6603 - DNA, 21 bp, Artificial Sequence
  Synthetic
gcaaagttcgutctgctgcuc

SEQ ID NO: 6604 - DNA, 24 bp, Artificial Sequence
  Synthetic
aagctcttgaugattgcaggauca

SEQ ID NO: 6605 - DNA, 22 bp, Artificial Sequence
  Synthetic
ttcctctucgccttgttcugag

SEQ ID NO: 6606 - DNA, 23 bp, Artificial Sequence
  Synthetic
gagutggaaactcuggagagcaa

SEQ ID NO: 6607 - DNA, 23 bp, Artificial Sequence
  Synthetic
gggtcugaagaaggtgguaaagg

SEQ ID NO: 6608 - DNA, 25 bp, Artificial Sequence
  Synthetic
gttacuctttaggatuggaccggaa

SEQ ID NO: 6609 - DNA, 27 bp, Artificial Sequence
  Synthetic
cttacgagaatuttaggagaggtucca

SEQ ID NO: 6610 - DNA, 24 bp, Artificial Sequence
  Synthetic
acagggaauggaatcaagaauggg

SEQ ID NO: 6611 - DNA, 28 bp, Artificial Sequence
  Synthetic
cgagutgctttaauacaggaaacagaga

SEQ ID NO: 6612 - DNA, 26 bp, Artificial Sequence
  Synthetic
cagcgaaauagaagcagtttctgtug

SEQ ID NO: 6613 - DNA, 26 bp, Artificial Sequence
  Synthetic
cctctttcttutcaggcttgaugact

SEQ ID NO: 6614 - DNA, 23 bp, Artificial Sequence
  Synthetic
gauggagggaaagagaagauggt

SEQ ID NO: 6615 - DNA, 29 bp, Artificial Sequence
  Synthetic
cgacaaattcatuacaaatggctgtcaua

SEQ ID NO: 6616 - DNA, 22 bp, Artificial Sequence
  Synthetic
tggaagugggcagagcagtaua

SEQ ID NO: 6617 - DNA, 21 bp, Artificial Sequence
  Synthetic
tgaaggcacccutgaaccauc

SEQ ID NO: 6618 - DNA, 26 bp, Artificial Sequence
  Synthetic
tgaaggaaagacacuagaagtuccca

SEQ ID NO: 6619 - DNA, 25 bp, Artificial Sequence
  Synthetic
gaccagagaucgtgttggacatuag

SEQ ID NO: 6620 - DNA, 31 bp, Artificial Sequence
  Synthetic
tgttatcaaccaaacuttaaattctgcctuc

SEQ ID NO: 6621 - DNA, 24 bp, Artificial Sequence
  Synthetic
aaagctaaucaacctcaggtuccc

SEQ ID NO: 6622 - DNA, 25 bp, Artificial Sequence
  Synthetic
ctaaatttggcaguttctggtucca

SEQ ID NO: 6623 - DNA, 27 bp, Artificial Sequence
  Synthetic
ggtattgtuggctcccttuagaaagaa

SEQ ID NO: 6624 - DNA, 23 bp, Artificial Sequence
  Synthetic
cucaggagagacagcttugaagt

SEQ ID NO: 6625 - DNA, 25 bp, Artificial Sequence
  Synthetic
gagatgcgatuttggactaccucat

SEQ ID NO: 6626 - DNA, 28 bp, Artificial Sequence
  Synthetic
tgattcagtgtuttatctgcatcuggat

SEQ ID NO: 6627 - DNA, 24 bp, Artificial Sequence
  Synthetic
cctacucgggagaattucaacagc

SEQ ID NO: 6628 - DNA, 22 bp, Artificial Sequence
  Synthetic
gcatcccaagagcugtagucaa

SEQ ID NO: 6629 - DNA, 29 bp, Artificial Sequence
  Synthetic
ggtcaggagcutttgtaaagaaaatcuct

SEQ ID NO: 6630 - DNA, 24 bp, Artificial Sequence
  Synthetic
cauaaccaggaggaagucaatuca

SEQ ID NO: 6631 - DNA, 30 bp, Artificial Sequence
  Synthetic
aattccagcagugatcatttatggauaagt

SEQ ID NO: 6632 - DNA, 32 bp, Artificial Sequence
  Synthetic
gtagatttgttagcauttccatcaaggtatut

SEQ ID NO: 6633 - DNA, 28 bp, Artificial Sequence
  Synthetic
gacttttgccaaggaaaucagctaaaut

SEQ ID NO: 6634 - DNA, 32 bp, Artificial Sequence
  Synthetic
aattgtgctgtgcutacagtaattatcattut

SEQ ID NO: 6635 - DNA, 22 bp, Artificial Sequence
  Synthetic
gctctcagccuagctgtttuga

SEQ ID NO: 6636 - DNA, 22 bp, Artificial Sequence
  Synthetic
cactgctuaaaggaagcgctut

SEQ ID NO: 6637 - DNA, 27 bp, Artificial Sequence
  Synthetic
ggtttttggagaaucacugtgaataug

SEQ ID NO: 6638 - DNA, 30 bp, Artificial Sequence
  Synthetic
aatgataacggcaucttggtaatcttcuaa

SEQ ID NO: 6639 - DNA, 28 bp, Artificial Sequence
  Synthetic
actccagcactutggatattgacttuaa

SEQ ID NO: 6640 - DNA, 28 bp, Artificial Sequence
  Synthetic
accagacttctucaactcaatggataug

SEQ ID NO: 6641 - DNA, 29 bp, Artificial Sequence
  Synthetic
tatttctccacuagaaagcatcatttcug

SEQ ID NO: 6642 - DNA, 31 bp, Artificial Sequence
  Synthetic
tcatgcaaatcaagcucctcttcatattuaa

SEQ ID NO: 6643 - DNA, 28 bp, Artificial Sequence
  Synthetic
cttttccagguccttctaacatagtuct

SEQ ID NO: 6644 - DNA, 25 bp, Artificial Sequence
  Synthetic
agacttaaacugtgcaacatuccca

SEQ ID NO: 6645 - DNA, 25 bp, Artificial Sequence
  Synthetic
gactgacatugatcctgtcauggat

SEQ ID NO: 6646 - DNA, 27 bp, Artificial Sequence
  Synthetic
tgcattttggtauatcaacaccctcut

SEQ ID NO: 6647 - DNA, 31 bp, Artificial Sequence
  Synthetic
agaaattttcttagaagugcttttcttggug

SEQ ID NO: 6648 - DNA, 30 bp, Artificial Sequence
  Synthetic
gaaaatttgtctcuggcttctctttttcut

SEQ ID NO: 6649 - DNA, 28 bp, Artificial Sequence
  Synthetic
caaactgctcgaaaucttacgcaaauat

SEQ ID NO: 6650 - DNA, 33 bp, Artificial Sequence
  Synthetic
gctttcaaaatataaucactatacctactuggt

SEQ ID NO: 6651 - DNA, 28 bp, Artificial Sequence
  Synthetic
atttactgacagaagugggctttaugaa

SEQ ID NO: 6652 - DNA, 21 bp, Artificial Sequence
  Synthetic
gggtgguctaggatugcaaga

SEQ ID NO: 6653 - DNA, 31 bp, Artificial Sequence
  Synthetic
gtgaatgctatguttgtttactgatgtugat

SEQ ID NO: 6654 - DNA, 23 bp, Artificial Sequence
  Synthetic
tctccccugatctgauaggacag

SEQ ID NO: 6655 - DNA, 25 bp, Artificial Sequence
  Synthetic
ccatgtttcuaggttgaactgctug

SEQ ID NO: 6656 - DNA, 23 bp, Artificial Sequence
  Synthetic
cctgctcgautttgacgtcgtua

SEQ ID NO: 6657 - DNA, 21 bp, Artificial Sequence
  Synthetic
cagaucggcaaggaggtguac

SEQ ID NO: 6658 - DNA, 18 bp, Artificial Sequence
  Synthetic
gtacucgcacgtgucgct

SEQ ID NO: 6659 - DNA, 17 bp, Artificial Sequence
  Synthetic
agccugcgcttcuccac

SEQ ID NO: 6660 - DNA, 18 bp, Artificial Sequence
  Synthetic
gctcagcuccgaguccat

SEQ ID NO: 6661 - DNA, 17 bp, Artificial Sequence
  Synthetic
cggccgacggugactuc

SEQ ID NO: 6662 - DNA, 18 bp, Artificial Sequence
  Synthetic
cgcacgacutgctctugg

SEQ ID NO: 6663 - DNA, 17 bp, Artificial Sequence
  Synthetic
cctaugcaccggcucct

SEQ ID NO: 6664 - DNA, 18 bp, Artificial Sequence
  Synthetic
tcaugcgcagcaggtuga

SEQ ID NO: 6665 - DNA, 20 bp, Artificial Sequence
  Synthetic
gcttccgcauctaccuggag

SEQ ID NO: 6666 - DNA, 22 bp, Artificial Sequence
  Synthetic
acaacugacactggcauccaaa

SEQ ID NO: 6667 - DNA, 20 bp, Artificial Sequence
  Synthetic
tcctcccacccucactcauc

SEQ ID NO: 6668 - DNA, 20 bp, Artificial Sequence
  Synthetic
cutgtcauagcaggcaccca

SEQ ID NO: 6669 - DNA, 23 bp, Artificial Sequence
  Synthetic
guctggagauagaggagccaagt

SEQ ID NO: 6670 - DNA, 23 bp, Artificial Sequence
  Synthetic
tcugagtguggagagaaaaggga

SEQ ID NO: 6671 - DNA, 19 bp, Artificial Sequence
  Synthetic
gtcacgucggagacugaca

SEQ ID NO: 6672 - DNA, 25 bp, Artificial Sequence
  Synthetic
atgaggatgagcucaaaaagctuct

SEQ ID NO: 6673 - DNA, 18 bp, Artificial Sequence
  Synthetic
cccttgaugccgagucct

SEQ ID NO: 6674 - DNA, 21 bp, Artificial Sequence
  Synthetic
cttctccgagugcaggtaguc

SEQ ID NO: 6675 - DNA, 17 bp, Artificial Sequence
  Synthetic
cggctgugcctcaggut

SEQ ID NO: 6676 - DNA, 18 bp, Artificial Sequence
  Synthetic
gcctguggccttctccut

SEQ ID NO: 6677 - DNA, 17 bp, Artificial Sequence
  Synthetic
gaccagcugggcacugt

SEQ ID NO: 6678 - DNA, 19 bp, Artificial Sequence
  Synthetic
gccgcuccttguagccaat

SEQ ID NO: 6679 - DNA, 20 bp, Artificial Sequence
  Synthetic
cgaggguctgacggguagag

SEQ ID NO: 6680 - DNA, 26 bp, Artificial Sequence
  Synthetic
tctggtcttcutttctcctacuccat

SEQ ID NO: 6681 - DNA, 23 bp, Artificial Sequence
  Synthetic
ggtcagaagutggugggagaaag

SEQ ID NO: 6682 - DNA, 19 bp, Artificial Sequence
  Synthetic
gggtccugcacctccatut

SEQ ID NO: 6683 - DNA, 19 bp, Artificial Sequence
  Synthetic
cccuggccaagcttttucc

SEQ ID NO: 6684 - DNA, 21 bp, Artificial Sequence
  Synthetic
gttttagcccagugcttcgut

SEQ ID NO: 6685 - DNA, 23 bp, Artificial Sequence
  Synthetic
tccctcaggagaaugaaggtuca

SEQ ID NO: 6686 - DNA, 20 bp, Artificial Sequence
  Synthetic
cagagaccucctgctccuga

SEQ ID NO: 6687 - DNA, 23 bp, Artificial Sequence
  Synthetic
ggatacatcccutcctcctccug

SEQ ID NO: 6688 - DNA, 22 bp, Artificial Sequence
  Synthetic
ccacctcttucacaaccacgua

SEQ ID NO: 6689 - DNA, 26 bp, Artificial Sequence
  Synthetic
aucttcatccucaacagaaccagaag

SEQ ID NO: 6690 - DNA, 25 bp, Artificial Sequence
  Synthetic
ggagagggtcugggaaggttauaaa

SEQ ID NO: 6691 - DNA, 21 bp, Artificial Sequence
  Synthetic
catccaaacugggagtgcuct

SEQ ID NO: 6692 - DNA, 22 bp, Artificial Sequence
  Synthetic
gtgagatggaugctgtaggcut

SEQ ID NO: 6693 - DNA, 20 bp, Artificial Sequence
  Synthetic
gggaaatgutgccccuggag

SEQ ID NO: 6694 - DNA, 23 bp, Artificial Sequence
  Synthetic
ggtctuccaaagaaaccctucca

SEQ ID NO: 6695 - DNA, 25 bp, Artificial Sequence
  Synthetic
acaggutctatggttuccaacagag

SEQ ID NO: 6696 - DNA, 27 bp, Artificial Sequence
  Synthetic
ccatagtuccgagagaaauttctgtua

SEQ ID NO: 6697 - DNA, 23 bp, Artificial Sequence
  Synthetic
ggcuaagttuagaggccaagagg

SEQ ID NO: 6698 - DNA, 20 bp, Artificial Sequence
  Synthetic
gutttgucacgggcagaagg

SEQ ID NO: 6699 - DNA, 28 bp, Artificial Sequence
  Synthetic
caaaacaacatugggatgagatucaaca

SEQ ID NO: 6700 - DNA, 21 bp, Artificial Sequence
  Synthetic
ggatcatguccacgctucagg

SEQ ID NO: 6701 - DNA, 21 bp, Artificial Sequence
  Synthetic
tcuctcatggauccacaccca

SEQ ID NO: 6702 - DNA, 25 bp, Artificial Sequence
  Synthetic
atctccagtgautgtttggcaacua

SEQ ID NO: 6703 - DNA, 28 bp, Artificial Sequence
  Synthetic
cttggttgtgcaaguaactgtacatauc

SEQ ID NO: 6704 - DNA, 26 bp, Artificial Sequence
  Synthetic
gaggaggaaguttttgagtcttcugt

SEQ ID NO: 6705 - DNA, 27 bp, Artificial Sequence
  Synthetic
cgtttaacaaacutaccctugagagca

SEQ ID NO: 6706 - DNA, 21 bp, Artificial Sequence
  Synthetic
ctgatagctguacccgctgug

SEQ ID NO: 6707 - DNA, 25 bp, Artificial Sequence
  Synthetic
aactgccttugggaagtagaauagg

SEQ ID NO: 6708 - DNA, 22 bp, Artificial Sequence
  Synthetic
gagatgagcuccaaaggcagut

SEQ ID NO: 6709 - DNA, 26 bp, Artificial Sequence
  Synthetic
caatctgtttcugcatttctgctcuc

SEQ ID NO: 6710 - DNA, 25 bp, Artificial Sequence
  Synthetic
cagttctttcugtgggtatugagca

SEQ ID NO: 6711 - DNA, 27 bp, Artificial Sequence
  Synthetic
tcttctcaaggcugtcaaatacaacuc

SEQ ID NO: 6712 - DNA, 23 bp, Artificial Sequence
  Synthetic
aagacacutgtgacttugccaga

SEQ ID NO: 6713 - DNA, 23 bp, Artificial Sequence
  Synthetic
gctggtccucagaggtcttuaca

SEQ ID NO: 6714 - DNA, 18 bp, Artificial Sequence
  Synthetic
ctttcccucccacuggca

SEQ ID NO: 6715 - DNA, 26 bp, Artificial Sequence
  Synthetic
tctcaattuccaacttaggcatuggt

SEQ ID NO: 6716 - DNA, 28 bp, Artificial Sequence
  Synthetic
cagccataaccauagacttaacugaact

SEQ ID NO: 6717 - DNA, 29 bp, Artificial Sequence
  Synthetic
acagctgcaaaaaugatcaaaatctucat

SEQ ID NO: 6718 - DNA, 26 bp, Artificial Sequence
  Synthetic
tggagatgcuacacaaagcagaaaua

SEQ ID NO: 6719 - DNA, 28 bp, Artificial Sequence
  Synthetic
aagtggcaacuatccatgtttuaagaga

SEQ ID NO: 6720 - DNA, 29 bp, Artificial Sequence
  Synthetic
ttcatatgcctaaucttgatggaaauggt

SEQ ID NO: 6721 - DNA, 22 bp, Artificial Sequence
  Synthetic
accccatucatttctgcugcaa

SEQ ID NO: 6722 - DNA, 31 bp, Artificial Sequence
  Synthetic
tcaacacagacuataaaucaacaccaaaaga

SEQ ID NO: 6723 - DNA, 28 bp, Artificial Sequence
  Synthetic
cttaccttccauttctgactttcucact

SEQ ID NO: 6724 - DNA, 29 bp, Artificial Sequence
  Synthetic
cctgacatcaagucacactgtaatgatua

SEQ ID NO: 6725 - DNA, 23 bp, Artificial Sequence
  Synthetic
cattcttgagucctcggtgugaa

SEQ ID NO: 6726 - DNA, 28 bp, Artificial Sequence
  Synthetic
ggctcttuagagaaaaagatgaugggat

SEQ ID NO: 6727 - DNA, 28 bp, Artificial Sequence
  Synthetic
caaagtgtggtuaaatgtcaagtccaua

SEQ ID NO: 6728 - DNA, 22 bp, Artificial Sequence
  Synthetic
gggcagaaacucacatagtcuc

SEQ ID NO: 6729 - DNA, 28 bp, Artificial Sequence
  Synthetic
ggtcatttccauggcatcattacaacua

SEQ ID NO: 6730 - DNA, 28 bp, Artificial Sequence
  Synthetic
acattaccaagagucatacagtugcaat

SEQ ID NO: 6731 - DNA, 26 bp, Artificial Sequence
  Synthetic
tcattttcccaucttctgatgtgguc

SEQ ID NO: 6732 - DNA, 23 bp, Artificial Sequence
  Synthetic
tgaaccatutcagcgaucagaca

SEQ ID NO: 6733 - DNA, 25 bp, Artificial Sequence
  Synthetic
tggcttgttgcuatctcctgatuac

SEQ ID NO: 6734 - DNA, 31 bp, Artificial Sequence
  Synthetic
caagaugattatatgtucagaggaagagcaa

SEQ ID NO: 6735 - DNA, 27 bp, Artificial Sequence
  Synthetic
ctggccaguagtgtgttctaaatuagt

SEQ ID NO: 6736 - DNA, 28 bp, Artificial Sequence
  Synthetic
agtgttgguggaccaaaaattgauaaga

SEQ ID NO: 6737 - DNA, 19 bp, Artificial Sequence
  Synthetic
tccugccaauggcaccaaa

SEQ ID NO: 6738 - DNA, 22 bp, Artificial Sequence
  Synthetic
gccuaggaacaccaacagugat

SEQ ID NO: 6739 - DNA, 27 bp, Artificial Sequence
  Synthetic
cccctattatuagaccattccuccaga

SEQ ID NO: 6740 - DNA, 23 bp, Artificial Sequence
  Synthetic
gccctggaggauaaagaggacut

SEQ ID NO: 6741 - DNA, 25 bp, Artificial Sequence
  Synthetic
auagctatttcattuggcaggagag

SEQ ID NO: 6742 - DNA, 29 bp, Artificial Sequence
  Synthetic
aacaactcttugctgctactaauagaact

SEQ ID NO: 6743 - DNA, 22 bp, Artificial Sequence
  Synthetic
acagctttcaacutgcgcttut

SEQ ID NO: 6744 - DNA, 24 bp, Artificial Sequence
  Synthetic
ctctctgctccutgtcctttgtua

SEQ ID NO: 6745 - DNA, 28 bp, Artificial Sequence
  Synthetic
tcatctcccccagaucttgactatauac

SEQ ID NO: 6746 - DNA, 29 bp, Artificial Sequence
  Synthetic
gaaaacaagcccaaaauactcaataguga

SEQ ID NO: 6747 - DNA, 25 bp, Artificial Sequence
  Synthetic
ttctccagcautgacatgagttuga

SEQ ID NO: 6748 - DNA, 30 bp, Artificial Sequence
  Synthetic
gcaatgcuaaagatagtagagaugaggaaa

SEQ ID NO: 6749 - DNA, 27 bp, Artificial Sequence
  Synthetic
actacaatttctcutgttgggcaauct

SEQ ID NO: 6750 - DNA, 25 bp, Artificial Sequence
  Synthetic
aaaggcctugattgagacauaccaa

SEQ ID NO: 6751 - DNA, 28 bp, Artificial Sequence
  Synthetic
ccgatcttgtgucgtatcactaaactua

SEQ ID NO: 6752 - DNA, 24 bp, Artificial Sequence
  Synthetic
tggttttguctgcaagauaccagt

SEQ ID NO: 6753 - DNA, 28 bp, Artificial Sequence
  Synthetic
gacgagccucacaatcttctctauaaat

SEQ ID NO: 6754 - DNA, 29 bp, Artificial Sequence
  Synthetic
ctgaaggccuttggaatttatctuaacaa

SEQ ID NO: 6755 - DNA, 25 bp, Artificial Sequence
  Synthetic
ctgtctcaaautacctgagcugact

SEQ ID NO: 6756 - DNA, 23 bp, Artificial Sequence
  Synthetic
actgttugggtggtaucagaagt

SEQ ID NO: 6757 - DNA, 30 bp, Artificial Sequence
  Synthetic
tgtcataaacaaaggugaatacagctugat

SEQ ID NO: 6758 - DNA, 22 bp, Artificial Sequence
  Synthetic
ccgcagcauttgcaaagttuga

SEQ ID NO: 6759 - DNA, 23 bp, Artificial Sequence
  Synthetic
agaaguagcccagagtctuaccc

SEQ ID NO: 6760 - DNA, 30 bp, Artificial Sequence
  Synthetic
tctgtaacuaatgtgtcaguagcaaaaaca

SEQ ID NO: 6761 - DNA, 21 bp, Artificial Sequence
  Synthetic
cctgtccugctggagcattut

SEQ ID NO: 6762 - DNA, 23 bp, Artificial Sequence
  Synthetic
gttacacuaccccaaagucacut

SEQ ID NO: 6763 - DNA, 24 bp, Artificial Sequence
  Synthetic
tctattugctcgcttucagaggag

SEQ ID NO: 6764 - DNA, 29 bp, Artificial Sequence
  Synthetic
ctgaattacatucaactgagaaagtucca

SEQ ID NO: 6765 - DNA, 28 bp, Artificial Sequence
  Synthetic
tttaccuaaggcatttugaagaggaaga

SEQ ID NO: 6766 - DNA, 30 bp, Artificial Sequence
  Synthetic
cctgatgataaacugaaacttttggatugt

SEQ ID NO: 6767 - DNA, 25 bp, Artificial Sequence
  Synthetic
cattttgcccugtccattttucact

SEQ ID NO: 6768 - DNA, 27 bp, Artificial Sequence
  Synthetic
aaggcctttatucaatacccattuaca

SEQ ID NO: 6769 - DNA, 30 bp, Artificial Sequence
  Synthetic
gcagtatgttuattctgatcttucacagca

SEQ ID NO: 6770 - DNA, 24 bp, Artificial Sequence
  Synthetic
ggcaagggaaaugctaaagctgua

SEQ ID NO: 6771 - DNA, 24 bp, Artificial Sequence
  Synthetic
ctttggaaacgcucatgttucaga

SEQ ID NO: 6772 - DNA, 25 bp, Artificial Sequence
  Synthetic
gtcactgttgucatttctccctuga

SEQ ID NO: 6773 - DNA, 31 bp, Artificial Sequence
  Synthetic
aaggttatucagaggacugaaatttaatugt

SEQ ID NO: 6774 - DNA, 21 bp, Artificial Sequence
  Synthetic
tctuacggccacagctaaucc

SEQ ID NO: 6775 - DNA, 25 bp, Artificial Sequence
  Synthetic
aggtgattcuaacatgtagcagcuc

SEQ ID NO: 6776 - DNA, 25 bp, Artificial Sequence
  Synthetic
ttccttcaaguctgtgccttaugaa

SEQ ID NO: 6777 - DNA, 23 bp, Artificial Sequence
  Synthetic
cagctcugccagattcttgguag

SEQ ID NO: 6778 - DNA, 30 bp, Artificial Sequence
  Synthetic
ggattauaaaacaagagatgtgacugacga

SEQ ID NO: 6779 - DNA, 25 bp, Artificial Sequence
  Synthetic
ccaagaaaatgucgaccagcataut

SEQ ID NO: 6780 - DNA, 25 bp, Artificial Sequence
  Synthetic
gatctgcttatucacgacacaaugc

SEQ ID NO: 6781 - DNA, 22 bp, Artificial Sequence
  Synthetic
tgggctttauttccgagcauca

SEQ ID NO: 6782 - DNA, 28 bp, Artificial Sequence
  Synthetic
tggtgttacugaagacaaacuggaaaaa

SEQ ID NO: 6783 - DNA, 26 bp, Artificial Sequence
  Synthetic
tcacacaacugcatccttctaatuca

SEQ ID NO: 6784 - DNA, 23 bp, Artificial Sequence
  Synthetic
gcaggtugagaggaaggtcatuc

SEQ ID NO: 6785 - DNA, 24 bp, Artificial Sequence
  Synthetic
gaagtatgugaggctgaacuggat

SEQ ID NO: 6786 - DNA, 22 bp, Artificial Sequence
  Synthetic
ctgtgaggugactgagcatugt

SEQ ID NO: 6787 - DNA, 21 bp, Artificial Sequence
  Synthetic
ctcttcttcuccagccagguc

SEQ ID NO: 6788 - DNA, 24 bp, Artificial Sequence
  Synthetic
actcacctugggctttcattgaut

SEQ ID NO: 6789 - DNA, 21 bp, Artificial Sequence
  Synthetic
aaggcuaggttggaucaggga

SEQ ID NO: 6790 - DNA, 22 bp, Artificial Sequence
  Synthetic
agaaucgcaaacacaggtgcua

SEQ ID NO: 6791 - DNA, 21 bp, Artificial Sequence
  Synthetic
agccucagagattugccagag

SEQ ID NO: 6792 - DNA, 23 bp, Artificial Sequence
  Synthetic
ggtaacccucaccctaaatcugg

SEQ ID NO: 6793 - DNA, 21 bp, Artificial Sequence
  Synthetic
agagagaucccgcatcacuca

SEQ ID NO: 6794 - DNA, 19 bp, Artificial Sequence
  Synthetic
gattgcugtgcugggcaaa

SEQ ID NO: 6795 - DNA, 19 bp, Artificial Sequence
  Synthetic
cctgcaggccauaggcauc

SEQ ID NO: 6796 - DNA, 22 bp, Artificial Sequence
  Synthetic
ctatttgagcugtccggctuct

SEQ ID NO: 6797 - DNA, 19 bp, Artificial Sequence
  Synthetic
cggcacaaaguagggcugt

SEQ ID NO: 6798 - DNA, 20 bp, Artificial Sequence
  Synthetic
agcttccucctgcaatgcut

SEQ ID NO: 6799 - DNA, 21 bp, Artificial Sequence
  Synthetic
cctccagccagutgtcauagg

SEQ ID NO: 6800 - DNA, 17 bp, Artificial Sequence
  Synthetic
gccucacgcctccugat

SEQ ID NO: 6801 - DNA, 18 bp, Artificial Sequence
  Synthetic
ctuccccaagccccucac

SEQ ID NO: 6802 - DNA, 22 bp, Artificial Sequence
  Synthetic
tgtgactgugactggaggtcut

SEQ ID NO: 6803 - DNA, 22 bp, Artificial Sequence
  Synthetic
gggtcccagaguctatacucac

SEQ ID NO: 6804 - DNA, 19 bp, Artificial Sequence
  Synthetic
gtggcttcuggaaggcuga

SEQ ID NO: 6805 - DNA, 19 bp, Artificial Sequence
  Synthetic
cccagacucccacacucac

SEQ ID NO: 6806 - DNA, 20 bp, Artificial Sequence
  Synthetic
tgagtucggcctactcucca

SEQ ID NO: 6807 - DNA, 20 bp, Artificial Sequence
  Synthetic
tcagtgucgagcagtuccag

SEQ ID NO: 6808 - DNA, 26 bp, Artificial Sequence
  Synthetic
gctgaagauagaaggagtugaacacc

SEQ ID NO: 6809 - DNA, 27 bp, Artificial Sequence
  Synthetic
tcagtcaagaagucaaccacaagtauc

SEQ ID NO: 6810 - DNA, 28 bp, Artificial Sequence
  Synthetic
tcatgtggaaagagugatgagaaatcut

SEQ ID NO: 6811 - DNA, 28 bp, Artificial Sequence
  Synthetic
gtgcaactaagutacagtagatcucaca

SEQ ID NO: 6812 - DNA, 28 bp, Artificial Sequence
  Synthetic
tcttgttttagacaauccgccattauct

SEQ ID NO: 6813 - DNA, 29 bp, Artificial Sequence
  Synthetic
gctctcagagautccagaagatuaagaaa

SEQ ID NO: 6814 - DNA, 26 bp, Artificial Sequence
  Synthetic
tatgtactgaugctcgtgttatcugt

SEQ ID NO: 6815 - DNA, 20 bp, Artificial Sequence
  Synthetic
agtcagtgccucccacttug

SEQ ID NO: 6816 - DNA, 29 bp, Artificial Sequence
  Synthetic
ggaaggaagacagutcaaagagaatuagg

SEQ ID NO: 6817 - DNA, 23 bp, Artificial Sequence
  Synthetic
cttcctctuccagttctucaggt

SEQ ID NO: 6818 - DNA, 22 bp, Artificial Sequence
  Synthetic
gcgctcuaggttgctgattuca

SEQ ID NO: 6819 - DNA, 23 bp, Artificial Sequence
  Synthetic
cutccttttcttuccgcaaagca

SEQ ID NO: 6820 - DNA, 25 bp, Artificial Sequence
  Synthetic
agttgtggauatgcgtgaattucga

SEQ ID NO: 6821 - DNA, 23 bp, Artificial Sequence
  Synthetic
ggccgttattuaaagagccgaut

SEQ ID NO: 6822 - DNA, 25 bp, Artificial Sequence
  Synthetic
agagaagtauaatcctgguccccaa

SEQ ID NO: 6823 - DNA, 21 bp, Artificial Sequence
  Synthetic
gtttggcauttgcagcatucc

SEQ ID NO: 6824 - DNA, 31 bp, Artificial Sequence
  Synthetic
gttcttaaggccaaauttgtatcgttatugt

SEQ ID NO: 6825 - DNA, 26 bp, Artificial Sequence
  Synthetic
caccacagatucagacttggactaug

SEQ ID NO: 6826 - DNA, 27 bp, Artificial Sequence
  Synthetic
cacccccttcaucatcataagtaauga

SEQ ID NO: 6827 - DNA, 27 bp, Artificial Sequence
  Synthetic
agaagaacccaggaauactggactuaa

SEQ ID NO: 6828 - DNA, 24 bp, Artificial Sequence
  Synthetic
tgctatgcaaugtaaacgccatut

SEQ ID NO: 6829 - DNA, 20 bp, Artificial Sequence
  Synthetic
caaggaugacacggccaaug

SEQ ID NO: 6830 - DNA, 30 bp, Artificial Sequence
  Synthetic
ggtaaagtagaaucaaaaccaugaggagaa

SEQ ID NO: 6831 - DNA, 27 bp, Artificial Sequence
  Synthetic
cactgaccucgacagatttttcacuat

SEQ ID NO: 6832 - DNA, 21 bp, Artificial Sequence
  Synthetic
gtgtcctugaaagggccatug

SEQ ID NO: 6833 - DNA, 28 bp, Artificial Sequence
  Synthetic
caatcgggtctutctcttccattatuct

SEQ ID NO: 6834 - DNA, 25 bp, Artificial Sequence
  Synthetic
ggaauaggtuagaggagggagagag

SEQ ID NO: 6835 - DNA, 23 bp, Artificial Sequence
  Synthetic
caaggacaugggtggacataugg

SEQ ID NO: 6836 - DNA, 17 bp, Artificial Sequence
  Synthetic
aggccucccacaccgua

SEQ ID NO: 6837 - DNA, 18 bp, Artificial Sequence
  Synthetic
accaaucggccacuggag

SEQ ID NO: 6838 - DNA, 17 bp, Artificial Sequence
  Synthetic
gcaccugcccctcctug

SEQ ID NO: 6839 - DNA, 21 bp, Artificial Sequence
  Synthetic
tctcctgugcctaccacguaa

SEQ ID NO: 6840 - DNA, 29 bp, Artificial Sequence
  Synthetic
gcataatttatgtaaugtcctgctccuga

SEQ ID NO: 6841 - DNA, 22 bp, Artificial Sequence
  Synthetic
gctaggtgtutgtcgctgtuct

SEQ ID NO: 6842 - DNA, 28 bp, Artificial Sequence
  Synthetic
cgaatttgaagauagagacaggtcucat

SEQ ID NO: 6843 - DNA, 26 bp, Artificial Sequence
  Synthetic
agcattaugcacaaacaucacaaaca

SEQ ID NO: 6844 - DNA, 18 bp, Artificial Sequence
  Synthetic
agggaacccuccgaguca

SEQ ID NO: 6845 - DNA, 18 bp, Artificial Sequence
  Synthetic
cucacctcugcccaggac

SEQ ID NO: 6846 - DNA, 25 bp, Artificial Sequence
  Synthetic
ggactccaccuacagaaagtttucc

SEQ ID NO: 6847 - DNA, 22 bp, Artificial Sequence
  Synthetic
cctggatuagacagcgcacuaa

SEQ ID NO: 6848 - DNA, 28 bp, Artificial Sequence
  Synthetic
ccccctgtuggtgtctttattatugaaa

SEQ ID NO: 6849 - DNA, 20 bp, Artificial Sequence
  Synthetic
gtggatgtuaccccggtguc

SEQ ID NO: 6850 - DNA, 22 bp, Artificial Sequence
  Synthetic
gctuacaccatccucagccaag

SEQ ID NO: 6851 - DNA, 23 bp, Artificial Sequence
  Synthetic
ccacgggautgagctaauacaca

SEQ ID NO: 6852 - DNA, 21 bp, Artificial Sequence
  Synthetic
gtgggaggcugtauacaccat

SEQ ID NO: 6853 - DNA, 22 bp, Artificial Sequence
  Synthetic
caagggtaugaacagctgugag

SEQ ID NO: 6854 - DNA, 25 bp, Artificial Sequence
  Synthetic
ggtcctattcuaaaagccagagcut

SEQ ID NO: 6855 - DNA, 22 bp, Artificial Sequence
  Synthetic
ctgtgtacgugctgttctucac

SEQ ID NO: 6856 - DNA, 23 bp, Artificial Sequence
  Synthetic
tgatgcagaccutcctcccaaua

SEQ ID NO: 6857 - DNA, 22 bp, Artificial Sequence
  Synthetic
catggcagtuggagcaaagtug

SEQ ID NO: 6858 - DNA, 22 bp, Artificial Sequence
  Synthetic
ggtggucaaagagcccttacug

SEQ ID NO: 6859 - DNA, 29 bp, Artificial Sequence
  Synthetic
aaatgcctacctcutactaatcattgcut

SEQ ID NO: 6860 - DNA, 21 bp, Artificial Sequence
  Synthetic
gttccgaagcugctagtcuga

SEQ ID NO: 6861 - DNA, 20 bp, Artificial Sequence
  Synthetic
ctctcgagucccctagucgt

SEQ ID NO: 6862 - DNA, 20 bp, Artificial Sequence
  Synthetic
gctggtugatgaccgucagg

SEQ ID NO: 6863 - DNA, 20 bp, Artificial Sequence
  Synthetic
catgucggagcugcagaaag

SEQ ID NO: 6864 - DNA, 19 bp, Artificial Sequence
  Synthetic
cccagtggutgagctccuc

SEQ ID NO: 6865 - DNA, 17 bp, Artificial Sequence
  Synthetic
gggagugtctggugcgt

SEQ ID NO: 6866 - DNA, 17 bp, Artificial Sequence
  Synthetic
cgcugggcagggtucag

SEQ ID NO: 6867 - DNA, 21 bp, Artificial Sequence
  Synthetic
tgtccccggutcatcctaugt

SEQ ID NO: 6868 - DNA, 23 bp, Artificial Sequence
  Synthetic
gggttucgcattacctucaggaa

SEQ ID NO: 6869 - DNA, 23 bp, Artificial Sequence
  Synthetic
gctgatgtgaggugggttttcuc

SEQ ID NO: 6870 - DNA, 21 bp, Artificial Sequence
  Synthetic
gaggccugcggtttttgtuat

SEQ ID NO: 6871 - DNA, 27 bp, Artificial Sequence
  Synthetic
acagcgtgttcutcttattttgctuac

SEQ ID NO: 6872 - DNA, 18 bp, Artificial Sequence
  Synthetic
gtgcgtcugggacaugga

SEQ ID NO: 6873 - DNA, 19 bp, Artificial Sequence
  Synthetic
ctgguagaggcctgtccug

SEQ ID NO: 6874 - DNA, 21 bp, Artificial Sequence
  Synthetic
gctcccaugctctgcttgtut

SEQ ID NO: 6875 - DNA, 20 bp, Artificial Sequence
  Synthetic
gcaguggcggtcttctucag

SEQ ID NO: 6876 - DNA, 24 bp, Artificial Sequence
  Synthetic
cactgtgccaugtgatttacaguc

SEQ ID NO: 6877 - DNA, 23 bp, Artificial Sequence
  Synthetic
gcacagaccuctctctugagaca

SEQ ID NO: 6878 - DNA, 24 bp, Artificial Sequence
  Synthetic
aatgtcgauggaacatcagtcucc

SEQ ID NO: 6879 - DNA, 27 bp, Artificial Sequence
  Synthetic
gctcaagatagaucagtttctcctuca

SEQ ID NO: 6880 - DNA, 24 bp, Artificial Sequence
  Synthetic
caaagtgttcuactgctgggagut

SEQ ID NO: 6881 - DNA, 24 bp, Artificial Sequence
  Synthetic
tgtaccatttgutgctggtcugat

SEQ ID NO: 6882 - DNA, 30 bp, Artificial Sequence
  Synthetic
gaagaaaaucaaggagcuttagaaatgaut

SEQ ID NO: 6883 - DNA, 25 bp, Artificial Sequence
  Synthetic
ccattctccauttttagccctucca

SEQ ID NO: 6884 - DNA, 24 bp, Artificial Sequence
  Synthetic
gccuaaagcugcaagaaaaagcat

SEQ ID NO: 6885 - DNA, 19 bp, Artificial Sequence
  Synthetic
ccuggcagaccccactuac

SEQ ID NO: 6886 - DNA, 27 bp, Artificial Sequence
  Synthetic
agactgtattgccutaggtaactccut

SEQ ID NO: 6887 - DNA, 21 bp, Artificial Sequence
  Synthetic
tcccaatcauggcaagagcug

SEQ ID NO: 6888 - DNA, 32 bp, Artificial Sequence
  Synthetic
caagtatatgcuattttgaaguggaacaacat

SEQ ID NO: 6889 - DNA, 24 bp, Artificial Sequence
  Synthetic
tcatcuacctgcatuggagagaca

SEQ ID NO: 6890 - DNA, 25 bp, Artificial Sequence
  Synthetic
cttctccttaccaugtgctcttcut

SEQ ID NO: 6891 - DNA, 20 bp, Artificial Sequence
  Synthetic
agctggaagutggctgaugt

SEQ ID NO: 6892 - DNA, 25 bp, Artificial Sequence
  Synthetic
ggaatctctugttggcattugaagc

SEQ ID NO: 6893 - DNA, 27 bp, Artificial Sequence
  Synthetic
acgagaaactgtutatcagatggcaua

SEQ ID NO: 6894 - DNA, 18 bp, Artificial Sequence
  Synthetic
gcuccgccacctcuacca

SEQ ID NO: 6895 - DNA, 20 bp, Artificial Sequence
  Synthetic
tcttcugccacccacctgua

SEQ ID NO: 6896 - DNA, 21 bp, Artificial Sequence
  Synthetic
gggaaagggucctctgaucat

SEQ ID NO: 6897 - DNA, 24 bp, Artificial Sequence
  Synthetic
ctggttgttcutgtggaagatguc

SEQ ID NO: 6898 - DNA, 19 bp, Artificial Sequence
  Synthetic
cccttugcccaacagugac

SEQ ID NO: 6899 - DNA, 21 bp, Artificial Sequence
  Synthetic
gguagagcacatugggcacaa

SEQ ID NO: 6900 - DNA, 20 bp, Artificial Sequence
  Synthetic
cugcacaaccaagaggugac

SEQ ID NO: 6901 - DNA, 22 bp, Artificial Sequence
  Synthetic
gagggtcugaggaaggauagga

SEQ ID NO: 6902 - DNA, 21 bp, Artificial Sequence
  Synthetic
tgtcctguccccactccttua

SEQ ID NO: 6903 - DNA, 20 bp, Artificial Sequence
  Synthetic
cccctcttuctcagtgcuca

SEQ ID NO: 6904 - DNA, 18 bp, Artificial Sequence
  Synthetic
agacccccucaccacugt

SEQ ID NO: 6905 - DNA, 18 bp, Artificial Sequence
  Synthetic
cccuccacccagctcuga

SEQ ID NO: 6906 - DNA, 21 bp, Artificial Sequence
  Synthetic
caccccaaacuagcccucaat

SEQ ID NO: 6907 - DNA, 23 bp, Artificial Sequence
  Synthetic
cgcutgatgaggaucccaaagac

SEQ ID NO: 6908 - DNA, 20 bp, Artificial Sequence
  Synthetic
cccacgcucttctcacucat

SEQ ID NO: 6909 - DNA, 20 bp, Artificial Sequence
  Synthetic
cctccuagcaggagagggug

SEQ ID NO: 6910 - DNA, 23 bp, Artificial Sequence
  Synthetic
tgcuggtcaagagucccaaccat

SEQ ID NO: 6911 - DNA, 22 bp, Artificial Sequence
  Synthetic
gttctcccaugggcuagacacc

SEQ ID NO: 6912 - DNA, 20 bp, Artificial Sequence
  Synthetic
ctgggacuagcatgcugacc

SEQ ID NO: 6913 - DNA, 22 bp, Artificial Sequence
  Synthetic
ccaguacctggaugaccacaaa

SEQ ID NO: 6914 - DNA, 21 bp, Artificial Sequence
  Synthetic
gtgagugacccccatcaugac

SEQ ID NO: 6915 - DNA, 20 bp, Artificial Sequence
  Synthetic
ccattcccaggucaccauca

SEQ ID NO: 6916 - DNA, 19 bp, Artificial Sequence
  Synthetic
gcccaagacuctcucccca

SEQ ID NO: 6917 - DNA, 24 bp, Artificial Sequence
  Synthetic
cctggtcccaguaatagaggtugt

SEQ ID NO: 6918 - DNA, 20 bp, Artificial Sequence
  Synthetic
ctgtggcuctgtacctgugg

SEQ ID NO: 6919 - DNA, 21 bp, Artificial Sequence
  Synthetic
agcaatugggcagatgtguga

SEQ ID NO: 6920 - DNA, 26 bp, Artificial Sequence
  Synthetic
auactccactatguaagacaaaggct

SEQ ID NO: 6921 - DNA, 24 bp, Artificial Sequence
  Synthetic
cctctctctucctctcttctucca

SEQ ID NO: 6922 - DNA, 26 bp, Artificial Sequence
  Synthetic
agcagaugcaaggtattctguaaagg

SEQ ID NO: 6923 - DNA, 32 bp, Artificial Sequence
  Synthetic
gctagaggtaacucatgataatggaatattug

SEQ ID NO: 6924 - DNA, 29 bp, Artificial Sequence
  Synthetic
atgtaggatucagagtaaaatcaaagugt

SEQ ID NO: 6925 - DNA, 24 bp, Artificial Sequence
  Synthetic
acccatcucaagaggagctcatua

SEQ ID NO: 6926 - DNA, 23 bp, Artificial Sequence
  Synthetic
gccagaaccaccauctttcagua

SEQ ID NO: 6927 - DNA, 24 bp, Artificial Sequence
  Synthetic
cccgttcccutgatgtctacaaut

SEQ ID NO: 6928 - DNA, 22 bp, Artificial Sequence
  Synthetic
actctgagaggauagcccugag

SEQ ID NO: 6929 - DNA, 25 bp, Artificial Sequence
  Synthetic
aaagtaaatccagucctgccaauga

SEQ ID NO: 6930 - DNA, 32 bp, Artificial Sequence
  Synthetic
tgataataaattcucctctgtgttctuagaca

SEQ ID NO: 6931 - DNA, 27 bp, Artificial Sequence
  Synthetic
ccaagaaautagagtccucagaagaga

SEQ ID NO: 6932 - DNA, 32 bp, Artificial Sequence
  Synthetic
gtctgaactacttcutcatattcttgctttut

SEQ ID NO: 6933 - DNA, 27 bp, Artificial Sequence
  Synthetic
cagugatgaaaacatucaagcagaact

SEQ ID NO: 6934 - DNA, 30 bp, Artificial Sequence
  Synthetic
tggtggtatacgauatgggttttguaaaag

SEQ ID NO: 6935 - DNA, 29 bp, Artificial Sequence
  Synthetic
tggtcagaaagauaagccagttgataaug

SEQ ID NO: 6936 - DNA, 25 bp, Artificial Sequence
  Synthetic
ctgtggttaacutcatgtcccaaug

SEQ ID NO: 6937 - DNA, 25 bp, Artificial Sequence
  Synthetic
gutagcactcuagggaaggcaaaaa

SEQ ID NO: 6938 - DNA, 23 bp, Artificial Sequence
  Synthetic
gggaaagtaucgctgtcatguct

SEQ ID NO: 6939 - DNA, 32 bp, Artificial Sequence
  Synthetic
gatagttgttcuagcagtgaagagauaaagaa

SEQ ID NO: 6940 - DNA, 30 bp, Artificial Sequence
  Synthetic
aatcacctttugttttattctcaugaccac

SEQ ID NO: 6941 - DNA, 22 bp, Artificial Sequence
  Synthetic
acctacaucaggccttcaucct

SEQ ID NO: 6942 - DNA, 31 bp, Artificial Sequence
  Synthetic
ctgaagaaccagaauattcatctacctcaut

SEQ ID NO: 6943 - DNA, 31 bp, Artificial Sequence
  Synthetic
ggataacacuaaatagcagcatucagaaagt

SEQ ID NO: 6944 - DNA, 32 bp, Artificial Sequence
  Synthetic
gtctttagtgaguaataaactgctgttcucat

SEQ ID NO: 6945 - DNA, 31 bp, Artificial Sequence
  Synthetic
cagtaataatgauttgaacaccacugagaag

SEQ ID NO: 6946 - DNA, 22 bp, Artificial Sequence
  Synthetic
ttttgaggtugtatccgcugct

SEQ ID NO: 6947 - DNA, 25 bp, Artificial Sequence
  Synthetic
tttgtccatggugtcaagtttcuct

SEQ ID NO: 6948 - DNA, 24 bp, Artificial Sequence
  Synthetic
ttttcctacugtggttgctuccaa

SEQ ID NO: 6949 - DNA, 30 bp, Artificial Sequence
  Synthetic
atttatagattttgcaugctgaaacttcuc

SEQ ID NO: 6950 - DNA, 19 bp, Artificial Sequence
  Synthetic
aguctgggcuagggcaact

SEQ ID NO: 6951 - DNA, 23 bp, Artificial Sequence
  Synthetic
cccaaggguggctactcttacua

SEQ ID NO: 6952 - DNA, 20 bp, Artificial Sequence
  Synthetic
caccaccutgtcccuagacc

SEQ ID NO: 6953 - DNA, 26 bp, Artificial Sequence
  Synthetic
gtagcatctcuaccccaaaactgtut

SEQ ID NO: 6954 - DNA, 19 bp, Artificial Sequence
  Synthetic
ccccaacauggagggctug

SEQ ID NO: 6955 - DNA, 22 bp, Artificial Sequence
  Synthetic
cacttctcacaucacccctuct

SEQ ID NO: 6956 - DNA, 22 bp, Artificial Sequence
  Synthetic
agtgggttuccctgtctcctua

SEQ ID NO: 6957 - DNA, 19 bp, Artificial Sequence
  Synthetic
cttggacagucgccccuac

SEQ ID NO: 6958 - DNA, 28 bp, Artificial Sequence
  Synthetic
ctgctctcttgugattctctatcctaug

SEQ ID NO: 6959 - DNA, 25 bp, Artificial Sequence
  Synthetic
caaactcaccuctgacttctctcug

SEQ ID NO: 6960 - DNA, 21 bp, Artificial Sequence
  Synthetic
ggcacttgcuggtccaaguat

SEQ ID NO: 6961 - DNA, 17 bp, Artificial Sequence
  Synthetic
ccuggacggtgugcgaa

SEQ ID NO: 6962 - DNA, 19 bp, Artificial Sequence
  Synthetic
gcacuatggccuggccaaa

SEQ ID NO: 6963 - DNA, 19 bp, Artificial Sequence
  Synthetic
ccucaagaaggccctgcuc

SEQ ID NO: 6964 - DNA, 21 bp, Artificial Sequence
  Synthetic
aaccagacaugcctcttgucc

SEQ ID NO: 6965 - DNA, 21 bp, Artificial Sequence
  Synthetic
tgcaaccuggatgccaucaaa

SEQ ID NO: 6966 - DNA, 21 bp, Artificial Sequence
  Synthetic
cgtgagccutctcttgaggug

SEQ ID NO: 6967 - DNA, 20 bp, Artificial Sequence
  Synthetic
aaagcactuggatgccggua

SEQ ID NO: 6968 - DNA, 20 bp, Artificial Sequence
  Synthetic
cccucctaucccacagcaca

SEQ ID NO: 6969 - DNA, 21 bp, Artificial Sequence
  Synthetic
gtggugacaagggugagacag

SEQ ID NO: 6970 - DNA, 21 bp, Artificial Sequence
  Synthetic
tggtcatggagugttgccauc

SEQ ID NO: 6971 - DNA, 20 bp, Artificial Sequence
  Synthetic
gccattguggccttgccuaa

SEQ ID NO: 6972 - DNA, 18 bp, Artificial Sequence
  Synthetic
cccagctcugcacaccuc

SEQ ID NO: 6973 - DNA, 20 bp, Artificial Sequence
  Synthetic
ctggacgucctggtgaagut

SEQ ID NO: 6974 - DNA, 19 bp, Artificial Sequence
  Synthetic
cagaggcaucaagccugga

SEQ ID NO: 6975 - DNA, 20 bp, Artificial Sequence
  Synthetic
gcuaaaggcgaacctgguga

SEQ ID NO: 6976 - DNA, 22 bp, Artificial Sequence
  Synthetic
ctgctgaggaggcuatgtgtua

SEQ ID NO: 6977 - DNA, 21 bp, Artificial Sequence
  Synthetic
ccaaaggtgcugatggctcuc

SEQ ID NO: 6978 - DNA, 18 bp, Artificial Sequence
  Synthetic
actugccagagcccctuc

SEQ ID NO: 6979 - DNA, 20 bp, Artificial Sequence
  Synthetic
tgccctguccttcccttcua

SEQ ID NO: 6980 - DNA, 21 bp, Artificial Sequence
  Synthetic
ctgagggtguctcccctttuc

SEQ ID NO: 6981 - DNA, 22 bp, Artificial Sequence
  Synthetic
tcctaacccugagttcccctut

SEQ ID NO: 6982 - DNA, 19 bp, Artificial Sequence
  Synthetic
cgcctcaucccagacccua

SEQ ID NO: 6983 - DNA, 17 bp, Artificial Sequence
  Synthetic
gggucccgctggugaac

SEQ ID NO: 6984 - DNA, 17 bp, Artificial Sequence
  Synthetic
gtccgggutcaccucga

SEQ ID NO: 6985 - DNA, 18 bp, Artificial Sequence
  Synthetic
cugaggcuggcacaggat

SEQ ID NO: 6986 - DNA, 23 bp, Artificial Sequence
  Synthetic
tgaggutagaaaguggcaaaggg

SEQ ID NO: 6987 - DNA, 27 bp, Artificial Sequence
  Synthetic
gatatgtccuttcttctgatucagggt

SEQ ID NO: 6988 - DNA, 20 bp, Artificial Sequence
  Synthetic
ctctggaacugggcacacuc

SEQ ID NO: 6989 - DNA, 20 bp, Artificial Sequence
  Synthetic
tcctccacauccccagaguc

SEQ ID NO: 6990 - DNA, 23 bp, Artificial Sequence
  Synthetic
gggtcagauggtatcttctugct

SEQ ID NO: 6991 - DNA, 20 bp, Artificial Sequence
  Synthetic
ccttcaaucccagcctuccc

SEQ ID NO: 6992 - DNA, 32 bp, Artificial Sequence
  Synthetic
tcaaagtataaaautatgtcatcugccaaaaa

SEQ ID NO: 6993 - DNA, 19 bp, Artificial Sequence
  Synthetic
cctggacagccuggactuc

SEQ ID NO: 6994 - DNA, 21 bp, Artificial Sequence
  Synthetic
gaucacgtcaucgcacaacac

SEQ ID NO: 6995 - DNA, 22 bp, Artificial Sequence
  Synthetic
gggttgcagucactacugacaa

SEQ ID NO: 6996 - DNA, 30 bp, Artificial Sequence
  Synthetic
ggatttgtgttgaugagcatatatgaaugt

SEQ ID NO: 6997 - DNA, 27 bp, Artificial Sequence
  Synthetic
tgcagatgaattugtcagactccauag

SEQ ID NO: 6998 - DNA, 30 bp, Artificial Sequence
  Synthetic
tgaaaagtaaaaugaaggctcataccauga

SEQ ID NO: 6999 - DNA, 22 bp, Artificial Sequence
  Synthetic
gcaaggcuagaatggcgaucaa

SEQ ID NO: 7000 - DNA, 22 bp, Artificial Sequence
  Synthetic
aggcagtggaugtcttcttucc

SEQ ID NO: 7001 - DNA, 30 bp, Artificial Sequence
  Synthetic
atctaccatgaauagtctttgggttaatut

SEQ ID NO: 7002 - DNA, 29 bp, Artificial Sequence
  Synthetic
tcagtgtgtguggaagaagaaaacauaat

SEQ ID NO: 7003 - DNA, 23 bp, Artificial Sequence
  Synthetic
tcccugggcaaaaagagcatuaa

SEQ ID NO: 7004 - DNA, 28 bp, Artificial Sequence
  Synthetic
agtgtcaacugctcatttcuaaaacagt

SEQ ID NO: 7005 - DNA, 26 bp, Artificial Sequence
  Synthetic
gaatgactttauttgggacgtuagcc

SEQ ID NO: 7006 - DNA, 22 bp, Artificial Sequence
  Synthetic
agcagtguactgcattctugct

SEQ ID NO: 7007 - DNA, 27 bp, Artificial Sequence
  Synthetic
atgttggaaacaugcctaaaaagcaut

SEQ ID NO: 7008 - DNA, 28 bp, Artificial Sequence
  Synthetic
ctttggttcctuatcagtagaagacucc

SEQ ID NO: 7009 - DNA, 26 bp, Artificial Sequence
  Synthetic
aatcagagacugagttgacagttgut

SEQ ID NO: 7010 - DNA, 26 bp, Artificial Sequence
  Synthetic
tgtgtgatcgauttgactttguccat

SEQ ID NO: 7011 - DNA, 30 bp, Artificial Sequence
  Synthetic
gagtttcaaaaggauttccagaataugaga

SEQ ID NO: 7012 - DNA, 22 bp, Artificial Sequence
  Synthetic
caacccggagagauttctucgt

SEQ ID NO: 7013 - DNA, 26 bp, Artificial Sequence
  Synthetic
cagcttctcuacatattcagcuagca

SEQ ID NO: 7014 - DNA, 24 bp, Artificial Sequence
  Synthetic
ctccgttagucacagtggttatut

SEQ ID NO: 7015 - DNA, 22 bp, Artificial Sequence
  Synthetic
gtgtacggucagccttaatugc

SEQ ID NO: 7016 - DNA, 25 bp, Artificial Sequence
  Synthetic
atattggaaactuggatcgggcaua

SEQ ID NO: 7017 - DNA, 30 bp, Artificial Sequence
  Synthetic
gaggaaggatcauctgctttgatauaagaa

SEQ ID NO: 7018 - DNA, 29 bp, Artificial Sequence
  Synthetic
gaggattaagcucacactaatatctugct

SEQ ID NO: 7019 - DNA, 25 bp, Artificial Sequence
  Synthetic
ggtagaugccaaacgtccaaaatug

SEQ ID NO: 7020 - DNA, 28 bp, Artificial Sequence
  Synthetic
agctcacatgggaaugtttactgaatua

SEQ ID NO: 7021 - DNA, 28 bp, Artificial Sequence
  Synthetic
agcattagttttaacuacacagttgcut

SEQ ID NO: 7022 - DNA, 27 bp, Artificial Sequence
  Synthetic
gttgttaaatgauttgctgatggugct

SEQ ID NO: 7023 - DNA, 23 bp, Artificial Sequence
  Synthetic
autgaagucccagggacaaaagt

SEQ ID NO: 7024 - DNA, 26 bp, Artificial Sequence
  Synthetic
attgagttcaggagaautgctgctua

SEQ ID NO: 7025 - DNA, 24 bp, Artificial Sequence
  Synthetic
ttgtaacaccautttaggccuggt

SEQ ID NO: 7026 - DNA, 27 bp, Artificial Sequence
  Synthetic
ctccaggtggauaaattagatgctuca

SEQ ID NO: 7027 - DNA, 27 bp, Artificial Sequence
  Synthetic
ttgtattctatttugaggcacagtcuc

SEQ ID NO: 7028 - DNA, 33 bp, Artificial Sequence
  Synthetic
attacttacaacagaguttaacataagcaugat

SEQ ID NO: 7029 - DNA, 27 bp, Artificial Sequence
  Synthetic
tggataaaugaactggaacugggaaaa

SEQ ID NO: 7030 - DNA, 28 bp, Artificial Sequence
  Synthetic
cacttctctggcugaatctacttcttut

SEQ ID NO: 7031 - DNA, 30 bp, Artificial Sequence
  Synthetic
acctgaactttaugatcctgaagauacaga

SEQ ID NO: 7032 - DNA, 28 bp, Artificial Sequence
  Synthetic
ggcaaaacagtuttactttccatctuct

SEQ ID NO: 7033 - DNA, 29 bp, Artificial Sequence
  Synthetic
ggtcaagctttaautctttgggacaguat

SEQ ID NO: 7034 - DNA, 26 bp, Artificial Sequence
  Synthetic
acactgtagtucctggacacatauct

SEQ ID NO: 7035 - DNA, 29 bp, Artificial Sequence
  Synthetic
cauaaaggacagaaccaatauacaggaca

SEQ ID NO: 7036 - DNA, 27 bp, Artificial Sequence
  Synthetic
gggatcccugcaattaactttauacaa

SEQ ID NO: 7037 - DNA, 24 bp, Artificial Sequence
  Synthetic
gtgagggtcuggatttctcagaug

SEQ ID NO: 7038 - DNA, 23 bp, Artificial Sequence
  Synthetic
accctaggaagcutactgtggua

SEQ ID NO: 7039 - DNA, 24 bp, Artificial Sequence
  Synthetic
gggagcactuttgttatctgtgug

SEQ ID NO: 7040 - DNA, 25 bp, Artificial Sequence
  Synthetic
ccagctggauagtaaatguaacacc

SEQ ID NO: 7041 - DNA, 27 bp, Artificial Sequence
  Synthetic
ttgcccagccucttctaaagataatut

SEQ ID NO: 7042 - DNA, 29 bp, Artificial Sequence
  Synthetic
tcctttaagcautatttgagttgaugcac

SEQ ID NO: 7043 - DNA, 22 bp, Artificial Sequence
  Synthetic
aattcccucccaacccctcuat

SEQ ID NO: 7044 - DNA, 24 bp, Artificial Sequence
  Synthetic
caaaccgaagcugaacttctgtua

SEQ ID NO: 7045 - DNA, 30 bp, Artificial Sequence
  Synthetic
tgctgttgttaaauctattttgccaaaugt

SEQ ID NO: 7046 - DNA, 26 bp, Artificial Sequence
  Synthetic
tttactcacguttttcccatcuagca

SEQ ID NO: 7047 - DNA, 23 bp, Artificial Sequence
  Synthetic
gattacuagagagcuccggagga

SEQ ID NO: 7048 - DNA, 28 bp, Artificial Sequence
  Synthetic
agtggagagtugagttttacagtcttuc

SEQ ID NO: 7049 - DNA, 23 bp, Artificial Sequence
  Synthetic
gagctgtuttggccttugagaac

SEQ ID NO: 7050 - DNA, 31 bp, Artificial Sequence
  Synthetic
tggttcatgtcatugtttgtaaaatccttug

SEQ ID NO: 7051 - DNA, 25 bp, Artificial Sequence
  Synthetic
ctgggctguagagaatgattgaugt

SEQ ID NO: 7052 - DNA, 17 bp, Artificial Sequence
  Synthetic
ctctggugggccagcut

SEQ ID NO: 7053 - DNA, 19 bp, Artificial Sequence
  Synthetic
guctgtaggugagcaccca

SEQ ID NO: 7054 - DNA, 21 bp, Artificial Sequence
  Synthetic
caugaccaucaccacaagagg

SEQ ID NO: 7055 - DNA, 25 bp, Artificial Sequence
  Synthetic
ttgaggacaauggcatctacttcug

SEQ ID NO: 7056 - DNA, 21 bp, Artificial Sequence
  Synthetic
gaggcuactgaccttugggat

SEQ ID NO: 7057 - DNA, 20 bp, Artificial Sequence
  Synthetic
ggaacauagagggcaugcag

SEQ ID NO: 7058 - DNA, 30 bp, Artificial Sequence
  Synthetic
ttctgcaatucccatgtttcttaaauaact

SEQ ID NO: 7059 - DNA, 22 bp, Artificial Sequence
  Synthetic
gcagctgcaccuatgattggut

SEQ ID NO: 7060 - DNA, 25 bp, Artificial Sequence
  Synthetic
aggtattaaauccacccctttugcc

SEQ ID NO: 7061 - DNA, 29 bp, Artificial Sequence
  Synthetic
agatctgtttcttuctgtccacaatgaut

SEQ ID NO: 7062 - DNA, 29 bp, Artificial Sequence
  Synthetic
gagcagaattcuagctaggttaaguaagg

SEQ ID NO: 7063 - DNA, 23 bp, Artificial Sequence
  Synthetic
ttttaactuaggtggccugccat

SEQ ID NO: 7064 - DNA, 28 bp, Artificial Sequence
  Synthetic
caccaactgaaauaacctaaaacaacuc

SEQ ID NO: 7065 - DNA, 24 bp, Artificial Sequence
  Synthetic
gagugcaaaccacaacattctuca

SEQ ID NO: 7066 - DNA, 28 bp, Artificial Sequence
  Synthetic
ggttcaaagcccauatcaagcattcuat

SEQ ID NO: 7067 - DNA, 25 bp, Artificial Sequence
  Synthetic
aggtguggaaatctgtatugcaaca

SEQ ID NO: 7068 - DNA, 28 bp, Artificial Sequence
  Synthetic
accaccacaaaugattacatcttuagct

SEQ ID NO: 7069 - DNA, 21 bp, Artificial Sequence
  Synthetic
ttcctgccautgtccacauca

SEQ ID NO: 7070 - DNA, 22 bp, Artificial Sequence
  Synthetic
cgatcgagtuacagcctgauga

SEQ ID NO: 7071 - DNA, 27 bp, Artificial Sequence
  Synthetic
ccttatcuggaaagaagttuggaaacc

SEQ ID NO: 7072 - DNA, 17 bp, Artificial Sequence
  Synthetic
gcccacuggccgatuct

SEQ ID NO: 7073 - DNA, 21 bp, Artificial Sequence
  Synthetic
aaagtggagcggaucgatuga

SEQ ID NO: 7074 - DNA, 24 bp, Artificial Sequence
  Synthetic
gguatggaatttctuccccacaga

SEQ ID NO: 7075 - DNA, 23 bp, Artificial Sequence
  Synthetic
gcacgtgugtgtttgcttuagat

SEQ ID NO: 7076 - DNA, 17 bp, Artificial Sequence
  Synthetic
tgagccagcgugtuggg

SEQ ID NO: 7077 - DNA, 19 bp, Artificial Sequence
  Synthetic
aaggccuacccctuggagt

SEQ ID NO: 7078 - DNA, 19 bp, Artificial Sequence
  Synthetic
ctccgtgccuttcccatug

SEQ ID NO: 7079 - DNA, 26 bp, Artificial Sequence
  Synthetic
acttgctgaautgtctgattcuagga

SEQ ID NO: 7080 - DNA, 22 bp, Artificial Sequence
  Synthetic
tctgcttggucacaaagcctut

SEQ ID NO: 7081 - DNA, 18 bp, Artificial Sequence
  Synthetic
caggcguaggccgctaua

SEQ ID NO: 7082 - DNA, 22 bp, Artificial Sequence
  Synthetic
tccaactccagcutcagcttut

SEQ ID NO: 7083 - DNA, 19 bp, Artificial Sequence
  Synthetic
ccaccuagcctgcugaacg

SEQ ID NO: 7084 - DNA, 19 bp, Artificial Sequence
  Synthetic
cgcccccgucaaagtctua

SEQ ID NO: 7085 - DNA, 25 bp, Artificial Sequence
  Synthetic
accttgaaugaagaagaggagugga

SEQ ID NO: 7086 - DNA, 24 bp, Artificial Sequence
  Synthetic
tcgctttggcuactcgtaaagtut

SEQ ID NO: 7087 - DNA, 21 bp, Artificial Sequence
  Synthetic
aagacggugcttacctgtucc

SEQ ID NO: 7088 - DNA, 22 bp, Artificial Sequence
  Synthetic
gtcaccaacauagcgctacuca

SEQ ID NO: 7089 - DNA, 22 bp, Artificial Sequence
  Synthetic
ccccctuccttttcttuccaga

SEQ ID NO: 7090 - DNA, 18 bp, Artificial Sequence
  Synthetic
gcgatgucgccgaaguca

SEQ ID NO: 7091 - DNA, 22 bp, Artificial Sequence
  Synthetic
aggctaccucatccatgaguct

SEQ ID NO: 7092 - DNA, 22 bp, Artificial Sequence
  Synthetic
cccacaccuccataaaaccuca

SEQ ID NO: 7093 - DNA, 25 bp, Artificial Sequence
  Synthetic
gagctatccgaccugattgtttuca

SEQ ID NO: 7094 - DNA, 20 bp, Artificial Sequence
  Synthetic
cagttgugtgcattgugggt

SEQ ID NO: 7095 - DNA, 18 bp, Artificial Sequence
  Synthetic
ctggcguccaugaccaag

SEQ ID NO: 7096 - DNA, 25 bp, Artificial Sequence
  Synthetic
gctgttgccgauaaagttgttugac

SEQ ID NO: 7097 - DNA, 17 bp, Artificial Sequence
  Synthetic
gctcggcgucacctuca

SEQ ID NO: 7098 - DNA, 23 bp, Artificial Sequence
  Synthetic
ctgagcagaguctucagagacag

SEQ ID NO: 7099 - DNA, 24 bp, Artificial Sequence
  Synthetic
tggcattctcugctctctctcuaa

SEQ ID NO: 7100 - DNA, 20 bp, Artificial Sequence
  Synthetic
gacgctcuccacacacauga

SEQ ID NO: 7101 - DNA, 19 bp, Artificial Sequence
  Synthetic
cgactucgccgagatgucc

SEQ ID NO: 7102 - DNA, 25 bp, Artificial Sequence
  Synthetic
ctctgcgacagcutataatggaugt

SEQ ID NO: 7103 - DNA, 29 bp, Artificial Sequence
  Synthetic
tggattataacucctcttctttctcuggg

SEQ ID NO: 7104 - DNA, 18 bp, Artificial Sequence
  Synthetic
aggctccaguccccctut

SEQ ID NO: 7105 - DNA, 17 bp, Artificial Sequence
  Synthetic
agccccaguccatgcug

SEQ ID NO: 7106 - DNA, 21 bp, Artificial Sequence
  Synthetic
ccttctcacgcucctcttuct

SEQ ID NO: 7107 - DNA, 20 bp, Artificial Sequence
  Synthetic
ccaccccaaccuctctgtuc

SEQ ID NO: 7108 - DNA, 17 bp, Artificial Sequence
  Synthetic
ctcuccgggtgctuggg

SEQ ID NO: 7109 - DNA, 17 bp, Artificial Sequence
  Synthetic
cgctgugcctgugccat

SEQ ID NO: 7110 - DNA, 21 bp, Artificial Sequence
  Synthetic
ccactuaccggttgaguaggg

SEQ ID NO: 7111 - DNA, 22 bp, Artificial Sequence
  Synthetic
agtttuccacccacauccaaca

SEQ ID NO: 7112 - DNA, 20 bp, Artificial Sequence
  Synthetic
gtttgggucaaggctgguga

SEQ ID NO: 7113 - DNA, 20 bp, Artificial Sequence
  Synthetic
cgcctcggugttgtgttcut

SEQ ID NO: 7114 - DNA, 20 bp, Artificial Sequence
  Synthetic
cagggcuctgaggaatucca

SEQ ID NO: 7115 - DNA, 23 bp, Artificial Sequence
  Synthetic
ctggtttcuctctccctcuacgt

SEQ ID NO: 7116 - DNA, 22 bp, Artificial Sequence
  Synthetic
gcttgttgaugtccaagcugag

SEQ ID NO: 7117 - DNA, 22 bp, Artificial Sequence
  Synthetic
ccgttctugatggtgtcugcat

SEQ ID NO: 7118 - DNA, 22 bp, Artificial Sequence
  Synthetic
tcatggucaggagggttguact

SEQ ID NO: 7119 - DNA, 22 bp, Artificial Sequence
  Synthetic
gccacttcuccatggtcacaug

SEQ ID NO: 7120 - DNA, 19 bp, Artificial Sequence
  Synthetic
ccagctuggtggtctuggg

SEQ ID NO: 7121 - DNA, 17 bp, Artificial Sequence
  Synthetic
ccggcugccacttcuga

SEQ ID NO: 7122 - DNA, 20 bp, Artificial Sequence
  Synthetic
cugcacaggaggaggatucg

SEQ ID NO: 7123 - DNA, 23 bp, Artificial Sequence
  Synthetic
tgtggatgucagcatggtctcua

SEQ ID NO: 7124 - DNA, 29 bp, Artificial Sequence
  Synthetic
gatacattccugagcattccagtaauagt

SEQ ID NO: 7125 - DNA, 23 bp, Artificial Sequence
  Synthetic
gcctaggugacactggactttug

SEQ ID NO: 7126 - DNA, 17 bp, Artificial Sequence
  Synthetic
gcggugctggcucagat

SEQ ID NO: 7127 - DNA, 17 bp, Artificial Sequence
  Synthetic
ctgcaggcutggcccua

SEQ ID NO: 7128 - DNA, 18 bp, Artificial Sequence
  Synthetic
gcgucgagctgggugaac

SEQ ID NO: 7129 - DNA, 19 bp, Artificial Sequence
  Synthetic
tggccccuctctcctgtut

SEQ ID NO: 7130 - DNA, 25 bp, Artificial Sequence
  Synthetic
gtctttgtgctucttggacttctuc

SEQ ID NO: 7131 - DNA, 18 bp, Artificial Sequence
  Synthetic
gcaaugaccugggccaca

SEQ ID NO: 7132 - DNA, 18 bp, Artificial Sequence
  Synthetic
ctgcaggugctugggaca

SEQ ID NO: 7133 - DNA, 17 bp, Artificial Sequence
  Synthetic
cctgccuctcctucgca

SEQ ID NO: 7134 - DNA, 20 bp, Artificial Sequence
  Synthetic
tggcaccacucttcctgaug

SEQ ID NO: 7135 - DNA, 21 bp, Artificial Sequence
  Synthetic
cgccctcuctgttcccuaaag

SEQ ID NO: 7136 - DNA, 19 bp, Artificial Sequence
  Synthetic
ggccgatgutggagaggua

SEQ ID NO: 7137 - DNA, 22 bp, Artificial Sequence
  Synthetic
ggactcaugcaggaagaugcag

SEQ ID NO: 7138 - DNA, 20 bp, Artificial Sequence
  Synthetic
ggaggcaccggaauctccua

SEQ ID NO: 7139 - DNA, 20 bp, Artificial Sequence
  Synthetic
ccagagagcuccttggucaa

SEQ ID NO: 7140 - DNA, 21 bp, Artificial Sequence
  Synthetic
cattgtcacuggtcagcucca

SEQ ID NO: 7141 - DNA, 23 bp, Artificial Sequence
  Synthetic
guggacaagaauagcaacgagua

SEQ ID NO: 7142 - DNA, 17 bp, Artificial Sequence
  Synthetic
cgtcucgtgcucgcaga

SEQ ID NO: 7143 - DNA, 18 bp, Artificial Sequence
  Synthetic
ccgaugagcagccaccug

SEQ ID NO: 7144 - DNA, 22 bp, Artificial Sequence
  Synthetic
gccctcctugagaagtgagtua

SEQ ID NO: 7145 - DNA, 25 bp, Artificial Sequence
  Synthetic
cgacacaagguacttcgatgaugaa

SEQ ID NO: 7146 - DNA, 22 bp, Artificial Sequence
  Synthetic
ccatgaggaugagcucgaagag

SEQ ID NO: 7147 - DNA, 23 bp, Artificial Sequence
  Synthetic
cctcatttcucctccatccucag

SEQ ID NO: 7148 - DNA, 25 bp, Artificial Sequence
  Synthetic
ccgagacaauctctgcaccauaaaa

SEQ ID NO: 7149 - DNA, 18 bp, Artificial Sequence
  Synthetic
accacaucactgcgcugg

SEQ ID NO: 7150 - DNA, 19 bp, Artificial Sequence
  Synthetic
ccgcaccaggaugacttug

SEQ ID NO: 7151 - DNA, 25 bp, Artificial Sequence
  Synthetic
ggcaacagugtcttttggtttucct

SEQ ID NO: 7152 - DNA, 22 bp, Artificial Sequence
  Synthetic
ggaaggtccuctcgatgacugt

SEQ ID NO: 7153 - DNA, 19 bp, Artificial Sequence
  Synthetic
gcaggcuagcagggctauc

SEQ ID NO: 7154 - DNA, 27 bp, Artificial Sequence
  Synthetic
cttctttgaugacagacacctcatuca

SEQ ID NO: 7155 - DNA, 21 bp, Artificial Sequence
  Synthetic
cctgaccagcucctctctugt

SEQ ID NO: 7156 - DNA, 21 bp, Artificial Sequence
  Synthetic
agcatcautgatggugagcct

SEQ ID NO: 7157 - DNA, 23 bp, Artificial Sequence
  Synthetic
tctggatgaucagcgtaccatug

SEQ ID NO: 7158 - DNA, 22 bp, Artificial Sequence
  Synthetic
agccatacuacctcctugcaga

SEQ ID NO: 7159 - DNA, 19 bp, Artificial Sequence
  Synthetic
ggctgacucagagguccga

SEQ ID NO: 7160 - DNA, 17 bp, Artificial Sequence
  Synthetic
cugcgccggaccatgua

SEQ ID NO: 7161 - DNA, 20 bp, Artificial Sequence
  Synthetic
ccgttacuccgcactuagca

SEQ ID NO: 7162 - DNA, 19 bp, Artificial Sequence
  Synthetic
ggcagcugttgctcaugaa

SEQ ID NO: 7163 - DNA, 17 bp, Artificial Sequence
  Synthetic
cctcctccuccgtggug

SEQ ID NO: 7164 - DNA, 21 bp, Artificial Sequence
  Synthetic
ccgctcugggctgtgttuaat

SEQ ID NO: 7165 - DNA, 19 bp, Artificial Sequence
  Synthetic
ccagggcauaccaccacuc

SEQ ID NO: 7166 - DNA, 21 bp, Artificial Sequence
  Synthetic
ctggugacaggcttacugact

SEQ ID NO: 7167 - DNA, 21 bp, Artificial Sequence
  Synthetic
caactgtgtguagccgttcug

SEQ ID NO: 7168 - DNA, 22 bp, Artificial Sequence
  Synthetic
cccaaagccutctacccaguat

SEQ ID NO: 7169 - DNA, 19 bp, Artificial Sequence
  Synthetic
gcgctccucatcactcguc

SEQ ID NO: 7170 - DNA, 19 bp, Artificial Sequence
  Synthetic
cccccggaucctcctguag

SEQ ID NO: 7171 - DNA, 19 bp, Artificial Sequence
  Synthetic
cagactccugggcctugaa

SEQ ID NO: 7172 - DNA, 17 bp, Artificial Sequence
  Synthetic
ctccccugtcccgucct

SEQ ID NO: 7173 - DNA, 22 bp, Artificial Sequence
  Synthetic
acctgcugtgtcattuggagac

SEQ ID NO: 7174 - DNA, 20 bp, Artificial Sequence
  Synthetic
cccctgcugtccagttcaut

SEQ ID NO: 7175 - DNA, 24 bp, Artificial Sequence
  Synthetic
gatgtactguacctgggtgatucc

SEQ ID NO: 7176 - DNA, 20 bp, Artificial Sequence
  Synthetic
ggccauagtcctgttuggct

SEQ ID NO: 7177 - DNA, 19 bp, Artificial Sequence
  Synthetic
cccgcacugacatgcuagg

SEQ ID NO: 7178 - DNA, 23 bp, Artificial Sequence
  Synthetic
gcagaatcaccuatgtgcaguca

SEQ ID NO: 7179 - DNA, 18 bp, Artificial Sequence
  Synthetic
ccagcgaggugaagccua

SEQ ID NO: 7180 - DNA, 20 bp, Artificial Sequence
  Synthetic
ccaagccuggtctacacugt

SEQ ID NO: 7181 - DNA, 21 bp, Artificial Sequence
  Synthetic
caactcactcugctctgggut

SEQ ID NO: 7182 - DNA, 19 bp, Artificial Sequence
  Synthetic
ccugccagagaccuggact

SEQ ID NO: 7183 - DNA, 17 bp, Artificial Sequence
  Synthetic
gccaaguggcaguggga

SEQ ID NO: 7184 - DNA, 20 bp, Artificial Sequence
  Synthetic
cttgguggagcgtgtuaggg

SEQ ID NO: 7185 - DNA, 20 bp, Artificial Sequence
  Synthetic
ctccucaggccgaaacucag

SEQ ID NO: 7186 - DNA, 18 bp, Artificial Sequence
  Synthetic
ttgggugggcacucagac

SEQ ID NO: 7187 - DNA, 23 bp, Artificial Sequence
  Synthetic
gaggagtauggcaccttgtcaua

SEQ ID NO: 7188 - DNA, 17 bp, Artificial Sequence
  Synthetic
ccuccacagcugccaca

SEQ ID NO: 7189 - DNA, 18 bp, Artificial Sequence
  Synthetic
atuccgccccaaacugga

SEQ ID NO: 7190 - DNA, 22 bp, Artificial Sequence
  Synthetic
atgcctgtgautccttcacucc

SEQ ID NO: 7191 - DNA, 19 bp, Artificial Sequence
  Synthetic
acctgccguaggttgtugt

SEQ ID NO: 7192 - DNA, 19 bp, Artificial Sequence
  Synthetic
caacgugaacgcgcaaaug

SEQ ID NO: 7193 - DNA, 20 bp, Artificial Sequence
  Synthetic
cgtgtcgtugtggcagtuct

SEQ ID NO: 7194 - DNA, 22 bp, Artificial Sequence
  Synthetic
ccatggctccucccaatttcut

SEQ ID NO: 7195 - DNA, 23 bp, Artificial Sequence
  Synthetic
cctcctcaugagtccaagatcug

SEQ ID NO: 7196 - DNA, 17 bp, Artificial Sequence
  Synthetic
gccgggcagucaggaug

SEQ ID NO: 7197 - DNA, 18 bp, Artificial Sequence
  Synthetic
cgagaaugggccaccuct

SEQ ID NO: 7198 - DNA, 21 bp, Artificial Sequence
  Synthetic
cccaaggauagccagagucct

SEQ ID NO: 7199 - DNA, 25 bp, Artificial Sequence
  Synthetic
ggtacatgtguccacagtacttucc

SEQ ID NO: 7200 - DNA, 22 bp, Artificial Sequence
  Synthetic
ctcgagcccuagggactactua

SEQ ID NO: 7201 - DNA, 23 bp, Artificial Sequence
  Synthetic
cataggugaggaaggccatguag

SEQ ID NO: 7202 - DNA, 17 bp, Artificial Sequence
  Synthetic
cccccaguccccctcuc

SEQ ID NO: 7203 - DNA, 17 bp, Artificial Sequence
  Synthetic
guggcagggucagggaa

SEQ ID NO: 7204 - DNA, 17 bp, Artificial Sequence
  Synthetic
gaccucccccagcacuc

SEQ ID NO: 7205 - DNA, 17 bp, Artificial Sequence
  Synthetic
tgccccagcuccaacuc

SEQ ID NO: 7206 - DNA, 22 bp, Artificial Sequence
  Synthetic
tgccttcucctgcgatuaaagg

SEQ ID NO: 7207 - DNA, 21 bp, Artificial Sequence
  Synthetic
cagattgcucagcagctcuga

SEQ ID NO: 7208 - DNA, 20 bp, Artificial Sequence
  Synthetic
gttctuggagcctgggaugg

SEQ ID NO: 7209 - DNA, 24 bp, Artificial Sequence
  Synthetic
accagttccagautcgtgagaaug

SEQ ID NO: 7210 - DNA, 20 bp, Artificial Sequence
  Synthetic
ccgagacgcaagutagguca

SEQ ID NO: 7211 - DNA, 25 bp, Artificial Sequence
  Synthetic
ccutgagaacauccagaggaacaag

SEQ ID NO: 7212 - DNA, 22 bp, Artificial Sequence
  Synthetic
ctgatacaccucccctctugga

SEQ ID NO: 7213 - DNA, 23 bp, Artificial Sequence
  Synthetic
cttatcgtgaccuctgttgcuct

SEQ ID NO: 7214 - DNA, 24 bp, Artificial Sequence
  Synthetic
cagggacagaaaaaggugagctua

SEQ ID NO: 7215 - DNA, 17 bp, Artificial Sequence
  Synthetic
cgaccccguctctccuc

SEQ ID NO: 7216 - DNA, 17 bp, Artificial Sequence
  Synthetic
ccaccugagcaccguct

SEQ ID NO: 7217 - DNA, 18 bp, Artificial Sequence
  Synthetic
gccagccccuctgaguga

SEQ ID NO: 7218 - DNA, 23 bp, Artificial Sequence
  Synthetic
gcaucaaattccugggacaagag

SEQ ID NO: 7219 - DNA, 20 bp, Artificial Sequence
  Synthetic
agccucacagcctcctaugt

SEQ ID NO: 7220 - DNA, 21 bp, Artificial Sequence
  Synthetic
ggaccaauagggccuagggaa

SEQ ID NO: 7221 - DNA, 22 bp, Artificial Sequence
  Synthetic
gggactgaguccgcttgttauc

SEQ ID NO: 7222 - DNA, 17 bp, Artificial Sequence
  Synthetic
agcccguccacgtugag

SEQ ID NO: 7223 - DNA, 20 bp, Artificial Sequence
  Synthetic
ctcctgaggaccugagggut

SEQ ID NO: 7224 - DNA, 23 bp, Artificial Sequence
  Synthetic
ctgagttguaccttgctgucaca

SEQ ID NO: 7225 - DNA, 25 bp, Artificial Sequence
  Synthetic
cacccatccautaaagggtcctuac

SEQ ID NO: 7226 - DNA, 20 bp, Artificial Sequence
  Synthetic
gctgtgccutcagggttcuc

SEQ ID NO: 7227 - DNA, 18 bp, Artificial Sequence
  Synthetic
tcacctguggctggctuc

SEQ ID NO: 7228 - DNA, 24 bp, Artificial Sequence
  Synthetic
gggtgggcutctgttctctttuaa

SEQ ID NO: 7229 - DNA, 21 bp, Artificial Sequence
  Synthetic
tctgagccgcauggguaaaaa

SEQ ID NO: 7230 - DNA, 24 bp, Artificial Sequence
  Synthetic
aggaggaggcugaaatcaaaagug

SEQ ID NO: 7231 - DNA, 21 bp, Artificial Sequence
  Synthetic
attccttcuggctctggtucg

SEQ ID NO: 7232 - DNA, 22 bp, Artificial Sequence
  Synthetic
tggaucaggaacccaaggauca

SEQ ID NO: 7233 - DNA, 22 bp, Artificial Sequence
  Synthetic
ggcttttcggugtgaacactut

SEQ ID NO: 7234 - DNA, 21 bp, Artificial Sequence
  Synthetic
agacatuaaagcccgtgcuct

SEQ ID NO: 7235 - DNA, 19 bp, Artificial Sequence
  Synthetic
accaccaucaccactgcug

SEQ ID NO: 7236 - DNA, 22 bp, Artificial Sequence
  Synthetic
actgtccucccaaacctcagua

SEQ ID NO: 7237 - DNA, 20 bp, Artificial Sequence
  Synthetic
ccautgtcugcaggaacggt

SEQ ID NO: 7238 - DNA, 23 bp, Artificial Sequence
  Synthetic
gugaaacaguccaaaccagaauc

SEQ ID NO: 7239 - DNA, 23 bp, Artificial Sequence
  Synthetic
acaguccagagtgaaguaaggct

SEQ ID NO: 7240 - DNA, 23 bp, Artificial Sequence
  Synthetic
ctgtccaaggugaatggugacat

SEQ ID NO: 7241 - DNA, 21 bp, Artificial Sequence
  Synthetic
ctcagtacuggccagcaguag

SEQ ID NO: 7242 - DNA, 22 bp, Artificial Sequence
  Synthetic
tgccagauagctgugaaacagg

SEQ ID NO: 7243 - DNA, 28 bp, Artificial Sequence
  Synthetic
ggaatccatttcutccagtttccuagag

SEQ ID NO: 7244 - DNA, 22 bp, Artificial Sequence
  Synthetic
gatcccuccagttttucccagt

SEQ ID NO: 7245 - DNA, 26 bp, Artificial Sequence
  Synthetic
acaaaagtcutctcattctugacgct

SEQ ID NO: 7246 - DNA, 20 bp, Artificial Sequence
  Synthetic
aaaggcctugctggaagugt

SEQ ID NO: 7247 - DNA, 19 bp, Artificial Sequence
  Synthetic
tcatggcuttcaggcugca

SEQ ID NO: 7248 - DNA, 24 bp, Artificial Sequence
  Synthetic
tggtgaatuccagtatgggttugg

SEQ ID NO: 7249 - DNA, 23 bp, Artificial Sequence
  Synthetic
ctgtacaaguaccccucagacct

SEQ ID NO: 7250 - DNA, 26 bp, Artificial Sequence
  Synthetic
gttcagtugaaggaatttcucaccaa

SEQ ID NO: 7251 - DNA, 24 bp, Artificial Sequence
  Synthetic
agattctuggaccaacaaguagcc

SEQ ID NO: 7252 - DNA, 21 bp, Artificial Sequence
  Synthetic
acggatcucagcaggacauct

SEQ ID NO: 7253 - DNA, 28 bp, Artificial Sequence
  Synthetic
ttcacatgtttguctttccttttgtcug

SEQ ID NO: 7254 - DNA, 19 bp, Artificial Sequence
  Synthetic
ctcccugaggctcagccua

SEQ ID NO: 7255 - DNA, 22 bp, Artificial Sequence
  Synthetic
agacaccgtugggatgaacuac

SEQ ID NO: 7256 - DNA, 27 bp, Artificial Sequence
  Synthetic
auctgccttgauaaaggaaaccaaaga

SEQ ID NO: 7257 - DNA, 28 bp, Artificial Sequence
  Synthetic
ctactttctggucagagagaagcaauaa

SEQ ID NO: 7258 - DNA, 19 bp, Artificial Sequence
  Synthetic
agagtcacugccagggtug

SEQ ID NO: 7259 - DNA, 18 bp, Artificial Sequence
  Synthetic
cttcgcccagacauggug

SEQ ID NO: 7260 - DNA, 20 bp, Artificial Sequence
  Synthetic
gcccaccagutattgcccut

SEQ ID NO: 7261 - DNA, 20 bp, Artificial Sequence
  Synthetic
cagtgucccatcccucacag

SEQ ID NO: 7262 - DNA, 24 bp, Artificial Sequence
  Synthetic
aaaagaaactgacugtccaggugt

SEQ ID NO: 7263 - DNA, 20 bp, Artificial Sequence
  Synthetic
gggacugaccctcagcttug

SEQ ID NO: 7264 - DNA, 25 bp, Artificial Sequence
  Synthetic
ggcttgaattuggagtagaggaugg

SEQ ID NO: 7265 - DNA, 21 bp, Artificial Sequence
  Synthetic
caggaggcaugcaatcacuct

SEQ ID NO: 7266 - DNA, 23 bp, Artificial Sequence
  Synthetic
ggcgggcaaagutagaaacatug

SEQ ID NO: 7267 - DNA, 28 bp, Artificial Sequence
  Synthetic
ccatctaggaacutaaaagcaactcugg

SEQ ID NO: 7268 - DNA, 23 bp, Artificial Sequence
  Synthetic
acttcttgctucagccaggttut

SEQ ID NO: 7269 - DNA, 22 bp, Artificial Sequence
  Synthetic
cccagcuccagaaagattuggt

SEQ ID NO: 7270 - DNA, 24 bp, Artificial Sequence
  Synthetic
cagatgtttugaatctgcctgugt

SEQ ID NO: 7271 - DNA, 24 bp, Artificial Sequence
  Synthetic
cctgaagagatutcggtcactguc

SEQ ID NO: 7272 - DNA, 20 bp, Artificial Sequence
  Synthetic
gcagcucagcacatctgcua

SEQ ID NO: 7273 - DNA, 22 bp, Artificial Sequence
  Synthetic
agtgcttccugagagagaaugc

SEQ ID NO: 7274 - DNA, 25 bp, Artificial Sequence
  Synthetic
ctgtcctcucactgccatgatuaag

SEQ ID NO: 7275 - DNA, 21 bp, Artificial Sequence
  Synthetic
cacgtcguaggaggcttcuaa

SEQ ID NO: 7276 - DNA, 22 bp, Artificial Sequence
  Synthetic
ctgtctuacaggcagccugaat

SEQ ID NO: 7277 - DNA, 25 bp, Artificial Sequence
  Synthetic
ggcaggtgtuacaaggacaaaaaug

SEQ ID NO: 7278 - DNA, 23 bp, Artificial Sequence
  Synthetic
gccctcttgaugtcatagagguc

SEQ ID NO: 7279 - DNA, 22 bp, Artificial Sequence
  Synthetic
ttctcaccgaacuccctgttuc

SEQ ID NO: 7280 - DNA, 26 bp, Artificial Sequence
  Synthetic
ctttaaaaucagcaaccacucaacca

SEQ ID NO: 7281 - DNA, 25 bp, Artificial Sequence
  Synthetic
gtgauccagtgtttugcagaaacag

SEQ ID NO: 7282 - DNA, 18 bp, Artificial Sequence
  Synthetic
gcgagggutctccgggua

SEQ ID NO: 7283 - DNA, 17 bp, Artificial Sequence
  Synthetic
ccauggccctugcggat

SEQ ID NO: 7284 - DNA, 17 bp, Artificial Sequence
  Synthetic
gcgucgacggcgacuac

SEQ ID NO: 7285 - DNA, 18 bp, Artificial Sequence
  Synthetic
tcaugcccccgacguaga

SEQ ID NO: 7286 - DNA, 19 bp, Artificial Sequence
  Synthetic
accaccuaccgcatgtucc

SEQ ID NO: 7287 - DNA, 17 bp, Artificial Sequence
  Synthetic
gatgguggccucggaca

SEQ ID NO: 7288 - DNA, 23 bp, Artificial Sequence
  Synthetic
ccttccaggcugacttctgtcua

SEQ ID NO: 7289 - DNA, 22 bp, Artificial Sequence
  Synthetic
tcagctcccuaaatcctccuca

SEQ ID NO: 7290 - DNA, 23 bp, Artificial Sequence
  Synthetic
gtctgcatcaucaaagctgctuc

SEQ ID NO: 7291 - DNA, 21 bp, Artificial Sequence
  Synthetic
acctcagcaugcagaacucac

SEQ ID NO: 7292 - DNA, 22 bp, Artificial Sequence
  Synthetic
gacaucagccauagaaggcagt

SEQ ID NO: 7293 - DNA, 23 bp, Artificial Sequence
  Synthetic
ccagttcauccaccatcuggaag

SEQ ID NO: 7294 - DNA, 22 bp, Artificial Sequence
  Synthetic
cggagataacugggtgtgtuct

SEQ ID NO: 7295 - DNA, 21 bp, Artificial Sequence
  Synthetic
gcctggcccuaatggttugaa

SEQ ID NO: 7296 - DNA, 22 bp, Artificial Sequence
  Synthetic
tcagccataacautgacccgut

SEQ ID NO: 7297 - DNA, 28 bp, Artificial Sequence
  Synthetic
ggatcttcgtcutgttgtaacactttuc

SEQ ID NO: 7298 - DNA, 20 bp, Artificial Sequence
  Synthetic
tggaggaggugggcatcuac

SEQ ID NO: 7299 - DNA, 21 bp, Artificial Sequence
  Synthetic
gatctcaucgcggacaccaut

SEQ ID NO: 7300 - DNA, 17 bp, Artificial Sequence
  Synthetic
cccgcugctttggucct

SEQ ID NO: 7301 - DNA, 22 bp, Artificial Sequence
  Synthetic
ccagctgucagtcatggtgaua

SEQ ID NO: 7302 - DNA, 26 bp, Artificial Sequence
  Synthetic
tgtacaucagtgactgugaaaaagca

SEQ ID NO: 7303 - DNA, 18 bp, Artificial Sequence
  Synthetic
agctgtgugtgctgcugt

SEQ ID NO: 7304 - DNA, 22 bp, Artificial Sequence
  Synthetic
tgagacttcugcccagactuca

SEQ ID NO: 7305 - DNA, 21 bp, Artificial Sequence
  Synthetic
ctgaaugccactgagaaugcc

SEQ ID NO: 7306 - DNA, 25 bp, Artificial Sequence
  Synthetic
tcaacuaaaagaaaggcagctguca

SEQ ID NO: 7307 - DNA, 22 bp, Artificial Sequence
  Synthetic
ttgcctugcctttgtgttucag

SEQ ID NO: 7308 - DNA, 28 bp, Artificial Sequence
  Synthetic
accaccaaucacaaatgtatagugaaaa

SEQ ID NO: 7309 - DNA, 31 bp, Artificial Sequence
  Synthetic
tgactgtagatgaucagtcagtttatccuaa

SEQ ID NO: 7310 - DNA, 27 bp, Artificial Sequence
  Synthetic
tgtttcagacttugaatagcagagaut

SEQ ID NO: 7311 - DNA, 25 bp, Artificial Sequence
  Synthetic
tgaugaaccactgcugaaaagaaca

SEQ ID NO: 7312 - DNA, 22 bp, Artificial Sequence
  Synthetic
tggtagaggagcuggataugcc

SEQ ID NO: 7313 - DNA, 23 bp, Artificial Sequence
  Synthetic
actcaccuttgttgtuggacact

SEQ ID NO: 7314 - DNA, 24 bp, Artificial Sequence
  Synthetic
cataugggcaacaaagctauggaa

SEQ ID NO: 7315 - DNA, 23 bp, Artificial Sequence
  Synthetic
cuagccagaaugacccaaaaauc

SEQ ID NO: 7316 - DNA, 22 bp, Artificial Sequence
  Synthetic
ttgctcguagctttgtagcaut

SEQ ID NO: 7317 - DNA, 23 bp, Artificial Sequence
  Synthetic
tgtaacccccugtgctagatuga

SEQ ID NO: 7318 - DNA, 28 bp, Artificial Sequence
  Synthetic
ttctcttctctcuctttcagctatucct

SEQ ID NO: 7319 - DNA, 20 bp, Artificial Sequence
  Synthetic
tggguaactagugggaggct

SEQ ID NO: 7320 - DNA, 25 bp, Artificial Sequence
  Synthetic
cattggctgtuaaacgtggaaacut

SEQ ID NO: 7321 - DNA, 22 bp, Artificial Sequence
  Synthetic
caccgtgtcuagtcccacttut

SEQ ID NO: 7322 - DNA, 30 bp, Artificial Sequence
  Synthetic
aatggtggtataguagatagctatgtgugt

SEQ ID NO: 7323 - DNA, 27 bp, Artificial Sequence
  Synthetic
agcacgataugaagcacaactagaaut

SEQ ID NO: 7324 - DNA, 23 bp, Artificial Sequence
  Synthetic
caacccaugatccacatcuacct

SEQ ID NO: 7325 - DNA, 25 bp, Artificial Sequence
  Synthetic
tccctcaugccatattctauagcca

SEQ ID NO: 7326 - DNA, 22 bp, Artificial Sequence
  Synthetic
gatagaggaggcutcccuccaa

SEQ ID NO: 7327 - DNA, 21 bp, Artificial Sequence
  Synthetic
gtggcttcacucgtaggguat

SEQ ID NO: 7328 - DNA, 22 bp, Artificial Sequence
  Synthetic
ttcctcaccccutcccattcua

SEQ ID NO: 7329 - DNA, 28 bp, Artificial Sequence
  Synthetic
aaataaatctgguagtcaatgcagcuct

SEQ ID NO: 7330 - DNA, 28 bp, Artificial Sequence
  Synthetic
tggttttgtcauactttgacctttguct

SEQ ID NO: 7331 - DNA, 26 bp, Artificial Sequence
  Synthetic
gccaagacttguctgaagctgatuaa

SEQ ID NO: 7332 - DNA, 21 bp, Artificial Sequence
  Synthetic
tgccaugggaaugaacacagg

SEQ ID NO: 7333 - DNA, 20 bp, Artificial Sequence
  Synthetic
acttcccaugcctgggttug

SEQ ID NO: 7334 - DNA, 21 bp, Artificial Sequence
  Synthetic
aaaaaggcagutcctggugga

SEQ ID NO: 7335 - DNA, 28 bp, Artificial Sequence
  Synthetic
caaaucccagcatatauaacagaagggt

SEQ ID NO: 7336 - DNA, 26 bp, Artificial Sequence
  Synthetic
tgttttcutctctttaguggcacact

SEQ ID NO: 7337 - DNA, 28 bp, Artificial Sequence
  Synthetic
caaaagatttcaucacttacgctgtuga

SEQ ID NO: 7338 - DNA, 25 bp, Artificial Sequence
  Synthetic
caaguaaatcagaugccgacacaac

SEQ ID NO: 7339 - DNA, 27 bp, Artificial Sequence
  Synthetic
tgtcatttacugacacaaccaauacca

SEQ ID NO: 7340 - DNA, 28 bp, Artificial Sequence
  Synthetic
aatgctgacaugatattacagtgguagg

SEQ ID NO: 7341 - DNA, 25 bp, Artificial Sequence
  Synthetic
tttgcagattcauacatgtccccut

SEQ ID NO: 7342 - DNA, 25 bp, Artificial Sequence
  Synthetic
ttgtgtgtgcagugagtttttgtut

SEQ ID NO: 7343 - DNA, 25 bp, Artificial Sequence
  Synthetic
gttattcgaggcaucatctggttug

SEQ ID NO: 7344 - DNA, 29 bp, Artificial Sequence
  Synthetic
ctataatgaagcaguttggtgatttgugt

SEQ ID NO: 7345 - DNA, 25 bp, Artificial Sequence
  Synthetic
gacggagucaaagggauatttgtua

SEQ ID NO: 7346 - DNA, 22 bp, Artificial Sequence
  Synthetic
tcaccatacucccccaagcaua

SEQ ID NO: 7347 - DNA, 21 bp, Artificial Sequence
  Synthetic
ggaagttgugttgttgguggt

SEQ ID NO: 7348 - DNA, 22 bp, Artificial Sequence
  Synthetic
agtgaattcucaggccatugct

SEQ ID NO: 7349 - DNA, 25 bp, Artificial Sequence
  Synthetic
tgggttcctauactgaggtccuaac

SEQ ID NO: 7350 - DNA, 23 bp, Artificial Sequence
  Synthetic
aagaacuacgacaggcactgaug

SEQ ID NO: 7351 - DNA, 28 bp, Artificial Sequence
  Synthetic
caaaaguaccaccaaatactuacaggga

SEQ ID NO: 7352 - DNA, 23 bp, Artificial Sequence
  Synthetic
tctagcttguccttaaggccuct

SEQ ID NO: 7353 - DNA, 19 bp, Artificial Sequence
  Synthetic
cacaccuggccaagctuac

SEQ ID NO: 7354 - DNA, 28 bp, Artificial Sequence
  Synthetic
tcaacggtttauctaagttgtguaagca

SEQ ID NO: 7355 - DNA, 29 bp, Artificial Sequence
  Synthetic
ctaggcttcagauaagttttgccaaaaut

SEQ ID NO: 7356 - DNA, 23 bp, Artificial Sequence
  Synthetic
tccuttccauaccgaaccaaagc

SEQ ID NO: 7357 - DNA, 23 bp, Artificial Sequence
  Synthetic
agttggaacucccacacaaaucc

SEQ ID NO: 7358 - DNA, 20 bp, Artificial Sequence
  Synthetic
catguccaccaagugaggga

SEQ ID NO: 7359 - DNA, 20 bp, Artificial Sequence
  Synthetic
gcccctaugtcccaacugac

SEQ ID NO: 7360 - DNA, 27 bp, Artificial Sequence
  Synthetic
accttattttctugtctcctttgugct

SEQ ID NO: 7361 - DNA, 22 bp, Artificial Sequence
  Synthetic
gcatcccggguttcttcttgut

SEQ ID NO: 7362 - DNA, 20 bp, Artificial Sequence
  Synthetic
ggaccgcuttgtcuacacct

SEQ ID NO: 7363 - DNA, 19 bp, Artificial Sequence
  Synthetic
agcaucccacaggcctcua

SEQ ID NO: 7364 - DNA, 20 bp, Artificial Sequence
  Synthetic
ctcattgcccuctgctgcua

SEQ ID NO: 7365 - DNA, 21 bp, Artificial Sequence
  Synthetic
catcctccugcgaagcattug

SEQ ID NO: 7366 - DNA, 20 bp, Artificial Sequence
  Synthetic
ccaccugcagcaguggaaat

SEQ ID NO: 7367 - DNA, 22 bp, Artificial Sequence
  Synthetic
gtcatgggaggugggttcauac

SEQ ID NO: 7368 - DNA, 23 bp, Artificial Sequence
  Synthetic
gtgcutagtatcctucacgccaa

SEQ ID NO: 7369 - DNA, 19 bp, Artificial Sequence
  Synthetic
ctgctgaccuggcatggua

SEQ ID NO: 7370 - DNA, 21 bp, Artificial Sequence
  Synthetic
caggaauaggccctggaaugg

SEQ ID NO: 7371 - DNA, 27 bp, Artificial Sequence
  Synthetic
ctatctgtcccauatttccttgtugca

SEQ ID NO: 7372 - DNA, 18 bp, Artificial Sequence
  Synthetic
cccaaggaugcagccuca

SEQ ID NO: 7373 - DNA, 20 bp, Artificial Sequence
  Synthetic
ttgccatgccuggattgcua

SEQ ID NO: 7374 - DNA, 20 bp, Artificial Sequence
  Synthetic
ccctctccuttgacagguca

SEQ ID NO: 7375 - DNA, 21 bp, Artificial Sequence
  Synthetic
cccagttgcucttccagtuct

SEQ ID NO: 7376 - DNA, 17 bp, Artificial Sequence
  Synthetic
cuggccccacuggaaga

SEQ ID NO: 7377 - DNA, 22 bp, Artificial Sequence
  Synthetic
ctacctcgaguctgatgagcug

SEQ ID NO: 7378 - DNA, 27 bp, Artificial Sequence
  Synthetic
gcaagatcttcaucattgtggaacuca

SEQ ID NO: 7379 - DNA, 23 bp, Artificial Sequence
  Synthetic
gaacctcttutccagcatgucct

SEQ ID NO: 7380 - DNA, 20 bp, Artificial Sequence
  Synthetic
ggtaatuccccggugggaaa

SEQ ID NO: 7381 - DNA, 19 bp, Artificial Sequence
  Synthetic
gcccgagaggutcgttgua

SEQ ID NO: 7382 - DNA, 24 bp, Artificial Sequence
  Synthetic
cttcgaccauggaggtcauaaagg

SEQ ID NO: 7383 - DNA, 25 bp, Artificial Sequence
  Synthetic
tggatttgaggaugattcaggugag

SEQ ID NO: 7384 - DNA, 25 bp, Artificial Sequence
  Synthetic
gggcagttucccacagatattcuaa

SEQ ID NO: 7385 - DNA, 20 bp, Artificial Sequence
  Synthetic
cgaagttccugcctggugac

SEQ ID NO: 7386 - DNA, 27 bp, Artificial Sequence
  Synthetic
ggatctttacaggccautttctcagua

SEQ ID NO: 7387 - DNA, 20 bp, Artificial Sequence
  Synthetic
tcatgagcacgugagcucag

SEQ ID NO: 7388 - DNA, 22 bp, Artificial Sequence
  Synthetic
gggaaatuggcagggtaacuca

SEQ ID NO: 7389 - DNA, 21 bp, Artificial Sequence
  Synthetic
gcagcuccaagaaaggtcuca

SEQ ID NO: 7390 - DNA, 23 bp, Artificial Sequence
  Synthetic
ttttgggtcuccatgatgauggg

SEQ ID NO: 7391 - DNA, 24 bp, Artificial Sequence
  Synthetic
ctggatgctugctcactagtauct

SEQ ID NO: 7392 - DNA, 20 bp, Artificial Sequence
  Synthetic
gaaggcucggattgugggaa

SEQ ID NO: 7393 - DNA, 24 bp, Artificial Sequence
  Synthetic
ctcctatgtucagggtatggugac

SEQ ID NO: 7394 - DNA, 21 bp, Artificial Sequence
  Synthetic
tgtcttggaaacuggcgtuca

SEQ ID NO: 7395 - DNA, 19 bp, Artificial Sequence
  Synthetic
tgcagacgaucccacugac

SEQ ID NO: 7396 - DNA, 21 bp, Artificial Sequence
  Synthetic
ggcagauctggaugagaccct

SEQ ID NO: 7397 - DNA, 24 bp, Artificial Sequence
  Synthetic
ggtgtaccaguttaaggagaugcc

SEQ ID NO: 7398 - DNA, 24 bp, Artificial Sequence
  Synthetic
aggugtttctgtctugcagaagag

SEQ ID NO: 7399 - DNA, 19 bp, Artificial Sequence
  Synthetic
acagcugggactcagguga

SEQ ID NO: 7400 - DNA, 20 bp, Artificial Sequence
  Synthetic
gccttgagutcaggcacugg

SEQ ID NO: 7401 - DNA, 24 bp, Artificial Sequence
  Synthetic
acttttcutctctccucccaccat

SEQ ID NO: 7402 - DNA, 21 bp, Artificial Sequence
  Synthetic
tgggctguagggtaauagcca

SEQ ID NO: 7403 - DNA, 21 bp, Artificial Sequence
  Synthetic
agctctcuccaccccctatut

SEQ ID NO: 7404 - DNA, 22 bp, Artificial Sequence
  Synthetic
ccugaagaacucgaacgggaac

SEQ ID NO: 7405 - DNA, 17 bp, Artificial Sequence
  Synthetic
ggtugcccgaagccgua

SEQ ID NO: 7406 - DNA, 20 bp, Artificial Sequence
  Synthetic
cacccucaaccaactgcuca

SEQ ID NO: 7407 - DNA, 18 bp, Artificial Sequence
  Synthetic
aacacugcgaggccaugt

SEQ ID NO: 7408 - DNA, 21 bp, Artificial Sequence
  Synthetic
gggacuaacccatacucgcag

SEQ ID NO: 7409 - DNA, 26 bp, Artificial Sequence
  Synthetic
catctaccugctgtgtauaagagagg

SEQ ID NO: 7410 - DNA, 21 bp, Artificial Sequence
  Synthetic
ctctcagccuccatacuccca

SEQ ID NO: 7411 - DNA, 18 bp, Artificial Sequence
  Synthetic
gctgcugaggttgcugct

SEQ ID NO: 7412 - DNA, 33 bp, Artificial Sequence
  Synthetic
atctttctgcctaauattactaatccatgtuct

SEQ ID NO: 7413 - DNA, 23 bp, Artificial Sequence
  Synthetic
agctggattacuctgctctccut

SEQ ID NO: 7414 - DNA, 21 bp, Artificial Sequence
  Synthetic
gatggagagcauttgtucgca

SEQ ID NO: 7415 - DNA, 22 bp, Artificial Sequence
  Synthetic
gtgtguatctgtccuccggaag

SEQ ID NO: 7416 - DNA, 22 bp, Artificial Sequence
  Synthetic
cctaacauggccaataugccac

SEQ ID NO: 7417 - DNA, 22 bp, Artificial Sequence
  Synthetic
tttcttgcacugacaccctcuc

SEQ ID NO: 7418 - DNA, 24 bp, Artificial Sequence
  Synthetic
gggatguaaagttaacuccagcca

SEQ ID NO: 7419 - DNA, 29 bp, Artificial Sequence
  Synthetic
tcactgaaaaagauaggacacaaagtuga

SEQ ID NO: 7420 - DNA, 27 bp, Artificial Sequence
  Synthetic
cagctcctugaaaaagcagtataucca

SEQ ID NO: 7421 - DNA, 19 bp, Artificial Sequence
  Synthetic
ccgcugaccccatcctuac

SEQ ID NO: 7422 - DNA, 22 bp, Artificial Sequence
  Synthetic
acatuccagaagcggaatucca

SEQ ID NO: 7423 - DNA, 21 bp, Artificial Sequence
  Synthetic
cccugtcttuacgagcacaag

SEQ ID NO: 7424 - DNA, 21 bp, Artificial Sequence
  Synthetic
ccgaatcucatgcctuccaac

SEQ ID NO: 7425 - DNA, 19 bp, Artificial Sequence
  Synthetic
gtggcgaagccugauccat

SEQ ID NO: 7426 - DNA, 23 bp, Artificial Sequence
  Synthetic
ccttccccucagcaagatgtaua

SEQ ID NO: 7427 - DNA, 21 bp, Artificial Sequence
  Synthetic
atgttttgcugggcattggug

SEQ ID NO: 7428 - DNA, 21 bp, Artificial Sequence
  Synthetic
aaggcccccuccatctaacua

SEQ ID NO: 7429 - DNA, 22 bp, Artificial Sequence
  Synthetic
cagagtgcaggaauggagacut

SEQ ID NO: 7430 - DNA, 21 bp, Artificial Sequence
  Synthetic
gcagagagcacaugggcatua

SEQ ID NO: 7431 - DNA, 27 bp, Artificial Sequence
  Synthetic
acattcccautgtctacacuaagaaga

SEQ ID NO: 7432 - DNA, 29 bp, Artificial Sequence
  Synthetic
aagaggaaguagttgaaaatgaugaggag

SEQ ID NO: 7433 - DNA, 26 bp, Artificial Sequence
  Synthetic
tccaccacaaauggatcattcttcug

SEQ ID NO: 7434 - DNA, 21 bp, Artificial Sequence
  Synthetic
ctagcacctugaccgaggaug

SEQ ID NO: 7435 - DNA, 20 bp, Artificial Sequence
  Synthetic
cctgccaguccagaagggua

SEQ ID NO: 7436 - DNA, 21 bp, Artificial Sequence
  Synthetic
cutggagatgcuccgggaaaa

SEQ ID NO: 7437 - DNA, 19 bp, Artificial Sequence
  Synthetic
tcagcugaagggcaaacug

SEQ ID NO: 7438 - DNA, 18 bp, Artificial Sequence
  Synthetic
cagctcgugccatugcag

SEQ ID NO: 7439 - DNA, 18 bp, Artificial Sequence
  Synthetic
cgccgcaucatguccaca

SEQ ID NO: 7440 - DNA, 19 bp, Artificial Sequence
  Synthetic
gccatcaugcagcctggut

SEQ ID NO: 7441 - DNA, 28 bp, Artificial Sequence
  Synthetic
gcaacaaactaguaagttgctctagguc

SEQ ID NO: 7442 - DNA, 24 bp, Artificial Sequence
  Synthetic
actttgcuggagtttcaagcugat

SEQ ID NO: 7443 - DNA, 20 bp, Artificial Sequence
  Synthetic
ccccttauggttccgaugcc

SEQ ID NO: 7444 - DNA, 28 bp, Artificial Sequence
  Synthetic
gttgccaaagaauaagagaautctucat

SEQ ID NO: 7445 - DNA, 27 bp, Artificial Sequence
  Synthetic
ccctctgaagaagauatgatcgaaugg

SEQ ID NO: 7446 - DNA, 26 bp, Artificial Sequence
  Synthetic
cagtttaaagggaucaggagaaucca

SEQ ID NO: 7447 - DNA, 25 bp, Artificial Sequence
  Synthetic
tcctcuacccacagtactttaaugc

SEQ ID NO: 7448 - DNA, 20 bp, Artificial Sequence
  Synthetic
cctgaaucgcttgcugcaac

SEQ ID NO: 7449 - DNA, 23 bp, Artificial Sequence
  Synthetic
ggtgatgagguttcagctgugaa

SEQ ID NO: 7450 - DNA, 28 bp, Artificial Sequence
  Synthetic
gctattgaaacugaagccttgaatccut

SEQ ID NO: 7451 - DNA, 23 bp, Artificial Sequence
  Synthetic
gtagacucaagttcgcugacagg

SEQ ID NO: 7452 - DNA, 22 bp, Artificial Sequence
  Synthetic
ggctcagacuctaggttgcuct

SEQ ID NO: 7453 - DNA, 24 bp, Artificial Sequence
  Synthetic
gtcagttaaautggtgcaguagcc

SEQ ID NO: 7454 - DNA, 27 bp, Artificial Sequence
  Synthetic
ttcatctuaagucaggaaaagcaacua

SEQ ID NO: 7455 - DNA, 24 bp, Artificial Sequence
  Synthetic
tgaugaactggaugagcagaaagc

SEQ ID NO: 7456 - DNA, 27 bp, Artificial Sequence
  Synthetic
ggttatccatccucctaatcctgaauc

SEQ ID NO: 7457 - DNA, 30 bp, Artificial Sequence
  Synthetic
ttcaccacatttuagtgagaaagcaattut

SEQ ID NO: 7458 - DNA, 27 bp, Artificial Sequence
  Synthetic
gcagaaacuggaattgauacaaaacca

SEQ ID NO: 7459 - DNA, 30 bp, Artificial Sequence
  Synthetic
cctgaaaactgauaaagatatggacggaut

SEQ ID NO: 7460 - DNA, 23 bp, Artificial Sequence
  Synthetic
tgcaaacucatctctgucaagca

SEQ ID NO: 7461 - DNA, 30 bp, Artificial Sequence
  Synthetic
accattcctagcucataaactttctttuct

SEQ ID NO: 7462 - DNA, 27 bp, Artificial Sequence
  Synthetic
gcatttctuacaaatcttgguggagga

SEQ ID NO: 7463 - DNA, 26 bp, Artificial Sequence
  Synthetic
gttgguagagggagaatgctctuaac

SEQ ID NO: 7464 - DNA, 23 bp, Artificial Sequence
  Synthetic
agtatcaagtcuggaagcccuga

SEQ ID NO: 7465 - DNA, 27 bp, Artificial Sequence
  Synthetic
atggaaggcagguaaatggtgataaut

SEQ ID NO: 7466 - DNA, 26 bp, Artificial Sequence
  Synthetic
agagtttgcacaagutccttcttcut

SEQ ID NO: 7467 - DNA, 26 bp, Artificial Sequence
  Synthetic
cctgttctagaaguaggcagaacuga

SEQ ID NO: 7468 - DNA, 23 bp, Artificial Sequence
  Synthetic
tccagaccttutgggttttccug

SEQ ID NO: 7469 - DNA, 28 bp, Artificial Sequence
  Synthetic
agagacatttugatcatctacgugcaaa

SEQ ID NO: 7470 - DNA, 27 bp, Artificial Sequence
  Synthetic
aaaggttctcuggagagttaucaaagc

SEQ ID NO: 7471 - DNA, 26 bp, Artificial Sequence
  Synthetic
tgcaagactgaauttcaaatgcgaut

SEQ ID NO: 7472 - DNA, 21 bp, Artificial Sequence
  Synthetic
gcgcuccattaacgucacaag

SEQ ID NO: 7473 - DNA, 27 bp, Artificial Sequence
  Synthetic
tcattctgugcttaacttuggaaaaca

SEQ ID NO: 7474 - DNA, 19 bp, Artificial Sequence
  Synthetic
ggucggaagugcagaggac

SEQ ID NO: 7475 - DNA, 25 bp, Artificial Sequence
  Synthetic
aguctctgaagagaugaggaggaac

SEQ ID NO: 7476 - DNA, 17 bp, Artificial Sequence
  Synthetic
ctcgcccutgucccact

SEQ ID NO: 7477 - DNA, 18 bp, Artificial Sequence
  Synthetic
ccucatgugcccagggaa

SEQ ID NO: 7478 - DNA, 24 bp, Artificial Sequence
  Synthetic
actgacgttcuccctgaaaatucc

SEQ ID NO: 7479 - DNA, 30 bp, Artificial Sequence
  Synthetic
acatttccatccuatgtgtcttttactuca

SEQ ID NO: 7480 - DNA, 19 bp, Artificial Sequence
  Synthetic
gtcgcagaacugtccggut

SEQ ID NO: 7481 - DNA, 24 bp, Artificial Sequence
  Synthetic
cctactccucactcaccttttugt

SEQ ID NO: 7482 - DNA, 29 bp, Artificial Sequence
  Synthetic
cactagtgaaatuacagaagttaccugaa

SEQ ID NO: 7483 - DNA, 22 bp, Artificial Sequence
  Synthetic
tcctcccauaaggtcctgugat

SEQ ID NO: 7484 - DNA, 19 bp, Artificial Sequence
  Synthetic
gcagcugtttctgcugcaa

SEQ ID NO: 7485 - DNA, 22 bp, Artificial Sequence
  Synthetic
cctctgtgugtttcctgaugga

SEQ ID NO: 7486 - DNA, 21 bp, Artificial Sequence
  Synthetic
ggccataccccuaaagcacuc

SEQ ID NO: 7487 - DNA, 22 bp, Artificial Sequence
  Synthetic
gtttggagucccaggatctcuc

SEQ ID NO: 7488 - DNA, 20 bp, Artificial Sequence
  Synthetic
atggccaaacuacugccaca

SEQ ID NO: 7489 - DNA, 22 bp, Artificial Sequence
  Synthetic
aauttagguccccagacaagcc

SEQ ID NO: 7490 - DNA, 22 bp, Artificial Sequence
  Synthetic
accaggaccagaautctuccca

SEQ ID NO: 7491 - DNA, 28 bp, Artificial Sequence
  Synthetic
acttcctacagaaggaaucagtttgtut

SEQ ID NO: 7492 - DNA, 25 bp, Artificial Sequence
  Synthetic
gcatgctutttcctgaugagaaaga

SEQ ID NO: 7493 - DNA, 23 bp, Artificial Sequence
  Synthetic
cttacctaggcuttgggatuggg

SEQ ID NO: 7494 - DNA, 20 bp, Artificial Sequence
  Synthetic
gttguccagcagtgtuccct

SEQ ID NO: 7495 - DNA, 21 bp, Artificial Sequence
  Synthetic
gcagagaaugtggcatgtuga

SEQ ID NO: 7496 - DNA, 26 bp, Artificial Sequence
  Synthetic
ggattgtcugaagagatgttucagca

SEQ ID NO: 7497 - DNA, 21 bp, Artificial Sequence
  Synthetic
ggttatucccaggctccaugt

SEQ ID NO: 7498 - DNA, 21 bp, Artificial Sequence
  Synthetic
cctgcucagcagaagatggug

SEQ ID NO: 7499 - DNA, 19 bp, Artificial Sequence
  Synthetic
cggctgutagtcctcuggt

SEQ ID NO: 7500 - DNA, 22 bp, Artificial Sequence
  Synthetic
ctgctgcugcttccattaaguc

SEQ ID NO: 7501 - DNA, 23 bp, Artificial Sequence
  Synthetic
ggtgcuttatggttuggagggat

SEQ ID NO: 7502 - DNA, 23 bp, Artificial Sequence
  Synthetic
gttccaccccgutataccaugat

SEQ ID NO: 7503 - DNA, 25 bp, Artificial Sequence
  Synthetic
caagaggttuctctttggtcuagca

SEQ ID NO: 7504 - DNA, 20 bp, Artificial Sequence
  Synthetic
ccaguacagtcucccccaca

SEQ ID NO: 7505 - DNA, 19 bp, Artificial Sequence
  Synthetic
gccuccaggctugcaaagt

SEQ ID NO: 7506 - DNA, 21 bp, Artificial Sequence
  Synthetic
ggaactccggacauccctcut

SEQ ID NO: 7507 - DNA, 20 bp, Artificial Sequence
  Synthetic
gctggautgctcaucagggt

SEQ ID NO: 7508 - DNA, 25 bp, Artificial Sequence
  Synthetic
gcaacccaggaaacaugatgtttua

SEQ ID NO: 7509 - DNA, 17 bp, Artificial Sequence
  Synthetic
gcagcccucgggtcuct

SEQ ID NO: 7510 - DNA, 21 bp, Artificial Sequence
  Synthetic
gcggttgutgaacatgtugct

SEQ ID NO: 7511 - DNA, 28 bp, Artificial Sequence
  Synthetic
agattggagtugtttattcttcctugct

SEQ ID NO: 7512 - DNA, 21 bp, Artificial Sequence
  Synthetic
ggaaatcugggccaacatcug

SEQ ID NO: 7513 - DNA, 29 bp, Artificial Sequence
  Synthetic
attcctagcttcugtgataaatctaucct

SEQ ID NO: 7514 - DNA, 27 bp, Artificial Sequence
  Synthetic
cggagaacactucctaagtaaatacuc

SEQ ID NO: 7515 - DNA, 26 bp, Artificial Sequence
  Synthetic
ttctatttgtctugtcaactggccut

SEQ ID NO: 7516 - DNA, 23 bp, Artificial Sequence
  Synthetic
gtaaaggagcuggttctcaucca

SEQ ID NO: 7517 - DNA, 27 bp, Artificial Sequence
  Synthetic
aattttctatgagutccactgauggca

SEQ ID NO: 7518 - DNA, 23 bp, Artificial Sequence
  Synthetic
tgugaggaaccaactguaccaag

SEQ ID NO: 7519 - DNA, 28 bp, Artificial Sequence
  Synthetic
aaactcctgtaacucttctaggaaugga

SEQ ID NO: 7520 - DNA, 21 bp, Artificial Sequence
  Synthetic
catcatcugggtgcaccugat

SEQ ID NO: 7521 - DNA, 27 bp, Artificial Sequence
  Synthetic
tggctttctgtutattgtctcatguga

SEQ ID NO: 7522 - DNA, 28 bp, Artificial Sequence
  Synthetic
ttcagcaacuaaagttggtttauaggag

SEQ ID NO: 7523 - DNA, 23 bp, Artificial Sequence
  Synthetic
ctggaaactcuggacctggaaut

SEQ ID NO: 7524 - DNA, 22 bp, Artificial Sequence
  Synthetic
cttgcattautggttgguggca

SEQ ID NO: 7525 - DNA, 31 bp, Artificial Sequence
  Synthetic
tctagcatatagcugagtaatagccatgtua

SEQ ID NO: 7526 - DNA, 23 bp, Artificial Sequence
  Synthetic
tttgcccccaugtacaagaucaa

SEQ ID NO: 7527 - DNA, 25 bp, Artificial Sequence
  Synthetic
atauccacacagaaaacctguaccc

SEQ ID NO: 7528 - DNA, 24 bp, Artificial Sequence
  Synthetic
tctccttttccucctcttctccug

SEQ ID NO: 7529 - DNA, 21 bp, Artificial Sequence
  Synthetic
aatguagccattgguggcact

SEQ ID NO: 7530 - DNA, 24 bp, Artificial Sequence
  Synthetic
agtgccaucaagtgtcaauaccat

SEQ ID NO: 7531 - DNA, 22 bp, Artificial Sequence
  Synthetic
atgtgcatucctccttcaucac

SEQ ID NO: 7532 - DNA, 22 bp, Artificial Sequence
  Synthetic
ccaacatgccuttctcctugct

SEQ ID NO: 7533 - DNA, 22 bp, Artificial Sequence
  Synthetic
gggaaagaugcgatcgtaaguc

SEQ ID NO: 7534 - DNA, 22 bp, Artificial Sequence
  Synthetic
aggaaaagaugtggctguggag

SEQ ID NO: 7535 - DNA, 26 bp, Artificial Sequence
  Synthetic
actgatcattttuatccaaccaccut

SEQ ID NO: 7536 - DNA, 28 bp, Artificial Sequence
  Synthetic
aaacatcatccauctattagctgtgugt

SEQ ID NO: 7537 - DNA, 22 bp, Artificial Sequence
  Synthetic
gagaaggaagaccuggcttgut

SEQ ID NO: 7538 - DNA, 26 bp, Artificial Sequence
  Synthetic
gaaatttaacagggugttgttgugca

SEQ ID NO: 7539 - DNA, 24 bp, Artificial Sequence
  Synthetic
gttcatcugacagctgggaauagg

SEQ ID NO: 7540 - DNA, 20 bp, Artificial Sequence
  Synthetic
ctucaacaaggcgacgagug

SEQ ID NO: 7541 - DNA, 23 bp, Artificial Sequence
  Synthetic
caaacaagccuctgtctcucagt

SEQ ID NO: 7542 - DNA, 21 bp, Artificial Sequence
  Synthetic
gatgcaguccacatagccuga

SEQ ID NO: 7543 - DNA, 25 bp, Artificial Sequence
  Synthetic
cucagcagacaaaaucagcaaagag

SEQ ID NO: 7544 - DNA, 20 bp, Artificial Sequence
  Synthetic
ggtcgguccttgtcuccaga

SEQ ID NO: 7545 - DNA, 24 bp, Artificial Sequence
  Synthetic
cacaaagugccagtccttatcuca

SEQ ID NO: 7546 - DNA, 22 bp, Artificial Sequence
  Synthetic
ggagcagcacuttcctctgaut

SEQ ID NO: 7547 - DNA, 22 bp, Artificial Sequence
  Synthetic
gcttccagagcaggauaggaug

SEQ ID NO: 7548 - DNA, 25 bp, Artificial Sequence
  Synthetic
gagaagttacccgugagttcgtaut

SEQ ID NO: 7549 - DNA, 22 bp, Artificial Sequence
  Synthetic
gcctcutggaagaugccaaaga

SEQ ID NO: 7550 - DNA, 31 bp, Artificial Sequence
  Synthetic
ctccacaaaagtugatcatttttgaaatgua

SEQ ID NO: 7551 - DNA, 23 bp, Artificial Sequence
  Synthetic
gataggcccucttttgcugaaac

SEQ ID NO: 7552 - DNA, 28 bp, Artificial Sequence
  Synthetic
gtaagagaagcuctaaagaaucaaggca

SEQ ID NO: 7553 - DNA, 23 bp, Artificial Sequence
  Synthetic
tcatgcuggagccaaatttccua

SEQ ID NO: 7554 - DNA, 27 bp, Artificial Sequence
  Synthetic
caagcattttuggaggaaatctauggt

SEQ ID NO: 7555 - DNA, 28 bp, Artificial Sequence
  Synthetic
cctctcgttttcutctttcttaccttuc

SEQ ID NO: 7556 - DNA, 23 bp, Artificial Sequence
  Synthetic
gtagccaguccatgctuaaaggt

SEQ ID NO: 7557 - DNA, 23 bp, Artificial Sequence
  Synthetic
gcagtctaaucaatggcagctuc

SEQ ID NO: 7558 - DNA, 29 bp, Artificial Sequence
  Synthetic
gcuacaaaatcataaagugcaacgaagag

SEQ ID NO: 7559 - DNA, 28 bp, Artificial Sequence
  Synthetic
gaattcccttcccutcttatgtcttuca

SEQ ID NO: 7560 - DNA, 24 bp, Artificial Sequence
  Synthetic
gaagatatugaagccggtctcugt

SEQ ID NO: 7561 - DNA, 19 bp, Artificial Sequence
  Synthetic
guacgcgagaguagggaug

SEQ ID NO: 7562 - DNA, 28 bp, Artificial Sequence
  Synthetic
cgtgaatcuttttatgtctucagcaaca

SEQ ID NO: 7563 - DNA, 24 bp, Artificial Sequence
  Synthetic
tggaatgggcutctgaaagtucaa

SEQ ID NO: 7564 - DNA, 27 bp, Artificial Sequence
  Synthetic
gcaatucttcaatctguaaaagccaga

SEQ ID NO: 7565 - DNA, 27 bp, Artificial Sequence
  Synthetic
cactgcaatataaguggcaacttcaut

SEQ ID NO: 7566 - DNA, 27 bp, Artificial Sequence
  Synthetic
tcccattttcaucacgtggaatacaut

SEQ ID NO: 7567 - DNA, 31 bp, Artificial Sequence
  Synthetic
gcatctggtcutttcttctttgtatuagagt

SEQ ID NO: 7568 - DNA, 21 bp, Artificial Sequence
  Synthetic
gcatggcagutcaaaggtugg

SEQ ID NO: 7569 - DNA, 26 bp, Artificial Sequence
  Synthetic
cgcagaactataugactgtttctcut

SEQ ID NO: 7570 - DNA, 29 bp, Artificial Sequence
  Synthetic
gtaaagcataaaucgcacttgagattcug

SEQ ID NO: 7571 - DNA, 26 bp, Artificial Sequence
  Synthetic
agguatcatctcctugaagcacaaag

SEQ ID NO: 7572 - DNA, 24 bp, Artificial Sequence
  Synthetic
caacaggacugagagtacuccaga

SEQ ID NO: 7573 - DNA, 26 bp, Artificial Sequence
  Synthetic
ttgggttattugtgtgctgttucaag

SEQ ID NO: 7574 - DNA, 26 bp, Artificial Sequence
  Synthetic
ggcaaataaaugaaagcaatggugac

SEQ ID NO: 7575 - DNA, 19 bp, Artificial Sequence
  Synthetic
gggutagaacuggcaccca

SEQ ID NO: 7576 - DNA, 21 bp, Artificial Sequence
  Synthetic
ctuccagggaagguagtttug

SEQ ID NO: 7577 - DNA, 26 bp, Artificial Sequence
  Synthetic
accatctgucatcaaatttgucacga

SEQ ID NO: 7578 - DNA, 28 bp, Artificial Sequence
  Synthetic
ctgtcattggauccatgttcaaaatcuc

SEQ ID NO: 7579 - DNA, 27 bp, Artificial Sequence
  Synthetic
gccagctttttcaugaactatgggaua

SEQ ID NO: 7580 - DNA, 20 bp, Artificial Sequence
  Synthetic
aggttcuagacgcuggagct

SEQ ID NO: 7581 - DNA, 26 bp, Artificial Sequence
  Synthetic
cgctgttauccaggtttctgttgtua

SEQ ID NO: 7582 - DNA, 26 bp, Artificial Sequence
  Synthetic
cagaaatauccaaggaggaagccuat

SEQ ID NO: 7583 - DNA, 21 bp, Artificial Sequence
  Synthetic
ccattcgauctggtgatuggg

SEQ ID NO: 7584 - DNA, 17 bp, Artificial Sequence
  Synthetic
ctggcucccccatccug

SEQ ID NO: 7585 - DNA, 22 bp, Artificial Sequence
  Synthetic
acctgttgugctcactgctuag

SEQ ID NO: 7586 - DNA, 17 bp, Artificial Sequence
  Synthetic
gccucaacggcaccuct

SEQ ID NO: 7587 - DNA, 19 bp, Artificial Sequence
  Synthetic
tcgguggtacucaccccat

SEQ ID NO: 7588 - DNA, 19 bp, Artificial Sequence
  Synthetic
aaagctgggugccctcaut

SEQ ID NO: 7589 - DNA, 22 bp, Artificial Sequence
  Synthetic
cgatgagagugacacugccaag

SEQ ID NO: 7590 - DNA, 18 bp, Artificial Sequence
  Synthetic
gggtgccutcagctgcuc

SEQ ID NO: 7591 - DNA, 17 bp, Artificial Sequence
  Synthetic
ggcctcgugaccacugt

SEQ ID NO: 7592 - DNA, 28 bp, Artificial Sequence
  Synthetic
atcccaccaacaaautaauaagccaaac

SEQ ID NO: 7593 - DNA, 31 bp, Artificial Sequence
  Synthetic
gagctaagtatcaaggauttcattctcctut

SEQ ID NO: 7594 - DNA, 21 bp, Artificial Sequence
  Synthetic
ccacccgugtccttcttcuag

SEQ ID NO: 7595 - DNA, 23 bp, Artificial Sequence
  Synthetic
aacgaactgguccctttgttcut

SEQ ID NO: 7596 - DNA, 21 bp, Artificial Sequence
  Synthetic
cgcttcuccaagtccccatug

SEQ ID NO: 7597 - DNA, 23 bp, Artificial Sequence
  Synthetic
cccactgatcuaaccctcctcut

SEQ ID NO: 7598 - DNA, 26 bp, Artificial Sequence
  Synthetic
tggtactucaaaataggtuggcacaa

SEQ ID NO: 7599 - DNA, 23 bp, Artificial Sequence
  Synthetic
gcaagaauagcaugaaccagcct

SEQ ID NO: 7600 - DNA, 30 bp, Artificial Sequence
  Synthetic
gctataggattatuctttttggtgggttuc

SEQ ID NO: 7601 - DNA, 25 bp, Artificial Sequence
  Synthetic
aatatggcautctctcaguccaacc

SEQ ID NO: 7602 - DNA, 31 bp, Artificial Sequence
  Synthetic
tgccatctttaagacugtttcatatagagua

SEQ ID NO: 7603 - DNA, 21 bp, Artificial Sequence
  Synthetic
tggcaacaucagccugaagac

SEQ ID NO: 7604 - DNA, 22 bp, Artificial Sequence
  Synthetic
gcagggauacctggaggaugat

SEQ ID NO: 7605 - DNA, 25 bp, Artificial Sequence
  Synthetic
ctagtttggtuttcctctcctuccc

SEQ ID NO: 7606 - DNA, 22 bp, Artificial Sequence
  Synthetic
tgagcuccagcaggaugaaccg

SEQ ID NO: 7607 - DNA, 26 bp, Artificial Sequence
  Synthetic
cctgttccucccagtttaagattugc

SEQ ID NO: 7608 - DNA, 21 bp, Artificial Sequence
  Synthetic
ggtctugccagcaaagcagua

SEQ ID NO: 7609 - DNA, 19 bp, Artificial Sequence
  Synthetic
ccatgutgcagcugaccac

SEQ ID NO: 7610 - DNA, 23 bp, Artificial Sequence
  Synthetic
gctttcaggguccatgtgacaut

SEQ ID NO: 7611 - DNA, 24 bp, Artificial Sequence
  Synthetic
gaccaccuggagacatagtacuga

SEQ ID NO: 7612 - DNA, 18 bp, Artificial Sequence
  Synthetic
cacgctugcagcgcttua

SEQ ID NO: 7613 - DNA, 19 bp, Artificial Sequence
  Synthetic
gtgccccugatcatugcag

SEQ ID NO: 7614 - DNA, 21 bp, Artificial Sequence
  Synthetic
aggaggagggugttgagtgut

SEQ ID NO: 7615 - DNA, 20 bp, Artificial Sequence
  Synthetic
tgctgggcaucttcaaccug

SEQ ID NO: 7616 - DNA, 23 bp, Artificial Sequence
  Synthetic
ctttcttcugcctttugcaacaa

SEQ ID NO: 7617 - DNA, 23 bp, Artificial Sequence
  Synthetic
agcacccaaaucaagaaaccugt

SEQ ID NO: 7618 - DNA, 25 bp, Artificial Sequence
  Synthetic
agctgauagaggagaagggtatugg

SEQ ID NO: 7619 - DNA, 24 bp, Artificial Sequence
  Synthetic
ccutggtgctaguggagaacaaaa

SEQ ID NO: 7620 - DNA, 22 bp, Artificial Sequence
  Synthetic
catcctttagggucctgaccug

SEQ ID NO: 7621 - DNA, 27 bp, Artificial Sequence
  Synthetic
gcatattttgccuttagtggtccugaa

SEQ ID NO: 7622 - DNA, 24 bp, Artificial Sequence
  Synthetic
ggtttccacuggagatgtatucca

SEQ ID NO: 7623 - DNA, 27 bp, Artificial Sequence
  Synthetic
aggcctaattcucatatctgtttcuct

SEQ ID NO: 7624 - DNA, 19 bp, Artificial Sequence
  Synthetic
cugacccauccaggacauc

SEQ ID NO: 7625 - DNA, 21 bp, Artificial Sequence
  Synthetic
ggagtatucccctccacugca

SEQ ID NO: 7626 - DNA, 30 bp, Artificial Sequence
  Synthetic
gttgcatatcaaugtgactaaaaacacuaa

SEQ ID NO: 7627 - DNA, 20 bp, Artificial Sequence
  Synthetic
agaagaaggcgucggaagug

SEQ ID NO: 7628 - DNA, 18 bp, Artificial Sequence
  Synthetic
cctucagcacccuggaca

SEQ ID NO: 7629 - DNA, 18 bp, Artificial Sequence
  Synthetic
gctgccaccaucctccuc

SEQ ID NO: 7630 - DNA, 17 bp, Artificial Sequence
  Synthetic
agcugccguggaaagca

SEQ ID NO: 7631 - DNA, 19 bp, Artificial Sequence
  Synthetic
gctggguaccaaggacugt

SEQ ID NO: 7632 - DNA, 23 bp, Artificial Sequence
  Synthetic
cccctcctuccaaatggactuaa

SEQ ID NO: 7633 - DNA, 23 bp, Artificial Sequence
  Synthetic
gacttggutttctgttugcacca

SEQ ID NO: 7634 - DNA, 23 bp, Artificial Sequence
  Synthetic
ccatcaccagcugaaaagucaca

SEQ ID NO: 7635 - DNA, 27 bp, Artificial Sequence
  Synthetic
gcaatacttactugtctgcagtttugg

SEQ ID NO: 7636 - DNA, 22 bp, Artificial Sequence
  Synthetic
ggtcggccaautaccatgtuca

SEQ ID NO: 7637 - DNA, 26 bp, Artificial Sequence
  Synthetic
gcaaatgaattugctgtcatgguaga

SEQ ID NO: 7638 - DNA, 29 bp, Artificial Sequence
  Synthetic
caaaggtattcugttgtttcatgttucct

SEQ ID NO: 7639 - DNA, 26 bp, Artificial Sequence
  Synthetic
tctctagguacagaaggcauaacact

SEQ ID NO: 7640 - DNA, 30 bp, Artificial Sequence
  Synthetic
tgacttttctttaggautcaggtgttcaut

SEQ ID NO: 7641 - DNA, 25 bp, Artificial Sequence
  Synthetic
acctgcaaaacaaguaacgtacuct

SEQ ID NO: 7642 - DNA, 25 bp, Artificial Sequence
  Synthetic
gcaucaagttgtcauggcaaaaaga

SEQ ID NO: 7643 - DNA, 24 bp, Artificial Sequence
  Synthetic
ggctctacaguagttttgcuccat

SEQ ID NO: 7644 - DNA, 25 bp, Artificial Sequence
  Synthetic
ttacagctauaaatgcaggctucga

SEQ ID NO: 7645 - DNA, 27 bp, Artificial Sequence
  Synthetic
gcctactaaaaautgatctgccttucc

SEQ ID NO: 7646 - DNA, 21 bp, Artificial Sequence
  Synthetic
gctactguccccauagggaga

SEQ ID NO: 7647 - DNA, 28 bp, Artificial Sequence
  Synthetic
caccacttcagautactcagttcactua

SEQ ID NO: 7648 - DNA, 26 bp, Artificial Sequence
  Synthetic
gacattccaaauggctgcaaacuaat

SEQ ID NO: 7649 - DNA, 25 bp, Artificial Sequence
  Synthetic
acccacaaaccacutctttacauca

SEQ ID NO: 7650 - DNA, 27 bp, Artificial Sequence
  Synthetic
acaatgacagucacctgatatcaacug

SEQ ID NO: 7651 - DNA, 24 bp, Artificial Sequence
  Synthetic
cggtgugggagtattagatuggat

SEQ ID NO: 7652 - DNA, 18 bp, Artificial Sequence
  Synthetic
cccttcgcccucgtccua

SEQ ID NO: 7653 - DNA, 31 bp, Artificial Sequence
  Synthetic
actatugaagaaaacaaatcacauggaaacc

SEQ ID NO: 7654 - DNA, 17 bp, Artificial Sequence
  Synthetic
gggugtcaggugggagt

SEQ ID NO: 7655 - DNA, 28 bp, Artificial Sequence
  Synthetic
gaaatttgtaagaugccttttagcgugt

SEQ ID NO: 7656 - DNA, 24 bp, Artificial Sequence
  Synthetic
tttcccacaguactcacaagtguc

SEQ ID NO: 7657 - DNA, 20 bp, Artificial Sequence
  Synthetic
ggagttugcgcttcuccaca

SEQ ID NO: 7658 - DNA, 18 bp, Artificial Sequence
  Synthetic
cggccautaacagugcca

SEQ ID NO: 7659 - DNA, 18 bp, Artificial Sequence
  Synthetic
ctcagcuccaugcagcac

SEQ ID NO: 7660 - DNA, 22 bp, Artificial Sequence
  Synthetic
tcgttctcgcucttgaactugg

SEQ ID NO: 7661 - DNA, 19 bp, Artificial Sequence
  Synthetic
agcugaagcgccacaugaa

SEQ ID NO: 7662 - DNA, 23 bp, Artificial Sequence
  Synthetic
ctgccagctcuctaagtctccua

SEQ ID NO: 7663 - DNA, 21 bp, Artificial Sequence
  Synthetic
ccaccaccgagacaucactug

SEQ ID NO: 7664 - DNA, 26 bp, Artificial Sequence
  Synthetic
ttccgtgttcgcuttctaagtagaut

SEQ ID NO: 7665 - DNA, 27 bp, Artificial Sequence
  Synthetic
cctcagtgatuaaacattgatgtuggt

SEQ ID NO: 7666 - DNA, 28 bp, Artificial Sequence
  Synthetic
gctcgauaaaaataagaatgucccccaa

SEQ ID NO: 7667 - DNA, 24 bp, Artificial Sequence
  Synthetic
ttgtgcutttgtttcuccaaccac

SEQ ID NO: 7668 - DNA, 21 bp, Artificial Sequence
  Synthetic
aaacgtugagccatctgugga

SEQ ID NO: 7669 - DNA, 21 bp, Artificial Sequence
  Synthetic
caacgaccuggatctgcucat

SEQ ID NO: 7670 - DNA, 21 bp, Artificial Sequence
  Synthetic
catgcatugtctggctuacgg

SEQ ID NO: 7671 - DNA, 26 bp, Artificial Sequence
  Synthetic
tggcactcacugtcagtgtttttaut

SEQ ID NO: 7672 - DNA, 29 bp, Artificial Sequence
  Synthetic
gagctctactgtutctgaatacatcguat

SEQ ID NO: 7673 - DNA, 26 bp, Artificial Sequence
  Synthetic
actctgttgaucaggtggaaaagtut

SEQ ID NO: 7674 - DNA, 28 bp, Artificial Sequence
  Synthetic
gttttaatugggaaaggaagagcaucaa

SEQ ID NO: 7675 - DNA, 25 bp, Artificial Sequence
  Synthetic
cauctaaacacaaauacaccagcga

SEQ ID NO: 7676 - DNA, 17 bp, Artificial Sequence
  Synthetic
agucagccccaggccua

SEQ ID NO: 7677 - DNA, 20 bp, Artificial Sequence
  Synthetic
guccaggaucccagaacacc

SEQ ID NO: 7678 - DNA, 23 bp, Artificial Sequence
  Synthetic
ctccttcagccuctgatcatucc

SEQ ID NO: 7679 - DNA, 24 bp, Artificial Sequence
  Synthetic
gacagagtcgucatcttcatccuc

SEQ ID NO: 7680 - DNA, 20 bp, Artificial Sequence
  Synthetic
ggacttctgcutcacgccut

SEQ ID NO: 7681 - DNA, 22 bp, Artificial Sequence
  Synthetic
cuacaacccggugaaagaggac

SEQ ID NO: 7682 - DNA, 19 bp, Artificial Sequence
  Synthetic
tcagauccggagctgcuct

SEQ ID NO: 7683 - DNA, 21 bp, Artificial Sequence
  Synthetic
acttggcttuccttccctcug

SEQ ID NO: 7684 - DNA, 21 bp, Artificial Sequence
  Synthetic
tgcatgugaacggtgctgaua

SEQ ID NO: 7685 - DNA, 22 bp, Artificial Sequence
  Synthetic
tgaagucgtctucggaaaccag

SEQ ID NO: 7686 - DNA, 26 bp, Artificial Sequence
  Synthetic
tttagcagauttgtgcaaaucaagca

SEQ ID NO: 7687 - DNA, 21 bp, Artificial Sequence
  Synthetic
agccctcguctatctguagca

SEQ ID NO: 7688 - DNA, 30 bp, Artificial Sequence
  Synthetic
gagagtaactagaautaaacgtgccaucat

SEQ ID NO: 7689 - DNA, 28 bp, Artificial Sequence
  Synthetic
acagtttaatttgugtgtgtggttgtuc

SEQ ID NO: 7690 - DNA, 21 bp, Artificial Sequence
  Synthetic
cgaaguaccctgccuaagcat

SEQ ID NO: 7691 - DNA, 24 bp, Artificial Sequence
  Synthetic
ttggcaccaugagttctatgtcug

SEQ ID NO: 7692 - DNA, 21 bp, Artificial Sequence
  Synthetic
gggtaucaagaaggcctuggt

SEQ ID NO: 7693 - DNA, 27 bp, Artificial Sequence
  Synthetic
aatgcctttttcuactcactggtaucc

SEQ ID NO: 7694 - DNA, 19 bp, Artificial Sequence
  Synthetic
cuccaccccataugccaca

SEQ ID NO: 7695 - DNA, 26 bp, Artificial Sequence
  Synthetic
ggtctaacacagcutcattcttcuct

SEQ ID NO: 7696 - DNA, 20 bp, Artificial Sequence
  Synthetic
agctccauccagttggctuc

SEQ ID NO: 7697 - DNA, 23 bp, Artificial Sequence
  Synthetic
gtgaatgcucccattgtttccuc

SEQ ID NO: 7698 - DNA, 25 bp, Artificial Sequence
  Synthetic
cctgaccaccutcttaactctggua

SEQ ID NO: 7699 - DNA, 23 bp, Artificial Sequence
  Synthetic
cggaatgatuctgtcaacccuga

SEQ ID NO: 7700 - DNA, 25 bp, Artificial Sequence
  Synthetic
gctaggttguaagtgctgggtuaaa

SEQ ID NO: 7701 - DNA, 23 bp, Artificial Sequence
  Synthetic
gccgctuaagaaactcugaaggg

SEQ ID NO: 7702 - DNA, 24 bp, Artificial Sequence
  Synthetic
gcatacaaggaguaggcagtuagt

SEQ ID NO: 7703 - DNA, 28 bp, Artificial Sequence
  Synthetic
tgtctgttttguccatttggtatctcuc

SEQ ID NO: 7704 - DNA, 17 bp, Artificial Sequence
  Synthetic
cagtcguggcugagcgt

SEQ ID NO: 7705 - DNA, 19 bp, Artificial Sequence
  Synthetic
ccggatugagccggaaguc

SEQ ID NO: 7706 - DNA, 22 bp, Artificial Sequence
  Synthetic
accaccagtcuctgataccgua

SEQ ID NO: 7707 - DNA, 22 bp, Artificial Sequence
  Synthetic
cagagugacccuccacgaaaag

SEQ ID NO: 7708 - DNA, 24 bp, Artificial Sequence
  Synthetic
aaggtgatuaccaagaggacgtug

SEQ ID NO: 7709 - DNA, 28 bp, Artificial Sequence
  Synthetic
tcaacattatcacuggtgcactuaaact

SEQ ID NO: 7710 - DNA, 22 bp, Artificial Sequence
  Synthetic
tcgtaaggucacagctguacac

SEQ ID NO: 7711 - DNA, 25 bp, Artificial Sequence
  Synthetic
aacactccagaaugctcaaaacuct

SEQ ID NO: 7712 - DNA, 23 bp, Artificial Sequence
  Synthetic
ccatcctggccugtagaatcuct

SEQ ID NO: 7713 - DNA, 25 bp, Artificial Sequence
  Synthetic
tgccaagaugacgataaacccaaut

SEQ ID NO: 7714 - DNA, 21 bp, Artificial Sequence
  Synthetic
agccacaaucaagagctgguc

SEQ ID NO: 7715 - DNA, 19 bp, Artificial Sequence
  Synthetic
tggtggugggacgttgtut

SEQ ID NO: 7716 - DNA, 22 bp, Artificial Sequence
  Synthetic
ctgcactuaccaaacaggguca

SEQ ID NO: 7717 - DNA, 18 bp, Artificial Sequence
  Synthetic
gcaccccacuctcuccga

SEQ ID NO: 7718 - DNA, 25 bp, Artificial Sequence
  Synthetic
cagttcaaguccatggagtcatuca

SEQ ID NO: 7719 - DNA, 29 bp, Artificial Sequence
  Synthetic
ataactagugaaaggagagagatauggct

SEQ ID NO: 7720 - DNA, 20 bp, Artificial Sequence
  Synthetic
ccacugtaacggugccaact

SEQ ID NO: 7721 - DNA, 27 bp, Artificial Sequence
  Synthetic
ctctgaagagaaugcaactattagcut

SEQ ID NO: 7722 - DNA, 21 bp, Artificial Sequence
  Synthetic
gcacccacuagcactatugcc

SEQ ID NO: 7723 - DNA, 26 bp, Artificial Sequence
  Synthetic
gcagaatgugaagacacactuaacac

SEQ ID NO: 7724 - DNA, 31 bp, Artificial Sequence
  Synthetic
cataactatcatugcatctctgtatctucca

SEQ ID NO: 7725 - DNA, 23 bp, Artificial Sequence
  Synthetic
agacaccggaauactgtggtgua

SEQ ID NO: 7726 - DNA, 22 bp, Artificial Sequence
  Synthetic
aggtacucagctttucccaagg

SEQ ID NO: 7727 - DNA, 24 bp, Artificial Sequence
  Synthetic
aatggagaccutcaagcatuggat

SEQ ID NO: 7728 - DNA, 22 bp, Artificial Sequence
  Synthetic
cacaggagcutctggaattgug

SEQ ID NO: 7729 - DNA, 30 bp, Artificial Sequence
  Synthetic
ttttaaactatttcuaacaacgccttcuct

SEQ ID NO: 7730 - DNA, 25 bp, Artificial Sequence
  Synthetic
ctcattttgcagugagtttgccaut

SEQ ID NO: 7731 - DNA, 26 bp, Artificial Sequence
  Synthetic
cctaaatttaaggaacuggctgcuga

SEQ ID NO: 7732 - DNA, 26 bp, Artificial Sequence
  Synthetic
ttgcttuacaagctttaatucgcaaa

SEQ ID NO: 7733 - DNA, 32 bp, Artificial Sequence
  Synthetic
cttacttctctauagatgccaattaaauggat

SEQ ID NO: 7734 - DNA, 30 bp, Artificial Sequence
  Synthetic
catattttcaauatgaaaactgtuccaggt

SEQ ID NO: 7735 - DNA, 25 bp, Artificial Sequence
  Synthetic
acattggaucacaactgctgctuaa

SEQ ID NO: 7736 - DNA, 26 bp, Artificial Sequence
  Synthetic
cttgggaccagutgtctcatuaagaa

SEQ ID NO: 7737 - DNA, 31 bp, Artificial Sequence
  Synthetic
actttgtaagaactuaataggttgagatguc

SEQ ID NO: 7738 - DNA, 23 bp, Artificial Sequence
  Synthetic
gcaaatgucagacccacaaugac

SEQ ID NO: 7739 - DNA, 29 bp, Artificial Sequence
  Synthetic
tgtgaaatguggataatgtcttguacaac

SEQ ID NO: 7740 - DNA, 31 bp, Artificial Sequence
  Synthetic
tcauacatgatactaaauaagccaacacacc

SEQ ID NO: 7741 - DNA, 23 bp, Artificial Sequence
  Synthetic
cctcatguggctgatgtttucac

SEQ ID NO: 7742 - DNA, 28 bp, Artificial Sequence
  Synthetic
ccggattactatuctctggttgattgug

SEQ ID NO: 7743 - DNA, 21 bp, Artificial Sequence
  Synthetic
agggcaucacctctcuacagt

SEQ ID NO: 7744 - DNA, 21 bp, Artificial Sequence
  Synthetic
ttcauagcgcaacagtugcag

SEQ ID NO: 7745 - DNA, 30 bp, Artificial Sequence
  Synthetic
aatttggctacatcucttcttgattttcua

SEQ ID NO: 7746 - DNA, 30 bp, Artificial Sequence
  Synthetic
atgtcagtgcaagguttacacattttaauc

SEQ ID NO: 7747 - DNA, 26 bp, Artificial Sequence
  Synthetic
tgttttgagctugtttgctgaatgut

SEQ ID NO: 7748 - DNA, 21 bp, Artificial Sequence
  Synthetic
acattctcgauggcagcaguc

SEQ ID NO: 7749 - DNA, 23 bp, Artificial Sequence
  Synthetic
acagggugagaaattgtcacucc

SEQ ID NO: 7750 - DNA, 32 bp, Artificial Sequence
  Synthetic
gccttatattgauaatgaaagcatattugcca

SEQ ID NO: 7751 - DNA, 26 bp, Artificial Sequence
  Synthetic
tttacgcautattcgugggacaaaac

SEQ ID NO: 7752 - DNA, 22 bp, Artificial Sequence
  Synthetic
ggaacccaccugactgagaauc

SEQ ID NO: 7753 - DNA, 26 bp, Artificial Sequence
  Synthetic
ccatttggacaugtaattgucagcac

SEQ ID NO: 7754 - DNA, 19 bp, Artificial Sequence
  Synthetic
agaatcggguctcgcaugg

SEQ ID NO: 7755 - DNA, 25 bp, Artificial Sequence
  Synthetic
aaacaccauccaaaggacaacctua

SEQ ID NO: 7756 - DNA, 30 bp, Artificial Sequence
  Synthetic
tcatttcttaautctctcaaauccaacact

SEQ ID NO: 7757 - DNA, 31 bp, Artificial Sequence
  Synthetic
gcttgtatctttctutctcttactgctttut

SEQ ID NO: 7758 - DNA, 27 bp, Artificial Sequence
  Synthetic
ctagctgaggaugattcattcttcuct

SEQ ID NO: 7759 - DNA, 30 bp, Artificial Sequence
  Synthetic
catttgacttactuaaacacatctgcacut

SEQ ID NO: 7760 - DNA, 28 bp, Artificial Sequence
  Synthetic
tgagatggtattucagagtaagcaucct

SEQ ID NO: 7761 - DNA, 29 bp, Artificial Sequence
  Synthetic
ggtacaccaccutctacattaagtagtuc

SEQ ID NO: 7762 - DNA, 24 bp, Artificial Sequence
  Synthetic
ggagtcactacutcattcctgcuc

SEQ ID NO: 7763 - DNA, 26 bp, Artificial Sequence
  Synthetic
ctccagtccucagataaatggugaaa

SEQ ID NO: 7764 - DNA, 26 bp, Artificial Sequence
  Synthetic
tctgactttctuacttcgagggcuaa

SEQ ID NO: 7765 - DNA, 21 bp, Artificial Sequence
  Synthetic
agctccatgugggagcaauaa

SEQ ID NO: 7766 - DNA, 21 bp, Artificial Sequence
  Synthetic
ccccaagaagcuccgtcttua

SEQ ID NO: 7767 - DNA, 17 bp, Artificial Sequence
  Synthetic
aggauccgcuccgggaa

SEQ ID NO: 7768 - DNA, 28 bp, Artificial Sequence
  Synthetic
ggatttataaactugtgcgatgcttuga

SEQ ID NO: 7769 - DNA, 28 bp, Artificial Sequence
  Synthetic
aagaagaaatgccuttcgaacaattcug

SEQ ID NO: 7770 - DNA, 28 bp, Artificial Sequence
  Synthetic
aatgaaaaattugagggaaguggagaga

SEQ ID NO: 7771 - DNA, 26 bp, Artificial Sequence
  Synthetic
taatgacttgucgacgacaccatuat

SEQ ID NO: 7772 - DNA, 24 bp, Artificial Sequence
  Synthetic
aggcaaactautggtggctuagac

SEQ ID NO: 7773 - DNA, 28 bp, Artificial Sequence
  Synthetic
tugaactgaatatuaacacagccgagaa

SEQ ID NO: 7774 - DNA, 23 bp, Artificial Sequence
  Synthetic
gttctgctgcugacaaagttgug

SEQ ID NO: 7775 - DNA, 25 bp, Artificial Sequence
  Synthetic
caccuacacauaagcaagccaaaaa

SEQ ID NO: 7776 - DNA, 30 bp, Artificial Sequence
  Synthetic
agctaaaacataccaucaaccctattctut

SEQ ID NO: 7777 - DNA, 26 bp, Artificial Sequence
  Synthetic
caggttttgaauttacaggcttugct

SEQ ID NO: 7778 - DNA, 26 bp, Artificial Sequence
  Synthetic
tggattacagaugttgggucagaaac

SEQ ID NO: 7779 - DNA, 29 bp, Artificial Sequence
  Synthetic
tccagaagauaagaaagtctacauacgct

SEQ ID NO: 7780 - DNA, 23 bp, Artificial Sequence
  Synthetic
tcaucactgttgauggaaagcca

SEQ ID NO: 7781 - DNA, 23 bp, Artificial Sequence
  Synthetic
tggagaaugtggucaccagaaag

SEQ ID NO: 7782 - DNA, 21 bp, Artificial Sequence
  Synthetic
ggatauttgcctcuggcccat

SEQ ID NO: 7783 - DNA, 26 bp, Artificial Sequence
  Synthetic
ttcaagucacagacactgaactuacc

SEQ ID NO: 7784 - DNA, 24 bp, Artificial Sequence
  Synthetic
gcagcgattcaugaacatctgtut

SEQ ID NO: 7785 - DNA, 20 bp, Artificial Sequence
  Synthetic
cgtctggcaucacacuccag

SEQ ID NO: 7786 - DNA, 23 bp, Artificial Sequence
  Synthetic
ttgttttccccuctccaccttuc

SEQ ID NO: 7787 - DNA, 25 bp, Artificial Sequence
  Synthetic
gaattccacgutcttacctgttugc

SEQ ID NO: 7788 - DNA, 28 bp, Artificial Sequence
  Synthetic
tccagtaaaaatucgtttgagtccugaa

SEQ ID NO: 7789 - DNA, 27 bp, Artificial Sequence
  Synthetic
agcaaactgaugccagaagagaauaat

SEQ ID NO: 7790 - DNA, 21 bp, Artificial Sequence
  Synthetic
gtgugaggaagccccaaauct

SEQ ID NO: 7791 - DNA, 24 bp, Artificial Sequence
  Synthetic
tctatatcctgcugtgtggcttuc

SEQ ID NO: 7792 - DNA, 26 bp, Artificial Sequence
  Synthetic
tcccatatcaucaaaagtcaaggcut

SEQ ID NO: 7793 - DNA, 25 bp, Artificial Sequence
  Synthetic
agaccttttugacgccatcauagaa

SEQ ID NO: 7794 - DNA, 20 bp, Artificial Sequence
  Synthetic
cctcgtctugggctccttut

SEQ ID NO: 7795 - DNA, 20 bp, Artificial Sequence
  Synthetic
cuttgagaagcuccgcagga

SEQ ID NO: 7796 - DNA, 21 bp, Artificial Sequence
  Synthetic
cctccccacutgcaggattug

SEQ ID NO: 7797 - DNA, 20 bp, Artificial Sequence
  Synthetic
gagcgugagaggctttcuct

SEQ ID NO: 7798 - DNA, 19 bp, Artificial Sequence
  Synthetic
cacagcgguggtctcctut

SEQ ID NO: 7799 - DNA, 23 bp, Artificial Sequence
  Synthetic
ccactgacacugaagagcatuca

SEQ ID NO: 7800 - DNA, 32 bp, Artificial Sequence
  Synthetic
catttccaatctacuaatgctaatactgttuc

SEQ ID NO: 7801 - DNA, 24 bp, Artificial Sequence
  Synthetic
ggattccagaguccagguaagact

SEQ ID NO: 7802 - DNA, 21 bp, Artificial Sequence
  Synthetic
gggtacgagcugctatgtucc

SEQ ID NO: 7803 - DNA, 28 bp, Artificial Sequence
  Synthetic
ggcaagttctgcaucatcttgatagtua

SEQ ID NO: 7804 - DNA, 23 bp, Artificial Sequence
  Synthetic
ggacctugcataaccttucccat

SEQ ID NO: 7805 - DNA, 30 bp, Artificial Sequence
  Synthetic
ctcttctacttttuagcttcaagcattcug

SEQ ID NO: 7806 - DNA, 27 bp, Artificial Sequence
  Synthetic
tcttctcagacaugtgatcaagatucc

SEQ ID NO: 7807 - DNA, 28 bp, Artificial Sequence
  Synthetic
gtggtccacaguagtttttcgtaaguat

SEQ ID NO: 7808 - DNA, 28 bp, Artificial Sequence
  Synthetic
tggaattcttuctaacctcactugcaat

SEQ ID NO: 7809 - DNA, 19 bp, Artificial Sequence
  Synthetic
cttcttggugtcggcuggt

SEQ ID NO: 7810 - DNA, 25 bp, Artificial Sequence
  Synthetic
ttgtucctcaaacttuacagaggag

SEQ ID NO: 7811 - DNA, 22 bp, Artificial Sequence
  Synthetic
tgtgaacaucccgagcuaggat

SEQ ID NO: 7812 - DNA, 26 bp, Artificial Sequence
  Synthetic
tctaggaatgaaggugtgggtaagua

SEQ ID NO: 7813 - DNA, 24 bp, Artificial Sequence
  Synthetic
ttgtaatcttguggcttgtccuca

SEQ ID NO: 7814 - DNA, 20 bp, Artificial Sequence
  Synthetic
caccctggugctgactaucc

SEQ ID NO: 7815 - DNA, 32 bp, Artificial Sequence
  Synthetic
tggctttttaaaacutcttacctaaaggauga

SEQ ID NO: 7816 - DNA, 21 bp, Artificial Sequence
  Synthetic
ctcagcagggcautccagtua

SEQ ID NO: 7817 - DNA, 26 bp, Artificial Sequence
  Synthetic
gctctcagtcutcttctctccuacag

SEQ ID NO: 7818 - DNA, 19 bp, Artificial Sequence
  Synthetic
ccagugagccaguccaagg

SEQ ID NO: 7819 - DNA, 23 bp, Artificial Sequence
  Synthetic
cgtgttgacugcatacgcuacaa

SEQ ID NO: 7820 - DNA, 23 bp, Artificial Sequence
  Synthetic
ggaattgagagguccttcuggga

SEQ ID NO: 7821 - DNA, 23 bp, Artificial Sequence
  Synthetic
cgttccctugcttcacatctuct

SEQ ID NO: 7822 - DNA, 19 bp, Artificial Sequence
  Synthetic
gaaccccautgaggcugct

SEQ ID NO: 7823 - DNA, 25 bp, Artificial Sequence
  Synthetic
actgtgagcutttcttggagaucct

SEQ ID NO: 7824 - DNA, 23 bp, Artificial Sequence
  Synthetic
gcagagccuctagtactgtcuga

SEQ ID NO: 7825 - DNA, 17 bp, Artificial Sequence
  Synthetic
ggcugtgacugcaggga

SEQ ID NO: 7826 - DNA, 24 bp, Artificial Sequence
  Synthetic
aaaatgatacuccccctacuccca

SEQ ID NO: 7827 - DNA, 23 bp, Artificial Sequence
  Synthetic
cggccttattutcttccccguag

SEQ ID NO: 7828 - DNA, 19 bp, Artificial Sequence
  Synthetic
ccccagcacuctgggtgua

SEQ ID NO: 7829 - DNA, 24 bp, Artificial Sequence
  Synthetic
ccctactgctutcctttcctcauc

SEQ ID NO: 7830 - DNA, 27 bp, Artificial Sequence
  Synthetic
gctttccatttuggtgtctacagtuct

SEQ ID NO: 7831 - DNA, 27 bp, Artificial Sequence
  Synthetic
gagccttagagauagcccagaataaug

SEQ ID NO: 7832 - DNA, 29 bp, Artificial Sequence
  Synthetic
gatcatagtcctgugatgttctgttagut

SEQ ID NO: 7833 - DNA, 25 bp, Artificial Sequence
  Synthetic
cagccaaucaacagagatcatccut

SEQ ID NO: 7834 - DNA, 22 bp, Artificial Sequence
  Synthetic
ctttggattgucccgagtugga

SEQ ID NO: 7835 - DNA, 28 bp, Artificial Sequence
  Synthetic
acatcttaauggtcagaattuaaaggca

SEQ ID NO: 7836 - DNA, 28 bp, Artificial Sequence
  Synthetic
ggaatcttgtautcatcatcatctucct

SEQ ID NO: 7837 - DNA, 28 bp, Artificial Sequence
  Synthetic
tttgacttgaataugtcacatcagacut

SEQ ID NO: 7838 - DNA, 22 bp, Artificial Sequence
  Synthetic
tctgtgtutccgcauaagcact

SEQ ID NO: 7839 - DNA, 21 bp, Artificial Sequence
  Synthetic
caatgccucttgaagcauggt

SEQ ID NO: 7840 - DNA, 21 bp, Artificial Sequence
  Synthetic
tcaggctguggctttcttcuc

SEQ ID NO: 7841 - DNA, 26 bp, Artificial Sequence
  Synthetic
agaacactcugcacagctaauaaaca

SEQ ID NO: 7842 - DNA, 22 bp, Artificial Sequence
  Synthetic
caaaugcccacaaggctcaauc

SEQ ID NO: 7843 - DNA, 23 bp, Artificial Sequence
  Synthetic
attactttcuccctccuccccaa

SEQ ID NO: 7844 - DNA, 26 bp, Artificial Sequence
  Synthetic
gctaaaaagtctuaccttccgggtut

SEQ ID NO: 7845 - DNA, 27 bp, Artificial Sequence
  Synthetic
gctctatttugcggaattggaattuct

SEQ ID NO: 7846 - DNA, 27 bp, Artificial Sequence
  Synthetic
tgtgatacgaaagutatctcccuggaa

SEQ ID NO: 7847 - DNA, 30 bp, Artificial Sequence
  Synthetic
tgcatgcatcuaggtgtttatttcttauct

SEQ ID NO: 7848 - DNA, 24 bp, Artificial Sequence
  Synthetic
tcuggagaaaccauagacaaagug

SEQ ID NO: 7849 - DNA, 21 bp, Artificial Sequence
  Synthetic
cagtuggacccccuaagcaag

SEQ ID NO: 7850 - DNA, 18 bp, Artificial Sequence
  Synthetic
gcaaggugccctgacucg

SEQ ID NO: 7851 - DNA, 21 bp, Artificial Sequence
  Synthetic
tttgttctgcauggtgacugt

SEQ ID NO: 7852 - DNA, 21 bp, Artificial Sequence
  Synthetic
gccaauccagagacagctugg

SEQ ID NO: 7853 - DNA, 22 bp, Artificial Sequence
  Synthetic
tgccgaaggcuttgcttacuaa

SEQ ID NO: 7854 - DNA, 21 bp, Artificial Sequence
  Synthetic
agagaccagagugggcuaagg

SEQ ID NO: 7855 - DNA, 25 bp, Artificial Sequence
  Synthetic
attgctcttcacuttcctgtctcut

SEQ ID NO: 7856 - DNA, 25 bp, Artificial Sequence
  Synthetic
aggaaagaaaagcaggutcctuacc

SEQ ID NO: 7857 - DNA, 26 bp, Artificial Sequence
  Synthetic
tgcagaaactautgacaggattgugt

SEQ ID NO: 7858 - DNA, 27 bp, Artificial Sequence
  Synthetic
ggaacctgguaaataagacaaacugct

SEQ ID NO: 7859 - DNA, 23 bp, Artificial Sequence
  Synthetic
ccaaagaugatgccugaaaacca

SEQ ID NO: 7860 - DNA, 22 bp, Artificial Sequence
  Synthetic
ggtctgcugggtaaguaacact

SEQ ID NO: 7861 - DNA, 20 bp, Artificial Sequence
  Synthetic
gcaggcucttggtgcuaact

SEQ ID NO: 7862 - DNA, 27 bp, Artificial Sequence
  Synthetic
gccacaacataaucagggaaagcttua

SEQ ID NO: 7863 - DNA, 24 bp, Artificial Sequence
  Synthetic
tcactttctgutggcctcttucag

SEQ ID NO: 7864 - DNA, 21 bp, Artificial Sequence
  Synthetic
tggtttagcuggtgttuggca

SEQ ID NO: 7865 - DNA, 27 bp, Artificial Sequence
  Synthetic
cactaattcatttcugcctctttgcut

SEQ ID NO: 7866 - DNA, 22 bp, Artificial Sequence
  Synthetic
gcccggtucttcttgttttcuc

SEQ ID NO: 7867 - DNA, 21 bp, Artificial Sequence
  Synthetic
gggttgugacacacugaggac

SEQ ID NO: 7868 - DNA, 22 bp, Artificial Sequence
  Synthetic
ccgttttccacutcctctcugg

SEQ ID NO: 7869 - DNA, 21 bp, Artificial Sequence
  Synthetic
tttctgctguggtggcaaaug

SEQ ID NO: 7870 - DNA, 19 bp, Artificial Sequence
  Synthetic
tgagtcgugtcgcccuagt

SEQ ID NO: 7871 - DNA, 32 bp, Artificial Sequence
  Synthetic
gaagcagagctaauttctttttcttttaccut

SEQ ID NO: 7872 - DNA, 21 bp, Artificial Sequence
  Synthetic
gatattcacugctccugggct

SEQ ID NO: 7873 - DNA, 21 bp, Artificial Sequence
  Synthetic
ggaactccuccgtcaagtgug

SEQ ID NO: 7874 - DNA, 23 bp, Artificial Sequence
  Synthetic
cagaagttgcaguaggttggtut

SEQ ID NO: 7875 - DNA, 31 bp, Artificial Sequence
  Synthetic
ctaaatgagaugaaaaggaagaacaugcaag

SEQ ID NO: 7876 - DNA, 23 bp, Artificial Sequence
  Synthetic
cctttcucaggtccaugagggat

SEQ ID NO: 7877 - DNA, 20 bp, Artificial Sequence
  Synthetic
gccauccgcgcttctuagag

SEQ ID NO: 7878 - DNA, 20 bp, Artificial Sequence
  Synthetic
gcgcaaggucttcccatcut

SEQ ID NO: 7879 - DNA, 21 bp, Artificial Sequence
  Synthetic
ctgagcacucacctcttccug

SEQ ID NO: 7880 - DNA, 27 bp, Artificial Sequence
  Synthetic
gctatgcttuccagaaatgatttcucc

SEQ ID NO: 7881 - DNA, 25 bp, Artificial Sequence
  Synthetic
gccctttagccacucacataaagut

SEQ ID NO: 7882 - DNA, 20 bp, Artificial Sequence
  Synthetic
ctaacgtgcugagacgggut

SEQ ID NO: 7883 - DNA, 24 bp, Artificial Sequence
  Synthetic
cttcaagauccacaaccgtttcut

SEQ ID NO: 7884 - DNA, 25 bp, Artificial Sequence
  Synthetic
caagacagccacauttgctattucc

SEQ ID NO: 7885 - DNA, 24 bp, Artificial Sequence
  Synthetic
tcacagtugtgaaaccugaaacct

SEQ ID NO: 7886 - DNA, 28 bp, Artificial Sequence
  Synthetic
agtatgactttguttctaacagcuccaa

SEQ ID NO: 7887 - DNA, 26 bp, Artificial Sequence
  Synthetic
gggtgaagtaaugcttacctgaauac

SEQ ID NO: 7888 - DNA, 24 bp, Artificial Sequence
  Synthetic
tggctggcccagaaugaattttua

SEQ ID NO: 7889 - DNA, 19 bp, Artificial Sequence
  Synthetic
ccacctugcgcctcgtaut

SEQ ID NO: 7890 - DNA, 20 bp, Artificial Sequence
  Synthetic
gtggccuacatgacaggugt

SEQ ID NO: 7891 - DNA, 20 bp, Artificial Sequence
  Synthetic
gccaagaugctggcttcuca

SEQ ID NO: 7892 - DNA, 21 bp, Artificial Sequence
  Synthetic
aacccccagcuatgattugca

SEQ ID NO: 7893 - DNA, 17 bp, Artificial Sequence
  Synthetic
cuccggagcuccccaaa

SEQ ID NO: 7894 - DNA, 20 bp, Artificial Sequence
  Synthetic
caggtggcucttcagaguct

SEQ ID NO: 7895 - DNA, 21 bp, Artificial Sequence
  Synthetic
ccagaagaccuctcatgccut

SEQ ID NO: 7896 - DNA, 20 bp, Artificial Sequence
  Synthetic
gcagcggucacacttguagg

SEQ ID NO: 7897 - DNA, 21 bp, Artificial Sequence
  Synthetic
cttcctcgugctgacttuggt

SEQ ID NO: 7898 - DNA, 19 bp, Artificial Sequence
  Synthetic
tggcacucagcttggtugg

SEQ ID NO: 7899 - DNA, 20 bp, Artificial Sequence
  Synthetic
atcgtgcucaacagccucaa

SEQ ID NO: 7900 - DNA, 18 bp, Artificial Sequence
  Synthetic
gttugaggcccucagcca

SEQ ID NO: 7901 - DNA, 20 bp, Artificial Sequence
  Synthetic
cgggcacucccatgtgauag

SEQ ID NO: 7902 - DNA, 20 bp, Artificial Sequence
  Synthetic
tcucttccatcuccgacgct

SEQ ID NO: 7903 - DNA, 25 bp, Artificial Sequence
  Synthetic
tcatgtacacauctcggctcaatut

SEQ ID NO: 7904 - DNA, 25 bp, Artificial Sequence
  Synthetic
aacatcagtcaagaugtctcgacuc

SEQ ID NO: 7905 - DNA, 23 bp, Artificial Sequence
  Synthetic
aggaaacaggutctggaggacua

SEQ ID NO: 7906 - DNA, 29 bp, Artificial Sequence
  Synthetic
atgttattcgttucacatttcctttugct

SEQ ID NO: 7907 - DNA, 23 bp, Artificial Sequence
  Synthetic
gaaagguggacaaatgggtuagt

SEQ ID NO: 7908 - DNA, 17 bp, Artificial Sequence
  Synthetic
ccctccuccgggcctua

SEQ ID NO: 7909 - DNA, 18 bp, Artificial Sequence
  Synthetic
gctcggaggcucaggaug

SEQ ID NO: 7910 - DNA, 28 bp, Artificial Sequence
  Synthetic
gttttcattctuttgtggcatcugaaac

SEQ ID NO: 7911 - DNA, 26 bp, Artificial Sequence
  Synthetic
gggaatctttucaggaaatgcctcut

SEQ ID NO: 7912 - DNA, 22 bp, Artificial Sequence
  Synthetic
catccagcuccttccacacuag

SEQ ID NO: 7913 - DNA, 22 bp, Artificial Sequence
  Synthetic
tggagactuggcattggtucag

SEQ ID NO: 7914 - DNA, 22 bp, Artificial Sequence
  Synthetic
agccaaatcucccaaggaccua

SEQ ID NO: 7915 - DNA, 23 bp, Artificial Sequence
  Synthetic
gctgcatugcaacacttttugag

SEQ ID NO: 7916 - DNA, 29 bp, Artificial Sequence
  Synthetic
aatatctttccaggaaaugacccatucat

SEQ ID NO: 7917 - DNA, 24 bp, Artificial Sequence
  Synthetic
gcaatgccugccatactttuaagg

SEQ ID NO: 7918 - DNA, 21 bp, Artificial Sequence
  Synthetic
acaactggcugaccaaaguca

SEQ ID NO: 7919 - DNA, 21 bp, Artificial Sequence
  Synthetic
ggctttgcuggagctttuagg

SEQ ID NO: 7920 - DNA, 19 bp, Artificial Sequence
  Synthetic
tcccuatggcucccgagac

SEQ ID NO: 7921 - DNA, 20 bp, Artificial Sequence
  Synthetic
gggccugagagagcctuaga

SEQ ID NO: 7922 - DNA, 18 bp, Artificial Sequence
  Synthetic
tcucggauaccccagcct

SEQ ID NO: 7923 - DNA, 19 bp, Artificial Sequence
  Synthetic
gcagtcuccccacacucac

SEQ ID NO: 7924 - DNA, 25 bp, Artificial Sequence
  Synthetic
acagtccucaaagaaggaaatgcuc

SEQ ID NO: 7925 - DNA, 24 bp, Artificial Sequence
  Synthetic
gggaatggaagaguctttgtggut

SEQ ID NO: 7926 - DNA, 28 bp, Artificial Sequence
  Synthetic
tgccctagtcuagtaatttttggcucat

SEQ ID NO: 7927 - DNA, 30 bp, Artificial Sequence
  Synthetic
tctaccaaagagauaaagggccaatacuaa

SEQ ID NO: 7928 - DNA, 26 bp, Artificial Sequence
  Synthetic
atggctgcttutctgtagtatgauag

SEQ ID NO: 7929 - DNA, 29 bp, Artificial Sequence
  Synthetic
actttggaagaacuctcgaagtgtttaut

SEQ ID NO: 7930 - DNA, 21 bp, Artificial Sequence
  Synthetic
cagaattcttugctcggcuca

SEQ ID NO: 7931 - DNA, 22 bp, Artificial Sequence
  Synthetic
tcccaaggcautgaaucaacct

SEQ ID NO: 7932 - DNA, 30 bp, Artificial Sequence
  Synthetic
gactgctuaaagcaattgttgtauaaaaac

SEQ ID NO: 7933 - DNA, 21 bp, Artificial Sequence
  Synthetic
acaggacugcactcuccagaa

SEQ ID NO: 7934 - DNA, 30 bp, Artificial Sequence
  Synthetic
ttgtggttutagttttcctuacaaacagat

SEQ ID NO: 7935 - DNA, 28 bp, Artificial Sequence
  Synthetic
agctcttcgcugttttatcactuagaaa

SEQ ID NO: 7936 - DNA, 21 bp, Artificial Sequence
  Synthetic
gcatgaaaccggcucacauga

SEQ ID NO: 7937 - DNA, 31 bp, Artificial Sequence
  Synthetic
agatcattctuagaaccatcttgcttcauac

SEQ ID NO: 7938 - DNA, 23 bp, Artificial Sequence
  Synthetic
ttgctagcuatgtctagcuccca

SEQ ID NO: 7939 - DNA, 21 bp, Artificial Sequence
  Synthetic
ctctttacugccccgggaaut

SEQ ID NO: 7940 - DNA, 24 bp, Artificial Sequence
  Synthetic
tgtcctgctgugtgtgttctaaug

SEQ ID NO: 7941 - DNA, 29 bp, Artificial Sequence
  Synthetic
accatgatttaaaaauccaccagtaatug

SEQ ID NO: 7942 - DNA, 27 bp, Artificial Sequence
  Synthetic
tgattaatttgcaggutattgcgagug

SEQ ID NO: 7943 - DNA, 28 bp, Artificial Sequence
  Synthetic
aggtaccuttttaacttcuaaagcacat

SEQ ID NO: 7944 - DNA, 29 bp, Artificial Sequence
  Synthetic
ccagacaaacacuttagccattatugaaa

SEQ ID NO: 7945 - DNA, 31 bp, Artificial Sequence
  Synthetic
taggtcttttugagagtatgaattctguact

SEQ ID NO: 7946 - DNA, 23 bp, Artificial Sequence
  Synthetic
tcaagctugccatctcttcaugt

SEQ ID NO: 7947 - DNA, 29 bp, Artificial Sequence
  Synthetic
aacataatcaccauagagactttgctugt

SEQ ID NO: 7948 - DNA, 24 bp, Artificial Sequence
  Synthetic
gtgtcagccautcatacctcucag

SEQ ID NO: 7949 - DNA, 30 bp, Artificial Sequence
  Synthetic
acatgtcctattugaattttccgactuagt

SEQ ID NO: 7950 - DNA, 26 bp, Artificial Sequence
  Synthetic
gcaaagtccutcacagaaugaaagat

SEQ ID NO: 7951 - DNA, 23 bp, Artificial Sequence
  Synthetic
tgtggttggaacutgaggtgtut

SEQ ID NO: 7952 - DNA, 25 bp, Artificial Sequence
  Synthetic
gccacagauattccttcaucacaga

SEQ ID NO: 7953 - DNA, 25 bp, Artificial Sequence
  Synthetic
ctgattctgccucttggcatuagat

SEQ ID NO: 7954 - DNA, 23 bp, Artificial Sequence
  Synthetic
cctgugagcgaagtuccagcagt

SEQ ID NO: 7955 - DNA, 25 bp, Artificial Sequence
  Synthetic
tttgggtgtcugagcaccactttug

SEQ ID NO: 7956 - DNA, 28 bp, Artificial Sequence
  Synthetic
cacctactgcugaaaagagagagagugg

SEQ ID NO: 7957 - DNA, 22 bp, Artificial Sequence
  Synthetic
gctcagagcacucaggcuggat

SEQ ID NO: 7958 - DNA, 21 bp, Artificial Sequence
  Synthetic
attaccuccacctguggcaag

SEQ ID NO: 7959 - DNA, 29 bp, Artificial Sequence
  Synthetic
gagatgtagcugtggaaaagtttauaggt

SEQ ID NO: 7960 - DNA, 23 bp, Artificial Sequence
  Synthetic
acaagccuttccgtgugaaaaag

SEQ ID NO: 7961 - DNA, 32 bp, Artificial Sequence
  Synthetic
tttcttacacgtgucctatattcagtatttug

SEQ ID NO: 7962 - DNA, 32 bp, Artificial Sequence
  Synthetic
gctgaatuaagaaaggcaaaagaaaauaagga

SEQ ID NO: 7963 - DNA, 27 bp, Artificial Sequence
  Synthetic
aaagtggattguttctgaagtaugggt

SEQ ID NO: 7964 - DNA, 30 bp, Artificial Sequence
  Synthetic
tctcaagaaacagtuctctcagttctctua

SEQ ID NO: 7965 - DNA, 23 bp, Artificial Sequence
  Synthetic
gccacccauatttctgggacuat

SEQ ID NO: 7966 - DNA, 26 bp, Artificial Sequence
  Synthetic
acaagtaauaaaggcccacgaatuct

SEQ ID NO: 7967 - DNA, 23 bp, Artificial Sequence
  Synthetic
ggctgttucatttggccugaaat

SEQ ID NO: 7968 - DNA, 22 bp, Artificial Sequence
  Synthetic
gccaggcagacaucccaaauag

SEQ ID NO: 7969 - DNA, 29 bp, Artificial Sequence
  Synthetic
gttaggaggacutattccatttcuaccag

SEQ ID NO: 7970 - DNA, 25 bp, Artificial Sequence
  Synthetic
agacctgtatuagtacgccagucaa

SEQ ID NO: 7971 - DNA, 25 bp, Artificial Sequence
  Synthetic
ggacttaaaacuggagtttgugcct

SEQ ID NO: 7972 - DNA, 30 bp, Artificial Sequence
  Synthetic
tgaaaaagcaaaaagugaggaugaaaaaca

SEQ ID NO: 7973 - DNA, 22 bp, Artificial Sequence
  Synthetic
caccattugtagcaccugagga

SEQ ID NO: 7974 - DNA, 28 bp, Artificial Sequence
  Synthetic
caaaaaggaacugagauaaaaccaggac

SEQ ID NO: 7975 - DNA, 21 bp, Artificial Sequence
  Synthetic
agcaacagucccactagguga

SEQ ID NO: 7976 - DNA, 26 bp, Artificial Sequence
  Synthetic
gggtcttacctugtgacatctgttua

SEQ ID NO: 7977 - DNA, 23 bp, Artificial Sequence
  Synthetic
ggctuccagaacaaaaacccuct

SEQ ID NO: 7978 - DNA, 21 bp, Artificial Sequence
  Synthetic
ctgccugaagggttguaacga

SEQ ID NO: 7979 - DNA, 30 bp, Artificial Sequence
  Synthetic
ctccattttgaaaugtgttcttgtcttgua

SEQ ID NO: 7980 - DNA, 21 bp, Artificial Sequence
  Synthetic
ggttggcuccggatgtagaug

SEQ ID NO: 7981 - DNA, 22 bp, Artificial Sequence
  Synthetic
agcaaaggutcaggctugagag

SEQ ID NO: 7982 - DNA, 25 bp, Artificial Sequence
  Synthetic
caagggaggauacacaaugacaaua

SEQ ID NO: 7983 - DNA, 26 bp, Artificial Sequence
  Synthetic
aaaatttggcagcucttctttctucc

SEQ ID NO: 7984 - DNA, 23 bp, Artificial Sequence
  Synthetic
gggcatagagccutcatgtcauc

SEQ ID NO: 7985 - DNA, 21 bp, Artificial Sequence
  Synthetic
tggactaucgccagtagugac

SEQ ID NO: 7986 - DNA, 19 bp, Artificial Sequence
  Synthetic
cagggaagggugcagguag

SEQ ID NO: 7987 - DNA, 24 bp, Artificial Sequence
  Synthetic
ctccctaacacacucctcttcuca

SEQ ID NO: 7988 - DNA, 23 bp, Artificial Sequence
  Synthetic
cccacgaauccctcuaaaaccag

SEQ ID NO: 7989 - DNA, 22 bp, Artificial Sequence
  Synthetic
catcactuccccacatctgugt

SEQ ID NO: 7990 - DNA, 19 bp, Artificial Sequence
  Synthetic
cgcaguggaacgtctccua

SEQ ID NO: 7991 - DNA, 20 bp, Artificial Sequence
  Synthetic
acagttttuccgcagccuct

SEQ ID NO: 7992 - DNA, 27 bp, Artificial Sequence
  Synthetic
cagttcaagataucaacttggcaucct

SEQ ID NO: 7993 - DNA, 29 bp, Artificial Sequence
  Synthetic
gttttctagaatuctttgctgaacuggat

SEQ ID NO: 7994 - DNA, 21 bp, Artificial Sequence
  Synthetic
tguctccuaggaaacggacct

SEQ ID NO: 7995 - DNA, 25 bp, Artificial Sequence
  Synthetic
gtaaataagccgcccutttccatug

SEQ ID NO: 7996 - DNA, 24 bp, Artificial Sequence
  Synthetic
tggaaaagucacatggcaagtuga

SEQ ID NO: 7997 - DNA, 26 bp, Artificial Sequence
  Synthetic
gcaaaaacagutcctccacaucaaag

SEQ ID NO: 7998 - DNA, 28 bp, Artificial Sequence
  Synthetic
acaacaaaaacccutcacaaaccttaug

SEQ ID NO: 7999 - DNA, 30 bp, Artificial Sequence
  Synthetic
ctagaauaccaggaaagcctuacaaagaaa

SEQ ID NO: 8000 - DNA, 28 bp, Artificial Sequence
  Synthetic
tctgaatctgaggaugaggtatctgtut

SEQ ID NO: 8001 - DNA, 31 bp, Artificial Sequence
  Synthetic
gaaacccaatauaaagaaggagtctaaguct

SEQ ID NO: 8002 - DNA, 20 bp, Artificial Sequence
  Synthetic
cggaguagcggaactcgtut

SEQ ID NO: 8003 - DNA, 24 bp, Artificial Sequence
  Synthetic
agtgaacccacauaaagtgucacc

SEQ ID NO: 8004 - DNA, 28 bp, Artificial Sequence
  Synthetic
ccttagtuggaaaaggaaattuggaagg

SEQ ID NO: 8005 - DNA, 25 bp, Artificial Sequence
  Synthetic
ccttgacctggutgaaaacaaacug

SEQ ID NO: 8006 - DNA, 25 bp, Artificial Sequence
  Synthetic
aaaaagguacacgggaaggagaauc

SEQ ID NO: 8007 - DNA, 22 bp, Artificial Sequence
  Synthetic
aaaccccaggcugtttctucat

SEQ ID NO: 8008 - DNA, 27 bp, Artificial Sequence
  Synthetic
gggttagatttutcatctgctgauggt

SEQ ID NO: 8009 - DNA, 26 bp, Artificial Sequence
  Synthetic
caagtcgtatucagagtatgctugga

SEQ ID NO: 8010 - DNA, 20 bp, Artificial Sequence
  Synthetic
gactgcugcctcgatagucc

SEQ ID NO: 8011 - DNA, 17 bp, Artificial Sequence
  Synthetic
gggcucgggacacucac

SEQ ID NO: 8012 - DNA, 30 bp, Artificial Sequence
  Synthetic
taattctttactgauactgcttttgtguct

SEQ ID NO: 8013 - DNA, 25 bp, Artificial Sequence
  Synthetic
cagaccaaagcutgcaaaattcuca

SEQ ID NO: 8014 - DNA, 25 bp, Artificial Sequence
  Synthetic
tccggcagcauttctatgaagtauc

SEQ ID NO: 8015 - DNA, 29 bp, Artificial Sequence
  Synthetic
atgagggatgaauatatgggtacatcaut

SEQ ID NO: 8016 - DNA, 28 bp, Artificial Sequence
  Synthetic
tcatgatgtauagcatacagtggaaugt

SEQ ID NO: 8017 - DNA, 26 bp, Artificial Sequence
  Synthetic
ggtaccatggugatttgtttggaauc

SEQ ID NO: 8018 - DNA, 21 bp, Artificial Sequence
  Synthetic
cagtgaaccuataggguggca

SEQ ID NO: 8019 - DNA, 23 bp, Artificial Sequence
  Synthetic
ctggctguagaaggtuacccaag

SEQ ID NO: 8020 - DNA, 25 bp, Artificial Sequence
  Synthetic
gatattaccuccctccttccttugc

SEQ ID NO: 8021 - DNA, 26 bp, Artificial Sequence
  Synthetic
gggtaagaaaaaggcuagtaatuggt

SEQ ID NO: 8022 - DNA, 25 bp, Artificial Sequence
  Synthetic
cagatatttaacaccgugcccgaua

SEQ ID NO: 8023 - DNA, 21 bp, Artificial Sequence
  Synthetic
ccctaugcagcaaagacucac

SEQ ID NO: 8024 - DNA, 19 bp, Artificial Sequence
  Synthetic
ccacguccagcgactcauc

SEQ ID NO: 8025 - DNA, 21 bp, Artificial Sequence
  Synthetic
guttggauggcagggaacaaa

SEQ ID NO: 8026 - DNA, 26 bp, Artificial Sequence
  Synthetic
cctgagaattacguggagttcctcua

SEQ ID NO: 8027 - DNA, 26 bp, Artificial Sequence
  Synthetic
tcacagaaacautcatgtugacaggt

SEQ ID NO: 8028 - DNA, 18 bp, Artificial Sequence
  Synthetic
ccaagccucaccccacuc

SEQ ID NO: 8029 - DNA, 22 bp, Artificial Sequence
  Synthetic
tgggcatccuctgtcctatcuc

SEQ ID NO: 8030 - DNA, 21 bp, Artificial Sequence
  Synthetic
tgggatgacaguccccagtua

SEQ ID NO: 8031 - DNA, 22 bp, Artificial Sequence
  Synthetic
ctgttgaccaauggtcatgugg

SEQ ID NO: 8032 - DNA, 23 bp, Artificial Sequence
  Synthetic
acctggcctutttcttgtcctut

SEQ ID NO: 8033 - DNA, 20 bp, Artificial Sequence
  Synthetic
tttcugcgaaggaaggcuga

SEQ ID NO: 8034 - DNA, 19 bp, Artificial Sequence
  Synthetic
cctcaucccctccccucac

SEQ ID NO: 8035 - DNA, 21 bp, Artificial Sequence
  Synthetic
ctttggugcccagggactuaa

SEQ ID NO: 8036 - DNA, 27 bp, Artificial Sequence
  Synthetic
gcutatacttgtacaauagcagcagga

SEQ ID NO: 8037 - DNA, 21 bp, Artificial Sequence
  Synthetic
ctgctcacugctttgctucat

SEQ ID NO: 8038 - DNA, 19 bp, Artificial Sequence
  Synthetic
actgcagccaugtcacgut

SEQ ID NO: 8039 - DNA, 23 bp, Artificial Sequence
  Synthetic
agtaggtacugggagatugggag

SEQ ID NO: 8040 - DNA, 22 bp, Artificial Sequence
  Synthetic
gtcagaaaagggucccagguag

SEQ ID NO: 8041 - DNA, 22 bp, Artificial Sequence
  Synthetic
cagatgcttgugtgttctgcut

SEQ ID NO: 8042 - DNA, 19 bp, Artificial Sequence
  Synthetic
tggcugagcacacgatcug

SEQ ID NO: 8043 - DNA, 26 bp, Artificial Sequence
  Synthetic
agcaatatcuctatcatgtucaggga

SEQ ID NO: 8044 - DNA, 28 bp, Artificial Sequence
  Synthetic
gattgttaatttuagggcccattguagt

SEQ ID NO: 8045 - DNA, 23 bp, Artificial Sequence
  Synthetic
caacaacgcuacctuccaaaaca

SEQ ID NO: 8046 - DNA, 21 bp, Artificial Sequence
  Synthetic
ctcttaccaugccaagctgug

SEQ ID NO: 8047 - DNA, 20 bp, Artificial Sequence
  Synthetic
gaggaacgugtgtccagugt

SEQ ID NO: 8048 - DNA, 19 bp, Artificial Sequence
  Synthetic
ccagcaguagccgatgcuc

SEQ ID NO: 8049 - DNA, 21 bp, Artificial Sequence
  Synthetic
tgtgtcctcaucatgcctguc

SEQ ID NO: 8050 - DNA, 19 bp, Artificial Sequence
  Synthetic
ctccauccaggcgggauaa

SEQ ID NO: 8051 - DNA, 22 bp, Artificial Sequence
  Synthetic
cacacttacccucgttcctguc

SEQ ID NO: 8052 - DNA, 20 bp, Artificial Sequence
  Synthetic
gataaggucgcgctggucat

SEQ ID NO: 8053 - DNA, 20 bp, Artificial Sequence
  Synthetic
tggccttcugtggacgaauc

SEQ ID NO: 8054 - DNA, 30 bp, Artificial Sequence
  Synthetic
ctcccacacacutaaatactatguacaaca

SEQ ID NO: 8055 - DNA, 26 bp, Artificial Sequence
  Synthetic
tgaaaagugccaatgtuaagaaagca

SEQ ID NO: 8056 - DNA, 28 bp, Artificial Sequence
  Synthetic
cctttttactgccuttgctacaagttut

SEQ ID NO: 8057 - DNA, 29 bp, Artificial Sequence
  Synthetic
tcttgagagaggaauaagaaattgagtug

SEQ ID NO: 8058 - DNA, 26 bp, Artificial Sequence
  Synthetic
ctttttcaaauggaaagccacugaac

SEQ ID NO: 8059 - DNA, 29 bp, Artificial Sequence
  Synthetic
aagatgttgacuttgaattggcttugaat

SEQ ID NO: 8060 - DNA, 20 bp, Artificial Sequence
  Synthetic
cccccaccuttttcctccuc

SEQ ID NO: 8061 - DNA, 19 bp, Artificial Sequence
  Synthetic
gcaugcaggtucacagcat

SEQ ID NO: 8062 - DNA, 20 bp, Artificial Sequence
  Synthetic
gtctgagaggcutcccugag

SEQ ID NO: 8063 - DNA, 20 bp, Artificial Sequence
  Synthetic
cacctgcugccagatgcuat

SEQ ID NO: 8064 - DNA, 19 bp, Artificial Sequence
  Synthetic
agccggugcagaaugaagg

SEQ ID NO: 8065 - DNA, 23 bp, Artificial Sequence
  Synthetic
cctgagacuttgagacttcugct

SEQ ID NO: 8066 - DNA, 19 bp, Artificial Sequence
  Synthetic
ggtaccuccagcauccagt

SEQ ID NO: 8067 - DNA, 17 bp, Artificial Sequence
  Synthetic
gggaccagcgugtccug

SEQ ID NO: 8068 - DNA, 20 bp, Artificial Sequence
  Synthetic
cgatccauggaggcttggug

SEQ ID NO: 8069 - DNA, 22 bp, Artificial Sequence
  Synthetic
agtccaacauctaccccaucgt

SEQ ID NO: 8070 - DNA, 20 bp, Artificial Sequence
  Synthetic
gggaagucgtcctggtucat

SEQ ID NO: 8071 - DNA, 18 bp, Artificial Sequence
  Synthetic
ccgugctctucacaccca

SEQ ID NO: 8072 - DNA, 18 bp, Artificial Sequence
  Synthetic
cgguaggtgcuccggaga

SEQ ID NO: 8073 - DNA, 28 bp, Artificial Sequence
  Synthetic
ggcctgactgautgataaattcattuca

SEQ ID NO: 8074 - DNA, 21 bp, Artificial Sequence
  Synthetic
gtcacactucagggacauggt

SEQ ID NO: 8075 - DNA, 23 bp, Artificial Sequence
  Synthetic
ccccatacugatagacagcugga

SEQ ID NO: 8076 - DNA, 18 bp, Artificial Sequence
  Synthetic
cggctuccccttcacugg

SEQ ID NO: 8077 - DNA, 20 bp, Artificial Sequence
  Synthetic
ctactcctucggacccucct

SEQ ID NO: 8078 - DNA, 23 bp, Artificial Sequence
  Synthetic
cgagagagacagagugacagaug

SEQ ID NO: 8079 - DNA, 28 bp, Artificial Sequence
  Synthetic
ctgtttgatttgugtcttgtgtcttgut

SEQ ID NO: 8080 - DNA, 21 bp, Artificial Sequence
  Synthetic
tctcgtcgutcttctccucca

SEQ ID NO: 8081 - DNA, 18 bp, Artificial Sequence
  Synthetic
gccttcgucccgcttcuc

SEQ ID NO: 8082 - DNA, 17 bp, Artificial Sequence
  Synthetic
gcctccucctgcaggut

SEQ ID NO: 8083 - DNA, 17 bp, Artificial Sequence
  Synthetic
cccgacccugacccuct

SEQ ID NO: 8084 - DNA, 22 bp, Artificial Sequence
  Synthetic
tgagcccuggtgacatttgtut

SEQ ID NO: 8085 - DNA, 23 bp, Artificial Sequence
  Synthetic
gtcaaggugaaggacgacaacua

SEQ ID NO: 8086 - DNA, 21 bp, Artificial Sequence
  Synthetic
gccccucctcttagaguccag

SEQ ID NO: 8087 - DNA, 28 bp, Artificial Sequence
  Synthetic
tggagagccuagaattttatuacccaga

SEQ ID NO: 8088 - DNA, 22 bp, Artificial Sequence
  Synthetic
gggataacagaugccgaguacc

SEQ ID NO: 8089 - DNA, 21 bp, Artificial Sequence
  Synthetic
ttcagaucccaagcacugcaa

SEQ ID NO: 8090 - DNA, 22 bp, Artificial Sequence
  Synthetic
catgtctgucttcagcagugga

SEQ ID NO: 8091 - DNA, 22 bp, Artificial Sequence
  Synthetic
gcgatggugaggatgggtttut

SEQ ID NO: 8092 - DNA, 29 bp, Artificial Sequence
  Synthetic
cagtccaggcaauaaaatgagaattugaa

SEQ ID NO: 8093 - DNA, 24 bp, Artificial Sequence
  Synthetic
gacaucaaacaagagucaggaaug

SEQ ID NO: 8094 - DNA, 25 bp, Artificial Sequence
  Synthetic
atatgcaaaatcuctgggttccugt

SEQ ID NO: 8095 - DNA, 23 bp, Artificial Sequence
  Synthetic
ctatguaccaacgccagatguct

SEQ ID NO: 8096 - DNA, 29 bp, Artificial Sequence
  Synthetic
agaaccactatccuacatacatacaccug

SEQ ID NO: 8097 - DNA, 23 bp, Artificial Sequence
  Synthetic
ccccacaguccatgtucagaaat

SEQ ID NO: 8098 - DNA, 29 bp, Artificial Sequence
  Synthetic
ctaagcattagauacacacctaacgtuct

SEQ ID NO: 8099 - DNA, 23 bp, Artificial Sequence
  Synthetic
ggtgttctgguggaggactttuc

SEQ ID NO: 8100 - DNA, 22 bp, Artificial Sequence
  Synthetic
ccccctcccutctcattttcuc

SEQ ID NO: 8101 - DNA, 25 bp, Artificial Sequence
  Synthetic
gcagcauggatggattttaugacca

SEQ ID NO: 8102 - DNA, 30 bp, Artificial Sequence
  Synthetic
tttctgcatttcucagtatttcatgtgaua

SEQ ID NO: 8103 - DNA, 26 bp, Artificial Sequence
  Synthetic
guaatttccaaatucccaaggaccac

SEQ ID NO: 8104 - DNA, 25 bp, Artificial Sequence
  Synthetic
ccttcatgggaauttaaaggagcug

SEQ ID NO: 8105 - DNA, 24 bp, Artificial Sequence
  Synthetic
cgacatgtugctgagaaagucact

SEQ ID NO: 8106 - DNA, 28 bp, Artificial Sequence
  Synthetic
ctctttttcagugaccaaaatcatcugt

SEQ ID NO: 8107 - DNA, 20 bp, Artificial Sequence
  Synthetic
catctuaccaggcagucgct

SEQ ID NO: 8108 - DNA, 23 bp, Artificial Sequence
  Synthetic
ccgacagcuatgagauggaggaa

SEQ ID NO: 8109 - DNA, 18 bp, Artificial Sequence
  Synthetic
augagagcccagccucag

SEQ ID NO: 8110 - DNA, 25 bp, Artificial Sequence
  Synthetic
ccgtaaaggaaaucacaggttugag

SEQ ID NO: 8111 - DNA, 29 bp, Artificial Sequence
  Synthetic
aacatcagccautaacggtaaaattucag

SEQ ID NO: 8112 - DNA, 30 bp, Artificial Sequence
  Synthetic
gtgctatgcaaauacaataaacuggaaaaa

SEQ ID NO: 8113 - DNA, 29 bp, Artificial Sequence
  Synthetic
atacaaauaaaggacccatuagaaccaac

SEQ ID NO: 8114 - DNA, 27 bp, Artificial Sequence
  Synthetic
gaaagagacaugcatgaacattttuct

SEQ ID NO: 8115 - DNA, 24 bp, Artificial Sequence
  Synthetic
tgttgttttcucccatgactccug

SEQ ID NO: 8116 - DNA, 32 bp, Artificial Sequence
  Synthetic
ctgcctttttaaacuatcatcctgtaaucaaa

SEQ ID NO: 8117 - DNA, 20 bp, Artificial Sequence
  Synthetic
ccccaacccagcugaaacuc

SEQ ID NO: 8118 - DNA, 20 bp, Artificial Sequence
  Synthetic
tgccaaggccauggaatcug

SEQ ID NO: 8119 - DNA, 18 bp, Artificial Sequence
  Synthetic
ctuccgaacgatguggcg

SEQ ID NO: 8120 - DNA, 23 bp, Artificial Sequence
  Synthetic
cagcatguggcaccatcucacaa

SEQ ID NO: 8121 - DNA, 27 bp, Artificial Sequence
  Synthetic
tggctttcggagaugttgcttctctua

SEQ ID NO: 8122 - DNA, 22 bp, Artificial Sequence
  Synthetic
gcagagctucttcccatgauga

SEQ ID NO: 8123 - DNA, 26 bp, Artificial Sequence
  Synthetic
ccaaaatctgtgaucttgacatgcug

SEQ ID NO: 8124 - DNA, 22 bp, Artificial Sequence
  Synthetic
caagccauatgacggaauccct

SEQ ID NO: 8125 - DNA, 19 bp, Artificial Sequence
  Synthetic
guggacagauccaccaguc

SEQ ID NO: 8126 - DNA, 23 bp, Artificial Sequence
  Synthetic
acctgcatucaggaaaaguggat

SEQ ID NO: 8127 - DNA, 25 bp, Artificial Sequence
  Synthetic
agccataguggagagctgtaaatuc

SEQ ID NO: 8128 - DNA, 22 bp, Artificial Sequence
  Synthetic
accccgaguatctcaacacugt

SEQ ID NO: 8129 - DNA, 24 bp, Artificial Sequence
  Synthetic
ccttaaagaugccatttggctugg

SEQ ID NO: 8130 - DNA, 19 bp, Artificial Sequence
  Synthetic
cctgctguccatccuccac

SEQ ID NO: 8131 - DNA, 20 bp, Artificial Sequence
  Synthetic
agtucccagggacgaagguc

SEQ ID NO: 8132 - DNA, 21 bp, Artificial Sequence
  Synthetic
ctgatcacagcacugcccuaa

SEQ ID NO: 8133 - DNA, 22 bp, Artificial Sequence
  Synthetic
tctttcttgggugtcagcacuc

SEQ ID NO: 8134 - DNA, 21 bp, Artificial Sequence
  Synthetic
ggctgagcugctgctaguaac

SEQ ID NO: 8135 - DNA, 24 bp, Artificial Sequence
  Synthetic
ggctgctttcutcctatagagucc

SEQ ID NO: 8136 - DNA, 22 bp, Artificial Sequence
  Synthetic
ggtagatctguccacccaggut

SEQ ID NO: 8137 - DNA, 24 bp, Artificial Sequence
  Synthetic
acagtcuagaagggtctcacucac

SEQ ID NO: 8138 - DNA, 21 bp, Artificial Sequence
  Synthetic
ccctctguggctgtgtttuca

SEQ ID NO: 8139 - DNA, 20 bp, Artificial Sequence
  Synthetic
gggtcuccgaggtctaugca

SEQ ID NO: 8140 - DNA, 24 bp, Artificial Sequence
  Synthetic
acagatggguagacagagggauac

SEQ ID NO: 8141 - DNA, 21 bp, Artificial Sequence
  Synthetic
agctgucagcatagcacucac

SEQ ID NO: 8142 - DNA, 25 bp, Artificial Sequence
  Synthetic
agagattactcuctcaccccttcuc

SEQ ID NO: 8143 - DNA, 18 bp, Artificial Sequence
  Synthetic
gcagutctccgugagcca

SEQ ID NO: 8144 - DNA, 19 bp, Artificial Sequence
  Synthetic
ggacuaggctcagcuccct

SEQ ID NO: 8145 - DNA, 20 bp, Artificial Sequence
  Synthetic
accagcaccaacuccaaguc

SEQ ID NO: 8146 - DNA, 21 bp, Artificial Sequence
  Synthetic
agtacagagugcctcccugaa

SEQ ID NO: 8147 - DNA, 20 bp, Artificial Sequence
  Synthetic
gtcagaagcuccucccacac

SEQ ID NO: 8148 - DNA, 21 bp, Artificial Sequence
  Synthetic
cuaccaacccaccaaccugaa

SEQ ID NO: 8149 - DNA, 20 bp, Artificial Sequence
  Synthetic
cttcugagcaggagauggca

SEQ ID NO: 8150 - DNA, 24 bp, Artificial Sequence
  Synthetic
ccuttcctttctauccccaaccac

SEQ ID NO: 8151 - DNA, 17 bp, Artificial Sequence
  Synthetic
ggttgccucgggctcuc

SEQ ID NO: 8152 - DNA, 29 bp, Artificial Sequence
  Synthetic
agttctcagagaguagaatcaactgugat

SEQ ID NO: 8153 - DNA, 27 bp, Artificial Sequence
  Synthetic
gttatgacuactttccaucgagaacca

SEQ ID NO: 8154 - DNA, 27 bp, Artificial Sequence
  Synthetic
gtgaaactcugagaaacagcactcaua

SEQ ID NO: 8155 - DNA, 29 bp, Artificial Sequence
  Synthetic
gcattgtgaagucttctttctttttcuga

SEQ ID NO: 8156 - DNA, 28 bp, Artificial Sequence
  Synthetic
cagcagauagtgcaaaugaaacaagaat

SEQ ID NO: 8157 - DNA, 31 bp, Artificial Sequence
  Synthetic
tgccacattcatuaactttatctgatctuca

SEQ ID NO: 8158 - DNA, 27 bp, Artificial Sequence
  Synthetic
gaagcacataagucccttagtacagug

SEQ ID NO: 8159 - DNA, 28 bp, Artificial Sequence
  Synthetic
cattctgtcuaacacagcattctttuct

SEQ ID NO: 8160 - DNA, 28 bp, Artificial Sequence
  Synthetic
agctaaaagattuacagcagtctctugt

SEQ ID NO: 8161 - DNA, 27 bp, Artificial Sequence
  Synthetic
tgaacttcttgtucaagtgtaccctut

SEQ ID NO: 8162 - DNA, 28 bp, Artificial Sequence
  Synthetic
ctcctgtuagccaagaagaaagatugat

SEQ ID NO: 8163 - DNA, 29 bp, Artificial Sequence
  Synthetic
tgaatacattgttguttgaggtcctcaut

SEQ ID NO: 8164 - DNA, 28 bp, Artificial Sequence
  Synthetic
gcttgccttcucaaagtaaaagatgaut

SEQ ID NO: 8165 - DNA, 30 bp, Artificial Sequence; identical to SEQ ID NO: 6023
  Synthetic

SEQ ID NO: 8166 - DNA, 28 bp, Artificial Sequence
  Synthetic
gcaagagaaagaacaaguttcatugaga

SEQ ID NO: 8167 - DNA, 29 bp, Artificial Sequence
  Synthetic
tgtcatggucacaactccatctaauaaag

SEQ ID NO: 8168 - DNA, 20 bp, Artificial Sequence
  Synthetic
ggcuacagauggaagcccaa

SEQ ID NO: 8169 - DNA, 28 bp, Artificial Sequence
  Synthetic
ttcctctugagcaaaaataagctctuct

SEQ ID NO: 8170 - DNA, 29 bp, Artificial Sequence
  Synthetic
agaacaagttcaagaautagaaagccuca

SEQ ID NO: 8171 - DNA, 22 bp, Artificial Sequence
  Synthetic
ggaaccguggactcacuaacag

SEQ ID NO: 8172 - DNA, 28 bp, Artificial Sequence
  Synthetic
tgtgtcaatgaguatagcatttgcucaa

SEQ ID NO: 8173 - DNA, 28 bp, Artificial Sequence
  Synthetic
agtctgaaaaccaauttgatcctgugat

SEQ ID NO: 8174 - DNA, 26 bp, Artificial Sequence
  Synthetic
tcatgatgagauttcagtgucaagca

SEQ ID NO: 8175 - DNA, 22 bp, Artificial Sequence
  Synthetic
tctctccatutgccgcataugt

SEQ ID NO: 8176 - DNA, 29 bp, Artificial Sequence
  Synthetic
cttctttatctauacaggtatgcacucca

SEQ ID NO: 8177 - DNA, 24 bp, Artificial Sequence
  Synthetic
ggcagatgacuggcttttacuaga

SEQ ID NO: 8178 - DNA, 25 bp, Artificial Sequence
  Synthetic
ttttgcuggaactgaaauagaccct

SEQ ID NO: 8179 - DNA, 28 bp, Artificial Sequence
  Synthetic
gcaatataaggaggutacctgactgcua

SEQ ID NO: 8180 - DNA, 23 bp, Artificial Sequence
  Synthetic
gagcaggagutgttatgugcaag

SEQ ID NO: 8181 - DNA, 27 bp, Artificial Sequence
  Synthetic
cagaggactguttcatacaaattcuga

SEQ ID NO: 8182 - DNA, 30 bp, Artificial Sequence
  Synthetic
catgagagagatguattccaacaggaaaua

SEQ ID NO: 8183 - DNA, 26 bp, Artificial Sequence
  Synthetic
tgtaagtugggcaatatcagugaagt

SEQ ID NO: 8184 - DNA, 26 bp, Artificial Sequence
  Synthetic
tgttccuaggatgacauggagaaact

SEQ ID NO: 8185 - DNA, 28 bp, Artificial Sequence
  Synthetic
ttggtcaatttcuacctctttttccugt

SEQ ID NO: 8186 - DNA, 21 bp, Artificial Sequence
  Synthetic
gaaaagcuggcctuggaacag

SEQ ID NO: 8187 - DNA, 25 bp, Artificial Sequence
  Synthetic
tttccacacttucacgttctctcut

SEQ ID NO: 8188 - DNA, 29 bp, Artificial Sequence
  Synthetic
caaaggacttagaacutacccagtgtuat

SEQ ID NO: 8189 - DNA, 26 bp, Artificial Sequence
  Synthetic
cctcaagtuggatttgacugacaaga

SEQ ID NO: 8190 - DNA, 29 bp, Artificial Sequence
  Synthetic
caggttgttgaaaugcatactagttugat

SEQ ID NO: 8191 - DNA, 28 bp, Artificial Sequence
  Synthetic
ggcttcttttctuttctttctctctcug

SEQ ID NO: 8192 - DNA, 27 bp, Artificial Sequence
  Synthetic
gggaagatttuaactgaatgcccuact

SEQ ID NO: 8193 - DNA, 30 bp, Artificial Sequence
  Synthetic
ttcttgtacctcaguctcatcttcttttuc

SEQ ID NO: 8194 - DNA, 29 bp, Artificial Sequence
  Synthetic
acatggaauccagacatattucagaaact

SEQ ID NO: 8195 - DNA, 28 bp, Artificial Sequence
  Synthetic
ccaaataccuctttacttcucagacact

SEQ ID NO: 8196 - DNA, 27 bp, Artificial Sequence
  Synthetic
attctattcagcagguttcagaaccut

SEQ ID NO: 8197 - DNA, 27 bp, Artificial Sequence
  Synthetic
catagtattcttuggttacctcggcut

SEQ ID NO: 8198 - DNA, 24 bp, Artificial Sequence
  Synthetic
gccuccagaaagcagauagaagga

SEQ ID NO: 8199 - DNA, 28 bp, Artificial Sequence
  Synthetic
tgaaatctttucacctgtttgtguaacc

SEQ ID NO: 8200 - DNA, 21 bp, Artificial Sequence
  Synthetic
ctccagugggcttuggagaaa

SEQ ID NO: 8201 - DNA, 28 bp, Artificial Sequence
  Synthetic
cttaagacccucttctatcattcuggat

SEQ ID NO: 8202 - DNA, 24 bp, Artificial Sequence
  Synthetic
cccucagaggacctacugaaagag

SEQ ID NO: 8203 - DNA, 23 bp, Artificial Sequence
  Synthetic
ttctgtcugcagtgttttccugt

SEQ ID NO: 8204 - DNA, 21 bp, Artificial Sequence
  Synthetic
tcugtccaaaatugccagcca

SEQ ID NO: 8205 - DNA, 28 bp, Artificial Sequence
  Synthetic
ggttcctccuccattcatttcaaucaat

SEQ ID NO: 8206 - DNA, 27 bp, Artificial Sequence
  Synthetic
acagttugaaacagcagatgaugaaga

SEQ ID NO: 8207 - DNA, 29 bp, Artificial Sequence
  Synthetic
atccagtttctautaaatctttgctcuca

SEQ ID NO: 8208 - DNA, 26 bp, Artificial Sequence
  Synthetic
gctcagactttucttcagagactugt

SEQ ID NO: 8209 - DNA, 22 bp, Artificial Sequence
  Synthetic
agcctcugccctttucaaagat

SEQ ID NO: 8210 - DNA, 17 bp, Artificial Sequence
  Synthetic
cctgctugcccggaugg

SEQ ID NO: 8211 - DNA, 27 bp, Artificial Sequence
  Synthetic
aatgcattttccutcaagtcttuacct

SEQ ID NO: 8212 - DNA, 21 bp, Artificial Sequence
  Synthetic
tccuttagguacccaggcact

SEQ ID NO: 8213 - DNA, 27 bp, Artificial Sequence
  Synthetic
tgactgtatagtuccaagtcgtcttug

SEQ ID NO: 8214 - DNA, 20 bp, Artificial Sequence
  Synthetic
ctuggagaagcagagccugt

SEQ ID NO: 8215 - DNA, 20 bp, Artificial Sequence
  Synthetic
cggagcugaatacagccuga

SEQ ID NO: 8216 - DNA, 31 bp, Artificial Sequence
  Synthetic
cctagttcatcgauatctgttacaaactuct

SEQ ID NO: 8217 - DNA, 26 bp, Artificial Sequence
  Synthetic
gctaatgcttatguccatgtgtggut

SEQ ID NO: 8218 - DNA, 22 bp, Artificial Sequence
  Synthetic
gttttatttguccgctgcuggt

SEQ ID NO: 8219 - DNA, 24 bp, Artificial Sequence
  Synthetic
gcaaatgcucaacttccgtttuga

SEQ ID NO: 8220 - DNA, 19 bp, Artificial Sequence
  Synthetic
ggctcaccugaccacgtug

SEQ ID NO: 8221 - DNA, 19 bp, Artificial Sequence
  Synthetic
ccgtttcguggcgtugaag

SEQ ID NO: 8222 - DNA, 22 bp, Artificial Sequence
  Synthetic
accacacaagugttctttggut

SEQ ID NO: 8223 - DNA, 20 bp, Artificial Sequence
  Synthetic
gtgcgttucctgtccacuga

SEQ ID NO: 8224 - DNA, 25 bp, Artificial Sequence
  Synthetic
aatctctucatggctttuggacagt

SEQ ID NO: 8225 - DNA, 32 bp, Artificial Sequence
  Synthetic
caacttatctacaaggutgaattatttcccut

SEQ ID NO: 8226 - DNA, 22 bp, Artificial Sequence
  Synthetic
ctgaugggacccactccaucga

SEQ ID NO: 8227 - DNA, 31 bp, Artificial Sequence
  Synthetic
tctcttacctaaacucttcataatgctugct

SEQ ID NO: 8228 - DNA, 25 bp, Artificial Sequence
  Synthetic
gtaacaatagccagutgtggcttug

SEQ ID NO: 8229 - DNA, 27 bp, Artificial Sequence
  Synthetic
tutctgacaacatttuaccgacagact

SEQ ID NO: 8230 - DNA, 30 bp, Artificial Sequence
  Synthetic
attacatttggcugtgacttcuaagaagaa

SEQ ID NO: 8231 - DNA, 23 bp, Artificial Sequence
  Synthetic
cctcattaccuggctcacuaact

SEQ ID NO: 8232 - DNA, 27 bp, Artificial Sequence
  Synthetic
gcccaaattgauttcgatgatctucat

SEQ ID NO: 8233 - DNA, 32 bp, Artificial Sequence
  Synthetic
cctttatatcgttacuctgaatcttatctucc

SEQ ID NO: 8234 - DNA, 24 bp, Artificial Sequence
  Synthetic
cttctgtacuacaacgctggugaa

SEQ ID NO: 8235 - DNA, 30 bp, Artificial Sequence
  Synthetic
agttttcttgtgaguttttgaaatctcugt

SEQ ID NO: 8236 - DNA, 32 bp, Artificial Sequence
  Synthetic
agaaacagcaaaauggtgatattaaaacugac

SEQ ID NO: 8237 - DNA, 24 bp, Artificial Sequence
  Synthetic
gcctttcagugctaccttcatcuc

SEQ ID NO: 8238 - DNA, 31 bp, Artificial Sequence
  Synthetic
actagatatgatacucaaaagcttaccucca

SEQ ID NO: 8239 - DNA, 30 bp, Artificial Sequence
  Synthetic
aggtgtggaauatcaaacaaatgatuaagt

SEQ ID NO: 8240 - DNA, 28 bp, Artificial Sequence
  Synthetic
tgcaaattcagaauttcaaactgcaugt

SEQ ID NO: 8241 - DNA, 22 bp, Artificial Sequence
  Synthetic
tcggcaucgaaagagaaaugga

SEQ ID NO: 8242 - DNA, 22 bp, Artificial Sequence
  Synthetic
ccacatgcaacucaggaacuca

SEQ ID NO: 8243 - DNA, 31 bp, Artificial Sequence
  Synthetic
ctttatccaaaagaautttctcctgtgtcut

SEQ ID NO: 8244 - DNA, 26 bp, Artificial Sequence
  Synthetic
ggacacattttuactgtcccaauggt

SEQ ID NO: 8245 - DNA, 24 bp, Artificial Sequence
  Synthetic
gaagaaccuccaaacctctctcug

SEQ ID NO: 8246 - DNA, 31 bp, Artificial Sequence
  Synthetic
cagtgtctatcuatgttgacttctcuaagga

SEQ ID NO: 8247 - DNA, 21 bp, Artificial Sequence
  Synthetic
gctctgtgacugtgcctctug

SEQ ID NO: 8248 - DNA, 22 bp, Artificial Sequence
  Synthetic
gtttcagtcccugcttcccuat

SEQ ID NO: 8249 - DNA, 23 bp, Artificial Sequence
  Synthetic
gauaaagacccuaccaaaacguc

SEQ ID NO: 8250 - DNA, 28 bp, Artificial Sequence
  Synthetic
ctccaagcugctttaaaacataatucca

SEQ ID NO: 8251 - DNA, 28 bp, Artificial Sequence
  Synthetic
accaaatgcuaaatctgtucagagagag

SEQ ID NO: 8252 - DNA, 29 bp, Artificial Sequence
  Synthetic
ctaagccctattuctactctttctacugt

SEQ ID NO: 8253 - DNA, 24 bp, Artificial Sequence
  Synthetic
tgatgauggagacgatccugaaga

SEQ ID NO: 8254 - DNA, 25 bp, Artificial Sequence
  Synthetic
gggagaccaagaauacattaugggt

SEQ ID NO: 8255 - DNA, 24 bp, Artificial Sequence
  Synthetic
tgatggcuacagcttaaggttguc

SEQ ID NO: 8256 - DNA, 25 bp, Artificial Sequence
  Synthetic
acaaactggucccttctcagattuc

SEQ ID NO: 8257 - DNA, 23 bp, Artificial Sequence
  Synthetic
agtttgcugcggatuaaaacaca

SEQ ID NO: 8258 - DNA, 29 bp, Artificial Sequence
  Synthetic
tttgtttgctttuagatcctgttcuacct

SEQ ID NO: 8259 - DNA, 23 bp, Artificial Sequence
  Synthetic
cggcaguttttgtaccucaagaa

SEQ ID NO: 8260 - DNA, 24 bp, Artificial Sequence
  Synthetic
agcagtgggaaauatgccctatug

SEQ ID NO: 8261 - DNA, 26 bp, Artificial Sequence
  Synthetic
ctgtctccacutgaagaactuaaggt

SEQ ID NO: 8262 - DNA, 22 bp, Artificial Sequence
  Synthetic
cauccgaggtttuggcaaaact

SEQ ID NO: 8263 - DNA, 21 bp, Artificial Sequence
  Synthetic
cttccagguggccattcucaa

SEQ ID NO: 8264 - DNA, 25 bp, Artificial Sequence
  Synthetic
caagggaagagggcucttctauact

SEQ ID NO: 8265 - DNA, 24 bp, Artificial Sequence
  Synthetic
cctgaagaacauggtggaccaaut

SEQ ID NO: 8266 - DNA, 21 bp, Artificial Sequence
  Synthetic
ctcctcaggcaugggttctua

SEQ ID NO: 8267 - DNA, 23 bp, Artificial Sequence
  Synthetic
ctgcctacutctacttccuccca

SEQ ID NO: 8268 - DNA, 22 bp, Artificial Sequence
  Synthetic
tcaggguaaacaagggcaacuc

SEQ ID NO: 8269 - DNA, 29 bp, Artificial Sequence
  Synthetic
ggacagaatatucaagcacatatcacgua

SEQ ID NO: 8270 - DNA, 24 bp, Artificial Sequence
  Synthetic
gcagcttggutccaattaaucact

SEQ ID NO: 8271 - DNA, 27 bp, Artificial Sequence
  Synthetic
gccagtcatugagtttgtactgattuc

SEQ ID NO: 8272 - DNA, 22 bp, Artificial Sequence
  Synthetic
tcaggtaccucttcccctugaa

SEQ ID NO: 8273 - DNA, 28 bp, Artificial Sequence
  Synthetic
ccaactttgatgtutctattcccctcut

SEQ ID NO: 8274 - DNA, 19 bp, Artificial Sequence
  Synthetic
cctcgauggccgcuagaat

SEQ ID NO: 8275 - DNA, 24 bp, Artificial Sequence
  Synthetic
cagcatcuacaaaggcaagaagug

SEQ ID NO: 8276 - DNA, 26 bp, Artificial Sequence
  Synthetic
tgagagcaggaugaaatagcgtttut

SEQ ID NO: 8277 - DNA, 19 bp, Artificial Sequence
  Synthetic
ggugggagcggagagttug

SEQ ID NO: 8278 - DNA, 20 bp, Artificial Sequence
  Synthetic
cgcagguaccgtgcgacauc

SEQ ID NO: 8279 - DNA, 19 bp, Artificial Sequence
  Synthetic
ctcucacccgacccgugca

SEQ ID NO: 8280 - DNA, 22 bp, Artificial Sequence
  Synthetic
ccutctgaaaacuccccaggaa

SEQ ID NO: 8281 - DNA, 21 bp, Artificial Sequence
  Synthetic
caccgaauagttacggucgga

SEQ ID NO: 8282 - DNA, 21 bp, Artificial Sequence
  Synthetic
ggactttucgagggccttucc

SEQ ID NO: 8283 - DNA, 21 bp, Artificial Sequence
  Synthetic
gggttttcguggttcacaucc

SEQ ID NO: 8284 - DNA, 18 bp, Artificial Sequence
  Synthetic
gccactccugccccctua

SEQ ID NO: 8285 - DNA, 20 bp, Artificial Sequence
  Synthetic
agagccgtuccgagatctug

SEQ ID NO: 8286 - DNA, 17 bp, Artificial Sequence
  Synthetic
cucccgggcagcaucat

SEQ ID NO: 8287 - DNA, 18 bp, Artificial Sequence
  Synthetic
cacccuggctcugaccac

SEQ ID NO: 8288 - DNA, 20 bp, Artificial Sequence
  Synthetic
cttgttctccucgcgcatuc

SEQ ID NO: 8289 - DNA, 20 bp, Artificial Sequence
  Synthetic
aatgaagcugagcccagguc

SEQ ID NO: 8290 - DNA, 27 bp, Artificial Sequence
  Synthetic
agacctgaaggutctagaaagaauagt

SEQ ID NO: 8291 - DNA, 30 bp, Artificial Sequence
  Synthetic
atgatgatggtatcuttgctttggagaaua

SEQ ID NO: 8292 - DNA, 30 bp, Artificial Sequence
  Synthetic
ggagttagatatatuacagaggccctcaut

SEQ ID NO: 8293 - DNA, 26 bp, Artificial Sequence
  Synthetic
gctcagaaatugttggtaaccuacct

SEQ ID NO: 8294 - DNA, 30 bp, Artificial Sequence
  Synthetic
agcaaaattgaaggcauagaaaatatgugt

SEQ ID NO: 8295 - DNA, 27 bp, Artificial Sequence
  Synthetic
acttaccgatgauatcttgttgcctut

SEQ ID NO: 8296 - DNA, 27 bp, Artificial Sequence
  Synthetic
cugaagagctuaagagcaaacaaacaa

SEQ ID NO: 8297 - DNA, 27 bp, Artificial Sequence
  Synthetic
tttaagtcacucttgagttccucacag

SEQ ID NO: 8298 - DNA, 28 bp, Artificial Sequence
  Synthetic
tgaataatgtcauttgactgctuggaga

SEQ ID NO: 8299 - DNA, 29 bp, Artificial Sequence
  Synthetic
ttctcttgtatcuggatttgccaatguaa

SEQ ID NO: 8300 - DNA, 25 bp, Artificial Sequence
  Synthetic
ggagautagattucagaagcaggga

SEQ ID NO: 8301 - DNA, 25 bp, Artificial Sequence
  Synthetic
caggtccttaauctccttctgctut

SEQ ID NO: 8302 - DNA, 26 bp, Artificial Sequence
  Synthetic
tggcttauaacaaaatgcugagcaga

SEQ ID NO: 8303 - DNA, 25 bp, Artificial Sequence
  Synthetic
gcaacccacugataacaccttcuaa

SEQ ID NO: 8304 - DNA, 23 bp, Artificial Sequence
  Synthetic
gagatcucagtgcctaugaagct

SEQ ID NO: 8305 - DNA, 25 bp, Artificial Sequence
  Synthetic
tgatatctuaaggcacagggtccut

SEQ ID NO: 8306 - DNA, 28 bp, Artificial Sequence
  Synthetic
agatttccagaaucaccttaaccatgug

SEQ ID NO: 8307 - DNA, 21 bp, Artificial Sequence
  Synthetic
ttgugaggcccactcuagact

SEQ ID NO: 8308 - DNA, 23 bp, Artificial Sequence
  Synthetic
tccaaggccutacagatcuccaa

SEQ ID NO: 8309 - DNA, 22 bp, Artificial Sequence
  Synthetic
catctcagcugacctagtugcc

SEQ ID NO: 8310 - DNA, 24 bp, Artificial Sequence
  Synthetic
ggtgcctttcucatacttctgucc

SEQ ID NO: 8311 - DNA, 22 bp, Artificial Sequence
  Synthetic
ggtctctggguaccaacacuga

SEQ ID NO: 8312 - DNA, 24 bp, Artificial Sequence
  Synthetic
agcauggcagatccttucaaaaga

SEQ ID NO: 8313 - DNA, 23 bp, Artificial Sequence
  Synthetic
gggacaatgucacactttctuca

SEQ ID NO: 8314 - DNA, 26 bp, Artificial Sequence
  Synthetic
gcctcctccuggatacatgatgtaua

SEQ ID NO: 8315 - DNA, 21 bp, Artificial Sequence
  Synthetic
ggtgggccauaaacaacagug

SEQ ID NO: 8316 - DNA, 24 bp, Artificial Sequence
  Synthetic
ggaagaaagguggatgagagcauc

SEQ ID NO: 8317 - DNA, 28 bp, Artificial Sequence
  Synthetic
ttgacgtttcuggacagttctatguaat

SEQ ID NO: 8318 - DNA, 23 bp, Artificial Sequence
  Synthetic
gtttacauggccagtagctguga

SEQ ID NO: 8319 - DNA, 25 bp, Artificial Sequence
  Synthetic
gctctccuttctaattccucagcat

SEQ ID NO: 8320 - DNA, 23 bp, Artificial Sequence
  Synthetic
cgagtccctuaggatctgctcua

SEQ ID NO: 8321 - DNA, 27 bp, Artificial Sequence
  Synthetic
aagaagcaccucagattcttuaaggac

SEQ ID NO: 8322 - DNA, 29 bp, Artificial Sequence
  Synthetic
aaacacaggaaguaaaatctcttcuggaa

SEQ ID NO: 8323 - DNA, 26 bp, Artificial Sequence
  Synthetic
gacatctgccutaaaacaaccugaag

SEQ ID NO: 8324 - DNA, 22 bp, Artificial Sequence
  Synthetic
attugcagcagataucccagca

SEQ ID NO: 8325 - DNA, 26 bp, Artificial Sequence
  Synthetic
gtcacatttcucttggagatctucct

SEQ ID NO: 8326 - DNA, 23 bp, Artificial Sequence
  Synthetic
acttttugggaatgctaauggga

SEQ ID NO: 8327 - DNA, 25 bp, Artificial Sequence
  Synthetic
cttggacattagcuagttcctccug

SEQ ID NO: 8328 - DNA, 22 bp, Artificial Sequence
  Synthetic
ctgtctcatguccatgcaggut

SEQ ID NO: 8329 - DNA, 29 bp, Artificial Sequence
  Synthetic
agtgtcacttuactggtttctaattugct

SEQ ID NO: 8330 - DNA, 23 bp, Artificial Sequence
  Synthetic
gcagattctaugagggcagacut

SEQ ID NO: 8331 - DNA, 27 bp, Artificial Sequence
  Synthetic
ggtacucacaagaaggtttttcuccag

SEQ ID NO: 8332 - DNA, 23 bp, Artificial Sequence
  Synthetic
acatggcacaucatacagcucaa

SEQ ID NO: 8333 - DNA, 26 bp, Artificial Sequence
  Synthetic
tccttcaccucagatttaagtgucct

SEQ ID NO: 8334 - DNA, 29 bp, Artificial Sequence
  Synthetic
ctgtgtaaaacccuaagtcttaucacact

SEQ ID NO: 8335 - DNA, 21 bp, Artificial Sequence
  Synthetic
cagaggtgcuggtgaccaaut

SEQ ID NO: 8336 - DNA, 26 bp, Artificial Sequence
  Synthetic
gtgattgactucaattgctgactugt

SEQ ID NO: 8337 - DNA, 21 bp, Artificial Sequence
  Synthetic
ccccaaguactttuccaggct

SEQ ID NO: 8338 - DNA, 22 bp, Artificial Sequence
  Synthetic
acccagugaaaaugaccccaac

SEQ ID NO: 8339 - DNA, 23 bp, Artificial Sequence
  Synthetic
accgcaatucccagatttctauc

SEQ ID NO: 8340 - DNA, 20 bp, Artificial Sequence
  Synthetic
cctgtctcugtgggcugaag

SEQ ID NO: 8341 - DNA, 22 bp, Artificial Sequence
  Synthetic
tggataauggagcgtggtgaug

SEQ ID NO: 8342 - DNA, 20 bp, Artificial Sequence
  Synthetic
ccacgtgutgaagtccucgt

SEQ ID NO: 8343 - DNA, 23 bp, Artificial Sequence
  Synthetic
gagatctgaguggccatguacag

SEQ ID NO: 8344 - DNA, 24 bp, Artificial Sequence
  Synthetic
tgctacacatcutgaacagcctut

SEQ ID NO: 8345 - DNA, 22 bp, Artificial Sequence
  Synthetic
ggtagtcctuctctagcagcuc

SEQ ID NO: 8346 - DNA, 19 bp, Artificial Sequence
  Synthetic
cuccaggagagcugcagag

SEQ ID NO: 8347 - DNA, 20 bp, Artificial Sequence
  Synthetic
cattcacagcutcccgtugg

SEQ ID NO: 8348 - DNA, 17 bp, Artificial Sequence
  Synthetic
gggcacuggcttucacc

SEQ ID NO: 8349 - DNA, 18 bp, Artificial Sequence
  Synthetic
ggtcagcgugctggacut

SEQ ID NO: 8350 - DNA, 23 bp, Artificial Sequence
  Synthetic
caggctggugaaaaagaaugagg

SEQ ID NO: 8351 - DNA, 22 bp, Artificial Sequence
  Synthetic
cctttccagcutcttccttgug

SEQ ID NO: 8352 - DNA, 22 bp, Artificial Sequence
  Synthetic
ggaaattguccaggcucaaacc

SEQ ID NO: 8353 - DNA, 19 bp, Artificial Sequence
  Synthetic
ggcagcgucactgtucaca

SEQ ID NO: 8354 - DNA, 19 bp, Artificial Sequence
  Synthetic
tgccucgccatctcuagga

SEQ ID NO: 8355 - DNA, 24 bp, Artificial Sequence
  Synthetic
ggaaggcaaacutgttcctcatut

SEQ ID NO: 8356 - DNA, 24 bp, Artificial Sequence
  Synthetic
ctgaatuaagaagcagaccugcac

SEQ ID NO: 8357 - DNA, 20 bp, Artificial Sequence
  Synthetic
gctcugacagcagtgacuca

SEQ ID NO: 8358 - DNA, 19 bp, Artificial Sequence
  Synthetic
gcuccacgcaggcaactua

SEQ ID NO: 8359 - DNA, 24 bp, Artificial Sequence
  Synthetic
caaccccgacgagauagaaatuga

SEQ ID NO: 8360 - DNA, 19 bp, Artificial Sequence
  Synthetic
gagccaccutggccttcut

SEQ ID NO: 8361 - DNA, 20 bp, Artificial Sequence
  Synthetic
ctgtcucaggccccaguaaa

SEQ ID NO: 8362 - DNA, 26 bp, Artificial Sequence
  Synthetic
gggattgtauttgtagcaatucgaga

SEQ ID NO: 8363 - DNA, 20 bp, Artificial Sequence
  Synthetic
gtguggcagagagtccugat

SEQ ID NO: 8364 - DNA, 19 bp, Artificial Sequence
  Synthetic
ccaccactutggcctgcut

SEQ ID NO: 8365 - DNA, 23 bp, Artificial Sequence
  Synthetic
gggttcacuggttatttcacugt

SEQ ID NO: 8366 - DNA, 24 bp, Artificial Sequence
  Synthetic
gcatcugggccactttttguagaa

SEQ ID NO: 8367 - DNA, 28 bp, Artificial Sequence
  Synthetic
tgagctacaacuaataatgtccttugca

SEQ ID NO: 8368 - DNA, 19 bp, Artificial Sequence
  Synthetic
ctgcagcuggttggtctug

SEQ ID NO: 8369 - DNA, 17 bp, Artificial Sequence
  Synthetic
ccaagccgcugctguga

SEQ ID NO: 8370 - DNA, 26 bp, Artificial Sequence
  Synthetic
ttccttcacaucaactcaatgacugt

SEQ ID NO: 8371 - DNA, 25 bp, Artificial Sequence
  Synthetic
agtggautatgaagaugaggaggct

SEQ ID NO: 8372 - DNA, 25 bp, Artificial Sequence
  Synthetic
ccaccagaagaugtcgaagaaguag

SEQ ID NO: 8373 - DNA, 23 bp, Artificial Sequence
  Synthetic
ctgctttgtuctgccatcuaagg

SEQ ID NO: 8374 - DNA, 22 bp, Artificial Sequence
  Synthetic
gagtttgucgccagtcagtuac

SEQ ID NO: 8375 - DNA, 23 bp, Artificial Sequence
  Synthetic
aacccccaacagutcctaaugac

SEQ ID NO: 8376 - DNA, 21 bp, Artificial Sequence
  Synthetic
ggctcugcagcctctaucaat

SEQ ID NO: 8377 - DNA, 29 bp, Artificial Sequence
  Synthetic
ctgtcctatcggauataacttaccuagca

SEQ ID NO: 8378 - DNA, 22 bp, Artificial Sequence
  Synthetic
cgaagcugagaggcttggauat

SEQ ID NO: 8379 - DNA, 28 bp, Artificial Sequence
  Synthetic
tgttcutatttcaggcuacagacaagag

SEQ ID NO: 8380 - DNA, 29 bp, Artificial Sequence
  Synthetic
atttacaacacaauggatagtgaagccua

SEQ ID NO: 8381 - DNA, 19 bp, Artificial Sequence
  Synthetic
cccctccucccagcctuaa

SEQ ID NO: 8382 - DNA, 23 bp, Artificial Sequence
  Synthetic
cagctctagucagtgaagtuggt

SEQ ID NO: 8383 - DNA, 27 bp, Artificial Sequence
  Synthetic
tgcgatttaaaaccucctagatagtug

SEQ ID NO: 8384 - DNA, 26 bp, Artificial Sequence
  Synthetic
tctacaggcaugaaactagugaaacc

SEQ ID NO: 8385 - DNA, 23 bp, Artificial Sequence
  Synthetic
gctccaccaucgcctagagauat

SEQ ID NO: 8386 - DNA, 27 bp, Artificial Sequence
  Synthetic
tcatcagtttgutgacctgaaatucct

SEQ ID NO: 8387 - DNA, 22 bp, Artificial Sequence
  Synthetic
gccagtgttuccatggcattug

SEQ ID NO: 8388 - DNA, 19 bp, Artificial Sequence
  Synthetic
tgutctcttgcugcagcga

SEQ ID NO: 8389 - DNA, 17 bp, Artificial Sequence
  Synthetic
cgccaugcagtcgucct

SEQ ID NO: 8390 - DNA, 23 bp, Artificial Sequence
  Synthetic
gaugaaatcagacuccgaccaga

SEQ ID NO: 8391 - DNA, 24 bp, Artificial Sequence
  Synthetic
cctaactctuaagaagggcugcat

SEQ ID NO: 8392 - DNA, 29 bp, Artificial Sequence
  Synthetic
tgtcggaccaatutatgtaaccagtatut

SEQ ID NO: 8393 - DNA, 26 bp, Artificial Sequence
  Synthetic
tcaattctagguagcctggttacugt

SEQ ID NO: 8394 - DNA, 25 bp, Artificial Sequence
  Synthetic
acgtcgtuacaatcgtgattuggaa

SEQ ID NO: 8395 - DNA, 28 bp, Artificial Sequence
  Synthetic
gacacattctaaaucaacacaccatuca

SEQ ID NO: 8396 - DNA, 27 bp, Artificial Sequence
  Synthetic
ctcagtatccagaaugagcattactuc

SEQ ID NO: 8397 - DNA, 23 bp, Artificial Sequence
  Synthetic
aauagagctgaguccaggaacct

SEQ ID NO: 8398 - DNA, 23 bp, Artificial Sequence
  Synthetic
tcaacttggaccutggctttcut

SEQ ID NO: 8399 - DNA, 24 bp, Artificial Sequence
  Synthetic
ggaagtggttuttgttcaggctut

SEQ ID NO: 8400 - DNA, 25 bp, Artificial Sequence
  Synthetic
gtccccugaagaagtgattcguaaa

SEQ ID NO: 8401 - DNA, 28 bp, Artificial Sequence
  Synthetic
gtcttcttaattcucaatgctgtgaguc

SEQ ID NO: 8402 - DNA, 23 bp, Artificial Sequence
  Synthetic
tgtcctcccacuttaatgtgguc

SEQ ID NO: 8403 - DNA, 19 bp, Artificial Sequence
  Synthetic
tgccgtgtugcgtgttcua

SEQ ID NO: 8404 - DNA, 20 bp, Artificial Sequence
  Synthetic
gagtggcucccacactctut

SEQ ID NO: 8405 - DNA, 23 bp, Artificial Sequence
  Synthetic
cagctctcagugaaccaaaacug

SEQ ID NO: 8406 - DNA, 23 bp, Artificial Sequence
  Synthetic
cccaaagaaauggcaccacctua

SEQ ID NO: 8407 - DNA, 29 bp, Artificial Sequence
  Synthetic
gaaaagttgccuaaatgctgttaaacuga

SEQ ID NO: 8408 - DNA, 27 bp, Artificial Sequence
  Synthetic
tcaaggcatcuttaatggtgaugaagt

SEQ ID NO: 8409 - DNA, 22 bp, Artificial Sequence
  Synthetic
gccccaguaacacatgactgut

SEQ ID NO: 8410 - DNA, 21 bp, Artificial Sequence
  Synthetic
ggccugcaaagucaacacaac

SEQ ID NO: 8411 - DNA, 21 bp, Artificial Sequence
  Synthetic
agcgaaguttgcttcuagcga

SEQ ID NO: 8412 - DNA, 24 bp, Artificial Sequence
  Synthetic
gcagctuggagaagatggaatugt

SEQ ID NO: 8413 - DNA, 20 bp, Artificial Sequence
  Synthetic
accagcugcacgagatgtuc

SEQ ID NO: 8414 - DNA, 30 bp, Artificial Sequence
  Synthetic
caaattcccttuaccttgtcatcaataucc

SEQ ID NO: 8415 - DNA, 23 bp, Artificial Sequence
  Synthetic
tcgtctggugtggaaatgttugt

SEQ ID NO: 8416 - DNA, 17 bp, Artificial Sequence
  Synthetic
tgcugcccggaggaauc

SEQ ID NO: 8417 - DNA, 19 bp, Artificial Sequence
  Synthetic
agccccuggtagttgccua

SEQ ID NO: 8418 - DNA, 23 bp, Artificial Sequence
  Synthetic
ttttgatgtcuatcgctguggct

SEQ ID NO: 8419 - DNA, 27 bp, Artificial Sequence
  Synthetic
tcagtgtagtagucactgtctgagaug

SEQ ID NO: 8420 - DNA, 25 bp, Artificial Sequence
  Synthetic
gtacgaaucacctgttgtucaacat

SEQ ID NO: 8421 - DNA, 27 bp, Artificial Sequence
  Synthetic
cacatgaacaaaaugatctugaaccca

SEQ ID NO: 8422 - DNA, 21 bp, Artificial Sequence
  Synthetic
gaagcccuccaggucaaacat

SEQ ID NO: 8423 - DNA, 21 bp, Artificial Sequence
  Synthetic
ctgagccttugcgagagguaa

SEQ ID NO: 8424 - DNA, 26 bp, Artificial Sequence
  Synthetic
ataaaggaatuagcctaaccuggagt

SEQ ID NO: 8425 - DNA, 24 bp, Artificial Sequence
  Synthetic
cagggcaauggctttaattgacug

SEQ ID NO: 8426 - DNA, 23 bp, Artificial Sequence
  Synthetic
acaagctgautctcccatcucat

SEQ ID NO: 8427 - DNA, 26 bp, Artificial Sequence
  Synthetic
agtccucacaacttttaauggaaccc

SEQ ID NO: 8428 - DNA, 25 bp, Artificial Sequence
  Synthetic
aagtggaagtaugagtctgagugga

SEQ ID NO: 8429 - DNA, 22 bp, Artificial Sequence
  Synthetic
ctaagccctcutggcaggtaug

SEQ ID NO: 8430 - DNA, 23 bp, Artificial Sequence
  Synthetic
acaggucagagtgcaucaacaag

SEQ ID NO: 8431 - DNA, 21 bp, Artificial Sequence
  Synthetic
acctccaccaaugacacgtut

SEQ ID NO: 8432 - DNA, 26 bp, Artificial Sequence
  Synthetic
cagaagaccuccgagattgtatuacg

SEQ ID NO: 8433 - DNA, 22 bp, Artificial Sequence
  Synthetic
agcacccuaaaaggcggaaaua

SEQ ID NO: 8434 - DNA, 21 bp, Artificial Sequence
  Synthetic
ctccagcaguccttttugcac

SEQ ID NO: 8435 - DNA, 24 bp, Artificial Sequence
  Synthetic
gcatgatatcucccccttuggaac

SEQ ID NO: 8436 - DNA, 23 bp, Artificial Sequence
  Synthetic
gcggcaacagugagtaaauagga

SEQ ID NO: 8437 - DNA, 22 bp, Artificial Sequence
  Synthetic
ccatgtucagcaggatcacgut

SEQ ID NO: 8438 - DNA, 20 bp, Artificial Sequence
  Synthetic
gagggctugtggttcctuca

SEQ ID NO: 8439 - DNA, 19 bp, Artificial Sequence
  Synthetic
cagucccacugggaagcag

SEQ ID NO: 8440 - DNA, 25 bp, Artificial Sequence
  Synthetic
ccaaaagugaccagaaatcaggugt

SEQ ID NO: 8441 - DNA, 26 bp, Artificial Sequence
  Synthetic
caagtcagagacautctcctccuact

SEQ ID NO: 8442 - DNA, 24 bp, Artificial Sequence
  Synthetic
gaggcuaatgaugacaagaagcca

SEQ ID NO: 8443 - DNA, 27 bp, Artificial Sequence
  Synthetic
gcatcaaaggugaatttcttgttucgg

SEQ ID NO: 8444 - DNA, 22 bp, Artificial Sequence
  Synthetic
tcccacttaugtggagcuggat

SEQ ID NO: 8445 - DNA, 25 bp, Artificial Sequence
  Synthetic
gguggaaccaaaatgauacaccaga

SEQ ID NO: 8446 - DNA, 24 bp, Artificial Sequence
  Synthetic
ttgttctggaucaagaacgacugt

SEQ ID NO: 8447 - DNA, 27 bp, Artificial Sequence
  Synthetic
cagcctcggaauccataaaaatacuca

SEQ ID NO: 8448 - DNA, 24 bp, Artificial Sequence
  Synthetic
gagcatcaggugtttactgttcug

SEQ ID NO: 8449 - DNA, 21 bp, Artificial Sequence
  Synthetic
cuctatgucccaggcagcaag

SEQ ID NO: 8450 - DNA, 17 bp, Artificial Sequence
  Synthetic
cgtgccuccgtagguct

SEQ ID NO: 8451 - DNA, 19 bp, Artificial Sequence
  Synthetic
ggccacgaacaugcaagug

SEQ ID NO: 8452 - DNA, 22 bp, Artificial Sequence
  Synthetic
cctccttcccuctctccttcug

SEQ ID NO: 8453 - DNA, 20 bp, Artificial Sequence
  Synthetic
actcuggagaggaagcgugt

SEQ ID NO: 8454 - DNA, 18 bp, Artificial Sequence
  Synthetic
tggaccuggctugcacac

SEQ ID NO: 8455 - DNA, 23 bp, Artificial Sequence
  Synthetic
guatcaaaatgcuccggagagga

SEQ ID NO: 8456 - DNA, 28 bp, Artificial Sequence
  Synthetic
gaactgaaauacgacttgtcatgugaac

SEQ ID NO: 8457 - DNA, 22 bp, Artificial Sequence
  Synthetic
ttccagtuatccagcaucaggc

SEQ ID NO: 8458 - DNA, 26 bp, Artificial Sequence
  Synthetic
gtgcaatgaauaacgaaaaugccaga

SEQ ID NO: 8459 - DNA, 24 bp, Artificial Sequence
  Synthetic
attatcctucggttcccaatugct

SEQ ID NO: 8460 - DNA, 31 bp, Artificial Sequence
  Synthetic
gggcaaattatgugtattcataagtttuggt

SEQ ID NO: 8461 - DNA, 22 bp, Artificial Sequence
  Synthetic
ggaaaccacutggcatgtugaa

SEQ ID NO: 8462 - DNA, 23 bp, Artificial Sequence
  Synthetic
gattaatgcugccgtggaaaugg

SEQ ID NO: 8463 - DNA, 29 bp, Artificial Sequence
  Synthetic
ttctgcatugagtaagtcuaacacaagat

SEQ ID NO: 8464 - DNA, 28 bp, Artificial Sequence
  Synthetic
cgtcttuacaaguaagagaactgatuga

SEQ ID NO: 8465 - DNA, 30 bp, Artificial Sequence
  Synthetic
ttttctatcacucaccaaataaatgcucat

SEQ ID NO: 8466 - DNA, 27 bp, Artificial Sequence
  Synthetic
ccttgtggucatctagtagtaugcaaa

SEQ ID NO: 8467 - DNA, 30 bp, Artificial Sequence
  Synthetic
agtttagacgatgutttggttcttctucat

SEQ ID NO: 8468 - DNA, 28 bp, Artificial Sequence
  Synthetic
agttgccatuccaagtgtcttattttug

SEQ ID NO: 8469 - DNA, 23 bp, Artificial Sequence
  Synthetic
tatgttgcuacaatcagcuccgt

SEQ ID NO: 8470 - DNA, 23 bp, Artificial Sequence
  Synthetic
tgttcccccugttatacccagut

SEQ ID NO: 8471 - DNA, 29 bp, Artificial Sequence
  Synthetic
agaatttcatctccuaattcacacacucg

SEQ ID NO: 8472 - DNA, 29 bp, Artificial Sequence
  Synthetic
acaacttatatgauctgctagtgaaugag

SEQ ID NO: 8473 - DNA, 31 bp, Artificial Sequence
  Synthetic
aacaggaaatttcuaaatgtgacatgaccua

SEQ ID NO: 8474 - DNA, 30 bp, Artificial Sequence
  Synthetic
ttaatatcaaagtaucctgcaagttuacct

SEQ ID NO: 8475 - DNA, 25 bp, Artificial Sequence
  Synthetic
gagctttctagguttgacctctugt

SEQ ID NO: 8476 - DNA, 21 bp, Artificial Sequence
  Synthetic
ctttggcacugaccaccagua

SEQ ID NO: 8477 - DNA, 24 bp, Artificial Sequence
  Synthetic
ggaggcactuctgtgctatttuct

SEQ ID NO: 8478 - DNA, 29 bp, Artificial Sequence
  Synthetic
gctaatacatauaaggcaaagcatuaggt

SEQ ID NO: 8479 - DNA, 28 bp, Artificial Sequence
  Synthetic
tccatcttgucaaaagttgtcugaagaa

SEQ ID NO: 8480 - DNA, 21 bp, Artificial Sequence
  Synthetic
gtgtcctuggctgctactgut

SEQ ID NO: 8481 - DNA, 32 bp, Artificial Sequence
  Synthetic
cacaggaatacauttcattcaaatttauccga

SEQ ID NO: 8482 - DNA, 27 bp, Artificial Sequence
  Synthetic
agccatctugaacatctttgtttcuct

SEQ ID NO: 8483 - DNA, 32 bp, Artificial Sequence
  Synthetic
acactactatcaggguaatcgttaaatagaut

SEQ ID NO: 8484 - DNA, 30 bp, Artificial Sequence
  Synthetic
aactgatgtgtuctgttaagcttauaaagt

SEQ ID NO: 8485 - DNA, 26 bp, Artificial Sequence
  Synthetic
ttctcagaguccatattgcttugacc

SEQ ID NO: 8486 - DNA, 32 bp, Artificial Sequence
  Synthetic
ctctatttcatattuaaccacagttctttucc

SEQ ID NO: 8487 - DNA, 32 bp, Artificial Sequence
  Synthetic
gatgattgucaguaagaaattgtgtaaauact

SEQ ID NO: 8488 - DNA, 28 bp, Artificial Sequence
  Synthetic
tctttttaagucccatagtgcugagaac

SEQ ID NO: 8489 - DNA, 25 bp, Artificial Sequence
  Synthetic
tcuttcacagattuacacagggcaa

SEQ ID NO: 8490 - DNA, 27 bp, Artificial Sequence
  Synthetic
ctggttttggaauggctaaatctucaa

SEQ ID NO: 8491 - DNA, 33 bp, Artificial Sequence
  Synthetic
acaaatttcacataugtcatgtataaactuacc

SEQ ID NO: 8492 - DNA, 30 bp, Artificial Sequence
  Synthetic
acagtcatcgaauacttttggaaauaaggt

SEQ ID NO: 8493 - DNA, 27 bp, Artificial Sequence
  Synthetic
gtcatcaataacuccaccacaatcuct

SEQ ID NO: 8494 - DNA, 30 bp, Artificial Sequence
  Synthetic
attgtagccgaguatctaattaaacaagut

SEQ ID NO: 8495 - DNA, 32 bp, Artificial Sequence
  Synthetic
caggtgatatatttuaagaattctgtgctuct

SEQ ID NO: 8496 - DNA, 20 bp, Artificial Sequence
  Synthetic
gccagacagccgugactuac

SEQ ID NO: 8497 - DNA, 33 bp, Artificial Sequence
  Synthetic
aaataccattttgaagaugagtcagaaaatuac

SEQ ID NO: 8498 - DNA, 30 bp, Artificial Sequence
  Synthetic
gcttaaccaatacgugttaaaagcaagtua

SEQ ID NO: 8499 - DNA, 27 bp, Artificial Sequence
  Synthetic
ctctcataatguccaccatctgatcut

SEQ ID NO: 8500 - DNA, 27 bp, Artificial Sequence
  Synthetic
ggagaagtgggucctatagatttcuct

SEQ ID NO: 8501 - DNA, 24 bp, Artificial Sequence
  Synthetic
gtgtgttatucaggtaggucagca

SEQ ID NO: 8502 - DNA, 32 bp, Artificial Sequence
  Synthetic
aaggtacaatgattuccacttctcttattuac

SEQ ID NO: 8503 - DNA, 32 bp, Artificial Sequence
  Synthetic
tgattttcactuagaggaatccacagattuat

SEQ ID NO: 8504 - DNA, 28 bp, Artificial Sequence
  Synthetic
aatcatggagaaauctgctttcuacaca

SEQ ID NO: 8505 - DNA, 30 bp, Artificial Sequence
  Synthetic
tccatctttctcuagaactgagttuacagt

SEQ ID NO: 8506 - DNA, 31 bp, Artificial Sequence
  Synthetic
tcactttacagcttuactctatgcagaaauc

SEQ ID NO: 8507 - DNA, 28 bp, Artificial Sequence
  Synthetic
actatatacccutattgagacaaugcca

SEQ ID NO: 8508 - DNA, 32 bp, Artificial Sequence
  Synthetic
gttttcaggatcutctcttagaaatcuacaga

SEQ ID NO: 8509 - DNA, 31 bp, Artificial Sequence
  Synthetic
cacacataactccutcataaacagaatuact

SEQ ID NO: 8510 - DNA, 31 bp, Artificial Sequence
  Synthetic
gattggattatgaaaauaaagactggtgucc

SEQ ID NO: 8511 - DNA, 26 bp, Artificial Sequence
  Synthetic
cagtugttgtttagaaugaggagaga

SEQ ID NO: 8512 - DNA, 22 bp, Artificial Sequence
  Synthetic
tcgctctaucccacactuagca

SEQ ID NO: 8513 - DNA, 30 bp, Artificial Sequence
  Synthetic
ttttaaagucactattgguaacagaaaagc

SEQ ID NO: 8514 - DNA, 27 bp, Artificial Sequence
  Synthetic
cccatatgtcautttcatttcagcucc

SEQ ID NO: 8515 - DNA, 22 bp, Artificial Sequence
  Synthetic
gggcaagacuctgctcctttut

SEQ ID NO: 8516 - DNA, 29 bp, Artificial Sequence
  Synthetic
atttaaattggutgtgttttctugaaggc

SEQ ID NO: 8517 - DNA, 28 bp, Artificial Sequence
  Synthetic
gtattgagtatcugaaaaccgggcuaat

SEQ ID NO: 8518 - DNA, 21 bp, Artificial Sequence
  Synthetic
ttggatgaautagcccugcgt

SEQ ID NO: 8519 - DNA, 24 bp, Artificial Sequence
  Synthetic
acuccagaatttucaagccagagg

SEQ ID NO: 8520 - DNA, 33 bp, Artificial Sequence
  Synthetic
tgcataaatctaatagutcttttcttacagcua

SEQ ID NO: 8521 - DNA, 23 bp, Artificial Sequence
  Synthetic
tctggctaccuctggtttaguca

SEQ ID NO: 8522 - DNA, 30 bp, Artificial Sequence
  Synthetic
tgttcctcagttugtcactaaaatctctuc

SEQ ID NO: 8523 - DNA, 32 bp, Artificial Sequence
  Synthetic
caaattacctuaatttccataguagggacaac

SEQ ID NO: 8524 - DNA, 22 bp, Artificial Sequence
  Synthetic
tgtcaugcaacaggtctuccag

SEQ ID NO: 8525 - DNA, 23 bp, Artificial Sequence
  Synthetic
cacccaaccaaauggcatcttut

SEQ ID NO: 8526 - DNA, 26 bp, Artificial Sequence
  Synthetic
tcttggauccagctatttggttugag

SEQ ID NO: 8527 - DNA, 22 bp, Artificial Sequence
  Synthetic
tcccccugcaactcagaatgua

SEQ ID NO: 8528 - DNA, 25 bp, Artificial Sequence
  Synthetic
caaaatcctucctactccugagaca

SEQ ID NO: 8529 - DNA, 22 bp, Artificial Sequence
  Synthetic
tgcccagcccaugtaatttuga

SEQ ID NO: 8530 - DNA, 25 bp, Artificial Sequence
  Synthetic
gaaggtccugttgtcagttttucag

SEQ ID NO: 8531 - DNA, 27 bp, Artificial Sequence
  Synthetic
cttcttccacucctttcagtttctcut

SEQ ID NO: 8532 - DNA, 25 bp, Artificial Sequence
  Synthetic
gtttaatttctgtucccagctgcuc

SEQ ID NO: 8533 - DNA, 28 bp, Artificial Sequence
  Synthetic
tgacttgcacaautcacattgatttuca

SEQ ID NO: 8534 - DNA, 25 bp, Artificial Sequence
  Synthetic
ctcgcugagaggagtuacagaaaat

SEQ ID NO: 8535 - DNA, 25 bp, Artificial Sequence
  Synthetic
tttttgctggutcgtgtttucaaga

SEQ ID NO: 8536 - DNA, 27 bp, Artificial Sequence
  Synthetic
aggtagcgugagaataatatccuccat

SEQ ID NO: 8537 - DNA, 22 bp, Artificial Sequence
  Synthetic
gatgctttugttggatgaugcc

SEQ ID NO: 8538 - DNA, 20 bp, Artificial Sequence
  Synthetic
cctcccaugtgtttgcugac

SEQ ID NO: 8539 - DNA, 25 bp, Artificial Sequence
  Synthetic
gatgtatagcaugttctcccaccuc

SEQ ID NO: 8540 - DNA, 25 bp, Artificial Sequence
  Synthetic
atcagtaacucccgttucaaacagt

SEQ ID NO: 8541 - DNA, 28 bp, Artificial Sequence
  Synthetic
acacagauaaattuaccaaaggacacca

SEQ ID NO: 8542 - DNA, 21 bp, Artificial Sequence
  Synthetic
ggcctcucagctgaccattut

SEQ ID NO: 8543 - DNA, 30 bp, Artificial Sequence
  Synthetic
tcttcatttuggagaguctaataaactgut

SEQ ID NO: 8544 - DNA, 20 bp, Artificial Sequence
  Synthetic
ctcaugaaggacgcctucca

SEQ ID NO: 8545 - DNA, 17 bp, Artificial Sequence
  Synthetic
gcucagccggccttuca

SEQ ID NO: 8546 - DNA, 25 bp, Artificial Sequence
  Synthetic
catcttgtauggtgaatttggugca

SEQ ID NO: 8547 - DNA, 22 bp, Artificial Sequence
  Synthetic
tgtgtctcccugaaagagucca

SEQ ID NO: 8548 - DNA, 23 bp, Artificial Sequence
  Synthetic
tgccctcugagttggttguacat

SEQ ID NO: 8549 - DNA, 24 bp, Artificial Sequence
  Synthetic
agctttcactucgtcatacgucaa

SEQ ID NO: 8550 - DNA, 27 bp, Artificial Sequence
  Synthetic
gcactggcaaautggcttaaauaaaac

SEQ ID NO: 8551 - DNA, 32 bp, Artificial Sequence
  Synthetic
gtgatatggttaucatgtgaaacaaaacucac

SEQ ID NO: 8552 - DNA, 22 bp, Artificial Sequence
  Synthetic
cgtggtagauccgtttgaucct

SEQ ID NO: 8553 - DNA, 23 bp, Artificial Sequence
  Synthetic
ccagtctccuaaactgccatcut

SEQ ID NO: 8554 - DNA, 22 bp, Artificial Sequence
  Synthetic
cutcgagatctuccaccaccac

SEQ ID NO: 8555 - DNA, 19 bp, Artificial Sequence
  Synthetic
agtcuccaaggcggcuaga

SEQ ID NO: 8556 - DNA, 24 bp, Artificial Sequence
  Synthetic
cccattagtagguccagagtguga

SEQ ID NO: 8557 - DNA, 28 bp, Artificial Sequence
  Synthetic
gcaagtaagcuttttacaaguaacaact

SEQ ID NO: 8558 - DNA, 28 bp, Artificial Sequence
  Synthetic
ttgaaatgtatuagaagatgaagugcgt

SEQ ID NO: 8559 - DNA, 23 bp, Artificial Sequence
  Synthetic
gctttgggacaucatacccauca

SEQ ID NO: 8560 - DNA, 24 bp, Artificial Sequence
  Synthetic
tactccuaccaggacauccagaaa

SEQ ID NO: 8561 - DNA, 21 bp, Artificial Sequence
  Synthetic
cuaaaccugcagcagggagat

SEQ ID NO: 8562 - DNA, 29 bp, Artificial Sequence
  Synthetic
gtcttttccttuctctgttttctctucct

SEQ ID NO: 8563 - DNA, 20 bp, Artificial Sequence
  Synthetic
ggattguctccacugaccgt

SEQ ID NO: 8564 - DNA, 23 bp, Artificial Sequence
  Synthetic
cacttgccgacuctgaaguagag

SEQ ID NO: 8565 - DNA, 21 bp, Artificial Sequence
  Synthetic
tccccattcutacccccauga

SEQ ID NO: 8566 - DNA, 25 bp, Artificial Sequence
  Synthetic
cagaaacagaucctggagatguact

SEQ ID NO: 8567 - DNA, 26 bp, Artificial Sequence
  Synthetic
gggctguaaagaagaauacagaagaa

SEQ ID NO: 8568 - DNA, 30 bp, Artificial Sequence
  Synthetic
tgttggagttacugatgcataatcattuct

SEQ ID NO: 8569 - DNA, 26 bp, Artificial Sequence
  Synthetic
agggtcaaatugtgaaactacauggt

SEQ ID NO: 8570 - DNA, 25 bp, Artificial Sequence
  Synthetic
gcgttgtuacaccttttgttugcat

SEQ ID NO: 8571 - DNA, 29 bp, Artificial Sequence
  Synthetic
tgagctgagcuacatatctattaagaugt

SEQ ID NO: 8572 - DNA, 23 bp, Artificial Sequence
  Synthetic
tgacuaaacttgaugcagagcga

SEQ ID NO: 8573 - DNA, 27 bp, Artificial Sequence
  Synthetic
cttcaagcauaactagtatcucagcag

SEQ ID NO: 8574 - DNA, 24 bp, Artificial Sequence
  Synthetic
acttatccacacccucatctguga

SEQ ID NO: 8575 - DNA, 27 bp, Artificial Sequence
  Synthetic
cctgaagcuacagaagacatggaatug

SEQ ID NO: 8576 - DNA, 22 bp, Artificial Sequence
  Synthetic
tgctgttuctcattguccacct

SEQ ID NO: 8577 - DNA, 24 bp, Artificial Sequence
  Synthetic
ttgggtggauctgtctctaaguca

SEQ ID NO: 8578 - DNA, 30 bp, Artificial Sequence
  Synthetic
tgtctacactgaaugtgttactaacgttut

SEQ ID NO: 8579 - DNA, 25 bp, Artificial Sequence
  Synthetic
tccttacccaugtcagcaaatctuc

SEQ ID NO: 8580 - DNA, 30 bp, Artificial Sequence
  Synthetic
tgaaggatattautcccactcaaaugcaaa

SEQ ID NO: 8581 - DNA, 24 bp, Artificial Sequence
  Synthetic
ggatattgggugtttcgttgtugt

SEQ ID NO: 8582 - DNA, 26 bp, Artificial Sequence
  Synthetic
ctagatttauacacgttgctgcugga

SEQ ID NO: 8583 - DNA, 24 bp, Artificial Sequence
  Synthetic
cttaatgacagggcuaaacgtgug

SEQ ID NO: 8584 - DNA, 28 bp, Artificial Sequence
  Synthetic
cgatgatguttagataccucaggaaggt

SEQ ID NO: 8585 - DNA, 24 bp, Artificial Sequence
  Synthetic
tcttcagaagagugtaccuggact

SEQ ID NO: 8586 - DNA, 23 bp, Artificial Sequence
  Synthetic
gcagccugaggttatagttguga

SEQ ID NO: 8587 - DNA, 22 bp, Artificial Sequence
  Synthetic
ggaaatgtugccagtcttccug

SEQ ID NO: 8588 - DNA, 24 bp, Artificial Sequence
  Synthetic
tgatgacaguggagagcactttut

SEQ ID NO: 8589 - DNA, 26 bp, Artificial Sequence
  Synthetic
agtgtgaaagauacttgcctgagaug

SEQ ID NO: 8590 - DNA, 22 bp, Artificial Sequence
  Synthetic
cctcctcutgtgcagatucaca

SEQ ID NO: 8591 - DNA, 24 bp, Artificial Sequence
  Synthetic
tcttccccuctgctaaatgttuct

SEQ ID NO: 8592 - DNA, 27 bp, Artificial Sequence
  Synthetic
gctgtgaauagagtaacugaagaagca

SEQ ID NO: 8593 - DNA, 31 bp, Artificial Sequence
  Synthetic
ctctcctgtgaccauagaattttactacaut

SEQ ID NO: 8594 - DNA, 26 bp, Artificial Sequence
  Synthetic
tttgtttuagagccagacauaggcat

SEQ ID NO: 8595 - DNA, 24 bp, Artificial Sequence
  Synthetic
ccuaagagggaugcagagagaaac

SEQ ID NO: 8596 - DNA, 28 bp, Artificial Sequence
  Synthetic
actgggacttgcuttgtttttagaatug

SEQ ID NO: 8597 - DNA, 30 bp, Artificial Sequence
  Synthetic
caagaaatcggtacuctttcactcaagaua

SEQ ID NO: 8598 - DNA, 21 bp, Artificial Sequence
  Synthetic
gagtcactucaggtggtgugt

SEQ ID NO: 8599 - DNA, 31 bp, Artificial Sequence
  Synthetic
gggaatactacaaucaaaaactactcaauct

SEQ ID NO: 8600 - DNA, 23 bp, Artificial Sequence
  Synthetic
cagcggtuggtcaaaagaaugac

SEQ ID NO: 8601 - DNA, 30 bp, Artificial Sequence
  Synthetic
aaacacacctgatucatacaacttttctuc

SEQ ID NO: 8602 - DNA, 21 bp, Artificial Sequence
  Synthetic
gatttggctucctgccacaug

SEQ ID NO: 8603 - DNA, 26 bp, Artificial Sequence
  Synthetic
tttggauaaacagggaagugaacact

SEQ ID NO: 8604 - DNA, 26 bp, Artificial Sequence
  Synthetic
gccctatgtauctaagtgaccaugaa

SEQ ID NO: 8605 - DNA, 22 bp, Artificial Sequence
  Synthetic
gctauggtgtcacuagcaaccc

SEQ ID NO: 8606 - DNA, 23 bp, Artificial Sequence
  Synthetic
ggctgctcugatttgctactuga

SEQ ID NO: 8607 - DNA, 21 bp, Artificial Sequence
  Synthetic
cagctgatucaggtccctcug

SEQ ID NO: 8608 - DNA, 22 bp, Artificial Sequence
  Synthetic
cacgutcatcaccuagaaagcc

SEQ ID NO: 8609 - DNA, 21 bp, Artificial Sequence
  Synthetic
ggcagagcacguagatucact

SEQ ID NO: 8610 - DNA, 27 bp, Artificial Sequence
  Synthetic
aaattcagatgcugaaatcgaatggug

SEQ ID NO: 8611 - DNA, 26 bp, Artificial Sequence
  Synthetic
atcaaaagtcucacatgccatuacct

SEQ ID NO: 8612 - DNA, 30 bp, Artificial Sequence
  Synthetic
agttctcagataguaaacagcacatugaag

SEQ ID NO: 8613 - DNA, 24 bp, Artificial Sequence
  Synthetic
caaaaacagcacagguaacgctua

SEQ ID NO: 8614 - DNA, 28 bp, Artificial Sequence
  Synthetic
aaaatctucaagagcagctuagagacaa

SEQ ID NO: 8615 - DNA, 22 bp, Artificial Sequence
  Synthetic
ccacucactttctcugcaaggg

SEQ ID NO: 8616 - DNA, 27 bp, Artificial Sequence
  Synthetic
ctagatgtgugttccttctttuaggct

SEQ ID NO: 8617 - DNA, 22 bp, Artificial Sequence
  Synthetic
actcctccutcttctgcuccaa

SEQ ID NO: 8618 - DNA, 24 bp, Artificial Sequence
  Synthetic
ttcagccatuccttattgtcacug

SEQ ID NO: 8619 - DNA, 22 bp, Artificial Sequence
  Synthetic
acctgtuccttgtgctucagat

SEQ ID NO: 8620 - DNA, 24 bp, Artificial Sequence
  Synthetic
gacactctgutgttctcttuccca

SEQ ID NO: 8621 - DNA, 24 bp, Artificial Sequence
  Synthetic
cttctctcugcccgaagattaguc

SEQ ID NO: 8622 - DNA, 30 bp, Artificial Sequence
  Synthetic
actcgttacttuacagtgtgtcauagaaac

SEQ ID NO: 8623 - DNA, 24 bp, Artificial Sequence
  Synthetic
atgggaggatutgaagtggtcauc

SEQ ID NO: 8624 - DNA, 24 bp, Artificial Sequence
  Synthetic
acatacagagugcctttgtcatut

SEQ ID NO: 8625 - DNA, 21 bp, Artificial Sequence
  Synthetic
gttctgcautgtcccgtucac

SEQ ID NO: 8626 - DNA, 21 bp, Artificial Sequence
  Synthetic
tctccccucccctuccaaaaa

SEQ ID NO: 8627 - DNA, 18 bp, Artificial Sequence
  Synthetic
tcgtcucggagcaggtug

SEQ ID NO: 8628 - DNA, 22 bp, Artificial Sequence
  Synthetic
gccuccaaacucaaagagacca

SEQ ID NO: 8629 - DNA, 25 bp, Artificial Sequence
  Synthetic
gcagtggtgauagaaggcatatugt

SEQ ID NO: 8630 - DNA, 21 bp, Artificial Sequence
  Synthetic
gctcacttgugatgcccugac

SEQ ID NO: 8631 - DNA, 23 bp, Artificial Sequence
  Synthetic
aatcaaatccgucgtctcctucc

SEQ ID NO: 8632 - DNA, 23 bp, Artificial Sequence
  Synthetic
tgatctcuctcgctgugagacat

SEQ ID NO: 8633 - DNA, 19 bp, Artificial Sequence
  Synthetic
caacugcaacagcctgcuc

SEQ ID NO: 8634 - DNA, 22 bp, Artificial Sequence
  Synthetic
gctcaagugggctgaaaaugag

SEQ ID NO: 8635 - DNA, 25 bp, Artificial Sequence
  Synthetic
ctaagagacuttccaagtugggcat

SEQ ID NO: 8636 - DNA, 19 bp, Artificial Sequence
  Synthetic
ccgctccaggucacctauc

SEQ ID NO: 8637 - DNA, 22 bp, Artificial Sequence
  Synthetic
gtaggactccuggtggttgtuc

SEQ ID NO: 8638 - DNA, 22 bp, Artificial Sequence
  Synthetic
catcaaccuctctcaucgggaa

SEQ ID NO: 8639 - DNA, 22 bp, Artificial Sequence
  Synthetic
gactttgucaggtccccaugat

SEQ ID NO: 8640 - DNA, 21 bp, Artificial Sequence
  Synthetic
ccugcgccactacuacaaact

SEQ ID NO: 8641 - DNA, 25 bp, Artificial Sequence
  Synthetic
cgataggcagguagagatctuaaca

SEQ ID NO: 8642 - DNA, 22 bp, Artificial Sequence
  Synthetic
tcccaccugcattgttcaucat

SEQ ID NO: 8643 - DNA, 25 bp, Artificial Sequence
  Synthetic
gggcttcauacaagagagtacucac

SEQ ID NO: 8644 - DNA, 22 bp, Artificial Sequence
  Synthetic
gccttacagutggcaaguccag

SEQ ID NO: 8645 - DNA, 25 bp, Artificial Sequence
  Synthetic
cacaagtatcugctgtccaucagag

SEQ ID NO: 8646 - DNA, 31 bp, Artificial Sequence
  Synthetic
cggaaaattacugaagaacatttaccattua

SEQ ID NO: 8647 - DNA, 20 bp, Artificial Sequence
  Synthetic
ccaggacugcaactcggtut

SEQ ID NO: 8648 - DNA, 20 bp, Artificial Sequence
  Synthetic
cgagucgcctctactuccct

SEQ ID NO: 8649 - DNA, 22 bp, Artificial Sequence
  Synthetic
cggaaacagaguggtcatuccc

SEQ ID NO: 8650 - DNA, 22 bp, Artificial Sequence
  Synthetic
ctcttgcaggucctcauaccag

SEQ ID NO: 8651 - DNA, 24 bp, Artificial Sequence
  Synthetic
tggcatagacugtttgctacaugg

SEQ ID NO: 8652 - DNA, 22 bp, Artificial Sequence
  Synthetic
gactccuccatctcagguacca

SEQ ID NO: 8653 - DNA, 21 bp, Artificial Sequence
  Synthetic
tcctgaccagagutctccugt

SEQ ID NO: 8654 - DNA, 21 bp, Artificial Sequence
  Synthetic
tctggctucagatctcgguga

SEQ ID NO: 8655 - DNA, 23 bp, Artificial Sequence
  Synthetic
agaggtggatugggacctttgua

SEQ ID NO: 8656 - DNA, 21 bp, Artificial Sequence
  Synthetic
cctccagucgcctcaguaaag

SEQ ID NO: 8657 - DNA, 20 bp, Artificial Sequence
  Synthetic
tggctgaaautggtgucggt

SEQ ID NO: 8658 - DNA, 21 bp, Artificial Sequence
  Synthetic
ttcggctguctaccattugca

SEQ ID NO: 8659 - DNA, 21 bp, Artificial Sequence
  Synthetic
acactctgggutgaccccuat

SEQ ID NO: 8660 - DNA, 19 bp, Artificial Sequence
  Synthetic
aggctcuggctgaagguct

SEQ ID NO: 8661 - DNA, 20 bp, Artificial Sequence
  Synthetic
ccccatgcaucccttcuaca

SEQ ID NO: 8662 - DNA, 18 bp, Artificial Sequence
  Synthetic
tgtgcgcgagugagugag

SEQ ID NO: 8663 - DNA, 18 bp, Artificial Sequence
  Synthetic
tcctcguctcggcucgaa

SEQ ID NO: 8664 - DNA, 20 bp, Artificial Sequence
  Synthetic
cagatgccucccccaucaaa

SEQ ID NO: 8665 - DNA, 20 bp, Artificial Sequence
  Synthetic
caccuccagaggccacauac

SEQ ID NO: 8666 - DNA, 27 bp, Artificial Sequence
  Synthetic
ctctcaacaaaacuccgaagagatgua

SEQ ID NO: 8667 - DNA, 27 bp, Artificial Sequence
  Synthetic
tcttcttggauttgcacttgguaaact

SEQ ID NO: 8668 - DNA, 20 bp, Artificial Sequence
  Synthetic
ttctcagaggaccuggcuga

SEQ ID NO: 8669 - DNA, 24 bp, Artificial Sequence
  Synthetic
gtgcttttcuccacctttccatut

SEQ ID NO: 8670 - DNA, 17 bp, Artificial Sequence
  Synthetic
cggctuccgcauccact

SEQ ID NO: 8671 - DNA, 17 bp, Artificial Sequence
  Synthetic
gccttccugcgcttcug

SEQ ID NO: 8672 - DNA, 18 bp, Artificial Sequence
  Synthetic
acgtgguaaccgccguag

SEQ ID NO: 8673 - DNA, 19 bp, Artificial Sequence
  Synthetic
tcgccaccaugtacgugag

SEQ ID NO: 8674 - DNA, 27 bp, Artificial Sequence
  Synthetic
caaatttgtcugtcactggtuaaaact

SEQ ID NO: 8675 - DNA, 28 bp, Artificial Sequence
  Synthetic
tttatgttcagatucttctgcaggtuca

SEQ ID NO: 8676 - DNA, 27 bp, Artificial Sequence
  Synthetic
caggaaggaaugttcccaataguagac

SEQ ID NO: 8677 - DNA, 32 bp, Artificial Sequence
  Synthetic
ataatagcttcaucatacctttcacuaagaca

SEQ ID NO: 8678 - DNA, 32 bp, Artificial Sequence
  Synthetic
gctatttttccaaucatgatgaaagtcugaag

SEQ ID NO: 8679 - DNA, 29 bp, Artificial Sequence
  Synthetic
acctgtagttcaacuaaacagaggactua

SEQ ID NO: 8680 - DNA, 32 bp, Artificial Sequence
  Synthetic
caaaaagtaagaacuagcaagacuaggaaaaa

SEQ ID NO: 8681 - DNA, 25 bp, Artificial Sequence
  Synthetic
agggcttcugatttgctacattuga

SEQ ID NO: 8682 - DNA, 28 bp, Artificial Sequence
  Synthetic
tcagagaagccautaaaugaggaaacag

SEQ ID NO: 8683 - DNA, 24 bp, Artificial Sequence
  Synthetic
ctgaaaugaagaagccacuggaga

SEQ ID NO: 8684 - DNA, 25 bp, Artificial Sequence
  Synthetic
ttctgtagcuttgaagaaugcaggt

SEQ ID NO: 8685 - DNA, 26 bp, Artificial Sequence
  Synthetic
cttcaaaagcauttgcttcaaacugg

SEQ ID NO: 8686 - DNA, 32 bp, Artificial Sequence
  Synthetic
aatctctcaggaucttgattauaaagaagcaa

SEQ ID NO: 8687 - DNA, 30 bp, Artificial Sequence
  Synthetic
agccaagaccucttcttttatatcugaaac

SEQ ID NO: 8688 - DNA, 31 bp, Artificial Sequence
  Synthetic
catggaaaagaaucaagatgtatgtgcttua

SEQ ID NO: 8689 - DNA, 30 bp, Artificial Sequence
  Synthetic
ttttggattactcutagatttgtgtttugg

SEQ ID NO: 8690 - DNA, 27 bp, Artificial Sequence
  Synthetic
tctugcagaggagaauaaaaatagugt

SEQ ID NO: 8691 - DNA, 29 bp, Artificial Sequence
  Synthetic
cctgcccatttgutcatgtaatcattaut

SEQ ID NO: 8692 - DNA, 32 bp, Artificial Sequence
  Synthetic
cagagtagtgtagutgtttctgattguaaaaa

SEQ ID NO: 8693 - DNA, 32 bp, Artificial Sequence
  Synthetic
tcaaactgacttccugattcttctaatauagt

SEQ ID NO: 8694 - DNA, 23 bp, Artificial Sequence
  Synthetic
gcttttatuctgctcauggcaca

SEQ ID NO: 8695 - DNA, 30 bp, Artificial Sequence
  Synthetic
acaacagaatcaugacatttactugaagat

SEQ ID NO: 8696 - DNA, 30 bp, Artificial Sequence
  Synthetic
tgaagataacaaatauactgctgccaguag

SEQ ID NO: 8697 - DNA, 23 bp, Artificial Sequence
  Synthetic
cctccutcataaacuggccagat

SEQ ID NO: 8698 - DNA, 30 bp, Artificial Sequence
  Synthetic
ccagaagaatugcataacttttcctuaaat

SEQ ID NO: 8699 - DNA, 23 bp, Artificial Sequence
  Synthetic
cagtaccaacugggacacttuct

SEQ ID NO: 8700 - DNA, 28 bp, Artificial Sequence
  Synthetic
gaattagcatgugagaccattgagauca

SEQ ID NO: 8701 - DNA, 30 bp, Artificial Sequence
  Synthetic
gatgttttgagautttcagtttgtcuacat

SEQ ID NO: 8702 - DNA, 29 bp, Artificial Sequence
  Synthetic
ggcttagagaaggaauatttgatggucaa

SEQ ID NO: 8703 - DNA, 32 bp, Artificial Sequence
  Synthetic
gctgttagacaugctactgttacttaaauaag

SEQ ID NO: 8704 - DNA, 29 bp, Artificial Sequence
  Synthetic
aaatgaagatattugcgttgaggaactug

SEQ ID NO: 8705 - DNA, 26 bp, Artificial Sequence
  Synthetic
acacaaacgattutaccactggcuat

SEQ ID NO: 8706 - DNA, 32 bp, Artificial Sequence
  Synthetic
ctgacattcagagugaagaaatttuacaacat

SEQ ID NO: 8707 - DNA, 25 bp, Artificial Sequence
  Synthetic
cccacaaguatttgcagaugagact

SEQ ID NO: 8708 - DNA, 32 bp, Artificial Sequence
  Synthetic
gcttttcatataaugtggtaaattcatcugct

SEQ ID NO: 8709 - DNA, 28 bp, Artificial Sequence
  Synthetic
ttgtctagacguaggtgaatagugaaga

SEQ ID NO: 8710 - DNA, 28 bp, Artificial Sequence
  Synthetic
caaagtgtcacutgttgagaacatucat

SEQ ID NO: 8711 - DNA, 32 bp, Artificial Sequence
  Synthetic
aagtagttttctgaauctttggagtaaguaga

SEQ ID NO: 8712 - DNA, 28 bp, Artificial Sequence
  Synthetic
tttccuaggcacaataaaagaucgaaga

SEQ ID NO: 8713 - DNA, 33 bp, Artificial Sequence
  Synthetic
cgagacttttctcauactgtattagaattuaga

SEQ ID NO: 8714 - DNA, 26 bp, Artificial Sequence
  Synthetic
acagagtugaacagtgtgtuaggaat

SEQ ID NO: 8715 - DNA, 32 bp, Artificial Sequence
  Synthetic
cttgattggagtugtttttgttaaactgauga

SEQ ID NO: 8716 - DNA, 29 bp, Artificial Sequence
  Synthetic
ttttgtgtgtgtutattttgtgtagcugt

SEQ ID NO: 8717 - DNA, 21 bp, Artificial Sequence
  Synthetic
catccaccaucagccaacugt

SEQ ID NO: 8718 - DNA, 30 bp, Artificial Sequence
  Synthetic
tgcctttccuaaggaatttgctaatagaug

SEQ ID NO: 8719 - DNA, 22 bp, Artificial Sequence
  Synthetic
caactggctugtgcaacattut

SEQ ID NO: 8720 - DNA, 26 bp, Artificial Sequence
  Synthetic
cccctcttagcugtcttaaagaaugg

SEQ ID NO: 8721 - DNA, 28 bp, Artificial Sequence
  Synthetic
caatgactgatutttaccaagagugcaa

SEQ ID NO: 8722 - DNA, 24 bp, Artificial Sequence
  Synthetic
tgcctggccugatacaattaacut

SEQ ID NO: 8723 - DNA, 21 bp, Artificial Sequence
  Synthetic
agtctctttugttgggccucc

SEQ ID NO: 8724 - DNA, 30 bp, Artificial Sequence
  Synthetic
atttgtcctgttuaaagccatctagtuaca

SEQ ID NO: 8725 - DNA, 29 bp, Artificial Sequence
  Synthetic
actggatctgagcutgtttcttatcatuc

SEQ ID NO: 8726 - DNA, 32 bp, Artificial Sequence
  Synthetic
gagatacagaattuatcatcttgcaactucaa

SEQ ID NO: 8727 - DNA, 32 bp, Artificial Sequence
  Synthetic
ccataaacuaacaaguacttatcaaaacugaa

SEQ ID NO: 8728 - DNA, 19 bp, Artificial Sequence
  Synthetic
gcugcaagcaaccuccagt

SEQ ID NO: 8729 - DNA, 24 bp, Artificial Sequence
  Synthetic
gtgtggtgaugctgaaaaguaacc

SEQ ID NO: 8730 - DNA, 28 bp, Artificial Sequence
  Synthetic
cccagatgacutcaaagtcttguaaagg

SEQ ID NO: 8731 - DNA, 21 bp, Artificial Sequence
  Synthetic
gugcagucggagaaacaaaug

SEQ ID NO: 8732 - DNA, 23 bp, Artificial Sequence
  Synthetic
gctcccaccagutcagaagatua

SEQ ID NO: 8733 - DNA, 30 bp, Artificial Sequence
  Synthetic
tcgcctttgcaaaugcttagatatatttut

SEQ ID NO: 8734 - DNA, 29 bp, Artificial Sequence
  Synthetic
ggaaattgaagutgtgaggaugaagagaa

SEQ ID NO: 8735 - DNA, 24 bp, Artificial Sequence
  Synthetic
agagccgaugaaacaaagugagaa

SEQ ID NO: 8736 - DNA, 22 bp, Artificial Sequence
  Synthetic
cctgagcaggguctgcataauc

SEQ ID NO: 8737 - DNA, 29 bp, Artificial Sequence
  Synthetic
acatttacctgtguttttcttcctctugt

SEQ ID NO: 8738 - DNA, 26 bp, Artificial Sequence
  Synthetic
agatattgaguctgaggactucagca

SEQ ID NO: 8739 - DNA, 26 bp, Artificial Sequence
  Synthetic
tgtactgttgcauatttcacctcugg

SEQ ID NO: 8740 - DNA, 24 bp, Artificial Sequence
  Synthetic
gctttcugaaggaggtagagucaa

SEQ ID NO: 8741 - DNA, 27 bp, Artificial Sequence
  Synthetic
gggtgctagttuatagaattcagaguc

SEQ ID NO: 8742 - DNA, 24 bp, Artificial Sequence
  Synthetic
gccatuaagagagctctugacgat

SEQ ID NO: 8743 - DNA, 26 bp, Artificial Sequence
  Synthetic
agtgttgcaguaaacggtattcctut

SEQ ID NO: 8744 - DNA, 27 bp, Artificial Sequence
  Synthetic
tcaaagaatgaaacacaugctgaagug

SEQ ID NO: 8745 - DNA, 26 bp, Artificial Sequence
  Synthetic
ctacttgttucttgcaaacugacagg

SEQ ID NO: 8746 - DNA, 25 bp, Artificial Sequence
  Synthetic
agaattcccugaaactuccaaacct

SEQ ID NO: 8747 - DNA, 23 bp, Artificial Sequence
  Synthetic
tcttccgcauctttctcagctuc

SEQ ID NO: 8748 - DNA, 19 bp, Artificial Sequence
  Synthetic
cctgggcgucactgtguac

SEQ ID NO: 8749 - DNA, 23 bp, Artificial Sequence
  Synthetic
gcuccaaacagccagataucact

SEQ ID NO: 8750 - DNA, 24 bp, Artificial Sequence
  Synthetic
attctcaaugaattcccugggcat

SEQ ID NO: 8751 - DNA, 23 bp, Artificial Sequence
  Synthetic
tcacatgtuacagcatgacagut

SEQ ID NO: 8752 - DNA, 24 bp, Artificial Sequence
  Synthetic
cuggaacagaaugaagacagauga

SEQ ID NO: 8753 - DNA, 24 bp, Artificial Sequence
  Synthetic
tctgctctaugccccaaaauaaga

SEQ ID NO: 8754 - DNA, 28 bp, Artificial Sequence
  Synthetic
ccagaagagaggcauaacaaatacctua

SEQ ID NO: 8755 - DNA, 28 bp, Artificial Sequence
  Synthetic
agatgaacttucagcatcttcactugaa

SEQ ID NO: 8756 - DNA, 24 bp, Artificial Sequence
  Synthetic
aaagaaggaaacuaagacgugcga

SEQ ID NO: 8757 - DNA, 20 bp, Artificial Sequence
  Synthetic
aaagaccgugccaccagtua

SEQ ID NO: 8758 - DNA, 23 bp, Artificial Sequence
  Synthetic
agaacaccagacugtgcaaucat

SEQ ID NO: 8759 - DNA, 29 bp, Artificial Sequence
  Synthetic
aagaaaaagtucagtgacatctcugagaa

SEQ ID NO: 8760 - DNA, 25 bp, Artificial Sequence
  Synthetic
gcactaaccugatatguccagaagg

SEQ ID NO: 8761 - DNA, 25 bp, Artificial Sequence
  Synthetic
caacagtacccuttctggaaagcua

SEQ ID NO: 8762 - DNA, 31 bp, Artificial Sequence
  Synthetic
actaacaactttaagucttcctttccgatut

SEQ ID NO: 8763 - DNA, 23 bp, Artificial Sequence
  Synthetic
ctccgaagccucaaagctaauca

SEQ ID NO: 8764 - DNA, 33 bp, Artificial Sequence
  Synthetic
aatatctctgaagutgtttttaattttgugggt

SEQ ID NO: 8765 - DNA, 21 bp, Artificial Sequence
  Synthetic
gcttgcuggtgccattuacat

SEQ ID NO: 8766 - DNA, 23 bp, Artificial Sequence
  Synthetic
gggtcttcauaaaggtgctuggt

SEQ ID NO: 8767 - DNA, 23 bp, Artificial Sequence
  Synthetic
gggatagtguaaatgcttcugca

SEQ ID NO: 8768 - DNA, 25 bp, Artificial Sequence
  Synthetic
cagctcacugaaaggttcttttgut

SEQ ID NO: 8769 - DNA, 22 bp, Artificial Sequence
  Synthetic
gggctgcuatttaaccagcugt

SEQ ID NO: 8770 - DNA, 27 bp, Artificial Sequence
  Synthetic
cagaaucagtggtugaaaaaggagaaa

SEQ ID NO: 8771 - DNA, 20 bp, Artificial Sequence
  Synthetic
ggaggagagccugatgugga

SEQ ID NO: 8772 - DNA, 27 bp, Artificial Sequence
  Synthetic
ggcacactgaauaattaactgcucaaa

SEQ ID NO: 8773 - DNA, 21 bp, Artificial Sequence
  Synthetic
tttaaccuggagcggctugaa

SEQ ID NO: 8774 - DNA, 23 bp, Artificial Sequence
  Synthetic
gcacgggtauttcctgcttguag

SEQ ID NO: 8775 - DNA, 27 bp, Artificial Sequence
  Synthetic
tcagcagatcutacagcaattaauggt

SEQ ID NO: 8776 - DNA, 27 bp, Artificial Sequence
  Synthetic
tctgttctttugcaaacaggatcucat

SEQ ID NO: 8777 - DNA, 24 bp, Artificial Sequence
  Synthetic
cagcatactttaucgccttcacug

SEQ ID NO: 8778 - DNA, 26 bp, Artificial Sequence
  Synthetic
agtgatgtcuggtaagaatcccucaa

SEQ ID NO: 8779 - DNA, 29 bp, Artificial Sequence
  Synthetic
cccctgagtaugaaacttttgcagaauat

SEQ ID NO: 8780 - DNA, 28 bp, Artificial Sequence
  Synthetic
gcttcagacttcucaatatcttccauga

SEQ ID NO: 8781 - DNA, 31 bp, Artificial Sequence
  Synthetic
catatacaaacauacagctttggtaugaaac

SEQ ID NO: 8782 - DNA, 27 bp, Artificial Sequence
  Synthetic
ttccttttccuaagcaagacgttttug

SEQ ID NO: 8783 - DNA, 31 bp, Artificial Sequence
  Synthetic
aatggttttaacuacacctttacctgaugaa

SEQ ID NO: 8784 - DNA, 30 bp, Artificial Sequence
  Synthetic
ggttgcaatttautttcattcgtataugct

SEQ ID NO: 8785 - DNA, 28 bp, Artificial Sequence
  Synthetic
agcgatgtgcauatataatggaaaggut

SEQ ID NO: 8786 - DNA, 25 bp, Artificial Sequence
  Synthetic
acatatggugggaaaacgtcaucat

SEQ ID NO: 8787 - DNA, 23 bp, Artificial Sequence
  Synthetic
tuctgtagguacagaggcagaca

SEQ ID NO: 8788 - DNA, 25 bp, Artificial Sequence
  Synthetic
gcactttguctgtatatgucccgaa

SEQ ID NO: 8789 - DNA, 26 bp, Artificial Sequence
  Synthetic
cagagcuggcttatatcaguagcaat

SEQ ID NO: 8790 - DNA, 22 bp, Artificial Sequence
  Synthetic
aactgctgucgctcatatggut

SEQ ID NO: 8791 - DNA, 29 bp, Artificial Sequence
  Synthetic
agctgcacaggaaauttttattgttuaca

SEQ ID NO: 8792 - DNA, 26 bp, Artificial Sequence
  Synthetic
tgcttcttctaautccatcagcaguc

SEQ ID NO: 8793 - DNA, 27 bp, Artificial Sequence
  Synthetic
actgcagtatugataccttttgttuct

SEQ ID NO: 8794 - DNA, 26 bp, Artificial Sequence
  Synthetic
aaacctaaaucagacaaccaaggcua

SEQ ID NO: 8795 - DNA, 31 bp, Artificial Sequence
  Synthetic
gggaatactcaaaccuagaagtaaatgcauc

SEQ ID NO: 8796 - DNA, 26 bp, Artificial Sequence
  Synthetic
tgctccagtatuagtgttcgcatuag

SEQ ID NO: 8797 - DNA, 20 bp, Artificial Sequence
  Synthetic
ctttgcaaccccucagcaug

SEQ ID NO: 8798 - DNA, 20 bp, Artificial Sequence
  Synthetic
gaagggcauctggcagaugt

SEQ ID NO: 8799 - DNA, 19 bp, Artificial Sequence
  Synthetic
acugcagcaactugacggt

SEQ ID NO: 8800 - DNA, 17 bp, Artificial Sequence
  Synthetic
agtgcucggacgacgug

SEQ ID NO: 8801 - DNA, 22 bp, Artificial Sequence
  Synthetic
catcaagguggagaaggaccug

SEQ ID NO: 8802 - DNA, 17 bp, Artificial Sequence
  Synthetic
gggtcgcuctcgtggug

SEQ ID NO: 8803 - DNA, 19 bp, Artificial Sequence
  Synthetic
agcucaagcgccacaugaa

SEQ ID NO: 8804 - DNA, 18 bp, Artificial Sequence
  Synthetic
gtucaggagccggugcat

SEQ ID NO: 8805 - DNA, 19 bp, Artificial Sequence
  Synthetic
gtgcctucgaccgagucat

SEQ ID NO: 8806 - DNA, 22 bp, Artificial Sequence
  Synthetic
tgtcgcccaggaaautcaugag

SEQ ID NO: 8807 - DNA, 18 bp, Artificial Sequence
  Synthetic
cttcaacagcgcguggut

SEQ ID NO: 8808 - DNA, 20 bp, Artificial Sequence
  Synthetic
gcacgcagaggugaagugat

SEQ ID NO: 8809 - DNA, 17 bp, Artificial Sequence
  Synthetic
ccgugccccucacacag

SEQ ID NO: 8810 - DNA, 20 bp, Artificial Sequence
  Synthetic
auttgacacuggccacaggt

SEQ ID NO: 8811 - DNA, 25 bp, Artificial Sequence
  Synthetic
ccttcccttucttctttctgtcucc

SEQ ID NO: 8812 - DNA, 24 bp, Artificial Sequence
  Synthetic
gccgtgaacucctcatcaaaauac

SEQ ID NO: 8813 - DNA, 23 bp, Artificial Sequence
  Synthetic
cttggagauccaggtgcttugaa

SEQ ID NO: 8814 - DNA, 18 bp, Artificial Sequence
  Synthetic
cacagcautgcgtgugct

SEQ ID NO: 8815 - DNA, 25 bp, Artificial Sequence
  Synthetic
cgggcacatuaagatcacagactuc

SEQ ID NO: 8816 - DNA, 19 bp, Artificial Sequence
  Synthetic
ccauggagaguagccgagg

SEQ ID NO: 8817 - DNA, 18 bp, Artificial Sequence
  Synthetic
cctugcaggcccugaagt

SEQ ID NO: 8818 - DNA, 18 bp, Artificial Sequence
  Synthetic
cagcccuccacaguccaa

SEQ ID NO: 8819 - DNA, 22 bp, Artificial Sequence
  Synthetic
ggaggaggaggagauggactuc

SEQ ID NO: 8820 - DNA, 18 bp, Artificial Sequence
  Synthetic
ccuggcagcgggtacuaa

SEQ ID NO: 8821 - DNA, 23 bp, Artificial Sequence
  Synthetic
cattcagctucctttgcttcucc

SEQ ID NO: 8822 - DNA, 24 bp, Artificial Sequence
  Synthetic
ccggataugagcatgaaaccuagt

SEQ ID NO: 8823 - DNA, 22 bp, Artificial Sequence
  Synthetic
cagagagcaucagagggttguc

SEQ ID NO: 8824 - DNA, 21 bp, Artificial Sequence
  Synthetic
gctcaactgguccccattgug

SEQ ID NO: 8825 - DNA, 24 bp, Artificial Sequence
  Synthetic
cactgacggaagutctcauaaacg

SEQ ID NO: 8826 - DNA, 21 bp, Artificial Sequence
  Synthetic
gcttggctgucgtctggatut

SEQ ID NO: 8827 - DNA, 22 bp, Artificial Sequence
  Synthetic
gagacccatucatcagctgugt

SEQ ID NO: 8828 - DNA, 27 bp, Artificial Sequence
  Synthetic
agucagauggaaaauaagaggaagaag

SEQ ID NO: 8829 - DNA, 21 bp, Artificial Sequence
  Synthetic
ccaccccaaggauctgcuaga

SEQ ID NO: 8830 - DNA, 20 bp, Artificial Sequence
  Synthetic
gcgcucagttggacucaagt

SEQ ID NO: 8831 - DNA, 21 bp, Artificial Sequence
  Synthetic
gcacttctcutgcccgtttuc

SEQ ID NO: 8832 - DNA, 22 bp, Artificial Sequence
  Synthetic
ggcugataggactucagaggct

SEQ ID NO: 8833 - DNA, 20 bp, Artificial Sequence
  Synthetic
acgacccccugtttgttguc

SEQ ID NO: 8834 - DNA, 28 bp, Artificial Sequence
  Synthetic
tgagaagtgugtaactgagtaucaggaa

SEQ ID NO: 8835 - DNA, 27 bp, Artificial Sequence
  Synthetic
agctgcaataguttctcttttcuaggg

SEQ ID NO: 8836 - DNA, 23 bp, Artificial Sequence
  Synthetic
ggagcagaggcaautcctttuct

SEQ ID NO: 8837 - DNA, 26 bp, Artificial Sequence
  Synthetic
gggtcataagaaugaacattcagugg

SEQ ID NO: 8838 - DNA, 24 bp, Artificial Sequence
  Synthetic
atgaggaactcuccaactttgcut

SEQ ID NO: 8839 - DNA, 24 bp, Artificial Sequence
  Synthetic
gcaacaggatauggaagtttgcug

SEQ ID NO: 8840 - DNA, 19 bp, Artificial Sequence
  Synthetic
ggccgguttgtuagggagt

SEQ ID NO: 8841 - DNA, 19 bp, Artificial Sequence
  Synthetic
gcacccccutccttctuca

SEQ ID NO: 8842 - DNA, 24 bp, Artificial Sequence
  Synthetic
gctgttgucactattgcataugct

SEQ ID NO: 8843 - DNA, 30 bp, Artificial Sequence
  Synthetic
tggccataaggacutatctgttaatgttuc

SEQ ID NO: 8844 - DNA, 22 bp, Artificial Sequence
  Synthetic
ggcgtttaugcaatgagcctut

SEQ ID NO: 8845 - DNA, 29 bp, Artificial Sequence
  Synthetic
tgaaatatcgcatcugctttcctaaagut

SEQ ID NO: 8846 - DNA, 29 bp, Artificial Sequence
  Synthetic
aggttttaatatttutgctcctagcucca

SEQ ID NO: 8847 - DNA, 23 bp, Artificial Sequence
  Synthetic
gctggacugtaggctuagacaac

SEQ ID NO: 8848 - DNA, 29 bp, Artificial Sequence
  Synthetic
agtaattttgcttcuttaggacaccaugt

SEQ ID NO: 8849 - DNA, 20 bp, Artificial Sequence
  Synthetic
ctccucagacgcttgcugat

SEQ ID NO: 8850 - DNA, 27 bp, Artificial Sequence
  Synthetic
tttactgtttcuagccgagctatugac

SEQ ID NO: 8851 - DNA, 27 bp, Artificial Sequence
  Synthetic
agaaaaattaccugatcacctgttcut

SEQ ID NO: 8852 - DNA, 28 bp, Artificial Sequence
  Synthetic
attgctaagugaggtatgtcttttucca

SEQ ID NO: 8853 - DNA, 27 bp, Artificial Sequence
  Synthetic
acatctggagacacaucttcattugag

SEQ ID NO: 8854 - DNA, 27 bp, Artificial Sequence
  Synthetic
agagactgtuaccggaagaagatcuag

SEQ ID NO: 8855 - DNA, 25 bp, Artificial Sequence
  Synthetic
tgacaagcacaugcagaauaagaga

SEQ ID NO: 8856 - DNA, 25 bp, Artificial Sequence
  Synthetic
tctgcagagutgtgtauagaagaca

SEQ ID NO: 8857 - DNA, 30 bp, Artificial Sequence
  Synthetic
tcaagcatcaagcutaagtacaaataauca

SEQ ID NO: 8858 - DNA, 28 bp, Artificial Sequence
  Synthetic
ccatgggacutttatatcaaccucaagt

SEQ ID NO: 8859 - DNA, 29 bp, Artificial Sequence
  Synthetic
ctgaagggugaagcagtttatatatuggt

SEQ ID NO: 8860 - DNA, 22 bp, Artificial Sequence
  Synthetic
accagctaugcagcttcttuca

SEQ ID NO: 8861 - DNA, 21 bp, Artificial Sequence
  Synthetic
aacatccagcugcacccuaag

SEQ ID NO: 8862 - DNA, 23 bp, Artificial Sequence
  Synthetic
cggattctgaaugccaatgauga

SEQ ID NO: 8863 - DNA, 23 bp, Artificial Sequence
  Synthetic
cuagctcacugaaagagcaaagc

SEQ ID NO: 8864 - DNA, 28 bp, Artificial Sequence
  Synthetic
acugatgaagaaccuaagaaaaggaaaa

SEQ ID NO: 8865 - DNA, 25 bp, Artificial Sequence
  Synthetic
cttctgttgcauctgggtatgaaug

SEQ ID NO: 8866 - DNA, 28 bp, Artificial Sequence
  Synthetic
ccaccaagatagauaccacatcattuct

SEQ ID NO: 8867 - DNA, 31 bp, Artificial Sequence
  Synthetic
aagcactacatttucctgttttcaatcttut

SEQ ID NO: 8868 - DNA, 28 bp, Artificial Sequence
  Synthetic
caactcacgggaauctaaaggtaaugat

SEQ ID NO: 8869 - DNA, 31 bp, Artificial Sequence
  Synthetic
ccatggcattcugagtttgattttctattuc

SEQ ID NO: 8870 - DNA, 31 bp, Artificial Sequence
  Synthetic
ccatctattcaaggutgtaagactgtttuct

SEQ ID NO: 8871 - DNA, 28 bp, Artificial Sequence
  Synthetic
agaagacatagcauctggattgcaauac

SEQ ID NO: 8872 - DNA, 28 bp, Artificial Sequence
  Synthetic
ccgaaaaagaaaugatgctccaaaauct

SEQ ID NO: 8873 - DNA, 27 bp, Artificial Sequence
  Synthetic
tgaaauagacaaaggattugacaggct

SEQ ID NO: 8874 - DNA, 28 bp, Artificial Sequence
  Synthetic
tgataaagattcucctcagtcagcugat

SEQ ID NO: 8875 - DNA, 29 bp, Artificial Sequence
  Synthetic
agaactgtcctgaugaaaataatggctut

SEQ ID NO: 8876 - DNA, 28 bp, Artificial Sequence
  Synthetic
gtccttctgaacuacaagaacttgguaa

SEQ ID NO: 8877 - DNA, 28 bp, Artificial Sequence
  Synthetic
cgtcctctaacacauccataatacagut

SEQ ID NO: 8878 - DNA, 22 bp, Artificial Sequence
  Synthetic
cgtgattgucatttggugccat

SEQ ID NO: 8879 - DNA, 29 bp, Artificial Sequence
  Synthetic
gcctagtagtuatttcatctggugagaca

SEQ ID NO: 8880 - DNA, 21 bp, Artificial Sequence
  Synthetic
gcaaaugacagccagcuaacc

SEQ ID NO: 8881 - DNA, 29 bp, Artificial Sequence
  Synthetic
tcattcagaaauccaggactttgtacauc

SEQ ID NO: 8882 - DNA, 27 bp, Artificial Sequence
  Synthetic
agtcacacaacugccttagaatguaaa

SEQ ID NO: 8883 - DNA, 24 bp, Artificial Sequence
  Synthetic
tttctctguggcttgacagucaat

SEQ ID NO: 8884 - DNA, 22 bp, Artificial Sequence
  Synthetic
gtagaccaggccugtacatugg

SEQ ID NO: 8885 - DNA, 30 bp, Artificial Sequence
  Synthetic
ccctccaaattaucagtacaggaaauaaca

SEQ ID NO: 8886 - DNA, 29 bp, Artificial Sequence
  Synthetic
ccacgaaatctatuggctaatcaaactut

SEQ ID NO: 8887 - DNA, 22 bp, Artificial Sequence
  Synthetic
ggaggtuggtcggtugagaaat

SEQ ID NO: 8888 - DNA, 27 bp, Artificial Sequence
  Synthetic
gtaactcagacguaactaagcaaguca

SEQ ID NO: 8889 - DNA, 28 bp, Artificial Sequence
  Synthetic
agtttgaaaggcuaaaaactctccagut

SEQ ID NO: 8890 - DNA, 26 bp, Artificial Sequence
  Synthetic
agatgttcttugggaatcttttugcc

SEQ ID NO: 8891 - DNA, 23 bp, Artificial Sequence
  Synthetic
agagaccggcugagtttcuaagt

SEQ ID NO: 8892 - DNA, 26 bp, Artificial Sequence
  Synthetic
tgggaaaaacutgcaauagccaaaaa

SEQ ID NO: 8893 - DNA, 28 bp, Artificial Sequence
  Synthetic
tcaagaacautctttggtucaagacaga

SEQ ID NO: 8894 - DNA, 28 bp, Artificial Sequence
  Synthetic
gtcaatatgttuaccgacccaagauaca

SEQ ID NO: 8895 - DNA, 27 bp, Artificial Sequence
  Synthetic
tcuaatcaaaacctuaccacacaaact

SEQ ID NO: 8896 - DNA, 30 bp, Artificial Sequence
  Synthetic
cgattatgtgagcaguttgaaccatttaua

SEQ ID NO: 8897 - DNA, 23 bp, Artificial Sequence
  Synthetic
gtttccatcucagtgaggcagut

SEQ ID NO: 8898 - DNA, 22 bp, Artificial Sequence
  Synthetic
ggatgtcgutgagtggagugat

SEQ ID NO: 8899 - DNA, 26 bp, Artificial Sequence
  Synthetic
gaatctttagugagtgtagccatuca

SEQ ID NO: 8900 - DNA, 26 bp, Artificial Sequence
  Synthetic
tgattaaccuttgttcttuccagcca

SEQ ID NO: 8901 - DNA, 21 bp, Artificial Sequence
  Synthetic
tgttccaauggtgguccaagg

SEQ ID NO: 8902 - DNA, 23 bp, Artificial Sequence
  Synthetic
agcaaagggucaaggacttctut

SEQ ID NO: 8903 - DNA, 23 bp, Artificial Sequence
  Synthetic
tggtgtgtttugggtagtgcaua

SEQ ID NO: 8904 - DNA, 25 bp, Artificial Sequence
  Synthetic
acagtaaagacugatttgccuccac

SEQ ID NO: 8905 - DNA, 23 bp, Artificial Sequence
  Synthetic
tcagagagucactttccugagca

SEQ ID NO: 8906 - DNA, 33 bp, Artificial Sequence
  Synthetic
ggtttcaaaattauacatttattgagtcuagcc

SEQ ID NO: 8907 - DNA, 28 bp, Artificial Sequence
  Synthetic
gcatactcatuttctcaggtttugacaa

SEQ ID NO: 8908 - DNA, 25 bp, Artificial Sequence
  Synthetic
actacagatttgcutttgtggccua

SEQ ID NO: 8909 - DNA, 24 bp, Artificial Sequence
  Synthetic
gaatcaggccugtatcuccacaat

SEQ ID NO: 8910 - DNA, 23 bp, Artificial Sequence
  Synthetic
cccaggaaaugttcucacaagca

SEQ ID NO: 8911 - DNA, 30 bp, Artificial Sequence
  Synthetic
gctaaattatgcatuatgtcttcccaguca

SEQ ID NO: 8912 - DNA, 26 bp, Artificial Sequence
  Synthetic
gtcagcacaaaauttagcauccagaa

SEQ ID NO: 8913 - DNA, 20 bp, Artificial Sequence
  Synthetic
agtctucaccaagcagugca

SEQ ID NO: 8914 - DNA, 25 bp, Artificial Sequence
  Synthetic
tcatgaggtgaugtgtttcagtgut

SEQ ID NO: 8915 - DNA, 24 bp, Artificial Sequence
  Synthetic
tcaauaacaaaacgugccaagagc

SEQ ID NO: 8916 - DNA, 28 bp, Artificial Sequence
  Synthetic
ttaggttuagcatgagcttuaacagaca

SEQ ID NO: 8917 - DNA, 24 bp, Artificial Sequence
  Synthetic
agctaatcacauggctgtacucac

SEQ ID NO: 8918 - DNA, 23 bp, Artificial Sequence
  Synthetic
tctccctaaauctgtggagggut

SEQ ID NO: 8919 - DNA, 24 bp, Artificial Sequence
  Synthetic
gaggctgaagaugacagaatguct

SEQ ID NO: 8920 - DNA, 31 bp, Artificial Sequence
  Synthetic
ctgacgatgugaaaagtattgtaagattugt

SEQ ID NO: 8921 - DNA, 28 bp, Artificial Sequence
  Synthetic
acattcaaaacagaugactuacccaaga

SEQ ID NO: 8922 - DNA, 27 bp, Artificial Sequence
  Synthetic
acccactcctaugatttgtttctcuct

SEQ ID NO: 8923 - DNA, 30 bp, Artificial Sequence
  Synthetic
agacttctgtaagutctccaagacatttut

SEQ ID NO: 8924 - DNA, 27 bp, Artificial Sequence
  Synthetic
cagcgtgtcucttcatatacacuaaaa

SEQ ID NO: 8925 - DNA, 22 bp, Artificial Sequence
  Synthetic
gtatttcctcgucgagctccuc

SEQ ID NO: 8926 - DNA, 25 bp, Artificial Sequence
  Synthetic
aaaacgaaatccuccagcatcatug

SEQ ID NO: 8927 - DNA, 27 bp, Artificial Sequence
  Synthetic
cggttgttaugagaatgcataugaagg

SEQ ID NO: 8928 - DNA, 25 bp, Artificial Sequence
  Synthetic
gcctcuaccacttctaugaccagat

SEQ ID NO: 8929 - DNA, 20 bp, Artificial Sequence
  Synthetic
tcccctgatugccgtctcua

SEQ ID NO: 8930 - DNA, 23 bp, Artificial Sequence
  Synthetic
ggcagctgaucacatgttttcuc

SEQ ID NO: 8931 - DNA, 24 bp, Artificial Sequence
  Synthetic
gccaggagtucaatctcttccauc

SEQ ID NO: 8932 - DNA, 21 bp, Artificial Sequence
  Synthetic
ccagtttguccccaccatcuc

SEQ ID NO: 8933 - DNA, 20 bp, Artificial Sequence
  Synthetic
ggtcagggagcagucaggua

SEQ ID NO: 8934 - DNA, 19 bp, Artificial Sequence
  Synthetic
acauacccccacccugaca

SEQ ID NO: 8935 - DNA, 21 bp, Artificial Sequence
  Synthetic
gcaccagauccacctccacua

SEQ ID NO: 8936 - DNA, 19 bp, Artificial Sequence
  Synthetic
ctgccautgctugaaccgt

SEQ ID NO: 8937 - DNA, 19 bp, Artificial Sequence
  Synthetic
agctccucgaagccgtcua

SEQ ID NO: 8938 - DNA, 21 bp, Artificial Sequence
  Synthetic
ggccactucttctcagucaca

SEQ ID NO: 8939 - DNA, 17 bp, Artificial Sequence
  Synthetic
gctgucgagggcugcac

SEQ ID NO: 8940 - DNA, 23 bp, Artificial Sequence
  Synthetic
cuagcatugaccccaaggaagaa

SEQ ID NO: 8941 - DNA, 19 bp, Artificial Sequence
  Synthetic
accucgcaagcaccttcug

SEQ ID NO: 8942 - DNA, 21 bp, Artificial Sequence
  Synthetic
catggagcugcccttccatua

SEQ ID NO: 8943 - DNA, 23 bp, Artificial Sequence
  Synthetic
ctcgatggugaacttctcctcug

SEQ ID NO: 8944 - DNA, 20 bp, Artificial Sequence
  Synthetic
gggaugggaagggtcagaug

SEQ ID NO: 8945 - DNA, 23 bp, Artificial Sequence
  Synthetic
ttgagggttuccaaggactucag

SEQ ID NO: 8946 - DNA, 21 bp, Artificial Sequence
  Synthetic
gccccaaggugagtttctcut

SEQ ID NO: 8947 - DNA, 21 bp, Artificial Sequence
  Synthetic
gagtgagutgttcuccaccca

SEQ ID NO: 8948 - DNA, 18 bp, Artificial Sequence
  Synthetic
cugctggaguacgagcga

SEQ ID NO: 8949 - DNA, 17 bp, Artificial Sequence
  Synthetic
cugcgtgtugagcacca

SEQ ID NO: 8950 - DNA, 27 bp, Artificial Sequence
  Synthetic
gtaggatacttguggttgacttctuga

SEQ ID NO: 8951 - DNA, 29 bp, Artificial Sequence
  Synthetic
ctgaagacagacuattctcuggagaaaaa

SEQ ID NO: 8952 - DNA, 25 bp, Artificial Sequence
  Synthetic
gggtgtuaaaccaagaccagaaaua

SEQ ID NO: 8953 - DNA, 27 bp, Artificial Sequence
  Synthetic
gatttctacaactucaggtttgtgcug

SEQ ID NO: 8954 - DNA, 29 bp, Artificial Sequence
  Synthetic
gcagtatctctcucagtatgattgtguca

SEQ ID NO: 8955 - DNA, 24 bp, Artificial Sequence
  Synthetic
ttcacaccugattcccccuaaaac

SEQ ID NO: 8956 - DNA, 26 bp, Artificial Sequence
  Synthetic
aaaaaggaacuggtccuagaaagcaa

SEQ ID NO: 8957 - DNA, 28 bp, Artificial Sequence
  Synthetic
aggactcauttgatagatttuggaagca

SEQ ID NO: 8958 - DNA, 29 bp, Artificial Sequence
  Synthetic
gaagttgaccutaactcaaatgguaggaa

SEQ ID NO: 8959 - DNA, 26 bp, Artificial Sequence
  Synthetic
gcagcatccgaugacaaatttacauc

SEQ ID NO: 8960 - DNA, 24 bp, Artificial Sequence
  Synthetic
caacugaggaacaacgctatcuca

SEQ ID NO: 8961 - DNA, 22 bp, Artificial Sequence
  Synthetic
ccuatccttccugagcaggact

SEQ ID NO: 8962 - DNA, 23 bp, Artificial Sequence
  Synthetic
ggagcgcaagaguatcagtgaut

SEQ ID NO: 8963 - DNA, 22 bp, Artificial Sequence
  Synthetic
atctccugaaacaaggcaccuc

SEQ ID NO: 8964 - DNA, 23 bp, Artificial Sequence
  Synthetic
caagacgagcucacgagtatuct

SEQ ID NO: 8965 - DNA, 25 bp, Artificial Sequence
  Synthetic
agaaaacagccaucactgttcacut

SEQ ID NO: 8966 - DNA, 24 bp, Artificial Sequence
  Synthetic
cgaggtccccagutctgtagauaa

SEQ ID NO: 8967 - DNA, 20 bp, Artificial Sequence
  Synthetic
cccacggcucctccttauga

SEQ ID NO: 8968 - DNA, 28 bp, Artificial Sequence
  Synthetic
tgtattugagaagcatgtgttucaagga

SEQ ID NO: 8969 - DNA, 22 bp, Artificial Sequence
  Synthetic
cgcagaggccuacattcugaac

SEQ ID NO: 8970 - DNA, 25 bp, Artificial Sequence
  Synthetic
gggtaggcugaagataaatctuggt

SEQ ID NO: 8971 - DNA, 27 bp, Artificial Sequence
  Synthetic
tttgaataaatgaugtgccaatgucag

SEQ ID NO: 8972 - DNA, 30 bp, Artificial Sequence
  Synthetic
tcctctctaucuagaggttttgtagtttua

SEQ ID NO: 8973 - DNA, 26 bp, Artificial Sequence
  Synthetic
tgaatgtcttgguctaattgccucat

SEQ ID NO: 8974 - DNA, 22 bp, Artificial Sequence
  Synthetic
ctgtttctugcagtgttgccut

SEQ ID NO: 8975 - DNA, 24 bp, Artificial Sequence
  Synthetic
ggaaucgtttgaaaucacaacgga

SEQ ID NO: 8976 - DNA, 22 bp, Artificial Sequence
  Synthetic
cactttggutgtcccugagagt

SEQ ID NO: 8977 - DNA, 24 bp, Artificial Sequence
  Synthetic
cgaatatctgugatgttgccugct

SEQ ID NO: 8978 - DNA, 23 bp, Artificial Sequence
  Synthetic
ccutgacaatgaatuccgacggt

SEQ ID NO: 8979 - DNA, 23 bp, Artificial Sequence
  Synthetic
gaaggagcuggaaccattttugt

SEQ ID NO: 8980 - DNA, 26 bp, Artificial Sequence
  Synthetic
ggcttgtaaacaguagttctcctuca

SEQ ID NO: 8981 - DNA, 20 bp, Artificial Sequence
  Synthetic
cgugatgagcucaaccagca

SEQ ID NO: 8982 - DNA, 26 bp, Artificial Sequence
  Synthetic
ggaaccaatctguctctccagtttut

SEQ ID NO: 8983 - DNA, 29 bp, Artificial Sequence
  Synthetic
agauaatctcuaacaaaacaauccacagt

SEQ ID NO: 8984 - DNA, 28 bp, Artificial Sequence
  Synthetic
accccaaattaugattttgtcatugcag

SEQ ID NO: 8985 - DNA, 22 bp, Artificial Sequence
  Synthetic
tguaaagaugggcagcacacat

SEQ ID NO: 8986 - DNA, 20 bp, Artificial Sequence
  Synthetic
cttugacgccgagagcuaca

SEQ ID NO: 8987 - DNA, 19 bp, Artificial Sequence
  Synthetic
ttcucggccccttuccaac

SEQ ID NO: 8988 - DNA, 24 bp, Artificial Sequence
  Synthetic
ttagacctgaaguatccgtctuga

SEQ ID NO: 8989 - DNA, 22 bp, Artificial Sequence
  Synthetic
ggcagctgaugggaggaauaac

SEQ ID NO: 8990 - DNA, 23 bp, Artificial Sequence
  Synthetic
ccccttcucccatgttttctucc

SEQ ID NO: 8991 - DNA, 21 bp, Artificial Sequence
  Synthetic
ggtgaatucgggcttgttguc

SEQ ID NO: 8992 - DNA, 21 bp, Artificial Sequence
  Synthetic
gctaggccaaagguggcuagt

SEQ ID NO: 8993 - DNA, 22 bp, Artificial Sequence
  Synthetic
ctgttgcugttgtgctuaaccc

SEQ ID NO: 8994 - DNA, 31 bp, Artificial Sequence
  Synthetic
cgttttgtttttaacutcattgtttctgcuc

SEQ ID NO: 8995 - DNA, 23 bp, Artificial Sequence
  Synthetic
ttcattcacauccagcacaucca

SEQ ID NO: 8996 - DNA, 21 bp, Artificial Sequence
  Synthetic
gcuggacagggaggatttuga

SEQ ID NO: 8997 - DNA, 23 bp, Artificial Sequence
  Synthetic
gcaaggaacugaactagcuagga

SEQ ID NO: 8998 - DNA, 21 bp, Artificial Sequence
  Synthetic
tttcctccccuggtctcauca

SEQ ID NO: 8999 - DNA, 20 bp, Artificial Sequence
  Synthetic
gtcacacacgcugacctcua

SEQ ID NO: 9000 - DNA, 29 bp, Artificial Sequence
  Synthetic
cctgtgtgtaugactatttctttccuact

SEQ ID NO: 9001 - DNA, 21 bp, Artificial Sequence
  Synthetic
ggacactcaugagggttggug

SEQ ID NO: 9002 - DNA, 19 bp, Artificial Sequence
  Synthetic
gctggcugacatguacgga

SEQ ID NO: 9003 - DNA, 26 bp, Artificial Sequence
  Synthetic
actgcatcacuaaccagtctctttut

SEQ ID NO: 9004 - DNA, 19 bp, Artificial Sequence
  Synthetic
gatgagcucgtgcgcttug

SEQ ID NO: 9005 - DNA, 19 bp, Artificial Sequence
  Synthetic
ccacgcguaggaaguccag

SEQ ID NO: 9006 - DNA, 20 bp, Artificial Sequence
  Synthetic
tgtgtguggacactcacgut

SEQ ID NO: 9007 - DNA, 21 bp, Artificial Sequence
  Synthetic
agaauagggcagagacuggct

SEQ ID NO: 9008 - DNA, 17 bp, Artificial Sequence
  Synthetic
ggcgucctcctctugcc

SEQ ID NO: 9009 - DNA, 17 bp, Artificial Sequence
  Synthetic
gggagcucctgcacugt

SEQ ID NO: 9010 - DNA, 20 bp, Artificial Sequence
  Synthetic
ccgtggcugcaacctcatua

SEQ ID NO: 9011 - DNA, 19 bp, Artificial Sequence
  Synthetic
agcucaagcgcttccucac

SEQ ID NO: 9012 - DNA, 20 bp, Artificial Sequence
  Synthetic
gggctactuacgtgtgtgug

SEQ ID NO: 9013 - DNA, 17 bp, Artificial Sequence
  Synthetic
cucagcgaugccggact

SEQ ID NO: 9014 - DNA, 20 bp, Artificial Sequence
  Synthetic
ccctguccctcagtctugaa

SEQ ID NO: 9015 - DNA, 18 bp, Artificial Sequence
  Synthetic
ccagccccucctcttucc

SEQ ID NO: 9016 - DNA, 20 bp, Artificial Sequence
  Synthetic
ccaggaaguaccgctgcauc

SEQ ID NO: 9017 - DNA, 20 bp, Artificial Sequence
  Synthetic
gggtcacugaagtgctucca

SEQ ID NO: 9018 - DNA, 22 bp, Artificial Sequence
  Synthetic
gccccacgggaautttcaguaa

SEQ ID NO: 9019 - DNA, 23 bp, Artificial Sequence
  Synthetic
cattctcttgcutgggctttgug

SEQ ID NO: 9020 - DNA, 26 bp, Artificial Sequence
  Synthetic
gcuttccgatcuagaggaagaaaacc

SEQ ID NO: 9021 - DNA, 22 bp, Artificial Sequence
  Synthetic
gcttccgaagcutgactctuga

SEQ ID NO: 9022 - DNA, 29 bp, Artificial Sequence
  Synthetic
agaagaacuacaggctactcuacaagaat

SEQ ID NO: 9023 - DNA, 27 bp, Artificial Sequence
  Synthetic
tctcattttctugacttagctgctcug

SEQ ID NO: 9024 - DNA, 29 bp, Artificial Sequence
  Synthetic
ccaaaacttuggaagagtgtagagtuacc

SEQ ID NO: 9025 - DNA, 21 bp, Artificial Sequence
  Synthetic
tgcucgggctacttucaacat

SEQ ID NO: 9026 - DNA, 23 bp, Artificial Sequence
  Synthetic
ctcacagctuttctaagcccugt

SEQ ID NO: 9027 - DNA, 25 bp, Artificial Sequence
  Synthetic
ggagcggguaattcataggaagaug

SEQ ID NO: 9028 - DNA, 19 bp, Artificial Sequence
  Synthetic
ccctgggcuctgtcagcua

SEQ ID NO: 9029 - DNA, 26 bp, Artificial Sequence
  Synthetic
tcugagaaacagagaatgucacaagg

SEQ ID NO: 9030 - DNA, 21 bp, Artificial Sequence
  Synthetic
ctggtguccccctggttttua

SEQ ID NO: 9031 - DNA, 27 bp, Artificial Sequence
  Synthetic
gcacggaaagauaagtcaaaagttcut

SEQ ID NO: 9032 - DNA, 24 bp, Artificial Sequence
  Synthetic
cctcatctgugatactgcacagut

SEQ ID NO: 9033 - DNA, 20 bp, Artificial Sequence
  Synthetic
guaggtguggagcagagcac

SEQ ID NO: 9034 - DNA, 20 bp, Artificial Sequence
  Synthetic
cctugtgatctgucccccat

SEQ ID NO: 9035 - DNA, 20 bp, Artificial Sequence
  Synthetic
aagcugcagtagguggcaat

SEQ ID NO: 9036 - DNA, 22 bp, Artificial Sequence
  Synthetic
gggtggcagugttcctattuca

SEQ ID NO: 9037 - DNA, 21 bp, Artificial Sequence
  Synthetic
gttgtccucaaagagcugggt

SEQ ID NO: 9038 - DNA, 22 bp, Artificial Sequence
  Synthetic
accaggacacgautttguggaa

SEQ ID NO: 9039 - DNA, 21 bp, Artificial Sequence
  Synthetic
caggcacugggttgtaagtug

SEQ ID NO: 9040 - DNA, 20 bp, Artificial Sequence
  Synthetic
gcctgguactgccctatugc

SEQ ID NO: 9041 - DNA, 21 bp, Artificial Sequence
  Synthetic
ggattgggcauggacucaaac

SEQ ID NO: 9042 - DNA, 21 bp, Artificial Sequence
  Synthetic
ttgacctgucccggtaugaag

SEQ ID NO: 9043 - DNA, 22 bp, Artificial Sequence
  Synthetic
cccaaagaucttctugcagcca

SEQ ID NO: 9044 - DNA, 20 bp, Artificial Sequence
  Synthetic
gtggtaaggugcccacctut

SEQ ID NO: 9045 - DNA, 21 bp, Artificial Sequence
  Synthetic
cgaagcagaggugggtgtuat

SEQ ID NO: 9046 - DNA, 20 bp, Artificial Sequence
  Synthetic
cccaacuaagggcctgaucc

SEQ ID NO: 9047 - DNA, 23 bp, Artificial Sequence
  Synthetic
tgtaggagaggucaggttucaca

SEQ ID NO: 9048 - DNA, 19 bp, Artificial Sequence
  Synthetic
ttggcatuctgctggucgt

SEQ ID NO: 9049 - DNA, 18 bp, Artificial Sequence
  Synthetic
ggcugggaggactucacc

SEQ ID NO: 9050 - DNA, 20 bp, Artificial Sequence
  Synthetic
ccatacccuctcagcguacc

SEQ ID NO: 9051 - DNA, 23 bp, Artificial Sequence
  Synthetic
gttttcccggacauggtcuaaga

SEQ ID NO: 9052 - DNA, 23 bp, Artificial Sequence
  Synthetic
acaacacacagutggaggactuc

SEQ ID NO: 9053 - DNA, 17 bp, Artificial Sequence
  Synthetic
ccauggctccucaccca

SEQ ID NO: 9054 - DNA, 20 bp, Artificial Sequence
  Synthetic
gaatgucggccaagatuccg

SEQ ID NO: 9055 - DNA, 21 bp, Artificial Sequence
  Synthetic
cctggcauactggactcauct

SEQ ID NO: 9056 - DNA, 18 bp, Artificial Sequence
  Synthetic
gggctggcuccgatguat

SEQ ID NO: 9057 - DNA, 21 bp, Artificial Sequence
  Synthetic
cgtagccaucagtcucagagg

SEQ ID NO: 9058 - DNA, 18 bp, Artificial Sequence
  Synthetic
gcctucagcccagcctuc

SEQ ID NO: 9059 - DNA, 18 bp, Artificial Sequence
  Synthetic
ctgcggacutggcctuct

SEQ ID NO: 9060 - DNA, 23 bp, Artificial Sequence
  Synthetic
ggtagagugctacactguccaac

SEQ ID NO: 9061 - DNA, 25 bp, Artificial Sequence
  Synthetic
tccuaagaactcauacaaccaggac

SEQ ID NO: 9062 - DNA, 22 bp, Artificial Sequence
  Synthetic
gagtggaauacagagtgguggg

SEQ ID NO: 9063 - DNA, 24 bp, Artificial Sequence
  Synthetic
ctgatgggtugtgtttggtttcut

SEQ ID NO: 9064 - DNA, 31 bp, Artificial Sequence
  Synthetic
actctttccagaaugttgttaagtcttaguc

SEQ ID NO: 9065 - DNA, 23 bp, Artificial Sequence
  Synthetic
tgcaauggaagaaagtgugagca

SEQ ID NO: 9066 - DNA, 21 bp, Artificial Sequence
  Synthetic
tgctccuccacaucaacaacc

SEQ ID NO: 9067 - DNA, 21 bp, Artificial Sequence
  Synthetic
cacaattgguggcgatggtut

SEQ ID NO: 9068 - DNA, 30 bp, Artificial Sequence
  Synthetic
gggaaggaaagaautttgcttaagatauca

SEQ ID NO: 9069 - DNA, 22 bp, Artificial Sequence
  Synthetic
cagccttcuaacagctacccut

SEQ ID NO: 9070 - DNA, 26 bp, Artificial Sequence
  Synthetic
gcaaacacaaaaaccuggttccaaua

SEQ ID NO: 9071 - DNA, 27 bp, Artificial Sequence
  Synthetic
caaacaaaugaggcatcagtcugaaag

SEQ ID NO: 9072 - DNA, 27 bp, Artificial Sequence
  Synthetic
ggaagctcttcaucctcactagauaag

SEQ ID NO: 9073 - DNA, 32 bp, Artificial Sequence
  Synthetic
aatgacattaaggaaagutctgctgttttuag

SEQ ID NO: 9074 - DNA, 24 bp, Artificial Sequence
  Synthetic
caattttggcccuctgtttcuacc

SEQ ID NO: 9075 - DNA, 31 bp, Artificial Sequence
  Synthetic
gcacaatuagccgtaataacatuagagaaaa

SEQ ID NO: 9076 - DNA, 28 bp, Artificial Sequence
  Synthetic
cctagagcctccuttgatactacattug

SEQ ID NO: 9077 - DNA, 29 bp, Artificial Sequence
  Synthetic
aaagtccaaaagucacttttgaatgugaa

SEQ ID NO: 9078 - DNA, 28 bp, Artificial Sequence
  Synthetic
acactgacucacacatttatttggtuct

SEQ ID NO: 9079 - DNA, 27 bp, Artificial Sequence
  Synthetic
ctcatgttaaguggagaaagggtttug

SEQ ID NO: 9080 - DNA, 26 bp, Artificial Sequence
  Synthetic
ctgactggcauttggttgtactttut

SEQ ID NO: 9081 - DNA, 26 bp, Artificial Sequence
  Synthetic
ggaggaagtctuctaccaggcataut

SEQ ID NO: 9082 - DNA, 28 bp, Artificial Sequence
  Synthetic
gccaaatctgcuttcttgataaaaucct

SEQ ID NO: 9083 - DNA, 32 bp, Artificial Sequence
  Synthetic
ccaacttaagccaugtaactgaaaatctaaut

SEQ ID NO: 9084 - DNA, 26 bp, Artificial Sequence
  Synthetic
tcatcacttcuggaaaaccactcaut

SEQ ID NO: 9085 - DNA, 21 bp, Artificial Sequence
  Synthetic
aatgctgaucccctgtgugag

SEQ ID NO: 9086 - DNA, 25 bp, Artificial Sequence
  Synthetic
ctgatacttttcuggatgcctcuca

SEQ ID NO: 9087 - DNA, 30 bp, Artificial Sequence
  Synthetic
taatgacaattcaguttttgagtacctugt

SEQ ID NO: 9088 - DNA, 23 bp, Artificial Sequence
  Synthetic
ccaaggaaggautttcgggtuca

SEQ ID NO: 9089 - DNA, 32 bp, Artificial Sequence
  Synthetic
ccttgtattttacagaugcaaacagctauaat

SEQ ID NO: 9090 - DNA, 30 bp, Artificial Sequence
  Synthetic
aaacaaaagctaauaatggagccacauaac

SEQ ID NO: 9091 - DNA, 29 bp, Artificial Sequence
  Synthetic
attgagcctcauttattttctttttcucc

SEQ ID NO: 9092 - DNA, 27 bp, Artificial Sequence
  Synthetic
autcatttatatguacacagggcagca

SEQ ID NO: 9093 - DNA, 23 bp, Artificial Sequence
  Synthetic
cctttgucccacttggaugagag

SEQ ID NO: 9094 - DNA, 24 bp, Artificial Sequence
  Synthetic
cctccaggcugtaaacttuggaaa

SEQ ID NO: 9095 - DNA, 21 bp, Artificial Sequence
  Synthetic
cagctguggcaatttctggug

SEQ ID NO: 9096 - DNA, 19 bp, Artificial Sequence
  Synthetic
gccccaccccaguctctua

SEQ ID NO: 9097 - DNA, 27 bp, Artificial Sequence
  Synthetic
agctttaagcaagaauaccatgauccc

SEQ ID NO: 9098 - DNA, 24 bp, Artificial Sequence
  Synthetic
gatctcaggaaautccgttgcuct

SEQ ID NO: 9099 - DNA, 25 bp, Artificial Sequence
  Synthetic
gttcaaagatgcuttccagcttcuc

SEQ ID NO: 9100 - DNA, 21 bp, Artificial Sequence
  Synthetic
gggctuagggtggaauaccag

SEQ ID NO: 9101 - DNA, 26 bp, Artificial Sequence
  Synthetic
ctccaattccacuatttaccccucag

SEQ ID NO: 9102 - DNA, 25 bp, Artificial Sequence
  Synthetic
ccaaagtccaugtgaaattgtcucc

SEQ ID NO: 9103 - DNA, 20 bp, Artificial Sequence
  Synthetic
aggaattcggcutcgacgut

SEQ ID NO: 9104 - DNA, 18 bp, Artificial Sequence
  Synthetic
cgcggauctcgatcucgt

SEQ ID NO: 9105 - DNA, 19 bp, Artificial Sequence
  Synthetic
ccttccugcgcctgatguc

SEQ ID NO: 9106 - DNA, 22 bp, Artificial Sequence
  Synthetic
accagtcuccatgtugcagaag

SEQ ID NO: 9107 - DNA, 22 bp, Artificial Sequence
  Synthetic
gcccatatgugcccctaccaua

SEQ ID NO: 9108 - DNA, 21 bp, Artificial Sequence
  Synthetic
gggatuaccggcatccaagug

SEQ ID NO: 9109 - DNA, 22 bp, Artificial Sequence
  Synthetic
gcaaagauggactcaacgguct

SEQ ID NO: 9110 - DNA, 20 bp, Artificial Sequence
  Synthetic
cacggugaccctttaugcct

SEQ ID NO: 9111 - DNA, 23 bp, Artificial Sequence
  Synthetic
agaacuctacagaugcagacagt

SEQ ID NO: 9112 - DNA, 19 bp, Artificial Sequence
  Synthetic
gctgaggguactggcaugg

SEQ ID NO: 9113 - DNA, 24 bp, Artificial Sequence
  Synthetic
gcctgactcuttcttctccctuag

SEQ ID NO: 9114 - DNA, 20 bp, Artificial Sequence
  Synthetic
ggaucctttcucgccagcag

SEQ ID NO: 9115 - DNA, 20 bp, Artificial Sequence
  Synthetic
gacagccccucctatccuca

SEQ ID NO: 9116 - DNA, 19 bp, Artificial Sequence
  Synthetic
ccagcaucgccttuagcac

SEQ ID NO: 9117 - DNA, 20 bp, Artificial Sequence
  Synthetic
tgcctccautactgctccuc

SEQ ID NO: 9118 - DNA, 20 bp, Artificial Sequence
  Synthetic
ccaccucaccttgucaccag

SEQ ID NO: 9119 - DNA, 21 bp, Artificial Sequence
  Synthetic
gccccacacuggaaatcucaa

SEQ ID NO: 9120 - DNA, 20 bp, Artificial Sequence
  Synthetic
caaguacgacgcacctugac

SEQ ID NO: 9121 - DNA, 22 bp, Artificial Sequence
  Synthetic
gggttttgcucactgtctgtuc

SEQ ID NO: 9122 - DNA, 21 bp, Artificial Sequence
  Synthetic
gcagcaaugggaaggagguag

SEQ ID NO: 9123 - DNA, 19 bp, Artificial Sequence
  Synthetic
tcagcccccucaacccuaa

SEQ ID NO: 9124 - DNA, 22 bp, Artificial Sequence
  Synthetic
cagctucaccaggagatcctut

SEQ ID NO: 9125 - DNA, 22 bp, Artificial Sequence
  Synthetic
ggcatctucttcctctttuggc

SEQ ID NO: 9126 - DNA, 24 bp, Artificial Sequence
  Synthetic
ctcttcctttcuggatttcccuca

SEQ ID NO: 9127 - DNA, 23 bp, Artificial Sequence
  Synthetic
gactctcagcucatcctcttcuc

SEQ ID NO: 9128 - DNA, 22 bp, Artificial Sequence
  Synthetic
ccatgagggucatgctuagagg

SEQ ID NO: 9129 - DNA, 23 bp, Artificial Sequence
  Synthetic
catctctuccttctcgcugacat

SEQ ID NO: 9130 - DNA, 26 bp, Artificial Sequence
  Synthetic
gagtgagaaautcattcatgguggga

SEQ ID NO: 9131 - DNA, 28 bp, Artificial Sequence
  Synthetic
cttaccttctaccuctttcctgcttuag

SEQ ID NO: 9132 - DNA, 22 bp, Artificial Sequence
  Synthetic
caggccugggagttcttctaua

SEQ ID NO: 9133 - DNA, 29 bp, Artificial Sequence
  Synthetic
tctaacccatcuttttccttcttcucaag

SEQ ID NO: 9134 - DNA, 17 bp, Artificial Sequence
  Synthetic
agagccaugcccaccug

SEQ ID NO: 9135 - DNA, 21 bp, Artificial Sequence
  Synthetic
cccttctcuaacctggccuct

SEQ ID NO: 9136 - DNA, 24 bp, Artificial Sequence
  Synthetic
gagtauccttgcacucccaaaagt

SEQ ID NO: 9137 - DNA, 28 bp, Artificial Sequence
  Synthetic
cacaaagagtcuacatgtctagggtcua

SEQ ID NO: 9138 - DNA, 23 bp, Artificial Sequence
  Synthetic
ccagcaaacautggcttcaguac

SEQ ID NO: 9139 - DNA, 27 bp, Artificial Sequence
  Synthetic
gtcttcgaatuggattacttgggucat

SEQ ID NO: 9140 - DNA, 24 bp, Artificial Sequence
  Synthetic
ggagagtcucagccagtgaaaaug

SEQ ID NO: 9141 - DNA, 25 bp, Artificial Sequence
  Synthetic
acaaccgtgtuctaaacctcttcut

SEQ ID NO: 9142 - DNA, 28 bp, Artificial Sequence
  Synthetic
ttctgtagatcagugaaaagcatgaugt

SEQ ID NO: 9143 - DNA, 28 bp, Artificial Sequence
  Synthetic
gcttcatgaggugcagtaacaaaaatug

SEQ ID NO: 9144 - DNA, 28 bp, Artificial Sequence
  Synthetic
tgagaatggcugtacgtaataactuagc

SEQ ID NO: 9145 - DNA, 25 bp, Artificial Sequence
  Synthetic
actctttaccuttggtgcatuagca

SEQ ID NO: 9146 - DNA, 27 bp, Artificial Sequence
  Synthetic
ctacattggcacutagtgtgtaccuaa

SEQ ID NO: 9147 - DNA, 26 bp, Artificial Sequence
  Synthetic
aggctaatttcuctgtcaatgctuca

SEQ ID NO: 9148 - DNA, 28 bp, Artificial Sequence
  Synthetic
gaattactcaugtaagtggaguggacaa

SEQ ID NO: 9149 - DNA, 24 bp, Artificial Sequence
  Synthetic
cagtgaaaugttctaaugcacgct

SEQ ID NO: 9150 - DNA, 28 bp, Artificial Sequence
  Synthetic
ttgtgttcagguggcttctaaataucat

SEQ ID NO: 9151 - DNA, 23 bp, Artificial Sequence
  Synthetic
tttccaacagccugatcauaagc

SEQ ID NO: 9152 - DNA, 29 bp, Artificial Sequence
  Synthetic
tctacttcttttuaaccacaggtgaaucc

SEQ ID NO: 9153 - DNA, 28 bp, Artificial Sequence
  Synthetic
gctcatcaguagagaattgacctctuac

SEQ ID NO: 9154 - DNA, 28 bp, Artificial Sequence
  Synthetic
cttctttaggtutgcaatgagaatuccc

SEQ ID NO: 9155 - DNA, 25 bp, Artificial Sequence
  Synthetic
gacagccauaaacacattugccaat

SEQ ID NO: 9156 - DNA, 25 bp, Artificial Sequence
  Synthetic
atctgcaaaaccuccttatccucac

SEQ ID NO: 9157 - DNA, 21 bp, Artificial Sequence
  Synthetic
ttccggaaaauggcaaaugct

SEQ ID NO: 9158 - DNA, 22 bp, Artificial Sequence
  Synthetic
gtcaactugcaaaagcccagut

SEQ ID NO: 9159 - DNA, 28 bp, Artificial Sequence
  Synthetic
gtaagaagtcauaccactagtatuggca

SEQ ID NO: 9160 - DNA, 30 bp, Artificial Sequence
  Synthetic
gatgctgctaagutgttgtacaataatgut

SEQ ID NO: 9161 - DNA, 28 bp, Artificial Sequence
  Synthetic
tgggtttagatuacctctttccatgtuc

SEQ ID NO: 9162 - DNA, 28 bp, Artificial Sequence
  Synthetic
gctgttagcuagactcatatcuaaagca

SEQ ID NO: 9163 - DNA, 28 bp, Artificial Sequence
  Synthetic
tggatgattcaucatggtaattauggca

SEQ ID NO: 9164 - DNA, 24 bp, Artificial Sequence
  Synthetic
cgataacttttguccctgggacut

SEQ ID NO: 9165 - DNA, 29 bp, Artificial Sequence
  Synthetic
acagatttgttgtuatggttctgaacuga

SEQ ID NO: 9166 - DNA, 27 bp, Artificial Sequence
  Synthetic
ctttgaataggaugcaatgcagtaugc

SEQ ID NO: 9167 - DNA, 23 bp, Artificial Sequence
  Synthetic
ttctaggacgacauctggcctua

SEQ ID NO: 9168 - DNA, 26 bp, Artificial Sequence
  Synthetic
ttggagtgttcuaaatgctaacagut

SEQ ID NO: 9169 - DNA, 25 bp, Artificial Sequence
  Synthetic
gcggtataaccauaaccaaaaggug

SEQ ID NO: 9170 - DNA, 27 bp, Artificial Sequence
  Synthetic
gcctttattttuggaaggagatggtut

SEQ ID NO: 9171 - DNA, 29 bp, Artificial Sequence
  Synthetic
aggattgcatagauacaaagttgaaugga

SEQ ID NO: 9172 - DNA, 28 bp, Artificial Sequence
  Synthetic
cctctatcagttucagctaggtcattut

SEQ ID NO: 9173 - DNA, 27 bp, Artificial Sequence
  Synthetic
ggatccagacautgaattgtctcuagt

SEQ ID NO: 9174 - DNA, 26 bp, Artificial Sequence
  Synthetic
tgttgccttcgguattttaccaguaa

SEQ ID NO: 9175 - DNA, 24 bp, Artificial Sequence
  Synthetic
guattccuggaagaagcagggaaa

SEQ ID NO: 9176 - DNA, 25 bp, Artificial Sequence
  Synthetic
agaggtcactucaagtgtagacuca

SEQ ID NO: 9177 - DNA, 21 bp, Artificial Sequence
  Synthetic
tcuaaatggguacggcagcag

SEQ ID NO: 9178 - DNA, 21 bp, Artificial Sequence
  Synthetic
gttaugacagcacgggcatug

SEQ ID NO: 9179 - DNA, 29 bp, Artificial Sequence
  Synthetic
agcaatttctgagaautttggatatgcut

SEQ ID NO: 9180 - DNA, 27 bp, Artificial Sequence
  Synthetic
ccutaccttgtaagauggcaagaaaca

SEQ ID NO: 9181 - DNA, 26 bp, Artificial Sequence
  Synthetic
gaatctctgtgcuaccttccagaaua

SEQ ID NO: 9182 - DNA, 25 bp, Artificial Sequence
  Synthetic
aaaaugctggtacugagcaagaaga

SEQ ID NO: 9183 - DNA, 28 bp, Artificial Sequence
  Synthetic
aaaaatgggutgttggttcuaccaaaaa

SEQ ID NO: 9184 - DNA, 31 bp, Artificial Sequence
  Synthetic
acttctaatucactaaatacgttucacaggt

SEQ ID NO: 9185 - DNA, 28 bp, Artificial Sequence
  Synthetic
gcaaacgcugaatatcttguagaaagag

SEQ ID NO: 9186 - DNA, 26 bp, Artificial Sequence
  Synthetic
acatctccatgaguaggaagaaggut

SEQ ID NO: 9187 - DNA, 28 bp, Artificial Sequence
  Synthetic
ccatatuacacaguccgagaactaauac

SEQ ID NO: 9188 - DNA, 23 bp, Artificial Sequence
  Synthetic
tcattggaaccccugaataugcc

SEQ ID NO: 9189 - DNA, 29 bp, Artificial Sequence
  Synthetic
actaaacaaggaaacagucaagagtcauc

SEQ ID NO: 9190 - DNA, 26 bp, Artificial Sequence
  Synthetic
cttgactaccaugttcagctguaact

SEQ ID NO: 9191 - DNA, 31 bp, Artificial Sequence
  Synthetic
ggcatccatauacagagatgaaaatgaugat

SEQ ID NO: 9192 - DNA, 29 bp, Artificial Sequence
  Synthetic
ctgaaccagtcuggataaagaatactgua

SEQ ID NO: 9193 - DNA, 24 bp, Artificial Sequence
  Synthetic
aacattgttugttggagaguccca

SEQ ID NO: 9194 - DNA, 17 bp, Artificial Sequence
  Synthetic
gcgaccuggctcucact

SEQ ID NO: 9195 - DNA, 17 bp, Artificial Sequence
  Synthetic
ggtcccggccugagtuc

SEQ ID NO: 9196 - DNA, 21 bp, Artificial Sequence
  Synthetic
gtagaccuccgaggtgttgut

SEQ ID NO: 9197 - DNA, 21 bp, Artificial Sequence
  Synthetic
caggagauggacgagaauccc

SEQ ID NO: 9198 - DNA, 21 bp, Artificial Sequence
  Synthetic
cccagacagcuggagaugaga

SEQ ID NO: 9199 - DNA, 19 bp, Artificial Sequence
  Synthetic
ggacgttgucacgggttug

SEQ ID NO: 9200 - DNA, 23 bp, Artificial Sequence
  Synthetic
gggaatatccugttggcatugga

SEQ ID NO: 9201 - DNA, 23 bp, Artificial Sequence
  Synthetic
ccaacagggacutaccagaaugg

SEQ ID NO: 9202 - DNA, 26 bp, Artificial Sequence
  Synthetic
gtgactcguaactaccaacattucct

SEQ ID NO: 9203 - DNA, 25 bp, Artificial Sequence
  Synthetic
caggcacagcauacactttcttuac

SEQ ID NO: 9204 - DNA, 24 bp, Artificial Sequence
  Synthetic
ttgactcttgucaccatggauacc

SEQ ID NO: 9205 - DNA, 26 bp, Artificial Sequence
  Synthetic
tttctggcgaaautaaagagatcugt

SEQ ID NO: 9206 - DNA, 23 bp, Artificial Sequence
  Synthetic
acgtcaugacacacauccacaat

SEQ ID NO: 9207 - DNA, 22 bp, Artificial Sequence
  Synthetic
tctaatgtggagugcgactugg

SEQ ID NO: 9208 - DNA, 29 bp, Artificial Sequence
  Synthetic
acactctaaaaagucaatcagtctuccag

SEQ ID NO: 9209 - DNA, 27 bp, Artificial Sequence
  Synthetic
cgtgattuggagagaggtatgtaauga

SEQ ID NO: 9210 - DNA, 25 bp, Artificial Sequence
  Synthetic
tcagatcaacucaagagttcuccca

SEQ ID NO: 9211 - DNA, 28 bp, Artificial Sequence
  Synthetic
ggatgttatugcaagacagaattucact

SEQ ID NO: 9212 - DNA, 29 bp, Artificial Sequence
  Synthetic
cagctcatcaagautccacttcttttuaa

SEQ ID NO: 9213 - DNA, 25 bp, Artificial Sequence
  Synthetic
acagaaaccugggtatagccattug

SEQ ID NO: 9214 - DNA, 21 bp, Artificial Sequence
  Synthetic
cuccaacagtucaccaaagcc

SEQ ID NO: 9215 - DNA, 20 bp, Artificial Sequence
  Synthetic
gcgatgaguttgcctgugga

SEQ ID NO: 9216 - DNA, 29 bp, Artificial Sequence
  Synthetic
aaaatgaaacuccagatagcgaatatuct

SEQ ID NO: 9217 - DNA, 22 bp, Artificial Sequence
  Synthetic
aggaatcatucggccactgtuc

SEQ ID NO: 9218 - DNA, 18 bp, Artificial Sequence
  Synthetic
gctcgutcgccuggagac

SEQ ID NO: 9219 - DNA, 29 bp, Artificial Sequence
  Synthetic
gtttctattgaagucacattttccagtuc

SEQ ID NO: 9220 - DNA, 17 bp, Artificial Sequence
  Synthetic
catggaccuggcuggga

SEQ ID NO: 9221 - DNA, 17 bp, Artificial Sequence
  Synthetic
cgggugcactgcttcug

SEQ ID NO: 9222 - DNA, 20 bp, Artificial Sequence
  Synthetic
ggagtgguactgcgaauggt

SEQ ID NO: 9223 - DNA, 21 bp, Artificial Sequence
  Synthetic
gcagacgauactggacgauca

SEQ ID NO: 9224 - DNA, 22 bp, Artificial Sequence
  Synthetic
gcagaaaacagcugtctccuca

SEQ ID NO: 9225 - DNA, 27 bp, Artificial Sequence
  Synthetic
tggattctgtcutttcctttccctuag

SEQ ID NO: 9226 - DNA, 20 bp, Artificial Sequence
  Synthetic
tgcacutgaagucggcacaa

SEQ ID NO: 9227 - DNA, 28 bp, Artificial Sequence
  Synthetic
gcctaccagatguttttgacttctgaua

SEQ ID NO: 9228 - DNA, 24 bp, Artificial Sequence
  Synthetic
catttctcccuctccaggaaagut

SEQ ID NO: 9229 - DNA, 21 bp, Artificial Sequence
  Synthetic
gccugtctctuccaacaccag

SEQ ID NO: 9230 - DNA, 17 bp, Artificial Sequence
  Synthetic
gactgggcuccctgucc

SEQ ID NO: 9231 - DNA, 23 bp, Artificial Sequence
  Synthetic
gaagcgtgaaauacgaaggcauc

SEQ ID NO: 9232 - DNA, 19 bp, Artificial Sequence
  Synthetic
cgtcgtccutctcgctgua

SEQ ID NO: 9233 - DNA, 17 bp, Artificial Sequence
  Synthetic
cgcaugcgtgtcugacc

SEQ ID NO: 9234 - DNA, 21 bp, Artificial Sequence
  Synthetic
tccacggaguagagttuccca

SEQ ID NO: 9235 - DNA, 22 bp, Artificial Sequence
  Synthetic
cctgaaaaagggcuaccugacc

SEQ ID NO: 9236 - DNA, 21 bp, Artificial Sequence
  Synthetic
gaacgucaggatcacctucca

SEQ ID NO: 9237 - DNA, 19 bp, Artificial Sequence
  Synthetic
gcctgtcugtcacgcugat

SEQ ID NO: 9238 - DNA, 22 bp, Artificial Sequence
  Synthetic
ggagugaacgctttguccagag

SEQ ID NO: 9239 - DNA, 22 bp, Artificial Sequence
  Synthetic
tgcacttggugatgtgagtcug

SEQ ID NO: 9240 - DNA, 17 bp, Artificial Sequence
  Synthetic
cuccaccaccguggcaa

SEQ ID NO: 9241 - DNA, 17 bp, Artificial Sequence
  Synthetic
cggtgccaccugtgguc

SEQ ID NO: 9242 - DNA, 23 bp, Artificial Sequence
  Synthetic
ggttatcguaccctgttcuccca

SEQ ID NO: 9243 - DNA, 23 bp, Artificial Sequence
  Synthetic
gtccaagaaugcaaagcacaucc

SEQ ID NO: 9244 - DNA, 18 bp, Artificial Sequence
  Synthetic
ccaacuccctctgcuggt

SEQ ID NO: 9245 - DNA, 18 bp, Artificial Sequence
  Synthetic
cccaugaggaggcacguc

SEQ ID NO: 9246 - DNA, 19 bp, Artificial Sequence
  Synthetic
cccauggacctccauccca

SEQ ID NO: 9247 - DNA, 22 bp, Artificial Sequence
  Synthetic
ggaaatgaagccugtggatguc

SEQ ID NO: 9248 - DNA, 19 bp, Artificial Sequence
  Synthetic
gcccuagcccacaggacua

SEQ ID NO: 9249 - DNA, 23 bp, Artificial Sequence
  Synthetic
ctccccgcutatgatacatuccc

SEQ ID NO: 9250 - DNA, 21 bp, Artificial Sequence
  Synthetic
ctggatgacutgctgaggcut

SEQ ID NO: 9251 - DNA, 17 bp, Artificial Sequence
  Synthetic
gugcactugcagcccat

SEQ ID NO: 9252 - DNA, 20 bp, Artificial Sequence
  Synthetic
ctcggacaccacauggguaa

SEQ ID NO: 9253 - DNA, 17 bp, Artificial Sequence
  Synthetic
ctgagcugcccccucac

SEQ ID NO: 9254 - DNA, 26 bp, Artificial Sequence
  Synthetic
gagtttgguaagacacguagaacaca

SEQ ID NO: 9255 - DNA, 20 bp, Artificial Sequence
  Synthetic
gctcccautgcttggatugc

SEQ ID NO: 9256 - DNA, 23 bp, Artificial Sequence
  Synthetic
gggautaagaauggagccaccaa

SEQ ID NO: 9257 - DNA, 19 bp, Artificial Sequence
  Synthetic
cccucccaccaaggttgug

SEQ ID NO: 9258 - DNA, 19 bp, Artificial Sequence
  Synthetic
ctcaggcacaucccgcuaa

SEQ ID NO: 9259 - DNA, 24 bp, Artificial Sequence
  Synthetic
ctcaaggagaugttugccaagaag

SEQ ID NO: 9260 - DNA, 21 bp, Artificial Sequence
  Synthetic
agtccaggagacucacctuca

SEQ ID NO: 9261 - DNA, 19 bp, Artificial Sequence
  Synthetic
tcguccagacccctgucat

SEQ ID NO: 9262 - DNA, 24 bp, Artificial Sequence
  Synthetic
gggagaaagccaauttacttgcua

SEQ ID NO: 9263 - DNA, 26 bp, Artificial Sequence
  Synthetic
ctctggaaaagcucttctugcaaaaa

SEQ ID NO: 9264 - DNA, 17 bp, Artificial Sequence
  Synthetic
gcccugcccacacuact

SEQ ID NO: 9265 - DNA, 20 bp, Artificial Sequence
  Synthetic
accuccaacccuaacaagcc

SEQ ID NO: 9266 - DNA, 17 bp, Artificial Sequence
  Synthetic
cccagauccccgccauc

SEQ ID NO: 9267 - DNA, 20 bp, Artificial Sequence
  Synthetic
tgagcatgacugtgctgucc

SEQ ID NO: 9268 - DNA, 21 bp, Artificial Sequence
  Synthetic
gcagtggcutctacctcugat

SEQ ID NO: 9269 - DNA, 20 bp, Artificial Sequence
  Synthetic
gtttccagugttcccacguc

SEQ ID NO: 9270 - DNA, 20 bp, Artificial Sequence
  Synthetic
ctctccgugctcacagtcuc

SEQ ID NO: 9271 - DNA, 17 bp, Artificial Sequence
  Synthetic
aatggccgugaggccut

SEQ ID NO: 9272 - DNA, 18 bp, Artificial Sequence
  Synthetic
ggaugggaggcggcatua

SEQ ID NO: 9273 - DNA, 20 bp, Artificial Sequence
  Synthetic
tgatggcuggctctgtctug

SEQ ID NO: 9274 - DNA, 19 bp, Artificial Sequence
  Synthetic
cccuacagcccugccaaac

SEQ ID NO: 9275 - DNA, 23 bp, Artificial Sequence
  Synthetic
ggcagcauacaggacaagaucac

SEQ ID NO: 9276 - DNA, 25 bp, Artificial Sequence
  Synthetic
agactataccagucccaagatucca

SEQ ID NO: 9277 - DNA, 28 bp, Artificial Sequence
  Synthetic
ggtttcccaaugtctttattgatgtucc

SEQ ID NO: 9278 - DNA, 18 bp, Artificial Sequence
  Synthetic
tcctagucctggcucgca

SEQ ID NO: 9279 - DNA, 19 bp, Artificial Sequence
  Synthetic
gccagagagcuccttgguc

SEQ ID NO: 9280 - DNA, 17 bp, Artificial Sequence
  Synthetic
ggcugcaggtgcauggt

SEQ ID NO: 9281 - DNA, 19 bp, Artificial Sequence
  Synthetic
cggccucttccctuaccag

SEQ ID NO: 9282 - DNA, 21 bp, Artificial Sequence
  Synthetic
gagutagagttcucccggcat

SEQ ID NO: 9283 - DNA, 20 bp, Artificial Sequence
  Synthetic
cctgccggguataaaagcug

SEQ ID NO: 9284 - DNA, 19 bp, Artificial Sequence
  Synthetic
gtgatggacugggcgguaa

SEQ ID NO: 9285 - DNA, 19 bp, Artificial Sequence
  Synthetic
accttggutgaggccucct

SEQ ID NO: 9286 - DNA, 20 bp, Artificial Sequence
  Synthetic
ttggccucacacgttccuac

SEQ ID NO: 9287 - DNA, 24 bp, Artificial Sequence
  Synthetic
ggccacaucaagatcactgactut

SEQ ID NO: 9288 - DNA, 18 bp, Artificial Sequence
  Synthetic
acccacagcucctcucca

SEQ ID NO: 9289 - DNA, 18 bp, Artificial Sequence
  Synthetic
accctgcugccttcaucc

SEQ ID NO: 9290 - DNA, 18 bp, Artificial Sequence
  Synthetic
ccctgcucccagcactua

SEQ ID NO: 9291 - DNA, 18 bp, Artificial Sequence
  Synthetic
gucgccaacagccucaag

SEQ ID NO: 9292 - DNA, 20 bp, Artificial Sequence
  Synthetic
ccaucctgugagcaccagaa

SEQ ID NO: 9293 - DNA, 22 bp, Artificial Sequence
  Synthetic
cacggtacutcctgcugaagag

SEQ ID NO: 9294 - DNA, 17 bp, Artificial Sequence
  Synthetic
ggccacuggagcccauc

SEQ ID NO: 9295 - DNA, 19 bp, Artificial Sequence
  Synthetic
gctuggaggactccuggac

SEQ ID NO: 9296 - DNA, 21 bp, Artificial Sequence
  Synthetic
cgtcctccauggcaacuacac

SEQ ID NO: 9297 - DNA, 21 bp, Artificial Sequence
  Synthetic
ggtatgacucgttgcccucct

SEQ ID NO: 9298 - DNA, 22 bp, Artificial Sequence
  Synthetic
cauccaggagggtcugaaagat

SEQ ID NO: 9299 - DNA, 20 bp, Artificial Sequence
  Synthetic
catccccacccutcacucac

SEQ ID NO: 9300 - DNA, 19 bp, Artificial Sequence
  Synthetic
caccuggctccttuccaca

SEQ ID NO: 9301 - DNA, 18 bp, Artificial Sequence
  Synthetic
cuctggtuggaggccact

SEQ ID NO: 9302 - DNA, 21 bp, Artificial Sequence
  Synthetic
gtgguggaatctgguaagggt

SEQ ID NO: 9303 - DNA, 20 bp, Artificial Sequence
  Synthetic
gacagugagggccatgtcuc

SEQ ID NO: 9304 - DNA, 19 bp, Artificial Sequence
  Synthetic
ggaccgucagcaagaucct

SEQ ID NO: 9305 - DNA, 19 bp, Artificial Sequence
  Synthetic
gcagggcaacccutcacuc

SEQ ID NO: 9306 - DNA, 22 bp, Artificial Sequence
  Synthetic
gcgccacuctctacttuacagt

SEQ ID NO: 9307 - DNA, 19 bp, Artificial Sequence
  Synthetic
ccgctgugggagaaagcuc

SEQ ID NO: 9308 - DNA, 20 bp, Artificial Sequence
  Synthetic
gagctuctcgttcucagcgt

SEQ ID NO: 9309 - DNA, 19 bp, Artificial Sequence
  Synthetic
ctgggtccugggcaagaut

SEQ ID NO: 9310 - DNA, 21 bp, Artificial Sequence
  Synthetic
cttctcacugggcucaggaac

SEQ ID NO: 9311 - DNA, 17 bp, Artificial Sequence
  Synthetic
gguctctugcgccggaa

SEQ ID NO: 9312 - DNA, 19 bp, Artificial Sequence
  Synthetic
ccatcgccuctaagcccut

SEQ ID NO: 9313 - DNA, 19 bp, Artificial Sequence
  Synthetic
ctgccgacutcttguccga

SEQ ID NO: 9314 - DNA, 17 bp, Artificial Sequence
  Synthetic
cugggaguggccccaat

SEQ ID NO: 9315 - DNA, 18 bp, Artificial Sequence
  Synthetic
ggcaggugccaccugaag

SEQ ID NO: 9316 - DNA, 20 bp, Artificial Sequence
  Synthetic
gaaggtccuagtgcctcugg

SEQ ID NO: 9317 - DNA, 23 bp, Artificial Sequence
  Synthetic
caacauccagcagguagagagaa

SEQ ID NO: 9318 - DNA, 21 bp, Artificial Sequence
  Synthetic
cccacgagcuctgtagctcua

SEQ ID NO: 9319 - DNA, 19 bp, Artificial Sequence
  Synthetic
caagtuagggcccggacug

SEQ ID NO: 9320 - DNA, 17 bp, Artificial Sequence
  Synthetic
cagtcaggccuggcuca

SEQ ID NO: 9321 - DNA, 17 bp, Artificial Sequence
  Synthetic
gggaatgcuggcgaugg

SEQ ID NO: 9322 - DNA, 18 bp, Artificial Sequence
  Synthetic
ccatctcccugcccauct

SEQ ID NO: 9323 - DNA, 17 bp, Artificial Sequence
  Synthetic
cgcccacugctgctcuc

SEQ ID NO: 9324 - DNA, 23 bp, Artificial Sequence
  Synthetic
ctgtcagaaguggactucgaaga

SEQ ID NO: 9325 - DNA, 18 bp, Artificial Sequence
  Synthetic
tgcccaaugctcgccuac

SEQ ID NO: 9326 - DNA, 20 bp, Artificial Sequence
  Synthetic
ccugcacagguacagaagcc

SEQ ID NO: 9327 - DNA, 19 bp, Artificial Sequence
  Synthetic
gacuccgagacaggcucac

SEQ ID NO: 9328 - DNA, 18 bp, Artificial Sequence
  Synthetic
ccttgtcgucccccugga

SEQ ID NO: 9329 - DNA, 22 bp, Artificial Sequence
  Synthetic
tgaccctaugctctgtguggat

SEQ ID NO: 9330 - DNA, 17 bp, Artificial Sequence
  Synthetic
tctgtgguccggcucct

SEQ ID NO: 9331 - DNA, 18 bp, Artificial Sequence
  Synthetic
gcctccagguccaacgug

SEQ ID NO: 9332 - DNA, 20 bp, Artificial Sequence
  Synthetic
caaatgtacuccggcagcuc

SEQ ID NO: 9333 - DNA, 17 bp, Artificial Sequence
  Synthetic
accaugagcggcgtguc

SEQ ID NO: 9334 - DNA, 18 bp, Artificial Sequence
  Synthetic
gccttccugcccttugct

SEQ ID NO: 9335 - DNA, 25 bp, Artificial Sequence
  Synthetic
cagagtgagaucttcacagttucca

SEQ ID NO: 9336 - DNA, 18 bp, Artificial Sequence
  Synthetic
tgtccgugagtcccccut

SEQ ID NO: 9337 - DNA, 26 bp, Artificial Sequence
  Synthetic
ggtagaugagtagaaaguccccagag

SEQ ID NO: 9338 - DNA, 22 bp, Artificial Sequence
  Synthetic
catcatctucagccacaugcac

SEQ ID NO: 9339 - DNA, 21 bp, Artificial Sequence
  Synthetic
gagcugaggacaagggctuac

SEQ ID NO: 9340 - DNA, 22 bp, Artificial Sequence
  Synthetic
caacactccucaagaacuggca

SEQ ID NO: 9341 - DNA, 20 bp, Artificial Sequence
  Synthetic
ctgagcccuggacccttuac

SEQ ID NO: 9342 - DNA, 20 bp, Artificial Sequence
  Synthetic
gcccctcgcugtcttctcua

SEQ ID NO: 9343 - DNA, 20 bp, Artificial Sequence
  Synthetic
cgcacggcucaatctucaca

SEQ ID NO: 9344 - DNA, 24 bp, Artificial Sequence
  Synthetic
gaacauggaggcgagaagaaaaug

SEQ ID NO: 9345 - DNA, 17 bp, Artificial Sequence
  Synthetic
cucagaccagcgccuga

SEQ ID NO: 9346 - DNA, 23 bp, Artificial Sequence
  Synthetic
ggagucaccaggaaccgtttaug

SEQ ID NO: 9347 - DNA, 22 bp, Artificial Sequence
  Synthetic
ccctctcccuttcctctgtuct

SEQ ID NO: 9348 - DNA, 23 bp, Artificial Sequence
  Synthetic
gcatggcaucgaagguaagaaag

SEQ ID NO: 9349 - DNA, 21 bp, Artificial Sequence
  Synthetic
ccagggagucccacagtgtua

SEQ ID NO: 9350 - DNA, 24 bp, Artificial Sequence
  Synthetic
catccugggtctcaauaaagagca

SEQ ID NO: 9351 - DNA, 21 bp, Artificial Sequence
  Synthetic
gtgggaguccccagaagagut

SEQ ID NO: 9352 - DNA, 17 bp, Artificial Sequence
  Synthetic
agcccuagcctcuccca

SEQ ID NO: 9353 - DNA, 18 bp, Artificial Sequence
  Synthetic
gcccagucctgcugagat

SEQ ID NO: 9354 - DNA, 19 bp, Artificial Sequence
  Synthetic
cuctgcauaaccgggacct

SEQ ID NO: 9355 - DNA, 20 bp, Artificial Sequence
  Synthetic
tgctggaguacgtgaagugg

SEQ ID NO: 9356 - DNA, 17 bp, Artificial Sequence
  Synthetic
gggcuggcatcccttug

SEQ ID NO: 9357 - DNA, 24 bp, Artificial Sequence
  Synthetic
gcatgccaaugtggtggtttauag

SEQ ID NO: 9358 - DNA, 21 bp, Artificial Sequence
  Synthetic
gctggtgtcaugctggtacug

SEQ ID NO: 9359 - DNA, 20 bp, Artificial Sequence
  Synthetic
gtguggagaccagggttuga

SEQ ID NO: 9360 - DNA, 22 bp, Artificial Sequence
  Synthetic
ccccttcctutgtctgccttua

SEQ ID NO: 9361 - DNA, 22 bp, Artificial Sequence
  Synthetic
ggttctgagacccugtgtgtug

SEQ ID NO: 9362 - DNA, 18 bp, Artificial Sequence
  Synthetic
cccaccgaugaccccauc

SEQ ID NO: 9363 - DNA, 18 bp, Artificial Sequence
  Synthetic
gcccucgaggatguccac

SEQ ID NO: 9364 - DNA, 21 bp, Artificial Sequence
  Synthetic
acagcaggcacuagggacuaa

SEQ ID NO: 9365 - DNA, 24 bp, Artificial Sequence
  Synthetic
ggctaggctcuacctcttcctuac

SEQ ID NO: 9366 - DNA, 23 bp, Artificial Sequence
  Synthetic
tcaccaaagtuttcccatcagut

SEQ ID NO: 9367 - DNA, 28 bp, Artificial Sequence
  Synthetic
cccaggtgtcucaaaatctatttctucc

SEQ ID NO: 9368 - DNA, 23 bp, Artificial Sequence
  Synthetic
gcagcagugcactaaauaacgag

SEQ ID NO: 9369 - DNA, 27 bp, Artificial Sequence
  Synthetic
gggttttaaauaccaggagacaugcaa

SEQ ID NO: 9370 - DNA, 23 bp, Artificial Sequence
  Synthetic
gggcatttuaagaaacgctcucg

SEQ ID NO: 9371 - DNA, 23 bp, Artificial Sequence
  Synthetic
tcttagccuccccatccttguag

SEQ ID NO: 9372 - DNA, 25 bp, Artificial Sequence
  Synthetic
tcgtcagtccuttcgtaacacaaut

SEQ ID NO: 9373 - DNA, 26 bp, Artificial Sequence
  Synthetic
ccagagtuaagggctctataatcuca

SEQ ID NO: 9374 - DNA, 19 bp, Artificial Sequence
  Synthetic
cgaugagggagguggcaga

SEQ ID NO: 9375 - DNA, 20 bp, Artificial Sequence
  Synthetic
cctgggtaugctccccatut

SEQ ID NO: 9376 - DNA, 24 bp, Artificial Sequence
  Synthetic
aaagugatgaugaggagcaaggac

SEQ ID NO: 9377 - DNA, 22 bp, Artificial Sequence
  Synthetic
gtgaggautcaggtguggaact

SEQ ID NO: 9378 - DNA, 23 bp, Artificial Sequence
  Synthetic
gaggaggguctagatcctctuga

SEQ ID NO: 9379 - DNA, 21 bp, Artificial Sequence
  Synthetic
gtgcttcagaguctccgtuga

SEQ ID NO: 9380 - DNA, 22 bp, Artificial Sequence
  Synthetic
tccgccaaaagaucccagatuc

SEQ ID NO: 9381 - DNA, 22 bp, Artificial Sequence
  Synthetic
gctgguggaagaaccttctcua

SEQ ID NO: 9382 - DNA, 26 bp, Artificial Sequence
  Synthetic
ccatccagugacaaatcccatuacat

SEQ ID NO: 9383 - DNA, 25 bp, Artificial Sequence
  Synthetic
gtagtaagatcucctgggctcttuc

SEQ ID NO: 9384 - DNA, 22 bp, Artificial Sequence
  Synthetic
ccaaagccacaugcctttgtug

SEQ ID NO: 9385 - DNA, 24 bp, Artificial Sequence
  Synthetic
taattuccagaagggcaaguccat

SEQ ID NO: 9386 - DNA, 20 bp, Artificial Sequence
  Synthetic
aaagcatcucgctccagugt

SEQ ID NO: 9387 - DNA, 31 bp, Artificial Sequence
  Synthetic
actaaatatacaatguttcccatggccauaa

SEQ ID NO: 9388 - DNA, 21 bp, Artificial Sequence
  Synthetic
gtgauaggagcccatguacgg

SEQ ID NO: 9389 - DNA, 23 bp, Artificial Sequence
  Synthetic
cgcccuccgttactactaugaca

SEQ ID NO: 9390 - DNA, 23 bp, Artificial Sequence
  Synthetic
gtttcucacctggattugcaagg

SEQ ID NO: 9391 - DNA, 26 bp, Artificial Sequence
  Synthetic
caggcattatguctgaagtcacauca

SEQ ID NO: 9392 - DNA, 17 bp, Artificial Sequence
  Synthetic
gcucttgcugggaggca

SEQ ID NO: 9393 - DNA, 27 bp, Artificial Sequence
  Synthetic
cgctttttgttutgttttgtagcucct

SEQ ID NO: 9394 - DNA, 22 bp, Artificial Sequence
  Synthetic
gtgcttctccuccatgtagcug

SEQ ID NO: 9395 - DNA, 21 bp, Artificial Sequence
  Synthetic
agtcgauggagacatgctcut

SEQ ID NO: 9396 - DNA, 27 bp, Artificial Sequence
  Synthetic
aaccctttcctuaccttaatagtgcug

SEQ ID NO: 9397 - DNA, 25 bp, Artificial Sequence
  Synthetic
acttcattucccagactuagcacaa

SEQ ID NO: 9398 - DNA, 19 bp, Artificial Sequence
  Synthetic
gccaaguccacgaggtugt

SEQ ID NO: 9399 - DNA, 21 bp, Artificial Sequence
  Synthetic
cagaagttgcugcagtggtuc

SEQ ID NO: 9400 - DNA, 23 bp, Artificial Sequence
  Synthetic
agcctgcttugagaacagaaugg

SEQ ID NO: 9401 - DNA, 23 bp, Artificial Sequence
  Synthetic
caagagtgugaatgaggcacuca

SEQ ID NO: 9402 - DNA, 21 bp, Artificial Sequence
  Synthetic
agcgctctguatcccctctua

SEQ ID NO: 9403 - DNA, 24 bp, Artificial Sequence
  Synthetic
gagctggugttcctctaugacaag

SEQ ID NO: 9404 - DNA, 22 bp, Artificial Sequence
  Synthetic
gtgcctctcugtggagtgttua

SEQ ID NO: 9405 - DNA, 21 bp, Artificial Sequence
  Synthetic
gctgtguggtcttcacaucgt

SEQ ID NO: 9406 - DNA, 21 bp, Artificial Sequence
  Synthetic
actgctgcuctgaggaacauc

SEQ ID NO: 9407 - DNA, 30 bp, Artificial Sequence
  Synthetic
gccgtgtttcugagctagaagattttatua

SEQ ID NO: 9408 - DNA, 27 bp, Artificial Sequence
  Synthetic
tctgatataggagutgatggcttccut

SEQ ID NO: 9409 - DNA, 25 bp, Artificial Sequence
  Synthetic
gagaatggaagucctctcauaaccc

SEQ ID NO: 9410 - DNA, 21 bp, Artificial Sequence
  Synthetic
ggtcggcugtcataaaggcut

SEQ ID NO: 9411 - DNA, 23 bp, Artificial Sequence
  Synthetic
gtccttcccutctgtttagctuc

SEQ ID NO: 9412 - DNA, 21 bp, Artificial Sequence
  Synthetic
caccacgcugctgtcatagua

SEQ ID NO: 9413 - DNA, 21 bp, Artificial Sequence
  Synthetic
ggagucccagatucaggaagg

SEQ ID NO: 9414 - DNA, 20 bp, Artificial Sequence
  Synthetic
gggaagacugccactgacug

SEQ ID NO: 9415 - DNA, 22 bp, Artificial Sequence
  Synthetic
cgtgtgtgaucgttttggctut

SEQ ID NO: 9416 - DNA, 25 bp, Artificial Sequence
  Synthetic
cctgagaaaggaggugtagucacat

SEQ ID NO: 9417 - DNA, 22 bp, Artificial Sequence
  Synthetic
gacagaaccutcagctgtgugt

SEQ ID NO: 9418 - DNA, 22 bp, Artificial Sequence
  Synthetic
cucaagtcugcaaacccagaga

SEQ ID NO: 9419 - DNA, 27 bp, Artificial Sequence
  Synthetic
tgtacttccttcutattggatgcctug

SEQ ID NO: 9420 - DNA, 25 bp, Artificial Sequence
  Synthetic
tggcauagagcacaattttcuggaa

SEQ ID NO: 9421 - DNA, 21 bp, Artificial Sequence
  Synthetic
cttgtcccutggcauaccaca

SEQ ID NO: 9422 - DNA, 19 bp, Artificial Sequence
  Synthetic
cgctcagguccaactucga

SEQ ID NO: 9423 - DNA, 23 bp, Artificial Sequence
  Synthetic
acctctttgucgttgacctucac

SEQ ID NO: 9424 - DNA, 21 bp, Artificial Sequence
  Synthetic
ggaguaccagcccuaccagag

SEQ ID NO: 9425 - DNA, 20 bp, Artificial Sequence
  Synthetic
cgccuccgcaatccucaaaa

SEQ ID NO: 9426 - DNA, 17 bp, Artificial Sequence
  Synthetic
gccgcagugccauaagc

SEQ ID NO: 9427 - DNA, 18 bp, Artificial Sequence
  Synthetic
acgtggcgugaggaacuc

SEQ ID NO: 9428 - DNA, 21 bp, Artificial Sequence
  Synthetic
cctctcaccugtgctaccuca

SEQ ID NO: 9429 - DNA, 21 bp, Artificial Sequence
  Synthetic
ctcgtagagcucaggcactut

SEQ ID NO: 9430 - DNA, 25 bp, Artificial Sequence
  Synthetic
gctcctctgugtctaactcaaguct

SEQ ID NO: 9431 - DNA, 23 bp, Artificial Sequence
  Synthetic
tcattgatgcuggacaggaagut

SEQ ID NO: 9432 - DNA, 21 bp, Artificial Sequence
  Synthetic
gtacattccgcucacggauct

SEQ ID NO: 9433 - DNA, 18 bp, Artificial Sequence
  Synthetic
ccttgcucccctggtgug

SEQ ID NO: 9434 - DNA, 22 bp, Artificial Sequence
  Synthetic
caattggugcacctctttucca

SEQ ID NO: 9435 - DNA, 18 bp, Artificial Sequence
  Synthetic
ggugccctguacacggaa

SEQ ID NO: 9436 - DNA, 23 bp, Artificial Sequence
  Synthetic
cagacccugaggatactgtgcua

SEQ ID NO: 9437 - DNA, 22 bp, Artificial Sequence
  Synthetic
atgaaaaaggacgccaugcauc

SEQ ID NO: 9438 - DNA, 21 bp, Artificial Sequence
  Synthetic
tcacucgggatccucaaggag

SEQ ID NO: 9439 - DNA, 21 bp, Artificial Sequence
  Synthetic
cagctcacggaaguacagcut

SEQ ID NO: 9440 - DNA, 18 bp, Artificial Sequence
  Synthetic
accucgccacggtcttug

SEQ ID NO: 9441 - DNA, 19 bp, Artificial Sequence
  Synthetic
acctcugtcaggucagggt

SEQ ID NO: 9442 - DNA, 26 bp, Artificial Sequence
  Synthetic
ggtacattuctttcgtgtucaaacca

SEQ ID NO: 9443 - DNA, 29 bp, Artificial Sequence
  Synthetic
agccagtgatttucttttgaacatttcuc

SEQ ID NO: 9444 - DNA, 21 bp, Artificial Sequence
  Synthetic
cctaccaguctgugcagcaat

SEQ ID NO: 9445 - DNA, 25 bp, Artificial Sequence
  Synthetic
ctcaugagaaccttatguggaaccc

SEQ ID NO: 9446 - DNA, 25 bp, Artificial Sequence
  Synthetic
ggaugagaaagguaagcctacatua

SEQ ID NO: 9447 - DNA, 22 bp, Artificial Sequence
  Synthetic
tctcccccucttcttagcctug

SEQ ID NO: 9448 - DNA, 31 bp, Artificial Sequence
  Synthetic
tccaagagttttugacatgatgtattcauct

SEQ ID NO: 9449 - DNA, 25 bp, Artificial Sequence
  Synthetic
tcagtgatcgccucttgtgaauaaa

SEQ ID NO: 9450 - DNA, 30 bp, Artificial Sequence
  Synthetic
agtgtttcttgcugtatgttcggtattuat

SEQ ID NO: 9451 - DNA, 27 bp, Artificial Sequence
  Synthetic
ttgatacatgaaautcaacagcccuct

SEQ ID NO: 9452 - DNA, 22 bp, Artificial Sequence
  Synthetic
agaattcttccugccacgugaa

SEQ ID NO: 9453 - DNA, 31 bp, Artificial Sequence
  Synthetic
acacacaaaauacggttataaaagacugact

SEQ ID NO: 9454 - DNA, 29 bp, Artificial Sequence
  Synthetic
gagtcttcttaaautgagctgctuaaaaa

SEQ ID NO: 9455 - DNA, 25 bp, Artificial Sequence
  Synthetic
gcaagaaugagcaggatagucaaac

SEQ ID NO: 9456 - DNA, 22 bp, Artificial Sequence
  Synthetic
caagcccacugagactagucaa

SEQ ID NO: 9457 - DNA, 26 bp, Artificial Sequence
  Synthetic
acaaaaagtagacugacctgguagga

SEQ ID NO: 9458 - DNA, 21 bp, Artificial Sequence
  Synthetic
ggucaacaaagcagctauggg

SEQ ID NO: 9459 - DNA, 28 bp, Artificial Sequence
  Synthetic
atttggttttcuctcttagcaacucact

SEQ ID NO: 9460 - DNA, 21 bp, Artificial Sequence
  Synthetic
gtacucagccggcagcauaat

SEQ ID NO: 9461 - DNA, 31 bp, Artificial Sequence
  Synthetic
agttaccaaagtuacagaaggattccattua

SEQ ID NO: 9462 - DNA, 31 bp, Artificial Sequence
  Synthetic
ttagatttatgatgaauatccttgggcagua

SEQ ID NO: 9463 - DNA, 28 bp, Artificial Sequence
  Synthetic
tgtacataaatugcactgttgucagagt

SEQ ID NO: 9464 - DNA, 22 bp, Artificial Sequence
  Synthetic
ggcagaccuaatgcatcuggga

SEQ ID NO: 9465 - DNA, 23 bp, Artificial Sequence
  Synthetic
cgcatactgtucattggaggcut

SEQ ID NO: 9466 - DNA, 27 bp, Artificial Sequence
  Synthetic
tccttagttcaautggtgatttcugct

SEQ ID NO: 9467 - DNA, 23 bp, Artificial Sequence
  Synthetic
gacactcaugaaacctgcaccua

SEQ ID NO: 9468 - DNA, 20 bp, Artificial Sequence
  Synthetic
cgcagagaucggccctacua

SEQ ID NO: 9469 - DNA, 28 bp, Artificial Sequence
  Synthetic
caaggaataaucataatgttguggccaa

SEQ ID NO: 9470 - DNA, 22 bp, Artificial Sequence
  Synthetic
gggacuaaccaatggtggugat

SEQ ID NO: 9471 - DNA, 24 bp, Artificial Sequence
  Synthetic
ccaactcccauattgaggtuaggg

SEQ ID NO: 9472 - DNA, 22 bp, Artificial Sequence
  Synthetic
gagggcgacagaauatgcagua

SEQ ID NO: 9473 - DNA, 21 bp, Artificial Sequence
  Synthetic
caugccgattgugcacacaaa

SEQ ID NO: 9474 - DNA, 20 bp, Artificial Sequence
  Synthetic
tcuctcagggucaacagcca

SEQ ID NO: 9475 - DNA, 24 bp, Artificial Sequence
  Synthetic
gugagcaugcaaaaggagaacaag

SEQ ID NO: 9476 - DNA, 27 bp, Artificial Sequence
  Synthetic
ccctcaaaaaugctggtgauaagagaa

SEQ ID NO: 9477 - DNA, 21 bp, Artificial Sequence
  Synthetic
acaccacagguccctcacaua

SEQ ID NO: 9478 - DNA, 28 bp, Artificial Sequence
  Synthetic
tggctgttgtatutatttctgtctccug

SEQ ID NO: 9479 - DNA, 27 bp, Artificial Sequence
  Synthetic
cccagggtataaaucacgttaagacut

SEQ ID NO: 9480 - DNA, 25 bp, Artificial Sequence
  Synthetic
cctagttgcataugctcggaaagut

SEQ ID NO: 9481 - DNA, 24 bp, Artificial Sequence
  Synthetic
cccgtcugaagcatatgtacuact

SEQ ID NO: 9482 - DNA, 22 bp, Artificial Sequence
  Synthetic
caagtatgauccgtggcagugt

SEQ ID NO: 9483 - DNA, 22 bp, Artificial Sequence
  Synthetic
gcataaagcgggugttcaggua

SEQ ID NO: 9484 - DNA, 24 bp, Artificial Sequence
  Synthetic
cagttcccaucacagggaaugaat

SEQ ID NO: 9485 - DNA, 22 bp, Artificial Sequence
  Synthetic
cccactattugctgccactcuc

SEQ ID NO: 9486 - DNA, 20 bp, Artificial Sequence
  Synthetic
cccuccaaggcagacaccua

SEQ ID NO: 9487 - DNA, 18 bp, Artificial Sequence
  Synthetic
gaagcagcggugctgtug

SEQ ID NO: 9488 - DNA, 26 bp, Artificial Sequence
  Synthetic
gcatgagaaagggugttcagatuact

SEQ ID NO: 9489 - DNA, 26 bp, Artificial Sequence
  Synthetic
gctggtcttccucctcttttattuca

SEQ ID NO: 9490 - DNA, 29 bp, Artificial Sequence
  Synthetic
tgagacttgagtaaugtttgatgtcacut

SEQ ID NO: 9491 - DNA, 27 bp, Artificial Sequence
  Synthetic
ccaggcautattgaacauaagccaaat

SEQ ID NO: 9492 - DNA, 20 bp, Artificial Sequence
  Synthetic
cggaacagtucaccccagua

SEQ ID NO: 9493 - DNA, 31 bp, Artificial Sequence
  Synthetic
tggacaacaaacuaattagcactttucaaaa

SEQ ID NO: 9494 - DNA, 28 bp, Artificial Sequence
  Synthetic
caacagtaaattugcacctcagtaacut

SEQ ID NO: 9495 - DNA, 23 bp, Artificial Sequence
  Synthetic
cggttttgucagaagcaugaact

SEQ ID NO: 9496 - DNA, 22 bp, Artificial Sequence
  Synthetic
ctgggagagugagagggtgtua

SEQ ID NO: 9497 - DNA, 22 bp, Artificial Sequence
  Synthetic
actgcagucctcaagcattuag

SEQ ID NO: 9498 - DNA, 28 bp, Artificial Sequence
  Synthetic
tgtttcttgucagccatgattattcugt

SEQ ID NO: 9499 - DNA, 25 bp, Artificial Sequence
  Synthetic
gccagaaaucaccctcgaaauaagg

SEQ ID NO: 9500 - DNA, 25 bp, Artificial Sequence
  Synthetic
aaaaauaagagcagcctgaguaggg

SEQ ID NO: 9501 - DNA, 20 bp, Artificial Sequence
  Synthetic
tggccagaaaucttgccgut

SEQ ID NO: 9502 - DNA, 22 bp, Artificial Sequence
  Synthetic
cttggagaguttacgugcacct

SEQ ID NO: 9503 - DNA, 22 bp, Artificial Sequence
  Synthetic
gctggttgtugctctcatcauc

SEQ ID NO: 9504 - DNA, 18 bp, Artificial Sequence
  Synthetic
gcugcagcaccgacuaca

SEQ ID NO: 9505 - DNA, 18 bp, Artificial Sequence
  Synthetic
gttggctgutggccagut

SEQ ID NO: 9506 - DNA, 19 bp, Artificial Sequence
  Synthetic
cagaugcccccgatgacuc

SEQ ID NO: 9507 - DNA, 21 bp, Artificial Sequence
  Synthetic
gcatcccagacugtagtugct

SEQ ID NO: 9508 - DNA, 23 bp, Artificial Sequence
  Synthetic
actctaauccacaacccauccct

SEQ ID NO: 9509 - DNA, 23 bp, Artificial Sequence
  Synthetic
gcctgcatuggattcatgttcug

SEQ ID NO: 9510 - DNA, 20 bp, Artificial Sequence
  Synthetic
ggatgcagcaucacaugcaa

SEQ ID NO: 9511 - DNA, 22 bp, Artificial Sequence
  Synthetic
cccatctgtugctgaaggaguc

SEQ ID NO: 9512 - DNA, 25 bp, Artificial Sequence
  Synthetic
ccagaattcaaugctttctcagcut

SEQ ID NO: 9513 - DNA, 25 bp, Artificial Sequence
  Synthetic
tgctcccaaaauactacaaggtguc

SEQ ID NO: 9514 - DNA, 18 bp, Artificial Sequence
  Synthetic
ggctuggcctgtgguaga

SEQ ID NO: 9515 - DNA, 20 bp, Artificial Sequence
  Synthetic
gtcccucacacctacaccug

SEQ ID NO: 9516 - DNA, 24 bp, Artificial Sequence
  Synthetic
cctcttcgucctcctcatcugaat

SEQ ID NO: 9517 - DNA, 22 bp, Artificial Sequence
  Synthetic
cuatggcccucaacaggagaag

SEQ ID NO: 9518 - DNA, 26 bp, Artificial Sequence
  Synthetic
gagtgaaagaugagtcagagucagag

SEQ ID NO: 9519 - DNA, 25 bp, Artificial Sequence
  Synthetic
ctaccctactuattcacccccugaa

SEQ ID NO: 9520 - DNA, 22 bp, Artificial Sequence
  Synthetic
ggtctcucggacttgagtcuct

SEQ ID NO: 9521 - DNA, 23 bp, Artificial Sequence
  Synthetic
gcctatacucgagaggcttaugg

SEQ ID NO: 9522 - DNA, 21 bp, Artificial Sequence
  Synthetic
gtagacaaucccugcggacaa

SEQ ID NO: 9523 - DNA, 24 bp, Artificial Sequence
  Synthetic
ccagttaggtcutatcctggccua

SEQ ID NO: 9524 - DNA, 19 bp, Artificial Sequence
  Synthetic
cctccccaccuccttggua

SEQ ID NO: 9525 - DNA, 26 bp, Artificial Sequence
  Synthetic
tgacatcccugaaaagctttgatuca

SEQ ID NO: 9526 - DNA, 22 bp, Artificial Sequence
  Synthetic
ttggaagguctccucaaagcag

SEQ ID NO: 9527 - DNA, 22 bp, Artificial Sequence
  Synthetic
tttttagcaguatccgccguca

SEQ ID NO: 9528 - DNA, 21 bp, Artificial Sequence
  Synthetic
ccatcgtgggucttgctctug

SEQ ID NO: 9529 - DNA, 23 bp, Artificial Sequence
  Synthetic
aggcugaagaaaactgccaugaa

SEQ ID NO: 9530 - DNA, 25 bp, Artificial Sequence
  Synthetic
ggtcaagtgtautgacatcccacug

SEQ ID NO: 9531 - DNA, 27 bp, Artificial Sequence
  Synthetic
ccattcaacccuacttccctcatuaag

SEQ ID NO: 9532 - DNA, 21 bp, Artificial Sequence
  Synthetic
tcaggguctctucaggaacca

SEQ ID NO: 9533 - DNA, 22 bp, Artificial Sequence
  Synthetic
tcattgcugccttcaucaggac

SEQ ID NO: 9534 - DNA, 22 bp, Artificial Sequence
  Synthetic
tgagtgggagcaguagtacugg

SEQ ID NO: 9535 - DNA, 24 bp, Artificial Sequence
  Synthetic
tgccttaaccaacuctgttctcug

SEQ ID NO: 9536 - DNA, 22 bp, Artificial Sequence
  Synthetic
cttcaaugaccaccaggtccut

SEQ ID NO: 9537 - DNA, 22 bp, Artificial Sequence
  Synthetic
gatggagguagaaggtcuccca

SEQ ID NO: 9538 - DNA, 21 bp, Artificial Sequence
  Synthetic
cctgagucccagctgtccaua

SEQ ID NO: 9539 - DNA, 24 bp, Artificial Sequence
  Synthetic
tcatcctacucacctttcccucat

SEQ ID NO: 9540 - DNA, 22 bp, Artificial Sequence
  Synthetic
gctgcugttcccuaaagacaca

SEQ ID NO: 9541 - DNA, 21 bp, Artificial Sequence
  Synthetic
gttggacgacgutcacaaugg

SEQ ID NO: 9542 - DNA, 26 bp, Artificial Sequence
  Synthetic
caaactttcucaccatggtttcagut

SEQ ID NO: 9543 - DNA, 26 bp, Artificial Sequence
  Synthetic
tccttttctttcugccttcttaggug

SEQ ID NO: 9544 - DNA, 20 bp, Artificial Sequence
  Synthetic
gctagtcacuggtgcggtuc

SEQ ID NO: 9545 - DNA, 30 bp, Artificial Sequence
  Synthetic
ggctttttggtguttgaattttctgtuaat

SEQ ID NO: 9546 - DNA, 20 bp, Artificial Sequence
  Synthetic
cagctcgutcccgataucca

SEQ ID NO: 9547 - DNA, 30 bp, Artificial Sequence
  Synthetic
ggctccagguaaagaaaataaacattgaut

SEQ ID NO: 9548 - DNA, 23 bp, Artificial Sequence
  Synthetic
cccagcugtattatugacggcat

SEQ ID NO: 9549 - DNA, 22 bp, Artificial Sequence
  Synthetic
cctggacccaaacuacatguct

SEQ ID NO: 9550 - DNA, 19 bp, Artificial Sequence
  Synthetic
gctgcaucacacgctcauc

SEQ ID NO: 9551 - DNA, 21 bp, Artificial Sequence
  Synthetic
gctgaagagcugaggaccuct

SEQ ID NO: 9552 - DNA, 22 bp, Artificial Sequence
  Synthetic
ttgggtgagguccttgacatuc

SEQ ID NO: 9553 - DNA, 21 bp, Artificial Sequence
  Synthetic
ctcctgggutggttgagacut

SEQ ID NO: 9554 - DNA, 24 bp, Artificial Sequence
  Synthetic
cttcagaatctugttggctgcaut

SEQ ID NO: 9555 - DNA, 22 bp, Artificial Sequence
  Synthetic
gctctuccccaacccacattuc

SEQ ID NO: 9556 - DNA, 21 bp, Artificial Sequence
  Synthetic
catggccuaccagagtugcat

SEQ ID NO: 9557 - DNA, 23 bp, Artificial Sequence
  Synthetic
ctaacacgugtgtgtuccaacag

SEQ ID NO: 9558 - DNA, 18 bp, Artificial Sequence
  Synthetic
tcacagguggcctgctuc

SEQ ID NO: 9559 - DNA, 21 bp, Artificial Sequence
  Synthetic
gggcttguttctctgctucca

SEQ ID NO: 9560 - DNA, 19 bp, Artificial Sequence
  Synthetic
gggtggguggttgtcacuc

SEQ ID NO: 9561 - DNA, 26 bp, Artificial Sequence
  Synthetic
gtagaggacuggcagaaaatcctuat

SEQ ID NO: 9562 - DNA, 30 bp, Artificial Sequence
  Synthetic
aaaagtatggaaauaagcctcaaaaaugac

SEQ ID NO: 9563 - DNA, 24 bp, Artificial Sequence
  Synthetic
gtcccaagggutgtttctcttcua

SEQ ID NO: 9564 - DNA, 24 bp, Artificial Sequence
  Synthetic
ccaaagaucaaagagacgaaguct

SEQ ID NO: 9565 - DNA, 20 bp, Artificial Sequence
  Synthetic
gatgccctugtggcctauga

SEQ ID NO: 9566 - DNA, 26 bp, Artificial Sequence
  Synthetic
ggaactccagutctttgtagtguagt

SEQ ID NO: 9567 - DNA, 22 bp, Artificial Sequence
  Synthetic
ttctcttgttugtgccccauct

SEQ ID NO: 9568 - DNA, 22 bp, Artificial Sequence
  Synthetic
atgatgagtccutcagcagcuc

SEQ ID NO: 9569 - DNA, 24 bp, Artificial Sequence
  Synthetic
caattggcccutgaaactgatugt

SEQ ID NO: 9570 - DNA, 23 bp, Artificial Sequence
  Synthetic
tgtctgtccagacucccatctua

SEQ ID NO: 9571 - DNA, 21 bp, Artificial Sequence
  Synthetic
cggagtcccuggatttcacug

SEQ ID NO: 9572 - DNA, 23 bp, Artificial Sequence
  Synthetic
gggcagguagagcttaaatucac

SEQ ID NO: 9573 - DNA, 29 bp, Artificial Sequence
  Synthetic
ttcatatatcaucagaaagggaccugact

SEQ ID NO: 9574 - DNA, 22 bp, Artificial Sequence
  Synthetic
acagctggguagaactcaucca

SEQ ID NO: 9575 - DNA, 21 bp, Artificial Sequence
  Synthetic
ctctgccugaagtcacgucat

SEQ ID NO: 9576 - DNA, 26 bp, Artificial Sequence
  Synthetic
agaaaattcaguagcaccucaagcaa

SEQ ID NO: 9577 - DNA, 27 bp, Artificial Sequence
  Synthetic
caactatgcttucttttctctcguact

SEQ ID NO: 9578 - DNA, 24 bp, Artificial Sequence
  Synthetic
cttcagaauaggctccatguaggg

SEQ ID NO: 9579 - DNA, 26 bp, Artificial Sequence
  Synthetic
ctgccatagagaacauatgagcctut

SEQ ID NO: 9580 - DNA, 22 bp, Artificial Sequence
  Synthetic
agtttgcuaagcacatcugcca

SEQ ID NO: 9581 - DNA, 20 bp, Artificial Sequence
  Synthetic
ccactgugcggatcattucc

SEQ ID NO: 9582 - DNA, 21 bp, Artificial Sequence
  Synthetic
ggguttgtgcauaaggaccag

SEQ ID NO: 9583 - DNA, 23 bp, Artificial Sequence
  Synthetic
cccagcccutatgtgacttgtut

SEQ ID NO: 9584 - DNA, 24 bp, Artificial Sequence
  Synthetic
cgcgaggcaaauagacctuaaact

SEQ ID NO: 9585 - DNA, 28 bp, Artificial Sequence
  Synthetic
gagctatctacuttgtcttttctgugct

SEQ ID NO: 9586 - DNA, 22 bp, Artificial Sequence
  Synthetic
tttgtuccgaagcccaugagat

SEQ ID NO: 9587 - DNA, 23 bp, Artificial Sequence
  Synthetic
gcccagttugaatgccagtcaua

SEQ ID NO: 9588 - DNA, 20 bp, Artificial Sequence
  Synthetic
gctacagcucccucacggat

SEQ ID NO: 9589 - DNA, 24 bp, Artificial Sequence
  Synthetic
ggtaccaaugagagttctcggtut

SEQ ID NO: 9590 - DNA, 25 bp, Artificial Sequence
  Synthetic
catctgagcuggaaaccaatucaaa

SEQ ID NO: 9591 - DNA, 21 bp, Artificial Sequence
  Synthetic
acucccaccaccacagtuaga

SEQ ID NO: 9592 - DNA, 25 bp, Artificial Sequence
  Synthetic
ggaagatgacuggatggaaaacauc

SEQ ID NO: 9593 - DNA, 22 bp, Artificial Sequence
  Synthetic
gcctgtagugctggtcattuct

SEQ ID NO: 9594 - DNA, 17 bp, Artificial Sequence
  Synthetic
tggcggugaaggctuga

SEQ ID NO: 9595 - DNA, 17 bp, Artificial Sequence
  Synthetic
cgctcucccggaugagg

SEQ ID NO: 9596 - DNA, 20 bp, Artificial Sequence
  Synthetic
tcaatacgaggccugcccua

SEQ ID NO: 9597 - DNA, 18 bp, Artificial Sequence
  Synthetic
cuccaccagctucagcgt

SEQ ID NO: 9598 - DNA, 22 bp, Artificial Sequence
  Synthetic
cccaggagcccauctacaucat

SEQ ID NO: 9599 - DNA, 25 bp, Artificial Sequence
  Synthetic
tgggucagaagaaaaggugtattuc

SEQ ID NO: 9600 - DNA, 21 bp, Artificial Sequence
  Synthetic
agggaggguacgtgtgagaut

SEQ ID NO: 9601 - DNA, 25 bp, Artificial Sequence
  Synthetic
acatctgactugatggtgaatgucc

SEQ ID NO: 9602 - DNA, 20 bp, Artificial Sequence
  Synthetic
cagtaccagccucagcctug

SEQ ID NO: 9603 - DNA, 21 bp, Artificial Sequence
  Synthetic
gtgtcacatgugggtgggaut

SEQ ID NO: 9604 - DNA, 23 bp, Artificial Sequence
  Synthetic
ggccttgctuaggatcactacut

SEQ ID NO: 9605 - DNA, 25 bp, Artificial Sequence
  Synthetic
cctgtcagttcugatactgaggaug

SEQ ID NO: 9606 - DNA, 19 bp, Artificial Sequence
  Synthetic
ctcuaagcgccaacccuca

SEQ ID NO: 9607 - DNA, 18 bp, Artificial Sequence
  Synthetic
ctccgccuctcttuggct

SEQ ID NO: 9608 - DNA, 17 bp, Artificial Sequence
  Synthetic
ggcctgggucttgggut

SEQ ID NO: 9609 - DNA, 18 bp, Artificial Sequence
  Synthetic
cggcuggagagagctgug

SEQ ID NO: 9610 - DNA, 25 bp, Artificial Sequence
  Synthetic
cgtagaaatagugctggtacgaguc

SEQ ID NO: 9611 - DNA, 17 bp, Artificial Sequence
  Synthetic
gcaggcugcaagcuggt

SEQ ID NO: 9612 - DNA, 22 bp, Artificial Sequence
  Synthetic
tcccctuccacataaacaugcc

SEQ ID NO: 9613 - DNA, 23 bp, Artificial Sequence
  Synthetic
cagaagcaagugaggtccucaaa

SEQ ID NO: 9614 - DNA, 22 bp, Artificial Sequence
  Synthetic
ccagaggcugagccatagacug

SEQ ID NO: 9615 - DNA, 22 bp, Artificial Sequence
  Synthetic
tcctcccagcugatctgaagut

SEQ ID NO: 9616 - DNA, 21 bp, Artificial Sequence
  Synthetic
agcugacaggcagaccuagat

SEQ ID NO: 9617 - DNA, 21 bp, Artificial Sequence
  Synthetic
cgagggagaucccatcaggut

SEQ ID NO: 9618 - DNA, 22 bp, Artificial Sequence
  Synthetic
gcaggccugattcaatgacuct

SEQ ID NO: 9619 - DNA, 22 bp, Artificial Sequence
  Synthetic
gtcaccuccacaaggatgugaa

SEQ ID NO: 9620 - DNA, 19 bp, Artificial Sequence
  Synthetic
agacgcugggctaucgaag

SEQ ID NO: 9621 - DNA, 20 bp, Artificial Sequence
  Synthetic
tccagggaccutggtaggug

SEQ ID NO: 9622 - DNA, 22 bp, Artificial Sequence
  Synthetic
gctcagtcugcttctcttccut

SEQ ID NO: 9623 - DNA, 19 bp, Artificial Sequence
  Synthetic
ccaguaccaggcagggtug

SEQ ID NO: 9624 - DNA, 19 bp, Artificial Sequence
  Synthetic
gctatuggcagcagcctug

SEQ ID NO: 9625 - DNA, 22 bp, Artificial Sequence
  Synthetic
ccuaattgugagggcagacaga

SEQ ID NO: 9626 - DNA, 29 bp, Artificial Sequence
  Synthetic
gaaguacaacaaagauaacaaaggtagug

SEQ ID NO: 9627 - DNA, 25 bp, Artificial Sequence
  Synthetic
atatcaagtataugggctggcctug

SEQ ID NO: 9628 - DNA, 20 bp, Artificial Sequence
  Synthetic
ccacgcccaguatccaggua

SEQ ID NO: 9629 - DNA, 20 bp, Artificial Sequence
  Synthetic
ccctgggaguggtcaactuc

SEQ ID NO: 9630 - DNA, 18 bp, Artificial Sequence
  Synthetic
ctcuccacagggcacugg

SEQ ID NO: 9631 - DNA, 20 bp, Artificial Sequence
  Synthetic
tgcaaaggagcuctgctuca

SEQ ID NO: 9632 - DNA, 22 bp, Artificial Sequence
  Synthetic
gtcaaagagaucacccgucagt

SEQ ID NO: 9633 - DNA, 22 bp, Artificial Sequence
  Synthetic
agaaggcttccuctaccaccut

SEQ ID NO: 9634 - DNA, 26 bp, Artificial Sequence
  Synthetic
tgtgacttcagcuacgtctctgaaua

SEQ ID NO: 9635 - DNA, 21 bp, Artificial Sequence
  Synthetic
ctgtgucccaagaccctgaug

SEQ ID NO: 9636 - DNA, 29 bp, Artificial Sequence
  Synthetic
gttctcaagtctguctctctgtgttatut

SEQ ID NO: 9637 - DNA, 27 bp, Artificial Sequence
  Synthetic
acagctuaaacagaaagtcaugaacca

SEQ ID NO: 9638 - DNA, 17 bp, Artificial Sequence
  Synthetic
gcugggcagcgtgtuct

SEQ ID NO: 9639 - DNA, 21 bp, Artificial Sequence
  Synthetic
ggagcgccugataatccaguc

SEQ ID NO: 9640 - DNA, 21 bp, Artificial Sequence
  Synthetic
ccgtcactucacgtgaggtua

SEQ ID NO: 9641 - DNA, 18 bp, Artificial Sequence
  Synthetic
ggtgcgugcgctctuaga

SEQ ID NO: 9642 - DNA, 20 bp, Artificial Sequence
  Synthetic
gcgcacguccttcttctcut

SEQ ID NO: 9643 - DNA, 22 bp, Artificial Sequence
  Synthetic
gcugcagcaguaaagaacttuc

SEQ ID NO: 9644 - DNA, 21 bp, Artificial Sequence
  Synthetic
tgtctgtcugtctgccugact

SEQ ID NO: 9645 - DNA, 19 bp, Artificial Sequence
  Synthetic
agccaaugggaaggcctug

SEQ ID NO: 9646 - DNA, 28 bp, Artificial Sequence
  Synthetic
ctcaagcugcgaaaacataatagaaaug

SEQ ID NO: 9647 - DNA, 23 bp, Artificial Sequence
  Synthetic
gccagatgacagucacaagacut

SEQ ID NO: 9648 - DNA, 25 bp, Artificial Sequence
  Synthetic
agccagaaagggccuatuaaaacag

SEQ ID NO: 9649 - DNA, 25 bp, Artificial Sequence
  Synthetic
ccaagtgaaaautggagactucggt

SEQ ID NO: 9650 - DNA, 22 bp, Artificial Sequence
  Synthetic
cactggccuttatgacccuaga

SEQ ID NO: 9651 - DNA, 24 bp, Artificial Sequence
  Synthetic
agtggagguaaccacatagcugat

SEQ ID NO: 9652 - DNA, 21 bp, Artificial Sequence
  Synthetic
atagttcaugcagcgggucat

SEQ ID NO: 9653 - DNA, 22 bp, Artificial Sequence
  Synthetic
ggctgagaaguttgtagguggt

SEQ ID NO: 9654 - DNA, 21 bp, Artificial Sequence
  Synthetic
ccuagacagcaccgtaauggg

SEQ ID NO: 9655 - DNA, 25 bp, Artificial Sequence
  Synthetic
cagcttggcuaaacttgacctttut

SEQ ID NO: 9656 - DNA, 21 bp, Artificial Sequence
  Synthetic
tgttccacuggcuccagaaac

SEQ ID NO: 9657 - DNA, 26 bp, Artificial Sequence
  Synthetic
tctattctgggacccugatggatuac

SEQ ID NO: 9658 - DNA, 26 bp, Artificial Sequence
  Synthetic
tttagcaugaagctgatgttauccgt

SEQ ID NO: 9659 - DNA, 23 bp, Artificial Sequence
  Synthetic
actttcagaucgaggugcagaag

SEQ ID NO: 9660 - DNA, 22 bp, Artificial Sequence
  Synthetic
gtaatgatgggcauctgctgug

SEQ ID NO: 9661 - DNA, 25 bp, Artificial Sequence
  Synthetic
cagccacutaagctgauagagacat

SEQ ID NO: 9662 - DNA, 24 bp, Artificial Sequence
  Synthetic
aagattcccagucaccatcactuc

SEQ ID NO: 9663 - DNA, 25 bp, Artificial Sequence
  Synthetic
cctgaaggugaaatacttggcuacc

SEQ ID NO: 9664 - DNA, 20 bp, Artificial Sequence
  Synthetic
agccatcccuagacacucgt

SEQ ID NO: 9665 - DNA, 21 bp, Artificial Sequence
  Synthetic
cctccctgugtagtagcctuc

SEQ ID NO: 9666 - DNA, 22 bp, Artificial Sequence
  Synthetic
gatggtgcgauttggagcauac

SEQ ID NO: 9667 - DNA, 21 bp, Artificial Sequence
  Synthetic
ggccaaatguatccgcctuga

SEQ ID NO: 9668 - DNA, 24 bp, Artificial Sequence
  Synthetic
cctcaagaacacgguttcaucaat

SEQ ID NO: 9669 - DNA, 27 bp, Artificial Sequence
  Synthetic
ttttgtctttagcgcutctctgaagua

SEQ ID NO: 9670 - DNA, 24 bp, Artificial Sequence
  Synthetic
ttgccctgugcttacttacatuca

SEQ ID NO: 9671 - DNA, 22 bp, Artificial Sequence
  Synthetic
gaagggucaggcatcttcucac

SEQ ID NO: 9672 - DNA, 21 bp, Artificial Sequence
  Synthetic
gcatcuacccctggtcugaag

SEQ ID NO: 9673 - DNA, 23 bp, Artificial Sequence
  Synthetic
cucttaagtaggugccacaagca

SEQ ID NO: 9674 - DNA, 23 bp, Artificial Sequence
  Synthetic
gctactgguggttgtcactgaug

SEQ ID NO: 9675 - DNA, 22 bp, Artificial Sequence
  Synthetic
actcttccagauccagggugaa

SEQ ID NO: 9676 - DNA, 26 bp, Artificial Sequence
  Synthetic
tctttattccccacugtcttcucagt

SEQ ID NO: 9677 - DNA, 20 bp, Artificial Sequence
  Synthetic
gtcttccagugccattcgug

SEQ ID NO: 9678 - DNA, 22 bp, Artificial Sequence
  Synthetic
ggtcatcaucacccaccatucc

SEQ ID NO: 9679 - DNA, 23 bp, Artificial Sequence
  Synthetic
aacacgtccugtttccttgtuct

SEQ ID NO: 9680 - DNA, 21 bp, Artificial Sequence
  Synthetic
aggaggccugagaaacuaggt

SEQ ID NO: 9681 - DNA, 22 bp, Artificial Sequence
  Synthetic
catccagatcuagccgaccauc

SEQ ID NO: 9682 - DNA, 28 bp, Artificial Sequence
  Synthetic
tctgtgagugactaaaatgcatuacagg

SEQ ID NO: 9683 - DNA, 20 bp, Artificial Sequence
  Synthetic
ctggccagagccaucaaaug

SEQ ID NO: 9684 - DNA, 22 bp, Artificial Sequence
  Synthetic
ctccttcaacucctggtctcuc

SEQ ID NO: 9685 - DNA, 25 bp, Artificial Sequence
  Synthetic
actcaggctcguattgtaagcatut

SEQ ID NO: 9686 - DNA, 20 bp, Artificial Sequence
  Synthetic
cctctccccuctgacccuac

SEQ ID NO: 9687 - DNA, 24 bp, Artificial Sequence
  Synthetic
gggtatgaguctgaggucagaact

SEQ ID NO: 9688 - DNA, 26 bp, Artificial Sequence
  Synthetic
gatctgtctcuctctgtctcttcugt

SEQ ID NO: 9689 - DNA, 26 bp, Artificial Sequence
  Synthetic
gggagtacuagaaaaggaaaggctua

SEQ ID NO: 9690 - DNA, 26 bp, Artificial Sequence
  Synthetic
cccauaagaaaatcccugaggaagaa

SEQ ID NO: 9691 - DNA, 20 bp, Artificial Sequence
  Synthetic
catcugagcccccaaaccuc

SEQ ID NO: 9692 - DNA, 22 bp, Artificial Sequence
  Synthetic
aacttcuggagagctcccatug

SEQ ID NO: 9693 - DNA, 27 bp, Artificial Sequence
  Synthetic
caacacaguagggagagaacaagatua

SEQ ID NO: 9694 - DNA, 27 bp, Artificial Sequence
  Synthetic
cttaaaccttccuaatttcctgcucca

SEQ ID NO: 9695 - DNA, 28 bp, Artificial Sequence
  Synthetic
agcaagagacttaucactttagccttut

SEQ ID NO: 9696 - DNA, 28 bp, Artificial Sequence
  Synthetic
ctgtgggtugaaaactctagcuaaagaa

SEQ ID NO: 9697 - DNA, 27 bp, Artificial Sequence
  Synthetic
cagtattacguattgcaaaugcaggag

SEQ ID NO: 9698 - DNA, 23 bp, Artificial Sequence
  Synthetic
gaagaaccugagtggaguggaat

SEQ ID NO: 9699 - DNA, 22 bp, Artificial Sequence
  Synthetic
cctcacccuggatctctttucc

SEQ ID NO: 9700 - DNA, 22 bp, Artificial Sequence
  Synthetic
gcugccagcacuaaggaaagag

SEQ ID NO: 9701 - DNA, 28 bp, Artificial Sequence
  Synthetic
cagutcaatcagtauaaaacggaagcag

SEQ ID NO: 9702 - DNA, 20 bp, Artificial Sequence
  Synthetic
agtagtcggugctgggauct

SEQ ID NO: 9703 - DNA, 22 bp, Artificial Sequence
  Synthetic
caagacugatgccaguagcact

SEQ ID NO: 9704 - DNA, 21 bp, Artificial Sequence
  Synthetic
ctguaagcactgugaggagca

SEQ ID NO: 9705 - DNA, 21 bp, Artificial Sequence
  Synthetic
gggaccgguataaagcgguag

SEQ ID NO: 9706 - DNA, 30 bp, Artificial Sequence
  Synthetic
gaaugaatgaatatagttugcagccagaat

SEQ ID NO: 9707 - DNA, 25 bp, Artificial Sequence
  Synthetic
caggaacagccutgaaaatgtctut

SEQ ID NO: 9708 - DNA, 21 bp, Artificial Sequence
  Synthetic
cacaaaccugacttccuccga

SEQ ID NO: 9709 - DNA, 24 bp, Artificial Sequence
  Synthetic
tgaacctcuccactgagatucaca

SEQ ID NO: 9710 - DNA, 27 bp, Artificial Sequence
  Synthetic
tcaggatgauaaaacccatctctgcua

SEQ ID NO: 9711 - DNA, 21 bp, Artificial Sequence
  Synthetic
gtgtggugctgaaacagugag

SEQ ID NO: 9712 - DNA, 25 bp, Artificial Sequence
  Synthetic
cgtctccatauccaatgcatcgaua

SEQ ID NO: 9713 - DNA, 23 bp, Artificial Sequence
  Synthetic
tgacacatuggttctgagaugcc

SEQ ID NO: 9714 - DNA, 27 bp, Artificial Sequence
  Synthetic
accatgttgttutctctgttgcauaga

SEQ ID NO: 9715 - DNA, 21 bp, Artificial Sequence
  Synthetic
gcacctccaccucagaccuat

SEQ ID NO: 9716 - DNA, 22 bp, Artificial Sequence
  Synthetic
tcctgggcutcctcttctucat

SEQ ID NO: 9717 - DNA, 21 bp, Artificial Sequence
  Synthetic
cactgaauggagtcgctcuca

SEQ ID NO: 9718 - DNA, 23 bp, Artificial Sequence
  Synthetic
tccaagaaautttcccgtucgga

SEQ ID NO: 9719 - DNA, 21 bp, Artificial Sequence
  Synthetic
atcttggcagacuccgcauac

SEQ ID NO: 9720 - DNA, 24 bp, Artificial Sequence
  Synthetic
gcctgaugaccagaaccgtattua

SEQ ID NO: 9721 - DNA, 23 bp, Artificial Sequence
  Synthetic
ggactcagguagatgactcugga

SEQ ID NO: 9722 - DNA, 26 bp, Artificial Sequence
  Synthetic
ggtcaguacataatggugaagcaact

SEQ ID NO: 9723 - DNA, 22 bp, Artificial Sequence
  Synthetic
guggctaggtauaagcacccaa

SEQ ID NO: 9724 - DNA, 24 bp, Artificial Sequence
  Synthetic
tcuttcagcaaagugcagaggaaa

SEQ ID NO: 9725 - DNA, 26 bp, Artificial Sequence
  Synthetic
gtuggaagaggaagagaauaaaaguc

SEQ ID NO: 9726 - DNA, 29 bp, Artificial Sequence
  Synthetic
ctacagatgacutgtggtttttgaaugag

SEQ ID NO: 9727 - DNA, 27 bp, Artificial Sequence
  Synthetic
actaugagcacacaaacagaaucaaca

SEQ ID NO: 9728 - DNA, 22 bp, Artificial Sequence
  Synthetic
tggcagugtactgaaugcaaga

SEQ ID NO: 9729 - DNA, 29 bp, Artificial Sequence
  Synthetic
ggacatcatttccutcattttcctttuca

SEQ ID NO: 9730 - DNA, 21 bp, Artificial Sequence
  Synthetic
cgggccaucttgtcacttgut

SEQ ID NO: 9731 - DNA, 26 bp, Artificial Sequence
  Synthetic
tgtggtaagugaacggaataaaugca

SEQ ID NO: 9732 - DNA, 24 bp, Artificial Sequence
  Synthetic
tcaaactgctcugctgtgagauag

SEQ ID NO: 9733 - DNA, 29 bp, Artificial Sequence
  Synthetic
tgctttaggaaaccaaauatcactgcuaa

SEQ ID NO: 9734 - DNA, 23 bp, Artificial Sequence
  Synthetic
caactacccaaugtggaaucact

SEQ ID NO: 9735 - DNA, 24 bp, Artificial Sequence
  Synthetic
gcagcaauggacattttgagtuga

SEQ ID NO: 9736 - DNA, 27 bp, Artificial Sequence
  Synthetic
aagaatucaagacaggaacacucagaa

SEQ ID NO: 9737 - DNA, 31 bp, Artificial Sequence
  Synthetic
ggtacaggtttaaauactagaattggcttug

SEQ ID NO: 9738 - DNA, 27 bp, Artificial Sequence
  Synthetic
agtcctgguaacagtacttcaugaact

SEQ ID NO: 9739 - DNA, 26 bp, Artificial Sequence
  Synthetic
tcagaagtttgtutttgttgcctcug

SEQ ID NO: 9740 - DNA, 23 bp, Artificial Sequence
  Synthetic
agtatggcaugggtctgaggtua

SEQ ID NO: 9741 - DNA, 29 bp, Artificial Sequence
  Synthetic
ccagttattaaagcutttggcatctugaa

SEQ ID NO: 9742 - DNA, 19 bp, Artificial Sequence
  Synthetic
caggagggcugaaggucac

SEQ ID NO: 9743 - DNA, 18 bp, Artificial Sequence
  Synthetic
agccgcagccutagctuc

SEQ ID NO: 9744 - DNA, 18 bp, Artificial Sequence
  Synthetic
accctcuccggtgtguct

SEQ ID NO: 9745 - DNA, 17 bp, Artificial Sequence
  Synthetic
guggagcagcucggcat

SEQ ID NO: 9746 - DNA, 24 bp, Artificial Sequence
  Synthetic
gggaggacauctggaagaagttug

SEQ ID NO: 9747 - DNA, 20 bp, Artificial Sequence
  Synthetic
ccccacagcucgttcucaag

SEQ ID NO: 9748 - DNA, 20 bp, Artificial Sequence
  Synthetic
cacaaggcccucagtaccuc

SEQ ID NO: 9749 - DNA, 25 bp, Artificial Sequence
  Synthetic
gccaagacauacgagcacuaacaaa

SEQ ID NO: 9750 - DNA, 20 bp, Artificial Sequence
  Synthetic
cgtccgcucaagagtgucat

SEQ ID NO: 9751 - DNA, 21 bp, Artificial Sequence
  Synthetic
cgugagaaagcuggaccgaag

SEQ ID NO: 9752 - DNA, 19 bp, Artificial Sequence
  Synthetic
gggucgcgcattttctuca

SEQ ID NO: 9753 - DNA, 18 bp, Artificial Sequence
  Synthetic
gtggtggucggcttcucc

SEQ ID NO: 9754 - DNA, 23 bp, Artificial Sequence
  Synthetic
cttaggcttcucctggcaatcuc

SEQ ID NO: 9755 - DNA, 21 bp, Artificial Sequence
  Synthetic
acccaacuccaacctgtcuct

SEQ ID NO: 9756 - DNA, 29 bp, Artificial Sequence
  Synthetic
gaggaggaautctgaucacagaaagaaaa

SEQ ID NO: 9757 - DNA, 26 bp, Artificial Sequence
  Synthetic
gtacctgatuctccatttcuggcaat

SEQ ID NO: 9758 - DNA, 26 bp, Artificial Sequence
  Synthetic
ctgccttgcugaataagtguaaaacc

SEQ ID NO: 9759 - DNA, 25 bp, Artificial Sequence
  Synthetic
taatcatgtggguaactgcaggtua

SEQ ID NO: 9760 - DNA, 30 bp, Artificial Sequence
  Synthetic
tuactactttctttuaggaaaacaccagaa

SEQ ID NO: 9761 - DNA, 32 bp, Artificial Sequence
  Synthetic
atattgcatacctgauccatatctaaagtugt

SEQ ID NO: 9762 - DNA, 30 bp, Artificial Sequence
  Synthetic
ggaagaaaaaguccttcgtaacaauaaaaa

SEQ ID NO: 9763 - DNA, 32 bp, Artificial Sequence
  Synthetic
tcatgttagagcauttagggaattaauaaagg

SEQ ID NO: 9764 - DNA, 22 bp, Artificial Sequence
  Synthetic
gtgtcaaauggagcacctgtuc

SEQ ID NO: 9765 - DNA, 29 bp, Artificial Sequence
  Synthetic
acgtcattaggaauaaatgcaatttcauc

SEQ ID NO: 9766 - DNA, 24 bp, Artificial Sequence
  Synthetic
gggaagaggaacutctaccuacga

SEQ ID NO: 9767 - DNA, 23 bp, Artificial Sequence
  Synthetic
ggtgagtgcugtgacatguagat

SEQ ID NO: 9768 - DNA, 27 bp, Artificial Sequence
  Synthetic
actaatgggacautcacatgtgttuca

SEQ ID NO: 9769 - DNA, 30 bp, Artificial Sequence
  Synthetic
agctattattcttugctattacttcagcut

SEQ ID NO: 9770 - DNA, 30 bp, Artificial Sequence
  Synthetic
aactaagttaugtatttcctttuggcaaca

SEQ ID NO: 9771 - DNA, 23 bp, Artificial Sequence
  Synthetic
acatgaacacggacugattuccc

SEQ ID NO: 9772 - DNA, 18 bp, Artificial Sequence
  Synthetic
ttuccttgccuggcaggt

SEQ ID NO: 9773 - DNA, 27 bp, Artificial Sequence
  Synthetic
tctcagaatctgauatgacccttcgut

SEQ ID NO: 9774 - DNA, 22 bp, Artificial Sequence
  Synthetic
cgttaguggaggtggtgaugac

SEQ ID NO: 9775 - DNA, 24 bp, Artificial Sequence
  Synthetic
tgaggaaatccucaggcacauaga

SEQ ID NO: 9776 - DNA, 32 bp, Artificial Sequence
  Synthetic
agaaagatggcacauatatccaagtatgauag

SEQ ID NO: 9777 - DNA, 27 bp, Artificial Sequence
  Synthetic
gtatggccagaagaaucttcctcttut

SEQ ID NO: 9778 - DNA, 32 bp, Artificial Sequence
  Synthetic
ccttgaggaagaauattttagggaaaagcuaa

SEQ ID NO: 9779 - DNA, 25 bp, Artificial Sequence
  Synthetic
agguagaagacacaaccaccuagag

SEQ ID NO: 9780 - DNA, 21 bp, Artificial Sequence
  Synthetic
gtgccccacuctgtaaccaut

SEQ ID NO: 9781 - DNA, 27 bp, Artificial Sequence
  Synthetic
gggagacccaacautatgaatttuact

SEQ ID NO: 9782 - DNA, 24 bp, Artificial Sequence
  Synthetic
ctttgaccaugaaaaggcucgaaa

SEQ ID NO: 9783 - DNA, 22 bp, Artificial Sequence
  Synthetic
ccaattctgutgcgctgttuct

SEQ ID NO: 9784 - DNA, 22 bp, Artificial Sequence
  Synthetic
ccaaacgaugaagcctcactut

SEQ ID NO: 9785 - DNA, 26 bp, Artificial Sequence
  Synthetic
cgtgatccuttaagctcuaagaaggg

SEQ ID NO: 9786 - DNA, 21 bp, Artificial Sequence
  Synthetic
gttacgtcccugctgaagugt

SEQ ID NO: 9787 - DNA, 29 bp, Artificial Sequence
  Synthetic
atcacatctaaaugactgaatgagaacut

SEQ ID NO: 9788 - DNA, 23 bp, Artificial Sequence
  Synthetic
ccagccaggagacuattacgtuc

SEQ ID NO: 9789 - DNA, 31 bp, Artificial Sequence
  Synthetic
ctgattcatcttcucaaattctcttgcttut

SEQ ID NO: 9790 - DNA, 18 bp, Artificial Sequence
  Synthetic
guaccccgggacctcuga

SEQ ID NO: 9791 - DNA, 19 bp, Artificial Sequence
  Synthetic
cgaagtgguagccguagcc

SEQ ID NO: 9792 - DNA, 22 bp, Artificial Sequence
  Synthetic
ctauacgagccctuaccagcac

SEQ ID NO: 9793 - DNA, 20 bp, Artificial Sequence
  Synthetic
gtcctuggtgcaguacacct

SEQ ID NO: 9794 - DNA, 20 bp, Artificial Sequence
  Synthetic
cgtatcucggctgcuacgaa

SEQ ID NO: 9795 - DNA, 22 bp, Artificial Sequence
  Synthetic
cttctaagcugtctguggccaa

SEQ ID NO: 9796 - DNA, 20 bp, Artificial Sequence
  Synthetic
ccgtcugacttcgcuagcaa

SEQ ID NO: 9797 - DNA, 17 bp, Artificial Sequence
  Synthetic
cgcuccaggccgtaguc

SEQ ID NO: 9798 - DNA, 31 bp, Artificial Sequence
  Synthetic
cgtgtacauaaacaaagagaaaagactucaa

SEQ ID NO: 9799 - DNA, 18 bp, Artificial Sequence
  Synthetic
cgcttccuggagctcuca

SEQ ID NO: 9800 - DNA, 21 bp, Artificial Sequence
  Synthetic
cagaaagcaccgaugctcuga

SEQ ID NO: 9801 - DNA, 26 bp, Artificial Sequence
  Synthetic
ctttgcaaatgcuttggaagaaguct

SEQ ID NO: 9802 - DNA, 26 bp, Artificial Sequence
  Synthetic
ccaaattagagaacuaccctggaaug

SEQ ID NO: 9803 - DNA, 20 bp, Artificial Sequence
  Synthetic
ggctcaucgacgacatggug

SEQ ID NO: 9804 - DNA, 30 bp, Artificial Sequence
  Synthetic
aaaaagaagcttaugctacagtcatacaua

SEQ ID NO: 9805 - DNA, 27 bp, Artificial Sequence
  Synthetic
cagtacagagcaacugattttgttgut

SEQ ID NO: 9806 - DNA, 23 bp, Artificial Sequence
  Synthetic
aaccctcttcucatcaggaguga

SEQ ID NO: 9807 - DNA, 30 bp, Artificial Sequence
  Synthetic
ccatttgtcugaaaaactttgcttctaaut

SEQ ID NO: 9808 - DNA, 18 bp, Artificial Sequence
  Synthetic
gctgcaagcugggacugg

SEQ ID NO: 9809 - DNA, 17 bp, Artificial Sequence
  Synthetic
tccccggccucuccaaa

SEQ ID NO: 9810 - DNA, 18 bp, Artificial Sequence
  Synthetic
gcttgaacucgccgugac

SEQ ID NO: 9811 - DNA, 19 bp, Artificial Sequence
  Synthetic
gcactctuccccagtuccc

SEQ ID NO: 9812 - DNA, 23 bp, Artificial Sequence
  Synthetic
gaggguaacttctgttucccgat

SEQ ID NO: 9813 - DNA, 28 bp, Artificial Sequence
  Synthetic
tgctacaggaaauaaagcaacaaaugac

SEQ ID NO: 9814 - DNA, 27 bp, Artificial Sequence
  Synthetic
agtgggcuagaatgattttuaacagca

SEQ ID NO: 9815 - DNA, 24 bp, Artificial Sequence
  Synthetic
acaaaaggcagutcctgaaacugt

SEQ ID NO: 9816 - DNA, 28 bp, Artificial Sequence
  Synthetic
atattttgtgcaguattaatgcttgcug

SEQ ID NO: 9817 - DNA, 26 bp, Artificial Sequence
  Synthetic
cacaactctgucaagccattttagut

SEQ ID NO: 9818 - DNA, 21 bp, Artificial Sequence
  Synthetic
gcccagcuctgtucaaaccat

SEQ ID NO: 9819 - DNA, 28 bp, Artificial Sequence
  Synthetic
tgtttctggaaagcugagtcttttcuac

SEQ ID NO: 9820 - DNA, 21 bp, Artificial Sequence
  Synthetic
gtacauggcaggaacuccgat

SEQ ID NO: 9821 - DNA, 28 bp, Artificial Sequence
  Synthetic
caaagaggagaauaatacagctcugacc

SEQ ID NO: 9822 - DNA, 27 bp, Artificial Sequence
  Synthetic
gtgtactaactguttcctacagctuct

SEQ ID NO: 9823 - DNA, 29 bp, Artificial Sequence
  Synthetic
aatgcatatttguataggagacugccaaa

SEQ ID NO: 9824 - DNA, 26 bp, Artificial Sequence
  Synthetic
ggaaaaatgtuagctgctagccucat

SEQ ID NO: 9825 - DNA, 22 bp, Artificial Sequence
  Synthetic
gtttgctaaaugccagtgugct

SEQ ID NO: 9826 - DNA, 28 bp, Artificial Sequence
  Synthetic
gcctctgcacuttactatgatgaattug

SEQ ID NO: 9827 - DNA, 26 bp, Artificial Sequence
  Synthetic
tcacaggatgauctattttcacacug

SEQ ID NO: 9828 - DNA, 26 bp, Artificial Sequence
  Synthetic
atgtacgtggaguaatacacctauga

SEQ ID NO: 9829 - DNA, 27 bp, Artificial Sequence
  Synthetic
catcaatctccuccaagtttccgtuat

SEQ ID NO: 9830 - DNA, 28 bp, Artificial Sequence
  Synthetic
ttgtactttgcagautgtaaatgcctuc

SEQ ID NO: 9831 - DNA, 28 bp, Artificial Sequence
  Synthetic
tagtactaccaguataggacacttcuct

SEQ ID NO: 9832 - DNA, 23 bp, Artificial Sequence
  Synthetic
agacatcctccuctgacacacut

SEQ ID NO: 9833 - DNA, 25 bp, Artificial Sequence
  Synthetic
agctgggtttcugttaatctcacug

SEQ ID NO: 9834 - DNA, 21 bp, Artificial Sequence
  Synthetic
gactugactccatugcgaacc

SEQ ID NO: 9835 - DNA, 24 bp, Artificial Sequence
  Synthetic
gggucagcagtugaaaaacacaat

SEQ ID NO: 9836 - DNA, 23 bp, Artificial Sequence
  Synthetic
agctaaccccucttacctugact

SEQ ID NO: 9837 - DNA, 29 bp, Artificial Sequence
  Synthetic
acaatcttggcuatgtagttatgacucac

SEQ ID NO: 9838 - DNA, 31 bp, Artificial Sequence
  Synthetic
gatcatagaggaatuagaggaatctgtagut

SEQ ID NO: 9839 - DNA, 22 bp, Artificial Sequence
  Synthetic
gaucagttcugggacaccaaca

SEQ ID NO: 9840 - DNA, 22 bp, Artificial Sequence
  Synthetic
agtgcucaaaggagcagatcuc

SEQ ID NO: 9841 - DNA, 24 bp, Artificial Sequence
  Synthetic
tgaggtccuctctagagtgaucca

SEQ ID NO: 9842 - DNA, 29 bp, Artificial Sequence
  Synthetic
tgaaggcaugatgataaacucacaaaaga

SEQ ID NO: 9843 - DNA, 25 bp, Artificial Sequence
  Synthetic
ccagaaagccuctctacaattgtug

SEQ ID NO: 9844 - DNA, 22 bp, Artificial Sequence
  Synthetic
gcccatttccautccctccaua

SEQ ID NO: 9845 - DNA, 29 bp, Artificial Sequence
  Synthetic
tgaattcatggaaaaugagaggctauaat

SEQ ID NO: 9846 - DNA, 19 bp, Artificial Sequence
  Synthetic
gcgccaaaaugtcgtucgt

SEQ ID NO: 9847 - DNA, 18 bp, Artificial Sequence
  Synthetic
ggctcgacuccctccgua

SEQ ID NO: 9848 - DNA, 22 bp, Artificial Sequence
  Synthetic
ggtgacccagcagugagtttut

SEQ ID NO: 9849 - DNA, 27 bp, Artificial Sequence
  Synthetic
ctatacctgtaugcacactttccauca

SEQ ID NO: 9850 - DNA, 25 bp, Artificial Sequence
  Synthetic
auagccaugaggagaaaagcttuaa

SEQ ID NO: 9851 - DNA, 31 bp, Artificial Sequence
  Synthetic
ctagaacacattacuttgatgacaaatcuca

SEQ ID NO: 9852 - DNA, 29 bp, Artificial Sequence
  Synthetic
ggataaaacccuagccttcaaaatgaaug

SEQ ID NO: 9853 - DNA, 21 bp, Artificial Sequence
  Synthetic
gggtgttucctgtgaguggat

SEQ ID NO: 9854 - DNA, 30 bp, Artificial Sequence
  Synthetic
tttttaatacagactutgctaccaggacut

SEQ ID NO: 9855 - DNA, 24 bp, Artificial Sequence
  Synthetic
gaaatgcaucaagcttctgtuccc

SEQ ID NO: 9856 - DNA, 30 bp, Artificial Sequence
  Synthetic
taataatgatcugcacttccttttctucat

SEQ ID NO: 9857 - DNA, 30 bp, Artificial Sequence
  Synthetic
attaatttctucctggagacucaaaacact

SEQ ID NO: 9858 - DNA, 30 bp, Artificial Sequence
  Synthetic
ttcagcttttcctuaaagtcacttcattut

SEQ ID NO: 9859 - DNA, 29 bp, Artificial Sequence
  Synthetic
agctactatttucagaaacgatcagtuga

SEQ ID NO: 9860 - DNA, 33 bp, Artificial Sequence
  Synthetic
tgagaatgtttaaautcgtacctatttugaggt

SEQ ID NO: 9861 - DNA, 24 bp, Artificial Sequence
  Synthetic
agatatgtacugcttccggaugga

SEQ ID NO: 9862 - DNA, 28 bp, Artificial Sequence
  Synthetic
ctgcctgatcuatacaaagtcttugaga

SEQ ID NO: 9863 - DNA, 28 bp, Artificial Sequence
  Synthetic
aaggcaagtauaagtcttaagtgcuacc

SEQ ID NO: 9864 - DNA, 22 bp, Artificial Sequence
  Synthetic
gccaacttucctgctcucaact

SEQ ID NO: 9865 - DNA, 23 bp, Artificial Sequence
  Synthetic
ctcaccttcauagcaagggauca

SEQ ID NO: 9866 - DNA, 23 bp, Artificial Sequence
  Synthetic
ggaaccaucaaagtgcugaacct

SEQ ID NO: 9867 - DNA, 30 bp, Artificial Sequence
  Synthetic
aacaatgaagcaauaatttgtgaatcuggt

SEQ ID NO: 9868 - DNA, 21 bp, Artificial Sequence
  Synthetic
gagggcauccttgtgugagag

SEQ ID NO: 9869 - DNA, 25 bp, Artificial Sequence
  Synthetic
cctcauccctgatcucagaaaacat

SEQ ID NO: 9870 - DNA, 23 bp, Artificial Sequence
  Synthetic
gtgactgtggucttttcctguga

SEQ ID NO: 9871 - DNA, 29 bp, Artificial Sequence
  Synthetic
ctcatgtgccttuaaagaaaaacagctua

SEQ ID NO: 9872 - DNA, 22 bp, Artificial Sequence
  Synthetic
catcacagtgugtcggtcctut

SEQ ID NO: 9873 - DNA, 21 bp, Artificial Sequence
  Synthetic
gcagcttcuctgtgaccugac

SEQ ID NO: 9874 - DNA, 21 bp, Artificial Sequence
  Synthetic
actgtguactcgttugccact

SEQ ID NO: 9875 - DNA, 24 bp, Artificial Sequence
  Synthetic
gctcugaaggaaacaccgacauac

SEQ ID NO: 9876 - DNA, 21 bp, Artificial Sequence
  Synthetic
gcctgcugatgccaaauacca

SEQ ID NO: 9877 - DNA, 28 bp, Artificial Sequence
  Synthetic
ctggtcccauaaatctctcatcttugaa

SEQ ID NO: 9878 - DNA, 23 bp, Artificial Sequence
  Synthetic
gggtcatctgucagcatctctut

SEQ ID NO: 9879 - DNA, 22 bp, Artificial Sequence
  Synthetic
ctcaaggtggaugtcaggguag

SEQ ID NO: 9880 - DNA, 23 bp, Artificial Sequence
  Synthetic
ttgccuaacagcacactguaact

SEQ ID NO: 9881 - DNA, 28 bp, Artificial Sequence
  Synthetic
cagatgtcaacaautcaaatgcttcuaa

SEQ ID NO: 9882 - DNA, 25 bp, Artificial Sequence
  Synthetic
ttcagcacttcuaactcagcttcuc

SEQ ID NO: 9883 - DNA, 22 bp, Artificial Sequence
  Synthetic
gatcaggtcaugtgactggugt

SEQ ID NO: 9884 - DNA, 24 bp, Artificial Sequence
  Synthetic
cttctgtagcutgtttggtcaguc

SEQ ID NO: 9885 - DNA, 26 bp, Artificial Sequence
  Synthetic
accactgaaguattttcaaggtgucc

SEQ ID NO: 9886 - DNA, 21 bp, Artificial Sequence
  Synthetic
ctccaagccuccgataagcuc

SEQ ID NO: 9887 - DNA, 23 bp, Artificial Sequence
  Synthetic
tttatggcuggtgtctgacucac

SEQ ID NO: 9888 - DNA, 27 bp, Artificial Sequence
  Synthetic
cttacgctuaactccaactgugaaaaa

SEQ ID NO: 9889 - DNA, 23 bp, Artificial Sequence
  Synthetic
cacaaggacaaacuagaguccac

SEQ ID NO: 9890 - DNA, 27 bp, Artificial Sequence
  Synthetic
gttactgtttguctctctctagtugcc

SEQ ID NO: 9891 - DNA, 27 bp, Artificial Sequence
  Synthetic
gcacatttacuaggtgtttacctguga

SEQ ID NO: 9892 - DNA, 24 bp, Artificial Sequence
  Synthetic
gatgtgcuaaatgcatacauggca

SEQ ID NO: 9893 - DNA, 23 bp, Artificial Sequence
  Synthetic
gatgcagatuaacacgcgatugt

SEQ ID NO: 9894 - DNA, 23 bp, Artificial Sequence
  Synthetic
tgctctccagauttggtgaaucg

SEQ ID NO: 9895 - DNA, 23 bp, Artificial Sequence
  Synthetic
aggttgttgutgaaggtgauggt

SEQ ID NO: 9896 - DNA, 27 bp, Artificial Sequence
  Synthetic
cacatttcagagutgtcaaaacguagt

SEQ ID NO: 9897 - DNA, 23 bp, Artificial Sequence
  Synthetic
cagtaaacgaggacauggaguga

SEQ ID NO: 9898 - DNA, 22 bp, Artificial Sequence
  Synthetic
ctaagtugcccagagtgggaut

SEQ ID NO: 9899 - DNA, 29 bp, Artificial Sequence
  Synthetic
tcgagtacacccauaattagtagttucct

SEQ ID NO: 9900 - DNA, 26 bp, Artificial Sequence
  Synthetic
gtagcttccutatagcacaacugcat

SEQ ID NO: 9901 - DNA, 29 bp, Artificial Sequence
  Synthetic
agatctataactggutcacacgaatgtut

SEQ ID NO: 9902 - DNA, 24 bp, Artificial Sequence
  Synthetic
gtgaggcaaaagguggagtatcua

SEQ ID NO: 9903 - DNA, 22 bp, Artificial Sequence
  Synthetic
cucatacuccaacgaccccaac

SEQ ID NO: 9904 - DNA, 27 bp, Artificial Sequence
  Synthetic
ccautcaataatgaguacacaggaact

SEQ ID NO: 9905 - DNA, 21 bp, Artificial Sequence
  Synthetic
gcgcuggacgatagaaguaca

SEQ ID NO: 9906 - DNA, 22 bp, Artificial Sequence
  Synthetic
gcagtttuggacccatcucagt

SEQ ID NO: 9907 - DNA, 22 bp, Artificial Sequence
  Synthetic
aggcaacaaucacagcagttug

SEQ ID NO: 9908 - DNA, 25 bp, Artificial Sequence
  Synthetic
ctagatagtccuctgggatctgugg

SEQ ID NO: 9909 - DNA, 26 bp, Artificial Sequence
  Synthetic
cttaccgtccuctctttcctttguag

SEQ ID NO: 9910 - DNA, 24 bp, Artificial Sequence
  Synthetic
ttacctgaagagcuggttgttugt

SEQ ID NO: 9911 - DNA, 26 bp, Artificial Sequence
  Synthetic
tttttatgaagagucccctgaaccug

SEQ ID NO: 9912 - DNA, 20 bp, Artificial Sequence
  Synthetic
ccgccgcacuctagtaagug

SEQ ID NO: 9913 - DNA, 22 bp, Artificial Sequence
  Synthetic
cccccatcutggaaatcctugt

SEQ ID NO: 9914 - DNA, 21 bp, Artificial Sequence
  Synthetic
gcacttugacagctccucgaa

SEQ ID NO: 9915 - DNA, 21 bp, Artificial Sequence
  Synthetic
ggaacuggccctcugaaaact

SEQ ID NO: 9916 - DNA, 22 bp, Artificial Sequence
  Synthetic
caucttgtgguagaggccacag

SEQ ID NO: 9917 - DNA, 20 bp, Artificial Sequence
  Synthetic
cccgagaacutgccggtuaa

SEQ ID NO: 9918 - DNA, 24 bp, Artificial Sequence
  Synthetic
gctagggucaggagacacttctut

SEQ ID NO: 9919 - DNA, 20 bp, Artificial Sequence
  Synthetic
gcccacuctctgtguaccca

SEQ ID NO: 9920 - DNA, 20 bp, Artificial Sequence
  Synthetic
gcctgggutctcaucaccac

SEQ ID NO: 9921 - DNA, 17 bp, Artificial Sequence
  Synthetic
agctgcugccuccagac

SEQ ID NO: 9922 - DNA, 17 bp, Artificial Sequence
  Synthetic
ctcgcauccgtcugcac

SEQ ID NO: 9923 - DNA, 17 bp, Artificial Sequence
  Synthetic
gggccugcagttcgcut

SEQ ID NO: 9924 - DNA, 17 bp, Artificial Sequence
  Synthetic
ctugccgggcuggaagt

SEQ ID NO: 9925 - DNA, 22 bp, Artificial Sequence
  Synthetic
caacgagtgcutcatcaaggug

SEQ ID NO: 9926 - DNA, 18 bp, Artificial Sequence
  Synthetic
gagcgccacguacgagua

SEQ ID NO: 9927 - DNA, 17 bp, Artificial Sequence
  Synthetic
gaccggucgcacaguca

SEQ ID NO: 9928 - DNA, 17 bp, Artificial Sequence
  Synthetic
gcucagcctcuggccat

SEQ ID NO: 9929 - DNA, 18 bp, Artificial Sequence
  Synthetic
gucgtgctucgggaaacc

SEQ ID NO: 9930 - DNA, 24 bp, Artificial Sequence
  Synthetic
ctatgtgtutttggagcugacagt

SEQ ID NO: 9931 - DNA, 21 bp, Artificial Sequence
  Synthetic
ggccatccutaaggtctccuc

SEQ ID NO: 9932 - DNA, 29 bp, Artificial Sequence
  Synthetic
tgctattatcatcuctggaggacctaaut

SEQ ID NO: 9933 - DNA, 27 bp, Artificial Sequence
  Synthetic
aacaaatttgcugacatacctgcauac

SEQ ID NO: 9934 - DNA, 19 bp, Artificial Sequence
  Synthetic
gagcacagutccacccuga

SEQ ID NO: 9935 - DNA, 28 bp, Artificial Sequence
  Synthetic
cctactctctcuttgatctctcgaauac

SEQ ID NO: 9936 - DNA, 24 bp, Artificial Sequence
  Synthetic
cgagaaagccaguctgtugaagag

SEQ ID NO: 9937 - DNA, 28 bp, Artificial Sequence
  Synthetic
catactgagaaaacugtaattgtgcuca

SEQ ID NO: 9938 - DNA, 25 bp, Artificial Sequence
  Synthetic
cttgaaaucagaggaggutttccut

SEQ ID NO: 9939 - DNA, 24 bp, Artificial Sequence
  Synthetic
tctgatgagcuctgtgtcattgug

SEQ ID NO: 9940 - DNA, 18 bp, Artificial Sequence
  Synthetic
cctggccuggcaaucaga

SEQ ID NO: 9941 - DNA, 29 bp, Artificial Sequence
  Synthetic
ccgttcaatttcutgtaatgattagcugt

SEQ ID NO: 9942 - DNA, 24 bp, Artificial Sequence
  Synthetic
gatgaacctgacugggaatcacut

SEQ ID NO: 9943 - DNA, 26 bp, Artificial Sequence
  Synthetic
tctacatttgagccutttggtctucc

SEQ ID NO: 9944 - DNA, 23 bp, Artificial Sequence
  Synthetic
attttgaucgggacccactucaa

SEQ ID NO: 9945 - DNA, 25 bp, Artificial Sequence
  Synthetic
agaggtacugagaacgtgcatuaga

SEQ ID NO: 9946 - DNA, 23 bp, Artificial Sequence
  Synthetic
gaacccttuggaagagactugct

SEQ ID NO: 9947 - DNA, 26 bp, Artificial Sequence
  Synthetic
ttttcttcaaatucctacagggccut

SEQ ID NO: 9948 - DNA, 25 bp, Artificial Sequence
  Synthetic
gtaggtaagcuggccctgagataua

SEQ ID NO: 9949 - DNA, 26 bp, Artificial Sequence
  Synthetic
gtcatggataugatgaccaauagcca

SEQ ID NO: 9950 - DNA, 24 bp, Artificial Sequence
  Synthetic
cucagggagaaaccucaacaaagt

SEQ ID NO: 9951 - DNA, 31 bp, Artificial Sequence
  Synthetic
cagcaccattacuaactgttaaaacaaucaa

SEQ ID NO: 9952 - DNA, 22 bp, Artificial Sequence
  Synthetic
gggactccutgtcagacaguga

SEQ ID NO: 9953 - DNA, 30 bp, Artificial Sequence
  Synthetic
ccatccctttccauttaccaacaatatuct

SEQ ID NO: 9954 - DNA, 25 bp, Artificial Sequence
  Synthetic
gtttcttcauagtcatccucagggt

SEQ ID NO: 9955 - DNA, 21 bp, Artificial Sequence
  Synthetic
aaggcttuggtgaccagucaa

SEQ ID NO: 9956 - DNA, 30 bp, Artificial Sequence
  Synthetic
cgtcaaaatggaauaaaagaagaaagauca

SEQ ID NO: 9957 - DNA, 28 bp, Artificial Sequence
  Synthetic
acagacaccuaaagaaacatgagaaugg

SEQ ID NO: 9958 - DNA, 24 bp, Artificial Sequence
  Synthetic
ggagattuctggaaagucagccat

SEQ ID NO: 9959 - DNA, 23 bp, Artificial Sequence
  Synthetic
ccagtgagcucttacagtcagug

SEQ ID NO: 9960 - DNA, 25 bp, Artificial Sequence
  Synthetic
ataaagaaaggagugggtctugcat

SEQ ID NO: 9961 - DNA, 22 bp, Artificial Sequence
  Synthetic
agccccuggatctaagtauggg

SEQ ID NO: 9962 - DNA, 26 bp, Artificial Sequence
  Synthetic
agggtaagguaaagctccaactttut

SEQ ID NO: 9963 - DNA, 25 bp, Artificial Sequence
  Synthetic
cagcaatcautccattttcucacca

SEQ ID NO: 9964 - DNA, 23 bp, Artificial Sequence
  Synthetic
tgtccccuacagatgggtgttua

SEQ ID NO: 9965 - DNA, 27 bp, Artificial Sequence
  Synthetic
ctttgatacctgcuagttctcctgtua

SEQ ID NO: 9966 - DNA, 23 bp, Artificial Sequence
  Synthetic
acgtagtgcugaacatttgucca

SEQ ID NO: 9967 - DNA, 26 bp, Artificial Sequence
  Synthetic
agaagcaatugacataaagccugaga

SEQ ID NO: 9968 - DNA, 20 bp, Artificial Sequence
  Synthetic
atgtgacauctgguggcgaa

SEQ ID NO: 9969 - DNA, 26 bp, Artificial Sequence
  Synthetic
atgttgttccguttatgaatgcaucc

SEQ ID NO: 9970 - DNA, 20 bp, Artificial Sequence
  Synthetic
ggtggcgugagtggtacuaa

SEQ ID NO: 9971 - DNA, 31 bp, Artificial Sequence
  Synthetic
ctgattccatccaccuttattttgtcttuaa

SEQ ID NO: 9972 - DNA, 26 bp, Artificial Sequence
  Synthetic
acaatctcttcuttacacagcugcaa

SEQ ID NO: 9973 - DNA, 28 bp, Artificial Sequence
  Synthetic
ccaaaaggaagaucgaagtaggugaaaa

SEQ ID NO: 9974 - DNA, 22 bp, Artificial Sequence
  Synthetic
ccggagcgcuagagacagauat

SEQ ID NO: 9975 - DNA, 17 bp, Artificial Sequence
  Synthetic
cugcaggacugggcaca

SEQ ID NO: 9976 - DNA, 24 bp, Artificial Sequence
  Synthetic
ctctagatgatuccagtgccctuc

SEQ ID NO: 9977 - DNA, 25 bp, Artificial Sequence
  Synthetic
gagctcccuaggatggcttauaaac

SEQ ID NO: 9978 - DNA, 20 bp, Artificial Sequence
  Synthetic
cagttucgaccccagucaca

SEQ ID NO: 9979 - DNA, 20 bp, Artificial Sequence
  Synthetic
tgutccgatuggagccacag

SEQ ID NO: 9980 - DNA, 23 bp, Artificial Sequence
  Synthetic
ccaaccagggacgcuattaugaa

SEQ ID NO: 9981 - DNA, 22 bp, Artificial Sequence
  Synthetic
ggatacaucccaggagggtuct

SEQ ID NO: 9982 - DNA, 23 bp, Artificial Sequence
  Synthetic
actttggctutagcaggacugaa

SEQ ID NO: 9983 - DNA, 25 bp, Artificial Sequence
  Synthetic
cagatgaugcaggtaaaacaaucca

SEQ ID NO: 9984 - DNA, 18 bp, Artificial Sequence
  Synthetic
cagtgucgacgcgcagua

SEQ ID NO: 9985 - DNA, 23 bp, Artificial Sequence
  Synthetic
atggaaauctcgauccaaagcca

SEQ ID NO: 9986 - DNA, 21 bp, Artificial Sequence
  Synthetic
caaggcgagcacugaccttua

SEQ ID NO: 9987 - DNA, 27 bp, Artificial Sequence
  Synthetic
tgtgtttcuaaggcaaggttaauagca

SEQ ID NO: 9988 - DNA, 19 bp, Artificial Sequence
  Synthetic
gcctcauggttgcccauct

SEQ ID NO: 9989 - DNA, 17 bp, Artificial Sequence
  Synthetic
accagcccugtgccauc

SEQ ID NO: 9990 - DNA, 18 bp, Artificial Sequence
  Synthetic
cactcgggucatggccut

SEQ ID NO: 9991 - DNA, 21 bp, Artificial Sequence
  Synthetic
ccgttctucagccaggagaug

SEQ ID NO: 9992 - DNA, 19 bp, Artificial Sequence
  Synthetic
gcgacguggagttccacug

SEQ ID NO: 9993 - DNA, 19 bp, Artificial Sequence
  Synthetic
cccacctugagcacgguaa

SEQ ID NO: 9994 - DNA, 22 bp, Artificial Sequence
  Synthetic
gcctatcgcuctgctctctcut

SEQ ID NO: 9995 - DNA, 27 bp, Artificial Sequence
  Synthetic
gtgaugagaaaacccaatagaatugcc

SEQ ID NO: 9996 - DNA, 18 bp, Artificial Sequence
  Synthetic
tgtaccuccacgcccugt

SEQ ID NO: 9997 - DNA, 20 bp, Artificial Sequence
  Synthetic
gctcgagcucggagacatug

SEQ ID NO: 9998 - DNA, 23 bp, Artificial Sequence
  Synthetic
tgaagatgcugaaaggugaggag

SEQ ID NO: 9999 - DNA, 26 bp, Artificial Sequence
  Synthetic
ttgtgtttcccgaucatcttcaucat

SEQ ID NO: 10000 - DNA, 20 bp, Artificial Sequence
  Synthetic
ggagagguggagaggctuca

SEQ ID NO: 10001 - DNA, 25 bp, Artificial Sequence
  Synthetic
gtcttcttgtaguagtcgaggtugt

SEQ ID NO: 10002 - DNA, 20 bp, Artificial Sequence
  Synthetic
ctcugggagatctucacgct

SEQ ID NO: 10003 - DNA, 17 bp, Artificial Sequence
  Synthetic
gccagggaugccacuca

SEQ ID NO: 10004 - DNA, 20 bp, Artificial Sequence
  Synthetic
cgccttucgagcagtacucc

SEQ ID NO: 10005 - DNA, 21 bp, Artificial Sequence
  Synthetic
ctagggaccccucacattgut

SEQ ID NO: 10006 - DNA, 26 bp, Artificial Sequence
  Synthetic
ttccgaaaagtaaugcctgacatgua

SEQ ID NO: 10007 - DNA, 29 bp, Artificial Sequence
  Synthetic
tcagtaactggatutcaaagccttatgut

SEQ ID NO: 10008 - DNA, 21 bp, Artificial Sequence
  Synthetic
tgtctatgguatcgccuggct

SEQ ID NO: 10009 - DNA, 28 bp, Artificial Sequence
  Synthetic
aatctacctcuaagagtggaactccaut

SEQ ID NO: 10010 - DNA, 24 bp, Artificial Sequence
  Synthetic
caaatcacagacuagccacagcua

SEQ ID NO: 10011 - DNA, 22 bp, Artificial Sequence
  Synthetic
ccatcttggauctctgcaccug

SEQ ID NO: 10012 - DNA, 27 bp, Artificial Sequence
  Synthetic
gggucagagacaacaatatguaagaaa

SEQ ID NO: 10013 - DNA, 22 bp, Artificial Sequence
  Synthetic
catatcgaucctgccactuccc

SEQ ID NO: 10014 - DNA, 28 bp, Artificial Sequence
  Synthetic
ctgtgctctaatuttaggtcctttcuga

SEQ ID NO: 10015 - DNA, 19 bp, Artificial Sequence
  Synthetic
agtgcugacagucggagga

SEQ ID NO: 10016 - DNA, 30 bp, Artificial Sequence
  Synthetic
gttgtaattttgccutgtttttcctttugt

SEQ ID NO: 10017 - DNA, 19 bp, Artificial Sequence
  Synthetic
gcacgugcagaacgacuat

SEQ ID NO: 10018 - DNA, 28 bp, Artificial Sequence
  Synthetic
gggacuattaugucagaagagagaaaga

SEQ ID NO: 10019 - DNA, 25 bp, Artificial Sequence
  Synthetic
ccaacaaaccugttgaaaacactug

SEQ ID NO: 10020 - DNA, 28 bp, Artificial Sequence
  Synthetic
gtgattggatttutgtcactgattgugt

SEQ ID NO: 10021 - DNA, 29 bp, Artificial Sequence
  Synthetic
gcttcttttccutctttgcttctttuaga

SEQ ID NO: 10022 - DNA, 28 bp, Artificial Sequence
  Synthetic
gaagatggaacucagtatuggaagaagt

SEQ ID NO: 10023 - DNA, 21 bp, Artificial Sequence
  Synthetic
cccacgcggacuattaaguct

SEQ ID NO: 10024 - DNA, 25 bp, Artificial Sequence
  Synthetic
ccutgtaugggaaagaagauaacga

SEQ ID NO: 10025 - DNA, 26 bp, Artificial Sequence
  Synthetic
cgtttcacacutttgatcatgaugcc

SEQ ID NO: 10026 - DNA, 25 bp, Artificial Sequence
  Synthetic
tutctccttttcugaaaccagcaga

SEQ ID NO: 10027 - DNA, 28 bp, Artificial Sequence
  Synthetic
acacatgaacacuccagaatcatuaact

SEQ ID NO: 10028 - DNA, 27 bp, Artificial Sequence
  Synthetic
acagaacctucactgataaaugggaag

SEQ ID NO: 10029 - DNA, 27 bp, Artificial Sequence
  Synthetic
gaaataagatcugataagcccacugga

SEQ ID NO: 10030 - DNA, 23 bp, Artificial Sequence
  Synthetic
gaaaucctgactuacgacaggct

SEQ ID NO: 10031 - DNA, 23 bp, Artificial Sequence
  Synthetic
tcaagtgaatugcagtcctuccc

SEQ ID NO: 10032 - DNA, 25 bp, Artificial Sequence
  Synthetic
ttgttctctcuccagagtgctcuaa

SEQ ID NO: 10033 - DNA, 28 bp, Artificial Sequence
  Synthetic
cataaggaagttgugttgggtctatgua

SEQ ID NO: 10034 - DNA, 32 bp, Artificial Sequence
  Synthetic
tatctcaccttctutctaaccttttcttaugt

SEQ ID NO: 10035 - DNA, 26 bp, Artificial Sequence
  Synthetic
tcttataaagugcagcttctgcauga

SEQ ID NO: 10036 - DNA, 23 bp, Artificial Sequence
  Synthetic
ggccctagacutagaagactugc

SEQ ID NO: 10037 - DNA, 27 bp, Artificial Sequence
  Synthetic
ggctctaaaaugctctgttcucaaaaa

SEQ ID NO: 10038 - DNA, 28 bp, Artificial Sequence
  Synthetic
cacctgaaagcautttcaactgtgtaua

SEQ ID NO: 10039 - DNA, 24 bp, Artificial Sequence
  Synthetic
agcaggacaccaaugaaactucaa

SEQ ID NO: 10040 - DNA, 24 bp, Artificial Sequence
  Synthetic
ggatgcagauccccuaaaaagacc

SEQ ID NO: 10041 - DNA, 22 bp, Artificial Sequence
  Synthetic
ggttagucctcacccugaaagc

SEQ ID NO: 10042 - DNA, 17 bp, Artificial Sequence
  Synthetic
tcccugcaguccgaggt

SEQ ID NO: 10043 - DNA, 24 bp, Artificial Sequence
  Synthetic
acactgagcuctcctcctgttuaa

SEQ ID NO: 10044 - DNA, 30 bp, Artificial Sequence
  Synthetic
tgaaatttgtctttutaatatggctgaguc

SEQ ID NO: 10045 - DNA, 25 bp, Artificial Sequence
  Synthetic
tgctcaattaacugtgccatcucat

SEQ ID NO: 10046 - DNA, 23 bp, Artificial Sequence
  Synthetic
gggtcacatacutcctcctccuc

SEQ ID NO: 10047 - DNA, 26 bp, Artificial Sequence
  Synthetic
cacttgaagaacugaagccauaacaa

SEQ ID NO: 10048 - DNA, 25 bp, Artificial Sequence
  Synthetic
aaaacttccuctgttccugaacaca

SEQ ID NO: 10049 - DNA, 26 bp, Artificial Sequence
  Synthetic
gtggttaaaatcugtgactttggcut

SEQ ID NO: 10050 - DNA, 21 bp, Artificial Sequence
  Synthetic
gagctctggcuactggtgaug

SEQ ID NO: 10051 - DNA, 30 bp, Artificial Sequence
  Synthetic
aagactcattttguattcaaggagtttgut

SEQ ID NO: 10052 - DNA, 31 bp, Artificial Sequence
  Synthetic
acagaaagatagaucaccacataatttugct

SEQ ID NO: 10053 - DNA, 24 bp, Artificial Sequence
  Synthetic
cttgttgctgutgttgttgacuct

SEQ ID NO: 10054 - DNA, 32 bp, Artificial Sequence
  Synthetic
tttatcccactgaccutctattatgaaaaaug

SEQ ID NO: 10055 - DNA, 27 bp, Artificial Sequence
  Synthetic
cctctgtuaggcattgtatugaaggat

SEQ ID NO: 10056 - DNA, 27 bp, Artificial Sequence
  Synthetic
ttacaacauaatctccuagaggacagt

SEQ ID NO: 10057 - DNA, 24 bp, Artificial Sequence
  Synthetic
caagaaaagacautgcgtggucag

SEQ ID NO: 10058 - DNA, 30 bp, Artificial Sequence
  Synthetic
aaacaacagggaautacatagcttaguacc

SEQ ID NO: 10059 - DNA, 23 bp, Artificial Sequence
  Synthetic
gttauccaagcgguaaatgtguc

SEQ ID NO: 10060 - DNA, 22 bp, Artificial Sequence
  Synthetic
ccgtacaugtcagcgttugagt

SEQ ID NO: 10061 - DNA, 29 bp, Artificial Sequence
  Synthetic
gaaagtcagcttuagttgctaaaatccuc

SEQ ID NO: 10062 - DNA, 22 bp, Artificial Sequence
  Synthetic
gtactucgcagggattcugaca

SEQ ID NO: 10063 - DNA, 30 bp, Artificial Sequence
  Synthetic
atcaaatgaccauttacagtaagtugacct

SEQ ID NO: 10064 - DNA, 27 bp, Artificial Sequence
  Synthetic
aagtcaatccccacauttagttcagut

SEQ ID NO: 10065 - DNA, 30 bp, Artificial Sequence
  Synthetic
agttataggcttatutgctctctcatgtuc

SEQ ID NO: 10066 - DNA, 30 bp, Artificial Sequence
  Synthetic
caccacagtttugtttttgttctcaguaat

SEQ ID NO: 10067 - DNA, 27 bp, Artificial Sequence
  Synthetic
gtctggttagaguttaggaaccugaaa

SEQ ID NO: 10068 - DNA, 32 bp, Artificial Sequence
  Synthetic
agagttgtattagccutaattgtaagtatguc

SEQ ID NO: 10069 - DNA, 28 bp, Artificial Sequence
  Synthetic
cctattaggtcuaactcagtggcaacua

SEQ ID NO: 10070 - DNA, 28 bp, Artificial Sequence
  Synthetic
gtgggaagcacutaattatcaagucagt

SEQ ID NO: 10071 - DNA, 26 bp, Artificial Sequence
  Synthetic
agggatcugaaacaacattcatgugt

SEQ ID NO: 10072 - DNA, 30 bp, Artificial Sequence
  Synthetic
gtcccatctgugcaaattttcatattacut

SEQ ID NO: 10073 - DNA, 24 bp, Artificial Sequence
  Synthetic
caagaaucccaaacucaccaggat

SEQ ID NO: 10074 - DNA, 30 bp, Artificial Sequence
  Synthetic
cgtctacacaatuggacaaattcatcttut

SEQ ID NO: 10075 - DNA, 20 bp, Artificial Sequence
  Synthetic
gagttgtguggcggaucaga

SEQ ID NO: 10076 - DNA, 26 bp, Artificial Sequence
  Synthetic
guagaatctgcatucccagagacaag

SEQ ID NO: 10077 - DNA, 27 bp, Artificial Sequence
  Synthetic
tctcttgatacaucaatccgtgttugg

SEQ ID NO: 10078 - DNA, 25 bp, Artificial Sequence
  Synthetic
caaaacatguaaacactggcctguc

SEQ ID NO: 10079 - DNA, 31 bp, Artificial Sequence
  Synthetic
aaaccttgactaaauctaccatgttttcuca

SEQ ID NO: 10080 - DNA, 29 bp, Artificial Sequence
  Synthetic
agtgttgtcaucagaaccactaactatuc

SEQ ID NO: 10081 - DNA, 28 bp, Artificial Sequence
  Synthetic
gtttatgcctucatttttctctucacca

SEQ ID NO: 10082 - DNA, 26 bp, Artificial Sequence
  Synthetic
ctcttcttugcatttctctcuccaga

SEQ ID NO: 10083 - DNA, 26 bp, Artificial Sequence
  Synthetic
tttcttagttggcacuctatgtgcut

SEQ ID NO: 10084 - DNA, 19 bp, Artificial Sequence
  Synthetic
tcctggaggccugtaggug

SEQ ID NO: 10085 - DNA, 24 bp, Artificial Sequence
  Synthetic
tttttgtaguaccactgggctugt

SEQ ID NO: 10086 - DNA, 23 bp, Artificial Sequence
  Synthetic
agctcagtaucaaaccgcttcuc

SEQ ID NO: 10087 - DNA, 23 bp, Artificial Sequence
  Synthetic
tgtaatctgauccctctgcugct

SEQ ID NO: 10088 - DNA, 30 bp, Artificial Sequence
  Synthetic
caaagactgugaggaaagtttcatuacaat

SEQ ID NO: 10089 - DNA, 25 bp, Artificial Sequence
  Synthetic
acatactaacagugtcacgaacucc

SEQ ID NO: 10090 - DNA, 24 bp, Artificial Sequence
  Synthetic
ctcttgttgtcugagttgctgtug

SEQ ID NO: 10091 - DNA, 23 bp, Artificial Sequence
  Synthetic
gaatcaggaacugctctctgugg

SEQ ID NO: 10092 - DNA, 28 bp, Artificial Sequence
  Synthetic
gaagttcaccucctaacaatactucaca

SEQ ID NO: 10093 - DNA, 22 bp, Artificial Sequence
  Synthetic
ggaggguggtccttuacaaact

SEQ ID NO: 10094 - DNA, 24 bp, Artificial Sequence
  Synthetic
tggttttgcutgaggctgauacat

SEQ ID NO: 10095 - DNA, 21 bp, Artificial Sequence
  Synthetic
gcagagccugaaaaccatgug

SEQ ID NO: 10096 - DNA, 25 bp, Artificial Sequence
  Synthetic
aaaggatactugtcaccacuccaac

SEQ ID NO: 10097 - DNA, 27 bp, Artificial Sequence
  Synthetic
tctgtactucacactaaaaauggcgat

SEQ ID NO: 10098 - DNA, 27 bp, Artificial Sequence
  Synthetic
actcacctgatuctaaaaccctcauct

SEQ ID NO: 10099 - DNA, 25 bp, Artificial Sequence
  Synthetic
gttgaggatacutctgcagatucga

SEQ ID NO: 10100 - DNA, 22 bp, Artificial Sequence
  Synthetic
ctccagtccauaaggcatggut

SEQ ID NO: 10101 - DNA, 27 bp, Artificial Sequence
  Synthetic
caaaatagaacaagutgttgggauggg

SEQ ID NO: 10102 - DNA, 24 bp, Artificial Sequence
  Synthetic
ccaagtaccaugcgtaagtuaagc

SEQ ID NO: 10103 - DNA, 20 bp, Artificial Sequence
  Synthetic
gggccugatactuggagaga

SEQ ID NO: 10104 - DNA, 28 bp, Artificial Sequence
  Synthetic
tccagaaaguttcaguagaacaacgaat

SEQ ID NO: 10105 - DNA, 26 bp, Artificial Sequence
  Synthetic
tttgttttccaauagcggaatgucac

SEQ ID NO: 10106 - DNA, 26 bp, Artificial Sequence
  Synthetic
gatctagtgcagutccctatgtcaut

SEQ ID NO: 10107 - DNA, 22 bp, Artificial Sequence
  Synthetic
gttggaauccaggaagggugac

SEQ ID NO: 10108 - DNA, 24 bp, Artificial Sequence
  Synthetic
gccaatcagugctgataacactut

SEQ ID NO: 10109 - DNA, 28 bp, Artificial Sequence
  Synthetic
tcctctttttcttuctagggataccuga

SEQ ID NO: 10110 - DNA, 30 bp, Artificial Sequence
  Synthetic
aataatccaaaagtucactgataccaccut

SEQ ID NO: 10111 - DNA, 25 bp, Artificial Sequence
  Synthetic
accgcucaaatgttatcugggaaat

SEQ ID NO: 10112 - DNA, 29 bp, Artificial Sequence
  Synthetic
tcgtcatcaaaauggaaataaaacugcaa

SEQ ID NO: 10113 - DNA, 27 bp, Artificial Sequence
  Synthetic
ctggatgguggacaataaaagaaugag

SEQ ID NO: 10114 - DNA, 29 bp, Artificial Sequence
  Synthetic
cgtacagtctguggtaagtaactttuagg

SEQ ID NO: 10115 - DNA, 25 bp, Artificial Sequence
  Synthetic
ctgtggatcugggcaaatgaaaaug

SEQ ID NO: 10116 - DNA, 21 bp, Artificial Sequence
  Synthetic
acttggacugacggaactugg

SEQ ID NO: 10117 - DNA, 22 bp, Artificial Sequence
  Synthetic
aaggacacagcaguggtatugg

SEQ ID NO: 10118 - DNA, 27 bp, Artificial Sequence
  Synthetic
cttacagguctcgcttatuaaagcaga

SEQ ID NO: 10119 - DNA, 26 bp, Artificial Sequence
  Synthetic
tgtcaacautatttcccaucacacct

SEQ ID NO: 10120 - DNA, 27 bp, Artificial Sequence
  Synthetic
ttcaaagaagugagtttggactuacga

SEQ ID NO: 10121 - DNA, 27 bp, Artificial Sequence
  Synthetic
cuttagggaactuagcagagagcaaat

SEQ ID NO: 10122 - DNA, 28 bp, Artificial Sequence
  Synthetic
gctttatctgauaacacacaccacucaa

SEQ ID NO: 10123 - DNA, 28 bp, Artificial Sequence
  Synthetic
tgttttaaagctacucaccctgtaaugg

SEQ ID NO: 10124 - DNA, 25 bp, Artificial Sequence
  Synthetic
agttctguagccttgagtaugggat

SEQ ID NO: 10125 - DNA, 28 bp, Artificial Sequence
  Synthetic
ggagggcaagaguattaagaacaaagua

SEQ ID NO: 10126 - DNA, 31 bp, Artificial Sequence
  Synthetic
gaggcatctttggucctatattgaatgtuat

SEQ ID NO: 10127 - DNA, 21 bp, Artificial Sequence
  Synthetic
agcccaauccgccacataaut

SEQ ID NO: 10128 - DNA, 30 bp, Artificial Sequence
  Synthetic
gattttaaagtgaaguttgtctccaagugt

SEQ ID NO: 10129 - DNA, 28 bp, Artificial Sequence
  Synthetic
attaatcccutttagtgccuccagaaaa

SEQ ID NO: 10130 - DNA, 28 bp, Artificial Sequence
  Synthetic
cactggatgcugttctgtttatgauagt

SEQ ID NO: 10131 - DNA, 29 bp, Artificial Sequence
  Synthetic
gcagtttgtgugctaaaggaaaaatguat

SEQ ID NO: 10132 - DNA, 27 bp, Artificial Sequence
  Synthetic
gaacaacuttatcctccuggaagaaca

SEQ ID NO: 10133 - DNA, 23 bp, Artificial Sequence
  Synthetic
gaaactgcucacataccccauga

SEQ ID NO: 10134 - DNA, 23 bp, Artificial Sequence
  Synthetic
cccttgauagactgaccuggaaa

SEQ ID NO: 10135 - DNA, 22 bp, Artificial Sequence
  Synthetic
atcatatugggcacagcctgut

SEQ ID NO: 10136 - DNA, 21 bp, Artificial Sequence
  Synthetic
aacgaagaguactgcctgcug

SEQ ID NO: 10137 - DNA, 25 bp, Artificial Sequence
  Synthetic
cactgtgggagauaggacaaaucat

SEQ ID NO: 10138 - DNA, 22 bp, Artificial Sequence
  Synthetic
agauggttgcuagagcaaagcc

SEQ ID NO: 10139 - DNA, 27 bp, Artificial Sequence
  Synthetic
gggacatgaguttacattcctgatugt

SEQ ID NO: 10140 - DNA, 23 bp, Artificial Sequence
  Synthetic
cugtcagattatcuacgcaccca

SEQ ID NO: 10141 - DNA, 21 bp, Artificial Sequence
  Synthetic
tgttcacccugcatgctcaua

SEQ ID NO: 10142 - DNA, 24 bp, Artificial Sequence
  Synthetic
ttctagaggcaggutggtttgtut

SEQ ID NO: 10143 - DNA, 23 bp, Artificial Sequence
  Synthetic
ccgaaatccgguactgatgtcut

SEQ ID NO: 10144 - DNA, 19 bp, Artificial Sequence
  Synthetic
gcugaagggcagctctuct

SEQ ID NO: 10145 - DNA, 17 bp, Artificial Sequence
  Synthetic
gccacuggcggagctuc

SEQ ID NO: 10146 - DNA, 21 bp, Artificial Sequence
  Synthetic
gugcgcttugaacaagagcaa

SEQ ID NO: 10147 - DNA, 24 bp, Artificial Sequence
  Synthetic
gcctctgtuaggtgacccaaatuc

SEQ ID NO: 10148 - DNA, 19 bp, Artificial Sequence
  Synthetic
cacccggaaaucccguacc

SEQ ID NO: 10149 - DNA, 24 bp, Artificial Sequence
  Synthetic
atggccacautagcaattagcuct

SEQ ID NO: 10150 - DNA, 22 bp, Artificial Sequence
  Synthetic
tcugcctgtacuaccgggaaat

SEQ ID NO: 10151 - DNA, 25 bp, Artificial Sequence
  Synthetic
gcagcttctcaaugtttttcctcug

SEQ ID NO: 10152 - DNA, 25 bp, Artificial Sequence
  Synthetic
ctgagtgcugtttaatagugagcca

SEQ ID NO: 10153 - DNA, 25 bp, Artificial Sequence
  Synthetic
tgatgtgttcuggtaaatcguagcc

SEQ ID NO: 10154 - DNA, 22 bp, Artificial Sequence
  Synthetic
gtgttgaaggugttccuggaga

SEQ ID NO: 10155 - DNA, 22 bp, Artificial Sequence
  Synthetic
tgactgggcutcaaaaugccat

SEQ ID NO: 10156 - DNA, 22 bp, Artificial Sequence
  Synthetic
ggtggaaacaggugatgacugt

SEQ ID NO: 10157 - DNA, 23 bp, Artificial Sequence
  Synthetic
gggtagtcccauctcaagtcuca

SEQ ID NO: 10158 - DNA, 17 bp, Artificial Sequence
  Synthetic
cugggagccctucgact

SEQ ID NO: 10159 - DNA, 17 bp, Artificial Sequence
  Synthetic
cccgccucccataccug

SEQ ID NO: 10160 - DNA, 22 bp, Artificial Sequence
  Synthetic
cuccagacccugaagaagagga

SEQ ID NO: 10161 - DNA, 24 bp, Artificial Sequence
  Synthetic
cgggtctcuccttctcatgatcut

SEQ ID NO: 10162 - DNA, 21 bp, Artificial Sequence
  Synthetic
ctgccagcccuaacaugagat

SEQ ID NO: 10163 - DNA, 25 bp, Artificial Sequence
  Synthetic
aagggacagagaaugtaaccucaga

SEQ ID NO: 10164 - DNA, 21 bp, Artificial Sequence
  Synthetic
tctcctugacttccucagcct

SEQ ID NO: 10165 - DNA, 21 bp, Artificial Sequence
  Synthetic
agaacacugagggcagagcua

SEQ ID NO: 10166 - DNA, 23 bp, Artificial Sequence
  Synthetic
gtgattacugctccatcucccaa

SEQ ID NO: 10167 - DNA, 23 bp, Artificial Sequence
  Synthetic
ctcacgtuagcctgatactuggt

SEQ ID NO: 10168 - DNA, 27 bp, Artificial Sequence
  Synthetic
tgaactcactguctaaggtccuaacaa

SEQ ID NO: 10169 - DNA, 22 bp, Artificial Sequence
  Synthetic
ttgggcaauttctgccugaaag

SEQ ID NO: 10170 - DNA, 28 bp, Artificial Sequence
  Synthetic
cttgtgattgacuttaaacttgtuggca

SEQ ID NO: 10171 - DNA, 21 bp, Artificial Sequence
  Synthetic
gaaccuccagcagaagacucc

SEQ ID NO: 10172 - DNA, 28 bp, Artificial Sequence
  Synthetic
attgaucaggaagaacuaaacaagacca

SEQ ID NO: 10173 - DNA, 22 bp, Artificial Sequence
  Synthetic
aacaugcaaaggcttcucacac

SEQ ID NO: 10174 - DNA, 23 bp, Artificial Sequence
  Synthetic
ctccagcagagcaaaauctugaa

SEQ ID NO: 10175 - DNA, 28 bp, Artificial Sequence
  Synthetic
gtggtaaagggaauaagcattattugcc

SEQ ID NO: 10176 - DNA, 25 bp, Artificial Sequence
  Synthetic
gcttcgagguggtatataugaccga

SEQ ID NO: 10177 - DNA, 23 bp, Artificial Sequence
  Synthetic
tttgccttgcuctcttccatcut

SEQ ID NO: 10178 - DNA, 19 bp, Artificial Sequence
  Synthetic
gcugaggccgacaagaaug

SEQ ID NO: 10179 - DNA, 23 bp, Artificial Sequence
  Synthetic
ccacaccaaguaccaaagcuact

SEQ ID NO: 10180 - DNA, 19 bp, Artificial Sequence
  Synthetic
gctctcuccgctcgaagug

SEQ ID NO: 10181 - DNA, 21 bp, Artificial Sequence
  Synthetic
cgtcttcaucgtcctccucct

SEQ ID NO: 10182 - DNA, 24 bp, Artificial Sequence
  Synthetic
ctatatcatcugggtgctcggtut

SEQ ID NO: 10183 - DNA, 21 bp, Artificial Sequence
  Synthetic
gccagtuccctcattcuggac

SEQ ID NO: 10184 - DNA, 18 bp, Artificial Sequence
  Synthetic
acagtcccucccagcuct

SEQ ID NO: 10185 - DNA, 22 bp, Artificial Sequence
  Synthetic
atcgtccuggacttcauccaac

SEQ ID NO: 10186 - DNA, 23 bp, Artificial Sequence
  Synthetic
gttcggaccutcatctcugaact

SEQ ID NO: 10187 - DNA, 20 bp, Artificial Sequence
  Synthetic
atcatgacaucgctguggct

SEQ ID NO: 10188 - DNA, 23 bp, Artificial Sequence
  Synthetic
ttggtcaaucagaacttgcucca

SEQ ID NO: 10189 - DNA, 21 bp, Artificial Sequence
  Synthetic
gagggttugcatagacuggct

SEQ ID NO: 10190 - DNA, 30 bp, Artificial Sequence
  Synthetic
aacaatcttgtcuggagatatggtcaatut

SEQ ID NO: 10191 - DNA, 26 bp, Artificial Sequence
  Synthetic
gcagtaacugacacacatgaaaaugg

SEQ ID NO: 10192 - DNA, 28 bp, Artificial Sequence
  Synthetic
ttcaggagccacauaaactactucaaat

SEQ ID NO: 10193 - DNA, 23 bp, Artificial Sequence
  Synthetic
tagatctcuctaccccuaagcct

SEQ ID NO: 10194 - DNA, 31 bp, Artificial Sequence
  Synthetic
gtccaacaaaggagcaugattatactagaua

SEQ ID NO: 10195 - DNA, 26 bp, Artificial Sequence
  Synthetic
aagautcccuaaagaaaagccaaggt

SEQ ID NO: 10196 - DNA, 29 bp, Artificial Sequence
  Synthetic
aaaagaaagaaguaagagtcaacctcaut

SEQ ID NO: 10197 - DNA, 24 bp, Artificial Sequence
  Synthetic
gttctccaggcugaagtatauggg

SEQ ID NO: 10198 - DNA, 25 bp, Artificial Sequence
  Synthetic
ttcaaaattgtccugtacacccugt

SEQ ID NO: 10199 - DNA, 25 bp, Artificial Sequence
  Synthetic
gcttttacagcugcactctatucag

SEQ ID NO: 10200 - DNA, 24 bp, Artificial Sequence
  Synthetic
tggttgattugagacacagacugg

SEQ ID NO: 10201 - DNA, 23 bp, Artificial Sequence
  Synthetic
gcuggagaaggagtucgacaaag

SEQ ID NO: 10202 - DNA, 22 bp, Artificial Sequence
  Synthetic
atgactatgaugggctgctucc

SEQ ID NO: 10203 - DNA, 22 bp, Artificial Sequence
  Synthetic
gctaatgagcutgagcaccugt

SEQ ID NO: 10204 - DNA, 23 bp, Artificial Sequence
  Synthetic
acaatguagggagaggtggcaua

SEQ ID NO: 10205 - DNA, 22 bp, Artificial Sequence
  Synthetic
ctttgcgattuctgcccatcug

SEQ ID NO: 10206 - DNA, 24 bp, Artificial Sequence
  Synthetic
acaagctuccagaagaacagucat

SEQ ID NO: 10207 - DNA, 29 bp, Artificial Sequence
  Synthetic
accgtctctcucattaaactagatucaca

SEQ ID NO: 10208 - DNA, 30 bp, Artificial Sequence
  Synthetic
cctttcttctgucctctctttatttcuaca

SEQ ID NO: 10209 - DNA, 22 bp, Artificial Sequence
  Synthetic
gagatggaguggagtggtgtuc

SEQ ID NO: 10210 - DNA, 27 bp, Artificial Sequence
  Synthetic
agcagutttgaattcttugaagaagca

SEQ ID NO: 10211 - DNA, 21 bp, Artificial Sequence
  Synthetic
gggtgggucaagtgaactcuc

SEQ ID NO: 10212 - DNA, 27 bp, Artificial Sequence
  Synthetic
aacacttccaguaaccatgaaaacuca

SEQ ID NO: 10213 - DNA, 29 bp, Artificial Sequence
  Synthetic
tgaaccaaagacutacacagtatttucct

SEQ ID NO: 10214 - DNA, 30 bp, Artificial Sequence
  Synthetic
cattggtttattagucccattaggagtuct

SEQ ID NO: 10215 - DNA, 26 bp, Artificial Sequence
  Synthetic
gtccattutcttgaaacucagcaaca

SEQ ID NO: 10216 - DNA, 27 bp, Artificial Sequence
  Synthetic
acagtgttagaaaaaugtggctcucat

SEQ ID NO: 10217 - DNA, 27 bp, Artificial Sequence
  Synthetic
gaacattgtctucatcttctgatgcug

SEQ ID NO: 10218 - DNA, 17 bp, Artificial Sequence
  Synthetic
cggacgcuggtcatgug

SEQ ID NO: 10219 - DNA, 22 bp, Artificial Sequence
  Synthetic
actaaatgcacutggtgcugct

SEQ ID NO: 10220 - DNA, 31 bp, Artificial Sequence
  Synthetic
tgtattttaactucttttctagcugcaaggt

SEQ ID NO: 10221 - DNA, 20 bp, Artificial Sequence
  Synthetic
ttctgtugacagcgccugat

SEQ ID NO: 10222 - DNA, 27 bp, Artificial Sequence
  Synthetic
tgctcagauaccaaggtauaaaggaca

SEQ ID NO: 10223 - DNA, 22 bp, Artificial Sequence
  Synthetic
cugagaacccaatcugacagga

SEQ ID NO: 10224 - DNA, 23 bp, Artificial Sequence
  Synthetic
gagcaccgautaactgtcctugt

SEQ ID NO: 10225 - DNA, 22 bp, Artificial Sequence
  Synthetic
aagtccacauctttgggcacut

SEQ ID NO: 10226 - DNA, 26 bp, Artificial Sequence
  Synthetic
gcggattatcuggaagatgttgcaua

SEQ ID NO: 10227 - DNA, 23 bp, Artificial Sequence
  Synthetic
cagugtttttgaaaugcaaggca

SEQ ID NO: 10228 - DNA, 28 bp, Artificial Sequence
  Synthetic
ttgtacaactgaautggaacaaagauga

SEQ ID NO: 10229 - DNA, 25 bp, Artificial Sequence
  Synthetic
agtctccugtttatcagucagacct

SEQ ID NO: 10230 - DNA, 26 bp, Artificial Sequence
  Synthetic
cattttgatttutgtgcggtugcaat

SEQ ID NO: 10231 - DNA, 25 bp, Artificial Sequence
  Synthetic
cacctcaggautagaaatggtucga

SEQ ID NO: 10232 - DNA, 29 bp, Artificial Sequence
  Synthetic
agctttagagaaguatggtcuggaaaaag

SEQ ID NO: 10233 - DNA, 27 bp, Artificial Sequence
  Synthetic
atgatatgguaggctgaaaatcuaggt

SEQ ID NO: 10234 - DNA, 28 bp, Artificial Sequence
  Synthetic
gggattttaguctttcagtugaagagga

SEQ ID NO: 10235 - DNA, 28 bp, Artificial Sequence
  Synthetic
cttaactctacuaaatagggcagctuct

SEQ ID NO: 10236 - DNA, 30 bp, Artificial Sequence
  Synthetic
cattctgtgttuaaatgctgtgaactucat

SEQ ID NO: 10237 - DNA, 21 bp, Artificial Sequence
  Synthetic
ggccttccacguaggtttcug

SEQ ID NO: 10238 - DNA, 21 bp, Artificial Sequence
  Synthetic
cgctgagtgucaagcttggut

SEQ ID NO: 10239 - DNA, 25 bp, Artificial Sequence
  Synthetic
gataatctggcugctgttctacuct

SEQ ID NO: 10240 - DNA, 30 bp, Artificial Sequence
  Synthetic
gctgaagattcatutttgtctgccattaua

SEQ ID NO: 10241 - DNA, 24 bp, Artificial Sequence
  Synthetic
tgactttatgtgugcgctctguag

SEQ ID NO: 10242 - DNA, 24 bp, Artificial Sequence
  Synthetic
agagtccagautgtttcccatgug

SEQ ID NO: 10243 - DNA, 25 bp, Artificial Sequence
  Synthetic
agactgttctcutcagggtcatcua

SEQ ID NO: 10244 - DNA, 22 bp, Artificial Sequence
  Synthetic
cgattatccgucagcagtuggg

SEQ ID NO: 10245 - DNA, 28 bp, Artificial Sequence
  Synthetic
agctcttgctcaucataaagatcagaug

SEQ ID NO: 10246 - DNA, 21 bp, Artificial Sequence
  Synthetic
cgcagtgauggaagggaagug

SEQ ID NO: 10247 - DNA, 24 bp, Artificial Sequence
  Synthetic
ctcuggcacagagggtcuaaaaat

SEQ ID NO: 10248 - DNA, 22 bp, Artificial Sequence
  Synthetic
tcaatgcagugttttcgcctug

SEQ ID NO: 10249 - DNA, 27 bp, Artificial Sequence
  Synthetic
cagaatctcucacatcatttgcugaat

SEQ ID NO: 10250 - DNA, 24 bp, Artificial Sequence
  Synthetic
tcatgacaagaacaagcuctgugg

SEQ ID NO: 10251 - DNA, 23 bp, Artificial Sequence
  Synthetic
actgttgttuccctactggucct

SEQ ID NO: 10252 - DNA, 22 bp, Artificial Sequence
  Synthetic
ggagggaaaagugcataugcct

SEQ ID NO: 10253 - DNA, 28 bp, Artificial Sequence
  Synthetic
actagauaactgagatguccaaagggaa

SEQ ID NO: 10254 - DNA, 22 bp, Artificial Sequence
  Synthetic
cagctauggaccgaaagtcuga

SEQ ID NO: 10255 - DNA, 20 bp, Artificial Sequence
  Synthetic
ctgcuggtgtttuccaacgg

SEQ ID NO: 10256 - DNA, 21 bp, Artificial Sequence
  Synthetic
gttttcucccctgacugcaca

SEQ ID NO: 10257 - DNA, 25 bp, Artificial Sequence
  Synthetic
aaagctcctcuttgctgactguaat

SEQ ID NO: 10258 - DNA, 21 bp, Artificial Sequence
  Synthetic
ggacaccaugctgatcaugca

SEQ ID NO: 10259 - DNA, 25 bp, Artificial Sequence
  Synthetic
gggcccutttaatccttaucacgat

SEQ ID NO: 10260 - DNA, 27 bp, Artificial Sequence
  Synthetic
cgctgaagaaaaggutatggtccttua

SEQ ID NO: 10261 - DNA, 21 bp, Artificial Sequence
  Synthetic
gcaggtccaaucacaaagcug

SEQ ID NO: 10262 - DNA, 29 bp, Artificial Sequence
  Synthetic
taaaggtattuttgtattctcugagcact

SEQ ID NO: 10263 - DNA, 21 bp, Artificial Sequence
  Synthetic
acagctgcuccagtagaucct

SEQ ID NO: 10264 - DNA, 26 bp, Artificial Sequence
  Synthetic
actggagaaugaacugaacacaaagt

SEQ ID NO: 10265 - DNA, 29 bp, Artificial Sequence
  Synthetic
atcacttagaaatauaacccccttccuct

SEQ ID NO: 10266 - DNA, 21 bp, Artificial Sequence
  Synthetic
cctgcagcuatgtcucccaag

SEQ ID NO: 10267 - DNA, 24 bp, Artificial Sequence
  Synthetic
tgttttcucttgctgtuccaacaa

SEQ ID NO: 10268 - DNA, 21 bp, Artificial Sequence
  Synthetic
caggtccuccaccaccatauc

SEQ ID NO: 10269 - DNA, 24 bp, Artificial Sequence
  Synthetic
tttcacauggaaactuggaaagct

SEQ ID NO: 10270 - DNA, 21 bp, Artificial Sequence
  Synthetic
ccaaagccaaagutgccuaca

SEQ ID NO: 10271 - DNA, 27 bp, Artificial Sequence
  Synthetic
ctagacaagaaaugcaggaagtucaga

SEQ ID NO: 10272 - DNA, 29 bp, Artificial Sequence
  Synthetic
caaagtaatctcuaaggtgatgttccuca

SEQ ID NO: 10273 - DNA, 24 bp, Artificial Sequence
  Synthetic
ggttgggtgcuttgaattatgcut

SEQ ID NO: 10274 - DNA, 26 bp, Artificial Sequence
  Synthetic
agttcctcaaacuttcttctgtggut

SEQ ID NO: 10275 - DNA, 20 bp, Artificial Sequence
  Synthetic
gccagcaggucacctcauat

SEQ ID NO: 10276 - DNA, 18 bp, Artificial Sequence
  Synthetic
gggatgguggaggcuagg

SEQ ID NO: 10277 - DNA, 25 bp, Artificial Sequence
  Synthetic
agaaccgcaggaugaaaaugaagaa

SEQ ID NO: 10278 - DNA, 24 bp, Artificial Sequence
  Synthetic
ccttcgctgggutgtttttctcua

SEQ ID NO: 10279 - DNA, 17 bp, Artificial Sequence
  Synthetic
tctcctucgcgggctug

SEQ ID NO: 10280 - DNA, 18 bp, Artificial Sequence
  Synthetic
gccaacgcucagctcauc

SEQ ID NO: 10281 - DNA, 24 bp, Artificial Sequence
  Synthetic
tgcagtttcauaatttccgugggt

SEQ ID NO: 10282 - DNA, 25 bp, Artificial Sequence
  Synthetic
ccttcattcucctgttcugaaacca

SEQ ID NO: 10283 - DNA, 24 bp, Artificial Sequence
  Synthetic
ccctataccaaguaccagauccga

SEQ ID NO: 10284 - DNA, 18 bp, Artificial Sequence
  Synthetic
ctctgugcacgagcucct

SEQ ID NO: 10285 - DNA, 18 bp, Artificial Sequence
  Synthetic
cgtctucgcgcccaauga

SEQ ID NO: 10286 - DNA, 29 bp, Artificial Sequence
  Synthetic
gttgccttctugctctatttttaauccat

SEQ ID NO: 10287 - DNA, 23 bp, Artificial Sequence
  Synthetic
gataucagccacgacgaatcuct

SEQ ID NO: 10288 - DNA, 20 bp, Artificial Sequence
  Synthetic
cagggcuggtagcttuccat

SEQ ID NO: 10289 - DNA, 19 bp, Artificial Sequence
  Synthetic
gcgctaaggagutcgccut

SEQ ID NO: 10290 - DNA, 20 bp, Artificial Sequence
  Synthetic
gctgccgaaguagccauagg

SEQ ID NO: 10291 - DNA, 17 bp, Artificial Sequence
  Synthetic
cgucgtccucgggaggt

SEQ ID NO: 10292 - DNA, 23 bp, Artificial Sequence
  Synthetic
tctttaaagggutgctgaaugct

SEQ ID NO: 10293 - DNA, 21 bp, Artificial Sequence
  Synthetic
cggtgucggctgagattauca

SEQ ID NO: 10294 - DNA, 21 bp, Artificial Sequence
  Synthetic
ctcttccccuccattcaugca

SEQ ID NO: 10295 - DNA, 23 bp, Artificial Sequence
  Synthetic
ctgacagtccutgcacttctcut

SEQ ID NO: 10296 - DNA, 25 bp, Artificial Sequence
  Synthetic
cataggttggcugctgtaattctug

SEQ ID NO: 10297 - DNA, 27 bp, Artificial Sequence
  Synthetic
ttaatctttttctcugcttagcctcug

SEQ ID NO: 10298 - DNA, 21 bp, Artificial Sequence
  Synthetic
cccgagacucacacttctuct

SEQ ID NO: 10299 - DNA, 19 bp, Artificial Sequence
  Synthetic
ccgctggugacccactuac

SEQ ID NO: 10300 - DNA, 21 bp, Artificial Sequence
  Synthetic
catgtccccacgcugagttua

SEQ ID NO: 10301 - DNA, 21 bp, Artificial Sequence
  Synthetic
tggcattugaagggcttcucc

SEQ ID NO: 10302 - DNA, 20 bp, Artificial Sequence
  Synthetic
ggacgcgacugaacccttua

SEQ ID NO: 10303 - DNA, 22 bp, Artificial Sequence
  Synthetic
tttggcgacgutacttgcuagt

SEQ ID NO: 10304 - DNA, 18 bp, Artificial Sequence
  Synthetic
aggtggucccggtcauca

SEQ ID NO: 10305 - DNA, 20 bp, Artificial Sequence
  Synthetic
accaacutggcctuggagag

SEQ ID NO: 10306 - DNA, 24 bp, Artificial Sequence
  Synthetic
ggagcagaugaaggtgtacaagug

SEQ ID NO: 10307 - DNA, 20 bp, Artificial Sequence
  Synthetic
cgagaacucgtaccggucct

SEQ ID NO: 10308 - DNA, 23 bp, Artificial Sequence
  Synthetic
gggtgttgguttggctctatuct

SEQ ID NO: 10309 - DNA, 23 bp, Artificial Sequence
  Synthetic
atgtattttugagcccccauggt

SEQ ID NO: 10310 - DNA, 23 bp, Artificial Sequence
  Synthetic
tttagacacagucctgtgggaut

SEQ ID NO: 10311 - DNA, 21 bp, Artificial Sequence
  Synthetic
cgttgtggccucaaccattuc

SEQ ID NO: 10312 - DNA, 24 bp, Artificial Sequence
  Synthetic
ttggaggcugagataagtcctuct

SEQ ID NO: 10313 - DNA, 30 bp, Artificial Sequence
  Synthetic
gggataatatatguataaaagcaccugcca

SEQ ID NO: 10314 - DNA, 24 bp, Artificial Sequence
  Synthetic
aggaacctccuacctctattcugg

SEQ ID NO: 10315 - DNA, 22 bp, Artificial Sequence
  Synthetic
aaggtcagtucagcctttguga

SEQ ID NO: 10316 - DNA, 21 bp, Artificial Sequence
  Synthetic
tcacuagccgacagagacugt

SEQ ID NO: 10317 - DNA, 25 bp, Artificial Sequence
  Synthetic
gctatgagaacutgctctgacctug

SEQ ID NO: 10318 - DNA, 26 bp, Artificial Sequence
  Synthetic
agataattcctccuccctatgagcug

SEQ ID NO: 10319 - DNA, 23 bp, Artificial Sequence
  Synthetic
cctctgggaaguagggactgtut

SEQ ID NO: 10320 - DNA, 18 bp, Artificial Sequence
  Synthetic
gccugcaggatggugaca

SEQ ID NO: 10321 - DNA, 26 bp, Artificial Sequence
  Synthetic
cctcacctuggtcctttacaauacag

SEQ ID NO: 10322 - DNA, 23 bp, Artificial Sequence
  Synthetic
ggcttaacutagctccugaacca

SEQ ID NO: 10323 - DNA, 23 bp, Artificial Sequence
  Synthetic
cacucctttttggucaaccacag

SEQ ID NO: 10324 - DNA, 21 bp, Artificial Sequence
  Synthetic
acagtgcacutgcatggctua

SEQ ID NO: 10325 - DNA, 27 bp, Artificial Sequence
  Synthetic
tctcacactcuttccaatttctuccag

SEQ ID NO: 10326 - DNA, 20 bp, Artificial Sequence
  Synthetic
gccctccaugacccttauga

SEQ ID NO: 10327 - DNA, 21 bp, Artificial Sequence
  Synthetic
gcaaccugcagatgagugacc

SEQ ID NO: 10328 - DNA, 21 bp, Artificial Sequence
  Synthetic
caggtggcucctgagtacauc

SEQ ID NO: 10329 - DNA, 27 bp, Artificial Sequence
  Synthetic
ctttctttcctuctccattctcucaca

SEQ ID NO: 10330 - DNA, 23 bp, Artificial Sequence
  Synthetic
gcaagacucctactccctucaaa

SEQ ID NO: 10331 - DNA, 17 bp, Artificial Sequence
  Synthetic
acccacugcccaaggug

SEQ ID NO: 10332 - DNA, 22 bp, Artificial Sequence
  Synthetic
ggagtguaaagaggcacuagca

SEQ ID NO: 10333 - DNA, 32 bp, Artificial Sequence
  Synthetic
cttctgaaggtcutcctcatttaaaacauaaa

SEQ ID NO: 10334 - DNA, 23 bp, Artificial Sequence
  Synthetic
gggagccaaagucctttcatcug

SEQ ID NO: 10335 - DNA, 28 bp, Artificial Sequence
  Synthetic
ccgtcaaaaacauaaaaccatcttucgt

SEQ ID NO: 10336 - DNA, 22 bp, Artificial Sequence
  Synthetic
ggcccagcutgctagacaaaua

SEQ ID NO: 10337 - DNA, 29 bp, Artificial Sequence
  Synthetic
tttttgttgacgaucttgttgaagaaguc

SEQ ID NO: 10338 - DNA, 31 bp, Artificial Sequence
  Synthetic
ccctgctaatcugttattaccattatcauct

SEQ ID NO: 10339 - DNA, 21 bp, Artificial Sequence
  Synthetic
tggagacacuggatgggaguc

SEQ ID NO: 10340 - DNA, 30 bp, Artificial Sequence
  Synthetic
ttttaaaagttctaugttgtccttguaggt

SEQ ID NO: 10341 - DNA, 30 bp, Artificial Sequence
  Synthetic
ctcatttucaaggagaacuctagttttcut

SEQ ID NO: 10342 - DNA, 28 bp, Artificial Sequence
  Synthetic
tggtaaggaagautctatcctatcaugt

SEQ ID NO: 10343 - DNA, 27 bp, Artificial Sequence
  Synthetic
cagttaaaguaagtaaagugccaccag

SEQ ID NO: 10344 - DNA, 25 bp, Artificial Sequence
  Synthetic
tgaaaautgactuagccaaccgaga

SEQ ID NO: 10345 - DNA, 27 bp, Artificial Sequence
  Synthetic
acagcaaaatcauccttgtattcatug

SEQ ID NO: 10346 - DNA, 21 bp, Artificial Sequence
  Synthetic
gaatctgcaacucccccugaa

SEQ ID NO: 10347 - DNA, 30 bp, Artificial Sequence
  Synthetic
aagcatttctuaccttaatttccaguacat

SEQ ID NO: 10348 - DNA, 26 bp, Artificial Sequence
  Synthetic
aaagtgcuacaacctgtgtaguacaa

SEQ ID NO: 10349 - DNA, 26 bp, Artificial Sequence
  Synthetic
tgatatugagacaacaccagcaauca

SEQ ID NO: 10350 - DNA, 26 bp, Artificial Sequence
  Synthetic
ctgtttcaguccccattaaaugaggt

SEQ ID NO: 10351 - DNA, 27 bp, Artificial Sequence
  Synthetic
gactggatataucagagtccccacuag

SEQ ID NO: 10352 - DNA, 32 bp, Artificial Sequence
  Synthetic
gacaaaagtattcacugttccataatgaagut

SEQ ID NO: 10353 - DNA, 21 bp, Artificial Sequence
  Synthetic
cttcactucgcaggcagatuc

SEQ ID NO: 10354 - DNA, 32 bp, Artificial Sequence
  Synthetic
cttgccagagacaugtatgataaagaatacua

SEQ ID NO: 10355 - DNA, 32 bp, Artificial Sequence
  Synthetic
atgaaaguaaaagaggagaaautcagagauaa

SEQ ID NO: 10356 - DNA, 23 bp, Artificial Sequence
  Synthetic
gctaaaatgcuggcacccuaaag

SEQ ID NO: 10357 - DNA, 23 bp, Artificial Sequence
  Synthetic
gagcgacacautttacgtucaca

SEQ ID NO: 10358 - DNA, 22 bp, Artificial Sequence
  Synthetic
cggatactuggcaaatcugcga

SEQ ID NO: 10359 - DNA, 18 bp, Artificial Sequence
  Synthetic
gcugggtuaccccaccag

SEQ ID NO: 10360 - DNA, 22 bp, Artificial Sequence
  Synthetic
acacugacactcugagacacct

SEQ ID NO: 10361 - DNA, 22 bp, Artificial Sequence
  Synthetic
atttgcugccagagggatcuac

SEQ ID NO: 10362 - DNA, 18 bp, Artificial Sequence
  Synthetic
cctacaccugcggtgcug

SEQ ID NO: 10363 - DNA, 20 bp, Artificial Sequence
  Synthetic
aggtauccagcccttcccut

SEQ ID NO: 10364 - DNA, 18 bp, Artificial Sequence
  Synthetic
ggctccugtcctgcucct

SEQ ID NO: 10365 - DNA, 23 bp, Artificial Sequence
  Synthetic
cagatgcagaucgacaagaucct

SEQ ID NO: 10366 - DNA, 18 bp, Artificial Sequence
  Synthetic
cggctgcauggcgauaag

SEQ ID NO: 10367 - DNA, 27 bp, Artificial Sequence
  Synthetic
gtgtatgtgtttugcttttccttcugt

SEQ ID NO: 10368 - DNA, 23 bp, Artificial Sequence
  Synthetic
ttggaagggauctttgactuggg

SEQ ID NO: 10369 - DNA, 24 bp, Artificial Sequence
  Synthetic
gtgaagggcutcgattttgcuaag

SEQ ID NO: 10370 - DNA, 21 bp, Artificial Sequence
  Synthetic
cagagcucactgucagaacga

SEQ ID NO: 10371 - DNA, 22 bp, Artificial Sequence
  Synthetic
cagtcaagucttcggaccugat

SEQ ID NO: 10372 - DNA, 26 bp, Artificial Sequence
  Synthetic
gaaacaagaaagguagcaucattcuc

SEQ ID NO: 10373 - DNA, 27 bp, Artificial Sequence
  Synthetic
gtatccacagcucaacttatctcagut

SEQ ID NO: 10374 - DNA, 26 bp, Artificial Sequence
  Synthetic
ccactggagggaauaagagtuaagca

SEQ ID NO: 10375 - DNA, 23 bp, Artificial Sequence
  Synthetic
gaaaggccuaatgacagctcuct

SEQ ID NO: 10376 - DNA, 22 bp, Artificial Sequence
  Synthetic
ccagtcucaccagacaucacac

SEQ ID NO: 10377 - DNA, 24 bp, Artificial Sequence
  Synthetic
ggcatttgguggtttgctttcaut

SEQ ID NO: 10378 - DNA, 20 bp, Artificial Sequence
  Synthetic
ctgtgggugtgagtgauggg

SEQ ID NO: 10379 - DNA, 19 bp, Artificial Sequence
  Synthetic
cggtcacgugtctgtccug

SEQ ID NO: 10380 - DNA, 23 bp, Artificial Sequence
  Synthetic
acgcutcaacaaacucgagagaa

SEQ ID NO: 10381 - DNA, 22 bp, Artificial Sequence
  Synthetic
ctgcagtcauctcagctgtcuc

SEQ ID NO: 10382 - DNA, 21 bp, Artificial Sequence
  Synthetic
aaaacacucgggtctcugacg

SEQ ID NO: 10383 - DNA, 22 bp, Artificial Sequence
  Synthetic
tctgttgcugaaacccaaguga

SEQ ID NO: 10384 - DNA, 20 bp, Artificial Sequence
  Synthetic
cggtcaugcacagagtcucg

SEQ ID NO: 10385 - DNA, 24 bp, Artificial Sequence
  Synthetic
tcctguggacaacactcataucct

SEQ ID NO: 10386 - DNA, 24 bp, Artificial Sequence
  Synthetic
caaggaggguaacgguataguaat

SEQ ID NO: 10387 - DNA, 24 bp, Artificial Sequence
  Synthetic
catttaucaagcaggactcugcca

SEQ ID NO: 10388 - DNA, 22 bp, Artificial Sequence
  Synthetic
cgtggagtgguccagtgaguat

SEQ ID NO: 10389 - DNA, 26 bp, Artificial Sequence
  Synthetic
gccactactttugatacagcctttut

SEQ ID NO: 10390 - DNA, 17 bp, Artificial Sequence
  Synthetic
gtccgcugcccttguct

SEQ ID NO: 10391 - DNA, 25 bp, Artificial Sequence
  Synthetic
ggaugaaauggaaacgcagcaaaaa

SEQ ID NO: 10392 - DNA, 17 bp, Artificial Sequence
  Synthetic
ggtgccgguggaggaug

SEQ ID NO: 10393 - DNA, 17 bp, Artificial Sequence
  Synthetic
cagcuggaccaguggct

SEQ ID NO: 10394 - DNA, 17 bp, Artificial Sequence
  Synthetic
gggcgaugggttgaugg

SEQ ID NO: 10395 - DNA, 19 bp, Artificial Sequence
  Synthetic
tgcagcugcggatggauag

SEQ ID NO: 10396 - DNA, 22 bp, Artificial Sequence
  Synthetic
cctgtctgugtcctctctguct

SEQ ID NO: 10397 - DNA, 20 bp, Artificial Sequence
  Synthetic
ggtgaccucttgccaucacg

SEQ ID NO: 10398 - DNA, 18 bp, Artificial Sequence
  Synthetic
cccaugagcccacacucc

SEQ ID NO: 10399 - DNA, 19 bp, Artificial Sequence
  Synthetic
cacagagcgugtgtuccga

SEQ ID NO: 10400 - DNA, 19 bp, Artificial Sequence
  Synthetic
catccgcugguaccacaac

SEQ ID NO: 10401 - DNA, 20 bp, Artificial Sequence
  Synthetic
ggtgacggguagggtagguc

SEQ ID NO: 10402 - DNA, 20 bp, Artificial Sequence
  Synthetic
gcatcacagccuaccagucc

SEQ ID NO: 10403 - DNA, 19 bp, Artificial Sequence
  Synthetic
gcacccuggtgatgtcgut

SEQ ID NO: 10404 - DNA, 21 bp, Artificial Sequence
  Synthetic
tttgctcaagccuctctcuca

SEQ ID NO: 10405 - DNA, 18 bp, Artificial Sequence
  Synthetic
caggugctcguccaccag

SEQ ID NO: 10406 - DNA, 21 bp, Artificial Sequence
  Synthetic
ggtccuggtgtctcugaggag

SEQ ID NO: 10407 - DNA, 22 bp, Artificial Sequence
  Synthetic
cattucggaagacgagcagtug

SEQ ID NO: 10408 - DNA, 18 bp, Artificial Sequence
  Synthetic
cugagggagccgaaccug

SEQ ID NO: 10409 - DNA, 19 bp, Artificial Sequence
  Synthetic
caugagcacggccacatug

SEQ ID NO: 10410 - DNA, 21 bp, Artificial Sequence
  Synthetic
tgggtuggacggccattaaut

SEQ ID NO: 10411 - DNA, 24 bp, Artificial Sequence
  Synthetic
catctggtagutggtgagtgugat

SEQ ID NO: 10412 - DNA, 20 bp, Artificial Sequence
  Synthetic
ggacccccaauccctcatuc

SEQ ID NO: 10413 - DNA, 24 bp, Artificial Sequence
  Synthetic
atctggtgtuaggtaggtaggcut

SEQ ID NO: 10414 - DNA, 21 bp, Artificial Sequence
  Synthetic
cctctattcuccgggagucca

SEQ ID NO: 10415 - DNA, 19 bp, Artificial Sequence
  Synthetic
ccguacaagcagcugcaca

SEQ ID NO: 10416 - DNA, 20 bp, Artificial Sequence
  Synthetic
gcuggagaaggagagccauc

SEQ ID NO: 10417 - DNA, 23 bp, Artificial Sequence
  Synthetic
ccttagacgguagtttcgctcut

SEQ ID NO: 10418 - DNA, 17 bp, Artificial Sequence
  Synthetic
aagctgggcugggtguc

SEQ ID NO: 10419 - DNA, 19 bp, Artificial Sequence
  Synthetic
cttcctcucgcccaucaca

SEQ ID NO: 10420 - DNA, 24 bp, Artificial Sequence
  Synthetic
agaaagcaggacuctacagtgcua

SEQ ID NO: 10421 - DNA, 18 bp, Artificial Sequence
  Synthetic
ctccaaccucccctgugc

SEQ ID NO: 10422 - DNA, 19 bp, Artificial Sequence
  Synthetic
gctgctccuctgggttgug

SEQ ID NO: 10423 - DNA, 19 bp, Artificial Sequence
  Synthetic
cccatggccucttctccug

SEQ ID NO: 10424 - DNA, 23 bp, Artificial Sequence
  Synthetic
accgcccagaaggugttagtaua

SEQ ID NO: 10425 - DNA, 20 bp, Artificial Sequence
  Synthetic
cagtgggacucccatgcuag

SEQ ID NO: 10426 - DNA, 24 bp, Artificial Sequence
  Synthetic
gcaggacaucgagaggagaagtua

SEQ ID NO: 10427 - DNA, 22 bp, Artificial Sequence
  Synthetic
cgacaaagagauggaggtgcut

SEQ ID NO: 10428 - DNA, 23 bp, Artificial Sequence
  Synthetic
ccctactgagauggagtgtgugt

SEQ ID NO: 10429 - DNA, 24 bp, Artificial Sequence
  Synthetic
cctgccttaugtccagatctugaa

SEQ ID NO: 10430 - DNA, 23 bp, Artificial Sequence
  Synthetic
tgccgtacucattctccacaaug

SEQ ID NO: 10431 - DNA, 22 bp, Artificial Sequence
  Synthetic
gcattttccuctggacccucaa

SEQ ID NO: 10432 - DNA, 18 bp, Artificial Sequence
  Synthetic
gcagggcutggcuaccaa

SEQ ID NO: 10433 - DNA, 17 bp, Artificial Sequence
  Synthetic
gugcagcuggcggaaag

SEQ ID NO: 10434 - DNA, 18 bp, Artificial Sequence
  Synthetic
gaggcacutccagcucca

SEQ ID NO: 10435 - DNA, 19 bp, Artificial Sequence
  Synthetic
cctttccccuccccuacct

SEQ ID NO: 10436 - DNA, 27 bp, Artificial Sequence
  Synthetic
gttcatggcatucaaggtgttcataut

SEQ ID NO: 10437 - DNA, 19 bp, Artificial Sequence
  Synthetic
cagcagcugtatggccgua

SEQ ID NO: 10438 - DNA, 23 bp, Artificial Sequence
  Synthetic
aatggctauaaggcatggcauga

SEQ ID NO: 10439 - DNA, 30 bp, Artificial Sequence
  Synthetic
gggaacataagtauctatgagaggatucca

SEQ ID NO: 10440 - DNA, 21 bp, Artificial Sequence
  Synthetic
catcgtggagucgtaacugct

SEQ ID NO: 10441 - DNA, 23 bp, Artificial Sequence
  Synthetic
accctctaugcagaacauggaga

SEQ ID NO: 10442 - DNA, 24 bp, Artificial Sequence
  Synthetic
atgctcacugctttcttctugagt

SEQ ID NO: 10443 - DNA, 20 bp, Artificial Sequence
  Synthetic
ccgtggtgucagagcagaug

SEQ ID NO: 10444 - DNA, 21 bp, Artificial Sequence
  Synthetic
cgtcattcugggcagtctcug

SEQ ID NO: 10445 - DNA, 24 bp, Artificial Sequence
  Synthetic
caauagtccugagaccgaaaccaa

SEQ ID NO: 10446 - DNA, 23 bp, Artificial Sequence
  Synthetic
cccgacucaacttaaatccuggt

SEQ ID NO: 10447 - DNA, 25 bp, Artificial Sequence
  Synthetic
ctctttugcgaaaacgtgatgugaa

SEQ ID NO: 10448 - DNA, 23 bp, Artificial Sequence
  Synthetic
gcctctcggagucagaatctuca

SEQ ID NO: 10449 - DNA, 23 bp, Artificial Sequence
  Synthetic
aacagaaaccauttcuccaccga

SEQ ID NO: 10450 - DNA, 24 bp, Artificial Sequence
  Synthetic
cttctctugggaaggtcaggttuc

SEQ ID NO: 10451 - DNA, 22 bp, Artificial Sequence
  Synthetic
gctctuggaagagacgtctuca

SEQ ID NO: 10452 - DNA, 26 bp, Artificial Sequence
  Synthetic
agagactattcaugcccttacacuga

SEQ ID NO: 10453 - DNA, 20 bp, Artificial Sequence
  Synthetic
ccagaatguttgcgcuggac

SEQ ID NO: 10454 - DNA, 23 bp, Artificial Sequence
  Synthetic
agtgtggaagugatgtctugagg

SEQ ID NO: 10455 - DNA, 26 bp, Artificial Sequence
  Synthetic
ctccagagaaaccgutatctgatcug

SEQ ID NO: 10456 - DNA, 28 bp, Artificial Sequence
  Synthetic
cccttgacaucattctgtgttaguacat

SEQ ID NO: 10457 - DNA, 31 bp, Artificial Sequence
  Synthetic
cctctactgactgutttgttctgtttattuc

SEQ ID NO: 10458 - DNA, 25 bp, Artificial Sequence
  Synthetic
tggatcucaaaacagaaggucaagg

SEQ ID NO: 10459 - DNA, 20 bp, Artificial Sequence
  Synthetic
ctgatccacaaguccgcugt

SEQ ID NO: 10460 - DNA, 23 bp, Artificial Sequence
  Synthetic
ctaaacucttacctgugggccaa

SEQ ID NO: 10461 - DNA, 23 bp, Artificial Sequence
  Synthetic
gctcatugatggcctuaccaaat

SEQ ID NO: 10462 - DNA, 25 bp, Artificial Sequence
  Synthetic
cctattggattaguatagcgccgut

SEQ ID NO: 10463 - DNA, 28 bp, Artificial Sequence
  Synthetic
tgtctgtcacacutctatgtggaattut

SEQ ID NO: 10464 - DNA, 23 bp, Artificial Sequence
  Synthetic
tttttgccutgatcucgacagga

SEQ ID NO: 10465 - DNA, 23 bp, Artificial Sequence
  Synthetic
tgttcuccctcgtatuaggccat

SEQ ID NO: 10466 - DNA, 22 bp, Artificial Sequence
  Synthetic
catccacgutggttgcttuagt

SEQ ID NO: 10467 - DNA, 27 bp, Artificial Sequence
  Synthetic
tttttgaaaggucagaaggatgtguct

SEQ ID NO: 10468 - DNA, 22 bp, Artificial Sequence
  Synthetic
ggaugaagacacagcatugcat

SEQ ID NO: 10469 - DNA, 31 bp, Artificial Sequence
  Synthetic
caggataagggauaacgactctatggataua

SEQ ID NO: 10470 - DNA, 29 bp, Artificial Sequence
  Synthetic
gcctaagaaatuttctacagagguaacca

SEQ ID NO: 10471 - DNA, 21 bp, Artificial Sequence
  Synthetic
gaagaaccugggccaucacaa

SEQ ID NO: 10472 - DNA, 25 bp, Artificial Sequence
  Synthetic
tttgatctgucttgcctttuaccca

SEQ ID NO: 10473 - DNA, 28 bp, Artificial Sequence
  Synthetic
ccgatagtaacacutctaagcagaauga

SEQ ID NO: 10474 - DNA, 24 bp, Artificial Sequence
  Synthetic
gccttgattcccutgaccatctut

SEQ ID NO: 10475 - DNA, 30 bp, Artificial Sequence
  Synthetic
tcataaactauaagcatgaagcuccaacat

SEQ ID NO: 10476 - DNA, 22 bp, Artificial Sequence
  Synthetic
tgccgucgtcctatatuccaac

SEQ ID NO: 10477 - DNA, 26 bp, Artificial Sequence
  Synthetic
ttctaattgaguctggagcugcaaat

SEQ ID NO: 10478 - DNA, 30 bp, Artificial Sequence
  Synthetic
ctttacaagtgtggaugtgtttctgattut

SEQ ID NO: 10479 - DNA, 24 bp, Artificial Sequence
  Synthetic
ctaagagtttaaccugccgcctua

SEQ ID NO: 10480 - DNA, 29 bp, Artificial Sequence
  Synthetic
acagautatccgaagaaucaaagaaagca

SEQ ID NO: 10481 - DNA, 24 bp, Artificial Sequence
  Synthetic
cgccttaattutagcagtgcucaa

SEQ ID NO: 10482 - DNA, 25 bp, Artificial Sequence
  Synthetic
accaagaaggutcggacaaugaaaa

SEQ ID NO: 10483 - DNA, 26 bp, Artificial Sequence
  Synthetic
tgtttaagggautcagaaucaaggca

SEQ ID NO: 10484 - DNA, 27 bp, Artificial Sequence
  Synthetic
gaaaacaaagagucagagagagaugga

SEQ ID NO: 10485 - DNA, 27 bp, Artificial Sequence
  Synthetic
tggtagagugacttctacaguaaaggg

SEQ ID NO: 10486 - DNA, 19 bp, Artificial Sequence
  Synthetic
gggaggcuattcugcccat

SEQ ID NO: 10487 - DNA, 21 bp, Artificial Sequence
  Synthetic
caagtggacutcggtgctuac

SEQ ID NO: 10488 - DNA, 19 bp, Artificial Sequence
  Synthetic
ctcctacgutgcggucaca

SEQ ID NO: 10489 - DNA, 24 bp, Artificial Sequence
  Synthetic
gtttttgatgaagguctcgtcguc

SEQ ID NO: 10490 - DNA, 21 bp, Artificial Sequence
  Synthetic
ggattctcugctctccucgac

SEQ ID NO: 10491 - DNA, 26 bp, Artificial Sequence
  Synthetic
gccaatgaaaaugggaaaggtaucca

SEQ ID NO: 10492 - DNA, 23 bp, Artificial Sequence
  Synthetic
gaucagcaacaaccgaaaaugca

SEQ ID NO: 10493 - DNA, 25 bp, Artificial Sequence
  Synthetic
gggccttttcautgttttccaacuc

SEQ ID NO: 10494 - DNA, 20 bp, Artificial Sequence
  Synthetic
gcccagcccauttgtaacut

SEQ ID NO: 10495 - DNA, 28 bp, Artificial Sequence
  Synthetic
ggcatttccagaaauatcaccattcuga

SEQ ID NO: 10496 - DNA, 21 bp, Artificial Sequence
  Synthetic
ctggtauccacccaaccaugt

SEQ ID NO: 10497 - DNA, 27 bp, Artificial Sequence
  Synthetic
tcaggtatctgguattaagtacctugc

SEQ ID NO: 10498 - DNA, 25 bp, Artificial Sequence
  Synthetic
tgugactcaugaaacacaggaagaa

SEQ ID NO: 10499 - DNA, 29 bp, Artificial Sequence
  Synthetic
aaaatctctacucacacttatgtguaagg

SEQ ID NO: 10500 - DNA, 25 bp, Artificial Sequence
  Synthetic
cttcaggugaggagattttugcaac

SEQ ID NO: 10501 - DNA, 32 bp, Artificial Sequence
  Synthetic
caaagaacaagaacauatcattaaggatuacc

SEQ ID NO: 10502 - DNA, 32 bp, Artificial Sequence
  Synthetic
atggatattatagautaactgcagaugcacat

SEQ ID NO: 10503 - DNA, 32 bp, Artificial Sequence
  Synthetic
tacttttaagtctguattactcacgaaatugg

SEQ ID NO: 10504 - DNA, 32 bp, Artificial Sequence
  Synthetic
gcgagaaaatgtcautgaatataaacactgut

SEQ ID NO: 10505 - DNA, 29 bp, Artificial Sequence
  Synthetic
cagtttccauctggtaacaatucaaaaga

SEQ ID NO: 10506 - DNA, 22 bp, Artificial Sequence
  Synthetic
aggcguacgaagagaaguagga

SEQ ID NO: 10507 - DNA, 26 bp, Artificial Sequence
  Synthetic
tgagtacgutgtatgcataugagagc

SEQ ID NO: 10508 - DNA, 22 bp, Artificial Sequence
  Synthetic
gctccaguacttgtggacugat

SEQ ID NO: 10509 - DNA, 25 bp, Artificial Sequence
  Synthetic
gaggatttccugtcttcctgtctuc

SEQ ID NO: 10510 - DNA, 24 bp, Artificial Sequence
  Synthetic
aaaagaaggtuggtgtggcatuac

SEQ ID NO: 10511 - DNA, 28 bp, Artificial Sequence
  Synthetic
gcctgaaatcuggttcataatccauaca

SEQ ID NO: 10512 - DNA, 26 bp, Artificial Sequence
  Synthetic
tttgtaattugccttgaaaactuggt

SEQ ID NO: 10513 - DNA, 26 bp, Artificial Sequence
  Synthetic
tcttaggtgcucttcagtactaugct

SEQ ID NO: 10514 - DNA, 31 bp, Artificial Sequence
  Synthetic
ccatatggaagtutacgagactatctucaaa

SEQ ID NO: 10515 - DNA, 23 bp, Artificial Sequence
  Synthetic
atgtctactucaacacggtugct

SEQ ID NO: 10516 - DNA, 31 bp, Artificial Sequence
  Synthetic
gtaaaatcaagaguccacatatcaaguaact

SEQ ID NO: 10517 - DNA, 22 bp, Artificial Sequence
  Synthetic
accacuccaaagcuccaaacat

SEQ ID NO: 10518 - DNA, 31 bp, Artificial Sequence
  Synthetic
gacagaatgcuggaacaataatgtaaaucaa

SEQ ID NO: 10519 - DNA, 30 bp, Artificial Sequence
  Synthetic
gtaaatctacttuggtctcagaaugaaggt

SEQ ID NO: 10520 - DNA, 25 bp, Artificial Sequence
  Synthetic
aagtcutgaagtttcuggaaagggt

SEQ ID NO: 10521 - DNA, 26 bp, Artificial Sequence
  Synthetic
ctacttaaagugcttgtcctttucgg

SEQ ID NO: 10522 - DNA, 21 bp, Artificial Sequence
  Synthetic
gtgattaucccagcagggcut

SEQ ID NO: 10523 - DNA, 26 bp, Artificial Sequence
  Synthetic
gatgacaaugaggaggaatcagauga

SEQ ID NO: 10524 - DNA, 23 bp, Artificial Sequence
  Synthetic
tggcgguaacgttgatttctuct

SEQ ID NO: 10525 - DNA, 28 bp, Artificial Sequence
  Synthetic
ggaaaaagagtagcucagaggctttaut

SEQ ID NO: 10526 - DNA, 28 bp, Artificial Sequence
  Synthetic
agaggattcttuggaagatttgttguga

SEQ ID NO: 10527 - DNA, 25 bp, Artificial Sequence
  Synthetic
gcagtaguaccagttttucaaagcc

SEQ ID NO: 10528 - DNA, 21 bp, Artificial Sequence
  Synthetic
ggaggtgautcactgguggat

SEQ ID NO: 10529 - DNA, 30 bp, Artificial Sequence
  Synthetic
gcttttaaaatttcacutatgcctcacuct

SEQ ID NO: 10530 - DNA, 25 bp, Artificial Sequence
  Synthetic
caaagtgctguatgttactgtgcuc

SEQ ID NO: 10531 - DNA, 22 bp, Artificial Sequence
  Synthetic
gttattcacggcugtctcucct

SEQ ID NO: 10532 - DNA, 23 bp, Artificial Sequence
  Synthetic
cagctcaagcucttcaaaacgug

SEQ ID NO: 10533 - DNA, 23 bp, Artificial Sequence
  Synthetic
tcaccctuaggcatcatcctuct

SEQ ID NO: 10534 - DNA, 24 bp, Artificial Sequence
  Synthetic
gtcctgtaaggcuttggtatccug

SEQ ID NO: 10535 - DNA, 21 bp, Artificial Sequence
  Synthetic
aggcugggaagacacttctug

SEQ ID NO: 10536 - DNA, 22 bp, Artificial Sequence
  Synthetic
cttttcuggcatctucccacag

SEQ ID NO: 10537 - DNA, 23 bp, Artificial Sequence
  Synthetic
tgtatgccugaggtgttttugga

SEQ ID NO: 10538 - DNA, 21 bp, Artificial Sequence
  Synthetic
ggtcaggtgguggcagtagua

SEQ ID NO: 10539 - DNA, 29 bp, Artificial Sequence
  Synthetic
gactagtcaagauccaagtauaaggaagt

SEQ ID NO: 10540 - DNA, 21 bp, Artificial Sequence
  Synthetic
tguacaccuggaccaacacag

SEQ ID NO: 10541 - DNA, 22 bp, Artificial Sequence
  Synthetic
cccatcaugacccctgctcuat

SEQ ID NO: 10542 - DNA, 20 bp, Artificial Sequence
  Synthetic
ggucagcacucaaccagagg

SEQ ID NO: 10543 - DNA, 22 bp, Artificial Sequence
  Synthetic
cuctacagtgcuggagacacag

SEQ ID NO: 10544 - DNA, 21 bp, Artificial Sequence
  Synthetic
gagcggatguttctctggcua

SEQ ID NO: 10545 - DNA, 21 bp, Artificial Sequence
  Synthetic
agaactccgguctgactcuga

SEQ ID NO: 10546 - DNA, 20 bp, Artificial Sequence
  Synthetic
aaactctguggacacgcuca

SEQ ID NO: 10547 - DNA, 26 bp, Artificial Sequence
  Synthetic
acctgaaggaguacaatctggtcuaa

SEQ ID NO: 10548 - DNA, 26 bp, Artificial Sequence
  Synthetic
accatcatattcugggaagtagucga

SEQ ID NO: 10549 - DNA, 28 bp, Artificial Sequence
  Synthetic
gcaaggctcuctttagaacaattaucac

SEQ ID NO: 10550 - DNA, 27 bp, Artificial Sequence
  Synthetic
ggactcagtuactacctgaaaaugaca

SEQ ID NO: 10551 - DNA, 23 bp, Artificial Sequence
  Synthetic
tctcattgtgucttccctccuct

SEQ ID NO: 10552 - DNA, 22 bp, Artificial Sequence
  Synthetic
ctccaatgaagagucgcaccua

SEQ ID NO: 10553 - DNA, 23 bp, Artificial Sequence
  Synthetic
tgagaatcauccatgggucagga

SEQ ID NO: 10554 - DNA, 20 bp, Artificial Sequence
  Synthetic
ggtcatcaccugtcctgugg

SEQ ID NO: 10555 - DNA, 25 bp, Artificial Sequence
  Synthetic
agaccttguacagatggaatcguct

SEQ ID NO: 10556 - DNA, 19 bp, Artificial Sequence
  Synthetic
ccccaaacacaugcagugg

SEQ ID NO: 10557 - DNA, 19 bp, Artificial Sequence
  Synthetic
cttcggaggaugggcugag

SEQ ID NO: 10558 - DNA, 27 bp, Artificial Sequence
  Synthetic
aagtgctcttguccaaaatactcucaa

SEQ ID NO: 10559 - DNA, 27 bp, Artificial Sequence
  Synthetic
ggaaatcatagccacuattcaggtgut

SEQ ID NO: 10560 - DNA, 27 bp, Artificial Sequence
  Synthetic
gatccttcucagacaatttctcucact

SEQ ID NO: 10561 - DNA, 26 bp, Artificial Sequence
  Synthetic
gaaaggaagaagauttctcuccccat

SEQ ID NO: 10562 - DNA, 29 bp, Artificial Sequence
  Synthetic
accaaactgauacattttgaaaccugaga

SEQ ID NO: 10563 - DNA, 22 bp, Artificial Sequence
  Synthetic
tcctgttugcagcgtgagtuaa

SEQ ID NO: 10564 - DNA, 25 bp, Artificial Sequence
  Synthetic
aaatctggtagaguccctgaaguca

SEQ ID NO: 10565 - DNA, 23 bp, Artificial Sequence
  Synthetic
gatcaggcutccacttuggaaac

SEQ ID NO: 10566 - DNA, 22 bp, Artificial Sequence
  Synthetic
ctcttgaggaacugcctguaac

SEQ ID NO: 10567 - DNA, 24 bp, Artificial Sequence
  Synthetic
gtccccactucatatgtcgaaguc

SEQ ID NO: 10568 - DNA, 23 bp, Artificial Sequence
  Synthetic
tcaaactcgucgtcaaaauccgt

SEQ ID NO: 10569 - DNA, 20 bp, Artificial Sequence
  Synthetic
ccagucgcagggactcaauc

SEQ ID NO: 10570 - DNA, 24 bp, Artificial Sequence
  Synthetic
cgcctggccutgaatttcttaaua

SEQ ID NO: 10571 - DNA, 21 bp, Artificial Sequence
  Synthetic
gaggattucagcaaccuccca

SEQ ID NO: 10572 - DNA, 20 bp, Artificial Sequence
  Synthetic
cctuttgctgctugggagac

SEQ ID NO: 10573 - DNA, 23 bp, Artificial Sequence
  Synthetic
atttttactcugtcacggcucca

SEQ ID NO: 10574 - DNA, 20 bp, Artificial Sequence
  Synthetic
gattgggaucaccugccgat

SEQ ID NO: 10575 - DNA, 23 bp, Artificial Sequence
  Synthetic
gagguaacaatgcugccgaaaaa

SEQ ID NO: 10576 - DNA, 25 bp, Artificial Sequence
  Synthetic
cgtccattttcucaaagtactgcug

SEQ ID NO: 10577 - DNA, 23 bp, Artificial Sequence
  Synthetic
agaacaatgcuctttgggagcut

SEQ ID NO: 10578 - DNA, 26 bp, Artificial Sequence
  Synthetic
agacatgtatttcucctttccgtgug

SEQ ID NO: 10579 - DNA, 28 bp, Artificial Sequence
  Synthetic
agctgacatguctgcatttttattucag

SEQ ID NO: 10580 - DNA, 22 bp, Artificial Sequence
  Synthetic
cccucaaaagacctuccaagga

SEQ ID NO: 10581 - DNA, 21 bp, Artificial Sequence
  Synthetic
cacaugaagaggcacctcuga

SEQ ID NO: 10582 - DNA, 18 bp, Artificial Sequence
  Synthetic
gtgggcacugacctgugt

SEQ ID NO: 10583 - DNA, 19 bp, Artificial Sequence
  Synthetic
aagggaaauggcgaugcct

SEQ ID NO: 10584 - DNA, 27 bp, Artificial Sequence
  Synthetic
agatatcttcagtucggattcctccut

SEQ ID NO: 10585 - DNA, 23 bp, Artificial Sequence
  Synthetic
gccttctcuggttcatttugcac

SEQ ID NO: 10586 - DNA, 21 bp, Artificial Sequence
  Synthetic
cctcagccacucctacaugga

SEQ ID NO: 10587 - DNA, 18 bp, Artificial Sequence
  Synthetic
aggguacctcugcaccgt

SEQ ID NO: 10588 - DNA, 19 bp, Artificial Sequence
  Synthetic
ccgcaccucttcacctucc

SEQ ID NO: 10589 - DNA, 20 bp, Artificial Sequence
  Synthetic
gacgacuccagcttcaugct

SEQ ID NO: 10590 - DNA, 26 bp, Artificial Sequence
  Synthetic
cuatcacaaaaugaacggacagaacc

SEQ ID NO: 10591 - DNA, 24 bp, Artificial Sequence
  Synthetic
gctatccugtcaatttccugcaga

SEQ ID NO: 10592 - DNA, 18 bp, Artificial Sequence
  Synthetic
catcucgccctucagcca

SEQ ID NO: 10593 - DNA, 18 bp, Artificial Sequence
  Synthetic
ggcccugtgagcaucgag

SEQ ID NO: 10594 - DNA, 26 bp, Artificial Sequence
  Synthetic
acaggtggautaatagggcttugaaa

SEQ ID NO: 10595 - DNA, 25 bp, Artificial Sequence
  Synthetic
gagatucacatttccugcaaaacca

SEQ ID NO: 10596 - DNA, 28 bp, Artificial Sequence
  Synthetic
tttccacaauggaaccaattgtttuaca

SEQ ID NO: 10597 - DNA, 28 bp, Artificial Sequence
  Synthetic
ctggatttgauggagacctgtgatttua

SEQ ID NO: 10598 - DNA, 27 bp, Artificial Sequence
  Synthetic
tcttcttattaatguggcacccatugt

SEQ ID NO: 10599 - DNA, 26 bp, Artificial Sequence
  Synthetic
cagtagtatctuccaagcgctucaat

SEQ ID NO: 10600 - DNA, 22 bp, Artificial Sequence
  Synthetic
caggaacuccaggcagtguaaa

SEQ ID NO: 10601 - DNA, 24 bp, Artificial Sequence
  Synthetic
ctggcttccagacuctcctttaug

SEQ ID NO: 10602 - DNA, 28 bp, Artificial Sequence
  Synthetic
gtttctcatctcucagtttcttctgcut

SEQ ID NO: 10603 - DNA, 25 bp, Artificial Sequence
  Synthetic
cactgaggcuctgtaaacttccaut

SEQ ID NO: 10604 - DNA, 27 bp, Artificial Sequence
  Synthetic
cagtttttcaactugtctgtcatggug

SEQ ID NO: 10605 - DNA, 23 bp, Artificial Sequence
  Synthetic
aaccatgcuggagtttgguacat

SEQ ID NO: 10606 - DNA, 26 bp, Artificial Sequence
  Synthetic
gtgagagtcacuttatcagctcugaa

SEQ ID NO: 10607 - DNA, 29 bp, Artificial Sequence
  Synthetic
ctatactttgcagugtaaatagcgctuac

SEQ ID NO: 10608 - DNA, 27 bp, Artificial Sequence
  Synthetic
gtggtagtttuaggaatgctgaaguca

SEQ ID NO: 10609 - DNA, 26 bp, Artificial Sequence
  Synthetic
gcactgaaagcugtgcattcaauaac

SEQ ID NO: 10610 - DNA, 21 bp, Artificial Sequence
  Synthetic
gctcaacaaggcucaggagug

SEQ ID NO: 10611 - DNA, 26 bp, Artificial Sequence
  Synthetic
cctacaatgccautaattgccagtug

SEQ ID NO: 10612 - DNA, 24 bp, Artificial Sequence
  Synthetic
cagutaatgcaacaucaccaccag

SEQ ID NO: 10613 - DNA, 27 bp, Artificial Sequence
  Synthetic
attatctccauggatggtgagaaaugg

SEQ ID NO: 10614 - DNA, 23 bp, Artificial Sequence
  Synthetic
cctcugaagagagaatcugccat

SEQ ID NO: 10615 - DNA, 24 bp, Artificial Sequence
  Synthetic
cttauaggagguaaggcctttgut

SEQ ID NO: 10616 - DNA, 28 bp, Artificial Sequence
  Synthetic
tgtgaataaugggaggttacugaaagac

SEQ ID NO: 10617 - DNA, 22 bp, Artificial Sequence
  Synthetic
gcacgaacautactcctucgct

SEQ ID NO: 10618 - DNA, 22 bp, Artificial Sequence
  Synthetic
catcgaaugcaagacaugcagt

SEQ ID NO: 10619 - DNA, 28 bp, Artificial Sequence
  Synthetic
aagctttagaaagaaaguagccatacuc

SEQ ID NO: 10620 - DNA, 22 bp, Artificial Sequence
  Synthetic
tcagggaugtggattugccaag

SEQ ID NO: 10621 - DNA, 25 bp, Artificial Sequence
  Synthetic
ctcaaccuacaacaatcgttgctut

SEQ ID NO: 10622 - DNA, 22 bp, Artificial Sequence
  Synthetic
ttcatctggucatgctgcauct

SEQ ID NO: 10623 - DNA, 25 bp, Artificial Sequence
  Synthetic
atcaatgagcccuttggttttctug

SEQ ID NO: 10624 - DNA, 22 bp, Artificial Sequence
  Synthetic
cccagtucacaaaaguccagca

SEQ ID NO: 10625 - DNA, 23 bp, Artificial Sequence
  Synthetic
cgagactguccctgagtggtaua

SEQ ID NO: 10626 - DNA, 26 bp, Artificial Sequence
  Synthetic
gtatgctaattuggtgccatttuggt

SEQ ID NO: 10627 - DNA, 26 bp, Artificial Sequence
  Synthetic
tcttcaguaacgacatccttgttucc

SEQ ID NO: 10628 - DNA, 26 bp, Artificial Sequence
  Synthetic
acagattaccaaagcuttacctgugt

SEQ ID NO: 10629 - DNA, 26 bp, Artificial Sequence
  Synthetic
cgcttaccucaaatactgaaagguct

SEQ ID NO: 10630 - DNA, 28 bp, Artificial Sequence
  Synthetic
ctctgacatactugatctgtttctccut

SEQ ID NO: 10631 - DNA, 30 bp, Artificial Sequence
  Synthetic
agcttcctggaucatgaaagtaaauaaagt

SEQ ID NO: 10632 - DNA, 31 bp, Artificial Sequence
  Synthetic
attacatcttgttcugccttatcacatuaca

SEQ ID NO: 10633 - DNA, 28 bp, Artificial Sequence
  Synthetic
tcttcagacacugcagcattagaaatua

SEQ ID NO: 10634 - DNA, 17 bp, Artificial Sequence
  Synthetic
gcagcugctggagcugt

SEQ ID NO: 10635 - DNA, 28 bp, Artificial Sequence
  Synthetic
gggagagcttugaatattttcttctuct

SEQ ID NO: 10636 - DNA, 23 bp, Artificial Sequence
  Synthetic
tccugagaaaagcatuccagcat

SEQ ID NO: 10637 - DNA, 22 bp, Artificial Sequence
  Synthetic
ctcttuggcacccagtcagaua

SEQ ID NO: 10638 - DNA, 23 bp, Artificial Sequence
  Synthetic
gatugaggaggaggucaaggaaa

SEQ ID NO: 10639 - DNA, 26 bp, Artificial Sequence
  Synthetic
caggtttgaugagatcatcttcuggt

SEQ ID NO: 10640 - DNA, 20 bp, Artificial Sequence
  Synthetic
accatgaugccgaugacgag

SEQ ID NO: 10641 - DNA, 25 bp, Artificial Sequence
  Synthetic
caggctgcacautaaggtcuaaaaa

SEQ ID NO: 10642 - DNA, 21 bp, Artificial Sequence
  Synthetic
ccgagacucaagaggcctgua

SEQ ID NO: 10643 - DNA, 21 bp, Artificial Sequence
  Synthetic
ttgacagaacguacggacugg

SEQ ID NO: 10644 - DNA, 21 bp, Artificial Sequence
  Synthetic
cagcugctcctauagcaacct

SEQ ID NO: 10645 - DNA, 22 bp, Artificial Sequence
  Synthetic
cacagcctugaggagactugac

SEQ ID NO: 10646 - DNA, 25 bp, Artificial Sequence
  Synthetic
ccattaaguaacacagggcttgtuc

SEQ ID NO: 10647 - DNA, 23 bp, Artificial Sequence
  Synthetic
gatgccaauatttgaugcagcca

SEQ ID NO: 10648 - DNA, 21 bp, Artificial Sequence
  Synthetic
acagtggcuaccacagcaauc

SEQ ID NO: 10649 - DNA, 22 bp, Artificial Sequence
  Synthetic
tgttcatguagccgtgatgucc

SEQ ID NO: 10650 - DNA, 24 bp, Artificial Sequence
  Synthetic
gaagctcttucacttcggaggaut

SEQ ID NO: 10651 - DNA, 19 bp, Artificial Sequence
  Synthetic
ccgccccacuttgcctauc

SEQ ID NO: 10652 - DNA, 26 bp, Artificial Sequence
  Synthetic
gaguacacagauaaagcccattttuc

SEQ ID NO: 10653 - DNA, 21 bp, Artificial Sequence
  Synthetic
accacaguaggccccaattuc

SEQ ID NO: 10654 - DNA, 26 bp, Artificial Sequence
  Synthetic
tgtgaagaaaaaccaaucactctuga

SEQ ID NO: 10655 - DNA, 27 bp, Artificial Sequence
  Synthetic
guggaatugguaaaagaagaagacaaa

SEQ ID NO: 10656 - DNA, 27 bp, Artificial Sequence
  Synthetic
agatcaagaaugacaatguccaagaca

SEQ ID NO: 10657 - DNA, 26 bp, Artificial Sequence
  Synthetic
ctgcaagaguacaaagattggcttut

SEQ ID NO: 10658 - DNA, 27 bp, Artificial Sequence
  Synthetic
catacauccagcacctatatacugcat

SEQ ID NO: 10659 - DNA, 21 bp, Artificial Sequence
  Synthetic
ccaccatguaacccctcucac

SEQ ID NO: 10660 - DNA, 28 bp, Artificial Sequence
  Synthetic
cagacacagucattcatgtttuaacact

SEQ ID NO: 10661 - DNA, 25 bp, Artificial Sequence
  Synthetic
tcaccuagttacccugacacaagaa

SEQ ID NO: 10662 - DNA, 24 bp, Artificial Sequence
  Synthetic
agaggtatuactggtguggcaagt

SEQ ID NO: 10663 - DNA, 25 bp, Artificial Sequence
  Synthetic
ggattcccguggaggaacttttuaa

SEQ ID NO: 10664 - DNA, 23 bp, Artificial Sequence
  Synthetic
ctcaacatugacggcctttctuc

SEQ ID NO: 10665 - DNA, 31 bp, Artificial Sequence
  Synthetic
ggtaacagaaaacaaugtgatgaaaauagca

SEQ ID NO: 10666 - DNA, 23 bp, Artificial Sequence
  Synthetic
ggcgaatgcaguttttcctccua

SEQ ID NO: 10667 - DNA, 29 bp, Artificial Sequence
  Synthetic
actgatttgtgaauatgcctactgtucat

SEQ ID NO: 10668 - DNA, 21 bp, Artificial Sequence
  Synthetic
ggtguctgccgtugaagagag

SEQ ID NO: 10669 - DNA, 24 bp, Artificial Sequence
  Synthetic
ccttctcagauggagccaggatua

SEQ ID NO: 10670 - DNA, 27 bp, Artificial Sequence
  Synthetic
tgcagagugaaaggatatcccaauaga

SEQ ID NO: 10671 - DNA, 23 bp, Artificial Sequence
  Synthetic
cctgtgtcguctagccttttcut

SEQ ID NO: 10672 - DNA, 22 bp, Artificial Sequence
  Synthetic
gctgggcaucactgtaaaccut

SEQ ID NO: 10673 - DNA, 28 bp, Artificial Sequence
  Synthetic
gcttatttattgguctctcattcuccca

SEQ ID NO: 10674 - DNA, 20 bp, Artificial Sequence
  Synthetic
gcatggtuggcattgggtuc

SEQ ID NO: 10675 - DNA, 23 bp, Artificial Sequence
  Synthetic
gggaagctguccatcagtauaca

SEQ ID NO: 10676 - DNA, 21 bp, Artificial Sequence
  Synthetic
gcaccccauccttaguccaac

SEQ ID NO: 10677 - DNA, 23 bp, Artificial Sequence
  Synthetic
ccatctgtcuccgtcttctcuct

SEQ ID NO: 10678 - DNA, 17 bp, Artificial Sequence
  Synthetic
cctgcauccggcaccuc

SEQ ID NO: 10679 - DNA, 19 bp, Artificial Sequence
  Synthetic
gctgcaagugtgtgctcuc

SEQ ID NO: 10680 - DNA, 19 bp, Artificial Sequence
  Synthetic
ggccgagguctcgatguag

SEQ ID NO: 10681 - DNA, 20 bp, Artificial Sequence
  Synthetic
ctctcgctutccacctcuca

SEQ ID NO: 10682 - DNA, 21 bp, Artificial Sequence
  Synthetic
gccaggcucacctctatagug

SEQ ID NO: 10683 - DNA, 17 bp, Artificial Sequence
  Synthetic
ccccugaggagcgauga

SEQ ID NO: 10684 - DNA, 17 bp, Artificial Sequence
  Synthetic
ggccaguccagcacuga

SEQ ID NO: 10685 - DNA, 17 bp, Artificial Sequence
  Synthetic
gtcctcugcgccctucc

SEQ ID NO: 10686 - DNA, 20 bp, Artificial Sequence
  Synthetic
ctccttguccagcaccauca

SEQ ID NO: 10687 - DNA, 20 bp, Artificial Sequence
  Synthetic
cgggtaatuagagcccgcua

SEQ ID NO: 10688 - DNA, 22 bp, Artificial Sequence
  Synthetic
gactcagtuccaacccaaaugc

SEQ ID NO: 10689 - DNA, 23 bp, Artificial Sequence
  Synthetic
ggaagtcttugctgccttttguc

SEQ ID NO: 10690 - DNA, 23 bp, Artificial Sequence
  Synthetic
catcagagagucctccuggagat

SEQ ID NO: 10691 - DNA, 20 bp, Artificial Sequence
  Synthetic
ctggugcagcaactcttucc

SEQ ID NO: 10692 - DNA, 22 bp, Artificial Sequence
  Synthetic
gacgtagguagtgctugagacc

SEQ ID NO: 10693 - DNA, 21 bp, Artificial Sequence
  Synthetic
agcatugcagagaggcgtauc

SEQ ID NO: 10694 - DNA, 22 bp, Artificial Sequence
  Synthetic
acacuttgtcttucacccgcat

SEQ ID NO: 10695 - DNA, 21 bp, Artificial Sequence
  Synthetic
gagccctgucttccaggatug

SEQ ID NO: 10696 - DNA, 21 bp, Artificial Sequence
  Synthetic
gtccgaaguccccagtagtuc

SEQ ID NO: 10697 - DNA, 20 bp, Artificial Sequence
  Synthetic
gtggccaccaagaucaacuc

SEQ ID NO: 10698 - DNA, 19 bp, Artificial Sequence
  Synthetic
gctcctcuggcttggacuc

SEQ ID NO: 10699 - DNA, 20 bp, Artificial Sequence
  Synthetic
ggcaacctugctctcaccut

SEQ ID NO: 10700 - DNA, 19 bp, Artificial Sequence
  Synthetic
cctcctucagcaggtuggg

SEQ ID NO: 10701 - DNA, 21 bp, Artificial Sequence
  Synthetic
cgatggugagacccctucaga

SEQ ID NO: 10702 - DNA, 18 bp, Artificial Sequence
  Synthetic
cagcugcagaagcuccag

SEQ ID NO: 10703 - DNA, 23 bp, Artificial Sequence
  Synthetic
ggtgggccaucatgagacauaat

SEQ ID NO: 10704 - DNA, 24 bp, Artificial Sequence
  Synthetic
gctgaggctgutccatatgacauc

SEQ ID NO: 10705 - DNA, 21 bp, Artificial Sequence
  Synthetic
gtggccgaccugtctatcauc

SEQ ID NO: 10706 - DNA, 32 bp, Artificial Sequence
  Synthetic
cttatttaccucacttgattcaaaaucaaccc

SEQ ID NO: 10707 - DNA, 26 bp, Artificial Sequence
  Synthetic
aggcacactugatgaattatgtagut

SEQ ID NO: 10708 - DNA, 21 bp, Artificial Sequence
  Synthetic
tgtgaatgugcacaggacuga

SEQ ID NO: 10709 - DNA, 25 bp, Artificial Sequence
  Synthetic
cagaacagauggctaatgactcuga

SEQ ID NO: 10710 - DNA, 24 bp, Artificial Sequence
  Synthetic
ctcaatggcauctttctcctccut

SEQ ID NO: 10711 - DNA, 30 bp, Artificial Sequence
  Synthetic
aggaataaaaactauttctgcatccaguga

SEQ ID NO: 10712 - DNA, 29 bp, Artificial Sequence
  Synthetic
gataatgtctuttggattagcuacccgat

SEQ ID NO: 10713 - DNA, 27 bp, Artificial Sequence
  Synthetic
gcaaattgttgttucctagcgttcaua

SEQ ID NO: 10714 - DNA, 32 bp, Artificial Sequence
  Synthetic
gttaaaaatgtcuggatgattagcuagaacaa

SEQ ID NO: 10715 - DNA, 23 bp, Artificial Sequence
  Synthetic
cactgtgacucggtgttcattuc

SEQ ID NO: 10716 - DNA, 26 bp, Artificial Sequence
  Synthetic
ccttgaaagautaagggcattucact

SEQ ID NO: 10717 - DNA, 28 bp, Artificial Sequence
  Synthetic
aaguaacaatgtugagaccaaaggaaga

SEQ ID NO: 10718 - DNA, 27 bp, Artificial Sequence
  Synthetic
acagacaaacuaaactgatcattucca

SEQ ID NO: 10719 - DNA, 27 bp, Artificial Sequence
  Synthetic
caagatggcaaccucaacatttcaaut

SEQ ID NO: 10720 - DNA, 30 bp, Artificial Sequence
  Synthetic
aaaataacttgtuaaccaagggaatauggt

SEQ ID NO: 10721 - DNA, 28 bp, Artificial Sequence
  Synthetic
gagaaagatgcagucagaggaaatgaua

SEQ ID NO: 10722 - DNA, 30 bp, Artificial Sequence
  Synthetic
ttgtcttcccttucttctttaggaattgut

SEQ ID NO: 10723 - DNA, 21 bp, Artificial Sequence
  Synthetic
gccctgcccuaaacagtgaug

SEQ ID NO: 10724 - DNA, 23 bp, Artificial Sequence
  Synthetic
gcccatttagugtttggctcaut

SEQ ID NO: 10725 - DNA, 22 bp, Artificial Sequence
  Synthetic
acaggtacaccugcagcctaua

SEQ ID NO: 10726 - DNA, 27 bp, Artificial Sequence
  Synthetic
attgattcattccugaagtgacacugt

SEQ ID NO: 10727 - DNA, 27 bp, Artificial Sequence
  Synthetic
ccagttucaacacacaccatttuaact

SEQ ID NO: 10728 - DNA, 26 bp, Artificial Sequence
  Synthetic
ctttcccaucaattgctgatucaaca

SEQ ID NO: 10729 - DNA, 23 bp, Artificial Sequence
  Synthetic
agtagcttttccutcccccttuc

SEQ ID NO: 10730 - DNA, 28 bp, Artificial Sequence
  Synthetic
ggttcgcttgauctgagttaaaaugaaa

SEQ ID NO: 10731 - DNA, 24 bp, Artificial Sequence
  Synthetic
ctagaugtcctcaugcagcaaaag

SEQ ID NO: 10732 - DNA, 20 bp, Artificial Sequence
  Synthetic
gggcatgcugctgacgatua

SEQ ID NO: 10733 - DNA, 22 bp, Artificial Sequence
  Synthetic
ctctccactucgtctccaaucc

SEQ ID NO: 10734 - DNA, 23 bp, Artificial Sequence
  Synthetic
gctcaggauccatcagttgtuct

SEQ ID NO: 10735 - DNA, 25 bp, Artificial Sequence
  Synthetic
gcctgttuaacatgggctuaaagga

SEQ ID NO: 10736 - DNA, 22 bp, Artificial Sequence
  Synthetic
ccaugagaaagucaggtgctua

SEQ ID NO: 10737 - DNA, 21 bp, Artificial Sequence
  Synthetic
gcagcaccugctgaacaguag

SEQ ID NO: 10738 - DNA, 18 bp, Artificial Sequence
  Synthetic
gacugagcccccuccaag

SEQ ID NO: 10739 - DNA, 25 bp, Artificial Sequence
  Synthetic
tcaaaaacagacutgcctgcaauag

SEQ ID NO: 10740 - DNA, 22 bp, Artificial Sequence
  Synthetic
tcagtacaaaauggccagugct

SEQ ID NO: 10741 - DNA, 22 bp, Artificial Sequence
  Synthetic
tcagagccacutctaggtcucc

SEQ ID NO: 10742 - DNA, 28 bp, Artificial Sequence
  Synthetic
cgttucagcaagucacaaagatuaaaaa

SEQ ID NO: 10743 - DNA, 27 bp, Artificial Sequence
  Synthetic
gggtctttaucctttctgttgauggag

SEQ ID NO: 10744 - DNA, 28 bp, Artificial Sequence
  Synthetic
gacacaggtcaaaaauattcgacagtuc

SEQ ID NO: 10745 - DNA, 25 bp, Artificial Sequence
  Synthetic
ggcactgaatcuactattcggtgua

SEQ ID NO: 10746 - DNA, 28 bp, Artificial Sequence
  Synthetic
agaagutttggatcuagaacgacgaaaa

SEQ ID NO: 10747 - DNA, 22 bp, Artificial Sequence
  Synthetic
ggattgtuggaggcauaagcca

SEQ ID NO: 10748 - DNA, 28 bp, Artificial Sequence
  Synthetic
actccattcuggaacaaggtttgataug

SEQ ID NO: 10749 - DNA, 23 bp, Artificial Sequence
  Synthetic
tccugaagaagatgtuccagcag

SEQ ID NO: 10750 - DNA, 19 bp, Artificial Sequence
  Synthetic
agacuagtgcuccggcaga

SEQ ID NO: 10751 - DNA, 20 bp, Artificial Sequence
  Synthetic
ctccacgcucttgucagcat

SEQ ID NO: 10752 - DNA, 31 bp, Artificial Sequence
  Synthetic
gatacaacagctgucaaaaccaaaatactua

SEQ ID NO: 10753 - DNA, 23 bp, Artificial Sequence
  Synthetic
gagcctauggaggaagtggaaug

SEQ ID NO: 10754 - DNA, 26 bp, Artificial Sequence
  Synthetic
gautaaacatgtcugcagaagagcag

SEQ ID NO: 10755 - DNA, 23 bp, Artificial Sequence
  Synthetic
ccgactccaagautgaccttcut

SEQ ID NO: 10756 - DNA, 27 bp, Artificial Sequence
  Synthetic
gaatacagatucactgattgtugcaga

SEQ ID NO: 10757 - DNA, 28 bp, Artificial Sequence
  Synthetic
aggcatccattguagattctgacattut

SEQ ID NO: 10758 - DNA, 26 bp, Artificial Sequence
  Synthetic
gaggaaaagagugaagaagggaaugt

SEQ ID NO: 10759 - DNA, 27 bp, Artificial Sequence
  Synthetic
gagtggtttugggaacttcttttctug

SEQ ID NO: 10760 - DNA, 26 bp, Artificial Sequence
  Synthetic
ctctccaauggcaatagttcuaagca

SEQ ID NO: 10761 - DNA, 24 bp, Artificial Sequence
  Synthetic
tggtgctgauttcctcttucaaca

SEQ ID NO: 10762 - DNA, 28 bp, Artificial Sequence
  Synthetic
gggtactaagtaauaggtgttgggugaa

SEQ ID NO: 10763 - DNA, 21 bp, Artificial Sequence
  Synthetic
gtagtttggucccaggcacuc

SEQ ID NO: 10764 - DNA, 25 bp, Artificial Sequence
  Synthetic
gatgatgcaaugtggaaagtgugat

SEQ ID NO: 10765 - DNA, 31 bp, Artificial Sequence
  Synthetic
aagtgctctagaggcuaataaatgtaguagt

SEQ ID NO: 10766 - DNA, 24 bp, Artificial Sequence
  Synthetic
ggacctgauccaccagttctuact

SEQ ID NO: 10767 - DNA, 24 bp, Artificial Sequence
  Synthetic
agguccaaagaagctttatuggca

SEQ ID NO: 10768 - DNA, 28 bp, Artificial Sequence
  Synthetic
tgttttcttttagcaaauggaacgtgut

SEQ ID NO: 10769 - DNA, 26 bp, Artificial Sequence
  Synthetic
tgagaactcucagatttcuagccgat

SEQ ID NO: 10770 - DNA, 25 bp, Artificial Sequence
  Synthetic
ggatctcaagguattgatgggaguc

SEQ ID NO: 10771 - DNA, 23 bp, Artificial Sequence
  Synthetic
ggccctgtgutgcaaagtactua

SEQ ID NO: 10772 - DNA, 20 bp, Artificial Sequence
  Synthetic
tgtcucacatccugcaccag

SEQ ID NO: 10773 - DNA, 23 bp, Artificial Sequence
  Synthetic
ctaaagctctcucacttcgccut

SEQ ID NO: 10774 - DNA, 23 bp, Artificial Sequence
  Synthetic
ggccagggaaccuaggauaaaga

SEQ ID NO: 10775 - DNA, 22 bp, Artificial Sequence
  Synthetic
ggcactccacuatcttgcaugt

SEQ ID NO: 10776 - DNA, 21 bp, Artificial Sequence
  Synthetic
ctcaaagguccccaggatucg

SEQ ID NO: 10777 - DNA, 26 bp, Artificial Sequence
  Synthetic
aagtcaccaagauaaagttgccugaa

SEQ ID NO: 10778 - DNA, 26 bp, Artificial Sequence
  Synthetic
tcaagtgccaaaguagttgatcaugt

SEQ ID NO: 10779 - DNA, 24 bp, Artificial Sequence
  Synthetic
gcactggacugcttcatttcugaa

SEQ ID NO: 10780 - DNA, 25 bp, Artificial Sequence
  Synthetic
atcgagaucaacacacagautcuac

SEQ ID NO: 10781 - DNA, 26 bp, Artificial Sequence
  Synthetic
tctcctatcuctggaactagauccca

SEQ ID NO: 10782 - DNA, 29 bp, Artificial Sequence
  Synthetic
tgacacctcuaaaaatggaaaaugagagt

SEQ ID NO: 10783 - DNA, 21 bp, Artificial Sequence
  Synthetic
cactggaccauctcctggaut

SEQ ID NO: 10784 - DNA, 22 bp, Artificial Sequence
  Synthetic
agagaucagcugaaggacaggt

SEQ ID NO: 10785 - DNA, 27 bp, Artificial Sequence
  Synthetic
gaaataaattatgggaugccagtcgut

SEQ ID NO: 10786 - DNA, 25 bp, Artificial Sequence
  Synthetic
atggataacugccattctguaagca

SEQ ID NO: 10787 - DNA, 28 bp, Artificial Sequence
  Synthetic
ctgaatctgattucaggagctcagtaut

SEQ ID NO: 10788 - DNA, 25 bp, Artificial Sequence
  Synthetic
cagtttgagtugcctctagagcuac

SEQ ID NO: 10789 - DNA, 23 bp, Artificial Sequence
  Synthetic
tcacttucagaggaggcuacaga

SEQ ID NO: 10790 - DNA, 24 bp, Artificial Sequence
  Synthetic
ccagccacugagaaactcatagut

SEQ ID NO: 10791 - DNA, 28 bp, Artificial Sequence
  Synthetic
cccaatactgaaguatttgtctccauca

SEQ ID NO: 10792 - DNA, 22 bp, Artificial Sequence
  Synthetic
ctcagtaccacaguagccacuc

SEQ ID NO: 10793 - DNA, 25 bp, Artificial Sequence
  Synthetic
gggagggtgugaagttaatcaaugt

SEQ ID NO: 10794 - DNA, 19 bp, Artificial Sequence
  Synthetic
gtuccaggacacgucacct

SEQ ID NO: 10795 - DNA, 22 bp, Artificial Sequence
  Synthetic
gtgatguccccagttguggaaa

SEQ ID NO: 10796 - DNA, 23 bp, Artificial Sequence
  Synthetic
ccatcctcuccatcttcuggaca

SEQ ID NO: 10797 - DNA, 24 bp, Artificial Sequence
  Synthetic
tctggaaugtgtgctucagaagaa

SEQ ID NO: 10798 - DNA, 23 bp, Artificial Sequence
  Synthetic
gagcauttgttacugcaaccact

SEQ ID NO: 10799 - DNA, 24 bp, Artificial Sequence
  Synthetic
agtaatgcttuccttccgctttug

SEQ ID NO: 10800 - DNA, 20 bp, Artificial Sequence
  Synthetic
gugccaagcactgucgaaat

SEQ ID NO: 10801 - DNA, 27 bp, Artificial Sequence
  Synthetic
gtcaugagataagaaaaucgagaccca

SEQ ID NO: 10802 - DNA, 23 bp, Artificial Sequence
  Synthetic
caactagcauggatctgccaaug

SEQ ID NO: 10803 - DNA, 21 bp, Artificial Sequence
  Synthetic
aaggtcacuccagcattuggt

SEQ ID NO: 10804 - DNA, 21 bp, Artificial Sequence
  Synthetic
cacgctucatcaatcacucgt

SEQ ID NO: 10805 - DNA, 28 bp, Artificial Sequence
  Synthetic
cttatagtcguaagtgagttcctcucct

SEQ ID NO: 10806 - DNA, 21 bp, Artificial Sequence
  Synthetic
ctctttgacucagcguacgga

SEQ ID NO: 10807 - DNA, 20 bp, Artificial Sequence
  Synthetic
gtggtcauactcccgctuga

SEQ ID NO: 10808 - DNA, 21 bp, Artificial Sequence
  Synthetic
ccttccugcagtccttgcuaa

SEQ ID NO: 10809 - DNA, 23 bp, Artificial Sequence
  Synthetic
gccauccatgttcuggaaaaagg

SEQ ID NO: 10810 - DNA, 21 bp, Artificial Sequence
  Synthetic
ctgggtccuactcactgcaut

SEQ ID NO: 10811 - DNA, 28 bp, Artificial Sequence
  Synthetic
ggaagcaaaggagagautacatatccug

SEQ ID NO: 10812 - DNA, 28 bp, Artificial Sequence
  Synthetic
gggccctccgutattactatgauaaaaa

SEQ ID NO: 10813 - DNA, 26 bp, Artificial Sequence
  Synthetic
atgtaggagatgucagaagggtacut

SEQ ID NO: 10814 - DNA, 21 bp, Artificial Sequence
  Synthetic
gggacuttctcugaaggccat

SEQ ID NO: 10815 - DNA, 28 bp, Artificial Sequence
  Synthetic
caatggaggatcutaaagagaccagtua

SEQ ID NO: 10816 - DNA, 29 bp, Artificial Sequence
  Synthetic
cagtcacauaggccacttttaaaacuaat

SEQ ID NO: 10817 - DNA, 24 bp, Artificial Sequence
  Synthetic
ccagagtgauctattgacctgugt

SEQ ID NO: 10818 - DNA, 28 bp, Artificial Sequence
  Synthetic
ctttaactcctuggacttctgtttucct

SEQ ID NO: 10819 - DNA, 25 bp, Artificial Sequence
  Synthetic
ttttgaaggaugacagcauggaaga

SEQ ID NO: 10820 - DNA, 24 bp, Artificial Sequence
  Synthetic
cactcgaaauggagtcacagtcut

SEQ ID NO: 10821 - DNA, 23 bp, Artificial Sequence
  Synthetic
gtggacagcaccutcattttgug

SEQ ID NO: 10822 - DNA, 28 bp, Artificial Sequence
  Synthetic
catatgtctcucgaatgtcttcaucaga

SEQ ID NO: 10823 - DNA, 23 bp, Artificial Sequence
  Synthetic
gcatgtctugctgttcatctugg

SEQ ID NO: 10824 - DNA, 21 bp, Artificial Sequence
  Synthetic
gcttgccagcuggatccttut

SEQ ID NO: 10825 - DNA, 22 bp, Artificial Sequence
  Synthetic
gatgacaatgguggaccgcaua

SEQ ID NO: 10826 - DNA, 29 bp, Artificial Sequence
  Synthetic
aaattatcagctgcutatgagagtgtuga

SEQ ID NO: 10827 - DNA, 22 bp, Artificial Sequence
  Synthetic
ccctattccugtgcgtctugaa

SEQ ID NO: 10828 - DNA, 27 bp, Artificial Sequence
  Synthetic
gcttttaagttccutcttcccactcua

SEQ ID NO: 10829 - DNA, 23 bp, Artificial Sequence
  Synthetic
ccttacaguctctgaacgauggg

SEQ ID NO: 10830 - DNA, 24 bp, Artificial Sequence
  Synthetic
cacgttcaugaaactctuccacat

SEQ ID NO: 10831 - DNA, 27 bp, Artificial Sequence
  Synthetic
agagtctagaatugatagtttgcctug

SEQ ID NO: 10832 - DNA, 26 bp, Artificial Sequence
  Synthetic
tgggtatttccuatcctcagcatcut

SEQ ID NO: 10833 - DNA, 21 bp, Artificial Sequence
  Synthetic
gggactcacutgagtgaggut

SEQ ID NO: 10834 - DNA, 23 bp, Artificial Sequence
  Synthetic
catacaagccgcucaggatuaca

SEQ ID NO: 10835 - DNA, 21 bp, Artificial Sequence
  Synthetic
tcagggtgucctgatgucaga

SEQ ID NO: 10836 - DNA, 22 bp, Artificial Sequence
  Synthetic
agaacagacccagucagcagua

SEQ ID NO: 10837 - DNA, 23 bp, Artificial Sequence
  Synthetic
tgtatcccugttcccaattugca

SEQ ID NO: 10838 - DNA, 24 bp, Artificial Sequence
  Synthetic
cucaatgugccagcaaaaagaaga

SEQ ID NO: 10839 - DNA, 26 bp, Artificial Sequence
  Synthetic
aggaatatgcacuttctggtuggaat

SEQ ID NO: 10840 - DNA, 23 bp, Artificial Sequence
  Synthetic
gccgccaaaautccttttcuact

SEQ ID NO: 10841 - DNA, 26 bp, Artificial Sequence
  Synthetic
atctcatcatggguttgtgtttacut

SEQ ID NO: 10842 - DNA, 22 bp, Artificial Sequence
  Synthetic
cctttgggcacaucaggtagug

SEQ ID NO: 10843 - DNA, 31 bp, Artificial Sequence
  Synthetic
caggttgatctcuatgtttgtatgttttgug

SEQ ID NO: 10844 - DNA, 24 bp, Artificial Sequence
  Synthetic
cagccccaaaaauctgaagttuct

SEQ ID NO: 10845 - DNA, 28 bp, Artificial Sequence
  Synthetic
gttgaagaggatuctgaaactttcctug

SEQ ID NO: 10846 - DNA, 24 bp, Artificial Sequence
  Synthetic
gactucaaaagagacccagtucct

SEQ ID NO: 10847 - DNA, 27 bp, Artificial Sequence
  Synthetic
agtcaagatgcutgaatttgcctttut

SEQ ID NO: 10848 - DNA, 19 bp, Artificial Sequence
  Synthetic
agtguacggacucccccat

SEQ ID NO: 10849 - DNA, 20 bp, Artificial Sequence
  Synthetic
gtcttugagccgagtuggga

SEQ ID NO: 10850 - DNA, 32 bp, Artificial Sequence
  Synthetic
attaccacttguactagtatgcctuaagaaaa

SEQ ID NO: 10851 - DNA, 32 bp, Artificial Sequence
  Synthetic
tgatgccttctauacattagttcgagaaatuc

SEQ ID NO: 10852 - DNA, 33 bp, Artificial Sequence
  Synthetic
tgacauaacagttatgatttugcagaaaacaga

SEQ ID NO: 10853 - DNA, 28 bp, Artificial Sequence
  Synthetic
caaaacaggcucaggactuagcaagaag

SEQ ID NO: 10854 - DNA, 32 bp, Artificial Sequence
  Synthetic
aaacccacctauaatggtgaatatctucaaat

SEQ ID NO: 10855 - DNA, 27 bp, Artificial Sequence
  Synthetic
tggagaaaccugtctcttggatatuct

SEQ ID NO: 10856 - DNA, 19 bp, Artificial Sequence
  Synthetic
gcgaggugtctcccuagct

SEQ ID NO: 10857 - DNA, 20 bp, Artificial Sequence
  Synthetic
gcgctgtccucatagacgua

SEQ ID NO: 10858 - DNA, 17 bp, Artificial Sequence
  Synthetic
ggctacggcuaccccut

SEQ ID NO: 10859 - DNA, 21 bp, Artificial Sequence
  Synthetic
ggguagaaggcgaactcctug

SEQ ID NO: 10860 - DNA, 22 bp, Artificial Sequence
  Synthetic
ctagagaaggaauacgcggcua

SEQ ID NO: 10861 - DNA, 24 bp, Artificial Sequence
  Synthetic
ctgaccaccutcttctcttugacc

SEQ ID NO: 10862 - DNA, 26 bp, Artificial Sequence
  Synthetic
caggagaggagaaugaugtttaacuc

SEQ ID NO: 10863 - DNA, 23 bp, Artificial Sequence
  Synthetic
gagaacucgggcatgtaguaagt

SEQ ID NO: 10864 - DNA, 24 bp, Artificial Sequence
  Synthetic
ctcaugaaaaacgaaggctccuac

SEQ ID NO: 10865 - DNA, 21 bp, Artificial Sequence
  Synthetic
gttgucgaagaaacggucgaa

SEQ ID NO: 10866 - DNA, 27 bp, Artificial Sequence
  Synthetic
agcgagagttttucttcaacgtgtaua

SEQ ID NO: 10867 - DNA, 24 bp, Artificial Sequence
  Synthetic
agcagaggatutcccgagaaauac

SEQ ID NO: 10868 - DNA, 27 bp, Artificial Sequence
  Synthetic
atttcttucagacattctugccacaac

SEQ ID NO: 10869 - DNA, 27 bp, Artificial Sequence
  Synthetic
gttaggagagcutgacttgagaaauct

SEQ ID NO: 10870 - DNA, 24 bp, Artificial Sequence
  Synthetic
tgtuccaggaggaaacugaagaga

SEQ ID NO: 10871 - DNA, 23 bp, Artificial Sequence
  Synthetic
accccagaugaaaguggaaagac

SEQ ID NO: 10872 - DNA, 28 bp, Artificial Sequence
  Synthetic
caataccaacaugtctgtacctacugat

SEQ ID NO: 10873 - DNA, 23 bp, Artificial Sequence
  Synthetic
acagagccaugctacaatugagg

SEQ ID NO: 10874 - DNA, 31 bp, Artificial Sequence
  Synthetic
tctggttagauccagcttaatacaaatttut

SEQ ID NO: 10875 - DNA, 28 bp, Artificial Sequence
  Synthetic
tccatgatgcucaaaattaactuaccct

SEQ ID NO: 10876 - DNA, 24 bp, Artificial Sequence
  Synthetic
ttguacaagagctucaggaagaga

SEQ ID NO: 10877 - DNA, 26 bp, Artificial Sequence
  Synthetic
aatatcaaaaagcugtgtgaaugcgt

SEQ ID NO: 10878 - DNA, 25 bp, Artificial Sequence
  Synthetic
gtgattggtuggatcaggatucagt

SEQ ID NO: 10879 - DNA, 29 bp, Artificial Sequence
  Synthetic
actacctcatcaucttcatctgagagtuc

SEQ ID NO: 10880 - DNA, 25 bp, Artificial Sequence
  Synthetic
tctcugagaaagccaaacuggaaaa

SEQ ID NO: 10881 - DNA, 29 bp, Artificial Sequence
  Synthetic
ctttcttgtgatugtgaagcttgtguaat

SEQ ID NO: 10882 - DNA, 21 bp, Artificial Sequence
  Synthetic
ggaataagcccugcccaguat

SEQ ID NO: 10883 - DNA, 31 bp, Artificial Sequence
  Synthetic
tgaggcattttcucactttgatatatgugaa

SEQ ID NO: 10884 - DNA, 20 bp, Artificial Sequence
  Synthetic
cctaccucctggcuggagaa

SEQ ID NO: 10885 - DNA, 21 bp, Artificial Sequence
  Synthetic
gaagtctuccccatcgtcguc

SEQ ID NO: 10886 - DNA, 19 bp, Artificial Sequence
  Synthetic
ctcaaccagucccaccugt

SEQ ID NO: 10887 - DNA, 18 bp, Artificial Sequence
  Synthetic
gcccucccagggaagaug

SEQ ID NO: 10888 - DNA, 21 bp, Artificial Sequence
  Synthetic
gctcagctuctcagaacccuc

SEQ ID NO: 10889 - DNA, 18 bp, Artificial Sequence
  Synthetic
guagacacgcaccuccgt

SEQ ID NO: 10890 - DNA, 23 bp, Artificial Sequence
  Synthetic
cccttagugacagtgtcuacacc

SEQ ID NO: 10891 - DNA, 21 bp, Artificial Sequence
  Synthetic
cagaauctcccugccaaggaa

SEQ ID NO: 10892 - DNA, 18 bp, Artificial Sequence
  Synthetic
cuaccagcagccgcucat

SEQ ID NO: 10893 - DNA, 18 bp, Artificial Sequence
  Synthetic
accccttucccctgcauc

SEQ ID NO: 10894 - DNA, 20 bp, Artificial Sequence
  Synthetic
gtggcuagcagccttgttug

SEQ ID NO: 10895 - DNA, 23 bp, Artificial Sequence
  Synthetic
ggtggagaugaaggtctcgauga

SEQ ID NO: 10896 - DNA, 25 bp, Artificial Sequence
  Synthetic
cgcagacagcutctagagaaaaguc

SEQ ID NO: 10897 - DNA, 22 bp, Artificial Sequence
  Synthetic
aggctcaggucgaagattcgua

SEQ ID NO: 10898 - DNA, 24 bp, Artificial Sequence
  Synthetic
catctgccagcugacatccuaaaa

SEQ ID NO: 10899 - DNA, 25 bp, Artificial Sequence
  Synthetic
tgatccatuttgcttcatucagact

SEQ ID NO: 10900 - DNA, 25 bp, Artificial Sequence
  Synthetic
gatatctcgagccaauccaaaguca

SEQ ID NO: 10901 - DNA, 29 bp, Artificial Sequence
  Synthetic
gaagttgagtcuagaagaaagatugcact

SEQ ID NO: 10902 - DNA, 26 bp, Artificial Sequence
  Synthetic
ggtgtatcugaacttctctugaacca

SEQ ID NO: 10903 - DNA, 26 bp, Artificial Sequence
  Synthetic
ggacaaatggauggtgtgctttuaat

SEQ ID NO: 10904 - DNA, 22 bp, Artificial Sequence
  Synthetic
tggaagugggttaccugacagt

SEQ ID NO: 10905 - DNA, 30 bp, Artificial Sequence
  Synthetic
tacatttttaaugctcctttcttugacaga

SEQ ID NO: 10906 - DNA, 27 bp, Artificial Sequence
  Synthetic
tgcttcagagaugaaatgatgagucag

SEQ ID NO: 10907 - DNA, 28 bp, Artificial Sequence
  Synthetic
catctcattctaugcaacaattggtgut

SEQ ID NO: 10908 - DNA, 28 bp, Artificial Sequence
  Synthetic
gagttatggtugattgagaaggtuagca

SEQ ID NO: 10909 - DNA, 23 bp, Artificial Sequence
  Synthetic
cttggaccuggaagaagtgtuca

SEQ ID NO: 10910 - DNA, 25 bp, Artificial Sequence
  Synthetic
gcgacaaguaaggagaautatgcua

SEQ ID NO: 10911 - DNA, 25 bp, Artificial Sequence
  Synthetic
cctacccacaaaucagatgtacgug

SEQ ID NO: 10912 - DNA, 30 bp, Artificial Sequence
  Synthetic
gttaattgttccugcattttcagaauacaa

SEQ ID NO: 10913 - DNA, 25 bp, Artificial Sequence
  Synthetic
cctcagaccacautgccacaatuat

SEQ ID NO: 10914 - DNA, 30 bp, Artificial Sequence
  Synthetic
acatuagaaaaaggucaaaaggaaattaug

SEQ ID NO: 10915 - DNA, 22 bp, Artificial Sequence
  Synthetic
ccctgguctgcatatcugagag

SEQ ID NO: 10916 - DNA, 32 bp, Artificial Sequence
  Synthetic
cattttatgtcaagaagguattcctccactua

SEQ ID NO: 10917 - DNA, 23 bp, Artificial Sequence
  Synthetic
cgctgtggaaguggatgtatcug

SEQ ID NO: 10918 - DNA, 22 bp, Artificial Sequence
  Synthetic
aatcacaaaaagcagcuggcuc

SEQ ID NO: 10919 - DNA, 21 bp, Artificial Sequence
  Synthetic
acaactcgguggtcctguact

SEQ ID NO: 10920 - DNA, 21 bp, Artificial Sequence
  Synthetic
ctcgtaccccuccatcaacug

SEQ ID NO: 10921 - DNA, 26 bp, Artificial Sequence
  Synthetic
gtataacctttcuccttctcccccua

SEQ ID NO: 10922 - DNA, 24 bp, Artificial Sequence
  Synthetic
ccctgacguacattcaaaggcaut

SEQ ID NO: 10923 - DNA, 23 bp, Artificial Sequence
  Synthetic
ctatcagatcaugctggacugct

SEQ ID NO: 10924 - DNA, 24 bp, Artificial Sequence
  Synthetic
ggactacagcugaggaagtguaaa

SEQ ID NO: 10925 - DNA, 27 bp, Artificial Sequence
  Synthetic
acaacgtggugaagatttgtgatttug

SEQ ID NO: 10926 - DNA, 25 bp, Artificial Sequence
  Synthetic
gacutttatcttccugaaagccgga

SEQ ID NO: 10927 - DNA, 22 bp, Artificial Sequence
  Synthetic
ctccttttcaccugggtcctut

SEQ ID NO: 10928 - DNA, 30 bp, Artificial Sequence
  Synthetic
tatgaatctgtugaacaaatatctuaccca

SEQ ID NO: 10929 - DNA, 32 bp, Artificial Sequence
  Synthetic
actacctatcaattauaatggacccagaugaa

SEQ ID NO: 10930 - DNA, 26 bp, Artificial Sequence
  Synthetic
acaaacagggaaauagatgtcugacc

SEQ ID NO: 10931 - DNA, 24 bp, Artificial Sequence
  Synthetic
cagcacgcugtttatugaaagagt

SEQ ID NO: 10932 - DNA, 30 bp, Artificial Sequence
  Synthetic
tctcattattacugctatcatcuccgaact

SEQ ID NO: 10933 - DNA, 25 bp, Artificial Sequence
  Synthetic
gcacaaggaaugattguaccacaca

SEQ ID NO: 10934 - DNA, 32 bp, Artificial Sequence
  Synthetic
agtaaaatccaaguaacgtctctgtauaagaa

SEQ ID NO: 10935 - DNA, 28 bp, Artificial Sequence
  Synthetic
agacactgatutttctgtgaacugaagt

SEQ ID NO: 10936 - DNA, 24 bp, Artificial Sequence
  Synthetic
caattctgttucccatgttgcugt

SEQ ID NO: 10937 - DNA, 29 bp, Artificial Sequence
  Synthetic
tttgttatctgaggacutacaccaagtut

SEQ ID NO: 10938 - DNA, 27 bp, Artificial Sequence
  Synthetic
gtataattcccugcatcctcttcagut

SEQ ID NO: 10939 - DNA, 27 bp, Artificial Sequence
  Synthetic
cgtgttaucaaagtgatatugagaggc

SEQ ID NO: 10940 - DNA, 27 bp, Artificial Sequence
  Synthetic
tcctttgtcttugttctgcattttguc

SEQ ID NO: 10941 - DNA, 30 bp, Artificial Sequence
  Synthetic
tatataactttaagcaugaacactcacucc

SEQ ID NO: 10942 - DNA, 26 bp, Artificial Sequence
  Synthetic
ggtcagaagcccuatttctttguacg

SEQ ID NO: 10943 - DNA, 23 bp, Artificial Sequence
  Synthetic
tggugaaacagtatugccaacca

SEQ ID NO: 10944 - DNA, 22 bp, Artificial Sequence
  Synthetic
ctgtagaagccagugtggttug

SEQ ID NO: 10945 - DNA, 25 bp, Artificial Sequence
  Synthetic
gtctttgccugaaatggtgaguaag

SEQ ID NO: 10946 - DNA, 30 bp, Artificial Sequence
  Synthetic
cgggtttcattutattagcattgtatugga

SEQ ID NO: 10947 - DNA, 26 bp, Artificial Sequence
  Synthetic
aagaaacagaagcacuacccatacug

SEQ ID NO: 10948 - DNA, 21 bp, Artificial Sequence
  Synthetic
augaggucggaaacacagcaa

SEQ ID NO: 10949 - DNA, 21 bp, Artificial Sequence
  Synthetic
cggcagatgauggtgatggug

SEQ ID NO: 10950 - DNA, 23 bp, Artificial Sequence
  Synthetic
catggcaagtuactgtgttccuc

SEQ ID NO: 10951 - DNA, 27 bp, Artificial Sequence
  Synthetic
ttttaacttugacaatgtgtugcccaa

SEQ ID NO: 10952 - DNA, 19 bp, Artificial Sequence
  Synthetic
catggtgcutaccgtgugg

SEQ ID NO: 10953 - DNA, 20 bp, Artificial Sequence
  Synthetic
ctgggccagaacgucaugat

SEQ ID NO: 10954 - DNA, 20 bp, Artificial Sequence
  Synthetic
aggtgaggacugggucgaaa

SEQ ID NO: 10955 - DNA, 24 bp, Artificial Sequence
  Synthetic
cgcaaagauggcctctacttuacc

SEQ ID NO: 10956 - DNA, 24 bp, Artificial Sequence
  Synthetic
actggagagaugctttcttctugg

SEQ ID NO: 10957 - DNA, 24 bp, Artificial Sequence
  Synthetic
tgtgcagaaugaaggaacuggaaa

SEQ ID NO: 10958 - DNA, 17 bp, Artificial Sequence
  Synthetic
cuggaaguccccgcaca

SEQ ID NO: 10959 - DNA, 22 bp, Artificial Sequence
  Synthetic
ccgacttcaugagcaaccugag

SEQ ID NO: 10960 - DNA, 24 bp, Artificial Sequence
  Synthetic
ggctacttggcugcactaataugt

SEQ ID NO: 10961 - DNA, 23 bp, Artificial Sequence
  Synthetic
ggaaaggaaugaagagggtguga

SEQ ID NO: 10962 - DNA, 29 bp, Artificial Sequence
  Synthetic
ctgtcttcagaaggucatagttaauggaa

SEQ ID NO: 10963 - DNA, 22 bp, Artificial Sequence
  Synthetic
aaaaagccacccacutccttug

SEQ ID NO: 10964 - DNA, 25 bp, Artificial Sequence
  Synthetic
cttcatugagatcttguccaccgat

SEQ ID NO: 10965 - DNA, 29 bp, Artificial Sequence
  Synthetic
tcaagatgaugacgttaaatcgtttucct

SEQ ID NO: 10966 - DNA, 22 bp, Artificial Sequence
  Synthetic
gtgagtgccuttccccatctua

SEQ ID NO: 10967 - DNA, 21 bp, Artificial Sequence
  Synthetic
cagaugttguccgagggaacc

SEQ ID NO: 10968 - DNA, 21 bp, Artificial Sequence
  Synthetic
ttgcccaaautcccctucact

SEQ ID NO: 10969 - DNA, 26 bp, Artificial Sequence
  Synthetic
gatttgatgaaacuctccccugaaga

SEQ ID NO: 10970 - DNA, 24 bp, Artificial Sequence
  Synthetic
tcctgtattauggtaacgguggga

SEQ ID NO: 10971 - DNA, 28 bp, Artificial Sequence
  Synthetic
gctctgttatucagaagactgctttcut

SEQ ID NO: 10972 - DNA, 21 bp, Artificial Sequence
  Synthetic
ccaacgcuagactgctcugaa

SEQ ID NO: 10973 - DNA, 27 bp, Artificial Sequence
  Synthetic
tcctttgtgatuttcttgatcacugct

SEQ ID NO: 10974 - DNA, 22 bp, Artificial Sequence
  Synthetic
ttgtccccaccutcttcccuat

SEQ ID NO: 10975 - DNA, 30 bp, Artificial Sequence
  Synthetic
aaagucagaagaagaggaaaautactguaa

SEQ ID NO: 10976 - DNA, 26 bp, Artificial Sequence
  Synthetic
cagatgcttuggcagtagaagaugat

SEQ ID NO: 10977 - DNA, 23 bp, Artificial Sequence
  Synthetic
tgcgtcacuttctttgaugacct

SEQ ID NO: 10978 - DNA, 22 bp, Artificial Sequence
  Synthetic
cccuccaccaagagacuaaaca

SEQ ID NO: 10979 - DNA, 22 bp, Artificial Sequence
  Synthetic
ggagcuaaagagcgtgugagat

SEQ ID NO: 10980 - DNA, 31 bp, Artificial Sequence
  Synthetic
gcttacctttgcugaagttattatttgtgut

SEQ ID NO: 10981 - DNA, 28 bp, Artificial Sequence
  Synthetic
gcctcatctucagaaaacatcataguct

SEQ ID NO: 10982 - DNA, 27 bp, Artificial Sequence
  Synthetic
catcattguttatcattgtugcaggct

SEQ ID NO: 10983 - DNA, 28 bp, Artificial Sequence
  Synthetic
tgttccaattcgauctttcatccttgut

SEQ ID NO: 10984 - DNA, 25 bp, Artificial Sequence
  Synthetic
gctgacugagaaaacaggaaagcua

SEQ ID NO: 10985 - DNA, 23 bp, Artificial Sequence
  Synthetic
cagtcucgggcagttcttcauac

SEQ ID NO: 10986 - DNA, 25 bp, Artificial Sequence
  Synthetic
tggtaucaaaacaacagtuggagca

SEQ ID NO: 10987 - DNA, 27 bp, Artificial Sequence
  Synthetic
acacacagauctaataagugaccacct

SEQ ID NO: 10988 - DNA, 30 bp, Artificial Sequence
  Synthetic
gcagaaaaggauaagcagauaaaacagact

SEQ ID NO: 10989 - DNA, 28 bp, Artificial Sequence
  Synthetic
acacttactgatuatgtgcatcaaagua

SEQ ID NO: 10990 - DNA, 30 bp, Artificial Sequence
  Synthetic
agttgtgcccauaattcttgtagatttuct

SEQ ID NO: 10991 - DNA, 28 bp, Artificial Sequence
  Synthetic
gaaatttcatgtugtagttgctctucca

SEQ ID NO: 10992 - DNA, 24 bp, Artificial Sequence
  Synthetic
cagagcgaguctctgtcucaaaaa

SEQ ID NO: 10993 - DNA, 24 bp, Artificial Sequence
  Synthetic
tgccacctgaauaagtccagttuc

SEQ ID NO: 10994 - DNA, 27 bp, Artificial Sequence
  Synthetic
tttgtctgtgcautgcattttatguca

SEQ ID NO: 10995 - DNA, 26 bp, Artificial Sequence
  Synthetic
tcatgctatggcuctgggattttuac

SEQ ID NO: 10996 - DNA, 28 bp, Artificial Sequence
  Synthetic
gtgatattggaguctggttttcctttut

SEQ ID NO: 10997 - DNA, 25 bp, Artificial Sequence
  Synthetic
ccatattcaccugtaacagctgugt

SEQ ID NO: 10998 - DNA, 27 bp, Artificial Sequence
  Synthetic
atcttcttttcccccucatgaagaaut

SEQ ID NO: 10999 - DNA, 22 bp, Artificial Sequence
  Synthetic
aggtgccauttgcagtuacact

SEQ ID NO: 11000 - DNA, 28 bp, Artificial Sequence
  Synthetic
gtgatcttgtaaguttgatttggcucat

SEQ ID NO: 11001 - DNA, 26 bp, Artificial Sequence
  Synthetic
caaatuagaagggauagacaccttug

SEQ ID NO: 11002 - DNA, 29 bp, Artificial Sequence
  Synthetic
acagagaagtgtugagcaagaagaaaaua

SEQ ID NO: 11003 - DNA, 22 bp, Artificial Sequence
  Synthetic
cccaagaatgugcatggtgaug

SEQ ID NO: 11004 - DNA, 24 bp, Artificial Sequence
  Synthetic
gcagtcccautcattcttcagucc

SEQ ID NO: 11005 - DNA, 25 bp, Artificial Sequence
  Synthetic
accagctaccutctgtctttcatut

SEQ ID NO: 11006 - DNA, 30 bp, Artificial Sequence
  Synthetic
ggttttacatttcutttccttgtgtaugga

SEQ ID NO: 11007 - DNA, 24 bp, Artificial Sequence
  Synthetic
ctcctttgugagctgttggttuac

SEQ ID NO: 11008 - DNA, 17 bp, Artificial Sequence
  Synthetic
tggccuccccctcctuc

SEQ ID NO: 11009 - DNA, 18 bp, Artificial Sequence
  Synthetic
cattcccucggucgccat

SEQ ID NO: 11010 - DNA, 27 bp, Artificial Sequence
  Synthetic
ctgatggtaauggcagaaatcttucat

SEQ ID NO: 11011 - DNA, 28 bp, Artificial Sequence
  Synthetic
tgtttgtagaggugaaaaatgccauact

SEQ ID NO: 11012 - DNA, 28 bp, Artificial Sequence
  Synthetic
aatgctgatgggaucacttaatgtuaca

SEQ ID NO: 11013 - DNA, 29 bp, Artificial Sequence
  Synthetic
ttcacaacaaugccaaagtgtagatttut

SEQ ID NO: 11014 - DNA, 23 bp, Artificial Sequence
  Synthetic
ctacuaccagcccccauaaacag

SEQ ID NO: 11015 - DNA, 24 bp, Artificial Sequence
  Synthetic
aggcctcugagtaactctcaucag

SEQ ID NO: 11016 - DNA, 22 bp, Artificial Sequence
  Synthetic
ggctacatcucgcctctcuaca

SEQ ID NO: 11017 - DNA, 22 bp, Artificial Sequence
  Synthetic
aauccaacctugacaagcagga

SEQ ID NO: 11018 - DNA, 21 bp, Artificial Sequence
  Synthetic
agctgtgucagacaagcacuc

SEQ ID NO: 11019 - DNA, 26 bp, Artificial Sequence
  Synthetic
tgcatatacatcutgagcaaggacuc

SEQ ID NO: 11020 - DNA, 22 bp, Artificial Sequence
  Synthetic
cggtgcugatgcagtaguacaa

SEQ ID NO: 11021 - DNA, 25 bp, Artificial Sequence
  Synthetic
gggttaatcucacaaacacugcaga

SEQ ID NO: 11022 - DNA, 26 bp, Artificial Sequence
  Synthetic
tttttggctttguagctgctaaaucc

SEQ ID NO: 11023 - DNA, 25 bp, Artificial Sequence
  Synthetic
ctcctacaauacccaagttgaucgt

SEQ ID NO: 11024 - DNA, 33 bp, Artificial Sequence
  Synthetic
gtaaagtgattattttuaatgtttgcaggacua

SEQ ID NO: 11025 - DNA, 28 bp, Artificial Sequence
  Synthetic
ccaaaccaaccccauatatgagauaaca

SEQ ID NO: 11026 - DNA, 25 bp, Artificial Sequence
  Synthetic
ctccatguccactgtattcttugca

SEQ ID NO: 11027 - DNA, 27 bp, Artificial Sequence
  Synthetic
gccaagttagtauacaccgatggtaut

SEQ ID NO: 11028 - DNA, 22 bp, Artificial Sequence
  Synthetic
gtcatggtcautggacggcuat

SEQ ID NO: 11029 - DNA, 28 bp, Artificial Sequence
  Synthetic
acagatcaacutttatccaaaucgggaa

SEQ ID NO: 11030 - DNA, 25 bp, Artificial Sequence
  Synthetic
caccattttctucaatgtcacgugt

SEQ ID NO: 11031 - DNA, 22 bp, Artificial Sequence
  Synthetic
tgctttaugaaactgcgcucct

SEQ ID NO: 11032 - DNA, 28 bp, Artificial Sequence
  Synthetic
tcaatgatcaggaaaugctgtatucaca

SEQ ID NO: 11033 - DNA, 26 bp, Artificial Sequence
  Synthetic
acuttagtgtcagucaccaaagaagg

SEQ ID NO: 11034 - DNA, 22 bp, Artificial Sequence
  Synthetic
cauctcaucaccagaggcagat

SEQ ID NO: 11035 - DNA, 26 bp, Artificial Sequence
  Synthetic
accattagtttuccaattggcctcut

SEQ ID NO: 11036 - DNA, 28 bp, Artificial Sequence
  Synthetic
ctgcgtacauacaatttgatgttgtuct

SEQ ID NO: 11037 - DNA, 30 bp, Artificial Sequence
  Synthetic
tgcattgttcatuggtacttagtgtatcug

SEQ ID NO: 11038 - DNA, 22 bp, Artificial Sequence
  Synthetic
accccaaucaccuacagacaga

SEQ ID NO: 11039 - DNA, 28 bp, Artificial Sequence
  Synthetic
tggaacaaaagutatcctacaccugaaa

SEQ ID NO: 11040 - DNA, 26 bp, Artificial Sequence
  Synthetic
gacttggcgauagtaccaaggttaut

SEQ ID NO: 11041 - DNA, 26 bp, Artificial Sequence
  Synthetic
aaatccgguatgaaagctugacagat

SEQ ID NO: 11042 - DNA, 26 bp, Artificial Sequence
  Synthetic
gttttagctutctgtgacuccaacca

SEQ ID NO: 11043 - DNA, 22 bp, Artificial Sequence
  Synthetic
ggcaacaccuctacaaggauct

SEQ ID NO: 11044 - DNA, 23 bp, Artificial Sequence
  Synthetic
ttgagtcccutggtaccttcuca

SEQ ID NO: 11045 - DNA, 17 bp, Artificial Sequence
  Synthetic
gcccuccctucgggaca

SEQ ID NO: 11046 - DNA, 20 bp, Artificial Sequence
  Synthetic
tgtgcuccccacttuggaac

SEQ ID NO: 11047 - DNA, 22 bp, Artificial Sequence
  Synthetic
cccagcucactgatcttcucaa

SEQ ID NO: 11048 - DNA, 26 bp, Artificial Sequence
  Synthetic
gaacattgtcacuaactggtctggua

SEQ ID NO: 11049 - DNA, 30 bp, Artificial Sequence
  Synthetic
atcaatgaggaacutagaagaaaaactuca

SEQ ID NO: 11050 - DNA, 20 bp, Artificial Sequence
  Synthetic
tcccatcccucctccagaug

SEQ ID NO: 11051 - DNA, 20 bp, Artificial Sequence
  Synthetic
ctccccuccaacaguccaag

SEQ ID NO: 11052 - DNA, 22 bp, Artificial Sequence
  Synthetic
accacgtccuctcgtttcctua

SEQ ID NO: 11053 - DNA, 23 bp, Artificial Sequence
  Synthetic
gcuctttgttgctucccaaacac

SEQ ID NO: 11054 - DNA, 18 bp, Artificial Sequence
  Synthetic
cccaggguctgccuacca

SEQ ID NO: 11055 - DNA, 21 bp, Artificial Sequence
  Synthetic
cattctgccccauccccauag

SEQ ID NO: 11056 - DNA, 24 bp, Artificial Sequence
  Synthetic
acatctccgucatagttctugcag

SEQ ID NO: 11057 - DNA, 23 bp, Artificial Sequence
  Synthetic
ccctctccccauaacagacctut

SEQ ID NO: 11058 - DNA, 24 bp, Artificial Sequence
  Synthetic
aagttgtacacutcccactcctug

SEQ ID NO: 11059 - DNA, 19 bp, Artificial Sequence
  Synthetic
ctcgccuagccatcctcut

SEQ ID NO: 11060 - DNA, 21 bp, Artificial Sequence
  Synthetic
gcagagtcaauggtgaccugg

SEQ ID NO: 11061 - DNA, 24 bp, Artificial Sequence
  Synthetic
acttcttatccugccctttgtugt

SEQ ID NO: 11062 - DNA, 22 bp, Artificial Sequence
  Synthetic
ctgctgggutttgctttgtuct

SEQ ID NO: 11063 - DNA, 23 bp, Artificial Sequence
  Synthetic
gcagauggttcugaggaggaaac

SEQ ID NO: 11064 - DNA, 19 bp, Artificial Sequence
  Synthetic
ccatggccucgttgctcuc

SEQ ID NO: 11065 - DNA, 21 bp, Artificial Sequence
  Synthetic
cctaaccaccccuccaacuct

SEQ ID NO: 11066 - DNA, 25 bp, Artificial Sequence
  Synthetic
ggaggacgaaaugaaatcugggaat

SEQ ID NO: 11067 - DNA, 23 bp, Artificial Sequence
  Synthetic
cttugccacagucaaagagaaug

SEQ ID NO: 11068 - DNA, 18 bp, Artificial Sequence
  Synthetic
cgcaccugtctcugcagt

SEQ ID NO: 11069 - DNA, 21 bp, Artificial Sequence
  Synthetic
gagaugaagacgcagcuggaa

SEQ ID NO: 11070 - DNA, 18 bp, Artificial Sequence
  Synthetic
cccacgcccuctaccuga

SEQ ID NO: 11071 - DNA, 21 bp, Artificial Sequence
  Synthetic
gcggccgcutatgataaacug

SEQ ID NO: 11072 - DNA, 20 bp, Artificial Sequence
  Synthetic
gttctgctuggcctccauct

SEQ ID NO: 11073 - DNA, 22 bp, Artificial Sequence
  Synthetic
ggacctcttugcatccctttug

SEQ ID NO: 11074 - DNA, 22 bp, Artificial Sequence
  Synthetic
cgtgtttcugcctcatctccug

SEQ ID NO: 11075 - DNA, 22 bp, Artificial Sequence
  Synthetic
gcactgagaugaccctctguct

SEQ ID NO: 11076 - DNA, 22 bp, Artificial Sequence
  Synthetic
gcatcttgagcuctgcgatcug

SEQ ID NO: 11077 - DNA, 22 bp, Artificial Sequence
  Synthetic
cttccugaagagcaccttggut

SEQ ID NO: 11078 - DNA, 24 bp, Artificial Sequence
  Synthetic
ccagtttctugatcttggccucag

SEQ ID NO: 11079 - DNA, 28 bp, Artificial Sequence
  Synthetic
caccacgagaguaaatctgttauaacca

SEQ ID NO: 11080 - DNA, 20 bp, Artificial Sequence
  Synthetic
caagucctgtuccccagcaa

SEQ ID NO: 11081 - DNA, 23 bp, Artificial Sequence
  Synthetic
aaggaggaugaacugcagaagac

SEQ ID NO: 11082 - DNA, 22 bp, Artificial Sequence
  Synthetic
agaaaggccccugtttgtgaut

SEQ ID NO: 11083 - DNA, 24 bp, Artificial Sequence
  Synthetic
cuagaggaggagugagattugaag

SEQ ID NO: 11084 - DNA, 18 bp, Artificial Sequence
  Synthetic
ggacagcccuggcttcug

SEQ ID NO: 11085 - DNA, 18 bp, Artificial Sequence
  Synthetic
gcagcugggcaagcugat

SEQ ID NO: 11086 - DNA, 20 bp, Artificial Sequence
  Synthetic
ggtccccugagacagagucc

SEQ ID NO: 11087 - DNA, 22 bp, Artificial Sequence
  Synthetic
cggacaaguctttcguggagaa

SEQ ID NO: 11088 - DNA, 23 bp, Artificial Sequence
  Synthetic
gacaaccaagaccauggctctua

SEQ ID NO: 11089 - DNA, 22 bp, Artificial Sequence
  Synthetic
gcctttuccgctggatacucac

SEQ ID NO: 11090 - DNA, 24 bp, Artificial Sequence
  Synthetic
tcagagagcagaaauctgtccuga

SEQ ID NO: 11091 - DNA, 25 bp, Artificial Sequence
  Synthetic
aggaugatgagatgtuccaggaaac

SEQ ID NO: 11092 - DNA, 24 bp, Artificial Sequence
  Synthetic
cttttcuggaaaatccatguggct

SEQ ID NO: 11093 - DNA, 28 bp, Artificial Sequence
  Synthetic
ggttgctttcuccaataactagatguga

SEQ ID NO: 11094 - DNA, 21 bp, Artificial Sequence
  Synthetic
gcccutgtacatgucgacgat

SEQ ID NO: 11095 - DNA, 22 bp, Artificial Sequence
  Synthetic
gtgcaatcugtctacccuggag

SEQ ID NO: 11096 - DNA, 26 bp, Artificial Sequence
  Synthetic
gctgttgaugaagtttttguccacaa

SEQ ID NO: 11097 - DNA, 20 bp, Artificial Sequence
  Synthetic
tccuagacagggcaagguga

SEQ ID NO: 11098 - DNA, 22 bp, Artificial Sequence
  Synthetic
cctgccacauggatgtatucca

SEQ ID NO: 11099 - DNA, 21 bp, Artificial Sequence
  Synthetic
agattgagugccacccuaagc

SEQ ID NO: 11100 - DNA, 20 bp, Artificial Sequence
  Synthetic
ccuggagtuccgcaaagact

SEQ ID NO: 11101 - DNA, 21 bp, Artificial Sequence
  Synthetic
tccatcccagcutcacaccua

SEQ ID NO: 11102 - DNA, 22 bp, Artificial Sequence
  Synthetic
cctcacctuaccctcatccugt

SEQ ID NO: 11103 - DNA, 19 bp, Artificial Sequence
  Synthetic
ggtggcagcugtacaccuc

SEQ ID NO: 11104 - DNA, 19 bp, Artificial Sequence
  Synthetic
ggccuagaggacccacuct

SEQ ID NO: 11105 - DNA, 19 bp, Artificial Sequence
  Synthetic
gtccuccccatcugcaagg

SEQ ID NO: 11106 - DNA, 19 bp, Artificial Sequence
  Synthetic
ccacttucgagcccuggac

SEQ ID NO: 11107 - DNA, 19 bp, Artificial Sequence
  Synthetic
tcaggcucaaaggcccauc

SEQ ID NO: 11108 - DNA, 21 bp, Artificial Sequence
  Synthetic
gcccuacggacagcagagtua

SEQ ID NO: 11109 - DNA, 28 bp, Artificial Sequence
  Synthetic
gcaatautcagaaagaguaggaagaggt

SEQ ID NO: 11110 - DNA, 21 bp, Artificial Sequence
  Synthetic
gcuatgguggacagcagcaaa

SEQ ID NO: 11111 - DNA, 21 bp, Artificial Sequence
  Synthetic
gcugcagacaaagcugaagac

SEQ ID NO: 11112 - DNA, 18 bp, Artificial Sequence
  Synthetic
cgguggctauggacagca

SEQ ID NO: 11113 - DNA, 17 bp, Artificial Sequence
  Synthetic
ccaugccacctcugcct

SEQ ID NO: 11114 - DNA, 28 bp, Artificial Sequence
  Synthetic
ttcacatttgcautttctctgtucaaca

SEQ ID NO: 11115 - DNA, 21 bp, Artificial Sequence
  Synthetic
tgacagaaagcucccacucct

SEQ ID NO: 11116 - DNA, 23 bp, Artificial Sequence
  Synthetic
ggagcagacccauacttggtcua

SEQ ID NO: 11117 - DNA, 23 bp, Artificial Sequence
  Synthetic
acggatuaggacacttccaguca

SEQ ID NO: 11118 - DNA, 20 bp, Artificial Sequence
  Synthetic
gctatgaucgaggcggcuac

SEQ ID NO: 11119 - DNA, 25 bp, Artificial Sequence
  Synthetic
tgttatcctauggcctctgtucaac

SEQ ID NO: 11120 - DNA, 19 bp, Artificial Sequence
  Synthetic
gcgactuggagctgagugg

SEQ ID NO: 11121 - DNA, 17 bp, Artificial Sequence
  Synthetic
guggcauccccagcaga

SEQ ID NO: 11122 - DNA, 25 bp, Artificial Sequence
  Synthetic
tcctcaagugatggttuaaggcaaa

SEQ ID NO: 11123 - DNA, 30 bp, Artificial Sequence
  Synthetic
ccutattcttaaattgaugcaaacgaggaa

SEQ ID NO: 11124 - DNA, 24 bp, Artificial Sequence
  Synthetic
cacaagagauacctgtggtctcug

SEQ ID NO: 11125 - DNA, 23 bp, Artificial Sequence
  Synthetic
ccttgtgcatucatccgcaaaut

SEQ ID NO: 11126 - DNA, 27 bp, Artificial Sequence
  Synthetic
ttggtgttcatcauagccctaattgut

SEQ ID NO: 11127 - DNA, 22 bp, Artificial Sequence
  Synthetic
gccatgcugtgctcauaaagga

SEQ ID NO: 11128 - DNA, 25 bp, Artificial Sequence
  Synthetic
gtgaacacacuggtaaguacacgat

SEQ ID NO: 11129 - DNA, 30 bp, Artificial Sequence
  Synthetic
ctgcgtttgatcuttgtctaaatagtgtua

SEQ ID NO: 11130 - DNA, 20 bp, Artificial Sequence
  Synthetic
cttgagguggtcgactugct

SEQ ID NO: 11131 - DNA, 20 bp, Artificial Sequence
  Synthetic
gtgauccggcugaagcagaa

SEQ ID NO: 11132 - DNA, 18 bp, Artificial Sequence
  Synthetic
gtcttccaggugcgccut

SEQ ID NO: 11133 - DNA, 19 bp, Artificial Sequence
  Synthetic
accgcatcaucagccagug

SEQ ID NO: 11134 - DNA, 19 bp, Artificial Sequence
  Synthetic
caggcucgggaagatccuc

SEQ ID NO: 11135 - DNA, 18 bp, Artificial Sequence
  Synthetic
gaggcgagcccutcctua

SEQ ID NO: 11136 - DNA, 22 bp, Artificial Sequence
  Synthetic
tctacctcugtgcaaagugcaa

SEQ ID NO: 11137 - DNA, 21 bp, Artificial Sequence
  Synthetic
ttgctctcugcctcgtcttuc

SEQ ID NO: 11138 - DNA, 21 bp, Artificial Sequence
  Synthetic
gtcccgucagaagagaugagg

SEQ ID NO: 11139 - DNA, 20 bp, Artificial Sequence
  Synthetic
ctgtggtcugaggcctagug

SEQ ID NO: 11140 - DNA, 19 bp, Artificial Sequence
  Synthetic
cccagaggugctgagaugg

SEQ ID NO: 11141 - DNA, 21 bp, Artificial Sequence
  Synthetic
ctgagccacutcttggtgtug

SEQ ID NO: 11142 - DNA, 25 bp, Artificial Sequence
  Synthetic
cttcctgatgutttcttcccugact

SEQ ID NO: 11143 - DNA, 21 bp, Artificial Sequence
  Synthetic
tggtttctauggcgtggtugt

SEQ ID NO: 11144 - DNA, 21 bp, Artificial Sequence
  Synthetic
gaagcugacaggaggauccac

SEQ ID NO: 11145 - DNA, 26 bp, Artificial Sequence
  Synthetic
gcttttcttaccugccttgaactcut

SEQ ID NO: 11146 - DNA, 21 bp, Artificial Sequence
  Synthetic
gccgtcugcggaaaatcucaa

SEQ ID NO: 11147 - DNA, 19 bp, Artificial Sequence
  Synthetic
gccttccugtgccagcaua

SEQ ID NO: 11148 - DNA, 21 bp, Artificial Sequence
  Synthetic
ggccaggguagctctttucaa

SEQ ID NO: 11149 - DNA, 28 bp, Artificial Sequence
  Synthetic
ggattgtgtgttcugtcctcattgtaut

SEQ ID NO: 11150 - DNA, 18 bp, Artificial Sequence
  Synthetic
cgguccgaaagctgcgua

SEQ ID NO: 11151 - DNA, 27 bp, Artificial Sequence
  Synthetic
agcaatttcttacuctctctgcaagut

SEQ ID NO: 11152 - DNA, 20 bp, Artificial Sequence
  Synthetic
ccccaugaaggagagccuca

SEQ ID NO: 11153 - DNA, 21 bp, Artificial Sequence
  Synthetic
tgatggttucacggctgtcuc

SEQ ID NO: 11154 - DNA, 23 bp, Artificial Sequence
  Synthetic
cgtgttgaugctgagctgaauct

SEQ ID NO: 11155 - DNA, 21 bp, Artificial Sequence
  Synthetic
gcagctgtauccctccttucg

SEQ ID NO: 11156 - DNA, 24 bp, Artificial Sequence
  Synthetic
tgagagacugacaaggaaagucct

SEQ ID NO: 11157 - DNA, 22 bp, Artificial Sequence
  Synthetic
gatgcactguctgcttctcugt

SEQ ID NO: 11158 - DNA, 18 bp, Artificial Sequence
  Synthetic
gatguggcagccagctuc

SEQ ID NO: 11159 - DNA, 17 bp, Artificial Sequence
  Synthetic
gtccugggctucacgct

SEQ ID NO: 11160 - DNA, 20 bp, Artificial Sequence
  Synthetic
gaaccucctgcgttuccaga

SEQ ID NO: 11161 - DNA, 21 bp, Artificial Sequence
  Synthetic
ggtcatcugtcgcacatuggt

SEQ ID NO: 11162 - DNA, 25 bp, Artificial Sequence
  Synthetic
cttggcuctttaattuggcagacac

SEQ ID NO: 11163 - DNA, 23 bp, Artificial Sequence
  Synthetic
ttttctgttccuggctctgtcut

SEQ ID NO: 11164 - DNA, 21 bp, Artificial Sequence
  Synthetic
ccgtctgautctgggcttuga

SEQ ID NO: 11165 - DNA, 29 bp, Artificial Sequence
  Synthetic
ttgtttttcagagutctttgttgctugaa

SEQ ID NO: 11166 - DNA, 27 bp, Artificial Sequence
  Synthetic
atgtcctatttucccaaccagctuaaa

SEQ ID NO: 11167 - DNA, 21 bp, Artificial Sequence
  Synthetic
ggguattctcucagccgggat

SEQ ID NO: 11168 - DNA, 18 bp, Artificial Sequence
  Synthetic
cgggucacccttcuggaa

SEQ ID NO: 11169 - DNA, 19 bp, Artificial Sequence
  Synthetic
gcccugtggacauggagat

SEQ ID NO: 11170 - DNA, 22 bp, Artificial Sequence
  Synthetic
gctctgtgucagcctctguact

SEQ ID NO: 11171 - DNA, 23 bp, Artificial Sequence
  Synthetic
atggtgacugtggtcttttucca

SEQ ID NO: 11172 - DNA, 21 bp, Artificial Sequence
  Synthetic
ggtggucgcacttcttcaugt

SEQ ID NO: 11173 - DNA, 21 bp, Artificial Sequence
  Synthetic
tgcactggcutacagctgaug

SEQ ID NO: 11174 - DNA, 21 bp, Artificial Sequence
  Synthetic
gcttcaccuttcccggaugaa

SEQ ID NO: 11175 - DNA, 21 bp, Artificial Sequence
  Synthetic
agactcagacgugcccuaaac

SEQ ID NO: 11176 - DNA, 20 bp, Artificial Sequence
  Synthetic
gcagaagcagugaccgcuat

SEQ ID NO: 11177 - DNA, 21 bp, Artificial Sequence
  Synthetic
catctgagccgugtctctguc

SEQ ID NO: 11178 - DNA, 27 bp, Artificial Sequence
  Synthetic
gcaggcaagaaaaaucaattctuacca

SEQ ID NO: 11179 - DNA, 19 bp, Artificial Sequence
  Synthetic
gacttgccucagccccaut

SEQ ID NO: 11180 - DNA, 17 bp, Artificial Sequence
  Synthetic
aacaauggcggcuccga

SEQ ID NO: 11181 - DNA, 19 bp, Artificial Sequence
  Synthetic
cgcgtuccttacccugcat

SEQ ID NO: 11182 - DNA, 22 bp, Artificial Sequence
  Synthetic
gggatttcacugcagaggacut

SEQ ID NO: 11183 - DNA, 28 bp, Artificial Sequence
  Synthetic
agtaccaaaaauaatcatggcaucacct

SEQ ID NO: 11184 - DNA, 29 bp, Artificial Sequence
  Synthetic
gaactcatgtcuacctcgtttgataagut

SEQ ID NO: 11185 - DNA, 23 bp, Artificial Sequence
  Synthetic
gcattcaaaacuccagcagcauc

SEQ ID NO: 11186 - DNA, 24 bp, Artificial Sequence
  Synthetic
gcttccattugcctattcctugag

SEQ ID NO: 11187 - DNA, 25 bp, Artificial Sequence
  Synthetic
ggcaaggtugaatcagcauaaacat

SEQ ID NO: 11188 - DNA, 23 bp, Artificial Sequence
  Synthetic
gttgaggucgcatgctatgttug

SEQ ID NO: 11189 - DNA, 26 bp, Artificial Sequence
  Synthetic
attctttacgtcutgcttcctcucag

SEQ ID NO: 11190 - DNA, 23 bp, Artificial Sequence
  Synthetic
ccagtcauccagaactucagcag

SEQ ID NO: 11191 - DNA, 22 bp, Artificial Sequence
  Synthetic
tgctgtggugtctgagtgttut

SEQ ID NO: 11192 - DNA, 22 bp, Artificial Sequence
  Synthetic
cactggucaccacaaactcgua

SEQ ID NO: 11193 - DNA, 20 bp, Artificial Sequence
  Synthetic
ccacgggccutgtgttgtua

SEQ ID NO: 11194 - DNA, 21 bp, Artificial Sequence
  Synthetic
ctctcctccugagctccugat

SEQ ID NO: 11195 - DNA, 22 bp, Artificial Sequence
  Synthetic
gtugccagagaguacagaaggg

SEQ ID NO: 11196 - DNA, 18 bp, Artificial Sequence
  Synthetic
cctcagcgautccugcca

SEQ ID NO: 11197 - DNA, 18 bp, Artificial Sequence
  Synthetic
cggcugaccgagaagcuc

SEQ ID NO: 11198 - DNA, 22 bp, Artificial Sequence
  Synthetic
atgaggtagauccggtccauca

SEQ ID NO: 11199 - DNA, 23 bp, Artificial Sequence
  Synthetic
ccatcttcutcggagaugagcag

SEQ ID NO: 11200 - DNA, 21 bp, Artificial Sequence
  Synthetic
cacctacugcagggaucacaa

SEQ ID NO: 11201 - DNA, 23 bp, Artificial Sequence
  Synthetic
aagaagaggaagguggcatucag

SEQ ID NO: 11202 - DNA, 26 bp, Artificial Sequence
  Synthetic
ctcatgggagtaugaaggagatggua

SEQ ID NO: 11203 - DNA, 17 bp, Artificial Sequence
  Synthetic
gccacccccguacctug

SEQ ID NO: 11204 - DNA, 20 bp, Artificial Sequence
  Synthetic
tguggaggagggaacaguct

SEQ ID NO: 11205 - DNA, 21 bp, Artificial Sequence
  Synthetic
ggtgagcacgutggcaaatug

SEQ ID NO: 11206 - DNA, 20 bp, Artificial Sequence
  Synthetic
caggctgccutctctggtua

SEQ ID NO: 11207 - DNA, 23 bp, Artificial Sequence
  Synthetic
ccatctuaccacagctgacugac

SEQ ID NO: 11208 - DNA, 22 bp, Artificial Sequence
  Synthetic
cctggtgtugaaccttcctcuc

SEQ ID NO: 11209 - DNA, 26 bp, Artificial Sequence
  Synthetic
gctcagtttctuccctttatgacuca

SEQ ID NO: 11210 - DNA, 21 bp, Artificial Sequence
  Synthetic
ggtggtctuctctggcttugg

SEQ ID NO: 11211 - DNA, 18 bp, Artificial Sequence
  Synthetic
atccgtutgtgggugcct

SEQ ID NO: 11212 - DNA, 20 bp, Artificial Sequence
  Synthetic
ctgtccucccgaaccttugg

SEQ ID NO: 11213 - DNA, 25 bp, Artificial Sequence
  Synthetic
ccatcccatutccttctaagugcat

SEQ ID NO: 11214 - DNA, 22 bp, Artificial Sequence
  Synthetic
cgttaaucccctcctcucccaa

SEQ ID NO: 11215 - DNA, 21 bp, Artificial Sequence
  Synthetic
agccagaaagcuctcccatuc

SEQ ID NO: 11216 - DNA, 20 bp, Artificial Sequence
  Synthetic
cctcaggtucctcgctcuct

SEQ ID NO: 11217 - DNA, 22 bp, Artificial Sequence
  Synthetic
agagctgcacgutgagaatcug

SEQ ID NO: 11218 - DNA, 17 bp, Artificial Sequence
  Synthetic
gggccugcccctcaaug

SEQ ID NO: 11219 - DNA, 20 bp, Artificial Sequence
  Synthetic
agctctcccucacctgtuga

SEQ ID NO: 11220 - DNA, 21 bp, Artificial Sequence
  Synthetic
ctugcaggaacaccagacugt

SEQ ID NO: 11221 - DNA, 17 bp, Artificial Sequence
  Synthetic
ggtggagcutccugcca

SEQ ID NO: 11222 - DNA, 19 bp, Artificial Sequence
  Synthetic
ccagucctcacugcccaga

SEQ ID NO: 11223 - DNA, 24 bp, Artificial Sequence
  Synthetic
cctgctgagguacctgatgauaag

SEQ ID NO: 11224 - DNA, 22 bp, Artificial Sequence
  Synthetic
cttttcucggaaccaugaaccc

SEQ ID NO: 11225 - DNA, 20 bp, Artificial Sequence
  Synthetic
ctctccuccctggatucgga

SEQ ID NO: 11226 - DNA, 21 bp, Artificial Sequence
  Synthetic
ctaccccaagcagucctucac

SEQ ID NO: 11227 - DNA, 22 bp, Artificial Sequence
  Synthetic
gaaggtacucttgccaaaugcc

SEQ ID NO: 11228 - DNA, 21 bp, Artificial Sequence
  Synthetic
gagttugagaagagccgcaug

SEQ ID NO: 11229 - DNA, 21 bp, Artificial Sequence
  Synthetic
tcaggucatcugcaccaacag

SEQ ID NO: 11230 - DNA, 20 bp, Artificial Sequence
  Synthetic
aactacguggaggccatcug

SEQ ID NO: 11231 - DNA, 22 bp, Artificial Sequence
  Synthetic
tcagtuggcaaaagaagcugga

SEQ ID NO: 11232 - DNA, 30 bp, Artificial Sequence
  Synthetic
gaaauagtcttauaacaggucaggaaaagt

SEQ ID NO: 11233 - DNA, 28 bp, Artificial Sequence
  Synthetic
atccagcttctuttccttgtctttauct

SEQ ID NO: 11234 - DNA, 23 bp, Artificial Sequence
  Synthetic
gagctgaagacucttaccacuca

SEQ ID NO: 11235 - DNA, 21 bp, Artificial Sequence
  Synthetic
ggaccuggatggtgucaggat

SEQ ID NO: 11236 - DNA, 26 bp, Artificial Sequence
  Synthetic
ctaatgagcaggaugacaagtacugg

SEQ ID NO: 11237 - DNA, 22 bp, Artificial Sequence
  Synthetic
agutctccttcuccaggaacga

SEQ ID NO: 11238 - DNA, 20 bp, Artificial Sequence
  Synthetic
ccccguggaagtuacacacc

SEQ ID NO: 11239 - DNA, 25 bp, Artificial Sequence
  Synthetic
aaacauaacagaagugagcaccgat

SEQ ID NO: 11240 - DNA, 21 bp, Artificial Sequence
  Synthetic
aguattaggucagccccacca

SEQ ID NO: 11241 - DNA, 24 bp, Artificial Sequence
  Synthetic
gcaaaagaaggcacugtcccttua

SEQ ID NO: 11242 - DNA, 20 bp, Artificial Sequence
  Synthetic
ggccugccagaactgaacuc

SEQ ID NO: 11243 - DNA, 21 bp, Artificial Sequence
  Synthetic
gcgcaaccccuacacactuac

SEQ ID NO: 11244 - DNA, 29 bp, Artificial Sequence
  Synthetic
gccggttucacaagacataatttttauca

SEQ ID NO: 11245 - DNA, 23 bp, Artificial Sequence
  Synthetic
acagtcatucaaacaggcagcua

SEQ ID NO: 11246 - DNA, 28 bp, Artificial Sequence
  Synthetic
tcctttcccagaauatgacaatctgtuc

SEQ ID NO: 11247 - DNA, 23 bp, Artificial Sequence
  Synthetic
acacauggcagagacggtaauac

SEQ ID NO: 11248 - DNA, 19 bp, Artificial Sequence
  Synthetic
cgcgcugccagatttgtuc

SEQ ID NO: 11249 - DNA, 17 bp, Artificial Sequence
  Synthetic
guagcgggucccccaac

SEQ ID NO: 11250 - DNA, 28 bp, Artificial Sequence
  Synthetic
gaaagctgttgacutgaattctttcugt

SEQ ID NO: 11251 - DNA, 23 bp, Artificial Sequence
  Synthetic
catagccugcaggaaatcacuca

SEQ ID NO: 11252 - DNA, 25 bp, Artificial Sequence
  Synthetic
gcaggcttttaugtctgtcgagtua

SEQ ID NO: 11253 - DNA, 22 bp, Artificial Sequence
  Synthetic
gggaatccccaucccaacatuc

SEQ ID NO: 11254 - DNA, 28 bp, Artificial Sequence
  Synthetic
ccaagccautaaaauagaagaggaagca

SEQ ID NO: 11255 - DNA, 29 bp, Artificial Sequence
  Synthetic
cttgctatcttgacugtctcgatcatuat

SEQ ID NO: 11256 - DNA, 28 bp, Artificial Sequence
  Synthetic
tctgtaagtgaugctgctgatgttauat

SEQ ID NO: 11257 - DNA, 21 bp, Artificial Sequence
  Synthetic
tctacucacccaaaggcuggt

SEQ ID NO: 11258 - DNA, 27 bp, Artificial Sequence
  Synthetic
tgcaggacauggttatgaaaatttugg

SEQ ID NO: 11259 - DNA, 30 bp, Artificial Sequence
  Synthetic
tccagtttctttutcttgcatcaattucag

SEQ ID NO: 11260 - DNA, 24 bp, Artificial Sequence
  Synthetic
gtaagugtcacctuaccaaaggca

SEQ ID NO: 11261 - DNA, 23 bp, Artificial Sequence
  Synthetic
ccacugtagatuccgcacaagag

SEQ ID NO: 11262 - DNA, 30 bp, Artificial Sequence
  Synthetic
cacgagaggataguatcagttaagatguct

SEQ ID NO: 11263 - DNA, 24 bp, Artificial Sequence
  Synthetic
tttgataccaaguagctgccagut

SEQ ID NO: 11264 - DNA, 24 bp, Artificial Sequence
  Synthetic
gggaaggaagacutgcttucaaac

SEQ ID NO: 11265 - DNA, 24 bp, Artificial Sequence
  Synthetic
gacagctauctgctggtguaacat

SEQ ID NO: 11266 - DNA, 22 bp, Artificial Sequence
  Synthetic
cacattccugaagagcacuggt

SEQ ID NO: 11267 - DNA, 26 bp, Artificial Sequence
  Synthetic
ctgaaaaugcagacaaaactgccuaa

SEQ ID NO: 11268 - DNA, 27 bp, Artificial Sequence
  Synthetic
tgatgtttugaagtaagtcctuggaca

SEQ ID NO: 11269 - DNA, 26 bp, Artificial Sequence
  Synthetic
gagacucgacttattucagagaccac

SEQ ID NO: 11270 - DNA, 24 bp, Artificial Sequence
  Synthetic
aaccgaataaucccaactgtccug

SEQ ID NO: 11271 - DNA, 23 bp, Artificial Sequence
  Synthetic
ttttgacctcaugtggcctctut

SEQ ID NO: 11272 - DNA, 20 bp, Artificial Sequence
  Synthetic
agaagcugggtgucaggagt

SEQ ID NO: 11273 - DNA, 19 bp, Artificial Sequence
  Synthetic
accaggcggugtcaatgut

SEQ ID NO: 11274 - DNA, 18 bp, Artificial Sequence
  Synthetic
cctgaacutccccuggca

SEQ ID NO: 11275 - DNA, 18 bp, Artificial Sequence
  Synthetic
tgtugccgcaaagcucct

SEQ ID NO: 11276 - DNA, 25 bp, Artificial Sequence
  Synthetic
gtcuguagaagaggaagagaactuc

SEQ ID NO: 11277 - DNA, 20 bp, Artificial Sequence
  Synthetic
aggutctgggauccccaagt

SEQ ID NO: 11278 - DNA, 18 bp, Artificial Sequence
  Synthetic
cctccacuggcugcaact

SEQ ID NO: 11279 - DNA, 19 bp, Artificial Sequence
  Synthetic
cagcagagaccugggtucc

SEQ ID NO: 11280 - DNA, 18 bp, Artificial Sequence
  Synthetic
agagtcgucctcgucgga

SEQ ID NO: 11281 - DNA, 20 bp, Artificial Sequence
  Synthetic
agtgucaagaagctcugcgt

SEQ ID NO: 11282 - DNA, 17 bp, Artificial Sequence
  Synthetic
cacuccgggacccctuc

SEQ ID NO: 11283 - DNA, 21 bp, Artificial Sequence
  Synthetic
gauggcccugaaagagaccaa

SEQ ID NO: 11284 - DNA, 17 bp, Artificial Sequence
  Synthetic
ggcctuccgcctcacua

SEQ ID NO: 11285 - DNA, 21 bp, Artificial Sequence
  Synthetic
tgauggtaaugcccgaaggag

SEQ ID NO: 11286 - DNA, 19 bp, Artificial Sequence
  Synthetic
guccccauagagaggcauc

SEQ ID NO: 11287 - DNA, 26 bp, Artificial Sequence
  Synthetic
tgatgggtgtguttcttccttttcut

SEQ ID NO: 11288 - DNA, 18 bp, Artificial Sequence
  Synthetic
gcacguccactgccctut

SEQ ID NO: 11289 - DNA, 18 bp, Artificial Sequence
  Synthetic
gcccggcccaucaagaug

SEQ ID NO: 11290 - DNA, 17 bp, Artificial Sequence
  Synthetic
gacccuggcccccaauc

SEQ ID NO: 11291 - DNA, 18 bp, Artificial Sequence
  Synthetic
guagccaugcccaccaca

SEQ ID NO: 11292 - DNA, 21 bp, Artificial Sequence
  Synthetic
ccccaaaugcaatgtcauggg

SEQ ID NO: 11293 - DNA, 22 bp, Artificial Sequence
  Synthetic
aaacaccacuccctgtccttut

SEQ ID NO: 11294 - DNA, 18 bp, Artificial Sequence
  Synthetic
gctcugggaagccgacuc

SEQ ID NO: 11295 - DNA, 21 bp, Artificial Sequence
  Synthetic
cctcgcauctcaagacctugt

SEQ ID NO: 11296 - DNA, 24 bp, Artificial Sequence
  Synthetic
agatcugcgaggaauagagaagga

SEQ ID NO: 11297 - DNA, 21 bp, Artificial Sequence
  Synthetic
tgacagaucctgccttcucca

SEQ ID NO: 11298 - DNA, 20 bp, Artificial Sequence
  Synthetic
gtctuggcaggcauagagct

SEQ ID NO: 11299 - DNA, 20 bp, Artificial Sequence
  Synthetic
ggaggtugcacagcaaguca

SEQ ID NO: 11300 - DNA, 22 bp, Artificial Sequence
  Synthetic
tggtgacgccacuaaacactuc

SEQ ID NO: 11301 - DNA, 22 bp, Artificial Sequence
  Synthetic
agtggatcccugatcccactut

SEQ ID NO: 11302 - DNA, 20 bp, Artificial Sequence
  Synthetic
tgtttgaccaccugcagcut

SEQ ID NO: 11303 - DNA, 22 bp, Artificial Sequence
  Synthetic
cctccucaacacaagtgcagut

SEQ ID NO: 11304 - DNA, 21 bp, Artificial Sequence
  Synthetic
ctggaccccagacugagguat

SEQ ID NO: 11305 - DNA, 22 bp, Artificial Sequence
  Synthetic
acccacaucatccttggtucag

SEQ ID NO: 11306 - DNA, 20 bp, Artificial Sequence
  Synthetic
acccacccuagcaguagacc

SEQ ID NO: 11307 - DNA, 20 bp, Artificial Sequence
  Synthetic
tccccatuccctctcaccut

SEQ ID NO: 11308 - DNA, 23 bp, Artificial Sequence
  Synthetic
gttgtctgucctggtaacaguga

SEQ ID NO: 11309 - DNA, 20 bp, Artificial Sequence
  Synthetic
cttcggtacuccccctccut

SEQ ID NO: 11310 - DNA, 19 bp, Artificial Sequence
  Synthetic
cacgtugctcacucccaag

SEQ ID NO: 11311 - DNA, 20 bp, Artificial Sequence
  Synthetic
tcucaaggagcagggugagt

SEQ ID NO: 11312 - DNA, 28 bp, Artificial Sequence
  Synthetic
ctcgaaaugcaaggagatgataaaatug

SEQ ID NO: 11313 - DNA, 20 bp, Artificial Sequence
  Synthetic
ccactcccuctttgctcugg

SEQ ID NO: 11314 - DNA, 21 bp, Artificial Sequence
  Synthetic
tggacaagaggcugcaugaac

SEQ ID NO: 11315 - DNA, 21 bp, Artificial Sequence
  Synthetic
cagaagtccaaucccctcuga

SEQ ID NO: 11316 - DNA, 21 bp, Artificial Sequence
  Synthetic
gugagaagcatucccaaccct

SEQ ID NO: 11317 - DNA, 20 bp, Artificial Sequence
  Synthetic
cctgugggacacagccatuc

SEQ ID NO: 11318 - DNA, 22 bp, Artificial Sequence
  Synthetic
ccacagcccaguttttctcuga

SEQ ID NO: 11319 - DNA, 23 bp, Artificial Sequence
  Synthetic
ccagcacacaacaugaactcugt

SEQ ID NO: 11320 - DNA, 20 bp, Artificial Sequence
  Synthetic
ggaucaaggacaccaucgca

SEQ ID NO: 11321 - DNA, 21 bp, Artificial Sequence
  Synthetic
gucagtaggacucaggaggct

SEQ ID NO: 11322 - DNA, 21 bp, Artificial Sequence
  Synthetic
tcgctcaagucaaacagguca

SEQ ID NO: 11323 - DNA, 17 bp, Artificial Sequence
  Synthetic
cgacagccccucctcuc

SEQ ID NO: 11324 - DNA, 22 bp, Artificial Sequence
  Synthetic
gatcaccucgtccttggugaag

SEQ ID NO: 11325 - DNA, 17 bp, Artificial Sequence
  Synthetic
cagcugcccacuagcca

SEQ ID NO: 11326 - DNA, 17 bp, Artificial Sequence
  Synthetic
gcttugcagcggctgug

SEQ ID NO: 11327 - DNA, 17 bp, Artificial Sequence
  Synthetic
tcgucgcccagctucag

SEQ ID NO: 11328 - DNA, 19 bp, Artificial Sequence
  Synthetic
cucacaaggaggugaggct

SEQ ID NO: 11329 - DNA, 17 bp, Artificial Sequence
  Synthetic
ccgggaccuccgaucca

SEQ ID NO: 11330 - DNA, 20 bp, Artificial Sequence
  Synthetic
ccgaaaucgaguccgagacc

SEQ ID NO: 11331 - DNA, 19 bp, Artificial Sequence
  Synthetic
cutcgcaactugagagcgt

SEQ ID NO: 11332 - DNA, 19 bp, Artificial Sequence
  Synthetic
ggaaagugaggccggugaa

SEQ ID NO: 11333 - DNA, 17 bp, Artificial Sequence
  Synthetic
ccguagaggcagtugcg

SEQ ID NO: 11334 - DNA, 22 bp, Artificial Sequence
  Synthetic
ggtcuccagacccaacttucag

SEQ ID NO: 11335 - DNA, 19 bp, Artificial Sequence
  Synthetic
ccaggcugctccagtguag

SEQ ID NO: 11336 - DNA, 19 bp, Artificial Sequence
  Synthetic
tggcuccagaggaggcuac

SEQ ID NO: 11337 - DNA, 17 bp, Artificial Sequence
  Synthetic
gctgcugccgtcgacut

SEQ ID NO: 11338 - DNA, 19 bp, Artificial Sequence
  Synthetic
gauggaaggagccgcugat

SEQ ID NO: 11339 - DNA, 18 bp, Artificial Sequence
  Synthetic
tcccggagucgggatcut

SEQ ID NO: 11340 - DNA, 20 bp, Artificial Sequence
  Synthetic
gguttcagcaucggcgaaat

SEQ ID NO: 11341 - DNA, 24 bp, Artificial Sequence
  Synthetic
ggtacctucttgacctugagagag

SEQ ID NO: 11342 - DNA, 26 bp, Artificial Sequence
  Synthetic
gaaagcagtacucctaactgacaugg

SEQ ID NO: 11343 - DNA, 18 bp, Artificial Sequence
  Synthetic
cugggagggcgcuacaag

SEQ ID NO: 11344 - DNA, 21 bp, Artificial Sequence
  Synthetic
cactcagcaauagtggcccut

SEQ ID NO: 11345 - DNA, 21 bp, Artificial Sequence
  Synthetic
agattugggacattcguggct

SEQ ID NO: 11346 - DNA, 19 bp, Artificial Sequence
  Synthetic
ccttgucagcgggcatgua

SEQ ID NO: 11347 - DNA, 20 bp, Artificial Sequence
  Synthetic
ggtggcaagaagggugagug

SEQ ID NO: 11348 - DNA, 22 bp, Artificial Sequence
  Synthetic
gggtcgagguagagtuagacat

SEQ ID NO: 11349 - DNA, 20 bp, Artificial Sequence
  Synthetic
tgtcguccagctcugacaac

SEQ ID NO: 11350 - DNA, 18 bp, Artificial Sequence
  Synthetic
cgtgagcgccutttcgug

SEQ ID NO: 11351 - DNA, 19 bp, Artificial Sequence
  Synthetic
agcccuggcaccttcttug

SEQ ID NO: 11352 - DNA, 18 bp, Artificial Sequence
  Synthetic
agcaguccctccugggaa

SEQ ID NO: 11353 - DNA, 20 bp, Artificial Sequence
  Synthetic
accgctugccagaacaugat

SEQ ID NO: 11354 - DNA, 18 bp, Artificial Sequence
  Synthetic
cagacugcccccgaacug

SEQ ID NO: 11355 - DNA, 17 bp, Artificial Sequence
  Synthetic
tctgcccgcugactgug

SEQ ID NO: 11356 - DNA, 18 bp, Artificial Sequence
  Synthetic
gttgcagggacugguggt

SEQ ID NO: 11357 - DNA, 20 bp, Artificial Sequence
  Synthetic
aacggcgcuctggataauca

SEQ ID NO: 11358 - DNA, 19 bp, Artificial Sequence
  Synthetic
ggcgggcacgaautttguc

SEQ ID NO: 11359 - DNA, 19 bp, Artificial Sequence
  Synthetic
gcuccaggcacccgtuaat

SEQ ID NO: 11360 - DNA, 19 bp, Artificial Sequence
  Synthetic
gcgacccgcugcataauga

SEQ ID NO: 11361 - DNA, 20 bp, Artificial Sequence
  Synthetic
ccgatucccacagtcuggag

SEQ ID NO: 11362 - DNA, 19 bp, Artificial Sequence
  Synthetic
cgaagtugcccccaaagug

SEQ ID NO: 11363 - DNA, 18 bp, Artificial Sequence
  Synthetic
catggagcccuacggcut

SEQ ID NO: 11364 - DNA, 20 bp, Artificial Sequence
  Synthetic
gaggcatgutcacagcaguc

SEQ ID NO: 11365 - DNA, 20 bp, Artificial Sequence
  Synthetic
aggccaaaccugccgaauaa

SEQ ID NO: 11366 - DNA, 17 bp, Artificial Sequence
  Synthetic
gcaucggccgtcucagt

SEQ ID NO: 11367 - DNA, 18 bp, Artificial Sequence
  Synthetic
gggccacacguccatcuc

SEQ ID NO: 11368 - DNA, 20 bp, Artificial Sequence
  Synthetic
acttgacagugccctccauc

SEQ ID NO: 11369 - DNA, 20 bp, Artificial Sequence
  Synthetic
aaggtcacuggcccttctuc

SEQ ID NO: 11370 - DNA, 19 bp, Artificial Sequence
  Synthetic
gccctgucctcagcugaaa

SEQ ID NO: 11371 - DNA, 23 bp, Artificial Sequence
  Synthetic
agaagaagcugaagagcauggag

SEQ ID NO: 11372 - DNA, 18 bp, Artificial Sequence
  Synthetic
guagcaggaggccaugca

SEQ ID NO: 11373 - DNA, 17 bp, Artificial Sequence
  Synthetic
gccaagcugcggtugga

SEQ ID NO: 11374 - DNA, 21 bp, Artificial Sequence
  Synthetic
acagagccutggtctcctuct

SEQ ID NO: 11375 - DNA, 21 bp, Artificial Sequence
  Synthetic
gtagctcugagcctcatggug

SEQ ID NO: 11376 - DNA, 17 bp, Artificial Sequence
  Synthetic
cccagccugcagagucc

SEQ ID NO: 11377 - DNA, 19 bp, Artificial Sequence
  Synthetic
agaagcugagccugagcac

SEQ ID NO: 11378 - DNA, 18 bp, Artificial Sequence
  Synthetic
gggccacaacugctgcua

SEQ ID NO: 11379 - DNA, 21 bp, Artificial Sequence
  Synthetic
gagcugcaggtcaagtucaac

SEQ ID NO: 11380 - DNA, 17 bp, Artificial Sequence
  Synthetic
acggccugtgagtgcut

SEQ ID NO: 11381 - DNA, 17 bp, Artificial Sequence
  Synthetic
agcctcgcuccagcauc

SEQ ID NO: 11382 - DNA, 20 bp, Artificial Sequence
  Synthetic
tctttctuggccagcugcat

SEQ ID NO: 11383 - DNA, 17 bp, Artificial Sequence
  Synthetic
gggcuccccctgcatug

SEQ ID NO: 11384 - DNA, 22 bp, Artificial Sequence
  Synthetic
agttctggucctccaggaugat

SEQ ID NO: 11385 - DNA, 21 bp, Artificial Sequence
  Synthetic
ctgctgtccutaccgtgtcuc

SEQ ID NO: 11386 - DNA, 18 bp, Artificial Sequence
  Synthetic
catgccgugccuaccgat

SEQ ID NO: 11387 - DNA, 22 bp, Artificial Sequence
  Synthetic
ggugaaggucagagagaagcag

SEQ ID NO: 11388 - DNA, 20 bp, Artificial Sequence
  Synthetic
aggagtatcucccgggacuc

SEQ ID NO: 11389 - DNA, 22 bp, Artificial Sequence
  Synthetic
attggccagagcaaaguctuct

SEQ ID NO: 11390 - DNA, 20 bp, Artificial Sequence
  Synthetic
ccuggaagaccaccctgtug

SEQ ID NO: 11391 - DNA, 19 bp, Artificial Sequence
  Synthetic
cgacugttcuaggcacgga

SEQ ID NO: 11392 - DNA, 21 bp, Artificial Sequence
  Synthetic
cutccacagcuccgagacaaa

SEQ ID NO: 11393 - DNA, 20 bp, Artificial Sequence
  Synthetic
gcttgtgacucctgcctcuc

SEQ ID NO: 11394 - DNA, 21 bp, Artificial Sequence
  Synthetic
gatgaagtuccactcgaugcc

SEQ ID NO: 11395 - DNA, 22 bp, Artificial Sequence
  Synthetic
gttggcgtcuctctgacatugt

SEQ ID NO: 11396 - DNA, 23 bp, Artificial Sequence
  Synthetic
attcctctggugaaatcggucac

SEQ ID NO: 11397 - DNA, 23 bp, Artificial Sequence
  Synthetic
agucaaguagagggacttatuct

SEQ ID NO: 11398 - DNA, 19 bp, Artificial Sequence
  Synthetic
ggcugcaggccaactacuc

SEQ ID NO: 11399 - DNA, 26 bp, Artificial Sequence
  Synthetic
gcttgtgtugctccttaatattugca

SEQ ID NO: 11400 - DNA, 20 bp, Artificial Sequence
  Synthetic
tccttctugctcttgugcga

SEQ ID NO: 11401 - DNA, 21 bp, Artificial Sequence
  Synthetic
caaggactuggccatgccuaa

SEQ ID NO: 11402 - DNA, 20 bp, Artificial Sequence
  Synthetic
cgugagggtgaugggaagac

SEQ ID NO: 11403 - DNA, 19 bp, Artificial Sequence
  Synthetic
gctcacgugccucaacgaa

SEQ ID NO: 11404 - DNA, 20 bp, Artificial Sequence
  Synthetic
tgutctagccucccagggaa

SEQ ID NO: 11405 - DNA, 22 bp, Artificial Sequence
  Synthetic
gcactgggautcctgcttguag

SEQ ID NO: 11406 - DNA, 18 bp, Artificial Sequence
  Synthetic
gctgcucagcatcuggct

SEQ ID NO: 11407 - DNA, 17 bp, Artificial Sequence
  Synthetic
acccuccctcccuggac

SEQ ID NO: 11408 - DNA, 17 bp, Artificial Sequence
  Synthetic
ttcgccugccccctaut

SEQ ID NO: 11409 - DNA, 21 bp, Artificial Sequence
  Synthetic
tgcugaagaaggaaccaccug

SEQ ID NO: 11410 - DNA, 20 bp, Artificial Sequence
  Synthetic
ggugcaacccccttgaugag

SEQ ID NO: 11411 - DNA, 22 bp, Artificial Sequence
  Synthetic
ccacatagacccutgtgctgug

SEQ ID NO: 11412 - DNA, 22 bp, Artificial Sequence
  Synthetic
gcttgtcuttctccugcagcat

SEQ ID NO: 11413 - DNA, 23 bp, Artificial Sequence
  Synthetic
gagatggugacatcacctcugac

SEQ ID NO: 11414 - DNA, 19 bp, Artificial Sequence
  Synthetic
cugggaaggcuaccaccac

SEQ ID NO: 11415 - DNA, 21 bp, Artificial Sequence
  Synthetic
ggagcugaagttgcgaucact

SEQ ID NO: 11416 - DNA, 18 bp, Artificial Sequence
  Synthetic
caccagaccuggcaccug

SEQ ID NO: 11417 - DNA, 19 bp, Artificial Sequence
  Synthetic
ctcttccuccagcugcaga

SEQ ID NO: 11418 - DNA, 22 bp, Artificial Sequence
  Synthetic
gggatagtggutccattgguga

SEQ ID NO: 11419 - DNA, 22 bp, Artificial Sequence
  Synthetic
gccatgtccucacttcccttut

SEQ ID NO: 11420 - DNA, 23 bp, Artificial Sequence
  Synthetic
ggcctctgugcaatcttctcaut

SEQ ID NO: 11421 - DNA, 23 bp, Artificial Sequence
  Synthetic
gcagaaccacguccactcataua

SEQ ID NO: 11422 - DNA, 20 bp, Artificial Sequence
  Synthetic
aggaggcggcgauaaagtug

SEQ ID NO: 11423 - DNA, 21 bp, Artificial Sequence
  Synthetic
cgacacuccgcaggattucat

SEQ ID NO: 11424 - DNA, 27 bp, Artificial Sequence
  Synthetic
aatggaggcuatatgcattatctuggg

SEQ ID NO: 11425 - DNA, 24 bp, Artificial Sequence
  Synthetic
cagactccacutttccttcagcut

SEQ ID NO: 11426 - DNA, 27 bp, Artificial Sequence
  Synthetic
acagaagtutcaatgtacuaccaagca

SEQ ID NO: 11427 - DNA, 26 bp, Artificial Sequence
  Synthetic
tcgacaaaagcugggatcaacauaaa

SEQ ID NO: 11428 - DNA, 28 bp, Artificial Sequence
  Synthetic
aagaagcttaugaacaactttugcagac

SEQ ID NO: 11429 - DNA, 22 bp, Artificial Sequence
  Synthetic
gagccacatauttgccacacuc

SEQ ID NO: 11430 - DNA, 28 bp, Artificial Sequence
  Synthetic
ccaagcagttctuctgagttgacttaut

SEQ ID NO: 11431 - DNA, 21 bp, Artificial Sequence
  Synthetic
agagtgccuaggtccauccag

SEQ ID NO: 11432 - DNA, 20 bp, Artificial Sequence
  Synthetic
ggcguggagcctaccaatuc

SEQ ID NO: 11433 - DNA, 24 bp, Artificial Sequence
  Synthetic
actaaaagccucctgtgcttagua

SEQ ID NO: 11434 - DNA, 27 bp, Artificial Sequence
  Synthetic
tcutccctatagatuacacaaccagca

SEQ ID NO: 11435 - DNA, 23 bp, Artificial Sequence
  Synthetic
ctggccagagacugagtttguag

SEQ ID NO: 11436 - DNA, 20 bp, Artificial Sequence
  Synthetic
gggctucacaaaggucagag

SEQ ID NO: 11437 - DNA, 24 bp, Artificial Sequence
  Synthetic
cccctgtgutactgaattgcuagg

SEQ ID NO: 11438 - DNA, 24 bp, Artificial Sequence
  Synthetic
ccttgttgaugggaaaagccaaua

SEQ ID NO: 11439 - DNA, 24 bp, Artificial Sequence
  Synthetic
gattttggagaaggugttgctgut

SEQ ID NO: 11440 - DNA, 21 bp, Artificial Sequence
  Synthetic
ccuccctugccaaaggacaag

SEQ ID NO: 11441 - DNA, 25 bp, Artificial Sequence
  Synthetic
tgtaatgtttccuaaagggcaucca

SEQ ID NO: 11442 - DNA, 21 bp, Artificial Sequence
  Synthetic
gtgaggacacagutgtugcag

SEQ ID NO: 11443 - DNA, 26 bp, Artificial Sequence
  Synthetic
actctcaatgautcctggaaugagga

SEQ ID NO: 11444 - DNA, 28 bp, Artificial Sequence
  Synthetic
gtaaactuccacaggtatttguagcaga

SEQ ID NO: 11445 - DNA, 23 bp, Artificial Sequence
  Synthetic
actgtgttcaugcccaatauggt

SEQ ID NO: 11446 - DNA, 29 bp, Artificial Sequence
  Synthetic
cttccagtcttacuaggagcttcttaaug

SEQ ID NO: 11447 - DNA, 22 bp, Artificial Sequence
  Synthetic
ccaaatcuccaggtcgcugaat

SEQ ID NO: 11448 - DNA, 22 bp, Artificial Sequence
  Synthetic
gtggaacgguacgaauggaaca

SEQ ID NO: 11449 - DNA, 23 bp, Artificial Sequence
  Synthetic
acucuccaaaaagagagggacua

SEQ ID NO: 11450 - DNA, 28 bp, Artificial Sequence
  Synthetic
tgatctgctutttgtcactaaugagagt

SEQ ID NO: 11451 - DNA, 25 bp, Artificial Sequence
  Synthetic
caggtcctccautttgtactgtuct

SEQ ID NO: 11452 - DNA, 24 bp, Artificial Sequence
  Synthetic
ggtggaaggauttctgtgtcugag

SEQ ID NO: 11453 - DNA, 21 bp, Artificial Sequence
  Synthetic
ctgautctggtguggaggaca

SEQ ID NO: 11454 - DNA, 17 bp, Artificial Sequence
  Synthetic
cugggccuacggcaaga

SEQ ID NO: 11455 - DNA, 18 bp, Artificial Sequence
  Synthetic
tcaggagguctgggcuca

SEQ ID NO: 11456 - DNA, 21 bp, Artificial Sequence
  Synthetic
acaggccacuacctaugcaac

SEQ ID NO: 11457 - DNA, 27 bp, Artificial Sequence
  Synthetic
tataatgggaagaugtggcttcttgua

SEQ ID NO: 11458 - DNA, 23 bp, Artificial Sequence
  Synthetic
catgcggaaggauggtatucaga

SEQ ID NO: 11459 - DNA, 19 bp, Artificial Sequence
  Synthetic
cccacaautcccgcuaccg

SEQ ID NO: 11460 - DNA, 20 bp, Artificial Sequence
  Synthetic
gaggagagucccccagttug

SEQ ID NO: 11461 - DNA, 19 bp, Artificial Sequence
  Synthetic
cctggagucttcccuccct

SEQ ID NO: 11462 - DNA, 18 bp, Artificial Sequence
  Synthetic
ggcctgaaguggtcccut

SEQ ID NO: 11463 - DNA, 18 bp, Artificial Sequence
  Synthetic
ccagaggcugaggagguc

SEQ ID NO: 11464 - DNA, 22 bp, Artificial Sequence
  Synthetic
tgccatatgcugtggttcucat

SEQ ID NO: 11465 - DNA, 21 bp, Artificial Sequence
  Synthetic
gcttgttccugcaacctccua

SEQ ID NO: 11466 - DNA, 25 bp, Artificial Sequence
  Synthetic
ccaaaagagcagucacatctucaga

SEQ ID NO: 11467 - DNA, 19 bp, Artificial Sequence
  Synthetic
ggagaccaucctggcacug

SEQ ID NO: 11468 - DNA, 25 bp, Artificial Sequence
  Synthetic
agctcagacacuctatcaucaccaa

SEQ ID NO: 11469 - DNA, 20 bp, Artificial Sequence
  Synthetic
ggtggauggagaaggagcug

SEQ ID NO: 11470 - DNA, 24 bp, Artificial Sequence
  Synthetic
cacatcccagugtatatgccauct

SEQ ID NO: 11471 - DNA, 22 bp, Artificial Sequence
  Synthetic
ggaaaacauccctgttcaccug

SEQ ID NO: 11472 - DNA, 20 bp, Artificial Sequence
  Synthetic
gaccaacagucctcgcauga

SEQ ID NO: 11473 - DNA, 21 bp, Artificial Sequence
  Synthetic
ctactgcaguccctgtuggag

SEQ ID NO: 11474 - DNA, 23 bp, Artificial Sequence
  Synthetic
actcaggcagutctttagtugct

SEQ ID NO: 11475 - DNA, 23 bp, Artificial Sequence
  Synthetic
ccccttccuctgcctctatucaa

SEQ ID NO: 11476 - DNA, 23 bp, Artificial Sequence
  Synthetic
gctgauaggaaacacguagtcut

SEQ ID NO: 11477 - DNA, 22 bp, Artificial Sequence
  Synthetic
tggctgagauggaggatttugc

SEQ ID NO: 11478 - DNA, 23 bp, Artificial Sequence
  Synthetic
ccaccaucacaaaggacaucact

SEQ ID NO: 11479 - DNA, 24 bp, Artificial Sequence
  Synthetic
gtgatgaagaagcugacaccugaa

SEQ ID NO: 11480 - DNA, 25 bp, Artificial Sequence
  Synthetic
gacacguaaccatgaatcauccact

SEQ ID NO: 11481 - DNA, 24 bp, Artificial Sequence
  Synthetic
aggagttcuggaggctggtaaaua

SEQ ID NO: 11482 - DNA, 23 bp, Artificial Sequence
  Synthetic
ggtagttgtcaucacagccauca

SEQ ID NO: 11483 - DNA, 26 bp, Artificial Sequence
  Synthetic
actagcctauacagggctgtaaauca

SEQ ID NO: 11484 - DNA, 22 bp, Artificial Sequence
  Synthetic
cctgccccauagatctguagct

SEQ ID NO: 11485 - DNA, 25 bp, Artificial Sequence
  Synthetic
agcatgagaucaggtgatatguagt

SEQ ID NO: 11486 - DNA, 21 bp, Artificial Sequence
  Synthetic
gagcguagcaaggagccaaua

SEQ ID NO: 11487 - DNA, 25 bp, Artificial Sequence
  Synthetic
ccctcacauataaatacacguggca

SEQ ID NO: 11488 - DNA, 22 bp, Artificial Sequence
  Synthetic
gctggctaucctactgctucat

SEQ ID NO: 11489 - DNA, 20 bp, Artificial Sequence
  Synthetic
gagtuccgagaccctctugg

SEQ ID NO: 11490 - DNA, 23 bp, Artificial Sequence
  Synthetic
cccgacagucctagctaaactuc

SEQ ID NO: 11491 - DNA, 20 bp, Artificial Sequence
  Synthetic
agccaucagcaaagggcuat

SEQ ID NO: 11492 - DNA, 25 bp, Artificial Sequence
  Synthetic
acagccacuccattaccctuaaaac

SEQ ID NO: 11493 - DNA, 22 bp, Artificial Sequence
  Synthetic
gcgctgagugatgtcctgaauc

SEQ ID NO: 11494 - DNA, 25 bp, Artificial Sequence
  Synthetic
gtaagcaggcuttctatctcctugg

SEQ ID NO: 11495 - DNA, 23 bp, Artificial Sequence
  Synthetic
agctctgagccuttcttgttcut

SEQ ID NO: 11496 - DNA, 22 bp, Artificial Sequence
  Synthetic
gcggatuaacaagcggatctug

SEQ ID NO: 11497 - DNA, 21 bp, Artificial Sequence
  Synthetic
cacatcagtgugcagcaccua

SEQ ID NO: 11498 - DNA, 21 bp, Artificial Sequence
  Synthetic
gcuctggaactugagcaggaa

SEQ ID NO: 11499 - DNA, 21 bp, Artificial Sequence
  Synthetic
ccataaucccagcccacccua

SEQ ID NO: 11500 - DNA, 24 bp, Artificial Sequence
  Synthetic
gaagagaagggaaguctggucaaa

SEQ ID NO: 11501 - DNA, 24 bp, Artificial Sequence
  Synthetic
atggatcatgucattggcagtcut

SEQ ID NO: 11502 - DNA, 22 bp, Artificial Sequence
  Synthetic
aggtccaacuccacgtauggat

SEQ ID NO: 11503 - DNA, 21 bp, Artificial Sequence
  Synthetic
gctggtuagcgatctctgguc

SEQ ID NO: 11504 - DNA, 24 bp, Artificial Sequence
  Synthetic
gggaaaucagtcataugcagaact

SEQ ID NO: 11505 - DNA, 21 bp, Artificial Sequence
  Synthetic
gctgtcacccutgtcctugaa

SEQ ID NO: 11506 - DNA, 20 bp, Artificial Sequence
  Synthetic
agaaaccauctgtgcugcca

SEQ ID NO: 11507 - DNA, 22 bp, Artificial Sequence
  Synthetic
gacggaagguggtccacatauc

SEQ ID NO: 11508 - DNA, 18 bp, Artificial Sequence
  Synthetic
gtgcttcuccagcuccca

SEQ ID NO: 11509 - DNA, 17 bp, Artificial Sequence
  Synthetic
gcccguggccagctuac

SEQ ID NO: 11510 - DNA, 23 bp, Artificial Sequence
  Synthetic
ttggtgggaauctggatgauaga

SEQ ID NO: 11511 - DNA, 22 bp, Artificial Sequence
  Synthetic
gtagataugaacacgccuggct

SEQ ID NO: 11512 - DNA, 21 bp, Artificial Sequence
  Synthetic
ggaatgaacgutcccgaggut

SEQ ID NO: 11513 - DNA, 27 bp, Artificial Sequence
  Synthetic
agtgttatacugaggctatggguagac

SEQ ID NO: 11514 - DNA, 25 bp, Artificial Sequence
  Synthetic
cccttcatuttcagctcauggagat

SEQ ID NO: 11515 - DNA, 22 bp, Artificial Sequence
  Synthetic
gcttgtggucagtctgactgut

SEQ ID NO: 11516 - DNA, 25 bp, Artificial Sequence
  Synthetic
cttcggcuggataaggtttctucat

SEQ ID NO: 11517 - DNA, 23 bp, Artificial Sequence
  Synthetic
gattggcaagutatgtgcccaut

SEQ ID NO: 11518 - DNA, 22 bp, Artificial Sequence
  Synthetic
catgaccacautgcaguaaccg

SEQ ID NO: 11519 - DNA, 26 bp, Artificial Sequence
  Synthetic
aggctctgaaucttggaattgaagug

SEQ ID NO: 11520 - DNA, 24 bp, Artificial Sequence
  Synthetic
tgaacatggcautggtgtagtuct

SEQ ID NO: 11521 - DNA, 24 bp, Artificial Sequence
  Synthetic
atcaccacagcaauagagaaguct

SEQ ID NO: 11522 - DNA, 18 bp, Artificial Sequence
  Synthetic
gggcugcagtctcuggaa

SEQ ID NO: 11523 - DNA, 18 bp, Artificial Sequence
  Synthetic
tcccugcgaagcaggaug

SEQ ID NO: 11524 - DNA, 22 bp, Artificial Sequence
  Synthetic
gggtagagutgccacaugagag

SEQ ID NO: 11525 - DNA, 28 bp, Artificial Sequence
  Synthetic
ccagtctcaauattctgaagtcttuggt

SEQ ID NO: 11526 - DNA, 25 bp, Artificial Sequence
  Synthetic
aactttctcaccauggtttcagtut

SEQ ID NO: 11527 - DNA, 26 bp, Artificial Sequence
  Synthetic
tccttttctttcugccttcttaggug

SEQ ID NO: 11528 - DNA, 18 bp, Artificial Sequence
  Synthetic
ctcccguggatgcaccua

SEQ ID NO: 11529 - DNA, 30 bp, Artificial Sequence
  Synthetic
gtcaaaatttgaagcaugtttcaatacuct

SEQ ID NO: 11530 - DNA, 22 bp, Artificial Sequence
  Synthetic
aaagtgaucacccgggaagaug

SEQ ID NO: 11531 - DNA, 27 bp, Artificial Sequence
  Synthetic
ccctgatctgucttctgtttcucaaag

SEQ ID NO: 11532 - DNA, 19 bp, Artificial Sequence
  Synthetic
agcgcuacggagatuccct

SEQ ID NO: 11533 - DNA, 18 bp, Artificial Sequence
  Synthetic
cgccctcauccgggacua

SEQ ID NO: 11534 - DNA, 22 bp, Artificial Sequence
  Synthetic
acagaagugcacaatggtccut

SEQ ID NO: 11535 - DNA, 21 bp, Artificial Sequence
  Synthetic
gctgugccaggaacataugac

SEQ ID NO: 11536 - DNA, 30 bp, Artificial Sequence
  Synthetic
gaatatttctacagggutatgtccttucgt

SEQ ID NO: 11537 - DNA, 25 bp, Artificial Sequence
  Synthetic
gaagaggcatcucgtttgtacttug

SEQ ID NO: 11538 - DNA, 23 bp, Artificial Sequence
  Synthetic
ggttagaugagaaacugcccaga

SEQ ID NO: 11539 - DNA, 30 bp, Artificial Sequence
  Synthetic
atgctacatacugtgtctttttgaauacca

SEQ ID NO: 11540 - DNA, 17 bp, Artificial Sequence
  Synthetic
gggctgutctcggugct

SEQ ID NO: 11541 - DNA, 25 bp, Artificial Sequence
  Synthetic
cgatgagaagaagaaacugcgucat

SEQ ID NO: 11542 - DNA, 18 bp, Artificial Sequence
  Synthetic
acttgccccaggucagug

SEQ ID NO: 11543 - DNA, 23 bp, Artificial Sequence
  Synthetic
ctctctgtgccuttgtcctgtua

SEQ ID NO: 11544 - DNA, 23 bp, Artificial Sequence
  Synthetic
gagccaggutctcatgtctucat

SEQ ID NO: 11545 - DNA, 32 bp, Artificial Sequence
  Synthetic
ccacaaaaacaatguatcagaagacatatcua

SEQ ID NO: 11546 - DNA, 24 bp, Artificial Sequence
  Synthetic
agatctgggugcatgtaggtttut

SEQ ID NO: 11547 - DNA, 28 bp, Artificial Sequence
  Synthetic
tgctttctgtcuatgtgtgtgtgtauag

SEQ ID NO: 11548 - DNA, 24 bp, Artificial Sequence
  Synthetic
gtccttgttggugtccattttcut

SEQ ID NO: 11549 - DNA, 26 bp, Artificial Sequence
  Synthetic
taaacaatgtgaucccttcttctgug

SEQ ID NO: 11550 - DNA, 21 bp, Artificial Sequence
  Synthetic
gtcagccuccatcuggacaat

SEQ ID NO: 11551 - DNA, 23 bp, Artificial Sequence
  Synthetic
gctcaucagaagcatcgagtugg

SEQ ID NO: 11552 - DNA, 23 bp, Artificial Sequence
  Synthetic
cctttcccagucaccugaaacaa

SEQ ID NO: 11553 - DNA, 21 bp, Artificial Sequence
  Synthetic
ggatgcutaggaguggccaag

SEQ ID NO: 11554 - DNA, 22 bp, Artificial Sequence
  Synthetic
gtgaatgauccgggaggcauag

SEQ ID NO: 11555 - DNA, 22 bp, Artificial Sequence
  Synthetic
tcacgtctcutccttggagaut

SEQ ID NO: 11556 - DNA, 21 bp, Artificial Sequence
  Synthetic
ctgagccutcctugacccaaa

SEQ ID NO: 11557 - DNA, 24 bp, Artificial Sequence
  Synthetic
tggttgaccucttgtccattucag

SEQ ID NO: 11558 - DNA, 22 bp, Artificial Sequence
  Synthetic
caagggcuctgtgagugagaac

SEQ ID NO: 11559 - DNA, 23 bp, Artificial Sequence
  Synthetic
aagcacaaagugaacatuggcat

SEQ ID NO: 11560 - DNA, 21 bp, Artificial Sequence
  Synthetic
gggtctgucttgctcaaucag

SEQ ID NO: 11561 - DNA, 24 bp, Artificial Sequence
  Synthetic
ctttctgccacccuctttttcaut

SEQ ID NO: 11562 - DNA, 19 bp, Artificial Sequence
  Synthetic
ctggccaucacctcggtua

SEQ ID NO: 11563 - DNA, 21 bp, Artificial Sequence
  Synthetic
aacttgcaggccutgtttgug

SEQ ID NO: 11564 - DNA, 23 bp, Artificial Sequence
  Synthetic
ggatctcctugtgctcactgtuc

SEQ ID NO: 11565 - DNA, 22 bp, Artificial Sequence
  Synthetic
gcagaccuacctgtcuacagca

SEQ ID NO: 11566 - DNA, 21 bp, Artificial Sequence
  Synthetic
ccaagccucacgctgauacag

SEQ ID NO: 11567 - DNA, 23 bp, Artificial Sequence
  Synthetic
acagtctucacttgcaucagcat

SEQ ID NO: 11568 - DNA, 25 bp, Artificial Sequence
  Synthetic
atgggtaatgaugtcttccauggac

SEQ ID NO: 11569 - DNA, 25 bp, Artificial Sequence
  Synthetic
ccaaccctttauccttcctctcuca

SEQ ID NO: 11570 - DNA, 18 bp, Artificial Sequence
  Synthetic
gagccuggactccccuct

SEQ ID NO: 11571 - DNA, 23 bp, Artificial Sequence
  Synthetic
gaugagacctuggccaaagagaa

SEQ ID NO: 11572 - DNA, 21 bp, Artificial Sequence
  Synthetic
gctcctcccugtagacacuca

SEQ ID NO: 11573 - DNA, 23 bp, Artificial Sequence
  Synthetic
agttgtcauggaaatggcaucca

SEQ ID NO: 11574 - DNA, 22 bp, Artificial Sequence
  Synthetic
attuagcccacacaucccacaa

SEQ ID NO: 11575 - DNA, 21 bp, Artificial Sequence
  Synthetic
tctagcaatgugagcgtccug

SEQ ID NO: 11576 - DNA, 23 bp, Artificial Sequence
  Synthetic
ggtctgacccaaucttctgctut

SEQ ID NO: 11577 - DNA, 20 bp, Artificial Sequence
  Synthetic
cttgtcttucaggcccugct

SEQ ID NO: 11578 - DNA, 18 bp, Artificial Sequence
  Synthetic
ggaacacucacggcucct

SEQ ID NO: 11579 - DNA, 17 bp, Artificial Sequence
  Synthetic
cgacucaccccgtguct

SEQ ID NO: 11580 - DNA, 19 bp, Artificial Sequence
  Synthetic
gaggacgagugggaggtuc

SEQ ID NO: 11581 - DNA, 20 bp, Artificial Sequence
  Synthetic
agctgtccugggactcucat

SEQ ID NO: 11582 - DNA, 20 bp, Artificial Sequence
  Synthetic
aactugggccagcaactcut

SEQ ID NO: 11583 - DNA, 20 bp, Artificial Sequence
  Synthetic
tcactgguctgttccctugc

SEQ ID NO: 11584 - DNA, 21 bp, Artificial Sequence
  Synthetic
gcgccagaagccautaacuac

SEQ ID NO: 11585 - DNA, 23 bp, Artificial Sequence
  Synthetic
tgaatgggaagacauggactugc

SEQ ID NO: 11586 - DNA, 18 bp, Artificial Sequence
  Synthetic
accggcugcaatgcatuc

SEQ ID NO: 11587 - DNA, 26 bp, Artificial Sequence
  Synthetic
aaaagaattgcauacctcactggcua

SEQ ID NO: 11588 - DNA, 25 bp, Artificial Sequence
  Synthetic
ggaagttgtgautcttcctctuggt

SEQ ID NO: 11589 - DNA, 22 bp, Artificial Sequence
  Synthetic
gaggttcuggagagagatgcug

SEQ ID NO: 11590 - DNA, 24 bp, Artificial Sequence
  Synthetic
cacgccactuttccaaactgttua

SEQ ID NO: 11591 - DNA, 22 bp, Artificial Sequence
  Synthetic
gtcaggcautggctcttcucaa

SEQ ID NO: 11592 - DNA, 17 bp, Artificial Sequence
  Synthetic
gaggcugggagugcagt

SEQ ID NO: 11593 - DNA, 20 bp, Artificial Sequence
  Synthetic
caggaacuacgcctccauca

SEQ ID NO: 11594 - DNA, 22 bp, Artificial Sequence
  Synthetic
gtacgagtcguagtccatgucc

SEQ ID NO: 11595 - DNA, 17 bp, Artificial Sequence
  Synthetic
gcaggcugcaagcuggt

SEQ ID NO: 11596 - DNA, 22 bp, Artificial Sequence
  Synthetic
ccctgaagugtttcucccgaac

SEQ ID NO: 11597 - DNA, 21 bp, Artificial Sequence
  Synthetic
gctggagugggactcagcuaa

SEQ ID NO: 11598 - DNA, 22 bp, Artificial Sequence
  Synthetic
cagtatcaucaaggccaugggt

SEQ ID NO: 11599 - DNA, 23 bp, Artificial Sequence
  Synthetic
ccagtggagutcttgggatcuct

SEQ ID NO: 11600 - DNA, 20 bp, Artificial Sequence
  Synthetic
cagccuggcaactcctacug

SEQ ID NO: 11601 - DNA, 24 bp, Artificial Sequence
  Synthetic
cttttatctccuccccatcuccct

SEQ ID NO: 11602 - DNA, 25 bp, Artificial Sequence
  Synthetic
cttcaagtcacgaaaugacagcaut

SEQ ID NO: 11603 - DNA, 21 bp, Artificial Sequence
  Synthetic
gcacagggucagattcagugg

SEQ ID NO: 11604 - DNA, 20 bp, Artificial Sequence
  Synthetic
cgcgatcucgctaccgttua

SEQ ID NO: 11605 - DNA, 17 bp, Artificial Sequence
  Synthetic
gctgugcggctttggug

SEQ ID NO: 11606 - DNA, 21 bp, Artificial Sequence
  Synthetic
tgctttaauccagcgcctcuc

SEQ ID NO: 11607 - DNA, 23 bp, Artificial Sequence
  Synthetic
ctgcaatctucggtagtccauct

SEQ ID NO: 11608 - DNA, 30 bp, Artificial Sequence
  Synthetic
caaaaauaagcactttacuaacaacaggat

SEQ ID NO: 11609 - DNA, 20 bp, Artificial Sequence
  Synthetic
ggccagcaagucctggauaa

SEQ ID NO: 11610 - DNA, 19 bp, Artificial Sequence
  Synthetic
gtggtacgguggtcacugg

SEQ ID NO: 11611 - DNA, 24 bp, Artificial Sequence
  Synthetic
ttgaggctatauccacaggccuat

SEQ ID NO: 11612 - DNA, 17 bp, Artificial Sequence
  Synthetic
cttgcggcuggccttuc

SEQ ID NO: 11613 - DNA, 18 bp, Artificial Sequence
  Synthetic
tggccccuaaagcccuct

SEQ ID NO: 11614 - DNA, 21 bp, Artificial Sequence
  Synthetic
ccttugcagacaccccugaag

SEQ ID NO: 11615 - DNA, 22 bp, Artificial Sequence
  Synthetic
ctaactcttuggcccctctgug

SEQ ID NO: 11616 - DNA, 23 bp, Artificial Sequence
  Synthetic
ccccaaaguagaggctctcauct

SEQ ID NO: 11617 - DNA, 19 bp, Artificial Sequence
  Synthetic
cagugtcctcaugccaacc

SEQ ID NO: 11618 - DNA, 22 bp, Artificial Sequence
  Synthetic
tgggccacaaccuagttcctua

SEQ ID NO: 11619 - DNA, 22 bp, Artificial Sequence
  Synthetic
gctttggcugggtctttttgut

SEQ ID NO: 11620 - DNA, 22 bp, Artificial Sequence
  Synthetic
atgagtuggcacccactgtuaa

SEQ ID NO: 11621 - DNA, 23 bp, Artificial Sequence
  Synthetic
ggcuggaggaaaaagugaaaacc

SEQ ID NO: 11622 - DNA, 18 bp, Artificial Sequence
  Synthetic
ggtgatgugcccgtugct

SEQ ID NO: 11623 - DNA, 21 bp, Artificial Sequence
  Synthetic
cagagcaugaccctgaaccug

SEQ ID NO: 11624 - DNA, 17 bp, Artificial Sequence
  Synthetic
ctcaccagcucgcucca

SEQ ID NO: 11625 - DNA, 17 bp, Artificial Sequence
  Synthetic
cugcggacuccgaggaa

SEQ ID NO: 11626 - DNA, 20 bp, Artificial Sequence
  Synthetic
ccagccgggaaagutcttug

SEQ ID NO: 11627 - DNA, 17 bp, Artificial Sequence
  Synthetic
ctcccgggcuggtgtut

SEQ ID NO: 11628 - DNA, 26 bp, Artificial Sequence
  Synthetic
cagugacttttuggacagaacacaaa

SEQ ID NO: 11629 - DNA, 27 bp, Artificial Sequence
  Synthetic
ggacaagcttucagaaccttatugaag

SEQ ID NO: 11630 - DNA, 21 bp, Artificial Sequence
  Synthetic
tgacguggcccatagauacct

SEQ ID NO: 11631 - DNA, 25 bp, Artificial Sequence
  Synthetic
ttgttccugaaaatgauaggcccaa

SEQ ID NO: 11632 - DNA, 27 bp, Artificial Sequence
  Synthetic
ccttatcggttucaattgctttggtua

SEQ ID NO: 11633 - DNA, 28 bp, Artificial Sequence
  Synthetic
gactttagcaaugtgcttgactttuact

SEQ ID NO: 11634 - DNA, 30 bp, Artificial Sequence
  Synthetic
ggttccttaagauctcgatttccttttuca

SEQ ID NO: 11635 - DNA, 21 bp, Artificial Sequence
  Synthetic
acagcacaugcatcttuccct

SEQ ID NO: 11636 - DNA, 20 bp, Artificial Sequence
  Synthetic
caccugaaagccctcactug

SEQ ID NO: 11637 - DNA, 22 bp, Artificial Sequence
  Synthetic
ggactccaagaaccugagtgug

SEQ ID NO: 11638 - DNA, 21 bp, Artificial Sequence
  Synthetic
ctggtttcuggtgggaccaut

SEQ ID NO: 11639 - DNA, 23 bp, Artificial Sequence
  Synthetic
gauctcttcaugcaccggaaaag

SEQ ID NO: 11640 - DNA, 24 bp, Artificial Sequence
  Synthetic
cttcagaagtuccttcgtcaucct

SEQ ID NO: 11641 - DNA, 23 bp, Artificial Sequence
  Synthetic
catgttcccautgaggacccaut

SEQ ID NO: 11642 - DNA, 20 bp, Artificial Sequence
  Synthetic
ccgaaccgugcagactguag

SEQ ID NO: 11643 - DNA, 22 bp, Artificial Sequence
  Synthetic
cccatgccugaccccatttuaa

SEQ ID NO: 11644 - DNA, 23 bp, Artificial Sequence
  Synthetic
gaactcagcaautctccctcuca

SEQ ID NO: 11645 - DNA, 21 bp, Artificial Sequence
  Synthetic
acaagauccgggaagagugga

SEQ ID NO: 11646 - DNA, 27 bp, Artificial Sequence
  Synthetic
caccgtaatgutttgtcaaagttucca

SEQ ID NO: 11647 - DNA, 24 bp, Artificial Sequence
  Synthetic
caucagauagaggaaccttcucac

SEQ ID NO: 11648 - DNA, 22 bp, Artificial Sequence
  Synthetic
catcccacaaacuccagctuct

SEQ ID NO: 11649 - DNA, 22 bp, Artificial Sequence
  Synthetic
ccaacgacaaugagcagucagt

SEQ ID NO: 11650 - DNA, 25 bp, Artificial Sequence
  Synthetic
agatcttcugaactagtgtgtuggt

SEQ ID NO: 11651 - DNA, 24 bp, Artificial Sequence
  Synthetic
gaucttctatctgucggacaggga

SEQ ID NO: 11652 - DNA, 20 bp, Artificial Sequence
  Synthetic
gcaggaugggagggaaagug

SEQ ID NO: 11653 - DNA, 21 bp, Artificial Sequence
  Synthetic
cucacctgucaggaacaccag

SEQ ID NO: 11654 - DNA, 23 bp, Artificial Sequence
  Synthetic
cccatctaugaccccatgatcuc

SEQ ID NO: 11655 - DNA, 20 bp, Artificial Sequence
  Synthetic
caccacccuctccttagcuc

SEQ ID NO: 11656 - DNA, 26 bp, Artificial Sequence
  Synthetic
cccccatcucacatacatacattuca

SEQ ID NO: 11657 - DNA, 22 bp, Artificial Sequence
  Synthetic
tttgctgctcucaccacttcut

SEQ ID NO: 11658 - DNA, 21 bp, Artificial Sequence
  Synthetic
ttggctgugttctguaccaac

SEQ ID NO: 11659 - DNA, 28 bp, Artificial Sequence
  Synthetic
gcctcatctgugacattgaaaaagaauc

SEQ ID NO: 11660 - DNA, 22 bp, Artificial Sequence
  Synthetic
tctgtgcuatggctugaaggag

SEQ ID NO: 11661 - DNA, 25 bp, Artificial Sequence
  Synthetic
atgtatttccucccctaccctguaa

SEQ ID NO: 11662 - DNA, 25 bp, Artificial Sequence
  Synthetic
acaactgatgtcutacttgtggcug

SEQ ID NO: 11663 - DNA, 23 bp, Artificial Sequence
  Synthetic
caaatatgugcaccttcccucct

SEQ ID NO: 11664 - DNA, 20 bp, Artificial Sequence
  Synthetic
agctacttuggccgaagugt

SEQ ID NO: 11665 - DNA, 18 bp, Artificial Sequence
  Synthetic
ctguccaccaccaccuga

SEQ ID NO: 11666 - DNA, 22 bp, Artificial Sequence
  Synthetic
gcatcactggaugaatggacug

SEQ ID NO: 11667 - DNA, 22 bp, Artificial Sequence
  Synthetic
gccctgaugctaagcagtuact

SEQ ID NO: 11668 - DNA, 28 bp, Artificial Sequence
  Synthetic
guatctacaactcuggagaacagaaagg

SEQ ID NO: 11669 - DNA, 21 bp, Artificial Sequence
  Synthetic
ctgaggccaauaccccaauct

SEQ ID NO: 11670 - DNA, 24 bp, Artificial Sequence
  Synthetic
gtgttatggcugtgaccatguact

SEQ ID NO: 11671 - DNA, 23 bp, Artificial Sequence
  Synthetic
ccacautctcctcaugccaagac

SEQ ID NO: 11672 - DNA, 30 bp, Artificial Sequence
  Synthetic
aatggctcatttuaaatgtcttcctaucca

SEQ ID NO: 11673 - DNA, 20 bp, Artificial Sequence
  Synthetic
tcacagcuctcagacucggt

SEQ ID NO: 11674 - DNA, 30 bp, Artificial Sequence
  Synthetic
aattcctttttaccaguatgtggagtauct

SEQ ID NO: 11675 - DNA, 23 bp, Artificial Sequence
  Synthetic
augggcatccuccagaaaagaaa

SEQ ID NO: 11676 - DNA, 24 bp, Artificial Sequence
  Synthetic
cttcctttccacucctttcccaut

SEQ ID NO: 11677 - DNA, 27 bp, Artificial Sequence
  Synthetic
gcttgaaccatutactttgtgactuga

SEQ ID NO: 11678 - DNA, 28 bp, Artificial Sequence
  Synthetic
aatttgaggutatctgcuacgaaacagt

SEQ ID NO: 11679 - DNA, 28 bp, Artificial Sequence
  Synthetic
tcctcctgttutatacctctaacuaccc

SEQ ID NO: 11680 - DNA, 28 bp, Artificial Sequence
  Synthetic
gaacggcataagucctattttagcctua

SEQ ID NO: 11681 - DNA, 25 bp, Artificial Sequence
  Synthetic
gggacaagatgucgagtcagaauat

SEQ ID NO: 11682 - DNA, 23 bp, Artificial Sequence
  Synthetic
cttccaagcuctttgggtttucc

SEQ ID NO: 11683 - DNA, 20 bp, Artificial Sequence
  Synthetic
tgagcgaguaccccaccuac

SEQ ID NO: 11684 - DNA, 27 bp, Artificial Sequence
  Synthetic
tctgagatcgucaggttataucgagag

SEQ ID NO: 11685 - DNA, 21 bp, Artificial Sequence
  Synthetic
ctgaagugcccatttcccugt

SEQ ID NO: 11686 - DNA, 21 bp, Artificial Sequence
  Synthetic
gagagtacgcugctggtcaua

SEQ ID NO: 11687 - DNA, 23 bp, Artificial Sequence
  Synthetic
ccuaaacccguaacagttgtuac

SEQ ID NO: 11688 - DNA, 27 bp, Artificial Sequence
  Synthetic
gcatatgcaugagaagaatuagaaagc

SEQ ID NO: 11689 - DNA, 28 bp, Artificial Sequence
  Synthetic
ggaaagaucagctctaaggaugaagaaa

SEQ ID NO: 11690 - DNA, 24 bp, Artificial Sequence
  Synthetic
ggaacagctucctagaagggaauc

SEQ ID NO: 11691 - DNA, 28 bp, Artificial Sequence
  Synthetic
ttccagggattautatgtgtttctgugt

SEQ ID NO: 11692 - DNA, 23 bp, Artificial Sequence
  Synthetic
ccccacccutaattugaggaagt

SEQ ID NO: 11693 - DNA, 21 bp, Artificial Sequence
  Synthetic
ccaucagacagagccaugcag

SEQ ID NO: 11694 - DNA, 22 bp, Artificial Sequence
  Synthetic
gactgtgcutgtggatgtuacc

SEQ ID NO: 11695 - DNA, 20 bp, Artificial Sequence
  Synthetic
gucagacaccccactucact

SEQ ID NO: 11696 - DNA, 27 bp, Artificial Sequence
  Synthetic
gcagtcaatttcuctttccttcttcug

SEQ ID NO: 11697 - DNA, 25 bp, Artificial Sequence
  Synthetic
aaggagauagcaggaatgcttugaa

SEQ ID NO: 11698 - DNA, 23 bp, Artificial Sequence
  Synthetic
ggaugaaauggacaacagggact

SEQ ID NO: 11699 - DNA, 24 bp, Artificial Sequence
  Synthetic
atggctggcuctttactctcttuc

SEQ ID NO: 11700 - DNA, 19 bp, Artificial Sequence
  Synthetic
gccccaguggatcaacgug

SEQ ID NO: 11701 - DNA, 20 bp, Artificial Sequence
  Synthetic
cccgctgucattgttgtugg

SEQ ID NO: 11702 - DNA, 22 bp, Artificial Sequence
  Synthetic
cccaccgccuaatcctacuaac

SEQ ID NO: 11703 - DNA, 18 bp, Artificial Sequence
  Synthetic
tctcccuggctccagucc

SEQ ID NO: 11704 - DNA, 28 bp, Artificial Sequence
  Synthetic
cctttgtgtgaaugctaaatagggaaut

SEQ ID NO: 11705 - DNA, 21 bp, Artificial Sequence
  Synthetic
ggagagatccugcaagcacug

SEQ ID NO: 11706 - DNA, 24 bp, Artificial Sequence
  Synthetic
acggcaaaccacugatatctucat

SEQ ID NO: 11707 - DNA, 28 bp, Artificial Sequence
  Synthetic
tcaaagctgugatacagacugaagaaat

SEQ ID NO: 11708 - DNA, 24 bp, Artificial Sequence
  Synthetic
gatgaaacatcuaggctggaccut

SEQ ID NO: 11709 - DNA, 28 bp, Artificial Sequence
  Synthetic
gatttgtctgtaaaucagttgagccaut

SEQ ID NO: 11710 - DNA, 27 bp, Artificial Sequence
  Synthetic
tgtgagttttaaautgaagcagttguc

SEQ ID NO: 11711 - DNA, 26 bp, Artificial Sequence
  Synthetic
acttagagtccuccaggtcatcatut

SEQ ID NO: 11712 - DNA, 24 bp, Artificial Sequence
  Synthetic
ccacgtctgauatcactgccauac

SEQ ID NO: 11713 - DNA, 24 bp, Artificial Sequence
  Synthetic
agccaaauccaagaattccacuga

SEQ ID NO: 11714 - DNA, 30 bp, Artificial Sequence
  Synthetic
aagaaagagattcagcuggttattaaggut

SEQ ID NO: 11715 - DNA, 26 bp, Artificial Sequence
  Synthetic
agctaccttggautttgatgccuaag

SEQ ID NO: 11716 - DNA, 23 bp, Artificial Sequence
  Synthetic
gctgttcucaaacactgauccac

SEQ ID NO: 11717 - DNA, 26 bp, Artificial Sequence
  Synthetic
ggatcaacaagcugatgaatgaguct

SEQ ID NO: 11718 - DNA, 25 bp, Artificial Sequence
  Synthetic
gcttaccaucattggctugaaaaca

SEQ ID NO: 11719 - DNA, 27 bp, Artificial Sequence
  Synthetic
tctttactctgucattggtggtttuct

SEQ ID NO: 11720 - DNA, 23 bp, Artificial Sequence
  Synthetic
ccactttugcagcaacctttuct

SEQ ID NO: 11721 - DNA, 30 bp, Artificial Sequence
  Synthetic
tcaggaattuagtggttatgtucaacaagt

SEQ ID NO: 11722 - DNA, 27 bp, Artificial Sequence
  Synthetic
acttcttgucaaaaagtgaatgctugt

SEQ ID NO: 11723 - DNA, 28 bp, Artificial Sequence
  Synthetic
caattgaaatgtuaggaggtgaactugg

SEQ ID NO: 11724 - DNA, 28 bp, Artificial Sequence
  Synthetic
ggatcaagaccauaatcctggtttacut

SEQ ID NO: 11725 - DNA, 28 bp, Artificial Sequence
  Synthetic
gttttatgtauagcttttgcatcugcca

SEQ ID NO: 11726 - DNA, 17 bp, Artificial Sequence
  Synthetic
ccatucgagccgcgtuc

SEQ ID NO: 11727 - DNA, 23 bp, Artificial Sequence
  Synthetic
gaaattcuacccaagctcccuca

SEQ ID NO: 11728 - DNA, 21 bp, Artificial Sequence
  Synthetic
agcacccccgguatuaaaacg

SEQ ID NO: 11729 - DNA, 22 bp, Artificial Sequence
  Synthetic
agtcatctucgtccggguagaa

SEQ ID NO: 11730 - DNA, 19 bp, Artificial Sequence
  Synthetic
gagctgggucacggagaug

SEQ ID NO: 11731 - DNA, 18 bp, Artificial Sequence
  Synthetic
cgctccacaugcagucct

SEQ ID NO: 11732 - DNA, 26 bp, Artificial Sequence
  Synthetic
tggttctcacaugagagtaacuagca

SEQ ID NO: 11733 - DNA, 23 bp, Artificial Sequence
  Synthetic
agtgatggugaatgtggugacag

SEQ ID NO: 11734 - DNA, 21 bp, Artificial Sequence
  Synthetic
gucgcagaaaccacaacaucc

SEQ ID NO: 11735 - DNA, 22 bp, Artificial Sequence
  Synthetic
ggagggaguggacatacucagt

SEQ ID NO: 11736 - DNA, 19 bp, Artificial Sequence
  Synthetic
tgcgcutcttucagggcat

SEQ ID NO: 11737 - DNA, 21 bp, Artificial Sequence
  Synthetic
cggccccaugtacttgaucac

SEQ ID NO: 11738 - DNA, 24 bp, Artificial Sequence
  Synthetic
tgttaaaatguccgcagttgaugg

SEQ ID NO: 11739 - DNA, 26 bp, Artificial Sequence
  Synthetic
ggtaaaacacautcctttgguccaat

SEQ ID NO: 11740 - DNA, 30 bp, Artificial Sequence
  Synthetic
attcttaattttaggutgcagtttcaucac

SEQ ID NO: 11741 - DNA, 30 bp, Artificial Sequence
  Synthetic
tccaatttcatauactggctgaagucaaaa

SEQ ID NO: 11742 - DNA, 29 bp, Artificial Sequence
  Synthetic
ctgatttagtugagacttacgtgctuagt

SEQ ID NO: 11743 - DNA, 27 bp, Artificial Sequence
  Synthetic
atctgggaaucgacgaagtaaatctuc

SEQ ID NO: 11744 - DNA, 30 bp, Artificial Sequence
  Synthetic
ttataggattttgucactttgttctgttug

SEQ ID NO: 11745 - DNA, 26 bp, Artificial Sequence
  Synthetic
tgttgacugcatcttctttuccaagt

SEQ ID NO: 11746 - DNA, 29 bp, Artificial Sequence
  Synthetic
tggatgtttcauaggatactttggataug

SEQ ID NO: 11747 - DNA, 20 bp, Artificial Sequence
  Synthetic
aatggcatccugggcttcut

SEQ ID NO: 11748 - DNA, 30 bp, Artificial Sequence
  Synthetic
tagtagcagaaagaaguttaaaatctugct

SEQ ID NO: 11749 - DNA, 22 bp, Artificial Sequence
  Synthetic
acaatggacacutctgcugact

SEQ ID NO: 11750 - DNA, 27 bp, Artificial Sequence
  Synthetic
ttggccaatcagauaccaactgtuaat

SEQ ID NO: 11751 - DNA, 26 bp, Artificial Sequence
  Synthetic
aggcaatuactgatgattucaagggt

SEQ ID NO: 11752 - DNA, 32 bp, Artificial Sequence
  Synthetic
ctgaaatgucagaagaaaacatcacaauaaag

SEQ ID NO: 11753 - DNA, 32 bp, Artificial Sequence
  Synthetic
agcttatcaatatuaccttcattccattacug

SEQ ID NO: 11754 - DNA, 22 bp, Artificial Sequence
  Synthetic
auggaacattcauccgcgagaa

SEQ ID NO: 11755 - DNA, 22 bp, Artificial Sequence
  Synthetic
cacacacauggcagtagugact

SEQ ID NO: 11756 - DNA, 22 bp, Artificial Sequence
  Synthetic
gcgaaguagccgccaaauaaaa

SEQ ID NO: 11757 - DNA, 22 bp, Artificial Sequence
  Synthetic
caggcctucactctcactaucc

SEQ ID NO: 11758 - DNA, 23 bp, Artificial Sequence
  Synthetic
accccgatuttgatgcatcuaca

SEQ ID NO: 11759 - DNA, 27 bp, Artificial Sequence
  Synthetic
catgtgguacagctcataaaattuccc

SEQ ID NO: 11760 - DNA, 32 bp, Artificial Sequence
  Synthetic
gaactacagtaaguatcttcttagccucaaag

SEQ ID NO: 11761 - DNA, 25 bp, Artificial Sequence
  Synthetic
tgccactagagucctaaatcucgaa

SEQ ID NO: 11762 - DNA, 24 bp, Artificial Sequence
  Synthetic
gagaaaagtgaautggccctcuct

SEQ ID NO: 11763 - DNA, 25 bp, Artificial Sequence
  Synthetic
tgataggctutggtgaagauagcac

SEQ ID NO: 11764 - DNA, 24 bp, Artificial Sequence
  Synthetic
gcttccagaucttgagaggcuact

SEQ ID NO: 11765 - DNA, 27 bp, Artificial Sequence
  Synthetic
tcctuccagagcagaaagaaaaucaat

SEQ ID NO: 11766 - DNA, 23 bp, Artificial Sequence
  Synthetic
aacagagccucctggaataccua

SEQ ID NO: 11767 - DNA, 27 bp, Artificial Sequence
  Synthetic
tttacagcccutcttggtagattucaa

SEQ ID NO: 11768 - DNA, 22 bp, Artificial Sequence
  Synthetic
attctgtugccggaagauaccc

SEQ ID NO: 11769 - DNA, 24 bp, Artificial Sequence
  Synthetic
cacaataggcuttgccatttucct

SEQ ID NO: 11770 - DNA, 30 bp, Artificial Sequence
  Synthetic
aattcctttgagtuacttccttatgcauat

SEQ ID NO: 11771 - DNA, 32 bp, Artificial Sequence
  Synthetic
taatcttctactaaugaatggtagtgagtuga

SEQ ID NO: 11772 - DNA, 28 bp, Artificial Sequence
  Synthetic
ccagaggaagtuattcaaaagggacaua

SEQ ID NO: 11773 - DNA, 28 bp, Artificial Sequence
  Synthetic
tactgtttcttugaaacttaaggucagt

SEQ ID NO: 11774 - DNA, 19 bp, Artificial Sequence
  Synthetic
cucccccagucaaagagug

SEQ ID NO: 11775 - DNA, 18 bp, Artificial Sequence
  Synthetic
cgtgcggcgaugactuga

SEQ ID NO: 11776 - DNA, 19 bp, Artificial Sequence
  Synthetic
ctggcuaacggguggaaca

SEQ ID NO: 11777 - DNA, 21 bp, Artificial Sequence
  Synthetic
gggcgcauactcttagtccut

SEQ ID NO: 11778 - DNA, 25 bp, Artificial Sequence
  Synthetic
ccaagctcaaagauactgtctccug

SEQ ID NO: 11779 - DNA, 28 bp, Artificial Sequence
  Synthetic
aaacaattcacaaaauttgccaccatug

SEQ ID NO: 11780 - DNA, 18 bp, Artificial Sequence
  Synthetic
caugcaacgcgagctuct

SEQ ID NO: 11781 - DNA, 20 bp, Artificial Sequence
  Synthetic
ccctguggcaagatgccaut

SEQ ID NO: 11782 - DNA, 27 bp, Artificial Sequence
  Synthetic
gcagtatttcacuggaaaccccttaut

SEQ ID NO: 11783 - DNA, 21 bp, Artificial Sequence
  Synthetic
agttgaccgugggaaggaauc

SEQ ID NO: 11784 - DNA, 24 bp, Artificial Sequence
  Synthetic
aagccagccucaattgtctcaaua

SEQ ID NO: 11785 - DNA, 30 bp, Artificial Sequence
  Synthetic
tctataactaggaugattggagtgttgugt

SEQ ID NO: 11786 - DNA, 23 bp, Artificial Sequence
  Synthetic
gcctccctcugatttcatagcut

SEQ ID NO: 11787 - DNA, 24 bp, Artificial Sequence
  Synthetic
tttgggacaagcagaugatauccc

SEQ ID NO: 11788 - DNA, 28 bp, Artificial Sequence
  Synthetic
tggtgtgtaggutatctctactttucca

SEQ ID NO: 11789 - DNA, 24 bp, Artificial Sequence
  Synthetic
actgccctatutgtctaggtguct

SEQ ID NO: 11790 - DNA, 23 bp, Artificial Sequence
  Synthetic
cctttcugagtttgcuacacgga

SEQ ID NO: 11791 - DNA, 19 bp, Artificial Sequence
  Synthetic
gtggcggutctgtgguaga

SEQ ID NO: 11792 - DNA, 18 bp, Artificial Sequence
  Synthetic
ggcgggcagcutguagag

SEQ ID NO: 11793 - DNA, 18 bp, Artificial Sequence
  Synthetic
ctacgccuaccgctucga

SEQ ID NO: 11794 - DNA, 17 bp, Artificial Sequence
  Synthetic
cugtgcccugaccccaa

SEQ ID NO: 11795 - DNA, 24 bp, Artificial Sequence
  Synthetic
tcctgattcutttcttctgcugct

SEQ ID NO: 11796 - DNA, 26 bp, Artificial Sequence
  Synthetic
cuatttucagaaaucaggaagcaacc

SEQ ID NO: 11797 - DNA, 29 bp, Artificial Sequence
  Synthetic
tgactctctcccgutttaagaataatucc

SEQ ID NO: 11798 - DNA, 25 bp, Artificial Sequence
  Synthetic
cctggagtcutacattgaggaugaa

SEQ ID NO: 11799 - DNA, 23 bp, Artificial Sequence
  Synthetic
tttgaaacaacugtgctcuccct

SEQ ID NO: 11800 - DNA, 25 bp, Artificial Sequence
  Synthetic
caacataccucgactcattgucagt

SEQ ID NO: 11801 - DNA, 33 bp, Artificial Sequence
  Synthetic
aaaaatacaaccuccaaaagataugagaaacat

SEQ ID NO: 11802 - DNA, 27 bp, Artificial Sequence
  Synthetic
cagttcaguacaaagttgaggtaguga

SEQ ID NO: 11803 - DNA, 30 bp, Artificial Sequence
  Synthetic
gctgttacggaaugaagaatgaactttaut

SEQ ID NO: 11804 - DNA, 27 bp, Artificial Sequence
  Synthetic
gtagttccucaggaaaucaagaaagca

SEQ ID NO: 11805 - DNA, 26 bp, Artificial Sequence
  Synthetic
tgtcactaatugccactcatttccuc

SEQ ID NO: 11806 - DNA, 27 bp, Artificial Sequence
  Synthetic
tttgcttcactcuctagaccagaguat

SEQ ID NO: 11807 - DNA, 22 bp, Artificial Sequence
  Synthetic
ccctttctgugttccctcctug

SEQ ID NO: 11808 - DNA, 31 bp, Artificial Sequence
  Synthetic
cacagggcattutagattatctggauaacat

SEQ ID NO: 11809 - DNA, 26 bp, Artificial Sequence
  Synthetic
tctttcccaacauattgcctctuacc

SEQ ID NO: 11810 - DNA, 21 bp, Artificial Sequence
  Synthetic
ctctgcacugccctttttgut

SEQ ID NO: 11811 - DNA, 27 bp, Artificial Sequence
  Synthetic
tgacagaatugatgtaactucaccagt

SEQ ID NO: 11812 - DNA, 27 bp, Artificial Sequence
  Synthetic
gtatttccggtuactgagactttgugt

SEQ ID NO: 11813 - DNA, 24 bp, Artificial Sequence
  Synthetic
tcctccccacauacaccatgtaut

SEQ ID NO: 11814 - DNA, 27 bp, Artificial Sequence
  Synthetic
tgaatttcaagtcuaatggtggtgugt

SEQ ID NO: 11815 - DNA, 29 bp, Artificial Sequence
  Synthetic
ctgatttttgcugaaatagcaguaacagt

SEQ ID NO: 11816 - DNA, 23 bp, Artificial Sequence
  Synthetic
tctctttgtugctgtgactuccc

SEQ ID NO: 11817 - DNA, 24 bp, Artificial Sequence
  Synthetic
agatgaactucgtcacaaguccac

SEQ ID NO: 11818 - DNA, 25 bp, Artificial Sequence
  Synthetic
acagagatcugcccaagaaattgut

SEQ ID NO: 11819 - DNA, 25 bp, Artificial Sequence
  Synthetic
tcctcattutcctttttcucagcca

SEQ ID NO: 11820 - DNA, 29 bp, Artificial Sequence
  Synthetic
tgtgacacataggauactattgcattugt

SEQ ID NO: 11821 - DNA, 26 bp, Artificial Sequence
  Synthetic
gcagaagcugttgatttcuccaaaat

SEQ ID NO: 11822 - DNA, 23 bp, Artificial Sequence
  Synthetic
gaaggccauagaggagattgcug

SEQ ID NO: 11823 - DNA, 26 bp, Artificial Sequence
  Synthetic
cccagcctgaugatgattctatctua

SEQ ID NO: 11824 - DNA, 21 bp, Artificial Sequence
  Synthetic
gggccttucagtgagauacct

SEQ ID NO: 11825 - DNA, 31 bp, Artificial Sequence
  Synthetic
catatctttgttctcugctcttagctctuac

SEQ ID NO: 11826 - DNA, 24 bp, Artificial Sequence
  Synthetic
gcagagtcaaagcuatgctcacuc

SEQ ID NO: 11827 - DNA, 22 bp, Artificial Sequence
  Synthetic
ggtgaccutccttacaugccat

SEQ ID NO: 11828 - DNA, 22 bp, Artificial Sequence
  Synthetic
ggtcacucagagcaguaaccua

SEQ ID NO: 11829 - DNA, 26 bp, Artificial Sequence
  Synthetic
cacagaaguaggcaacaauttatcug

SEQ ID NO: 11830 - DNA, 32 bp, Artificial Sequence
  Synthetic
agagtagttgcagacugataaattattttcug

SEQ ID NO: 11831 - DNA, 28 bp, Artificial Sequence
  Synthetic
aacatcctgctacuttgaggttttacut

SEQ ID NO: 11832 - DNA, 32 bp, Artificial Sequence
  Synthetic
ttcagtctattttctuttcttccttaggctut

SEQ ID NO: 11833 - DNA, 32 bp, Artificial Sequence
  Synthetic
atatatgagtaaaagaagucagcactauacct

SEQ ID NO: 11834 - DNA, 23 bp, Artificial Sequence
  Synthetic
gatgtttcaguctcagccaugag

SEQ ID NO: 11835 - DNA, 27 bp, Artificial Sequence
  Synthetic
catttccaaagauggagcgaatatugt

SEQ ID NO: 11836 - DNA, 21 bp, Artificial Sequence
  Synthetic
ctcaccccucaggacagttut

SEQ ID NO: 11837 - DNA, 25 bp, Artificial Sequence
  Synthetic
gttgaggagtutggtgctacatuac

SEQ ID NO: 11838 - DNA, 23 bp, Artificial Sequence
  Synthetic
accagatggutcgtacagatucc

SEQ ID NO: 11839 - DNA, 25 bp, Artificial Sequence
  Synthetic
cctagcccugccactagaaatauct

SEQ ID NO: 11840 - DNA, 24 bp, Artificial Sequence
  Synthetic
ccggagaaggaucattaaccucac

SEQ ID NO: 11841 - DNA, 21 bp, Artificial Sequence
  Synthetic
ttccaaaaccutggcagtuga

SEQ ID NO: 11842 - DNA, 21 bp, Artificial Sequence
  Synthetic
gctccgtuaaagcttgcucct

SEQ ID NO: 11843 - DNA, 25 bp, Artificial Sequence
  Synthetic
agccttctucttcagaaacucaaca

SEQ ID NO: 11844 - DNA, 27 bp, Artificial Sequence
  Synthetic
cctcagtaaagaaugcgctatgttcua

SEQ ID NO: 11845 - DNA, 27 bp, Artificial Sequence
  Synthetic
aaagattgtaugaggtcctgtccuagt

SEQ ID NO: 11846 - DNA, 26 bp, Artificial Sequence
  Synthetic
ccatctgccucctattttcttaucgt

SEQ ID NO: 11847 - DNA, 23 bp, Artificial Sequence
  Synthetic
gugaacacggcactuaaacacag

SEQ ID NO: 11848 - DNA, 21 bp, Artificial Sequence
  Synthetic
cacatccuaccccatggctuc

SEQ ID NO: 11849 - DNA, 21 bp, Artificial Sequence
  Synthetic
atgttcagcuggtggtgcaua

SEQ ID NO: 11850 - DNA, 23 bp, Artificial Sequence
  Synthetic
ccctucccttcttttucaaccgt

SEQ ID NO: 11851 - DNA, 25 bp, Artificial Sequence
  Synthetic
cccagctatuccacagatgtttcuc

SEQ ID NO: 11852 - DNA, 22 bp, Artificial Sequence
  Synthetic
cttacttcggcucctccttgug

SEQ ID NO: 11853 - DNA, 22 bp, Artificial Sequence
  Synthetic
ccgcacatugcccagtattgua

SEQ ID NO: 11854 - DNA, 23 bp, Artificial Sequence
  Synthetic
tgtatgggcutcagcaagttuct

SEQ ID NO: 11855 - DNA, 23 bp, Artificial Sequence
  Synthetic
tcacccugaacagcacaatucaa

SEQ ID NO: 11856 - DNA, 21 bp, Artificial Sequence
  Synthetic
gatgcccaggguctacttugt

SEQ ID NO: 11857 - DNA, 24 bp, Artificial Sequence
  Synthetic
tccaagtgaacauctgcagagauc

SEQ ID NO: 11858 - DNA, 28 bp, Artificial Sequence
  Synthetic
gcctcatgttatautagtgtaggccuca

SEQ ID NO: 11859 - DNA, 21 bp, Artificial Sequence
  Synthetic
aggacacgutggcatcauagg

SEQ ID NO: 11860 - DNA, 20 bp, Artificial Sequence
  Synthetic
gtgtuggccagcgttcatuc

SEQ ID NO: 11861 - DNA, 20 bp, Artificial Sequence
  Synthetic
actccugtgttguggcaacc

SEQ ID NO: 11862 - DNA, 22 bp, Artificial Sequence
  Synthetic
gttctaccacucctgcctcuac

SEQ ID NO: 11863 - DNA, 29 bp, Artificial Sequence
  Synthetic
gatattttcttgtucttgagggatgaugc

SEQ ID NO: 11864 - DNA, 23 bp, Artificial Sequence
  Synthetic
atggaauttcagttcugcccagt

SEQ ID NO: 11865 - DNA, 25 bp, Artificial Sequence
  Synthetic
catgagctattuccaccaccctuag

SEQ ID NO: 11866 - DNA, 22 bp, Artificial Sequence
  Synthetic
gttgggacuggguccagaaaaa

SEQ ID NO: 11867 - DNA, 27 bp, Artificial Sequence
  Synthetic
tgggcutgatagaaugaagaagagaac

SEQ ID NO: 11868 - DNA, 23 bp, Artificial Sequence
  Synthetic
ccgctccauctctgaagucaaat

SEQ ID NO: 11869 - DNA, 26 bp, Artificial Sequence
  Synthetic
gaacctgtaaacugaggtacttuggt

SEQ ID NO: 11870 - DNA, 22 bp, Artificial Sequence
  Synthetic
ccagttcaugcaacagagagug

SEQ ID NO: 11871 - DNA, 26 bp, Artificial Sequence
  Synthetic
acaccuagcaaatggaaaauggaaga

SEQ ID NO: 11872 - DNA, 28 bp, Artificial Sequence
  Synthetic
ccaagttatagacugtttttgcttgugt

SEQ ID NO: 11873 - DNA, 22 bp, Artificial Sequence
  Synthetic
caggctgccaagucattcagua

SEQ ID NO: 11874 - DNA, 25 bp, Artificial Sequence
  Synthetic
cagccaaccutcccaacauaaaaag

SEQ ID NO: 11875 - DNA, 27 bp, Artificial Sequence
  Synthetic
catgagttggauatagtttgcacauca

SEQ ID NO: 11876 - DNA, 24 bp, Artificial Sequence
  Synthetic
ctgttttccuccattttcaucgca

SEQ ID NO: 11877 - DNA, 29 bp, Artificial Sequence
  Synthetic
gtttcttctgtcggutttcaagttcttut

SEQ ID NO: 11878 - DNA, 23 bp, Artificial Sequence
  Synthetic
aacaactctcgauctcacggaug

SEQ ID NO: 11879 - DNA, 20 bp, Artificial Sequence
  Synthetic
aaagggtgucgtccaucagg

SEQ ID NO: 11880 - DNA, 28 bp, Artificial Sequence
  Synthetic
tttcactgctaacutttgacgtgtttut

SEQ ID NO: 11881 - DNA, 22 bp, Artificial Sequence
  Synthetic
cugtccttagugacaacagcca

SEQ ID NO: 11882 - DNA, 21 bp, Artificial Sequence
  Synthetic
cctgtgccuctgctgcataut

SEQ ID NO: 11883 - DNA, 29 bp, Artificial Sequence
  Synthetic
agtcgactgtguttaactttgagttttua

SEQ ID NO: 11884 - DNA, 19 bp, Artificial Sequence
  Synthetic
gcgttgcgucggaaguaag

SEQ ID NO: 11885 - DNA, 24 bp, Artificial Sequence
  Synthetic
tttcgagaaacugtggaaugacga

SEQ ID NO: 11886 - DNA, 18 bp, Artificial Sequence
  Synthetic
ccttgggugacgggaguc

SEQ ID NO: 11887 - DNA, 25 bp, Artificial Sequence
  Synthetic
gctctggtttuctgaaggtcttcua

SEQ ID NO: 11888 - DNA, 25 bp, Artificial Sequence
  Synthetic
acctgcattugtactctacatuggg

SEQ ID NO: 11889 - DNA, 20 bp, Artificial Sequence
  Synthetic
ctagacccgcugcctagtut

SEQ ID NO: 11890 - DNA, 22 bp, Artificial Sequence
  Synthetic
gagacacaugtcgtggucagat

SEQ ID NO: 11891 - DNA, 28 bp, Artificial Sequence
  Synthetic
gaagaggacggaautagctgttaatuga

SEQ ID NO: 11892 - DNA, 23 bp, Artificial Sequence
  Synthetic
tggagguggaggaaggacaatua

SEQ ID NO: 11893 - DNA, 20 bp, Artificial Sequence
  Synthetic
gttcccgugtcagtggcuat

SEQ ID NO: 11894 - DNA, 22 bp, Artificial Sequence
  Synthetic
gcaugaaagcagugggaaccat

SEQ ID NO: 11895 - DNA, 27 bp, Artificial Sequence
  Synthetic
cttaagagactaauttcaagccctugg

SEQ ID NO: 11896 - DNA, 17 bp, Artificial Sequence
  Synthetic
gggcuggcaggaguggt

SEQ ID NO: 11897 - DNA, 17 bp, Artificial Sequence
  Synthetic
cacccguccagcauggt

SEQ ID NO: 11898 - DNA, 22 bp, Artificial Sequence
  Synthetic
caagccaagcuggatattgugg

SEQ ID NO: 11899 - DNA, 18 bp, Artificial Sequence
  Synthetic
ctgtcugcaacgcctgug

SEQ ID NO: 11900 - DNA, 18 bp, Artificial Sequence
  Synthetic
cgaaguccccagcaccug

SEQ ID NO: 11901 - DNA, 21 bp, Artificial Sequence
  Synthetic
cccaccuacccctcctatgug

SEQ ID NO: 11902 - DNA, 18 bp, Artificial Sequence
  Synthetic
gugagggaggccacugag

SEQ ID NO: 11903 - DNA, 18 bp, Artificial Sequence
  Synthetic
caaccccuggaccgugag

SEQ ID NO: 11904 - DNA, 17 bp, Artificial Sequence
  Synthetic
cucgtcuggaggcagca

SEQ ID NO: 11905 - DNA, 18 bp, Artificial Sequence
  Synthetic
tcugcacccagacccuga

SEQ ID NO: 11906 - DNA, 18 bp, Artificial Sequence
  Synthetic
gtguacggcccguacgag

SEQ ID NO: 11907 - DNA, 19 bp, Artificial Sequence
  Synthetic
ccctcacccaugccctaug

SEQ ID NO: 11908 - DNA, 24 bp, Artificial Sequence
  Synthetic
tgctatttugccagcccttctuat

SEQ ID NO: 11909 - DNA, 18 bp, Artificial Sequence
  Synthetic
tcgtacguggcgctcauc

SEQ ID NO: 11910 - DNA, 22 bp, Artificial Sequence
  Synthetic
gtagcuggccatcaugacaaag

SEQ ID NO: 11911 - DNA, 22 bp, Artificial Sequence
  Synthetic
catccgcaguctccagaagtut

SEQ ID NO: 11912 - DNA, 17 bp, Artificial Sequence
  Synthetic
ggcugctccucgaccag

SEQ ID NO: 11913 - DNA, 19 bp, Artificial Sequence
  Synthetic
tggaguctccgtugcacag

SEQ ID NO: 11914 - DNA, 24 bp, Artificial Sequence
  Synthetic
gtgctcaguacgggaaagtcauag

SEQ ID NO: 11915 - DNA, 29 bp, Artificial Sequence
  Synthetic
ccacaatctaagutcaatctcctcaugaa

SEQ ID NO: 11916 - DNA, 27 bp, Artificial Sequence
  Synthetic
gtgtagacaaaguagctgatggatuca

SEQ ID NO: 11917 - DNA, 30 bp, Artificial Sequence
  Synthetic
aaaaatcaaagaguacctcauacagaagca

SEQ ID NO: 11918 - DNA, 28 bp, Artificial Sequence
  Synthetic
ttcattttaccccguaggttttacucag

SEQ ID NO: 11919 - DNA, 24 bp, Artificial Sequence
  Synthetic
tcaacagacuggctttctcgttut

SEQ ID NO: 11920 - DNA, 27 bp, Artificial Sequence
  Synthetic
aatggaacaacaacccuaccaatauca

SEQ ID NO: 11921 - DNA, 26 bp, Artificial Sequence
  Synthetic
aggtacctuaacaaaagtauccccaa

SEQ ID NO: 11922 - DNA, 25 bp, Artificial Sequence
  Synthetic
acgctttgtttuccatgtcatctug

SEQ ID NO: 11923 - DNA, 24 bp, Artificial Sequence
  Synthetic
atgcctggaaacuaactcttcugg

SEQ ID NO: 11924 - DNA, 22 bp, Artificial Sequence
  Synthetic
gucaaagccugcacaacagaag

SEQ ID NO: 11925 - DNA, 26 bp, Artificial Sequence
  Synthetic
actggtgaaugaattcacacaacuca

SEQ ID NO: 11926 - DNA, 27 bp, Artificial Sequence
  Synthetic
cctacagatgtuactcccactttctug

SEQ ID NO: 11927 - DNA, 30 bp, Artificial Sequence
  Synthetic
tcctcctactcutaatatcaagctuccaaa

SEQ ID NO: 11928 - DNA, 23 bp, Artificial Sequence
  Synthetic
gaacagcagutttgaggaugacc

SEQ ID NO: 11929 - DNA, 22 bp, Artificial Sequence
  Synthetic
ttcaaaccgccuccagagtuac

SEQ ID NO: 11930 - DNA, 29 bp, Artificial Sequence
  Synthetic
tgttgttacttauttgaactctcuggcaa

SEQ ID NO: 11931 - DNA, 25 bp, Artificial Sequence
  Synthetic
ggcggttcauctcctatttuggaat

SEQ ID NO: 11932 - DNA, 27 bp, Artificial Sequence
  Synthetic
aatgaaaacaccagacuagacugaaat

SEQ ID NO: 11933 - DNA, 24 bp, Artificial Sequence
  Synthetic
cttcaaaaccucactttgccacuc

SEQ ID NO: 11934 - DNA, 20 bp, Artificial Sequence
  Synthetic
agatgagugacccugcaggt

SEQ ID NO: 11935 - DNA, 25 bp, Artificial Sequence
  Synthetic
ctatccagtccauaagccacgtaug

SEQ ID NO: 11936 - DNA, 30 bp, Artificial Sequence
  Synthetic
gctcagctucagaatattgattatctucca

SEQ ID NO: 11937 - DNA, 28 bp, Artificial Sequence
  Synthetic
tctgtgttttucgttggttcatttuagg

SEQ ID NO: 11938 - DNA, 25 bp, Artificial Sequence
  Synthetic
acatgttcauttcagtcgucacaga

SEQ ID NO: 11939 - DNA, 23 bp, Artificial Sequence
  Synthetic
aactggaaaguacaggtgcgaut

SEQ ID NO: 11940 - DNA, 27 bp, Artificial Sequence
  Synthetic
cttctctttautgtggatgtugcgaac

SEQ ID NO: 11941 - DNA, 27 bp, Artificial Sequence
  Synthetic
tggagatgatttutgatagctggcuaa

SEQ ID NO: 11942 - DNA, 28 bp, Artificial Sequence
  Synthetic
agtttacaagcuggaaatctcaaaucca

SEQ ID NO: 11943 - DNA, 29 bp, Artificial Sequence
  Synthetic
tgagactgcttcauctccaaaatctaaut

SEQ ID NO: 11944 - DNA, 21 bp, Artificial Sequence
  Synthetic
gggcttctcaucctttcgcut

SEQ ID NO: 11945 - DNA, 27 bp, Artificial Sequence
  Synthetic
gtacccatttccugatagagactugag

SEQ ID NO: 11946 - DNA, 30 bp, Artificial Sequence
  Synthetic
ggcttactttguctttgaacatttuaccat

SEQ ID NO: 11947 - DNA, 27 bp, Artificial Sequence
  Synthetic
ctttgagaaaaucagtgaccagucaga

SEQ ID NO: 11948 - DNA, 26 bp, Artificial Sequence
  Synthetic
agctaaaagaaaauccaggagctgut

SEQ ID NO: 11949 - DNA, 22 bp, Artificial Sequence
  Synthetic
aggcattucacttccuggaacc

SEQ ID NO: 11950 - DNA, 21 bp, Artificial Sequence
  Synthetic
gcaaacgttutgccacacucc

SEQ ID NO: 11951 - DNA, 21 bp, Artificial Sequence
  Synthetic
gagtcaucccgggtcttctut

SEQ ID NO: 11952 - DNA, 22 bp, Artificial Sequence
  Synthetic
tccttacacucctggatcgugt

SEQ ID NO: 11953 - DNA, 22 bp, Artificial Sequence
  Synthetic
cgaagactgugaccagctctut

SEQ ID NO: 11954 - DNA, 22 bp, Artificial Sequence
  Synthetic
gcaacaaggutgtgctgaucat

SEQ ID NO: 11955 - DNA, 23 bp, Artificial Sequence
  Synthetic
ttaatgagugggccaatauggca

SEQ ID NO: 11956 - DNA, 25 bp, Artificial Sequence
  Synthetic
gggatatcaucagggatgtagaugg

SEQ ID NO: 11957 - DNA, 27 bp, Artificial Sequence
  Synthetic
caactacccugaaataccttuggaaga

SEQ ID NO: 11958 - DNA, 18 bp, Artificial Sequence
  Synthetic
ccaugtgccugcacggat

SEQ ID NO: 11959 - DNA, 22 bp, Artificial Sequence
  Synthetic
accaacuctgaaaucccagcac

SEQ ID NO: 11960 - DNA, 22 bp, Artificial Sequence
  Synthetic
acgctgagautgactcctugac

SEQ ID NO: 11961 - DNA, 23 bp, Artificial Sequence
  Synthetic
aaataagcuctcaggugcagcat

SEQ ID NO: 11962 - DNA, 22 bp, Artificial Sequence
  Synthetic
ccacttctucaaggcctaccut

SEQ ID NO: 11963 - DNA, 21 bp, Artificial Sequence
  Synthetic
gtgtugaaggagguggacact

SEQ ID NO: 11964 - DNA, 21 bp, Artificial Sequence
  Synthetic
gccttggutgatggtcuaggt

SEQ ID NO: 11965 - DNA, 25 bp, Artificial Sequence
  Synthetic
caggtggatuttccatgtcauacag

SEQ ID NO: 11966 - DNA, 22 bp, Artificial Sequence
  Synthetic
gatgcctgucatgcagtaugga

SEQ ID NO: 11967 - DNA, 21 bp, Artificial Sequence
  Synthetic
acaucacgcaggugaaacagt

SEQ ID NO: 11968 - DNA, 24 bp, Artificial Sequence
  Synthetic
ggaggcctugaatagaaagcucaa

SEQ ID NO: 11969 - DNA, 24 bp, Artificial Sequence
  Synthetic
gccttggutatctcctucagacag

SEQ ID NO: 11970 - DNA, 18 bp, Artificial Sequence
  Synthetic
gcccacugtctgggucaa

SEQ ID NO: 11971 - DNA, 21 bp, Artificial Sequence
  Synthetic
gcacactgaaguggcacagua

SEQ ID NO: 11972 - DNA, 17 bp, Artificial Sequence
  Synthetic
gggccccutacuggaca

SEQ ID NO: 11973 - DNA, 19 bp, Artificial Sequence
  Synthetic
cttgaugcctccaaugcgg

SEQ ID NO: 11974 - DNA, 17 bp, Artificial Sequence
  Synthetic
gtggcucaagcacgugg

SEQ ID NO: 11975 - DNA, 21 bp, Artificial Sequence
  Synthetic
ctagacccaaauccucacgca

SEQ ID NO: 11976 - DNA, 23 bp, Artificial Sequence
  Synthetic
cgctctgcuctctctttguagac

SEQ ID NO: 11977 - DNA, 25 bp, Artificial Sequence
  Synthetic
cgcagagtgaugagaaaacccaaua

SEQ ID NO: 11978 - DNA, 19 bp, Artificial Sequence
  Synthetic
catcgcaaggcugtccuca

SEQ ID NO: 11979 - DNA, 17 bp, Artificial Sequence
  Synthetic
gcctcugactgguggct

SEQ ID NO: 11980 - DNA, 18 bp, Artificial Sequence
  Synthetic
gtcugaggagcccgtguc

SEQ ID NO: 11981 - DNA, 18 bp, Artificial Sequence
  Synthetic
cggctugcaggtgucgaa

SEQ ID NO: 11982 - DNA, 27 bp, Artificial Sequence
  Synthetic
gacaacgtgaugaagatcgcagactuc

SEQ ID NO: 11983 - DNA, 21 bp, Artificial Sequence
  Synthetic
caggcgucctactggcaugac

SEQ ID NO: 11984 - DNA, 18 bp, Artificial Sequence
  Synthetic
gcagcccutcaggctgut

SEQ ID NO: 11985 - DNA, 20 bp, Artificial Sequence
  Synthetic
ggacgucacgguaaggacac

SEQ ID NO: 11986 - DNA, 17 bp, Artificial Sequence
  Synthetic
gttugcccacgaccugc

SEQ ID NO: 11987 - DNA, 23 bp, Artificial Sequence
  Synthetic
tctgtgtagcugtctctccauct

SEQ ID NO: 11988 - DNA, 32 bp, Artificial Sequence
  Synthetic
tttgtttatgttcaugtagaaagtgacugaga

SEQ ID NO: 11989 - DNA, 28 bp, Artificial Sequence
  Synthetic
aaaaataactuacccatactgtggugct

SEQ ID NO: 11990 - DNA, 21 bp, Artificial Sequence
  Synthetic
ccttgaugcaccuggaagcat

SEQ ID NO: 11991 - DNA, 30 bp, Artificial Sequence
  Synthetic
tttctgatgactucacactgaaaatatuga

SEQ ID NO: 11992 - DNA, 26 bp, Artificial Sequence
  Synthetic
ccgaagactguactatggaagtuaca

SEQ ID NO: 11993 - DNA, 28 bp, Artificial Sequence
  Synthetic
ggtagctattuccactttaatcttgucc

SEQ ID NO: 11994 - DNA, 24 bp, Artificial Sequence
  Synthetic
agacaaguactgccuccagaaaag

SEQ ID NO: 11995 - DNA, 28 bp, Artificial Sequence
  Synthetic
tgatgatctaaacaucagggagtaucca

SEQ ID NO: 11996 - DNA, 21 bp, Artificial Sequence
  Synthetic
caaaccaccuccgttttuccc

SEQ ID NO: 11997 - DNA, 28 bp, Artificial Sequence
  Synthetic
aaacactcgcaagcuatttttcttucaa

SEQ ID NO: 11998 - DNA, 25 bp, Artificial Sequence
  Synthetic
caacagtggacautcctctggtuat

SEQ ID NO: 11999 - DNA, 28 bp, Artificial Sequence
  Synthetic
ctgtaagatgtuaaaccatgaacacgut

SEQ ID NO: 12000 - DNA, 21 bp, Artificial Sequence
  Synthetic
gagcgtgaucacagtccuaca

SEQ ID NO: 12001 - DNA, 28 bp, Artificial Sequence
  Synthetic
atctcttttccaagugaactgaaatuca

SEQ ID NO: 12002 - DNA, 26 bp, Artificial Sequence
  Synthetic
gtgaagaaggagauagucacaggaga

SEQ ID NO: 12003 - DNA, 22 bp, Artificial Sequence
  Synthetic
ggccaaaaccaugcctattcug

SEQ ID NO: 12004 - DNA, 24 bp, Artificial Sequence
  Synthetic
caccauccatccauccaggaaaat

SEQ ID NO: 12005 - DNA, 21 bp, Artificial Sequence
  Synthetic
gcttctgccutttccgtgauc

SEQ ID NO: 12006 - DNA, 22 bp, Artificial Sequence
  Synthetic
gguttattccugaccccaaggc

SEQ ID NO: 12007 - DNA, 25 bp, Artificial Sequence
  Synthetic
agaggcagauaagaaagagccagua

SEQ ID NO: 12008 - DNA, 23 bp, Artificial Sequence
  Synthetic
aacgttgacuatcagtucagcga

SEQ ID NO: 12009 - DNA, 32 bp, Artificial Sequence
  Synthetic
ctaataatttcttcttucactactgccaguaa

SEQ ID NO: 12010 - DNA, 26 bp, Artificial Sequence
  Synthetic
caggtagaaacugaaaaagacaugcc

SEQ ID NO: 12011 - DNA, 23 bp, Artificial Sequence
  Synthetic
gcattgacgucagaatuggacac

SEQ ID NO: 12012 - DNA, 24 bp, Artificial Sequence
  Synthetic
gagtaagccagggcutttgtttuc

SEQ ID NO: 12013 - DNA, 23 bp, Artificial Sequence
  Synthetic
gtaagcctuacattcaaccgugc

SEQ ID NO: 12014 - DNA, 32 bp, Artificial Sequence
  Synthetic
gttgttgaggagauaaatggaaacaattaugt

SEQ ID NO: 12015 - DNA, 28 bp, Artificial Sequence
  Synthetic
tggagttcctuaaagtcactgttatgug

SEQ ID NO: 12016 - DNA, 30 bp, Artificial Sequence
  Synthetic
gugattcatttatttgtucaaagcaggaag

SEQ ID NO: 12017 - DNA, 23 bp, Artificial Sequence
  Synthetic
tcagccttgautgcaaaccctua

SEQ ID NO: 12018 - DNA, 26 bp, Artificial Sequence
  Synthetic
aatggtttucttttctccuccaacct

SEQ ID NO: 12019 - DNA, 27 bp, Artificial Sequence
  Synthetic
aatcattcttgaugtctctggcuagac

SEQ ID NO: 12020 - DNA, 25 bp, Artificial Sequence
  Synthetic
tagacucagagcatcttctugaagt

SEQ ID NO: 12021 - DNA, 27 bp, Artificial Sequence
  Synthetic
gaagccttccutgatcatcttguagaa

SEQ ID NO: 12022 - DNA, 28 bp, Artificial Sequence
  Synthetic
catcagttagttgugatcttgacacugt

SEQ ID NO: 12023 - DNA, 25 bp, Artificial Sequence
  Synthetic
gaattgauccgcacagaatggtcua

SEQ ID NO: 12024 - DNA, 24 bp, Artificial Sequence
  Synthetic
ctctcatgtgaugtccaggagtug

SEQ ID NO: 12025 - DNA, 29 bp, Artificial Sequence
  Synthetic
gaggaagcagaacutttaaagctgauaga

SEQ ID NO: 12026 - DNA, 26 bp, Artificial Sequence
  Synthetic
taatgaggcuccaaaactttaaugct

SEQ ID NO: 12027 - DNA, 22 bp, Artificial Sequence
  Synthetic
ccggccugtgagtguaaaaaca

SEQ ID NO: 12028 - DNA, 22 bp, Artificial Sequence
  Synthetic
gcttctuggatggaggugacaa

SEQ ID NO: 12029 - DNA, 31 bp, Artificial Sequence
  Synthetic
gcatttaatgaaaucagtgttttgcttcuct

SEQ ID NO: 12030 - DNA, 32 bp, Artificial Sequence
  Synthetic
tctccttttctgacauaatctggatctttaua

SEQ ID NO: 12031 - DNA, 20 bp, Artificial Sequence
  Synthetic
cagctgugccgagaccuaat

SEQ ID NO: 12032 - DNA, 26 bp, Artificial Sequence
  Synthetic
ccutcattttataacauggccagagc

SEQ ID NO: 12033 - DNA, 24 bp, Artificial Sequence
  Synthetic
aaacccatuttccttccuggacat

SEQ ID NO: 12034 - DNA, 23 bp, Artificial Sequence
  Synthetic
gaggaagagauggcctgguaaac

SEQ ID NO: 12035 - DNA, 23 bp, Artificial Sequence
  Synthetic
ccatcgtcauggatccagaugaa

SEQ ID NO: 12036 - DNA, 19 bp, Artificial Sequence
  Synthetic
caggtguagaggcctucgt

SEQ ID NO: 12037 - DNA, 27 bp, Artificial Sequence
  Synthetic
tgaaaaactucacagactacatcauca

SEQ ID NO: 12038 - DNA, 22 bp, Artificial Sequence
  Synthetic
ccctaccuaggactgtgagcug

SEQ ID NO: 12039 - DNA, 25 bp, Artificial Sequence
  Synthetic
tctttggaaatugaatgccaccaug

SEQ ID NO: 12040 - DNA, 25 bp, Artificial Sequence
  Synthetic
tttgttgaccgcutcacatttguac

SEQ ID NO: 12041 - DNA, 22 bp, Artificial Sequence
  Synthetic
gcataggcaggutggagtgaut

SEQ ID NO: 12042 - DNA, 32 bp, Artificial Sequence
  Synthetic
agacaatgtaucataataaatctugggcagag

SEQ ID NO: 12043 - DNA, 27 bp, Artificial Sequence
  Synthetic
tgtactgacgautatggaagtgaguga

SEQ ID NO: 12044 - DNA, 27 bp, Artificial Sequence
  Synthetic
cacttgucaaggcacagaataattucc

SEQ ID NO: 12045 - DNA, 30 bp, Artificial Sequence
  Synthetic
gagatgaagaaauttttgagcacctuaact

SEQ ID NO: 12046 - DNA, 32 bp, Artificial Sequence
  Synthetic
tgttattaatgatauggaaaggaaatgtccuc

SEQ ID NO: 12047 - DNA, 24 bp, Artificial Sequence
  Synthetic
gggctttacuattcccagcuacat

SEQ ID NO: 12048 - DNA, 29 bp, Artificial Sequence
  Synthetic
cttttataactgguaaagagacgugggaa

SEQ ID NO: 12049 - DNA, 23 bp, Artificial Sequence
  Synthetic
gatggccucttctguaagacact

SEQ ID NO: 12050 - DNA, 19 bp, Artificial Sequence
  Synthetic
ctttcaggucctcuccgcc

SEQ ID NO: 12051 - DNA, 20 bp, Artificial Sequence
  Synthetic
tcccgagtuctgggcattuc

SEQ ID NO: 12052 - DNA, 25 bp, Artificial Sequence
  Synthetic
atggttgctguctcatcagcataut

SEQ ID NO: 12053 - DNA, 28 bp, Artificial Sequence
  Synthetic
aaaauaaaggcaacaggcctauaagact

SEQ ID NO: 12054 - DNA, 30 bp, Artificial Sequence
  Synthetic
cattcaaaatcatcugtaaatccagcagua

SEQ ID NO: 12055 - DNA, 23 bp, Artificial Sequence
  Synthetic
gccacaaugtacaggaugcaact

SEQ ID NO: 12056 - DNA, 22 bp, Artificial Sequence
  Synthetic
cacaccagcuttgtgttugagg

SEQ ID NO: 12057 - DNA, 29 bp, Artificial Sequence
  Synthetic
caagaactttgtaautaccagctcagaug

SEQ ID NO: 12058 - DNA, 23 bp, Artificial Sequence
  Synthetic
aatgcaatuccctgtcuccacat

SEQ ID NO: 12059 - DNA, 28 bp, Artificial Sequence
  Synthetic
ggtcagtaatugataggaagagtaucca

SEQ ID NO: 12060 - DNA, 24 bp, Artificial Sequence
  Synthetic
gggcccaaautcaccaataauaga

SEQ ID NO: 12061 - DNA, 25 bp, Artificial Sequence
  Synthetic
ggatctacagaucggacacucaaag

SEQ ID NO: 12062 - DNA, 29 bp, Artificial Sequence
  Synthetic
gaggagtgucatattatacagttugccaa

SEQ ID NO: 12063 - DNA, 26 bp, Artificial Sequence
  Synthetic
catggaaaagugcatacaucagacag

SEQ ID NO: 12064 - DNA, 26 bp, Artificial Sequence
  Synthetic
atgtttaaagguggtagctgtugagt

SEQ ID NO: 12065 - DNA, 28 bp, Artificial Sequence
  Synthetic
cucattgatagttgugaaccaacacaag

SEQ ID NO: 12066 - DNA, 25 bp, Artificial Sequence
  Synthetic
gcaggcauacacacacaatcacaua

SEQ ID NO: 12067 - DNA, 26 bp, Artificial Sequence
  Synthetic
tttatattgucagagacugccaagca

SEQ ID NO: 12068 - DNA, 24 bp, Artificial Sequence
  Synthetic
aaagaggccaagguacttcactua

SEQ ID NO: 12069 - DNA, 30 bp, Artificial Sequence
  Synthetic
cacatcaaactgugatgaagatattuagca

SEQ ID NO: 12070 - DNA, 21 bp, Artificial Sequence
  Synthetic
acgggcagguccacaatacua

SEQ ID NO: 12071 - DNA, 24 bp, Artificial Sequence
  Synthetic
gaacatgcuggtgaacaagaugag

SEQ ID NO: 12072 - DNA, 21 bp, Artificial Sequence
  Synthetic
ccagttcgucgtcttttgcug

SEQ ID NO: 12073 - DNA, 23 bp, Artificial Sequence
  Synthetic
ccctatttucccctgcagaaugt

SEQ ID NO: 12074 - DNA, 29 bp, Artificial Sequence
  Synthetic
actgttaatcguttggtttgttcugaaaa

SEQ ID NO: 12075 - DNA, 26 bp, Artificial Sequence
  Synthetic
ctagatccauagacagcaacagugag

SEQ ID NO: 12076 - DNA, 23 bp, Artificial Sequence
  Synthetic
gatggguggacaauaggacacaa

SEQ ID NO: 12077 - DNA, 26 bp, Artificial Sequence
  Synthetic
attggaaaugaatccttguaccccaa

SEQ ID NO: 12078 - DNA, 20 bp, Artificial Sequence
  Synthetic
cactacgcaugcaggaugga

SEQ ID NO: 12079 - DNA, 27 bp, Artificial Sequence
  Synthetic
cagaagacacugagaattgctgatcut

SEQ ID NO: 12080 - DNA, 29 bp, Artificial Sequence
  Synthetic
ccacaggaatgucttcccattttacuaat

SEQ ID NO: 12081 - DNA, 24 bp, Artificial Sequence
  Synthetic
ttgaggcuagaaagcucaggaaac

SEQ ID NO: 12082 - DNA, 24 bp, Artificial Sequence
  Synthetic
tatacgagaagaaggcugacauga

SEQ ID NO: 12083 - DNA, 25 bp, Artificial Sequence
  Synthetic
caccttccaaaauagcgagtaugga

SEQ ID NO: 12084 - DNA, 23 bp, Artificial Sequence
  Synthetic
tccatcagaacuccactctcucc

SEQ ID NO: 12085 - DNA, 28 bp, Artificial Sequence
  Synthetic
acgttttatugagaattccaaacaucct

SEQ ID NO: 12086 - DNA, 27 bp, Artificial Sequence
  Synthetic
agagaatcttaccugctcttgtacuga

SEQ ID NO: 12087 - DNA, 28 bp, Artificial Sequence
  Synthetic
cccatactccuacttcattcaaagugaa

SEQ ID NO: 12088 - DNA, 28 bp, Artificial Sequence
  Synthetic
ctttcaactaaagugtagcttguagcac

SEQ ID NO: 12089 - DNA, 26 bp, Artificial Sequence
  Synthetic
tgttagauccaccagatactccucaa

SEQ ID NO: 12090 - DNA, 30 bp, Artificial Sequence
  Synthetic
aggttatgagaagugaaagctcaaacuaaa

SEQ ID NO: 12091 - DNA, 21 bp, Artificial Sequence
  Synthetic
tggtcucgaagagtggaguga

SEQ ID NO: 12092 - DNA, 29 bp, Artificial Sequence
  Synthetic
agctccatactcuctttacgtagaactut

SEQ ID NO: 12093 - DNA, 27 bp, Artificial Sequence
  Synthetic
agccttaatuccagatacuccagagat

SEQ ID NO: 12094 - DNA, 22 bp, Artificial Sequence
  Synthetic
gccacuggaaattugaagcagt

SEQ ID NO: 12095 - DNA, 24 bp, Artificial Sequence
  Synthetic
gcacagtauaaggtgagcctucag

SEQ ID NO: 12096 - DNA, 21 bp, Artificial Sequence
  Synthetic
gcatctgcugcagaaactucc

SEQ ID NO: 12097 - DNA, 24 bp, Artificial Sequence
  Synthetic
gtcagcatgaauccagtccagaua

SEQ ID NO: 12098 - DNA, 23 bp, Artificial Sequence
  Synthetic
ggcctagaagaugacatgcauga

SEQ ID NO: 12099 - DNA, 27 bp, Artificial Sequence
  Synthetic
agatggcaattucactgatgtaagugt

SEQ ID NO: 12100 - DNA, 27 bp, Artificial Sequence
  Synthetic
gggtaguaaaagtgaattcuggaccat

SEQ ID NO: 12101 - DNA, 29 bp, Artificial Sequence
  Synthetic
tgaatgaagcacagutcttatttctucca

SEQ ID NO: 12102 - DNA, 27 bp, Artificial Sequence
  Synthetic
acgagcttgttuaaggtatgccttuat

SEQ ID NO: 12103 - DNA, 29 bp, Artificial Sequence
  Synthetic
catgcttaatcugctattcttgcttuagg

SEQ ID NO: 12104 - DNA, 24 bp, Artificial Sequence
  Synthetic
tttttatgggagcccugtccauac

SEQ ID NO: 12105 - DNA, 25 bp, Artificial Sequence
  Synthetic
tgatcgctauctagcaacccuaaca

SEQ ID NO: 12106 - DNA, 22 bp, Artificial Sequence
  Synthetic
ccagaaccagutcacatcugga

SEQ ID NO: 12107 - DNA, 27 bp, Artificial Sequence
  Synthetic
gtgtttaggautcgctgtaugaaggaa

SEQ ID NO: 12108 - DNA, 31 bp, Artificial Sequence
  Synthetic
gtaaacgactacagugtcaaataaactcuca

SEQ ID NO: 12109 - DNA, 26 bp, Artificial Sequence
  Synthetic
tgtcaacatugaagtctggguagaag

SEQ ID NO: 12110 - DNA, 28 bp, Artificial Sequence
  Synthetic
cgttcacaaugcaactcaaattttuagg

SEQ ID NO: 12111 - DNA, 26 bp, Artificial Sequence
  Synthetic
ctaatttagaucgcaaatgcctuggg

SEQ ID NO: 12112 - DNA, 30 bp, Artificial Sequence
  Synthetic
ggtttgtttuccagacaatgtaatuagcat

SEQ ID NO: 12113 - DNA, 25 bp, Artificial Sequence
  Synthetic
ggtgaacttcuagatccatgtggut

SEQ ID NO: 12114 - DNA, 23 bp, Artificial Sequence
  Synthetic
cagcctggcauactttgaagauc

SEQ ID NO: 12115 - DNA, 28 bp, Artificial Sequence
  Synthetic
gtttcctgtgcuctattttatgctaugt

SEQ ID NO: 12116 - DNA, 22 bp, Artificial Sequence
  Synthetic
tgttctcagcuggagaagctug

SEQ ID NO: 12117 - DNA, 24 bp, Artificial Sequence
  Synthetic
cattctgttccugacacccucaat

SEQ ID NO: 12118 - DNA, 24 bp, Artificial Sequence
  Synthetic
ggcaugaaggatatguaccaagca

SEQ ID NO: 12119 - DNA, 29 bp, Artificial Sequence
  Synthetic
ggatcatcuggtatttttacagucaacca

SEQ ID NO: 12120 - DNA, 25 bp, Artificial Sequence
  Synthetic
cagagaactcuctctctctctucca

SEQ ID NO: 12121 - DNA, 20 bp, Artificial Sequence
  Synthetic
tgacauagcccctucccgaa

SEQ ID NO: 12122 - DNA, 21 bp, Artificial Sequence
  Synthetic
aacagttttccuctccgccut

SEQ ID NO: 12123 - DNA, 23 bp, Artificial Sequence
  Synthetic
tcagtcccautcctgagactuca

SEQ ID NO: 12124 - DNA, 21 bp, Artificial Sequence
  Synthetic
cgaagcaacucagaggtggug

SEQ ID NO: 12125 - DNA, 26 bp, Artificial Sequence
  Synthetic
aaggagggaggucctcaaattgtaua

SEQ ID NO: 12126 - DNA, 18 bp, Artificial Sequence
  Synthetic
gcggagagutcggcauga

SEQ ID NO: 12127 - DNA, 21 bp, Artificial Sequence
  Synthetic
ggatgcggaagaugctctuct

SEQ ID NO: 12128 - DNA, 30 bp, Artificial Sequence
  Synthetic
tttgacatttagtuaggtcagttcctgtut

SEQ ID NO: 12129 - DNA, 23 bp, Artificial Sequence
  Synthetic
ggtaaggcgutgtcatggtguag

SEQ ID NO: 12130 - DNA, 20 bp, Artificial Sequence
  Synthetic
tgcgtcggacuctctgtcua

SEQ ID NO: 12131 - DNA, 20 bp, Artificial Sequence
  Synthetic
acucaccugagaacgccaag

SEQ ID NO: 12132 - DNA, 20 bp, Artificial Sequence
  Synthetic
cccuacccagaggacaaugg

SEQ ID NO: 12133 - DNA, 21 bp, Artificial Sequence
  Synthetic
cgtcccaguagatcctgcuct

SEQ ID NO: 12134 - DNA, 25 bp, Artificial Sequence
  Synthetic
ctcaacaaaacaguggacattucct

SEQ ID NO: 12135 - DNA, 28 bp, Artificial Sequence
  Synthetic
ggaaaaagaaaaccacucatctugacat

SEQ ID NO: 12136 - DNA, 18 bp, Artificial Sequence
  Synthetic
ctatggctucggcggcua

SEQ ID NO: 12137 - DNA, 28 bp, Artificial Sequence
  Synthetic
ttgtaaaataggaugacagaactcacug

SEQ ID NO: 12138 - DNA, 22 bp, Artificial Sequence
  Synthetic
gggtgagcacugatgagcatut

SEQ ID NO: 12139 - DNA, 25 bp, Artificial Sequence
  Synthetic
actcaacacccucaacucaaaagag

SEQ ID NO: 12140 - DNA, 23 bp, Artificial Sequence
  Synthetic
cttcagccaaacacutaacugct

SEQ ID NO: 12141 - DNA, 18 bp, Artificial Sequence
  Synthetic
ggtcctgcugggcaauct

SEQ ID NO: 12142 - DNA, 23 bp, Artificial Sequence
  Synthetic
gautacggtgtugggaagaggaa

SEQ ID NO: 12143 - DNA, 21 bp, Artificial Sequence
  Synthetic
ctcgccagucttaacugccat

SEQ ID NO: 12144 - DNA, 20 bp, Artificial Sequence
  Synthetic
gctugagacagccuagcaga

SEQ ID NO: 12145 - DNA, 21 bp, Artificial Sequence
  Synthetic
ggctgagaucaggugaaaggg

SEQ ID NO: 12146 - DNA, 22 bp, Artificial Sequence
  Synthetic
ctttctgctgucttctgccaut

SEQ ID NO: 12147 - DNA, 23 bp, Artificial Sequence
  Synthetic
cagcattagaaccugtgcatcug

SEQ ID NO: 12148 - DNA, 22 bp, Artificial Sequence
  Synthetic
ccaagctcaugctgacagugat

SEQ ID NO: 12149 - DNA, 31 bp, Artificial Sequence
  Synthetic
gggttttatcccugacatacatattcauaca

SEQ ID NO: 12150 - DNA, 22 bp, Artificial Sequence
  Synthetic
gaggaggagguggagactttug

SEQ ID NO: 12151 - DNA, 22 bp, Artificial Sequence
  Synthetic
ccaugccaaatguggaaaccag

SEQ ID NO: 12152 - DNA, 25 bp, Artificial Sequence
  Synthetic
cacaacgatgaugaacagtatgcut

SEQ ID NO: 12153 - DNA, 22 bp, Artificial Sequence
  Synthetic
actgcttuacagacaggaugcc

SEQ ID NO: 12154 - DNA, 26 bp, Artificial Sequence
  Synthetic
ggctaaaaggucctcttttgaaaugt

SEQ ID NO: 12155 - DNA, 27 bp, Artificial Sequence
  Synthetic
cggacatagaguttgatgttgttctut

SEQ ID NO: 12156 - DNA, 24 bp, Artificial Sequence
  Synthetic
attgtttttccucttcccacccut

SEQ ID NO: 12157 - DNA, 28 bp, Artificial Sequence
  Synthetic
tgtaatagatggacutctgtgtctccut

SEQ ID NO: 12158 - DNA, 22 bp, Artificial Sequence
  Synthetic
ccugaggaugaggaggagaaga

SEQ ID NO: 12159 - DNA, 21 bp, Artificial Sequence
  Synthetic
gcccaccucgaagatgtuaca

SEQ ID NO: 12160 - DNA, 23 bp, Artificial Sequence
  Synthetic
gtttgtgcaacucgtctcctcua

SEQ ID NO: 12161 - DNA, 18 bp, Artificial Sequence
  Synthetic
tcctcaucgcccucgaga

SEQ ID NO: 12162 - DNA, 17 bp, Artificial Sequence
  Synthetic
tgcugcagccucagcaa

SEQ ID NO: 12163 - DNA, 20 bp, Artificial Sequence
  Synthetic
acagagugagccgtttgucc

SEQ ID NO: 12164 - DNA, 20 bp, Artificial Sequence
  Synthetic
ctcccugcagaactccaucc

SEQ ID NO: 12165 - DNA, 25 bp, Artificial Sequence
  Synthetic
acttgttgcuattgtccauggagac

SEQ ID NO: 12166 - DNA, 18 bp, Artificial Sequence
  Synthetic
gtcgcccaucauggcaag

SEQ ID NO: 12167 - DNA, 22 bp, Artificial Sequence
  Synthetic
cagattcatggugcctgccaua

SEQ ID NO: 12168 - DNA, 20 bp, Artificial Sequence
  Synthetic
ctgctcacutcggacucact

SEQ ID NO: 12169 - DNA, 21 bp, Artificial Sequence
  Synthetic
ccaaactuccctggtuaggct

SEQ ID NO: 12170 - DNA, 22 bp, Artificial Sequence
  Synthetic
gaactcauggatgctgaugggt

SEQ ID NO: 12171 - DNA, 19 bp, Artificial Sequence
  Synthetic
tgacctgcuttgcccacut

SEQ ID NO: 12172 - DNA, 22 bp, Artificial Sequence
  Synthetic
tctagcggaguttcactugcag

SEQ ID NO: 12173 - DNA, 25 bp, Artificial Sequence
  Synthetic
gcaccugaccaaaaccaacttttua

SEQ ID NO: 12174 - DNA, 27 bp, Artificial Sequence
  Synthetic
acttcgtagggaaguatacagtgtuca

SEQ ID NO: 12175 - DNA, 28 bp, Artificial Sequence
  Synthetic
agttaaccuaagggacacaaagcauaaa

SEQ ID NO: 12176 - DNA, 31 bp, Artificial Sequence
  Synthetic
actagaauaaaggaaagaauggaaagcaact

SEQ ID NO: 12177 - DNA, 21 bp, Artificial Sequence
  Synthetic
gccugcagaggacgtaaugac

SEQ ID NO: 12178 - DNA, 22 bp, Artificial Sequence
  Synthetic
aagtactuggcagctagtcucg

SEQ ID NO: 12179 - DNA, 25 bp, Artificial Sequence
  Synthetic
cauaggaaagagagctugaggcaaa

SEQ ID NO: 12180 - DNA, 22 bp, Artificial Sequence
  Synthetic
ccagtttuagcatgaagcugca

SEQ ID NO: 12181 - DNA, 27 bp, Artificial Sequence
  Synthetic
tttctttauaaggcacagttgguggat

SEQ ID NO: 12182 - DNA, 23 bp, Artificial Sequence
  Synthetic
ggagcagauccacauccacaaaa

SEQ ID NO: 12183 - DNA, 17 bp, Artificial Sequence
  Synthetic
ctugacggcgccatguc

SEQ ID NO: 12184 - DNA, 29 bp, Artificial Sequence
  Synthetic
ccctcattcactutaacttgaacagagut

SEQ ID NO: 12185 - DNA, 27 bp, Artificial Sequence
  Synthetic
ctaactuaccgggagataatuggcaat

SEQ ID NO: 12186 - DNA, 27 bp, Artificial Sequence
  Synthetic
aautattuaccaggcacauaagagact

SEQ ID NO: 12187 - DNA, 29 bp, Artificial Sequence
  Synthetic
catttaaagcagaaugttcaauacccact

SEQ ID NO: 12188 - DNA, 24 bp, Artificial Sequence
  Synthetic
cctgaagcauatgtagcccugaat

SEQ ID NO: 12189 - DNA, 27 bp, Artificial Sequence
  Synthetic
gtgctttgaacagugaatgatcaauga

SEQ ID NO: 12190 - DNA, 22 bp, Artificial Sequence
  Synthetic
acagtgcaccugtttcctgtut

SEQ ID NO: 12191 - DNA, 27 bp, Artificial Sequence
  Synthetic
ggagtgttuctgcaaattcuaagaggt

SEQ ID NO: 12192 - DNA, 25 bp, Artificial Sequence
  Synthetic
caagggugaacaaacgtatgtugag

SEQ ID NO: 12193 - DNA, 23 bp, Artificial Sequence
  Synthetic
tgacgucagcaaataugaaggag

SEQ ID NO: 12194 - DNA, 27 bp, Artificial Sequence
  Synthetic
catagagaccagacugtgaaaacucaa

SEQ ID NO: 12195 - DNA, 26 bp, Artificial Sequence
  Synthetic
attatgcacauacaagtggaucagac

SEQ ID NO: 12196 - DNA, 28 bp, Artificial Sequence
  Synthetic
atcaaacaggaauctgatgaatcuggaa

SEQ ID NO: 12197 - DNA, 21 bp, Artificial Sequence
  Synthetic
gccaauggcagacacaucaag

SEQ ID NO: 12198 - DNA, 25 bp, Artificial Sequence
  Synthetic
tcttacaagcuccgttttaauggca

SEQ ID NO: 12199 - DNA, 25 bp, Artificial Sequence
  Synthetic
ccaccaccaaagaugacagttttuc

SEQ ID NO: 12200 - DNA, 17 bp, Artificial Sequence
  Synthetic
ggctucggcggttguct

SEQ ID NO: 12201 - DNA, 20 bp, Artificial Sequence
  Synthetic
caccttgaugcggtucagga

SEQ ID NO: 12202 - DNA, 27 bp, Artificial Sequence
  Synthetic
tgtggguggacccttattatuagaagt

SEQ ID NO: 12203 - DNA, 26 bp, Artificial Sequence
  Synthetic
tgcactaatcugcatggctaaacuaa

SEQ ID NO: 12204 - DNA, 26 bp, Artificial Sequence
  Synthetic
acacaggttugattatgctcaugaga

SEQ ID NO: 12205 - DNA, 23 bp, Artificial Sequence
  Synthetic
gggttcugacaaggagacactug

SEQ ID NO: 12206 - DNA, 25 bp, Artificial Sequence
  Synthetic
tttctcctgutcacagguaaaaggg

SEQ ID NO: 12207 - DNA, 25 bp, Artificial Sequence
  Synthetic
cggagtcactucttttacagcctua

SEQ ID NO: 12208 - DNA, 17 bp, Artificial Sequence
  Synthetic
gcggaccugtcgtccuc

SEQ ID NO: 12209 - DNA, 18 bp, Artificial Sequence
  Synthetic
ggcgtuccagtgguggat

SEQ ID NO: 12210 - DNA, 21 bp, Artificial Sequence
  Synthetic
cggcagcaugtgagaugaagt

SEQ ID NO: 12211 - DNA, 24 bp, Artificial Sequence
  Synthetic
ccccttcttuttcctgctttucag

SEQ ID NO: 12212 - DNA, 21 bp, Artificial Sequence
  Synthetic
acaugccggaaaccagcttua

SEQ ID NO: 12213 - DNA, 26 bp, Artificial Sequence
  Synthetic
gctcuttgtaacagguagaacagaga

SEQ ID NO: 12214 - DNA, 30 bp, Artificial Sequence
  Synthetic
cttgttaacttagutactttggcacatuca

SEQ ID NO: 12215 - DNA, 28 bp, Artificial Sequence
  Synthetic
ccctgaagatttguaaaggacactcauc

SEQ ID NO: 12216 - DNA, 20 bp, Artificial Sequence
  Synthetic
gctatggcuccaccctucct

SEQ ID NO: 12217 - DNA, 26 bp, Artificial Sequence
  Synthetic
tcagccaacagaagacuactugaaga

SEQ ID NO: 12218 - DNA, 20 bp, Artificial Sequence
  Synthetic
cactgugacgcccagaagua

SEQ ID NO: 12219 - DNA, 22 bp, Artificial Sequence
  Synthetic
tgcaagagcaugatcctgacug

SEQ ID NO: 12220 - DNA, 21 bp, Artificial Sequence
  Synthetic
gggaatggugaagccgaugat

SEQ ID NO: 12221 - DNA, 28 bp, Artificial Sequence
  Synthetic
acatgtcagcugaacctttataaatuca

SEQ ID NO: 12222 - DNA, 23 bp, Artificial Sequence
  Synthetic
caaccaguacagacctgacauca

SEQ ID NO: 12223 - DNA, 22 bp, Artificial Sequence
  Synthetic
agctgaatucactggctuagca

SEQ ID NO: 12224 - DNA, 30 bp, Artificial Sequence
  Synthetic
tcagaacttaataatuacatgccagcctut

SEQ ID NO: 12225 - DNA, 23 bp, Artificial Sequence
  Synthetic
cacctccacutacctacgcuaag

SEQ ID NO: 12226 - DNA, 29 bp, Artificial Sequence
  Synthetic
tgtcctutattcttttacauaggcaacga

SEQ ID NO: 12227 - DNA, 23 bp, Artificial Sequence
  Synthetic
cgttgggauaaaaggctcaucag

SEQ ID NO: 12228 - DNA, 29 bp, Artificial Sequence
  Synthetic
tgtcagaaacautccaaatggttuacaag

SEQ ID NO: 12229 - DNA, 24 bp, Artificial Sequence
  Synthetic
cacacaaguggactaccctaugag

SEQ ID NO: 12230 - DNA, 22 bp, Artificial Sequence
  Synthetic
tttcttccucccgctctcttug

SEQ ID NO: 12231 - DNA, 22 bp, Artificial Sequence
  Synthetic
agagaguccaaccagactucgt

SEQ ID NO: 12232 - DNA, 25 bp, Artificial Sequence
  Synthetic
tgctttgatuccagtttcagaucgt

SEQ ID NO: 12233 - DNA, 24 bp, Artificial Sequence
  Synthetic
tctgtcaucaccaggcaatttcut

SEQ ID NO: 12234 - DNA, 28 bp, Artificial Sequence
  Synthetic
agtctgtatggtugtaaaaagctcacut

SEQ ID NO: 12235 - DNA, 21 bp, Artificial Sequence
  Synthetic
gccatccgaucctgggattug

SEQ ID NO: 12236 - DNA, 22 bp, Artificial Sequence
  Synthetic
tgcutccacacugaccaaaagt

SEQ ID NO: 12237 - DNA, 23 bp, Artificial Sequence
  Synthetic
ggcaaatccauggacattccauc

SEQ ID NO: 12238 - DNA, 20 bp, Artificial Sequence
  Synthetic
gagcgcagagacutgcagua

SEQ ID NO: 12239 - DNA, 21 bp, Artificial Sequence
  Synthetic
gctcctggauctccttgcuca

SEQ ID NO: 12240 - DNA, 22 bp, Artificial Sequence
  Synthetic
tuctctgttaccugcagcagac

SEQ ID NO: 12241 - DNA, 27 bp, Artificial Sequence
  Synthetic
ggatcuactgaaaacaucaaacagcca

SEQ ID NO: 12242 - DNA, 22 bp, Artificial Sequence
  Synthetic
cacctctgaccuttgcactcut

SEQ ID NO: 12243 - DNA, 17 bp, Artificial Sequence
  Synthetic
ccucgggcuccagcaac

SEQ ID NO: 12244 - DNA, 26 bp, Artificial Sequence
  Synthetic
tcauggaaaaggaucaaactctuacc

SEQ ID NO: 12245 - DNA, 24 bp, Artificial Sequence
  Synthetic
tgaaagggcucatcagguacagat

SEQ ID NO: 12246 - DNA, 28 bp, Artificial Sequence
  Synthetic
ttatcutccctttaagucacaaaaggct

SEQ ID NO: 12247 - DNA, 25 bp, Artificial Sequence
  Synthetic
gcaaccttcuaactacggtccaaug

SEQ ID NO: 12248 - DNA, 23 bp, Artificial Sequence
  Synthetic
acgtagaggaaaacugaccucca

SEQ ID NO: 12249 - DNA, 28 bp, Artificial Sequence
  Synthetic
gctgaggtaguaagagaactgaaaauga

SEQ ID NO: 12250 - DNA, 28 bp, Artificial Sequence
  Synthetic
aaaattacctccucttccactccuagaa

SEQ ID NO: 12251 - DNA, 27 bp, Artificial Sequence
  Synthetic
gagtctgaatutttcattccagugcag

SEQ ID NO: 12252 - DNA, 22 bp, Artificial Sequence
  Synthetic
agggcagcgutcttcatgtuaa

SEQ ID NO: 12253 - DNA, 22 bp, Artificial Sequence
  Synthetic
tcatccatggcugaggttgaug

SEQ ID NO: 12254 - DNA, 19 bp, Artificial Sequence
  Synthetic
gtgacctgcuggcagagua

SEQ ID NO: 12255 - DNA, 25 bp, Artificial Sequence
  Synthetic
tgtgtagatcagcugaggcaattut

SEQ ID NO: 12256 - DNA, 24 bp, Artificial Sequence
  Synthetic
gtcttttgcucggtctttgtugat

SEQ ID NO: 12257 - DNA, 22 bp, Artificial Sequence
  Synthetic
cagacccuggaacuggagaaag

SEQ ID NO: 12258 - DNA, 18 bp, Artificial Sequence
  Synthetic
ccauaaggccggcuggag

SEQ ID NO: 12259 - DNA, 19 bp, Artificial Sequence
  Synthetic
cggtguaccaccaccauca

SEQ ID NO: 12260 - DNA, 23 bp, Artificial Sequence
  Synthetic
aggaacgaguccacgtagtagut

SEQ ID NO: 12261 - DNA, 23 bp, Artificial Sequence
  Synthetic
gccggcaacutattaggtgacug

SEQ ID NO: 12262 - DNA, 21 bp, Artificial Sequence
  Synthetic
cgctgaagaagaacucccgut

SEQ ID NO: 12263 - DNA, 21 bp, Artificial Sequence
  Synthetic
cagcccttcucctcagctaug

SEQ ID NO: 12264 - DNA, 23 bp, Artificial Sequence
  Synthetic
gcaggtuggaggagtaggaguat

SEQ ID NO: 12265 - DNA, 27 bp, Artificial Sequence
  Synthetic
caataatggatttugatgagcgtgguc

SEQ ID NO: 12266 - DNA, 23 bp, Artificial Sequence
  Synthetic
gttcuggaaccagattgugacct

SEQ ID NO: 12267 - DNA, 25 bp, Artificial Sequence
  Synthetic
cgtgccttauaccaaggtgcaatua

SEQ ID NO: 12268 - DNA, 18 bp, Artificial Sequence
  Synthetic
tgcgtagcccuggtggua

SEQ ID NO: 12269 - DNA, 19 bp, Artificial Sequence
  Synthetic
ccaacgccaucaagtcgug

SEQ ID NO: 12270 - DNA, 17 bp, Artificial Sequence
  Synthetic
gccgccccutccatgut

SEQ ID NO: 12271 - DNA, 17 bp, Artificial Sequence
  Synthetic
catgcggcucgggcuat

SEQ ID NO: 12272 - DNA, 20 bp, Artificial Sequence
  Synthetic
tggttugcggacacgaauct

SEQ ID NO: 12273 - DNA, 22 bp, Artificial Sequence
  Synthetic
atccaggaacugcaauccagac

SEQ ID NO: 12274 - DNA, 21 bp, Artificial Sequence
  Synthetic
gagtaaggcutccactgcugt

SEQ ID NO: 12275 - DNA, 28 bp, Artificial Sequence
  Synthetic
caggttccttaccutccattattgttuc

SEQ ID NO: 12276 - DNA, 24 bp, Artificial Sequence
  Synthetic
ccatttaccgaugtggttgtccuc

SEQ ID NO: 12277 - DNA, 21 bp, Artificial Sequence
  Synthetic
gatguagcaccaugacaggca

SEQ ID NO: 12278 - DNA, 21 bp, Artificial Sequence
  Synthetic
ctgagtggccucctgtatugt

SEQ ID NO: 12279 - DNA, 19 bp, Artificial Sequence
  Synthetic
ccgaggcaucaagcatucg

SEQ ID NO: 12280 - DNA, 19 bp, Artificial Sequence
  Synthetic
cggcacaucaagctgcaut

SEQ ID NO: 12281 - DNA, 19 bp, Artificial Sequence
  Synthetic
cgggcagaguggaggaauc

SEQ ID NO: 12282 - DNA, 20 bp, Artificial Sequence
  Synthetic
gagatcuctcgtgcuggaca

SEQ ID NO: 12283 - DNA, 24 bp, Artificial Sequence
  Synthetic
cctttctuccaccctcaactcaut

SEQ ID NO: 12284 - DNA, 18 bp, Artificial Sequence
  Synthetic
cguggagaacctgcugct

SEQ ID NO: 12285 - DNA, 22 bp, Artificial Sequence
  Synthetic
ggttggucaggtagaugagacc

SEQ ID NO: 12286 - DNA, 19 bp, Artificial Sequence
  Synthetic
gtgcaacaugtgcggcuac

SEQ ID NO: 12287 - DNA, 21 bp, Artificial Sequence
  Synthetic
ggcagtccutgtgctttucct

SEQ ID NO: 12288 - DNA, 25 bp, Artificial Sequence
  Synthetic
gggttccttgutctgttccattcua

SEQ ID NO: 12289 - DNA, 22 bp, Artificial Sequence
  Synthetic
caaaaacugggagagctucgga

SEQ ID NO: 12290 - DNA, 24 bp, Artificial Sequence
  Synthetic
tgtctcttcgauctgtgattugcc

SEQ ID NO: 12291 - DNA, 25 bp, Artificial Sequence
  Synthetic
tgttgctcuaggtgttgtaugaacc

SEQ ID NO: 12292 - DNA, 20 bp, Artificial Sequence
  Synthetic
gtcaccgaugcctcctctuc

SEQ ID NO: 12293 - DNA, 22 bp, Artificial Sequence
  Synthetic
tcctcgacutgtttgttuggca

SEQ ID NO: 12294 - DNA, 24 bp, Artificial Sequence
  Synthetic
gaactagcucagaacaucaccgat

SEQ ID NO: 12295 - DNA, 23 bp, Artificial Sequence
  Synthetic
ggaagagggaagccutgagaaug

SEQ ID NO: 12296 - DNA, 23 bp, Artificial Sequence
  Synthetic
cccctgagcuaagtctcacauga

SEQ ID NO: 12297 - DNA, 21 bp, Artificial Sequence
  Synthetic
ggtgauacaagacgcccugaa

SEQ ID NO: 12298 - DNA, 24 bp, Artificial Sequence
  Synthetic
gcatuccaacctgagugacagaag

SEQ ID NO: 12299 - DNA, 24 bp, Artificial Sequence
  Synthetic
ctttcagacucaagaacagcugga

SEQ ID NO: 12300 - DNA, 18 bp, Artificial Sequence
  Synthetic
tgagtccagcugggcuct

SEQ ID NO: 12301 - DNA, 21 bp, Artificial Sequence
  Synthetic
gccgacgacugtgaattccug

SEQ ID NO: 12302 - DNA, 23 bp, Artificial Sequence
  Synthetic
tggttagagucaatgggcttugg

SEQ ID NO: 12303 - DNA, 23 bp, Artificial Sequence
  Synthetic
ccagtccuagagaaggaugacct

SEQ ID NO: 12304 - DNA, 21 bp, Artificial Sequence
  Synthetic
gcacugagaaggactgcgtut

SEQ ID NO: 12305 - DNA, 23 bp, Artificial Sequence
  Synthetic
ctgcagccaccuttatgacuaca

SEQ ID NO: 12306 - DNA, 27 bp, Artificial Sequence
  Synthetic
cttacaagttgtucacgtcactttcuc

SEQ ID NO: 12307 - DNA, 21 bp, Artificial Sequence
  Synthetic
ctgagagagggcucttcaugt

SEQ ID NO: 12308 - DNA, 21 bp, Artificial Sequence
  Synthetic
cagucacttuccccacaagga

SEQ ID NO: 12309 - DNA, 21 bp, Artificial Sequence
  Synthetic
cctctgtcuagcaacgcagug

SEQ ID NO: 12310 - DNA, 18 bp, Artificial Sequence
  Synthetic
cacctgaguccgcucgaa

SEQ ID NO: 12311 - DNA, 19 bp, Artificial Sequence
  Synthetic
cggcgacauggatcggaug

SEQ ID NO: 12312 - DNA, 25 bp, Artificial Sequence
  Synthetic
cattttccttggugccactaacuac

SEQ ID NO: 12313 - DNA, 27 bp, Artificial Sequence
  Synthetic
ttgatgttatctutccaaacaccucct

SEQ ID NO: 12314 - DNA, 26 bp, Artificial Sequence
  Synthetic
tcgatatcagugagaaggcuaaagga

SEQ ID NO: 12315 - DNA, 21 bp, Artificial Sequence
  Synthetic
cccttuggaccgucaagaagt

SEQ ID NO: 12316 - DNA, 28 bp, Artificial Sequence
  Synthetic
tgtgtgcatuccctatcaaatatgucaa

SEQ ID NO: 12317 - DNA, 32 bp, Artificial Sequence
  Synthetic
ttctaatttataccucacagtttataaguggg

SEQ ID NO: 12318 - DNA, 25 bp, Artificial Sequence
  Synthetic
caacccctcaugtgaattttcucct

SEQ ID NO: 12319 - DNA, 23 bp, Artificial Sequence
  Synthetic
gcattugggaaaaaccacgtcua

SEQ ID NO: 12320 - DNA, 27 bp, Artificial Sequence
  Synthetic
gggactttggauttcggaggaataaua

SEQ ID NO: 12321 - DNA, 26 bp, Artificial Sequence
  Synthetic
aacaaaaccuatttuccaagcacacc

SEQ ID NO: 12322 - DNA, 27 bp, Artificial Sequence
  Synthetic
gttttgttttuatctccccuccaggat

SEQ ID NO: 12323 - DNA, 30 bp, Artificial Sequence
  Synthetic
acaacaccttttuaaagtacatgttttucc

SEQ ID NO: 12324 - DNA, 27 bp, Artificial Sequence
  Synthetic
ttccaaagaacagutacccatgaacut

SEQ ID NO: 12325 - DNA, 22 bp, Artificial Sequence
  Synthetic
tgttattgtgcucccaccacug

SEQ ID NO: 12326 - DNA, 25 bp, Artificial Sequence
  Synthetic
agtgatgatcucaatgggcaaugaa

SEQ ID NO: 12327 - DNA, 31 bp, Artificial Sequence
  Synthetic
tgtataagatacaauggccaaguacaacaat

SEQ ID NO: 12328 - DNA, 26 bp, Artificial Sequence
  Synthetic
ttcaaccagaucagaattucacagga

SEQ ID NO: 12329 - DNA, 32 bp, Artificial Sequence
  Synthetic
tgtaatgactgtgtucttaaggtaacttcuaa

SEQ ID NO: 12330 - DNA, 21 bp, Artificial Sequence
  Synthetic
acagacatgucccccatccua

SEQ ID NO: 12331 - DNA, 22 bp, Artificial Sequence
  Synthetic
ccaatcacuacatgctgcacug

SEQ ID NO: 12332 - DNA, 21 bp, Artificial Sequence
  Synthetic
catcccaatgucctctcgcuc

SEQ ID NO: 12333 - DNA, 21 bp, Artificial Sequence
  Synthetic
gatggcuggcttacagcuagt

SEQ ID NO: 12334 - DNA, 29 bp, Artificial Sequence
  Synthetic
tcctttcatatatguatggtcacatcuct

SEQ ID NO: 12335 - DNA, 25 bp, Artificial Sequence
  Synthetic
tctccctugcaacaagtaaacagut

SEQ ID NO: 12336 - DNA, 25 bp, Artificial Sequence
  Synthetic
cactatgtccaugtgaacgctacut

SEQ ID NO: 12337 - DNA, 27 bp, Artificial Sequence
  Synthetic
gactgttgctutgacatagtacuagca

SEQ ID NO: 12338 - DNA, 18 bp, Artificial Sequence
  Synthetic
aggcuggaggtctuccgt

SEQ ID NO: 12339 - DNA, 22 bp, Artificial Sequence
  Synthetic
ttttcagacacacaugcucgga

SEQ ID NO: 12340 - DNA, 18 bp, Artificial Sequence
  Synthetic
caccgacggcauctccuc

SEQ ID NO: 12341 - DNA, 19 bp, Artificial Sequence
  Synthetic
ggtgcaguggagtccugat

SEQ ID NO: 12342 - DNA, 18 bp, Artificial Sequence
  Synthetic
cgtgccucctcgauggac

SEQ ID NO: 12343 - DNA, 25 bp, Artificial Sequence
  Synthetic
gccacaaaaacucatgtgtgatuct

SEQ ID NO: 12344 - DNA, 23 bp, Artificial Sequence
  Synthetic
ctcttccugggctctaugaacac

SEQ ID NO: 12345 - DNA, 19 bp, Artificial Sequence
  Synthetic
gttcccggugguagacgac

SEQ ID NO: 12346 - DNA, 29 bp, Artificial Sequence
  Synthetic
tggactctcauagggactacttttaaugg

SEQ ID NO: 12347 - DNA, 23 bp, Artificial Sequence
  Synthetic
agtttctcccucagatgcugact

SEQ ID NO: 12348 - DNA, 23 bp, Artificial Sequence
  Synthetic
tttattgtgcugacccagaugct

SEQ ID NO: 12349 - DNA, 21 bp, Artificial Sequence
  Synthetic
tggaatugccagcacagtcut

SEQ ID NO: 12350 - DNA, 23 bp, Artificial Sequence
  Synthetic
gctctctggagguccattttgut

SEQ ID NO: 12351 - DNA, 25 bp, Artificial Sequence
  Synthetic
gcttctgcaaugtgaatggtttcug

SEQ ID NO: 12352 - DNA, 23 bp, Artificial Sequence
  Synthetic
gttcugacccaagaggactucag

SEQ ID NO: 12353 - DNA, 30 bp, Artificial Sequence
  Synthetic
ttagagctaaataguaaagacgatgtgtug

SEQ ID NO: 12354 - DNA, 23 bp, Artificial Sequence
  Synthetic
cctggtggugttttctcactuca

SEQ ID NO: 12355 - DNA, 28 bp, Artificial Sequence
  Synthetic
ccutaatactucagaaguacaaacacct

SEQ ID NO: 12356 - DNA, 24 bp, Artificial Sequence
  Synthetic
actgcacacaagcucctuagaaag

SEQ ID NO: 12357 - DNA, 21 bp, Artificial Sequence
  Synthetic
acacaccaacacuggctacug

SEQ ID NO: 12358 - DNA, 22 bp, Artificial Sequence
  Synthetic
tgggaauggcttuggagaaaga

SEQ ID NO: 12359 - DNA, 23 bp, Artificial Sequence
  Synthetic
cattttgacugccgggatucaag

SEQ ID NO: 12360 - DNA, 25 bp, Artificial Sequence
  Synthetic
aaactcaagauttgtggaacuggga

SEQ ID NO: 12361 - DNA, 21 bp, Artificial Sequence
  Synthetic
ctctgaugccgagtgactugt

SEQ ID NO: 12362 - DNA, 22 bp, Artificial Sequence
  Synthetic
gaccgagaaaaaugcagtgguc

SEQ ID NO: 12363 - DNA, 21 bp, Artificial Sequence
  Synthetic
gcatttcugccgaggtggaua

SEQ ID NO: 12364 - DNA, 24 bp, Artificial Sequence
  Synthetic
gtguatggtctgaaugaggacacc

SEQ ID NO: 12365 - DNA, 21 bp, Artificial Sequence
  Synthetic
caactccucttgcattugcgt

SEQ ID NO: 12366 - DNA, 23 bp, Artificial Sequence
  Synthetic
ctctgtuagggaagccacaauct

SEQ ID NO: 12367 - DNA, 20 bp, Artificial Sequence
  Synthetic
ctttcggucagctttucgca

SEQ ID NO: 12368 - DNA, 27 bp, Artificial Sequence
  Synthetic
tgtacttttggtcugttttccttggut

SEQ ID NO: 12369 - DNA, 22 bp, Artificial Sequence
  Synthetic
ctcgtgcugaagaaaagcacug

SEQ ID NO: 12370 - DNA, 19 bp, Artificial Sequence
  Synthetic
gccgcccutctgtttcucc

SEQ ID NO: 12371 - DNA, 17 bp, Artificial Sequence
  Synthetic
gguggccggtttcucac

SEQ ID NO: 12372 - DNA, 22 bp, Artificial Sequence
  Synthetic
gggcatctuaggcaggatcaug

SEQ ID NO: 12373 - DNA, 17 bp, Artificial Sequence
  Synthetic
cccggcgcuctccuact

SEQ ID NO: 12374 - DNA, 18 bp, Artificial Sequence
  Synthetic
gggcgaugggttgauggg

SEQ ID NO: 12375 - DNA, 17 bp, Artificial Sequence
  Synthetic
cacutgcagcugcggat

SEQ ID NO: 12376 - DNA, 18 bp, Artificial Sequence
  Synthetic
tgagggccuctgcactug

SEQ ID NO: 12377 - DNA, 19 bp, Artificial Sequence
  Synthetic
gggtgacuttctcccucgg

SEQ ID NO: 12378 - DNA, 18 bp, Artificial Sequence
  Synthetic
gaatcgcucccugcagct

SEQ ID NO: 12379 - DNA, 18 bp, Artificial Sequence
  Synthetic
agggtcccugggagaugt

SEQ ID NO: 12380 - DNA, 17 bp, Artificial Sequence
  Synthetic
cucacgagccagcucca

SEQ ID NO: 12381 - DNA, 20 bp, Artificial Sequence
  Synthetic
guaggaggcagaggtcucca

SEQ ID NO: 12382 - DNA, 24 bp, Artificial Sequence
  Synthetic
ggactacucccactgtctcuacac

SEQ ID NO: 12383 - DNA, 21 bp, Artificial Sequence
  Synthetic
cgttaggtuggcttctcccut

SEQ ID NO: 12384 - DNA, 19 bp, Artificial Sequence
  Synthetic
acauggccagcaaccugat

SEQ ID NO: 12385 - DNA, 17 bp, Artificial Sequence
  Synthetic
ccacccccuctgcugac

SEQ ID NO: 12386 - DNA, 17 bp, Artificial Sequence
  Synthetic
ctggccuccauccagct

SEQ ID NO: 12387 - DNA, 19 bp, Artificial Sequence
  Synthetic
ttgctguggctguggaaga

SEQ ID NO: 12388 - DNA, 18 bp, Artificial Sequence
  Synthetic
cuccagccagcccaaugt

SEQ ID NO: 12389 - DNA, 21 bp, Artificial Sequence
  Synthetic
aguacacccauccccatttuc

SEQ ID NO: 12390 - DNA, 21 bp, Artificial Sequence
  Synthetic
catagccaugacctctgcugt

SEQ ID NO: 12391 - DNA, 22 bp, Artificial Sequence
  Synthetic
gcatcaccccacuctatgccua

SEQ ID NO: 12392 - DNA, 22 bp, Artificial Sequence
  Synthetic
cctcatcacugcttctgtguct

SEQ ID NO: 12393 - DNA, 18 bp, Artificial Sequence
  Synthetic
gggutctgugccagagga

SEQ ID NO: 12394 - DNA, 17 bp, Artificial Sequence
  Synthetic
gctcuggcagtguccca

SEQ ID NO: 12395 - DNA, 18 bp, Artificial Sequence
  Synthetic
ccacgaggcuctcacguc

SEQ ID NO: 12396 - DNA, 20 bp, Artificial Sequence
  Synthetic
ctgcaugaagaccggacuct

SEQ ID NO: 12397 - DNA, 21 bp, Artificial Sequence
  Synthetic
gctgacuacggagacacctug

SEQ ID NO: 12398 - DNA, 17 bp, Artificial Sequence
  Synthetic
gagctcuggctcuggca

SEQ ID NO: 12399 - DNA, 21 bp, Artificial Sequence
  Synthetic
agacguccctgacctuacagt

SEQ ID NO: 12400 - DNA, 22 bp, Artificial Sequence
  Synthetic
ccactcctugcttctcagauga

SEQ ID NO: 12401 - DNA, 23 bp, Artificial Sequence
  Synthetic
ctggugacagaggacaatgugat

SEQ ID NO: 12402 - DNA, 22 bp, Artificial Sequence
  Synthetic
gataccccagcucagatctuct

SEQ ID NO: 12403 - DNA, 25 bp, Artificial Sequence
  Synthetic
tgtcagaccugatctcagaaaugga

SEQ ID NO: 12404 - DNA, 22 bp, Artificial Sequence
  Synthetic
gggaagcucatacucagagacc

SEQ ID NO: 12405 - DNA, 20 bp, Artificial Sequence
  Synthetic
ctctagggugaccccacuct

SEQ ID NO: 12406 - DNA, 27 bp, Artificial Sequence
  Synthetic
cgtccucaaaggagacatttctuaagt

SEQ ID NO: 12407 - DNA, 23 bp, Artificial Sequence
  Synthetic
tcctctagucccccttctttcug

SEQ ID NO: 12408 - DNA, 23 bp, Artificial Sequence
  Synthetic
acgaagacuggtgccatgatuac

SEQ ID NO: 12409 - DNA, 21 bp, Artificial Sequence
  Synthetic
gggtagcaacguggagtucat

SEQ ID NO: 12410 - DNA, 24 bp, Artificial Sequence
  Synthetic
tcccctgtucccattactcuaact

SEQ ID NO: 12411 - DNA, 23 bp, Artificial Sequence
  Synthetic
gaagttcaaaugcccttccagug

SEQ ID NO: 12412 - DNA, 22 bp, Artificial Sequence
  Synthetic
gctggtuacgcaagcauagagg

SEQ ID NO: 12413 - DNA, 21 bp, Artificial Sequence
  Synthetic
ggacgatgugcagagcaucaa

SEQ ID NO: 12414 - DNA, 28 bp, Artificial Sequence
  Synthetic
aaaaaggtccattuttctctggtttguc

SEQ ID NO: 12415 - DNA, 17 bp, Artificial Sequence
  Synthetic
acaggccccucccauca

SEQ ID NO: 12416 - DNA, 18 bp, Artificial Sequence
  Synthetic
catggcaacugccgaugg

SEQ ID NO: 12417 - DNA, 22 bp, Artificial Sequence
  Synthetic
ccaccaacautggcattccuca

SEQ ID NO: 12418 - DNA, 22 bp, Artificial Sequence
  Synthetic
ggctgatggutgagagtagcug

SEQ ID NO: 12419 - DNA, 17 bp, Artificial Sequence
  Synthetic
ccccgcugtcacagugt

SEQ ID NO: 12420 - DNA, 23 bp, Artificial Sequence
  Synthetic
gatacggaaggcacauccaucat

SEQ ID NO: 12421 - DNA, 20 bp, Artificial Sequence
  Synthetic
cagtcaguccgttcggucag

SEQ ID NO: 12422 - DNA, 20 bp, Artificial Sequence
  Synthetic
tcttcguggtcgtccucaga

SEQ ID NO: 12423 - DNA, 23 bp, Artificial Sequence
  Synthetic
agcctggtgutcaagagtcttut

SEQ ID NO: 12424 - DNA, 20 bp, Artificial Sequence
  Synthetic
cacctcaggcuccttggtut

SEQ ID NO: 12425 - DNA, 17 bp, Artificial Sequence
  Synthetic
augccccuacccgagga

SEQ ID NO: 12426 - DNA, 26 bp, Artificial Sequence
  Synthetic
gatgtatctggcucaagaggagaaut

SEQ ID NO: 12427 - DNA, 29 bp, Artificial Sequence
  Synthetic
tguatatgctagtctuggaagaaggaact

SEQ ID NO: 12428 - DNA, 27 bp, Artificial Sequence
  Synthetic
cagaacugtaagcuaaaacgagaaggt

SEQ ID NO: 12429 - DNA, 18 bp, Artificial Sequence
  Synthetic
aagcccucggtcaagcuc

SEQ ID NO: 12430 - DNA, 27 bp, Artificial Sequence
  Synthetic
cacattctccauattgttccugaggag

SEQ ID NO: 12431 - DNA, 21 bp, Artificial Sequence
  Synthetic
caaauagccagccatcucgga

SEQ ID NO: 12432 - DNA, 24 bp, Artificial Sequence
  Synthetic
cacagagtuggacactatgacugg

SEQ ID NO: 12433 - DNA, 27 bp, Artificial Sequence
  Synthetic
aacttttctctggutccagatttguga

SEQ ID NO: 12434 - DNA, 25 bp, Artificial Sequence
  Synthetic
caauatgccatguaggaaagacgac

SEQ ID NO: 12435 - DNA, 27 bp, Artificial Sequence
  Synthetic
gggattgttatttuggtgaatccagut

SEQ ID NO: 12436 - DNA, 27 bp, Artificial Sequence
  Synthetic
acaatagatgcaauataggtggcccua

SEQ ID NO: 12437 - DNA, 25 bp, Artificial Sequence
  Synthetic
catgaagaaaugtggttggtuccat

SEQ ID NO: 12438 - DNA, 24 bp, Artificial Sequence
  Synthetic
actucccaaactcaaugacagagg

SEQ ID NO: 12439 - DNA, 24 bp, Artificial Sequence
  Synthetic
cuttggagtccugagaagacaaca

SEQ ID NO: 12440 - DNA, 18 bp, Artificial Sequence
  Synthetic
agcttuccgcccaucagg

SEQ ID NO: 12441 - DNA, 24 bp, Artificial Sequence
  Synthetic
agccaatcagcaucatcatcauca

SEQ ID NO: 12442 - DNA, 26 bp, Artificial Sequence
  Synthetic
aaatgtgcttucactaacatccucct

SEQ ID NO: 12443 - DNA, 24 bp, Artificial Sequence
  Synthetic
tgtgattcatgugaccgaggttut

SEQ ID NO: 12444 - DNA, 30 bp, Artificial Sequence
  Synthetic
ctcataaggaucaaggatacaaacucaagt

SEQ ID NO: 12445 - DNA, 25 bp, Artificial Sequence
  Synthetic
aaaagaagucagaggaacucatcuc

SEQ ID NO: 12446 - DNA, 21 bp, Artificial Sequence
  Synthetic
gcagcacugcctccgaauaat

SEQ ID NO: 12447 - DNA, 30 bp, Artificial Sequence
  Synthetic
cggaaccauggaaaattggataauaaacaa

SEQ ID NO: 12448 - DNA, 20 bp, Artificial Sequence
  Synthetic
cgggttugcgagtttuacca

SEQ ID NO: 12449 - DNA, 24 bp, Artificial Sequence
  Synthetic
gaaggactuaggccagaaaacuca

SEQ ID NO: 12450 - DNA, 24 bp, Artificial Sequence
  Synthetic
accgtggaagauttaacgaauggg

SEQ ID NO: 12451 - DNA, 28 bp, Artificial Sequence
  Synthetic
ctctacacacguttcatgtaagtactut

SEQ ID NO: 12452 - DNA, 26 bp, Artificial Sequence
  Synthetic
ttggcaatgaguttctggtaauaaca

SEQ ID NO: 12453 - DNA, 26 bp, Artificial Sequence
  Synthetic
gttcacaucaggaagggtaaagucat

SEQ ID NO: 12454 - DNA, 28 bp, Artificial Sequence
  Synthetic
agtggctggguattcattttcttatgut

SEQ ID NO: 12455 - DNA, 24 bp, Artificial Sequence
  Synthetic
acauaggcatcattuccagcagag

SEQ ID NO: 12456 - DNA, 23 bp, Artificial Sequence
  Synthetic
ccuaacaguccagcaggaagaag

SEQ ID NO: 12457 - DNA, 30 bp, Artificial Sequence
  Synthetic
tgcctggccaauatactcttaacttuaaat

SEQ ID NO: 12458 - DNA, 28 bp, Artificial Sequence
  Synthetic
aaaaagaagcuagaagaccttggtgaut

SEQ ID NO: 12459 - DNA, 28 bp, Artificial Sequence
  Synthetic
tgtctcttgtagguttcaagttgactuc

SEQ ID NO: 12460 - DNA, 24 bp, Artificial Sequence
  Synthetic
ttaaaacgugaagctaacccucca

SEQ ID NO: 12461 - DNA, 27 bp, Artificial Sequence
  Synthetic
aaatcatcuggtttgtacucgcaaaac

SEQ ID NO: 12462 - DNA, 23 bp, Artificial Sequence
  Synthetic
aggcatacguaactcaccactug

SEQ ID NO: 12463 - DNA, 29 bp, Artificial Sequence
  Synthetic
atggaccatcgutggtacatatuaaaact

SEQ ID NO: 12464 - DNA, 30 bp, Artificial Sequence
  Synthetic
gatacactguaacaaattctgcatgaugaa

SEQ ID NO: 12465 - DNA, 23 bp, Artificial Sequence
  Synthetic
tgtgctugccagtctatctucag

SEQ ID NO: 12466 - DNA, 23 bp, Artificial Sequence
  Synthetic
gcaccaagaccccuttaacucaa

SEQ ID NO: 12467 - DNA, 22 bp, Artificial Sequence
  Synthetic
cctcgucgcagtagaaauacgg

SEQ ID NO: 12468 - DNA, 22 bp, Artificial Sequence
  Synthetic
tgaaccagaguttcatcugcga

SEQ ID NO: 12469 - DNA, 17 bp, Artificial Sequence
  Synthetic
ggctgccgcugtcttug

SEQ ID NO: 12470 - DNA, 29 bp, Artificial Sequence
  Synthetic
accttgctaaaggagugatttctattucc

SEQ ID NO: 12471 - DNA, 19 bp, Artificial Sequence
  Synthetic
ggctgugaggaggttugct

SEQ ID NO: 12472 - DNA, 18 bp, Artificial Sequence
  Synthetic
gccctgcgugaccagauc

SEQ ID NO: 12473 - DNA, 24 bp, Artificial Sequence
  Synthetic
gtttcaactgutctcgtcgttucc

SEQ ID NO: 12474 - DNA, 26 bp, Artificial Sequence
  Synthetic
ggagggaacauccacctcttctauat

SEQ ID NO: 12475 - DNA, 25 bp, Artificial Sequence
  Synthetic
gaaaggtcagauaatctgccucaga

SEQ ID NO: 12476 - DNA, 31 bp, Artificial Sequence
  Synthetic
aatacctttcagtaugctgtaggtgactaua

SEQ ID NO: 12477 - DNA, 23 bp, Artificial Sequence
  Synthetic
gcttcagcaccucgagatatucc

SEQ ID NO: 12478 - DNA, 26 bp, Artificial Sequence
  Synthetic
tccctagcuacaagacattctuacca

SEQ ID NO: 12479 - DNA, 22 bp, Artificial Sequence
  Synthetic
gtggctttgcautggctgaaut

SEQ ID NO: 12480 - DNA, 26 bp, Artificial Sequence
  Synthetic
aaatggctctguaaattctacccgut

SEQ ID NO: 12481 - DNA, 24 bp, Artificial Sequence
  Synthetic
tcatttgaacccucttggttugct

SEQ ID NO: 12482 - DNA, 30 bp, Artificial Sequence
  Synthetic
tgacagttttagauttgacttttgattgut

SEQ ID NO: 12483 - DNA, 24 bp, Artificial Sequence
  Synthetic
actgcatcgaaguacatacagucc

SEQ ID NO: 12484 - DNA, 29 bp, Artificial Sequence
  Synthetic
gacaaagaagaacutcagcagtctuaaag

SEQ ID NO: 12485 - DNA, 28 bp, Artificial Sequence
  Synthetic
ccacataaacaauccatgaccagtaaut

SEQ ID NO: 12486 - DNA, 30 bp, Artificial Sequence
  Synthetic
tttatggacaacagucaaacaacaattcut

SEQ ID NO: 12487 - DNA, 30 bp, Artificial Sequence
  Synthetic
aggcattagaaagccugtagttttactuac

SEQ ID NO: 12488 - DNA, 29 bp, Artificial Sequence
  Synthetic
tgtgccaaaaauattctgcttaucagaga

SEQ ID NO: 12489 - DNA, 21 bp, Artificial Sequence
  Synthetic
ccuttacaccacugcccaagt

SEQ ID NO: 12490 - DNA, 31 bp, Artificial Sequence
  Synthetic
agtgggcagaatuagcaaaccttataaauaa

SEQ ID NO: 12491 - DNA, 30 bp, Artificial Sequence
  Synthetic
agatagaaagcuggaaaatcaataagauca

SEQ ID NO: 12492 - DNA, 24 bp, Artificial Sequence
  Synthetic
guatgaccctcuacaggacaacac

SEQ ID NO: 12493 - DNA, 26 bp, Artificial Sequence
  Synthetic
acaatgttgtcaugctgtagggatut

SEQ ID NO: 12494 - DNA, 33 bp, Artificial Sequence
  Synthetic
agataataaagggaauatatagggtuaagacca

SEQ ID NO: 12495 - DNA, 25 bp, Artificial Sequence
  Synthetic
actctgttctcgutctccaccaaua

SEQ ID NO: 12496 - DNA, 26 bp, Artificial Sequence
  Synthetic
aatcacugacagagagcaagtttuct

SEQ ID NO: 12497 - DNA, 30 bp, Artificial Sequence
  Synthetic
aactgaaagtaaauaaaaagcacacugacc

SEQ ID NO: 12498 - DNA, 27 bp, Artificial Sequence
  Synthetic
tcaaataagggauaacatggctggaug

SEQ ID NO: 12499 - DNA, 25 bp, Artificial Sequence
  Synthetic
tctttgctggcuagcatcatgatut

SEQ ID NO: 12500 - DNA, 22 bp, Artificial Sequence
  Synthetic
ggaaggcutgtcagtgtuggag

SEQ ID NO: 12501 - DNA, 23 bp, Artificial Sequence
  Synthetic
cacagcgttcuctttgatcccua

SEQ ID NO: 12502 - DNA, 25 bp, Artificial Sequence
  Synthetic
cagagtcatugtcgttatccuccac

SEQ ID NO: 12503 - DNA, 23 bp, Artificial Sequence
  Synthetic
tggtaagcauccccctgtttcua

SEQ ID NO: 12504 - DNA, 23 bp, Artificial Sequence
  Synthetic
ggtggtgcgcuagaaaaacttut

SEQ ID NO: 12505 - DNA, 26 bp, Artificial Sequence
  Synthetic
catcaccaguggacaagauaagaagg

SEQ ID NO: 12506 - DNA, 26 bp, Artificial Sequence
  Synthetic
tgaggcttugaaaaactggtacuact

SEQ ID NO: 12507 - DNA, 27 bp, Artificial Sequence
  Synthetic
accctaauaggagtattcauaccagca

SEQ ID NO: 12508 - DNA, 27 bp, Artificial Sequence
  Synthetic
ctagtgacagaagugcttatgagucaa

SEQ ID NO: 12509 - DNA, 27 bp, Artificial Sequence
  Synthetic
caccttacaaaguagaagaatcugggt

SEQ ID NO: 12510 - DNA, 29 bp, Artificial Sequence
  Synthetic
gagggcttttatuattatttttgcgcgua

SEQ ID NO: 12511 - DNA, 25 bp, Artificial Sequence
  Synthetic
ctctcattcauagcagcctctucat

SEQ ID NO: 12512 - DNA, 24 bp, Artificial Sequence
  Synthetic
tttcagtgtucaccacccacaaua

SEQ ID NO: 12513 - DNA, 21 bp, Artificial Sequence
  Synthetic
ggctagaucggagggaugagg

SEQ ID NO: 12514 - DNA, 21 bp, Artificial Sequence
  Synthetic
ggtgggcugggacacatuaaa

SEQ ID NO: 12515 - DNA, 23 bp, Artificial Sequence
  Synthetic
ccctgttcugtgtcctactucag

SEQ ID NO: 12516 - DNA, 20 bp, Artificial Sequence
  Synthetic
ctgcctggaucagtgcuacc

SEQ ID NO: 12517 - DNA, 21 bp, Artificial Sequence
  Synthetic
aggactcugcatgguaccaga

SEQ ID NO: 12518 - DNA, 21 bp, Artificial Sequence
  Synthetic
ccacatctucacctggcagut

SEQ ID NO: 12519 - DNA, 22 bp, Artificial Sequence
  Synthetic
agcactgtugtacttggtugca

SEQ ID NO: 12520 - DNA, 22 bp, Artificial Sequence
  Synthetic
cccauggaactgaaugggacaa

SEQ ID NO: 12521 - DNA, 21 bp, Artificial Sequence
  Synthetic
gcccagggautgaaggatguc

SEQ ID NO: 12522 - DNA, 18 bp, Artificial Sequence
  Synthetic
agagucccacagcuccct

SEQ ID NO: 12523 - DNA, 22 bp, Artificial Sequence
  Synthetic
ggagatggaggaugaggtgcua

SEQ ID NO: 12524 - DNA, 20 bp, Artificial Sequence
  Synthetic
atcctgagccaacugctguc

SEQ ID NO: 12525 - DNA, 24 bp, Artificial Sequence
  Synthetic
agaaatgacuggagaatgcauccc

SEQ ID NO: 12526 - DNA, 17 bp, Artificial Sequence
  Synthetic
agggcgggugtcuagga

SEQ ID NO: 12527 - DNA, 29 bp, Artificial Sequence
  Synthetic
tgaacccagacagugacaaaattatcuac

SEQ ID NO: 12528 - DNA, 23 bp, Artificial Sequence
  Synthetic
ttccccacacccuactttctauc

SEQ ID NO: 12529 - DNA, 30 bp, Artificial Sequence
  Synthetic
gctttgaaaatgucacctctatcatgttuc

SEQ ID NO: 12530 - DNA, 33 bp, Artificial Sequence
  Synthetic
aaagaagttatgauaatcataaaaccuccacat

SEQ ID NO: 12531 - DNA, 28 bp, Artificial Sequence
  Synthetic
aggaatgctatgauagacgacgagaaua

SEQ ID NO: 12532 - DNA, 26 bp, Artificial Sequence
  Synthetic
gaagccccutttatcttcaucagagt

SEQ ID NO: 12533 - DNA, 28 bp, Artificial Sequence
  Synthetic
caaggcatgguatttggtttagttauct

SEQ ID NO: 12534 - DNA, 28 bp, Artificial Sequence
  Synthetic
cagtttttctgauctagggctttcaaug

SEQ ID NO: 12535 - DNA, 26 bp, Artificial Sequence
  Synthetic
acaaaggacaaauctgtcuggaaagt

SEQ ID NO: 12536 - DNA, 22 bp, Artificial Sequence
  Synthetic
atcaguaattgctcugccacca

SEQ ID NO: 12537 - DNA, 23 bp, Artificial Sequence
  Synthetic
cgttggcaaacgutaaagtugct

SEQ ID NO: 12538 - DNA, 21 bp, Artificial Sequence
  Synthetic
agcttcuacaaagcacugcgt

SEQ ID NO: 12539 - DNA, 26 bp, Artificial Sequence
  Synthetic
ctactttucccttatacagugcaggt

SEQ ID NO: 12540 - DNA, 21 bp, Artificial Sequence
  Synthetic
ccagaggcagacuacagcuga

SEQ ID NO: 12541 - DNA, 28 bp, Artificial Sequence
  Synthetic
gtctcacaaatuggattagtgatugcat

SEQ ID NO: 12542 - DNA, 27 bp, Artificial Sequence
  Synthetic
catttactcuttttgctgauggcacat

SEQ ID NO: 12543 - DNA, 29 bp, Artificial Sequence
  Synthetic
cactcagatttgauaaagaagttgctcut

SEQ ID NO: 12544 - DNA, 21 bp, Artificial Sequence
  Synthetic
cgtgaagacaggugtctugct

SEQ ID NO: 12545 - DNA, 23 bp, Artificial Sequence
  Synthetic
agggacaucaccttttcgcttut

SEQ ID NO: 12546 - DNA, 24 bp, Artificial Sequence
  Synthetic
caccttuggcatttttguccaaac

SEQ ID NO: 12547 - DNA, 26 bp, Artificial Sequence
  Synthetic
ttutcaggtcagaaugaaggaacgat

SEQ ID NO: 12548 - DNA, 20 bp, Artificial Sequence
  Synthetic
ggcgctgugcagatactgua

SEQ ID NO: 12549 - DNA, 25 bp, Artificial Sequence
  Synthetic
gagtctctcautgcttttgtcucca

SEQ ID NO: 12550 - DNA, 25 bp, Artificial Sequence
  Synthetic
ctgcagctttutccttctttgtuca

SEQ ID NO: 12551 - DNA, 23 bp, Artificial Sequence
  Synthetic
ggctttgcttucagccttcttuc

SEQ ID NO: 12552 - DNA, 22 bp, Artificial Sequence
  Synthetic
actcattucacgccaaccauca

SEQ ID NO: 12553 - DNA, 27 bp, Artificial Sequence
  Synthetic
tgaattugaggattacacucagccaat

SEQ ID NO: 12554 - DNA, 24 bp, Artificial Sequence
  Synthetic
agcaatcacgautcagaagtguca

SEQ ID NO: 12555 - DNA, 26 bp, Artificial Sequence
  Synthetic
acagcaaagcagautactcatccaut

SEQ ID NO: 12556 - DNA, 22 bp, Artificial Sequence
  Synthetic
ccgtttctttugctgtgcatug

SEQ ID NO: 12557 - DNA, 25 bp, Artificial Sequence
  Synthetic
agagggtactaaucaccagtgtgut

SEQ ID NO: 12558 - DNA, 24 bp, Artificial Sequence
  Synthetic
caacttaccugagttgcttugcat

SEQ ID NO: 12559 - DNA, 28 bp, Artificial Sequence
  Synthetic
accataacttcuctcttggtttgttuca

SEQ ID NO: 12560 - DNA, 24 bp, Artificial Sequence
  Synthetic
ttttagccuacaggatccaccuct

SEQ ID NO: 12561 - DNA, 21 bp, Artificial Sequence
  Synthetic
ggcaagggaugggaaccuaac

SEQ ID NO: 12562 - DNA, 17 bp, Artificial Sequence
  Synthetic
cggugcaccctccucct

SEQ ID NO: 12563 - DNA, 19 bp, Artificial Sequence
  Synthetic
ccacgccuccatcttcucc

SEQ ID NO: 12564 - DNA, 18 bp, Artificial Sequence
  Synthetic
gcacgauctggagcucct

SEQ ID NO: 12565 - DNA, 25 bp, Artificial Sequence
  Synthetic
cctggagttugcatgaaacttucac

SEQ ID NO: 12566 - DNA, 20 bp, Artificial Sequence
  Synthetic
ccgcccuactacggaaacuc

SEQ ID NO: 12567 - DNA, 17 bp, Artificial Sequence
  Synthetic
aggtcccucccgaccuc

SEQ ID NO: 12568 - DNA, 23 bp, Artificial Sequence
  Synthetic
gagaaagagugcctcaaguacca

SEQ ID NO: 12569 - DNA, 19 bp, Artificial Sequence
  Synthetic
ctgtacucgggcacguagg

SEQ ID NO: 12570 - DNA, 20 bp, Artificial Sequence
  Synthetic
ctcctctcuccccactcuca

SEQ ID NO: 12571 - DNA, 22 bp, Artificial Sequence
  Synthetic
ttgctgaucccagtccactuac

SEQ ID NO: 12572 - DNA, 18 bp, Artificial Sequence
  Synthetic
ggtcaccgccaugggtua

SEQ ID NO: 12573 - DNA, 26 bp, Artificial Sequence
  Synthetic
tgcaaaguggcaaacataatttugct

SEQ ID NO: 12574 - DNA, 23 bp, Artificial Sequence
  Synthetic
cattgttcaaguacccacuggac

SEQ ID NO: 12575 - DNA, 26 bp, Artificial Sequence
  Synthetic
aggagtgcagutcctaatttccuaac

SEQ ID NO: 12576 - DNA, 23 bp, Artificial Sequence
  Synthetic
accccaagacutgctacattugt

SEQ ID NO: 12577 - DNA, 24 bp, Artificial Sequence
  Synthetic
ctgtgcaacaauggaaacatccut

SEQ ID NO: 12578 - DNA, 27 bp, Artificial Sequence
  Synthetic
gcactagcaacaacuctatatcuggat

SEQ ID NO: 12579 - DNA, 24 bp, Artificial Sequence
  Synthetic
tgagctgtgagcugaagatttcut

SEQ ID NO: 12580 - DNA, 24 bp, Artificial Sequence
  Synthetic
acagtcaucagcaaccaaagaugt

SEQ ID NO: 12581 - DNA, 28 bp, Artificial Sequence
  Synthetic
ggaattacccaaauctccaggtgaatut

SEQ ID NO: 12582 - DNA, 26 bp, Artificial Sequence
  Synthetic
aagctctagtcugcagaaatctccua

SEQ ID NO: 12583 - DNA, 24 bp, Artificial Sequence
  Synthetic
guggtgggagugaaggagaaaaat

SEQ ID NO: 12584 - DNA, 24 bp, Artificial Sequence
  Synthetic
gtgtctgugacaaatttgacugct

SEQ ID NO: 12585 - DNA, 23 bp, Artificial Sequence
  Synthetic
ccagaagacugctgaggtaagug

SEQ ID NO: 12586 - DNA, 27 bp, Artificial Sequence
  Synthetic
ctgtactctctuaaaagcattccccut

SEQ ID NO: 12587 - DNA, 22 bp, Artificial Sequence
  Synthetic
caaaagcugttctatgcuggct

SEQ ID NO: 12588 - DNA, 30 bp, Artificial Sequence
  Synthetic
acaaautaaaaacttgacugccaaaaagga

SEQ ID NO: 12589 - DNA, 23 bp, Artificial Sequence
  Synthetic
acacttaccaguctgtgcugaaa

SEQ ID NO: 12590 - DNA, 26 bp, Artificial Sequence
  Synthetic
ggaataattggagcuttgccagguaa

SEQ ID NO: 12591 - DNA, 23 bp, Artificial Sequence
  Synthetic
ctgttagucagtgtagcuggcat

SEQ ID NO: 12592 - DNA, 22 bp, Artificial Sequence
  Synthetic
cactucacacagcuaccaccaa

SEQ ID NO: 12593 - DNA, 24 bp, Artificial Sequence
  Synthetic
ggaacaaaaccaggcuggaaaaug

SEQ ID NO: 12594 - DNA, 24 bp, Artificial Sequence
  Synthetic
ggatggcucagttctcaaagucac

SEQ ID NO: 12595 - DNA, 25 bp, Artificial Sequence
  Synthetic
atccacatugcggagatcatuacat

SEQ ID NO: 12596 - DNA, 18 bp, Artificial Sequence
  Synthetic
tgtcauagccccgtgcug

SEQ ID NO: 12597 - DNA, 28 bp, Artificial Sequence
  Synthetic
acacauaggaaaaacacaactuaccact

SEQ ID NO: 12598 - DNA, 28 bp, Artificial Sequence
  Synthetic
aaagaattttuggccttttacagtuggt

SEQ ID NO: 12599 - DNA, 23 bp, Artificial Sequence
  Synthetic
accttttggcautctggaaagug

SEQ ID NO: 12600 - DNA, 25 bp, Artificial Sequence
  Synthetic
cccatuggacgaccgaaaaauaaat

SEQ ID NO: 12601 - DNA, 30 bp, Artificial Sequence
  Synthetic
aaaacccctaaaggaauctgagagaauaac

SEQ ID NO: 12602 - DNA, 30 bp, Artificial Sequence
  Synthetic
cctacatttctgccuctacacttaaagtua

SEQ ID NO: 12603 - DNA, 25 bp, Artificial Sequence
  Synthetic
tggacgatagugctttgaaaaguct

SEQ ID NO: 12604 - DNA, 26 bp, Artificial Sequence
  Synthetic
gcactctttgaugggctttctcauat

SEQ ID NO: 12605 - DNA, 28 bp, Artificial Sequence
  Synthetic
accgacttcuaatatctctttugccaaa

SEQ ID NO: 12606 - DNA, 30 bp, Artificial Sequence
  Synthetic
caaacaagaaagugcagatgtaaatgugat

SEQ ID NO: 12607 - DNA, 28 bp, Artificial Sequence
  Synthetic
gaagccacatcutatacttgctacuaca

SEQ ID NO: 12608 - DNA, 26 bp, Artificial Sequence
  Synthetic
tccagcaaaugaaattuaccgaagga

SEQ ID NO: 12609 - DNA, 27 bp, Artificial Sequence
  Synthetic
tgtaccttcuaaacacaaaucagcaca

SEQ ID NO: 12610 - DNA, 21 bp, Artificial Sequence
  Synthetic
ccacagugaggaatgcccaut

SEQ ID NO: 12611 - DNA, 21 bp, Artificial Sequence
  Synthetic
ctccaagaugacgctctucca

SEQ ID NO: 12612 - DNA, 23 bp, Artificial Sequence
  Synthetic
ccagagccaaugaacttgaucca

SEQ ID NO: 12613 - DNA, 31 bp, Artificial Sequence
  Synthetic
gcttaagaatgcuacaagattgaagtuacac

SEQ ID NO: 12614 - DNA, 28 bp, Artificial Sequence
  Synthetic
tgtcuaaagagagcagugaagaagaaga

SEQ ID NO: 12615 - DNA, 20 bp, Artificial Sequence
  Synthetic
ggcaacugactgtggttucg

SEQ ID NO: 12616 - DNA, 26 bp, Artificial Sequence
  Synthetic
ccttcccgttuttgtctcttcacuaa

SEQ ID NO: 12617 - DNA, 23 bp, Artificial Sequence
  Synthetic
tcctctctutgttttgccuccac

SEQ ID NO: 12618 - DNA, 22 bp, Artificial Sequence
  Synthetic
tccaaacacaucaccaggugaa

SEQ ID NO: 12619 - DNA, 29 bp, Artificial Sequence
  Synthetic
cttttagcaccauctggatctttttcuac

SEQ ID NO: 12620 - DNA, 27 bp, Artificial Sequence
  Synthetic
cutcaaagaagtacuggaaaaccagga

SEQ ID NO: 12621 - DNA, 23 bp, Artificial Sequence
  Synthetic
gtcagatucgggtacagctucag

SEQ ID NO: 12622 - DNA, 21 bp, Artificial Sequence
  Synthetic
tttcatccguccactcccauc

SEQ ID NO: 12623 - DNA, 21 bp, Artificial Sequence
  Synthetic
tgggacauccatcaugggact

SEQ ID NO: 12624 - DNA, 17 bp, Artificial Sequence
  Synthetic
catcagcuccccuccga

SEQ ID NO: 12625 - DNA, 22 bp, Artificial Sequence
  Synthetic
cgtataagccaaugttggcgut

SEQ ID NO: 12626 - DNA, 20 bp, Artificial Sequence
  Synthetic
cgccuctttugcaacggaac

SEQ ID NO: 12627 - DNA, 18 bp, Artificial Sequence
  Synthetic
agtcugggagcgcccaua

SEQ ID NO: 12628 - DNA, 22 bp, Artificial Sequence
  Synthetic
caccccacgguaacatgatgua

SEQ ID NO: 12629 - DNA, 21 bp, Artificial Sequence
  Synthetic
tgatgccccguaggttttgug

SEQ ID NO: 12630 - DNA, 24 bp, Artificial Sequence
  Synthetic
gttacacttguttaccacgtugct

SEQ ID NO: 12631 - DNA, 28 bp, Artificial Sequence
  Synthetic
actgtagtaacagucttcctcaatucca

SEQ ID NO: 12632 - DNA, 23 bp, Artificial Sequence
  Synthetic
tcctgcccaccautttcataguc

SEQ ID NO: 12633 - DNA, 30 bp, Artificial Sequence
  Synthetic
acagtgttcacauacagtagagtuacaaaa

SEQ ID NO: 12634 - DNA, 25 bp, Artificial Sequence
  Synthetic
ctacaggauccagatctaactuggg

SEQ ID NO: 12635 - DNA, 28 bp, Artificial Sequence
  Synthetic
agaatgaggcaaauctttgtgaacuact

SEQ ID NO: 12636 - DNA, 29 bp, Artificial Sequence
  Synthetic
agcgtatgacacautgattaaagatcuca

SEQ ID NO: 12637 - DNA, 27 bp, Artificial Sequence
  Synthetic
ccaagcttuggatttcatttcugaagt

SEQ ID NO: 12638 - DNA, 20 bp, Artificial Sequence
  Synthetic
cacgtccaccutgagtccua

SEQ ID NO: 12639 - DNA, 26 bp, Artificial Sequence
  Synthetic
tgaaaacutgtaatctuccccaggag

SEQ ID NO: 12640 - DNA, 29 bp, Artificial Sequence
  Synthetic
aaacagaaucatctccugaagaacaagaa

SEQ ID NO: 12641 - DNA, 25 bp, Artificial Sequence
  Synthetic
ccttgttatccugacccaagaugaa

SEQ ID NO: 12642 - DNA, 23 bp, Artificial Sequence
  Synthetic
attctgtguccttcctucagcag

SEQ ID NO: 12643 - DNA, 22 bp, Artificial Sequence
  Synthetic
cgugtttaggtttuggcaacgt

SEQ ID NO: 12644 - DNA, 23 bp, Artificial Sequence
  Synthetic
gatatctcuggcgaguccaaagt

SEQ ID NO: 12645 - DNA, 21 bp, Artificial Sequence
  Synthetic
cctttttgttcuggcggtgut

SEQ ID NO: 12646 - DNA, 23 bp, Artificial Sequence
  Synthetic
gutcacaugccacaaaaggaact

SEQ ID NO: 12647 - DNA, 20 bp, Artificial Sequence
  Synthetic
tgcttugggcaagtggucat

SEQ ID NO: 12648 - DNA, 20 bp, Artificial Sequence
  Synthetic
gacaagauccacaagcuggc

SEQ ID NO: 12649 - DNA, 22 bp, Artificial Sequence
  Synthetic
atcctgugccgaaugaagaaca

SEQ ID NO: 12650 - DNA, 28 bp, Artificial Sequence
  Synthetic
accaagtctttucagcttctatauccag

SEQ ID NO: 12651 - DNA, 18 bp, Artificial Sequence
  Synthetic
atgugaccgaggcggaug

SEQ ID NO: 12652 - DNA, 22 bp, Artificial Sequence
  Synthetic
caaacgagucaagcaagaaugg

SEQ ID NO: 12653 - DNA, 24 bp, Artificial Sequence
  Synthetic
gagcctcatuatggaaagtguggt

SEQ ID NO: 12654 - DNA, 21 bp, Artificial Sequence
  Synthetic
gcagaactuccctccatgcuc

SEQ ID NO: 12655 - DNA, 28 bp, Artificial Sequence
  Synthetic
aacacatccauggaatatgttctttugc

SEQ ID NO: 12656 - DNA, 26 bp, Artificial Sequence
  Synthetic
tttacaatgcaaggguagctgatuct

SEQ ID NO: 12657 - DNA, 20 bp, Artificial Sequence
  Synthetic
tcaccauggcaaccttgucc

SEQ ID NO: 12658 - DNA, 18 bp, Artificial Sequence
  Synthetic
gggaguccccctcaccug

SEQ ID NO: 12659 - DNA, 21 bp, Artificial Sequence
  Synthetic
tcctgatcccauccctcctut

SEQ ID NO: 12660 - DNA, 21 bp, Artificial Sequence
  Synthetic
ggttcaccugtactgguggat

SEQ ID NO: 12661 - DNA, 22 bp, Artificial Sequence
  Synthetic
cctgttggacaucctggauacc

SEQ ID NO: 12662 - DNA, 18 bp, Artificial Sequence
  Synthetic
ccucccaucgaggacgga

SEQ ID NO: 12663 - DNA, 26 bp, Artificial Sequence
  Synthetic
gcacctttgaaucccaagttcaguaa

SEQ ID NO: 12664 - DNA, 17 bp, Artificial Sequence
  Synthetic
gttuggcagcccaccuc

SEQ ID NO: 12665 - DNA, 21 bp, Artificial Sequence
  Synthetic
gatcaaggaccgcuatcugct

SEQ ID NO: 12666 - DNA, 27 bp, Artificial Sequence
  Synthetic
attatacttuggacacacgaaggcaua

SEQ ID NO: 12667 - DNA, 24 bp, Artificial Sequence
  Synthetic
gctcttcguagtggtgcattuagg

SEQ ID NO: 12668 - DNA, 24 bp, Artificial Sequence
  Synthetic
cggctagucactaaagucaaaagc

SEQ ID NO: 12669 - DNA, 20 bp, Artificial Sequence
  Synthetic
gaacccggcauccacaaauc

SEQ ID NO: 12670 - DNA, 23 bp, Artificial Sequence
  Synthetic
gctctctuggagtgtctccucat

SEQ ID NO: 12671 - DNA, 21 bp, Artificial Sequence
  Synthetic
ccgggatuagcgaactuccag

SEQ ID NO: 12672 - DNA, 25 bp, Artificial Sequence
  Synthetic
cccaataaagguctaccatccccua

SEQ ID NO: 12673 - DNA, 26 bp, Artificial Sequence
  Synthetic
gagtggacuaagatcaatgggaugat

SEQ ID NO: 12674 - DNA, 17 bp, Artificial Sequence
  Synthetic
ctuccgagggcccagug

SEQ ID NO: 12675 - DNA, 19 bp, Artificial Sequence
  Synthetic
agtacuggcacgaggacug

SEQ ID NO: 12676 - DNA, 19 bp, Artificial Sequence
  Synthetic
ccgtgagutgcagctugat

SEQ ID NO: 12677 - DNA, 17 bp, Artificial Sequence
  Synthetic
ccgaggcccugaaggug

SEQ ID NO: 12678 - DNA, 20 bp, Artificial Sequence
  Synthetic
gctgctgucaccacctguag

SEQ ID NO: 12679 - DNA, 21 bp, Artificial Sequence
  Synthetic
attcuacgacggcatcugcaa

SEQ ID NO: 12680 - DNA, 18 bp, Artificial Sequence
  Synthetic
aggcugcaggccctagua

SEQ ID NO: 12681 - DNA, 25 bp, Artificial Sequence
  Synthetic
gggatgaacacauctaccccuacat

SEQ ID NO: 12682 - DNA, 21 bp, Artificial Sequence
  Synthetic
gtggctugggctactacagua

SEQ ID NO: 12683 - DNA, 21 bp, Artificial Sequence
  Synthetic
tcatgccugggtagtgttugg

SEQ ID NO: 12684 - DNA, 19 bp, Artificial Sequence
  Synthetic
ggugaagcgggcauagagg

SEQ ID NO: 12685 - DNA, 22 bp, Artificial Sequence
  Synthetic
tggagcattutctggctgucaa

SEQ ID NO: 12686 - DNA, 25 bp, Artificial Sequence
  Synthetic
cttttgcagaaaaucactgcaccua

SEQ ID NO: 12687 - DNA, 30 bp, Artificial Sequence
  Synthetic
tattcagagtctatuctcacaaaaactgut

SEQ ID NO: 12688 - DNA, 22 bp, Artificial Sequence
  Synthetic
tggttgctgcugagatgctauc

SEQ ID NO: 12689 - DNA, 27 bp, Artificial Sequence
  Synthetic
attgtgtgtactutctccttcttcucc

SEQ ID NO: 12690 - DNA, 32 bp, Artificial Sequence
  Synthetic
gttactataagguagccattattcaaaatgug

SEQ ID NO: 12691 - DNA, 27 bp, Artificial Sequence
  Synthetic
gggaaacttaucacaaagcctucagaa

SEQ ID NO: 12692 - DNA, 24 bp, Artificial Sequence
  Synthetic
tatgagcactcucctcactactut

SEQ ID NO: 12693 - DNA, 23 bp, Artificial Sequence
  Synthetic
gcutgaaaatgcugaacgggaac

SEQ ID NO: 12694 - DNA, 26 bp, Artificial Sequence
  Synthetic
ccagttagcgguaaccttaacauagg

SEQ ID NO: 12695 - DNA, 28 bp, Artificial Sequence
  Synthetic
agctgttttatauctcacaaccuggaag

SEQ ID NO: 12696 - DNA, 32 bp, Artificial Sequence
  Synthetic
gatgaatcacaaauaagttaaaccaagagtuc

SEQ ID NO: 12697 - DNA, 30 bp, Artificial Sequence
  Synthetic
aaaataatgtaatguccatttcaggaucca

SEQ ID NO: 12698 - DNA, 24 bp, Artificial Sequence
  Synthetic
gggatcgucatgattgccaugaat

SEQ ID NO: 12699 - DNA, 22 bp, Artificial Sequence
  Synthetic
aacagctttugtcccgtaugga

SEQ ID NO: 12700 - DNA, 30 bp, Artificial Sequence
  Synthetic
acaaatacaaaccacacucacttcatttuc

SEQ ID NO: 12701 - DNA, 30 bp, Artificial Sequence
  Synthetic
attagttgcaacagauattcatcttggaut

SEQ ID NO: 12702 - DNA, 29 bp, Artificial Sequence
  Synthetic
aggctctgtctucaataaagaatcaauga

SEQ ID NO: 12703 - DNA, 22 bp, Artificial Sequence
  Synthetic
cctucacccaaccaaagtucca

SEQ ID NO: 12704 - DNA, 22 bp, Artificial Sequence
  Synthetic
ctgttgcagugactgattuggg

SEQ ID NO: 12705 - DNA, 26 bp, Artificial Sequence
  Synthetic
ccaccacagagaacaucaaacguaat

SEQ ID NO: 12706 - DNA, 22 bp, Artificial Sequence
  Synthetic
gtagacaggaggcuggaatugg

SEQ ID NO: 12707 - DNA, 29 bp, Artificial Sequence
  Synthetic
ttattgaaaagugcagtuacagaggagat

SEQ ID NO: 12708 - DNA, 26 bp, Artificial Sequence
  Synthetic
tcttgatcutgtcccaauacaaacat

SEQ ID NO: 12709 - DNA, 23 bp, Artificial Sequence
  Synthetic
ttgcaggaaugggataccaaguc

SEQ ID NO: 12710 - DNA, 25 bp, Artificial Sequence
  Synthetic
gggtgcgggutgttaataaaactuc

SEQ ID NO: 12711 - DNA, 20 bp, Artificial Sequence
  Synthetic
agcggccagucgaaaguaat

SEQ ID NO: 12712 - DNA, 20 bp, Artificial Sequence
  Synthetic
cctggctcugagggacugaa

SEQ ID NO: 12713 - DNA, 28 bp, Artificial Sequence
  Synthetic
cccatggagaaaauagtgatcaaaagug

SEQ ID NO: 12714 - DNA, 23 bp, Artificial Sequence
  Synthetic
agtctctccuggctccttcttua

SEQ ID NO: 12715 - DNA, 30 bp, Artificial Sequence
  Synthetic
ctccaaataaacaauggacaaagtcagaut

SEQ ID NO: 12716 - DNA, 20 bp, Artificial Sequence
  Synthetic
cttggtgtguttgccagcut

SEQ ID NO: 12717 - DNA, 23 bp, Artificial Sequence
  Synthetic
cctgagctgugaaggacgataug

SEQ ID NO: 12718 - DNA, 17 bp, Artificial Sequence
  Synthetic
ctcagcagccuccucgt

SEQ ID NO: 12719 - DNA, 17 bp, Artificial Sequence
  Synthetic
caggttggugccgaugg

SEQ ID NO: 12720 - DNA, 27 bp, Artificial Sequence
  Synthetic
gttaaaactagucctcgaaaaccucgt

SEQ ID NO: 12721 - DNA, 28 bp, Artificial Sequence
  Synthetic
tgatcttatcuccagatttggtctcuga

SEQ ID NO: 12722 - DNA, 25 bp, Artificial Sequence
  Synthetic
guacaaattguacgacggagaggaa

SEQ ID NO: 12723 - DNA, 22 bp, Artificial Sequence
  Synthetic
gagggcttugtctgacaacugt

SEQ ID NO: 12724 - DNA, 28 bp, Artificial Sequence
  Synthetic
cctccaattaaaautgcccgatuagagt

SEQ ID NO: 12725 - DNA, 23 bp, Artificial Sequence
  Synthetic
cctgagagtcugtggaggtauca

SEQ ID NO: 12726 - DNA, 22 bp, Artificial Sequence
  Synthetic
ccaguatctcugaccacacacc

SEQ ID NO: 12727 - DNA, 23 bp, Artificial Sequence
  Synthetic
gtggctcugacctagaatgctut

SEQ ID NO: 12728 - DNA, 26 bp, Artificial Sequence
  Synthetic
ctgtaacctugcctagtaaucgaact

SEQ ID NO: 12729 - DNA, 25 bp, Artificial Sequence
  Synthetic
gagagctcagaacuactaagcctuc

SEQ ID NO: 12730 - DNA, 21 bp, Artificial Sequence
  Synthetic
gaggagcugtccaaagaucga

SEQ ID NO: 12731 - DNA, 22 bp, Artificial Sequence
  Synthetic
ccuacccacaggauacaaagca

SEQ ID NO: 12732 - DNA, 26 bp, Artificial Sequence
  Synthetic
tccactccttcauctagcactgtuaa

SEQ ID NO: 12733 - DNA, 28 bp, Artificial Sequence
  Synthetic
ggtcggtttgttuaagactcttactcut

SEQ ID NO: 12734 - DNA, 27 bp, Artificial Sequence
  Synthetic
tggagtaccaautaaaaccaggttuga

SEQ ID NO: 12735 - DNA, 23 bp, Artificial Sequence
  Synthetic
gtgcctugtttctagugacaggt

SEQ ID NO: 12736 - DNA, 29 bp, Artificial Sequence
  Synthetic
atggtttattcgtugttttcctaggauga

SEQ ID NO: 12737 - DNA, 27 bp, Artificial Sequence
  Synthetic
aacuatacaccattuaagcaaggagca

SEQ ID NO: 12738 - DNA, 21 bp, Artificial Sequence
  Synthetic
ctcagccaccuacuacaggac

SEQ ID NO: 12739 - DNA, 23 bp, Artificial Sequence
  Synthetic
tgctgttugagacatcagtgcut

SEQ ID NO: 12740 - DNA, 26 bp, Artificial Sequence
  Synthetic
ctttcctaagugacctttctctcucc

SEQ ID NO: 12741 - DNA, 24 bp, Artificial Sequence
  Synthetic
gtacaaagaagcaggaugcctuac

SEQ ID NO: 12742 - DNA, 21 bp, Artificial Sequence
  Synthetic
agugccgaaacagctaucacc

SEQ ID NO: 12743 - DNA, 25 bp, Artificial Sequence
  Synthetic
aagtccaatagucacatggtggtuc

SEQ ID NO: 12744 - DNA, 27 bp, Artificial Sequence
  Synthetic
gacctcatcauggtaggtttttgttut

SEQ ID NO: 12745 - DNA, 27 bp, Artificial Sequence
  Synthetic
ctgtcagaactugcttcagagaaauct

SEQ ID NO: 12746 - DNA, 24 bp, Artificial Sequence
  Synthetic
ggagggaagaggaaauggtttuca

SEQ ID NO: 12747 - DNA, 21 bp, Artificial Sequence
  Synthetic
acttgaccaugctgttggcut

SEQ ID NO: 12748 - DNA, 23 bp, Artificial Sequence
  Synthetic
gggcaacaggugataucaagaat

SEQ ID NO: 12749 - DNA, 22 bp, Artificial Sequence
  Synthetic
tcaagtgaagguggaagcacug

SEQ ID NO: 12750 - DNA, 27 bp, Artificial Sequence
  Synthetic
gttatcttcacuggaaaagctaaugcc

SEQ ID NO: 12751 - DNA, 20 bp, Artificial Sequence
  Synthetic
tcaaacacutccgcugacca

SEQ ID NO: 12752 - DNA, 23 bp, Artificial Sequence
  Synthetic
ccactcugagacagtcaggauca

SEQ ID NO: 12753 - DNA, 25 bp, Artificial Sequence
  Synthetic
ccaagccatugagaaacttcctuct

SEQ ID NO: 12754 - DNA, 20 bp, Artificial Sequence
  Synthetic
gctcgcaagcgcugtgtaua

SEQ ID NO: 12755 - DNA, 20 bp, Artificial Sequence
  Synthetic
ccagccucaagtcccatcut

SEQ ID NO: 12756 - DNA, 28 bp, Artificial Sequence
  Synthetic
aatcattgaaaccagugacttcuacaca

SEQ ID NO: 12757 - DNA, 28 bp, Artificial Sequence
  Synthetic
gagagtaaaggaucacctactgtgacua

SEQ ID NO: 12758 - DNA, 27 bp, Artificial Sequence
  Synthetic
aaaacagtcacutggatggatctucat

SEQ ID NO: 12759 - DNA, 24 bp, Artificial Sequence
  Synthetic
cacattatgugcagatccctcuga

SEQ ID NO: 12760 - DNA, 28 bp, Artificial Sequence
  Synthetic
caacagaucatccattaucaacgaacat

SEQ ID NO: 12761 - DNA, 23 bp, Artificial Sequence
  Synthetic
tctggcttcaaguttccttccuc

SEQ ID NO: 12762 - DNA, 23 bp, Artificial Sequence
  Synthetic
acagaaccaauttcagcctcuga

SEQ ID NO: 12763 - DNA, 23 bp, Artificial Sequence
  Synthetic
ggccatcuggaagcattaggtut

SEQ ID NO: 12764 - DNA, 25 bp, Artificial Sequence
  Synthetic
aacagtgatutcttcagguggagag

SEQ ID NO: 12765 - DNA, 25 bp, Artificial Sequence
  Synthetic
cttgttgtggcugtgacactaguat

SEQ ID NO: 12766 - DNA, 27 bp, Artificial Sequence
  Synthetic
ctccgacaaaaauttactggacaccua

SEQ ID NO: 12767 - DNA, 22 bp, Artificial Sequence
  Synthetic
gcctgcauggatggagtatuct

SEQ ID NO: 12768 - DNA, 27 bp, Artificial Sequence
  Synthetic
ggagaagagaguaaccaucacagaaaa

SEQ ID NO: 12769 - DNA, 21 bp, Artificial Sequence
  Synthetic
acugaaccauaaggagggcua

SEQ ID NO: 12770 - DNA, 26 bp, Artificial Sequence
  Synthetic
cctctuctgttagttcuacacccagt

SEQ ID NO: 12771 - DNA, 24 bp, Artificial Sequence
  Synthetic
tgagacatggguagcaatccttug

SEQ ID NO: 12772 - DNA, 26 bp, Artificial Sequence
  Synthetic
gccccttctgaugtggtttctaauat

SEQ ID NO: 12773 - DNA, 29 bp, Artificial Sequence
  Synthetic
ccggttcaaaauacatgatgctagattua

SEQ ID NO: 12774 - DNA, 23 bp, Artificial Sequence
  Synthetic
gcttuaccgccaagtucaggaat

SEQ ID NO: 12775 - DNA, 22 bp, Artificial Sequence
  Synthetic
tgatagtgtucgtctgctuccc

SEQ ID NO: 12776 - DNA, 20 bp, Artificial Sequence
  Synthetic
aguttcccattugcggacca

SEQ ID NO: 12777 - DNA, 21 bp, Artificial Sequence
  Synthetic
tctctcccggacuaccacauc

SEQ ID NO: 12778 - DNA, 22 bp, Artificial Sequence
  Synthetic
tgatgcuttggctucagcaaga

SEQ ID NO: 12779 - DNA, 21 bp, Artificial Sequence
  Synthetic
cttctgcugatgggucaacct

SEQ ID NO: 12780 - DNA, 29 bp, Artificial Sequence
  Synthetic
gatttccagttttaaugccatcatcctut

SEQ ID NO: 12781 - DNA, 24 bp, Artificial Sequence
  Synthetic
cctcctccucttcttcatcatugg

SEQ ID NO: 12782 - DNA, 27 bp, Artificial Sequence
  Synthetic
ggaacuaacagaucaggagaacttaut

SEQ ID NO: 12783 - DNA, 21 bp, Artificial Sequence
  Synthetic
gccggcauactcaaucaccat

SEQ ID NO: 12784 - DNA, 26 bp, Artificial Sequence
  Synthetic
gtcatctttgccaugcgtaagatcua

SEQ ID NO: 12785 - DNA, 21 bp, Artificial Sequence
  Synthetic
cctccttgcacuccaacacug

SEQ ID NO: 12786 - DNA, 21 bp, Artificial Sequence
  Synthetic
aatcagccagugagggucaac

SEQ ID NO: 12787 - DNA, 22 bp, Artificial Sequence
  Synthetic
gctgcaaaaaccutaagugcca

SEQ ID NO: 12788 - DNA, 22 bp, Artificial Sequence
  Synthetic
cagctugatggagaucgacaca

SEQ ID NO: 12789 - DNA, 20 bp, Artificial Sequence
  Synthetic
ggtactugggcggcactuac

SEQ ID NO: 12790 - DNA, 27 bp, Artificial Sequence
  Synthetic
aacccttatggutttcttatggtuggt

SEQ ID NO: 12791 - DNA, 21 bp, Artificial Sequence
  Synthetic
ttgcaggccaagguaaacuca

SEQ ID NO: 12792 - DNA, 19 bp, Artificial Sequence
  Synthetic
cgaccgagucgtccatgua

SEQ ID NO: 12793 - DNA, 21 bp, Artificial Sequence
  Synthetic
agtattgtgaugcggcuccaa

SEQ ID NO: 12794 - DNA, 24 bp, Artificial Sequence
  Synthetic
tgtcccaaacuaaccaagcatcug

SEQ ID NO: 12795 - DNA, 29 bp, Artificial Sequence
  Synthetic
tctccagaaatggcugaaaatgaagatua

SEQ ID NO: 12796 - DNA, 28 bp, Artificial Sequence
  Synthetic
atgcttgactauaaacagttggaacuca

SEQ ID NO: 12797 - DNA, 28 bp, Artificial Sequence
  Synthetic
gugaaagagagcacugaaaagaaaagag

SEQ ID NO: 12798 - DNA, 29 bp, Artificial Sequence
  Synthetic
ccaacatttaugatacctcuaaggaacct

SEQ ID NO: 12799 - DNA, 25 bp, Artificial Sequence
  Synthetic
aagtatctcuggacgagacucaaca

SEQ ID NO: 12800 - DNA, 28 bp, Artificial Sequence
  Synthetic
cttagaagcagaagaauaagcatgcuct

SEQ ID NO: 12801 - DNA, 23 bp, Artificial Sequence
  Synthetic
guttcttctucaggacacagcca

SEQ ID NO: 12802 - DNA, 29 bp, Artificial Sequence
  Synthetic
tgtaaatcctaaacutgcctgtaagtcug

SEQ ID NO: 12803 - DNA, 24 bp, Artificial Sequence
  Synthetic
aggctcuagccacagatgaacuat

SEQ ID NO: 12804 - DNA, 26 bp, Artificial Sequence
  Synthetic
gcggcaaaugcaaaattttacttcut

SEQ ID NO: 12805 - DNA, 25 bp, Artificial Sequence
  Synthetic
gggtatatugcagtgactctttuca

SEQ ID NO: 12806 - DNA, 19 bp, Artificial Sequence
  Synthetic
tgautccactugcggcagt

SEQ ID NO: 12807 - DNA, 27 bp, Artificial Sequence
  Synthetic
ttcaacagtatatugccaaaccccaua

SEQ ID NO: 12808 - DNA, 23 bp, Artificial Sequence
  Synthetic
gtaggcagaccutagcctttuct

SEQ ID NO: 12809 - DNA, 24 bp, Artificial Sequence
  Synthetic
gaccutatcagauccgcaacaagt

SEQ ID NO: 12810 - DNA, 24 bp, Artificial Sequence
  Synthetic
ccautctgugaaacccagaacagt

SEQ ID NO: 12811 - DNA, 20 bp, Artificial Sequence
  Synthetic
ggacucggaccaaacugaca

SEQ ID NO: 12812 - DNA, 29 bp, Artificial Sequence
  Synthetic
gcctcttttaaagugacaatcaatucagt

SEQ ID NO: 12813 - DNA, 24 bp, Artificial Sequence
  Synthetic
agacctcccutctctgctataugg

SEQ ID NO: 12814 - DNA, 26 bp, Artificial Sequence
  Synthetic
catagaaaatgugctcagcaaacuca

SEQ ID NO: 12815 - DNA, 29 bp, Artificial Sequence
  Synthetic
tgtctttucacacgaggaautaatttuca

SEQ ID NO: 12816 - DNA, 25 bp, Artificial Sequence
  Synthetic
acugaaggaagauaccaaaagacuc

SEQ ID NO: 12817 - DNA, 21 bp, Artificial Sequence
  Synthetic
agagcaacuggaggaggugat

SEQ ID NO: 12818 - DNA, 24 bp, Artificial Sequence
  Synthetic
gttccaggacaggcaugttatuca

SEQ ID NO: 12819 - DNA, 24 bp, Artificial Sequence
  Synthetic
aattttcugggaagactccctugg

SEQ ID NO: 12820 - DNA, 25 bp, Artificial Sequence
  Synthetic
gaggaaacugaaggctttgtacuca

SEQ ID NO: 12821 - DNA, 25 bp, Artificial Sequence
  Synthetic
tggattugaacaagctguacgagag

SEQ ID NO: 12822 - DNA, 30 bp, Artificial Sequence
  Synthetic
catccaucacacaaaaguaatttatctuca

SEQ ID NO: 12823 - DNA, 28 bp, Artificial Sequence
  Synthetic
gtttatttcagcuaaggagttcctggua

SEQ ID NO: 12824 - DNA, 25 bp, Artificial Sequence
  Synthetic
aaaagcccaagacautgataccuga

SEQ ID NO: 12825 - DNA, 28 bp, Artificial Sequence
  Synthetic
agatcttaaagaaaaaguggagccugag

SEQ ID NO: 12826 - DNA, 28 bp, Artificial Sequence
  Synthetic
atcctctatuggaagcaatgtttccuac

SEQ ID NO: 12827 - DNA, 26 bp, Artificial Sequence
  Synthetic
tgggaactucaaggatctactcugaa

SEQ ID NO: 12828 - DNA, 23 bp, Artificial Sequence
  Synthetic
gataaagcugagcggatctguga

SEQ ID NO: 12829 - DNA, 20 bp, Artificial Sequence
  Synthetic
agcttttcuccaccggtucc

SEQ ID NO: 12830 - DNA, 30 bp, Artificial Sequence
  Synthetic
taccatctttgcucatcttttctttatgut

SEQ ID NO: 12831 - DNA, 22 bp, Artificial Sequence
  Synthetic
cctgtacacaugaagccaucgt

SEQ ID NO: 12832 - DNA, 30 bp, Artificial Sequence
  Synthetic
tgctgatgtttcaauaaaaggaattccaua

SEQ ID NO: 12833 - DNA, 31 bp, Artificial Sequence
  Synthetic
tcccagagaacaaautaaaagagtuaaggac

SEQ ID NO: 12834 - DNA, 22 bp, Artificial Sequence
  Synthetic
tgtactcctcutgacctgcugt

SEQ ID NO: 12835 - DNA, 29 bp, Artificial Sequence
  Synthetic
tgaagtaaaaggugcactgtaataaucca

SEQ ID NO: 12836 - DNA, 18 bp, Artificial Sequence
  Synthetic
cuggccggagagcctuat

SEQ ID NO: 12837 - DNA, 18 bp, Artificial Sequence
  Synthetic
gctgcugcccagaccauc

SEQ ID NO: 12838 - DNA, 20 bp, Artificial Sequence
  Synthetic
cggtgacgaccugtcctcua

SEQ ID NO: 12839 - DNA, 19 bp, Artificial Sequence
  Synthetic
cagtgcuggtagcctucga

SEQ ID NO: 12840 - DNA, 23 bp, Artificial Sequence
  Synthetic
caggtaaccauctggtuccagaa

SEQ ID NO: 12841 - DNA, 26 bp, Artificial Sequence
  Synthetic
acaaagcggagacauaaatagauggg

SEQ ID NO: 12842 - DNA, 22 bp, Artificial Sequence
  Synthetic
tccaacctcuatctgcccagut

SEQ ID NO: 12843 - DNA, 18 bp, Artificial Sequence
  Synthetic
cuccaggccguaggagac

SEQ ID NO: 12844 - DNA, 20 bp, Artificial Sequence
  Synthetic
cctucgaccgtttctucgac

SEQ ID NO: 12845 - DNA, 20 bp, Artificial Sequence
  Synthetic
tgtgttcucctccucagcct

SEQ ID NO: 12846 - DNA, 28 bp, Artificial Sequence
  Synthetic
agaaggaugaaagaaaagaaacugagca

SEQ ID NO: 12847 - DNA, 29 bp, Artificial Sequence
  Synthetic
gcggaaagaagaugagutagaaaauaaaa

SEQ ID NO: 12848 - DNA, 26 bp, Artificial Sequence
  Synthetic
agatctcttcugaggtattcaugcca

SEQ ID NO: 12849 - DNA, 27 bp, Artificial Sequence
  Synthetic
aattcagtgacuccttttggtactgut

SEQ ID NO: 12850 - DNA, 18 bp, Artificial Sequence
  Synthetic
ccuccccggattagugcg

SEQ ID NO: 12851 - DNA, 21 bp, Artificial Sequence
  Synthetic
ccagtaccugctccucaccat

SEQ ID NO: 12852 - DNA, 23 bp, Artificial Sequence
  Synthetic
gcagggccuatagttctgggaua

SEQ ID NO: 12853 - DNA, 32 bp, Artificial Sequence
  Synthetic
agtgagatactactuatctcttgattcagcut

SEQ ID NO: 12854 - DNA, 31 bp, Artificial Sequence
  Synthetic
ataagggtttgtgtuagactgatagcatauc

SEQ ID NO: 12855 - DNA, 26 bp, Artificial Sequence
  Synthetic
attaccttttgaucactcccacctuc

SEQ ID NO: 12856 - DNA, 29 bp, Artificial Sequence
  Synthetic
tctgtacaaatagguactcaaaacagcuc

SEQ ID NO: 12857 - DNA, 22 bp, Artificial Sequence
  Synthetic
agccaggcuttcaucaaaggaa

SEQ ID NO: 12858 - DNA, 26 bp, Artificial Sequence
  Synthetic
gaaggaaauagggcgatgaattgaug

SEQ ID NO: 12859 - DNA, 30 bp, Artificial Sequence
  Synthetic
cttacagctaaggaaauttcaggatctuct

SEQ ID NO: 12860 - DNA, 30 bp, Artificial Sequence
  Synthetic
gagagtcatgtgtugaggaaaatgatgaua

SEQ ID NO: 12861 - DNA, 27 bp, Artificial Sequence
  Synthetic
cactctcttcttugtcttgggtttcut

SEQ ID NO: 12862 - DNA, 27 bp, Artificial Sequence
  Synthetic
cccctagtugacctgtctauaagagaa

SEQ ID NO: 12863 - DNA, 29 bp, Artificial Sequence
  Synthetic
tcactattccacuaccaaagtaggucaat

SEQ ID NO: 12864 - DNA, 17 bp, Artificial Sequence
  Synthetic
ggctgagcugcccaaug

SEQ ID NO: 12865 - DNA, 19 bp, Artificial Sequence
  Synthetic
tctccaccacggcuttcug

SEQ ID NO: 12866 - DNA, 24 bp, Artificial Sequence
  Synthetic
gccatggcaaugagaaagaaucaa

SEQ ID NO: 12867 - DNA, 20 bp, Artificial Sequence
  Synthetic
gcccctucttggttgguagc

SEQ ID NO: 12868 - DNA, 21 bp, Artificial Sequence
  Synthetic
tguccccaucacaggcacagg

SEQ ID NO: 12869 - DNA, 20 bp, Artificial Sequence
  Synthetic
ggcccgcugtacgtguccat

SEQ ID NO: 12870 - DNA, 18 bp, Artificial Sequence
  Synthetic
gcttggctucccctcgua

SEQ ID NO: 12871 - DNA, 22 bp, Artificial Sequence
  Synthetic
aagtgaggccaugatgaggtuc

SEQ ID NO: 12872 - DNA, 18 bp, Artificial Sequence
  Synthetic
cacgtcugcccctctcuc

SEQ ID NO: 12873 - DNA, 18 bp, Artificial Sequence
  Synthetic
gcaggccuggacctuacc

SEQ ID NO: 12874 - DNA, 18 bp, Artificial Sequence
  Synthetic
cctgcugccauccaacca

SEQ ID NO: 12875 - DNA, 18 bp, Artificial Sequence
  Synthetic
gctgcugccctcaucacc

SEQ ID NO: 12876 - DNA, 30 bp, Artificial Sequence
  Synthetic
gtggagggatgaaguccttaaaactaaaut

SEQ ID NO: 12877 - DNA, 25 bp, Artificial Sequence
  Synthetic
ggaatgtccucacaccuaccaaaac

SEQ ID NO: 12878 - DNA, 30 bp, Artificial Sequence
  Synthetic
acctttctgattucaaccaaattacaguct

SEQ ID NO: 12879 - DNA, 26 bp, Artificial Sequence
  Synthetic
gctgcaattguctaatgttttccuca

SEQ ID NO: 12880 - DNA, 24 bp, Artificial Sequence
  Synthetic
ctaggtgacuccaacagugaacag

SEQ ID NO: 12881 - DNA, 24 bp, Artificial Sequence
  Synthetic
tgccaaaggaauggaatttcugga

SEQ ID NO: 12882 - DNA, 24 bp, Artificial Sequence
  Synthetic
gaaactggucaacgaagtgtgtut

SEQ ID NO: 12883 - DNA, 27 bp, Artificial Sequence
  Synthetic
aaatttcacaggacutggacagagaut

SEQ ID NO: 12884 - DNA, 22 bp, Artificial Sequence
  Synthetic
tgtgcatcuttgttgctgucct

SEQ ID NO: 12885 - DNA, 24 bp, Artificial Sequence
  Synthetic
gcacgtacucaccatttgtcttug

SEQ ID NO: 12886 - DNA, 26 bp, Artificial Sequence
  Synthetic
ggutaaaacgacaaugaagaggagac

SEQ ID NO: 12887 - DNA, 30 bp, Artificial Sequence
  Synthetic
aggatgtgagagautataatgagttgucca

SEQ ID NO: 12888 - DNA, 28 bp, Artificial Sequence
  Synthetic
caatgtccttatuacttgggagactugt

SEQ ID NO: 12889 - DNA, 21 bp, Artificial Sequence
  Synthetic
cccagccagugagcttattuc

SEQ ID NO: 12890 - DNA, 28 bp, Artificial Sequence
  Synthetic
ctcacaaggaaaugatttucgagagaag

SEQ ID NO: 12891 - DNA, 30 bp, Artificial Sequence
  Synthetic
aaatgctaccaatucaagtgaagattauga

SEQ ID NO: 12892 - DNA, 29 bp, Artificial Sequence
  Synthetic
ttatccataagggutcccctacttuaaga

SEQ ID NO: 12893 - DNA, 26 bp, Artificial Sequence
  Synthetic
tgagatgatgcuaaagtctttgtuca

SEQ ID NO: 12894 - DNA, 21 bp, Artificial Sequence
  Synthetic
gaaucgcaaagcacccatucc

SEQ ID NO: 12895 - DNA, 32 bp, Artificial Sequence
  Synthetic
ataacttatgatgctutagataccctgcttua

SEQ ID NO: 12896 - DNA, 21 bp, Artificial Sequence
  Synthetic
agcactugcagtgtgauggaa

SEQ ID NO: 12897 - DNA, 21 bp, Artificial Sequence
  Synthetic
gaggcctuagacctgcagtut

SEQ ID NO: 12898 - DNA, 32 bp, Artificial Sequence
  Synthetic
gggtataaatacacaugtgcttctagaaauaa

SEQ ID NO: 12899 - DNA, 22 bp, Artificial Sequence
  Synthetic
cgctgagcuggaaaggaaaauc

SEQ ID NO: 12900 - DNA, 22 bp, Artificial Sequence
  Synthetic
gggtgcacuaggtacctuaact

SEQ ID NO: 12901 - DNA, 32 bp, Artificial Sequence
  Synthetic
cctgtcttgataatuctttctgtttcttcaut

SEQ ID NO: 12902 - DNA, 28 bp, Artificial Sequence
  Synthetic
ctagtttttccacaagutctgcaaauct

SEQ ID NO: 12903 - DNA, 22 bp, Artificial Sequence
  Synthetic
aggcaatgcauaggatgaucac

SEQ ID NO: 12904 - DNA, 26 bp, Artificial Sequence
  Synthetic
ggutcttataaataucccgggcaagg

SEQ ID NO: 12905 - DNA, 26 bp, Artificial Sequence
  Synthetic
actgacaggugtaggaaattagtugg

SEQ ID NO: 12906 - DNA, 30 bp, Artificial Sequence
  Synthetic
actcattgctauctttaaaaaccuccaact

SEQ ID NO: 12907 - DNA, 22 bp, Artificial Sequence
  Synthetic
gcatgagcaugtgctgtttugg

SEQ ID NO: 12908 - DNA, 23 bp, Artificial Sequence
  Synthetic
ctcacacugctcauccaaaggaa

SEQ ID NO: 12909 - DNA, 29 bp, Artificial Sequence
  Synthetic
gatcccaaauaaaacagtggatgtuaacg

SEQ ID NO: 12910 - DNA, 26 bp, Artificial Sequence
  Synthetic
tgatagacaccutcatcctcttcugt

SEQ ID NO: 12911 - DNA, 28 bp, Artificial Sequence
  Synthetic
cugaatgcataatgauaggaagaaggct

SEQ ID NO: 12912 - DNA, 32 bp, Artificial Sequence
  Synthetic
gagacaactgttacuttttaatgagtccttua

SEQ ID NO: 12913 - DNA, 32 bp, Artificial Sequence
  Synthetic
agaaatccucuagaagaaagaaattacaauca

SEQ ID NO: 12914 - DNA, 24 bp, Artificial Sequence
  Synthetic
tctctggtuataggatgtguggct

SEQ ID NO: 12915 - DNA, 28 bp, Artificial Sequence
  Synthetic
ctgttgctagcuaaagtttccttttcut

SEQ ID NO: 12916 - DNA, 22 bp, Artificial Sequence
  Synthetic
catcccacaugcagatucccat

SEQ ID NO: 12917 - DNA, 22 bp, Artificial Sequence
  Synthetic
cgcatauggtatcccucaacct

SEQ ID NO: 12918 - DNA, 25 bp, Artificial Sequence
  Synthetic
ttgcagctucccacttacaaaguat

SEQ ID NO: 12919 - DNA, 22 bp, Artificial Sequence
  Synthetic
aaaacagcaggugctugaaacc

SEQ ID NO: 12920 - DNA, 25 bp, Artificial Sequence
  Synthetic
gcgggattucacttgcttaaaauac

SEQ ID NO: 12921 - DNA, 26 bp, Artificial Sequence
  Synthetic
cccagtcaaatuacttagaggccaua

SEQ ID NO: 12922 - DNA, 30 bp, Artificial Sequence
  Synthetic
aaacttcattaugcttatttgcagugaaag

SEQ ID NO: 12923 - DNA, 25 bp, Artificial Sequence
  Synthetic
gagatguacagtgaaauccccgaaa

SEQ ID NO: 12924 - DNA, 23 bp, Artificial Sequence
  Synthetic
agttatgcucagcctttcgctut

SEQ ID NO: 12925 - DNA, 20 bp, Artificial Sequence
  Synthetic
gagaggaccuccgcttccua

SEQ ID NO: 12926 - DNA, 22 bp, Artificial Sequence
  Synthetic
gtctgctctuggtagctccauc

SEQ ID NO: 12927 - DNA, 24 bp, Artificial Sequence
  Synthetic
ttcttcttuccccttcctttgucc

SEQ ID NO: 12928 - DNA, 19 bp, Artificial Sequence
  Synthetic
gcauagcgcccacatucct

SEQ ID NO: 12929 - DNA, 22 bp, Artificial Sequence
  Synthetic
tctttuctttgtgcugccacct

SEQ ID NO: 12930 - DNA, 22 bp, Artificial Sequence
  Synthetic
gttgtctugacactgtguggga

SEQ ID NO: 12931 - DNA, 23 bp, Artificial Sequence
  Synthetic
tgttcatugagcgcttagacugt

SEQ ID NO: 12932 - DNA, 26 bp, Artificial Sequence
  Synthetic
cataggttgacaugaccgaatuaggg

SEQ ID NO: 12933 - DNA, 21 bp, Artificial Sequence
  Synthetic
cagtataacugtgcgccugga

SEQ ID NO: 12934 - DNA, 24 bp, Artificial Sequence
  Synthetic
gggautgcttatcucagacagact

SEQ ID NO: 12935 - DNA, 29 bp, Artificial Sequence
  Synthetic
aaatgctagtactautagtgggagacuct

SEQ ID NO: 12936 - DNA, 23 bp, Artificial Sequence
  Synthetic
ggautgagcauccaccaagaact

SEQ ID NO: 12937 - DNA, 28 bp, Artificial Sequence
  Synthetic
acatgtagaauaggaagtttugcaagca

SEQ ID NO: 12938 - DNA, 19 bp, Artificial Sequence
  Synthetic
aagtccucgctctccucca

SEQ ID NO: 12939 - DNA, 19 bp, Artificial Sequence
  Synthetic
ggccggaguttagccaguc

SEQ ID NO: 12940 - DNA, 22 bp, Artificial Sequence
  Synthetic
aatcatcccuggagcatctgug

SEQ ID NO: 12941 - DNA, 24 bp, Artificial Sequence
  Synthetic
tgaagugaaccccaaaatggucat

SEQ ID NO: 12942 - DNA, 25 bp, Artificial Sequence
  Synthetic
ctctaataccuaccactgaagguca

SEQ ID NO: 12943 - DNA, 25 bp, Artificial Sequence
  Synthetic
gugaatgaaacatugagggaagcaa

SEQ ID NO: 12944 - DNA, 24 bp, Artificial Sequence
  Synthetic
gtatttagagugctctugcaggct

SEQ ID NO: 12945 - DNA, 29 bp, Artificial Sequence
  Synthetic
agctctatgaaaagaucaaagttcctgut

SEQ ID NO: 12946 - DNA, 26 bp, Artificial Sequence
  Synthetic
gttggcaauaaaagccaagtucaact

SEQ ID NO: 12947 - DNA, 22 bp, Artificial Sequence
  Synthetic
ccagcccugagacatcctttug

SEQ ID NO: 12948 - DNA, 23 bp, Artificial Sequence
  Synthetic
taatuagcccaccucagcaagag

SEQ ID NO: 12949 - DNA, 23 bp, Artificial Sequence
  Synthetic
ccccaacaucgctgcatttatut

SEQ ID NO: 12950 - DNA, 25 bp, Artificial Sequence
  Synthetic
tgttgatgguctagaaaaugggcaa

SEQ ID NO: 12951 - DNA, 24 bp, Artificial Sequence
  Synthetic
aactggauaaacaaagcccuggaa

SEQ ID NO: 12952 - DNA, 27 bp, Artificial Sequence
  Synthetic
caagttccaaguttcaaatgtgtcucc

SEQ ID NO: 12953 - DNA, 22 bp, Artificial Sequence
  Synthetic
cttgccttugcctgggtauaga

SEQ ID NO: 12954 - DNA, 28 bp, Artificial Sequence
  Synthetic
gtaccatggagtuttatgagtcagcaua

SEQ ID NO: 12955 - DNA, 30 bp, Artificial Sequence
  Synthetic
ctcttttctgtttugcaagaacttcaucat

SEQ ID NO: 12956 - DNA, 24 bp, Artificial Sequence
  Synthetic
aaacaaaagccugtgctugaagag

SEQ ID NO: 12957 - DNA, 21 bp, Artificial Sequence
  Synthetic
ctgcccuggtttcttctucga

SEQ ID NO: 12958 - DNA, 27 bp, Artificial Sequence
  Synthetic
tgcttgcatgucatttactctgtttug

SEQ ID NO: 12959 - DNA, 30 bp, Artificial Sequence
  Synthetic
ttgagtcagcatuatccatcaaaggaauat

SEQ ID NO: 12960 - DNA, 30 bp, Artificial Sequence
  Synthetic
cttctgtcctugaagactatgatgtttuct

SEQ ID NO: 12961 - DNA, 28 bp, Artificial Sequence
  Synthetic
actggtcatgaauatgcccataaucaaa

SEQ ID NO: 12962 - DNA, 28 bp, Artificial Sequence
  Synthetic
acagagaaagaaagaaguaaugtggtua

SEQ ID NO: 12963 - DNA, 29 bp, Artificial Sequence
  Synthetic
caaccatttcatcutgtttccaaagaaug

SEQ ID NO: 12964 - DNA, 27 bp, Artificial Sequence
  Synthetic
atacaacagtaaagguagaggatgcut

SEQ ID NO: 12965 - DNA, 25 bp, Artificial Sequence
  Synthetic
ctgttctcttccugatgtagctcug

SEQ ID NO: 12966 - DNA, 25 bp, Artificial Sequence
  Synthetic
gcatgcttttuctctttttggtugc

SEQ ID NO: 12967 - DNA, 28 bp, Artificial Sequence
  Synthetic
gtgagtgtttaaauggctgcaagttaut

SEQ ID NO: 12968 - DNA, 29 bp, Artificial Sequence
  Synthetic
aagttgagacatutgcttaactctttugt

SEQ ID NO: 12969 - DNA, 21 bp, Artificial Sequence
  Synthetic
tgccagggccugtaatttcug

SEQ ID NO: 12970 - DNA, 30 bp, Artificial Sequence
  Synthetic
agatgataaaauaagattgcuggaagagca

SEQ ID NO: 12971 - DNA, 28 bp, Artificial Sequence
  Synthetic
cgtagtatttcuggaatcactcaacuga

SEQ ID NO: 12972 - DNA, 28 bp, Artificial Sequence
  Synthetic
tgtggaagaattacutgaaactggacut

SEQ ID NO: 12973 - DNA, 31 bp, Artificial Sequence
  Synthetic
aaaaaccttacacaaautacagagaaaucct

SEQ ID NO: 12974 - DNA, 22 bp, Artificial Sequence
  Synthetic
gccaauacagggaagtggtuac

SEQ ID NO: 12975 - DNA, 23 bp, Artificial Sequence
  Synthetic
tgctacttccugaacatgtgcut

SEQ ID NO: 12976 - DNA, 30 bp, Artificial Sequence
  Synthetic
gcttgtatgatcugtttctagcttgtauga

SEQ ID NO: 12977 - DNA, 27 bp, Artificial Sequence
  Synthetic
ggtagttttgtugtttaagctgcucaa

SEQ ID NO: 12978 - DNA, 31 bp, Artificial Sequence
  Synthetic
ggtagggatcuaagttgtattactgttuacc

SEQ ID NO: 12979 - DNA, 22 bp, Artificial Sequence
  Synthetic
ttcctctggugttcaacugcat

SEQ ID NO: 12980 - DNA, 28 bp, Artificial Sequence
  Synthetic
agttggaggcuaaagaagttcucaaaaa

SEQ ID NO: 12981 - DNA, 23 bp, Artificial Sequence
  Synthetic
tcagcacuctacugaaaccaagt

SEQ ID NO: 12982 - DNA, 28 bp, Artificial Sequence
  Synthetic
ggttttactuggccatgtaattgttuca

SEQ ID NO: 12983 - DNA, 28 bp, Artificial Sequence
  Synthetic
acaaccgttaaugctaaaaacaaaucca

SEQ ID NO: 12984 - DNA, 31 bp, Artificial Sequence
  Synthetic
aatgaaacacucacaaaacttagaacugaac

SEQ ID NO: 12985 - DNA, 28 bp, Artificial Sequence
  Synthetic
atgcaaaacaacaaauccagaatuagca

SEQ ID NO: 12986 - DNA, 23 bp, Artificial Sequence
  Synthetic
cacagtuacagcagttgctucag

SEQ ID NO: 12987 - DNA, 30 bp, Artificial Sequence
  Synthetic
attacacagacacauaacatcaatuaccca

SEQ ID NO: 12988 - DNA, 18 bp, Artificial Sequence
  Synthetic
ggtgacugcgcugggaaa

SEQ ID NO: 12989 - DNA, 21 bp, Artificial Sequence
  Synthetic
ggcgaaaagccuaaggcaaug

SEQ ID NO: 12990 - DNA, 28 bp, Artificial Sequence
  Synthetic
gtttcctcgttgaauacaaagtgtccua

SEQ ID NO: 12991 - DNA, 31 bp, Artificial Sequence
  Synthetic
atcctgttccuccagttgttaatatcaaaut

SEQ ID NO: 12992 - DNA, 24 bp, Artificial Sequence
  Synthetic
accgggcautcatagcaattuagt

SEQ ID NO: 12993 - DNA, 22 bp, Artificial Sequence
  Synthetic
cggctggucaaaagctctuaca

SEQ ID NO: 12994 - DNA, 29 bp, Artificial Sequence
  Synthetic
tgcttgtatagttucatgttttcctguca

SEQ ID NO: 12995 - DNA, 27 bp, Artificial Sequence
  Synthetic
gtcttacccgutcatctgttgaaugat

SEQ ID NO: 12996 - DNA, 22 bp, Artificial Sequence
  Synthetic
cctcaggagcutgcccatuaaa

SEQ ID NO: 12997 - DNA, 28 bp, Artificial Sequence
  Synthetic
agcccaccagaaauggtaaaatactuac

SEQ ID NO: 12998 - DNA, 28 bp, Artificial Sequence
  Synthetic
ccttcttttcucttccttcagauggaat

SEQ ID NO: 12999 - DNA, 29 bp, Artificial Sequence
  Synthetic
acagtgccugattatgttuaagaaaacca

SEQ ID NO: 13000 - DNA, 24 bp, Artificial Sequence
  Synthetic
gtttgaaattacaugaccggcugt

SEQ ID NO: 13001 - DNA, 29 bp, Artificial Sequence
  Synthetic
gggtttcctgaguaaatgatcatguagaa

SEQ ID NO: 13002 - DNA, 27 bp, Artificial Sequence
  Synthetic
ctagcaacaatucaggaacatggtuac

SEQ ID NO: 13003 - DNA, 23 bp, Artificial Sequence
  Synthetic
tgtctcttuagcagcaacuccac

SEQ ID NO: 13004 - DNA, 28 bp, Artificial Sequence
  Synthetic
tttttcttctagcutgccaacaacatut

SEQ ID NO: 13005 - DNA, 22 bp, Artificial Sequence
  Synthetic
ggtggucacatgagaaguccaa

SEQ ID NO: 13006 - DNA, 26 bp, Artificial Sequence
  Synthetic
gtgatgtaaaacutgatcctcgucca

SEQ ID NO: 13007 - DNA, 29 bp, Artificial Sequence
  Synthetic
aagtttgtgtttuaacaggataggtguct

SEQ ID NO: 13008 - DNA, 24 bp, Artificial Sequence
  Synthetic
tccccttaaaguagttgtcaugcc

SEQ ID NO: 13009 - DNA, 24 bp, Artificial Sequence
  Synthetic
acatcacgcauggaagaaguagac

SEQ ID NO: 13010 - DNA, 22 bp, Artificial Sequence
  Synthetic
cutccagacugaagccagaaga

SEQ ID NO: 13011 - DNA, 22 bp, Artificial Sequence
  Synthetic
acaaugggttacauggcagcaa

SEQ ID NO: 13012 - DNA, 29 bp, Artificial Sequence
  Synthetic
ggaaatgctgtautcacatacctttucaa

SEQ ID NO: 13013 - DNA, 21 bp, Artificial Sequence
  Synthetic
gucaccaaagaaggccuggaa

SEQ ID NO: 13014 - DNA, 26 bp, Artificial Sequence
  Synthetic
cagagccuacaagattguaagaacga

SEQ ID NO: 13015 - DNA, 26 bp, Artificial Sequence
  Synthetic
gctttcagagcugttaaggtacuaca

SEQ ID NO: 13016 - DNA, 29 bp, Artificial Sequence
  Synthetic
cccagaaaguacttctttaatcagugaca

SEQ ID NO: 13017 - DNA, 26 bp, Artificial Sequence
  Synthetic
cgtgctccutttgatctgttugaaaa

SEQ ID NO: 13018 - DNA, 28 bp, Artificial Sequence
  Synthetic
ttcctcaucagaaccaauatcttcaaut

SEQ ID NO: 13019 - DNA, 21 bp, Artificial Sequence
  Synthetic
gcagcagugatgtgattucgt

SEQ ID NO: 13020 - DNA, 29 bp, Artificial Sequence
  Synthetic
tcagcaaccaaauaagcagaauaaaaacc

SEQ ID NO: 13021 - DNA, 23 bp, Artificial Sequence
  Synthetic
ggaaugaccaaggctgactugat

SEQ ID NO: 13022 - DNA, 25 bp, Artificial Sequence
  Synthetic
aatgacatcaacugggcaatttcug

SEQ ID NO: 13023 - DNA, 21 bp, Artificial Sequence
  Synthetic
acgcgauggaatttcgtgtug

SEQ ID NO: 13024 - DNA, 23 bp, Artificial Sequence
  Synthetic
cctaccccgccugaaauaaaaca

SEQ ID NO: 13025 - DNA, 20 bp, Artificial Sequence
  Synthetic
ccgcccagagugctgaauac

SEQ ID NO: 13026 - DNA, 22 bp, Artificial Sequence
  Synthetic
gggagaacugaaggaugacgac

SEQ ID NO: 13027 - DNA, 25 bp, Artificial Sequence
  Synthetic
caggcttcuaagtacccugagaaat

SEQ ID NO: 13028 - DNA, 23 bp, Artificial Sequence
  Synthetic
tctcttccccaauctacctgugt

SEQ ID NO: 13029 - DNA, 20 bp, Artificial Sequence
  Synthetic
gccatggagucgatgagcug

SEQ ID NO: 13030 - DNA, 28 bp, Artificial Sequence
  Synthetic
ccccttgccucatattaacaagtaauct

SEQ ID NO: 13031 - DNA, 26 bp, Artificial Sequence
  Synthetic
aguaaattccaaggugaaggaaacca

SEQ ID NO: 13032 - DNA, 18 bp, Artificial Sequence
  Synthetic
ccatgctgcuggcgtcua

SEQ ID NO: 13033 - DNA, 24 bp, Artificial Sequence
  Synthetic
aagagtagaaucttggcacaugct

SEQ ID NO: 13034 - DNA, 19 bp, Artificial Sequence
  Synthetic
gcctctcccuccatgcuca

SEQ ID NO: 13035 - DNA, 20 bp, Artificial Sequence
  Synthetic
ggctctugatctcccugcaa

SEQ ID NO: 13036 - DNA, 24 bp, Artificial Sequence
  Synthetic
cacagagtacauggatgaggctut

SEQ ID NO: 13037 - DNA, 21 bp, Artificial Sequence
  Synthetic
cauctcaggtttugcgcacag

SEQ ID NO: 13038 - DNA, 20 bp, Artificial Sequence
  Synthetic
aggtcaguggatcccctcuc

SEQ ID NO: 13039 - DNA, 24 bp, Artificial Sequence
  Synthetic
caatggaacuatccggaacaucct

SEQ ID NO: 13040 - DNA, 19 bp, Artificial Sequence
  Synthetic
cuggagagucacccactuc

SEQ ID NO: 13041 - DNA, 20 bp, Artificial Sequence
  Synthetic
gctgtgtguccctgcttcua

SEQ ID NO: 13042 - DNA, 22 bp, Artificial Sequence
  Synthetic
cattgaaguctgcgtcucgagt

SEQ ID NO: 13043 - DNA, 25 bp, Artificial Sequence
  Synthetic
tcccaaccaugaagatttcttugct

SEQ ID NO: 13044 - DNA, 21 bp, Artificial Sequence
  Synthetic
gcattgccuttctctgccugt

SEQ ID NO: 13045 - DNA, 25 bp, Artificial Sequence
  Synthetic
acaagaagcugaaggaaatctugct

SEQ ID NO: 13046 - DNA, 22 bp, Artificial Sequence
  Synthetic
gcttccaagcucttggcttuct

SEQ ID NO: 13047 - DNA, 23 bp, Artificial Sequence
  Synthetic
ggagtaaggacauctgagctugt

SEQ ID NO: 13048 - DNA, 17 bp, Artificial Sequence
  Synthetic
tcctccguggctugcag

SEQ ID NO: 13049 - DNA, 20 bp, Artificial Sequence
  Synthetic
acggtggguttctcaaucgt

SEQ ID NO: 13050 - DNA, 23 bp, Artificial Sequence
  Synthetic
gctgaagccugttcttggtctut

SEQ ID NO: 13051 - DNA, 21 bp, Artificial Sequence
  Synthetic
cttgtagcuctccgacucgaa

SEQ ID NO: 13052 - DNA, 20 bp, Artificial Sequence
  Synthetic
ccaggucccctggatgaugt

SEQ ID NO: 13053 - DNA, 21 bp, Artificial Sequence
  Synthetic
ccagtctctuggcaccctuag

SEQ ID NO: 13054 - DNA, 23 bp, Artificial Sequence
  Synthetic
atagcaggauggtgggattgaug

SEQ ID NO: 13055 - DNA, 20 bp, Artificial Sequence
  Synthetic
caggaggaccuggacucaga

SEQ ID NO: 13056 - DNA, 27 bp, Artificial Sequence
  Synthetic
aaatctcttgguagctggtttacctuc

SEQ ID NO: 13057 - DNA, 28 bp, Artificial Sequence
  Synthetic
ggagaggautagtgactuaacgacaaat

SEQ ID NO: 13058 - DNA, 20 bp, Artificial Sequence
  Synthetic
cctgugacacctuaccagca

SEQ ID NO: 13059 - DNA, 22 bp, Artificial Sequence
  Synthetic
tgtaugcagaggcugaggagat

SEQ ID NO: 13060 - DNA, 24 bp, Artificial Sequence
  Synthetic
ccttaagctcautctctgcctuct

SEQ ID NO: 13061 - DNA, 23 bp, Artificial Sequence
  Synthetic
tgacaacauatcccttugccaca

SEQ ID NO: 13062 - DNA, 20 bp, Artificial Sequence
  Synthetic
ggccatgaugacatcgguga

SEQ ID NO: 13063 - DNA, 23 bp, Artificial Sequence
  Synthetic
gtggaaaucaggagctcttccut

SEQ ID NO: 13064 - DNA, 18 bp, Artificial Sequence
  Synthetic
ggtgtugcgtagcguggt

SEQ ID NO: 13065 - DNA, 17 bp, Artificial Sequence
  Synthetic
cctggcugtgccccaua

SEQ ID NO: 13066 - DNA, 20 bp, Artificial Sequence
  Synthetic
cttgggcutctggaactugg

SEQ ID NO: 13067 - DNA, 23 bp, Artificial Sequence
  Synthetic
ggttgggtgutctctctgatuca

SEQ ID NO: 13068 - DNA, 21 bp, Artificial Sequence
  Synthetic
cttguccagggctttgtucac

SEQ ID NO: 13069 - DNA, 26 bp, Artificial Sequence
  Synthetic
gaaaatggagcccautgagaauaacc

SEQ ID NO: 13070 - DNA, 21 bp, Artificial Sequence
  Synthetic
gcugaaacccatgatugccat

SEQ ID NO: 13071 - DNA, 26 bp, Artificial Sequence
  Synthetic
agtatgtcttatugaccctgaccugt

SEQ ID NO: 13072 - DNA, 22 bp, Artificial Sequence
  Synthetic
gatctaagtucactccgugcct

SEQ ID NO: 13073 - DNA, 27 bp, Artificial Sequence
  Synthetic
gtgatggaaauaacgctgacatttgut

SEQ ID NO: 13074 - DNA, 20 bp, Artificial Sequence
  Synthetic
gtacctggcugcctgcaaua

SEQ ID NO: 13075 - DNA, 22 bp, Artificial Sequence
  Synthetic
gaaggucacggtugggaaagat

SEQ ID NO: 13076 - DNA, 19 bp, Artificial Sequence
  Synthetic
ctcacccuccactguacgt

SEQ ID NO: 13077 - DNA, 20 bp, Artificial Sequence
  Synthetic
cctggcucagctctgtgaug

SEQ ID NO: 13078 - DNA, 22 bp, Artificial Sequence
  Synthetic
ggactucctcccaucaccaaat

SEQ ID NO: 13079 - DNA, 26 bp, Artificial Sequence
  Synthetic
cgccaggagauattatactgtccuga

SEQ ID NO: 13080 - DNA, 22 bp, Artificial Sequence
  Synthetic
cccatauggcctctgguagagt

SEQ ID NO: 13081 - DNA, 22 bp, Artificial Sequence
  Synthetic
gcuccagaaggcaggaaugaag

SEQ ID NO: 13082 - DNA, 17 bp, Artificial Sequence
  Synthetic
ccuggagcugggaccct

SEQ ID NO: 13083 - DNA, 20 bp, Artificial Sequence
  Synthetic
cgtcagacuccaccagcuct

SEQ ID NO: 13084 - DNA, 23 bp, Artificial Sequence
  Synthetic
gaagcctccuggacagacuaaag

SEQ ID NO: 13085 - DNA, 21 bp, Artificial Sequence
  Synthetic
caaagccacugtcaaacgugt

SEQ ID NO: 13086 - DNA, 21 bp, Artificial Sequence
  Synthetic
gcguacttaagctucgacgca

SEQ ID NO: 13087 - DNA, 18 bp, Artificial Sequence
  Synthetic
cctcgcgcccutaccuac

SEQ ID NO: 13088 - DNA, 29 bp, Artificial Sequence
  Synthetic
gctggctttaugagtataggtattatgut

SEQ ID NO: 13089 - DNA, 20 bp, Artificial Sequence
  Synthetic
gagctctggcuactgccaua

SEQ ID NO: 13090 - DNA, 21 bp, Artificial Sequence
  Synthetic
tccttcatugcctggcactug

SEQ ID NO: 13091 - DNA, 24 bp, Artificial Sequence
  Synthetic
caccactacucatggaggatugat

SEQ ID NO: 13092 - DNA, 21 bp, Artificial Sequence
  Synthetic
gctaugaacccagaggtcgug

SEQ ID NO: 13093 - DNA, 28 bp, Artificial Sequence
  Synthetic
acaagaatacuaaaccatgcacuaggga

SEQ ID NO: 13094 - DNA, 25 bp, Artificial Sequence
  Synthetic
tggaaagggaguactgtagccttua

SEQ ID NO: 13095 - DNA, 21 bp, Artificial Sequence
  Synthetic
ctgcttuagctgaaggugggt

SEQ ID NO: 13096 - DNA, 24 bp, Artificial Sequence
  Synthetic
tgguctatctgcatuaggacccat

SEQ ID NO: 13097 - DNA, 25 bp, Artificial Sequence
  Synthetic
aagtttcacucacggatuaggacac

SEQ ID NO: 13098 - DNA, 31 bp, Artificial Sequence
  Synthetic
gaggctggtaacucaaatataatggatacut

SEQ ID NO: 13099 - DNA, 21 bp, Artificial Sequence
  Synthetic
acgaggguaacactggguaca

SEQ ID NO: 13100 - DNA, 22 bp, Artificial Sequence
  Synthetic
gggtgaaatgcugacctgtgut

SEQ ID NO: 13101 - DNA, 29 bp, Artificial Sequence
  Synthetic
ggtgagtgctuaaaaacattcagaagtua

SEQ ID NO: 13102 - DNA, 27 bp, Artificial Sequence
  Synthetic
ttcatttgttcauactcaacccacuca

SEQ ID NO: 13103 - DNA, 22 bp, Artificial Sequence
  Synthetic
ggaaagcugaagccacccauag

SEQ ID NO: 13104 - DNA, 24 bp, Artificial Sequence
  Synthetic
ggttgttaatccuggagccaauca

SEQ ID NO: 13105 - DNA, 23 bp, Artificial Sequence
  Synthetic
tgctcagggaggaguagaaguag

SEQ ID NO: 13106 - DNA, 21 bp, Artificial Sequence
  Synthetic
guactagauggcgagcagacc

SEQ ID NO: 13107 - DNA, 22 bp, Artificial Sequence
  Synthetic
cuccaacagcuacagcacaaac

SEQ ID NO: 13108 - DNA, 18 bp, Artificial Sequence
  Synthetic
cttgcgagugggcucagt

SEQ ID NO: 13109 - DNA, 25 bp, Artificial Sequence
  Synthetic
actcctaaaucctgagtaagugcca

SEQ ID NO: 13110 - DNA, 19 bp, Artificial Sequence
  Synthetic
gcauagccgcggttttuca

SEQ ID NO: 13111 - DNA, 17 bp, Artificial Sequence
  Synthetic
gccugcactucgacgac

SEQ ID NO: 13112 - DNA, 17 bp, Artificial Sequence
  Synthetic
gccgcacuggctgauga

SEQ ID NO: 13113 - DNA, 22 bp, Artificial Sequence
  Synthetic
tcagaacuggcaaugagcaact

SEQ ID NO: 13114 - DNA, 17 bp, Artificial Sequence
  Synthetic
gctgcgcgcuttgcaua

SEQ ID NO: 13115 - DNA, 19 bp, Artificial Sequence
  Synthetic
gttaacucccccgugccaa

SEQ ID NO: 13116 - DNA, 24 bp, Artificial Sequence
  Synthetic
gggagtttagutctttcttgccut

SEQ ID NO: 13117 - DNA, 27 bp, Artificial Sequence
  Synthetic
tgctggaucagaggctttaaaatctut

SEQ ID NO: 13118 - DNA, 22 bp, Artificial Sequence
  Synthetic
caaggtgggcaucttgacgtua

SEQ ID NO: 13119 - DNA, 26 bp, Artificial Sequence
  Synthetic
tgtgagtttgccugttttctctcuag

SEQ ID NO: 13120 - DNA, 21 bp, Artificial Sequence
  Synthetic
gcctcagcagcgugtttctua

SEQ ID NO: 13121 - DNA, 21 bp, Artificial Sequence
  Synthetic
gttggtcucctgcggttuaca

SEQ ID NO: 13122 - DNA, 20 bp, Artificial Sequence
  Synthetic
catcucaccacccacacgua

SEQ ID NO: 13123 - DNA, 20 bp, Artificial Sequence
  Synthetic
atctgtgtgcuggtgctcuc

SEQ ID NO: 13124 - DNA, 19 bp, Artificial Sequence
  Synthetic
cggtcaguacacgcaugga

SEQ ID NO: 13125 - DNA, 20 bp, Artificial Sequence
  Synthetic
gccagaugcgagcagttcut

SEQ ID NO: 13126 - DNA, 26 bp, Artificial Sequence
  Synthetic
gcttaaatgaagugaatgcacugagt

SEQ ID NO: 13127 - DNA, 28 bp, Artificial Sequence
  Synthetic
ggcgatacugaggaggattttattguat

SEQ ID NO: 13128 - DNA, 19 bp, Artificial Sequence
  Synthetic
gaacggucacctacgugct

SEQ ID NO: 13129 - DNA, 23 bp, Artificial Sequence
  Synthetic
ccuctctctcuggacacacagaa

SEQ ID NO: 13130 - DNA, 25 bp, Artificial Sequence
  Synthetic
acaaagtauctcgtgacugggaaga

SEQ ID NO: 13131 - DNA, 28 bp, Artificial Sequence
  Synthetic
cggaatgcacuaaattcagttttaugaa

SEQ ID NO: 13132 - DNA, 20 bp, Artificial Sequence
  Synthetic
ggagacgagcucatgagucc

SEQ ID NO: 13133 - DNA, 20 bp, Artificial Sequence
  Synthetic
acctcctgcugacgtcttuc

SEQ ID NO: 13134 - DNA, 20 bp, Artificial Sequence
  Synthetic
agcatgagcucccatccauc

SEQ ID NO: 13135 - DNA, 27 bp, Artificial Sequence
  Synthetic
tttccatctggtutcttccttcttcuc

SEQ ID NO: 13136 - DNA, 20 bp, Artificial Sequence
  Synthetic
agctgcuagaggcctttucg

SEQ ID NO: 13137 - DNA, 27 bp, Artificial Sequence
  Synthetic
tgttctttttcctutcctccctgtaug

SEQ ID NO: 13138 - DNA, 27 bp, Artificial Sequence
  Synthetic
ccttctgggaagaucaggtattaggua

SEQ ID NO: 13139 - DNA, 20 bp, Artificial Sequence
  Synthetic
gtttgauggcccaggcatuc

SEQ ID NO: 13140 - DNA, 20 bp, Artificial Sequence
  Synthetic
cacgagcucagaagcaggua

SEQ ID NO: 13141 - DNA, 28 bp, Artificial Sequence
  Synthetic
ctgacttgaaguttttgtctgtttcucc

SEQ ID NO: 13142 - DNA, 22 bp, Artificial Sequence
  Synthetic
catttacaguctgggcugcagt

SEQ ID NO: 13143 - DNA, 29 bp, Artificial Sequence
  Synthetic
atgcaggtaucacacaaatuacagaagat

SEQ ID NO: 13144 - DNA, 24 bp, Artificial Sequence
  Synthetic
cacaatgcctugtacgtgaagaug

SEQ ID NO: 13145 - DNA, 29 bp, Artificial Sequence
  Synthetic
aggaaaatgcautcataaaggacucagaa

SEQ ID NO: 13146 - DNA, 21 bp, Artificial Sequence
  Synthetic
cagatctgucccacgcuagag

SEQ ID NO: 13147 - DNA, 30 bp, Artificial Sequence
  Synthetic
ctcatgtgtuaagagaaagctatggtttug

SEQ ID NO: 13148 - DNA, 18 bp, Artificial Sequence
  Synthetic
gcugcacaggcccatcua

SEQ ID NO: 13149 - DNA, 20 bp, Artificial Sequence
  Synthetic
ccgtctcuaacagtgucgca

SEQ ID NO: 13150 - DNA, 21 bp, Artificial Sequence
  Synthetic
cagtcaccucatctccuagcc

SEQ ID NO: 13151 - DNA, 23 bp, Artificial Sequence
  Synthetic
gagaucaagcugagcaacaagac

SEQ ID NO: 13152 - DNA, 22 bp, Artificial Sequence
  Synthetic
ccccagtgugtaagaccaacug

SEQ ID NO: 13153 - DNA, 25 bp, Artificial Sequence
  Synthetic
cctgagtctcauggtctttgtgtug

SEQ ID NO: 13154 - DNA, 20 bp, Artificial Sequence
  Synthetic
ggaaacugaggcgctgctua

SEQ ID NO: 13155 - DNA, 24 bp, Artificial Sequence
  Synthetic
tctttcttgtuctgtgcccuacag

SEQ ID NO: 13156 - DNA, 18 bp, Artificial Sequence
  Synthetic
ccucccagtugccccaaa

SEQ ID NO: 13157 - DNA, 28 bp, Artificial Sequence
  Synthetic
gtgattttctutgctcttcttucaccag

SEQ ID NO: 13158 - DNA, 21 bp, Artificial Sequence
  Synthetic
ccttaccuccagcaacugcac

SEQ ID NO: 13159 - DNA, 20 bp, Artificial Sequence
  Synthetic
ggaccctguaccccttcucc

SEQ ID NO: 13160 - DNA, 23 bp, Artificial Sequence
  Synthetic
gcaagttctcutgccttttggug

SEQ ID NO: 13161 - DNA, 29 bp, Artificial Sequence
  Synthetic
attcagagtaaaccutgctgtagattuga

SEQ ID NO: 13162 - DNA, 25 bp, Artificial Sequence
  Synthetic
gtctcguaacggtttttctcuacca

SEQ ID NO: 13163 - DNA, 25 bp, Artificial Sequence
  Synthetic
actccgcatuactacatccaaaucc

SEQ ID NO: 13164 - DNA, 30 bp, Artificial Sequence
  Synthetic
gtugtgctgtttgaauaaaaagaaacaagt

SEQ ID NO: 13165 - DNA, 27 bp, Artificial Sequence
  Synthetic
aaaaataccaatccauacccacctcug

SEQ ID NO: 13166 - DNA, 26 bp, Artificial Sequence
  Synthetic
gtaaatgatgccuggtgtatttugct

SEQ ID NO: 13167 - DNA, 22 bp, Artificial Sequence
  Synthetic
gggagaatuccctttccucaga

SEQ ID NO: 13168 - DNA, 23 bp, Artificial Sequence
  Synthetic
cagctctcccaugtatgtcgaut

SEQ ID NO: 13169 - DNA, 25 bp, Artificial Sequence
  Synthetic
acatgauggaaacgaacaccaauct

SEQ ID NO: 13170 - DNA, 23 bp, Artificial Sequence
  Synthetic
ctcctctttuggaaacagcucca

SEQ ID NO: 13171 - DNA, 24 bp, Artificial Sequence
  Synthetic
cctgaataagautgaagcggcuct

SEQ ID NO: 13172 - DNA, 20 bp, Artificial Sequence
  Synthetic
ggttccacuttgggccugag

SEQ ID NO: 13173 - DNA, 21 bp, Artificial Sequence
  Synthetic
ccauacagcagccaguacgag

SEQ ID NO: 13174 - DNA, 21 bp, Artificial Sequence
  Synthetic
ccugagagagaggaggacuct

SEQ ID NO: 13175 - DNA, 28 bp, Artificial Sequence
  Synthetic
gtatctgtaactguccttgtcatctguc

SEQ ID NO: 13176 - DNA, 26 bp, Artificial Sequence
  Synthetic
gactgctctaucctaacagataugcc

SEQ ID NO: 13177 - DNA, 22 bp, Artificial Sequence
  Synthetic
agaggaugaacacagcctucac

SEQ ID NO: 13178 - DNA, 22 bp, Artificial Sequence
  Synthetic
gaaggugtggcugaacacaaag

SEQ ID NO: 13179 - DNA, 22 bp, Artificial Sequence
  Synthetic
tgtgccagcugactcugaaaag

SEQ ID NO: 13180 - DNA, 19 bp, Artificial Sequence
  Synthetic
gcacgcauccgactgtuca

SEQ ID NO: 13181 - DNA, 19 bp, Artificial Sequence
  Synthetic
ctctcugccacttcugcga

SEQ ID NO: 13182 - DNA, 23 bp, Artificial Sequence
  Synthetic
actggctctagucctttggaguc

SEQ ID NO: 13183 - DNA, 23 bp, Artificial Sequence
  Synthetic
gagautcacattuccggcagaac

SEQ ID NO: 13184 - DNA, 21 bp, Artificial Sequence
  Synthetic
gtggtgtgugccctctacauc

SEQ ID NO: 13185 - DNA, 22 bp, Artificial Sequence
  Synthetic
augaagagagcgtuggaggaac

SEQ ID NO: 13186 - DNA, 25 bp, Artificial Sequence
  Synthetic
agaagagggtutgcaatttctcuca

SEQ ID NO: 13187 - DNA, 19 bp, Artificial Sequence
  Synthetic
cgtggauggtgaggcugac

SEQ ID NO: 13188 - DNA, 23 bp, Artificial Sequence
  Synthetic
gggaaaaagucttccagccauag

SEQ ID NO: 13189 - DNA, 18 bp, Artificial Sequence
  Synthetic
ccagcttccucccggaug

SEQ ID NO: 13190 - DNA, 23 bp, Artificial Sequence
  Synthetic
gactataagtcuccccacgucac

SEQ ID NO: 13191 - DNA, 21 bp, Artificial Sequence
  Synthetic
tcttgctggcuttgtgctuct

SEQ ID NO: 13192 - DNA, 20 bp, Artificial Sequence
  Synthetic
cugcaggcatcuacaccagt

SEQ ID NO: 13193 - DNA, 17 bp, Artificial Sequence
  Synthetic
agggugctggugaacgg

SEQ ID NO: 13194 - DNA, 18 bp, Artificial Sequence
  Synthetic
gcagcuaccactccucca

SEQ ID NO: 13195 - DNA, 17 bp, Artificial Sequence
  Synthetic
cctcgggugtcccucct

SEQ ID NO: 13196 - DNA, 17 bp, Artificial Sequence
  Synthetic
cugagccugacggccaa

SEQ ID NO: 13197 - DNA, 17 bp, Artificial Sequence
  Synthetic
tgggcaggauccccuca

SEQ ID NO: 13198 - DNA, 18 bp, Artificial Sequence
  Synthetic
cccctcaaugggctccut

SEQ ID NO: 13199 - DNA, 17 bp, Artificial Sequence
  Synthetic
ccagggcugagctcucc

SEQ ID NO: 13200 - DNA, 22 bp, Artificial Sequence
  Synthetic
gauccagcagauccagcagaaa

SEQ ID NO: 13201 - DNA, 18 bp, Artificial Sequence
  Synthetic
gguggagcagacgctgug

SEQ ID NO: 13202 - DNA, 22 bp, Artificial Sequence
  Synthetic
ttcttggccuaggaagctgtuc

SEQ ID NO: 13203 - DNA, 25 bp, Artificial Sequence
  Synthetic
ggtggatttagccuttttcctggut

SEQ ID NO: 13204 - DNA, 22 bp, Artificial Sequence
  Synthetic
gccugagccccttttucagaag

SEQ ID NO: 13205 - DNA, 25 bp, Artificial Sequence
  Synthetic
tctcgtagcccutgtagttctucat

SEQ ID NO: 13206 - DNA, 22 bp, Artificial Sequence
  Synthetic
cctgacuccaatccctctucct

SEQ ID NO: 13207 - DNA, 23 bp, Artificial Sequence
  Synthetic
ctcacgttacugatctggtccug

SEQ ID NO: 13208 - DNA, 21 bp, Artificial Sequence
  Synthetic
ggttuggcaggacagttucca

SEQ ID NO: 13209 - DNA, 18 bp, Artificial Sequence
  Synthetic
ctccggccagggutacuc

SEQ ID NO: 13210 - DNA, 19 bp, Artificial Sequence
  Synthetic
cccttttcuccaccgccut

SEQ ID NO: 13211 - DNA, 21 bp, Artificial Sequence
  Synthetic
cggucgggacattttcuccat

SEQ ID NO: 13212 - DNA, 26 bp, Artificial Sequence
  Synthetic
tttcccttcttcugcagcatttagua

SEQ ID NO: 13213 - DNA, 25 bp, Artificial Sequence
  Synthetic
aggtccaugtattccaacuggaaag

SEQ ID NO: 13214 - DNA, 22 bp, Artificial Sequence
  Synthetic
ccgcaauacaccaagtcccaut

SEQ ID NO: 13215 - DNA, 23 bp, Artificial Sequence
  Synthetic
gttcttccucagagaactugcgt

SEQ ID NO: 13216 - DNA, 23 bp, Artificial Sequence
  Synthetic
cugaaagagaaccagaucgccat

SEQ ID NO: 13217 - DNA, 23 bp, Artificial Sequence
  Synthetic
cctgcaaaaaugccatccuacag

SEQ ID NO: 13218 - DNA, 21 bp, Artificial Sequence
  Synthetic
acgtcaaaauggccgatcuga

SEQ ID NO: 13219 - DNA, 26 bp, Artificial Sequence
  Synthetic
accgggauaacaaagagcaauaaaga

SEQ ID NO: 13220 - DNA, 30 bp, Artificial Sequence
  Synthetic
aagtactttattgacucctgcttttctaut

SEQ ID NO: 13221 - DNA, 28 bp, Artificial Sequence
  Synthetic
gcaatcatctcugagtgctaaaatccua

SEQ ID NO: 13222 - DNA, 24 bp, Artificial Sequence
  Synthetic
atttgcatctcauttgttcgccut

SEQ ID NO: 13223 - DNA, 19 bp, Artificial Sequence
  Synthetic
cggtccugtccagacucac

SEQ ID NO: 13224 - DNA, 22 bp, Artificial Sequence
  Synthetic
gcccttucaaggattccuccat

SEQ ID NO: 13225 - DNA, 22 bp, Artificial Sequence
  Synthetic
gcctgtcccauacaccttccua

SEQ ID NO: 13226 - DNA, 21 bp, Artificial Sequence
  Synthetic
cgctgccagauttgttctucc

SEQ ID NO: 13227 - DNA, 17 bp, Artificial Sequence
  Synthetic
guagcgggucccccaac

SEQ ID NO: 13228 - DNA, 24 bp, Artificial Sequence
  Synthetic
gaaaaaggutgcacagucacagaa

SEQ ID NO: 13229 - DNA, 24 bp, Artificial Sequence
  Synthetic
cacagtucacctggucaaaagaga

SEQ ID NO: 13230 - DNA, 30 bp, Artificial Sequence
  Synthetic
gggaacttgacacauctctttaattauagg

SEQ ID NO: 13231 - DNA, 24 bp, Artificial Sequence
  Synthetic
cttttgggaagutggtucaacaca

SEQ ID NO: 13232 - DNA, 24 bp, Artificial Sequence
  Synthetic
caaggaaccuactggtgtcatgua

SEQ ID NO: 13233 - DNA, 28 bp, Artificial Sequence
  Synthetic
tttcctttgcutaattaaacgtugcagt

SEQ ID NO: 13234 - DNA, 21 bp, Artificial Sequence
  Synthetic
cgaaggacaaggutgccctut

SEQ ID NO: 13235 - DNA, 27 bp, Artificial Sequence
  Synthetic
agtaagatccaacagugaaaccactut

SEQ ID NO: 13236 - DNA, 29 bp, Artificial Sequence
  Synthetic
ggtctgaaaautgtctgtgtguacaaaat

SEQ ID NO: 13237 - DNA, 26 bp, Artificial Sequence
  Synthetic
cacaggtttcuctagtttgtcauggt

SEQ ID NO: 13238 - DNA, 29 bp, Artificial Sequence
  Synthetic
aggctctagagautcgaagtagtttauct

SEQ ID NO: 13239 - DNA, 24 bp, Artificial Sequence
  Synthetic
aaaatgggctutaccgtaccauga

SEQ ID NO: 13240 - DNA, 22 bp, Artificial Sequence
  Synthetic
cacctgaagaaacuggcagcua

SEQ ID NO: 13241 - DNA, 30 bp, Artificial Sequence
  Synthetic
gtctatgccaaaauaagtttccagttucat

SEQ ID NO: 13242 - DNA, 25 bp, Artificial Sequence
  Synthetic
ccattcacaucctggtaauccaagt

SEQ ID NO: 13243 - DNA, 30 bp, Artificial Sequence
  Synthetic
tgtctctacuggcacattacttctacuaaa

SEQ ID NO: 13244 - DNA, 28 bp, Artificial Sequence
  Synthetic
cagcaagcugttcaaattattuggaaac

SEQ ID NO: 13245 - DNA, 25 bp, Artificial Sequence
  Synthetic
ttccgcacuattgctttgtttuacc

SEQ ID NO: 13246 - DNA, 22 bp, Artificial Sequence
  Synthetic
ccugttctggttugcacacaga

SEQ ID NO: 13247 - DNA, 28 bp, Artificial Sequence
  Synthetic
tggaattatttguaaatcaggaggcugt

SEQ ID NO: 13248 - DNA, 20 bp, Artificial Sequence
  Synthetic
ggtgcuccagactgatguca

SEQ ID NO: 13249 - DNA, 20 bp, Artificial Sequence
  Synthetic
cttctggccugaggtcucac

SEQ ID NO: 13250 - DNA, 17 bp, Artificial Sequence
  Synthetic
gugcgtcguggaccaga

SEQ ID NO: 13251 - DNA, 20 bp, Artificial Sequence
  Synthetic
gcatguggcacgaggagaug

SEQ ID NO: 13252 - DNA, 18 bp, Artificial Sequence
  Synthetic
aggacagggcugtcgcua

SEQ ID NO: 13253 - DNA, 18 bp, Artificial Sequence
  Synthetic
cgugcgcaaacugcagag

SEQ ID NO: 13254 - DNA, 17 bp, Artificial Sequence
  Synthetic
gcuaagcccggcctcug

SEQ ID NO: 13255 - DNA, 20 bp, Artificial Sequence
  Synthetic
ttcaggutgagctucagcga

SEQ ID NO: 13256 - DNA, 20 bp, Artificial Sequence
  Synthetic
cccagcugctctccauacac

SEQ ID NO: 13257 - DNA, 21 bp, Artificial Sequence
  Synthetic
ggtgacagcuctccctttcuc

SEQ ID NO: 13258 - DNA, 22 bp, Artificial Sequence
  Synthetic
cgagctgcucttcttctgctuc

SEQ ID NO: 13259 - DNA, 21 bp, Artificial Sequence
  Synthetic
gaacccaagauggcccugaaa

SEQ ID NO: 13260 - DNA, 24 bp, Artificial Sequence
  Synthetic
cagagaagguagagaguggaatug

SEQ ID NO: 13261 - DNA, 22 bp, Artificial Sequence
  Synthetic
ccctgcccaucgataatgacug

SEQ ID NO: 13262 - DNA, 22 bp, Artificial Sequence
  Synthetic
ggaggagugaagacagaugggt

SEQ ID NO: 13263 - DNA, 21 bp, Artificial Sequence
  Synthetic
cactcacgacuggatggtgut

SEQ ID NO: 13264 - DNA, 17 bp, Artificial Sequence
  Synthetic
agagcugcggcttgguc

SEQ ID NO: 13265 - DNA, 19 bp, Artificial Sequence
  Synthetic
gaacgtuaacggcgcctuc

SEQ ID NO: 13266 - DNA, 19 bp, Artificial Sequence
  Synthetic
ggguggagagtugcagcag

SEQ ID NO: 13267 - DNA, 17 bp, Artificial Sequence
  Synthetic
cgcagguggaggaggug

SEQ ID NO: 13268 - DNA, 17 bp, Artificial Sequence
  Synthetic
cugcgggcaggagcuat

SEQ ID NO: 13269 - DNA, 18 bp, Artificial Sequence
  Synthetic
catgaagcugtgcugggc

SEQ ID NO: 13270 - DNA, 21 bp, Artificial Sequence
  Synthetic
gggtuccccaccagaaaaugg

SEQ ID NO: 13271 - DNA, 21 bp, Artificial Sequence
  Synthetic
ccgaaacaucctcguggagag

SEQ ID NO: 13272 - DNA, 22 bp, Artificial Sequence
  Synthetic
aaagcacccauacgtcttggut

SEQ ID NO: 13273 - DNA, 19 bp, Artificial Sequence
  Synthetic
gugaaacagcugcagcaca

SEQ ID NO: 13274 - DNA, 22 bp, Artificial Sequence
  Synthetic
ccttccacugggcccaatauga

SEQ ID NO: 13275 - DNA, 22 bp, Artificial Sequence
  Synthetic
ctgctgatucaacagtgcaugg

SEQ ID NO: 13276 - DNA, 22 bp, Artificial Sequence
  Synthetic
ctcctccaccuccaggaactua

SEQ ID NO: 13277 - DNA, 20 bp, Artificial Sequence
  Synthetic
gcaaugtctcugcccggaag

SEQ ID NO: 13278 - DNA, 22 bp, Artificial Sequence
  Synthetic
agaacagccuagacttggguga

SEQ ID NO: 13279 - DNA, 22 bp, Artificial Sequence
  Synthetic
atcttctctcccutcccaccut

SEQ ID NO: 13280 - DNA, 21 bp, Artificial Sequence
  Synthetic
tcagctgguattgggatuggg

SEQ ID NO: 13281 - DNA, 24 bp, Artificial Sequence
  Synthetic
gggactttucacctctgatttcug

SEQ ID NO: 13282 - DNA, 21 bp, Artificial Sequence
  Synthetic
ggtgaggacacugaggcauag

SEQ ID NO: 13283 - DNA, 18 bp, Artificial Sequence
  Synthetic
cugaccacggacucccag

SEQ ID NO: 13284 - DNA, 17 bp, Artificial Sequence
  Synthetic
ggaguccgcccucacct

SEQ ID NO: 13285 - DNA, 22 bp, Artificial Sequence
  Synthetic
ccaagtacaucatggaccugga

SEQ ID NO: 13286 - DNA, 21 bp, Artificial Sequence
  Synthetic
ctgacagtcutcagcagcuct

SEQ ID NO: 13287 - DNA, 18 bp, Artificial Sequence
  Synthetic
cgcagugacctggugagt

SEQ ID NO: 13288 - DNA, 20 bp, Artificial Sequence
  Synthetic
ccuccacggagaagatgugg

SEQ ID NO: 13289 - DNA, 21 bp, Artificial Sequence
  Synthetic
cactccugaagggcacagaug

SEQ ID NO: 13290 - DNA, 20 bp, Artificial Sequence
  Synthetic
ggtcagcauctaggugccaa

SEQ ID NO: 13291 - DNA, 20 bp, Artificial Sequence
  Synthetic
gcgauggagagaaccagguc

SEQ ID NO: 13292 - DNA, 25 bp, Artificial Sequence
  Synthetic
cattttctctcucctcatgcaucca

SEQ ID NO: 13293 - DNA, 21 bp, Artificial Sequence
  Synthetic
ggcuttgatgctucagaaggc

SEQ ID NO: 13294 - DNA, 24 bp, Artificial Sequence
  Synthetic
tgctagagcutactcugagaaggt

SEQ ID NO: 13295 - DNA, 25 bp, Artificial Sequence
  Synthetic
gcagatgtcuggttagcttucagat

SEQ ID NO: 13296 - DNA, 23 bp, Artificial Sequence
  Synthetic
gccacgacucacagaaagaacuc

SEQ ID NO: 13297 - DNA, 21 bp, Artificial Sequence
  Synthetic
gcagctuaagcaggaggtguc

SEQ ID NO: 13298 - DNA, 17 bp, Artificial Sequence
  Synthetic
gucggagaagcggucct

SEQ ID NO: 13299 - DNA, 18 bp, Artificial Sequence
  Synthetic
gcucacccgcaccaucac

SEQ ID NO: 13300 - DNA, 21 bp, Artificial Sequence
  Synthetic
gaggtgugtcttctgtucggt

SEQ ID NO: 13301 - DNA, 23 bp, Artificial Sequence
  Synthetic
tcaagutcgacgugaagaaggag

SEQ ID NO: 13302 - DNA, 20 bp, Artificial Sequence
  Synthetic
ctcggugtgtgccuaagagg

SEQ ID NO: 13303 - DNA, 18 bp, Artificial Sequence
  Synthetic
cgutggagguggcaaggg

SEQ ID NO: 13304 - DNA, 17 bp, Artificial Sequence
  Synthetic
cuccacctucggccagt

SEQ ID NO: 13305 - DNA, 21 bp, Artificial Sequence
  Synthetic
gatctttgucctcgggctuga

SEQ ID NO: 13306 - DNA, 20 bp, Artificial Sequence
  Synthetic
ttgggtgcuccatctuacgg

SEQ ID NO: 13307 - DNA, 20 bp, Artificial Sequence
  Synthetic
gggctgtuccccgattucag

SEQ ID NO: 13308 - DNA, 19 bp, Artificial Sequence
  Synthetic
ccagctugggaggcttcug

SEQ ID NO: 13309 - DNA, 21 bp, Artificial Sequence
  Synthetic
tcttctgguggagggctguat

SEQ ID NO: 13310 - DNA, 20 bp, Artificial Sequence
  Synthetic
ggcttucccgagttaucgca

SEQ ID NO: 13311 - DNA, 23 bp, Artificial Sequence
  Synthetic
cccgtgaagutagaaggagguct

SEQ ID NO: 13312 - DNA, 18 bp, Artificial Sequence
  Synthetic
gcagccucagcggauacc

SEQ ID NO: 13313 - DNA, 17 bp, Artificial Sequence
  Synthetic
cgggaucggcugcgaat

SEQ ID NO: 13314 - DNA, 20 bp, Artificial Sequence
  Synthetic
gcttcggucgatcugagagt

SEQ ID NO: 13315 - DNA, 24 bp, Artificial Sequence
  Synthetic
tgagcttacugcgtttcttctcug

SEQ ID NO: 13316 - DNA, 22 bp, Artificial Sequence
  Synthetic
gtcactgacaaguccccttgut

SEQ ID NO: 13317 - DNA, 21 bp, Artificial Sequence
  Synthetic
tcgtacugacgaaggtgcaug

SEQ ID NO: 13318 - DNA, 27 bp, Artificial Sequence
  Synthetic
gggatctttcutgtcattcaagtuagg

SEQ ID NO: 13319 - DNA, 19 bp, Artificial Sequence
  Synthetic
agtgcctguctgtccacug

SEQ ID NO: 13320 - DNA, 18 bp, Artificial Sequence
  Synthetic
gctcgcugtcgccatuct

SEQ ID NO: 13321 - DNA, 18 bp, Artificial Sequence
  Synthetic
cctucaggcgcagaucca

SEQ ID NO: 13322 - DNA, 21 bp, Artificial Sequence
  Synthetic
gggactccugctcgcttuaac

SEQ ID NO: 13323 - DNA, 21 bp, Artificial Sequence
  Synthetic
gtcggacaguagtucgccaaa

SEQ ID NO: 13324 - DNA, 18 bp, Artificial Sequence
  Synthetic
agccgccgaguacttguc

SEQ ID NO: 13325 - DNA, 19 bp, Artificial Sequence
  Synthetic
agcctcucccccaacuaca

SEQ ID NO: 13326 - DNA, 21 bp, Artificial Sequence
  Synthetic
tgaaggucacgttgaggtugg

SEQ ID NO: 13327 - DNA, 19 bp, Artificial Sequence
  Synthetic
agtaaatugggcgcgcuct

SEQ ID NO: 13328 - DNA, 18 bp, Artificial Sequence
  Synthetic
ctcaucggctccugcaga

SEQ ID NO: 13329 - DNA, 17 bp, Artificial Sequence
  Synthetic
gcgcguggttcucaggt

SEQ ID NO: 13330 - DNA, 17 bp, Artificial Sequence
  Synthetic
ccggguaggcctgggua

SEQ ID NO: 13331 - DNA, 18 bp, Artificial Sequence
  Synthetic
cggcugcagcattucgac

SEQ ID NO: 13332 - DNA, 22 bp, Artificial Sequence
  Synthetic
gggcacgaautttgtcggacua

SEQ ID NO: 13333 - DNA, 19 bp, Artificial Sequence
  Synthetic
ggccagaaagaugcctgug

SEQ ID NO: 13334 - DNA, 19 bp, Artificial Sequence
  Synthetic
ctcctuggttcgucaccct

SEQ ID NO: 13335 - DNA, 21 bp, Artificial Sequence
  Synthetic
cggactuccacagttcaggug

SEQ ID NO: 13336 - DNA, 17 bp, Artificial Sequence
  Synthetic
cctgcgugcaacuccga

SEQ ID NO: 13337 - DNA, 24 bp, Artificial Sequence
  Synthetic
tgagcaugaacacccacttuaagg

SEQ ID NO: 13338 - DNA, 21 bp, Artificial Sequence
  Synthetic
ctgtggtguctgtctguccat

SEQ ID NO: 13339 - DNA, 18 bp, Artificial Sequence
  Synthetic
gacctgccguttgtcgug

SEQ ID NO: 13340 - DNA, 19 bp, Artificial Sequence
  Synthetic
cutctcacugccccaccag

SEQ ID NO: 13341 - DNA, 21 bp, Artificial Sequence
  Synthetic
ctgagccaccutgtctgucat

SEQ ID NO: 13342 - DNA, 19 bp, Artificial Sequence
  Synthetic
agtgggagaaguccuggca

SEQ ID NO: 13343 - DNA, 20 bp, Artificial Sequence
  Synthetic
cccuggcgtuagaggagaag

SEQ ID NO: 13344 - DNA, 22 bp, Artificial Sequence
  Synthetic
cctcctgcaacuggatcatcuc

SEQ ID NO: 13345 - DNA, 18 bp, Artificial Sequence
  Synthetic
gggugccaagcctctguc

SEQ ID NO: 13346 - DNA, 19 bp, Artificial Sequence
  Synthetic
ttcatggccugcaggtuga

SEQ ID NO: 13347 - DNA, 20 bp, Artificial Sequence
  Synthetic
ctcctgactugggctctcug

SEQ ID NO: 13348 - DNA, 24 bp, Artificial Sequence
  Synthetic
ctugaaggagaggaaaugcaaagg

SEQ ID NO: 13349 - DNA, 21 bp, Artificial Sequence
  Synthetic
ccuacgacaagcuggagaaga

SEQ ID NO: 13350 - DNA, 24 bp, Artificial Sequence
  Synthetic
gaaggaattcutctcgtccuccac

SEQ ID NO: 13351 - DNA, 22 bp, Artificial Sequence
  Synthetic
gtttuggacaccaccctccuaa

SEQ ID NO: 13352 - DNA, 18 bp, Artificial Sequence
  Synthetic
cttgucggccagctcugt

SEQ ID NO: 13353 - DNA, 19 bp, Artificial Sequence
  Synthetic
cgaggugaaggtgctgcug

SEQ ID NO: 13354 - DNA, 18 bp, Artificial Sequence
  Synthetic
caucccgagggactuggt

SEQ ID NO: 13355 - DNA, 21 bp, Artificial Sequence
  Synthetic
caggaagaccuggagtcugag

SEQ ID NO: 13356 - DNA, 18 bp, Artificial Sequence
  Synthetic
cctcggugttccggucag

SEQ ID NO: 13357 - DNA, 21 bp, Artificial Sequence
  Synthetic
cucgccaagcucaagaacaag

SEQ ID NO: 13358 - DNA, 19 bp, Artificial Sequence
  Synthetic
gttctcccagcucctggut

SEQ ID NO: 13359 - DNA, 19 bp, Artificial Sequence
  Synthetic
ccuagaggccaggguggag

SEQ ID NO: 13360 - DNA, 21 bp, Artificial Sequence
  Synthetic
catctccgugagcctgttcuc

SEQ ID NO: 13361 - DNA, 20 bp, Artificial Sequence
  Synthetic
agccgagcaugtctcuacct

SEQ ID NO: 13362 - DNA, 21 bp, Artificial Sequence
  Synthetic
tgatcttcagguctcgcucct

SEQ ID NO: 13363 - DNA, 20 bp, Artificial Sequence
  Synthetic
ccagttgcuggccagguaaa

SEQ ID NO: 13364 - DNA, 18 bp, Artificial Sequence
  Synthetic
gccgcaccutcttcucgt

SEQ ID NO: 13365 - DNA, 18 bp, Artificial Sequence
  Synthetic
atgucggagaccgcacug

SEQ ID NO: 13366 - DNA, 21 bp, Artificial Sequence
  Synthetic
cgactccaccuctcctgugaa

SEQ ID NO: 13367 - DNA, 21 bp, Artificial Sequence
  Synthetic
ttcguggagaaggtgaugcag

SEQ ID NO: 13368 - DNA, 25 bp, Artificial Sequence
  Synthetic
gaagcagggtucttaaccaaggaua

SEQ ID NO: 13369 - DNA, 23 bp, Artificial Sequence
  Synthetic
caucaacaaggctcuggacaaga

SEQ ID NO: 13370 - DNA, 20 bp, Artificial Sequence
  Synthetic
ccaagcaccugccccatuat

SEQ ID NO: 13371 - DNA, 20 bp, Artificial Sequence
  Synthetic
tgagcugcctctgatugcac

SEQ ID NO: 13372 - DNA, 24 bp, Artificial Sequence
  Synthetic
gcagcttctuctctacagagguca

SEQ ID NO: 13373 - DNA, 29 bp, Artificial Sequence
  Synthetic
ctctgatctctugctatcctttcttacut

SEQ ID NO: 13374 - DNA, 22 bp, Artificial Sequence
  Synthetic
gccccagtugtggtttcaguag

SEQ ID NO: 13375 - DNA, 22 bp, Artificial Sequence
  Synthetic
ctggcgggagutaatctgaugt

SEQ ID NO: 13376 - DNA, 22 bp, Artificial Sequence
  Synthetic
agtaacgcuccttgaggttgug

SEQ ID NO: 13377 - DNA, 23 bp, Artificial Sequence
  Synthetic
agaatgggaagaaggugaaggug

SEQ ID NO: 13378 - DNA, 18 bp, Artificial Sequence
  Synthetic
ctuccccaccccgtctug

SEQ ID NO: 13379 - DNA, 19 bp, Artificial Sequence
  Synthetic
ctggagcugtcgtcaggug

SEQ ID NO: 13380 - DNA, 21 bp, Artificial Sequence
  Synthetic
gctcuccaggaagtccuccag

SEQ ID NO: 13381 - DNA, 21 bp, Artificial Sequence
  Synthetic
catccccgaagacaguctgug

SEQ ID NO: 13382 - DNA, 22 bp, Artificial Sequence
  Synthetic
ctggctcauggcttcctcauag

SEQ ID NO: 13383 - DNA, 19 bp, Artificial Sequence
  Synthetic
tcctctcccugctctccug

SEQ ID NO: 13384 - DNA, 19 bp, Artificial Sequence
  Synthetic
gctgcaaggcutcctgcut

SEQ ID NO: 13385 - DNA, 17 bp, Artificial Sequence
  Synthetic
ctccagcugccagcuga

SEQ ID NO: 13386 - DNA, 18 bp, Artificial Sequence
  Synthetic
ggcccucctcctucacga

SEQ ID NO: 13387 - DNA, 17 bp, Artificial Sequence
  Synthetic
cgcucactgcucagcac

SEQ ID NO: 13388 - DNA, 25 bp, Artificial Sequence
  Synthetic
ctgatttggucttgataggcucgaa

SEQ ID NO: 13389 - DNA, 20 bp, Artificial Sequence
  Synthetic
ggcctcccugactctugact

SEQ ID NO: 13390 - DNA, 18 bp, Artificial Sequence
  Synthetic
gctgctgcugctggtuga

SEQ ID NO: 13391 - DNA, 21 bp, Artificial Sequence
  Synthetic
ggagcugaagccaaaggugaa

SEQ ID NO: 13392 - DNA, 21 bp, Artificial Sequence
  Synthetic
agcatcuggaagcacacacuc

SEQ ID NO: 13393 - DNA, 19 bp, Artificial Sequence
  Synthetic
agcagcgaugccttauccc

SEQ ID NO: 13394 - DNA, 25 bp, Artificial Sequence
  Synthetic
tgagtacacacagugagaacuggat

SEQ ID NO: 13395 - DNA, 25 bp, Artificial Sequence
  Synthetic
cctggattugagagtttcttggugt

SEQ ID NO: 13396 - DNA, 21 bp, Artificial Sequence
  Synthetic
ggcgtuggagttgtgaatucg

SEQ ID NO: 13397 - DNA, 17 bp, Artificial Sequence
  Synthetic
tctcgccgcucgcttut

SEQ ID NO: 13398 - DNA, 22 bp, Artificial Sequence
  Synthetic
ggtgggaaucttgttaccgugt

SEQ ID NO: 13399 - DNA, 28 bp, Artificial Sequence
  Synthetic
catgaaatcagcaugcaaatgtacacua

SEQ ID NO: 13400 - DNA, 25 bp, Artificial Sequence
  Synthetic
ggcaattaaagcauttcaggaggug

SEQ ID NO: 13401 - DNA, 27 bp, Artificial Sequence
  Synthetic
cccaacaaccuacctttaaacuagact

SEQ ID NO: 13402 - DNA, 29 bp, Artificial Sequence
  Synthetic
ttttggtttgtttuctgcttcgtattcut

SEQ ID NO: 13403 - DNA, 26 bp, Artificial Sequence
  Synthetic
actgaatagcauagctttccttggug

SEQ ID NO: 13404 - DNA, 27 bp, Artificial Sequence
  Synthetic
ggcctatattugtgctgtacaatugga

SEQ ID NO: 13405 - DNA, 26 bp, Artificial Sequence
  Synthetic
gcaagugcagaggtattacuacaact

SEQ ID NO: 13406 - DNA, 29 bp, Artificial Sequence
  Synthetic
ggcctcctcuaaccattattattaacugt

SEQ ID NO: 13407 - DNA, 25 bp, Artificial Sequence
  Synthetic
tcaaacaccaugaatgagcttgtug

SEQ ID NO: 13408 - DNA, 21 bp, Artificial Sequence
  Synthetic
gccaacagcugactcaucact

SEQ ID NO: 13409 - DNA, 22 bp, Artificial Sequence
  Synthetic
tgatgtgcuacagggaacaugg

SEQ ID NO: 13410 - DNA, 22 bp, Artificial Sequence
  Synthetic
cagaaucagaacggacauccca

SEQ ID NO: 13411 - DNA, 25 bp, Artificial Sequence
  Synthetic
gtttcaggcaccgucaatatgttuc

SEQ ID NO: 13412 - DNA, 24 bp, Artificial Sequence
  Synthetic
cctcttcaccaucttcagccatut

SEQ ID NO: 13413 - DNA, 24 bp, Artificial Sequence
  Synthetic
cagaagcagauctgttttcauggg

SEQ ID NO: 13414 - DNA, 27 bp, Artificial Sequence
  Synthetic
aaagctctgttutcctgagatcuaacc

SEQ ID NO: 13415 - DNA, 21 bp, Artificial Sequence
  Synthetic
agcaaggccacguattacugt

SEQ ID NO: 13416 - DNA, 29 bp, Artificial Sequence
  Synthetic
actacaattgcuaaatatgcacaguacca

SEQ ID NO: 13417 - DNA, 28 bp, Artificial Sequence
  Synthetic
gtaatgtgucctttcaaaacuccaaagt

SEQ ID NO: 13418 - DNA, 26 bp, Artificial Sequence
  Synthetic
ggaaatcttcuaagccatgttgguca

SEQ ID NO: 13419 - DNA, 23 bp, Artificial Sequence
  Synthetic
agattctggcugtctttgcaugt

SEQ ID NO: 13420 - DNA, 27 bp, Artificial Sequence
  Synthetic
tgaagcaaatgtuccagtgtataggut

SEQ ID NO: 13421 - DNA, 25 bp, Artificial Sequence
  Synthetic
cctgtaaguggaccaacatuccaag

SEQ ID NO: 13422 - DNA, 28 bp, Artificial Sequence
  Synthetic
aagtctcttggcautatttctagtuggt

SEQ ID NO: 13423 - DNA, 23 bp, Artificial Sequence
  Synthetic
caatgagagcutccctcaatguc

SEQ ID NO: 13424 - DNA, 25 bp, Artificial Sequence
  Synthetic
cggaaactuggaaaactttgtggug

SEQ ID NO: 13425 - DNA, 23 bp, Artificial Sequence
  Synthetic
agagcaaacacugctgcttcaua

SEQ ID NO: 13426 - DNA, 21 bp, Artificial Sequence
  Synthetic
ccagtttguggatcctgcuct

SEQ ID NO: 13427 - DNA, 18 bp, Artificial Sequence
  Synthetic
gtctguaggccucagcgt

SEQ ID NO: 13428 - DNA, 24 bp, Artificial Sequence
  Synthetic
cttccuggagacttugaagacaga

SEQ ID NO: 13429 - DNA, 28 bp, Artificial Sequence
  Synthetic
ggagaaaagaagguactggaaaagucag

SEQ ID NO: 13430 - DNA, 20 bp, Artificial Sequence
  Synthetic
cctcctgacaucccctguga

SEQ ID NO: 13431 - DNA, 20 bp, Artificial Sequence
  Synthetic
gcatttcuccgccacagugt

SEQ ID NO: 13432 - DNA, 20 bp, Artificial Sequence
  Synthetic
ctggtggcuttatggtggug

SEQ ID NO: 13433 - DNA, 21 bp, Artificial Sequence
  Synthetic
aaggcaugaggtggcuaacag

SEQ ID NO: 13434 - DNA, 22 bp, Artificial Sequence
  Synthetic
tgggaatgcuggttagaggcua

SEQ ID NO: 13435 - DNA, 18 bp, Artificial Sequence
  Synthetic
gtggccauccctgcuacc

SEQ ID NO: 13436 - DNA, 20 bp, Artificial Sequence
  Synthetic
ctccagcucttcctccucct

SEQ ID NO: 13437 - DNA, 18 bp, Artificial Sequence
  Synthetic
cagagcgucacgggaguc

SEQ ID NO: 13438 - DNA, 25 bp, Artificial Sequence
  Synthetic
actacatgggucactatggtgaugt

SEQ ID NO: 13439 - DNA, 24 bp, Artificial Sequence
  Synthetic
cccctacctautcttgctctccuc

SEQ ID NO: 13440 - DNA, 18 bp, Artificial Sequence
  Synthetic
gcagtctcugcagggcua

SEQ ID NO: 13441 - DNA, 18 bp, Artificial Sequence
  Synthetic
gcctccucagctcuccga

SEQ ID NO: 13442 - DNA, 25 bp, Artificial Sequence
  Synthetic
agctctgugtcagatttguacaacc

SEQ ID NO: 13443 - DNA, 21 bp, Artificial Sequence
  Synthetic
ggatguaagggaagcccaguc

SEQ ID NO: 13444 - DNA, 22 bp, Artificial Sequence
  Synthetic
ctccttgagagccuggatgtug

SEQ ID NO: 13445 - DNA, 21 bp, Artificial Sequence
  Synthetic
ccacatcagacugagcgtuct

SEQ ID NO: 13446 - DNA, 17 bp, Artificial Sequence
  Synthetic
gccucaggcaccuccac

SEQ ID NO: 13447 - DNA, 24 bp, Artificial Sequence
  Synthetic
agctgaggaguttgttcttcaucc

SEQ ID NO: 13448 - DNA, 26 bp, Artificial Sequence
  Synthetic
gaagaaagggaauagaacttgccugt

SEQ ID NO: 13449 - DNA, 21 bp, Artificial Sequence
  Synthetic
cttggaugagcttccugccat

SEQ ID NO: 13450 - DNA, 22 bp, Artificial Sequence
  Synthetic
cgaactuccaccagaauagggt

SEQ ID NO: 13451 - DNA, 22 bp, Artificial Sequence
  Synthetic
cttatcugcaagatggcugcct

SEQ ID NO: 13452 - DNA, 23 bp, Artificial Sequence
  Synthetic
gaggtcaggcuggctatcaaaua

SEQ ID NO: 13453 - DNA, 22 bp, Artificial Sequence
  Synthetic
cctgcaugaccaaggtgtgaut

SEQ ID NO: 13454 - DNA, 26 bp, Artificial Sequence
  Synthetic
actcaacagucacatcttcctcaaug

SEQ ID NO: 13455 - DNA, 26 bp, Artificial Sequence
  Synthetic
tcataggtattgaugccagatgguct

SEQ ID NO: 13456 - DNA, 26 bp, Artificial Sequence
  Synthetic
gacaagaagcagagcautaagaaguc

SEQ ID NO: 13457 - DNA, 23 bp, Artificial Sequence
  Synthetic
ggatgugaaggtggagucaacat

SEQ ID NO: 13458 - DNA, 25 bp, Artificial Sequence
  Synthetic
tcaaagcuctaagtucgaagaaggg

SEQ ID NO: 13459 - DNA, 28 bp, Artificial Sequence
  Synthetic
agtgtaacacacguccatttgataauga

SEQ ID NO: 13460 - DNA, 22 bp, Artificial Sequence
  Synthetic
ggcccccagaguatcaaggaua

SEQ ID NO: 13461 - DNA, 23 bp, Artificial Sequence
  Synthetic
tgaactactuggaccagatugcc

SEQ ID NO: 13462 - DNA, 21 bp, Artificial Sequence
  Synthetic
gggcctgautttcgcgatgua

SEQ ID NO: 13463 - DNA, 19 bp, Artificial Sequence
  Synthetic
agtcctuaagggcggucca

SEQ ID NO: 13464 - DNA, 22 bp, Artificial Sequence
  Synthetic
tgtcucaggctctgtugaacac

SEQ ID NO: 13465 - DNA, 21 bp, Artificial Sequence
  Synthetic
gctaaggaguctccgcctuac

SEQ ID NO: 13466 - DNA, 21 bp, Artificial Sequence
  Synthetic
cugaggatgtguccgaggaat

SEQ ID NO: 13467 - DNA, 25 bp, Artificial Sequence
  Synthetic
gcacttccttautgaagtcgccaua

SEQ ID NO: 13468 - DNA, 27 bp, Artificial Sequence
  Synthetic
gatgtatggugtgaactactucagcat

SEQ ID NO: 13469 - DNA, 22 bp, Artificial Sequence
  Synthetic
ccttggtgaaaagugagcccua

SEQ ID NO: 13470 - DNA, 30 bp, Artificial Sequence
  Synthetic
tgttctatccattutatctccttcccuagt

SEQ ID NO: 13471 - DNA, 23 bp, Artificial Sequence
  Synthetic
ctcaccttgcugagccttctuag

SEQ ID NO: 13472 - DNA, 22 bp, Artificial Sequence
  Synthetic
agctcucacaggcttccaatut

SEQ ID NO: 13473 - DNA, 22 bp, Artificial Sequence
  Synthetic
tgctttaggcccugtgtctuac

SEQ ID NO: 13474 - DNA, 22 bp, Artificial Sequence
  Synthetic
ccaaugccagagatgaguccaa

SEQ ID NO: 13475 - DNA, 18 bp, Artificial Sequence
  Synthetic
ggtcccuagaggcugggt

SEQ ID NO: 13476 - DNA, 22 bp, Artificial Sequence
  Synthetic
gacctagaucccgactucgaac

SEQ ID NO: 13477 - DNA, 22 bp, Artificial Sequence
  Synthetic
gugtgtacctttucccccagat

SEQ ID NO: 13478 - DNA, 22 bp, Artificial Sequence
  Synthetic
ggatggtccguactgtacccua

SEQ ID NO: 13479 - DNA, 22 bp, Artificial Sequence
  Synthetic
ggccccagaguagaaguaaggg

SEQ ID NO: 13480 - DNA, 22 bp, Artificial Sequence
  Synthetic
ttgctcucgaaaccgugaagaa

SEQ ID NO: 13481 - DNA, 20 bp, Artificial Sequence
  Synthetic
cccccugcataactgcugac

SEQ ID NO: 13482 - DNA, 20 bp, Artificial Sequence
  Synthetic
gctccgacucttctgtugct

SEQ ID NO: 13483 - DNA, 22 bp, Artificial Sequence
  Synthetic
catgactggagguggtgctauc

SEQ ID NO: 13484 - DNA, 23 bp, Artificial Sequence
  Synthetic
gtttcttctucccacagauccct

SEQ ID NO: 13485 - DNA, 22 bp, Artificial Sequence
  Synthetic
tcttcaacaccugtgtgugacc

SEQ ID NO: 13486 - DNA, 29 bp, Artificial Sequence
  Synthetic
ttcctgagcaucaccatttttagatuaca

SEQ ID NO: 13487 - DNA, 24 bp, Artificial Sequence
  Synthetic
ctggaugaggaagggttugaaagt

SEQ ID NO: 13488 - DNA, 28 bp, Artificial Sequence
  Synthetic
tggtgcaautaatggagauagaagacat

SEQ ID NO: 13489 - DNA, 21 bp, Artificial Sequence
  Synthetic
ggaaaacgacacccuttgcug

SEQ ID NO: 13490 - DNA, 26 bp, Artificial Sequence
  Synthetic
aagcagatctauattggcgttgtuga

SEQ ID NO: 13491 - DNA, 25 bp, Artificial Sequence
  Synthetic
gggaagaaatugaagtgccttucag

SEQ ID NO: 13492 - DNA, 25 bp, Artificial Sequence
  Synthetic
aacttcaggugatcagttgtgtuga

SEQ ID NO: 13493 - DNA, 21 bp, Artificial Sequence
  Synthetic
gacatcaaugagtgccuccga

SEQ ID NO: 13494 - DNA, 22 bp, Artificial Sequence
  Synthetic
agcccagugcccaaataaugat

SEQ ID NO: 13495 - DNA, 29 bp, Artificial Sequence
  Synthetic
gaaaaataccaacuaacagcacgatugaa

SEQ ID NO: 13496 - DNA, 20 bp, Artificial Sequence
  Synthetic
agtccaagcugagcagcauc

SEQ ID NO: 13497 - DNA, 19 bp, Artificial Sequence
  Synthetic
cagcacguctcttgcucct

SEQ ID NO: 13498 - DNA, 28 bp, Artificial Sequence
  Synthetic
accaaagactucagaatattgagacugg

SEQ ID NO: 13499 - DNA, 22 bp, Artificial Sequence
  Synthetic
tctgggtucaccaagaggguat

SEQ ID NO: 13500 - DNA, 21 bp, Artificial Sequence
  Synthetic
gtcacttugagagccccacuc

SEQ ID NO: 13501 - DNA, 26 bp, Artificial Sequence
  Synthetic
gaaatgtttttgtucctcctgtgcua

SEQ ID NO: 13502 - DNA, 23 bp, Artificial Sequence
  Synthetic
ctcccaggcacutgatgatacuc

SEQ ID NO: 13503 - DNA, 22 bp, Artificial Sequence
  Synthetic
acagaaucacaugccacacagt

SEQ ID NO: 13504 - DNA, 30 bp, Artificial Sequence
  Synthetic
cattcaggaaaacuacaauggagaaagaag

SEQ ID NO: 13505 - DNA, 24 bp, Artificial Sequence
  Synthetic
gttcacatgcacucctgtgttcua

SEQ ID NO: 13506 - DNA, 27 bp, Artificial Sequence
  Synthetic
ctcgatgtugagaaggatcttcttcut

SEQ ID NO: 13507 - DNA, 24 bp, Artificial Sequence
  Synthetic
ctttacggtacacuaaccctgcut

SEQ ID NO: 13508 - DNA, 22 bp, Artificial Sequence
  Synthetic
gaatgcgaaugattggctggut

SEQ ID NO: 13509 - DNA, 26 bp, Artificial Sequence
  Synthetic
aattgcgttuaaattcttcccuggag

SEQ ID NO: 13510 - DNA, 22 bp, Artificial Sequence
  Synthetic
catgccttucacgttccttucc

SEQ ID NO: 13511 - DNA, 24 bp, Artificial Sequence
  Synthetic
acagacctttcugaggttagcuga

SEQ ID NO: 13512 - DNA, 21 bp, Artificial Sequence
  Synthetic
gagagactuggagccacctuc

SEQ ID NO: 13513 - DNA, 28 bp, Artificial Sequence
  Synthetic
ctcaccttauggtttgattatggucact

SEQ ID NO: 13514 - DNA, 20 bp, Artificial Sequence
  Synthetic
cctcgctcucactgttgcug

SEQ ID NO: 13515 - DNA, 26 bp, Artificial Sequence
  Synthetic
tgctacacuacaaacaucagaaccaa

SEQ ID NO: 13516 - DNA, 22 bp, Artificial Sequence
  Synthetic
aagcagatuaggcgagcatuct

SEQ ID NO: 13517 - DNA, 21 bp, Artificial Sequence
  Synthetic
cggcaactugaccatcctcug

SEQ ID NO: 13518 - DNA, 19 bp, Artificial Sequence
  Synthetic
gggtaggugggtgaacugg

SEQ ID NO: 13519 - DNA, 21 bp, Artificial Sequence
  Synthetic
catggtttcutgccacaugct

SEQ ID NO: 13520 - DNA, 21 bp, Artificial Sequence
  Synthetic
cctcacucaccccatcctuca

SEQ ID NO: 13521 - DNA, 21 bp, Artificial Sequence
  Synthetic
gcagtgcugtgaaaaguggac

SEQ ID NO: 13522 - DNA, 26 bp, Artificial Sequence
  Synthetic
caataactcccuagccaagtctcuac

SEQ ID NO: 13523 - DNA, 28 bp, Artificial Sequence
  Synthetic
ttgagtgtaacuaccttttccctttgut

SEQ ID NO: 13524 - DNA, 21 bp, Artificial Sequence
  Synthetic
agcgatgucttgtgaggugag

SEQ ID NO: 13525 - DNA, 23 bp, Artificial Sequence
  Synthetic
gaggtctcuccattttccaccut

SEQ ID NO: 13526 - DNA, 22 bp, Artificial Sequence
  Synthetic
tcctgtttccacuggtccacua

SEQ ID NO: 13527 - DNA, 28 bp, Artificial Sequence
  Synthetic
ttccuaaaccagaagcatctaguagagt

SEQ ID NO: 13528 - DNA, 21 bp, Artificial Sequence
  Synthetic
gctagucccaaagaggaggug

SEQ ID NO: 13529 - DNA, 22 bp, Artificial Sequence
  Synthetic
accatgctttugctccctttug

SEQ ID NO: 13530 - DNA, 21 bp, Artificial Sequence
  Synthetic
caugtgtggugcagaggagaa

SEQ ID NO: 13531 - DNA, 24 bp, Artificial Sequence
  Synthetic
catcacctucatcttcaaguccct

SEQ ID NO: 13532 - DNA, 20 bp, Artificial Sequence
  Synthetic
gcatcccgggacuggtcuat

SEQ ID NO: 13533 - DNA, 28 bp, Artificial Sequence
  Synthetic
acttgttgtaatcaugttgtgatgaaug

SEQ ID NO: 13534 - DNA, 24 bp, Artificial Sequence
  Synthetic
tcttttccacccuatctccgcuat

SEQ ID NO: 13535 - DNA, 32 bp, Artificial Sequence
  Synthetic
ctgcattcattttcucataacttctttctcua

SEQ ID NO: 13536 - DNA, 25 bp, Artificial Sequence
  Synthetic
gatctcaaacaccuggtcatucaga

SEQ ID NO: 13537 - DNA, 23 bp, Artificial Sequence
  Synthetic
tggagtgaugggatcaugaggaa

SEQ ID NO: 13538 - DNA, 23 bp, Artificial Sequence
  Synthetic
cccaaagttuccagcatctcuca

SEQ ID NO: 13539 - DNA, 18 bp, Artificial Sequence
  Synthetic
ctctccuggccucacgac

SEQ ID NO: 13540 - DNA, 22 bp, Artificial Sequence
  Synthetic
cttgatatccugctggaugcct

SEQ ID NO: 13541 - DNA, 27 bp, Artificial Sequence
  Synthetic
tgtcattatgtcucaactagccacuct

SEQ ID NO: 13542 - DNA, 21 bp, Artificial Sequence
  Synthetic
gaaagggccuctcaccactua

SEQ ID NO: 13543 - DNA, 20 bp, Artificial Sequence
  Synthetic
cagcagucaaatgcctuggt

SEQ ID NO: 13544 - DNA, 21 bp, Artificial Sequence
  Synthetic
ccgatcaucccgattcaugcc

SEQ ID NO: 13545 - DNA, 28 bp, Artificial Sequence
  Synthetic
ctgtattctttcugggtttgtactcugt

SEQ ID NO: 13546 - DNA, 19 bp, Artificial Sequence
  Synthetic
cauggcaagacggccaaug

SEQ ID NO: 13547 - DNA, 24 bp, Artificial Sequence
  Synthetic
catcatcaccutttgccttccuct

SEQ ID NO: 13548 - DNA, 21 bp, Artificial Sequence
  Synthetic
ctttaggccacuggcaaacug

SEQ ID NO: 13549 - DNA, 33 bp, Artificial Sequence
  Synthetic
ccagaatatuaaaggaaacttctctcuaaagaa

SEQ ID NO: 13550 - DNA, 21 bp, Artificial Sequence
  Synthetic
ccctgaugccccttgtcttua

SEQ ID NO: 13551 - DNA, 20 bp, Artificial Sequence
  Synthetic
caagguggagagggacucac

SEQ ID NO: 13552 - DNA, 22 bp, Artificial Sequence
  Synthetic
gtcgctttguccatccatucat

SEQ ID NO: 13553 - DNA, 18 bp, Artificial Sequence
  Synthetic
gcggaccagutcaugcag

SEQ ID NO: 13554 - DNA, 21 bp, Artificial Sequence
  Synthetic
gugatgagagucccaggacag

SEQ ID NO: 13555 - DNA, 20 bp, Artificial Sequence
  Synthetic
cagctgcutcatgaggtugg

SEQ ID NO: 13556 - DNA, 22 bp, Artificial Sequence
  Synthetic
gaacagaccagugacgugaaga

SEQ ID NO: 13557 - DNA, 22 bp, Artificial Sequence
  Synthetic
tgucagacaccagaatgtuggc

SEQ ID NO: 13558 - DNA, 21 bp, Artificial Sequence
  Synthetic
cctttcacccaucaacccgua

SEQ ID NO: 13559 - DNA, 20 bp, Artificial Sequence
  Synthetic
ctgcgcagguagucaaaggt

SEQ ID NO: 13560 - DNA, 26 bp, Artificial Sequence
  Synthetic
cgtaagacagaacugtcaggctttut

SEQ ID NO: 13561 - DNA, 21 bp, Artificial Sequence
  Synthetic
gaatactugcaagccctggug

SEQ ID NO: 13562 - DNA, 27 bp, Artificial Sequence
  Synthetic
tctcttcatccucctcatcttccttut

SEQ ID NO: 13563 - DNA, 23 bp, Artificial Sequence
  Synthetic
ctgcatgaagcauttccacauct

SEQ ID NO: 13564 - DNA, 19 bp, Artificial Sequence
  Synthetic
gacuacacgggcagctuca

SEQ ID NO: 13565 - DNA, 19 bp, Artificial Sequence
  Synthetic
cccaagcgacucggguaag

SEQ ID NO: 13566 - DNA, 18 bp, Artificial Sequence
  Synthetic
ttccugccccagccttuc

SEQ ID NO: 13567 - DNA, 21 bp, Artificial Sequence
  Synthetic
gaaattcgagcuggtgccauc

SEQ ID NO: 13568 - DNA, 22 bp, Artificial Sequence
  Synthetic
gctgtatcugacaggaaccuga

SEQ ID NO: 13569 - DNA, 21 bp, Artificial Sequence
  Synthetic
gcaggaggugaccaugaagag

SEQ ID NO: 13570 - DNA, 24 bp, Artificial Sequence
  Synthetic
ctgtguaggagggacctcttcuat

SEQ ID NO: 13571 - DNA, 21 bp, Artificial Sequence
  Synthetic
gaagagacgcacutcctccug

SEQ ID NO: 13572 - DNA, 21 bp, Artificial Sequence
  Synthetic
gaggtacgaacuccgctaugg

SEQ ID NO: 13573 - DNA, 20 bp, Artificial Sequence
  Synthetic
catctugccagggcattgug

SEQ ID NO: 13574 - DNA, 28 bp, Artificial Sequence
  Synthetic
ctgaaatcugaacaccctatacaguagg

SEQ ID NO: 13575 - DNA, 22 bp, Artificial Sequence
  Synthetic
tgctgtgguagaagaagcctug

SEQ ID NO: 13576 - DNA, 23 bp, Artificial Sequence
  Synthetic
tgtgcacagaaggacutaagcug

SEQ ID NO: 13577 - DNA, 27 bp, Artificial Sequence
  Synthetic
gtatcggagttgauaacaggtctctug

SEQ ID NO: 13578 - DNA, 22 bp, Artificial Sequence
  Synthetic
gccgaagtcugacccttttugt

SEQ ID NO: 13579 - DNA, 23 bp, Artificial Sequence
  Synthetic
guacctgtagtgugcaggaaact

SEQ ID NO: 13580 - DNA, 20 bp, Artificial Sequence
  Synthetic
gactccttugcccctgtgut

SEQ ID NO: 13581 - DNA, 24 bp, Artificial Sequence
  Synthetic
ctgccaatagcutagtggtaggua

SEQ ID NO: 13582 - DNA, 23 bp, Artificial Sequence
  Synthetic
guggagatgugagaccgaaagaa

SEQ ID NO: 13583 - DNA, 24 bp, Artificial Sequence
  Synthetic
agaggauaaggagaggautctcug

SEQ ID NO: 13584 - DNA, 22 bp, Artificial Sequence
  Synthetic
aggcctguggatatagccucaa

SEQ ID NO: 13585 - DNA, 19 bp, Artificial Sequence
  Synthetic
gcccucagagcagctucag

SEQ ID NO: 13586 - DNA, 24 bp, Artificial Sequence
  Synthetic
ggttagaggaagaacuggaauggg

SEQ ID NO: 13587 - DNA, 22 bp, Artificial Sequence
  Synthetic
ccctatgacacucaaccctgug

SEQ ID NO: 13588 - DNA, 18 bp, Artificial Sequence
  Synthetic
gggtgggcugtgagauca

SEQ ID NO: 13589 - DNA, 24 bp, Artificial Sequence
  Synthetic
tcttgagtctugcactccaaucag

SEQ ID NO: 13590 - DNA, 18 bp, Artificial Sequence
  Synthetic
actgctgaccugccccua

SEQ ID NO: 13591 - DNA, 17 bp, Artificial Sequence
  Synthetic
agcccccuccacccuaa

SEQ ID NO: 13592 - DNA, 18 bp, Artificial Sequence
  Synthetic
atccccgacugccugaac

SEQ ID NO: 13593 - DNA, 17 bp, Artificial Sequence
  Synthetic
gaagcugcgggagcuga

SEQ ID NO: 13594 - DNA, 21 bp, Artificial Sequence
  Synthetic
gctccgagutctgagcttuca

SEQ ID NO: 13595 - DNA, 18 bp, Artificial Sequence
  Synthetic
cctgucccccaucgacat

SEQ ID NO: 13596 - DNA, 18 bp, Artificial Sequence
  Synthetic
gcttcaggcuccccacug

SEQ ID NO: 13597 - DNA, 24 bp, Artificial Sequence
  Synthetic
acggactgutctatgacugcaaag

SEQ ID NO: 13598 - DNA, 20 bp, Artificial Sequence
  Synthetic
tcactcacugagcgctctuc

SEQ ID NO: 13599 - DNA, 19 bp, Artificial Sequence
  Synthetic
gggacaagucgtcggaguc

SEQ ID NO: 13600 - DNA, 19 bp, Artificial Sequence
  Synthetic
gcuggagaccaggctcuct

SEQ ID NO: 13601 - DNA, 20 bp, Artificial Sequence
  Synthetic
agccaggucggcagtauagt

SEQ ID NO: 13602 - DNA, 31 bp, Artificial Sequence
  Synthetic
ggagaaggactugataatctgtggaattuaa

SEQ ID NO: 13603 - DNA, 23 bp, Artificial Sequence
  Synthetic
tgaggaaaugctgggaatuccaa

SEQ ID NO: 13604 - DNA, 25 bp, Artificial Sequence
  Synthetic
agagggauggacacattttaaaugg

SEQ ID NO: 13605 - DNA, 24 bp, Artificial Sequence
  Synthetic
gtctggtctttuggagtcactcug

SEQ ID NO: 13606 - DNA, 24 bp, Artificial Sequence
  Synthetic
ggacagagugcctgatgtctuaat

SEQ ID NO: 13607 - DNA, 32 bp, Artificial Sequence
  Synthetic
ccttaaggaataucttccaaagaauaagaaca

SEQ ID NO: 13608 - DNA, 21 bp, Artificial Sequence
  Synthetic
aagcagcacgggugtaactua

SEQ ID NO: 13609 - DNA, 30 bp, Artificial Sequence
  Synthetic
ctttcactctgttutcttttctcttctgut

SEQ ID NO: 13610 - DNA, 22 bp, Artificial Sequence
  Synthetic
gttccaaagcuccacttgucag

SEQ ID NO: 13611 - DNA, 26 bp, Artificial Sequence
  Synthetic
aattgaatcccuaggagaucccagaa

SEQ ID NO: 13612 - DNA, 28 bp, Artificial Sequence
  Synthetic
caactttgaattuccatggtgtgguaag

SEQ ID NO: 13613 - DNA, 21 bp, Artificial Sequence
  Synthetic
accaggtuccagacatggcua

SEQ ID NO: 13614 - DNA, 17 bp, Artificial Sequence
  Synthetic
cctgcagccgugacuca

SEQ ID NO: 13615 - DNA, 21 bp, Artificial Sequence
  Synthetic
ctcccccaauctctuccacag

SEQ ID NO: 13616 - DNA, 20 bp, Artificial Sequence
  Synthetic
caagccagugtcctgacuga

SEQ ID NO: 13617 - DNA, 23 bp, Artificial Sequence
  Synthetic
ccctttgccuacttctccctcua

SEQ ID NO: 13618 - DNA, 31 bp, Artificial Sequence
  Synthetic
gtgagtgattucagggaagtaagaaaaatug

SEQ ID NO: 13619 - DNA, 23 bp, Artificial Sequence
  Synthetic
aagcaactuaaccctgtccctut

SEQ ID NO: 13620 - DNA, 29 bp, Artificial Sequence
  Synthetic
tccttgaaaacautatttatccgcaucct

SEQ ID NO: 13621 - DNA, 30 bp, Artificial Sequence
  Synthetic
aaactattttctccuaacctgtacaugaaa

SEQ ID NO: 13622 - DNA, 27 bp, Artificial Sequence
  Synthetic
ccatttttctgcutctttggagaauga

SEQ ID NO: 13623 - DNA, 20 bp, Artificial Sequence
  Synthetic
ccacatcugggtccccttug

SEQ ID NO: 13624 - DNA, 22 bp, Artificial Sequence
  Synthetic
cctctgcugtgtactcuccact

SEQ ID NO: 13625 - DNA, 23 bp, Artificial Sequence
  Synthetic
tgtgctaaaaugaggagcuccaa

SEQ ID NO: 13626 - DNA, 25 bp, Artificial Sequence
  Synthetic
tctcatacuggacagaaaccgauca

SEQ ID NO: 13627 - DNA, 28 bp, Artificial Sequence
  Synthetic
ttccaaacaatcuatgtatcttccaucc

SEQ ID NO: 13628 - DNA, 23 bp, Artificial Sequence
  Synthetic
agtaactatutcccccaucccca

SEQ ID NO: 13629 - DNA, 23 bp, Artificial Sequence
  Synthetic
gaaccaagtacucagccttccuc

SEQ ID NO: 13630 - DNA, 22 bp, Artificial Sequence
  Synthetic
ccugggagattuccgaacgaag

SEQ ID NO: 13631 - DNA, 28 bp, Artificial Sequence
  Synthetic
ctaactcttcuaagccttcattgctcua

SEQ ID NO: 13632 - DNA, 25 bp, Artificial Sequence
  Synthetic
aactattgccagugatccagaugag

SEQ ID NO: 13633 - DNA, 22 bp, Artificial Sequence
  Synthetic
ccccaccuacactccagaacut

SEQ ID NO: 13634 - DNA, 24 bp, Artificial Sequence
  Synthetic
ctactcuggaccccatcttcttut

SEQ ID NO: 13635 - DNA, 22 bp, Artificial Sequence
  Synthetic
gccccatcuttcttaagcugga

SEQ ID NO: 13636 - DNA, 22 bp, Artificial Sequence
  Synthetic
agaggttggguctgccagatua

SEQ ID NO: 13637 - DNA, 23 bp, Artificial Sequence
  Synthetic
gccacaucagcaaaaccatctug

SEQ ID NO: 13638 - DNA, 23 bp, Artificial Sequence
  Synthetic
gggcttaccucctactgcuagaa

SEQ ID NO: 13639 - DNA, 22 bp, Artificial Sequence
  Synthetic
cagtcagacagacugcctctug

SEQ ID NO: 13640 - DNA, 26 bp, Artificial Sequence
  Synthetic
gtgactctgtuttccttcaggauaca

SEQ ID NO: 13641 - DNA, 17 bp, Artificial Sequence
  Synthetic
ggcauggcactgcugac

SEQ ID NO: 13642 - DNA, 23 bp, Artificial Sequence
  Synthetic
cagctccagcutctatctccaut

SEQ ID NO: 13643 - DNA, 24 bp, Artificial Sequence
  Synthetic
cucttttcatccuagaccccaacc

SEQ ID NO: 13644 - DNA, 24 bp, Artificial Sequence
  Synthetic
ctcccacutcttcctatucccaac

SEQ ID NO: 13645 - DNA, 20 bp, Artificial Sequence
  Synthetic
gccctccuagaccagacuca

SEQ ID NO: 13646 - DNA, 24 bp, Artificial Sequence
  Synthetic
gaaaactacucttctguccacgca

SEQ ID NO: 13647 - DNA, 22 bp, Artificial Sequence
  Synthetic
tccccacuaaagcagtgctuac

SEQ ID NO: 13648 - DNA, 23 bp, Artificial Sequence
  Synthetic
cctgtgaguagccagtacagtuc

SEQ ID NO: 13649 - DNA, 21 bp, Artificial Sequence
  Synthetic
ttgcccgaucatttugccaac

SEQ ID NO: 13650 - DNA, 26 bp, Artificial Sequence
  Synthetic
tgtctacuccatttctcucaaaagcc

SEQ ID NO: 13651 - DNA, 27 bp, Artificial Sequence
  Synthetic
gcactactatacuactctcaggtgucc

SEQ ID NO: 13652 - DNA, 23 bp, Artificial Sequence
  Synthetic
ttccucagagaaaucaggagggt

SEQ ID NO: 13653 - DNA, 26 bp, Artificial Sequence
  Synthetic
ggagcaaagutgtaaagtgaguaggt

SEQ ID NO: 13654 - DNA, 28 bp, Artificial Sequence
  Synthetic
gctacatugagaccctgaaaugaacaat

SEQ ID NO: 13655 - DNA, 25 bp, Artificial Sequence
  Synthetic
ctgtggcutttcttgugaagagaga

SEQ ID NO: 13656 - DNA, 21 bp, Artificial Sequence
  Synthetic
gctacgaucggtactgcuagg

SEQ ID NO: 13657 - DNA, 21 bp, Artificial Sequence
  Synthetic
tggcctgccauaacctccuat

SEQ ID NO: 13658 - DNA, 21 bp, Artificial Sequence
  Synthetic
cccaaccutaagugcaccagt

SEQ ID NO: 13659 - DNA, 21 bp, Artificial Sequence
  Synthetic
ctgagtccuttccctcucacc

SEQ ID NO: 13660 - DNA, 23 bp, Artificial Sequence
  Synthetic
ggtagagcutgcaugaccagaac

SEQ ID NO: 13661 - DNA, 25 bp, Artificial Sequence
  Synthetic
tctgguggccagagcttatatttuc

SEQ ID NO: 13662 - DNA, 30 bp, Artificial Sequence
  Synthetic
ggacgttctcguaacttttcattctctuaa

SEQ ID NO: 13663 - DNA, 21 bp, Artificial Sequence
  Synthetic
ctcacacuccctctcggttuc

SEQ ID NO: 13664 - DNA, 23 bp, Artificial Sequence
  Synthetic
gggccaaagagguataactugac

SEQ ID NO: 13665 - DNA, 27 bp, Artificial Sequence
  Synthetic
gctgacaaaaaugcgtctttgcttuat

SEQ ID NO: 13666 - DNA, 26 bp, Artificial Sequence
  Synthetic
ctgttgtctgcugtacagtagtaucc

SEQ ID NO: 13667 - DNA, 18 bp, Artificial Sequence
  Synthetic
gtctgcuccgtggcugaa

SEQ ID NO: 13668 - DNA, 23 bp, Artificial Sequence
  Synthetic
cctcgccauctctgaagaagtug

SEQ ID NO: 13669 - DNA, 27 bp, Artificial Sequence
  Synthetic
tcagaacttgacutacctcttctcuct

SEQ ID NO: 13670 - DNA, 21 bp, Artificial Sequence
  Synthetic
cgtggaatcuccagggagcua

SEQ ID NO: 13671 - DNA, 21 bp, Artificial Sequence
  Synthetic
caggaaacacccucgaggtuc

SEQ ID NO: 13672 - DNA, 23 bp, Artificial Sequence
  Synthetic
cagaaaagagggcutttgcucat

SEQ ID NO: 13673 - DNA, 23 bp, Artificial Sequence
  Synthetic
tctccucagaactccttcuccaa

SEQ ID NO: 13674 - DNA, 20 bp, Artificial Sequence
  Synthetic
cagcccagcuacaggtucaa

SEQ ID NO: 13675 - DNA, 23 bp, Artificial Sequence
  Synthetic
tgaaagcagauttcatccgucct

SEQ ID NO: 13676 - DNA, 21 bp, Artificial Sequence
  Synthetic
gctctagttugggcgttggut

SEQ ID NO: 13677 - DNA, 21 bp, Artificial Sequence
  Synthetic
gagatggcugggatcacucac

SEQ ID NO: 13678 - DNA, 30 bp, Artificial Sequence
  Synthetic
tcttgttccataguttcagaaacctactug

SEQ ID NO: 13679 - DNA, 27 bp, Artificial Sequence
  Synthetic
atggcttaccuctttaacagugaacat

SEQ ID NO: 13680 - DNA, 25 bp, Artificial Sequence
  Synthetic
ggtcctttttgugtggaaagaaugg

SEQ ID NO: 13681 - DNA, 23 bp, Artificial Sequence
  Synthetic
caacaaaagaagucaccgtgugg

SEQ ID NO: 13682 - DNA, 30 bp, Artificial Sequence
  Synthetic
aaacttgagaagcaacuatacaccuagaag

SEQ ID NO: 13683 - DNA, 26 bp, Artificial Sequence
  Synthetic
tgtggtcaagaguaaccaagaatgut

SEQ ID NO: 13684 - DNA, 24 bp, Artificial Sequence
  Synthetic
cttcacaggugattgaagugggaa

SEQ ID NO: 13685 - DNA, 24 bp, Artificial Sequence
  Synthetic
acacaagtgaacugctgggatuac

SEQ ID NO: 13686 - DNA, 24 bp, Artificial Sequence
  Synthetic
ctccaaactutttgatcccugcaa

SEQ ID NO: 13687 - DNA, 23 bp, Artificial Sequence
  Synthetic
gcttcaagagautctggcaaucc

SEQ ID NO: 13688 - DNA, 27 bp, Artificial Sequence
  Synthetic
actgatcaaattgcuctgctagagaug

SEQ ID NO: 13689 - DNA, 20 bp, Artificial Sequence
  Synthetic
aggacaugctggguccaaag

SEQ ID NO: 13690 - DNA, 25 bp, Artificial Sequence
  Synthetic
ggattgagagcugtcaccaacatua

SEQ ID NO: 13691 - DNA, 17 bp, Artificial Sequence
  Synthetic
cacucagccaggcugct

SEQ ID NO: 13692 - DNA, 28 bp, Artificial Sequence
  Synthetic
ggttcatttucaggcaagatcaattcuc

SEQ ID NO: 13693 - DNA, 25 bp, Artificial Sequence
  Synthetic
gaataaattugaagctctggcugct

SEQ ID NO: 13694 - DNA, 28 bp, Artificial Sequence
  Synthetic
acaaatttggccutttaagctagucaga

SEQ ID NO: 13695 - DNA, 25 bp, Artificial Sequence
  Synthetic
catactcaggaugctgttccactua

SEQ ID NO: 13696 - DNA, 21 bp, Artificial Sequence
  Synthetic
gggaugcacaggtatctugct

SEQ ID NO: 13697 - DNA, 29 bp, Artificial Sequence
  Synthetic
ttctgcagguagctgaaggtaaatuaaat

SEQ ID NO: 13698 - DNA, 28 bp, Artificial Sequence
  Synthetic
gtaaagtgactcaugaatacagccuact

SEQ ID NO: 13699 - DNA, 25 bp, Artificial Sequence
  Synthetic
tggtgaacuaaaggtgccaaaugat

SEQ ID NO: 13700 - DNA, 18 bp, Artificial Sequence
  Synthetic
gccgaagugctcgguaca

SEQ ID NO: 13701 - DNA, 22 bp, Artificial Sequence
  Synthetic
ggtgtgaggcugttgatuggat

SEQ ID NO: 13702 - DNA, 22 bp, Artificial Sequence
  Synthetic
augatcugcaagaacccagacc

SEQ ID NO: 13703 - DNA, 25 bp, Artificial Sequence
  Synthetic
gctcaaacttcutccagatgtccuc

SEQ ID NO: 13704 - DNA, 20 bp, Artificial Sequence
  Synthetic
tgctugagaacgagctgugg

SEQ ID NO: 13705 - DNA, 17 bp, Artificial Sequence
  Synthetic
tgcugcagcttcucgct

SEQ ID NO: 13706 - DNA, 21 bp, Artificial Sequence
  Synthetic
cgutcctccuccaacaccaag

SEQ ID NO: 13707 - DNA, 21 bp, Artificial Sequence
  Synthetic
atagttgugctgctgguggat

SEQ ID NO: 13708 - DNA, 25 bp, Artificial Sequence
  Synthetic
gccaagguggtcatttugaaaaagg

SEQ ID NO: 13709 - DNA, 22 bp, Artificial Sequence
  Synthetic
acugtccagtttugagaagcgt

SEQ ID NO: 13710 - DNA, 30 bp, Artificial Sequence
  Synthetic
tacagtgctugaacatgtaatatcucaaat

SEQ ID NO: 13711 - DNA, 30 bp, Artificial Sequence
  Synthetic
tgacgaaucagaagaagauctttuacaaaa

SEQ ID NO: 13712 - DNA, 22 bp, Artificial Sequence
  Synthetic
atcttgaggcuctcctcaucca

SEQ ID NO: 13713 - DNA, 23 bp, Artificial Sequence
  Synthetic
cctaggccuggaatctcctcuat

SEQ ID NO: 13714 - DNA, 31 bp, Artificial Sequence
  Synthetic
ctgcggtaatcaaguttttagaactcttauc

SEQ ID NO: 13715 - DNA, 25 bp, Artificial Sequence
  Synthetic
ctgaaaaaggutaagggctcugact

SEQ ID NO: 13716 - DNA, 24 bp, Artificial Sequence
  Synthetic
tgcagaatugaggcagacttuaca

SEQ ID NO: 13717 - DNA, 32 bp, Artificial Sequence
  Synthetic
aacattaggtagtugatttataccctgauaga

SEQ ID NO: 13718 - DNA, 32 bp, Artificial Sequence
  Synthetic
catttgatccuaatctcagtgaatuaagagaa

SEQ ID NO: 13719 - DNA, 30 bp, Artificial Sequence
  Synthetic
agacaaaagaattautccaacctccaauga

SEQ ID NO: 13720 - DNA, 32 bp, Artificial Sequence
  Synthetic
gcaaattgacttcuttaaatgaagagtauacc

SEQ ID NO: 13721 - DNA, 23 bp, Artificial Sequence
  Synthetic
ccaaaagccaggugacatucaga

SEQ ID NO: 13722 - DNA, 23 bp, Artificial Sequence
  Synthetic
aaattgggtgutttgtgccaugt

SEQ ID NO: 13723 - DNA, 23 bp, Artificial Sequence
  Synthetic
tcttcaagggacuaggagaugca

SEQ ID NO: 13724 - DNA, 27 bp, Artificial Sequence
  Synthetic
acataaattgcugtctcttctcaugct

SEQ ID NO: 13725 - DNA, 22 bp, Artificial Sequence
  Synthetic
ctcaagtuccagggctttcugt

SEQ ID NO: 13726 - DNA, 17 bp, Artificial Sequence
  Synthetic
gcgguagatgcggugct

SEQ ID NO: 13727 - DNA, 20 bp, Artificial Sequence
  Synthetic
ggccttgtuggcatcacuca

SEQ ID NO: 13728 - DNA, 24 bp, Artificial Sequence
  Synthetic
gutcaaaaucaaaggaagcccaga

SEQ ID NO: 13729 - DNA, 26 bp, Artificial Sequence
  Synthetic
caaactgccaautcaagcctctuaat

SEQ ID NO: 13730 - DNA, 25 bp, Artificial Sequence
  Synthetic
agtgatgaaauaagcagtggagugg

SEQ ID NO: 13731 - DNA, 26 bp, Artificial Sequence
  Synthetic
gatgaaatgcuagttgcttgttuggt

SEQ ID NO: 13732 - DNA, 30 bp, Artificial Sequence
  Synthetic
tcagaactttgaucttgtcatctgtuacaa

SEQ ID NO: 13733 - DNA, 23 bp, Artificial Sequence
  Synthetic
gcaccagggaauctgaauaacgg

SEQ ID NO: 13734 - DNA, 24 bp, Artificial Sequence
  Synthetic
gtcagttttcagaugatcgccaut

SEQ ID NO: 13735 - DNA, 21 bp, Artificial Sequence
  Synthetic
ccgggtaucagaccttccuga

SEQ ID NO: 13736 - DNA, 24 bp, Artificial Sequence
  Synthetic
ctgacacagucagcacuacaagat

SEQ ID NO: 13737 - DNA, 25 bp, Artificial Sequence
  Synthetic
cctctctaguagggttccttcagua

SEQ ID NO: 13738 - DNA, 32 bp, Artificial Sequence
  Synthetic
taugaagaaactacauacagcaagaagaagat

SEQ ID NO: 13739 - DNA, 24 bp, Artificial Sequence
  Synthetic
gcagagagaugacctgctuaagga

SEQ ID NO: 13740 - DNA, 23 bp, Artificial Sequence
  Synthetic
cgcaattugccagaagaauacga

SEQ ID NO: 13741 - DNA, 23 bp, Artificial Sequence
  Synthetic
aagutatagaacagucgccgcat

SEQ ID NO: 13742 - DNA, 27 bp, Artificial Sequence
  Synthetic
gacattcuaataggctgugaggaagag

SEQ ID NO: 13743 - DNA, 30 bp, Artificial Sequence
  Synthetic
gtcacaaatgactutctgataacaaaacut

SEQ ID NO: 13744 - DNA, 30 bp, Artificial Sequence
  Synthetic
aacttgctgagacuataaaatgtcguacat

SEQ ID NO: 13745 - DNA, 21 bp, Artificial Sequence
  Synthetic
gcaagagaagugccctcucaa

SEQ ID NO: 13746 - DNA, 22 bp, Artificial Sequence
  Synthetic
tttaagggaaguttgccuggct

SEQ ID NO: 13747 - DNA, 24 bp, Artificial Sequence
  Synthetic
ccacctttgucagaagtcaacuca

SEQ ID NO: 13748 - DNA, 20 bp, Artificial Sequence
  Synthetic
gcgugggctuacagcagaat

SEQ ID NO: 13749 - DNA, 23 bp, Artificial Sequence
  Synthetic
ggtagaaggauacctcctuggct

SEQ ID NO: 13750 - DNA, 22 bp, Artificial Sequence
  Synthetic
cacacacaaucctcagcuaggt

SEQ ID NO: 13751 - DNA, 25 bp, Artificial Sequence
  Synthetic
ctccagttcttuaagctgcagttug

SEQ ID NO: 13752 - DNA, 19 bp, Artificial Sequence
  Synthetic
cccaagccucttgugcaat

SEQ ID NO: 13753 - DNA, 18 bp, Artificial Sequence
  Synthetic
ggcagguacatgcuggct

SEQ ID NO: 13754 - DNA, 19 bp, Artificial Sequence
  Synthetic
gctctucaaggcgccugag

SEQ ID NO: 13755 - DNA, 19 bp, Artificial Sequence
  Synthetic
cgctgccucgtagaacugg

SEQ ID NO: 13756 - DNA, 26 bp, Artificial Sequence
  Synthetic
ttgcctttauccttgagtguaacaca

SEQ ID NO: 13757 - DNA, 31 bp, Artificial Sequence
  Synthetic
tgactacttgaauacatttgagttcauggat

SEQ ID NO: 13758 - DNA, 26 bp, Artificial Sequence
  Synthetic
acaaatcagctacutggtgatgacut

SEQ ID NO: 13759 - DNA, 20 bp, Artificial Sequence
  Synthetic
ccgtcacuaccgcatguacc

SEQ ID NO: 13760 - DNA, 32 bp, Artificial Sequence
  Synthetic
catagggatagggagauacatactctataugc

SEQ ID NO: 13761 - DNA, 22 bp, Artificial Sequence
  Synthetic
ggccuttgtatcugagcaccaa

SEQ ID NO: 13762 - DNA, 27 bp, Artificial Sequence
  Synthetic
acatgcaaaaucacattatugccaaca

SEQ ID NO: 13763 - DNA, 22 bp, Artificial Sequence
  Synthetic
tcaccaaauggcaccauacgaa

SEQ ID NO: 13764 - DNA, 17 bp, Artificial Sequence
  Synthetic
cgggaugccgaugggat

SEQ ID NO: 13765 - DNA, 18 bp, Artificial Sequence
  Synthetic
cccagucccagctugcag

SEQ ID NO: 13766 - DNA, 18 bp, Artificial Sequence
  Synthetic
gtcgaagcgguaggcgua

SEQ ID NO: 13767 - DNA, 19 bp, Artificial Sequence
  Synthetic
gcgagutcaagcucacgga

SEQ ID NO: 13768 - DNA, 30 bp, Artificial Sequence
  Synthetic
gaaaatgacagcauctttgtaaagcttcut

SEQ ID NO: 13769 - DNA, 26 bp, Artificial Sequence
  Synthetic
agaaaacccaugattcagtccugaac

SEQ ID NO: 13770 - DNA, 27 bp, Artificial Sequence
  Synthetic
agcatuaaaacaaggaaagcaaagugg

SEQ ID NO: 13771 - DNA, 28 bp, Artificial Sequence
  Synthetic
caaatgtucacagaaaaagtgacaguct

SEQ ID NO: 13772 - DNA, 21 bp, Artificial Sequence
  Synthetic
cagctctgcauttcacacgua

SEQ ID NO: 13773 - DNA, 22 bp, Artificial Sequence
  Synthetic
gatctcagguaggctggtgaug

SEQ ID NO: 13774 - DNA, 30 bp, Artificial Sequence
  Synthetic
cgtctattagatuggaggatttacctguga

SEQ ID NO: 13775 - DNA, 24 bp, Artificial Sequence
  Synthetic
acagagaagagcaautggcactua

SEQ ID NO: 13776 - DNA, 30 bp, Artificial Sequence
  Synthetic
gtactgatttgtuaactgtttttctgtugt

SEQ ID NO: 13777 - DNA, 28 bp, Artificial Sequence
  Synthetic
cgaatcttatttcutagcaccctgucaa

SEQ ID NO: 13778 - DNA, 22 bp, Artificial Sequence
  Synthetic
gggtgaauccctttagaauggc

SEQ ID NO: 13779 - DNA, 27 bp, Artificial Sequence
  Synthetic
aacactaccaacuctagaaggacauct

SEQ ID NO: 13780 - DNA, 31 bp, Artificial Sequence
  Synthetic
agcattttcatcttucttcatcatctcatug

SEQ ID NO: 13781 - DNA, 25 bp, Artificial Sequence
  Synthetic
acagaagtcagaauctccacgtgua

SEQ ID NO: 13782 - DNA, 24 bp, Artificial Sequence
  Synthetic
tctagtggtttuccctgtagccut

SEQ ID NO: 13783 - DNA, 19 bp, Artificial Sequence
  Synthetic
cggcaggagguttauggca

SEQ ID NO: 13784 - DNA, 22 bp, Artificial Sequence
  Synthetic
ctccaggutttattggctugca

SEQ ID NO: 13785 - DNA, 27 bp, Artificial Sequence
  Synthetic
agagaacacatgaaugaacgctcttua

SEQ ID NO: 13786 - DNA, 25 bp, Artificial Sequence
  Synthetic
ccctcctctuggaaactttgatgug

SEQ ID NO: 13787 - DNA, 31 bp, Artificial Sequence
  Synthetic
cutattuagagacacaagauaagaggaaaag

SEQ ID NO: 13788 - DNA, 29 bp, Artificial Sequence
  Synthetic
tggacattgaggucttctctattcuacat

SEQ ID NO: 13789 - DNA, 24 bp, Artificial Sequence
  Synthetic
cctcagtgucacagtgttcttugt

SEQ ID NO: 13790 - DNA, 27 bp, Artificial Sequence
  Synthetic
gctgctaagcaaauatgaggtttcaut

SEQ ID NO: 13791 - DNA, 27 bp, Artificial Sequence
  Synthetic
gaagacattaugtggtactccugaact

SEQ ID NO: 13792 - DNA, 29 bp, Artificial Sequence
  Synthetic
gctctttatctcaucagacttttgauggt

SEQ ID NO: 13793 - DNA, 24 bp, Artificial Sequence
  Synthetic
gaagcccaaaguttgtaagtguga

SEQ ID NO: 13794 - DNA, 22 bp, Artificial Sequence
  Synthetic
cgcatgctttucccgtcttcua

SEQ ID NO: 13795 - DNA, 28 bp, Artificial Sequence
  Synthetic
ccaaagtccactucttgaagtgactaut

SEQ ID NO: 13796 - DNA, 26 bp, Artificial Sequence
  Synthetic
cagagtttatccuctttggagcttut

SEQ ID NO: 13797 - DNA, 21 bp, Artificial Sequence
  Synthetic
aatgcccacacaggugaugaa

SEQ ID NO: 13798 - DNA, 24 bp, Artificial Sequence
  Synthetic
caccattttcutggtccatucaca

SEQ ID NO: 13799 - DNA, 20 bp, Artificial Sequence
  Synthetic
atgcaaccaucagugccaga

SEQ ID NO: 13800 - DNA, 30 bp, Artificial Sequence
  Synthetic
gagcaagatagugatgagagttatgaugac

SEQ ID NO: 13801 - DNA, 25 bp, Artificial Sequence
  Synthetic
ggaucctaccaguaagaaaggcaaa

SEQ ID NO: 13802 - DNA, 30 bp, Artificial Sequence
  Synthetic
caaagagattuggaaaaatgagtaacauga

SEQ ID NO: 13803 - DNA, 31 bp, Artificial Sequence
  Synthetic
cataggtagaaauactggctaaatccucaaa

SEQ ID NO: 13804 - DNA, 26 bp, Artificial Sequence
  Synthetic
tccccttgggautagtatctatcuct

SEQ ID NO: 13805 - DNA, 30 bp, Artificial Sequence
  Synthetic
acaatttactcucccatgtaccattctuac

SEQ ID NO: 13806 - DNA, 28 bp, Artificial Sequence
  Synthetic
cttgtgtcttcugctgtttgtttaucag

SEQ ID NO: 13807 - DNA, 26 bp, Artificial Sequence
  Synthetic
gttatcgacauaccgacuaacagcat

SEQ ID NO: 13808 - DNA, 25 bp, Artificial Sequence
  Synthetic
ctttttctcccccucccactatcua

SEQ ID NO: 13809 - DNA, 21 bp, Artificial Sequence
  Synthetic
cctcgugcaggaagtgaacut

SEQ ID NO: 13810 - DNA, 23 bp, Artificial Sequence
  Synthetic
ggccattgucacagaggauaaga

SEQ ID NO: 13811 - DNA, 23 bp, Artificial Sequence
  Synthetic
cctttgttguatcccccuccaag

SEQ ID NO: 13812 - DNA, 30 bp, Artificial Sequence
  Synthetic
gggttggtaggautctattacttacctgut

SEQ ID NO: 13813 - DNA, 28 bp, Artificial Sequence
  Synthetic
ttgagaaggtauaacttggtttgaugct

SEQ ID NO: 13814 - DNA, 25 bp, Artificial Sequence
  Synthetic
cccaaagaaggacutgctgaauaca

SEQ ID NO: 13815 - DNA, 29 bp, Artificial Sequence
  Synthetic
ccggctggaaautttatttgaagaauaca

SEQ ID NO: 13816 - DNA, 22 bp, Artificial Sequence
  Synthetic
ggacaccagugtatgtugggat

SEQ ID NO: 13817 - DNA, 22 bp, Artificial Sequence
  Synthetic
gtgugagcgcaaggctttauag

SEQ ID NO: 13818 - DNA, 21 bp, Artificial Sequence
  Synthetic
cagccctucagtgaagtcucc

SEQ ID NO: 13819 - DNA, 24 bp, Artificial Sequence
  Synthetic
agaagagcaagguataaggguaca

SEQ ID NO: 13820 - DNA, 22 bp, Artificial Sequence
  Synthetic
tggtttgctuctctctcctucc

SEQ ID NO: 13821 - DNA, 31 bp, Artificial Sequence
  Synthetic
gccaaaatcatauaagcaaggaaaugaacac

SEQ ID NO: 13822 - DNA, 27 bp, Artificial Sequence
  Synthetic
cttttaaataggacucccaggagagug

SEQ ID NO: 13823 - DNA, 26 bp, Artificial Sequence
  Synthetic
caagaacctcaccuttttacctgaug

SEQ ID NO: 13824 - DNA, 28 bp, Artificial Sequence
  Synthetic
gttttgttttccautttctcctccaucc

SEQ ID NO: 13825 - DNA, 18 bp, Artificial Sequence
  Synthetic
gugcaccaggagcacuca

SEQ ID NO: 13826 - DNA, 30 bp, Artificial Sequence
  Synthetic
gatttatcctgtuggtctagttcttgttug

SEQ ID NO: 13827 - DNA, 20 bp, Artificial Sequence
  Synthetic
ctgtccgucgtgacacugag

SEQ ID NO: 13828 - DNA, 31 bp, Artificial Sequence
  Synthetic
caggattagtagtuaatgcacgtatttgtut

SEQ ID NO: 13829 - DNA, 21 bp, Artificial Sequence
  Synthetic
ccttttuccagcggagaacug

SEQ ID NO: 13830 - DNA, 25 bp, Artificial Sequence
  Synthetic
ctctatcuccaacctcggagaugat

SEQ ID NO: 13831 - DNA, 26 bp, Artificial Sequence
  Synthetic
gcctattccaggcaauaatgaaaguc

SEQ ID NO: 13832 - DNA, 25 bp, Artificial Sequence
  Synthetic
gggatgacagauttcatgcttucct

SEQ ID NO: 13833 - DNA, 20 bp, Artificial Sequence
  Synthetic
gaggtcuccaggagtgggua

SEQ ID NO: 13834 - DNA, 24 bp, Artificial Sequence
  Synthetic
ctcttuccagaaaaacccaacucc

SEQ ID NO: 13835 - DNA, 20 bp, Artificial Sequence
  Synthetic
agugaggaccauccgtgtua

SEQ ID NO: 13836 - DNA, 24 bp, Artificial Sequence
  Synthetic
gttcgtctgucatccagttcaugt

SEQ ID NO: 13837 - DNA, 20 bp, Artificial Sequence
  Synthetic
cagctccagguctccaaguc

SEQ ID NO: 13838 - DNA, 18 bp, Artificial Sequence
  Synthetic
ccaggcccagcuacctuc

SEQ ID NO: 13839 - DNA, 23 bp, Artificial Sequence
  Synthetic
ttgggctctucatgaaactccuc

SEQ ID NO: 13840 - DNA, 21 bp, Artificial Sequence
  Synthetic
cacagccagugccagaacuaa

SEQ ID NO: 13841 - DNA, 23 bp, Artificial Sequence
  Synthetic
ggucccgggattattuccagaat

SEQ ID NO: 13842 - DNA, 25 bp, Artificial Sequence
  Synthetic
tgttttctttuccctccatggcuat

SEQ ID NO: 13843 - DNA, 21 bp, Artificial Sequence
  Synthetic
gtttggacauggcaagcucag

SEQ ID NO: 13844 - DNA, 27 bp, Artificial Sequence
  Synthetic
agaccatgagtcuctttttaggttgug

SEQ ID NO: 13845 - DNA, 27 bp, Artificial Sequence
  Synthetic
ccatcaagcccaagauttcctcatuat

SEQ ID NO: 13846 - DNA, 28 bp, Artificial Sequence
  Synthetic
aataagcttctguatgtttgggaaauga

SEQ ID NO: 13847 - DNA, 24 bp, Artificial Sequence
  Synthetic
tgtcctttttcugcctctcttugg

SEQ ID NO: 13848 - DNA, 26 bp, Artificial Sequence
  Synthetic
cuatatccgaaagtugcaacgagaac

SEQ ID NO: 13849 - DNA, 26 bp, Artificial Sequence
  Synthetic
tgtcttgaagucggtaaaaagcagua

SEQ ID NO: 13850 - DNA, 25 bp, Artificial Sequence
  Synthetic
aaaatgggauccaaacuggaagaca

SEQ ID NO: 13851 - DNA, 22 bp, Artificial Sequence
  Synthetic
aggattcgcuaacaagtgugct

SEQ ID NO: 13852 - DNA, 24 bp, Artificial Sequence
  Synthetic
tcatggtcaaaauctggactgugg

SEQ ID NO: 13853 - DNA, 23 bp, Artificial Sequence
  Synthetic
ccctcacugaacctctgcataut

SEQ ID NO: 13854 - DNA, 21 bp, Artificial Sequence
  Synthetic
gcagccaaagccuctacgtua

SEQ ID NO: 13855 - DNA, 25 bp, Artificial Sequence
  Synthetic
cacaagtgtuttgtgcgaguagaaa

SEQ ID NO: 13856 - DNA, 28 bp, Artificial Sequence
  Synthetic
tgcttgcatacuaaacggtttttaaauc

SEQ ID NO: 13857 - DNA, 28 bp, Artificial Sequence
  Synthetic
gcagaaccaagaautttauaagaacgca

SEQ ID NO: 13858 - DNA, 22 bp, Artificial Sequence
  Synthetic
ccaaagtaggcuggtcctccut

SEQ ID NO: 13859 - DNA, 20 bp, Artificial Sequence
  Synthetic
gatgacccaccugcatguga

SEQ ID NO: 13860 - DNA, 27 bp, Artificial Sequence
  Synthetic
aaaaggcattttaugagcaaagcauga

SEQ ID NO: 13861 - DNA, 22 bp, Artificial Sequence
  Synthetic
cccccauagccatcctctcuat

SEQ ID NO: 13862 - DNA, 25 bp, Artificial Sequence
  Synthetic
ctatgccutctgtaaaaucaacgca

SEQ ID NO: 13863 - DNA, 21 bp, Artificial Sequence
  Synthetic
ctacccagcagutggctttuc

SEQ ID NO: 13864 - DNA, 24 bp, Artificial Sequence
  Synthetic
gggagtgauaacttgaggtgucat

SEQ ID NO: 13865 - DNA, 22 bp, Artificial Sequence
  Synthetic
gtcaactctutaagcaggcuga

SEQ ID NO: 13866 - DNA, 20 bp, Artificial Sequence
  Synthetic
gaccugcaggactuccaact

SEQ ID NO: 13867 - DNA, 23 bp, Artificial Sequence
  Synthetic
gcgatcagugttttgtgtucacc

SEQ ID NO: 13868 - DNA, 21 bp, Artificial Sequence
  Synthetic
tcgacgtccauctgttcccua

SEQ ID NO: 13869 - DNA, 19 bp, Artificial Sequence
  Synthetic
ctggacacauggcaccugt

SEQ ID NO: 13870 - DNA, 24 bp, Artificial Sequence
  Synthetic
acattgugcagcttgtaguagagg

SEQ ID NO: 13871 - DNA, 17 bp, Artificial Sequence
  Synthetic
ctgcugacgctgcctug

SEQ ID NO: 13872 - DNA, 18 bp, Artificial Sequence
  Synthetic
gtccgcugctgtagucgt

SEQ ID NO: 13873 - DNA, 19 bp, Artificial Sequence
  Synthetic
aaggacggcgucaaguacc

SEQ ID NO: 13874 - DNA, 19 bp, Artificial Sequence
  Synthetic
gcaguggcgtctuggagaa

SEQ ID NO: 13875 - DNA, 18 bp, Artificial Sequence
  Synthetic
cugaccggaggccagaug

SEQ ID NO: 13876 - DNA, 20 bp, Artificial Sequence
  Synthetic
gcgggtuccatgtagttgug

SEQ ID NO: 13877 - DNA, 18 bp, Artificial Sequence
  Synthetic
cugcacccagacccugag

SEQ ID NO: 13878 - DNA, 18 bp, Artificial Sequence
  Synthetic
gctcugcacgcgtgtgua

SEQ ID NO: 13879 - DNA, 20 bp, Artificial Sequence
  Synthetic
cctatgccucctgccagaug

SEQ ID NO: 13880 - DNA, 20 bp, Artificial Sequence
  Synthetic
ggtccagcguccagtagtug

SEQ ID NO: 13881 - DNA, 23 bp, Artificial Sequence
  Synthetic
cgaagtucccgttcuacgagaag

SEQ ID NO: 13882 - DNA, 17 bp, Artificial Sequence
  Synthetic
ggccctuctggctccut

SEQ ID NO: 13883 - DNA, 18 bp, Artificial Sequence
  Synthetic
gtgcgccccaacucttug

SEQ ID NO: 13884 - DNA, 23 bp, Artificial Sequence
  Synthetic
gttttcttttcugcgctctuccc

SEQ ID NO: 13885 - DNA, 20 bp, Artificial Sequence
  Synthetic
gaactcgguggagcccauac

SEQ ID NO: 13886 - DNA, 24 bp, Artificial Sequence
  Synthetic
tgatatttgcagcuggagaaugct

SEQ ID NO: 13887 - DNA, 22 bp, Artificial Sequence
  Synthetic
gaacagtuccctcactctucgg

SEQ ID NO: 13888 - DNA, 27 bp, Artificial Sequence
  Synthetic
tggcaagcutgtgtttcuaaaacaaaa

SEQ ID NO: 13889 - DNA, 21 bp, Artificial Sequence
  Synthetic
gtgccacaaccutgaauccat

SEQ ID NO: 13890 - DNA, 22 bp, Artificial Sequence
  Synthetic
cgugcagaacagagaactugag

SEQ ID NO: 13891 - DNA, 27 bp, Artificial Sequence
  Synthetic
taaaactgtagaacauttaagggcugt

SEQ ID NO: 13892 - DNA, 25 bp, Artificial Sequence
  Synthetic
accaatttaaaacgcutctccccut

SEQ ID NO: 13893 - DNA, 29 bp, Artificial Sequence
  Synthetic
gacttgtggtcauatttaacgttttgcua

SEQ ID NO: 13894 - DNA, 24 bp, Artificial Sequence
  Synthetic
gcaaagcugaactcaucaaaaccc

SEQ ID NO: 13895 - DNA, 25 bp, Artificial Sequence
  Synthetic
gaggagggaagaauggaagacttuc

SEQ ID NO: 13896 - DNA, 23 bp, Artificial Sequence
  Synthetic
gcctcttuggtttttcucagcca

SEQ ID NO: 13897 - DNA, 25 bp, Artificial Sequence
  Synthetic
gutttaatuggcaguaagaaggcat

SEQ ID NO: 13898 - DNA, 30 bp, Artificial Sequence
  Synthetic
agtgccttgctuctcatactaaaatguaat

SEQ ID NO: 13899 - DNA, 22 bp, Artificial Sequence
  Synthetic
aaagtacugagcacccctgtug

SEQ ID NO: 13900 - DNA, 17 bp, Artificial Sequence
  Synthetic
gtgaggcgucgtccgua

SEQ ID NO: 13901 - DNA, 23 bp, Artificial Sequence
  Synthetic
cucccgtaacucacgagaagaag

SEQ ID NO: 13902 - DNA, 30 bp, Artificial Sequence
  Synthetic
ttttagctgtttuggaagatgtattugcat

SEQ ID NO: 13903 - DNA, 28 bp, Artificial Sequence
  Synthetic
ctcatatttgacaccauttggtccatug

SEQ ID NO: 13904 - DNA, 28 bp, Artificial Sequence
  Synthetic
gagagattcugacagtggacuagaaaaa

SEQ ID NO: 13905 - DNA, 26 bp, Artificial Sequence
  Synthetic
catattgaugaactcctggtugacct

SEQ ID NO: 13906 - DNA, 26 bp, Artificial Sequence
  Synthetic
ggcucatctgugaaaagcaacaaaaa

SEQ ID NO: 13907 - DNA, 28 bp, Artificial Sequence
  Synthetic
acattcagataucagaagaaagtugcca

SEQ ID NO: 13908 - DNA, 27 bp, Artificial Sequence
  Synthetic
accatgatgctguactatgggaaaauc

SEQ ID NO: 13909 - DNA, 27 bp, Artificial Sequence
  Synthetic
ttcacagauagcctcaaaaugaggaaa

SEQ ID NO: 13910 - DNA, 26 bp, Artificial Sequence
  Synthetic
ttcttcatcauccagcaagtcugaat

SEQ ID NO: 13911 - DNA, 29 bp, Artificial Sequence
  Synthetic
aactgttgtugggaagacataauaaagga

SEQ ID NO: 13912 - DNA, 28 bp, Artificial Sequence
  Synthetic
acacaatttattacguaccggacatgut

SEQ ID NO: 13913 - DNA, 26 bp, Artificial Sequence
  Synthetic
agcauatcttctaactugcaaaggca

SEQ ID NO: 13914 - DNA, 23 bp, Artificial Sequence
  Synthetic
cgcccugaagttgaacauagagg

SEQ ID NO: 13915 - DNA, 21 bp, Artificial Sequence
  Synthetic
ccaaacgcutcatggtctugt

SEQ ID NO: 13916 - DNA, 21 bp, Artificial Sequence
  Synthetic
cccactggcuctactccuact

SEQ ID NO: 13917 - DNA, 21 bp, Artificial Sequence
  Synthetic
gtcccccuttgatcucaccac

SEQ ID NO: 13918 - DNA, 21 bp, Artificial Sequence
  Synthetic
ccgcagtcugctcctcuaaag

SEQ ID NO: 13919 - DNA, 31 bp, Artificial Sequence
  Synthetic
tggaaagtgacautgaaagtgauaaagagaa

SEQ ID NO: 13920 - DNA, 28 bp, Artificial Sequence
  Synthetic
gtttgtctgtucagtacttgatagucct

SEQ ID NO: 13921 - DNA, 23 bp, Artificial Sequence
  Synthetic
gcatcctgcuggtcttaccttuc

SEQ ID NO: 13922 - DNA, 24 bp, Artificial Sequence
  Synthetic
gagggctggagugttgaaaactua

SEQ ID NO: 13923 - DNA, 20 bp, Artificial Sequence
  Synthetic
caacctucagcggcacatuc

SEQ ID NO: 13924 - DNA, 24 bp, Artificial Sequence
  Synthetic
caaautttccatcugcacaaagcc

SEQ ID NO: 13925 - DNA, 27 bp, Artificial Sequence
  Synthetic
gaaagcgagaaugatctccaagagaua

SEQ ID NO: 13926 - DNA, 22 bp, Artificial Sequence
  Synthetic
caagggtcuactgcagctuact

SEQ ID NO: 13927 - DNA, 24 bp, Artificial Sequence
  Synthetic
aagtacattagautcgctggcugt

SEQ ID NO: 13928 - DNA, 21 bp, Artificial Sequence
  Synthetic
cuctcccacauaaggcccaaa

SEQ ID NO: 13929 - DNA, 22 bp, Artificial Sequence
  Synthetic
ggagggutctcctuacaaagcc

SEQ ID NO: 13930 - DNA, 28 bp, Artificial Sequence
  Synthetic
gcaatgaaaugaggagtattgtctucgt

SEQ ID NO: 13931 - DNA, 21 bp, Artificial Sequence
  Synthetic
cccaaaggaaugggtggtcuc

SEQ ID NO: 13932 - DNA, 28 bp, Artificial Sequence
  Synthetic
gaaatttcctttgutaacatgtctgugt

SEQ ID NO: 13933 - DNA, 21 bp, Artificial Sequence
  Synthetic
ctcaaggucagccaagaugct

SEQ ID NO: 13934 - DNA, 24 bp, Artificial Sequence
  Synthetic
aaguctacatugaaaccacagcct

SEQ ID NO: 13935 - DNA, 21 bp, Artificial Sequence
  Synthetic
ggctgactucacctgcacaut

SEQ ID NO: 13936 - DNA, 20 bp, Artificial Sequence
  Synthetic
ggtacacucctccuggagca

SEQ ID NO: 13937 - DNA, 24 bp, Artificial Sequence
  Synthetic
acccctgtatuctcctccttaugt

SEQ ID NO: 13938 - DNA, 21 bp, Artificial Sequence
  Synthetic
gccatggaucaggtctuccac

SEQ ID NO: 13939 - DNA, 24 bp, Artificial Sequence
  Synthetic
gcaaagtgcutgaggaacaaauct

SEQ ID NO: 13940 - DNA, 22 bp, Artificial Sequence
  Synthetic
ccaggaggagacugtccgtaut

SEQ ID NO: 13941 - DNA, 25 bp, Artificial Sequence
  Synthetic
gccgttcugagatttagtaatugct

SEQ ID NO: 13942 - DNA, 18 bp, Artificial Sequence
  Synthetic
gcugaatgccucccacga

SEQ ID NO: 13943 - DNA, 21 bp, Artificial Sequence
  Synthetic
gcactcggcucctttctguag

SEQ ID NO: 13944 - DNA, 17 bp, Artificial Sequence
  Synthetic
tgccuccgctcacucac

SEQ ID NO: 13945 - DNA, 18 bp, Artificial Sequence
  Synthetic
cagcacguccagcgtgua

SEQ ID NO: 13946 - DNA, 19 bp, Artificial Sequence
  Synthetic
ctgagccggguctcttguc

SEQ ID NO: 13947 - DNA, 21 bp, Artificial Sequence
  Synthetic
acgcctaugaaattgguggct

SEQ ID NO: 13948 - DNA, 20 bp, Artificial Sequence
  Synthetic
cctcaacgcccaugtcttug

SEQ ID NO: 13949 - DNA, 18 bp, Artificial Sequence
  Synthetic
agcccaggccuttctugg

SEQ ID NO: 13950 - DNA, 19 bp, Artificial Sequence
  Synthetic
gctgagagugggcgagtut

SEQ ID NO: 13951 - DNA, 20 bp, Artificial Sequence
  Synthetic
gtccttgucaatgccgaugg

SEQ ID NO: 13952 - DNA, 19 bp, Artificial Sequence
  Synthetic
gggtaaccugcgggagtut

SEQ ID NO: 13953 - DNA, 21 bp, Artificial Sequence
  Synthetic
cttcugggaggccaagtacuc

SEQ ID NO: 13954 - DNA, 18 bp, Artificial Sequence
  Synthetic
cctucccacacccuccca

SEQ ID NO: 13955 - DNA, 18 bp, Artificial Sequence
  Synthetic
cctggctcugcccagtuc

SEQ ID NO: 13956 - DNA, 19 bp, Artificial Sequence
  Synthetic
ctgcccgcagguacaugat

SEQ ID NO: 13957 - DNA, 18 bp, Artificial Sequence
  Synthetic
agagccagcacucacguc

SEQ ID NO: 13958 - DNA, 21 bp, Artificial Sequence
  Synthetic
tgggattggaguctcgagcut

SEQ ID NO: 13959 - DNA, 17 bp, Artificial Sequence
  Synthetic
cacuaggcgcucgacct

SEQ ID NO: 13960 - DNA, 27 bp, Artificial Sequence
  Synthetic
agaaagtgacugagaccgaagatgaua

SEQ ID NO: 13961 - DNA, 25 bp, Artificial Sequence
  Synthetic
ggcacactcuccttactatauagca

SEQ ID NO: 13962 - DNA, 26 bp, Artificial Sequence
  Synthetic
ttgatgctgcauaaaaatagagcuga

SEQ ID NO: 13963 - DNA, 26 bp, Artificial Sequence
  Synthetic
aagtcccattcguatcctcttttgut

SEQ ID NO: 13964 - DNA, 31 bp, Artificial Sequence
  Synthetic
catctaaagtccatuatgtttgagtgttcug

SEQ ID NO: 13965 - DNA, 26 bp, Artificial Sequence
  Synthetic
agaaggaggagaaguaaactcagcut

SEQ ID NO: 13966 - DNA, 30 bp, Artificial Sequence
  Synthetic
taagcatctaatuaggtgaaactgaatuga

SEQ ID NO: 13967 - DNA, 29 bp, Artificial Sequence
  Synthetic
ctaaacctgtatgutgctgttctcattug

SEQ ID NO: 13968 - DNA, 28 bp, Artificial Sequence
  Synthetic
cccagagaaauttagtgataugcagcaa

SEQ ID NO: 13969 - DNA, 26 bp, Artificial Sequence
  Synthetic
tgttggtauaagagatggagguggag

SEQ ID NO: 13970 - DNA, 23 bp, Artificial Sequence
  Synthetic
catgacacauttttggugggcat

SEQ ID NO: 13971 - DNA, 21 bp, Artificial Sequence
  Synthetic
gctggtguccacaagacuagg

SEQ ID NO: 13972 - DNA, 26 bp, Artificial Sequence
  Synthetic
ggactgcagaucacatctctttuaca

SEQ ID NO: 13973 - DNA, 25 bp, Artificial Sequence
  Synthetic
tcgttcttctutttctcgactugct

SEQ ID NO: 13974 - DNA, 18 bp, Artificial Sequence
  Synthetic
gcugcactugggcgagag

SEQ ID NO: 13975 - DNA, 19 bp, Artificial Sequence
  Synthetic
ggtgucccacctgtcugga

SEQ ID NO: 13976 - DNA, 31 bp, Artificial Sequence
  Synthetic
gatgaaacgaaugagaataagcagaaugaat

SEQ ID NO: 13977 - DNA, 23 bp, Artificial Sequence
  Synthetic
cacugcagaaagucaagcattua

SEQ ID NO: 13978 - DNA, 28 bp, Artificial Sequence
  Synthetic
caaagtaagcugtacacattugaggaga

SEQ ID NO: 13979 - DNA, 23 bp, Artificial Sequence
  Synthetic
tcactgtgaautcttcccctucc

SEQ ID NO: 13980 - DNA, 32 bp, Artificial Sequence
  Synthetic
ttttgtccagtagtugtagataatggtttcut

SEQ ID NO: 13981 - DNA, 31 bp, Artificial Sequence
  Synthetic
caacaatcaaatcuacattttctccatcgut

SEQ ID NO: 13982 - DNA, 23 bp, Artificial Sequence
  Synthetic
gaaggaggcacutacacatucct

SEQ ID NO: 13983 - DNA, 26 bp, Artificial Sequence
  Synthetic
catagtacacaagutgagtcctugca

SEQ ID NO: 13984 - DNA, 31 bp, Artificial Sequence
  Synthetic
ttctatagautctagtgcatucaagcacaat

SEQ ID NO: 13985 - DNA, 28 bp, Artificial Sequence
  Synthetic
ctgatatgguagacagagcctaaacauc

SEQ ID NO: 13986 - DNA, 22 bp, Artificial Sequence
  Synthetic
gcaccaucaccacttacctugt

SEQ ID NO: 13987 - DNA, 25 bp, Artificial Sequence
  Synthetic
gcatgcaguaccatacaggaactua

SEQ ID NO: 13988 - DNA, 22 bp, Artificial Sequence
  Synthetic
cccttctacaugtcccactuga

SEQ ID NO: 13989 - DNA, 25 bp, Artificial Sequence
  Synthetic
ggttgcttgauaggtaggtacucac

SEQ ID NO: 13990 - DNA, 25 bp, Artificial Sequence
  Synthetic
ctcatggtcggaucacaaagattug

SEQ ID NO: 13991 - DNA, 27 bp, Artificial Sequence
  Synthetic
gaaactaaaaatccuttgcaggacugt

SEQ ID NO: 13992 - DNA, 22 bp, Artificial Sequence
  Synthetic
ctggaaugccggtcgattcuaa

SEQ ID NO: 13993 - DNA, 22 bp, Artificial Sequence
  Synthetic
cctcaacatcugggtttctguc

SEQ ID NO: 13994 - DNA, 27 bp, Artificial Sequence
  Synthetic
agatttactccaacutagcaaacugca

SEQ ID NO: 13995 - DNA, 22 bp, Artificial Sequence
  Synthetic
gggugacccaaacactgatuct

SEQ ID NO: 13996 - DNA, 21 bp, Artificial Sequence
  Synthetic
gctaccgguttgcacuccaat

SEQ ID NO: 13997 - DNA, 23 bp, Artificial Sequence
  Synthetic
auctgaaggcucaaaccagacaa

SEQ ID NO: 13998 - DNA, 28 bp, Artificial Sequence
  Synthetic
tctggttcttcuaacgggatatctucaa

SEQ ID NO: 13999 - DNA, 21 bp, Artificial Sequence
  Synthetic
aggtagccgauctgcagucaa

SEQ ID NO: 14000 - DNA, 32 bp, Artificial Sequence
  Synthetic
agaaagagaauacaggaauacttcttaaaguc

SEQ ID NO: 14001 - DNA, 27 bp, Artificial Sequence
  Synthetic
aatcaaagaatgtcucctccctgttut

SEQ ID NO: 14002 - DNA, 28 bp, Artificial Sequence
  Synthetic
caaacctgtgauctgaaaagatagcuga

SEQ ID NO: 14003 - DNA, 21 bp, Artificial Sequence
  Synthetic
catcctccugcctcttuggac

SEQ ID NO: 14004 - DNA, 23 bp, Artificial Sequence
  Synthetic
ttgactgcuttcccucaaacact

SEQ ID NO: 14005 - DNA, 22 bp, Artificial Sequence
  Synthetic
gcatcgagcuctcatgtcugaa

SEQ ID NO: 14006 - DNA, 24 bp, Artificial Sequence
  Synthetic
gttcacaaugttcatccaauggga

SEQ ID NO: 14007 - DNA, 26 bp, Artificial Sequence
  Synthetic
tgaggctccaauaaacagcaauaaca

SEQ ID NO: 14008 - DNA, 21 bp, Artificial Sequence
  Synthetic
tcccugggaaagttcugcaac

SEQ ID NO: 14009 - DNA, 25 bp, Artificial Sequence
  Synthetic
cctggagaaucagacgacaagtaut

SEQ ID NO: 14010 - DNA, 32 bp, Artificial Sequence
  Synthetic
catgatcaaaatgucatttgtgctatuagaga

SEQ ID NO: 14011 - DNA, 23 bp, Artificial Sequence
  Synthetic
gcactgcagacagauctacgtut

SEQ ID NO: 14012 - DNA, 32 bp, Artificial Sequence
  Synthetic
ccttccatuaaagagagagagattttuaaaut

SEQ ID NO: 14013 - DNA, 21 bp, Artificial Sequence
  Synthetic
gcugtctcagugacaaaccca

SEQ ID NO: 14014 - DNA, 27 bp, Artificial Sequence
  Synthetic
gatgacagtguaatttcctgtgtcuct

SEQ ID NO: 14015 - DNA, 22 bp, Artificial Sequence
  Synthetic
agcatcauttcgtgugagagca

SEQ ID NO: 14016 - DNA, 22 bp, Artificial Sequence
  Synthetic
tcactccgggutacaccatcua

SEQ ID NO: 14017 - DNA, 29 bp, Artificial Sequence
  Synthetic
agttattgggtaaugttatatgctgugct

SEQ ID NO: 14018 - DNA, 21 bp, Artificial Sequence
  Synthetic
gaccaugccagcatagcugat

SEQ ID NO: 14019 - DNA, 28 bp, Artificial Sequence
  Synthetic
tcattgtacatggcuctcatttttggua

SEQ ID NO: 14020 - DNA, 27 bp, Artificial Sequence
  Synthetic
gtcatttccgaucacttttggaatugt

SEQ ID NO: 14021 - DNA, 27 bp, Artificial Sequence
  Synthetic
ggcacttcatautaatacctcccugaa

SEQ ID NO: 14022 - DNA, 19 bp, Artificial Sequence
  Synthetic
agagugggctcctuaccca

SEQ ID NO: 14023 - DNA, 18 bp, Artificial Sequence
  Synthetic
tccgcgccuccttctcua

SEQ ID NO: 14024 - DNA, 27 bp, Artificial Sequence
  Synthetic
aatgtggtactttuccccctactttut

SEQ ID NO: 14025 - DNA, 25 bp, Artificial Sequence
  Synthetic
aaacctcuggaggaagtgctaaaut

SEQ ID NO: 14026 - DNA, 25 bp, Artificial Sequence
  Synthetic
caagacutagtgcaaugcaagacag

SEQ ID NO: 14027 - DNA, 28 bp, Artificial Sequence
  Synthetic
tttgacacccccauaatattttuccaga

SEQ ID NO: 14028 - DNA, 29 bp, Artificial Sequence
  Synthetic
ttttcaagtcccauagttttacagtucca

SEQ ID NO: 14029 - DNA, 31 bp, Artificial Sequence
  Synthetic
gtaactaactcauagccattatttcuaacca

SEQ ID NO: 14030 - DNA, 30 bp, Artificial Sequence
  Synthetic
tgagtaaaacaaccutatgattcaucagga

SEQ ID NO: 14031 - DNA, 30 bp, Artificial Sequence
  Synthetic
gagggttgttaguggagcatatgatttuat

SEQ ID NO: 14032 - DNA, 23 bp, Artificial Sequence
  Synthetic
attctccaguctctgcatuccac

SEQ ID NO: 14033 - DNA, 30 bp, Artificial Sequence
  Synthetic
tctacccaaaaguaatcatcttaagtgtut

SEQ ID NO: 14034 - DNA, 25 bp, Artificial Sequence
  Synthetic
cgcctccagutagtatcaattcugt

SEQ ID NO: 14035 - DNA, 30 bp, Artificial Sequence
  Synthetic
tgtataactgutattattggugaaggcaat

SEQ ID NO: 14036 - DNA, 28 bp, Artificial Sequence
  Synthetic
gggttctatcacutgcatcatatgttut

SEQ ID NO: 14037 - DNA, 31 bp, Artificial Sequence
  Synthetic
gtgagttttccttuataagcctgtaattugg

SEQ ID NO: 14038 - DNA, 27 bp, Artificial Sequence
  Synthetic
tgtatttttccccutcagtgattcugt

SEQ ID NO: 14039 - DNA, 25 bp, Artificial Sequence
  Synthetic
ctaatcttccutttctgacgugcct

SEQ ID NO: 14040 - DNA, 20 bp, Artificial Sequence
  Synthetic
ggcctugggcaatgatgcua

SEQ ID NO: 14041 - DNA, 29 bp, Artificial Sequence
  Synthetic
gagtattcgucaaccaagaggagtttuaa

SEQ ID NO: 14042 - DNA, 21 bp, Artificial Sequence
  Synthetic
cactctccuggtccatcucct

SEQ ID NO: 14043 - DNA, 21 bp, Artificial Sequence
  Synthetic
tggaggccaaaaugatuccca

SEQ ID NO: 14044 - DNA, 24 bp, Artificial Sequence
  Synthetic
agcatggacutccaaaugagacaa

SEQ ID NO: 14045 - DNA, 27 bp, Artificial Sequence
  Synthetic
ctccccatuaattctactguggaagat

SEQ ID NO: 14046 - DNA, 27 bp, Artificial Sequence
  Synthetic
gatcgagttuccagaacctcaacatua

SEQ ID NO: 14047 - DNA, 24 bp, Artificial Sequence
  Synthetic
gugtccctttttauaggaggagca

SEQ ID NO: 14048 - DNA, 25 bp, Artificial Sequence
  Synthetic
accaggtgguaacttgttttaccut

SEQ ID NO: 14049 - DNA, 22 bp, Artificial Sequence
  Synthetic
tgagacaggugtggguaaccat

SEQ ID NO: 14050 - DNA, 28 bp, Artificial Sequence
  Synthetic
gccttgagcucttataaataaguaccca

SEQ ID NO: 14051 - DNA, 28 bp, Artificial Sequence
  Synthetic
atcctatagatgaguttcgaccagguat

SEQ ID NO: 14052 - DNA, 24 bp, Artificial Sequence
  Synthetic
tctcaagcacucaccattuggaat

SEQ ID NO: 14053 - DNA, 24 bp, Artificial Sequence
  Synthetic
cagatgaggaaauacaguccctut

SEQ ID NO: 14054 - DNA, 25 bp, Artificial Sequence
  Synthetic
cccggccaacaucttcttttuaaag

SEQ ID NO: 14055 - DNA, 25 bp, Artificial Sequence
  Synthetic
tggaaatggagcaaauggagcaaua

SEQ ID NO: 14056 - DNA, 31 bp, Artificial Sequence
  Synthetic
cttacctgctctugtactgaattagattuct

SEQ ID NO: 14057 - DNA, 25 bp, Artificial Sequence
  Synthetic
tgcagtttauccccatactccuact

SEQ ID NO: 14058 - DNA, 28 bp, Artificial Sequence
  Synthetic
cttucaaggaagaucaaaacaggtuaat

SEQ ID NO: 14059 - DNA, 28 bp, Artificial Sequence
  Synthetic
gggaaaatgtugcaatcaagattcguaa

SEQ ID NO: 14060 - DNA, 22 bp, Artificial Sequence
  Synthetic
aaatgttctucacagggcucca

SEQ ID NO: 14061 - DNA, 24 bp, Artificial Sequence
  Synthetic
acaacacaacuctgaauggcaaag

SEQ ID NO: 14062 - DNA, 28 bp, Artificial Sequence
  Synthetic
ccacaatacuaacaagtgacactugact

SEQ ID NO: 14063 - DNA, 27 bp, Artificial Sequence
  Synthetic
aattccagctctutcacatggtgatua

SEQ ID NO: 14064 - DNA, 29 bp, Artificial Sequence
  Synthetic
ctcatgtgaaacutcagttcatttttguc

SEQ ID NO: 14065 - DNA, 18 bp, Artificial Sequence
  Synthetic
gcggcuacatgccucagt

SEQ ID NO: 14066 - DNA, 28 bp, Artificial Sequence
  Synthetic
aacttgcttugacctttcaaaatgugaa

SEQ ID NO: 14067 - DNA, 24 bp, Artificial Sequence
  Synthetic
gagcggccagaagauctacaatua

SEQ ID NO: 14068 - DNA, 28 bp, Artificial Sequence
  Synthetic
gctttttgtcauttgcttctattuccac

SEQ ID NO: 14069 - DNA, 26 bp, Artificial Sequence
  Synthetic
ttactgggaaguttcagagatgcaut

SEQ ID NO: 14070 - DNA, 27 bp, Artificial Sequence
  Synthetic
accagtttcattuccaatgatggtuct

SEQ ID NO: 14071 - DNA, 24 bp, Artificial Sequence
  Synthetic
aaaggaccuactgtucggacaaaa

SEQ ID NO: 14072 - DNA, 22 bp, Artificial Sequence
  Synthetic
ggaagucgttucaacggaccaa

SEQ ID NO: 14073 - DNA, 24 bp, Artificial Sequence
  Synthetic
tcacagacuggcaacaagaagaug

SEQ ID NO: 14074 - DNA, 28 bp, Artificial Sequence
  Synthetic
gcatctgattugccaacaagatttctua

SEQ ID NO: 14075 - DNA, 26 bp, Artificial Sequence
  Synthetic
cctcctttugaagccaauggaaaaat

SEQ ID NO: 14076 - DNA, 24 bp, Artificial Sequence
  Synthetic
agtcacuccagtatccctuaccat

SEQ ID NO: 14077 - DNA, 30 bp, Artificial Sequence
  Synthetic
actaattgaggtttuctgttgtttggttug

SEQ ID NO: 14078 - DNA, 23 bp, Artificial Sequence
  Synthetic
gatgtaacctucccaagggcaut

SEQ ID NO: 14079 - DNA, 24 bp, Artificial Sequence
  Synthetic
cacacaaguttgctgatugcaaag

SEQ ID NO: 14080 - DNA, 27 bp, Artificial Sequence
  Synthetic
tgcagttcaauagtcatgacaaaguct

SEQ ID NO: 14081 - DNA, 31 bp, Artificial Sequence
  Synthetic
cagtgtcaccttuacagatatagcttcatua

SEQ ID NO: 14082 - DNA, 25 bp, Artificial Sequence
  Synthetic
cttacctguagattcagtggugagg

SEQ ID NO: 14083 - DNA, 28 bp, Artificial Sequence
  Synthetic
cagcatggaaacaagautgtgtctuaaa

SEQ ID NO: 14084 - DNA, 30 bp, Artificial Sequence
  Synthetic
ttctttcttacaugaatgggatgttctuct

SEQ ID NO: 14085 - DNA, 24 bp, Artificial Sequence
  Synthetic
gaactacccaccugatggactuac

SEQ ID NO: 14086 - DNA, 21 bp, Artificial Sequence
  Synthetic
cacttccggutgggtccatua

SEQ ID NO: 14087 - DNA, 21 bp, Artificial Sequence
  Synthetic
catgccaaucaggtagccugt

SEQ ID NO: 14088 - DNA, 21 bp, Artificial Sequence
  Synthetic
ctggaggcauaagcctggtut

SEQ ID NO: 14089 - DNA, 23 bp, Artificial Sequence
  Synthetic
gctgagcagagutagctccauac

SEQ ID NO: 14090 - DNA, 23 bp, Artificial Sequence
  Synthetic
aggacaagguggctaucaaaacc

SEQ ID NO: 14091 - DNA, 20 bp, Artificial Sequence
  Synthetic
gtacccccuggcgttugaat

SEQ ID NO: 14092 - DNA, 21 bp, Artificial Sequence
  Synthetic
cccggaacautctgacctuct

SEQ ID NO: 14093 - DNA, 21 bp, Artificial Sequence
  Synthetic
cacacatcggacutgctgcua

SEQ ID NO: 14094 - DNA, 26 bp, Artificial Sequence
  Synthetic
cctaugacgcataaguacaaggaact

SEQ ID NO: 14095 - DNA, 22 bp, Artificial Sequence
  Synthetic
gtggcctgguactcagtctcua

SEQ ID NO: 14096 - DNA, 18 bp, Artificial Sequence
  Synthetic
gcuggtgugggagaacga

SEQ ID NO: 14097 - DNA, 17 bp, Artificial Sequence
  Synthetic
ccgggcuctgtctcugg

SEQ ID NO: 14098 - DNA, 19 bp, Artificial Sequence
  Synthetic
gacccgcagaugtccauga

SEQ ID NO: 14099 - DNA, 21 bp, Artificial Sequence
  Synthetic
aatggcaagutctgctgtcug

SEQ ID NO: 14100 - DNA, 22 bp, Artificial Sequence
  Synthetic
acagagccaagcauaaggtcug

SEQ ID NO: 14101 - DNA, 26 bp, Artificial Sequence
  Synthetic
caagtgtctaaagucccatcgaauct

SEQ ID NO: 14102 - DNA, 22 bp, Artificial Sequence
  Synthetic
ggctctaugcgaaaagactgug

SEQ ID NO: 14103 - DNA, 26 bp, Artificial Sequence
  Synthetic
accacctccautctaacagauaacga

SEQ ID NO: 14104 - DNA, 26 bp, Artificial Sequence
  Synthetic
gttacccauaaaagaaagctgccauc

SEQ ID NO: 14105 - DNA, 18 bp, Artificial Sequence
  Synthetic
ccgaauggctggctuggt

SEQ ID NO: 14106 - DNA, 23 bp, Artificial Sequence
  Synthetic
guagaaagtggcugaagcgagat

SEQ ID NO: 14107 - DNA, 21 bp, Artificial Sequence
  Synthetic
ccgtcctuttcctgctuggag

SEQ ID NO: 14108 - DNA, 21 bp, Artificial Sequence
  Synthetic
cagagcucacaccaacaacug

SEQ ID NO: 14109 - DNA, 21 bp, Artificial Sequence
  Synthetic
aaagcugtccagucccagaag

SEQ ID NO: 14110 - DNA, 20 bp, Artificial Sequence
  Synthetic
gaaagtgggcucctctcugt

SEQ ID NO: 14111 - DNA, 21 bp, Artificial Sequence
  Synthetic
tttggagctguctctggcauc

SEQ ID NO: 14112 - DNA, 24 bp, Artificial Sequence
  Synthetic
atctcctatuaaggaccagccugt

SEQ ID NO: 14113 - DNA, 22 bp, Artificial Sequence
  Synthetic
ggauaaagccaccactgcugaa

SEQ ID NO: 14114 - DNA, 20 bp, Artificial Sequence
  Synthetic
agctctcagaccucggtcuc

SEQ ID NO: 14115 - DNA, 21 bp, Artificial Sequence
  Synthetic
gttgctctuccccattgucct

SEQ ID NO: 14116 - DNA, 22 bp, Artificial Sequence
  Synthetic
ctgtgttgccutgtgaagaugg

SEQ ID NO: 14117 - DNA, 23 bp, Artificial Sequence
  Synthetic
cccaacacaugtgatgtcacuct

SEQ ID NO: 14118 - DNA, 22 bp, Artificial Sequence
  Synthetic
gttgctggagucctgacaugat

SEQ ID NO: 14119 - DNA, 19 bp, Artificial Sequence
  Synthetic
gtccctuggtggatgguca

SEQ ID NO: 14120 - DNA, 29 bp, Artificial Sequence
  Synthetic
gcaaaagtaagtugctgtttgtattucca

SEQ ID NO: 14121 - DNA, 21 bp, Artificial Sequence
  Synthetic
tcatgccaaugcctgtgtcua

SEQ ID NO: 14122 - DNA, 25 bp, Artificial Sequence
  Synthetic
gttcttcacagcagutctgctgaua

SEQ ID NO: 14123 - DNA, 28 bp, Artificial Sequence
  Synthetic
ctctcttctagguactctgtctgatcut

SEQ ID NO: 14124 - DNA, 27 bp, Artificial Sequence
  Synthetic
ccuttgaccttttugagaacaagaaga

SEQ ID NO: 14125 - DNA, 24 bp, Artificial Sequence
  Synthetic
aatgcctaaaaccucccaagacut

SEQ ID NO: 14126 - DNA, 25 bp, Artificial Sequence
  Synthetic
ctctgtcagaguatgtttcucgcat

SEQ ID NO: 14127 - DNA, 26 bp, Artificial Sequence
  Synthetic
aaatgaacucagtgactaaaaugcct

SEQ ID NO: 14128 - DNA, 28 bp, Artificial Sequence
  Synthetic
ttcaaagtgguaatgtcaatcuaaggct

SEQ ID NO: 14129 - DNA, 20 bp, Artificial Sequence
  Synthetic
ggtggagtugtcccgaagug

SEQ ID NO: 14130 - DNA, 22 bp, Artificial Sequence
  Synthetic
ctgcagtucctgatgagauccc

SEQ ID NO: 14131 - DNA, 17 bp, Artificial Sequence
  Synthetic
gcacucgaggcugcagt

SEQ ID NO: 14132 - DNA, 19 bp, Artificial Sequence
  Synthetic
tgtccuacgcggaccugat

SEQ ID NO: 14133 - DNA, 18 bp, Artificial Sequence
  Synthetic
gggtggguacgcacctuc

SEQ ID NO: 14134 - DNA, 18 bp, Artificial Sequence
  Synthetic
gggcugtctccauggaca

SEQ ID NO: 14135 - DNA, 17 bp, Artificial Sequence
  Synthetic
cugccaggccactugga

SEQ ID NO: 14136 - DNA, 17 bp, Artificial Sequence
  Synthetic
actgccacggcugacug

SEQ ID NO: 14137 - DNA, 21 bp, Artificial Sequence
  Synthetic
cccutggtggtauacgggaag

SEQ ID NO: 14138 - DNA, 20 bp, Artificial Sequence
  Synthetic
cutgatgtcucaggccagca

SEQ ID NO: 14139 - DNA, 23 bp, Artificial Sequence
  Synthetic
tggagcaagutctgatugaccaa

SEQ ID NO: 14140 - DNA, 22 bp, Artificial Sequence
  Synthetic
gaacttcacuggtgcuaagcag

SEQ ID NO: 14141 - DNA, 21 bp, Artificial Sequence
  Synthetic
ccccctcauccccatattgut

SEQ ID NO: 14142 - DNA, 28 bp, Artificial Sequence
  Synthetic
agttttactgaagaaautctgaggccut

SEQ ID NO: 14143 - DNA, 26 bp, Artificial Sequence
  Synthetic
gtaccttgatgagutagaaggaggug

SEQ ID NO: 14144 - DNA, 27 bp, Artificial Sequence
  Synthetic
cctgctgagaaagaauagttacagcut

SEQ ID NO: 14145 - DNA, 25 bp, Artificial Sequence
  Synthetic
caatcctcatcuctgagatccaucc

SEQ ID NO: 14146 - DNA, 21 bp, Artificial Sequence
  Synthetic
gtgcttgcautggtcgttuca

SEQ ID NO: 14147 - DNA, 24 bp, Artificial Sequence
  Synthetic
ttcccaauatgaaggguccaacag

SEQ ID NO: 14148 - DNA, 28 bp, Artificial Sequence
  Synthetic
agcttcaagttgugcttctttcatttut

SEQ ID NO: 14149 - DNA, 27 bp, Artificial Sequence
  Synthetic
tacattgttgaacugtaggcttttgug

SEQ ID NO: 14150 - DNA, 26 bp, Artificial Sequence
  Synthetic
ttgggtttctgucagttcagattuca

SEQ ID NO: 14151 - DNA, 28 bp, Artificial Sequence
  Synthetic
ggtagtctctcugttgtcattctugaat

SEQ ID NO: 14152 - DNA, 17 bp, Artificial Sequence
  Synthetic
tgctgcugggcauggac

SEQ ID NO: 14153 - DNA, 19 bp, Artificial Sequence
  Synthetic
gcgaggugaagggagguga

SEQ ID NO: 14154 - DNA, 29 bp, Artificial Sequence
  Synthetic
tcacatcatatctutatggtggtgcauac

SEQ ID NO: 14155 - DNA, 28 bp, Artificial Sequence
  Synthetic
agtcacacaccaaugaagaaagaactua

SEQ ID NO: 14156 - DNA, 23 bp, Artificial Sequence
  Synthetic
ccaagggaaagguctctgtuaga

SEQ ID NO: 14157 - DNA, 24 bp, Artificial Sequence
  Synthetic
acgcattgtagaautccagtggut

SEQ ID NO: 14158 - DNA, 20 bp, Artificial Sequence
  Synthetic
gcggcaccucatgaccauat

SEQ ID NO: 14159 - DNA, 27 bp, Artificial Sequence
  Synthetic
ctcggttgacautaggagcaattcuaa

SEQ ID NO: 14160 - DNA, 26 bp, Artificial Sequence
  Synthetic
agggcaccautctggataatgtuaag

SEQ ID NO: 14161 - DNA, 27 bp, Artificial Sequence
  Synthetic
tgctaataacagcutggctauagaaaa

SEQ ID NO: 14162 - DNA, 22 bp, Artificial Sequence
  Synthetic
cccttagccacuggagactgua

SEQ ID NO: 14163 - DNA, 28 bp, Artificial Sequence
  Synthetic
tctagattattaaggcucaggtgtcugt

SEQ ID NO: 14164 - DNA, 24 bp, Artificial Sequence
  Synthetic
gtaacagguaaagccatguaggga

SEQ ID NO: 14165 - DNA, 28 bp, Artificial Sequence
  Synthetic
ccgtatttaatttcutgagctgcaagug

SEQ ID NO: 14166 - DNA, 22 bp, Artificial Sequence
  Synthetic
gtatutgagggacuggccagaa

SEQ ID NO: 14167 - DNA, 22 bp, Artificial Sequence
  Synthetic
ggtattcagacugtcccctucc

SEQ ID NO: 14168 - DNA, 22 bp, Artificial Sequence
  Synthetic
tgtcaaccacutgccatctgut

SEQ ID NO: 14169 - DNA, 23 bp, Artificial Sequence
  Synthetic
ctggaagatgucatctgctccuc

SEQ ID NO: 14170 - DNA, 23 bp, Artificial Sequence
  Synthetic
gttgtctuggagaagcaagaugg

SEQ ID NO: 14171 - DNA, 17 bp, Artificial Sequence
  Synthetic
ctccggccucacctuga

SEQ ID NO: 14172 - DNA, 28 bp, Artificial Sequence
  Synthetic
ttttagggtgcacutgatctatctgaug

SEQ ID NO: 14173 - DNA, 24 bp, Artificial Sequence
  Synthetic
aaagcagagcacuctggagtuaag

SEQ ID NO: 14174 - DNA, 25 bp, Artificial Sequence
  Synthetic
caatgaugaggccaatcagagugat

SEQ ID NO: 14175 - DNA, 28 bp, Artificial Sequence
  Synthetic
ttccataucatcttcatcuggacaaagg

SEQ ID NO: 14176 - DNA, 24 bp, Artificial Sequence
  Synthetic
ccctuctgaaattaguaccagcca

SEQ ID NO: 14177 - DNA, 26 bp, Artificial Sequence
  Synthetic
tctatgggaaaugcagaacaccauac

SEQ ID NO: 14178 - DNA, 29 bp, Artificial Sequence
  Synthetic
agtgaatcctttucagaatgttgtttucc

SEQ ID NO: 14179 - DNA, 25 bp, Artificial Sequence
  Synthetic
gattacatcttgaguggtggcagua

SEQ ID NO: 14180 - DNA, 27 bp, Artificial Sequence
  Synthetic
tttcatcagaaggcucaaagtaaugga

SEQ ID NO: 14181 - DNA, 24 bp, Artificial Sequence
  Synthetic
ctttatcagaugcctgtcgcaaug

SEQ ID NO: 14182 - DNA, 26 bp, Artificial Sequence
  Synthetic
aatgcaggtaccuttttctcaaguga

SEQ ID NO: 14183 - DNA, 29 bp, Artificial Sequence
  Synthetic
aggattgtcttguagggaatatttggtut

SEQ ID NO: 14184 - DNA, 27 bp, Artificial Sequence
  Synthetic
cattctgaugaaaagggtgcuaaagaa

SEQ ID NO: 14185 - DNA, 28 bp, Artificial Sequence
  Synthetic
tctcctacaucatgtgataaggugaaca

SEQ ID NO: 14186 - DNA, 21 bp, Artificial Sequence
  Synthetic
gcatggtcuctctcctgcuga

SEQ ID NO: 14187 - DNA, 27 bp, Artificial Sequence
  Synthetic
gcccatgaggutctattagtgcttuag

SEQ ID NO: 14188 - DNA, 21 bp, Artificial Sequence
  Synthetic
ctgcagaguggcatgaaagug

SEQ ID NO: 14189 - DNA, 23 bp, Artificial Sequence
  Synthetic
caggtttatgucttgggccctua

SEQ ID NO: 14190 - DNA, 28 bp, Artificial Sequence
  Synthetic
aggttgtcaguaatattgttagccaugt

SEQ ID NO: 14191 - DNA, 29 bp, Artificial Sequence
  Synthetic
atctgaaattacucacaactttcccugaa

SEQ ID NO: 14192 - DNA, 23 bp, Artificial Sequence
  Synthetic
tctucagcagctttucaagagca

SEQ ID NO: 14193 - DNA, 27 bp, Artificial Sequence
  Synthetic
ggtcttgcttaaugaagttgagaagut

SEQ ID NO: 14194 - DNA, 23 bp, Artificial Sequence
  Synthetic
ttttgctccucttgtcctcucac

SEQ ID NO: 14195 - DNA, 27 bp, Artificial Sequence
  Synthetic
gtcaccaatctautgaacagccacaua

SEQ ID NO: 14196 - DNA, 31 bp, Artificial Sequence
  Synthetic
tcattacaactucaagccttatuacagaact

SEQ ID NO: 14197 - DNA, 22 bp, Artificial Sequence
  Synthetic
tcatccaaaugtccccaugcaa

SEQ ID NO: 14198 - DNA, 27 bp, Artificial Sequence
  Synthetic
tcacttacaattugcttgtttccucct

SEQ ID NO: 14199 - DNA, 28 bp, Artificial Sequence
  Synthetic
ccatttcactucatggtacccucaaaat

SEQ ID NO: 14200 - DNA, 22 bp, Artificial Sequence
  Synthetic
tgatcagcucctcagtguggat

SEQ ID NO: 14201 - DNA, 29 bp, Artificial Sequence
  Synthetic
agcacgtttuagcatagtttttatctucc

SEQ ID NO: 14202 - DNA, 24 bp, Artificial Sequence
  Synthetic
gcctugggcagaatatagugaacc

SEQ ID NO: 14203 - DNA, 22 bp, Artificial Sequence
  Synthetic
acaaagtgccucctctcactuc

SEQ ID NO: 14204 - DNA, 26 bp, Artificial Sequence
  Synthetic
cagagagtatttuaccttcccagcut

SEQ ID NO: 14205 - DNA, 25 bp, Artificial Sequence
  Synthetic
gagaggugagaaaagtgtguggaat

SEQ ID NO: 14206 - DNA, 22 bp, Artificial Sequence
  Synthetic
cagtccactaugccggtgatut

SEQ ID NO: 14207 - DNA, 18 bp, Artificial Sequence
  Synthetic
gcgggccutctccttcuc

SEQ ID NO: 14208 - DNA, 21 bp, Artificial Sequence
  Synthetic
gcagaugcacatcguggacat

SEQ ID NO: 14209 - DNA, 23 bp, Artificial Sequence
  Synthetic
tcctggagtcucttctggaacug

SEQ ID NO: 14210 - DNA, 22 bp, Artificial Sequence
  Synthetic
gtggagtttguggagggagaut

SEQ ID NO: 14211 - DNA, 21 bp, Artificial Sequence
  Synthetic
gtctcgtttugttcgctccuc

SEQ ID NO: 14212 - DNA, 17 bp, Artificial Sequence
  Synthetic
ccgctuccccgggacua

SEQ ID NO: 14213 - DNA, 19 bp, Artificial Sequence
  Synthetic
acutggcagugaacagcga

SEQ ID NO: 14214 - DNA, 24 bp, Artificial Sequence
  Synthetic
cgtgtgtaatugttgacaggtugt

SEQ ID NO: 14215 - DNA, 31 bp, Artificial Sequence
  Synthetic
actttattggatacaucttgaccttgugaaa

SEQ ID NO: 14216 - DNA, 23 bp, Artificial Sequence
  Synthetic
gctaccaccaaaguttccacuct

SEQ ID NO: 14217 - DNA, 27 bp, Artificial Sequence
  Synthetic
tgtttttaugggagctttgtccuaagt

SEQ ID NO: 14218 - DNA, 26 bp, Artificial Sequence
  Synthetic
aagcacactcaucctttaaacacgua

SEQ ID NO: 14219 - DNA, 27 bp, Artificial Sequence
  Synthetic
atttattgtaggcaacuttggcttugg

SEQ ID NO: 14220 - DNA, 26 bp, Artificial Sequence
  Synthetic
gcagctucaaaagtttaccttucaat

SEQ ID NO: 14221 - DNA, 25 bp, Artificial Sequence
  Synthetic
cagtcuggaaagaaaagaggcttug

SEQ ID NO: 14222 - DNA, 28 bp, Artificial Sequence
  Synthetic
ctcaactactcucccatcaattgaauga

SEQ ID NO: 14223 - DNA, 25 bp, Artificial Sequence
  Synthetic
ggtttgaaagguaatgagggaucct

SEQ ID NO: 14224 - DNA, 22 bp, Artificial Sequence
  Synthetic
cctcgccaugcccttttcaaua

SEQ ID NO: 14225 - DNA, 19 bp, Artificial Sequence
  Synthetic
agtccggtucgtgttcguc

SEQ ID NO: 14226 - DNA, 26 bp, Artificial Sequence
  Synthetic
tggtgagguacatgtugaacagaaac

SEQ ID NO: 14227 - DNA, 21 bp, Artificial Sequence
  Synthetic
gatgtgcgucttctgctccua

SEQ ID NO: 14228 - DNA, 17 bp, Artificial Sequence
  Synthetic
gcgtgcacugggtucca

SEQ ID NO: 14229 - DNA, 17 bp, Artificial Sequence
  Synthetic
tgagcgtuggccgcuat

SEQ ID NO: 14230 - DNA, 20 bp, Artificial Sequence
  Synthetic
gggctatcuccatgcauccc

SEQ ID NO: 14231 - DNA, 26 bp, Artificial Sequence
  Synthetic
actactcagcaaauccactcctcuaa

SEQ ID NO: 14232 - DNA, 17 bp, Artificial Sequence
  Synthetic
cccttcucggcgctcut

SEQ ID NO: 14233 - DNA, 17 bp, Artificial Sequence
  Synthetic
cccgcaguctcguccaa

SEQ ID NO: 14234 - DNA, 25 bp, Artificial Sequence
  Synthetic
tggcaaauacatgtuagaggagcag

SEQ ID NO: 14235 - DNA, 20 bp, Artificial Sequence
  Synthetic
cacgtcagcutacgtcucca

SEQ ID NO: 14236 - DNA, 23 bp, Artificial Sequence
  Synthetic
ggcgtatucccgttcaagttcut

SEQ ID NO: 14237 - DNA, 21 bp, Artificial Sequence
  Synthetic
ccgatcccugtgtaactugcc

SEQ ID NO: 14238 - DNA, 20 bp, Artificial Sequence
  Synthetic
caugtacttguccgcgaagg

SEQ ID NO: 14239 - DNA, 18 bp, Artificial Sequence
  Synthetic
cgctgcccuatggcuact

SEQ ID NO: 14240 - DNA, 24 bp, Artificial Sequence
  Synthetic
gttgtcguagagaaacaugacggt

SEQ ID NO: 14241 - DNA, 19 bp, Artificial Sequence
  Synthetic
cgcgctcutcacttctugg

SEQ ID NO: 14242 - DNA, 22 bp, Artificial Sequence
  Synthetic
ttgccctgtutccatgtggtua

SEQ ID NO: 14243 - DNA, 20 bp, Artificial Sequence
  Synthetic
gaagccaucctcagcuccat

SEQ ID NO: 14244 - DNA, 30 bp, Artificial Sequence
  Synthetic
aaagtcaauaagcaguagatataaggtugt

SEQ ID NO: 14245 - DNA, 28 bp, Artificial Sequence
  Synthetic
cagatacagauccacgggtttuagaaaa

SEQ ID NO: 14246 - DNA, 27 bp, Artificial Sequence
  Synthetic
gggttctttatcuctctctctttcuca

SEQ ID NO: 14247 - DNA, 25 bp, Artificial Sequence
  Synthetic
ccacacagctauctcataaggtcuc

SEQ ID NO: 14248 - DNA, 27 bp, Artificial Sequence
  Synthetic
cgacttccuaacggaaaactaaagugt

SEQ ID NO: 14249 - DNA, 23 bp, Artificial Sequence
  Synthetic
gaagacaggaugctttcctccut

SEQ ID NO: 14250 - DNA, 21 bp, Artificial Sequence
  Synthetic
acauaaagagcgcugccacaa

SEQ ID NO: 14251 - DNA, 20 bp, Artificial Sequence
  Synthetic
ctctgcucctaaggcugcat

SEQ ID NO: 14252 - DNA, 24 bp, Artificial Sequence
  Synthetic
cgaaatgaugaagtcccacgugat

SEQ ID NO: 14253 - DNA, 20 bp, Artificial Sequence
  Synthetic
ggcttgugcagctgguacat

SEQ ID NO: 14254 - DNA, 17 bp, Artificial Sequence
  Synthetic
acgggcugtcgcucaag

SEQ ID NO: 14255 - DNA, 24 bp, Artificial Sequence
  Synthetic
tgtacaugacgtgauccaggaaga

SEQ ID NO: 14256 - DNA, 18 bp, Artificial Sequence
  Synthetic
atgcaugtccucggcact

SEQ ID NO: 14257 - DNA, 23 bp, Artificial Sequence
  Synthetic
actgcaagaagugguaaccgaaa

SEQ ID NO: 14258 - DNA, 23 bp, Artificial Sequence
  Synthetic
ctctggcutttctccaugggaat

SEQ ID NO: 14259 - DNA, 23 bp, Artificial Sequence
  Synthetic
ccttcttguttccatcctugcag

SEQ ID NO: 14260 - DNA, 27 bp, Artificial Sequence
  Synthetic
ttttccctccutagctattgttuggag

SEQ ID NO: 14261 - DNA, 25 bp, Artificial Sequence
  Synthetic
ttttatgccaagaacuctcgaugga

SEQ ID NO: 14262 - DNA, 23 bp, Artificial Sequence
  Synthetic
ccatggccutaatgaacgacugt

SEQ ID NO: 14263 - DNA, 24 bp, Artificial Sequence
  Synthetic
gccactucagctgctatugaaact

SEQ ID NO: 14264 - DNA, 20 bp, Artificial Sequence
  Synthetic
ccctcaugccccagtacuca

SEQ ID NO: 14265 - DNA, 24 bp, Artificial Sequence
  Synthetic
aaacttctcuttccaatccuggca

SEQ ID NO: 14266 - DNA, 21 bp, Artificial Sequence
  Synthetic
ggtgggaatucacaggtgcuc

SEQ ID NO: 14267 - DNA, 20 bp, Artificial Sequence
  Synthetic
gagtucgccgagcuagagaa

SEQ ID NO: 14268 - DNA, 18 bp, Artificial Sequence
  Synthetic
gtgctccucgtcccacuc

SEQ ID NO: 14269 - DNA, 27 bp, Artificial Sequence
  Synthetic
cctggttcaagacacugttcttcttut

SEQ ID NO: 14270 - DNA, 30 bp, Artificial Sequence
  Synthetic
tgcaaatttaacatucaaatctaccgtgut

SEQ ID NO: 14271 - DNA, 24 bp, Artificial Sequence
  Synthetic
agcaaactcatuccccttctctuc

SEQ ID NO: 14272 - DNA, 20 bp, Artificial Sequence
  Synthetic
tgtgtggtugggcatgctua

SEQ ID NO: 14273 - DNA, 20 bp, Artificial Sequence
  Synthetic
ctgctctgucccctacaugg

SEQ ID NO: 14274 - DNA, 24 bp, Artificial Sequence
  Synthetic
gggagaggaggacuaggaatuagg

SEQ ID NO: 14275 - DNA, 24 bp, Artificial Sequence
  Synthetic
tgtaagctcuctttcctctugggt

SEQ ID NO: 14276 - DNA, 22 bp, Artificial Sequence
  Synthetic
tggtgtgguactccatctuggt

SEQ ID NO: 14277 - DNA, 26 bp, Artificial Sequence
  Synthetic
gattcttuaccagagaattccuggct

SEQ ID NO: 14278 - DNA, 20 bp, Artificial Sequence
  Synthetic
ggucggtctuccaagcaaca

SEQ ID NO: 14279 - DNA, 26 bp, Artificial Sequence
  Synthetic
cttattcatcucatcctccttuccct

SEQ ID NO: 14280 - DNA, 21 bp, Artificial Sequence
  Synthetic
gctctcgccutgaacctgtut

SEQ ID NO: 14281 - DNA, 30 bp, Artificial Sequence
  Synthetic
gatacttcatautcacattcatcucggact

SEQ ID NO: 14282 - DNA, 20 bp, Artificial Sequence
  Synthetic
cctgccagcgacaugtctut

SEQ ID NO: 14283 - DNA, 24 bp, Artificial Sequence
  Synthetic
aagaagttgaugaaccggtcctut

SEQ ID NO: 14284 - DNA, 24 bp, Artificial Sequence
  Synthetic
actctggatugcattcctacaugg

SEQ ID NO: 14285 - DNA, 22 bp, Artificial Sequence
  Synthetic
aatgtcatcautcaggcuggct

SEQ ID NO: 14286 - DNA, 21 bp, Artificial Sequence
  Synthetic
gcagcgcgutgacttatucat

SEQ ID NO: 14287 - DNA, 26 bp, Artificial Sequence
  Synthetic
tgcacaauaccagauagaacagacac

SEQ ID NO: 14288 - DNA, 21 bp, Artificial Sequence
  Synthetic
ctttgttcagugtggctggug

SEQ ID NO: 14289 - DNA, 26 bp, Artificial Sequence
  Synthetic
aaaacatgtaugccagctgtuagaga

SEQ ID NO: 14290 - DNA, 24 bp, Artificial Sequence
  Synthetic
tccagattgaaaugcacagtuggt

SEQ ID NO: 14291 - DNA, 30 bp, Artificial Sequence
  Synthetic
acatgataggauagaatcttcctuaccaca

SEQ ID NO: 14292 - DNA, 32 bp, Artificial Sequence
  Synthetic
tgtgtatctctaauagctaaaattcactucct

SEQ ID NO: 14293 - DNA, 24 bp, Artificial Sequence
  Synthetic
ttcacggtaacugaagatgctugt

SEQ ID NO: 14294 - DNA, 23 bp, Artificial Sequence
  Synthetic
gctatggatgutgccaagctgua

SEQ ID NO: 14295 - DNA, 26 bp, Artificial Sequence
  Synthetic
ccatctaacaugaaaaaggcttuggt

SEQ ID NO: 14296 - DNA, 31 bp, Artificial Sequence
  Synthetic
tgttaaaagtuggaaataagagctgugagaa

SEQ ID NO: 14297 - DNA, 30 bp, Artificial Sequence
  Synthetic
aacataattacacuggcttccttattuaca

SEQ ID NO: 14298 - DNA, 23 bp, Artificial Sequence
  Synthetic
gctacgaugcaagaguacacact

SEQ ID NO: 14299 - DNA, 32 bp, Artificial Sequence
  Synthetic
tgaggtatatguataggtatttcucagaacaa

SEQ ID NO: 14300 - DNA, 30 bp, Artificial Sequence
  Synthetic
cataattaaatgtuacgcagtgcuaaccaa

SEQ ID NO: 14301 - DNA, 32 bp, Artificial Sequence
  Synthetic
tatactccatggtuaaataaaatgccactuac

SEQ ID NO: 14302 - DNA, 31 bp, Artificial Sequence
  Synthetic
attgtaaattattctatutcagccacgggua

SEQ ID NO: 14303 - DNA, 23 bp, Artificial Sequence
  Synthetic
gcacctgutttgttgtguacact

SEQ ID NO: 14304 - DNA, 26 bp, Artificial Sequence
  Synthetic
cccttgtaaguagtctttctguacct

SEQ ID NO: 14305 - DNA, 24 bp, Artificial Sequence
  Synthetic
ggacaccagutcagaaaaggaugg

SEQ ID NO: 14306 - DNA, 25 bp, Artificial Sequence
  Synthetic
ggcatcttcuaaattgcaactugct

SEQ ID NO: 14307 - DNA, 20 bp, Artificial Sequence
  Synthetic
tgcagaacutccacagcuga

SEQ ID NO: 14308 - DNA, 21 bp, Artificial Sequence
  Synthetic
ctccaattcugctggcaaucc

SEQ ID NO: 14309 - DNA, 24 bp, Artificial Sequence
  Synthetic
gtcagagtugacagtgtcttccuc

SEQ ID NO: 14310 - DNA, 17 bp, Artificial Sequence
  Synthetic
gtctgggcugggctgua

SEQ ID NO: 14311 - DNA, 18 bp, Artificial Sequence
  Synthetic
tccuggacgacgccttug

SEQ ID NO: 14312 - DNA, 19 bp, Artificial Sequence
  Synthetic
tgtaggugccatcgctguc

SEQ ID NO: 14313 - DNA, 23 bp, Artificial Sequence
  Synthetic
gguaagtcaguggcaaaaagggt

SEQ ID NO: 14314 - DNA, 19 bp, Artificial Sequence
  Synthetic
ccgggctuagccgagttut

SEQ ID NO: 14315 - DNA, 20 bp, Artificial Sequence
  Synthetic
cggguccccagtaagaucca

SEQ ID NO: 14316 - DNA, 23 bp, Artificial Sequence
  Synthetic
gacatcagaaacucacagccuga

SEQ ID NO: 14317 - DNA, 21 bp, Artificial Sequence
  Synthetic
ccctcggaaaauggagacgug

SEQ ID NO: 14318 - DNA, 22 bp, Artificial Sequence
  Synthetic
ctgtgcggcauagtttccagua

SEQ ID NO: 14319 - DNA, 28 bp, Artificial Sequence
  Synthetic
aggaattatugaaagacctttcttccut

SEQ ID NO: 14320 - DNA, 20 bp, Artificial Sequence
  Synthetic
cttctgguggaaaccucgct

SEQ ID NO: 14321 - DNA, 21 bp, Artificial Sequence
  Synthetic
acttgttttgggugccacgua

SEQ ID NO: 14322 - DNA, 24 bp, Artificial Sequence
  Synthetic
ccattcaaaaauccctgtgtgcut

SEQ ID NO: 14323 - DNA, 27 bp, Artificial Sequence
  Synthetic
agagaaatcauggttaagcttucagca

SEQ ID NO: 14324 - DNA, 23 bp, Artificial Sequence
  Synthetic
gattaaaggaguctggucacgga

SEQ ID NO: 14325 - DNA, 29 bp, Artificial Sequence
  Synthetic
tccctaggttuacgaactatttacugact

SEQ ID NO: 14326 - DNA, 17 bp, Artificial Sequence
  Synthetic
gcggcgucacccaucag

SEQ ID NO: 14327 - DNA, 18 bp, Artificial Sequence
  Synthetic
cacagagcugaccgucgt

SEQ ID NO: 14328 - DNA, 26 bp, Artificial Sequence
  Synthetic
ggattcaugggaaatgagugaagact

SEQ ID NO: 14329 - DNA, 22 bp, Artificial Sequence
  Synthetic
ccatggtcaagcutcccttcug

SEQ ID NO: 14330 - DNA, 26 bp, Artificial Sequence
  Synthetic
tgttgagaaaaagcuggaugcaaaat

SEQ ID NO: 14331 - DNA, 21 bp, Artificial Sequence
  Synthetic
acaaaaacacaccgucgctug

SEQ ID NO: 14332 - DNA, 27 bp, Artificial Sequence
  Synthetic
gggaaaagcguattaaatactugagga

SEQ ID NO: 14333 - DNA, 22 bp, Artificial Sequence
  Synthetic
ctcauggagaaagacgugggat

SEQ ID NO: 14334 - DNA, 23 bp, Artificial Sequence
  Synthetic
gggtatgtucttggagagauggt

SEQ ID NO: 14335 - DNA, 22 bp, Artificial Sequence
  Synthetic
ctttaaugccacagccgtuagg

SEQ ID NO: 14336 - DNA, 28 bp, Artificial Sequence
  Synthetic
ccgatgtcacutcttcatcttguaaaga

SEQ ID NO: 14337 - DNA, 25 bp, Artificial Sequence
  Synthetic
cgatgagauggataactttcugcca

SEQ ID NO: 14338 - DNA, 24 bp, Artificial Sequence
  Synthetic
aaatcagagcugggttagugcaat

SEQ ID NO: 14339 - DNA, 29 bp, Artificial Sequence
  Synthetic
ctgatggtaattcugtcaatttctcgtut

SEQ ID NO: 14340 - DNA, 20 bp, Artificial Sequence
  Synthetic
ccgcgacagguacttgtuga

SEQ ID NO: 14341 - DNA, 18 bp, Artificial Sequence
  Synthetic
gggccucactgcccttug

SEQ ID NO: 14342 - DNA, 26 bp, Artificial Sequence
  Synthetic
gatgcggaaauttttggattttucca

SEQ ID NO: 14343 - DNA, 19 bp, Artificial Sequence
  Synthetic
ccggcggcgacuttgatua

SEQ ID NO: 14344 - DNA, 17 bp, Artificial Sequence
  Synthetic
ggcugcccgctauccat

SEQ ID NO: 14345 - DNA, 19 bp, Artificial Sequence
  Synthetic
ggugccgtuaggcagaagg

SEQ ID NO: 14346 - DNA, 22 bp, Artificial Sequence
  Synthetic
ccatgtgtucctcacaagugga

SEQ ID NO: 14347 - DNA, 23 bp, Artificial Sequence
  Synthetic
ccacttcucaccccatcactuac

SEQ ID NO: 14348 - DNA, 19 bp, Artificial Sequence
  Synthetic
ctgctggacuctcgcucac

SEQ ID NO: 14349 - DNA, 19 bp, Artificial Sequence
  Synthetic
gaucccccuggaacaccac

SEQ ID NO: 14350 - DNA, 21 bp, Artificial Sequence
  Synthetic
cagcaagaagguggagaucgt

SEQ ID NO: 14351 - DNA, 21 bp, Artificial Sequence
  Synthetic
acctgtgaugtcaggugcaag

SEQ ID NO: 14352 - DNA, 22 bp, Artificial Sequence
  Synthetic
acaggcgagaugatcctctcuc

SEQ ID NO: 14353 - DNA, 25 bp, Artificial Sequence
  Synthetic
tctgagccacauagactacauccat

SEQ ID NO: 14354 - DNA, 23 bp, Artificial Sequence
  Synthetic
accatctcaaauggtgggaugac

SEQ ID NO: 14355 - DNA, 18 bp, Artificial Sequence
  Synthetic
ggttcuggccagggctuc

SEQ ID NO: 14356 - DNA, 21 bp, Artificial Sequence
  Synthetic
actgctcgucttccgaaaugg

SEQ ID NO: 14357 - DNA, 23 bp, Artificial Sequence
  Synthetic
gggaattcagucccttactggut

SEQ ID NO: 14358 - DNA, 21 bp, Artificial Sequence
  Synthetic
ggtgtccacautcctcacguc

SEQ ID NO: 14359 - DNA, 24 bp, Artificial Sequence
  Synthetic
gtggttgaggaugtaggtgaugat

SEQ ID NO: 14360 - DNA, 20 bp, Artificial Sequence
  Synthetic
gggaggguccagtcgtaguc

SEQ ID NO: 14361 - DNA, 21 bp, Artificial Sequence
  Synthetic
ccctccaggugagctcctuat

SEQ ID NO: 14362 - DNA, 17 bp, Artificial Sequence
  Synthetic
ccgggcuacgctuacgg

SEQ ID NO: 14363 - DNA, 21 bp, Artificial Sequence
  Synthetic
cucccaguagcaagaagggaa

SEQ ID NO: 14364 - DNA, 17 bp, Artificial Sequence
  Synthetic
gacggtuccccggtgut

SEQ ID NO: 14365 - DNA, 17 bp, Artificial Sequence
  Synthetic
gctccggcuctcctucc

SEQ ID NO: 14366 - DNA, 23 bp, Artificial Sequence
  Synthetic
tggaagagcgaaacuaccgtcua

SEQ ID NO: 14367 - DNA, 17 bp, Artificial Sequence
  Synthetic
gggaacauccgcctgug

SEQ ID NO: 14368 - DNA, 26 bp, Artificial Sequence
  Synthetic
ggagatggauactctctagtcuagcc

SEQ ID NO: 14369 - DNA, 22 bp, Artificial Sequence
  Synthetic
tgcctguggaggaactttucaa

SEQ ID NO: 14370 - DNA, 22 bp, Artificial Sequence
  Synthetic
cgaggccaaaguctgctatcut

SEQ ID NO: 14371 - DNA, 21 bp, Artificial Sequence
  Synthetic
acaagtcggcuagttgcaugg

SEQ ID NO: 14372 - DNA, 28 bp, Artificial Sequence
  Synthetic
ggttgatgauattcttatgctucccgat

SEQ ID NO: 14373 - DNA, 23 bp, Artificial Sequence
  Synthetic
cctcctcccutcccaagtaaaug

SEQ ID NO: 14374 - DNA, 21 bp, Artificial Sequence
  Synthetic
tgagtgtgcaaaucccccauc

SEQ ID NO: 14375 - DNA, 20 bp, Artificial Sequence
  Synthetic
gggtcggucatcgtcuacaa

SEQ ID NO: 14376 - DNA, 25 bp, Artificial Sequence
  Synthetic
aaagatcguacgtaacucaggacac

SEQ ID NO: 14377 - DNA, 19 bp, Artificial Sequence
  Synthetic
gggtggugctggtctguaa

SEQ ID NO: 14378 - DNA, 21 bp, Artificial Sequence
  Synthetic
gcgggtcacugtacacctuac

SEQ ID NO: 14379 - DNA, 22 bp, Artificial Sequence
  Synthetic
cctctttagccauggcaagguc

SEQ ID NO: 14380 - DNA, 22 bp, Artificial Sequence
  Synthetic
cattttucaaccagcgcagugt

SEQ ID NO: 14381 - DNA, 21 bp, Artificial Sequence
  Synthetic
tgcctgtcuctcttggcttuc

SEQ ID NO: 14382 - DNA, 17 bp, Artificial Sequence
  Synthetic
gggtgcggutgcttucc

SEQ ID NO: 14383 - DNA, 18 bp, Artificial Sequence
  Synthetic
ccccugtggaaguggagt

SEQ ID NO: 14384 - DNA, 19 bp, Artificial Sequence
  Synthetic
cgccagcagcgutcatgua

SEQ ID NO: 14385 - DNA, 24 bp, Artificial Sequence
  Synthetic
acaugaaccagauagcacagtauc

SEQ ID NO: 14386 - DNA, 19 bp, Artificial Sequence
  Synthetic
gccctugcaatctcugcgt

SEQ ID NO: 14387 - DNA, 21 bp, Artificial Sequence
  Synthetic
ctcagctggcuccatctcauc

SEQ ID NO: 14388 - DNA, 18 bp, Artificial Sequence
  Synthetic
ggctgcugctgctggtua

SEQ ID NO: 14389 - DNA, 18 bp, Artificial Sequence
  Synthetic
cucacccagagcagcugt

SEQ ID NO: 14390 - DNA, 20 bp, Artificial Sequence
  Synthetic
ggtguagccactcucaaggg

SEQ ID NO: 14391 - DNA, 21 bp, Artificial Sequence
  Synthetic
cgaggacccucagatguccat

SEQ ID NO: 14392 - DNA, 29 bp, Artificial Sequence
  Synthetic
ttccctactcttcugcatattagcatcua

SEQ ID NO: 14393 - DNA, 20 bp, Artificial Sequence
  Synthetic
gagacugcccagaaugacga

SEQ ID NO: 14394 - DNA, 19 bp, Artificial Sequence
  Synthetic
cttcactgcuggctgcauc

SEQ ID NO: 14395 - DNA, 25 bp, Artificial Sequence
  Synthetic
tttccattccuaaagctggacguaa

SEQ ID NO: 14396 - DNA, 29 bp, Artificial Sequence
  Synthetic
ctgaagacaauaaaccacagtaagugagt

SEQ ID NO: 14397 - DNA, 24 bp, Artificial Sequence
  Synthetic
ttccctagagaauacttccgucgt

SEQ ID NO: 14398 - DNA, 21 bp, Artificial Sequence
  Synthetic
gtgggctutgtgagaatuggt

SEQ ID NO: 14399 - DNA, 21 bp, Artificial Sequence
  Synthetic
aaaagcccugaggctcugaag

SEQ ID NO: 14400 - DNA, 24 bp, Artificial Sequence
  Synthetic
tcctgggtttutctgttcttccuc

SEQ ID NO: 14401 - DNA, 27 bp, Artificial Sequence
  Synthetic
agugaaaagaaaucagaagttauggct

SEQ ID NO: 14402 - DNA, 23 bp, Artificial Sequence
  Synthetic
ggataagttttucccggcggaua

SEQ ID NO: 14403 - DNA, 25 bp, Artificial Sequence
  Synthetic
acctatcaucttacatgctucacca

SEQ ID NO: 14404 - DNA, 22 bp, Artificial Sequence
  Synthetic
cacagagaagguccacuggaaa

SEQ ID NO: 14405 - DNA, 24 bp, Artificial Sequence
  Synthetic
cttgacutgtgttttcuccaccag

SEQ ID NO: 14406 - DNA, 27 bp, Artificial Sequence
  Synthetic
tctttcugtaaatctcatuggcaggag

SEQ ID NO: 14407 - DNA, 21 bp, Artificial Sequence
  Synthetic
cgtttacaggcugcccaaaut

SEQ ID NO: 14408 - DNA, 22 bp, Artificial Sequence
  Synthetic
ggcaaactgcugttactgctua

SEQ ID NO: 14409 - DNA, 30 bp, Artificial Sequence
  Synthetic
caggaaatcaugactgagaaagatauggaa

SEQ ID NO: 14410 - DNA, 27 bp, Artificial Sequence
  Synthetic
agccatctauccgctctaaatatccut

SEQ ID NO: 14411 - DNA, 26 bp, Artificial Sequence
  Synthetic
tttagaucaaaaggtccctucagcaa

SEQ ID NO: 14412 - DNA, 21 bp, Artificial Sequence
  Synthetic
gcggaucacaacactccaugt

SEQ ID NO: 14413 - DNA, 27 bp, Artificial Sequence
  Synthetic
ttttaagatcccugaagctttcuaggt

SEQ ID NO: 14414 - DNA, 24 bp, Artificial Sequence
  Synthetic
ggaaatcacauaccactgtugcca

SEQ ID NO: 14415 - DNA, 22 bp, Artificial Sequence
  Synthetic
gtgtttttctucacagccggut

SEQ ID NO: 14416 - DNA, 28 bp, Artificial Sequence
  Synthetic
cgctttatcaguttattccaauccacat

SEQ ID NO: 14417 - DNA, 30 bp, Artificial Sequence
  Synthetic
ggagttgagtgtuaaagatggaacaattut

SEQ ID NO: 14418 - DNA, 17 bp, Artificial Sequence
  Synthetic
ggccugaggccgaguca

SEQ ID NO: 14419 - DNA, 18 bp, Artificial Sequence
  Synthetic
agugaggaggctcucgca

SEQ ID NO: 14420 - DNA, 28 bp, Artificial Sequence
  Synthetic
atgttgcagutaagtgattataugggat

SEQ ID NO: 14421 - DNA, 28 bp, Artificial Sequence
  Synthetic
gcctccaattatcucctacttcagttut

SEQ ID NO: 14422 - DNA, 29 bp, Artificial Sequence
  Synthetic
tctccattcagatuttaggacagcaaaut

SEQ ID NO: 14423 - DNA, 24 bp, Artificial Sequence
  Synthetic
ccttgcttcugttcacagtucaca

SEQ ID NO: 14424 - DNA, 28 bp, Artificial Sequence
  Synthetic
tttcagctgatgaguaaagaatctccug

SEQ ID NO: 14425 - DNA, 28 bp, Artificial Sequence
  Synthetic
cccattcttcucattaacatctgaugct

SEQ ID NO: 14426 - DNA, 24 bp, Artificial Sequence
  Synthetic
tgutctaaggagaaugaggaggca

SEQ ID NO: 14427 - DNA, 23 bp, Artificial Sequence
  Synthetic
atctgccaaaguggtcagtucat

SEQ ID NO: 14428 - DNA, 29 bp, Artificial Sequence
  Synthetic
tgtcagtcuagaggaagagtuaagaaagg

SEQ ID NO: 14429 - DNA, 25 bp, Artificial Sequence
  Synthetic
agctacatgtcauaactgagagcut

SEQ ID NO: 14430 - DNA, 28 bp, Artificial Sequence
  Synthetic
gggtttcataucgaaagttgtgtaacug

SEQ ID NO: 14431 - DNA, 25 bp, Artificial Sequence
  Synthetic
agtgtaagtgugaacaccacaauct

SEQ ID NO: 14432 - DNA, 27 bp, Artificial Sequence
  Synthetic
gaagcagtaguaggtgatgtttaccug

SEQ ID NO: 14433 - DNA, 28 bp, Artificial Sequence
  Synthetic
agcaagcccacutaaaaactatccuaat

SEQ ID NO: 14434 - DNA, 23 bp, Artificial Sequence
  Synthetic
gaatgacccugcauaaaaaggca

SEQ ID NO: 14435 - DNA, 23 bp, Artificial Sequence
  Synthetic
acaacttctcuaccttgctgugg

SEQ ID NO: 14436 - DNA, 19 bp, Artificial Sequence
  Synthetic
acctcgacuacgacucggt

SEQ ID NO: 14437 - DNA, 19 bp, Artificial Sequence
  Synthetic
tgggcagcagcucgaatut

SEQ ID NO: 14438 - DNA, 19 bp, Artificial Sequence
  Synthetic
agaagcuggcctccuacca

SEQ ID NO: 14439 - DNA, 20 bp, Artificial Sequence
  Synthetic
ctgtcgtugagaggguaggg

SEQ ID NO: 14440 - DNA, 23 bp, Artificial Sequence
  Synthetic
ggtcagagtcuggatcacctuct

SEQ ID NO: 14441 - DNA, 22 bp, Artificial Sequence
  Synthetic
actgtccaacutgaccctctug

SEQ ID NO: 14442 - DNA, 27 bp, Artificial Sequence
  Synthetic
caaaagctcattuctgaagaggactug

SEQ ID NO: 14443 - DNA, 28 bp, Artificial Sequence
  Synthetic
aggacatttctgutagaaggaatcgtut

SEQ ID NO: 14444 - DNA, 28 bp, Artificial Sequence
  Synthetic
agttcttcaggugtatctttaccatucc

SEQ ID NO: 14445 - DNA, 28 bp, Artificial Sequence
  Synthetic
acaatccatgcauaaaaaggaaaaugct

SEQ ID NO: 14446 - DNA, 32 bp, Artificial Sequence
  Synthetic
tcttgtagattttacuttcctcgttggtatug

SEQ ID NO: 14447 - DNA, 32 bp, Artificial Sequence
  Synthetic
aagauaatataatcataccugagcaaagaggt

SEQ ID NO: 14448 - DNA, 30 bp, Artificial Sequence
  Synthetic
gcgaataagguacagatttcgcagattuat

SEQ ID NO: 14449 - DNA, 32 bp, Artificial Sequence
  Synthetic
aggttcttttactucaaatttctctgtguaga

SEQ ID NO: 14450 - DNA, 30 bp, Artificial Sequence
  Synthetic
tgcgattttccuaatattattgatgucagt

SEQ ID NO: 14451 - DNA, 30 bp, Artificial Sequence
  Synthetic
accattattcaaucataaagcaaactuacc

SEQ ID NO: 14452 - DNA, 30 bp, Artificial Sequence
  Synthetic
ccattagtaaacugaagaaagcaggtaauc

SEQ ID NO: 14453 - DNA, 28 bp, Artificial Sequence
  Synthetic
aaagtgttaccacuaataagtgugacat

SEQ ID NO: 14454 - DNA, 32 bp, Artificial Sequence
  Synthetic
gagcaattcatacuttcagtgtatttugaagt

SEQ ID NO: 14455 - DNA, 26 bp, Artificial Sequence
  Synthetic
ttggttcatatgaguaggcctctgua

SEQ ID NO: 14456 - DNA, 30 bp, Artificial Sequence
  Synthetic
ttttaatgcagatatuctggttcaggagut

SEQ ID NO: 14457 - DNA, 18 bp, Artificial Sequence
  Synthetic
catggcccaugccaacug

SEQ ID NO: 14458 - DNA, 30 bp, Artificial Sequence
  Synthetic
tggtttacttgugaattatttaacccuact

SEQ ID NO: 14459 - DNA, 23 bp, Artificial Sequence
  Synthetic
cactgcagatutcccacaaagug

SEQ ID NO: 14460 - DNA, 32 bp, Artificial Sequence
  Synthetic
gtcaacttgaaugtatatcagtttaguccaga

SEQ ID NO: 14461 - DNA, 22 bp, Artificial Sequence
  Synthetic
gtaggaucccggtctucaaagg

SEQ ID NO: 14462 - DNA, 25 bp, Artificial Sequence
  Synthetic
gcaccuaagagacttugaaagggaa

SEQ ID NO: 14463 - DNA, 22 bp, Artificial Sequence
  Synthetic
autacacaggaugccaaacaca

SEQ ID NO: 14464 - DNA, 23 bp, Artificial Sequence
  Synthetic
gtatauccacagggatcuggcaa

SEQ ID NO: 14465 - DNA, 31 bp, Artificial Sequence
  Synthetic
ggactttcaccaggutcttttactttauagt

SEQ ID NO: 14466 - DNA, 32 bp, Artificial Sequence
  Synthetic
ggtttgttttaggaauttatgcgtatgatugg

SEQ ID NO: 14467 - DNA, 29 bp, Artificial Sequence
  Synthetic
gaaaatgcatgacuaccctggatuaaaaa

SEQ ID NO: 14468 - DNA, 25 bp, Artificial Sequence
  Synthetic
tcccttttggutgcatcatttugag

SEQ ID NO: 14469 - DNA, 25 bp, Artificial Sequence
  Synthetic
tccgtaaacuacagagttaccugga

SEQ ID NO: 14470 - DNA, 23 bp, Artificial Sequence
  Synthetic
cagggaugaaagttttgcaugct

SEQ ID NO: 14471 - DNA, 23 bp, Artificial Sequence
  Synthetic
ttctucacccctacaucacgaac

SEQ ID NO: 14472 - DNA, 26 bp, Artificial Sequence
  Synthetic
atgagaaaagcauctcctagttugca

SEQ ID NO: 14473 - DNA, 28 bp, Artificial Sequence
  Synthetic
tgtggtatcccguaaatttattgauggt

SEQ ID NO: 14474 - DNA, 22 bp, Artificial Sequence
  Synthetic
tgaaaugggcggccttttacua

SEQ ID NO: 14475 - DNA, 29 bp, Artificial Sequence
  Synthetic
agaaaatagttccuaagatggcctucaag

SEQ ID NO: 14476 - DNA, 23 bp, Artificial Sequence
  Synthetic
ctgctgcuggtatgaatacucct

SEQ ID NO: 14477 - DNA, 24 bp, Artificial Sequence
  Synthetic
gcutgagaggaaucaaagaaggat

SEQ ID NO: 14478 - DNA, 24 bp, Artificial Sequence
  Synthetic
tcaautggcaaaaugaaaccagca

SEQ ID NO: 14479 - DNA, 25 bp, Artificial Sequence
  Synthetic
gcgtgtgatcuagatggtagaaugg

SEQ ID NO: 14480 - DNA, 20 bp, Artificial Sequence
  Synthetic
cgtactuaccgagcuagcca

SEQ ID NO: 14481 - DNA, 19 bp, Artificial Sequence
  Synthetic
gcagagaaugtccgccauc

SEQ ID NO: 14482 - DNA, 25 bp, Artificial Sequence
  Synthetic
gcatcttcatgugaccccttagtut

SEQ ID NO: 14483 - DNA, 31 bp, Artificial Sequence
  Synthetic
gactatgtcaagtuctaagactctgtacuct

SEQ ID NO: 14484 - DNA, 27 bp, Artificial Sequence
  Synthetic
ttcagaaactcuagggtaagtagguga

SEQ ID NO: 14485 - DNA, 23 bp, Artificial Sequence
  Synthetic
gtgcccaaaaaguggcaatuagt

SEQ ID NO: 14486 - DNA, 21 bp, Artificial Sequence
  Synthetic
cgtcuaccccatugcagagaa

SEQ ID NO: 14487 - DNA, 24 bp, Artificial Sequence
  Synthetic
ggcttatgggcutttactccucag

SEQ ID NO: 14488 - DNA, 21 bp, Artificial Sequence
  Synthetic
caggctgauccctcttucagg

SEQ ID NO: 14489 - DNA, 22 bp, Artificial Sequence
  Synthetic
agacagtccuagggtggatugg

SEQ ID NO: 14490 - DNA, 21 bp, Artificial Sequence
  Synthetic
ggtaggcaaaugctgucagga

SEQ ID NO: 14491 - DNA, 21 bp, Artificial Sequence
  Synthetic
ttgtaggctuggagcttcugg

SEQ ID NO: 14492 - DNA, 24 bp, Artificial Sequence
  Synthetic
cttaaacccagacugaagauggca

SEQ ID NO: 14493 - DNA, 21 bp, Artificial Sequence
  Synthetic
gttcttcccutggagcugact

SEQ ID NO: 14494 - DNA, 20 bp, Artificial Sequence
  Synthetic
aucttgaggcugcaaaccga

SEQ ID NO: 14495 - DNA, 21 bp, Artificial Sequence
  Synthetic
tcctaaguccgcttctgguct

SEQ ID NO: 14496 - DNA, 22 bp, Artificial Sequence
  Synthetic
cggatattcucggtgtctgugg

SEQ ID NO: 14497 - DNA, 25 bp, Artificial Sequence
  Synthetic
gcagattagguaacaaagtguccct

SEQ ID NO: 14498 - DNA, 29 bp, Artificial Sequence
  Synthetic
gaacttgatcatautcactaagcgcuact

SEQ ID NO: 14499 - DNA, 27 bp, Artificial Sequence
  Synthetic
tgagtattgtuaaccttgcagaauggt

SEQ ID NO: 14500 - DNA, 31 bp, Artificial Sequence
  Synthetic
ggaaagatactcacuatttggtagagucaga

SEQ ID NO: 14501 - DNA, 24 bp, Artificial Sequence
  Synthetic
gctcaugcacaattagtucgagaa

SEQ ID NO: 14502 - DNA, 17 bp, Artificial Sequence
  Synthetic
ttgtcccugcggagcug

SEQ ID NO: 14503 - DNA, 17 bp, Artificial Sequence
  Synthetic
gcgggagggugtgtgug

SEQ ID NO: 14504 - DNA, 22 bp, Artificial Sequence
  Synthetic
agtacuaggatgcuggaccaca

SEQ ID NO: 14505 - DNA, 19 bp, Artificial Sequence
  Synthetic
cugcagacgguagcaggac

SEQ ID NO: 14506 - DNA, 24 bp, Artificial Sequence
  Synthetic
aggatcuagggaaaccatgtguga

SEQ ID NO: 14507 - DNA, 22 bp, Artificial Sequence
  Synthetic
ttgccctcugacgtatctcuct

SEQ ID NO: 14508 - DNA, 26 bp, Artificial Sequence
  Synthetic
ccagagacuaccacaacattttcuga

SEQ ID NO: 14509 - DNA, 28 bp, Artificial Sequence
  Synthetic
acattctcatggucttctcctttuacag

SEQ ID NO: 14510 - DNA, 24 bp, Artificial Sequence
  Synthetic
tgtcguacagtcttuccaacacac

SEQ ID NO: 14511 - DNA, 22 bp, Artificial Sequence
  Synthetic
ggaggctcucctcatctgucat

SEQ ID NO: 14512 - DNA, 22 bp, Artificial Sequence
  Synthetic
gcatacccaagaccutgaguga

SEQ ID NO: 14513 - DNA, 28 bp, Artificial Sequence
  Synthetic
ccccatgtacaaauaaattgtaggcaut

SEQ ID NO: 14514 - DNA, 28 bp, Artificial Sequence
  Synthetic
caagaaagauctactgaatctugagcca

SEQ ID NO: 14515 - DNA, 24 bp, Artificial Sequence
  Synthetic
gtcgugaaggcactgauaaaagag

SEQ ID NO: 14516 - DNA, 28 bp, Artificial Sequence
  Synthetic
catacaatgttuctccttcaacuacgga

SEQ ID NO: 14517 - DNA, 25 bp, Artificial Sequence
  Synthetic
acttcatctucgacgacacttgtut

SEQ ID NO: 14518 - DNA, 20 bp, Artificial Sequence
  Synthetic
cctcccagugagaggaucgt

SEQ ID NO: 14519 - DNA, 25 bp, Artificial Sequence
  Synthetic
cacaaatuagcagaagucagccaaa

SEQ ID NO: 14520 - DNA, 27 bp, Artificial Sequence
  Synthetic
agttaacttugaagatacgttgugcat

SEQ ID NO: 14521 - DNA, 29 bp, Artificial Sequence
  Synthetic
tcccatacctcuccaatttttacaugaag

SEQ ID NO: 14522 - DNA, 22 bp, Artificial Sequence
  Synthetic
tgttatcugacacagtgcgcut

SEQ ID NO: 14523 - DNA, 28 bp, Artificial Sequence
  Synthetic
tgtttaaaaagtguttgcatgcttcuga

SEQ ID NO: 14524 - DNA, 24 bp, Artificial Sequence
  Synthetic
gctgctcauggttgaatttcugga

SEQ ID NO: 14525 - DNA, 25 bp, Artificial Sequence
  Synthetic
tctaggcutttattgatugcaccca

SEQ ID NO: 14526 - DNA, 26 bp, Artificial Sequence
  Synthetic
atcttctagggauattcccactgugt

SEQ ID NO: 14527 - DNA, 22 bp, Artificial Sequence
  Synthetic
agggcagcaugaagttatcucc

SEQ ID NO: 14528 - DNA, 18 bp, Artificial Sequence
  Synthetic
acucacccagagcucggt

SEQ ID NO: 14529 - DNA, 17 bp, Artificial Sequence
  Synthetic
gcggacuccgggcttuc

SEQ ID NO: 14530 - DNA, 20 bp, Artificial Sequence
  Synthetic
gcattgtccucaggcacgua

SEQ ID NO: 14531 - DNA, 20 bp, Artificial Sequence
  Synthetic
tgcttgtccugtgctctcuc

SEQ ID NO: 14532 - DNA, 21 bp, Artificial Sequence
  Synthetic
gagaaggtuccctgctcagut

SEQ ID NO: 14533 - DNA, 21 bp, Artificial Sequence
  Synthetic
cagatgucagcagcgaaucct

SEQ ID NO: 14534 - DNA, 20 bp, Artificial Sequence
  Synthetic
tggaagaugctgcacauggg

SEQ ID NO: 14535 - DNA, 17 bp, Artificial Sequence
  Synthetic
gtctcugcgagccugga

SEQ ID NO: 14536 - DNA, 17 bp, Artificial Sequence
  Synthetic
cctgcccuttccccgut

SEQ ID NO: 14537 - DNA, 17 bp, Artificial Sequence
  Synthetic
agccguggtggauggac

SEQ ID NO: 14538 - DNA, 19 bp, Artificial Sequence
  Synthetic
caccccaucaccaccuacc

SEQ ID NO: 14539 - DNA, 19 bp, Artificial Sequence
  Synthetic
gggaagagcuggctccuac

SEQ ID NO: 14540 - DNA, 22 bp, Artificial Sequence
  Synthetic
gugcattucagaggcagcaaaa

SEQ ID NO: 14541 - DNA, 22 bp, Artificial Sequence
  Synthetic
ggaagtccuccagtgagtcaug

SEQ ID NO: 14542 - DNA, 21 bp, Artificial Sequence
  Synthetic
gaagcacuaatcggctugcat

SEQ ID NO: 14543 - DNA, 23 bp, Artificial Sequence
  Synthetic
caacagccuccaatcatctccut

SEQ ID NO: 14544 - DNA, 28 bp, Artificial Sequence
  Synthetic
gttgcagggaagauactacattttugat

SEQ ID NO: 14545 - DNA, 24 bp, Artificial Sequence
  Synthetic
gaaatctctgcacutacccccaut

SEQ ID NO: 14546 - DNA, 31 bp, Artificial Sequence
  Synthetic
ctcagagcatgaaugattggaagtaaattut

SEQ ID NO: 14547 - DNA, 25 bp, Artificial Sequence
  Synthetic
caguattggacattaucggcaccat

SEQ ID NO: 14548 - DNA, 21 bp, Artificial Sequence
  Synthetic
cuagagggucagagggcaaag

SEQ ID NO: 14549 - DNA, 28 bp, Artificial Sequence
  Synthetic
aacaucactaatacctugaggaaaaggg

SEQ ID NO: 14550 - DNA, 27 bp, Artificial Sequence
  Synthetic
ctgttactucacagcctaaaagcttug

SEQ ID NO: 14551 - DNA, 25 bp, Artificial Sequence
  Synthetic
caggcccaugcttactttgtttaut

SEQ ID NO: 14552 - DNA, 25 bp, Artificial Sequence
  Synthetic
ggtgaatttcccuccatttttcugg

SEQ ID NO: 14553 - DNA, 22 bp, Artificial Sequence
  Synthetic
caagctccaucatgccgauact

SEQ ID NO: 14554 - DNA, 24 bp, Artificial Sequence
  Synthetic
atctagtactccugtctccagcuc

SEQ ID NO: 14555 - DNA, 27 bp, Artificial Sequence
  Synthetic
aaatgagaaacccaccuattacctguc

SEQ ID NO: 14556 - DNA, 25 bp, Artificial Sequence
  Synthetic
agtttggaaaauctgcctccaguag

SEQ ID NO: 14557 - DNA, 23 bp, Artificial Sequence
  Synthetic
ccatctgcccauctgtcttgaut

SEQ ID NO: 14558 - DNA, 28 bp, Artificial Sequence
  Synthetic
gcttcagcauaagctttttaauaagcct

SEQ ID NO: 14559 - DNA, 26 bp, Artificial Sequence
  Synthetic
gctgtttcctauatgagggctctuac

SEQ ID NO: 14560 - DNA, 23 bp, Artificial Sequence
  Synthetic
gtaccaccuaatgcaacacaucc

SEQ ID NO: 14561 - DNA, 28 bp, Artificial Sequence
  Synthetic
gtatcuacaaaggaacacatugaaagcc

SEQ ID NO: 14562 - DNA, 29 bp, Artificial Sequence
  Synthetic
cttaatacagtcuggaatactctguccat

SEQ ID NO: 14563 - DNA, 27 bp, Artificial Sequence
  Synthetic
actctgtataaagugggtttgcaagut

SEQ ID NO: 14564 - DNA, 23 bp, Artificial Sequence
  Synthetic
acutttcctaagucagccaaggg

SEQ ID NO: 14565 - DNA, 25 bp, Artificial Sequence
  Synthetic
tgcttgtgagaucactttgactuct

SEQ ID NO: 14566 - DNA, 28 bp, Artificial Sequence
  Synthetic
atcccattccaauatgtagcttctgtut

SEQ ID NO: 14567 - DNA, 27 bp, Artificial Sequence
  Synthetic
agcatgaagctaugataatgggaaguc

SEQ ID NO: 14568 - DNA, 25 bp, Artificial Sequence
  Synthetic
atttcatauggaatgctgugaccca

SEQ ID NO: 14569 - DNA, 24 bp, Artificial Sequence
  Synthetic
agaacctgtauacctctgagcugt

SEQ ID NO: 14570 - DNA, 23 bp, Artificial Sequence
  Synthetic
aagcccatugaatgcatctagut

SEQ ID NO: 14571 - DNA, 25 bp, Artificial Sequence
  Synthetic
cattcatggauccttcatcacuggt

SEQ ID NO: 14572 - DNA, 24 bp, Artificial Sequence
  Synthetic
gtcgcagaucacgaggtgaaatua

SEQ ID NO: 14573 - DNA, 24 bp, Artificial Sequence
  Synthetic
gtgaagaagguggaggtttuagct

SEQ ID NO: 14574 - DNA, 23 bp, Artificial Sequence
  Synthetic
ctuccacggcaaaatcuaaagcc

SEQ ID NO: 14575 - DNA, 22 bp, Artificial Sequence
  Synthetic
tgcctagcaucctgtgctttut

SEQ ID NO: 14576 - DNA, 27 bp, Artificial Sequence
  Synthetic
tgauagtcactggugaaagaaccaaaa

SEQ ID NO: 14577 - DNA, 30 bp, Artificial Sequence
  Synthetic
gagtaccagguttggatttcatattuacca

SEQ ID NO: 14578 - DNA, 27 bp, Artificial Sequence
  Synthetic
gttgtctgtttcuttttgctaggtuga

SEQ ID NO: 14579 - DNA, 26 bp, Artificial Sequence
  Synthetic
cagatgacagcccutttcatcattut

SEQ ID NO: 14580 - DNA, 21 bp, Artificial Sequence
  Synthetic
ccgtctctccuacctggcaua

SEQ ID NO: 14581 - DNA, 22 bp, Artificial Sequence
  Synthetic
tcttgtcgaucatgtggaggug

SEQ ID NO: 14582 - DNA, 22 bp, Artificial Sequence
  Synthetic
caccauttttacccuccccact

SEQ ID NO: 14583 - DNA, 17 bp, Artificial Sequence
  Synthetic
gtgacuggccggctcuc

SEQ ID NO: 14584 - DNA, 29 bp, Artificial Sequence
  Synthetic
ctcatgagctcutatgtgttatgttugga

SEQ ID NO: 14585 - DNA, 23 bp, Artificial Sequence
  Synthetic
tgagttgucaaagggctcatuca

SEQ ID NO: 14586 - DNA, 22 bp, Artificial Sequence
  Synthetic
ggaacaaagcgcgguctatcua

SEQ ID NO: 14587 - DNA, 26 bp, Artificial Sequence
  Synthetic
ccttctgaagtcuccttctgttctuc

SEQ ID NO: 14588 - DNA, 27 bp, Artificial Sequence
  Synthetic
gatgatcucatcaaaccugaggaagag

SEQ ID NO: 14589 - DNA, 25 bp, Artificial Sequence
  Synthetic
tctttttccguggagatttctggut

SEQ ID NO: 14590 - DNA, 22 bp, Artificial Sequence
  Synthetic
tugtaacagugagcccaaggag

SEQ ID NO: 14591 - DNA, 24 bp, Artificial Sequence
  Synthetic
tctcagagtcgauttccatggtug

SEQ ID NO: 14592 - DNA, 22 bp, Artificial Sequence
  Synthetic
gccatctcugcagaacauggaa

SEQ ID NO: 14593 - DNA, 22 bp, Artificial Sequence
  Synthetic
gtagaatcguagctgctugggt

SEQ ID NO: 14594 - DNA, 20 bp, Artificial Sequence
  Synthetic
gcugaaauccccgagacgag

SEQ ID NO: 14595 - DNA, 29 bp, Artificial Sequence
  Synthetic
ctgtaaggcaaugaatgatcaataagugt

SEQ ID NO: 14596 - DNA, 20 bp, Artificial Sequence
  Synthetic
tgccacccaucagucacaaa

SEQ ID NO: 14597 - DNA, 26 bp, Artificial Sequence
  Synthetic
gttgagagtgutcatgttcatgtuca

SEQ ID NO: 14598 - DNA, 25 bp, Artificial Sequence
  Synthetic
tcaatggctccuacatgagaaggua

SEQ ID NO: 14599 - DNA, 24 bp, Artificial Sequence
  Synthetic
ggtgccaacaaaugtttttgcaut

SEQ ID NO: 14600 - DNA, 22 bp, Artificial Sequence
  Synthetic
gacugacatcaacuccaaggga

SEQ ID NO: 14601 - DNA, 25 bp, Artificial Sequence
  Synthetic
gctactccuaactgtgacttucact

SEQ ID NO: 14602 - DNA, 28 bp, Artificial Sequence
  Synthetic
agaataccaagugcagatguaaaccaaa

SEQ ID NO: 14603 - DNA, 30 bp, Artificial Sequence
  Synthetic
acttccctaggaaaaugataactctcaugt

SEQ ID NO: 14604 - DNA, 28 bp, Artificial Sequence
  Synthetic
ggctgagaccugagttgataaaattuct

SEQ ID NO: 14605 - DNA, 30 bp, Artificial Sequence
  Synthetic
ggaaagctgauacctatttcaataccuaca

SEQ ID NO: 14606 - DNA, 27 bp, Artificial Sequence
  Synthetic
cctcaaggacautactagtgacucaga

SEQ ID NO: 14607 - DNA, 29 bp, Artificial Sequence
  Synthetic
gccagctautaagaatctttucaaacact

SEQ ID NO: 14608 - DNA, 23 bp, Artificial Sequence
  Synthetic
cactgcuccagaaaccttctuct

SEQ ID NO: 14609 - DNA, 20 bp, Artificial Sequence
  Synthetic
gcuacacugagcagggagac

SEQ ID NO: 14610 - DNA, 22 bp, Artificial Sequence
  Synthetic
aacacuacgcatgtcucacaag

SEQ ID NO: 14611 - DNA, 21 bp, Artificial Sequence
  Synthetic
cucccagagaccaacgtucaa

SEQ ID NO: 14612 - DNA, 27 bp, Artificial Sequence
  Synthetic
aggaagaaaggugaagtacgtacagua

SEQ ID NO: 14613 - DNA, 24 bp, Artificial Sequence
  Synthetic
gcattttccuctacattugcaggg

SEQ ID NO: 14614 - DNA, 26 bp, Artificial Sequence
  Synthetic
agacatttutagttggatuccaccca

SEQ ID NO: 14615 - DNA, 25 bp, Artificial Sequence
  Synthetic
ctcctatgacautaaccgtgtucct

SEQ ID NO: 14616 - DNA, 23 bp, Artificial Sequence
  Synthetic
ctttgtcaatucccactgctucc

SEQ ID NO: 14617 - DNA, 22 bp, Artificial Sequence
  Synthetic
tcacuacaccccaucaccagat

SEQ ID NO: 14618 - DNA, 22 bp, Artificial Sequence
  Synthetic
gctgaagtcuggcttcttgguc

SEQ ID NO: 14619 - DNA, 22 bp, Artificial Sequence
  Synthetic
ctcctcctgugatctgcaauct

SEQ ID NO: 14620 - DNA, 31 bp, Artificial Sequence
  Synthetic
cctgccctatataautggagaccttacauat

SEQ ID NO: 14621 - DNA, 24 bp, Artificial Sequence
  Synthetic
gacaatgcuaagaccttcctggut

SEQ ID NO: 14622 - DNA, 27 bp, Artificial Sequence
  Synthetic
acaggtataattucccttgtcagaugg

SEQ ID NO: 14623 - DNA, 24 bp, Artificial Sequence
  Synthetic
ctttcttgccuccttcagcttcut

SEQ ID NO: 14624 - DNA, 28 bp, Artificial Sequence
  Synthetic
gcatccaatuacaattagagatcucact

SEQ ID NO: 14625 - DNA, 21 bp, Artificial Sequence
  Synthetic
ggcctctaugcttgtacugcc

SEQ ID NO: 14626 - DNA, 27 bp, Artificial Sequence
  Synthetic
tgtggtatccucaactaaacugaagga

SEQ ID NO: 14627 - DNA, 24 bp, Artificial Sequence
  Synthetic
ccacauggagatauggaagaggac

SEQ ID NO: 14628 - DNA, 18 bp, Artificial Sequence
  Synthetic
gccgucccgggagactua

SEQ ID NO: 14629 - DNA, 20 bp, Artificial Sequence
  Synthetic
cagcactcacugaccctcuc

SEQ ID NO: 14630 - DNA, 17 bp, Artificial Sequence
  Synthetic
ccggugcgcatgtacug

SEQ ID NO: 14631 - DNA, 17 bp, Artificial Sequence
  Synthetic
tcccugagccctgucct

SEQ ID NO: 14632 - DNA, 20 bp, Artificial Sequence
  Synthetic
cagcctgcacuggtagagug

SEQ ID NO: 14633 - DNA, 26 bp, Artificial Sequence
  Synthetic
tcttgtgucagatggactaugaggaa

SEQ ID NO: 14634 - DNA, 22 bp, Artificial Sequence
  Synthetic
gccagtactugtccaatgccut

SEQ ID NO: 14635 - DNA, 20 bp, Artificial Sequence
  Synthetic
gttgctguctgtctguccgt

SEQ ID NO: 14636 - DNA, 23 bp, Artificial Sequence
  Synthetic
gctgagacccaaaacutgtctut

SEQ ID NO: 14637 - DNA, 26 bp, Artificial Sequence
  Synthetic
gataaagttcuaactgcccuggagac

SEQ ID NO: 14638 - DNA, 21 bp, Artificial Sequence
  Synthetic
gaagccaguggactagcacut

SEQ ID NO: 14639 - DNA, 20 bp, Artificial Sequence
  Synthetic
aggtttcucagcagcctgug

SEQ ID NO: 14640 - DNA, 18 bp, Artificial Sequence
  Synthetic
ggacgucacagugaccga

SEQ ID NO: 14641 - DNA, 19 bp, Artificial Sequence
  Synthetic
ctaccugcgccacauccat

SEQ ID NO: 14642 - DNA, 22 bp, Artificial Sequence
  Synthetic
cagugaacaccuccccaaagat

SEQ ID NO: 14643 - DNA, 25 bp, Artificial Sequence
  Synthetic
gtcagaagcauttctgtgtagguga

SEQ ID NO: 14644 - DNA, 18 bp, Artificial Sequence
  Synthetic
cacagaggucgcagcuca

SEQ ID NO: 14645 - DNA, 21 bp, Artificial Sequence
  Synthetic
cctgatgctuggccttctcuc

SEQ ID NO: 14646 - DNA, 25 bp, Artificial Sequence
  Synthetic
ccttcatcutctcactcuggaaagt

SEQ ID NO: 14647 - DNA, 17 bp, Artificial Sequence
  Synthetic
ggccagggugcagtguc

SEQ ID NO: 14648 - DNA, 17 bp, Artificial Sequence
  Synthetic
ggacugccctccuccca

SEQ ID NO: 14649 - DNA, 23 bp, Artificial Sequence
  Synthetic
gggtgaguaagagactgatcugt

SEQ ID NO: 14650 - DNA, 17 bp, Artificial Sequence
  Synthetic
gcacatugcggtugcga

SEQ ID NO: 14651 - DNA, 17 bp, Artificial Sequence
  Synthetic
gctgccucccugaggat

SEQ ID NO: 14652 - DNA, 19 bp, Artificial Sequence
  Synthetic
agctgtcugctccccatug

SEQ ID NO: 14653 - DNA, 23 bp, Artificial Sequence
  Synthetic
ccctctttcatuacctcccccut

SEQ ID NO: 14654 - DNA, 20 bp, Artificial Sequence
  Synthetic
gggaacgtuggtagggauga

SEQ ID NO: 14655 - DNA, 18 bp, Artificial Sequence
  Synthetic
cgctccaucgacgacgug

SEQ ID NO: 14656 - DNA, 23 bp, Artificial Sequence
  Synthetic
cutcccaatgatugcaacacaaa

SEQ ID NO: 14657 - DNA, 22 bp, Artificial Sequence
  Synthetic
gagactuctacccguagcagga

SEQ ID NO: 14658 - DNA, 32 bp, Artificial Sequence
  Synthetic
aagtgatatauaaacacaagaattugcagcag

SEQ ID NO: 14659 - DNA, 28 bp, Artificial Sequence
  Synthetic
ctggaataggcaacaugtttgtgattua

SEQ ID NO: 14660 - DNA, 28 bp, Artificial Sequence
  Synthetic
gcggttugaaagtactgtttuacaagat

SEQ ID NO: 14661 - DNA, 25 bp, Artificial Sequence
  Synthetic
ctgacaactugcaatgagtaugcac

SEQ ID NO: 14662 - DNA, 23 bp, Artificial Sequence
  Synthetic
ggacttacucgcagtcguacaag

SEQ ID NO: 14663 - DNA, 27 bp, Artificial Sequence
  Synthetic
ttcctgtgguaataagctgctatucag

SEQ ID NO: 14664 - DNA, 32 bp, Artificial Sequence
  Synthetic
aatatataacactcacutctttacagcttcuc

SEQ ID NO: 14665 - DNA, 30 bp, Artificial Sequence
  Synthetic
ttttggatgactucattgatcttgttauct

SEQ ID NO: 14666 - DNA, 30 bp, Artificial Sequence
  Synthetic
ttctcaattgttuaaagaatcacacaugga

SEQ ID NO: 14667 - DNA, 24 bp, Artificial Sequence
  Synthetic
gacgtucaatgtctguggagaaga

SEQ ID NO: 14668 - DNA, 31 bp, Artificial Sequence
  Synthetic
gtcttatacagcaaauaccatacacaaguaa

SEQ ID NO: 14669 - DNA, 26 bp, Artificial Sequence
  Synthetic
gaaaacattacauacctgccucgagt

SEQ ID NO: 14670 - DNA, 24 bp, Artificial Sequence
  Synthetic
acagtugacgagcttuagaaaccc

SEQ ID NO: 14671 - DNA, 26 bp, Artificial Sequence
  Synthetic
ggaatcgagugcattttctgacatut

SEQ ID NO: 14672 - DNA, 23 bp, Artificial Sequence
  Synthetic
ctgtggucagttcctugaaaagc

SEQ ID NO: 14673 - DNA, 26 bp, Artificial Sequence
  Synthetic
tgcctaauttgaatcagucaggaaca

SEQ ID NO: 14674 - DNA, 22 bp, Artificial Sequence
  Synthetic
gtgcagttgugttggatgugat

SEQ ID NO: 14675 - DNA, 26 bp, Artificial Sequence
  Synthetic
ccacctacctuagggccaagtaauaa

SEQ ID NO: 14676 - DNA, 27 bp, Artificial Sequence
  Synthetic
gaacacttaccagaauactgagcagut

SEQ ID NO: 14677 - DNA, 28 bp, Artificial Sequence
  Synthetic
gggaatgaugcaacataatatgcttuca

SEQ ID NO: 14678 - DNA, 23 bp, Artificial Sequence
  Synthetic
ccttacctguctctgttgtuggg

SEQ ID NO: 14679 - DNA, 22 bp, Artificial Sequence
  Synthetic
atctcuaccaagccagccttug

SEQ ID NO: 14680 - DNA, 22 bp, Artificial Sequence
  Synthetic
gccggcctugtacatgtagtua

SEQ ID NO: 14681 - DNA, 21 bp, Artificial Sequence
  Synthetic
cctcttcugctggaccaucac

SEQ ID NO: 14682 - DNA, 21 bp, Artificial Sequence
  Synthetic
tgagucaagcccggtgaguat

SEQ ID NO: 14683 - DNA, 26 bp, Artificial Sequence
  Synthetic
gagaacatgaucaatgccaccauaaa

SEQ ID NO: 14684 - DNA, 21 bp, Artificial Sequence
  Synthetic
tcataggcaaggucccugaca

SEQ ID NO: 14685 - DNA, 25 bp, Artificial Sequence
  Synthetic
aatggctttguggacaactcattuc

SEQ ID NO: 14686 - DNA, 21 bp, Artificial Sequence
  Synthetic
gtgctttcuctttcccgguct

SEQ ID NO: 14687 - DNA, 18 bp, Artificial Sequence
  Synthetic
ccgagagugcacagugct

SEQ ID NO: 14688 - DNA, 21 bp, Artificial Sequence
  Synthetic
gtcatcgtccucagcctctuc

SEQ ID NO: 14689 - DNA, 18 bp, Artificial Sequence
  Synthetic
gggttccucgccccctua

SEQ ID NO: 14690 - DNA, 29 bp, Artificial Sequence
  Synthetic
gatccatctgtgutttcccctctaaauaa

SEQ ID NO: 14691 - DNA, 27 bp, Artificial Sequence
  Synthetic
gtaactctgaaaugtcctttccatgug

SEQ ID NO: 14692 - DNA, 29 bp, Artificial Sequence
  Synthetic
ggaacacctccacutacaaaagaagauaa

SEQ ID NO: 14693 - DNA, 25 bp, Artificial Sequence
  Synthetic
tttgccctcugtaagagttgctuag

SEQ ID NO: 14694 - DNA, 22 bp, Artificial Sequence
  Synthetic
tctcgatctaguagccccagug

SEQ ID NO: 14695 - DNA, 28 bp, Artificial Sequence
  Synthetic
actgaatacctuctgcttctcctaucat

SEQ ID NO: 14696 - DNA, 25 bp, Artificial Sequence
  Synthetic
gaaccgacattuaggtggacttcut

SEQ ID NO: 14697 - DNA, 19 bp, Artificial Sequence
  Synthetic
ccaacgtccucgggagtua

SEQ ID NO: 14698 - DNA, 24 bp, Artificial Sequence
  Synthetic
tcucactccaugaggacaagaagt

SEQ ID NO: 14699 - DNA, 28 bp, Artificial Sequence
  Synthetic
ggaatgagaaggaaaaguaaaagtuggg

SEQ ID NO: 14700 - DNA, 29 bp, Artificial Sequence
  Synthetic
ggaaaaagggaucagaaattcagaguagt

SEQ ID NO: 14701 - DNA, 25 bp, Artificial Sequence
  Synthetic
cagtcccagaaucatgtgaugaaga

SEQ ID NO: 14702 - DNA, 22 bp, Artificial Sequence
  Synthetic
aagctcagcuctgcaagatuga

SEQ ID NO: 14703 - DNA, 28 bp, Artificial Sequence
  Synthetic
gttctcataacuggatgtaatugaacca

SEQ ID NO: 14704 - DNA, 23 bp, Artificial Sequence
  Synthetic
tgctccacccaucaaaccaatua

SEQ ID NO: 14705 - DNA, 22 bp, Artificial Sequence
  Synthetic
gaccaccaaacutgggcttauc

SEQ ID NO: 14706 - DNA, 29 bp, Artificial Sequence
  Synthetic
ctcactatagacagaugatgttgttgugt

SEQ ID NO: 14707 - DNA, 22 bp, Artificial Sequence
  Synthetic
caggatccuctcttgctgaugg

SEQ ID NO: 14708 - DNA, 27 bp, Artificial Sequence
  Synthetic
tcttcacaggucagtcagtacuaaagt

SEQ ID NO: 14709 - DNA, 24 bp, Artificial Sequence
  Synthetic
ggcagagaaacaaauctctccuca

SEQ ID NO: 14710 - DNA, 31 bp, Artificial Sequence
  Synthetic
cccaaagtatauaagaagggtatggttgaut

SEQ ID NO: 14711 - DNA, 21 bp, Artificial Sequence
  Synthetic
ggcgctcgutctcctcuaaac

SEQ ID NO: 14712 - DNA, 29 bp, Artificial Sequence
  Synthetic
cttcttttctagauctgtaccaagtgugt

SEQ ID NO: 14713 - DNA, 22 bp, Artificial Sequence
  Synthetic
aagctggcaaaacuggctttut

SEQ ID NO: 14714 - DNA, 21 bp, Artificial Sequence
  Synthetic
ctggccctugaaaaagagcug

SEQ ID NO: 14715 - DNA, 27 bp, Artificial Sequence
  Synthetic
aagactaccuaagaacaagctcucaga

SEQ ID NO: 14716 - DNA, 26 bp, Artificial Sequence
  Synthetic
cagauggaggauagccagaaatuaaa

SEQ ID NO: 14717 - DNA, 30 bp, Artificial Sequence
  Synthetic
caaagcaaaaaguagaagagaacaagtuca

SEQ ID NO: 14718 - DNA, 23 bp, Artificial Sequence
  Synthetic
tttcagcagugggatgtuaccaa

SEQ ID NO: 14719 - DNA, 22 bp, Artificial Sequence
  Synthetic
gggtttgggagcuggaatgaut

SEQ ID NO: 14720 - DNA, 26 bp, Artificial Sequence
  Synthetic
gagtggacacaugtaaattgtgctut

SEQ ID NO: 14721 - DNA, 27 bp, Artificial Sequence
  Synthetic
cacaggaagaauatctggaaacugaga

SEQ ID NO: 14722 - DNA, 24 bp, Artificial Sequence
  Synthetic
tgtggacttugaaggaatcagcut

SEQ ID NO: 14723 - DNA, 24 bp, Artificial Sequence
  Synthetic
cacctggcugagggtcattttaua

SEQ ID NO: 14724 - DNA, 30 bp, Artificial Sequence
  Synthetic
tctagttttacatutacctgatagcugact

SEQ ID NO: 14725 - DNA, 26 bp, Artificial Sequence
  Synthetic
cggtctggtgauggaggacttauaat

SEQ ID NO: 14726 - DNA, 22 bp, Artificial Sequence
  Synthetic
tccuaccccaaccactcaugaa

SEQ ID NO: 14727 - DNA, 28 bp, Artificial Sequence
  Synthetic
agagtaagtatucccagttctcatugga

SEQ ID NO: 14728 - DNA, 23 bp, Artificial Sequence
  Synthetic
accaaagugctgagtuccaagag

SEQ ID NO: 14729 - DNA, 28 bp, Artificial Sequence
  Synthetic
tcttuagaagaaaacgacacugaagagg

SEQ ID NO: 14730 - DNA, 20 bp, Artificial Sequence
  Synthetic
cctggucaggtgacaacugg

SEQ ID NO: 14731 - DNA, 20 bp, Artificial Sequence
  Synthetic
cttgcatggguggagcttug

SEQ ID NO: 14732 - DNA, 27 bp, Artificial Sequence
  Synthetic
actatcagaaucttccaguacaggaca

SEQ ID NO: 14733 - DNA, 27 bp, Artificial Sequence
  Synthetic
accataggatcutactccatagagugg

SEQ ID NO: 14734 - DNA, 23 bp, Artificial Sequence
  Synthetic
gugttgatgaugggacagagagt

SEQ ID NO: 14735 - DNA, 26 bp, Artificial Sequence
  Synthetic
ccagcatctucaggtctatcaatcut

SEQ ID NO: 14736 - DNA, 28 bp, Artificial Sequence
  Synthetic
gccttcagacatuatggactttgtacua

SEQ ID NO: 14737 - DNA, 25 bp, Artificial Sequence
  Synthetic
gcagctgcugagaaaatactucaaa

SEQ ID NO: 14738 - DNA, 22 bp, Artificial Sequence
  Synthetic
cacatggaugcagaccacauct

SEQ ID NO: 14739 - DNA, 23 bp, Artificial Sequence
  Synthetic
ggcacatacutctggttcuggat

SEQ ID NO: 14740 - DNA, 27 bp, Artificial Sequence
  Synthetic
cttctcaatcttugttcccttctgcua

SEQ ID NO: 14741 - DNA, 22 bp, Artificial Sequence
  Synthetic
ccaauaagcaggccugaaggag

SEQ ID NO: 14742 - DNA, 28 bp, Artificial Sequence
  Synthetic
cgaactguccccaacatcauaaaaagat

SEQ ID NO: 14743 - DNA, 21 bp, Artificial Sequence
  Synthetic
cacagacccugatgtgaggug

SEQ ID NO: 14744 - DNA, 21 bp, Artificial Sequence
  Synthetic
ataacagccgcutcacctuct

SEQ ID NO: 14745 - DNA, 22 bp, Artificial Sequence
  Synthetic
tgctatuaggagcgtcuaccgt

SEQ ID NO: 14746 - DNA, 28 bp, Artificial Sequence
  Synthetic
ggtttgtctugaaaagatacaaaugcct

SEQ ID NO: 14747 - DNA, 24 bp, Artificial Sequence
  Synthetic
gaggtggacaaaacugagagctua

SEQ ID NO: 14748 - DNA, 27 bp, Artificial Sequence
  Synthetic
ttggtatuaagaagggtttacgugcat

SEQ ID NO: 14749 - DNA, 24 bp, Artificial Sequence
  Synthetic
tggaataacaccuccagccatuac

SEQ ID NO: 14750 - DNA, 23 bp, Artificial Sequence
  Synthetic
atcgtcagccucctgaauacaac

SEQ ID NO: 14751 - DNA, 24 bp, Artificial Sequence
  Synthetic
atccaggaaautctgaugcaaaca

SEQ ID NO: 14752 - DNA, 26 bp, Artificial Sequence
  Synthetic
tgtaagagaaacautgatgcagguga

SEQ ID NO: 14753 - DNA, 22 bp, Artificial Sequence
  Synthetic
gggtcatacuggtccctttcua

SEQ ID NO: 14754 - DNA, 26 bp, Artificial Sequence
  Synthetic
aagaaatgccggaagutcctaaacua

SEQ ID NO: 14755 - DNA, 23 bp, Artificial Sequence
  Synthetic
ggacataagagagcucagccauc

SEQ ID NO: 14756 - DNA, 22 bp, Artificial Sequence
  Synthetic
gctcatgautcagaggcugagg

SEQ ID NO: 14757 - DNA, 27 bp, Artificial Sequence
  Synthetic
ctcgtccatauagctgttgtagtucat

SEQ ID NO: 14758 - DNA, 29 bp, Artificial Sequence
  Synthetic
gttataacctgttuatgttttgcctcuca

SEQ ID NO: 14759 - DNA, 20 bp, Artificial Sequence
  Synthetic
ggcctgtgucatgtctggua

SEQ ID NO: 14760 - DNA, 22 bp, Artificial Sequence
  Synthetic
gctgaggtgutctgttctcucc

SEQ ID NO: 14761 - DNA, 22 bp, Artificial Sequence
  Synthetic
tcattttgaacuccccgtuggt

SEQ ID NO: 14762 - DNA, 21 bp, Artificial Sequence
  Synthetic
cctgtcactucctccagctuc

SEQ ID NO: 14763 - DNA, 24 bp, Artificial Sequence
  Synthetic
agctagaaggccacugatgaguaa

SEQ ID NO: 14764 - DNA, 27 bp, Artificial Sequence
  Synthetic
ctgcttcttugcacagtttauacagat

SEQ ID NO: 14765 - DNA, 28 bp, Artificial Sequence
  Synthetic
tgtaacctaaacautccccaatcttgut

SEQ ID NO: 14766 - DNA, 21 bp, Artificial Sequence
  Synthetic
gggatguccagcaccttttuc

SEQ ID NO: 14767 - DNA, 25 bp, Artificial Sequence
  Synthetic
tgcagacaaaucaaaggagcugaat

SEQ ID NO: 14768 - DNA, 20 bp, Artificial Sequence
  Synthetic
gcctgcaaaauccgccauat

SEQ ID NO: 14769 - DNA, 19 bp, Artificial Sequence
  Synthetic
cucggaagagcccttuggt

SEQ ID NO: 14770 - DNA, 27 bp, Artificial Sequence
  Synthetic
ggttcaagacuactagaggactucaca

SEQ ID NO: 14771 - DNA, 23 bp, Artificial Sequence
  Synthetic
aagctttaaccugaaagccucca

SEQ ID NO: 14772 - DNA, 23 bp, Artificial Sequence
  Synthetic
ctggcucaacacagatagttugg

SEQ ID NO: 14773 - DNA, 23 bp, Artificial Sequence
  Synthetic
ttctgtcacucctggtatcccut

SEQ ID NO: 14774 - DNA, 23 bp, Artificial Sequence
  Synthetic
tcaccaagcaaacucaagaugct

SEQ ID NO: 14775 - DNA, 25 bp, Artificial Sequence
  Synthetic
ggaguggcaaaaauaggaggaaaaa

SEQ ID NO: 14776 - DNA, 26 bp, Artificial Sequence
  Synthetic
aatccaugaaacaggcattaccugat

SEQ ID NO: 14777 - DNA, 24 bp, Artificial Sequence
  Synthetic
gaacatuccagcctttcuacccaa

SEQ ID NO: 14778 - DNA, 26 bp, Artificial Sequence
  Synthetic
atcagcttcutcatgacauccaaagt

SEQ ID NO: 14779 - DNA, 25 bp, Artificial Sequence
  Synthetic
ctagtctctatguggaactcccuga

SEQ ID NO: 14780 - DNA, 24 bp, Artificial Sequence
  Synthetic
ggacaaaggccutcaattctucca

SEQ ID NO: 14781 - DNA, 27 bp, Artificial Sequence
  Synthetic
ctaggattgctuaggtttgaattcuga

SEQ ID NO: 14782 - DNA, 28 bp, Artificial Sequence
  Synthetic
gtccagaguaaaggagtaaaguaaggga

SEQ ID NO: 14783 - DNA, 25 bp, Artificial Sequence
  Synthetic
gtctctaccauccaactgatctgug

SEQ ID NO: 14784 - DNA, 21 bp, Artificial Sequence
  Synthetic
cattctggauctgctgccauc

SEQ ID NO: 14785 - DNA, 23 bp, Artificial Sequence
  Synthetic
agtagtggttcugtgctgggaua

SEQ ID NO: 14786 - DNA, 28 bp, Artificial Sequence
  Synthetic
ttcatgatgguaactaactgaugcagaa

SEQ ID NO: 14787 - DNA, 21 bp, Artificial Sequence
  Synthetic
gggagccaaagacauggtaug

SEQ ID NO: 14788 - DNA, 30 bp, Artificial Sequence
  Synthetic
tgtgatccctuaagatagttttcaaugcaa

SEQ ID NO: 14789 - DNA, 23 bp, Artificial Sequence
  Synthetic
gaagtggauttccggugaaggat

SEQ ID NO: 14790 - DNA, 26 bp, Artificial Sequence
  Synthetic
catctctccaaagcuctgaagtguat

SEQ ID NO: 14791 - DNA, 30 bp, Artificial Sequence
  Synthetic
gtaactaagagccutaaagctttctucagt

SEQ ID NO: 14792 - DNA, 29 bp, Artificial Sequence
  Synthetic
acgagctaacuaaacacataccatgauat

SEQ ID NO: 14793 - DNA, 24 bp, Artificial Sequence
  Synthetic
ttaccaacaggucagacgcattua

SEQ ID NO: 14794 - DNA, 24 bp, Artificial Sequence
  Synthetic
gaagtttggguatcagtgcugaga

SEQ ID NO: 14795 - DNA, 28 bp, Artificial Sequence
  Synthetic
acttttacactgautctccagcatgaut

SEQ ID NO: 14796 - DNA, 26 bp, Artificial Sequence
  Synthetic
aggauttttctctcuaccacagggat

SEQ ID NO: 14797 - DNA, 26 bp, Artificial Sequence
  Synthetic
gacccctgcuctgttattcttatuca

SEQ ID NO: 14798 - DNA, 20 bp, Artificial Sequence
  Synthetic
tcccaacucggcucaaagac

SEQ ID NO: 14799 - DNA, 19 bp, Artificial Sequence
  Synthetic
gggctucagccagctttuc

SEQ ID NO: 14800 - DNA, 24 bp, Artificial Sequence
  Synthetic
ctaaagtggtugccaccttgtuac

SEQ ID NO: 14801 - DNA, 26 bp, Artificial Sequence
  Synthetic
gggagauccgacaatacagatugaaa

SEQ ID NO: 14802 - DNA, 28 bp, Artificial Sequence
  Synthetic
cctactaggaccauaggtacatctucag

SEQ ID NO: 14803 - DNA, 25 bp, Artificial Sequence
  Synthetic
tttaugacaaaagttguggacaggt

SEQ ID NO: 14804 - DNA, 23 bp, Artificial Sequence
  Synthetic
aaagaatggucctgcaccaguaa

SEQ ID NO: 14805 - DNA, 29 bp, Artificial Sequence
  Synthetic
tgaatataaacttguggtagttggagcug

SEQ ID NO: 14806 - DNA, 25 bp, Artificial Sequence
  Synthetic
agccttaugtacgtctaugaggaca

SEQ ID NO: 14807 - DNA, 18 bp, Artificial Sequence
  Synthetic
gctgcugcccagaccauc

SEQ ID NO: 14808 - DNA, 17 bp, Artificial Sequence
  Synthetic
cgucacgacgcccucat

SEQ ID NO: 14809 - DNA, 17 bp, Artificial Sequence
  Synthetic
gctcgggucccttccut

SEQ ID NO: 14810 - DNA, 20 bp, Artificial Sequence
  Synthetic
cctcatcuccactccaccug

SEQ ID NO: 14811 - DNA, 17 bp, Artificial Sequence
  Synthetic
cggcgcggutcttcuct

SEQ ID NO: 14812 - DNA, 20 bp, Artificial Sequence
  Synthetic
ccuatccctacucggcccaa

SEQ ID NO: 14813 - DNA, 19 bp, Artificial Sequence
  Synthetic
gatctcggugacgguggaa

SEQ ID NO: 14814 - DNA, 22 bp, Artificial Sequence
  Synthetic
cgtttctucgacaacgccuact

SEQ ID NO: 14815 - DNA, 22 bp, Artificial Sequence
  Synthetic
gggatttgtgutctcctccuca

SEQ ID NO: 14816 - DNA, 22 bp, Artificial Sequence
  Synthetic
tctcgggaaaucctctgctgua

SEQ ID NO: 14817 - DNA, 17 bp, Artificial Sequence
  Synthetic
ccuggccacaguccagt

SEQ ID NO: 14818 - DNA, 25 bp, Artificial Sequence
  Synthetic
accagcuccaagaagaaaacatcuc

SEQ ID NO: 14819 - DNA, 28 bp, Artificial Sequence
  Synthetic
acacctgauaggtttctataucggagaa

SEQ ID NO: 14820 - DNA, 20 bp, Artificial Sequence
  Synthetic
cccggautagtgcguacgag

SEQ ID NO: 14821 - DNA, 21 bp, Artificial Sequence
  Synthetic
ccagtaccugctccucaccat

SEQ ID NO: 14822 - DNA, 33 bp, Artificial Sequence
  Synthetic
caactaacatttagutttctttaatgcucagaa

SEQ ID NO: 14823 - DNA, 24 bp, Artificial Sequence
  Synthetic
gcacgccaaacaaauctccuagaa

SEQ ID NO: 14824 - DNA, 25 bp, Artificial Sequence
  Synthetic
tcaggtacauctgtgagugagaaca

SEQ ID NO: 14825 - DNA, 29 bp, Artificial Sequence
  Synthetic
accagtaagcuaacttgttgtaaauaacc

SEQ ID NO: 14826 - DNA, 26 bp, Artificial Sequence
  Synthetic
acgccacaaauctgatagtattuccc

SEQ ID NO: 14827 - DNA, 26 bp, Artificial Sequence
  Synthetic
actttgaacaguaagagtcttgccut

SEQ ID NO: 14828 - DNA, 23 bp, Artificial Sequence
  Synthetic
caaagttgcuagcattcctguga

SEQ ID NO: 14829 - DNA, 22 bp, Artificial Sequence
  Synthetic
ctgtugcaatgtgauggaaggg

SEQ ID NO: 14830 - DNA, 28 bp, Artificial Sequence
  Synthetic
ccaagaagaugtgaaagagttugaaagg

SEQ ID NO: 14831 - DNA, 26 bp, Artificial Sequence
  Synthetic
catggacaaugcaaccattttuaggt

SEQ ID NO: 14832 - DNA, 17 bp, Artificial Sequence
  Synthetic
cuagcgtgguggacccg

SEQ ID NO: 14833 - DNA, 20 bp, Artificial Sequence
  Synthetic
ccttcuccagccaggaggua

SEQ ID NO: 14834 - DNA, 18 bp, Artificial Sequence
  Synthetic
ctucacgccacccaucct

SEQ ID NO: 14835 - DNA, 18 bp, Artificial Sequence
  Synthetic
gccccuctaggctcucct

SEQ ID NO: 14836 - DNA, 21 bp, Artificial Sequence
  Synthetic
tgatugaagagcccacaggug

SEQ ID NO: 14837 - DNA, 21 bp, Artificial Sequence
  Synthetic
ctcctcctugctagggttcut

SEQ ID NO: 14838 - DNA, 17 bp, Artificial Sequence
  Synthetic
cctuccggcacaagcug

SEQ ID NO: 14839 - DNA, 17 bp, Artificial Sequence
  Synthetic
cccaccutcccacgugt

SEQ ID NO: 14840 - DNA, 20 bp, Artificial Sequence
  Synthetic
acagctuggagcagacaucc

SEQ ID NO: 14841 - DNA, 19 bp, Artificial Sequence
  Synthetic
cccauccccaccagctuac

SEQ ID NO: 14842 - DNA, 17 bp, Artificial Sequence
  Synthetic
gcucaggaggctgcuct

SEQ ID NO: 14843 - DNA, 17 bp, Artificial Sequence
  Synthetic
tgcaggugctggaugct

SEQ ID NO: 14844 - DNA, 20 bp, Artificial Sequence
  Synthetic
atggcctctucctcccagua

SEQ ID NO: 14845 - DNA, 20 bp, Artificial Sequence
  Synthetic
gatgcaucagagcagagugg

SEQ ID NO: 14846 - DNA, 25 bp, Artificial Sequence
  Synthetic
caaatccauctctctgcugaaaggt

SEQ ID NO: 14847 - DNA, 24 bp, Artificial Sequence
  Synthetic
cgcataacaugtgcatctacauca

SEQ ID NO: 14848 - DNA, 19 bp, Artificial Sequence
  Synthetic
ccagcagcugcccaactua

SEQ ID NO: 14849 - DNA, 25 bp, Artificial Sequence
  Synthetic
cttatctccuctgggtttuccacag

SEQ ID NO: 14850 - DNA, 27 bp, Artificial Sequence
  Synthetic
aaaaggagcauaccgacttaaatucca

SEQ ID NO: 14851 - DNA, 29 bp, Artificial Sequence
  Synthetic
caaaagtgaagacuggctctatttuacag

SEQ ID NO: 14852 - DNA, 28 bp, Artificial Sequence
  Synthetic
gggtaaaaacugaaattgtgttcctuga

SEQ ID NO: 14853 - DNA, 30 bp, Artificial Sequence
  Synthetic
ttgctttgtgtaugcctataattgaaacug

SEQ ID NO: 14854 - DNA, 23 bp, Artificial Sequence
  Synthetic
agacaaatggugagtacgugcat

SEQ ID NO: 14855 - DNA, 32 bp, Artificial Sequence
  Synthetic
ctcagataatgaguacttctacgttgattuca

SEQ ID NO: 14856 - DNA, 27 bp, Artificial Sequence
  Synthetic
ggaattcctgauggtggaataucacaa

SEQ ID NO: 14857 - DNA, 23 bp, Artificial Sequence
  Synthetic
tgggtgucgagcagtactcuaaa

SEQ ID NO: 14858 - DNA, 30 bp, Artificial Sequence
  Synthetic
aatcaaattcucggcaatttaacttactuc

SEQ ID NO: 14859 - DNA, 28 bp, Artificial Sequence
  Synthetic
gcatatccaagutttgcaatcauaagca

SEQ ID NO: 14860 - DNA, 26 bp, Artificial Sequence
  Synthetic
ccacacuacagcgactaaaaauagga

SEQ ID NO: 14861 - DNA, 29 bp, Artificial Sequence
  Synthetic
actatgatacggautctgtttgctttugt

SEQ ID NO: 14862 - DNA, 24 bp, Artificial Sequence
  Synthetic
ctgatagttgcuaagaaccgguca

SEQ ID NO: 14863 - DNA, 27 bp, Artificial Sequence
  Synthetic
ccagcugttgtuaaaaaggaggaaaaa

SEQ ID NO: 14864 - DNA, 28 bp, Artificial Sequence
  Synthetic
cctttgaaauattgtggtatuccaggct

SEQ ID NO: 14865 - DNA, 24 bp, Artificial Sequence
  Synthetic
acccaagcuggagaatacctacut

SEQ ID NO: 14866 - DNA, 23 bp, Artificial Sequence
  Synthetic
gagaagcccauttagccatggua

SEQ ID NO: 14867 - DNA, 28 bp, Artificial Sequence
  Synthetic
gcctgtgaucaagtgtgttttaaucaat

SEQ ID NO: 14868 - DNA, 21 bp, Artificial Sequence
  Synthetic
aggaccaccgagutgtaguct

SEQ ID NO: 14869 - DNA, 19 bp, Artificial Sequence
  Synthetic
gggctguctgatgucagca

SEQ ID NO: 14870 - DNA, 31 bp, Artificial Sequence
  Synthetic
aagtttgagaaagaaaucttacctgacauca

SEQ ID NO: 14871 - DNA, 26 bp, Artificial Sequence
  Synthetic
ccaatcaaugccatacugacaggaaa

SEQ ID NO: 14872 - DNA, 22 bp, Artificial Sequence
  Synthetic
ggugaaaagcgagctgucagat

SEQ ID NO: 14873 - DNA, 20 bp, Artificial Sequence
  Synthetic
tttccacautgtcucccgca

SEQ ID NO: 14874 - DNA, 26 bp, Artificial Sequence
  Synthetic
cccugguagagaagaaaaacaguaaa

SEQ ID NO: 14875 - DNA, 26 bp, Artificial Sequence
  Synthetic
acagttacggutctaatgcttuccag

SEQ ID NO: 14876 - DNA, 20 bp, Artificial Sequence
  Synthetic
ggcccuccccttctccatua

SEQ ID NO: 14877 - DNA, 23 bp, Artificial Sequence
  Synthetic
actcttccutgcttcucacacag

SEQ ID NO: 14878 - DNA, 23 bp, Artificial Sequence
  Synthetic
agggtccaacauttgtttgccua

SEQ ID NO: 14879 - DNA, 23 bp, Artificial Sequence
  Synthetic
tcactctaacaugcacctgtgug

SEQ ID NO: 14880 - DNA, 32 bp, Artificial Sequence
  Synthetic
gctgatgaaagaugagaaataataaauggaag

SEQ ID NO: 14881 - DNA, 23 bp, Artificial Sequence
  Synthetic
ccatcagcagutccaccacttua

SEQ ID NO: 14882 - DNA, 22 bp, Artificial Sequence
  Synthetic
ctttttgtugcagtgcucacct

SEQ ID NO: 14883 - DNA, 25 bp, Artificial Sequence
  Synthetic
aggagcacuccatcactcttaauct

SEQ ID NO: 14884 - DNA, 30 bp, Artificial Sequence
  Synthetic
aaattctgaatagccauttccttgtaatug

SEQ ID NO: 14885 - DNA, 25 bp, Artificial Sequence
  Synthetic
cgtatttgacgauctctcctgtcut

SEQ ID NO: 14886 - DNA, 21 bp, Artificial Sequence
  Synthetic
ggtgccagaaccacutgatug

SEQ ID NO: 14887 - DNA, 23 bp, Artificial Sequence
  Synthetic
ctcttgacttcugtcccgttcut

SEQ ID NO: 14888 - DNA, 26 bp, Artificial Sequence
  Synthetic
cttcactttcauagagagccgguaag

SEQ ID NO: 14889 - DNA, 20 bp, Artificial Sequence
  Synthetic
cctccctgaaugaggcccua

SEQ ID NO: 14890 - DNA, 25 bp, Artificial Sequence
  Synthetic
gguagcagtacaatugaggacaaga

SEQ ID NO: 14891 - DNA, 23 bp, Artificial Sequence
  Synthetic
tgaacauaagccgaagtgctcug

SEQ ID NO: 14892 - DNA, 26 bp, Artificial Sequence
  Synthetic
gctcccttccutcagtcatgtgtaua

SEQ ID NO: 14893 - DNA, 22 bp, Artificial Sequence
  Synthetic
actgtggcaaugcctaccauac

SEQ ID NO: 14894 - DNA, 23 bp, Artificial Sequence
  Synthetic
gccttaggcauggcaactagaut

SEQ ID NO: 14895 - DNA, 32 bp, Artificial Sequence
  Synthetic
caggatctagtucaggttcaaaatuaaaagat

SEQ ID NO: 14896 - DNA, 26 bp, Artificial Sequence
  Synthetic
tctttttcuaaaaggagtgccaucca

SEQ ID NO: 14897 - DNA, 27 bp, Artificial Sequence
  Synthetic
ggtaaagcccucttgtcttatctctut

SEQ ID NO: 14898 - DNA, 21 bp, Artificial Sequence
  Synthetic
gtgauccccagagccaguaag

SEQ ID NO: 14899 - DNA, 24 bp, Artificial Sequence
  Synthetic
cctcatugccctatctggugaaag

SEQ ID NO: 14900 - DNA, 25 bp, Artificial Sequence
  Synthetic
tcattccgaaugatggattccaugt

SEQ ID NO: 14901 - DNA, 20 bp, Artificial Sequence
  Synthetic
ccaccccaugcagatgagug

SEQ ID NO: 14902 - DNA, 24 bp, Artificial Sequence
  Synthetic
cagaagucagcaactcctucaaga

SEQ ID NO: 14903 - DNA, 23 bp, Artificial Sequence
  Synthetic
ttgaatucacccagcccaaacua

SEQ ID NO: 14904 - DNA, 23 bp, Artificial Sequence
  Synthetic
catcctgtucggtcataaugggt

SEQ ID NO: 14905 - DNA, 22 bp, Artificial Sequence
  Synthetic
agttttccaaauggccugcaag

SEQ ID NO: 14906 - DNA, 18 bp, Artificial Sequence
  Synthetic
cctgcuccgcacctucag

SEQ ID NO: 14907 - DNA, 21 bp, Artificial Sequence
  Synthetic
caagagcgugccctactucaa

SEQ ID NO: 14908 - DNA, 17 bp, Artificial Sequence
  Synthetic
ctggagguggccgagut

SEQ ID NO: 14909 - DNA, 18 bp, Artificial Sequence
  Synthetic
cccctctuggctctccug

SEQ ID NO: 14910 - DNA, 24 bp, Artificial Sequence
  Synthetic
cctcttcatucctttccccaugag

SEQ ID NO: 14911 - DNA, 27 bp, Artificial Sequence
  Synthetic
ctcaggctcuccttatttttcctctut

SEQ ID NO: 14912 - DNA, 30 bp, Artificial Sequence
  Synthetic
accttgaaactagagauggatgaactttuc

SEQ ID NO: 14913 - DNA, 23 bp, Artificial Sequence
  Synthetic
agcaacugttcuccagaaagcat

SEQ ID NO: 14914 - DNA, 24 bp, Artificial Sequence
  Synthetic
gcggtttguttactctgtuccagt

SEQ ID NO: 14915 - DNA, 23 bp, Artificial Sequence
  Synthetic
atgtaagaaagugtcuggcccat

SEQ ID NO: 14916 - DNA, 22 bp, Artificial Sequence
  Synthetic
ccagtcauggaactccagaauc

SEQ ID NO: 14917 - DNA, 24 bp, Artificial Sequence
  Synthetic
gcuccaaaaggagaugaagaaggt

SEQ ID NO: 14918 - DNA, 28 bp, Artificial Sequence
  Synthetic
tgagaatttcugacatcttcctccuaca

SEQ ID NO: 14919 - DNA, 23 bp, Artificial Sequence
  Synthetic
ccttatctggucctgggactuct

SEQ ID NO: 14920 - DNA, 22 bp, Artificial Sequence
  Synthetic
acatgccgacaaucaggaucat

SEQ ID NO: 14921 - DNA, 27 bp, Artificial Sequence
  Synthetic
ctctctgcugggaatgagaattuaaga

SEQ ID NO: 14922 - DNA, 28 bp, Artificial Sequence
  Synthetic
gccatcaggtttuctgtaatttctcgua

SEQ ID NO: 14923 - DNA, 24 bp, Artificial Sequence
  Synthetic
ctctaaaagcugttgcctgaaucg

SEQ ID NO: 14924 - DNA, 30 bp, Artificial Sequence
  Synthetic
agtaattttcctcutcttctggctttucat

SEQ ID NO: 14925 - DNA, 28 bp, Artificial Sequence
  Synthetic
ggaggtttccatuctggatttctttcut

SEQ ID NO: 14926 - DNA, 27 bp, Artificial Sequence
  Synthetic
gtagaacctgucccagttacuaaacag

SEQ ID NO: 14927 - DNA, 28 bp, Artificial Sequence
  Synthetic
acagaatatcucaattccaagcuccaaa

SEQ ID NO: 14928 - DNA, 27 bp, Artificial Sequence
  Synthetic
gatgaaccccutattcatgcaacuact

SEQ ID NO: 14929 - DNA, 25 bp, Artificial Sequence
  Synthetic
ctttgtcagttucggtcttcagtut

SEQ ID NO: 14930 - DNA, 26 bp, Artificial Sequence
  Synthetic
ccatggtgtauatgtgccacattuca

SEQ ID NO: 14931 - DNA, 25 bp, Artificial Sequence
  Synthetic
gcagcgaguaacttgtccttttcut

SEQ ID NO: 14932 - DNA, 21 bp, Artificial Sequence
  Synthetic
cagcaagtucgtgagcagaug

SEQ ID NO: 14933 - DNA, 30 bp, Artificial Sequence
  Synthetic
gatgattcaagaaaauactctgccatucaa

SEQ ID NO: 14934 - DNA, 22 bp, Artificial Sequence
  Synthetic
cugagagaaggugggaagaagt

SEQ ID NO: 14935 - DNA, 31 bp, Artificial Sequence
  Synthetic
ccaaaatgccaaautatactttctucacaga

SEQ ID NO: 14936 - DNA, 33 bp, Artificial Sequence
  Synthetic
aagctttctctuaaatacttttatgtugacact

SEQ ID NO: 14937 - DNA, 28 bp, Artificial Sequence
  Synthetic
acaagtatcagutagtggtgacuacaca

SEQ ID NO: 14938 - DNA, 33 bp, Artificial Sequence
  Synthetic
taaatgctatttttccutgttctaggatauaca

SEQ ID NO: 14939 - DNA, 28 bp, Artificial Sequence
  Synthetic
gaaattcugagatcaatgcucaaaagca

SEQ ID NO: 14940 - DNA, 28 bp, Artificial Sequence
  Synthetic
tgttcaaaaacccautcaaatgatugct

SEQ ID NO: 14941 - DNA, 29 bp, Artificial Sequence
  Synthetic
gagtctgtagctuctgaacttctgattut

SEQ ID NO: 14942 - DNA, 26 bp, Artificial Sequence
  Synthetic
ttcctattuccaggtttctttugcct

SEQ ID NO: 14943 - DNA, 29 bp, Artificial Sequence
  Synthetic
tcccaactgcacaauaaaactagattuct

SEQ ID NO: 14944 - DNA, 30 bp, Artificial Sequence
  Synthetic
ggaagtggtuacaggtgagaaatuaaaaac

SEQ ID NO: 14945 - DNA, 23 bp, Artificial Sequence
  Synthetic
tgctacttccugaacatgtgcut

SEQ ID NO: 14946 - DNA, 25 bp, Artificial Sequence
  Synthetic
gtttaagtcccaaautgagcagcut

SEQ ID NO: 14947 - DNA, 29 bp, Artificial Sequence
  Synthetic
gcagaaatggcaaaaauactcatatguca

SEQ ID NO: 14948 - DNA, 29 bp, Artificial Sequence
  Synthetic
atttaaatgcagugcaaaatactgaugaa

SEQ ID NO: 14949 - DNA, 22 bp, Artificial Sequence
  Synthetic
tgttcacuttgtccugcagcat

SEQ ID NO: 14950 - DNA, 23 bp, Artificial Sequence
  Synthetic
tcgttcttugcaggttcuagagc

SEQ ID NO: 14951 - DNA, 25 bp, Artificial Sequence
  Synthetic
ggccaugaaggaagaaggtaaugat

SEQ ID NO: 14952 - DNA, 28 bp, Artificial Sequence
  Synthetic
agtgtgttaacttutcctttgttgcaut

SEQ ID NO: 14953 - DNA, 31 bp, Artificial Sequence
  Synthetic
agaagcaagttugaaaagattctgttguaag

SEQ ID NO: 14954 - DNA, 29 bp, Artificial Sequence
  Synthetic
gagaggagcttutatcttctacaaaauga

SEQ ID NO: 14955 - DNA, 28 bp, Artificial Sequence
  Synthetic
tgtctccagcagcutttactattttuga

SEQ ID NO: 14956 - DNA, 26 bp, Artificial Sequence
  Synthetic
gagagcttagguatcctggaaaagut

SEQ ID NO: 14957 - DNA, 31 bp, Artificial Sequence
  Synthetic
gggcttattatauggaaagtcatgtuagaga

SEQ ID NO: 14958 - DNA, 28 bp, Artificial Sequence
  Synthetic
gtcttttggucagcaatagcttaaauga

SEQ ID NO: 14959 - DNA, 29 bp, Artificial Sequence
  Synthetic
gcacaatacucacaaagaaggatcttgua

SEQ ID NO: 14960 - DNA, 28 bp, Artificial Sequence
  Synthetic
cctgatagautggtgtgaugaaaaggaa

SEQ ID NO: 14961 - DNA, 33 bp, Artificial Sequence
  Synthetic
ccatgattagtutaatccttgaataugaaaagg

SEQ ID NO: 14962 - DNA, 26 bp, Artificial Sequence
  Synthetic
augcaaatccaaaaucacgaaacagt

SEQ ID NO: 14963 - DNA, 23 bp, Artificial Sequence
  Synthetic
ggcatcacguaaaaggtcaaugg

SEQ ID NO: 14964 - DNA, 26 bp, Artificial Sequence
  Synthetic
ccatccctgguctcatcaattatucc

SEQ ID NO: 14965 - DNA, 27 bp, Artificial Sequence
  Synthetic
tcttccatatgutacagcctatcucca

SEQ ID NO: 14966 - DNA, 26 bp, Artificial Sequence
  Synthetic
gccactttutaatcagtgtuacagca

SEQ ID NO: 14967 - DNA, 22 bp, Artificial Sequence
  Synthetic
ggagtcatcuccaggactguga

SEQ ID NO: 14968 - DNA, 27 bp, Artificial Sequence
  Synthetic
tccaattttaggutcttgttccaugct

SEQ ID NO: 14969 - DNA, 24 bp, Artificial Sequence
  Synthetic
gcctttcaggccuatcaatcucac

SEQ ID NO: 14970 - DNA, 29 bp, Artificial Sequence
  Synthetic
gaaaatgttgttcuctaatcacactgcut

SEQ ID NO: 14971 - DNA, 28 bp, Artificial Sequence
  Synthetic
acttattaactucaacctctgugacacc

SEQ ID NO: 14972 - DNA, 24 bp, Artificial Sequence
  Synthetic
aggcgatguagttttaagtuggca

SEQ ID NO: 14973 - DNA, 21 bp, Artificial Sequence
  Synthetic
catggauacaccccctgaugt

SEQ ID NO: 14974 - DNA, 23 bp, Artificial Sequence
  Synthetic
cttccgucacattctgauaccca

SEQ ID NO: 14975 - DNA, 23 bp, Artificial Sequence
  Synthetic
aacaaagagautgcaggugacca

SEQ ID NO: 14976 - DNA, 22 bp, Artificial Sequence
  Synthetic
gtcuacaagggcccaactguat

SEQ ID NO: 14977 - DNA, 24 bp, Artificial Sequence
  Synthetic
ccacgtacugttctgtcttuggag

SEQ ID NO: 14978 - DNA, 22 bp, Artificial Sequence
  Synthetic
agtcatcccucagccagagaut

SEQ ID NO: 14979 - DNA, 28 bp, Artificial Sequence
  Synthetic
gaaacaggtattgaugaagatgacccua

SEQ ID NO: 14980 - DNA, 25 bp, Artificial Sequence
  Synthetic
gtctcaataauggaatggucagggt

SEQ ID NO: 14981 - DNA, 25 bp, Artificial Sequence
  Synthetic
gacatctccaugctgtattgucaca

SEQ ID NO: 14982 - DNA, 21 bp, Artificial Sequence
  Synthetic
aagtuccaggccttcttuggt

SEQ ID NO: 14983 - DNA, 21 bp, Artificial Sequence
  Synthetic
cagcctttguggaacgtctuc

SEQ ID NO: 14984 - DNA, 25 bp, Artificial Sequence
  Synthetic
gtagutctctttatctuccgccagt

SEQ ID NO: 14985 - DNA, 23 bp, Artificial Sequence
  Synthetic
gactcggaggauctccctcuaaa

SEQ ID NO: 14986 - DNA, 21 bp, Artificial Sequence
  Synthetic
caagctugaagcacccaucag

SEQ ID NO: 14987 - DNA, 28 bp, Artificial Sequence
  Synthetic
cgaucaagaagagcucaacaaaacaaag

SEQ ID NO: 14988 - DNA, 24 bp, Artificial Sequence
  Synthetic
cctccaagtacucagtttggtcut

SEQ ID NO: 14989 - DNA, 24 bp, Artificial Sequence
  Synthetic
aacggcaaaccutgctttauagac

SEQ ID NO: 14990 - DNA, 28 bp, Artificial Sequence
  Synthetic
cagctcttucccagagtctaatttacug

SEQ ID NO: 14991 - DNA, 22 bp, Artificial Sequence
  Synthetic
acccagaaucggattttggtut

SEQ ID NO: 14992 - DNA, 27 bp, Artificial Sequence
  Synthetic
ccagtagccuaagcaatataaauggct

SEQ ID NO: 14993 - DNA, 22 bp, Artificial Sequence
  Synthetic
tctctggcauctgatggtguct

SEQ ID NO: 14994 - DNA, 29 bp, Artificial Sequence
  Synthetic
ctttcataaaaccuctctttctuccacct

SEQ ID NO: 14995 - DNA, 22 bp, Artificial Sequence
  Synthetic
caccauagaagcccacgatgua

SEQ ID NO: 14996 - DNA, 23 bp, Artificial Sequence
  Synthetic
agatcaagcuctgtgacttuggg

SEQ ID NO: 14997 - DNA, 22 bp, Artificial Sequence
  Synthetic
cctctcccugaccguacaagaa

SEQ ID NO: 14998 - DNA, 23 bp, Artificial Sequence
  Synthetic
caaggagccaggcauttttctua

SEQ ID NO: 14999 - DNA, 25 bp, Artificial Sequence
  Synthetic
guatacgctuccagagaacaaggag

SEQ ID NO: 15000 - DNA, 29 bp, Artificial Sequence
  Synthetic
acacatatgctttuaaaaacatctggcut

SEQ ID NO: 15001 - DNA, 17 bp, Artificial Sequence
  Synthetic
cccugggcaggcaguag

SEQ ID NO: 15002 - DNA, 17 bp, Artificial Sequence
  Synthetic
cccaugccctgcacuca

SEQ ID NO: 15003 - DNA, 23 bp, Artificial Sequence
  Synthetic
gcccugagagaaaggctttcuac

SEQ ID NO: 15004 - DNA, 22 bp, Artificial Sequence
  Synthetic
tcatguacagcggccatttcut

SEQ ID NO: 15005 - DNA, 19 bp, Artificial Sequence
  Synthetic
ggguaccgttccuggagag

SEQ ID NO: 15006 - DNA, 24 bp, Artificial Sequence
  Synthetic
cgtgggatguttttgcagatgaug

SEQ ID NO: 15007 - DNA, 21 bp, Artificial Sequence
  Synthetic
gctgcagugggaccactatua

SEQ ID NO: 15008 - DNA, 17 bp, Artificial Sequence
  Synthetic
ggcugctctugcgaggt

SEQ ID NO: 15009 - DNA, 18 bp, Artificial Sequence
  Synthetic
cctgctcgutcgctcucc

SEQ ID NO: 15010 - DNA, 26 bp, Artificial Sequence
  Synthetic
cattggguagaaaagaaauggauact

SEQ ID NO: 15011 - DNA, 27 bp, Artificial Sequence
  Synthetic
gaatatactuaaccgggctccttctug

SEQ ID NO: 15012 - DNA, 20 bp, Artificial Sequence
  Synthetic
ccttgtacugctcggccauc

SEQ ID NO: 15013 - DNA, 22 bp, Artificial Sequence
  Synthetic
cgcugaaaccacctgtttucct

SEQ ID NO: 15014 - DNA, 17 bp, Artificial Sequence
  Synthetic
cuccacccaugccccaa

SEQ ID NO: 15015 - DNA, 18 bp, Artificial Sequence
  Synthetic
cuggcagcugcagcaaag

SEQ ID NO: 15016 - DNA, 24 bp, Artificial Sequence
  Synthetic
ccatttcggcuttgagcatttugt

SEQ ID NO: 15017 - DNA, 24 bp, Artificial Sequence
  Synthetic
agucgaggagaaaaacauctctuc

SEQ ID NO: 15018 - DNA, 23 bp, Artificial Sequence
  Synthetic
ctccttcuggaacctcttctucc

SEQ ID NO: 15019 - DNA, 22 bp, Artificial Sequence
  Synthetic
gtcttcgctuctcagagtcugt

SEQ ID NO: 15020 - DNA, 17 bp, Artificial Sequence
  Synthetic
ctgcgccuccagctuct

SEQ ID NO: 15021 - DNA, 20 bp, Artificial Sequence
  Synthetic
acagccuccctgttauccct

SEQ ID NO: 15022 - DNA, 21 bp, Artificial Sequence
  Synthetic
cgaggtcucgcttctgcttut

SEQ ID NO: 15023 - DNA, 21 bp, Artificial Sequence
  Synthetic
ggttcattcugctgggtcuct

SEQ ID NO: 15024 - DNA, 27 bp, Artificial Sequence
  Synthetic
tggtttacctuccagttctgaaaucat

SEQ ID NO: 15025 - DNA, 23 bp, Artificial Sequence
  Synthetic
ggaacgaaaacucctugaggaga

SEQ ID NO: 15026 - DNA, 21 bp, Artificial Sequence
  Synthetic
cctgugacacctuaccagcat

SEQ ID NO: 15027 - DNA, 21 bp, Artificial Sequence
  Synthetic
tgtaugcagaggcugaggaga

SEQ ID NO: 15028 - DNA, 20 bp, Artificial Sequence
  Synthetic
ccacctccugtcccaaaugt

SEQ ID NO: 15029 - DNA, 20 bp, Artificial Sequence
  Synthetic
ctgaccgccaugaaggugat

SEQ ID NO: 15030 - DNA, 20 bp, Artificial Sequence
  Synthetic
ggaggtctcuggtggactuc

SEQ ID NO: 15031 - DNA, 22 bp, Artificial Sequence
  Synthetic
ggaggaatggaugctggaggua

SEQ ID NO: 15032 - DNA, 22 bp, Artificial Sequence
  Synthetic
gggtgttcaautctccagcuca

SEQ ID NO: 15033 - DNA, 22 bp, Artificial Sequence
  Synthetic
gcctggcugaccaagaataugg

SEQ ID NO: 15034 - DNA, 17 bp, Artificial Sequence
  Synthetic
ctcaccggucgcucgat

SEQ ID NO: 15035 - DNA, 22 bp, Artificial Sequence
  Synthetic
gctgugcatcaacuacaccaac

SEQ ID NO: 15036 - DNA, 27 bp, Artificial Sequence
  Synthetic
tcattacctgttcutttgtctgagcut

SEQ ID NO: 15037 - DNA, 26 bp, Artificial Sequence
  Synthetic
tcacgatgttucttttctccauccag

SEQ ID NO: 15038 - DNA, 21 bp, Artificial Sequence
  Synthetic
ggaaggcucaagccauccaat

SEQ ID NO: 15039 - DNA, 23 bp, Artificial Sequence
  Synthetic
gaatcccuaactcccuccaaacc

SEQ ID NO: 15040 - DNA, 23 bp, Artificial Sequence
  Synthetic
ttggctaaaucatggcctcugat

SEQ ID NO: 15041 - DNA, 24 bp, Artificial Sequence
  Synthetic
agatgatgtucccgtgtcttucag

SEQ ID NO: 15042 - DNA, 17 bp, Artificial Sequence
  Synthetic
tcagcuccgccatgucc

SEQ ID NO: 15043 - DNA, 18 bp, Artificial Sequence
  Synthetic
gguccccucggagaagca

SEQ ID NO: 15044 - DNA, 18 bp, Artificial Sequence
  Synthetic
gcctctcuccccacugac

SEQ ID NO: 15045 - DNA, 19 bp, Artificial Sequence
  Synthetic
gtgaggcccggcuactuac

SEQ ID NO: 15046 - DNA, 23 bp, Artificial Sequence
  Synthetic
cctttcaacgugactgtgaccut

SEQ ID NO: 15047 - DNA, 22 bp, Artificial Sequence
  Synthetic
cactgauccccacattccucac

SEQ ID NO: 15048 - DNA, 23 bp, Artificial Sequence
  Synthetic
gcttctccucctgcttgtcauag

SEQ ID NO: 15049 - DNA, 25 bp, Artificial Sequence
  Synthetic
accatgaugacagtcatgtttucca

SEQ ID NO: 15050 - DNA, 21 bp, Artificial Sequence
  Synthetic
cucacggagcuacaagaacca

SEQ ID NO: 15051 - DNA, 22 bp, Artificial Sequence
  Synthetic
gcatcuagcacagtcactgugt

SEQ ID NO: 15052 - DNA, 17 bp, Artificial Sequence
  Synthetic
ctggccggccuggauat

SEQ ID NO: 15053 - DNA, 20 bp, Artificial Sequence
  Synthetic
ggaggaaugaccacccacug

SEQ ID NO: 15054 - DNA, 26 bp, Artificial Sequence
  Synthetic
tcctttttatucatcagtgctugagt

SEQ ID NO: 15055 - DNA, 23 bp, Artificial Sequence
  Synthetic
actcuggaagcccaaaaauagca

SEQ ID NO: 15056 - DNA, 20 bp, Artificial Sequence
  Synthetic
ccagggatauggctcgacug

SEQ ID NO: 15057 - DNA, 23 bp, Artificial Sequence
  Synthetic
aattcaccccuctttucaagcct

SEQ ID NO: 15058 - DNA, 26 bp, Artificial Sequence
  Synthetic
cttttcucacaggtaactauggccaa

SEQ ID NO: 15059 - DNA, 17 bp, Artificial Sequence
  Synthetic
ccacggucctgctgucc

SEQ ID NO: 15060 - DNA, 23 bp, Artificial Sequence
  Synthetic
aaacaaccttutgtagccgtugg

SEQ ID NO: 15061 - DNA, 27 bp, Artificial Sequence
  Synthetic
tgcaaatgaacaaucagacaaagcaut

SEQ ID NO: 15062 - DNA, 23 bp, Artificial Sequence
  Synthetic
gagaggcaacgguctctttugat

SEQ ID NO: 15063 - DNA, 25 bp, Artificial Sequence
  Synthetic
gttggaagacucaaaagaacccuca

SEQ ID NO: 15064 - DNA, 22 bp, Artificial Sequence
  Synthetic
gctccagacugattgtctucct

SEQ ID NO: 15065 - DNA, 22 bp, Artificial Sequence
  Synthetic
gcaccagguctgcctttctuac

SEQ ID NO: 15066 - DNA, 22 bp, Artificial Sequence
  Synthetic
cutctauaaaaggcgcccgaag

SEQ ID NO: 15067 - DNA, 19 bp, Artificial Sequence
  Synthetic
gttcgguctcggacuccat

SEQ ID NO: 15068 - DNA, 27 bp, Artificial Sequence
  Synthetic
cttctgaatguttttaagcacucacca

SEQ ID NO: 15069 - DNA, 24 bp, Artificial Sequence
  Synthetic
gutaccatcaugaagaggcagaca

SEQ ID NO: 15070 - DNA, 22 bp, Artificial Sequence
  Synthetic
gtcctggtutctccggtuacac

SEQ ID NO: 15071 - DNA, 30 bp, Artificial Sequence
  Synthetic
acaggtaacauggataaaattccctucaat

SEQ ID NO: 15072 - DNA, 30 bp, Artificial Sequence
  Synthetic
cagctacattttcugtttttctcagtaucc

SEQ ID NO: 15073 - DNA, 28 bp, Artificial Sequence
  Synthetic
aaaagagcaaaauctgcttagtgugaac

SEQ ID NO: 15074 - DNA, 18 bp, Artificial Sequence
  Synthetic
cccagccaucgcaaacug

SEQ ID NO: 15075 - DNA, 27 bp, Artificial Sequence
  Synthetic
ttttgcttgcucacaaaagcataucat

SEQ ID NO: 15076 - DNA, 18 bp, Artificial Sequence
  Synthetic
gtggcgagcauggctcua

SEQ ID NO: 15077 - DNA, 17 bp, Artificial Sequence
  Synthetic
tggugagcagcggctuc

SEQ ID NO: 15078 - DNA, 17 bp, Artificial Sequence
  Synthetic
cgcgcguagccaucgaa

SEQ ID NO: 15079 - DNA, 25 bp, Artificial Sequence
  Synthetic
cctggaagacuactactggaugacc

SEQ ID NO: 15080 - DNA, 28 bp, Artificial Sequence
  Synthetic
ggttccttttucacttcaaacttcauca

SEQ ID NO: 15081 - DNA, 17 bp, Artificial Sequence
  Synthetic
ccuctccugcagcccat

SEQ ID NO: 15082 - DNA, 19 bp, Artificial Sequence
  Synthetic
gcgcgcuttgcauaaggaa

SEQ ID NO: 15083 - DNA, 20 bp, Artificial Sequence
  Synthetic
gaggcgagaagcaugaagug

SEQ ID NO: 15084 - DNA, 23 bp, Artificial Sequence
  Synthetic
ccgagcuacagctagaagaugaa

SEQ ID NO: 15085 - DNA, 20 bp, Artificial Sequence
  Synthetic
cccggagugccagtcaatut

SEQ ID NO: 15086 - DNA, 20 bp, Artificial Sequence
  Synthetic
gctgugccggaacattctut

SEQ ID NO: 15087 - DNA, 21 bp, Artificial Sequence
  Synthetic
cttgaagcuggtccagctcut

SEQ ID NO: 15088 - DNA, 21 bp, Artificial Sequence
  Synthetic
agaggacaccutggctgguaa

SEQ ID NO: 15089 - DNA, 29 bp, Artificial Sequence
  Synthetic
gccttatttagaaugacagcacagguaat

SEQ ID NO: 15090 - DNA, 20 bp, Artificial Sequence
  Synthetic
ggagacgugctgcagagaug

SEQ ID NO: 15091 - DNA, 22 bp, Artificial Sequence
  Synthetic
tcgacttcauactggccaagug

SEQ ID NO: 15092 - DNA, 25 bp, Artificial Sequence
  Synthetic
ctaccatcucagagttgaccaagug

SEQ ID NO: 15093 - DNA, 22 bp, Artificial Sequence
  Synthetic
ccaccaauacagccccttctut

SEQ ID NO: 15094 - DNA, 25 bp, Artificial Sequence
  Synthetic
ccctaatacagugtgtgctgcuaac

SEQ ID NO: 15095 - DNA, 22 bp, Artificial Sequence
  Synthetic
tttgctgttcuaggcaggacut

SEQ ID NO: 15096 - DNA, 23 bp, Artificial Sequence
  Synthetic
cctcttucaacacctcucggaag

SEQ ID NO: 15097 - DNA, 27 bp, Artificial Sequence
  Synthetic
cagttcctcaugttcagattgttcuca

SEQ ID NO: 15098 - DNA, 21 bp, Artificial Sequence
  Synthetic
cgactguggaagaagagcuca

SEQ ID NO: 15099 - DNA, 17 bp, Artificial Sequence
  Synthetic
guctgcgcucccagagg

SEQ ID NO: 15100 - DNA, 19 bp, Artificial Sequence
  Synthetic
gaggcagccaucaggtuct

SEQ ID NO: 15101 - DNA, 24 bp, Artificial Sequence
  Synthetic
caaagcagaatugcgatgtctgug

SEQ ID NO: 15102 - DNA, 27 bp, Artificial Sequence
  Synthetic
caaggutaggaaaauggaaaagcacaa

SEQ ID NO: 15103 - DNA, 30 bp, Artificial Sequence
  Synthetic
gctgacttaattguattgttttcctgugat

SEQ ID NO: 15104 - DNA, 27 bp, Artificial Sequence
  Synthetic
tcaactcaagagucaaaagaaacugga

SEQ ID NO: 15105 - DNA, 25 bp, Artificial Sequence
  Synthetic
gttctcattcugtgtcttcccugaa

SEQ ID NO: 15106 - DNA, 19 bp, Artificial Sequence
  Synthetic
ggaacgcagugaccaugct

SEQ ID NO: 15107 - DNA, 26 bp, Artificial Sequence
  Synthetic
gtctccttcuggaatacttgaucacc

SEQ ID NO: 15108 - DNA, 19 bp, Artificial Sequence
  Synthetic
caacugagcagccuccaca

SEQ ID NO: 15109 - DNA, 20 bp, Artificial Sequence
  Synthetic
ctctttcugctgcatuggca

SEQ ID NO: 15110 - DNA, 21 bp, Artificial Sequence
  Synthetic
ggctcctuccgctaaactcut

SEQ ID NO: 15111 - DNA, 29 bp, Artificial Sequence
  Synthetic
agaccatgatguccataaataacttuggt

SEQ ID NO: 15112 - DNA, 21 bp, Artificial Sequence
  Synthetic
caggtacuctgttgccuccat

SEQ ID NO: 15113 - DNA, 30 bp, Artificial Sequence
  Synthetic
ccctgttagagtutgctcagtatttatugg

SEQ ID NO: 15114 - DNA, 28 bp, Artificial Sequence
  Synthetic
tgaactagaatgautagcataggccuca

SEQ ID NO: 15115 - DNA, 22 bp, Artificial Sequence
  Synthetic
cctggccuggagcttgaattut

SEQ ID NO: 15116 - DNA, 20 bp, Artificial Sequence
  Synthetic
tcactugcagcagccactua

SEQ ID NO: 15117 - DNA, 21 bp, Artificial Sequence
  Synthetic
ctgcggcaugaaacagacaug

SEQ ID NO: 15118 - DNA, 21 bp, Artificial Sequence
  Synthetic
cgccttctugatgtcctccuc

SEQ ID NO: 15119 - DNA, 19 bp, Artificial Sequence
  Synthetic
gcuccgagctgtaugagca

SEQ ID NO: 15120 - DNA, 23 bp, Artificial Sequence
  Synthetic
gctgatttcccutcctcagugac

SEQ ID NO: 15121 - DNA, 26 bp, Artificial Sequence
  Synthetic
tgatgtgtgtugggttttctctctut

SEQ ID NO: 15122 - DNA, 18 bp, Artificial Sequence
  Synthetic
ccccucgggagccactua

SEQ ID NO: 15123 - DNA, 20 bp, Artificial Sequence
  Synthetic
cacccucagggaaccugaat

SEQ ID NO: 15124 - DNA, 20 bp, Artificial Sequence
  Synthetic
gactcaccautggtggucgt

SEQ ID NO: 15125 - DNA, 26 bp, Artificial Sequence
  Synthetic
tgtgacctuttctttcttcuccaaca

SEQ ID NO: 15126 - DNA, 17 bp, Artificial Sequence
  Synthetic
accugcagcagcgugat

SEQ ID NO: 15127 - DNA, 17 bp, Artificial Sequence
  Synthetic
caggcugcgctgugaac

SEQ ID NO: 15128 - DNA, 27 bp, Artificial Sequence
  Synthetic
gcactgaagtugaattttgcaaaucca

SEQ ID NO: 15129 - DNA, 27 bp, Artificial Sequence
  Synthetic
tctttgcttgagutgagcctttgatua

SEQ ID NO: 15130 - DNA, 32 bp, Artificial Sequence
  Synthetic
agtggaugaaaaagaauaaaaacaacttctua

SEQ ID NO: 15131 - DNA, 24 bp, Artificial Sequence
  Synthetic
cctgccaucttcatttgucccaat

SEQ ID NO: 15132 - DNA, 29 bp, Artificial Sequence
  Synthetic
gaagccttatguaacttaggaagaagcua

SEQ ID NO: 15133 - DNA, 24 bp, Artificial Sequence
  Synthetic
tgtctuggcaatagaguccacaag

SEQ ID NO: 15134 - DNA, 21 bp, Artificial Sequence
  Synthetic
agatccuccgcagctgaguaa

SEQ ID NO: 15135 - DNA, 22 bp, Artificial Sequence
  Synthetic
gtcccctucctccatguaaagt

SEQ ID NO: 15136 - DNA, 19 bp, Artificial Sequence
  Synthetic
cccagcccugatggttucc

SEQ ID NO: 15137 - DNA, 18 bp, Artificial Sequence
  Synthetic
gccucggagtcucggaac

SEQ ID NO: 15138 - DNA, 21 bp, Artificial Sequence
  Synthetic
cacagacaggutctggtuggt

SEQ ID NO: 15139 - DNA, 24 bp, Artificial Sequence
  Synthetic
gcagagtgucctttttgugagaag

SEQ ID NO: 15140 - DNA, 20 bp, Artificial Sequence
  Synthetic
cccaggaagutgcaccgaua

SEQ ID NO: 15141 - DNA, 22 bp, Artificial Sequence
  Synthetic
gggtttggguagtagagcaugg

SEQ ID NO: 15142 - DNA, 22 bp, Artificial Sequence
  Synthetic
gcuatcacaaaaucgggacgag

SEQ ID NO: 15143 - DNA, 18 bp, Artificial Sequence
  Synthetic
accctccgauctcggugt

SEQ ID NO: 15144 - DNA, 22 bp, Artificial Sequence
  Synthetic
ccgttcctcuggtgtaggaaug

SEQ ID NO: 15145 - DNA, 22 bp, Artificial Sequence
  Synthetic
ctggcagcuttggctuaaagag

SEQ ID NO: 15146 - DNA, 19 bp, Artificial Sequence
  Synthetic
caugtgggcucccacagag

SEQ ID NO: 15147 - DNA, 22 bp, Artificial Sequence
  Synthetic
acccgggauatatcagccauga

SEQ ID NO: 15148 - DNA, 20 bp, Artificial Sequence
  Synthetic
cctccgugcagaagagagug

SEQ ID NO: 15149 - DNA, 25 bp, Artificial Sequence
  Synthetic
aggtttcatggagucaataggcaut

SEQ ID NO: 15150 - DNA, 21 bp, Artificial Sequence
  Synthetic
agcttgctauggcatcgtuca

SEQ ID NO: 15151 - DNA, 21 bp, Artificial Sequence
  Synthetic
ctcagagucccctagcucaac

SEQ ID NO: 15152 - DNA, 23 bp, Artificial Sequence
  Synthetic
tggccuaaggaccatcaguagaa

SEQ ID NO: 15153 - DNA, 21 bp, Artificial Sequence
  Synthetic
aggtgacguggaaagcttguc

SEQ ID NO: 15154 - DNA, 23 bp, Artificial Sequence
  Synthetic
tgguttcatctcugggaggagaa

SEQ ID NO: 15155 - DNA, 23 bp, Artificial Sequence
  Synthetic
ggcttttugagccatgtttguga

SEQ ID NO: 15156 - DNA, 18 bp, Artificial Sequence
  Synthetic
caguacacgcgggagugg

SEQ ID NO: 15157 - DNA, 21 bp, Artificial Sequence
  Synthetic
ctgtgggcutggagtactugt

SEQ ID NO: 15158 - DNA, 20 bp, Artificial Sequence
  Synthetic
ccugagacaggccugaagga

SEQ ID NO: 15159 - DNA, 18 bp, Artificial Sequence
  Synthetic
cagcaguggcgguaaagc

SEQ ID NO: 15160 - DNA, 19 bp, Artificial Sequence
  Synthetic
ctctctccuccagccucct

SEQ ID NO: 15161 - DNA, 20 bp, Artificial Sequence
  Synthetic
tgucagtctguccccaacct

SEQ ID NO: 15162 - DNA, 18 bp, Artificial Sequence
  Synthetic
agtggucgggtcgacuga

SEQ ID NO: 15163 - DNA, 17 bp, Artificial Sequence
  Synthetic
cgtcgcccugcttcucc

SEQ ID NO: 15164 - DNA, 20 bp, Artificial Sequence
  Synthetic
ctgacugcagcctgugacat

SEQ ID NO: 15165 - DNA, 21 bp, Artificial Sequence
  Synthetic
ccttgagtcuccccctcctuc

SEQ ID NO: 15166 - DNA, 22 bp, Artificial Sequence
  Synthetic
cttgggatuaggagcaggagug

SEQ ID NO: 15167 - DNA, 18 bp, Artificial Sequence
  Synthetic
ctggagcugctgctctug

SEQ ID NO: 15168 - DNA, 17 bp, Artificial Sequence
  Synthetic
gctgctguctgcgggua

SEQ ID NO: 15169 - DNA, 19 bp, Artificial Sequence
  Synthetic
gcagtgaggacuggagguc

SEQ ID NO: 15170 - DNA, 20 bp, Artificial Sequence
  Synthetic
cgcugacaaaggagccucag

SEQ ID NO: 15171 - DNA, 19 bp, Artificial Sequence
  Synthetic
tctgggucaaggctcucca

SEQ ID NO: 15172 - DNA, 23 bp, Artificial Sequence
  Synthetic
gagaccugcaagatgacacugaa

SEQ ID NO: 15173 - DNA, 21 bp, Artificial Sequence
  Synthetic
gccaatgucaccttgcggtua

SEQ ID NO: 15174 - DNA, 24 bp, Artificial Sequence
  Synthetic
cgagcuccagagaaucaagaagac

SEQ ID NO: 15175 - DNA, 21 bp, Artificial Sequence
  Synthetic
tcattcacatcugccaggcut

SEQ ID NO: 15176 - DNA, 23 bp, Artificial Sequence
  Synthetic
cagggtcguggagagtuagaaaa

SEQ ID NO: 15177 - DNA, 19 bp, Artificial Sequence
  Synthetic
gcacgtugacgatggtguc

SEQ ID NO: 15178 - DNA, 25 bp, Artificial Sequence
  Synthetic
ggaaaagcucagcaacatttuaggg

SEQ ID NO: 15179 - DNA, 18 bp, Artificial Sequence
  Synthetic
ccguagggaggcgggaua

SEQ ID NO: 15180 - DNA, 22 bp, Artificial Sequence
  Synthetic
aacccutccctaugacggagat

SEQ ID NO: 15181 - DNA, 19 bp, Artificial Sequence
  Synthetic
ggctgcugaggtccaugac

SEQ ID NO: 15182 - DNA, 21 bp, Artificial Sequence
  Synthetic
aggaaatguttgacccucgca

SEQ ID NO: 15183 - DNA, 22 bp, Artificial Sequence
  Synthetic
atctgtctguggatcccacuct

SEQ ID NO: 15184 - DNA, 25 bp, Artificial Sequence
  Synthetic
gcaaaugcaagaacatactugccaa

SEQ ID NO: 15185 - DNA, 22 bp, Artificial Sequence
  Synthetic
tgcctctgguaaagtgctgaug

SEQ ID NO: 15186 - DNA, 26 bp, Artificial Sequence
  Synthetic
ccccatctctcuctttctctctcuac

SEQ ID NO: 15187 - DNA, 27 bp, Artificial Sequence
  Synthetic
gacaaaauccagaagggaatggttuac

SEQ ID NO: 15188 - DNA, 25 bp, Artificial Sequence
  Synthetic
cccatgcctutctcttgtcattuct

SEQ ID NO: 15189 - DNA, 22 bp, Artificial Sequence
  Synthetic
atgaggctacutctggcatgug

SEQ ID NO: 15190 - DNA, 21 bp, Artificial Sequence
  Synthetic
ctgaggcggcugtacuaacag

SEQ ID NO: 15191 - DNA, 21 bp, Artificial Sequence
  Synthetic
ccaccucttgtgctuccaaag

SEQ ID NO: 15192 - DNA, 23 bp, Artificial Sequence
  Synthetic
cagtcctgaauagctacagugct

SEQ ID NO: 15193 - DNA, 24 bp, Artificial Sequence
  Synthetic
cgcacttatguaattccccacucc

SEQ ID NO: 15194 - DNA, 17 bp, Artificial Sequence
  Synthetic
gagggccaugtcgcugt

SEQ ID NO: 15195 - DNA, 19 bp, Artificial Sequence
  Synthetic
tgatccaggagcucgcuga

SEQ ID NO: 15196 - DNA, 20 bp, Artificial Sequence
  Synthetic
cccagagucaaaggcaguct

SEQ ID NO: 15197 - DNA, 30 bp, Artificial Sequence
  Synthetic
attctctatcautctctctcctuggaagaa

SEQ ID NO: 15198 - DNA, 24 bp, Artificial Sequence
  Synthetic
cgtctcugaatccaagtugcaaat

SEQ ID NO: 15199 - DNA, 29 bp, Artificial Sequence
  Synthetic
gtaattcattttugaaccactggtaguga

SEQ ID NO: 15200 - DNA, 20 bp, Artificial Sequence
  Synthetic
cttgacggcugcccttctua

SEQ ID NO: 15201 - DNA, 23 bp, Artificial Sequence
  Synthetic
gcatgcaggagauttggttucaa

SEQ ID NO: 15202 - DNA, 26 bp, Artificial Sequence
  Synthetic
tttggtggatgugtacgaattgacua

SEQ ID NO: 15203 - DNA, 29 bp, Artificial Sequence
  Synthetic
ctcccttgtcuaaaaggagtaaaaacuca

SEQ ID NO: 15204 - DNA, 23 bp, Artificial Sequence
  Synthetic
tgucaaggaguagaagctttuga

SEQ ID NO: 15205 - DNA, 28 bp, Artificial Sequence
  Synthetic
ttttaccttcugcaacttcatccaguaa

SEQ ID NO: 15206 - DNA, 29 bp, Artificial Sequence
  Synthetic
cctcttatcaucagaaaaccuaccaaagt

SEQ ID NO: 15207 - DNA, 28 bp, Artificial Sequence
  Synthetic
ctccggtggttugtaaactatacttgua

SEQ ID NO: 15208 - DNA, 28 bp, Artificial Sequence
  Synthetic
gggtgtgtaugtgtgaatatttucagat

SEQ ID NO: 15209 - DNA, 22 bp, Artificial Sequence
  Synthetic
cccaacatucacttcctgctug

SEQ ID NO: 15210 - DNA, 20 bp, Artificial Sequence
  Synthetic
cgctcaccaugcttcatguc

SEQ ID NO: 15211 - DNA, 28 bp, Artificial Sequence
  Synthetic
tgcagtactattucacaggcatcuaaaa

SEQ ID NO: 15212 - DNA, 25 bp, Artificial Sequence
  Synthetic
acgaactatgcugtcaaaactucca

SEQ ID NO: 15213 - DNA, 27 bp, Artificial Sequence
  Synthetic
actgtttgtuagagacctaggtaccut

SEQ ID NO: 15214 - DNA, 30 bp, Artificial Sequence
  Synthetic
atcagaaaagcaguaaacattagaggtuca

SEQ ID NO: 15215 - DNA, 27 bp, Artificial Sequence
  Synthetic
ctgaagguacacgtgttgtttugaaat

SEQ ID NO: 15216 - DNA, 18 bp, Artificial Sequence
  Synthetic
gtgucctctguccgcaga

SEQ ID NO: 15217 - DNA, 17 bp, Artificial Sequence
  Synthetic
actcgucgcggtaggug

SEQ ID NO: 15218 - DNA, 20 bp, Artificial Sequence
  Synthetic
acctacauctcctcgugcca

SEQ ID NO: 15219 - DNA, 23 bp, Artificial Sequence
  Synthetic
aagggtcgauaagagcatugagg

SEQ ID NO: 15220 - DNA, 17 bp, Artificial Sequence
  Synthetic
ggcccagggucatgugg

SEQ ID NO: 15221 - DNA, 19 bp, Artificial Sequence
  Synthetic
caccugccaccacctuaca

SEQ ID NO: 15222 - DNA, 17 bp, Artificial Sequence
  Synthetic
cccaggcucacctugct

SEQ ID NO: 15223 - DNA, 17 bp, Artificial Sequence
  Synthetic
cccccgugtgtcggtuc

SEQ ID NO: 15224 - DNA, 17 bp, Artificial Sequence
  Synthetic
cgggucccaccacacug

SEQ ID NO: 15225 - DNA, 19 bp, Artificial Sequence
  Synthetic
aggugaaggccgagaguga

SEQ ID NO: 15226 - DNA, 19 bp, Artificial Sequence
  Synthetic
acgtgctutccagctuggt

SEQ ID NO: 15227 - DNA, 18 bp, Artificial Sequence
  Synthetic
caaggagcuggagcguga

SEQ ID NO: 15228 - DNA, 19 bp, Artificial Sequence
  Synthetic
gcaaaguagcctcggugga

SEQ ID NO: 15229 - DNA, 20 bp, Artificial Sequence
  Synthetic
tccugaaccuggaaggcaac

SEQ ID NO: 15230 - DNA, 22 bp, Artificial Sequence
  Synthetic
gaagtgcuggatgtcacatugc

SEQ ID NO: 15231 - DNA, 22 bp, Artificial Sequence
  Synthetic
gacttcatcuccccacctcuct

SEQ ID NO: 15232 - DNA, 21 bp, Artificial Sequence
  Synthetic
acctcgttcutgctcagctuc

SEQ ID NO: 15233 - DNA, 17 bp, Artificial Sequence
  Synthetic
ggcccuccttguccaca

SEQ ID NO: 15234 - DNA, 18 bp, Artificial Sequence
  Synthetic
ctgguacaccagguggca

SEQ ID NO: 15235 - DNA, 22 bp, Artificial Sequence
  Synthetic
tgacugagaaggcagagauggt

SEQ ID NO: 15236 - DNA, 22 bp, Artificial Sequence
  Synthetic
agtgaaggcaugagtcucacac

SEQ ID NO: 15237 - DNA, 20 bp, Artificial Sequence
  Synthetic
cucaggcacgaucccatuat

SEQ ID NO: 15238 - DNA, 21 bp, Artificial Sequence
  Synthetic
agtcagcgaucttgacgtgug

SEQ ID NO: 15239 - DNA, 21 bp, Artificial Sequence
  Synthetic
gggtaccugccggattaucct

SEQ ID NO: 15240 - DNA, 21 bp, Artificial Sequence
  Synthetic
tgaatcucccgctgaaagucc

SEQ ID NO: 15241 - DNA, 20 bp, Artificial Sequence
  Synthetic
ctggacaucagtcccgcuat

SEQ ID NO: 15242 - DNA, 19 bp, Artificial Sequence
  Synthetic
gcctcuggaccggctcaua

SEQ ID NO: 15243 - DNA, 19 bp, Artificial Sequence
  Synthetic
gggatuaccgactgcucct

SEQ ID NO: 15244 - DNA, 20 bp, Artificial Sequence
  Synthetic
ccagggucactcagctugat

SEQ ID NO: 15245 - DNA, 25 bp, Artificial Sequence
  Synthetic
gtttgccaaacagacucttcatuca

SEQ ID NO: 15246 - DNA, 22 bp, Artificial Sequence
  Synthetic
gactccaaaaguctgguccaca

SEQ ID NO: 15247 - DNA, 24 bp, Artificial Sequence
  Synthetic
atgggtcctucaccaagattuacc

SEQ ID NO: 15248 - DNA, 21 bp, Artificial Sequence
  Synthetic
ccagaucagccactcatucca

SEQ ID NO: 15249 - DNA, 20 bp, Artificial Sequence
  Synthetic
cttccttcuggttggccuca

SEQ ID NO: 15250 - DNA, 19 bp, Artificial Sequence
  Synthetic
gtgccaccucctugcagaa

SEQ ID NO: 15251 - DNA, 18 bp, Artificial Sequence
  Synthetic
ggcacccucgggttucac

SEQ ID NO: 15252 - DNA, 18 bp, Artificial Sequence
  Synthetic
gcccacguggaaggtcuc

SEQ ID NO: 15253 - DNA, 18 bp, Artificial Sequence
  Synthetic
tgauccagggccugagct

SEQ ID NO: 15254 - DNA, 20 bp, Artificial Sequence
  Synthetic
ttgcatgccagucctcaugt

SEQ ID NO: 15255 - DNA, 22 bp, Artificial Sequence
  Synthetic
caattgguttgggcuggagaag

SEQ ID NO: 15256 - DNA, 21 bp, Artificial Sequence
  Synthetic
gatccacuagggatgcacuca

SEQ ID NO: 15257 - DNA, 20 bp, Artificial Sequence
  Synthetic
tcatgcagccucttguccac

SEQ ID NO: 15258 - DNA, 20 bp, Artificial Sequence
  Synthetic
ggacaccugtgtcagcaugt

SEQ ID NO: 15259 - DNA, 20 bp, Artificial Sequence
  Synthetic
ggugggaggaaaagggctuc

SEQ ID NO: 15260 - DNA, 21 bp, Artificial Sequence
  Synthetic
cccacacccgcuctacaauat

SEQ ID NO: 15261 - DNA, 22 bp, Artificial Sequence
  Synthetic
cccaggaccutcacaacatcug

SEQ ID NO: 15262 - DNA, 25 bp, Artificial Sequence
  Synthetic
gccaatctttcucactgtgtctcuc

SEQ ID NO: 15263 - DNA, 20 bp, Artificial Sequence
  Synthetic
cutccggtaaugcaccacct

SEQ ID NO: 15264 - DNA, 22 bp, Artificial Sequence
  Synthetic
cttgaccttguaggcgtctcuc

SEQ ID NO: 15265 - DNA, 22 bp, Artificial Sequence
  Synthetic
gcccagtcutgcaggtauaaac

SEQ ID NO: 15266 - DNA, 19 bp, Artificial Sequence
  Synthetic
ggcgacgcutggtgaugat

SEQ ID NO: 15267 - DNA, 18 bp, Artificial Sequence
  Synthetic
ccgcugcaaagctucgac

SEQ ID NO: 15268 - DNA, 17 bp, Artificial Sequence
  Synthetic
ctcuggccccatgcuca

SEQ ID NO: 15269 - DNA, 17 bp, Artificial Sequence
  Synthetic
cgccuccccagctctuc

SEQ ID NO: 15270 - DNA, 18 bp, Artificial Sequence
  Synthetic
tgagucccccgaaucgga

SEQ ID NO: 15271 - DNA, 19 bp, Artificial Sequence
  Synthetic
tctcaggcucggtcucgaa

SEQ ID NO: 15272 - DNA, 17 bp, Artificial Sequence
  Synthetic
tccccggagucccctuc

SEQ ID NO: 15273 - DNA, 22 bp, Artificial Sequence
  Synthetic
ccttcucacctccttuccacct

SEQ ID NO: 15274 - DNA, 20 bp, Artificial Sequence
  Synthetic
cuagcccagucgaagagaug

SEQ ID NO: 15275 - DNA, 19 bp, Artificial Sequence
  Synthetic
ctgaaugccgggtugagga

SEQ ID NO: 15276 - DNA, 24 bp, Artificial Sequence
  Synthetic
ctgcagucaacttctctuacaggt

SEQ ID NO: 15277 - DNA, 24 bp, Artificial Sequence
  Synthetic
gctcaaatggcauagtctccucag

SEQ ID NO: 15278 - DNA, 20 bp, Artificial Sequence
  Synthetic
cactcccgucaacauggaca

SEQ ID NO: 15279 - DNA, 22 bp, Artificial Sequence
  Synthetic
ggagaggguacttttccuccct

SEQ ID NO: 15280 - DNA, 21 bp, Artificial Sequence
  Synthetic
cgcgtguactacgaugaaggg

SEQ ID NO: 15281 - DNA, 23 bp, Artificial Sequence
  Synthetic
acgagaaagtugcggagtaagut

SEQ ID NO: 15282 - DNA, 23 bp, Artificial Sequence
  Synthetic
gcaguaagctcaucgacaaacaa

SEQ ID NO: 15283 - DNA, 17 bp, Artificial Sequence
  Synthetic
cacugcggagccccuag

SEQ ID NO: 15284 - DNA, 21 bp, Artificial Sequence
  Synthetic
tcgtcaguacgagctgctcua

SEQ ID NO: 15285 - DNA, 22 bp, Artificial Sequence
  Synthetic
ggaagggaaaggutgctttgut

SEQ ID NO: 15286 - DNA, 18 bp, Artificial Sequence
  Synthetic
gtcacccacgucgtcugt

SEQ ID NO: 15287 - DNA, 19 bp, Artificial Sequence
  Synthetic
gccacttuggcccccatua

SEQ ID NO: 15288 - DNA, 20 bp, Artificial Sequence
  Synthetic
gctgaactgcugcctctgua

SEQ ID NO: 15289 - DNA, 19 bp, Artificial Sequence
  Synthetic
cctcgaccccugacagcua

SEQ ID NO: 15290 - DNA, 17 bp, Artificial Sequence
  Synthetic
gctcgugctcaccucgt

SEQ ID NO: 15291 - DNA, 18 bp, Artificial Sequence
  Synthetic
cgaaaaggcgcucacguc

SEQ ID NO: 15292 - DNA, 21 bp, Artificial Sequence
  Synthetic
ccactguccctttttcugcga

SEQ ID NO: 15293 - DNA, 19 bp, Artificial Sequence
  Synthetic
aguagcagcggcuccaaag

SEQ ID NO: 15294 - DNA, 20 bp, Artificial Sequence
  Synthetic
gagcugggcttgtugaagga

SEQ ID NO: 15295 - DNA, 17 bp, Artificial Sequence
  Synthetic
cgguccaggcgugaact

SEQ ID NO: 15296 - DNA, 17 bp, Artificial Sequence
  Synthetic
gccugctgcucgaaggt

SEQ ID NO: 15297 - DNA, 18 bp, Artificial Sequence
  Synthetic
cccaaccuggctcagcua

SEQ ID NO: 15298 - DNA, 21 bp, Artificial Sequence
  Synthetic
cctctuggccacgttcatgua

SEQ ID NO: 15299 - DNA, 20 bp, Artificial Sequence
  Synthetic
cacgcgcaautcgagtaucc

SEQ ID NO: 15300 - DNA, 18 bp, Artificial Sequence
  Synthetic
cccacugagggcuccaga

SEQ ID NO: 15301 - DNA, 17 bp, Artificial Sequence
  Synthetic
gggcauggtgggctugt

SEQ ID NO: 15302 - DNA, 18 bp, Artificial Sequence
  Synthetic
ctcggtuagggctcuggt

SEQ ID NO: 15303 - DNA, 17 bp, Artificial Sequence
  Synthetic
cctucgccgagggcuat

SEQ ID NO: 15304 - DNA, 21 bp, Artificial Sequence
  Synthetic
cgctcauagcaggauccacag

SEQ ID NO: 15305 - DNA, 23 bp, Artificial Sequence
  Synthetic
aagtatguttgggcuggaccaat

SEQ ID NO: 15306 - DNA, 21 bp, Artificial Sequence
  Synthetic
gccatcuacctcttcgucgga

SEQ ID NO: 15307 - DNA, 22 bp, Artificial Sequence
  Synthetic
actttgagatgugtgggctgug

SEQ ID NO: 15308 - DNA, 20 bp, Artificial Sequence
  Synthetic
gctggttguggcccagatut

SEQ ID NO: 15309 - DNA, 21 bp, Artificial Sequence
  Synthetic
aagtacaaggccuccaucacc

SEQ ID NO: 15310 - DNA, 19 bp, Artificial Sequence
  Synthetic
ggtcgtugatcagcuccgt

SEQ ID NO: 15311 - DNA, 19 bp, Artificial Sequence
  Synthetic
ggguaggcccctcactuct

SEQ ID NO: 15312 - DNA, 20 bp, Artificial Sequence
  Synthetic
gagcccuggcaccttcauat

SEQ ID NO: 15313 - DNA, 18 bp, Artificial Sequence
  Synthetic
ggaggcgcacaucgacuc

SEQ ID NO: 15314 - DNA, 20 bp, Artificial Sequence
  Synthetic
acaccgacccuctgtgauga

SEQ ID NO: 15315 - DNA, 18 bp, Artificial Sequence
  Synthetic
gcuggagcggcucaacaa

SEQ ID NO: 15316 - DNA, 17 bp, Artificial Sequence
  Synthetic
guccaccagcaggucgt

SEQ ID NO: 15317 - DNA, 20 bp, Artificial Sequence
  Synthetic
gccuggaaactgcugaggag

SEQ ID NO: 15318 - DNA, 20 bp, Artificial Sequence
  Synthetic
ccgatgggcuctgaagcuaa

SEQ ID NO: 15319 - DNA, 19 bp, Artificial Sequence
  Synthetic
gccaguccgacagcaaguc

SEQ ID NO: 15320 - DNA, 21 bp, Artificial Sequence
  Synthetic
ctccactttcutgcgcttgug

SEQ ID NO: 15321 - DNA, 23 bp, Artificial Sequence
  Synthetic
cccactcacguctttgctttcut

SEQ ID NO: 15322 - DNA, 24 bp, Artificial Sequence
  Synthetic
tctcagcuttattccuggaagcac

SEQ ID NO: 15323 - DNA, 27 bp, Artificial Sequence
  Synthetic
ttggaggtgaaacuctccttatacuga

SEQ ID NO: 15324 - DNA, 24 bp, Artificial Sequence
  Synthetic
ccaagtcagugatcattgccucat

SEQ ID NO: 15325 - DNA, 24 bp, Artificial Sequence
  Synthetic
ctgtgcucaaccaacactaaaugc

SEQ ID NO: 15326 - DNA, 17 bp, Artificial Sequence
  Synthetic
cttcuccgccugcaggt

SEQ ID NO: 15327 - DNA, 17 bp, Artificial Sequence
  Synthetic
ctgtgugccgaggcuga

SEQ ID NO: 15328 - DNA, 20 bp, Artificial Sequence
  Synthetic
ccttcuagcacgcacctugg

SEQ ID NO: 15329 - DNA, 22 bp, Artificial Sequence
  Synthetic
tccucaccacacagagcattug

SEQ ID NO: 15330 - DNA, 19 bp, Artificial Sequence
  Synthetic
gggacagcagcucaacuca

SEQ ID NO: 15331 - DNA, 23 bp, Artificial Sequence
  Synthetic
gaggcaaugggtaaaaugaccag

SEQ ID NO: 15332 - DNA, 18 bp, Artificial Sequence
  Synthetic
gccctuccgcgtctugaa

SEQ ID NO: 15333 - DNA, 22 bp, Artificial Sequence
  Synthetic
gtgtgcctguctctctctccua

SEQ ID NO: 15334 - DNA, 19 bp, Artificial Sequence
  Synthetic
tgggctuctggaactuggg

SEQ ID NO: 15335 - DNA, 20 bp, Artificial Sequence
  Synthetic
tgcactcaccugtgctgaug

SEQ ID NO: 15336 - DNA, 20 bp, Artificial Sequence
  Synthetic
tccaggaucccgaugaagga

SEQ ID NO: 15337 - DNA, 22 bp, Artificial Sequence
  Synthetic
ccuttgtatcugacaccacgct

SEQ ID NO: 15338 - DNA, 20 bp, Artificial Sequence
  Synthetic
cccacacucgaccauaggag

SEQ ID NO: 15339 - DNA, 24 bp, Artificial Sequence
  Synthetic
cgtacaacaaauaccgcttccugt

SEQ ID NO: 15340 - DNA, 23 bp, Artificial Sequence
  Synthetic
gaggagtugtcattctucacggt

SEQ ID NO: 15341 - DNA, 17 bp, Artificial Sequence
  Synthetic
ccatcguccccctucca

SEQ ID NO: 15342 - DNA, 19 bp, Artificial Sequence
  Synthetic
ggtgggcacacacuacguc

SEQ ID NO: 15343 - DNA, 26 bp, Artificial Sequence
  Synthetic
ttctgtgtggucatcaatcctuacaa

SEQ ID NO: 15344 - DNA, 26 bp, Artificial Sequence
  Synthetic
gttcatcttcuggatgtcatcctugt

SEQ ID NO: 15345 - DNA, 20 bp, Artificial Sequence
  Synthetic
gccaagaagcuggtaugggt

SEQ ID NO: 15346 - DNA, 23 bp, Artificial Sequence
  Synthetic
atcgaggaaguctguggagaaga

SEQ ID NO: 15347 - DNA, 23 bp, Artificial Sequence
  Synthetic
tcggaatugcactttgttccuga

SEQ ID NO: 15348 - DNA, 20 bp, Artificial Sequence
  Synthetic
cagaaggugatggctgugct

SEQ ID NO: 15349 - DNA, 29 bp, Artificial Sequence
  Synthetic
ttggcttctgatauccatttactctctug

SEQ ID NO: 15350 - DNA, 19 bp, Artificial Sequence
  Synthetic
gctguagcgagacgctcut

SEQ ID NO: 15351 - DNA, 19 bp, Artificial Sequence
  Synthetic
accttgucctcaccgugac

SEQ ID NO: 15352 - DNA, 18 bp, Artificial Sequence
  Synthetic
cagcuggcagcuggagaa

SEQ ID NO: 15353 - DNA, 18 bp, Artificial Sequence
  Synthetic
gcagaucgaggcgcugac

SEQ ID NO: 15354 - DNA, 21 bp, Artificial Sequence
  Synthetic
accatcucaccaaaggtgucc

SEQ ID NO: 15355 - DNA, 17 bp, Artificial Sequence
  Synthetic
gctccagcugagguggt

SEQ ID NO: 15356 - DNA, 22 bp, Artificial Sequence
  Synthetic
cagtggcucaagttttccagug

SEQ ID NO: 15357 - DNA, 22 bp, Artificial Sequence
  Synthetic
ccactaccaauagcagcuccag

SEQ ID NO: 15358 - DNA, 24 bp, Artificial Sequence
  Synthetic
gatgtactgguggtacttgagcut

SEQ ID NO: 15359 - DNA, 18 bp, Artificial Sequence
  Synthetic
ctgaggcugccccugaat

SEQ ID NO: 15360 - DNA, 20 bp, Artificial Sequence
  Synthetic
cacagaacccugggacucat

SEQ ID NO: 15361 - DNA, 21 bp, Artificial Sequence
  Synthetic
ctgggcuggaagtggaatcuc

SEQ ID NO: 15362 - DNA, 30 bp, Artificial Sequence
  Synthetic
ctctaaatggaaauataaccagcaaugcaa

SEQ ID NO: 15363 - DNA, 28 bp, Artificial Sequence
  Synthetic
ggtaatcttuacggttcttctcucaaca

SEQ ID NO: 15364 - DNA, 17 bp, Artificial Sequence
  Synthetic
cggagtgucgctcgcua

SEQ ID NO: 15365 - DNA, 17 bp, Artificial Sequence
  Synthetic
gcccguacctguccagt

SEQ ID NO: 15366 - DNA, 27 bp, Artificial Sequence
  Synthetic
taggactuaaaacatcttggauaccgt

SEQ ID NO: 15367 - DNA, 28 bp, Artificial Sequence
  Synthetic
tggaaguagaccaaaucaagaccataua

SEQ ID NO: 15368 - DNA, 29 bp, Artificial Sequence
  Synthetic
agatgcttttgugtgactctaaatugact

SEQ ID NO: 15369 - DNA, 25 bp, Artificial Sequence
  Synthetic
ttgccatgaagugatcggaauacat

SEQ ID NO: 15370 - DNA, 26 bp, Artificial Sequence
  Synthetic
cacactgtagauctcctgggagauaa

SEQ ID NO: 15371 - DNA, 22 bp, Artificial Sequence
  Synthetic
tctggtaaguctcacctuccga

SEQ ID NO: 15372 - DNA, 30 bp, Artificial Sequence
  Synthetic
cctcaggatgccautaaatgctactuaaat

SEQ ID NO: 15373 - DNA, 20 bp, Artificial Sequence
  Synthetic
cctccttcugcctgagtgut

SEQ ID NO: 15374 - DNA, 25 bp, Artificial Sequence
  Synthetic
tcattucagggaaaggttgctuaga

SEQ ID NO: 15375 - DNA, 30 bp, Artificial Sequence
  Synthetic
gcatcagtttctgugctggatttaaatuat

SEQ ID NO: 15376 - DNA, 22 bp, Artificial Sequence
  Synthetic
ctttggccaauggaccctttuc

SEQ ID NO: 15377 - DNA, 23 bp, Artificial Sequence
  Synthetic
tgcggttaugaggtagagugagt

SEQ ID NO: 15378 - DNA, 24 bp, Artificial Sequence
  Synthetic
ctuaaccaaagagaguaagcctuc

SEQ ID NO: 15379 - DNA, 25 bp, Artificial Sequence
  Synthetic
gacttagaauctccatggcuaggac

SEQ ID NO: 15380 - DNA, 25 bp, Artificial Sequence
  Synthetic
ggagaagggauggaagaatcucaga

SEQ ID NO: 15381 - DNA, 25 bp, Artificial Sequence
  Synthetic
tcactutgatgaacttucccacact

SEQ ID NO: 15382 - DNA, 23 bp, Artificial Sequence
  Synthetic
tgtacaaauccgaacaacccugt

SEQ ID NO: 15383 - DNA, 23 bp, Artificial Sequence
  Synthetic
tctgccagugctggaaaagtuaa

SEQ ID NO: 15384 - DNA, 30 bp, Artificial Sequence
  Synthetic
agaagtcatcauaaagaccactcagauagt

SEQ ID NO: 15385 - DNA, 24 bp, Artificial Sequence
  Synthetic
tcctcctccucccagaactuaaaa

SEQ ID NO: 15386 - DNA, 27 bp, Artificial Sequence
  Synthetic
ttcttttcacauttcaggtcaucagga

SEQ ID NO: 15387 - DNA, 28 bp, Artificial Sequence
  Synthetic
ttggaaacctacutttcacagaagucat

SEQ ID NO: 15388 - DNA, 24 bp, Artificial Sequence
  Synthetic
actgttcatugggttcaggctaut

SEQ ID NO: 15389 - DNA, 28 bp, Artificial Sequence
  Synthetic
aggaacagtccuattggatataatccut

SEQ ID NO: 15390 - DNA, 28 bp, Artificial Sequence
  Synthetic
tgtcttctaagaacuctgaagcaatguc

SEQ ID NO: 15391 - DNA, 27 bp, Artificial Sequence
  Synthetic
agggaagaggcuttataaaacaacugt

SEQ ID NO: 15392 - DNA, 27 bp, Artificial Sequence
  Synthetic
gagttattucccctaactucacaagca

SEQ ID NO: 15393 - DNA, 28 bp, Artificial Sequence
  Synthetic
aggtctcauttaatgtccauggaacaat

SEQ ID NO: 15394 - DNA, 18 bp, Artificial Sequence
  Synthetic
gcggcacuggcctacuac

SEQ ID NO: 15395 - DNA, 24 bp, Artificial Sequence
  Synthetic
gtattctgaccuagccaaggauct

SEQ ID NO: 15396 - DNA, 23 bp, Artificial Sequence
  Synthetic
tccctguccccaatagtgctuat

SEQ ID NO: 15397 - DNA, 24 bp, Artificial Sequence
  Synthetic
cacctcaactuccctgtcctttut

SEQ ID NO: 15398 - DNA, 22 bp, Artificial Sequence
  Synthetic
gtcaguaaacgggcaggtacuc

SEQ ID NO: 15399 - DNA, 19 bp, Artificial Sequence
  Synthetic
gcgtcaccuggtgtagcut

SEQ ID NO: 15400 - DNA, 17 bp, Artificial Sequence
  Synthetic
gccctguggtgctguca

SEQ ID NO: 15401 - DNA, 18 bp, Artificial Sequence
  Synthetic
ctggaggccaugctcugt

SEQ ID NO: 15402 - DNA, 27 bp, Artificial Sequence
  Synthetic
gtcagaatacaaaagucaagggacuca

SEQ ID NO: 15403 - DNA, 19 bp, Artificial Sequence
  Synthetic
gtgacaguggctgagccua

SEQ ID NO: 15404 - DNA, 22 bp, Artificial Sequence
  Synthetic
cctctttggcuctagctccuct

SEQ ID NO: 15405 - DNA, 23 bp, Artificial Sequence
  Synthetic
cctgtctttcugcctgtctguaa

SEQ ID NO: 15406 - DNA, 23 bp, Artificial Sequence
  Synthetic
gggcuaggagacaagaatcugag

SEQ ID NO: 15407 - DNA, 20 bp, Artificial Sequence
  Synthetic
acggcuacaggctgaaccua

SEQ ID NO: 15408 - DNA, 19 bp, Artificial Sequence
  Synthetic
gggatgaggugggatuggg

SEQ ID NO: 15409 - DNA, 18 bp, Artificial Sequence
  Synthetic
agcacggccucctcuaca

SEQ ID NO: 15410 - DNA, 22 bp, Artificial Sequence
  Synthetic
cgttaagagacgcugtagguca

SEQ ID NO: 15411 - DNA, 22 bp, Artificial Sequence
  Synthetic
ggaggagcugagacagcuagag

SEQ ID NO: 15412 - DNA, 22 bp, Artificial Sequence
  Synthetic
ctgggtcuccactcaacttuga

SEQ ID NO: 15413 - DNA, 22 bp, Artificial Sequence
  Synthetic
cctagcccugctgtggauaaag

SEQ ID NO: 15414 - DNA, 20 bp, Artificial Sequence
  Synthetic
ctcaucagcacuccaagcgt

SEQ ID NO: 15415 - DNA, 24 bp, Artificial Sequence
  Synthetic
gagtttggaccugaaaccucacat

SEQ ID NO: 15416 - DNA, 21 bp, Artificial Sequence
  Synthetic
ccgaaccutcagcttaugcag

SEQ ID NO: 15417 - DNA, 20 bp, Artificial Sequence
  Synthetic
catgggccuttcuggaggaa

SEQ ID NO: 15418 - DNA, 22 bp, Artificial Sequence
  Synthetic
ggttcagguctagcttctcugg

SEQ ID NO: 15419 - DNA, 20 bp, Artificial Sequence
  Synthetic
ttggccacacucaacctuga

SEQ ID NO: 15420 - DNA, 21 bp, Artificial Sequence
  Synthetic
ggagcccacacugacttgaut

SEQ ID NO: 15421 - DNA, 24 bp, Artificial Sequence
  Synthetic
gcagatatctcuggcatgaaggug

SEQ ID NO: 15422 - DNA, 20 bp, Artificial Sequence
  Synthetic
actaccucagccctccauca

SEQ ID NO: 15423 - DNA, 25 bp, Artificial Sequence
  Synthetic
tgacatgttcucctttgggttucag

SEQ ID NO: 15424 - DNA, 23 bp, Artificial Sequence
  Synthetic
cttgctcuccaggaaggtctuag

SEQ ID NO: 15425 - DNA, 25 bp, Artificial Sequence
  Synthetic
tttacagccauttttctctcuccca

SEQ ID NO: 15426 - DNA, 24 bp, Artificial Sequence
  Synthetic
gggtttgtatuccttgtccttcuc

SEQ ID NO: 15427 - DNA, 21 bp, Artificial Sequence
  Synthetic
accacagctutggatgccaut

SEQ ID NO: 15428 - DNA, 22 bp, Artificial Sequence
  Synthetic
gagccctggauttcccagaaut

SEQ ID NO: 15429 - DNA, 22 bp, Artificial Sequence
  Synthetic
gtgtggagugctgtattccuct

SEQ ID NO: 15430 - DNA, 19 bp, Artificial Sequence
  Synthetic
gcgguaggaaatcgucgga

SEQ ID NO: 15431 - DNA, 17 bp, Artificial Sequence
  Synthetic
cgctuagggccuagcct

SEQ ID NO: 15432 - DNA, 30 bp, Artificial Sequence
  Synthetic
aagggcagatataauattgacttcaaacut

SEQ ID NO: 15433 - DNA, 26 bp, Artificial Sequence
  Synthetic
gagaaacctttagugtcctggtacug

SEQ ID NO: 15434 - DNA, 22 bp, Artificial Sequence
  Synthetic
cctcgtatgcugtccagtcuaa

SEQ ID NO: 15435 - DNA, 20 bp, Artificial Sequence
  Synthetic
gtgaggcagggautggucag

SEQ ID NO: 15436 - DNA, 22 bp, Artificial Sequence
  Synthetic
ccttcttgtcutgcccttgucc

SEQ ID NO: 15437 - DNA, 22 bp, Artificial Sequence
  Synthetic
gtcagagggaggaaucacucac

SEQ ID NO: 15438 - DNA, 25 bp, Artificial Sequence
  Synthetic
ccctagtgcuatgctggaaaaugag

SEQ ID NO: 15439 - DNA, 22 bp, Artificial Sequence
  Synthetic
tccaatcuccaaggtgacucca

SEQ ID NO: 15440 - DNA, 25 bp, Artificial Sequence
  Synthetic
actgacagtcuttctctccttcugt

SEQ ID NO: 15441 - DNA, 21 bp, Artificial Sequence
  Synthetic
ctctgccccautctcatccug

SEQ ID NO: 15442 - DNA, 26 bp, Artificial Sequence
  Synthetic
cgcattgacgaauttgagtctatgua

SEQ ID NO: 15443 - DNA, 25 bp, Artificial Sequence
  Synthetic
cattaaatgcutggcatgacuccag

SEQ ID NO: 15444 - DNA, 17 bp, Artificial Sequence
  Synthetic
gcuaaccagccguccga

SEQ ID NO: 15445 - DNA, 17 bp, Artificial Sequence
  Synthetic
gggagccuccctuccga

SEQ ID NO: 15446 - DNA, 19 bp, Artificial Sequence
  Synthetic
gccacugacctccccuaca

SEQ ID NO: 15447 - DNA, 19 bp, Artificial Sequence
  Synthetic
tcttgccuccctcagggut

SEQ ID NO: 15448 - DNA, 21 bp, Artificial Sequence
  Synthetic
ggcggaggaaauaccagctuc

SEQ ID NO: 15449 - DNA, 20 bp, Artificial Sequence
  Synthetic
gtaaccccaggaugcugcaa

SEQ ID NO: 15450 - DNA, 22 bp, Artificial Sequence
  Synthetic
agtctggtucccaccctttcua

SEQ ID NO: 15451 - DNA, 30 bp, Artificial Sequence
  Synthetic
actccaggtuctccatatacataucaagat

SEQ ID NO: 15452 - DNA, 26 bp, Artificial Sequence
  Synthetic
cacatggttagucctctacttcaugg

SEQ ID NO: 15453 - DNA, 22 bp, Artificial Sequence
  Synthetic
cttcttcttccuggtgcacuga

SEQ ID NO: 15454 - DNA, 23 bp, Artificial Sequence
  Synthetic
atcttcatcaucaccgcagtcuc

SEQ ID NO: 15455 - DNA, 25 bp, Artificial Sequence
  Synthetic
ctgttaauaacacactgugcagacc

SEQ ID NO: 15456 - DNA, 23 bp, Artificial Sequence
  Synthetic
ctctccacgagutcttgtccaut

SEQ ID NO: 15457 - DNA, 26 bp, Artificial Sequence
  Synthetic
agtttactugcctcttaugcacagat

SEQ ID NO: 15458 - DNA, 22 bp, Artificial Sequence
  Synthetic
cucaccccaauaaggcccaaat

SEQ ID NO: 15459 - DNA, 28 bp, Artificial Sequence
  Synthetic
ttgtgaatggcaugtacagaatctauga

SEQ ID NO: 15460 - DNA, 25 bp, Artificial Sequence
  Synthetic
aaatactttcaggucacgtctugct

SEQ ID NO: 15461 - DNA, 26 bp, Artificial Sequence
  Synthetic
tctctacatctugggttctgacauca

SEQ ID NO: 15462 - DNA, 22 bp, Artificial Sequence
  Synthetic
cagacugaagcagctgtuccat

SEQ ID NO: 15463 - DNA, 24 bp, Artificial Sequence
  Synthetic
tgtgtgagagagagaucctgctua

SEQ ID NO: 15464 - DNA, 25 bp, Artificial Sequence
  Synthetic
aaatcaccacaacugaauagagcca

SEQ ID NO: 15465 - DNA, 28 bp, Artificial Sequence
  Synthetic
actctcguaacagagtactccauaaact

SEQ ID NO: 15466 - DNA, 19 bp, Artificial Sequence
  Synthetic
gctggtatucgtcgcggua

SEQ ID NO: 15467 - DNA, 22 bp, Artificial Sequence
  Synthetic
cccaaaaagucacacctgtguc

SEQ ID NO: 15468 - DNA, 26 bp, Artificial Sequence
  Synthetic
agtgtgctcagautttatgtccctut

SEQ ID NO: 15469 - DNA, 32 bp, Artificial Sequence
  Synthetic
cccattcttacagutatttctacttttgtgua

SEQ ID NO: 15470 - DNA, 22 bp, Artificial Sequence
  Synthetic
catgacactguccttgtgcuct

SEQ ID NO: 15471 - DNA, 22 bp, Artificial Sequence
  Synthetic
gcttgcttugggtggagagtua

SEQ ID NO: 15472 - DNA, 19 bp, Artificial Sequence
  Synthetic
gccatccuattgcgagugg

SEQ ID NO: 15473 - DNA, 22 bp, Artificial Sequence
  Synthetic
gcagaagguggaggtgttugag

SEQ ID NO: 15474 - DNA, 27 bp, Artificial Sequence
  Synthetic
cagaagacttcucaaattgttgccaut

SEQ ID NO: 15475 - DNA, 27 bp, Artificial Sequence
  Synthetic
ttccttcuaaaaggccatgaagatcug

SEQ ID NO: 15476 - DNA, 30 bp, Artificial Sequence
  Synthetic
gacaguaaaacagaaaggactataaugaca

SEQ ID NO: 15477 - DNA, 25 bp, Artificial Sequence
  Synthetic
tggtgcaggaaguacatgaaaucag

SEQ ID NO: 15478 - DNA, 21 bp, Artificial Sequence
  Synthetic
cagcuaagggaccagggtcua

SEQ ID NO: 15479 - DNA, 23 bp, Artificial Sequence
  Synthetic
ggcutctaagtcuaccacgacag

SEQ ID NO: 15480 - DNA, 25 bp, Artificial Sequence
  Synthetic
ggtatcaatcuggatggcttucacc

SEQ ID NO: 15481 - DNA, 22 bp, Artificial Sequence
  Synthetic
gcaggcaaaaacugggaaacua

SEQ ID NO: 15482 - DNA, 25 bp, Artificial Sequence
  Synthetic
catgacgcaguttcttcttctcauc

SEQ ID NO: 15483 - DNA, 20 bp, Artificial Sequence
  Synthetic
gttggucacagctccagugt

SEQ ID NO: 15484 - DNA, 21 bp, Artificial Sequence
  Synthetic
tcacctgagggugaactgtug

SEQ ID NO: 15485 - DNA, 26 bp, Artificial Sequence
  Synthetic
gtccagttctguctataacccagtut

SEQ ID NO: 15486 - DNA, 20 bp, Artificial Sequence
  Synthetic
ctggcggaugatctctcguc

SEQ ID NO: 15487 - DNA, 23 bp, Artificial Sequence
  Synthetic
atcctgtcutttggattgtucgt

SEQ ID NO: 15488 - DNA, 23 bp, Artificial Sequence
  Synthetic
agctttaccuaaaccccaugcag

SEQ ID NO: 15489 - DNA, 28 bp, Artificial Sequence
  Synthetic
ggaagattgguagtttaaggagattugg

SEQ ID NO: 15490 - DNA, 24 bp, Artificial Sequence
  Synthetic
cagugggagaagagaggtuattut

SEQ ID NO: 15491 - DNA, 20 bp, Artificial Sequence
  Synthetic
gugccgagcataugccaaag

SEQ ID NO: 15492 - DNA, 32 bp, Artificial Sequence
  Synthetic
tgtatatatcgtttuctatgtgctgatctuct

SEQ ID NO: 15493 - DNA, 19 bp, Artificial Sequence
  Synthetic
gaatggcugagacggcuga

SEQ ID NO: 15494 - DNA, 27 bp, Artificial Sequence
  Synthetic
caagtaguaaagacaacagggactuca

SEQ ID NO: 15495 - DNA, 24 bp, Artificial Sequence
  Synthetic
catctctuccccctcctgtttuag

SEQ ID NO: 15496 - DNA, 24 bp, Artificial Sequence
  Synthetic
cagggacucagaggaaaucagaaa

SEQ ID NO: 15497 - DNA, 22 bp, Artificial Sequence
  Synthetic
gcaaattguggtagctctuggg

SEQ ID NO: 15498 - DNA, 22 bp, Artificial Sequence
  Synthetic
ggaacugcacacatttgagucc

SEQ ID NO: 15499 - DNA, 22 bp, Artificial Sequence
  Synthetic
tgctggtcaacaugggaaacut

SEQ ID NO: 15500 - DNA, 22 bp, Artificial Sequence
  Synthetic
ccatcgucccagcaaagtctut

SEQ ID NO: 15501 - DNA, 22 bp, Artificial Sequence
  Synthetic
agcccuacaggaagtacccuac

SEQ ID NO: 15502 - DNA, 24 bp, Artificial Sequence
  Synthetic
tctccccauatgagctgaugacaa

SEQ ID NO: 15503 - DNA, 26 bp, Artificial Sequence
  Synthetic
gattggaagaaucaaagagcagagug

SEQ ID NO: 15504 - DNA, 23 bp, Artificial Sequence
  Synthetic
ctcccaattgucctaagctccut

SEQ ID NO: 15505 - DNA, 22 bp, Artificial Sequence
  Synthetic
catgcucatgtggtuagccaga

SEQ ID NO: 15506 - DNA, 20 bp, Artificial Sequence
  Synthetic
ggagggcaagagugatgcug

SEQ ID NO: 15507 - DNA, 24 bp, Artificial Sequence
  Synthetic
tcaagatgggcuactgaaaaugct

SEQ ID NO: 15508 - DNA, 20 bp, Artificial Sequence
  Synthetic
cgtccutcctcuccaaccaa

SEQ ID NO: 15509 - DNA, 21 bp, Artificial Sequence
  Synthetic
ctttctguggctgtgagguct

SEQ ID NO: 15510 - DNA, 20 bp, Artificial Sequence
  Synthetic
aggccttggugagagctgua

SEQ ID NO: 15511 - DNA, 23 bp, Artificial Sequence
  Synthetic
tgguacacgacaagtacugcaaa

SEQ ID NO: 15512 - DNA, 22 bp, Artificial Sequence
  Synthetic
tgggaauggagccatctcctua

SEQ ID NO: 15513 - DNA, 27 bp, Artificial Sequence
  Synthetic
caacccttcttugacaacatttttgug

SEQ ID NO: 15514 - DNA, 22 bp, Artificial Sequence
  Synthetic
gcacaaaggugagtgtgttgut

SEQ ID NO: 15515 - DNA, 27 bp, Artificial Sequence
  Synthetic
cttctatgaccaacugaaccaucacat

SEQ ID NO: 15516 - DNA, 22 bp, Artificial Sequence
  Synthetic
gggcaaggccccautatatcug

SEQ ID NO: 15517 - DNA, 25 bp, Artificial Sequence
  Synthetic
ggataauggcagttcucacacacat

SEQ ID NO: 15518 - DNA, 18 bp, Artificial Sequence
  Synthetic
tctcaggucgacggcuga

SEQ ID NO: 15519 - DNA, 18 bp, Artificial Sequence
  Synthetic
cgacggguccccactuac

SEQ ID NO: 15520 - DNA, 24 bp, Artificial Sequence
  Synthetic
tctacatctccccucgaatcacut

SEQ ID NO: 15521 - DNA, 23 bp, Artificial Sequence
  Synthetic
gggaatggaguagggcatugaaa

SEQ ID NO: 15522 - DNA, 20 bp, Artificial Sequence
  Synthetic
cggugaagagccugaagcag

SEQ ID NO: 15523 - DNA, 24 bp, Artificial Sequence
  Synthetic
cccaccatuctccatgtatucagt

SEQ ID NO: 15524 - DNA, 27 bp, Artificial Sequence
  Synthetic
cggaattatatucatcgtgacctucgg

SEQ ID NO: 15525 - DNA, 22 bp, Artificial Sequence
  Synthetic
cccagaccacccutaaatcuca

SEQ ID NO: 15526 - DNA, 20 bp, Artificial Sequence
  Synthetic
tcatgaggcugtgcuggaag

SEQ ID NO: 15527 - DNA, 22 bp, Artificial Sequence
  Synthetic
caagucaggcuggagagaaagg

SEQ ID NO: 15528 - DNA, 24 bp, Artificial Sequence
  Synthetic
ttctctgtagccaucctcttcuca

SEQ ID NO: 15529 - DNA, 19 bp, Artificial Sequence
  Synthetic
acctgcgtucgcgattcut

SEQ ID NO: 15530 - DNA, 22 bp, Artificial Sequence
  Synthetic
gttgtgctgutgctgatggaug

SEQ ID NO: 15531 - DNA, 27 bp, Artificial Sequence
  Synthetic
cttctcttgauctcttttcucggacag

SEQ ID NO: 15532 - DNA, 17 bp, Artificial Sequence
  Synthetic
gtggcccccuctuggat

SEQ ID NO: 15533 - DNA, 17 bp, Artificial Sequence
  Synthetic
cucccagccucgaagcc

SEQ ID NO: 15534 - DNA, 19 bp, Artificial Sequence
  Synthetic
gggatuccgcttcgtcucc

SEQ ID NO: 15535 - DNA, 24 bp, Artificial Sequence
  Synthetic
agcgaggacauctggaagaaatuc

SEQ ID NO: 15536 - DNA, 21 bp, Artificial Sequence
  Synthetic
ctgaagggaggaugggcuaag

SEQ ID NO: 15537 - DNA, 23 bp, Artificial Sequence
  Synthetic
cataggtgatcuccaccctcugt

SEQ ID NO: 15538 - DNA, 22 bp, Artificial Sequence
  Synthetic
gatacgtgugccagttuccaga

SEQ ID NO: 15539 - DNA, 22 bp, Artificial Sequence
  Synthetic
ggtgacaggaggauggctctua

SEQ ID NO: 15540 - DNA, 21 bp, Artificial Sequence
  Synthetic
ctctggaccaguctccatgug

SEQ ID NO: 15541 - DNA, 25 bp, Artificial Sequence
  Synthetic
ctaggtctggaauccccaaagtaug

SEQ ID NO: 15542 - DNA, 22 bp, Artificial Sequence
  Synthetic
tgtuacctgtcaauggcagcaa

SEQ ID NO: 15543 - DNA, 21 bp, Artificial Sequence
  Synthetic
gcucactcccaugacaccaac

SEQ ID NO: 15544 - DNA, 21 bp, Artificial Sequence
  Synthetic
gcatcuggaattggaguggca

SEQ ID NO: 15545 - DNA, 22 bp, Artificial Sequence
  Synthetic
gtagtgagguctgtgggcatut

SEQ ID NO: 15546 - DNA, 20 bp, Artificial Sequence
  Synthetic
tgaccgcuctgcatctagug

SEQ ID NO: 15547 - DNA, 22 bp, Artificial Sequence
  Synthetic
gucacagagugaaccaagaaug

SEQ ID NO: 15548 - DNA, 21 bp, Artificial Sequence
  Synthetic
cacccacatugccaaccatuc

SEQ ID NO: 15549 - DNA, 22 bp, Artificial Sequence
  Synthetic
gggtaggguagggaagtucaca

SEQ ID NO: 15550 - DNA, 22 bp, Artificial Sequence
  Synthetic
gaguggagaatgtucacccaga

SEQ ID NO: 15551 - DNA, 19 bp, Artificial Sequence
  Synthetic
gccctcaccuccctgtcut

SEQ ID NO: 15552 - DNA, 19 bp, Artificial Sequence
  Synthetic
cagcccaacgcugtagtuc

SEQ ID NO: 15553 - DNA, 27 bp, Artificial Sequence
  Synthetic
tgaguaacaagagagaauggagggaat

SEQ ID NO: 15554 - DNA, 21 bp, Artificial Sequence
  Synthetic
ggcacagggutgagtgtcaua

SEQ ID NO: 15555 - DNA, 19 bp, Artificial Sequence
  Synthetic
ccaagcagccauggagcua

SEQ ID NO: 15556 - DNA, 24 bp, Artificial Sequence
  Synthetic
ctgattggagugcaagacucaaga

SEQ ID NO: 15557 - DNA, 22 bp, Artificial Sequence
  Synthetic
ttgaccuctgatccuacccaca

SEQ ID NO: 15558 - DNA, 17 bp, Artificial Sequence
  Synthetic
tgctccucgcctgccua

SEQ ID NO: 15559 - DNA, 22 bp, Artificial Sequence
  Synthetic
ggcctcugtctcctcauaccat

SEQ ID NO: 15560 - DNA, 21 bp, Artificial Sequence
  Synthetic
gcaacccaguccaactuggat

SEQ ID NO: 15561 - DNA, 22 bp, Artificial Sequence
  Synthetic
cgcagcagutgcaaacatttug

SEQ ID NO: 15562 - DNA, 18 bp, Artificial Sequence
  Synthetic
tgauccgctccugggact

SEQ ID NO: 15563 - DNA, 17 bp, Artificial Sequence
  Synthetic
accugccccagcagaug

SEQ ID NO: 15564 - DNA, 24 bp, Artificial Sequence
  Synthetic
gcatcgtcauagaaggtcgttucc

SEQ ID NO: 15565 - DNA, 26 bp, Artificial Sequence
  Synthetic
gctcttagagaaacuttccctgucaa

SEQ ID NO: 15566 - DNA, 18 bp, Artificial Sequence
  Synthetic
cggacuccgacgactugt

SEQ ID NO: 15567 - DNA, 19 bp, Artificial Sequence
  Synthetic
gcttcuccacggcgguaaa

SEQ ID NO: 15568 - DNA, 28 bp, Artificial Sequence
  Synthetic
ggcagtuagagagaaggugaaaagaaaa

SEQ ID NO: 15569 - DNA, 21 bp, Artificial Sequence
  Synthetic
tcagagtugcactgagtgugg

SEQ ID NO: 15570 - DNA, 28 bp, Artificial Sequence
  Synthetic
agtgcttcaaauccttcaataaggtuct

SEQ ID NO: 15571 - DNA, 31 bp, Artificial Sequence
  Synthetic
agttcccagatcuaacatttttactgttgut

SEQ ID NO: 15572 - DNA, 25 bp, Artificial Sequence
  Synthetic
gaatcacaguaagtcagcagcucat

SEQ ID NO: 15573 - DNA, 23 bp, Artificial Sequence
  Synthetic
tgcctcccaggaaaugaagttut

SEQ ID NO: 15574 - DNA, 30 bp, Artificial Sequence
  Synthetic
gcatattttagcugctgtttgaggtttaut

SEQ ID NO: 15575 - DNA, 21 bp, Artificial Sequence
  Synthetic
ctctcccauggttccctcaut

SEQ ID NO: 15576 - DNA, 22 bp, Artificial Sequence
  Synthetic
gtttcuccccaagctgggtuaa

SEQ ID NO: 15577 - DNA, 22 bp, Artificial Sequence
  Synthetic
atcatguaaggagctggcugac

SEQ ID NO: 15578 - DNA, 18 bp, Artificial Sequence
  Synthetic
tgctgacutgccccugac

SEQ ID NO: 15579 - DNA, 19 bp, Artificial Sequence
  Synthetic
gtgagggcaucgacaguga

SEQ ID NO: 15580 - DNA, 26 bp, Artificial Sequence
  Synthetic
caccccttugaaagagaacacactua

SEQ ID NO: 15581 - DNA, 22 bp, Artificial Sequence
  Synthetic
gctggccugagacattcctaug

SEQ ID NO: 15582 - DNA, 22 bp, Artificial Sequence
  Synthetic
atctgggtcucagcacatuact

SEQ ID NO: 15583 - DNA, 21 bp, Artificial Sequence
  Synthetic
gccaccucaagaagcagaucc

SEQ ID NO: 15584 - DNA, 24 bp, Artificial Sequence
  Synthetic
accaaaggcaacugataaggtuct

SEQ ID NO: 15585 - DNA, 22 bp, Artificial Sequence
  Synthetic
tccctgguagatggctactucc

SEQ ID NO: 15586 - DNA, 22 bp, Artificial Sequence
  Synthetic
cauacgctatgugacacgggaa

SEQ ID NO: 15587 - DNA, 24 bp, Artificial Sequence
  Synthetic
tgacgguggaaacgttctctacua

SEQ ID NO: 15588 - DNA, 23 bp, Artificial Sequence
  Synthetic
gtagaaacaccaccauccucaca

SEQ ID NO: 15589 - DNA, 25 bp, Artificial Sequence
  Synthetic
cgagcaggauggacatgatatugag

SEQ ID NO: 15590 - DNA, 22 bp, Artificial Sequence
  Synthetic
ggcagguaccaggtcagtacut

SEQ ID NO: 15591 - DNA, 22 bp, Artificial Sequence
  Synthetic
cctcttugccctgtaugacgag

SEQ ID NO: 15592 - DNA, 22 bp, Artificial Sequence
  Synthetic
cctccaggtucacctcagtcut

SEQ ID NO: 15593 - DNA, 27 bp, Artificial Sequence
  Synthetic
ttgccataagaacutttagcacauaga

SEQ ID NO: 15594 - DNA, 26 bp, Artificial Sequence
  Synthetic
actaacautatgatccugaccccaca

SEQ ID NO: 15595 - DNA, 20 bp, Artificial Sequence
  Synthetic
cctggcacuccggtttctuc

SEQ ID NO: 15596 - DNA, 23 bp, Artificial Sequence
  Synthetic
tcagtgtccuctacctcagtgut

SEQ ID NO: 15597 - DNA, 23 bp, Artificial Sequence
  Synthetic
ccagtcttcguaggaaggtcuga

SEQ ID NO: 15598 - DNA, 24 bp, Artificial Sequence
  Synthetic
tgtgtgtgtcugcatacatcugat

SEQ ID NO: 15599 - DNA, 21 bp, Artificial Sequence
  Synthetic
gctccuctccatcaugggact

SEQ ID NO: 15600 - DNA, 21 bp, Artificial Sequence
  Synthetic
gggaaactgucttccccugat

SEQ ID NO: 15601 - DNA, 28 bp, Artificial Sequence
  Synthetic
gagtcagagaaugggagaagtaaugaag

SEQ ID NO: 15602 - DNA, 22 bp, Artificial Sequence
  Synthetic
acaucgaggaaaagtcaucgcc

SEQ ID NO: 15603 - DNA, 21 bp, Artificial Sequence
  Synthetic
gaggccuctctctuacccact

SEQ ID NO: 15604 - DNA, 22 bp, Artificial Sequence
  Synthetic
tgggagcucttcctgatcugaa

SEQ ID NO: 15605 - DNA, 24 bp, Artificial Sequence
  Synthetic
cctgctttattugggtactccuga

SEQ ID NO: 15606 - DNA, 22 bp, Artificial Sequence
  Synthetic
gtgtggtucagagggactguag

SEQ ID NO: 15607 - DNA, 22 bp, Artificial Sequence
  Synthetic
ggaaggcaugcaaggaatugag

SEQ ID NO: 15608 - DNA, 27 bp, Artificial Sequence
  Synthetic
tattctattccttucctccttgcttuc

SEQ ID NO: 15609 - DNA, 24 bp, Artificial Sequence
  Synthetic
ttgcctaguacatgtccauccaac

SEQ ID NO: 15610 - DNA, 24 bp, Artificial Sequence
  Synthetic
cctgttccuctgtagttgtuccat

SEQ ID NO: 15611 - DNA, 26 bp, Artificial Sequence
  Synthetic
gtctggaagaaagutcccttcatuct

SEQ ID NO: 15612 - DNA, 21 bp, Artificial Sequence
  Synthetic
ccccaucaggagggtcttuca

SEQ ID NO: 15613 - DNA, 23 bp, Artificial Sequence
  Synthetic
ggacaccccuttgtgactcauac

SEQ ID NO: 15614 - DNA, 26 bp, Artificial Sequence
  Synthetic
ggaaacagaacaaaagugaagaccuc

SEQ ID NO: 15615 - DNA, 27 bp, Artificial Sequence
  Synthetic
acattcattgcuccaacttctcttcuc

SEQ ID NO: 15616 - DNA, 23 bp, Artificial Sequence
  Synthetic
caccuacaaggucaaagacagca

SEQ ID NO: 15617 - DNA, 22 bp, Artificial Sequence
  Synthetic
agtccagtucgaaggaguggat

SEQ ID NO: 15618 - DNA, 22 bp, Artificial Sequence
  Synthetic
ctccagaaacuaggcctgacug

SEQ ID NO: 15619 - DNA, 29 bp, Artificial Sequence
  Synthetic
tcatcacccctugaagaaatatttgtgut

SEQ ID NO: 15620 - DNA, 27 bp, Artificial Sequence
  Synthetic
ttttctcaaaagagugtcccttctuca

SEQ ID NO: 15621 - DNA, 28 bp, Artificial Sequence
  Synthetic
ccgttcagaagautgaattgaaacctua

SEQ ID NO: 15622 - DNA, 18 bp, Artificial Sequence
  Synthetic
gcctcugaaggaggcugt

SEQ ID NO: 15623 - DNA, 22 bp, Artificial Sequence
  Synthetic
agccacttcugccaacttguag

SEQ ID NO: 15624 - DNA, 17 bp, Artificial Sequence
  Synthetic
ggccagggacugcacuc

SEQ ID NO: 15625 - DNA, 19 bp, Artificial Sequence
  Synthetic
gcccugaccactgctttuc

SEQ ID NO: 15626 - DNA, 21 bp, Artificial Sequence
  Synthetic
gggaaaggacucaggctugat

SEQ ID NO: 15627 - DNA, 26 bp, Artificial Sequence
  Synthetic
aaacctccaguttaattcctctcugg

SEQ ID NO: 15628 - DNA, 23 bp, Artificial Sequence
  Synthetic
ccttaacttcauggtgccatcug

SEQ ID NO: 15629 - DNA, 21 bp, Artificial Sequence
  Synthetic
cacccaguctcctttctucct

SEQ ID NO: 15630 - DNA, 24 bp, Artificial Sequence
  Synthetic
aactgagacaucctgaaauggaag

SEQ ID NO: 15631 - DNA, 24 bp, Artificial Sequence
  Synthetic
ccagtgatuctctttctguccaca

SEQ ID NO: 15632 - DNA, 20 bp, Artificial Sequence
  Synthetic
gccacuaaggctgtcugcat

SEQ ID NO: 15633 - DNA, 21 bp, Artificial Sequence
  Synthetic
ctgctcagugctcttctccug

SEQ ID NO: 15634 - DNA, 21 bp, Artificial Sequence
  Synthetic
ggtgccaggagaaugtgguat

SEQ ID NO: 15635 - DNA, 22 bp, Artificial Sequence
  Synthetic
ccccacctguggtctcatttuc

SEQ ID NO: 15636 - DNA, 29 bp, Artificial Sequence
  Synthetic
ttctttccttacaugctcagtttcctauc

SEQ ID NO: 15637 - DNA, 27 bp, Artificial Sequence
  Synthetic
acaagcaagutcaaataacaauggcaa

SEQ ID NO: 15638 - DNA, 23 bp, Artificial Sequence
  Synthetic
ctggcatctguacagtccagaut

SEQ ID NO: 15639 - DNA, 25 bp, Artificial Sequence
  Synthetic
tgactctgacutgcaatggattuca

SEQ ID NO: 15640 - DNA, 21 bp, Artificial Sequence
  Synthetic
aucactuaccaaaggccagca

SEQ ID NO: 15641 - DNA, 28 bp, Artificial Sequence
  Synthetic
gctttaugcagagaagaaguttacugag

SEQ ID NO: 15642 - DNA, 19 bp, Artificial Sequence
  Synthetic
cgggtccuctgcggtttut

SEQ ID NO: 15643 - DNA, 23 bp, Artificial Sequence
  Synthetic
ctggaagaaugtgacctugacca

SEQ ID NO: 15644 - DNA, 23 bp, Artificial Sequence
  Synthetic
ccttttctgutgccttcttucct

SEQ ID NO: 15645 - DNA, 24 bp, Artificial Sequence
  Synthetic
aatcccaaugcaagacaauggaga

SEQ ID NO: 15646 - DNA, 27 bp, Artificial Sequence
  Synthetic
agcaaactaactuaccttacctccuct

SEQ ID NO: 15647 - DNA, 24 bp, Artificial Sequence
  Synthetic
catatgctgcucctgctgatcaua

SEQ ID NO: 15648 - DNA, 23 bp, Artificial Sequence
  Synthetic
cattgtgtugcacactaacuggt

SEQ ID NO: 15649 - DNA, 28 bp, Artificial Sequence
  Synthetic
ttctgtagttcuttttctggaaguggaa

SEQ ID NO: 15650 - DNA, 27 bp, Artificial Sequence
  Synthetic
attgagttttgggutcatttgtgtugt

SEQ ID NO: 15651 - DNA, 25 bp, Artificial Sequence
  Synthetic
ccaacacctaacugctctgatacug

SEQ ID NO: 15652 - DNA, 26 bp, Artificial Sequence
  Synthetic
atagcttagugagaggatgtgaauga

SEQ ID NO: 15653 - DNA, 27 bp, Artificial Sequence
  Synthetic
cagtacctctugcttggagagtuaaat

SEQ ID NO: 15654 - DNA, 29 bp, Artificial Sequence
  Synthetic
tgaacagagaacagauacagaaaacaugg

SEQ ID NO: 15655 - DNA, 25 bp, Artificial Sequence
  Synthetic
cttctttagtcutctggcacaguga

SEQ ID NO: 15656 - DNA, 27 bp, Artificial Sequence
  Synthetic
tccgtttttaagaaaugggagtctgut

SEQ ID NO: 15657 - DNA, 27 bp, Artificial Sequence
  Synthetic
ccttaaaggaaacugctatcgaactug

SEQ ID NO: 15658 - DNA, 24 bp, Artificial Sequence
  Synthetic
ccacgcagutttctguaaaggaaa

SEQ ID NO: 15659 - DNA, 27 bp, Artificial Sequence
  Synthetic
catgttgcctuagtaatgtctctcuct

SEQ ID NO: 15660 - DNA, 20 bp, Artificial Sequence
  Synthetic
gagcucaaccagagcgucat

SEQ ID NO: 15661 - DNA, 29 bp, Artificial Sequence
  Synthetic
gtatattggaacuttctgtttcactugct

SEQ ID NO: 15662 - DNA, 24 bp, Artificial Sequence
  Synthetic
tcaaacucctataccugcccaaga

SEQ ID NO: 15663 - DNA, 22 bp, Artificial Sequence
  Synthetic
atgcacatugctgctgcaauag

SEQ ID NO: 15664 - DNA, 24 bp, Artificial Sequence
  Synthetic
gccauaccacgagaggaaaaugat

SEQ ID NO: 15665 - DNA, 24 bp, Artificial Sequence
  Synthetic
tcagaagctuagatatgtggguca

SEQ ID NO: 15666 - DNA, 20 bp, Artificial Sequence
  Synthetic
ggtcugggcgccataauact

SEQ ID NO: 15667 - DNA, 28 bp, Artificial Sequence
  Synthetic
tttctcttuaacagctgataagaugcga

SEQ ID NO: 15668 - DNA, 23 bp, Artificial Sequence
  Synthetic
ccggacgaagaugacttctacut

SEQ ID NO: 15669 - DNA, 21 bp, Artificial Sequence
  Synthetic
gttcucaagcagcatcuccgt

SEQ ID NO: 15670 - DNA, 17 bp, Artificial Sequence
  Synthetic
ggtuccaccgcccaguc

SEQ ID NO: 15671 - DNA, 17 bp, Artificial Sequence
  Synthetic
gcgggauccacgcacuc

SEQ ID NO: 15672 - DNA, 22 bp, Artificial Sequence
  Synthetic
gctgatccucaaacgatgccut

SEQ ID NO: 15673 - DNA, 22 bp, Artificial Sequence
  Synthetic
gctcaagcucttagccttuggg

SEQ ID NO: 15674 - DNA, 20 bp, Artificial Sequence
  Synthetic
gaacacgcucggacttgcua

SEQ ID NO: 15675 - DNA, 18 bp, Artificial Sequence
  Synthetic
ggucctacugcccaccca

SEQ ID NO: 15676 - DNA, 32 bp, Artificial Sequence
  Synthetic
cagagtgttgtgcutagtaaaatgaatttuga

SEQ ID NO: 15677 - DNA, 30 bp, Artificial Sequence
  Synthetic
ttaccttataugccaaataccaatcatuct

SEQ ID NO: 15678 - DNA, 32 bp, Artificial Sequence
  Synthetic
tagataatucaaagaggaggaattutgaucac

SEQ ID NO: 15679 - DNA, 25 bp, Artificial Sequence
  Synthetic
tccatttcuggcaatacagcacuat

SEQ ID NO: 15680 - DNA, 24 bp, Artificial Sequence
  Synthetic
gttcctctgtutttcatggcguag

SEQ ID NO: 15681 - DNA, 27 bp, Artificial Sequence
  Synthetic
actggttaacaaguctttgtcctugag

SEQ ID NO: 15682 - DNA, 26 bp, Artificial Sequence
  Synthetic
cagcaaactuacaagattgtuaccga

SEQ ID NO: 15683 - DNA, 23 bp, Artificial Sequence
  Synthetic
ccaccaccaacuttaugaggaca

SEQ ID NO: 15684 - DNA, 30 bp, Artificial Sequence
  Synthetic
ctttttctttucttcttgattaucaaggct

SEQ ID NO: 15685 - DNA, 32 bp, Artificial Sequence
  Synthetic
atttaacaccattctuctggatatctacagua

SEQ ID NO: 15686 - DNA, 30 bp, Artificial Sequence
  Synthetic
ttattcagtattccugtgtacattttcugt

SEQ ID NO: 15687 - DNA, 25 bp, Artificial Sequence
  Synthetic
ctccaaaatggcuggtcgtacauat

SEQ ID NO: 15688 - DNA, 30 bp, Artificial Sequence
  Synthetic
tgtatgtgtatgtuaccacattttatguga

SEQ ID NO: 15689 - DNA, 21 bp, Artificial Sequence
  Synthetic
agcccatgcuaacccaaaucc

SEQ ID NO: 15690 - DNA, 27 bp, Artificial Sequence
  Synthetic
tccctaagcatguaatagagtgtgcua

SEQ ID NO: 15691 - DNA, 32 bp, Artificial Sequence
  Synthetic
gagaagctaagtuaaactatgaaaacaaacug

SEQ ID NO: 15692 - DNA, 20 bp, Artificial Sequence
  Synthetic
ggtgcttutaggagcuccgt

SEQ ID NO: 15693 - DNA, 17 bp, Artificial Sequence
  Synthetic
ctggccgaggccutgut

SEQ ID NO: 15694 - DNA, 28 bp, Artificial Sequence
  Synthetic
gtgcagaugaagccttaaauaaagacaa

SEQ ID NO: 15695 - DNA, 22 bp, Artificial Sequence
  Synthetic
cctttctucccccatcacccua

SEQ ID NO: 15696 - DNA, 21 bp, Artificial Sequence
  Synthetic
tcuaggaaggaaacgcccuca

SEQ ID NO: 15697 - DNA, 24 bp, Artificial Sequence
  Synthetic
gataccaaacaguagggcgacuac

SEQ ID NO: 15698 - DNA, 26 bp, Artificial Sequence
  Synthetic
attctggcttucctgaaattgcatut

SEQ ID NO: 15699 - DNA, 21 bp, Artificial Sequence
  Synthetic
acagatcuccctccucaccac

SEQ ID NO: 15700 - DNA, 31 bp, Artificial Sequence
  Synthetic
acaattctaaagagtucattgtcctgttcuc

SEQ ID NO: 15701 - DNA, 21 bp, Artificial Sequence
  Synthetic
aacatcaccccaaugccauca

SEQ ID NO: 15702 - DNA, 29 bp, Artificial Sequence
  Synthetic
ggagatttttctgaauggaacaaatggut

SEQ ID NO: 15703 - DNA, 30 bp, Artificial Sequence
  Synthetic
tctatggcatcuagacgatcattaauagca

SEQ ID NO: 15704 - DNA, 30 bp, Artificial Sequence
  Synthetic
gaagaagttgcugatggttttaagtcuaaa

SEQ ID NO: 15705 - DNA, 25 bp, Artificial Sequence
  Synthetic
ctgcttugggagtaataaguccagt

SEQ ID NO: 15706 - DNA, 25 bp, Artificial Sequence
  Synthetic
ggagggatgtaucattgaaggacug

SEQ ID NO: 15707 - DNA, 22 bp, Artificial Sequence
  Synthetic
agcuggcaaacagcactactua

SEQ ID NO: 15708 - DNA, 31 bp, Artificial Sequence
  Synthetic
gaaactgttacuaccagtcataaaagaccut

SEQ ID NO: 15709 - DNA, 30 bp, Artificial Sequence
  Synthetic
gtctagtaaacacuctatcaattggtguga

SEQ ID NO: 15710 - DNA, 22 bp, Artificial Sequence
  Synthetic
tgagagggcacutctcttgcua

SEQ ID NO: 15711 - DNA, 32 bp, Artificial Sequence
  Synthetic
tttaggacaagcucccttaatgaatttauaga

SEQ ID NO: 15712 - DNA, 27 bp, Artificial Sequence
  Synthetic
gctgtccataaautgctgactttgaut

SEQ ID NO: 15713 - DNA, 30 bp, Artificial Sequence
  Synthetic
ttcctagaaagaaaauggaaaaatggucat

SEQ ID NO: 15714 - DNA, 23 bp, Artificial Sequence
  Synthetic
gagaagtacauggacgtgucagg

SEQ ID NO: 15715 - DNA, 26 bp, Artificial Sequence
  Synthetic
cgaaagtggacaccaugtcgatauag

SEQ ID NO: 15716 - DNA, 24 bp, Artificial Sequence
  Synthetic
ggaggaagaagagagugcctuaca

SEQ ID NO: 15717 - DNA, 27 bp, Artificial Sequence
  Synthetic
ccaaatggtcacutgtctctcagauag

SEQ ID NO: 15718 - DNA, 23 bp, Artificial Sequence
  Synthetic
ggagtcaugaacgacttugacga

SEQ ID NO: 15719 - DNA, 21 bp, Artificial Sequence
  Synthetic
gggaaagucatcuggcaggac

SEQ ID NO: 15720 - DNA, 20 bp, Artificial Sequence
  Synthetic
tctcacccccuggtctctut

SEQ ID NO: 15721 - DNA, 21 bp, Artificial Sequence
  Synthetic
gtgaggutgagcauccgagag

SEQ ID NO: 15722 - DNA, 30 bp, Artificial Sequence
  Synthetic
ctagtttgatctucaagttttctccaagut

SEQ ID NO: 15723 - DNA, 24 bp, Artificial Sequence
  Synthetic
cactaccugctaccataucagaga

SEQ ID NO: 15724 - DNA, 21 bp, Artificial Sequence
  Synthetic
gtggacgtcucctgtccttuc

SEQ ID NO: 15725 - DNA, 20 bp, Artificial Sequence
  Synthetic
agtuggacccaacgctucat

SEQ ID NO: 15726 - DNA, 29 bp, Artificial Sequence
  Synthetic
cgcccatcatatutcttcagaatagtgut

SEQ ID NO: 15727 - DNA, 23 bp, Artificial Sequence
  Synthetic
cctctcacuggcttctcctcuac

SEQ ID NO: 15728 - DNA, 19 bp, Artificial Sequence
  Synthetic
gaccgugccacccagaaua

SEQ ID NO: 15729 - DNA, 29 bp, Artificial Sequence
  Synthetic
ctataaagaagcauaatgttggcgucaaa

SEQ ID NO: 15730 - DNA, 20 bp, Artificial Sequence
  Synthetic
gccccguctagtggtaaugg

SEQ ID NO: 15731 - DNA, 18 bp, Artificial Sequence
  Synthetic
cgccggcutctcctacug

SEQ ID NO: 15732 - DNA, 22 bp, Artificial Sequence
  Synthetic
gttcatgtugggcttgctctug

SEQ ID NO: 15733 - DNA, 20 bp, Artificial Sequence
  Synthetic
atccagcugtggcagttuct

SEQ ID NO: 15734 - DNA, 28 bp, Artificial Sequence
  Synthetic
gagaaggaaaacuatggtaggaaacugg

SEQ ID NO: 15735 - DNA, 24 bp, Artificial Sequence
  Synthetic
agutatgcuggcacaagcaaaaat

SEQ ID NO: 15736 - DNA, 28 bp, Artificial Sequence
  Synthetic
ttgagatcatctccuaactccctatguc

SEQ ID NO: 15737 - DNA, 29 bp, Artificial Sequence
  Synthetic
gtacatcaggguactttgaacattccaua

SEQ ID NO: 15738 - DNA, 21 bp, Artificial Sequence
  Synthetic
cagagaaccugcagcaugaca

SEQ ID NO: 15739 - DNA, 22 bp, Artificial Sequence
  Synthetic
tgctctttgcauactgcaguga

SEQ ID NO: 15740 - DNA, 29 bp, Artificial Sequence
  Synthetic
actatgaaugagcagaaaaucatagcuaa

SEQ ID NO: 15741 - DNA, 24 bp, Artificial Sequence
  Synthetic
cctgtgtgaggaugagctcttuac

SEQ ID NO: 15742 - DNA, 25 bp, Artificial Sequence
  Synthetic
gtttgacctggugatgcttttcauc

SEQ ID NO: 15743 - DNA, 25 bp, Artificial Sequence
  Synthetic
tgaacagagaaugtactcuggagca

SEQ ID NO: 15744 - DNA, 25 bp, Artificial Sequence
  Synthetic
aatgaagcugaagttgatacugcct

SEQ ID NO: 15745 - DNA, 21 bp, Artificial Sequence
  Synthetic
ccaccaccucccaccaatuat

SEQ ID NO: 15746 - DNA, 22 bp, Artificial Sequence
  Synthetic
gcgaguggagttugggaaagat

SEQ ID NO: 15747 - DNA, 25 bp, Artificial Sequence
  Synthetic
cagcttttcatgutggatcaggtug

SEQ ID NO: 15748 - DNA, 23 bp, Artificial Sequence
  Synthetic
agaatacgacacucaggauggga

SEQ ID NO: 15749 - DNA, 25 bp, Artificial Sequence
  Synthetic
tgtggaatuccccatgaacatucaa

SEQ ID NO: 15750 - DNA, 24 bp, Artificial Sequence
  Synthetic
gagagaagtuggagtccatgtcug

SEQ ID NO: 15751 - DNA, 23 bp, Artificial Sequence
  Synthetic
acttcuagggagtcttgugggaa

SEQ ID NO: 15752 - DNA, 23 bp, Artificial Sequence
  Synthetic
ggttgttttcugagggcaaugat

SEQ ID NO: 15753 - DNA, 28 bp, Artificial Sequence
  Synthetic
gggtcacattcugaatttttctcttcug

SEQ ID NO: 15754 - DNA, 25 bp, Artificial Sequence
  Synthetic
ggaactaatccuttcctccatguga

SEQ ID NO: 15755 - DNA, 25 bp, Artificial Sequence
  Synthetic
gtcctatgctuctgcctacacuaac

SEQ ID NO: 15756 - DNA, 23 bp, Artificial Sequence
  Synthetic
tgtagttgauggaccaggaguga

SEQ ID NO: 15757 - DNA, 22 bp, Artificial Sequence
  Synthetic
atttcagtgccutggtgacugt

SEQ ID NO: 15758 - DNA, 28 bp, Artificial Sequence
  Synthetic
gaggtcaagtucccatatgtaagatucc

SEQ ID NO: 15759 - DNA, 26 bp, Artificial Sequence
  Synthetic
gctcatuggaagaaaccaaacatcuc

SEQ ID NO: 15760 - DNA, 27 bp, Artificial Sequence
  Synthetic
ggaatacaguaagggaagtattuggct

SEQ ID NO: 15761 - DNA, 23 bp, Artificial Sequence
  Synthetic
gtgtcaagcaguctccatacuca

SEQ ID NO: 15762 - DNA, 23 bp, Artificial Sequence
  Synthetic
ggaaaccutccagtuggacacaa

SEQ ID NO: 15763 - DNA, 20 bp, Artificial Sequence
  Synthetic
gcccatggaucccccaauag

SEQ ID NO: 15764 - DNA, 25 bp, Artificial Sequence
  Synthetic
agguatctcuacaaaacccaccaga

SEQ ID NO: 15765 - DNA, 29 bp, Artificial Sequence
  Synthetic
gggucccaaaaattatauaagcacagaag

SEQ ID NO: 15766 - DNA, 24 bp, Artificial Sequence
  Synthetic
cgtaagcuacagcugaaggaagaa

SEQ ID NO: 15767 - DNA, 21 bp, Artificial Sequence
  Synthetic
gttcaccacugtctcguccag

SEQ ID NO: 15768 - DNA, 28 bp, Artificial Sequence
  Synthetic
aaaggttcactacuagtaaactgcaguc

SEQ ID NO: 15769 - DNA, 26 bp, Artificial Sequence
  Synthetic
acagacaatgtcaucacaggaggaua

SEQ ID NO: 15770 - DNA, 32 bp, Artificial Sequence
  Synthetic
tttacaagaaaaatcaaucttctgttcaggug

SEQ ID NO: 15771 - DNA, 22 bp, Artificial Sequence
  Synthetic
ggactgtaccugccaacaacut

SEQ ID NO: 15772 - DNA, 30 bp, Artificial Sequence
  Synthetic
tgagttttgaguattttcaaaagctucaga

SEQ ID NO: 15773 - DNA, 30 bp, Artificial Sequence
  Synthetic
ttcactgagtagtutgcattggatatguaa

SEQ ID NO: 15774 - DNA, 24 bp, Artificial Sequence
  Synthetic
gaugttaatgugcaccccacaaag

SEQ ID NO: 15775 - DNA, 22 bp, Artificial Sequence
  Synthetic
ccccagagaaguagctggauga

SEQ ID NO: 15776 - DNA, 22 bp, Artificial Sequence
  Synthetic
gaagtggcugccaaaaaucaga

SEQ ID NO: 15777 - DNA, 24 bp, Artificial Sequence
  Synthetic
acagaataaaggagguaggctgua

SEQ ID NO: 15778 - DNA, 21 bp, Artificial Sequence
  Synthetic
gggctgtgugaatcctcagug

SEQ ID NO: 15779 - DNA, 20 bp, Artificial Sequence
  Synthetic
tgctcccuggaccattgtug

SEQ ID NO: 15780 - DNA, 29 bp, Artificial Sequence
  Synthetic
ctatgacagcatuatttcttgttccctug

SEQ ID NO: 15781 - DNA, 28 bp, Artificial Sequence
  Synthetic
aaatgcttagtauctgcttgatcacuga

SEQ ID NO: 15782 - DNA, 23 bp, Artificial Sequence
  Synthetic
gaagtggacugtggaacacatug

SEQ ID NO: 15783 - DNA, 29 bp, Artificial Sequence
  Synthetic
acatcccacagugcataaataaccataut

SEQ ID NO: 15784 - DNA, 23 bp, Artificial Sequence
  Synthetic
gtctggctcutctcctctttcuc

SEQ ID NO: 15785 - DNA, 21 bp, Artificial Sequence
  Synthetic
actuaccaacacacggccauc

SEQ ID NO: 15786 - DNA, 23 bp, Artificial Sequence
  Synthetic
gactgtggtuctcattgcatucc

SEQ ID NO: 15787 - DNA, 27 bp, Artificial Sequence
  Synthetic
gttcagtttuaaataggtgttguccgt

SEQ ID NO: 15788 - DNA, 30 bp, Artificial Sequence
  Synthetic
cataggtttauattttcagagcugaccgaa

SEQ ID NO: 15789 - DNA, 22 bp, Artificial Sequence
  Synthetic
cagguagggcctucaaaccaat

SEQ ID NO: 15790 - DNA, 25 bp, Artificial Sequence
  Synthetic
tgtggcttttuaacccatagctgut

SEQ ID NO: 15791 - DNA, 29 bp, Artificial Sequence
  Synthetic
agttgccatatcacuctcacactaatuac

SEQ ID NO: 15792 - DNA, 21 bp, Artificial Sequence
  Synthetic
cgggcuccatcaacaucacag

SEQ ID NO: 15793 - DNA, 21 bp, Artificial Sequence
  Synthetic
cactagcccacuccagcuaaa

SEQ ID NO: 15794 - DNA, 22 bp, Artificial Sequence
  Synthetic
cagtgagcaugtgacuggagag

SEQ ID NO: 15795 - DNA, 22 bp, Artificial Sequence
  Synthetic
cttgggtgcugagtatgagcut

SEQ ID NO: 15796 - DNA, 24 bp, Artificial Sequence
  Synthetic
cccatctgtuggtgctttttctut

SEQ ID NO: 15797 - DNA, 20 bp, Artificial Sequence
  Synthetic
ggtcccguctgtgtccctua

SEQ ID NO: 15798 - DNA, 23 bp, Artificial Sequence
  Synthetic
acaggaaauggaggtctgctaut

SEQ ID NO: 15799 - DNA, 23 bp, Artificial Sequence
  Synthetic
ccaccagaugagagtcgatuagg

SEQ ID NO: 15800 - DNA, 30 bp, Artificial Sequence
  Synthetic
ttgttgtggattugtctttgttcttaatuc

SEQ ID NO: 15801 - DNA, 27 bp, Artificial Sequence
  Synthetic
cgactttcttctutagcaagagcacua

SEQ ID NO: 15802 - DNA, 21 bp, Artificial Sequence
  Synthetic
gttttcacugttgcgtugcct

SEQ ID NO: 15803 - DNA, 21 bp, Artificial Sequence
  Synthetic
gacctgcaaucaccagacuca

SEQ ID NO: 15804 - DNA, 19 bp, Artificial Sequence
  Synthetic
tcgugccggattucgaagt

SEQ ID NO: 15805 - DNA, 17 bp, Artificial Sequence
  Synthetic
gcuctccucgccccaga

SEQ ID NO: 15806 - DNA, 24 bp, Artificial Sequence
  Synthetic
ggtgcaauttaggauacccccaaa

SEQ ID NO: 15807 - DNA, 24 bp, Artificial Sequence
  Synthetic
caagatgcgugatgtcatacugga

SEQ ID NO: 15808 - DNA, 27 bp, Artificial Sequence
  Synthetic
tutagcaaataaacaugccaaccaagt

SEQ ID NO: 15809 - DNA, 26 bp, Artificial Sequence
  Synthetic
gagaggagaggagauaugaatuacct

SEQ ID NO: 15810 - DNA, 28 bp, Artificial Sequence
  Synthetic
cgatgacatcautagcctagaaucaagt

SEQ ID NO: 15811 - DNA, 24 bp, Artificial Sequence
  Synthetic
agaaaagaacccuggaaacaccuc

SEQ ID NO: 15812 - DNA, 24 bp, Artificial Sequence
  Synthetic
ttttucccacagagtcugaagcaa

SEQ ID NO: 15813 - DNA, 23 bp, Artificial Sequence
  Synthetic
gctgtaggaaucaactctccuct

SEQ ID NO: 15814 - DNA, 30 bp, Artificial Sequence
  Synthetic
gctctgcctattucagtgttttatcttuac

SEQ ID NO: 15815 - DNA, 23 bp, Artificial Sequence
  Synthetic
agaacgggutcttgcttgaugat

SEQ ID NO: 15816 - DNA, 23 bp, Artificial Sequence
  Synthetic
gagcaguatgagcauggaagaga

SEQ ID NO: 15817 - DNA, 30 bp, Artificial Sequence
  Synthetic
ggaaaattaucaagaaaaucccttcaggua

SEQ ID NO: 15818 - DNA, 21 bp, Artificial Sequence
  Synthetic
aaagaccugttggguggacaa

SEQ ID NO: 15819 - DNA, 23 bp, Artificial Sequence
  Synthetic
ctatacacuaccgcttccauggg

SEQ ID NO: 15820 - DNA, 22 bp, Artificial Sequence
  Synthetic
tgtccatacugccccttuaacg

SEQ ID NO: 15821 - DNA, 26 bp, Artificial Sequence
  Synthetic
ttacaaatguggactgttaggcugaa

SEQ ID NO: 15822 - DNA, 30 bp, Artificial Sequence
  Synthetic
aagatgcatatgtaaauggtggtctaacut

SEQ ID NO: 15823 - DNA, 22 bp, Artificial Sequence
  Synthetic
cacctttugcctcacguagagt

SEQ ID NO: 15824 - DNA, 21 bp, Artificial Sequence
  Synthetic
gcggcttugggttctguagac

SEQ ID NO: 15825 - DNA, 29 bp, Artificial Sequence
  Synthetic
tggtgccatagcguaatttgtaatatgua

SEQ ID NO: 15826 - DNA, 21 bp, Artificial Sequence
  Synthetic
ggccactugcatacaccaugt

SEQ ID NO: 15827 - DNA, 24 bp, Artificial Sequence
  Synthetic
ttttatcctcguctggtggaaugg

SEQ ID NO: 15828 - DNA, 25 bp, Artificial Sequence
  Synthetic
gtaactgctgcauctgtaaaagcug

SEQ ID NO: 15829 - DNA, 26 bp, Artificial Sequence
  Synthetic
ttctcagcattugatgatgatgguga

SEQ ID NO: 15830 - DNA, 26 bp, Artificial Sequence
  Synthetic
tcttacatgauttgcaatgcucaaca

SEQ ID NO: 15831 - DNA, 30 bp, Artificial Sequence
  Synthetic
gtuagtggattaaaatcucccaagaggaat

SEQ ID NO: 15832 - DNA, 21 bp, Artificial Sequence
  Synthetic
ccaagacuccaaagcccagua

SEQ ID NO: 15833 - DNA, 21 bp, Artificial Sequence
  Synthetic
gttcagccauccagaaugggt

SEQ ID NO: 15834 - DNA, 19 bp, Artificial Sequence
  Synthetic
caggatgugtccggagugg

SEQ ID NO: 15835 - DNA, 25 bp, Artificial Sequence
  Synthetic
agaugtccaacaaguccaagaagag

SEQ ID NO: 15836 - DNA, 22 bp, Artificial Sequence
  Synthetic
ctgtaatuaaccgccagcucct

SEQ ID NO: 15837 - DNA, 19 bp, Artificial Sequence
  Synthetic
ggccacuacctgtgcaaug

SEQ ID NO: 15838 - DNA, 20 bp, Artificial Sequence
  Synthetic
catgctcuccgtcagugaca

SEQ ID NO: 15839 - DNA, 19 bp, Artificial Sequence
  Synthetic
tctggcucccacctttucg

SEQ ID NO: 15840 - DNA, 18 bp, Artificial Sequence
  Synthetic
gggctgugcaacaagugt

SEQ ID NO: 15841 - DNA, 20 bp, Artificial Sequence
  Synthetic
tggttcugggagtcgtgauc

SEQ ID NO: 15842 - DNA, 18 bp, Artificial Sequence
  Synthetic
cccagagggugtgagguc

SEQ ID NO: 15843 - DNA, 17 bp, Artificial Sequence
  Synthetic
tgcatucgcgccucgat

SEQ ID NO: 15844 - DNA, 20 bp, Artificial Sequence
  Synthetic
gaagccagacugcagguact

SEQ ID NO: 15845 - DNA, 19 bp, Artificial Sequence
  Synthetic
cgcaugaagaggccctucc

SEQ ID NO: 15846 - DNA, 17 bp, Artificial Sequence
  Synthetic
ctcucgcggaucgccat

SEQ ID NO: 15847 - DNA, 18 bp, Artificial Sequence
  Synthetic
ccggucgcacagucaagg

SEQ ID NO: 15848 - DNA, 18 bp, Artificial Sequence
  Synthetic
ccgctuacggccaaguct

SEQ ID NO: 15849 - DNA, 18 bp, Artificial Sequence
  Synthetic
ggagccccuctctgtugg

SEQ ID NO: 15850 - DNA, 20 bp, Artificial Sequence
  Synthetic
ggcctccutctcaaccucag

SEQ ID NO: 15851 - DNA, 18 bp, Artificial Sequence
  Synthetic
ccacgcugacctuggagt

SEQ ID NO: 15852 - DNA, 23 bp, Artificial Sequence
  Synthetic
gtgttgttuccctcagtgguaca

SEQ ID NO: 15853 - DNA, 22 bp, Artificial Sequence
  Synthetic
gggagcaucttcagcauacaca

SEQ ID NO: 15854 - DNA, 28 bp, Artificial Sequence
  Synthetic
gttattgcttgagucttttcagcaugaa

SEQ ID NO: 15855 - DNA, 26 bp, Artificial Sequence
  Synthetic
cttutccattttctguaaggccaact

SEQ ID NO: 15856 - DNA, 26 bp, Artificial Sequence
  Synthetic
cttugaaccaagaauaagtcatugct

SEQ ID NO: 15857 - DNA, 27 bp, Artificial Sequence
  Synthetic
ttctgaggtucttcaataccttugacc

SEQ ID NO: 15858 - DNA, 26 bp, Artificial Sequence
  Synthetic
ctcttacaaggcugttttactccugt

SEQ ID NO: 15859 - DNA, 26 bp, Artificial Sequence
  Synthetic
agggatgcacuttcaattagaucagg

SEQ ID NO: 15860 - DNA, 23 bp, Artificial Sequence
  Synthetic
atttugggcagagaactuggact

SEQ ID NO: 15861 - DNA, 28 bp, Artificial Sequence
  Synthetic
attccctgagaugacagattattucaga

SEQ ID NO: 15862 - DNA, 28 bp, Artificial Sequence
  Synthetic
agctttgtcaagutaaactggtgtauct

SEQ ID NO: 15863 - DNA, 25 bp, Artificial Sequence
  Synthetic
cgagguataagccuagccagaaaaa

SEQ ID NO: 15864 - DNA, 28 bp, Artificial Sequence
  Synthetic
tgaactgagtuagagtgcttttctaugg

SEQ ID NO: 15865 - DNA, 22 bp, Artificial Sequence
  Synthetic
ccacagauctctggcaugaagg

SEQ ID NO: 15866 - DNA, 29 bp, Artificial Sequence
  Synthetic
cctgcctacutactatttaaacuccaaca

SEQ ID NO: 15867 - DNA, 25 bp, Artificial Sequence
  Synthetic
ctctccctcuaccatcagagauact

SEQ ID NO: 15868 - DNA, 28 bp, Artificial Sequence
  Synthetic
tggacattcatttugttcttcctcagut

SEQ ID NO: 15869 - DNA, 29 bp, Artificial Sequence
  Synthetic
gatctagacagtcuatcatcccctaacut

SEQ ID NO: 15870 - DNA, 24 bp, Artificial Sequence
  Synthetic
aggtgatgcucatgcttttgauga

SEQ ID NO: 15871 - DNA, 24 bp, Artificial Sequence
  Synthetic
cutcttttaagttcucgggagcca

SEQ ID NO: 15872 - DNA, 24 bp, Artificial Sequence
  Synthetic
ccactctggucaaccttgauaacg

SEQ ID NO: 15873 - DNA, 22 bp, Artificial Sequence
  Synthetic
cccaggcauatgctatgaugct

SEQ ID NO: 15874 - DNA, 22 bp, Artificial Sequence
  Synthetic
cacaggaggaautgcaaccgua

SEQ ID NO: 15875 - DNA, 29 bp, Artificial Sequence
  Synthetic
aaccagugacaagtaatttacaugaagga

SEQ ID NO: 15876 - DNA, 27 bp, Artificial Sequence
  Synthetic
tgaagtaagcaucttctttgtcaucca

SEQ ID NO: 15877 - DNA, 27 bp, Artificial Sequence
  Synthetic
agcactgatcaaautcataaggaguga

SEQ ID NO: 15878 - DNA, 28 bp, Artificial Sequence
  Synthetic
agcaaatatcatugtcagacctguaagg

SEQ ID NO: 15879 - DNA, 27 bp, Artificial Sequence
  Synthetic
tggcatgagugaaatatagtcaacugt

SEQ ID NO: 15880 - DNA, 28 bp, Artificial Sequence
  Synthetic
gttaaaaagccaucactttacaguggaa

SEQ ID NO: 15881 - DNA, 22 bp, Artificial Sequence
  Synthetic
gacctgctucagatggttccut

SEQ ID NO: 15882 - DNA, 24 bp, Artificial Sequence
  Synthetic
gggttccautttcaaagguaacga

SEQ ID NO: 15883 - DNA, 23 bp, Artificial Sequence
  Synthetic
actttggtucaacaggactggug

SEQ ID NO: 15884 - DNA, 27 bp, Artificial Sequence
  Synthetic
tgtactgacaucatcaaggtcacuact

SEQ ID NO: 15885 - DNA, 28 bp, Artificial Sequence
  Synthetic
gctacacaggauattttgaaggcacuat

SEQ ID NO: 15886 - DNA, 25 bp, Artificial Sequence
  Synthetic
accatggacgutttatccatagcug

SEQ ID NO: 15887 - DNA, 25 bp, Artificial Sequence
  Synthetic
agaacccaaaucaagugcaaagact

SEQ ID NO: 15888 - DNA, 27 bp, Artificial Sequence
  Synthetic
tcgtagcaagugatggatuaagagaga

SEQ ID NO: 15889 - DNA, 28 bp, Artificial Sequence
  Synthetic
caaggcatttaacuggaagtccaattua

SEQ ID NO: 15890 - DNA, 26 bp, Artificial Sequence
  Synthetic
gtgatctgctagutcagccttagaut

SEQ ID NO: 15891 - DNA, 28 bp, Artificial Sequence
  Synthetic
cttgtaaaattuggtaagattggcuggt

SEQ ID NO: 15892 - DNA, 25 bp, Artificial Sequence
  Synthetic
cucttgagtacugagaccaaaagca

SEQ ID NO: 15893 - DNA, 24 bp, Artificial Sequence
  Synthetic
ccttcaauttcctcauggccaaag

SEQ ID NO: 15894 - DNA, 22 bp, Artificial Sequence
  Synthetic
ctactccauctgcatcuggcat

SEQ ID NO: 15895 - DNA, 28 bp, Artificial Sequence
  Synthetic
cttcaaagaacaacauaataagguggct

SEQ ID NO: 15896 - DNA, 30 bp, Artificial Sequence
  Synthetic
agtaaaatgccagcaaauatatcacgagua

SEQ ID NO: 15897 - DNA, 27 bp, Artificial Sequence
  Synthetic
ggaggaggaaaguttccagagauagat

SEQ ID NO: 15898 - DNA, 27 bp, Artificial Sequence
  Synthetic
agtttcgttggcaguaatttttgctut

SEQ ID NO: 15899 - DNA, 23 bp, Artificial Sequence
  Synthetic
cgggatgaccautctcttgtguc

SEQ ID NO: 15900 - DNA, 24 bp, Artificial Sequence
  Synthetic
ctataacacucagccagttccugt

SEQ ID NO: 15901 - DNA, 20 bp, Artificial Sequence
  Synthetic
ctggcccugctgcataguag

SEQ ID NO: 15902 - DNA, 23 bp, Artificial Sequence
  Synthetic
cutgagcaccugaccaaaaagat

SEQ ID NO: 15903 - DNA, 25 bp, Artificial Sequence
  Synthetic
ctcaaatacttuaccagtggagcug

SEQ ID NO: 15904 - DNA, 20 bp, Artificial Sequence
  Synthetic
caccgggaaggccuatcauc

SEQ ID NO: 15905 - DNA, 22 bp, Artificial Sequence
  Synthetic
ggtggugacgagagagtaggut

SEQ ID NO: 15906 - DNA, 21 bp, Artificial Sequence
  Synthetic
gttctaggautgcggtgguct

SEQ ID NO: 15907 - DNA, 21 bp, Artificial Sequence
  Synthetic
cggcugaacaggtgacugaat

SEQ ID NO: 15908 - DNA, 17 bp, Artificial Sequence
  Synthetic
gggcaggutgggcatug

SEQ ID NO: 15909 - DNA, 18 bp, Artificial Sequence
  Synthetic
tgaacccuggacccugct

SEQ ID NO: 15910 - DNA, 17 bp, Artificial Sequence
  Synthetic
gccccugagcgtcauct

SEQ ID NO: 15911 - DNA, 21 bp, Artificial Sequence
  Synthetic
ctgtgcgucactgtacaccut

SEQ ID NO: 15912 - DNA, 18 bp, Artificial Sequence
  Synthetic
cctggccaaugtgucgga

SEQ ID NO: 15913 - DNA, 19 bp, Artificial Sequence
  Synthetic
ggcaugggacagagtcgut

SEQ ID NO: 15914 - DNA, 23 bp, Artificial Sequence
  Synthetic
gcttcttccugttcatcctggug

SEQ ID NO: 15915 - DNA, 23 bp, Artificial Sequence
  Synthetic
ggcagcucagaacctggtatcua

SEQ ID NO: 15916 - DNA, 17 bp, Artificial Sequence
  Synthetic
tccacugccaggcugac

SEQ ID NO: 15917 - DNA, 18 bp, Artificial Sequence
  Synthetic
gcccccucctcaccttuc

SEQ ID NO: 15918 - DNA, 20 bp, Artificial Sequence
  Synthetic
agcagcucacctucaaggac

SEQ ID NO: 15919 - DNA, 17 bp, Artificial Sequence
  Synthetic
ggcagggcugaagccuc

SEQ ID NO: 15920 - DNA, 20 bp, Artificial Sequence
  Synthetic
tgtctgtccugggagtcuca

SEQ ID NO: 15921 - DNA, 21 bp, Artificial Sequence
  Synthetic
cctcctucagcagctugaaga

SEQ ID NO: 15922 - DNA, 18 bp, Artificial Sequence
  Synthetic
gagguggctgugcgaaga

SEQ ID NO: 15923 - DNA, 18 bp, Artificial Sequence
  Synthetic
gtccccugaggagcugga

SEQ ID NO: 15924 - DNA, 21 bp, Artificial Sequence
  Synthetic
ttgatcgccgcguttaagtug

SEQ ID NO: 15925 - DNA, 25 bp, Artificial Sequence
  Synthetic
agagacagagauaggaaguttcgua

SEQ ID NO: 15926 - DNA, 30 bp, Artificial Sequence
  Synthetic
tgtttgtttgtttutaggagttatgguaca

SEQ ID NO: 15927 - DNA, 32 bp, Artificial Sequence
  Synthetic
cctatttaagatatgugccttatttccctaut

SEQ ID NO: 15928 - DNA, 27 bp, Artificial Sequence
  Synthetic
gaagataccuggaaagcttactgugaa

SEQ ID NO: 15929 - DNA, 20 bp, Artificial Sequence
  Synthetic
gggaguaaaagugggacggt

SEQ ID NO: 15930 - DNA, 25 bp, Artificial Sequence
  Synthetic
gaaagaaacugcccttccatcuaca

SEQ ID NO: 15931 - DNA, 32 bp, Artificial Sequence
  Synthetic
caaatacaatgtaaagauaccaatgtcguaca

SEQ ID NO: 15932 - DNA, 28 bp, Artificial Sequence
  Synthetic
agactataactaucagccgaguagaagg

SEQ ID NO: 15933 - DNA, 24 bp, Artificial Sequence
  Synthetic
aaaacacagcauagcactaugact

SEQ ID NO: 15934 - DNA, 27 bp, Artificial Sequence
  Synthetic
gattgaatgttucaggttttcctccuc

SEQ ID NO: 15935 - DNA, 28 bp, Artificial Sequence
  Synthetic
aagtatatggutcttctgucaaaaggct

SEQ ID NO: 15936 - DNA, 19 bp, Artificial Sequence
  Synthetic
cctggtuctgctcctucgt

SEQ ID NO: 15937 - DNA, 23 bp, Artificial Sequence
  Synthetic
ctctctctggugcgttctcttuc

SEQ ID NO: 15938 - DNA, 24 bp, Artificial Sequence
  Synthetic
cagaaagaggutatgagcgucaca

SEQ ID NO: 15939 - DNA, 29 bp, Artificial Sequence
  Synthetic
cgacaatgtaguaagtcaaaatctcucac

SEQ ID NO: 15940 - DNA, 19 bp, Artificial Sequence
  Synthetic
cagcuaccgcgaugagagg

SEQ ID NO: 15941 - DNA, 18 bp, Artificial Sequence
  Synthetic
cacaggctucgccgagua

SEQ ID NO: 15942 - DNA, 24 bp, Artificial Sequence
  Synthetic
aagtgtttucagtgtctgugacca

SEQ ID NO: 15943 - DNA, 22 bp, Artificial Sequence
  Synthetic
ggtcacttcugggtctgugaga

SEQ ID NO: 15944 - DNA, 26 bp, Artificial Sequence
  Synthetic
tgtgtccaaagcaagcuatcttctua

SEQ ID NO: 15945 - DNA, 27 bp, Artificial Sequence
  Synthetic
gaaaacutatcatcucccacagagaca

SEQ ID NO: 15946 - DNA, 30 bp, Artificial Sequence
  Synthetic
cttccccatgauaaacactacagtattugt

SEQ ID NO: 15947 - DNA, 32 bp, Artificial Sequence
  Synthetic
tgatattactttcatuctcagacttgggauaa

SEQ ID NO: 15948 - DNA, 23 bp, Artificial Sequence
  Synthetic
agggatuagagagggagugaagt

SEQ ID NO: 15949 - DNA, 22 bp, Artificial Sequence
  Synthetic
cacacatuggagcatgccatuc

SEQ ID NO: 15950 - DNA, 27 bp, Artificial Sequence
  Synthetic
agtttgtgatuccacatttctctucca

SEQ ID NO: 15951 - DNA, 30 bp, Artificial Sequence
  Synthetic
actutggagagagaacaaauaaatggtuac

SEQ ID NO: 15952 - DNA, 27 bp, Artificial Sequence
  Synthetic
gttgtgcttttugctaaaatgcatgut

SEQ ID NO: 15953 - DNA, 20 bp, Artificial Sequence
  Synthetic
cagctuggacacggcttuac

SEQ ID NO: 15954 - DNA, 24 bp, Artificial Sequence
  Synthetic
cattgccacugtcttttccttucc

SEQ ID NO: 15955 - DNA, 22 bp, Artificial Sequence
  Synthetic
tgccaccuggtaagaaaagcuc

SEQ ID NO: 15956 - DNA, 29 bp, Artificial Sequence
  Synthetic
tttcagcaauagcagcauctataagaaua

SEQ ID NO: 15957 - DNA, 22 bp, Artificial Sequence
  Synthetic
accagacgucacttucaaacgt

SEQ ID NO: 15958 - DNA, 28 bp, Artificial Sequence
  Synthetic
ctggaattattacugaagttgctggaug

SEQ ID NO: 15959 - DNA, 29 bp, Artificial Sequence
  Synthetic
tcaattagcugaacaatttgcttgaaugt

SEQ ID NO: 15960 - DNA, 20 bp, Artificial Sequence
  Synthetic
cttgugcacgacgatgtcug

SEQ ID NO: 15961 - DNA, 22 bp, Artificial Sequence
  Synthetic
ggccacuaaagtgtgcucagaa

SEQ ID NO: 15962 - DNA, 21 bp, Artificial Sequence
  Synthetic
gtgatauccggactgguagcc

SEQ ID NO: 15963 - DNA, 26 bp, Artificial Sequence
  Synthetic
aaagaattgucttctctcugccaact

SEQ ID NO: 15964 - DNA, 21 bp, Artificial Sequence
  Synthetic
cgagauggccttgaagucacc

SEQ ID NO: 15965 - DNA, 24 bp, Artificial Sequence
  Synthetic
gcctaccucacctgtttcctguat

SEQ ID NO: 15966 - DNA, 27 bp, Artificial Sequence
  Synthetic
tctggauggaaggacaaaaagaaauga

SEQ ID NO: 15967 - DNA, 26 bp, Artificial Sequence
  Synthetic
tgaatccttgtcutctacccctguag

SEQ ID NO: 15968 - DNA, 23 bp, Artificial Sequence
  Synthetic
atcacccugtctgctcugacaag

SEQ ID NO: 15969 - DNA, 22 bp, Artificial Sequence
  Synthetic
gatcugaaacggcgctuggaca

SEQ ID NO: 15970 - DNA, 27 bp, Artificial Sequence
  Synthetic
ggtgaccaataugaatgaggatctuga

SEQ ID NO: 15971 - DNA, 23 bp, Artificial Sequence
  Synthetic
ccggaggguaagttgtatagugg

SEQ ID NO: 15972 - DNA, 23 bp, Artificial Sequence
  Synthetic
tgcaugggcagaagggaaatuat

SEQ ID NO: 15973 - DNA, 30 bp, Artificial Sequence
  Synthetic
tgttgatactcautcaattgtgtcttucca

SEQ ID NO: 15974 - DNA, 22 bp, Artificial Sequence
  Synthetic
catgagacutcgatgcttuccc

SEQ ID NO: 15975 - DNA, 30 bp, Artificial Sequence
  Synthetic
accagaaccatutcaaaagttataatucca

SEQ ID NO: 15976 - DNA, 24 bp, Artificial Sequence
  Synthetic
caagcttguaccatgtgaggtuct

SEQ ID NO: 15977 - DNA, 25 bp, Artificial Sequence
  Synthetic
tgagctguaccaagttaaaucacca

SEQ ID NO: 15978 - DNA, 23 bp, Artificial Sequence
  Synthetic
gctgtaagaaaugcaagauggca

SEQ ID NO: 15979 - DNA, 21 bp, Artificial Sequence
  Synthetic
ggattccuaccaguacggcac

SEQ ID NO: 15980 - DNA, 24 bp, Artificial Sequence
  Synthetic
tcaaaggauttgctcucacacgaa

SEQ ID NO: 15981 - DNA, 22 bp, Artificial Sequence
  Synthetic
ggcatggaauctctgguggaag

SEQ ID NO: 15982 - DNA, 22 bp, Artificial Sequence
  Synthetic
ccaaagaggccccuatctcuca

SEQ ID NO: 15983 - DNA, 30 bp, Artificial Sequence
  Synthetic
gagaaaagctugtcttaaattguacagcaa

SEQ ID NO: 15984 - DNA, 32 bp, Artificial Sequence
  Synthetic
ttataaaaactuaagagacgatuggaggagat

SEQ ID NO: 15985 - DNA, 22 bp, Artificial Sequence
  Synthetic
gtgaccaacauggagtcgtgua

SEQ ID NO: 15986 - DNA, 30 bp, Artificial Sequence
  Synthetic
tccactcaauaaacaatcagttactuaaca

SEQ ID NO: 15987 - DNA, 21 bp, Artificial Sequence
  Synthetic
gcccaggcucagcauacaaaa

SEQ ID NO: 15988 - DNA, 27 bp, Artificial Sequence
  Synthetic
acaatagguagcaaaccatacatucaa

SEQ ID NO: 15989 - DNA, 29 bp, Artificial Sequence
  Synthetic
gattaccttttgucaaagcatcatcucaa

SEQ ID NO: 15990 - DNA, 27 bp, Artificial Sequence
  Synthetic
ctgggtcttaagugaaagtttttgcut

SEQ ID NO: 15991 - DNA, 28 bp, Artificial Sequence
  Synthetic
gattctgacctcuatgtaaactgagcug

SEQ ID NO: 15992 - DNA, 22 bp, Artificial Sequence
  Synthetic
tuttcaatctgtugccccaagc

SEQ ID NO: 15993 - DNA, 25 bp, Artificial Sequence
  Synthetic
ggactttgatguggacatgaaguga

SEQ ID NO: 15994 - DNA, 30 bp, Artificial Sequence
  Synthetic
ctcatttttaaugaacaaaacgaaagguga

SEQ ID NO: 15995 - DNA, 29 bp, Artificial Sequence
  Synthetic
acaagtggaauggaactcaaagacaauat

SEQ ID NO: 15996 - DNA, 23 bp, Artificial Sequence
  Synthetic
gtctctggaucccacaccttuac

SEQ ID NO: 15997 - DNA, 25 bp, Artificial Sequence
  Synthetic
gccactctuagggtttgggatatug

SEQ ID NO: 15998 - DNA, 32 bp, Artificial Sequence
  Synthetic
gctacttgcaaugatatacacaaaattaugac

SEQ ID NO: 15999 - DNA, 28 bp, Artificial Sequence
  Synthetic
gatcacatgctuacagttttgtgguaac

SEQ ID NO: 16000 - DNA, 28 bp, Artificial Sequence
  Synthetic
tttcagaatcacuctgcttttcaaagua

SEQ ID NO: 16001 - DNA, 25 bp, Artificial Sequence
  Synthetic
agacatgtcgcuactggagaattut

SEQ ID NO: 16002 - DNA, 27 bp, Artificial Sequence
  Synthetic
aatcccttatttugcagcaattaagug

SEQ ID NO: 16003 - DNA, 20 bp, Artificial Sequence
  Synthetic
ggaccucagagcagccaaug

SEQ ID NO: 16004 - DNA, 26 bp, Artificial Sequence
  Synthetic
gtcacagattcuaatgtggacaugct

SEQ ID NO: 16005 - DNA, 25 bp, Artificial Sequence
  Synthetic
caagctgcatguatgtatgtgtguc

SEQ ID NO: 16006 - DNA, 23 bp, Artificial Sequence
  Synthetic
agtaggtttucccggtttugaca

SEQ ID NO: 16007 - DNA, 17 bp, Artificial Sequence
  Synthetic
cagcaggccutgggtuc

SEQ ID NO: 16008 - DNA, 32 bp, Artificial Sequence
  Synthetic
aatctattattgttttcutccaactgtcctug

SEQ ID NO: 16009 - DNA, 23 bp, Artificial Sequence
  Synthetic
tgaaucgtgtgguagaggaggaa

SEQ ID NO: 16010 - DNA, 28 bp, Artificial Sequence
  Synthetic
gttttatctaagtccucttctgcagcua

SEQ ID NO: 16011 - DNA, 29 bp, Artificial Sequence
  Synthetic
gcacaggttattuacattgatgttcaguc

SEQ ID NO: 16012 - DNA, 28 bp, Artificial Sequence
  Synthetic
tgccttuaagaagaaaauagcaagagua

SEQ ID NO: 16013 - DNA, 29 bp, Artificial Sequence
  Synthetic
gattaattattgccautctcatcccagug

SEQ ID NO: 16014 - DNA, 27 bp, Artificial Sequence
  Synthetic
aaactacugagcaggautttcctttut

SEQ ID NO: 16015 - DNA, 28 bp, Artificial Sequence
  Synthetic
cttuggaaaaggagaaagagauacauct

SEQ ID NO: 16016 - DNA, 21 bp, Artificial Sequence
  Synthetic
cccagtctuacgtgttgccut

SEQ ID NO: 16017 - DNA, 20 bp, Artificial Sequence
  Synthetic
gtggtguaactcgtcucggt

SEQ ID NO: 16018 - DNA, 22 bp, Artificial Sequence
  Synthetic
gtgctgaggaucagggattuca

SEQ ID NO: 16019 - DNA, 25 bp, Artificial Sequence
  Synthetic
aattaccttgccuagtcacagucac

SEQ ID NO: 16020 - DNA, 29 bp, Artificial Sequence
  Synthetic
acttagttaacttacuggcttctgttgut

SEQ ID NO: 16021 - DNA, 28 bp, Artificial Sequence
  Synthetic
ctctggacaagutaaatccatacacuct

SEQ ID NO: 16022 - DNA, 28 bp, Artificial Sequence
  Synthetic
actaaaattgutgattgtgaucgaccca

SEQ ID NO: 16023 - DNA, 27 bp, Artificial Sequence
  Synthetic
gttagacutaaaagagcugaagcacct

SEQ ID NO: 16024 - DNA, 27 bp, Artificial Sequence
  Synthetic
actacatttgutccactactugcagaa

SEQ ID NO: 16025 - DNA, 29 bp, Artificial Sequence
  Synthetic
gacataacatttugttgtgtgagucaaga

SEQ ID NO: 16026 - DNA, 22 bp, Artificial Sequence
  Synthetic
cccaacuccagtgatgaagugt

SEQ ID NO: 16027 - DNA, 28 bp, Artificial Sequence
  Synthetic
agctgatgattguatggaatctattgug

SEQ ID NO: 16028 - DNA, 18 bp, Artificial Sequence
  Synthetic
aguaccacggcctgtucc

SEQ ID NO: 16029 - DNA, 29 bp, Artificial Sequence
  Synthetic
gcagttgacttautcagcatattctgugt

SEQ ID NO: 16030 - DNA, 25 bp, Artificial Sequence
  Synthetic
gctgaagttguagcaggaactacua

SEQ ID NO: 16031 - DNA, 20 bp, Artificial Sequence
  Synthetic
gguccaggtacugagggaca

SEQ ID NO: 16032 - DNA, 24 bp, Artificial Sequence
  Synthetic
gcaaaataccaucaccgccatcua

SEQ ID NO: 16033 - DNA, 23 bp, Artificial Sequence
  Synthetic
cgagcactguccagtattcuacc

SEQ ID NO: 16034 - DNA, 27 bp, Artificial Sequence
  Synthetic
acaactcagaagcautttctctuaccc

SEQ ID NO: 16035 - DNA, 28 bp, Artificial Sequence
  Synthetic
gtgtggttttacauaggccatttttcut

SEQ ID NO: 16036 - DNA, 28 bp, Artificial Sequence
  Synthetic
accagtttcattuccaatgatggttcua

SEQ ID NO: 16037 - DNA, 23 bp, Artificial Sequence
  Synthetic
tgttcactctgutacagcaccut

SEQ ID NO: 16038 - DNA, 23 bp, Artificial Sequence
  Synthetic
ttaaataggugcgatgcacggua

SEQ ID NO: 16039 - DNA, 22 bp, Artificial Sequence
  Synthetic
tgggtggaauggactacuccaa

SEQ ID NO: 16040 - DNA, 29 bp, Artificial Sequence
  Synthetic
catcttgtgagagucacttcataauccaa

SEQ ID NO: 16041 - DNA, 28 bp, Artificial Sequence
  Synthetic
agagatttgacauaatggcatgattugt

SEQ ID NO: 16042 - DNA, 30 bp, Artificial Sequence
  Synthetic
gattagagggtugaaagaaggactattuga

SEQ ID NO: 16043 - DNA, 26 bp, Artificial Sequence
  Synthetic
cauggaccaacccaagtatuaagagt

SEQ ID NO: 16044 - DNA, 28 bp, Artificial Sequence
  Synthetic
agtagaataatcaacagugcatgaggug

SEQ ID NO: 16045 - DNA, 27 bp, Artificial Sequence
  Synthetic
tctaggtcucatcaaactcttugcaag

SEQ ID NO: 16046 - DNA, 25 bp, Artificial Sequence
  Synthetic
gtccgaaugtaagaatgtugcaagt

SEQ ID NO: 16047 - DNA, 29 bp, Artificial Sequence
  Synthetic
gcuaattacattgtcuggaaaacaaacca

SEQ ID NO: 16048 - DNA, 23 bp, Artificial Sequence
  Synthetic
tctctgaagaucaactgccucca

SEQ ID NO: 16049 - DNA, 29 bp, Artificial Sequence
  Synthetic
cttctcttttgtugggatttcttgaugag

SEQ ID NO: 16050 - DNA, 22 bp, Artificial Sequence
  Synthetic
gtcaacuatctccaugcacgct

SEQ ID NO: 16051 - DNA, 28 bp, Artificial Sequence
  Synthetic
cagtgattcaauggcaaaggagttuaat

SEQ ID NO: 16052 - DNA, 25 bp, Artificial Sequence
  Synthetic
gtctttgctuggttttgttgtcuct

SEQ ID NO: 16053 - DNA, 23 bp, Artificial Sequence
  Synthetic
ccaccagugaatctcagaacugt

SEQ ID NO: 16054 - DNA, 29 bp, Artificial Sequence
  Synthetic
aagtgagaacaauccctgtataaagcaut

SEQ ID NO: 16055 - DNA, 18 bp, Artificial Sequence
  Synthetic
gggtccaccccugctcua

SEQ ID NO: 16056 - DNA, 24 bp, Artificial Sequence
  Synthetic
catctcaccccutgtcttttucct

SEQ ID NO: 16057 - DNA, 21 bp, Artificial Sequence
  Synthetic
ggtctcugcagcaaaaagucc

SEQ ID NO: 16058 - DNA, 24 bp, Artificial Sequence
  Synthetic
cagaggtttuctctttcagucgct

SEQ ID NO: 16059 - DNA, 21 bp, Artificial Sequence
  Synthetic
gatacagggutcagtgugggt

SEQ ID NO: 16060 - DNA, 26 bp, Artificial Sequence
  Synthetic
gctgaaattgcagaaucaggacttua

SEQ ID NO: 16061 - DNA, 20 bp, Artificial Sequence
  Synthetic
gtgacucagggactgaugcc

SEQ ID NO: 16062 - DNA, 27 bp, Artificial Sequence
  Synthetic
acttttcgttcucttcattcttuccca

SEQ ID NO: 16063 - DNA, 22 bp, Artificial Sequence
  Synthetic
gctcaaccagutcctcaaaguc

SEQ ID NO: 16064 - DNA, 21 bp, Artificial Sequence
  Synthetic
agcctctccugcactccttua

SEQ ID NO: 16065 - DNA, 22 bp, Artificial Sequence
  Synthetic
cattttcacaagcugggcctug

SEQ ID NO: 16066 - DNA, 20 bp, Artificial Sequence
  Synthetic
cttggctcugtggagtcgut

SEQ ID NO: 16067 - DNA, 19 bp, Artificial Sequence
  Synthetic
gtggucagctcctucacga

SEQ ID NO: 16068 - DNA, 22 bp, Artificial Sequence
  Synthetic
atggtctcttucttgtgggcut

SEQ ID NO: 16069 - DNA, 24 bp, Artificial Sequence
  Synthetic
ggtaggagtguaactgaggacuca

SEQ ID NO: 16070 - DNA, 20 bp, Artificial Sequence
  Synthetic
cgcgacaacauccaggguat

SEQ ID NO: 16071 - DNA, 19 bp, Artificial Sequence
  Synthetic
cgtgcuccgtgtaggucac

SEQ ID NO: 16072 - DNA, 21 bp, Artificial Sequence
  Synthetic
ggaagaugagtgagucgagct

SEQ ID NO: 16073 - DNA, 23 bp, Artificial Sequence
  Synthetic
accaagugaagcaaaggttugga

SEQ ID NO: 16074 - DNA, 18 bp, Artificial Sequence
  Synthetic
cugcccaccucacaggag

SEQ ID NO: 16075 - DNA, 20 bp, Artificial Sequence
  Synthetic
caaagcugtccagucccaga

SEQ ID NO: 16076 - DNA, 21 bp, Artificial Sequence
  Synthetic
ggagcttcuccactgtcugaa

SEQ ID NO: 16077 - DNA, 21 bp, Artificial Sequence
  Synthetic
gagtcctutctgcgttuccca

SEQ ID NO: 16078 - DNA, 20 bp, Artificial Sequence
  Synthetic
ggagggacguagcagugact

SEQ ID NO: 16079 - DNA, 26 bp, Artificial Sequence
  Synthetic
gggtagaagauggaagaaaggctaug

SEQ ID NO: 16080 - DNA, 29 bp, Artificial Sequence
  Synthetic
tttcctttgtaacaugtatcatcatcuga

SEQ ID NO: 16081 - DNA, 21 bp, Artificial Sequence
  Synthetic
ggucagggcagttguaagcag

SEQ ID NO: 16082 - DNA, 22 bp, Artificial Sequence
  Synthetic
ggaggccaggcauttttcacua

SEQ ID NO: 16083 - DNA, 23 bp, Artificial Sequence
  Synthetic
gcagcacttcuttgtccactcut

SEQ ID NO: 16084 - DNA, 20 bp, Artificial Sequence
  Synthetic
gccgccutgaaacattuggg

SEQ ID NO: 16085 - DNA, 22 bp, Artificial Sequence
  Synthetic
caggcucagcctttatccucag

SEQ ID NO: 16086 - DNA, 23 bp, Artificial Sequence
  Synthetic
ctcaggaacguaccctgacttug

SEQ ID NO: 16087 - DNA, 27 bp, Artificial Sequence
  Synthetic
aagtatgaaugcctacagaacugcaat

SEQ ID NO: 16088 - DNA, 27 bp, Artificial Sequence
  Synthetic
ggtaccaaagugatcctccatctuaaa

SEQ ID NO: 16089 - DNA, 22 bp, Artificial Sequence
  Synthetic
acaggaaacaucctgcacgtua

SEQ ID NO: 16090 - DNA, 22 bp, Artificial Sequence
  Synthetic
ccaggtctgguctagctgttut

SEQ ID NO: 16091 - DNA, 29 bp, Artificial Sequence
  Synthetic
cacttcttaacaaugtttttgcgaaugac

SEQ ID NO: 16092 - DNA, 21 bp, Artificial Sequence
  Synthetic
tcctgggaacuggcagtauga

SEQ ID NO: 16093 - DNA, 22 bp, Artificial Sequence
  Synthetic
gcacacaguactcgtcaauggg

SEQ ID NO: 16094 - DNA, 24 bp, Artificial Sequence
  Synthetic
ccaatauggagcggatcaugaaag

SEQ ID NO: 16095 - DNA, 22 bp, Artificial Sequence
  Synthetic
caccaggtccutaactgcctua

SEQ ID NO: 16096 - DNA, 17 bp, Artificial Sequence
  Synthetic
cgctcuctccgcucgaa

SEQ ID NO: 16097 - DNA, 21 bp, Artificial Sequence
  Synthetic
gtcttcatcgucctcctccuc

SEQ ID NO: 16098 - DNA, 23 bp, Artificial Sequence
  Synthetic
cuacttcaaggauaagggcgaca

SEQ ID NO: 16099 - DNA, 18 bp, Artificial Sequence
  Synthetic
agcgcacuccgacgaauc

SEQ ID NO: 16100 - DNA, 24 bp, Artificial Sequence
  Synthetic
ctgtctccauggacaauagcaaca

SEQ ID NO: 16101 - DNA, 17 bp, Artificial Sequence
  Synthetic
cugccaggccactugga

SEQ ID NO: 16102 - DNA, 19 bp, Artificial Sequence
  Synthetic
ctcaugcagcggagctcua

SEQ ID NO: 16103 - DNA, 21 bp, Artificial Sequence
  Synthetic
gatggtctgcaugggagacug

SEQ ID NO: 16104 - DNA, 22 bp, Artificial Sequence
  Synthetic
ccagccuaaccagggaagttug

SEQ ID NO: 16105 - DNA, 19 bp, Artificial Sequence
  Synthetic
caaggcugctggacucact

SEQ ID NO: 16106 - DNA, 20 bp, Artificial Sequence
  Synthetic
acccgccuttcattuaggca

SEQ ID NO: 16107 - DNA, 28 bp, Artificial Sequence
  Synthetic
tcaaaattagatgauctgcacactcugt

SEQ ID NO: 16108 - DNA, 22 bp, Artificial Sequence
  Synthetic
tttgcaacuagcaccagggtua

SEQ ID NO: 16109 - DNA, 31 bp, Artificial Sequence
  Synthetic
tttcatttcctgtttuagagaggagagatug

SEQ ID NO: 16110 - DNA, 21 bp, Artificial Sequence
  Synthetic
ctccgcatcuatcagcaggut

SEQ ID NO: 16111 - DNA, 31 bp, Artificial Sequence
  Synthetic
gattaatcgguaactgtacctuacaaagagt

SEQ ID NO: 16112 - DNA, 27 bp, Artificial Sequence
  Synthetic
ccttcatatctcgucctagcaattgua

SEQ ID NO: 16113 - DNA, 29 bp, Artificial Sequence
  Synthetic
tttgagattcaugcaaaagctacttaugt

SEQ ID NO: 16114 - DNA, 26 bp, Artificial Sequence
  Synthetic
cacttcagcgugacatatuaaagcaa

SEQ ID NO: 16115 - DNA, 27 bp, Artificial Sequence
  Synthetic
atccaacatgugggatttttccttaua

SEQ ID NO: 16116 - DNA, 22 bp, Artificial Sequence
  Synthetic
tcacuggagcgttaaauggcat

SEQ ID NO: 16117 - DNA, 22 bp, Artificial Sequence
  Synthetic
gacagaagaugaccagccugag

SEQ ID NO: 16118 - DNA, 22 bp, Artificial Sequence
  Synthetic
ctcttgttucagcccacgtcua

SEQ ID NO: 16119 - DNA, 22 bp, Artificial Sequence
  Synthetic
ccaagtgacgcuttccagacut

SEQ ID NO: 16120 - DNA, 28 bp, Artificial Sequence
  Synthetic
gtgtgtttatcugaaggtgatagagcut

SEQ ID NO: 16121 - DNA, 28 bp, Artificial Sequence
  Synthetic
ggttttcttaacutctggattcaagugg

SEQ ID NO: 16122 - DNA, 28 bp, Artificial Sequence
  Synthetic
ttctgtgcagaacugataatgctaucaa

SEQ ID NO: 16123 - DNA, 20 bp, Artificial Sequence
  Synthetic
agccugagcaaaacccauca

SEQ ID NO: 16124 - DNA, 26 bp, Artificial Sequence
  Synthetic
ccugagaaggaaaagcgaauaaagga

SEQ ID NO: 16125 - DNA, 31 bp, Artificial Sequence
  Synthetic
gtgtaatattuagaagagaagagcgctuagg

SEQ ID NO: 16126 - DNA, 21 bp, Artificial Sequence
  Synthetic
tgctttgcgutgagcatcuct

SEQ ID NO: 16127 - DNA, 25 bp, Artificial Sequence
  Synthetic
gtgtgatgutggctaggugaaaaat

SEQ ID NO: 16128 - DNA, 28 bp, Artificial Sequence
  Synthetic
gtcaggaaaacautcttgttatcuaggt

SEQ ID NO: 16129 - DNA, 27 bp, Artificial Sequence
  Synthetic
ggaagttaaagaaggcauttccaaguc

SEQ ID NO: 16130 - DNA, 27 bp, Artificial Sequence
  Synthetic
ccaagaacucctacaccatucaaacat

SEQ ID NO: 16131 - DNA, 22 bp, Artificial Sequence
  Synthetic
guctgaggcuaaacggaagagt

SEQ ID NO: 16132 - DNA, 23 bp, Artificial Sequence
  Synthetic
aaacutcttctgcucacaccact

SEQ ID NO: 16133 - DNA, 23 bp, Artificial Sequence
  Synthetic
ccctaugccacacacaggattuc

SEQ ID NO: 16134 - DNA, 22 bp, Artificial Sequence
  Synthetic
gaaccugcatcctguggaaaga

SEQ ID NO: 16135 - DNA, 29 bp, Artificial Sequence
  Synthetic
cttgaagtgttcugaaaaccataatgcut

SEQ ID NO: 16136 - DNA, 25 bp, Artificial Sequence
  Synthetic
ctcgtgtttgutgctggataaaugt

SEQ ID NO: 16137 - DNA, 28 bp, Artificial Sequence
  Synthetic
cagccatgtuaaaatctggaaactucat

SEQ ID NO: 16138 - DNA, 29 bp, Artificial Sequence
  Synthetic
tgagacatttttcaguaggtatctttgut

SEQ ID NO: 16139 - DNA, 22 bp, Artificial Sequence
  Synthetic
gcccgctugtcttcttctuacc

SEQ ID NO: 16140 - DNA, 27 bp, Artificial Sequence
  Synthetic
gaactttagauggcaaagacaaagcug

SEQ ID NO: 16141 - DNA, 26 bp, Artificial Sequence
  Synthetic
ccctaguctcatagcucaaaaaccat

SEQ ID NO: 16142 - DNA, 29 bp, Artificial Sequence
  Synthetic
ctttctttugaacaacaaagcttgaugac

SEQ ID NO: 16143 - DNA, 23 bp, Artificial Sequence
  Synthetic
ggtcagtccuctgtccttgtuaa

SEQ ID NO: 16144 - DNA, 26 bp, Artificial Sequence
  Synthetic
tgcaacaaaatguattcgggtctcua

SEQ ID NO: 16145 - DNA, 22 bp, Artificial Sequence
  Synthetic
cctctagcaaacccutcctgua

SEQ ID NO: 16146 - DNA, 28 bp, Artificial Sequence
  Synthetic
cagaactucaagagaactctcucaaaga

SEQ ID NO: 16147 - DNA, 26 bp, Artificial Sequence
  Synthetic
cauctgattuggagcacaaagaaagg

SEQ ID NO: 16148 - DNA, 30 bp, Artificial Sequence
  Synthetic
gtggaacattgagaauttatgcagatagut

SEQ ID NO: 16149 - DNA, 24 bp, Artificial Sequence
  Synthetic
gcgatgcaguaatccttagggtut

SEQ ID NO: 16150 - DNA, 28 bp, Artificial Sequence
  Synthetic
gcatcttttugagaaagtttugcacagt

SEQ ID NO: 16151 - DNA, 22 bp, Artificial Sequence
  Synthetic
ttctttgggaugtggtctggug

SEQ ID NO: 16152 - DNA, 26 bp, Artificial Sequence
  Synthetic
actttgcaaauagagctgtcttccut

SEQ ID NO: 16153 - DNA, 20 bp, Artificial Sequence
  Synthetic
gcaggaagcucagacuacgt

SEQ ID NO: 16154 - DNA, 25 bp, Artificial Sequence
  Synthetic
gagactatgccugtcattggaaugt

SEQ ID NO: 16155 - DNA, 31 bp, Artificial Sequence
  Synthetic
caagcacacttctaucaggtaatccataaut

SEQ ID NO: 16156 - DNA, 31 bp, Artificial Sequence
  Synthetic
tcttgatccatttuactccatctgatttuca

SEQ ID NO: 16157 - DNA, 28 bp, Artificial Sequence
  Synthetic
gacaacttaaaguggactgtagagcuat

SEQ ID NO: 16158 - DNA, 23 bp, Artificial Sequence
  Synthetic
ccttctggauggcaaatgcauct

SEQ ID NO: 16159 - DNA, 29 bp, Artificial Sequence
  Synthetic
ttaattatttagaguagtgccgcctucaa

SEQ ID NO: 16160 - DNA, 25 bp, Artificial Sequence
  Synthetic
tcttctctcagcucttccactucat

SEQ ID NO: 16161 - DNA, 23 bp, Artificial Sequence
  Synthetic
cttcucagcccaggcttcaauat

SEQ ID NO: 16162 - DNA, 23 bp, Artificial Sequence
  Synthetic
ccaggcagugagcatctctttut

SEQ ID NO: 16163 - DNA, 23 bp, Artificial Sequence
  Synthetic
cagatcaggaucctccuccaact

SEQ ID NO: 16164 - DNA, 28 bp, Artificial Sequence
  Synthetic
tctaaccauacagaagcacttccattuc

SEQ ID NO: 16165 - DNA, 21 bp, Artificial Sequence
  Synthetic
gcacgtgacuaattggccuac

SEQ ID NO: 16166 - DNA, 27 bp, Artificial Sequence
  Synthetic
gctgtgtaacaugattttccattgcua

SEQ ID NO: 16167 - DNA, 22 bp, Artificial Sequence
  Synthetic
ctgctttgcuacttccagtguc

SEQ ID NO: 16168 - DNA, 25 bp, Artificial Sequence
  Synthetic
agcagtatgaagaugaatgagguct

SEQ ID NO: 16169 - DNA, 25 bp, Artificial Sequence
  Synthetic
agatgttatctucgctgttgtucca

SEQ ID NO: 16170 - DNA, 26 bp, Artificial Sequence
  Synthetic
tctttttcttttugcagcgtgtuaca

SEQ ID NO: 16171 - DNA, 28 bp, Artificial Sequence
  Synthetic
aggagctctgauttatccacataucact

SEQ ID NO: 16172 - DNA, 24 bp, Artificial Sequence
  Synthetic
gagagaagaacaucagcgttggua

SEQ ID NO: 16173 - DNA, 21 bp, Artificial Sequence
  Synthetic
aaggctttucgggcttcauct

SEQ ID NO: 16174 - DNA, 19 bp, Artificial Sequence
  Synthetic
gcaagctcaugctggagug

SEQ ID NO: 16175 - DNA, 19 bp, Artificial Sequence
  Synthetic
ctcgcucttcgtucagcct

SEQ ID NO: 16176 - DNA, 22 bp, Artificial Sequence
  Synthetic
agcagtuagaagagaugcgcaa

SEQ ID NO: 16177 - DNA, 27 bp, Artificial Sequence
  Synthetic
acgttcaggcuaacttggtaaaatuct

SEQ ID NO: 16178 - DNA, 22 bp, Artificial Sequence
  Synthetic
cctcaaaacacaggucctcucc

SEQ ID NO: 16179 - DNA, 22 bp, Artificial Sequence
  Synthetic
ggaagaagguccccaugagact

SEQ ID NO: 16180 - DNA, 25 bp, Artificial Sequence
  Synthetic
ccccugaaaacttgacatucaagga

SEQ ID NO: 16181 - DNA, 27 bp, Artificial Sequence
  Synthetic
gggtaaatacaaagugttctcctcaut

SEQ ID NO: 16182 - DNA, 24 bp, Artificial Sequence
  Synthetic
ccaaatucccacataaaggtugca

SEQ ID NO: 16183 - DNA, 19 bp, Artificial Sequence
  Synthetic
tggagguagccccggtuat

SEQ ID NO: 16184 - DNA, 20 bp, Artificial Sequence
  Synthetic
tcctggucctgguccgaaat

SEQ ID NO: 16185 - DNA, 24 bp, Artificial Sequence
  Synthetic
tcagagutctaggaguggaagagg

SEQ ID NO: 16186 - DNA, 29 bp, Artificial Sequence
  Synthetic
caggatcauggtcatcaaaaguaacaaag

SEQ ID NO: 16187 - DNA, 28 bp, Artificial Sequence
  Synthetic
ctgtttgtuggcggaattaaagaagaua

SEQ ID NO: 16188 - DNA, 29 bp, Artificial Sequence
  Synthetic
gctgatagttatutcctccatgatucact

SEQ ID NO: 16189 - DNA, 26 bp, Artificial Sequence
  Synthetic
gctctttattgguggcttaagcttug

SEQ ID NO: 16190 - DNA, 24 bp, Artificial Sequence
  Synthetic
ttgattucaaacccgttaccucca

SEQ ID NO: 16191 - DNA, 17 bp, Artificial Sequence
  Synthetic
gaggugctccucgcaga

SEQ ID NO: 16192 - DNA, 24 bp, Artificial Sequence
  Synthetic
ggattugaagggaggagauactua

SEQ ID NO: 16193 - DNA, 22 bp, Artificial Sequence
  Synthetic
gcttgtggtuctcctccagtug

SEQ ID NO: 16194 - DNA, 19 bp, Artificial Sequence
  Synthetic
cgtcgccutggacuggaag

SEQ ID NO: 16195 - DNA, 22 bp, Artificial Sequence
  Synthetic
ctactacguggactcgttccug

SEQ ID NO: 16196 - DNA, 28 bp, Artificial Sequence
  Synthetic
ggcaaaatctgcauattatctcatgugt

SEQ ID NO: 16197 - DNA, 25 bp, Artificial Sequence
  Synthetic
acctcacugatcgtcaagucaaaat

SEQ ID NO: 16198 - DNA, 20 bp, Artificial Sequence
  Synthetic
ctgcccacggugctauagaa

SEQ ID NO: 16199 - DNA, 20 bp, Artificial Sequence
  Synthetic
aatctggcccacugctacuc

SEQ ID NO: 16200 - DNA, 21 bp, Artificial Sequence
  Synthetic
gggagaggaaaaugccaguct

SEQ ID NO: 16201 - DNA, 29 bp, Artificial Sequence
  Synthetic
agtcatcaacaaacugaaaaccactagut

SEQ ID NO: 16202 - DNA, 19 bp, Artificial Sequence
  Synthetic
agggcugggaataggucgt

SEQ ID NO: 16203 - DNA, 20 bp, Artificial Sequence
  Synthetic
ccacgaacccutgggtctuc

SEQ ID NO: 16204 - DNA, 18 bp, Artificial Sequence
  Synthetic
gtaguagccgcugccgaa

SEQ ID NO: 16205 - DNA, 17 bp, Artificial Sequence
  Synthetic
cgucgtccucgggaggt

SEQ ID NO: 16206 - DNA, 24 bp, Artificial Sequence
  Synthetic
ccagcatgttautgctgcatctuc

SEQ ID NO: 16207 - DNA, 23 bp, Artificial Sequence
  Synthetic
acgcuaagaatggucacagaaca

SEQ ID NO: 16208 - DNA, 24 bp, Artificial Sequence
  Synthetic
cacactttctcuttctcccctcuc

SEQ ID NO: 16209 - DNA, 21 bp, Artificial Sequence
  Synthetic
tgtcucgagggaatgtgucca

SEQ ID NO: 16210 - DNA, 19 bp, Artificial Sequence
  Synthetic
cccgggccauttaccgaug

SEQ ID NO: 16211 - DNA, 23 bp, Artificial Sequence
  Synthetic
ctctcgaugtagcaccaugacag

SEQ ID NO: 16212 - DNA, 22 bp, Artificial Sequence
  Synthetic
gggaagaatgugcggaggatut

SEQ ID NO: 16213 - DNA, 25 bp, Artificial Sequence
  Synthetic
ccgatgcaaaugatcccacagauat

SEQ ID NO: 16214 - DNA, 20 bp, Artificial Sequence
  Synthetic
cctuacacagaaggcuggca

SEQ ID NO: 16215 - DNA, 21 bp, Artificial Sequence
  Synthetic
aaggcccaugctttccaagua

SEQ ID NO: 16216 - DNA, 20 bp, Artificial Sequence
  Synthetic
actcactgucgcctgcttuc

SEQ ID NO: 16217 - DNA, 20 bp, Artificial Sequence
  Synthetic
gatggcgtugttgatggcut

SEQ ID NO: 16218 - DNA, 19 bp, Artificial Sequence
  Synthetic
acagcugccaagacuccac

SEQ ID NO: 16219 - DNA, 18 bp, Artificial Sequence
  Synthetic
gtccugcgagttcucgga

SEQ ID NO: 16220 - DNA, 20 bp, Artificial Sequence
  Synthetic
caccgctuccacatgagcua

SEQ ID NO: 16221 - DNA, 29 bp, Artificial Sequence
  Synthetic
acagttacaaauccaaacacaacattguc

SEQ ID NO: 16222 - DNA, 21 bp, Artificial Sequence
  Synthetic
ccagcaagcucgtagtgctut

SEQ ID NO: 16223 - DNA, 27 bp, Artificial Sequence
  Synthetic
ctgagagcugattaagagaaaauccca

SEQ ID NO: 16224 - DNA, 19 bp, Artificial Sequence
  Synthetic
cctuccagcgtccuaggag

SEQ ID NO: 16225 - DNA, 23 bp, Artificial Sequence
  Synthetic
tccctcttgucgttttccaucag

SEQ ID NO: 16226 - DNA, 28 bp, Artificial Sequence
  Synthetic
gtatgcaaaguatagaccaatgucagga

SEQ ID NO: 16227 - DNA, 28 bp, Artificial Sequence
  Synthetic
ggcacattuagaaaccatgcttctttut

SEQ ID NO: 16228 - DNA, 21 bp, Artificial Sequence
  Synthetic
atcttgcucaggcagttccuc

SEQ ID NO: 16229 - DNA, 28 bp, Artificial Sequence
  Synthetic
aaaaagtgtctautgccttgtatcucca

SEQ ID NO: 16230 - DNA, 24 bp, Artificial Sequence
  Synthetic
gatgagaggaggutcttcaagcug

SEQ ID NO: 16231 - DNA, 25 bp, Artificial Sequence
  Synthetic
ggttcautatggagtcuagggcaga

SEQ ID NO: 16232 - DNA, 24 bp, Artificial Sequence
  Synthetic
ttcctgctucaagctctcuagaac

SEQ ID NO: 16233 - DNA, 25 bp, Artificial Sequence
  Synthetic
gtttacagauctcttgttgaucgct

SEQ ID NO: 16234 - DNA, 20 bp, Artificial Sequence
  Synthetic
tcctgagcucgtccagtuct

SEQ ID NO: 16235 - DNA, 17 bp, Artificial Sequence
  Synthetic
gcggtuggcctcaugac

SEQ ID NO: 16236 - DNA, 21 bp, Artificial Sequence
  Synthetic
ctgagaggcauccatguccat

SEQ ID NO: 16237 - DNA, 24 bp, Artificial Sequence
  Synthetic
cactattugaggatgtgtcuccgt

SEQ ID NO: 16238 - DNA, 24 bp, Artificial Sequence
  Synthetic
tggagttugaagagaagctugaca

SEQ ID NO: 16239 - DNA, 23 bp, Artificial Sequence
  Synthetic
tctaccacctutctccctcacut

SEQ ID NO: 16240 - DNA, 26 bp, Artificial Sequence
  Synthetic
gtctattaccugaaagagcugacaaa

SEQ ID NO: 16241 - DNA, 25 bp, Artificial Sequence
  Synthetic
gcagcatcuacctgaaactgcuaag

SEQ ID NO: 16242 - DNA, 23 bp, Artificial Sequence
  Synthetic
gtttguggaacacauggcagaac

SEQ ID NO: 16243 - DNA, 22 bp, Artificial Sequence
  Synthetic
agcccatccgutgttttccaua

SEQ ID NO: 16244 - DNA, 19 bp, Artificial Sequence
  Synthetic
gttgggcaccugcttcaug

SEQ ID NO: 16245 - DNA, 17 bp, Artificial Sequence
  Synthetic
gggagccgucccgtuag

SEQ ID NO: 16246 - DNA, 23 bp, Artificial Sequence
  Synthetic
cugcagcaguaaagccaattuat

SEQ ID NO: 16247 - DNA, 27 bp, Artificial Sequence
  Synthetic
cgactgtatgucagcagtatgattgug

SEQ ID NO: 16248 - DNA, 29 bp, Artificial Sequence
  Synthetic
tccatgccttugaaagcaacaattttaut

SEQ ID NO: 16249 - DNA, 24 bp, Artificial Sequence
  Synthetic
gtgagaatacacuccagaggcaut

SEQ ID NO: 16250 - DNA, 24 bp, Artificial Sequence
  Synthetic
accagcttgtucatgtctggatuc

SEQ ID NO: 16251 - DNA, 22 bp, Artificial Sequence
  Synthetic
agaggactucgctgaatugacc

SEQ ID NO: 16252 - DNA, 24 bp, Artificial Sequence
  Synthetic
ctagataccccuctggaagctcut

SEQ ID NO: 16253 - DNA, 21 bp, Artificial Sequence
  Synthetic
cgatcgcacacauttgtcgug

SEQ ID NO: 16254 - DNA, 27 bp, Artificial Sequence
  Synthetic
acaaccuaaccagaaaattcctuggat

SEQ ID NO: 16255 - DNA, 32 bp, Artificial Sequence
  Synthetic
gtggccatttgaaauaattatggacatatuga

SEQ ID NO: 16256 - DNA, 28 bp, Artificial Sequence
  Synthetic
gtgggaattcuagacacatttcaatugg

SEQ ID NO: 16257 - DNA, 30 bp, Artificial Sequence
  Synthetic
ataaacatctugatttttcttcuccacaca

SEQ ID NO: 16258 - DNA, 31 bp, Artificial Sequence
  Synthetic
ctcaacattgtcagutttctattttgcttug

SEQ ID NO: 16259 - DNA, 23 bp, Artificial Sequence
  Synthetic
gagctctgaguagaaccatugct

SEQ ID NO: 16260 - DNA, 24 bp, Artificial Sequence
  Synthetic
tcctttgccautgttagcatucct

SEQ ID NO: 16261 - DNA, 29 bp, Artificial Sequence
  Synthetic
cataaaacggctucagaatgtaagtguat

SEQ ID NO: 16262 - DNA, 27 bp, Artificial Sequence
  Synthetic
tgtagtccauaaaacccatgagttcug

SEQ ID NO: 16263 - DNA, 25 bp, Artificial Sequence
  Synthetic
gcacttacaagccuatccaaaugag

SEQ ID NO: 16264 - DNA, 22 bp, Artificial Sequence
  Synthetic
ctctaaauccagagctggucca

SEQ ID NO: 16265 - DNA, 24 bp, Artificial Sequence
  Synthetic
agutcctaatcugcaaaggccaaa

SEQ ID NO: 16266 - DNA, 26 bp, Artificial Sequence
  Synthetic
tgcttttctaacuctctttgacugca

SEQ ID NO: 16267 - DNA, 24 bp, Artificial Sequence
  Synthetic
tttggattguggcacagagatuct

SEQ ID NO: 16268 - DNA, 28 bp, Artificial Sequence
  Synthetic
ccttatcctgacguaaacacctttgaua

SEQ ID NO: 16269 - DNA, 25 bp, Artificial Sequence
  Synthetic
aagacatgctguaagagacccttug

SEQ ID NO: 16270 - DNA, 23 bp, Artificial Sequence
  Synthetic
gcctccttcugggagacatcaua

SEQ ID NO: 16271 - DNA, 23 bp, Artificial Sequence
  Synthetic
agugcaatttuggcaagagcaaa

SEQ ID NO: 16272 - DNA, 25 bp, Artificial Sequence
  Synthetic
tgaugacccaaauaggagatacuca

SEQ ID NO: 16273 - DNA, 21 bp, Artificial Sequence
  Synthetic
cagauccagcaccugacacag

SEQ ID NO: 16274 - DNA, 28 bp, Artificial Sequence
  Synthetic
tttgtttugaaaaccttacctuggcaat

SEQ ID NO: 16275 - DNA, 29 bp, Artificial Sequence
  Synthetic
gctgaatttauaagtttgctgttgucact

SEQ ID NO: 16276 - DNA, 21 bp, Artificial Sequence
  Synthetic
ccccttucagcgcatcttuct

SEQ ID NO: 16277 - DNA, 20 bp, Artificial Sequence
  Synthetic
ctgagaaggaucggcucauc

SEQ ID NO: 16278 - DNA, 18 bp, Artificial Sequence
  Synthetic
cutagtgucgcccgagga

SEQ ID NO: 16279 - DNA, 20 bp, Artificial Sequence
  Synthetic
cgggaccuctatggctguct

SEQ ID NO: 16280 - DNA, 22 bp, Artificial Sequence
  Synthetic
gctggactcutcactgaccgua

SEQ ID NO: 16281 - DNA, 21 bp, Artificial Sequence
  Synthetic
ggttttgccuggaagccugac

SEQ ID NO: 16282 - DNA, 22 bp, Artificial Sequence
  Synthetic
cctgccccacaaaacugctuat

SEQ ID NO: 16283 - DNA, 24 bp, Artificial Sequence
  Synthetic
ggtgatggugattgttgtcaucct

SEQ ID NO: 16284 - DNA, 23 bp, Artificial Sequence
  Synthetic
ccctcctccuttgatgtggagua

SEQ ID NO: 16285 - DNA, 22 bp, Artificial Sequence
  Synthetic
gaagtgttucaagccgagaugg

SEQ ID NO: 16286 - DNA, 21 bp, Artificial Sequence
  Synthetic
gcatguccaagagggctguac

SEQ ID NO: 16287 - DNA, 25 bp, Artificial Sequence
  Synthetic
ccggtgaataucatctttgcggtua

SEQ ID NO: 16288 - DNA, 29 bp, Artificial Sequence
  Synthetic
caaataaaaacaacuatgctgagctguct

SEQ ID NO: 16289 - DNA, 27 bp, Artificial Sequence
  Synthetic
ggcaatatccgucataaatgtgctuat

SEQ ID NO: 16290 - DNA, 25 bp, Artificial Sequence
  Synthetic
tgatatcacaaacauatggcggcut

SEQ ID NO: 16291 - DNA, 18 bp, Artificial Sequence
  Synthetic
tggtccccucgacuccac

SEQ ID NO: 16292 - DNA, 23 bp, Artificial Sequence
  Synthetic
ggacagtggucaatggtgatgut

SEQ ID NO: 16293 - DNA, 29 bp, Artificial Sequence
  Synthetic
cagctttcattgaaacuacctcctatcut

SEQ ID NO: 16294 - DNA, 26 bp, Artificial Sequence
  Synthetic
ggagaaaaagacugagatgugaaggg

SEQ ID NO: 16295 - DNA, 22 bp, Artificial Sequence
  Synthetic
gcataaacccagaggugcttug

SEQ ID NO: 16296 - DNA, 25 bp, Artificial Sequence
  Synthetic
aacctgtgtggutgtaacactacuc

SEQ ID NO: 16297 - DNA, 27 bp, Artificial Sequence
  Synthetic
gtagcagacutctctgaattugaggaa

SEQ ID NO: 16298 - DNA, 24 bp, Artificial Sequence
  Synthetic
gaaacaucagttggugaagcagag

SEQ ID NO: 16299 - DNA, 25 bp, Artificial Sequence
  Synthetic
ctgtgttgagucaaagccuagaaga

SEQ ID NO: 16300 - DNA, 22 bp, Artificial Sequence
  Synthetic
aaattccugccaggagtuggaa

SEQ ID NO: 16301 - DNA, 23 bp, Artificial Sequence
  Synthetic
ctcactccaucattacccauggt

SEQ ID NO: 16302 - DNA, 23 bp, Artificial Sequence
  Synthetic
gtttctgtuaaggccacttgugc

SEQ ID NO: 16303 - DNA, 23 bp, Artificial Sequence
  Synthetic
aacgttagcugtgtgactuccaa

SEQ ID NO: 16304 - DNA, 21 bp, Artificial Sequence
  Synthetic
tgggtcacaagugcaaaggua

SEQ ID NO: 16305 - DNA, 20 bp, Artificial Sequence
  Synthetic
agcuggagcaccagtucaag

SEQ ID NO: 16306 - DNA, 20 bp, Artificial Sequence
  Synthetic
ggcgtcgaugcggaaattut

SEQ ID NO: 16307 - DNA, 26 bp, Artificial Sequence
  Synthetic
gcaaauaaccaccataacaauaccga

SEQ ID NO: 16308 - DNA, 17 bp, Artificial Sequence
  Synthetic
cggaggguggtgugcag

SEQ ID NO: 16309 - DNA, 17 bp, Artificial Sequence
  Synthetic
gtctcgccuccctucgt

SEQ ID NO: 16310 - DNA, 22 bp, Artificial Sequence
  Synthetic
accctaagaccccauctcagut

SEQ ID NO: 16311 - DNA, 26 bp, Artificial Sequence
  Synthetic
tccttgagcuaggaagagatacucac

SEQ ID NO: 16312 - DNA, 19 bp, Artificial Sequence
  Synthetic
cacctcaucccgtcccuac

SEQ ID NO: 16313 - DNA, 19 bp, Artificial Sequence
  Synthetic
ctgctcaucacccuccaca

SEQ ID NO: 16314 - DNA, 22 bp, Artificial Sequence
  Synthetic
tcaccgutctaaagucgggaga

SEQ ID NO: 16315 - DNA, 21 bp, Artificial Sequence
  Synthetic
gcactgaggugaagggauact

SEQ ID NO: 16316 - DNA, 21 bp, Artificial Sequence
  Synthetic
ggccgcuagctttucagacat

SEQ ID NO: 16317 - DNA, 23 bp, Artificial Sequence
  Synthetic
gugagagagaggctugagcaaat

SEQ ID NO: 16318 - DNA, 19 bp, Artificial Sequence
  Synthetic
ccugcacagcctuccagag

SEQ ID NO: 16319 - DNA, 20 bp, Artificial Sequence
  Synthetic
cccaccutgatguggaagga

SEQ ID NO: 16320 - DNA, 18 bp, Artificial Sequence
  Synthetic
acctcccugacacccugt

SEQ ID NO: 16321 - DNA, 18 bp, Artificial Sequence
  Synthetic
ccucctggcuccaccaag

SEQ ID NO: 16322 - DNA, 19 bp, Artificial Sequence
  Synthetic
gtgguataccccugcacgg

SEQ ID NO: 16323 - DNA, 25 bp, Artificial Sequence
  Synthetic
tgaaagtatguaccggagcauagga

SEQ ID NO: 16324 - DNA, 22 bp, Artificial Sequence
  Synthetic
tgcactacucctccctauccac

SEQ ID NO: 16325 - DNA, 22 bp, Artificial Sequence
  Synthetic
ccccaatugcaaagctggaaut

SEQ ID NO: 16326 - DNA, 18 bp, Artificial Sequence
  Synthetic
gcccccucctgagugact

SEQ ID NO: 16327 - DNA, 21 bp, Artificial Sequence
  Synthetic
caaguacaggaagtgcguggt

SEQ ID NO: 16328 - DNA, 18 bp, Artificial Sequence
  Synthetic
ccagagucaggtgugcga

SEQ ID NO: 16329 - DNA, 17 bp, Artificial Sequence
  Synthetic
cctuggcccggctctug

SEQ ID NO: 16330 - DNA, 17 bp, Artificial Sequence
  Synthetic
ggctgugggtgagggut

SEQ ID NO: 16331 - DNA, 23 bp, Artificial Sequence
  Synthetic
gggaggatuccgtcttctcucat

SEQ ID NO: 16332 - DNA, 21 bp, Artificial Sequence
  Synthetic
gcagttacugggcttguccat

SEQ ID NO: 16333 - DNA, 21 bp, Artificial Sequence
  Synthetic
ggagaagcuctaacacccugt

SEQ ID NO: 16334 - DNA, 20 bp, Artificial Sequence
  Synthetic
ctgttcccacccuggcatua

SEQ ID NO: 16335 - DNA, 22 bp, Artificial Sequence
  Synthetic
ggctggaauactgcuacaaccc

SEQ ID NO: 16336 - DNA, 24 bp, Artificial Sequence
  Synthetic
ttgcaaggauagaagcaucactua

SEQ ID NO: 16337 - DNA, 22 bp, Artificial Sequence
  Synthetic
cacuctctgttucccccgaaag

SEQ ID NO: 16338 - DNA, 26 bp, Artificial Sequence
  Synthetic
tcactcttctuggtaccactctucat

SEQ ID NO: 16339 - DNA, 20 bp, Artificial Sequence
  Synthetic
gcctgcuaacaccctgtucg

SEQ ID NO: 16340 - DNA, 21 bp, Artificial Sequence
  Synthetic
ccagtgacgutgctcucaaag

SEQ ID NO: 16341 - DNA, 22 bp, Artificial Sequence
  Synthetic
gggatcatucctcacgctucag

SEQ ID NO: 16342 - DNA, 21 bp, Artificial Sequence
  Synthetic
cctggcucttcccacuaaact

SEQ ID NO: 16343 - DNA, 22 bp, Artificial Sequence
  Synthetic
cctcugacaagggcaacuacac

SEQ ID NO: 16344 - DNA, 23 bp, Artificial Sequence
  Synthetic
cctcutaaacccaaugcccagac

SEQ ID NO: 16345 - DNA, 22 bp, Artificial Sequence
  Synthetic
agtgcccctucttcttcccaua

SEQ ID NO: 16346 - DNA, 18 bp, Artificial Sequence
  Synthetic
ccagcccaucctgtuccc

SEQ ID NO: 16347 - DNA, 23 bp, Artificial Sequence
  Synthetic
acctctaacugcagaacugggat

SEQ ID NO: 16348 - DNA, 25 bp, Artificial Sequence
  Synthetic
catcattcccauctgcatctgcaua

SEQ ID NO: 16349 - DNA, 25 bp, Artificial Sequence
  Synthetic
ctcccgccuataatgtcaatuccat

SEQ ID NO: 16350 - DNA, 21 bp, Artificial Sequence
  Synthetic
tgcttgaggagucccagcuaa

SEQ ID NO: 16351 - DNA, 22 bp, Artificial Sequence
  Synthetic
agcagcugaccaacaccatuat

SEQ ID NO: 16352 - DNA, 19 bp, Artificial Sequence
  Synthetic
tggccauctgctgagugac

SEQ ID NO: 16353 - DNA, 25 bp, Artificial Sequence
  Synthetic
gcaccacugaaaactaugagaaccc

SEQ ID NO: 16354 - DNA, 23 bp, Artificial Sequence
  Synthetic
tctgacgcaugacagtctucaac

SEQ ID NO: 16355 - DNA, 21 bp, Artificial Sequence
  Synthetic
tgtacaggcagugcagtctut

SEQ ID NO: 16356 - DNA, 21 bp, Artificial Sequence
  Synthetic
atcctcatcaucagcgtcgug

SEQ ID NO: 16357 - DNA, 20 bp, Artificial Sequence
  Synthetic
aaaccaaggagccugaggug

SEQ ID NO: 16358 - DNA, 22 bp, Artificial Sequence
  Synthetic
cttcactcucctggatctuggg

SEQ ID NO: 16359 - DNA, 23 bp, Artificial Sequence
  Synthetic
ctggaagaaaagaccuggucgaa

SEQ ID NO: 16360 - DNA, 22 bp, Artificial Sequence
  Synthetic
ctgaguacatccugcgaagaca

SEQ ID NO: 16361 - DNA, 26 bp, Artificial Sequence
  Synthetic
gaccactgaagugttagatgaaccut

SEQ ID NO: 16362 - DNA, 26 bp, Artificial Sequence
  Synthetic
gcctctcactuccttctgttaatcug

SEQ ID NO: 16363 - DNA, 23 bp, Artificial Sequence
  Synthetic
actgaaagugaagaacagcuggt

SEQ ID NO: 16364 - DNA, 24 bp, Artificial Sequence
  Synthetic
ttgctcaaacgugtagaacugact

SEQ ID NO: 16365 - DNA, 29 bp, Artificial Sequence
  Synthetic
caaacaagacugaaaaattaaccagcaut

SEQ ID NO: 16366 - DNA, 27 bp, Artificial Sequence
  Synthetic
catcaataatcugactggctgauccaa

SEQ ID NO: 16367 - DNA, 27 bp, Artificial Sequence
  Synthetic
gaagttaagcaagutgactggaatcug

SEQ ID NO: 16368 - DNA, 20 bp, Artificial Sequence
  Synthetic
ttgtguccccgagugagaac

SEQ ID NO: 16369 - DNA, 29 bp, Artificial Sequence
  Synthetic
tctattacgatguggagccatttctttut

SEQ ID NO: 16370 - DNA, 29 bp, Artificial Sequence
  Synthetic
gctgctgcagaauagttctacttttcaua

SEQ ID NO: 16371 - DNA, 24 bp, Artificial Sequence
  Synthetic
accugggtagtaaugagaggcaaa

SEQ ID NO: 16372 - DNA, 28 bp, Artificial Sequence
  Synthetic
agtgcttgttctuggatatcacgaaaua

SEQ ID NO: 16373 - DNA, 23 bp, Artificial Sequence
  Synthetic
gggacagtuaacatgtgagcuct

SEQ ID NO: 16374 - DNA, 28 bp, Artificial Sequence
  Synthetic
gugaatcctacactauagagaagaccct

SEQ ID NO: 16375 - DNA, 26 bp, Artificial Sequence
  Synthetic
ttcuacaaaagaagguagcacagaua

SEQ ID NO: 16376 - DNA, 28 bp, Artificial Sequence
  Synthetic
ccaagtgtcugaaaaataaccagtcaua

SEQ ID NO: 16377 - DNA, 24 bp, Artificial Sequence
  Synthetic
gcagtgcaucgagtgtaaaacaug

SEQ ID NO: 16378 - DNA, 29 bp, Artificial Sequence
  Synthetic
cctatatcaucagctctauaaaccccgaa

SEQ ID NO: 16379 - DNA, 23 bp, Artificial Sequence
  Synthetic
gatggaccuctttatcggcucaa

SEQ ID NO: 16380 - DNA, 30 bp, Artificial Sequence
  Synthetic
cccaggattaucaggatctttataggaaut

SEQ ID NO: 16381 - DNA, 23 bp, Artificial Sequence
  Synthetic
cagaaacagcgucctucagaaga

SEQ ID NO: 16382 - DNA, 17 bp, Artificial Sequence
  Synthetic
gtcuggccaggcgguag

SEQ ID NO: 16383 - DNA, 17 bp, Artificial Sequence
  Synthetic
cgtggagggucccggua

SEQ ID NO: 16384 - DNA, 28 bp, Artificial Sequence
  Synthetic
gcagagatccugcatattttgaugaaaa

SEQ ID NO: 16385 - DNA, 22 bp, Artificial Sequence
  Synthetic
gctcacuggacacaucagacaa

SEQ ID NO: 16386 - DNA, 23 bp, Artificial Sequence
  Synthetic
gcttcagctcaucttaggctgug

SEQ ID NO: 16387 - DNA, 24 bp, Artificial Sequence
  Synthetic
cagatgttacugttggtactggug

SEQ ID NO: 16388 - DNA, 28 bp, Artificial Sequence
  Synthetic
tgtttctaaccagcugaagaaaacuaca

SEQ ID NO: 16389 - DNA, 22 bp, Artificial Sequence
  Synthetic
gttucaaagaggtggugcacag

SEQ ID NO: 16390 - DNA, 24 bp, Artificial Sequence
  Synthetic
auctctgaactucggcaacagaat

SEQ ID NO: 16391 - DNA, 27 bp, Artificial Sequence
  Synthetic
ttaagttugctagatccucagaaaccc

SEQ ID NO: 16392 - DNA, 27 bp, Artificial Sequence
  Synthetic
tggtgggagagautttggttttctuaa

SEQ ID NO: 16393 - DNA, 27 bp, Artificial Sequence
  Synthetic
atctgctttcttugattcttcggauaa

SEQ ID NO: 16394 - DNA, 30 bp, Artificial Sequence
  Synthetic
gtgttgtatattaaugcaccaaatgacugt

SEQ ID NO: 16395 - DNA, 26 bp, Artificial Sequence
  Synthetic
tctagaaggcuctgcaataaggcuat

SEQ ID NO: 16396 - DNA, 20 bp, Artificial Sequence
  Synthetic
ctgugtctcatcugcagcct

SEQ ID NO: 16397 - DNA, 28 bp, Artificial Sequence
  Synthetic
ggtagagtgagaugcctacaaaatucat

SEQ ID NO: 16398 - DNA, 19 bp, Artificial Sequence
  Synthetic
agucatttcuggcgaggca

SEQ ID NO: 16399 - DNA, 23 bp, Artificial Sequence
  Synthetic
gctggctgaguttcctgaaaugt

SEQ ID NO: 16400 - DNA, 25 bp, Artificial Sequence
  Synthetic
gcgaggatauctggaagaaatucga

SEQ ID NO: 16401 - DNA, 17 bp, Artificial Sequence
  Synthetic
ggucggccguggagaag

SEQ ID NO: 16402 - DNA, 17 bp, Artificial Sequence
  Synthetic
gaccccucggtggtcut

SEQ ID NO: 16403 - DNA, 18 bp, Artificial Sequence
  Synthetic
gcggtguctcctcaugga

SEQ ID NO: 16404 - DNA, 21 bp, Artificial Sequence
  Synthetic
ccctccacucggaaggacuat

SEQ ID NO: 16405 - DNA, 23 bp, Artificial Sequence
  Synthetic
ctcttgacatuctcctcggtguc

SEQ ID NO: 16406 - DNA, 21 bp, Artificial Sequence
  Synthetic
gctacggaacucttgtgcgua

SEQ ID NO: 16407 - DNA, 27 bp, Artificial Sequence
  Synthetic
ggctaaatcttucagtctcaagacuca

SEQ ID NO: 16408 - DNA, 30 bp, Artificial Sequence
  Synthetic
tgctatgtaaaaauattctgttgtguacct

SEQ ID NO: 16409 - DNA, 26 bp, Artificial Sequence
  Synthetic
tgcctggtugactcatctatauggaa

SEQ ID NO: 16410 - DNA, 30 bp, Artificial Sequence
  Synthetic
aatgaaacttacgaugagatatttcctuca

SEQ ID NO: 16411 - DNA, 26 bp, Artificial Sequence
  Synthetic
catatcuaacactgccaucccaagac

SEQ ID NO: 16412 - DNA, 31 bp, Artificial Sequence
  Synthetic
gtatcttataaatcuggaaactctgcaguct

SEQ ID NO: 16413 - DNA, 28 bp, Artificial Sequence
  Synthetic
actgaattccaccguttccagttatuat

SEQ ID NO: 16414 - DNA, 28 bp, Artificial Sequence
  Synthetic
catggagttgacuttctaaaaggtgcua

SEQ ID NO: 16415 - DNA, 27 bp, Artificial Sequence
  Synthetic
gaggtgctacutctttacagagguaat

SEQ ID NO: 16416 - DNA, 30 bp, Artificial Sequence
  Synthetic
ttattctgttgcutgttcttgtgataucat

SEQ ID NO: 16417 - DNA, 28 bp, Artificial Sequence
  Synthetic
cactgaggttguactcttcattctcaut

SEQ ID NO: 16418 - DNA, 31 bp, Artificial Sequence
  Synthetic
tcttcctcattgaaugtattttcttgtucct

SEQ ID NO: 16419 - DNA, 23 bp, Artificial Sequence
  Synthetic
tgtttcatgcagutgaccguagt

SEQ ID NO: 16420 - DNA, 29 bp, Artificial Sequence
  Synthetic
tctggttcaggaguttgtaaaattuggat

SEQ ID NO: 16421 - DNA, 30 bp, Artificial Sequence
  Synthetic
aggttgtactacutactagaaaatgcaugg

SEQ ID NO: 16422 - DNA, 25 bp, Artificial Sequence
  Synthetic
gcaacagacaaauggagttttggua

SEQ ID NO: 16423 - DNA, 32 bp, Artificial Sequence
  Synthetic
gtgaaagaaataugaaagttcagagauagagt

SEQ ID NO: 16424 - DNA, 32 bp, Artificial Sequence
  Synthetic
aaaatgacatgtuaccaaatatgaggauaggt

SEQ ID NO: 16425 - DNA, 30 bp, Artificial Sequence
  Synthetic
aaaaattctgacaatutaccttgccaagut

SEQ ID NO: 16426 - DNA, 28 bp, Artificial Sequence
  Synthetic
tggcagagtaaaacautatttccaccut

SEQ ID NO: 16427 - DNA, 32 bp, Artificial Sequence
  Synthetic
gaagttttatgtgauctatccgttctttaugt

SEQ ID NO: 16428 - DNA, 23 bp, Artificial Sequence
  Synthetic
ggtuaaccaaagtctugccacaa

SEQ ID NO: 16429 - DNA, 30 bp, Artificial Sequence
  Synthetic
acaataaagttugaagtctgtgctcuaaaa

SEQ ID NO: 16430 - DNA, 29 bp, Artificial Sequence
  Synthetic
catgtgccctguattgaaaattaatguct

SEQ ID NO: 16431 - DNA, 25 bp, Artificial Sequence
  Synthetic
ccactcgaagagcuagatcccuaaa

SEQ ID NO: 16432 - DNA, 28 bp, Artificial Sequence
  Synthetic
tgttatatccucaggatgttccagaugt

SEQ ID NO: 16433 - DNA, 26 bp, Artificial Sequence
  Synthetic
ccaaactttctcutcttcactccuct

SEQ ID NO: 16434 - DNA, 25 bp, Artificial Sequence
  Synthetic
gttggtttttaguaagggtggugga

SEQ ID NO: 16435 - DNA, 26 bp, Artificial Sequence
  Synthetic
ccacgcctatutctatgggtattuca

SEQ ID NO: 16436 - DNA, 27 bp, Artificial Sequence
  Synthetic
ggaaaggaagaaagucaguaagaacua

SEQ ID NO: 16437 - DNA, 28 bp, Artificial Sequence
  Synthetic
ggtcaaaatugaaagtgagacaucagag

SEQ ID NO: 16438 - DNA, 24 bp, Artificial Sequence
  Synthetic
ggctctttugacatgggttuaggt

SEQ ID NO: 16439 - DNA, 23 bp, Artificial Sequence
  Synthetic
agtgcctucaaagaacctuccag

SEQ ID NO: 16440 - DNA, 25 bp, Artificial Sequence
  Synthetic
gcttttcacaagagagugccactua

SEQ ID NO: 16441 - DNA, 31 bp, Artificial Sequence
  Synthetic
gctttgattatgacutattcctgcatctuga

SEQ ID NO: 16442 - DNA, 22 bp, Artificial Sequence
  Synthetic
gggccaagcgautgttucaaag

SEQ ID NO: 16443 - DNA, 21 bp, Artificial Sequence
  Synthetic
cacgactggauggtgttcgua

SEQ ID NO: 16444 - DNA, 23 bp, Artificial Sequence
  Synthetic
aaattucacaggccuaccaccaa

SEQ ID NO: 16445 - DNA, 23 bp, Artificial Sequence
  Synthetic
tgccaaagtcutgtgacctguag

SEQ ID NO: 16446 - DNA, 25 bp, Artificial Sequence
  Synthetic
cactcttacacutacgcccaaguat

SEQ ID NO: 16447 - DNA, 21 bp, Artificial Sequence
  Synthetic
agtcgtggacuggaatgggua

SEQ ID NO: 16448 - DNA, 20 bp, Artificial Sequence
  Synthetic
ccgggcucacctgctaaaut

SEQ ID NO: 16449 - DNA, 23 bp, Artificial Sequence
  Synthetic
catctctgcuacccaagatgucc

SEQ ID NO: 16450 - DNA, 23 bp, Artificial Sequence
  Synthetic
ggcaucagaagugggaagagaag

SEQ ID NO: 16451 - DNA, 24 bp, Artificial Sequence
  Synthetic
ccgcagttuctcattgagguagaa

SEQ ID NO: 16452 - DNA, 24 bp, Artificial Sequence
  Synthetic
cataatgcutgtggttuccccaat

SEQ ID NO: 16453 - DNA, 21 bp, Artificial Sequence
  Synthetic
aggcacuaagcagccttcaug

SEQ ID NO: 16454 - DNA, 23 bp, Artificial Sequence
  Synthetic
tcagcttcaggucactttcccua

SEQ ID NO: 16455 - DNA, 20 bp, Artificial Sequence
  Synthetic
actctgtccutcgtgctucc

SEQ ID NO: 16456 - DNA, 25 bp, Artificial Sequence
  Synthetic
ctcaggataaugaagttgcagguga

SEQ ID NO: 16457 - DNA, 22 bp, Artificial Sequence
  Synthetic
tgtagctgttutggttggagug

SEQ ID NO: 16458 - DNA, 22 bp, Artificial Sequence
  Synthetic
gaacgagccggucattctttuc

SEQ ID NO: 16459 - DNA, 18 bp, Artificial Sequence
  Synthetic
aggccagcutcaccctuc

SEQ ID NO: 16460 - DNA, 27 bp, Artificial Sequence
  Synthetic
tttggagacaaaaccuattcacagcua

SEQ ID NO: 16461 - DNA, 29 bp, Artificial Sequence
  Synthetic
ctcctcggutattctgttctuaaacaaga

SEQ ID NO: 16462 - DNA, 26 bp, Artificial Sequence
  Synthetic
ttgttttgaagccuacacatgatucc

SEQ ID NO: 16463 - DNA, 28 bp, Artificial Sequence
  Synthetic
atcatcgaauacccctttgactuacaaa

SEQ ID NO: 16464 - DNA, 22 bp, Artificial Sequence
  Synthetic
gcagacaccutctccacaucaa

SEQ ID NO: 16465 - DNA, 25 bp, Artificial Sequence
  Synthetic
tgaaggaaggugttacctgaatugt

SEQ ID NO: 16466 - DNA, 22 bp, Artificial Sequence
  Synthetic
gtcccaagaugtgtacagcuca

SEQ ID NO: 16467 - DNA, 26 bp, Artificial Sequence
  Synthetic
cttaaagagcugcgaactcaagtcua

SEQ ID NO: 16468 - DNA, 21 bp, Artificial Sequence
  Synthetic
tgatcagcugttgugcaggag

SEQ ID NO: 16469 - DNA, 23 bp, Artificial Sequence
  Synthetic
tcctaaccuctcccctgugaaat

SEQ ID NO: 16470 - DNA, 24 bp, Artificial Sequence
  Synthetic
ttgacaaugctctucccaggaaat

SEQ ID NO: 16471 - DNA, 22 bp, Artificial Sequence
  Synthetic
ttggatttuccatcctguggca

SEQ ID NO: 16472 - DNA, 27 bp, Artificial Sequence
  Synthetic
aagaaatgatuccaagcatctcctuca

SEQ ID NO: 16473 - DNA, 28 bp, Artificial Sequence
  Synthetic
tgctgcatctttutgaaaagctaatcuc

SEQ ID NO: 16474 - DNA, 23 bp, Artificial Sequence
  Synthetic
gaggatttccugaggttcacguc

SEQ ID NO: 16475 - DNA, 26 bp, Artificial Sequence
  Synthetic
tgcatggctcutagatttgagtgaut

SEQ ID NO: 16476 - DNA, 23 bp, Artificial Sequence
  Synthetic
agccatttugagaggacacgtut

SEQ ID NO: 16477 - DNA, 31 bp, Artificial Sequence
  Synthetic
gttgcataatgccuttactgaccaaaattua

SEQ ID NO: 16478 - DNA, 17 bp, Artificial Sequence
  Synthetic
ggugggctguccacagg

SEQ ID NO: 16479 - DNA, 18 bp, Artificial Sequence
  Synthetic
ccgcgccutcctctcuaa

SEQ ID NO: 16480 - DNA, 22 bp, Artificial Sequence
  Synthetic
gggaauccagcagacaugaaat

SEQ ID NO: 16481 - DNA, 23 bp, Artificial Sequence
  Synthetic
agtcaggagagugagaugaaggt

SEQ ID NO: 16482 - DNA, 26 bp, Artificial Sequence
  Synthetic
gggtctctacucgcagtttctctaua

SEQ ID NO: 16483 - DNA, 28 bp, Artificial Sequence
  Synthetic
aacctttacagcautctactcgttctut

SEQ ID NO: 16484 - DNA, 22 bp, Artificial Sequence
  Synthetic
caggatuccggagcagaactua

SEQ ID NO: 16485 - DNA, 19 bp, Artificial Sequence
  Synthetic
ccuctgctgtucccaacgg

SEQ ID NO: 16486 - DNA, 28 bp, Artificial Sequence
  Synthetic
gggagaaataauggatctgcaaatagut

SEQ ID NO: 16487 - DNA, 25 bp, Artificial Sequence
  Synthetic
gtccatgaagacauatgcagaggut

SEQ ID NO: 16488 - DNA, 20 bp, Artificial Sequence
  Synthetic
ggcccacacutgagcttuca

SEQ ID NO: 16489 - DNA, 24 bp, Artificial Sequence
  Synthetic
gtaaaaggcgauttgaacgcgaut

SEQ ID NO: 16490 - DNA, 25 bp, Artificial Sequence
  Synthetic
acaatgatctgugatgccatgtuct

SEQ ID NO: 16491 - DNA, 29 bp, Artificial Sequence
  Synthetic
ggtgtaaagcagaauatgaatgaatgugg

SEQ ID NO: 16492 - DNA, 18 bp, Artificial Sequence
  Synthetic
ctccagggcuggugcaat

SEQ ID NO: 16493 - DNA, 21 bp, Artificial Sequence
  Synthetic
cggcugcaggaaagttuacac

SEQ ID NO: 16494 - DNA, 21 bp, Artificial Sequence
  Synthetic
gagaaagtucctcggagcugt

SEQ ID NO: 16495 - DNA, 23 bp, Artificial Sequence
  Synthetic
aaaatcautctggcucgggagaa

SEQ ID NO: 16496 - DNA, 17 bp, Artificial Sequence
  Synthetic
cgaggccauggagguga

SEQ ID NO: 16497 - DNA, 24 bp, Artificial Sequence
  Synthetic
tgttaaaaagcacauccaccucct

SEQ ID NO: 16498 - DNA, 20 bp, Artificial Sequence
  Synthetic
tcucagccccttcuccaaga

SEQ ID NO: 16499 - DNA, 17 bp, Artificial Sequence
  Synthetic
gguggacagcgaugggt

SEQ ID NO: 16500 - DNA, 24 bp, Artificial Sequence
  Synthetic
ggcttatcugtgcttttgttucca

SEQ ID NO: 16501 - DNA, 21 bp, Artificial Sequence
  Synthetic
ccttcgcutgggcttaaugag

SEQ ID NO: 16502 - DNA, 28 bp, Artificial Sequence
  Synthetic
tgtctagcaaauccaaaaagugcaaaaa

SEQ ID NO: 16503 - DNA, 18 bp, Artificial Sequence
  Synthetic
ggtcagcaugtggcugga

SEQ ID NO: 16504 - DNA, 23 bp, Artificial Sequence
  Synthetic
gaggacgagguctcccataguat

SEQ ID NO: 16505 - DNA, 18 bp, Artificial Sequence
  Synthetic
gggcggutgggtgttuac

SEQ ID NO: 16506 - DNA, 29 bp, Artificial Sequence
  Synthetic
acggtgttaattugctttcgataaaacug

SEQ ID NO: 16507 - DNA, 28 bp, Artificial Sequence
  Synthetic
cctuattataacgatcaugcggaacaga

SEQ ID NO: 16508 - DNA, 20 bp, Artificial Sequence
  Synthetic
gccagaaccaucaccugcat

SEQ ID NO: 16509 - DNA, 29 bp, Artificial Sequence
  Synthetic
agggaatgaaaacaguttttagaggugaa

SEQ ID NO: 16510 - DNA, 27 bp, Artificial Sequence
  Synthetic
tgattatatcatguctgctgcttaugg

SEQ ID NO: 16511 - DNA, 24 bp, Artificial Sequence
  Synthetic
ctgcactgaacutccagaagauga

SEQ ID NO: 16512 - DNA, 31 bp, Artificial Sequence
  Synthetic
ggcauagaagaagaaactguaaaggaaaaga

SEQ ID NO: 16513 - DNA, 24 bp, Artificial Sequence
  Synthetic
gctgatgcuacagatgatgtuggt

SEQ ID NO: 16514 - DNA, 30 bp, Artificial Sequence
  Synthetic
tcagtgtatggcuatgtatttcttttgugt

SEQ ID NO: 16515 - DNA, 27 bp, Artificial Sequence
  Synthetic
acctttgtgauaaacgaaccacuagag

SEQ ID NO: 16516 - DNA, 27 bp, Artificial Sequence
  Synthetic
ctctatctggaucttctctcagucagg

SEQ ID NO: 16517 - DNA, 29 bp, Artificial Sequence
  Synthetic
aaagtaggtgagaguagggttttagagut

SEQ ID NO: 16518 - DNA, 26 bp, Artificial Sequence
  Synthetic
acttatttctaaggutaccggcacug

SEQ ID NO: 16519 - DNA, 28 bp, Artificial Sequence
  Synthetic
ttcctctaatctucggttttcaactuga

SEQ ID NO: 16520 - DNA, 21 bp, Artificial Sequence
  Synthetic
cgcugggacttaatguccagt

SEQ ID NO: 16521 - DNA, 21 bp, Artificial Sequence
  Synthetic
ccattgaccugctgaacucca

SEQ ID NO: 16522 - DNA, 26 bp, Artificial Sequence
  Synthetic
tgtaatcatttutcagtgccucagga

SEQ ID NO: 16523 - DNA, 28 bp, Artificial Sequence
  Synthetic
cagcttagaacacaugctcctaauaaga

SEQ ID NO: 16524 - DNA, 27 bp, Artificial Sequence
  Synthetic
tgaagaagtcattugtcaaccatggua

SEQ ID NO: 16525 - DNA, 22 bp, Artificial Sequence
  Synthetic
ccaacccaugggaagtacugac

SEQ ID NO: 16526 - DNA, 28 bp, Artificial Sequence
  Synthetic
cctccctgaagaacauagagaagtauct

SEQ ID NO: 16527 - DNA, 24 bp, Artificial Sequence
  Synthetic
gctcccataatugaccctgtacug

SEQ ID NO: 16528 - DNA, 20 bp, Artificial Sequence
  Synthetic
gcaccautcccaucaagcaa

SEQ ID NO: 16529 - DNA, 24 bp, Artificial Sequence
  Synthetic
catttctgccutggactcuacagg

SEQ ID NO: 16530 - DNA, 22 bp, Artificial Sequence
  Synthetic
caggcatccutgagcagctuat

SEQ ID NO: 16531 - DNA, 29 bp, Artificial Sequence
  Synthetic
gctttctcatgaaguagttttcttcccut

SEQ ID NO: 16532 - DNA, 30 bp, Artificial Sequence
  Synthetic
actattctctaaattuctgcctaggtcugt

SEQ ID NO: 16533 - DNA, 22 bp, Artificial Sequence
  Synthetic
ccaatctgcugcttgagtccut

SEQ ID NO: 16534 - DNA, 22 bp, Artificial Sequence
  Synthetic
gttggcuacagguaccacacaa

SEQ ID NO: 16535 - DNA, 21 bp, Artificial Sequence
  Synthetic
cactggcuggaagaactcugg

SEQ ID NO: 16536 - DNA, 24 bp, Artificial Sequence
  Synthetic
tcactucaagcgaacaacttucct

SEQ ID NO: 16537 - DNA, 23 bp, Artificial Sequence
  Synthetic
gtttggtuggagctttgacctut

SEQ ID NO: 16538 - DNA, 23 bp, Artificial Sequence
  Synthetic
ccggtacccutctgtgatugaat

SEQ ID NO: 16539 - DNA, 29 bp, Artificial Sequence
  Synthetic
catccctaatucctgctttagaaucaaga

SEQ ID NO: 16540 - DNA, 29 bp, Artificial Sequence
  Synthetic
tgtattatgatgucgagccattcctttut

SEQ ID NO: 16541 - DNA, 24 bp, Artificial Sequence
  Synthetic
tgttcaaagaautgggctcuacca

SEQ ID NO: 16542 - DNA, 21 bp, Artificial Sequence
  Synthetic
acatgacatugccaccacuct

SEQ ID NO: 16543 - DNA, 25 bp, Artificial Sequence
  Synthetic
ggaacctcaguctttaactggaaug

SEQ ID NO: 16544 - DNA, 26 bp, Artificial Sequence
  Synthetic
caactagagcuaacagtaggcaauca

SEQ ID NO: 16545 - DNA, 27 bp, Artificial Sequence
  Synthetic
cttcttcttcacugctctcttuagaca

SEQ ID NO: 16546 - DNA, 26 bp, Artificial Sequence
  Synthetic
agaccattucagagacgacagaagua

SEQ ID NO: 16547 - DNA, 23 bp, Artificial Sequence
  Synthetic
tguttgtcttttctucccaggct

SEQ ID NO: 16548 - DNA, 20 bp, Artificial Sequence
  Synthetic
ccugacgagcagguaacagt

SEQ ID NO: 16549 - DNA, 24 bp, Artificial Sequence
  Synthetic
ttcugttttcctctugaggcaaca

SEQ ID NO: 16550 - DNA, 26 bp, Artificial Sequence
  Synthetic
auggtgcuaaaagccaagaaaaagag

SEQ ID NO: 16551 - DNA, 21 bp, Artificial Sequence
  Synthetic
cagactccaugtggctgucat

SEQ ID NO: 16552 - DNA, 26 bp, Artificial Sequence
  Synthetic
gucgatacagagtucaaagagggaaa

SEQ ID NO: 16553 - DNA, 21 bp, Artificial Sequence
  Synthetic
acgggtguagttctguaggct

SEQ ID NO: 16554 - DNA, 24 bp, Artificial Sequence
  Synthetic
gagagcacaacugagaacuacgaa

SEQ ID NO: 16555 - DNA, 21 bp, Artificial Sequence
  Synthetic
ctctgtgucagactgcuggag

SEQ ID NO: 16556 - DNA, 23 bp, Artificial Sequence
  Synthetic
gccaaacugcagcagttaacuaa

SEQ ID NO: 16557 - DNA, 22 bp, Artificial Sequence
  Synthetic
ggagtguggagacugagaaagt

SEQ ID NO: 16558 - DNA, 22 bp, Artificial Sequence
  Synthetic
gccagccuacaatgtcaacuct

SEQ ID NO: 16559 - DNA, 22 bp, Artificial Sequence
  Synthetic
gggcgtutgattcatauagcca

SEQ ID NO: 16560 - DNA, 17 bp, Artificial Sequence
  Synthetic
gcggagcugcctctuct

SEQ ID NO: 16561 - DNA, 20 bp, Artificial Sequence
  Synthetic
gagagggcucaccagaggua

SEQ ID NO: 16562 - DNA, 21 bp, Artificial Sequence
  Synthetic
cccgugtcctgtucaaacact

SEQ ID NO: 16563 - DNA, 27 bp, Artificial Sequence
  Synthetic
acacaatctacaucttctgcattugga

SEQ ID NO: 16564 - DNA, 25 bp, Artificial Sequence
  Synthetic
gccaggctttugaatttctcctgua

SEQ ID NO: 16565 - DNA, 26 bp, Artificial Sequence
  Synthetic
ggtttttctucacatctttccauggg

SEQ ID NO: 16566 - DNA, 23 bp, Artificial Sequence
  Synthetic
ccactattgcuggagtcaugaca

SEQ ID NO: 16567 - DNA, 23 bp, Artificial Sequence
  Synthetic
gcagttgaacuttctgttcugct

SEQ ID NO: 16568 - DNA, 28 bp, Artificial Sequence
  Synthetic
tcagaaatgaaauccaaagcttggtcua

SEQ ID NO: 16569 - DNA, 20 bp, Artificial Sequence
  Synthetic
tgttggctcutcagcgcuaa

SEQ ID NO: 16570 - DNA, 22 bp, Artificial Sequence
  Synthetic
aaguggagacaacaagctcugg

SEQ ID NO: 16571 - DNA, 25 bp, Artificial Sequence
  Synthetic
gccttcctcaguatccacacauaaa

SEQ ID NO: 16572 - DNA, 27 bp, Artificial Sequence
  Synthetic
aattcgatccaagucttctaccaacug

SEQ ID NO: 16573 - DNA, 26 bp, Artificial Sequence
  Synthetic
acgtccccauattgcctatuaaaact

SEQ ID NO: 16574 - DNA, 27 bp, Artificial Sequence
  Synthetic
agagttactcacacaucactctgauga

SEQ ID NO: 16575 - DNA, 25 bp, Artificial Sequence
  Synthetic
tcttaaacagggcauagccctatug

SEQ ID NO: 16576 - DNA, 22 bp, Artificial Sequence
  Synthetic
tccttgaaggucatctgcucct

SEQ ID NO: 16577 - DNA, 27 bp, Artificial Sequence
  Synthetic
attctctcttuagggagcttctctuct

SEQ ID NO: 16578 - DNA, 24 bp, Artificial Sequence
  Synthetic
tccccatttauagctgagtcucca

SEQ ID NO: 16579 - DNA, 21 bp, Artificial Sequence
  Synthetic
cgctggugaggauaacaacac

SEQ ID NO: 16580 - DNA, 30 bp, Artificial Sequence
  Synthetic
acagaagctgtgutaattttatagcaguca

SEQ ID NO: 16581 - DNA, 22 bp, Artificial Sequence
  Synthetic
aatatacgtgcutggcggguaa

SEQ ID NO: 16582 - DNA, 27 bp, Artificial Sequence
  Synthetic
cagttgtggguacctttagatucagaa

SEQ ID NO: 16583 - DNA, 23 bp, Artificial Sequence
  Synthetic
ggaggagacguagagtttgtcug

SEQ ID NO: 16584 - DNA, 30 bp, Artificial Sequence
  Synthetic
atgtaagaaatgtgaugttctgaaagctua

SEQ ID NO: 16585 - DNA, 21 bp, Artificial Sequence
  Synthetic
cggccaacacugtcaagttuc

SEQ ID NO: 16586 - DNA, 26 bp, Artificial Sequence
  Synthetic
accaagtttcacugtctacagtccua

SEQ ID NO: 16587 - DNA, 19 bp, Artificial Sequence
  Synthetic
tgaaagaugccgccgugat

SEQ ID NO: 16588 - DNA, 20 bp, Artificial Sequence
  Synthetic
gaugaaacgaccccagcuga

SEQ ID NO: 16589 - DNA, 18 bp, Artificial Sequence
  Synthetic
cgcaggcugaaggcatug

SEQ ID NO: 16590 - DNA, 20 bp, Artificial Sequence
  Synthetic
ggagagggucagtgagugct

SEQ ID NO: 16591 - DNA, 19 bp, Artificial Sequence
  Synthetic
cacgcacugtggaatcucg

SEQ ID NO: 16592 - DNA, 17 bp, Artificial Sequence
  Synthetic
cgccaggcucacctcua

SEQ ID NO: 16593 - DNA, 25 bp, Artificial Sequence
  Synthetic
ctgaggagcgaugacggaatauaag

SEQ ID NO: 16594 - DNA, 26 bp, Artificial Sequence
  Synthetic
gttactgaactugggattcaaaggug

SEQ ID NO: 16595 - DNA, 25 bp, Artificial Sequence
  Synthetic
cttctctctcucgcttggatttuct

SEQ ID NO: 16596 - DNA, 18 bp, Artificial Sequence
  Synthetic
gccaccuaccgtccucct

SEQ ID NO: 16597 - DNA, 22 bp, Artificial Sequence
  Synthetic
ggtaatuagagcccgctagcug

SEQ ID NO: 16598 - DNA, 23 bp, Artificial Sequence
  Synthetic
aaatctccaucctgcgcttuaca

SEQ ID NO: 16599 - DNA, 25 bp, Artificial Sequence
  Synthetic
acgtttgcacuatgacctucagaaa

SEQ ID NO: 16600 - DNA, 23 bp, Artificial Sequence
  Synthetic
tcaggaagutgttcugaggcaag

SEQ ID NO: 16601 - DNA, 25 bp, Artificial Sequence
  Synthetic
cutcaatggctauagagagaaccca

SEQ ID NO: 16602 - DNA, 18 bp, Artificial Sequence
  Synthetic
cuccagagccgugcgaat

SEQ ID NO: 16603 - DNA, 21 bp, Artificial Sequence
  Synthetic
gatcgctttuccgagcttcug

SEQ ID NO: 16604 - DNA, 28 bp, Artificial Sequence
  Synthetic
ctatgtcagagtugatgaggaggtauct

SEQ ID NO: 16605 - DNA, 23 bp, Artificial Sequence
  Synthetic
cggattcgugcctatgagaugac

SEQ ID NO: 16606 - DNA, 22 bp, Artificial Sequence
  Synthetic
aacctaggguttggguagaggt

SEQ ID NO: 16607 - DNA, 26 bp, Artificial Sequence
  Synthetic
gtgactacacuctgtctttccucaag

SEQ ID NO: 16608 - DNA, 18 bp, Artificial Sequence
  Synthetic
ccaggcccutgtccagug

SEQ ID NO: 16609 - DNA, 20 bp, Artificial Sequence
  Synthetic
gcagaaggugcgcataguga

SEQ ID NO: 16610 - DNA, 18 bp, Artificial Sequence
  Synthetic
tguggaagggagcccugt

SEQ ID NO: 16611 - DNA, 27 bp, Artificial Sequence
  Synthetic
agttctttgaaguagccaatgatguca

SEQ ID NO: 16612 - DNA, 21 bp, Artificial Sequence
  Synthetic
cctcagccacugttaggguct

SEQ ID NO: 16613 - DNA, 26 bp, Artificial Sequence
  Synthetic
gcagcctgaatuatgatcctttccua

SEQ ID NO: 16614 - DNA, 24 bp, Artificial Sequence
  Synthetic
aaccauggagggtttugaagaagt

SEQ ID NO: 16615 - DNA, 21 bp, Artificial Sequence
  Synthetic
gtgagctggugaagaagguct

SEQ ID NO: 16616 - DNA, 30 bp, Artificial Sequence
  Synthetic
agcttgtaacattutcatttttcctgtauc

SEQ ID NO: 16617 - DNA, 29 bp, Artificial Sequence
  Synthetic
cagggaacaaucactaatacaacattugt

SEQ ID NO: 16618 - DNA, 29 bp, Artificial Sequence
  Synthetic
aatagacatatutctagatgcugacacag

SEQ ID NO: 16619 - DNA, 29 bp, Artificial Sequence
  Synthetic
gtatgaaataaaccutagctgctgauagg

SEQ ID NO: 16620 - DNA, 32 bp, Artificial Sequence
  Synthetic
atagacctagacacucaaattagttactuacc

SEQ ID NO: 16621 - DNA, 26 bp, Artificial Sequence
  Synthetic
ggtgaagcaguacaagaatttgugga

SEQ ID NO: 16622 - DNA, 30 bp, Artificial Sequence
  Synthetic
aagattcctucacaaatcctauaagaacat

SEQ ID NO: 16623 - DNA, 25 bp, Artificial Sequence
  Synthetic
gtgttcttcgcuttagccagaaaut

SEQ ID NO: 16624 - DNA, 32 bp, Artificial Sequence
  Synthetic
aggtgaataattctucaactaaagtagatcuc

SEQ ID NO: 16625 - DNA, 21 bp, Artificial Sequence
  Synthetic
cggcaguttttcauggaggat

SEQ ID NO: 16626 - DNA, 30 bp, Artificial Sequence
  Synthetic
gttcatttttggutggagctatttuacact

SEQ ID NO: 16627 - DNA, 31 bp, Artificial Sequence
  Synthetic
tcaaaatcttgauacaggagtaaacauggaa

SEQ ID NO: 16628 - DNA, 24 bp, Artificial Sequence
  Synthetic
tgaagcaaaaccggacuaatguct

SEQ ID NO: 16629 - DNA, 30 bp, Artificial Sequence
  Synthetic
attcatgcagauacctacttttacauacac

SEQ ID NO: 16630 - DNA, 30 bp, Artificial Sequence
  Synthetic
ggccgatcacccauacaatattttctuaat

SEQ ID NO: 16631 - DNA, 32 bp, Artificial Sequence
  Synthetic
ctaattttaacaccuttttctgttgaucaggt

SEQ ID NO: 16632 - DNA, 28 bp, Artificial Sequence
  Synthetic
atgttatcttcaugtagtccaccugaac

SEQ ID NO: 16633 - DNA, 28 bp, Artificial Sequence
  Synthetic
atgactggaugaaagacatcaatctuga

SEQ ID NO: 16634 - DNA, 21 bp, Artificial Sequence
  Synthetic
ccgtccucgactgatucaacc

SEQ ID NO: 16635 - DNA, 22 bp, Artificial Sequence
  Synthetic
gtgcaaaugagacccaugaacc

SEQ ID NO: 16636 - DNA, 24 bp, Artificial Sequence
  Synthetic
agctccaaaaguggctacattgut

SEQ ID NO: 16637 - DNA, 27 bp, Artificial Sequence
  Synthetic
aatctgcctugtaatcaaccuaacaca

SEQ ID NO: 16638 - DNA, 22 bp, Artificial Sequence
  Synthetic
tgggucaacaggtttgtucagt

SEQ ID NO: 16639 - DNA, 24 bp, Artificial Sequence
  Synthetic
ggttacatgaacucccagcaauca

SEQ ID NO: 16640 - DNA, 21 bp, Artificial Sequence
  Synthetic
tgttgctgtugggtgtagugt

SEQ ID NO: 16641 - DNA, 17 bp, Artificial Sequence
  Synthetic
ccauggagccccgucag

SEQ ID NO: 16642 - DNA, 23 bp, Artificial Sequence
  Synthetic
ggattttcucctgcccaaaugga

SEQ ID NO: 16643 - DNA, 22 bp, Artificial Sequence
  Synthetic
gcccagcagcucaaacagauag

SEQ ID NO: 16644 - DNA, 27 bp, Artificial Sequence
  Synthetic
caagtcaatgtuaaatgggtcatccug

SEQ ID NO: 16645 - DNA, 23 bp, Artificial Sequence
  Synthetic
cuaatagguacggagacgaccct

SEQ ID NO: 16646 - DNA, 27 bp, Artificial Sequence
  Synthetic
tctccccaacacgaautcttttgauat

SEQ ID NO: 16647 - DNA, 28 bp, Artificial Sequence
  Synthetic
ctttttattccctuctgtctttcagcuc

SEQ ID NO: 16648 - DNA, 17 bp, Artificial Sequence
  Synthetic
ggaggcgcuccacgaua

SEQ ID NO: 16649 - DNA, 23 bp, Artificial Sequence
  Synthetic
atcattgtguccggtaagauggg

SEQ ID NO: 16650 - DNA, 25 bp, Artificial Sequence
  Synthetic
gggatgtgttugtatgcacgtttut

SEQ ID NO: 16651 - DNA, 22 bp, Artificial Sequence
  Synthetic
accatgcacutaattggccgua

SEQ ID NO: 16652 - DNA, 28 bp, Artificial Sequence
  Synthetic
ccaccttcccuggagtaaaaaucaaaat

SEQ ID NO: 16653 - DNA, 26 bp, Artificial Sequence
  Synthetic
agaggagagaguttacctgctctuaa

SEQ ID NO: 16654 - DNA, 26 bp, Artificial Sequence
  Synthetic
cttcaaaaaggacagaugcaaccaut

SEQ ID NO: 16655 - DNA, 22 bp, Artificial Sequence
  Synthetic
atagcacugacaacaggcauga

SEQ ID NO: 16656 - DNA, 22 bp, Artificial Sequence
  Synthetic
ccaguccccagaaaaugagagt

SEQ ID NO: 16657 - DNA, 19 bp, Artificial Sequence
  Synthetic
gagacgaggagguctgcug

SEQ ID NO: 16658 - DNA, 22 bp, Artificial Sequence
  Synthetic
tgataattuccgacccccucca

SEQ ID NO: 16659 - DNA, 22 bp, Artificial Sequence
  Synthetic
ctcagaagagggcucctttugt

SEQ ID NO: 16660 - DNA, 22 bp, Artificial Sequence
  Synthetic
cctcttgccacuagtgcctuaa

SEQ ID NO: 16661 - DNA, 28 bp, Artificial Sequence
  Synthetic
gaggagtaggacuacttgatgaaaaugg

SEQ ID NO: 16662 - DNA, 22 bp, Artificial Sequence
  Synthetic
gccactucatcttcugccaaaa

SEQ ID NO: 16663 - DNA, 19 bp, Artificial Sequence
  Synthetic
gccgagguccaagttggut

SEQ ID NO: 16664 - DNA, 28 bp, Artificial Sequence
  Synthetic
ggttgttattgtutttggattgccucat

SEQ ID NO: 16665 - DNA, 19 bp, Artificial Sequence
  Synthetic
cagcucgtttucggccaag

SEQ ID NO: 16666 - DNA, 26 bp, Artificial Sequence
  Synthetic
gactgtggtguttgtactaattgcut

SEQ ID NO: 16667 - DNA, 27 bp, Artificial Sequence
  Synthetic
attcagtttccugatgtatctcugcaa

SEQ ID NO: 16668 - DNA, 25 bp, Artificial Sequence
  Synthetic
gtggtggactcuagtcagaaaccua

SEQ ID NO: 16669 - DNA, 21 bp, Artificial Sequence
  Synthetic
tggtggccugtttggatucag

SEQ ID NO: 16670 - DNA, 23 bp, Artificial Sequence
  Synthetic
gcaaatgugaaggcaaauagggt

SEQ ID NO: 16671 - DNA, 23 bp, Artificial Sequence
  Synthetic
tggactccauctgctggaattut

SEQ ID NO: 16672 - DNA, 21 bp, Artificial Sequence
  Synthetic
tgtgagcccutccacaagtut

SEQ ID NO: 16673 - DNA, 28 bp, Artificial Sequence
  Synthetic
ccagctgtagtuctattaccaagtttug

SEQ ID NO: 16674 - DNA, 21 bp, Artificial Sequence
  Synthetic
aaaacacggguatgugagcca

SEQ ID NO: 16675 - DNA, 28 bp, Artificial Sequence
  Synthetic
ctgaaagattcucacatttggaauggac

SEQ ID NO: 16676 - DNA, 27 bp, Artificial Sequence
  Synthetic
catggacaccutggttttagtgtuaga

SEQ ID NO: 16677 - DNA, 23 bp, Artificial Sequence
  Synthetic
ctgatcaucctgtttgcugacct

SEQ ID NO: 16678 - DNA, 25 bp, Artificial Sequence
  Synthetic
tcctcgtatuaacagagaagcuggt

SEQ ID NO: 16679 - DNA, 25 bp, Artificial Sequence
  Synthetic
gacttttugacactgaaccauggaa

SEQ ID NO: 16680 - DNA, 24 bp, Artificial Sequence
  Synthetic
ctgagcagccucctttaaugaaga

SEQ ID NO: 16681 - DNA, 26 bp, Artificial Sequence
  Synthetic
agtcaatcauctgcatcuagagggaa

SEQ ID NO: 16682 - DNA, 24 bp, Artificial Sequence
  Synthetic
ggaugagtctauagaggagacggt

SEQ ID NO: 16683 - DNA, 25 bp, Artificial Sequence
  Synthetic
ctcgggaacacaugaagtgatagut

SEQ ID NO: 16684 - DNA, 28 bp, Artificial Sequence
  Synthetic
aatgacgctcauaatcttctctaaucgg

SEQ ID NO: 16685 - DNA, 28 bp, Artificial Sequence
  Synthetic
ctgctctcttcuctttatagtgctacut

SEQ ID NO: 16686 - DNA, 26 bp, Artificial Sequence
  Synthetic
tcaaaagagagucaaaacacagcuga

SEQ ID NO: 16687 - DNA, 24 bp, Artificial Sequence
  Synthetic
ctgtgttggagaauaactgggugt

SEQ ID NO: 16688 - DNA, 22 bp, Artificial Sequence
  Synthetic
cggtccaaacuccggataaugt

SEQ ID NO: 16689 - DNA, 27 bp, Artificial Sequence
  Synthetic
actagtacttgaautcagtggcccuaa

SEQ ID NO: 16690 - DNA, 24 bp, Artificial Sequence
  Synthetic
agtaaaatcggcucctttgcugaa

SEQ ID NO: 16691 - DNA, 24 bp, Artificial Sequence
  Synthetic
atctggagaggaguttgctgatug

SEQ ID NO: 16692 - DNA, 21 bp, Artificial Sequence
  Synthetic
ggcctttctaugccaggaguc

SEQ ID NO: 16693 - DNA, 24 bp, Artificial Sequence
  Synthetic
gggaagcaggacuactttcttuca

SEQ ID NO: 16694 - DNA, 24 bp, Artificial Sequence
  Synthetic
ccgtgcacgutctaacatgtttut

SEQ ID NO: 16695 - DNA, 21 bp, Artificial Sequence
  Synthetic
gcttaagtcaucggccccauc

SEQ ID NO: 16696 - DNA, 31 bp, Artificial Sequence
  Synthetic
gaaatggtaaagaaaauggaacagagaacut

SEQ ID NO: 16697 - DNA, 27 bp, Artificial Sequence
  Synthetic
aaggaatcttguccctgtgtttuaact

SEQ ID NO: 16698 - DNA, 26 bp, Artificial Sequence
  Synthetic
agtaatcgugaaaaagacatggguct

SEQ ID NO: 16699 - DNA, 24 bp, Artificial Sequence
  Synthetic
gtggucaagacagacagaucagat

SEQ ID NO: 16700 - DNA, 23 bp, Artificial Sequence
  Synthetic
ggtacctgttuccccaactgtuc

SEQ ID NO: 16701 - DNA, 22 bp, Artificial Sequence
  Synthetic
agtggctgcaugttctggtuaa

SEQ ID NO: 16702 - DNA, 23 bp, Artificial Sequence
  Synthetic
gttucccaccaaacaucagcaat

SEQ ID NO: 16703 - DNA, 24 bp, Artificial Sequence
  Synthetic
ggtcutttcttgaguccagaggat

SEQ ID NO: 16704 - DNA, 27 bp, Artificial Sequence
  Synthetic
gcacatcaacaauaagccaggatacua

SEQ ID NO: 16705 - DNA, 20 bp, Artificial Sequence
  Synthetic
caagcaaccutgggttggut

SEQ ID NO: 16706 - DNA, 22 bp, Artificial Sequence
  Synthetic
cccagguatccaacttuaccca

SEQ ID NO: 16707 - DNA, 19 bp, Artificial Sequence
  Synthetic
actgaagggcutgcugacc

SEQ ID NO: 16708 - DNA, 29 bp, Artificial Sequence
  Synthetic
cacagctgtauagaaaattctgggtttut

SEQ ID NO: 16709 - DNA, 22 bp, Artificial Sequence
  Synthetic
cctttuacccacccacauacct

SEQ ID NO: 16710 - DNA, 23 bp, Artificial Sequence
  Synthetic
cttccctggugcttctgattcut

SEQ ID NO: 16711 - DNA, 22 bp, Artificial Sequence
  Synthetic
ggcttguggaaacggaattugt

SEQ ID NO: 16712 - DNA, 29 bp, Artificial Sequence
  Synthetic
tgtactaattgtcuctaggaacctucgat

SEQ ID NO: 16713 - DNA, 26 bp, Artificial Sequence
  Synthetic
ccaactgccuccttagaagtctttut

SEQ ID NO: 16714 - DNA, 28 bp, Artificial Sequence
  Synthetic
gaaatgacaagtucttctcccttctuct

SEQ ID NO: 16715 - DNA, 22 bp, Artificial Sequence
  Synthetic
ccgagaauagcagttaggcuca

SEQ ID NO: 16716 - DNA, 23 bp, Artificial Sequence
  Synthetic
agctcaaagcaagagugtcacut

SEQ ID NO: 16717 - DNA, 18 bp, Artificial Sequence
  Synthetic
gcagtcaugtcggcctug

SEQ ID NO: 16718 - DNA, 21 bp, Artificial Sequence
  Synthetic
cagcgutagcaaaugcagcaa

SEQ ID NO: 16719 - DNA, 21 bp, Artificial Sequence
  Synthetic
ggcagccuggttctcgaatua

SEQ ID NO: 16720 - DNA, 22 bp, Artificial Sequence
  Synthetic
acutttcugagaagcaggcgat

SEQ ID NO: 16721 - DNA, 27 bp, Artificial Sequence
  Synthetic
agaaacatgcttucctccaaagaacua

SEQ ID NO: 16722 - DNA, 19 bp, Artificial Sequence
  Synthetic
ccagcugtatcaccuggga

SEQ ID NO: 16723 - DNA, 21 bp, Artificial Sequence
  Synthetic
gccgtgcacuttggtcauaat

SEQ ID NO: 16724 - DNA, 26 bp, Artificial Sequence
  Synthetic
ccttcacactuaggcagctactacua

SEQ ID NO: 16725 - DNA, 28 bp, Artificial Sequence
  Synthetic
ggttctauccaacaagaaagaacaucca

SEQ ID NO: 16726 - DNA, 26 bp, Artificial Sequence
  Synthetic
gaagaguacaacaatgugaaggcaat

SEQ ID NO: 16727 - DNA, 30 bp, Artificial Sequence
  Synthetic
agutgtatttguaauggaagaagagaagaa

SEQ ID NO: 16728 - DNA, 25 bp, Artificial Sequence
  Synthetic
tcttttgctagtutcttggccagut

SEQ ID NO: 16729 - DNA, 28 bp, Artificial Sequence
  Synthetic
gctagaaaagguagagcaacttttugga

SEQ ID NO: 16730 - DNA, 21 bp, Artificial Sequence
  Synthetic
agcactggaggutccaaacut

SEQ ID NO: 16731 - DNA, 25 bp, Artificial Sequence
  Synthetic
gggctagtcucaatatttgcttuga

SEQ ID NO: 16732 - DNA, 23 bp, Artificial Sequence
  Synthetic
tttcaggccucaaacatcacugt

SEQ ID NO: 16733 - DNA, 31 bp, Artificial Sequence
  Synthetic
aaacaatggacuatgatgaugaagaaacaga

SEQ ID NO: 16734 - DNA, 19 bp, Artificial Sequence
  Synthetic
aaccguacgggcaactuct

SEQ ID NO: 16735 - DNA, 28 bp, Artificial Sequence
  Synthetic
gttcctctucctaaatcaagtucccaaa

SEQ ID NO: 16736 - DNA, 26 bp, Artificial Sequence
  Synthetic
ctccaggtccagauccttttctttut

SEQ ID NO: 16737 - DNA, 28 bp, Artificial Sequence
  Synthetic
aatggtggttttauttttgtaggtgcug

SEQ ID NO: 16738 - DNA, 25 bp, Artificial Sequence
  Synthetic
guaaggcttcttucaaggacaacac

SEQ ID NO: 16739 - DNA, 29 bp, Artificial Sequence
  Synthetic
aaatgttgatttcucatgcatcctacuct

SEQ ID NO: 16740 - DNA, 22 bp, Artificial Sequence
  Synthetic
gctcttgctucagtcgtgguaa

SEQ ID NO: 16741 - DNA, 30 bp, Artificial Sequence
  Synthetic
ttcttttgacctuttcagaatctgcuagat

SEQ ID NO: 16742 - DNA, 27 bp, Artificial Sequence
  Synthetic
cttcttaggttuacctgtgtttcugct

SEQ ID NO: 16743 - DNA, 28 bp, Artificial Sequence
  Synthetic
agatttgattgaatugcgagtaatgcug

SEQ ID NO: 16744 - DNA, 25 bp, Artificial Sequence
  Synthetic
acctaagacauttcttctgcauggg

SEQ ID NO: 16745 - DNA, 28 bp, Artificial Sequence
  Synthetic
agaagtgtttgaacutgttcctgaugat

SEQ ID NO: 16746 - DNA, 23 bp, Artificial Sequence
  Synthetic
cctgagcccagcuaagcaaauat

SEQ ID NO: 16747 - DNA, 24 bp, Artificial Sequence
  Synthetic
actttgcugaagctgtgaactuct

SEQ ID NO: 16748 - DNA, 28 bp, Artificial Sequence
  Synthetic
ctagactttaguagagttcatgcaugct

SEQ ID NO: 16749 - DNA, 22 bp, Artificial Sequence
  Synthetic
ggctctatgugggaatgtgcut

SEQ ID NO: 16750 - DNA, 26 bp, Artificial Sequence
  Synthetic
ctcttcttcuggcagaatctttcucc

SEQ ID NO: 16751 - DNA, 23 bp, Artificial Sequence
  Synthetic
tgugtagatggtucccacagaac

SEQ ID NO: 16752 - DNA, 25 bp, Artificial Sequence
  Synthetic
aaggatccauagaggttagacgugt

SEQ ID NO: 16753 - DNA, 26 bp, Artificial Sequence
  Synthetic
cttttgtgtgauggatgtgaugacag

SEQ ID NO: 16754 - DNA, 29 bp, Artificial Sequence
  Synthetic
cagactgcaatucaagtatcatttgagut

SEQ ID NO: 16755 - DNA, 17 bp, Artificial Sequence
  Synthetic
gcugggcccaaggtugt

SEQ ID NO: 16756 - DNA, 26 bp, Artificial Sequence
  Synthetic
tgtacttgggcaaacuggatttauca

SEQ ID NO: 16757 - DNA, 21 bp, Artificial Sequence
  Synthetic
gcutgggatatcugccaggaa

SEQ ID NO: 16758 - DNA, 28 bp, Artificial Sequence
  Synthetic
atgaaucaggaagcagaaatagugacaa

SEQ ID NO: 16759 - DNA, 28 bp, Artificial Sequence
  Synthetic
cattccttgttuacataccactgtgtut

SEQ ID NO: 16760 - DNA, 25 bp, Artificial Sequence
  Synthetic
ggtaaaagcuaacagtctgcaugga

SEQ ID NO: 16761 - DNA, 30 bp, Artificial Sequence
  Synthetic
agaagtcaaagacaaagugtgtaattaugt

SEQ ID NO: 16762 - DNA, 27 bp, Artificial Sequence
  Synthetic
caggagtctttucttctttgctgatut

SEQ ID NO: 16763 - DNA, 23 bp, Artificial Sequence
  Synthetic
tctcaaactucttgcacauggct

SEQ ID NO: 16764 - DNA, 23 bp, Artificial Sequence
  Synthetic
gcatggcautagcaaagacucaa

SEQ ID NO: 16765 - DNA, 22 bp, Artificial Sequence
  Synthetic
agggaccaguacatgaggacug

SEQ ID NO: 16766 - DNA, 23 bp, Artificial Sequence
  Synthetic
gctgtatcgucaaggcactctug

SEQ ID NO: 16767 - DNA, 30 bp, Artificial Sequence
  Synthetic
ctggtggaguatttgatagtgtatuaacct

SEQ ID NO: 16768 - DNA, 17 bp, Artificial Sequence
  Synthetic
cucagggcgccgtcuat

SEQ ID NO: 16769 - DNA, 19 bp, Artificial Sequence
  Synthetic
aggtucacgttgugcgaca

SEQ ID NO: 16770 - DNA, 22 bp, Artificial Sequence
  Synthetic
cttcttcccgcutgccttauct

SEQ ID NO: 16771 - DNA, 24 bp, Artificial Sequence
  Synthetic
cgcttctcttuggtgatgaactug

SEQ ID NO: 16772 - DNA, 27 bp, Artificial Sequence
  Synthetic
gacaatatctacuttggatcacgugct

SEQ ID NO: 16773 - DNA, 20 bp, Artificial Sequence
  Synthetic
cagaagtugcccaggtugac

SEQ ID NO: 16774 - DNA, 18 bp, Artificial Sequence
  Synthetic
gccgacgagcutaugcac

SEQ ID NO: 16775 - DNA, 22 bp, Artificial Sequence
  Synthetic
ggacgctgutcttgttgacuga

SEQ ID NO: 16776 - DNA, 20 bp, Artificial Sequence
  Synthetic
cgggtcucacgtgtctcuct

SEQ ID NO: 16777 - DNA, 20 bp, Artificial Sequence
  Synthetic
gcagccgcutctctttgtug

SEQ ID NO: 16778 - DNA, 20 bp, Artificial Sequence
  Synthetic
tcatcucccgaaaggtgcug

SEQ ID NO: 16779 - DNA, 19 bp, Artificial Sequence
  Synthetic
cgcgtccuctcttcugagg

SEQ ID NO: 16780 - DNA, 23 bp, Artificial Sequence
  Synthetic
cagcccacacaguataacgatug

SEQ ID NO: 16781 - DNA, 24 bp, Artificial Sequence
  Synthetic
gctgagguagaaatcgaacgtugg

SEQ ID NO: 16782 - DNA, 26 bp, Artificial Sequence
  Synthetic
tccacagaugtttcatgattuccagt

SEQ ID NO: 16783 - DNA, 23 bp, Artificial Sequence
  Synthetic
ctcttgtuccgaagctggaauct

SEQ ID NO: 16784 - DNA, 32 bp, Artificial Sequence
  Synthetic
tgacuaaacgattatatgaugagaagcaacaa

SEQ ID NO: 16785 - DNA, 26 bp, Artificial Sequence
  Synthetic
ggtagaggugaactgaaatgtuagcc

SEQ ID NO: 16786 - DNA, 29 bp, Artificial Sequence
  Synthetic
attggaaaggtuatttacaacaagtuagc

SEQ ID NO: 16787 - DNA, 28 bp, Artificial Sequence
  Synthetic
tctagaaaccaaaugtgaagaugaaggt

SEQ ID NO: 16788 - DNA, 28 bp, Artificial Sequence
  Synthetic
tgagttaggaaacagauacagaggucaa

SEQ ID NO: 16789 - DNA, 30 bp, Artificial Sequence
  Synthetic
agtcgagagatucaacttcaaattcuacac

SEQ ID NO: 16790 - DNA, 26 bp, Artificial Sequence
  Synthetic
gcacttcaugcaatgaaatgaauccc

SEQ ID NO: 16791 - DNA, 21 bp, Artificial Sequence
  Synthetic
gccctctucagcttgtgtuga

SEQ ID NO: 16792 - DNA, 26 bp, Artificial Sequence
  Synthetic
ccattgaaccutgtgtgatttgucaa

SEQ ID NO: 16793 - DNA, 29 bp, Artificial Sequence
  Synthetic
gttagcacaatcauttgaattggttguct

SEQ ID NO: 16794 - DNA, 20 bp, Artificial Sequence
  Synthetic
gagucagggcugagcaaaga

SEQ ID NO: 16795 - DNA, 17 bp, Artificial Sequence
  Synthetic
atugggcagcucagcca

SEQ ID NO: 16796 - DNA, 19 bp, Artificial Sequence
  Synthetic
ctgagcagaucccgtccut

SEQ ID NO: 16797 - DNA, 20 bp, Artificial Sequence
  Synthetic
gagtgcccutgttgaggugt

SEQ ID NO: 16798 - DNA, 22 bp, Artificial Sequence
  Synthetic
atcctgtuccaggcctaugaga

SEQ ID NO: 16799 - DNA, 24 bp, Artificial Sequence
  Synthetic
acagcctttuacaggaccuagagt

SEQ ID NO: 16800 - DNA, 19 bp, Artificial Sequence
  Synthetic
ctgaggcaggacacugcut

SEQ ID NO: 16801 - DNA, 20 bp, Artificial Sequence
  Synthetic
ctgtacucagcaggctgugg

SEQ ID NO: 16802 - DNA, 20 bp, Artificial Sequence
  Synthetic
gctgatuccctcccctucca

SEQ ID NO: 16803 - DNA, 19 bp, Artificial Sequence
  Synthetic
cacauggctcugcacaggt

SEQ ID NO: 16804 - DNA, 17 bp, Artificial Sequence
  Synthetic
ctucacacgccggcauc

SEQ ID NO: 16805 - DNA, 19 bp, Artificial Sequence
  Synthetic
gggugggaccaacauggaa

SEQ ID NO: 16806 - DNA, 26 bp, Artificial Sequence
  Synthetic
gcaatgagaaugacaacttgguacct

SEQ ID NO: 16807 - DNA, 25 bp, Artificial Sequence
  Synthetic
gccatcctuccctaatttgactucg

SEQ ID NO: 16808 - DNA, 27 bp, Artificial Sequence
  Synthetic
ccatgauaacgacacaacacaaaauag

SEQ ID NO: 16809 - DNA, 23 bp, Artificial Sequence
  Synthetic
ccacgggaaaguggtgaagauat

SEQ ID NO: 16810 - DNA, 32 bp, Artificial Sequence
  Synthetic
gcattcatttccatuttaaagtgctactacut

SEQ ID NO: 16811 - DNA, 27 bp, Artificial Sequence
  Synthetic
ttttaatagcaugcctggtucaagaga

SEQ ID NO: 16812 - DNA, 26 bp, Artificial Sequence
  Synthetic
gagttcacacugtgacugagaaaaga

SEQ ID NO: 16813 - DNA, 24 bp, Artificial Sequence
  Synthetic
cacgagaatatugtgaacctgcug

SEQ ID NO: 16814 - DNA, 32 bp, Artificial Sequence
  Synthetic
gaaactcccattugagatcatattcatatuct

SEQ ID NO: 16815 - DNA, 22 bp, Artificial Sequence
  Synthetic
tcctctatcugcagaacugcct

SEQ ID NO: 16816 - DNA, 25 bp, Artificial Sequence
  Synthetic
ggaaccctttuatggcttcacucat

SEQ ID NO: 16817 - DNA, 23 bp, Artificial Sequence
  Synthetic
caatctgaugacagctcaccugt

SEQ ID NO: 16818 - DNA, 25 bp, Artificial Sequence
  Synthetic
ggcatcaucattttctgcauggaat

SEQ ID NO: 16819 - DNA, 24 bp, Artificial Sequence
  Synthetic
ggagcattucaaggaagacaccuc

SEQ ID NO: 16820 - DNA, 22 bp, Artificial Sequence
  Synthetic
tgtcgtttcutgccactgauga

SEQ ID NO: 16821 - DNA, 32 bp, Artificial Sequence
  Synthetic
attctgaaaaugcaggaacaattaactaauag

SEQ ID NO: 16822 - DNA, 25 bp, Artificial Sequence
  Synthetic
tccgucccaaataattcaugaagca

SEQ ID NO: 16823 - DNA, 25 bp, Artificial Sequence
  Synthetic
ttgaccctuaaaactggctcuagaa

SEQ ID NO: 16824 - DNA, 32 bp, Artificial Sequence
  Synthetic
tattgtgtaattgguagcttcactctgaauaa

SEQ ID NO: 16825 - DNA, 30 bp, Artificial Sequence
  Synthetic
tcacacatttuccaaaataactagttcuct

SEQ ID NO: 16826 - DNA, 28 bp, Artificial Sequence
  Synthetic
ttccccactgaugaatcattgttctuat

SEQ ID NO: 16827 - DNA, 31 bp, Artificial Sequence
  Synthetic
gataaatgcatgtuttctttttaaggtgugc

SEQ ID NO: 16828 - DNA, 21 bp, Artificial Sequence
  Synthetic
ccacagcuggaauggcagaaa

SEQ ID NO: 16829 - DNA, 26 bp, Artificial Sequence
  Synthetic
caaatgacccacucagaaagaguaga

SEQ ID NO: 16830 - DNA, 25 bp, Artificial Sequence
  Synthetic
caggagutgagtatguaaacccact

SEQ ID NO: 16831 - DNA, 30 bp, Artificial Sequence
  Synthetic
caagattgtgcaaaugacatagtcaaagut

SEQ ID NO: 16832 - DNA, 25 bp, Artificial Sequence
  Synthetic
gctgtttgauttcttccttcuccca

SEQ ID NO: 16833 - DNA, 19 bp, Artificial Sequence
  Synthetic
gccccctugccctcttcua

SEQ ID NO: 16834 - DNA, 26 bp, Artificial Sequence
  Synthetic
ttgtaaaaatatcucagcgcguagga

SEQ ID NO: 16835 - DNA, 22 bp, Artificial Sequence
  Synthetic
gacuagatagcgucaccagcag

SEQ ID NO: 16836 - DNA, 22 bp, Artificial Sequence
  Synthetic
tgggucagtugaaagccaaact

SEQ ID NO: 16837 - DNA, 28 bp, Artificial Sequence
  Synthetic
aacaaaccagtgucttctcttcatuaca

SEQ ID NO: 16838 - DNA, 25 bp, Artificial Sequence
  Synthetic
ggttaauaggagucagaagagaguc

SEQ ID NO: 16839 - DNA, 25 bp, Artificial Sequence
  Synthetic
tgggaatttcttugttgcaccacua

SEQ ID NO: 16840 - DNA, 22 bp, Artificial Sequence
  Synthetic
gggacaccautagcaugacagt

SEQ ID NO: 16841 - DNA, 31 bp, Artificial Sequence
  Synthetic
catagacaauacaagaataaagtugacgagt

SEQ ID NO: 16842 - DNA, 23 bp, Artificial Sequence
  Synthetic
tgcagggaaacautcatgauggt

SEQ ID NO: 16843 - DNA, 26 bp, Artificial Sequence
  Synthetic
ctgaaactgucttgcacagtuaacaa

SEQ ID NO: 16844 - DNA, 22 bp, Artificial Sequence
  Synthetic
tgggagcugagagtgtattugt

SEQ ID NO: 16845 - DNA, 25 bp, Artificial Sequence
  Synthetic
tgaagagtccuttatcctggaugct

SEQ ID NO: 16846 - DNA, 25 bp, Artificial Sequence
  Synthetic
acuaatttgttgccuaccagaacca

SEQ ID NO: 16847 - DNA, 26 bp, Artificial Sequence
  Synthetic
tggctacucgttaattaucaaggacg

SEQ ID NO: 16848 - DNA, 23 bp, Artificial Sequence
  Synthetic
gaaagcauagcatgagtuggcaa

SEQ ID NO: 16849 - DNA, 32 bp, Artificial Sequence
  Synthetic
catgccaacatatuctacagtgttcttacuat

SEQ ID NO: 16850 - DNA, 27 bp, Artificial Sequence
  Synthetic
cacagataaaaauacagagcactucgg

SEQ ID NO: 16851 - DNA, 27 bp, Artificial Sequence
  Synthetic
agaaagggctucatcatatcaaaugca

SEQ ID NO: 16852 - DNA, 28 bp, Artificial Sequence
  Synthetic
gcaaaagcaaacagaaugtagaaaaugg

SEQ ID NO: 16853 - DNA, 27 bp, Artificial Sequence
  Synthetic
agtactttaaccutgaacacagcucaa

SEQ ID NO: 16854 - DNA, 18 bp, Artificial Sequence
  Synthetic
tgtcuggcctgctugcat

SEQ ID NO: 16855 - DNA, 32 bp, Artificial Sequence
  Synthetic
aaatgaaaaactcaccutcatggaaagauaac

SEQ ID NO: 16856 - DNA, 23 bp, Artificial Sequence
  Synthetic
aactcaagcucagcaagtcacut

SEQ ID NO: 16857 - DNA, 22 bp, Artificial Sequence
  Synthetic
gaggatcugcaccatagugacc

SEQ ID NO: 16858 - DNA, 19 bp, Artificial Sequence
  Synthetic
caagucaggctggaugcca

SEQ ID NO: 16859 - DNA, 25 bp, Artificial Sequence
  Synthetic
gaaagttgaugcccagtaagacuga

SEQ ID NO: 16860 - DNA, 19 bp, Artificial Sequence
  Synthetic
agctgcucacggaggagua

SEQ ID NO: 16861 - DNA, 22 bp, Artificial Sequence
  Synthetic
gctcagcagacauctgcagtua

SEQ ID NO: 16862 - DNA, 30 bp, Artificial Sequence
  Synthetic
catgctggatuggccatatgtatattttug

SEQ ID NO: 16863 - DNA, 28 bp, Artificial Sequence
  Synthetic
ccttctctcaucaccaacatcatuaact

SEQ ID NO: 16864 - DNA, 28 bp, Artificial Sequence
  Synthetic
agttatcaaagucatcattgctgugaga

SEQ ID NO: 16865 - DNA, 24 bp, Artificial Sequence
  Synthetic
guaaatttgcuaagagccgaagcc

SEQ ID NO: 16866 - DNA, 22 bp, Artificial Sequence
  Synthetic
gagctgttgcugtcaccctuat

SEQ ID NO: 16867 - DNA, 17 bp, Artificial Sequence
  Synthetic
cugtccuacgccgacct

SEQ ID NO: 16868 - DNA, 20 bp, Artificial Sequence
  Synthetic
gtcgatcuccaccaccugag

SEQ ID NO: 16869 - DNA, 17 bp, Artificial Sequence
  Synthetic
cggcutcgtucccccaa

SEQ ID NO: 16870 - DNA, 26 bp, Artificial Sequence
  Synthetic
gcatgagcautagacttuacaaccat

SEQ ID NO: 16871 - DNA, 21 bp, Artificial Sequence
  Synthetic
tcaucgatgccauccaaccag

SEQ ID NO: 16872 - DNA, 30 bp, Artificial Sequence
  Synthetic
ttcaagaaaaagccacutccataagctaua

SEQ ID NO: 16873 - DNA, 27 bp, Artificial Sequence
  Synthetic
cttgagaattguaactacgcgguagaa

SEQ ID NO: 16874 - DNA, 24 bp, Artificial Sequence
  Synthetic
tcctatggcucttttgaggtcuct

SEQ ID NO: 16875 - DNA, 29 bp, Artificial Sequence
  Synthetic
cccaaaagauaacccatcttcattcauct

SEQ ID NO: 16876 - DNA, 25 bp, Artificial Sequence
  Synthetic
gacaugtcaauaacaacagcaggaa

SEQ ID NO: 16877 - DNA, 26 bp, Artificial Sequence
  Synthetic
ttgcttttgggaaaucattgttaugc

SEQ ID NO: 16878 - DNA, 22 bp, Artificial Sequence
  Synthetic
acccaatcutgatgactugcca

SEQ ID NO: 16879 - DNA, 28 bp, Artificial Sequence
  Synthetic
aaaaacttgcauacattttctcccucag

SEQ ID NO: 16880 - DNA, 27 bp, Artificial Sequence
  Synthetic
ctgtgtttgcutctgtctttgttuaca

SEQ ID NO: 16881 - DNA, 22 bp, Artificial Sequence
  Synthetic
gggatttgugcaatcggtggua

SEQ ID NO: 16882 - DNA, 28 bp, Artificial Sequence
  Synthetic
ctactcagugaagaagagaatgaugcaa

SEQ ID NO: 16883 - DNA, 29 bp, Artificial Sequence
  Synthetic
gttatcccttaugttcttcttctcuccag

SEQ ID NO: 16884 - DNA, 31 bp, Artificial Sequence
  Synthetic
tccuaccaaaacagauaaaaagaaagcagaa

SEQ ID NO: 16885 - DNA, 23 bp, Artificial Sequence
  Synthetic
cattcaauggaacaggugcaact

SEQ ID NO: 16886 - DNA, 28 bp, Artificial Sequence
  Synthetic
catcttttccgutatgttcattgttugc

SEQ ID NO: 16887 - DNA, 26 bp, Artificial Sequence
  Synthetic
gctttcttctuccctgatccacttuc

SEQ ID NO: 16888 - DNA, 24 bp, Artificial Sequence
  Synthetic
agggatccagaaauctgggacuaa

SEQ ID NO: 16889 - DNA, 30 bp, Artificial Sequence
  Synthetic
agaaaatgaaauctatgactccaucagaac

SEQ ID NO: 16890 - DNA, 29 bp, Artificial Sequence
  Synthetic
gagaattgactacgcutatacatcagcut

SEQ ID NO: 16891 - DNA, 26 bp, Artificial Sequence
  Synthetic
cttttgtugcttctgattugggaagt

SEQ ID NO: 16892 - DNA, 27 bp, Artificial Sequence
  Synthetic
tttgtaauaacggaaggctcctaaucc

SEQ ID NO: 16893 - DNA, 26 bp, Artificial Sequence
  Synthetic
attcttctttuggacttcctctugct

SEQ ID NO: 16894 - DNA, 25 bp, Artificial Sequence
  Synthetic
acuagguaaagaaagagacctcugt

SEQ ID NO: 16895 - DNA, 28 bp, Artificial Sequence
  Synthetic
gctctgattccautaactgcattaguct

SEQ ID NO: 16896 - DNA, 28 bp, Artificial Sequence
  Synthetic
gaactactgaaguaaggatgatgcttut

SEQ ID NO: 16897 - DNA, 27 bp, Artificial Sequence
  Synthetic
gatcacgttcacutgctaaagaatcut

SEQ ID NO: 16898 - DNA, 31 bp, Artificial Sequence
  Synthetic
ttcctgtgaagugatatcattttcttcucat

SEQ ID NO: 16899 - DNA, 28 bp, Artificial Sequence
  Synthetic
gttataagcagcaauattttcugcaaca

SEQ ID NO: 16900 - DNA, 28 bp, Artificial Sequence
  Synthetic
ccagautctaaaugaccaaaacaaagca

SEQ ID NO: 16901 - DNA, 31 bp, Artificial Sequence
  Synthetic
gtaauttggtacctaaauaagaagaaccaga

SEQ ID NO: 16902 - DNA, 25 bp, Artificial Sequence
  Synthetic
tggtgggtctuggtgatttctaauc

SEQ ID NO: 16903 - DNA, 26 bp, Artificial Sequence
  Synthetic
aaacacagttcuctgtctcccaauac

SEQ ID NO: 16904 - DNA, 28 bp, Artificial Sequence
  Synthetic
agcacctacaacauaacatttaatgcua

SEQ ID NO: 16905 - DNA, 30 bp, Artificial Sequence
  Synthetic
tctcttcaaaatguggtcttaaagcauact

SEQ ID NO: 16906 - DNA, 30 bp, Artificial Sequence
  Synthetic
agaaaagcttcaaugtttttaagtctccug

SEQ ID NO: 16907 - DNA, 32 bp, Artificial Sequence
  Synthetic
ataaactgtgacucaaacttattactuacact

SEQ ID NO: 16908 - DNA, 24 bp, Artificial Sequence
  Synthetic
ggaagcatuggcatcaacugaaaa

SEQ ID NO: 16909 - DNA, 28 bp, Artificial Sequence
  Synthetic
ttagtctgattutaagacaagcugcaga

SEQ ID NO: 16910 - DNA, 27 bp, Artificial Sequence
  Synthetic
cattaccttctuccttcatggccuaaa

SEQ ID NO: 16911 - DNA, 27 bp, Artificial Sequence
  Synthetic
tgtgattcaucgaccttaacttuccat

SEQ ID NO: 16912 - DNA, 27 bp, Artificial Sequence
  Synthetic
agtagcauacaaaacatgggctaucat

SEQ ID NO: 16913 - DNA, 23 bp, Artificial Sequence
  Synthetic
ccaguggaggacaagcttctuac

SEQ ID NO: 16914 - DNA, 23 bp, Artificial Sequence
  Synthetic
caacagtcacuggagcttaucca

SEQ ID NO: 16915 - DNA, 29 bp, Artificial Sequence
  Synthetic
acatttttgttcuttacacaggucacaag

SEQ ID NO: 16916 - DNA, 28 bp, Artificial Sequence
  Synthetic
gccttctgtugctttgttttaaagugaa

SEQ ID NO: 16917 - DNA, 28 bp, Artificial Sequence
  Synthetic
gttcagtgtutctgacaaaguagaaagg

SEQ ID NO: 16918 - DNA, 23 bp, Artificial Sequence
  Synthetic
aagaccgcagugggataaatcuc

SEQ ID NO: 16919 - DNA, 30 bp, Artificial Sequence
  Synthetic
ttcacauaaaactctttugagaaaaggaac

SEQ ID NO: 16920 - DNA, 27 bp, Artificial Sequence
  Synthetic
ttttggcttattucactcagtctgcua

SEQ ID NO: 16921 - DNA, 25 bp, Artificial Sequence
  Synthetic
gactttcttaccuagagagcaugcc

SEQ ID NO: 16922 - DNA, 23 bp, Artificial Sequence
  Synthetic
tcatacugccagctctaccucat

SEQ ID NO: 16923 - DNA, 26 bp, Artificial Sequence
  Synthetic
ctcacattgaacucctttgtcttcug

SEQ ID NO: 16924 - DNA, 25 bp, Artificial Sequence
  Synthetic
aaaccatagttgutccccttgtuca

SEQ ID NO: 16925 - DNA, 21 bp, Artificial Sequence
  Synthetic
cutttggtgtugggcaggaag

SEQ ID NO: 16926 - DNA, 26 bp, Artificial Sequence
  Synthetic
ctctgacatctauggacaaagcctut

SEQ ID NO: 16927 - DNA, 29 bp, Artificial Sequence
  Synthetic
caggaaaactgugcattaatgttacauga

SEQ ID NO: 16928 - DNA, 23 bp, Artificial Sequence
  Synthetic
ttgcagcagcaaaguacaucaac

SEQ ID NO: 16929 - DNA, 25 bp, Artificial Sequence
  Synthetic
tccctgataagutcggtatctucca

SEQ ID NO: 16930 - DNA, 23 bp, Artificial Sequence
  Synthetic
gagattggtcutctggcaacugt

SEQ ID NO: 16931 - DNA, 30 bp, Artificial Sequence
  Synthetic
acaacacagaacauatgtcagaaataccut

SEQ ID NO: 16932 - DNA, 25 bp, Artificial Sequence
  Synthetic
gtatcagtcgugctgatgtcaucat

SEQ ID NO: 16933 - DNA, 26 bp, Artificial Sequence
  Synthetic
gagcctcgtuatgaatatcagaugcc

SEQ ID NO: 16934 - DNA, 24 bp, Artificial Sequence
  Synthetic
gactttcagggaaucctgtaucgg

SEQ ID NO: 16935 - DNA, 22 bp, Artificial Sequence
  Synthetic
cctaactgtuaccaggctucca

SEQ ID NO: 16936 - DNA, 24 bp, Artificial Sequence
  Synthetic
agtgccaatggautgttgatgcua

SEQ ID NO: 16937 - DNA, 24 bp, Artificial Sequence
  Synthetic
gacatgcaucaaagctttctccug

SEQ ID NO: 16938 - DNA, 21 bp, Artificial Sequence
  Synthetic
gcagcacuggtatcaucagca

SEQ ID NO: 16939 - DNA, 26 bp, Artificial Sequence
  Synthetic
tcctguaatactgtctugaaagcaga

SEQ ID NO: 16940 - DNA, 24 bp, Artificial Sequence
  Synthetic
gtctcttagggcutgagcttucat

SEQ ID NO: 16941 - DNA, 28 bp, Artificial Sequence
  Synthetic
agtcatcacttttugattacaggtggut

SEQ ID NO: 16942 - DNA, 29 bp, Artificial Sequence
  Synthetic
gctcaatcatauagatcacttcuaagcca

SEQ ID NO: 16943 - DNA, 28 bp, Artificial Sequence
  Synthetic
aagaaaagucagagctagaugaaaccat

SEQ ID NO: 16944 - DNA, 22 bp, Artificial Sequence
  Synthetic
gttgcaacauctcacgggauat

SEQ ID NO: 16945 - DNA, 25 bp, Artificial Sequence
  Synthetic
acgtcccatcaucttcaggttauct

SEQ ID NO: 16946 - DNA, 22 bp, Artificial Sequence
  Synthetic
gtcgggattuctggtccagaug

SEQ ID NO: 16947 - DNA, 24 bp, Artificial Sequence
  Synthetic
agaaagagucggaagacaaaccug

SEQ ID NO: 16948 - DNA, 22 bp, Artificial Sequence
  Synthetic
ccagtgaatgutcaggtgccua

SEQ ID NO: 16949 - DNA, 20 bp, Artificial Sequence
  Synthetic
atgattggccagutcggugt

SEQ ID NO: 16950 - DNA, 26 bp, Artificial Sequence
  Synthetic
tgaaaccaaaauccgattctgggtua

SEQ ID NO: 16951 - DNA, 21 bp, Artificial Sequence
  Synthetic
gttgagacgutcgccttucag

SEQ ID NO: 16952 - DNA, 24 bp, Artificial Sequence
  Synthetic
cagagacagaguagagtgguggat

SEQ ID NO: 16953 - DNA, 21 bp, Artificial Sequence
  Synthetic
tctgccgcccuatctctgtua

SEQ ID NO: 16954 - DNA, 21 bp, Artificial Sequence
  Synthetic
tctgcatgagugcaactcucc

SEQ ID NO: 16955 - DNA, 22 bp, Artificial Sequence
  Synthetic
gtcaccucccagaccaaagaut

SEQ ID NO: 16956 - DNA, 27 bp, Artificial Sequence
  Synthetic
aggttaggtgautatcactgtctguct

SEQ ID NO: 16957 - DNA, 21 bp, Artificial Sequence
  Synthetic
caaacatcagcuccagcucct

SEQ ID NO: 16958 - DNA, 27 bp, Artificial Sequence
  Synthetic
gcaaacatgutatttgagcuagaacca

SEQ ID NO: 16959 - DNA, 31 bp, Artificial Sequence
  Synthetic
agagaagaacaaaugaataaacaggtacugt

SEQ ID NO: 16960 - DNA, 17 bp, Artificial Sequence
  Synthetic
ccacugcagccaugggt

SEQ ID NO: 16961 - DNA, 18 bp, Artificial Sequence
  Synthetic
gagccaccccugatguga

SEQ ID NO: 16962 - DNA, 28 bp, Artificial Sequence
  Synthetic
cactagagttttcuaccaaaagggtcug

SEQ ID NO: 16963 - DNA, 21 bp, Artificial Sequence
  Synthetic
ctcaagtctucgggtggctut

SEQ ID NO: 16964 - DNA, 17 bp, Artificial Sequence
  Synthetic
cctcaccucgtcggugt

SEQ ID NO: 16965 - DNA, 22 bp, Artificial Sequence
  Synthetic
caguacaaggccacagacttug

SEQ ID NO: 16966 - DNA, 19 bp, Artificial Sequence
  Synthetic
ggugggagaagcctgugac

SEQ ID NO: 16967 - DNA, 21 bp, Artificial Sequence
  Synthetic
ccaaaccgugaccagacugat

SEQ ID NO: 16968 - DNA, 17 bp, Artificial Sequence
  Synthetic
gctgctcutgcgaggug

SEQ ID NO: 16969 - DNA, 17 bp, Artificial Sequence
  Synthetic
ccctgcucgttcgcuct

SEQ ID NO: 16970 - DNA, 21 bp, Artificial Sequence
  Synthetic
tgcttttcuctggccugagag

SEQ ID NO: 16971 - DNA, 18 bp, Artificial Sequence
  Synthetic
ggagucccagcgcaucaa

SEQ ID NO: 16972 - DNA, 21 bp, Artificial Sequence
  Synthetic
ctctgctucagagccctctuc

SEQ ID NO: 16973 - DNA, 20 bp, Artificial Sequence
  Synthetic
ccuttcccuggcagacaaca

SEQ ID NO: 16974 - DNA, 22 bp, Artificial Sequence
  Synthetic
gaagctccagguctttcagguc

SEQ ID NO: 16975 - DNA, 21 bp, Artificial Sequence
  Synthetic
gggcagcacacauctctatuc

SEQ ID NO: 16976 - DNA, 20 bp, Artificial Sequence
  Synthetic
cagggccutggtttcctuct

SEQ ID NO: 16977 - DNA, 23 bp, Artificial Sequence
  Synthetic
gcttcccccgguatttacaatuc

SEQ ID NO: 16978 - DNA, 22 bp, Artificial Sequence
  Synthetic
gatcucagcgcagagaagtuga

SEQ ID NO: 16979 - DNA, 19 bp, Artificial Sequence
  Synthetic
ccugcaagaccagcuggac

SEQ ID NO: 16980 - DNA, 27 bp, Artificial Sequence
  Synthetic
gatgtcacucttatgtgtcaucaccaa

SEQ ID NO: 16981 - DNA, 22 bp, Artificial Sequence
  Synthetic
ctgaagaaggcccuggaugaag

SEQ ID NO: 16982 - DNA, 21 bp, Artificial Sequence
  Synthetic
cauggacacacagcaaaugcc

SEQ ID NO: 16983 - DNA, 20 bp, Artificial Sequence
  Synthetic
aagcugaaacggaagcugga

SEQ ID NO: 16984 - DNA, 20 bp, Artificial Sequence
  Synthetic
ccggccccuactcactttug

SEQ ID NO: 16985 - DNA, 21 bp, Artificial Sequence
  Synthetic
ggacctugaagaacagcugga

SEQ ID NO: 16986 - DNA, 17 bp, Artificial Sequence
  Synthetic
ccgcauctccucagcct

SEQ ID NO: 16987 - DNA, 22 bp, Artificial Sequence
  Synthetic
aggtacctguatggatgcaugg

SEQ ID NO: 16988 - DNA, 20 bp, Artificial Sequence
  Synthetic
cagttccgcagcutgaggua

SEQ ID NO: 16989 - DNA, 20 bp, Artificial Sequence
  Synthetic
ctctgtugacagcagggugt

SEQ ID NO: 16990 - DNA, 19 bp, Artificial Sequence
  Synthetic
ggccagaccutgggactua

SEQ ID NO: 16991 - DNA, 21 bp, Artificial Sequence
  Synthetic
cactgcccuctttgaccttug

SEQ ID NO: 16992 - DNA, 23 bp, Artificial Sequence
  Synthetic
cagggaagucacgttgtcatuca

SEQ ID NO: 16993 - DNA, 25 bp, Artificial Sequence
  Synthetic
ctcagaagatcuggaaggacaaugg

SEQ ID NO: 16994 - DNA, 24 bp, Artificial Sequence
  Synthetic
gatgaacauggtgtggtugaagag

SEQ ID NO: 16995 - DNA, 26 bp, Artificial Sequence
  Synthetic
ctccttgtcutctgacttcauaccaa

SEQ ID NO: 16996 - DNA, 23 bp, Artificial Sequence
  Synthetic
ggtcaucaggaaaaaguggcaag

SEQ ID NO: 16997 - DNA, 23 bp, Artificial Sequence
  Synthetic
cttggcatugacctttgtgtcug

SEQ ID NO: 16998 - DNA, 21 bp, Artificial Sequence
  Synthetic
cccaggcucagggaaaggaua

SEQ ID NO: 16999 - DNA, 20 bp, Artificial Sequence
  Synthetic
gggtuaacggctgaagtugg

SEQ ID NO: 17000 - DNA, 19 bp, Artificial Sequence
  Synthetic
gtgcagcccugagtucact

SEQ ID NO: 17001 - DNA, 21 bp, Artificial Sequence
  Synthetic
cctgcccauctacucggagaa

SEQ ID NO: 17002 - DNA, 20 bp, Artificial Sequence
  Synthetic
ctccacaaccaccucauccc

SEQ ID NO: 17003 - DNA, 22 bp, Artificial Sequence
  Synthetic
gccaacucagtgacgaugagaa

SEQ ID NO: 17004 - DNA, 19 bp, Artificial Sequence
  Synthetic
catgaccggcugctttguc

SEQ ID NO: 17005 - DNA, 21 bp, Artificial Sequence
  Synthetic
gaaaatgtcgucggccaugaa

SEQ ID NO: 17006 - DNA, 20 bp, Artificial Sequence
  Synthetic
tggcctgguttaacccugac

SEQ ID NO: 17007 - DNA, 20 bp, Artificial Sequence
  Synthetic
gcaccugcagctcatagcuc

SEQ ID NO: 17008 - DNA, 20 bp, Artificial Sequence
  Synthetic
ccctcuggtgatgucagggt

SEQ ID NO: 17009 - DNA, 20 bp, Artificial Sequence
  Synthetic
ctccgaggagcucaucacag

SEQ ID NO: 17010 - DNA, 20 bp, Artificial Sequence
  Synthetic
catacggccuggtgtccaut

SEQ ID NO: 17011 - DNA, 19 bp, Artificial Sequence
  Synthetic
gactgtgguccctgcaucc

SEQ ID NO: 17012 - DNA, 21 bp, Artificial Sequence
  Synthetic
ctgtggagugtgactucacca

SEQ ID NO: 17013 - DNA, 23 bp, Artificial Sequence
  Synthetic
ggacatccagucagcctcatuag

SEQ ID NO: 17014 - DNA, 23 bp, Artificial Sequence
  Synthetic
cttccagaguttguagagggcaa

SEQ ID NO: 17015 - DNA, 21 bp, Artificial Sequence
  Synthetic
cgtggacuggctauaaccact

SEQ ID NO: 17016 - DNA, 20 bp, Artificial Sequence
  Synthetic
gggctatgcugggattguga

SEQ ID NO: 17017 - DNA, 26 bp, Artificial Sequence
  Synthetic
ggattatagcttugctgctgtccaua

SEQ ID NO: 17018 - DNA, 25 bp, Artificial Sequence
  Synthetic
tttctcacagguaactauggccaag

SEQ ID NO: 17019 - DNA, 17 bp, Artificial Sequence
  Synthetic
cctccacggucctgcug

SEQ ID NO: 17020 - DNA, 23 bp, Artificial Sequence
  Synthetic
ttttcctgtugactaacggcuca

SEQ ID NO: 17021 - DNA, 21 bp, Artificial Sequence
  Synthetic
tcttttcaugccaccacgugt

SEQ ID NO: 17022 - DNA, 28 bp, Artificial Sequence
  Synthetic
gtgtcttgcatutaaagtctgttgauga

SEQ ID NO: 17023 - DNA, 21 bp, Artificial Sequence
  Synthetic
cactagcagguagctccucac

SEQ ID NO: 17024 - DNA, 28 bp, Artificial Sequence
  Synthetic
gggaatgggaauatgatagatcttgtut

SEQ ID NO: 17025 - DNA, 17 bp, Artificial Sequence
  Synthetic
cccucggaagccuccac

SEQ ID NO: 17026 - DNA, 18 bp, Artificial Sequence
  Synthetic
cctgccuggcaccuagga

SEQ ID NO: 17027 - DNA, 18 bp, Artificial Sequence
  Synthetic
cutgagguggcccacact

SEQ ID NO: 17028 - DNA, 25 bp, Artificial Sequence
  Synthetic
ttgcttgattucagacagttgcauc

SEQ ID NO: 17029 - DNA, 24 bp, Artificial Sequence
  Synthetic
gaagaaaggtuccgaagaactucc

SEQ ID NO: 17030 - DNA, 23 bp, Artificial Sequence
  Synthetic
cggtgcttuggtctcaacaguat

SEQ ID NO: 17031 - DNA, 24 bp, Artificial Sequence
  Synthetic
gctggaaacuggttgtgaauaggg

SEQ ID NO: 17032 - DNA, 24 bp, Artificial Sequence
  Synthetic
ctgtgacaucagctaagauggact

SEQ ID NO: 17033 - DNA, 20 bp, Artificial Sequence
  Synthetic
cttcgugggaggctccauac

SEQ ID NO: 17034 - DNA, 20 bp, Artificial Sequence
  Synthetic
gggtagguggttctccauga

SEQ ID NO: 17035 - DNA, 22 bp, Artificial Sequence
  Synthetic
gggauacgccacatttuggaag

SEQ ID NO: 17036 - DNA, 19 bp, Artificial Sequence
  Synthetic
gctgcucgagccgtttuct

SEQ ID NO: 17037 - DNA, 21 bp, Artificial Sequence
  Synthetic
ccuggagucggagaagaacca

SEQ ID NO: 17038 - DNA, 18 bp, Artificial Sequence
  Synthetic
gttcagcugctgcgggua

SEQ ID NO: 17039 - DNA, 18 bp, Artificial Sequence
  Synthetic
cuccacccccaugagcac

SEQ ID NO: 17040 - DNA, 17 bp, Artificial Sequence
  Synthetic
ggcutcaggcucgggaa

SEQ ID NO: 17041 - DNA, 21 bp, Artificial Sequence
  Synthetic
gcgagcccutccttaugcaaa

SEQ ID NO: 17042 - DNA, 23 bp, Artificial Sequence
  Synthetic
gggagtuaacacttcatgctuct

SEQ ID NO: 17043 - DNA, 19 bp, Artificial Sequence
  Synthetic
ccctcccuctcctccaguc

SEQ ID NO: 17044 - DNA, 25 bp, Artificial Sequence
  Synthetic
attgattccuttccccacuaaagca

SEQ ID NO: 17045 - DNA, 18 bp, Artificial Sequence
  Synthetic
cctgacgcugacctgucc

SEQ ID NO: 17046 - DNA, 23 bp, Artificial Sequence
  Synthetic
aggtgaaacugtgcttgtauccc

SEQ ID NO: 17047 - DNA, 22 bp, Artificial Sequence
  Synthetic
agcagtctguagccatttguca

SEQ ID NO: 17048 - DNA, 26 bp, Artificial Sequence
  Synthetic
gttcaucagacaaguccagagaaaua

SEQ ID NO: 17049 - DNA, 22 bp, Artificial Sequence
  Synthetic
gcactgcacuttgcgatucaac

SEQ ID NO: 17050 - DNA, 25 bp, Artificial Sequence
  Synthetic
ccagagcagaggucaaaatuaaggg

SEQ ID NO: 17051 - DNA, 24 bp, Artificial Sequence
  Synthetic
cactctactagutgtgggtccuca

SEQ ID NO: 17052 - DNA, 22 bp, Artificial Sequence
  Synthetic
gcccagguggtagtaggtgtua

SEQ ID NO: 17053 - DNA, 20 bp, Artificial Sequence
  Synthetic
cttcccaggagcacutccuc

SEQ ID NO: 17054 - DNA, 22 bp, Artificial Sequence
  Synthetic
cagggagaaagugctcauggat

SEQ ID NO: 17055 - DNA, 23 bp, Artificial Sequence
  Synthetic
ctagtgctgugtgtcccttacua

SEQ ID NO: 17056 - DNA, 21 bp, Artificial Sequence
  Synthetic
cctccucagaaagaggctguc

SEQ ID NO: 17057 - DNA, 21 bp, Artificial Sequence
  Synthetic
ggtctguttccaccugagcat

SEQ ID NO: 17058 - DNA, 19 bp, Artificial Sequence
  Synthetic
gugcaggaggauccacauc

SEQ ID NO: 17059 - DNA, 21 bp, Artificial Sequence
  Synthetic
tgccctggaaaautccagcut

SEQ ID NO: 17060 - DNA, 25 bp, Artificial Sequence
  Synthetic
aaacagaaatugagagaaggcucca

SEQ ID NO: 17061 - DNA, 24 bp, Artificial Sequence
  Synthetic
gatgacagcagcgutgagatauca

SEQ ID NO: 17062 - DNA, 26 bp, Artificial Sequence
  Synthetic
gaagatccacaautcttcgcattguc

SEQ ID NO: 17063 - DNA, 24 bp, Artificial Sequence
  Synthetic
aggactttccutgtcagtctcuca

SEQ ID NO: 17064 - DNA, 20 bp, Artificial Sequence
  Synthetic
gcaguttctgcugggacagg

SEQ ID NO: 17065 - DNA, 22 bp, Artificial Sequence
  Synthetic
tgcgctcugctatctatccuca

SEQ ID NO: 17066 - DNA, 21 bp, Artificial Sequence
  Synthetic
cccuacacacactctugacca

SEQ ID NO: 17067 - DNA, 22 bp, Artificial Sequence
  Synthetic
ttggutggccattugcaagaag

SEQ ID NO: 17068 - DNA, 19 bp, Artificial Sequence
  Synthetic
ccgaccucatccucacagg

SEQ ID NO: 17069 - DNA, 29 bp, Artificial Sequence
  Synthetic
tgtctgccaaatuaaagagccaagataut

SEQ ID NO: 17070 - DNA, 22 bp, Artificial Sequence
  Synthetic
agaacccgcaucttgtcaugaa

SEQ ID NO: 17071 - DNA, 21 bp, Artificial Sequence
  Synthetic
cttacgtcugcctctgtgugt

SEQ ID NO: 17072 - DNA, 24 bp, Artificial Sequence
  Synthetic
gaaagacgggagaacauactgugt

SEQ ID NO: 17073 - DNA, 22 bp, Artificial Sequence
  Synthetic
acctgcccgutgttactttuaa

SEQ ID NO: 17074 - DNA, 21 bp, Artificial Sequence
  Synthetic
acggacaccagcutcctctua

SEQ ID NO: 17075 - DNA, 21 bp, Artificial Sequence
  Synthetic
cgaaccgacutctctccguag

SEQ ID NO: 17076 - DNA, 22 bp, Artificial Sequence
  Synthetic
tggaaacucacgctttggtuga

SEQ ID NO: 17077 - DNA, 22 bp, Artificial Sequence
  Synthetic
gctcagagtuctctggccttug

SEQ ID NO: 17078 - DNA, 19 bp, Artificial Sequence
  Synthetic
cccagucccccttctucca

SEQ ID NO: 17079 - DNA, 26 bp, Artificial Sequence
  Synthetic
tgaacttccgugagaactucaagaaa

SEQ ID NO: 17080 - DNA, 22 bp, Artificial Sequence
  Synthetic
gtgtgcaguactgagtcctgug

SEQ ID NO: 17081 - DNA, 27 bp, Artificial Sequence
  Synthetic
caaacaaaugcagaaggaaatgucaga

SEQ ID NO: 17082 - DNA, 26 bp, Artificial Sequence
  Synthetic
aacatcgtcaaagcugttctccauat

SEQ ID NO: 17083 - DNA, 17 bp, Artificial Sequence
  Synthetic
cutgcccuggcccagaa

SEQ ID NO: 17084 - DNA, 22 bp, Artificial Sequence
  Synthetic
tttcagagcugcctcttuacca

SEQ ID NO: 17085 - DNA, 23 bp, Artificial Sequence
  Synthetic
aagactcucctctgagguagcag

SEQ ID NO: 17086 - DNA, 18 bp, Artificial Sequence
  Synthetic
gccgagcutgctgcatug

SEQ ID NO: 17087 - DNA, 17 bp, Artificial Sequence
  Synthetic
ctgcaugctgcugacgg

SEQ ID NO: 17088 - DNA, 26 bp, Artificial Sequence
  Synthetic
aaaatguggaaaaattgctucccaat

SEQ ID NO: 17089 - DNA, 24 bp, Artificial Sequence
  Synthetic
tcgtccaattuctccaaggtctut

SEQ ID NO: 17090 - DNA, 30 bp, Artificial Sequence
  Synthetic
aagtaaaggcaaggugatatttaagatgua

SEQ ID NO: 17091 - DNA, 32 bp, Artificial Sequence
  Synthetic
ttgcctaaaatttctuctggaataacatcauc

SEQ ID NO: 17092 - DNA, 20 bp, Artificial Sequence
  Synthetic
gactucggcatcaguggaca

SEQ ID NO: 17093 - DNA, 27 bp, Artificial Sequence
  Synthetic
tcatggtaaaaccguatgactaauggc

SEQ ID NO: 17094 - DNA, 23 bp, Artificial Sequence
  Synthetic
aaatgttcaguttgggctgucat

SEQ ID NO: 17095 - DNA, 23 bp, Artificial Sequence
  Synthetic
gctggcattugatccaggattut

SEQ ID NO: 17096 - DNA, 22 bp, Artificial Sequence
  Synthetic
tctttaggcaggugtgtgugac

SEQ ID NO: 17097 - DNA, 21 bp, Artificial Sequence
  Synthetic
guccgaggaggacaatgucaa

SEQ ID NO: 17098 - DNA, 25 bp, Artificial Sequence
  Synthetic
ggcaucttcucacaaaaaggacact

SEQ ID NO: 17099 - DNA, 17 bp, Artificial Sequence
  Synthetic
tccacccuccacccugt

SEQ ID NO: 17100 - DNA, 24 bp, Artificial Sequence
  Synthetic
ccgcacaccuaaggaaaagatgut

SEQ ID NO: 17101 - DNA, 25 bp, Artificial Sequence
  Synthetic
gaaagcacugcactctcttgttuag

SEQ ID NO: 17102 - DNA, 23 bp, Artificial Sequence
  Synthetic
agattcttucacatggcggucaa

SEQ ID NO: 17103 - DNA, 20 bp, Artificial Sequence
  Synthetic
ggtaccagcugtctgctcuc

SEQ ID NO: 17104 - DNA, 21 bp, Artificial Sequence
  Synthetic
ccggcaccucatctctgaaut

SEQ ID NO: 17105 - DNA, 23 bp, Artificial Sequence
  Synthetic
gctggtacagcaucatcaccauc

SEQ ID NO: 17106 - DNA, 27 bp, Artificial Sequence
  Synthetic
gctgacgtattuaatggaggtctctut

SEQ ID NO: 17107 - DNA, 22 bp, Artificial Sequence
  Synthetic
agcttgagtuttccgagcucag

SEQ ID NO: 17108 - DNA, 20 bp, Artificial Sequence
  Synthetic
ggagggagcucatgggagua

SEQ ID NO: 17109 - DNA, 19 bp, Artificial Sequence
  Synthetic
ccguaccttgguggacgac

SEQ ID NO: 17110 - DNA, 20 bp, Artificial Sequence
  Synthetic
cccctgugcactcttgcaut

SEQ ID NO: 17111 - DNA, 22 bp, Artificial Sequence
  Synthetic
aactcagtccautcctgcctuc

SEQ ID NO: 17112 - DNA, 20 bp, Artificial Sequence
  Synthetic
gacctguaaccgccauggat

SEQ ID NO: 17113 - DNA, 21 bp, Artificial Sequence
  Synthetic
ccaucaaagggacagcagcua

SEQ ID NO: 17114 - DNA, 25 bp, Artificial Sequence
  Synthetic
cccagcacaauatctagtcaccuct

SEQ ID NO: 17115 - DNA, 20 bp, Artificial Sequence
  Synthetic
acaccauccctccugaaggt

SEQ ID NO: 17116 - DNA, 19 bp, Artificial Sequence
  Synthetic
catuccccaagcuggagca

SEQ ID NO: 17117 - DNA, 19 bp, Artificial Sequence
  Synthetic
gtggagaagcgcaugaugg

SEQ ID NO: 17118 - DNA, 17 bp, Artificial Sequence
  Synthetic
ccagcugccccatccut

SEQ ID NO: 17119 - DNA, 17 bp, Artificial Sequence
  Synthetic
cugggcaagcucccaga

SEQ ID NO: 17120 - DNA, 22 bp, Artificial Sequence
  Synthetic
gggattctaccuccctccctua

SEQ ID NO: 17121 - DNA, 20 bp, Artificial Sequence
  Synthetic
acatacctgugtggctgcuc

SEQ ID NO: 17122 - DNA, 22 bp, Artificial Sequence
  Synthetic
acgactaacauggagcagctuc

SEQ ID NO: 17123 - DNA, 21 bp, Artificial Sequence
  Synthetic
ggccuaagggcggaacctuaa

SEQ ID NO: 17124 - DNA, 20 bp, Artificial Sequence
  Synthetic
ctgtgagaaugctggugggt

SEQ ID NO: 17125 - DNA, 18 bp, Artificial Sequence
  Synthetic
cgugctguggaaggacag

SEQ ID NO: 17126 - DNA, 22 bp, Artificial Sequence
  Synthetic
gcagcagagacauctcctucag

SEQ ID NO: 17127 - DNA, 22 bp, Artificial Sequence
  Synthetic
tgatcctcugagatgtgcccut

SEQ ID NO: 17128 - DNA, 24 bp, Artificial Sequence
  Synthetic
cttggcaauaacacaaguctcaug

SEQ ID NO: 17129 - DNA, 21 bp, Artificial Sequence
  Synthetic
ccttacucacccctccttugg

SEQ ID NO: 17130 - DNA, 18 bp, Artificial Sequence
  Synthetic
gtcgctgcugcctgtgua

SEQ ID NO: 17131 - DNA, 22 bp, Artificial Sequence
  Synthetic
agttcaccttcuccgtgggaua

SEQ ID NO: 17132 - DNA, 23 bp, Artificial Sequence
  Synthetic
gcauaggacgaagtucccaggag

SEQ ID NO: 17133 - DNA, 20 bp, Artificial Sequence
  Synthetic
tgttgctugaggcgaaggut

SEQ ID NO: 17134 - DNA, 20 bp, Artificial Sequence
  Synthetic
gaucttgagggucacgggaa

SEQ ID NO: 17135 - DNA, 19 bp, Artificial Sequence
  Synthetic
ctgtgaaucccgacgcuct

SEQ ID NO: 17136 - DNA, 20 bp, Artificial Sequence
  Synthetic
aggacgagguctcctuccag

SEQ ID NO: 17137 - DNA, 23 bp, Artificial Sequence
  Synthetic
ggaatgtgcugaagacagauggg

SEQ ID NO: 17138 - DNA, 17 bp, Artificial Sequence
  Synthetic
gcuccccctgaauccca

SEQ ID NO: 17139 - DNA, 17 bp, Artificial Sequence
  Synthetic
cggagcgucgtccctuc

SEQ ID NO: 17140 - DNA, 19 bp, Artificial Sequence
  Synthetic
gcaugaccacagcccucac

SEQ ID NO: 17141 - DNA, 23 bp, Artificial Sequence
  Synthetic
agggagaatcutcagggcactua

SEQ ID NO: 17142 - DNA, 19 bp, Artificial Sequence
  Synthetic
ctgcacaauccuggagcct

SEQ ID NO: 17143 - DNA, 22 bp, Artificial Sequence
  Synthetic
atgttgttcttuctgcgcctug

SEQ ID NO: 17144 - DNA, 19 bp, Artificial Sequence
  Synthetic
gcucgcagagagatucgga

SEQ ID NO: 17145 - DNA, 18 bp, Artificial Sequence
  Synthetic
ggctcccauttgccucca

SEQ ID NO: 17146 - DNA, 23 bp, Artificial Sequence
  Synthetic
tctcactccuggttgcttucaat

SEQ ID NO: 17147 - DNA, 26 bp, Artificial Sequence
  Synthetic
caacctaccgucttggaatctaacuc

SEQ ID NO: 17148 - DNA, 28 bp, Artificial Sequence
  Synthetic
ccgacatgcauataatgttttgtguact

SEQ ID NO: 17149 - DNA, 21 bp, Artificial Sequence
  Synthetic
gggugaacgcaaccctctuac

SEQ ID NO: 17150 - DNA, 22 bp, Artificial Sequence
  Synthetic
cctctctttuccccactcugga

SEQ ID NO: 17151 - DNA, 24 bp, Artificial Sequence
  Synthetic
cccactttgcuatgcctctctuaa

SEQ ID NO: 17152 - DNA, 17 bp, Artificial Sequence
  Synthetic
ccugccagccaggacuc

SEQ ID NO: 17153 - DNA, 18 bp, Artificial Sequence
  Synthetic
ttgggcuttccuggcaca

SEQ ID NO: 17154 - DNA, 17 bp, Artificial Sequence
  Synthetic
gccatgucgctgtuggg

SEQ ID NO: 17155 - DNA, 19 bp, Artificial Sequence
  Synthetic
tgatccaggagcucgcuga

SEQ ID NO: 17156 - DNA, 25 bp, Artificial Sequence
  Synthetic
aggtgtgtttutgatgagtcaucca

SEQ ID NO: 17157 - DNA, 28 bp, Artificial Sequence
  Synthetic
ctggctgaatucaaaggtgaaattgtua

SEQ ID NO: 17158 - DNA, 22 bp, Artificial Sequence
  Synthetic
gttgctgtuggaagccctatuc

SEQ ID NO: 17159 - DNA, 28 bp, Artificial Sequence
  Synthetic
gutttacatgttaacucccccaaaagac

SEQ ID NO: 17160 - DNA, 27 bp, Artificial Sequence
  Synthetic
tcactggcucaaaactacttggatuag

SEQ ID NO: 17161 - DNA, 26 bp, Artificial Sequence
  Synthetic
tgtattacucaccaggaugaccaaga

SEQ ID NO: 17162 - DNA, 24 bp, Artificial Sequence
  Synthetic
gcagtctguatgttcagagugcat

SEQ ID NO: 17163 - DNA, 26 bp, Artificial Sequence
  Synthetic
cctatatggauttggagcaucaacgg

SEQ ID NO: 17164 - DNA, 29 bp, Artificial Sequence
  Synthetic
ctggattggcaaauggaatctttaugaaa

SEQ ID NO: 17165 - DNA, 22 bp, Artificial Sequence
  Synthetic
agggaacccugaataggtgugt

SEQ ID NO: 17166 - DNA, 28 bp, Artificial Sequence
  Synthetic
agattcaattaggauttgcagctgagut

SEQ ID NO: 17167 - DNA, 28 bp, Artificial Sequence
  Synthetic
aaagaagagacucacaagtggaaaauca

SEQ ID NO: 17168 - DNA, 27 bp, Artificial Sequence
  Synthetic
actcaggatuggaagatactguagagg

SEQ ID NO: 17169 - DNA, 28 bp, Artificial Sequence
  Synthetic
tctgguaaggaccattagacauaagaca

SEQ ID NO: 17170 - DNA, 28 bp, Artificial Sequence
  Synthetic
ctgacaggcucagaatttctgaaaaaug

SEQ ID NO: 17171 - DNA, 28 bp, Artificial Sequence
  Synthetic
tcctgaagttugctatgaaacagtuact

SEQ ID NO: 17172 - DNA, 20 bp, Artificial Sequence
  Synthetic
tgctagccuaggcagagcut

SEQ ID NO: 17173 - DNA, 30 bp, Artificial Sequence
  Synthetic
gattccctctttcucttctttttcttcuct

SEQ ID NO: 17174 - DNA, 24 bp, Artificial Sequence
  Synthetic
guatattgcugagcggagaggaat

SEQ ID NO: 17175 - DNA, 21 bp, Artificial Sequence
  Synthetic
gatcgtguttgtgtccuccca

SEQ ID NO: 17176 - DNA, 20 bp, Artificial Sequence
  Synthetic
cctctguccgcagattcgug

SEQ ID NO: 17177 - DNA, 17 bp, Artificial Sequence
  Synthetic
cactcgucgcgguaggt

SEQ ID NO: 17178 - DNA, 23 bp, Artificial Sequence
  Synthetic
cctcaatgcucttatcgacccut

SEQ ID NO: 17179 - DNA, 26 bp, Artificial Sequence
  Synthetic
gactctgcugtggcaataaauaacag

SEQ ID NO: 17180 - DNA, 17 bp, Artificial Sequence
  Synthetic
ccatcagccuccggugt

SEQ ID NO: 17181 - DNA, 19 bp, Artificial Sequence
  Synthetic
gatggacugggtcaugggt

SEQ ID NO: 17182 - DNA, 18 bp, Artificial Sequence
  Synthetic
cugcagccccacaaucac

SEQ ID NO: 17183 - DNA, 18 bp, Artificial Sequence
  Synthetic
ggaccugcaguccgagga

SEQ ID NO: 17184 - DNA, 19 bp, Artificial Sequence
  Synthetic
ttggacucctccaccucca

SEQ ID NO: 17185 - DNA, 17 bp, Artificial Sequence
  Synthetic
ccgcaccucctccucct

SEQ ID NO: 17186 - DNA, 21 bp, Artificial Sequence
  Synthetic
aggtgtccutggagctttugg

SEQ ID NO: 17187 - DNA, 18 bp, Artificial Sequence
  Synthetic
cttgcccuccctgctcut

SEQ ID NO: 17188 - DNA, 20 bp, Artificial Sequence
  Synthetic
ttgaaggugagcttcucgca

SEQ ID NO: 17189 - DNA, 23 bp, Artificial Sequence
  Synthetic
ccctctgaugcagactttctugt

SEQ ID NO: 17190 - DNA, 17 bp, Artificial Sequence
  Synthetic
cgagaccutgccccuga

SEQ ID NO: 17191 - DNA, 19 bp, Artificial Sequence
  Synthetic
cgcttugagcccagaggug

SEQ ID NO: 17192 - DNA, 21 bp, Artificial Sequence
  Synthetic
ccacaagugcacauacaggca

SEQ ID NO: 17193 - DNA, 19 bp, Artificial Sequence
  Synthetic
agugacccacgacccctua

SEQ ID NO: 17194 - DNA, 19 bp, Artificial Sequence
  Synthetic
gcacacaccauctcugcct

SEQ ID NO: 17195 - DNA, 18 bp, Artificial Sequence
  Synthetic
gggcaccuagtcctccuc

SEQ ID NO: 17196 - DNA, 19 bp, Artificial Sequence
  Synthetic
ggaaacugaggcuagccct

SEQ ID NO: 17197 - DNA, 17 bp, Artificial Sequence
  Synthetic
ccaccacaugcgcucct

SEQ ID NO: 17198 - DNA, 17 bp, Artificial Sequence
  Synthetic
ggccgugccagcugaat

SEQ ID NO: 17199 - DNA, 17 bp, Artificial Sequence
  Synthetic
gctgctugcgcgactuc

SEQ ID NO: 17200 - DNA, 20 bp, Artificial Sequence
  Synthetic
gatagcgggacugatgucca

SEQ ID NO: 17201 - DNA, 20 bp, Artificial Sequence
  Synthetic
gtgatgggcugtggaauggt

SEQ ID NO: 17202 - DNA, 22 bp, Artificial Sequence
  Synthetic
cagtcugcccttctgucaaagt

SEQ ID NO: 17203 - DNA, 24 bp, Artificial Sequence
  Synthetic
acttagctuggaagctgacaagug

SEQ ID NO: 17204 - DNA, 21 bp, Artificial Sequence
  Synthetic
agaaagcctuccctgggaaug

SEQ ID NO: 17205 - DNA, 26 bp, Artificial Sequence
  Synthetic
catagacatgtauctgcgaaaacgug

SEQ ID NO: 17206 - DNA, 21 bp, Artificial Sequence
  Synthetic
cttggcauccatgacctucag

SEQ ID NO: 17207 - DNA, 20 bp, Artificial Sequence
  Synthetic
gctgtccccucaccatucag

SEQ ID NO: 17208 - DNA, 20 bp, Artificial Sequence
  Synthetic
gagctcucgaagactgcugt

SEQ ID NO: 17209 - DNA, 23 bp, Artificial Sequence
  Synthetic
aaggacugagaaggagagtguct

SEQ ID NO: 17210 - DNA, 19 bp, Artificial Sequence
  Synthetic
ccagugaaacccgagggug

SEQ ID NO: 17211 - DNA, 28 bp, Artificial Sequence
  Synthetic
tccagaaatcguagacattagcaucaag

SEQ ID NO: 17212 - DNA, 18 bp, Artificial Sequence
  Synthetic
gaatacgccuccgcguca

SEQ ID NO: 17213 - DNA, 21 bp, Artificial Sequence
  Synthetic
ggctaaagccugggtttgugt

SEQ ID NO: 17214 - DNA, 22 bp, Artificial Sequence
  Synthetic
ggatagcacuggccaaatccut

SEQ ID NO: 17215 - DNA, 20 bp, Artificial Sequence
  Synthetic
ctccgcagaauctgtcccuc

SEQ ID NO: 17216 - DNA, 24 bp, Artificial Sequence
  Synthetic
agtgguccccaaaggagaaagaua

SEQ ID NO: 17217 - DNA, 21 bp, Artificial Sequence
  Synthetic
catggcaccuccaagugaaga

SEQ ID NO: 17218 - DNA, 23 bp, Artificial Sequence
  Synthetic
gctccctccccuatccaattcut

SEQ ID NO: 17219 - DNA, 22 bp, Artificial Sequence
  Synthetic
cccatccaugactguacacagc

SEQ ID NO: 17220 - DNA, 20 bp, Artificial Sequence
  Synthetic
ctgucagagccugccaagat

SEQ ID NO: 17221 - DNA, 20 bp, Artificial Sequence
  Synthetic
gctcccagcuacaccatcug

SEQ ID NO: 17222 - DNA, 21 bp, Artificial Sequence
  Synthetic
gcctgaaaagccugctgtgua

SEQ ID NO: 17223 - DNA, 29 bp, Artificial Sequence
  Synthetic
gaacgtgagguggacttaaatttacuaga

SEQ ID NO: 17224 - DNA, 21 bp, Artificial Sequence
  Synthetic
cattctccagguggtgctuct

SEQ ID NO: 17225 - DNA, 18 bp, Artificial Sequence
  Synthetic
gctcgugtccatguccgt

SEQ ID NO: 17226 - DNA, 18 bp, Artificial Sequence
  Synthetic
ggtgatggugcgggugag

SEQ ID NO: 17227 - DNA, 18 bp, Artificial Sequence
  Synthetic
cgcugcaaagctucgaca

SEQ ID NO: 17228 - DNA, 18 bp, Artificial Sequence
  Synthetic
cugagcggtguggaggac

SEQ ID NO: 17229 - DNA, 20 bp, Artificial Sequence
  Synthetic
gctggccauggagtatguca

SEQ ID NO: 17230 - DNA, 18 bp, Artificial Sequence
  Synthetic
ggctctccugctccaucg

SEQ ID NO: 17231 - DNA, 18 bp, Artificial Sequence
  Synthetic
ctcgtgcucgtggucaga

SEQ ID NO: 17232 - DNA, 17 bp, Artificial Sequence
  Synthetic
cgacgccuccccaaguc

SEQ ID NO: 17233 - DNA, 17 bp, Artificial Sequence
  Synthetic
ggcgggugggcttctut

SEQ ID NO: 17234 - DNA, 28 bp, Artificial Sequence
  Synthetic
gcaataatatgucaggacaacgcgauat

SEQ ID NO: 17235 - DNA, 18 bp, Artificial Sequence
  Synthetic
gctcgttgugaggcggut

SEQ ID NO: 17236 - DNA, 18 bp, Artificial Sequence
  Synthetic
ccggagccutcagtggug

SEQ ID NO: 17237 - DNA, 19 bp, Artificial Sequence
  Synthetic
cctccuggagcaaggtcug

SEQ ID NO: 17238 - DNA, 18 bp, Artificial Sequence
  Synthetic
cccaucccaagaggcugt

SEQ ID NO: 17239 - DNA, 17 bp, Artificial Sequence
  Synthetic
ccgucaagcgcgatugg

SEQ ID NO: 17240 - DNA, 21 bp, Artificial Sequence
  Synthetic
gccagacgcaagauccatcuc

SEQ ID NO: 17241 - DNA, 18 bp, Artificial Sequence
  Synthetic
ggagtcaucgtcgcugct

SEQ ID NO: 17242 - DNA, 23 bp, Artificial Sequence
  Synthetic
ctctcaaggucaagaagguaccc

SEQ ID NO: 17243 - DNA, 23 bp, Artificial Sequence
  Synthetic
catgtagcccaucttttcgucct

SEQ ID NO: 17244 - DNA, 21 bp, Artificial Sequence
  Synthetic
cgactgccgugacatcatuca

SEQ ID NO: 17245 - DNA, 31 bp, Artificial Sequence
  Synthetic
gattaactgcttguacaattacgtttcacut

SEQ ID NO: 17246 - DNA, 24 bp, Artificial Sequence
  Synthetic
gtgagaggaaaacgagugtgcaua

SEQ ID NO: 17247 - DNA, 21 bp, Artificial Sequence
  Synthetic
attgaccuggactcgctgaug

SEQ ID NO: 17248 - DNA, 18 bp, Artificial Sequence
  Synthetic
gcgccugaaggatcucca

SEQ ID NO: 17249 - DNA, 17 bp, Artificial Sequence
  Synthetic
ctcggccugggcaucat

SEQ ID NO: 17250 - DNA, 17 bp, Artificial Sequence
  Synthetic
cccaggauggcgacgug

SEQ ID NO: 17251 - DNA, 21 bp, Artificial Sequence
  Synthetic
cccuggcaccttcttugacaa

SEQ ID NO: 17252 - DNA, 21 bp, Artificial Sequence
  Synthetic
ggattccagggugtagtuggg

SEQ ID NO: 17253 - DNA, 18 bp, Artificial Sequence
  Synthetic
cccgggcucggattacut

SEQ ID NO: 17254 - DNA, 19 bp, Artificial Sequence
  Synthetic
ggctgggcuggaaaucagg

SEQ ID NO: 17255 - DNA, 17 bp, Artificial Sequence
  Synthetic
ccgggcuttccgttugg

SEQ ID NO: 17256 - DNA, 17 bp, Artificial Sequence
  Synthetic
agutcggcugggccaag

SEQ ID NO: 17257 - DNA, 20 bp, Artificial Sequence
  Synthetic
aaacgcggcccucatgatua

SEQ ID NO: 17258 - DNA, 18 bp, Artificial Sequence
  Synthetic
gttcuccagccgguggat

SEQ ID NO: 17259 - DNA, 18 bp, Artificial Sequence
  Synthetic
ccacccgggcutctaguc

SEQ ID NO: 17260 - DNA, 18 bp, Artificial Sequence
  Synthetic
ggctgggcgugcatttug

SEQ ID NO: 17261 - DNA, 18 bp, Artificial Sequence
  Synthetic
cgcccuctgacuccgaag

SEQ ID NO: 17262 - DNA, 17 bp, Artificial Sequence
  Synthetic
gctcuccgccatgugct

SEQ ID NO: 17263 - DNA, 18 bp, Artificial Sequence
  Synthetic
auccccaccagcaucacc

SEQ ID NO: 17264 - DNA, 19 bp, Artificial Sequence
  Synthetic
cgttcctgcugttgaccug

SEQ ID NO: 17265 - DNA, 19 bp, Artificial Sequence
  Synthetic
caatccugggcuggaacga

SEQ ID NO: 17266 - DNA, 20 bp, Artificial Sequence
  Synthetic
gggcuctggtugaggaacaa

SEQ ID NO: 17267 - DNA, 17 bp, Artificial Sequence
  Synthetic
ccucccgccggaaacug

SEQ ID NO: 17268 - DNA, 21 bp, Artificial Sequence
  Synthetic
gcacgtacutggtctcgtugt

SEQ ID NO: 17269 - DNA, 23 bp, Artificial Sequence
  Synthetic
acaaggagctuaaggtcaagcug

SEQ ID NO: 17270 - DNA, 18 bp, Artificial Sequence
  Synthetic
ccaactcugcccccucac

SEQ ID NO: 17271 - DNA, 21 bp, Artificial Sequence
  Synthetic
gctgccttuaggtcacacuct

SEQ ID NO: 17272 - DNA, 20 bp, Artificial Sequence
  Synthetic
gcttcgucccggttcttgut

SEQ ID NO: 17273 - DNA, 24 bp, Artificial Sequence
  Synthetic
cttcccaagtugttgatgttccut

SEQ ID NO: 17274 - DNA, 18 bp, Artificial Sequence
  Synthetic
ccauctccgugcggaact

SEQ ID NO: 17275 - DNA, 25 bp, Artificial Sequence
  Synthetic
gagaagaccauctctgccaagtaug

SEQ ID NO: 17276 - DNA, 22 bp, Artificial Sequence
  Synthetic
tccttcuggagcttcctctuca

SEQ ID NO: 17277 - DNA, 18 bp, Artificial Sequence
  Synthetic
acctgagcaggugccauc

SEQ ID NO: 17278 - DNA, 21 bp, Artificial Sequence
  Synthetic
gaagtcctuggtgagctugct

SEQ ID NO: 17279 - DNA, 23 bp, Artificial Sequence
  Synthetic
ttgtgactcagguccagcttuac

SEQ ID NO: 17280 - DNA, 22 bp, Artificial Sequence
  Synthetic
aggactgguttggattctgugg

SEQ ID NO: 17281 - DNA, 21 bp, Artificial Sequence
  Synthetic
ccagauccaggagaugaggca

SEQ ID NO: 17282 - DNA, 22 bp, Artificial Sequence
  Synthetic
ctcactagugccgagaacuagg

SEQ ID NO: 17283 - DNA, 19 bp, Artificial Sequence
  Synthetic
cagaucgcggagcucaaga

SEQ ID NO: 17284 - DNA, 19 bp, Artificial Sequence
  Synthetic
gcaagggugaccacacuct

SEQ ID NO: 17285 - DNA, 22 bp, Artificial Sequence
  Synthetic
cgaagcugaaaaagcuggagga

SEQ ID NO: 17286 - DNA, 28 bp, Artificial Sequence
  Synthetic
cagatctcttcuaattcctgcttctugg

SEQ ID NO: 17287 - DNA, 23 bp, Artificial Sequence
  Synthetic
aggagcttgugttttccactugt

SEQ ID NO: 17288 - DNA, 20 bp, Artificial Sequence
  Synthetic
gaggacctucatggcgguaa

SEQ ID NO: 17289 - DNA, 22 bp, Artificial Sequence
  Synthetic
gguagacccucagaaaagctug

SEQ ID NO: 17290 - DNA, 19 bp, Artificial Sequence
  Synthetic
cccaccuctgggacucact

SEQ ID NO: 17291 - DNA, 20 bp, Artificial Sequence
  Synthetic
tctcgagggcauccgtauct

SEQ ID NO: 17292 - DNA, 21 bp, Artificial Sequence
  Synthetic
acatgtguaccccttgttugg

SEQ ID NO: 17293 - DNA, 20 bp, Artificial Sequence
  Synthetic
ctccaccagucctcugacaa

SEQ ID NO: 17294 - DNA, 21 bp, Artificial Sequence
  Synthetic
gaggucaaagcaagcctggua

SEQ ID NO: 17295 - DNA, 21 bp, Artificial Sequence
  Synthetic
caccatgutcatccuggagca

SEQ ID NO: 17296 - DNA, 19 bp, Artificial Sequence
  Synthetic
tgcugcagggacatucacc

SEQ ID NO: 17297 - DNA, 23 bp, Artificial Sequence
  Synthetic
gtgtcccauctcttgggtaucaa

SEQ ID NO: 17298 - DNA, 20 bp, Artificial Sequence
  Synthetic
gggatggugacgtgtccaut

SEQ ID NO: 17299 - DNA, 22 bp, Artificial Sequence
  Synthetic
gtcccagtcuctccaaccttug

SEQ ID NO: 17300 - DNA, 22 bp, Artificial Sequence
  Synthetic
gggaccacuaagtgctctucct

SEQ ID NO: 17301 - DNA, 22 bp, Artificial Sequence
  Synthetic
catccagtatcuggcgtacgug

SEQ ID NO: 17302 - DNA, 23 bp, Artificial Sequence
  Synthetic
tcttcagaguagatgggcaggut

SEQ ID NO: 17303 - DNA, 23 bp, Artificial Sequence
  Synthetic
gtccttugaagccgcagatatut

SEQ ID NO: 17304 - DNA, 21 bp, Artificial Sequence
  Synthetic
tcaaagccacucttgucggaa

SEQ ID NO: 17305 - DNA, 20 bp, Artificial Sequence
  Synthetic
tccttctccuccccgctuag

SEQ ID NO: 17306 - DNA, 19 bp, Artificial Sequence
  Synthetic
ctgtccagguggccaucag

SEQ ID NO: 17307 - DNA, 20 bp, Artificial Sequence
  Synthetic
tccctcatugacgaccucca

SEQ ID NO: 17308 - DNA, 22 bp, Artificial Sequence
  Synthetic
ctaugaacagagaaggccguca

SEQ ID NO: 17309 - DNA, 19 bp, Artificial Sequence
  Synthetic
cugggagcccccatucaag

SEQ ID NO: 17310 - DNA, 23 bp, Artificial Sequence
  Synthetic
ccagggctguctgcattcttaut

SEQ ID NO: 17311 - DNA, 18 bp, Artificial Sequence
  Synthetic
ggaagccutgcagccuga

SEQ ID NO: 17312 - DNA, 17 bp, Artificial Sequence
  Synthetic
ctugagccgcuccacca

SEQ ID NO: 17313 - DNA, 17 bp, Artificial Sequence
  Synthetic
cgggtccugttgccuga

SEQ ID NO: 17314 - DNA, 19 bp, Artificial Sequence
  Synthetic
ccgtgcugccaaactucac

SEQ ID NO: 17315 - DNA, 20 bp, Artificial Sequence
  Synthetic
gccaccuctatccugcacaa

SEQ ID NO: 17316 - DNA, 21 bp, Artificial Sequence
  Synthetic
tcagtgaggugctgttcugac

SEQ ID NO: 17317 - DNA, 24 bp, Artificial Sequence
  Synthetic
gggctaattuctgccttttctucc

SEQ ID NO: 17318 - DNA, 22 bp, Artificial Sequence
  Synthetic
gaggguacaatcacuggcagaa

SEQ ID NO: 17319 - DNA, 23 bp, Artificial Sequence
  Synthetic
agagaaaugcttttccuggcaga

SEQ ID NO: 17320 - DNA, 20 bp, Artificial Sequence
  Synthetic
gcatctcagcugcctcucac

SEQ ID NO: 17321 - DNA, 20 bp, Artificial Sequence
  Synthetic
gccagacuagccgaugacct

SEQ ID NO: 17322 - DNA, 22 bp, Artificial Sequence
  Synthetic
cauactcggugaacacagccat

SEQ ID NO: 17323 - DNA, 23 bp, Artificial Sequence
  Synthetic
tcatctctccuctctctctgcug

SEQ ID NO: 17324 - DNA, 17 bp, Artificial Sequence
  Synthetic
cuccacagccgcctcut

SEQ ID NO: 17325 - DNA, 18 bp, Artificial Sequence
  Synthetic
guggccacaaugagcaca

SEQ ID NO: 17326 - DNA, 25 bp, Artificial Sequence
  Synthetic
ccttccttuacagaatgctgcctut

SEQ ID NO: 17327 - DNA, 27 bp, Artificial Sequence
  Synthetic
caaaacaaguaaacaagccauttacug

SEQ ID NO: 17328 - DNA, 23 bp, Artificial Sequence
  Synthetic
tgccccaaautctgctgtatugt

SEQ ID NO: 17329 - DNA, 30 bp, Artificial Sequence
  Synthetic
gcatgataggaguaatgatttttgttugct

SEQ ID NO: 17330 - DNA, 30 bp, Artificial Sequence
  Synthetic
cctttcagccgautaatttgtttcagtaut

SEQ ID NO: 17331 - DNA, 22 bp, Artificial Sequence
  Synthetic
acaccatguatctgcactugct

SEQ ID NO: 17332 - DNA, 25 bp, Artificial Sequence
  Synthetic
cttgctcttacucaagtaggctugt

SEQ ID NO: 17333 - DNA, 20 bp, Artificial Sequence
  Synthetic
cctgccuggaggtaagcuct

SEQ ID NO: 17334 - DNA, 26 bp, Artificial Sequence
  Synthetic
tcttcttctagcauttggaacagcuc

SEQ ID NO: 17335 - DNA, 28 bp, Artificial Sequence
  Synthetic
agggaaaaataugctatacacactuggt

SEQ ID NO: 17336 - DNA, 19 bp, Artificial Sequence
  Synthetic
ccutaccugcagcgaaacg

SEQ ID NO: 17337 - DNA, 24 bp, Artificial Sequence
  Synthetic
tgugaaaagccaauaaggaagcua

SEQ ID NO: 17338 - DNA, 21 bp, Artificial Sequence
  Synthetic
gatgacggcagaugctgttug

SEQ ID NO: 17339 - DNA, 22 bp, Artificial Sequence
  Synthetic
acaggttccaguacccacatug

SEQ ID NO: 17340 - DNA, 28 bp, Artificial Sequence
  Synthetic
ttttccaggaauctaggtaaaaauggct

SEQ ID NO: 17341 - DNA, 28 bp, Artificial Sequence
  Synthetic
acgtaaatactaggugtaggtggatuca

SEQ ID NO: 17342 - DNA, 27 bp, Artificial Sequence
  Synthetic
gtattcatgaagaccugggactttuct

SEQ ID NO: 17343 - DNA, 29 bp, Artificial Sequence
  Synthetic
actttcacaaugccagattttctttgtuc

SEQ ID NO: 17344 - DNA, 29 bp, Artificial Sequence
  Synthetic
aaaggcatgtttcuaatactgtgtctcut

SEQ ID NO: 17345 - DNA, 26 bp, Artificial Sequence
  Synthetic
acaggataacuctttgcatcagtuca

SEQ ID NO: 17346 - DNA, 25 bp, Artificial Sequence
  Synthetic
gtttgttgttccugaaggttacugg

SEQ ID NO: 17347 - DNA, 27 bp, Artificial Sequence
  Synthetic
caatgtatccatuaggagatccagcut

SEQ ID NO: 17348 - DNA, 28 bp, Artificial Sequence
  Synthetic
aattgatgtugaagatatcaccugagca

SEQ ID NO: 17349 - DNA, 28 bp, Artificial Sequence
  Synthetic
gggtactatugacttcacacttugcaat

SEQ ID NO: 17350 - DNA, 29 bp, Artificial Sequence
  Synthetic
tgtccacaattucattcaagtagaatucc

SEQ ID NO: 17351 - DNA, 28 bp, Artificial Sequence
  Synthetic
gcaatgtactaugtaggtctttcgugaa

SEQ ID NO: 17352 - DNA, 23 bp, Artificial Sequence
  Synthetic
ccattaccauccgcctcatctug

SEQ ID NO: 17353 - DNA, 19 bp, Artificial Sequence
  Synthetic
actccgcacutggaaggut

SEQ ID NO: 17354 - DNA, 19 bp, Artificial Sequence
  Synthetic
gtgcgcugaccctagacug

SEQ ID NO: 17355 - DNA, 21 bp, Artificial Sequence
  Synthetic
acacagtugaggcaggguaga

SEQ ID NO: 17356 - DNA, 22 bp, Artificial Sequence
  Synthetic
gcccaaaguaaagctgagcuga

SEQ ID NO: 17357 - DNA, 24 bp, Artificial Sequence
  Synthetic
tgcccatucatcttgtgauagagg

SEQ ID NO: 17358 - DNA, 19 bp, Artificial Sequence
  Synthetic
gagggtguccctggtugac

SEQ ID NO: 17359 - DNA, 19 bp, Artificial Sequence
  Synthetic
agatgccutgcggttucga

SEQ ID NO: 17360 - DNA, 17 bp, Artificial Sequence
  Synthetic
ggctccgcucagcucat

SEQ ID NO: 17361 - DNA, 24 bp, Artificial Sequence
  Synthetic
acaaaagcuttgaaggtucaagcc

SEQ ID NO: 17362 - DNA, 20 bp, Artificial Sequence
  Synthetic
gggtctcugtcagggtcugt

SEQ ID NO: 17363 - DNA, 22 bp, Artificial Sequence
  Synthetic
agaaccagaauggctuggaacc

SEQ ID NO: 17364 - DNA, 19 bp, Artificial Sequence
  Synthetic
cccaugacccctctccuca

SEQ ID NO: 17365 - DNA, 20 bp, Artificial Sequence
  Synthetic
ccctuggaggagctcaugat

SEQ ID NO: 17366 - DNA, 22 bp, Artificial Sequence
  Synthetic
gtagtuaggaggctccucaggt

SEQ ID NO: 17367 - DNA, 20 bp, Artificial Sequence
  Synthetic
ccucacagagagggccauca

SEQ ID NO: 17368 - DNA, 22 bp, Artificial Sequence
  Synthetic
cugcccacacacacagauagag

SEQ ID NO: 17369 - DNA, 21 bp, Artificial Sequence
  Synthetic
ctttgctccugtcctggguat

SEQ ID NO: 17370 - DNA, 20 bp, Artificial Sequence
  Synthetic
gtgcgctgucagtacctgua

SEQ ID NO: 17371 - DNA, 24 bp, Artificial Sequence
  Synthetic
gcatcaatagcautggcaagtuga

SEQ ID NO: 17372 - DNA, 20 bp, Artificial Sequence
  Synthetic
agcaatggucagcagtucct

SEQ ID NO: 17373 - DNA, 21 bp, Artificial Sequence
  Synthetic
gatgaggugaaacgcacacug

SEQ ID NO: 17374 - DNA, 22 bp, Artificial Sequence
  Synthetic
gcaccttaugtgtgcccuaact

SEQ ID NO: 17375 - DNA, 25 bp, Artificial Sequence
  Synthetic
gaggtttcctaauagtgagctgcug

SEQ ID NO: 17376 - DNA, 19 bp, Artificial Sequence
  Synthetic
cuccagaaaggcccaugct

SEQ ID NO: 17377 - DNA, 21 bp, Artificial Sequence
  Synthetic
tgagcgccagugtatcaagug

SEQ ID NO: 17378 - DNA, 23 bp, Artificial Sequence
  Synthetic
ccatcccaccacautctagacuc

SEQ ID NO: 17379 - DNA, 22 bp, Artificial Sequence
  Synthetic
gccatggccutttgtgttctuc

SEQ ID NO: 17380 - DNA, 21 bp, Artificial Sequence
  Synthetic
gaagaccaugcccacguagag

SEQ ID NO: 17381 - DNA, 23 bp, Artificial Sequence
  Synthetic
cttagcataacccucatgcccut

SEQ ID NO: 17382 - DNA, 21 bp, Artificial Sequence
  Synthetic
gaagccctaugaggcagaugt

SEQ ID NO: 17383 - DNA, 20 bp, Artificial Sequence
  Synthetic
ggatgacaagcucctgcugt

SEQ ID NO: 17384 - DNA, 21 bp, Artificial Sequence
  Synthetic
ctaggacacutagggcccuga

SEQ ID NO: 17385 - DNA, 26 bp, Artificial Sequence
  Synthetic
acattgagaagaauccagagcugaaa

SEQ ID NO: 17386 - DNA, 22 bp, Artificial Sequence
  Synthetic
gcaagtguggaaatctgtgcug

SEQ ID NO: 17387 - DNA, 23 bp, Artificial Sequence
  Synthetic
ccucaactauccaccaggcaaaa

SEQ ID NO: 17388 - DNA, 21 bp, Artificial Sequence
  Synthetic
accaccagcucctagtctuct

SEQ ID NO: 17389 - DNA, 25 bp, Artificial Sequence
  Synthetic
gctgagataacucaagtcccttucc

SEQ ID NO: 17390 - DNA, 21 bp, Artificial Sequence
  Synthetic
cgctagugagggacccaauct

SEQ ID NO: 17391 - DNA, 18 bp, Artificial Sequence
  Synthetic
ccggcacucaccgtttug

SEQ ID NO: 17392 - DNA, 24 bp, Artificial Sequence
  Synthetic
gagggaagttuggttctttgguct

SEQ ID NO: 17393 - DNA, 22 bp, Artificial Sequence
  Synthetic
tccaggauttgccaacuagcac

SEQ ID NO: 17394 - DNA, 26 bp, Artificial Sequence
  Synthetic
aactactcaucacccattgtcttucc

SEQ ID NO: 17395 - DNA, 24 bp, Artificial Sequence
  Synthetic
tctcautcaccctguaagggaagt

SEQ ID NO: 17396 - DNA, 27 bp, Artificial Sequence
  Synthetic
cagtgctttuggatttagctttucaga

SEQ ID NO: 17397 - DNA, 25 bp, Artificial Sequence
  Synthetic
gcatgtauagttcatggtuccccat

SEQ ID NO: 17398 - DNA, 27 bp, Artificial Sequence
  Synthetic
cgaagctattgugtcgtctttatcuct

SEQ ID NO: 17399 - DNA, 20 bp, Artificial Sequence
  Synthetic
agcttctugacgctcctugg

SEQ ID NO: 17400 - DNA, 22 bp, Artificial Sequence
  Synthetic
ctgctgagaaugagcaggauga

SEQ ID NO: 17401 - DNA, 20 bp, Artificial Sequence
  Synthetic
cccctuggccctacttguat

SEQ ID NO: 17402 - DNA, 19 bp, Artificial Sequence
  Synthetic
gggaagtucgcgacttuct

SEQ ID NO: 17403 - DNA, 24 bp, Artificial Sequence
  Synthetic
cctctgtggcugaattctcatucc

SEQ ID NO: 17404 - DNA, 20 bp, Artificial Sequence
  Synthetic
gctcagagccgaucctgtug

SEQ ID NO: 17405 - DNA, 21 bp, Artificial Sequence
  Synthetic
gctttcaauggcctggcugat

SEQ ID NO: 17406 - DNA, 21 bp, Artificial Sequence
  Synthetic
caaaagctcutggtggaugct

SEQ ID NO: 17407 - DNA, 18 bp, Artificial Sequence
  Synthetic
ttggaguggcacctucgg

SEQ ID NO: 17408 - DNA, 21 bp, Artificial Sequence
  Synthetic
ggagtggtcuctctggctuct

SEQ ID NO: 17409 - DNA, 20 bp, Artificial Sequence
  Synthetic
gtggcguatcagaggugagc

SEQ ID NO: 17410 - DNA, 24 bp, Artificial Sequence
  Synthetic
caagacagaaugcctcaggatcua

SEQ ID NO: 17411 - DNA, 24 bp, Artificial Sequence
  Synthetic
gtggtaataggcuatgaggtgcug

SEQ ID NO: 17412 - DNA, 21 bp, Artificial Sequence
  Synthetic
gaagaccacagggugctguag

SEQ ID NO: 17413 - DNA, 24 bp, Artificial Sequence
  Synthetic
ggacaacgagauaagcaccttuca

SEQ ID NO: 17414 - DNA, 23 bp, Artificial Sequence
  Synthetic
cctcctcctcuctctcggttaut

SEQ ID NO: 17415 - DNA, 27 bp, Artificial Sequence
  Synthetic
gcaaggaatggaaugaaaaaccagtuc

SEQ ID NO: 17416 - DNA, 24 bp, Artificial Sequence
  Synthetic
aaagaaaccuctcaccttctucgg

SEQ ID NO: 17417 - DNA, 27 bp, Artificial Sequence
  Synthetic
cccattcucaacaacgccaatauagat

SEQ ID NO: 17418 - DNA, 22 bp, Artificial Sequence
  Synthetic
gaccaagcaguacgttcuccat

SEQ ID NO: 17419 - DNA, 25 bp, Artificial Sequence
  Synthetic
ggactgatgauggttaaaccctgug

SEQ ID NO: 17420 - DNA, 29 bp, Artificial Sequence
  Synthetic
caaacaattcatugaccatgtcatcuaca

SEQ ID NO: 17421 - DNA, 22 bp, Artificial Sequence
  Synthetic
tgaaattgtugttcgccaugcc

SEQ ID NO: 17422 - DNA, 17 bp, Artificial Sequence
  Synthetic
ctagcgcgcucagggua

SEQ ID NO: 17423 - DNA, 19 bp, Artificial Sequence
  Synthetic
gtcaccaaguccgctccut

SEQ ID NO: 17424 - DNA, 24 bp, Artificial Sequence
  Synthetic
gtactctgutacgagagucccagt

SEQ ID NO: 17425 - DNA, 22 bp, Artificial Sequence
  Synthetic
tcaccttctuacctcccagcua

SEQ ID NO: 17426 - DNA, 19 bp, Artificial Sequence
  Synthetic
gggttcugaggcacagcut

SEQ ID NO: 17427 - DNA, 19 bp, Artificial Sequence
  Synthetic
agtcuccaggaggcuccat

SEQ ID NO: 17428 - DNA, 21 bp, Artificial Sequence
  Synthetic
ggcaggutatcgtgugaagga

SEQ ID NO: 17429 - DNA, 19 bp, Artificial Sequence
  Synthetic
ggctgtgcuggcctctuac

SEQ ID NO: 17430 - DNA, 17 bp, Artificial Sequence
  Synthetic
cctgccuctcccacguc

SEQ ID NO: 17431 - DNA, 19 bp, Artificial Sequence
  Synthetic
aggccaacuguggagcaaa

SEQ ID NO: 17432 - DNA, 21 bp, Artificial Sequence
  Synthetic
gggtgtcagautgagtgcuct

SEQ ID NO: 17433 - DNA, 18 bp, Artificial Sequence
  Synthetic
cctcgccutggaucgcat

SEQ ID NO: 17434 - DNA, 23 bp, Artificial Sequence
  Synthetic
attcctgaagacautccgauccc

SEQ ID NO: 17435 - DNA, 22 bp, Artificial Sequence
  Synthetic
ccatccgaaguctgtctcctut

SEQ ID NO: 17436 - DNA, 20 bp, Artificial Sequence
  Synthetic
gctggcucaagtacauccgt

SEQ ID NO: 17437 - DNA, 21 bp, Artificial Sequence
  Synthetic
caccaatctuggtgccacauc

SEQ ID NO: 17438 - DNA, 18 bp, Artificial Sequence
  Synthetic
acacgtguggctcagugg

SEQ ID NO: 17439 - DNA, 17 bp, Artificial Sequence
  Synthetic
ggcguggcacctguact

SEQ ID NO: 17440 - DNA, 18 bp, Artificial Sequence
  Synthetic
acctucagcggcacaucc

SEQ ID NO: 17441 - DNA, 17 bp, Artificial Sequence
  Synthetic
gcugggcgaccacucac

SEQ ID NO: 17442 - DNA, 19 bp, Artificial Sequence
  Synthetic
ctcccccagccucaaucac

SEQ ID NO: 17443 - DNA, 21 bp, Artificial Sequence
  Synthetic
caaggauggagggaagaugcc

SEQ ID NO: 17444 - DNA, 21 bp, Artificial Sequence
  Synthetic
tgtguggagaagcugaagacc

SEQ ID NO: 17445 - DNA, 20 bp, Artificial Sequence
  Synthetic
ccttgcccutgtccttguca

SEQ ID NO: 17446 - DNA, 21 bp, Artificial Sequence
  Synthetic
cttccagtucctgcccaacut

SEQ ID NO: 17447 - DNA, 22 bp, Artificial Sequence
  Synthetic
gcttgguggtgagaucaaaggg

SEQ ID NO: 17448 - DNA, 17 bp, Artificial Sequence
  Synthetic
ccgcuccacuacgccaa

SEQ ID NO: 17449 - DNA, 20 bp, Artificial Sequence
  Synthetic
agacaccaccaugcacugag

SEQ ID NO: 17450 - DNA, 19 bp, Artificial Sequence
  Synthetic
tctccgaccccauccucag

SEQ ID NO: 17451 - DNA, 23 bp, Artificial Sequence
  Synthetic
agtttttccuggaagcacaggut

SEQ ID NO: 17452 - DNA, 17 bp, Artificial Sequence
  Synthetic
gtgcaaccgcugctucg

SEQ ID NO: 17453 - DNA, 17 bp, Artificial Sequence
  Synthetic
cccacucccctgctgut

SEQ ID NO: 17454 - DNA, 18 bp, Artificial Sequence
  Synthetic
tguccaggccuagccagt

SEQ ID NO: 17455 - DNA, 18 bp, Artificial Sequence
  Synthetic
ggctggcucctcatccuc

SEQ ID NO: 17456 - DNA, 21 bp, Artificial Sequence
  Synthetic
cctgtccugtgtgtgtgucat

SEQ ID NO: 17457 - DNA, 20 bp, Artificial Sequence
  Synthetic
gtggcuccagtgacctucaa

SEQ ID NO: 17458 - DNA, 25 bp, Artificial Sequence
  Synthetic
ccaccattttggutcccaagtttua

SEQ ID NO: 17459 - DNA, 19 bp, Artificial Sequence
  Synthetic
gactggtugcgcgtagtug

SEQ ID NO: 17460 - DNA, 27 bp, Artificial Sequence
  Synthetic
ttctcaacaguatctcaaaatgtucgt

SEQ ID NO: 17461 - DNA, 27 bp, Artificial Sequence
  Synthetic
gcaagttctgaagutcactcttgatug

SEQ ID NO: 17462 - DNA, 29 bp, Artificial Sequence
  Synthetic
tggaaaaccaagauctttaaaggaacuca

SEQ ID NO: 17463 - DNA, 22 bp, Artificial Sequence
  Synthetic
ggtctgaauccagggaaagcua

SEQ ID NO: 17464 - DNA, 25 bp, Artificial Sequence
  Synthetic
cctggcaaucatctttgcaauaaat

SEQ ID NO: 17465 - DNA, 26 bp, Artificial Sequence
  Synthetic
gcacagtacaaauccattgagcctua

SEQ ID NO: 17466 - DNA, 21 bp, Artificial Sequence
  Synthetic
cuggagcccaacaggaaugaa

SEQ ID NO: 17467 - DNA, 28 bp, Artificial Sequence
  Synthetic
ggttgaacgtuacataaataccacugga

SEQ ID NO: 17468 - DNA, 22 bp, Artificial Sequence
  Synthetic
ggaagcgatutttgccgactut

SEQ ID NO: 17469 - DNA, 19 bp, Artificial Sequence
  Synthetic
ccagccugggcgttctuac

SEQ ID NO: 17470 - DNA, 19 bp, Artificial Sequence
  Synthetic
ctcccaccuccacctcuga

SEQ ID NO: 17471 - DNA, 19 bp, Artificial Sequence
  Synthetic
ggctcagcugccttcucac

SEQ ID NO: 17472 - DNA, 20 bp, Artificial Sequence
  Synthetic
gagcuggagaaggccttuga

SEQ ID NO: 17473 - DNA, 20 bp, Artificial Sequence
  Synthetic
accttggccaucccaaacut

SEQ ID NO: 17474 - DNA, 18 bp, Artificial Sequence
  Synthetic
accagcuctgccuacgga

SEQ ID NO: 17475 - DNA, 19 bp, Artificial Sequence
  Synthetic
gctgggcugagaccaccua

SEQ ID NO: 17476 - DNA, 25 bp, Artificial Sequence
  Synthetic
ggatgggtguagatagagtgaaugg

SEQ ID NO: 17477 - DNA, 17 bp, Artificial Sequence
  Synthetic
ttcaugcgacgcugggt

SEQ ID NO: 17478 - DNA, 20 bp, Artificial Sequence
  Synthetic
aggccccautcctcuaggac

SEQ ID NO: 17479 - DNA, 27 bp, Artificial Sequence
  Synthetic
tttacttaacacacauggacaucaact

SEQ ID NO: 17480 - DNA, 26 bp, Artificial Sequence
  Synthetic
tctaggtaccugcaagttctauagac

SEQ ID NO: 17481 - DNA, 26 bp, Artificial Sequence
  Synthetic
tcaacgtgagauggaagaacaaauga

SEQ ID NO: 17482 - DNA, 26 bp, Artificial Sequence
  Synthetic
ttgatacatuggattcttcugggcaa

SEQ ID NO: 17483 - DNA, 27 bp, Artificial Sequence
  Synthetic
gtggcaataaaacuggaacaaagcuaa

SEQ ID NO: 17484 - DNA, 21 bp, Artificial Sequence
  Synthetic
cgaacucgaagctgtcuacct

SEQ ID NO: 17485 - DNA, 28 bp, Artificial Sequence
  Synthetic
gagtagacatcauccaattttgagguca

SEQ ID NO: 17486 - DNA, 19 bp, Artificial Sequence
  Synthetic
ggtgatgcugctggtggua

SEQ ID NO: 17487 - DNA, 17 bp, Artificial Sequence
  Synthetic
gtccggguggucccaaa

SEQ ID NO: 17488 - DNA, 19 bp, Artificial Sequence
  Synthetic
gggccgcgautctgatuga

SEQ ID NO: 17489 - DNA, 17 bp, Artificial Sequence
  Synthetic
gggaucggtuccggagt

SEQ ID NO: 17490 - DNA, 25 bp, Artificial Sequence
  Synthetic
cgaggucacaacagaggctauagaa

SEQ ID NO: 17491 - DNA, 22 bp, Artificial Sequence
  Synthetic
ggactgtaugcttgccgguaat

SEQ ID NO: 17492 - DNA, 24 bp, Artificial Sequence
  Synthetic
ggaggcaccuctcaagauacaaaa

SEQ ID NO: 17493 - DNA, 20 bp, Artificial Sequence
  Synthetic
cucaccaccacagacuggag

SEQ ID NO: 17494 - DNA, 23 bp, Artificial Sequence
  Synthetic
gcatgctgtuaagaagcctctug

SEQ ID NO: 17495 - DNA, 21 bp, Artificial Sequence
  Synthetic
cccaagccugtgucagagaag

SEQ ID NO: 17496 - DNA, 25 bp, Artificial Sequence
  Synthetic
tcauaggugcaaacaaaaaccagga

SEQ ID NO: 17497 - DNA, 19 bp, Artificial Sequence
  Synthetic
gcttctctugccccgauct

SEQ ID NO: 17498 - DNA, 29 bp, Artificial Sequence
  Synthetic
gttcttcctgtguattgtgttctaatugg

SEQ ID NO: 17499 - DNA, 21 bp, Artificial Sequence
  Synthetic
acgctgagacugagctgatug

SEQ ID NO: 17500 - DNA, 24 bp, Artificial Sequence
  Synthetic
aggagaauagacattucccccagt

SEQ ID NO: 17501 - DNA, 21 bp, Artificial Sequence
  Synthetic
gcccaacgcacucattttgut

SEQ ID NO: 17502 - DNA, 22 bp, Artificial Sequence
  Synthetic
gattgatcacccuggctctuct

SEQ ID NO: 17503 - DNA, 21 bp, Artificial Sequence
  Synthetic
gatttgucaaagcccgtggug

SEQ ID NO: 17504 - DNA, 22 bp, Artificial Sequence
  Synthetic
ctctggcacugatggcaattut

SEQ ID NO: 17505 - DNA, 20 bp, Artificial Sequence
  Synthetic
gaacutgtcaugggcccact

SEQ ID NO: 17506 - DNA, 25 bp, Artificial Sequence
  Synthetic
cctgtatuaaaagggcagggagtua

SEQ ID NO: 17507 - DNA, 28 bp, Artificial Sequence
  Synthetic
aatttttcctgaaaguttgcaacctuct

SEQ ID NO: 17508 - DNA, 26 bp, Artificial Sequence
  Synthetic
ggtcattctuagaaggctctttcuga

SEQ ID NO: 17509 - DNA, 26 bp, Artificial Sequence
  Synthetic
agatatggacucctacaaagcaguga

SEQ ID NO: 17510 - DNA, 29 bp, Artificial Sequence
  Synthetic
aacaaaattttaaaagutacctggcguga

SEQ ID NO: 17511 - DNA, 26 bp, Artificial Sequence
  Synthetic
cattcaagacuggtggacaaagatug

SEQ ID NO: 17512 - DNA, 26 bp, Artificial Sequence
  Synthetic
tggttatcugatggttgaugaagcaa

SEQ ID NO: 17513 - DNA, 26 bp, Artificial Sequence
  Synthetic
tggcagaaagugtaagcatgtgttua

SEQ ID NO: 17514 - DNA, 28 bp, Artificial Sequence
  Synthetic
ctacctggaagacutgtgacttcatuat

SEQ ID NO: 17515 - DNA, 19 bp, Artificial Sequence
  Synthetic
cctccaggugctagctugt

SEQ ID NO: 17516 - DNA, 23 bp, Artificial Sequence
  Synthetic
tgcatctggagauagtcccauca

SEQ ID NO: 17517 - DNA, 23 bp, Artificial Sequence
  Synthetic
gggagataugggcagttgttcuc

SEQ ID NO: 17518 - DNA, 27 bp, Artificial Sequence
  Synthetic
agttccattggucttcctgaattaugg

SEQ ID NO: 17519 - DNA, 28 bp, Artificial Sequence
  Synthetic
tgctggaaatguacaaaacgaagaguat

SEQ ID NO: 17520 - DNA, 27 bp, Artificial Sequence
  Synthetic
agtgttccaaguggttaaucaaaggag

SEQ ID NO: 17521 - DNA, 26 bp, Artificial Sequence
  Synthetic
ctaagatccaaccaucagttccugaa

SEQ ID NO: 17522 - DNA, 30 bp, Artificial Sequence
  Synthetic
tggacattcugaaaatatactaaugcaact

SEQ ID NO: 17523 - DNA, 22 bp, Artificial Sequence
  Synthetic
gcccauccccattatuccaaca

SEQ ID NO: 17524 - DNA, 28 bp, Artificial Sequence
  Synthetic
tcttgagtatgaacuttgcatggaauca

SEQ ID NO: 17525 - DNA, 29 bp, Artificial Sequence
  Synthetic
ctacagaugaagaaggtgtaacatugaca

SEQ ID NO: 17526 - DNA, 22 bp, Artificial Sequence
  Synthetic
gggtugggaacccaauaacagt

SEQ ID NO: 17527 - DNA, 18 bp, Artificial Sequence
  Synthetic
cgccgccaucttggacuc

SEQ ID NO: 17528 - DNA, 17 bp, Artificial Sequence
  Synthetic
tgguggcagcaauggga

SEQ ID NO: 17529 - DNA, 24 bp, Artificial Sequence
  Synthetic
gagctataactaugcaagcggcua

SEQ ID NO: 17530 - DNA, 21 bp, Artificial Sequence
  Synthetic
ggtagccuttgtgaactuccg

SEQ ID NO: 17531 - DNA, 23 bp, Artificial Sequence
  Synthetic
cacactggcugatggaggauaag

SEQ ID NO: 17532 - DNA, 23 bp, Artificial Sequence
  Synthetic
tggaugagattucacccgaggat

SEQ ID NO: 17533 - DNA, 19 bp, Artificial Sequence
  Synthetic
cuagtcuggccgcgagaag

SEQ ID NO: 17534 - DNA, 22 bp, Artificial Sequence
  Synthetic
ccagtaugaaagcctggaugca

SEQ ID NO: 17535 - DNA, 25 bp, Artificial Sequence
  Synthetic
tgtcaccagcucataatgagucaag

SEQ ID NO: 17536 - DNA, 22 bp, Artificial Sequence
  Synthetic
ggaggacgucatctggauaggt

SEQ ID NO: 17537 - DNA, 25 bp, Artificial Sequence
  Synthetic
cttuccaagagaagaugggaagauc

SEQ ID NO: 17538 - DNA, 23 bp, Artificial Sequence
  Synthetic
gggcaugcttctacugaagaaca

SEQ ID NO: 17539 - DNA, 20 bp, Artificial Sequence
  Synthetic
tcatccaacutgggctgguc

SEQ ID NO: 17540 - DNA, 26 bp, Artificial Sequence
  Synthetic
gcactggccaaauctgaagaagatua

SEQ ID NO: 17541 - DNA, 28 bp, Artificial Sequence
  Synthetic
aaaaagaaaattgcauctgatgctguat

SEQ ID NO: 17542 - DNA, 22 bp, Artificial Sequence
  Synthetic
gagtcccaucatcactgctgut

SEQ ID NO: 17543 - DNA, 32 bp, Artificial Sequence
  Synthetic
gagatacaaaugcaagagagcttataattugg

SEQ ID NO: 17544 - DNA, 22 bp, Artificial Sequence
  Synthetic
tggtctctcauggcactguact

SEQ ID NO: 17545 - DNA, 31 bp, Artificial Sequence
  Synthetic
tgcattccctguggtttttaataaaaatuga

SEQ ID NO: 17546 - DNA, 22 bp, Artificial Sequence
  Synthetic
ctacactggagguggactcuct

SEQ ID NO: 17547 - DNA, 22 bp, Artificial Sequence
  Synthetic
tcaagttcaucaccccactcug

SEQ ID NO: 17548 - DNA, 25 bp, Artificial Sequence
  Synthetic
ccatttctggaauctggtacauggt

SEQ ID NO: 17549 - DNA, 20 bp, Artificial Sequence
  Synthetic
aagcacauaaccaccccucg

SEQ ID NO: 17550 - DNA, 28 bp, Artificial Sequence
  Synthetic
gaaggttagaaaaagauagtgcatgcug

SEQ ID NO: 17551 - DNA, 25 bp, Artificial Sequence
  Synthetic
atcccctgtugattccctagaauct

SEQ ID NO: 17552 - DNA, 22 bp, Artificial Sequence
  Synthetic
gggaagacgauccatatgguct

SEQ ID NO: 17553 - DNA, 24 bp, Artificial Sequence
  Synthetic
gttctgtgaugggccttttctgua

SEQ ID NO: 17554 - DNA, 21 bp, Artificial Sequence
  Synthetic
cactgcatucacatccgctug

SEQ ID NO: 17555 - DNA, 29 bp, Artificial Sequence
  Synthetic
actctcttttctguactttctcctctuct

SEQ ID NO: 17556 - DNA, 22 bp, Artificial Sequence
  Synthetic
gacaacaaugtggaaccauggg

SEQ ID NO: 17557 - DNA, 20 bp, Artificial Sequence
  Synthetic
gcaccutgaagcugcagaca

SEQ ID NO: 17558 - DNA, 31 bp, Artificial Sequence
  Synthetic
atcatgattcaacaagauatgcttttcuagt

SEQ ID NO: 17559 - DNA, 21 bp, Artificial Sequence
  Synthetic
gguttcactctucgccgagat

SEQ ID NO: 17560 - DNA, 21 bp, Artificial Sequence
  Synthetic
gcatccgugttctugaagcag

SEQ ID NO: 17561 - DNA, 25 bp, Artificial Sequence
  Synthetic
ctcctgtcacccuttatgacatgut

SEQ ID NO: 17562 - DNA, 22 bp, Artificial Sequence
  Synthetic
cctggtcacaguggttgtctut

SEQ ID NO: 17563 - DNA, 26 bp, Artificial Sequence
  Synthetic
aaaatggguaggaaaatccacaguag

SEQ ID NO: 17564 - DNA, 18 bp, Artificial Sequence
  Synthetic
cggcuacccgagaauggt

SEQ ID NO: 17565 - DNA, 17 bp, Artificial Sequence
  Synthetic
tgcttcugccccagucc

SEQ ID NO: 17566 - DNA, 21 bp, Artificial Sequence
  Synthetic
cacagggcccaauttgtucac

SEQ ID NO: 17567 - DNA, 20 bp, Artificial Sequence
  Synthetic
tcaacgagugcctcuccaac

SEQ ID NO: 17568 - DNA, 22 bp, Artificial Sequence
  Synthetic
ctgattcuggcactcauccact

SEQ ID NO: 17569 - DNA, 22 bp, Artificial Sequence
  Synthetic
gtgggagacagucacagaaaug

SEQ ID NO: 17570 - DNA, 22 bp, Artificial Sequence
  Synthetic
agacatugggcacgtcacaaua

SEQ ID NO: 17571 - DNA, 22 bp, Artificial Sequence
  Synthetic
tgatgtatguacaccccugcct

SEQ ID NO: 17572 - DNA, 25 bp, Artificial Sequence
  Synthetic
tgcaagtgtaacugttgacgtaguc

SEQ ID NO: 17573 - DNA, 22 bp, Artificial Sequence
  Synthetic
gatcctugccagaatggaggut

SEQ ID NO: 17574 - DNA, 27 bp, Artificial Sequence
  Synthetic
aacctgaccacuttgtttaaagucaga

SEQ ID NO: 17575 - DNA, 21 bp, Artificial Sequence
  Synthetic
cagtattggcuccctgtuccc

SEQ ID NO: 17576 - DNA, 24 bp, Artificial Sequence
  Synthetic
gucaagcagtaugcaacaacaaga

SEQ ID NO: 17577 - DNA, 25 bp, Artificial Sequence
  Synthetic
gtgaaguggacaaaaatgaaugcct

SEQ ID NO: 17578 - DNA, 23 bp, Artificial Sequence
  Synthetic
cacaccgutgatacatgtugcac

SEQ ID NO: 17579 - DNA, 27 bp, Artificial Sequence
  Synthetic
agatgaaggatgucaacataacgtguc

SEQ ID NO: 17580 - DNA, 22 bp, Artificial Sequence
  Synthetic
gcagatgcaggugtaggaauca

SEQ ID NO: 17581 - DNA, 23 bp, Artificial Sequence
  Synthetic
gttctggugtggaatatcugcct

SEQ ID NO: 17582 - DNA, 24 bp, Artificial Sequence
  Synthetic
cgattgacttuatccacacacugc

SEQ ID NO: 17583 - DNA, 25 bp, Artificial Sequence
  Synthetic
attgcaaatttgugcttccttguct

SEQ ID NO: 17584 - DNA, 19 bp, Artificial Sequence
  Synthetic
agtcagccccuttguagcc

SEQ ID NO: 17585 - DNA, 27 bp, Artificial Sequence
  Synthetic
gacattttctcutagttgtccttugcc

SEQ ID NO: 17586 - DNA, 22 bp, Artificial Sequence
  Synthetic
cagtcugcctctggtuaccaat

SEQ ID NO: 17587 - DNA, 26 bp, Artificial Sequence
  Synthetic
cctgtgagaggaauattgatgacugc

SEQ ID NO: 17588 - DNA, 21 bp, Artificial Sequence
  Synthetic
guaggaaccaggcaggtugag

SEQ ID NO: 17589 - DNA, 25 bp, Artificial Sequence
  Synthetic
caaatggaaguacctgtaccacugt

SEQ ID NO: 17590 - DNA, 21 bp, Artificial Sequence
  Synthetic
gagtacuggcagtcctcucct

SEQ ID NO: 17591 - DNA, 23 bp, Artificial Sequence
  Synthetic
ccatacagatguccagaaggcut

SEQ ID NO: 17592 - DNA, 17 bp, Artificial Sequence
  Synthetic
gccccucagcccgauac

SEQ ID NO: 17593 - DNA, 19 bp, Artificial Sequence
  Synthetic
ccccuccccatgtggauct

SEQ ID NO: 17594 - DNA, 18 bp, Artificial Sequence
  Synthetic
caggctuggtgcctcuga

SEQ ID NO: 17595 - DNA, 29 bp, Artificial Sequence
  Synthetic
ttctcatgcuaagcaagtagggttaatut

SEQ ID NO: 17596 - DNA, 18 bp, Artificial Sequence
  Synthetic
agggatgugggtgctugg

SEQ ID NO: 17597 - DNA, 18 bp, Artificial Sequence
  Synthetic
tctctccgcucctguggt

SEQ ID NO: 17598 - DNA, 20 bp, Artificial Sequence
  Synthetic
cttcugccgcagaactucct

SEQ ID NO: 17599 - DNA, 21 bp, Artificial Sequence
  Synthetic
ctcagccccucctccatuaac

SEQ ID NO: 17600 - DNA, 27 bp, Artificial Sequence
  Synthetic
gccataaagtgccucgtagatttguag

SEQ ID NO: 17601 - DNA, 19 bp, Artificial Sequence
  Synthetic
gctctggugtggctgagua

SEQ ID NO: 17602 - DNA, 25 bp, Artificial Sequence
  Synthetic
tttgcttcuccagttggtgatuagt

SEQ ID NO: 17603 - DNA, 23 bp, Artificial Sequence
  Synthetic
ccataccucagctctgcaaugag

SEQ ID NO: 17604 - DNA, 25 bp, Artificial Sequence
  Synthetic
ctggguaggaaaagagtagacucca

SEQ ID NO: 17605 - DNA, 21 bp, Artificial Sequence
  Synthetic
tggcaagugggatgtgaugag

SEQ ID NO: 17606 - DNA, 21 bp, Artificial Sequence
  Synthetic
cugaaaggcaggaagcuggat

SEQ ID NO: 17607 - DNA, 30 bp, Artificial Sequence
  Synthetic
cccattcttttcuctcattttctcttgaug

SEQ ID NO: 17608 - DNA, 25 bp, Artificial Sequence
  Synthetic
tctcttcatagugtgtgtacucgct

SEQ ID NO: 17609 - DNA, 20 bp, Artificial Sequence
  Synthetic
autgaagtccugcaggccaa

SEQ ID NO: 17610 - DNA, 18 bp, Artificial Sequence
  Synthetic
gcttcccugggcgagtug

SEQ ID NO: 17611 - DNA, 24 bp, Artificial Sequence
  Synthetic
ggaacugtcttaccuacggcaaaa

SEQ ID NO: 17612 - DNA, 19 bp, Artificial Sequence
  Synthetic
aaggugccaacagctcuca

SEQ ID NO: 17613 - DNA, 26 bp, Artificial Sequence
  Synthetic
agaaaacaucttggtccuacgaaagg

SEQ ID NO: 17614 - DNA, 27 bp, Artificial Sequence
  Synthetic
ccacgttatgucggtatagaacauaca

SEQ ID NO: 17615 - DNA, 22 bp, Artificial Sequence
  Synthetic
agaagccacugtctttgcucag

SEQ ID NO: 17616 - DNA, 22 bp, Artificial Sequence
  Synthetic
acagtcacatucccctcctcut

SEQ ID NO: 17617 - DNA, 26 bp, Artificial Sequence
  Synthetic
atcaacctccucaaagaacaactugt

SEQ ID NO: 17618 - DNA, 25 bp, Artificial Sequence
  Synthetic
aaatattaatgcauggagccuggga

SEQ ID NO: 17619 - DNA, 25 bp, Artificial Sequence
  Synthetic
ggagcuaaaggctcaaatugaggaa

SEQ ID NO: 17620 - DNA, 26 bp, Artificial Sequence
  Synthetic
tgtccatcgtcutgcaagtaaaaaug

SEQ ID NO: 17621 - DNA, 23 bp, Artificial Sequence
  Synthetic
tttctctccaauccacccttugg

SEQ ID NO: 17622 - DNA, 29 bp, Artificial Sequence
  Synthetic
aagcatctgcacutaatgaagaauaaaag

SEQ ID NO: 17623 - DNA, 25 bp, Artificial Sequence
  Synthetic
agctctatagcaguctggtgaagut

SEQ ID NO: 17624 - DNA, 21 bp, Artificial Sequence
  Synthetic
caagggautcgatgtgugcaa

SEQ ID NO: 17625 - DNA, 22 bp, Artificial Sequence
  Synthetic
aggctgcugatatggagtcuct

SEQ ID NO: 17626 - DNA, 24 bp, Artificial Sequence
  Synthetic
ctaatgtggauctgggtatgcuga

SEQ ID NO: 17627 - DNA, 28 bp, Artificial Sequence
  Synthetic
cagtactgtcautgtgatcatagtucct

SEQ ID NO: 17628 - DNA, 26 bp, Artificial Sequence
  Synthetic
catgttccagcacutgtttattucga

SEQ ID NO: 17629 - DNA, 24 bp, Artificial Sequence
  Synthetic
ccagaagctuacagtgtccttuct

SEQ ID NO: 17630 - DNA, 24 bp, Artificial Sequence
  Synthetic
ggcgcagtuctttttctttctcut

SEQ ID NO: 17631 - DNA, 25 bp, Artificial Sequence
  Synthetic
tgggatttggutttctattcugcca

SEQ ID NO: 17632 - DNA, 27 bp, Artificial Sequence
  Synthetic
aatctcattguatttttcagccuccca

SEQ ID NO: 17633 - DNA, 27 bp, Artificial Sequence
  Synthetic
ggcctctgtauctaataaccatgugac

SEQ ID NO: 17634 - DNA, 22 bp, Artificial Sequence
  Synthetic
ctttggugcagcatttcucgaa

SEQ ID NO: 17635 - DNA, 28 bp, Artificial Sequence
  Synthetic
gtcctgttacuaaaatgtgtacagguga

SEQ ID NO: 17636 - DNA, 25 bp, Artificial Sequence
  Synthetic
agactgctgagutatagtggtcuca

SEQ ID NO: 17637 - DNA, 28 bp, Artificial Sequence
  Synthetic
aagaugcaacagacattttugaagacaa

SEQ ID NO: 17638 - DNA, 24 bp, Artificial Sequence
  Synthetic
caacagtcacacuttccaagtucc

SEQ ID NO: 17639 - DNA, 23 bp, Artificial Sequence
  Synthetic
actuagcaagcacaaagguaccc

SEQ ID NO: 17640 - DNA, 20 bp, Artificial Sequence
  Synthetic
tgcagaguatctcgcaucgg

SEQ ID NO: 17641 - DNA, 21 bp, Artificial Sequence
  Synthetic
actggagaaggaucgccucaa

SEQ ID NO: 17642 - DNA, 24 bp, Artificial Sequence
  Synthetic
cacagatccugcaaatctcctuca

SEQ ID NO: 17643 - DNA, 17 bp, Artificial Sequence
  Synthetic
ccacugggctgugccat

SEQ ID NO: 17644 - DNA, 28 bp, Artificial Sequence
  Synthetic
agattaguaagacagactcuggaaagga

SEQ ID NO: 17645 - DNA, 29 bp, Artificial Sequence
  Synthetic
attaatgcctgtgugtttttcagaacaut

SEQ ID NO: 17646 - DNA, 25 bp, Artificial Sequence
  Synthetic
gacagagugcgatatccatuagaca

SEQ ID NO: 17647 - DNA, 17 bp, Artificial Sequence
  Synthetic
ccguagccccagccuct

SEQ ID NO: 17648 - DNA, 20 bp, Artificial Sequence
  Synthetic
ccatgctcucacctcaucca

SEQ ID NO: 17649 - DNA, 20 bp, Artificial Sequence
  Synthetic
gctcacuacacgcctuaccg

SEQ ID NO: 17650 - DNA, 26 bp, Artificial Sequence
  Synthetic
ttctacatcucattcaggucaagcag

SEQ ID NO: 17651 - DNA, 21 bp, Artificial Sequence
  Synthetic
cugcaacaggaguaagtcuca

SEQ ID NO: 17652 - DNA, 19 bp, Artificial Sequence
  Synthetic
gctcccccaucctaaugcc

SEQ ID NO: 17653 - DNA, 28 bp, Artificial Sequence
  Synthetic
agtccttctcaccuagagtatcctuact

SEQ ID NO: 17654 - DNA, 28 bp, Artificial Sequence
  Synthetic
gattatatatggaaugcgtgtcuccagt

SEQ ID NO: 17655 - DNA, 23 bp, Artificial Sequence
  Synthetic
gtaagtgutctgagcuggaggag

SEQ ID NO: 17656 - DNA, 27 bp, Artificial Sequence
  Synthetic
atcccaguatagcttagugaagcaaag

SEQ ID NO: 17657 - DNA, 26 bp, Artificial Sequence
  Synthetic
aaaagatggaacuccaggaaauccaa

SEQ ID NO: 17658 - DNA, 18 bp, Artificial Sequence
  Synthetic
cagcucgctcctcugcat

SEQ ID NO: 17659 - DNA, 20 bp, Artificial Sequence
  Synthetic
caggcggaaguaagggugag

SEQ ID NO: 17660 - DNA, 22 bp, Artificial Sequence
  Synthetic
gagagatcaaugccagtgccua

SEQ ID NO: 17661 - DNA, 21 bp, Artificial Sequence
  Synthetic
cacaggugagccuaccaacag

SEQ ID NO: 17662 - DNA, 18 bp, Artificial Sequence
  Synthetic
gggagggacugggatugg

SEQ ID NO: 17663 - DNA, 24 bp, Artificial Sequence
  Synthetic
ccggatacucacatctcccttaug

SEQ ID NO: 17664 - DNA, 20 bp, Artificial Sequence
  Synthetic
gccttgctuccccaaccuaa

SEQ ID NO: 17665 - DNA, 26 bp, Artificial Sequence
  Synthetic
caagagaggaagucttggtctuagaa

SEQ ID NO: 17666 - DNA, 23 bp, Artificial Sequence
  Synthetic
tgaattcaagauggcagcaggut

SEQ ID NO: 17667 - DNA, 22 bp, Artificial Sequence
  Synthetic
ccaccatgutccaacatuccct

SEQ ID NO: 17668 - DNA, 25 bp, Artificial Sequence
  Synthetic
aaacttctgcuttcatcctguggat

SEQ ID NO: 17669 - DNA, 25 bp, Artificial Sequence
  Synthetic
cagatttacagagaucctgccugag

SEQ ID NO: 17670 - DNA, 17 bp, Artificial Sequence
  Synthetic
caggccgcccucatcug

SEQ ID NO: 17671 - DNA, 24 bp, Artificial Sequence
  Synthetic
atgatccaaauggctggtgagaut

SEQ ID NO: 17672 - DNA, 20 bp, Artificial Sequence
  Synthetic
cccagaguagctgagaccug

SEQ ID NO: 17673 - DNA, 18 bp, Artificial Sequence
  Synthetic
tgggugtccuccccaact

SEQ ID NO: 17674 - DNA, 17 bp, Artificial Sequence
  Synthetic
ggtgugcccacgcugaa

SEQ ID NO: 17675 - DNA, 20 bp, Artificial Sequence
  Synthetic
gccagcgaaggucttcucac

SEQ ID NO: 17676 - DNA, 19 bp, Artificial Sequence
  Synthetic
ctgcgcuggctcttcaaug

SEQ ID NO: 17677 - DNA, 21 bp, Artificial Sequence
  Synthetic
gtagttgccgutgttgacgug

SEQ ID NO: 17678 - DNA, 23 bp, Artificial Sequence
  Synthetic
cctggatcuaactacccctgucc

SEQ ID NO: 17679 - DNA, 17 bp, Artificial Sequence
  Synthetic
ccccgacucacggtuga

SEQ ID NO: 17680 - DNA, 22 bp, Artificial Sequence
  Synthetic
cctcaggugttcaccacaucaa

SEQ ID NO: 17681 - DNA, 19 bp, Artificial Sequence
  Synthetic
gcaggguctcacctugaca

SEQ ID NO: 17682 - DNA, 20 bp, Artificial Sequence
  Synthetic
cccauggacctgaugccaag

SEQ ID NO: 17683 - DNA, 19 bp, Artificial Sequence
  Synthetic
aggucccggugcacaaaat

SEQ ID NO: 17684 - DNA, 17 bp, Artificial Sequence
  Synthetic
cccatucgctggaugcc

SEQ ID NO: 17685 - DNA, 17 bp, Artificial Sequence
  Synthetic
gggctgaccuccgtgut

SEQ ID NO: 17686 - DNA, 27 bp, Artificial Sequence
  Synthetic
caaacggtcuggttttattttagugct

SEQ ID NO: 17687 - DNA, 28 bp, Artificial Sequence
  Synthetic
ccagaatcctuccttacctgtagauagt

SEQ ID NO: 17688 - DNA, 25 bp, Artificial Sequence
  Synthetic
tgtaacttaugagcagctgugacaa

SEQ ID NO: 17689 - DNA, 22 bp, Artificial Sequence
  Synthetic
cttagctgugtggatcagugct

SEQ ID NO: 17690 - DNA, 20 bp, Artificial Sequence
  Synthetic
gaggcucccagcatcatcut

SEQ ID NO: 17691 - DNA, 29 bp, Artificial Sequence
  Synthetic
cactattatggtcuaccaggtactcuact

SEQ ID NO: 17692 - DNA, 19 bp, Artificial Sequence
  Synthetic
gucccagcactugcaggat

SEQ ID NO: 17693 - DNA, 26 bp, Artificial Sequence
  Synthetic
gaaaggaaaagaaaagucuccatcuc

SEQ ID NO: 17694 - DNA, 26 bp, Artificial Sequence
  Synthetic
caactcaguggagcattcagatuaca

SEQ ID NO: 17695 - DNA, 22 bp, Artificial Sequence
  Synthetic
tgcttccuccaccctttccuaa

SEQ ID NO: 17696 - DNA, 25 bp, Artificial Sequence
  Synthetic
ctattcccatcucagcaaccctuac

SEQ ID NO: 17697 - DNA, 26 bp, Artificial Sequence
  Synthetic
tgtccaguaaagcaagacctcuaaga

SEQ ID NO: 17698 - DNA, 21 bp, Artificial Sequence
  Synthetic
ctgtgatucaggtgccucact

SEQ ID NO: 17699 - DNA, 22 bp, Artificial Sequence
  Synthetic
gacatattggcugggtcccuac

SEQ ID NO: 17700 - DNA, 25 bp, Artificial Sequence
  Synthetic
gtgttcactcugatacctccaacug

SEQ ID NO: 17701 - DNA, 27 bp, Artificial Sequence
  Synthetic
aaggagactcutattgtgtttgcugat

SEQ ID NO: 17702 - DNA, 29 bp, Artificial Sequence
  Synthetic
ggcttcttttcaucattgtgttctatucc

SEQ ID NO: 17703 - DNA, 22 bp, Artificial Sequence
  Synthetic
gtcttcucgcacaaaagcauca

SEQ ID NO: 17704 - DNA, 21 bp, Artificial Sequence
  Synthetic
ctgacatcugctgaacgcaut

SEQ ID NO: 17705 - DNA, 23 bp, Artificial Sequence
  Synthetic
ctcttcccccuctgacaagtuac

SEQ ID NO: 17706 - DNA, 23 bp, Artificial Sequence
  Synthetic
cagcagagagccacautacttug

SEQ ID NO: 17707 - DNA, 22 bp, Artificial Sequence
  Synthetic
aagagcgacutggccaaauact

SEQ ID NO: 17708 - DNA, 17 bp, Artificial Sequence
  Synthetic
cuccagcacccacgugt

SEQ ID NO: 17709 - DNA, 21 bp, Artificial Sequence
  Synthetic
acacctgtccucttcccctut

SEQ ID NO: 17710 - DNA, 17 bp, Artificial Sequence
  Synthetic
tcugctggcugccaagg

SEQ ID NO: 17711 - DNA, 21 bp, Artificial Sequence
  Synthetic
actcatgaccutcacgctgut

SEQ ID NO: 17712 - DNA, 17 bp, Artificial Sequence
  Synthetic
guggctgcuacgcaggt

SEQ ID NO: 17713 - DNA, 21 bp, Artificial Sequence
  Synthetic
gccaggccuactctgtctaug

SEQ ID NO: 17714 - DNA, 23 bp, Artificial Sequence
  Synthetic
guggcatgtatcuggaacaggaa

SEQ ID NO: 17715 - DNA, 20 bp, Artificial Sequence
  Synthetic
agctcttgcuggtcaaccug

SEQ ID NO: 17716 - DNA, 27 bp, Artificial Sequence
  Synthetic
ggtagatttctuactgttgtcctucct

SEQ ID NO: 17717 - DNA, 29 bp, Artificial Sequence
  Synthetic
ccaaaaatagacuaagaggagtgttccua

SEQ ID NO: 17718 - DNA, 28 bp, Artificial Sequence
  Synthetic
aatcaacaacugatgacgatguacagaa

SEQ ID NO: 17719 - DNA, 30 bp, Artificial Sequence
  Synthetic
ccaaactggcuacaacaaagattttaauca

SEQ ID NO: 17720 - DNA, 23 bp, Artificial Sequence
  Synthetic
ggcaacacgacgaaauagccaua

SEQ ID NO: 17721 - DNA, 23 bp, Artificial Sequence
  Synthetic
ccgtttggcuttaccttcuccat

SEQ ID NO: 17722 - DNA, 31 bp, Artificial Sequence
  Synthetic
gatgcagttgtuagttttgaaatacagauga

SEQ ID NO: 17723 - DNA, 25 bp, Artificial Sequence
  Synthetic
cttccucactaaatctucccaacca

SEQ ID NO: 17724 - DNA, 21 bp, Artificial Sequence
  Synthetic
tctutttcccccuagggagca

SEQ ID NO: 17725 - DNA, 23 bp, Artificial Sequence
  Synthetic
tggataccaugttgctgtuggat

SEQ ID NO: 17726 - DNA, 27 bp, Artificial Sequence
  Synthetic
ggcatgacaaguagtgcctgtaauaat

SEQ ID NO: 17727 - DNA, 23 bp, Artificial Sequence
  Synthetic
gaattctgugagctcatcugcct

SEQ ID NO: 17728 - DNA, 23 bp, Artificial Sequence
  Synthetic
caaagatgucctgtctugcacag

SEQ ID NO: 17729 - DNA, 21 bp, Artificial Sequence
  Synthetic
tcaggcucgacagacaaagug

SEQ ID NO: 17730 - DNA, 25 bp, Artificial Sequence
  Synthetic
tctacgttgttucaggtgaaagugt

SEQ ID NO: 17731 - DNA, 22 bp, Artificial Sequence
  Synthetic
caccatccaucctgtctgtcuc

SEQ ID NO: 17732 - DNA, 27 bp, Artificial Sequence
  Synthetic
tgctatgtcaguctgaaactttctugt

SEQ ID NO: 17733 - DNA, 25 bp, Artificial Sequence
  Synthetic
gctcagtttcauctttgccacuaag

SEQ ID NO: 17734 - DNA, 26 bp, Artificial Sequence
  Synthetic
gccttactcttcuccttctcctacug

SEQ ID NO: 17735 - DNA, 23 bp, Artificial Sequence
  Synthetic
ggaggtcugtttagagttugcct

SEQ ID NO: 17736 - DNA, 24 bp, Artificial Sequence
  Synthetic
actttatugccccaagcaaguagg

SEQ ID NO: 17737 - DNA, 20 bp, Artificial Sequence
  Synthetic
gtacagtucccgctgacgut

SEQ ID NO: 17738 - DNA, 23 bp, Artificial Sequence
  Synthetic
agatgcagcagaaugtctuccag

SEQ ID NO: 17739 - DNA, 27 bp, Artificial Sequence
  Synthetic
tccacacacuattttaatguccaagca

SEQ ID NO: 17740 - DNA, 23 bp, Artificial Sequence
  Synthetic
tggcagguggaaatacgaatgut

SEQ ID NO: 17741 - DNA, 30 bp, Artificial Sequence
  Synthetic
acctgattttccucagaattaactgtgaug

SEQ ID NO: 17742 - DNA, 26 bp, Artificial Sequence
  Synthetic
tgagtttccacutcaagtaguaccca

SEQ ID NO: 17743 - DNA, 21 bp, Artificial Sequence
  Synthetic
gaccaggcuggttcagguaag

SEQ ID NO: 17744 - DNA, 17 bp, Artificial Sequence
  Synthetic
gggagtgugccgcaaug

SEQ ID NO: 17745 - DNA, 17 bp, Artificial Sequence
  Synthetic
acugccacggccttuga

SEQ ID NO: 17746 - DNA, 20 bp, Artificial Sequence
  Synthetic
ctctttgcagugctccccut

SEQ ID NO: 17747 - DNA, 26 bp, Artificial Sequence
  Synthetic
gacgactctutgctgtattttuccag

SEQ ID NO: 17748 - DNA, 21 bp, Artificial Sequence
  Synthetic
gtctggtgagucgagaggtug

SEQ ID NO: 17749 - DNA, 19 bp, Artificial Sequence
  Synthetic
ggtcggcutgttggaucgt

SEQ ID NO: 17750 - DNA, 21 bp, Artificial Sequence
  Synthetic
gtttctguccccaucaaagcc

SEQ ID NO: 17751 - DNA, 20 bp, Artificial Sequence
  Synthetic
gagtcaccccagucggatuc

SEQ ID NO: 17752 - DNA, 22 bp, Artificial Sequence
  Synthetic
gtagggttcuggcgtttguagt

SEQ ID NO: 17753 - DNA, 21 bp, Artificial Sequence
  Synthetic
cctgtcuaaagaccccaccug

SEQ ID NO: 17754 - DNA, 27 bp, Artificial Sequence
  Synthetic
agtatgagcatutcacatcacaguagg

SEQ ID NO: 17755 - DNA, 25 bp, Artificial Sequence
  Synthetic
agcaaacaagagauggcaatgttut

SEQ ID NO: 17756 - DNA, 25 bp, Artificial Sequence
  Synthetic
agccactttatucttacccctccua

SEQ ID NO: 17757 - DNA, 27 bp, Artificial Sequence
  Synthetic
tctccataucccattccctguagaaaa

SEQ ID NO: 17758 - DNA, 25 bp, Artificial Sequence
  Synthetic
gtgtgtctccauagctggaagatuc

SEQ ID NO: 17759 - DNA, 28 bp, Artificial Sequence
  Synthetic
gcccattgatgtutctgatctatcacut

SEQ ID NO: 17760 - DNA, 21 bp, Artificial Sequence
  Synthetic
ggcutctggactuggaaccat

SEQ ID NO: 17761 - DNA, 26 bp, Artificial Sequence
  Synthetic
ataagcctgaagauaatgtggguagg

SEQ ID NO: 17762 - DNA, 30 bp, Artificial Sequence
  Synthetic
ttttaaatggagatucattgacgggactua

SEQ ID NO: 17763 - DNA, 23 bp, Artificial Sequence
  Synthetic
cgcagacautcccgtttguagat

SEQ ID NO: 17764 - DNA, 22 bp, Artificial Sequence
  Synthetic
ctcatactctutccgtcgcuga

SEQ ID NO: 17765 - DNA, 26 bp, Artificial Sequence
  Synthetic
aaaaacatgagcuctctccttcctut

SEQ ID NO: 17766 - DNA, 32 bp, Artificial Sequence
  Synthetic
ataggagaactauggatttgataaaatugagg

SEQ ID NO: 17767 - DNA, 26 bp, Artificial Sequence
  Synthetic
ccacgaaaaccguaagttgtcaaaut

SEQ ID NO: 17768 - DNA, 25 bp, Artificial Sequence
  Synthetic
gatctgtgacgutccttccaaauct

SEQ ID NO: 17769 - DNA, 26 bp, Artificial Sequence
  Synthetic
gctcatgaggagaucttggatcttut

SEQ ID NO: 17770 - DNA, 21 bp, Artificial Sequence
  Synthetic
ccagacccguggaactacaut

SEQ ID NO: 17771 - DNA, 32 bp, Artificial Sequence
  Synthetic
gtttatgaagatgaaacutctttctggtgtug

SEQ ID NO: 17772 - DNA, 30 bp, Artificial Sequence
  Synthetic
aggaatctgtttuaattgctcttgaaaauc

SEQ ID NO: 17773 - DNA, 30 bp, Artificial Sequence
  Synthetic
tccactttatuaaaaagcacatctgttuct

SEQ ID NO: 17774 - DNA, 31 bp, Artificial Sequence
  Synthetic
gaatgcattucaggacatttcaatgaguaat

SEQ ID NO: 17775 - DNA, 32 bp, Artificial Sequence
  Synthetic
actctcatctatauggtctttattgccattut

SEQ ID NO: 17776 - DNA, 31 bp, Artificial Sequence
  Synthetic
ccaatcccugaacaaatgaatcttaaugaag

SEQ ID NO: 17777 - DNA, 26 bp, Artificial Sequence
  Synthetic
gaaacugaggacgatgatctugaaca

SEQ ID NO: 17778 - DNA, 32 bp, Artificial Sequence
  Synthetic
gcacaagtuaaaaacctcattatctaaucaac

SEQ ID NO: 17779 - DNA, 32 bp, Artificial Sequence
  Synthetic
cttctcttctaagucaactttgttttgttuct

SEQ ID NO: 17780 - DNA, 24 bp, Artificial Sequence
  Synthetic
cttgtcaaagggcccuaggatuaa

SEQ ID NO: 17781 - DNA, 27 bp, Artificial Sequence
  Synthetic
ggtaagttgauccactgtatcttuggt

SEQ ID NO: 17782 - DNA, 30 bp, Artificial Sequence
  Synthetic
tcccattctauggagtagcagattuaaaag

SEQ ID NO: 17783 - DNA, 32 bp, Artificial Sequence
  Synthetic
tgggacccctguatacaataacatatatauaa

SEQ ID NO: 17784 - DNA, 27 bp, Artificial Sequence
  Synthetic
ccttctaagagaucctgaaacctcugt

SEQ ID NO: 17785 - DNA, 25 bp, Artificial Sequence
  Synthetic
ccaaaaggtauccctctttgugcaa

SEQ ID NO: 17786 - DNA, 21 bp, Artificial Sequence
  Synthetic
gtcagccagcugctgtttcua

SEQ ID NO: 17787 - DNA, 24 bp, Artificial Sequence
  Synthetic
ggcttcatatcucggtgtaggaug

SEQ ID NO: 17788 - DNA, 21 bp, Artificial Sequence
  Synthetic
gcaccccucccttctatgcua

SEQ ID NO: 17789 - DNA, 25 bp, Artificial Sequence
  Synthetic
cagagauagagggagacagattuct

SEQ ID NO: 17790 - DNA, 21 bp, Artificial Sequence
  Synthetic
ctgattcagugttgcccccua

SEQ ID NO: 17791 - DNA, 19 bp, Artificial Sequence
  Synthetic
cggccaggaggcutgatuc

SEQ ID NO: 17792 - DNA, 25 bp, Artificial Sequence
  Synthetic
ctattcaacugaaggctcctcucac

SEQ ID NO: 17793 - DNA, 23 bp, Artificial Sequence
  Synthetic
tcaatgcuccatctgugaaaaca

SEQ ID NO: 17794 - DNA, 22 bp, Artificial Sequence
  Synthetic
tcaccacauccaggctttuagt

SEQ ID NO: 17795 - DNA, 21 bp, Artificial Sequence
  Synthetic
gctcagagucatctggtuggg

SEQ ID NO: 17796 - DNA, 20 bp, Artificial Sequence
  Synthetic
gcctcaggccuttggagtua

SEQ ID NO: 17797 - DNA, 20 bp, Artificial Sequence
  Synthetic
caggagcagugcatauggct

SEQ ID NO: 17798 - DNA, 21 bp, Artificial Sequence
  Synthetic
ctgtcucagccagaggttgut

SEQ ID NO: 17799 - DNA, 27 bp, Artificial Sequence
  Synthetic
gtggagacacccuactttatgactuac

SEQ ID NO: 17800 - DNA, 22 bp, Artificial Sequence
  Synthetic
tggttuaacggacaccccatuc

SEQ ID NO: 17801 - DNA, 23 bp, Artificial Sequence
  Synthetic
catccaucccaagatccatcugt

SEQ ID NO: 17802 - DNA, 23 bp, Artificial Sequence
  Synthetic
tcccagcauggaagtatccucat

SEQ ID NO: 17803 - DNA, 21 bp, Artificial Sequence
  Synthetic
cttctttcuccctccccgtug

SEQ ID NO: 17804 - DNA, 23 bp, Artificial Sequence
  Synthetic
accagtttgugaacacagtguct

SEQ ID NO: 17805 - DNA, 25 bp, Artificial Sequence
  Synthetic
aagctcttggauaaaggacaagugg

SEQ ID NO: 17806 - DNA, 21 bp, Artificial Sequence
  Synthetic
cagctgctuggagatccucag

SEQ ID NO: 17807 - DNA, 20 bp, Artificial Sequence
  Synthetic
gcagccuccttcacattugg

SEQ ID NO: 17808 - DNA, 18 bp, Artificial Sequence
  Synthetic
gccagcccauagcatgug

SEQ ID NO: 17809 - DNA, 22 bp, Artificial Sequence
  Synthetic
ttctcagttgagutggcagcut

SEQ ID NO: 17810 - DNA, 31 bp, Artificial Sequence
  Synthetic
tttttgtttucagaguagattcttcatauct

SEQ ID NO: 17811 - DNA, 23 bp, Artificial Sequence
  Synthetic
gtgaattgucccagcatgaccua

SEQ ID NO: 17812 - DNA, 20 bp, Artificial Sequence
  Synthetic
gtgguggtaggtuccagacc

SEQ ID NO: 17813 - DNA, 22 bp, Artificial Sequence
  Synthetic
ttctttcagcugtaggcugcaa

SEQ ID NO: 17814 - DNA, 28 bp, Artificial Sequence
  Synthetic
aatcgcctggaagutactttctaatcuc

SEQ ID NO: 17815 - DNA, 21 bp, Artificial Sequence
  Synthetic
gggccaaucaactgatggcut

SEQ ID NO: 17816 - DNA, 21 bp, Artificial Sequence
  Synthetic
tgttctgctgugaaggtggut

SEQ ID NO: 17817 - DNA, 30 bp, Artificial Sequence
  Synthetic
acattttatgatgutttgttcttctgugct

SEQ ID NO: 17818 - DNA, 18 bp, Artificial Sequence
  Synthetic
ctagccgaugcccuccaa

SEQ ID NO: 17819 - DNA, 24 bp, Artificial Sequence
  Synthetic
aaatucgggaaaggugaagaggag

SEQ ID NO: 17820 - DNA, 20 bp, Artificial Sequence
  Synthetic
atuggagagucccagatguc

SEQ ID NO: 17821 - DNA, 21 bp, Artificial Sequence
  Synthetic
caagatccugtgcagguacca

SEQ ID NO: 17822 - DNA, 18 bp, Artificial Sequence
  Synthetic
caucatccugggcacagc

SEQ ID NO: 17823 - DNA, 19 bp, Artificial Sequence
  Synthetic
tctccacgcuccggauagt

SEQ ID NO: 17824 - DNA, 17 bp, Artificial Sequence
  Synthetic
ccucccagacggaccuc

SEQ ID NO: 17825 - DNA, 18 bp, Artificial Sequence
  Synthetic
acaagucgggcaccaugt

SEQ ID NO: 17826 - DNA, 20 bp, Artificial Sequence
  Synthetic
gcggaugacgatggtgugaa

SEQ ID NO: 17827 - DNA, 22 bp, Artificial Sequence
  Synthetic
acaucgagaagaccaugagcac

SEQ ID NO: 17828 - DNA, 20 bp, Artificial Sequence
  Synthetic
ttctcagggcuctcgaucct

SEQ ID NO: 17829 - DNA, 21 bp, Artificial Sequence
  Synthetic
cggtuacgatctgauggagca

SEQ ID NO: 17830 - DNA, 18 bp, Artificial Sequence
  Synthetic
cgaggcccccutctugaa

SEQ ID NO: 17831 - DNA, 19 bp, Artificial Sequence
  Synthetic
ctgagcugccactttgcug

SEQ ID NO: 17832 - DNA, 21 bp, Artificial Sequence
  Synthetic
cccatcagggaugtgcaugag

SEQ ID NO: 17833 - DNA, 23 bp, Artificial Sequence
  Synthetic
acttgccttucccagatgactug

SEQ ID NO: 17834 - DNA, 21 bp, Artificial Sequence
  Synthetic
cctggccacaagccuaagaug

SEQ ID NO: 17835 - DNA, 28 bp, Artificial Sequence
  Synthetic
ctcaaggtctcguggatttactattuct

SEQ ID NO: 17836 - DNA, 28 bp, Artificial Sequence
  Synthetic
agagtttauggctatacacugagagagg

SEQ ID NO: 17837 - DNA, 25 bp, Artificial Sequence
  Synthetic
ttcccagtugtatgtttatgtuggt

SEQ ID NO: 17838 - DNA, 22 bp, Artificial Sequence
  Synthetic
gccaggccutccaaagaaaauc

SEQ ID NO: 17839 - DNA, 21 bp, Artificial Sequence
  Synthetic
gttattccugcaggtcugcca

SEQ ID NO: 17840 - DNA, 19 bp, Artificial Sequence
  Synthetic
cccugctcagucccagact

SEQ ID NO: 17841 - DNA, 24 bp, Artificial Sequence
  Synthetic
agaacaagcugaaaugcacaaagg

SEQ ID NO: 17842 - DNA, 24 bp, Artificial Sequence
  Synthetic
ggtgaugaagacagagacccaauc

SEQ ID NO: 17843 - DNA, 25 bp, Artificial Sequence
  Synthetic
gctgacatttgutcttccacatucc

SEQ ID NO: 17844 - DNA, 22 bp, Artificial Sequence
  Synthetic
tcgagctcaauctcagcttucc

SEQ ID NO: 17845 - DNA, 21 bp, Artificial Sequence
  Synthetic
accaccaguctcatgctccua

SEQ ID NO: 17846 - DNA, 19 bp, Artificial Sequence
  Synthetic
ggtgccugctgtggaaaug

SEQ ID NO: 17847 - DNA, 23 bp, Artificial Sequence
  Synthetic
ctcaccggaaagautguccagaa

SEQ ID NO: 17848 - DNA, 19 bp, Artificial Sequence
  Synthetic
ccgugcgcaagtactucca

SEQ ID NO: 17849 - DNA, 18 bp, Artificial Sequence
  Synthetic
cuaaccccagcccagguc

SEQ ID NO: 17850 - DNA, 24 bp, Artificial Sequence
  Synthetic
agctcacutactagccuaaggaca

SEQ ID NO: 17851 - DNA, 20 bp, Artificial Sequence
  Synthetic
cctgttcutccaggauggct

SEQ ID NO: 17852 - DNA, 23 bp, Artificial Sequence
  Synthetic
ctcttagucacctctcccucaga

SEQ ID NO: 17853 - DNA, 22 bp, Artificial Sequence
  Synthetic
ggaaaccuagggaggacaccua

SEQ ID NO: 17854 - DNA, 18 bp, Artificial Sequence
  Synthetic
ccaaucccgccatgcuca

SEQ ID NO: 17855 - DNA, 20 bp, Artificial Sequence
  Synthetic
tccccaacaugagacugggt

SEQ ID NO: 17856 - DNA, 20 bp, Artificial Sequence
  Synthetic
ccaggaucaccuccgagaag

SEQ ID NO: 17857 - DNA, 19 bp, Artificial Sequence
  Synthetic
ggtcauccacgtcctuggt

SEQ ID NO: 17858 - DNA, 21 bp, Artificial Sequence
  Synthetic
caacttugggatcagcuccgt

SEQ ID NO: 17859 - DNA, 26 bp, Artificial Sequence
  Synthetic
caggtcauacttgtaatcugcaacca

SEQ ID NO: 17860 - DNA, 25 bp, Artificial Sequence
  Synthetic
gctgctuccatgtgtcauaaagact

SEQ ID NO: 17861 - DNA, 31 bp, Artificial Sequence
  Synthetic
gaaaccgacaguactgacatttatttcuact

SEQ ID NO: 17862 - DNA, 24 bp, Artificial Sequence
  Synthetic
atacataaaguccttcccgcugac

SEQ ID NO: 17863 - DNA, 21 bp, Artificial Sequence
  Synthetic
gtgtgcattugtagcgcagua

SEQ ID NO: 17864 - DNA, 29 bp, Artificial Sequence
  Synthetic
tcaaatatggaguccacgagatcattuac

SEQ ID NO: 17865 - DNA, 24 bp, Artificial Sequence
  Synthetic
caaactcaaacutgggctccauaa

SEQ ID NO: 17866 - DNA, 23 bp, Artificial Sequence
  Synthetic
ggagacagacaugagtctucacc

SEQ ID NO: 17867 - DNA, 26 bp, Artificial Sequence
  Synthetic
tcttaggtgucagattttcccucaga

SEQ ID NO: 17868 - DNA, 20 bp, Artificial Sequence
  Synthetic
tggugggcuaccaaaagcaa

SEQ ID NO: 17869 - DNA, 24 bp, Artificial Sequence
  Synthetic
tgagcaacgugttctcttttcuct

SEQ ID NO: 17870 - DNA, 26 bp, Artificial Sequence
  Synthetic
gtaagacaauggtttttggttuggga

SEQ ID NO: 17871 - DNA, 27 bp, Artificial Sequence
  Synthetic
ttcagccagautaagagagagaucact

SEQ ID NO: 17872 - DNA, 24 bp, Artificial Sequence
  Synthetic
accatagactgutggacatgtcug

SEQ ID NO: 17873 - DNA, 27 bp, Artificial Sequence
  Synthetic
ccagttuagggacagaautatagtgut

SEQ ID NO: 17874 - DNA, 22 bp, Artificial Sequence
  Synthetic
cacataggccugcatgggauaa

SEQ ID NO: 17875 - DNA, 23 bp, Artificial Sequence
  Synthetic
ggaagttgttugagcaagaggug

SEQ ID NO: 17876 - DNA, 27 bp, Artificial Sequence
  Synthetic
tgtaaagccaucaacacagagtatcuc

SEQ ID NO: 17877 - DNA, 25 bp, Artificial Sequence
  Synthetic
accattuccaccctcactaauaacc

SEQ ID NO: 17878 - DNA, 22 bp, Artificial Sequence
  Synthetic
ctgttgugggagtagctgtugt

SEQ ID NO: 17879 - DNA, 25 bp, Artificial Sequence
  Synthetic
aaatagcauggacagtgcaatcuct

SEQ ID NO: 17880 - DNA, 27 bp, Artificial Sequence
  Synthetic
gaaacaagcaagcuaaatgtgaacuga

SEQ ID NO: 17881 - DNA, 21 bp, Artificial Sequence
  Synthetic
gtctcccutcccccaugaaag

SEQ ID NO: 17882 - DNA, 29 bp, Artificial Sequence
  Synthetic
catcagaagcagcaaaautaguagaaaca

SEQ ID NO: 17883 - DNA, 21 bp, Artificial Sequence
  Synthetic
aguggactgugaacggacaac

SEQ ID NO: 17884 - DNA, 23 bp, Artificial Sequence
  Synthetic
cttacgaaggaaggucttuggca

SEQ ID NO: 17885 - DNA, 25 bp, Artificial Sequence
  Synthetic
tttcagttcutctcggtguccaaat

SEQ ID NO: 17886 - DNA, 22 bp, Artificial Sequence
  Synthetic
ccctgctcuacctccactcuaa

SEQ ID NO: 17887 - DNA, 28 bp, Artificial Sequence
  Synthetic
ggacacttuagctgtgaaugaaaagaaa

SEQ ID NO: 17888 - DNA, 22 bp, Artificial Sequence
  Synthetic
ccattgccutgccagtaaucac

SEQ ID NO: 17889 - DNA, 24 bp, Artificial Sequence
  Synthetic
agagcucagaaacttaggtuggga

SEQ ID NO: 17890 - DNA, 28 bp, Artificial Sequence
  Synthetic
aggcaggcgautatctatttgttttcua

SEQ ID NO: 17891 - DNA, 28 bp, Artificial Sequence
  Synthetic
gagtcaaggagacauttgtaugaggaaa

SEQ ID NO: 17892 - DNA, 23 bp, Artificial Sequence
  Synthetic
gcatgaccacuactgtcacacut

SEQ ID NO: 17893 - DNA, 28 bp, Artificial Sequence
  Synthetic
cugaaagaagaggaagaucagaaatcuc

SEQ ID NO: 17894 - DNA, 24 bp, Artificial Sequence
  Synthetic
caccttuattcctgguggaagact

SEQ ID NO: 17895 - DNA, 28 bp, Artificial Sequence
  Synthetic
cagatcacucaaaatttgcatgugaaga

SEQ ID NO: 17896 - DNA, 27 bp, Artificial Sequence
  Synthetic
ggcatagacaugagtttatcttggugt

SEQ ID NO: 17897 - DNA, 28 bp, Artificial Sequence
  Synthetic
gcatgctttcaucaaatggattucagaa

SEQ ID NO: 17898 - DNA, 25 bp, Artificial Sequence
  Synthetic
ggguagatttauaacgggaagcact

SEQ ID NO: 17899 - DNA, 27 bp, Artificial Sequence
  Synthetic
gagauggaaagaagagguaagtatuct

SEQ ID NO: 17900 - DNA, 24 bp, Artificial Sequence
  Synthetic
tggtagcgacgaucagagtcauaa

SEQ ID NO: 17901 - DNA, 24 bp, Artificial Sequence
  Synthetic
actcggtatguatcttcccgaugt

SEQ ID NO: 17902 - DNA, 28 bp, Artificial Sequence
  Synthetic
gccttcagattgugaggatttcttctua

SEQ ID NO: 17903 - DNA, 28 bp, Artificial Sequence
  Synthetic
gaatgagcaagcagauatttccucaaaa

SEQ ID NO: 17904 - DNA, 20 bp, Artificial Sequence
  Synthetic
caaggccacuggctctgtua

SEQ ID NO: 17905 - DNA, 21 bp, Artificial Sequence
  Synthetic
ccacagcaguagcatcuccac

SEQ ID NO: 17906 - DNA, 25 bp, Artificial Sequence
  Synthetic
tgtcgtcccugttcttccaaatuaa

SEQ ID NO: 17907 - DNA, 26 bp, Artificial Sequence
  Synthetic
tgtaggcaaagautgaaaatgugcag

SEQ ID NO: 17908 - DNA, 27 bp, Artificial Sequence
  Synthetic
cattttgtttcaguttccacacaguga

SEQ ID NO: 17909 - DNA, 21 bp, Artificial Sequence
  Synthetic
cagcugccatcttcuaccaca

SEQ ID NO: 17910 - DNA, 19 bp, Artificial Sequence
  Synthetic
gcccatccucgacgatgut

SEQ ID NO: 17911 - DNA, 22 bp, Artificial Sequence
  Synthetic
ctauccccaaggcucacagaaa

SEQ ID NO: 17912 - DNA, 23 bp, Artificial Sequence
  Synthetic
gaactcccccacuatctagguct

SEQ ID NO: 17913 - DNA, 26 bp, Artificial Sequence
  Synthetic
gatgctctcacutcctcatttctgua

SEQ ID NO: 17914 - DNA, 20 bp, Artificial Sequence
  Synthetic
cctgctccaugactggugag

SEQ ID NO: 17915 - DNA, 18 bp, Artificial Sequence
  Synthetic
ctgugcccaggaccatug

SEQ ID NO: 17916 - DNA, 22 bp, Artificial Sequence
  Synthetic
ttcccctaacccugccttctua

SEQ ID NO: 17917 - DNA, 25 bp, Artificial Sequence
  Synthetic
tccaagatccuacttccatctucca

SEQ ID NO: 17918 - DNA, 17 bp, Artificial Sequence
  Synthetic
gcacguagcccgtcuca

SEQ ID NO: 17919 - DNA, 17 bp, Artificial Sequence
  Synthetic
ctgcccggccucatgua

SEQ ID NO: 17920 - DNA, 22 bp, Artificial Sequence
  Synthetic
gtatgctuggcgaatgtugagg

SEQ ID NO: 17921 - DNA, 25 bp, Artificial Sequence
  Synthetic
guccatttgucgaaagaacaggaga

SEQ ID NO: 17922 - DNA, 26 bp, Artificial Sequence
  Synthetic
tctgcacatgutctgagaaggauaac

SEQ ID NO: 17923 - DNA, 28 bp, Artificial Sequence
  Synthetic
ctaactgtgccautgcattctgaatuat

SEQ ID NO: 17924 - DNA, 23 bp, Artificial Sequence
  Synthetic
cgaaagagtaguctgggtgtugg

SEQ ID NO: 17925 - DNA, 27 bp, Artificial Sequence
  Synthetic
tgttttgatgcaccauaagaccttuct

SEQ ID NO: 17926 - DNA, 27 bp, Artificial Sequence
  Synthetic
acactggacuacactatgttgctauca

SEQ ID NO: 17927 - DNA, 30 bp, Artificial Sequence
  Synthetic
gcagatgaagaaautcaaaggatugaagag

SEQ ID NO: 17928 - DNA, 28 bp, Artificial Sequence
  Synthetic
gcaggtttcutccagattacucagaaat

SEQ ID NO: 17929 - DNA, 27 bp, Artificial Sequence
  Synthetic
tcctccccaagaautgaaaaagtaugg

SEQ ID NO: 17930 - DNA, 26 bp, Artificial Sequence
  Synthetic
ttctgtgtggcuattatctgcauacc

SEQ ID NO: 17931 - DNA, 19 bp, Artificial Sequence
  Synthetic
gttcgcguggcctctguat

SEQ ID NO: 17932 - DNA, 31 bp, Artificial Sequence
  Synthetic
tgcctagaattttacuaactggaactttgut

SEQ ID NO: 17933 - DNA, 27 bp, Artificial Sequence
  Synthetic
aaatggttgtauggctgttggtttuac

SEQ ID NO: 17934 - DNA, 27 bp, Artificial Sequence
  Synthetic
gcaatttttccuttctctctttcucca

SEQ ID NO: 17935 - DNA, 27 bp, Artificial Sequence
  Synthetic
agatgcagtagaacutcagcagtttut

SEQ ID NO: 17936 - DNA, 24 bp, Artificial Sequence
  Synthetic
ctgtagcatcutccctcatcaucc

SEQ ID NO: 17937 - DNA, 26 bp, Artificial Sequence
  Synthetic
gatgctcttgutctacacaaagucct

SEQ ID NO: 17938 - DNA, 29 bp, Artificial Sequence
  Synthetic
gctgcattggagucatgtattttgattut

SEQ ID NO: 17939 - DNA, 26 bp, Artificial Sequence
  Synthetic
ttacaaattactuggaatcgtcccut

SEQ ID NO: 17940 - DNA, 25 bp, Artificial Sequence
  Synthetic
attccctctucaccagcatattugt

SEQ ID NO: 17941 - DNA, 21 bp, Artificial Sequence
  Synthetic
gutcttgaagcucgagagcca

SEQ ID NO: 17942 - DNA, 27 bp, Artificial Sequence
  Synthetic
caataaatcacaccugcataactugct

SEQ ID NO: 17943 - DNA, 30 bp, Artificial Sequence
  Synthetic
ctttcacagaacaaaacugaagaaucaaga

SEQ ID NO: 17944 - DNA, 29 bp, Artificial Sequence
  Synthetic
caactcctaactgugtcataaagctgaua

SEQ ID NO: 17945 - DNA, 26 bp, Artificial Sequence
  Synthetic
gttctttctucatctcattcguccct

SEQ ID NO: 17946 - DNA, 23 bp, Artificial Sequence
  Synthetic
cgcccagccuagacattttctua

SEQ ID NO: 17947 - DNA, 30 bp, Artificial Sequence
  Synthetic
ccaagtaattttaucttgacaggaugcaaa

SEQ ID NO: 17948 - DNA, 24 bp, Artificial Sequence
  Synthetic
ggaaagatcauaggccaatcugct

SEQ ID NO: 17949 - DNA, 26 bp, Artificial Sequence
  Synthetic
gtttaacttatugagcatgcctggut

SEQ ID NO: 17950 - DNA, 28 bp, Artificial Sequence
  Synthetic
ctcatttcttgtucgaaggtacaaaucc

SEQ ID NO: 17951 - DNA, 27 bp, Artificial Sequence
  Synthetic
taacaattttuggtctttgcugaaaca

SEQ ID NO: 17952 - DNA, 22 bp, Artificial Sequence
  Synthetic
ggtgcccuaatgaagagcucac

SEQ ID NO: 17953 - DNA, 28 bp, Artificial Sequence
  Synthetic
ttcttatgtctacacuggctttctgtuc

SEQ ID NO: 17954 - DNA, 25 bp, Artificial Sequence
  Synthetic
acagttggatcuaagtgggaagcua

SEQ ID NO: 17955 - DNA, 23 bp, Artificial Sequence
  Synthetic
tcctctgaaaacucgttgcauca

SEQ ID NO: 17956 - DNA, 26 bp, Artificial Sequence
  Synthetic
gcaagtatgtcugcttttgatcctut

SEQ ID NO: 17957 - DNA, 26 bp, Artificial Sequence
  Synthetic
gaaagaugaaggaaaugaagggtgua

SEQ ID NO: 17958 - DNA, 23 bp, Artificial Sequence
  Synthetic
tguaccaacaguaccagcaacag

SEQ ID NO: 17959 - DNA, 22 bp, Artificial Sequence
  Synthetic
aaaaccaugagccaactcccut

SEQ ID NO: 17960 - DNA, 24 bp, Artificial Sequence
  Synthetic
gcctaucaaccaagaccaggttut

SEQ ID NO: 17961 - DNA, 22 bp, Artificial Sequence
  Synthetic
aaccagguccaggttgggtaua

SEQ ID NO: 17962 - DNA, 26 bp, Artificial Sequence
  Synthetic
gagcttctcatuctcaatgtacgugt

SEQ ID NO: 17963 - DNA, 20 bp, Artificial Sequence
  Synthetic
gggaggacagcucacaaguc

SEQ ID NO: 17964 - DNA, 22 bp, Artificial Sequence
  Synthetic
tcagtgcucaagctggugaaat

SEQ ID NO: 17965 - DNA, 24 bp, Artificial Sequence
  Synthetic
cttctacaucctgttctucaccgt

SEQ ID NO: 17966 - DNA, 21 bp, Artificial Sequence
  Synthetic
aaccagagaaaucgggugcaa

SEQ ID NO: 17967 - DNA, 24 bp, Artificial Sequence
  Synthetic
gcttatgctugcttgatcctucag

SEQ ID NO: 17968 - DNA, 28 bp, Artificial Sequence
  Synthetic
agctagttucgaaaagcaaagaauaggt

SEQ ID NO: 17969 - DNA, 23 bp, Artificial Sequence
  Synthetic
gcuatgatuaccagagacagcca

SEQ ID NO: 17970 - DNA, 20 bp, Artificial Sequence
  Synthetic
caagctucacacgcatggut

SEQ ID NO: 17971 - DNA, 22 bp, Artificial Sequence
  Synthetic
gggccaagauttcagtcatugt

SEQ ID NO: 17972 - DNA, 17 bp, Artificial Sequence
  Synthetic
gucgcccacacucacct

SEQ ID NO: 17973 - DNA, 20 bp, Artificial Sequence
  Synthetic
gaagcgcacaguggaccuaa

SEQ ID NO: 17974 - DNA, 32 bp, Artificial Sequence
  Synthetic
agtagaatgtttacuaccaaatggaatgauag

SEQ ID NO: 17975 - DNA, 32 bp, Artificial Sequence
  Synthetic
acgaaaatguaagaagattcatctugaagaag

SEQ ID NO: 17976 - DNA, 32 bp, Artificial Sequence
  Synthetic
tgtgaatttgauatggttaaagauccagaagt

SEQ ID NO: 17977 - DNA, 22 bp, Artificial Sequence
  Synthetic
tgctttggcaautctggugaag

SEQ ID NO: 17978 - DNA, 29 bp, Artificial Sequence
  Synthetic
atcctctgaacaacuaaaactctgtgtut

SEQ ID NO: 17979 - DNA, 32 bp, Artificial Sequence
  Synthetic
attttgaaacttgtuactcaccttatacugac

SEQ ID NO: 17980 - DNA, 25 bp, Artificial Sequence
  Synthetic
agtgtgtgcauatgtgtatgtugag

SEQ ID NO: 17981 - DNA, 27 bp, Artificial Sequence
  Synthetic
ggtactctttgagugttcacattguca

SEQ ID NO: 17982 - DNA, 23 bp, Artificial Sequence
  Synthetic
ttaaggaacacugtccatuggca

SEQ ID NO: 17983 - DNA, 26 bp, Artificial Sequence
  Synthetic
gtaacaccaauagggttcagcaaauc

SEQ ID NO: 17984 - DNA, 33 bp, Artificial Sequence
  Synthetic
atgtatttgcttttuctgtaaatcatctgugaa

SEQ ID NO: 17985 - DNA, 27 bp, Artificial Sequence
  Synthetic
agaggatctcgugtagaaattgcttug

SEQ ID NO: 17986 - DNA, 27 bp, Artificial Sequence
  Synthetic
tgtaactauccccgaaattcuacccaa

SEQ ID NO: 17987 - DNA, 30 bp, Artificial Sequence
  Synthetic
tttaagtgacauaccaatttguacaacagt

SEQ ID NO: 17988 - DNA, 30 bp, Artificial Sequence
  Synthetic
tggaatcaccuaggtcctaaaataugaaca

SEQ ID NO: 17989 - DNA, 33 bp, Artificial Sequence
  Synthetic
gcaagtaatatguaccttaagaatttaauggga

SEQ ID NO: 17990 - DNA, 31 bp, Artificial Sequence
  Synthetic
gtacagatgaagtutttagttgagcaaauga

SEQ ID NO: 17991 - DNA, 25 bp, Artificial Sequence
  Synthetic
caaugaaacccccaagaaaguacct

SEQ ID NO: 17992 - DNA, 30 bp, Artificial Sequence
  Synthetic
ttccatcatttaatugtaaacgtgttacuc

SEQ ID NO: 17993 - DNA, 22 bp, Artificial Sequence
  Synthetic
gttgaactgcagugcaccttuc

SEQ ID NO: 17994 - DNA, 33 bp, Artificial Sequence
  Synthetic
tcaagacattttgtauctgcatatatcaaacua

SEQ ID NO: 17995 - DNA, 27 bp, Artificial Sequence
  Synthetic
gcacacgttcucgtttataaccaaaut

SEQ ID NO: 17996 - DNA, 29 bp, Artificial Sequence
  Synthetic
gcatgccaatcucttcataaatctttuct

SEQ ID NO: 17997 - DNA, 28 bp, Artificial Sequence
  Synthetic
ccatgatgtgcaucattcatttgttuca

SEQ ID NO: 17998 - DNA, 21 bp, Artificial Sequence
  Synthetic
catgauggagacggagcugaa

SEQ ID NO: 17999 - DNA, 18 bp, Artificial Sequence
  Synthetic
gcattcaugggccgctug

SEQ ID NO: 18000 - DNA, 17 bp, Artificial Sequence
  Synthetic
cggcggcaauagcaugg

SEQ ID NO: 18001 - DNA, 19 bp, Artificial Sequence
  Synthetic
ccagctggucctgcaucat

SEQ ID NO: 18002 - DNA, 22 bp, Artificial Sequence
  Synthetic
ccgggacaugatcagcatguat

SEQ ID NO: 18003 - DNA, 17 bp, Artificial Sequence
  Synthetic
ccggcccucacatgugt

SEQ ID NO: 18004 - DNA, 29 bp, Artificial Sequence
  Synthetic
acttttatgagagagaucctggacttcut

SEQ ID NO: 18005 - DNA, 25 bp, Artificial Sequence
  Synthetic
gctcctaccguaccactagaactut

SEQ ID NO: 18006 - DNA, 28 bp, Artificial Sequence
  Synthetic
acatggcaatcaaaaugtccattgttua

SEQ ID NO: 18007 - DNA, 26 bp, Artificial Sequence
  Synthetic
attttcttcutttcacgttugcaact

SEQ ID NO: 18008 - DNA, 27 bp, Artificial Sequence
  Synthetic
catctctguggtcttgttuaaaaaggg

SEQ ID NO: 18009 - DNA, 25 bp, Artificial Sequence
  Synthetic
caaaatggaaagutgggaucgaaca

SEQ ID NO: 18010 - DNA, 25 bp, Artificial Sequence
  Synthetic
tctcatggaagcuatgggtaucaca

SEQ ID NO: 18011 - DNA, 28 bp, Artificial Sequence
  Synthetic
cttttaaugaaacgctgtucagaaacca

SEQ ID NO: 18012 - DNA, 25 bp, Artificial Sequence
  Synthetic
agcattcccgaaauctgttgtuagt

SEQ ID NO: 18013 - DNA, 27 bp, Artificial Sequence
  Synthetic
aggcauacaaaagaatgtcctuagaaa

SEQ ID NO: 18014 - DNA, 28 bp, Artificial Sequence
  Synthetic
actcacattttgcautgttttctcaaua

SEQ ID NO: 18015 - DNA, 28 bp, Artificial Sequence
  Synthetic
cagtgtgaaaautatcggaauggagaag

SEQ ID NO: 18016 - DNA, 25 bp, Artificial Sequence
  Synthetic
gctttctgaggutaccatccuacat

SEQ ID NO: 18017 - DNA, 21 bp, Artificial Sequence
  Synthetic
caggaguaaacccugggcaag

SEQ ID NO: 18018 - DNA, 22 bp, Artificial Sequence
  Synthetic
tgcaaaggugattttcccugct

SEQ ID NO: 18019 - DNA, 24 bp, Artificial Sequence
  Synthetic
gagctgtuccgataccataaugct

SEQ ID NO: 18020 - DNA, 25 bp, Artificial Sequence
  Synthetic
cgccagacttugctgagtttaaaut

SEQ ID NO: 18021 - DNA, 28 bp, Artificial Sequence
  Synthetic
gttcatttaaaaggcautttctccucca

SEQ ID NO: 18022 - DNA, 25 bp, Artificial Sequence
  Synthetic
gtgacattggccuttgtgttatugt

SEQ ID NO: 18023 - DNA, 22 bp, Artificial Sequence
  Synthetic
tgcctgttcutcatcatgccut

SEQ ID NO: 18024 - DNA, 21 bp, Artificial Sequence
  Synthetic
cgcgattacuttaggcccuca

SEQ ID NO: 18025 - DNA, 23 bp, Artificial Sequence
  Synthetic
cgccttagugaagagcagtaugt

SEQ ID NO: 18026 - DNA, 21 bp, Artificial Sequence
  Synthetic
gaggcuccaggacttcgaaut

SEQ ID NO: 18027 - DNA, 22 bp, Artificial Sequence
  Synthetic
ccctgaagaucgaccucacaga

SEQ ID NO: 18028 - DNA, 22 bp, Artificial Sequence
  Synthetic
ggccccaaaaguggtccttauc

SEQ ID NO: 18029 - DNA, 21 bp, Artificial Sequence
  Synthetic
attcctcugcctacgagucct

SEQ ID NO: 18030 - DNA, 22 bp, Artificial Sequence
  Synthetic
gcatcctatucagagcgtgcut

SEQ ID NO: 18031 - DNA, 21 bp, Artificial Sequence
  Synthetic
tactgccagcucacttcacuc

SEQ ID NO: 18032 - DNA, 32 bp, Artificial Sequence
  Synthetic
ctttgtacctcuaggaatgacggattattuag

SEQ ID NO: 18033 - DNA, 22 bp, Artificial Sequence
  Synthetic
ggtcccatuaaagccctgtcug

SEQ ID NO: 18034 - DNA, 24 bp, Artificial Sequence
  Synthetic
cggttttctuccccttttgctgua

SEQ ID NO: 18035 - DNA, 24 bp, Artificial Sequence
  Synthetic
gtaatcuccactgtcttucaccgt

SEQ ID NO: 18036 - DNA, 31 bp, Artificial Sequence
  Synthetic
gtttaaacaattggaacutacttagctacug

SEQ ID NO: 18037 - DNA, 30 bp, Artificial Sequence
  Synthetic
attttgagcuacaatagtataauggccact

SEQ ID NO: 18038 - DNA, 25 bp, Artificial Sequence
  Synthetic
tcattgccaugactctcaggaatug

SEQ ID NO: 18039 - DNA, 21 bp, Artificial Sequence
  Synthetic
cacttuggcgaaagucacacg

SEQ ID NO: 18040 - DNA, 28 bp, Artificial Sequence
  Synthetic
tgaatatatttatguggacccgaugcag

SEQ ID NO: 18041 - DNA, 25 bp, Artificial Sequence
  Synthetic
caagctcagauctctattcugccaa

SEQ ID NO: 18042 - DNA, 28 bp, Artificial Sequence
  Synthetic
tgtctgaacugaagataatgacucacct

SEQ ID NO: 18043 - DNA, 23 bp, Artificial Sequence
  Synthetic
gggatggagaguggaggattuaa

SEQ ID NO: 18044 - DNA, 25 bp, Artificial Sequence
  Synthetic
cacagtatguccccatgcuagaaag

SEQ ID NO: 18045 - DNA, 23 bp, Artificial Sequence
  Synthetic
tcccaacacccagagugagtaua

SEQ ID NO: 18046 - DNA, 21 bp, Artificial Sequence
  Synthetic
gcaacgucctccuggcacaag

SEQ ID NO: 18047 - DNA, 28 bp, Artificial Sequence
  Synthetic
agagattaaagugaaggaggaugagcct

SEQ ID NO: 18048 - DNA, 21 bp, Artificial Sequence
  Synthetic
tgcccactcutgagttctguc

SEQ ID NO: 18049 - DNA, 22 bp, Artificial Sequence
  Synthetic
ccttuccacccacagauccaaa

SEQ ID NO: 18050 - DNA, 22 bp, Artificial Sequence
  Synthetic
agguctagttctgugcaggagt

SEQ ID NO: 18051 - DNA, 23 bp, Artificial Sequence
  Synthetic
tcaatggtcucgtcctctctcut

SEQ ID NO: 18052 - DNA, 24 bp, Artificial Sequence
  Synthetic
cagacagaaccuctggcuacaaag

SEQ ID NO: 18053 - DNA, 27 bp, Artificial Sequence
  Synthetic
ctttcttgtguaaagtcaggacucaca

SEQ ID NO: 18054 - DNA, 21 bp, Artificial Sequence
  Synthetic
cataactgcagugggccugaa

SEQ ID NO: 18055 - DNA, 22 bp, Artificial Sequence
  Synthetic
agttcaccaugtgtgtgtucca

SEQ ID NO: 18056 - DNA, 27 bp, Artificial Sequence
  Synthetic
tgataatgccaguaaactagcugcaat

SEQ ID NO: 18057 - DNA, 25 bp, Artificial Sequence
  Synthetic
tgctggaaccugaacagaattctuc

SEQ ID NO: 18058 - DNA, 21 bp, Artificial Sequence
  Synthetic
gtaaaccugaggcaccaccut

SEQ ID NO: 18059 - DNA, 27 bp, Artificial Sequence
  Synthetic
tgacattggucttgttttcucagaaca

SEQ ID NO: 18060 - DNA, 28 bp, Artificial Sequence
  Synthetic
ccaatcaaaugacctccaaacaauacac

SEQ ID NO: 18061 - DNA, 22 bp, Artificial Sequence
  Synthetic
gaactggagaugttgguccact

SEQ ID NO: 18062 - DNA, 28 bp, Artificial Sequence
  Synthetic
ccagcaauagcagcaaaaautacaaaua

SEQ ID NO: 18063 - DNA, 28 bp, Artificial Sequence
  Synthetic
cgaactcgctugattttgaatactgaut

SEQ ID NO: 18064 - DNA, 25 bp, Artificial Sequence
  Synthetic
gaaacaagacccaaaacutgcauca

SEQ ID NO: 18065 - DNA, 23 bp, Artificial Sequence
  Synthetic
cgcagcttgutgaccagacauat

SEQ ID NO: 18066 - DNA, 23 bp, Artificial Sequence
  Synthetic
gtcttgccauagtcagaugcaca

SEQ ID NO: 18067 - DNA, 24 bp, Artificial Sequence
  Synthetic
tggtctcaaugatgctctttugct

SEQ ID NO: 18068 - DNA, 27 bp, Artificial Sequence
  Synthetic
attggatacaccugtcaagactcaaua

SEQ ID NO: 18069 - DNA, 26 bp, Artificial Sequence
  Synthetic
ctttacaaatugctgccagacucaag

SEQ ID NO: 18070 - DNA, 28 bp, Artificial Sequence
  Synthetic
ccataggcagtcuaatgtacgaacttua

SEQ ID NO: 18071 - DNA, 27 bp, Artificial Sequence
  Synthetic
aauggagaaaaggaaacttuaggagca

SEQ ID NO: 18072 - DNA, 23 bp, Artificial Sequence
  Synthetic
gtttgcaacagccccutctttut

SEQ ID NO: 18073 - DNA, 28 bp, Artificial Sequence
  Synthetic
tggtttattgucaaggatacccctttut

SEQ ID NO: 18074 - DNA, 25 bp, Artificial Sequence
  Synthetic
ccaacacuacacactgtgctatuca

SEQ ID NO: 18075 - DNA, 18 bp, Artificial Sequence
  Synthetic
gtuggagcctgugccagt

SEQ ID NO: 18076 - DNA, 24 bp, Artificial Sequence
  Synthetic
tggccuggcagaaatagtgaatut

SEQ ID NO: 18077 - DNA, 25 bp, Artificial Sequence
  Synthetic
gaggctggcaaauagttagtaucca

SEQ ID NO: 18078 - DNA, 23 bp, Artificial Sequence
  Synthetic
gtttgggauggaatggtgaucca

SEQ ID NO: 18079 - DNA, 24 bp, Artificial Sequence
  Synthetic
aguagagtttgucagccagagaca

SEQ ID NO: 18080 - DNA, 25 bp, Artificial Sequence
  Synthetic
actactttcgcautcacacacacut

SEQ ID NO: 18081 - DNA, 19 bp, Artificial Sequence
  Synthetic
gtgctgccautctgcaugt

SEQ ID NO: 18082 - DNA, 26 bp, Artificial Sequence
  Synthetic
ctcccuggagaacagctcaaauaaaa

SEQ ID NO: 18083 - DNA, 28 bp, Artificial Sequence
  Synthetic
ccacacaacacauttatctacaaaugct

SEQ ID NO: 18084 - DNA, 21 bp, Artificial Sequence
  Synthetic
gaagcaccagcccuaugaact

SEQ ID NO: 18085 - DNA, 28 bp, Artificial Sequence
  Synthetic
ccattgcattgauatgatggatatuggg

SEQ ID NO: 18086 - DNA, 22 bp, Artificial Sequence
  Synthetic
gggagccaccuctagatuacca

SEQ ID NO: 18087 - DNA, 22 bp, Artificial Sequence
  Synthetic
gaagagagcugttgaacaugcc

SEQ ID NO: 18088 - DNA, 23 bp, Artificial Sequence
  Synthetic
gctttctggaucctgacatuggg

SEQ ID NO: 18089 - DNA, 27 bp, Artificial Sequence
  Synthetic
ctcattcatgcucttatgctgguaaaa

SEQ ID NO: 18090 - DNA, 29 bp, Artificial Sequence
  Synthetic
gtcacagggccutacaacagatatataug

SEQ ID NO: 18091 - DNA, 26 bp, Artificial Sequence
  Synthetic
ttcccaccacauttgtcatgaauact

SEQ ID NO: 18092 - DNA, 24 bp, Artificial Sequence
  Synthetic
cttaaaccttuggagagtggucct

SEQ ID NO: 18093 - DNA, 20 bp, Artificial Sequence
  Synthetic
tggtaccccucagcacucat

SEQ ID NO: 18094 - DNA, 32 bp, Artificial Sequence
  Synthetic
ggaacttacguagaatatatuggaaggaaaaa

SEQ ID NO: 18095 - DNA, 27 bp, Artificial Sequence
  Synthetic
gggagtcatuaagcaaccacttaucaa

SEQ ID NO: 18096 - DNA, 24 bp, Artificial Sequence
  Synthetic
ctttcaaacgcuatctccuggact

SEQ ID NO: 18097 - DNA, 22 bp, Artificial Sequence
  Synthetic
acaagcaccuctacatcuccat

SEQ ID NO: 18098 - DNA, 17 bp, Artificial Sequence
  Synthetic
ggctuggcccactuggt

SEQ ID NO: 18099 - DNA, 24 bp, Artificial Sequence
  Synthetic
gaagugcacaaatucaaggcaact

SEQ ID NO: 18100 - DNA, 30 bp, Artificial Sequence
  Synthetic
actaaaccttaagaugagcattgttttgug

SEQ ID NO: 18101 - DNA, 28 bp, Artificial Sequence
  Synthetic
cctaatttcagcuatattccctggctua

SEQ ID NO: 18102 - DNA, 30 bp, Artificial Sequence
  Synthetic
agaagataatautgaagctguagggaaaaa

SEQ ID NO: 18103 - DNA, 29 bp, Artificial Sequence
  Synthetic
ctgattttcauagaaaactcaccugggat

SEQ ID NO: 18104 - DNA, 30 bp, Artificial Sequence
  Synthetic
agaagaagatuggaagaagactugaagaag

SEQ ID NO: 18105 - DNA, 32 bp, Artificial Sequence
  Synthetic
caatcaccaattautcatgtataggatuccat

SEQ ID NO: 18106 - DNA, 25 bp, Artificial Sequence
  Synthetic
tcttggacaagcucaaaagacagut

SEQ ID NO: 18107 - DNA, 24 bp, Artificial Sequence
  Synthetic
caccagttcttucagagagctgua

SEQ ID NO: 18108 - DNA, 18 bp, Artificial Sequence
  Synthetic
aggagatgcugggtgcug

SEQ ID NO: 18109 - DNA, 20 bp, Artificial Sequence
  Synthetic
agccagagcuggaacagtug

SEQ ID NO: 18110 - DNA, 19 bp, Artificial Sequence
  Synthetic
gtggtuacctggcuaggct

SEQ ID NO: 18111 - DNA, 20 bp, Artificial Sequence
  Synthetic
gttccatggccuccgatcuc

SEQ ID NO: 18112 - DNA, 21 bp, Artificial Sequence
  Synthetic
cuggaggaggaaguaagcaua

SEQ ID NO: 18113 - DNA, 21 bp, Artificial Sequence
  Synthetic
cctgtccugacctcccuacag

SEQ ID NO: 18114 - DNA, 19 bp, Artificial Sequence
  Synthetic
gccatuggccacctgguag

SEQ ID NO: 18115 - DNA, 21 bp, Artificial Sequence
  Synthetic
cctgugggccagaaggagaua

SEQ ID NO: 18116 - DNA, 22 bp, Artificial Sequence
  Synthetic
ctgcaggaaggugtgtttgtug

SEQ ID NO: 18117 - DNA, 19 bp, Artificial Sequence
  Synthetic
cctugaagggacgccugag

SEQ ID NO: 18118 - DNA, 19 bp, Artificial Sequence
  Synthetic
aggcctcucaggacugacc

SEQ ID NO: 18119 - DNA, 22 bp, Artificial Sequence
  Synthetic
ccgatggaaggugattgaguct

SEQ ID NO: 18120 - DNA, 19 bp, Artificial Sequence
  Synthetic
gatgaccucctgcgtgucc

SEQ ID NO: 18121 - DNA, 22 bp, Artificial Sequence
  Synthetic
ctggagacuaacgtgacguact

SEQ ID NO: 18122 - DNA, 23 bp, Artificial Sequence
  Synthetic
tggcggcugcaaagaaaaauaac

SEQ ID NO: 18123 - DNA, 19 bp, Artificial Sequence
  Synthetic
agtgtucgaggccuaccca

SEQ ID NO: 18124 - DNA, 20 bp, Artificial Sequence
  Synthetic
ccagatauccacccgtucct

SEQ ID NO: 18125 - DNA, 22 bp, Artificial Sequence
  Synthetic
ggtgagaacaucaccctcaugt

SEQ ID NO: 18126 - DNA, 22 bp, Artificial Sequence
  Synthetic
cctttcttcucgtgcagtguca

SEQ ID NO: 18127 - DNA, 22 bp, Artificial Sequence
  Synthetic
ccctgattuattcacggcucca

SEQ ID NO: 18128 - DNA, 19 bp, Artificial Sequence
  Synthetic
cagctccagggutccacuc

SEQ ID NO: 18129 - DNA, 22 bp, Artificial Sequence
  Synthetic
gccctgacucctgtttaacuct

SEQ ID NO: 18130 - DNA, 17 bp, Artificial Sequence
  Synthetic
ccaccgccucugccaag

SEQ ID NO: 18131 - DNA, 20 bp, Artificial Sequence
  Synthetic
cagctcugctcacctgugaa

SEQ ID NO: 18132 - DNA, 17 bp, Artificial Sequence
  Synthetic
cugcaacacgacgccut

SEQ ID NO: 18133 - DNA, 21 bp, Artificial Sequence
  Synthetic
gcgggaaccutggaactaucc

SEQ ID NO: 18134 - DNA, 32 bp, Artificial Sequence
  Synthetic
cacttaagtttcagugttatttttctcctugt

SEQ ID NO: 18135 - DNA, 30 bp, Artificial Sequence
  Synthetic
aagataactggugctcattttcatcatuat

SEQ ID NO: 18136 - DNA, 24 bp, Artificial Sequence
  Synthetic
tggaaaaacaggutcactggttug

SEQ ID NO: 18137 - DNA, 23 bp, Artificial Sequence
  Synthetic
ccctgaaccacacutcaacctua

SEQ ID NO: 18138 - DNA, 27 bp, Artificial Sequence
  Synthetic
gcttttagtttggugatagaacagcuc

SEQ ID NO: 18139 - DNA, 30 bp, Artificial Sequence
  Synthetic
tgtcaagatuccggaagtatatuaagttuc

SEQ ID NO: 18140 - DNA, 22 bp, Artificial Sequence
  Synthetic
tggtttaatugcaggcgcatug

SEQ ID NO: 18141 - DNA, 27 bp, Artificial Sequence
  Synthetic
agaagacttcaguctggattgttgaug

SEQ ID NO: 18142 - DNA, 21 bp, Artificial Sequence
  Synthetic
catagaggccacuaggcctug

SEQ ID NO: 18143 - DNA, 22 bp, Artificial Sequence
  Synthetic
agggcagcagacaauttctuct

SEQ ID NO: 18144 - DNA, 23 bp, Artificial Sequence
  Synthetic
tgtttgcactuccttgagtccug

SEQ ID NO: 18145 - DNA, 25 bp, Artificial Sequence
  Synthetic
gcatcguccacacaagtaaaatuct

SEQ ID NO: 18146 - DNA, 23 bp, Artificial Sequence
  Synthetic
gcaaugaaaaagcagcccttcuc

SEQ ID NO: 18147 - DNA, 28 bp, Artificial Sequence
  Synthetic
gatgaagttccagguaattctagcaugt

SEQ ID NO: 18148 - DNA, 29 bp, Artificial Sequence
  Synthetic
tgatctaatgatuctggttctctuaccct

SEQ ID NO: 18149 - DNA, 24 bp, Artificial Sequence
  Synthetic
ggacagguagctcttcgaatugat

SEQ ID NO: 18150 - DNA, 23 bp, Artificial Sequence
  Synthetic
gagtcagaacaugacctgtugct

SEQ ID NO: 18151 - DNA, 27 bp, Artificial Sequence
  Synthetic
gcttcaaattgtaugtggcccttttuc

SEQ ID NO: 18152 - DNA, 23 bp, Artificial Sequence
  Synthetic
gtgtgtggutcaaaagugaagct

SEQ ID NO: 18153 - DNA, 28 bp, Artificial Sequence
  Synthetic
gcatctggaattucaaggacactgtuat

SEQ ID NO: 18154 - DNA, 26 bp, Artificial Sequence
  Synthetic
ccaaaatucaacctgtcaucaagcat

SEQ ID NO: 18155 - DNA, 22 bp, Artificial Sequence
  Synthetic
gggttctgccauaactggatut

SEQ ID NO: 18156 - DNA, 28 bp, Artificial Sequence
  Synthetic
cttctgcttcuagtcagaatcacauacc

SEQ ID NO: 18157 - DNA, 19 bp, Artificial Sequence
  Synthetic
acgaccaggacuccgguaa

SEQ ID NO: 18158 - DNA, 23 bp, Artificial Sequence
  Synthetic
aaccguaaagcctuaaagaccga

SEQ ID NO: 18159 - DNA, 25 bp, Artificial Sequence
  Synthetic
tgttaaguggcccattatcugaagg

SEQ ID NO: 18160 - DNA, 23 bp, Artificial Sequence
  Synthetic
cgggatgaguttccagagcauag

SEQ ID NO: 18161 - DNA, 23 bp, Artificial Sequence
  Synthetic
ccttttccatgucaccaatgcug

SEQ ID NO: 18162 - DNA, 22 bp, Artificial Sequence
  Synthetic
caacaatttuggcctguggact

SEQ ID NO: 18163 - DNA, 26 bp, Artificial Sequence
  Synthetic
gaaatcaaagaatuctcgtccaccug

SEQ ID NO: 18164 - DNA, 23 bp, Artificial Sequence
  Synthetic
acccuggatttaugcccaagaag

SEQ ID NO: 18165 - DNA, 33 bp, Artificial Sequence
  Synthetic
catcaatgttataacugctactcaaaatgucat

SEQ ID NO: 18166 - DNA, 27 bp, Artificial Sequence
  Synthetic
aagtgcttaauggctagacaaauagca

SEQ ID NO: 18167 - DNA, 22 bp, Artificial Sequence
  Synthetic
cttccucaacagtctcctuggg

SEQ ID NO: 18168 - DNA, 22 bp, Artificial Sequence
  Synthetic
aaaggtgccutctacccttgug

SEQ ID NO: 18169 - DNA, 22 bp, Artificial Sequence
  Synthetic
tggattagcagcaugacaggut

SEQ ID NO: 18170 - DNA, 24 bp, Artificial Sequence
  Synthetic
gcatgttaatgutagctggtgcut

SEQ ID NO: 18171 - DNA, 31 bp, Artificial Sequence
  Synthetic
tccagtggcaataugatgaaaagtattttug

SEQ ID NO: 18172 - DNA, 21 bp, Artificial Sequence
  Synthetic
gggagagtucccagtcctcut

SEQ ID NO: 18173 - DNA, 29 bp, Artificial Sequence
  Synthetic
gccugagaaauaaaaaggataaagtuacc

SEQ ID NO: 18174 - DNA, 27 bp, Artificial Sequence
  Synthetic
gcaactguaaagctactgaugagaacc

SEQ ID NO: 18175 - DNA, 26 bp, Artificial Sequence
  Synthetic
ctgtaatgugcggaaaattucaacct

SEQ ID NO: 18176 - DNA, 21 bp, Artificial Sequence
  Synthetic
cagcagagguctcaggaaguc

SEQ ID NO: 18177 - DNA, 23 bp, Artificial Sequence
  Synthetic
ctacacggguatctccatucaca

SEQ ID NO: 18178 - DNA, 24 bp, Artificial Sequence
  Synthetic
gtgttcacagaaugctgactgtuc

SEQ ID NO: 18179 - DNA, 22 bp, Artificial Sequence
  Synthetic
ccagcauccccacaacuaaaac

SEQ ID NO: 18180 - DNA, 21 bp, Artificial Sequence
  Synthetic
tgtactgagcaugaccccugt

SEQ ID NO: 18181 - DNA, 25 bp, Artificial Sequence
  Synthetic
tttatctgacatuttgggtgccuga

SEQ ID NO: 18182 - DNA, 21 bp, Artificial Sequence
  Synthetic
caaacccuctccagugaccag

SEQ ID NO: 18183 - DNA, 23 bp, Artificial Sequence
  Synthetic
ggaactgaggutttctccaguga

SEQ ID NO: 18184 - DNA, 21 bp, Artificial Sequence
  Synthetic
gcagcttcaccucatcagguc

SEQ ID NO: 18185 - DNA, 22 bp, Artificial Sequence
  Synthetic
gaggatcugacacacagcctut

SEQ ID NO: 18186 - DNA, 25 bp, Artificial Sequence
  Synthetic
caatcutttaggtctcucgggaagg

SEQ ID NO: 18187 - DNA, 22 bp, Artificial Sequence
  Synthetic
cagtgtctguccagccactaug

SEQ ID NO: 18188 - DNA, 23 bp, Artificial Sequence
  Synthetic
acttaaucccaaaaacccuggca

SEQ ID NO: 18189 - DNA, 20 bp, Artificial Sequence
  Synthetic
cctgtcuccgtcaccacuct

SEQ ID NO: 18190 - DNA, 20 bp, Artificial Sequence
  Synthetic
gcagagagacauggcacuca

SEQ ID NO: 18191 - DNA, 23 bp, Artificial Sequence
  Synthetic
agtaucgagaaccgagugagagg

SEQ ID NO: 18192 - DNA, 21 bp, Artificial Sequence
  Synthetic
gagatgcggucagaatcugca

SEQ ID NO: 18193 - DNA, 26 bp, Artificial Sequence
  Synthetic
ccutttaaaatccagucccaggacat

SEQ ID NO: 18194 - DNA, 17 bp, Artificial Sequence
  Synthetic
gccccaucggagtugct

SEQ ID NO: 18195 - DNA, 19 bp, Artificial Sequence
  Synthetic
cccgccguatgagttcugt

SEQ ID NO: 18196 - DNA, 27 bp, Artificial Sequence
  Synthetic
tcattacagaaaugcatcgtgatucct

SEQ ID NO: 18197 - DNA, 23 bp, Artificial Sequence
  Synthetic
gtttcuagcaacccacacactuc

SEQ ID NO: 18198 - DNA, 25 bp, Artificial Sequence
  Synthetic
atgcctcacgccauaaatactaaut

SEQ ID NO: 18199 - DNA, 23 bp, Artificial Sequence
  Synthetic
tgccattuctaagaacguagcca

SEQ ID NO: 18200 - DNA, 18 bp, Artificial Sequence
  Synthetic
cactgaguccccgtgcut

SEQ ID NO: 18201 - DNA, 19 bp, Artificial Sequence
  Synthetic
cacucaccggcaagttguc

SEQ ID NO: 18202 - DNA, 20 bp, Artificial Sequence
  Synthetic
gaaggtgagcucgggttuct

SEQ ID NO: 18203 - DNA, 20 bp, Artificial Sequence
  Synthetic
gctccccuttccgtgaugaa

SEQ ID NO: 18204 - DNA, 29 bp, Artificial Sequence
  Synthetic
ctgtatgatatggugtgtggagatatucc

SEQ ID NO: 18205 - DNA, 27 bp, Artificial Sequence
  Synthetic
aatttcaaagacugtcccaugaagact

SEQ ID NO: 18206 - DNA, 17 bp, Artificial Sequence
  Synthetic
gcagggcagguggcuac

SEQ ID NO: 18207 - DNA, 19 bp, Artificial Sequence
  Synthetic
ggagcagcutcagcaugga

SEQ ID NO: 18208 - DNA, 19 bp, Artificial Sequence
  Synthetic
gtggcugaagtccagguga

SEQ ID NO: 18209 - DNA, 18 bp, Artificial Sequence
  Synthetic
ccagcagguggugaagca

SEQ ID NO: 18210 - DNA, 20 bp, Artificial Sequence
  Synthetic
atcacccucccccucagaaa

SEQ ID NO: 18211 - DNA, 27 bp, Artificial Sequence
  Synthetic
gctccttctggaauctgttaccttuag

SEQ ID NO: 18212 - DNA, 18 bp, Artificial Sequence
  Synthetic
gcacgagcucugcaagca

SEQ ID NO: 18213 - DNA, 18 bp, Artificial Sequence
  Synthetic
gacacgugctgtccucct

SEQ ID NO: 18214 - DNA, 18 bp, Artificial Sequence
  Synthetic
gtggcgacuggaagugga

SEQ ID NO: 18215 - DNA, 18 bp, Artificial Sequence
  Synthetic
gttgcgcaugcagcucat

SEQ ID NO: 18216 - DNA, 25 bp, Artificial Sequence
  Synthetic
ggcagtaagccacutgtttttctug

SEQ ID NO: 18217 - DNA, 23 bp, Artificial Sequence
  Synthetic
ggccaaggugaagaaaagtcuga

SEQ ID NO: 18218 - DNA, 29 bp, Artificial Sequence
  Synthetic
ttctgaataactgaagutggtcctgaaut

SEQ ID NO: 18219 - DNA, 27 bp, Artificial Sequence
  Synthetic
tctaaaatgacccuacctgggttauca

SEQ ID NO: 18220 - DNA, 24 bp, Artificial Sequence
  Synthetic
ggccttccccuctctttctauagt

SEQ ID NO: 18221 - DNA, 22 bp, Artificial Sequence
  Synthetic
ggatcuggcagctagaaatugc

SEQ ID NO: 18222 - DNA, 22 bp, Artificial Sequence
  Synthetic
aaggttttaccacugcagccua

SEQ ID NO: 18223 - DNA, 24 bp, Artificial Sequence
  Synthetic
attatccuggaactgauggaggga

SEQ ID NO: 18224 - DNA, 23 bp, Artificial Sequence
  Synthetic
ctcctaagatguccactgctgut

SEQ ID NO: 18225 - DNA, 28 bp, Artificial Sequence
  Synthetic
gggagacaaaaaugttgctatttuacag

SEQ ID NO: 18226 - DNA, 26 bp, Artificial Sequence
  Synthetic
ctagtgtguagacagacatgguaaca

SEQ ID NO: 18227 - DNA, 30 bp, Artificial Sequence
  Synthetic
ggaagtccaaaaaccugaaaggaatattuc

SEQ ID NO: 18228 - DNA, 25 bp, Artificial Sequence
  Synthetic
cttcagctttcucccactgtatuga

SEQ ID NO: 18229 - DNA, 30 bp, Artificial Sequence
  Synthetic
ttctgtagaaagatutcagtgcagaagaut

SEQ ID NO: 18230 - DNA, 26 bp, Artificial Sequence
  Synthetic
acatgagcatgutctagatgcaugaa

SEQ ID NO: 18231 - DNA, 27 bp, Artificial Sequence
  Synthetic
gctccattgaaugttaacctcaucaga

SEQ ID NO: 18232 - DNA, 24 bp, Artificial Sequence
  Synthetic
ccaccagacaguctaguaacaagg

SEQ ID NO: 18233 - DNA, 26 bp, Artificial Sequence
  Synthetic
accagccucattatatctuggagaga

SEQ ID NO: 18234 - DNA, 28 bp, Artificial Sequence
  Synthetic
agaacaucttgugaaaagacaaagacca

SEQ ID NO: 18235 - DNA, 21 bp, Artificial Sequence
  Synthetic
ctcuggccaagacaaaccuca

SEQ ID NO: 18236 - DNA, 28 bp, Artificial Sequence
  Synthetic
tgtatatttgaguatacgcggaaugcaa

SEQ ID NO: 18237 - DNA, 22 bp, Artificial Sequence
  Synthetic
caatggatcuggaaggctguca

SEQ ID NO: 18238 - DNA, 33 bp, Artificial Sequence
  Synthetic
aaatacttgcauttacatacctuaaaagaggat

SEQ ID NO: 18239 - DNA, 28 bp, Artificial Sequence
  Synthetic
tgcactgaaagaaucacaaaatggaaug

SEQ ID NO: 18240 - DNA, 31 bp, Artificial Sequence
  Synthetic
tccacacaacttgautttgatccatatcuaa

SEQ ID NO: 18241 - DNA, 27 bp, Artificial Sequence
  Synthetic
tgccagatatuaaatcgagacttugct

SEQ ID NO: 18242 - DNA, 28 bp, Artificial Sequence
  Synthetic
attttgttaacaccccautttcatgcut

SEQ ID NO: 18243 - DNA, 22 bp, Artificial Sequence
  Synthetic
cttttctgcuctacctgugcct

SEQ ID NO: 18244 - DNA, 25 bp, Artificial Sequence
  Synthetic
gtagaaaacuacaccccagtcuacc

SEQ ID NO: 18245 - DNA, 27 bp, Artificial Sequence
  Synthetic
gtttcatcctguagggaacttttccut

SEQ ID NO: 18246 - DNA, 26 bp, Artificial Sequence
  Synthetic
cagctgtguacaggtgaatacatuga

SEQ ID NO: 18247 - DNA, 28 bp, Artificial Sequence
  Synthetic
ctatagcttaagugtgacctgtucacaa

SEQ ID NO: 18248 - DNA, 23 bp, Artificial Sequence
  Synthetic
agcatccagaaugccatgcttua

SEQ ID NO: 18249 - DNA, 21 bp, Artificial Sequence
  Synthetic
gaaaggcgacguttttgtgug

SEQ ID NO: 18250 - DNA, 21 bp, Artificial Sequence
  Synthetic
gggcacucagctagtcctcut

SEQ ID NO: 18251 - DNA, 25 bp, Artificial Sequence
  Synthetic
tgagctgcagagugctatgaaauac

SEQ ID NO: 18252 - DNA, 23 bp, Artificial Sequence
  Synthetic
catugaacaagagcctggugaga

SEQ ID NO: 18253 - DNA, 22 bp, Artificial Sequence
  Synthetic
tgaattcaucgtgggatgugac

SEQ ID NO: 18254 - DNA, 28 bp, Artificial Sequence
  Synthetic
tggtacuacaatgtttcatuagcaagca

SEQ ID NO: 18255 - DNA, 27 bp, Artificial Sequence
  Synthetic
agaactgctcaaacaucgaggaaatua

SEQ ID NO: 18256 - DNA, 24 bp, Artificial Sequence
  Synthetic
gguatatagcauccaaccgaaggc

SEQ ID NO: 18257 - DNA, 25 bp, Artificial Sequence
  Synthetic
tctacctgtcugcaaattgtgtugt

SEQ ID NO: 18258 - DNA, 30 bp, Artificial Sequence
  Synthetic
aaagctttggaauaatgtcctttcauaaga

SEQ ID NO: 18259 - DNA, 24 bp, Artificial Sequence
  Synthetic
gcacccctucactgagtacattut

SEQ ID NO: 18260 - DNA, 22 bp, Artificial Sequence
  Synthetic
tcactagaguggtgcagccuat

SEQ ID NO: 18261 - DNA, 26 bp, Artificial Sequence
  Synthetic
cttaucagcaaaaccagtaucaaggc

SEQ ID NO: 18262 - DNA, 28 bp, Artificial Sequence
  Synthetic
acacgacttuaggcagctattuaaaact

SEQ ID NO: 18263 - DNA, 28 bp, Artificial Sequence
  Synthetic
catctaaaaatcugccattggtgaagug

SEQ ID NO: 18264 - DNA, 24 bp, Artificial Sequence
  Synthetic
acttgccagtuttgtcctcagtut

SEQ ID NO: 18265 - DNA, 28 bp, Artificial Sequence
  Synthetic
gcaaaagaaauacaacagaacaagucut

SEQ ID NO: 18266 - DNA, 26 bp, Artificial Sequence
  Synthetic
gacttcaguacaactcacuggaagaa

SEQ ID NO: 18267 - DNA, 21 bp, Artificial Sequence
  Synthetic
caaggcauaaggcugaaagca

SEQ ID NO: 18268 - DNA, 28 bp, Artificial Sequence
  Synthetic
gagaugaaggagaagctctuaaaagagt

SEQ ID NO: 18269 - DNA, 25 bp, Artificial Sequence
  Synthetic
ggctgaggutaaagacagtuacaga

SEQ ID NO: 18270 - DNA, 24 bp, Artificial Sequence
  Synthetic
ctttatgccaugagtgcucagaga

SEQ ID NO: 18271 - DNA, 20 bp, Artificial Sequence
  Synthetic
ccagtggacucctcagggut

SEQ ID NO: 18272 - DNA, 22 bp, Artificial Sequence
  Synthetic
gggatcugcagtacttgctuca

SEQ ID NO: 18273 - DNA, 22 bp, Artificial Sequence
  Synthetic
tttccagcuctguggcaagaat

SEQ ID NO: 18274 - DNA, 21 bp, Artificial Sequence
  Synthetic
ggtuccagaacaccatuccgt

SEQ ID NO: 18275 - DNA, 21 bp, Artificial Sequence
  Synthetic
ggaaagcucctccaagtguct

SEQ ID NO: 18276 - DNA, 26 bp, Artificial Sequence
  Synthetic
tttcagttcaagcagaugtatggcua

SEQ ID NO: 18277 - DNA, 25 bp, Artificial Sequence
  Synthetic
gcttatcttucctctcctgcucaga

SEQ ID NO: 18278 - DNA, 22 bp, Artificial Sequence
  Synthetic
gguactctctgtugaccaccca

SEQ ID NO: 18279 - DNA, 22 bp, Artificial Sequence
  Synthetic
tctcugacccagcacaaaugat

SEQ ID NO: 18280 - DNA, 21 bp, Artificial Sequence
  Synthetic
cagagcctguctttgcggaua

SEQ ID NO: 18281 - DNA, 20 bp, Artificial Sequence
  Synthetic
cccagaauccatccgaguct

SEQ ID NO: 18282 - DNA, 26 bp, Artificial Sequence
  Synthetic
tugtgtcagtugaagaaacagaagga

SEQ ID NO: 18283 - DNA, 22 bp, Artificial Sequence
  Synthetic
ccatgtgcugtgtttgtuccag

SEQ ID NO: 18284 - DNA, 23 bp, Artificial Sequence
  Synthetic
ctttgtgcagaucttgctgugag

SEQ ID NO: 18285 - DNA, 21 bp, Artificial Sequence
  Synthetic
ccagcttucgtggcatcugaa

SEQ ID NO: 18286 - DNA, 23 bp, Artificial Sequence
  Synthetic
cagcagcucttgataucagaagg

SEQ ID NO: 18287 - DNA, 23 bp, Artificial Sequence
  Synthetic
tgaactcactgugctctgtgtug

SEQ ID NO: 18288 - DNA, 24 bp, Artificial Sequence
  Synthetic
ccaggaaaauacatggagctgaug

SEQ ID NO: 18289 - DNA, 24 bp, Artificial Sequence
  Synthetic
gatgtcaagtuctacctggcugag

SEQ ID NO: 18290 - DNA, 25 bp, Artificial Sequence
  Synthetic
taacggaguagaaattgcagtuacc

SEQ ID NO: 18291 - DNA, 26 bp, Artificial Sequence
  Synthetic
tctgatgttccgutttctcttgcuaa

SEQ ID NO: 18292 - DNA, 21 bp, Artificial Sequence
  Synthetic
gctgcagagutcggattctug

SEQ ID NO: 18293 - DNA, 29 bp, Artificial Sequence
  Synthetic
cuactatcaatacucgaccagcagaaaag

SEQ ID NO: 18294 - DNA, 29 bp, Artificial Sequence
  Synthetic
ttctcaagatcacutttaaatgggtguga

SEQ ID NO: 18295 - DNA, 23 bp, Artificial Sequence
  Synthetic
cctgggugtcatttcucagaact

SEQ ID NO: 18296 - DNA, 19 bp, Artificial Sequence
  Synthetic
ggctgucgctcagcaugaa

SEQ ID NO: 18297 - DNA, 23 bp, Artificial Sequence
  Synthetic
gctttcaagugaaacgtgttugt

SEQ ID NO: 18298 - DNA, 32 bp, Artificial Sequence
  Synthetic
ttaccttatctctuttcttagttcatctucgg

SEQ ID NO: 18299 - DNA, 30 bp, Artificial Sequence
  Synthetic
ttagctaaacgaauaaagcagttacaucat

SEQ ID NO: 18300 - DNA, 24 bp, Artificial Sequence
  Synthetic
gagautagttggcugaggcaaaac

SEQ ID NO: 18301 - DNA, 20 bp, Artificial Sequence
  Synthetic
cucgcaggaacatguggact

SEQ ID NO: 18302 - DNA, 22 bp, Artificial Sequence
  Synthetic
ctagagggcuccttcttggtuc

SEQ ID NO: 18303 - DNA, 27 bp, Artificial Sequence
  Synthetic
cccutcattaaggacuggagaagaaaa

SEQ ID NO: 18304 - DNA, 26 bp, Artificial Sequence
  Synthetic
actagttgtacugaaatgccaaugga

SEQ ID NO: 18305 - DNA, 27 bp, Artificial Sequence
  Synthetic
ggctgggaacauttgtcatttattcut

SEQ ID NO: 18306 - DNA, 23 bp, Artificial Sequence
  Synthetic
cagcucaaaccgtactctucaca

SEQ ID NO: 18307 - DNA, 27 bp, Artificial Sequence
  Synthetic
gcgcttgtaatgucaatagcttgacua

SEQ ID NO: 18308 - DNA, 25 bp, Artificial Sequence
  Synthetic
gtagtguggaaaataactgcugcac

SEQ ID NO: 18309 - DNA, 22 bp, Artificial Sequence
  Synthetic
ccatgccuggtattctcucaca

SEQ ID NO: 18310 - DNA, 25 bp, Artificial Sequence
  Synthetic
tttcttgtggcutaaaactcuccca

SEQ ID NO: 18311 - DNA, 23 bp, Artificial Sequence
  Synthetic
cctgcuaaggccatcaaaccuat

SEQ ID NO: 18312 - DNA, 29 bp, Artificial Sequence
  Synthetic
tttcagattgaguacttccaaagaaccut

SEQ ID NO: 18313 - DNA, 27 bp, Artificial Sequence
  Synthetic
gagtttattctgugtcttgctcaucct

SEQ ID NO: 18314 - DNA, 27 bp, Artificial Sequence
  Synthetic
gatgtccttcauggctctctcaauaag

SEQ ID NO: 18315 - DNA, 27 bp, Artificial Sequence
  Synthetic
cagauaaagaaagauacacacaacugg

SEQ ID NO: 18316 - DNA, 24 bp, Artificial Sequence
  Synthetic
ccttgtttttguagcaggcgatut

SEQ ID NO: 18317 - DNA, 17 bp, Artificial Sequence
  Synthetic
cgggucagccctggtuc

SEQ ID NO: 18318 - DNA, 19 bp, Artificial Sequence
  Synthetic
gtgagaaugaccgggugga

SEQ ID NO: 18319 - DNA, 21 bp, Artificial Sequence
  Synthetic
ccttgtcucacagagcacuca

SEQ ID NO: 18320 - DNA, 20 bp, Artificial Sequence
  Synthetic
ggaacucgaatcgcuaccct

SEQ ID NO: 18321 - DNA, 19 bp, Artificial Sequence
  Synthetic
ggguccccaagacaccuac

SEQ ID NO: 18322 - DNA, 23 bp, Artificial Sequence
  Synthetic
gctacaagaacuaccgauaccgt

SEQ ID NO: 18323 - DNA, 25 bp, Artificial Sequence
  Synthetic
cagcaagugcccagtatattttgut

SEQ ID NO: 18324 - DNA, 22 bp, Artificial Sequence
  Synthetic
tgtttgccaugtttggaacugg

SEQ ID NO: 18325 - DNA, 24 bp, Artificial Sequence
  Synthetic
aggacccgauaaaaccuaaagaug

SEQ ID NO: 18326 - DNA, 21 bp, Artificial Sequence
  Synthetic
ccctcagcugatgtctccuct

SEQ ID NO: 18327 - DNA, 21 bp, Artificial Sequence
  Synthetic
caccttccuccagaagctuga

SEQ ID NO: 18328 - DNA, 21 bp, Artificial Sequence
  Synthetic
cctggtcuccaacccattcug

SEQ ID NO: 18329 - DNA, 23 bp, Artificial Sequence
  Synthetic
gcatccaugagttctgtguccat

SEQ ID NO: 18330 - DNA, 25 bp, Artificial Sequence
  Synthetic
tcagtgctucaaagattgtatugct

SEQ ID NO: 18331 - DNA, 22 bp, Artificial Sequence
  Synthetic
ccatctucaaagggacctccuc

SEQ ID NO: 18332 - DNA, 24 bp, Artificial Sequence
  Synthetic
ggcgaagaacaaagacuccacaua

SEQ ID NO: 18333 - DNA, 30 bp, Artificial Sequence
  Synthetic
attcacaaaccugatctaaatcacugaagt

SEQ ID NO: 18334 - DNA, 23 bp, Artificial Sequence
  Synthetic
atttccccugcagattguaagca

SEQ ID NO: 18335 - DNA, 29 bp, Artificial Sequence
  Synthetic
ctattagatgaguaaggcgctcaacatua

SEQ ID NO: 18336 - DNA, 29 bp, Artificial Sequence
  Synthetic
ggagcctauggaagagatagaaaattuga

SEQ ID NO: 18337 - DNA, 22 bp, Artificial Sequence
  Synthetic
actgcaatagcutgctctgcut

SEQ ID NO: 18338 - DNA, 31 bp, Artificial Sequence
  Synthetic
aaaatgagaatgcauttaattgcgttaguct

SEQ ID NO: 18339 - DNA, 23 bp, Artificial Sequence
  Synthetic
cgttctgaagcugatggttucct

SEQ ID NO: 18340 - DNA, 23 bp, Artificial Sequence
  Synthetic
tttgttgttgugccttctucagc

SEQ ID NO: 18341 - DNA, 27 bp, Artificial Sequence
  Synthetic
gaacagatgatgugaggctattggaut

SEQ ID NO: 18342 - DNA, 28 bp, Artificial Sequence
  Synthetic
ggaaagaugaagaaactgaagagucaga

SEQ ID NO: 18343 - DNA, 28 bp, Artificial Sequence
  Synthetic
actacaacgaaguatttttgtucccaca

SEQ ID NO: 18344 - DNA, 25 bp, Artificial Sequence
  Synthetic
catgttgcacaaggugaagatgaug

SEQ ID NO: 18345 - DNA, 22 bp, Artificial Sequence
  Synthetic
gttttgcagccauaagtcggut

SEQ ID NO: 18346 - DNA, 31 bp, Artificial Sequence
  Synthetic
acacagaaagauactggagtaaaugaaaagg

SEQ ID NO: 18347 - DNA, 24 bp, Artificial Sequence
  Synthetic
aagcatuaggcacaacauaacaca

SEQ ID NO: 18348 - DNA, 22 bp, Artificial Sequence
  Synthetic
tggguaactgucccaccaaaaa

SEQ ID NO: 18349 - DNA, 29 bp, Artificial Sequence
  Synthetic
caaaagactaacucaggaacaagagagua

SEQ ID NO: 18350 - DNA, 25 bp, Artificial Sequence
  Synthetic
aattgutcggacagaugaagaggag

SEQ ID NO: 18351 - DNA, 26 bp, Artificial Sequence
  Synthetic
acctgagccucttaaatuaagcacaa

SEQ ID NO: 18352 - DNA, 31 bp, Artificial Sequence
  Synthetic
tctttcaatagacuctatcttgtctgcuaca

SEQ ID NO: 18353 - DNA, 26 bp, Artificial Sequence
  Synthetic
gttagctgaguatagcactggtucaa

SEQ ID NO: 18354 - DNA, 30 bp, Artificial Sequence
  Synthetic
ttctcttacccautgcttttactgatuagg

SEQ ID NO: 18355 - DNA, 25 bp, Artificial Sequence
  Synthetic
tttcctgaagaautctgggcuaagg

SEQ ID NO: 18356 - DNA, 28 bp, Artificial Sequence
  Synthetic
caagactggatuttcagtgtctguagaa

SEQ ID NO: 18357 - DNA, 30 bp, Artificial Sequence
  Synthetic
ttgtcttgaatgttutagtcactgttgtug

SEQ ID NO: 18358 - DNA, 26 bp, Artificial Sequence
  Synthetic
ttttactcaaggguatgaaagugcca

SEQ ID NO: 18359 - DNA, 24 bp, Artificial Sequence
  Synthetic
cagttgctcaugattctttcugct

SEQ ID NO: 18360 - DNA, 30 bp, Artificial Sequence
  Synthetic
ccacattttcttautgaactcttccaugag

SEQ ID NO: 18361 - DNA, 26 bp, Artificial Sequence
  Synthetic
tcagtcuaagacaguaaccagagaua

SEQ ID NO: 18362 - DNA, 25 bp, Artificial Sequence
  Synthetic
ttgttccaaaugtagguaacaccgt

SEQ ID NO: 18363 - DNA, 26 bp, Artificial Sequence
  Synthetic
caccatctccaucctcaataatccug

SEQ ID NO: 18364 - DNA, 20 bp, Artificial Sequence
  Synthetic
gctccucgcagcttcuaact

SEQ ID NO: 18365 - DNA, 29 bp, Artificial Sequence
  Synthetic
aaaaacctuaccacacagtacatatuggt

SEQ ID NO: 18366 - DNA, 31 bp, Artificial Sequence
  Synthetic
ctcaaatatttttgtguctaggacaaggaug

SEQ ID NO: 18367 - DNA, 28 bp, Artificial Sequence
  Synthetic
ccttcactttcutcatcttcctctugat

SEQ ID NO: 18368 - DNA, 25 bp, Artificial Sequence
  Synthetic
tgaccatatattucaggccctgcua

SEQ ID NO: 18369 - DNA, 30 bp, Artificial Sequence
  Synthetic
gatttcttactttuactagtggcttcucgt

SEQ ID NO: 18370 - DNA, 22 bp, Artificial Sequence
  Synthetic
tctctggcuggaagtcctgaua

SEQ ID NO: 18371 - DNA, 26 bp, Artificial Sequence
  Synthetic
aaacacaaaauggtttacatguggag

SEQ ID NO: 18372 - DNA, 26 bp, Artificial Sequence
  Synthetic
gcagaccgaagaautagctggaaaut

SEQ ID NO: 18373 - DNA, 23 bp, Artificial Sequence
  Synthetic
ctcccaggucagtagtagcauat

SEQ ID NO: 18374 - DNA, 28 bp, Artificial Sequence
  Synthetic
cagaatcctacugaaaagcttgauggaa

SEQ ID NO: 18375 - DNA, 23 bp, Artificial Sequence
  Synthetic
cacattcttcugtttcccagcuc

SEQ ID NO: 18376 - DNA, 30 bp, Artificial Sequence
  Synthetic
ttgtaactccaucaggtaactctcaattuc

SEQ ID NO: 18377 - DNA, 26 bp, Artificial Sequence
  Synthetic
tcacaacttuacctttgggaaugaca

SEQ ID NO: 18378 - DNA, 28 bp, Artificial Sequence
  Synthetic
caatactgauagaggaagucctttctuc

SEQ ID NO: 18379 - DNA, 23 bp, Artificial Sequence
  Synthetic
gagtgcttcuggagcacctuaaa

SEQ ID NO: 18380 - DNA, 24 bp, Artificial Sequence
  Synthetic
ggctucaaacagccaacauaagag

SEQ ID NO: 18381 - DNA, 23 bp, Artificial Sequence
  Synthetic
cucctactcucacacaggagaga

SEQ ID NO: 18382 - DNA, 21 bp, Artificial Sequence
  Synthetic
acacagcuctccagacuggaa

SEQ ID NO: 18383 - DNA, 25 bp, Artificial Sequence
  Synthetic
gtttttgtggugggctttatgaugt

SEQ ID NO: 18384 - DNA, 22 bp, Artificial Sequence
  Synthetic
tcatctggtucatgctgcucat

SEQ ID NO: 18385 - DNA, 29 bp, Artificial Sequence
  Synthetic
agcaagctgtaacautcattcaatcttuc

SEQ ID NO: 18386 - DNA, 21 bp, Artificial Sequence
  Synthetic
cgagggtugctcatagtugct

SEQ ID NO: 18387 - DNA, 23 bp, Artificial Sequence
  Synthetic
gggaaatccugaaccagcatcut

SEQ ID NO: 18388 - DNA, 21 bp, Artificial Sequence
  Synthetic
ccaggugccaucgaagaacag

SEQ ID NO: 18389 - DNA, 23 bp, Artificial Sequence
  Synthetic
caaactutcacaccaugggacag

SEQ ID NO: 18390 - DNA, 22 bp, Artificial Sequence
  Synthetic
caatctccuccaggccaucaaa

SEQ ID NO: 18391 - DNA, 21 bp, Artificial Sequence
  Synthetic
cttttccatuggcccaaggug

SEQ ID NO: 18392 - DNA, 23 bp, Artificial Sequence
  Synthetic
cgaatcataccuccttggacugg

SEQ ID NO: 18393 - DNA, 24 bp, Artificial Sequence
  Synthetic
tgcatctcucagttttcttuggct

SEQ ID NO: 18394 - DNA, 25 bp, Artificial Sequence
  Synthetic
gaaauttcttggcauaaccagccat

SEQ ID NO: 18395 - DNA, 20 bp, Artificial Sequence
  Synthetic
cccctgcuggatcagtugac

SEQ ID NO: 18396 - DNA, 21 bp, Artificial Sequence
  Synthetic
ggctcaccggcucttgttuaa

SEQ ID NO: 18397 - DNA, 28 bp, Artificial Sequence
  Synthetic
tcaaggagaagcauaaaatttugcacag

SEQ ID NO: 18398 - DNA, 24 bp, Artificial Sequence
  Synthetic
ggcuccccatataguccaaaacag

SEQ ID NO: 18399 - DNA, 23 bp, Artificial Sequence
  Synthetic
ctcattagggucatcgttggcut

SEQ ID NO: 18400 - DNA, 23 bp, Artificial Sequence
  Synthetic
gggctgttcautttgagtgcaua

SEQ ID NO: 18401 - DNA, 31 bp, Artificial Sequence
  Synthetic
acatgaccctcaguagcaatataaatttucc

SEQ ID NO: 18402 - DNA, 23 bp, Artificial Sequence
  Synthetic
gtctgagaacggaugagttugct

SEQ ID NO: 18403 - DNA, 24 bp, Artificial Sequence
  Synthetic
ttctaaacgugccttctgttucct

SEQ ID NO: 18404 - DNA, 28 bp, Artificial Sequence
  Synthetic
cgagtaguaaaactttctgaugagggaa

SEQ ID NO: 18405 - DNA, 25 bp, Artificial Sequence
  Synthetic
ctgtgctgucataaatacactuggg

SEQ ID NO: 18406 - DNA, 24 bp, Artificial Sequence
  Synthetic
ggtttttgacaaautccgtguggt

SEQ ID NO: 18407 - DNA, 22 bp, Artificial Sequence
  Synthetic
ggcccttgaugggttcttctut

SEQ ID NO: 18408 - DNA, 25 bp, Artificial Sequence
  Synthetic
gattaaagggacuctgaagggacut

SEQ ID NO: 18409 - DNA, 31 bp, Artificial Sequence
  Synthetic
aatcttaaaagaaacugtgaagcaaatucgt

SEQ ID NO: 18410 - DNA, 22 bp, Artificial Sequence
  Synthetic
ctttcttguctctgcccuggag

SEQ ID NO: 18411 - DNA, 25 bp, Artificial Sequence
  Synthetic
cagacacttcaucatcagctctcut

SEQ ID NO: 18412 - DNA, 32 bp, Artificial Sequence
  Synthetic
actggtatctcuaaaaacatttcaaacacuga

SEQ ID NO: 18413 - DNA, 30 bp, Artificial Sequence
  Synthetic
attgactgaattuagatcactggtgatuaa

SEQ ID NO: 18414 - DNA, 24 bp, Artificial Sequence
  Synthetic
gccacatcauccatttccctttut

SEQ ID NO: 18415 - DNA, 25 bp, Artificial Sequence
  Synthetic
aggagcagcauctatctgagaauga

SEQ ID NO: 18416 - DNA, 25 bp, Artificial Sequence
  Synthetic
ctgctgagaagcccuatctttacut

SEQ ID NO: 18417 - DNA, 22 bp, Artificial Sequence
  Synthetic
ctttcacaagaugcacccacug

SEQ ID NO: 18418 - DNA, 22 bp, Artificial Sequence
  Synthetic
aatatggucaccccuagcaagt

SEQ ID NO: 18419 - DNA, 26 bp, Artificial Sequence
  Synthetic
gaaattggatuggcggtgatttucat

SEQ ID NO: 18420 - DNA, 30 bp, Artificial Sequence
  Synthetic
agcttataacataatuacctgtttggcaut

SEQ ID NO: 18421 - DNA, 25 bp, Artificial Sequence
  Synthetic
cccacctctugatgaaccatctaut

SEQ ID NO: 18422 - DNA, 30 bp, Artificial Sequence
  Synthetic
ttaacataagaacaagacautcaaccuact

SEQ ID NO: 18423 - DNA, 26 bp, Artificial Sequence
  Synthetic
tttagatgtctcugggaaaactgcut

SEQ ID NO: 18424 - DNA, 28 bp, Artificial Sequence
  Synthetic
agaatattttgtgauttcaaccccctua

SEQ ID NO: 18425 - DNA, 29 bp, Artificial Sequence
  Synthetic
aaaactgtgccautctgattgaaaaugat

SEQ ID NO: 18426 - DNA, 22 bp, Artificial Sequence
  Synthetic
cctccgacagutctgagtucac

SEQ ID NO: 18427 - DNA, 20 bp, Artificial Sequence
  Synthetic
gcagtcagcucctctgucac

SEQ ID NO: 18428 - DNA, 21 bp, Artificial Sequence
  Synthetic
tgatcatgucgtgggcttucc

SEQ ID NO: 18429 - DNA, 22 bp, Artificial Sequence
  Synthetic
tgactucggctaacugagaggt

SEQ ID NO: 18430 - DNA, 25 bp, Artificial Sequence
  Synthetic
ccagtaattcaautcttcccgguct

SEQ ID NO: 18431 - DNA, 23 bp, Artificial Sequence
  Synthetic
tgctcttcccuattctcccctut

SEQ ID NO: 18432 - DNA, 21 bp, Artificial Sequence
  Synthetic
ggtgggcaauggccataucat

SEQ ID NO: 18433 - DNA, 23 bp, Artificial Sequence
  Synthetic
cctttgcacucagaacauccaag

SEQ ID NO: 18434 - DNA, 22 bp, Artificial Sequence
  Synthetic
tcccacccacacuatccctuac

SEQ ID NO: 18435 - DNA, 24 bp, Artificial Sequence
  Synthetic
gctgaaaaggutccttacuaccct

SEQ ID NO: 18436 - DNA, 21 bp, Artificial Sequence
  Synthetic
gtggcattgutggaggaguca

SEQ ID NO: 18437 - DNA, 28 bp, Artificial Sequence
  Synthetic
tgaaaaactgaggugcttaaggaguaaa

SEQ ID NO: 18438 - DNA, 28 bp, Artificial Sequence
  Synthetic
ctattactaaacucagtgctcuccaagt

SEQ ID NO: 18439 - DNA, 24 bp, Artificial Sequence
  Synthetic
gaaaagattgauctctgggcuggt

SEQ ID NO: 18440 - DNA, 29 bp, Artificial Sequence
  Synthetic
actattgttgtguttctttttcccucagt

SEQ ID NO: 18441 - DNA, 22 bp, Artificial Sequence
  Synthetic
cctctcaacagucctgguacct

SEQ ID NO: 18442 - DNA, 20 bp, Artificial Sequence
  Synthetic
gggtuaggcccuacagacaa

SEQ ID NO: 18443 - DNA, 23 bp, Artificial Sequence
  Synthetic
gaagccugaaaagccattgtuca

SEQ ID NO: 18444 - DNA, 28 bp, Artificial Sequence
  Synthetic
tgtgtgtaucacttgagaataugagcag

SEQ ID NO: 18445 - DNA, 24 bp, Artificial Sequence
  Synthetic
ggagtcaacutcccaatuggagaa

SEQ ID NO: 18446 - DNA, 26 bp, Artificial Sequence
  Synthetic
ctccaacaatgucagattgcaaaugt

SEQ ID NO: 18447 - DNA, 28 bp, Artificial Sequence
  Synthetic
gagtcctttgaggautgtgaaattctut

SEQ ID NO: 18448 - DNA, 21 bp, Artificial Sequence
  Synthetic
cctctcgauactccuggcgaa

SEQ ID NO: 18449 - DNA, 24 bp, Artificial Sequence
  Synthetic
aggcucgaaaacgcaagtacttua

SEQ ID NO: 18450 - DNA, 31 bp, Artificial Sequence
  Synthetic
atgaaaaccatuacaaacttctcaagtgtuc

SEQ ID NO: 18451 - DNA, 28 bp, Artificial Sequence
  Synthetic
ggagaaaatccuaattccagttguacct

SEQ ID NO: 18452 - DNA, 30 bp, Artificial Sequence
  Synthetic
acaacattgtagacutttccatgatuacct

SEQ ID NO: 18453 - DNA, 28 bp, Artificial Sequence
  Synthetic
aagtcatgtggautctttgaattttguc

SEQ ID NO: 18454 - DNA, 22 bp, Artificial Sequence
  Synthetic
gaaatttccgaugctgcugaag

SEQ ID NO: 18455 - DNA, 21 bp, Artificial Sequence
  Synthetic
aaggaugggcacggaaaauga

SEQ ID NO: 18456 - DNA, 24 bp, Artificial Sequence
  Synthetic
ccatcctccucctcatcatcauac

SEQ ID NO: 18457 - DNA, 25 bp, Artificial Sequence
  Synthetic
gtctcgagaugcctctgtattucaa

SEQ ID NO: 18458 - DNA, 24 bp, Artificial Sequence
  Synthetic
cttgtgctuggagatgttctuacg

SEQ ID NO: 18459 - DNA, 28 bp, Artificial Sequence
  Synthetic
ggcattttctttcautctggacaacaut

SEQ ID NO: 18460 - DNA, 22 bp, Artificial Sequence
  Synthetic
tgcattgacuggagtguggaaa

SEQ ID NO: 18461 - DNA, 21 bp, Artificial Sequence
  Synthetic
gcgagtuggaaccactgtuca

SEQ ID NO: 18462 - DNA, 24 bp, Artificial Sequence
  Synthetic
catgccccacauttcagtttuagg

SEQ ID NO: 18463 - DNA, 28 bp, Artificial Sequence
  Synthetic
cttuttgatgaaaaacaucgggaagaga

SEQ ID NO: 18464 - DNA, 23 bp, Artificial Sequence
  Synthetic
gtgattgtttccugatgctgcug

SEQ ID NO: 18465 - DNA, 28 bp, Artificial Sequence
  Synthetic
catctcagcugaagatagtgacttugaa

SEQ ID NO: 18466 - DNA, 23 bp, Artificial Sequence
  Synthetic
gcutggcattttucagggaaagg

SEQ ID NO: 18467 - DNA, 23 bp, Artificial Sequence
  Synthetic
gggtgtggugaaggattctccua

SEQ ID NO: 18468 - DNA, 27 bp, Artificial Sequence
  Synthetic
ctcttcttccgutggtaaacgaaaauc

SEQ ID NO: 18469 - DNA, 30 bp, Artificial Sequence
  Synthetic
cacggaggauacgaatggaagatauaaaaa

SEQ ID NO: 18470 - DNA, 24 bp, Artificial Sequence
  Synthetic
gaaaaaggtugttctcaagugcct

SEQ ID NO: 18471 - DNA, 23 bp, Artificial Sequence
  Synthetic
gttggcauggcaaccaagauaaa

SEQ ID NO: 18472 - DNA, 25 bp, Artificial Sequence
  Synthetic
aaagaagggcugccataattccaua

SEQ ID NO: 18473 - DNA, 21 bp, Artificial Sequence
  Synthetic
cagcagaacaugtcucagcca

SEQ ID NO: 18474 - DNA, 22 bp, Artificial Sequence
  Synthetic
cgtccauacaccagatccucat

SEQ ID NO: 18475 - DNA, 29 bp, Artificial Sequence
  Synthetic
tggcttccttcuattaagactaggaaugt

SEQ ID NO: 18476 - DNA, 24 bp, Artificial Sequence
  Synthetic
cacccagcauatcataccacaguc

SEQ ID NO: 18477 - DNA, 26 bp, Artificial Sequence
  Synthetic
ctgatgatgaaaucacgatgatggut

SEQ ID NO: 18478 - DNA, 21 bp, Artificial Sequence
  Synthetic
caacagctuggtggcatcaug

SEQ ID NO: 18479 - DNA, 28 bp, Artificial Sequence
  Synthetic
cctcagagaaaguggatttcagtagtua

SEQ ID NO: 18480 - DNA, 26 bp, Artificial Sequence
  Synthetic
atcttctgtacucctaatccacccut

SEQ ID NO: 18481 - DNA, 22 bp, Artificial Sequence
  Synthetic
gggaaagcgucttggatgauga

SEQ ID NO: 18482 - DNA, 21 bp, Artificial Sequence
  Synthetic
tcatgggcuctctggctauct

SEQ ID NO: 18483 - DNA, 23 bp, Artificial Sequence
  Synthetic
aggctcccccuactattauagcg

SEQ ID NO: 18484 - DNA, 22 bp, Artificial Sequence
  Synthetic
tctucccaccauacactccuat

SEQ ID NO: 18485 - DNA, 21 bp, Artificial Sequence
  Synthetic
gacgacaugaaggccaatcug

SEQ ID NO: 18486 - DNA, 17 bp, Artificial Sequence
  Synthetic
gcgcgggccuctctuac

SEQ ID NO: 18487 - DNA, 17 bp, Artificial Sequence
  Synthetic
accgcccguctttcucc

SEQ ID NO: 18488 - DNA, 22 bp, Artificial Sequence
  Synthetic
cctgatcucccaggcaaacaug

SEQ ID NO: 18489 - DNA, 24 bp, Artificial Sequence
  Synthetic
cctcatggcuaagcttctttcuct

SEQ ID NO: 18490 - DNA, 29 bp, Artificial Sequence
  Synthetic
ccgaggagucggataatttttctcuaaat

SEQ ID NO: 18491 - DNA, 24 bp, Artificial Sequence
  Synthetic
ggcttgaattautccgacctguga

SEQ ID NO: 18492 - DNA, 30 bp, Artificial Sequence
  Synthetic
gtataugagggaaguagaagaagatgtaug

SEQ ID NO: 18493 - DNA, 28 bp, Artificial Sequence
  Synthetic
gagatgaatctuacagtgatgtgtccut

SEQ ID NO: 18494 - DNA, 25 bp, Artificial Sequence
  Synthetic
gcaaaccaggaggcautgattcuaa

SEQ ID NO: 18495 - DNA, 24 bp, Artificial Sequence
  Synthetic
agacaaatgcuatggatgggcuag

SEQ ID NO: 18496 - DNA, 27 bp, Artificial Sequence
  Synthetic
attgaactgaagguagagttgcugaat

SEQ ID NO: 18497 - DNA, 27 bp, Artificial Sequence
  Synthetic
agactacggagutccttttcatcagua

SEQ ID NO: 18498 - DNA, 20 bp, Artificial Sequence
  Synthetic
cacctcagtuggagctgcut

SEQ ID NO: 18499 - DNA, 18 bp, Artificial Sequence
  Synthetic
gactcugcccaggcuacc

SEQ ID NO: 18500 - DNA, 19 bp, Artificial Sequence
  Synthetic
gtggccacaagccutcuct

SEQ ID NO: 18501 - DNA, 20 bp, Artificial Sequence
  Synthetic
acccttcuaacccacccuca

SEQ ID NO: 18502 - DNA, 20 bp, Artificial Sequence
  Synthetic
ggacauccccgtgtcacuac

SEQ ID NO: 18503 - DNA, 23 bp, Artificial Sequence
  Synthetic
tgttcccgttucctcttgatcuc

SEQ ID NO: 18504 - DNA, 21 bp, Artificial Sequence
  Synthetic
cagaagcgaucaggaugacca

SEQ ID NO: 18505 - DNA, 18 bp, Artificial Sequence
  Synthetic
gcccacugaccactgugt

SEQ ID NO: 18506 - DNA, 23 bp, Artificial Sequence
  Synthetic
gacctcccgauaaaacgctacut

SEQ ID NO: 18507 - DNA, 22 bp, Artificial Sequence
  Synthetic
ctacatctaccugacggctugg

SEQ ID NO: 18508 - DNA, 22 bp, Artificial Sequence
  Synthetic
cugttgaagcugaacacgcaaa

SEQ ID NO: 18509 - DNA, 26 bp, Artificial Sequence
  Synthetic
acttacuttacgaccuacacaggagt

SEQ ID NO: 18510 - DNA, 24 bp, Artificial Sequence
  Synthetic
gagcauagtgcttcucagcaaaag

SEQ ID NO: 18511 - DNA, 17 bp, Artificial Sequence
  Synthetic
ctctgugcagcccguca

SEQ ID NO: 18512 - DNA, 23 bp, Artificial Sequence
  Synthetic
tgtcctcgcgucgatataaaucc

SEQ ID NO: 18513 - DNA, 27 bp, Artificial Sequence
  Synthetic
aaaagcatctttautttcgaagcaguc

SEQ ID NO: 18514 - DNA, 18 bp, Artificial Sequence
  Synthetic
ccggguggcatttgucaa

SEQ ID NO: 18515 - DNA, 19 bp, Artificial Sequence
  Synthetic
cctgctggutgcactguca

SEQ ID NO: 18516 - DNA, 26 bp, Artificial Sequence
  Synthetic
tggtgaaaaugaagaattgcauaacc

SEQ ID NO: 18517 - DNA, 22 bp, Artificial Sequence
  Synthetic
gggtacgaguatgtcucacaca

SEQ ID NO: 18518 - DNA, 22 bp, Artificial Sequence
  Synthetic
tgttttgctcuccacccttcug

SEQ ID NO: 18519 - DNA, 24 bp, Artificial Sequence
  Synthetic
gctgggaggaaaugctgaauaagg

SEQ ID NO: 18520 - DNA, 32 bp, Artificial Sequence
  Synthetic
caagaagaaaatauacctgatccatguaacct

SEQ ID NO: 18521 - DNA, 32 bp, Artificial Sequence
  Synthetic
cttattacagtgagaaauttttgtctctgcut

SEQ ID NO: 18522 - DNA, 18 bp, Artificial Sequence
  Synthetic
ggccggugcagatagucc

SEQ ID NO: 18523 - DNA, 17 bp, Artificial Sequence
  Synthetic
catggccucggctggua

SEQ ID NO: 18524 - DNA, 23 bp, Artificial Sequence
  Synthetic
ccctgcttgutaaagaaaggcut

SEQ ID NO: 18525 - DNA, 29 bp, Artificial Sequence
  Synthetic
acttcacatttccuttgacatctttcuct

SEQ ID NO: 18526 - DNA, 22 bp, Artificial Sequence
  Synthetic
tcgagcaacuacgaacucaagc

SEQ ID NO: 18527 - DNA, 20 bp, Artificial Sequence
  Synthetic
tggaggcuggaggaauggat

SEQ ID NO: 18528 - DNA, 20 bp, Artificial Sequence
  Synthetic
cttcccgcucttccactuca

SEQ ID NO: 18529 - DNA, 19 bp, Artificial Sequence
  Synthetic
cgtacggguggctcucaag

SEQ ID NO: 18530 - DNA, 17 bp, Artificial Sequence
  Synthetic
acuacggcgugcgaacc

SEQ ID NO: 18531 - DNA, 22 bp, Artificial Sequence
  Synthetic
gggaagaacaaggaugctccua

SEQ ID NO: 18532 - DNA, 25 bp, Artificial Sequence
  Synthetic
gcatcagttguccgtacagataguc

SEQ ID NO: 18533 - DNA, 24 bp, Artificial Sequence
  Synthetic
tgggtgttgaguctgttaaagcuc

SEQ ID NO: 18534 - DNA, 23 bp, Artificial Sequence
  Synthetic
guatccagaagcugggcagaaaa

SEQ ID NO: 18535 - DNA, 24 bp, Artificial Sequence
  Synthetic
aggttucaggcttctucaaaggac

SEQ ID NO: 18536 - DNA, 25 bp, Artificial Sequence
  Synthetic
ctatgcaacaagaucacaagcagut

SEQ ID NO: 18537 - DNA, 22 bp, Artificial Sequence
  Synthetic
gtggagacaccaaguctuccag

SEQ ID NO: 18538 - DNA, 21 bp, Artificial Sequence
  Synthetic
cagaatgucaacagcgcctut

SEQ ID NO: 18539 - DNA, 21 bp, Artificial Sequence
  Synthetic
cgtttgtugcaggctttgcuc

SEQ ID NO: 18540 - DNA, 23 bp, Artificial Sequence
  Synthetic
aagccaugaggaatgtcactugt

SEQ ID NO: 18541 - DNA, 31 bp, Artificial Sequence
  Synthetic
cattgagtataaacagugattttcagcctut

SEQ ID NO: 18542 - DNA, 28 bp, Artificial Sequence
  Synthetic
gaaatataacaaacuccgccaaccatut

SEQ ID NO: 18543 - DNA, 25 bp, Artificial Sequence
  Synthetic
aagcttccuccattcuaacaaacac

SEQ ID NO: 18544 - DNA, 24 bp, Artificial Sequence
  Synthetic
aggaaccagagagcutcttuacct

SEQ ID NO: 18545 - DNA, 27 bp, Artificial Sequence
  Synthetic
cattttuaaacaaccgagacaagucca

SEQ ID NO: 18546 - DNA, 21 bp, Artificial Sequence
  Synthetic
gggaggaaguttgctgucgag

SEQ ID NO: 18547 - DNA, 19 bp, Artificial Sequence
  Synthetic
ggccccggutagtctcuga

SEQ ID NO: 18548 - DNA, 24 bp, Artificial Sequence
  Synthetic
cacatcgaacuggatagaggtugt

SEQ ID NO: 18549 - DNA, 24 bp, Artificial Sequence
  Synthetic
gcagagagugtgaggttaucacag

SEQ ID NO: 18550 - DNA, 23 bp, Artificial Sequence
  Synthetic
agtattgctgucctgcaagucac

SEQ ID NO: 18551 - DNA, 28 bp, Artificial Sequence
  Synthetic
acacaaaaagctauccactttcactuct

SEQ ID NO: 18552 - DNA, 26 bp, Artificial Sequence
  Synthetic
ggctattccaaacauaagctgcttut

SEQ ID NO: 18553 - DNA, 20 bp, Artificial Sequence
  Synthetic
gcagcagcauacactauggc

SEQ ID NO: 18554 - DNA, 29 bp, Artificial Sequence
  Synthetic
ccaggttagctuagaactattgctgtaut

SEQ ID NO: 18555 - DNA, 28 bp, Artificial Sequence
  Synthetic
aagagatttaccugatcactttgucgag

SEQ ID NO: 18556 - DNA, 29 bp, Artificial Sequence
  Synthetic
cagatggtgtgcuttgtccattttataug

SEQ ID NO: 18557 - DNA, 21 bp, Artificial Sequence
  Synthetic
tcttgugcaagcccatgguat

SEQ ID NO: 18558 - DNA, 23 bp, Artificial Sequence
  Synthetic
gcccatcaaccutctcttttgut

SEQ ID NO: 18559 - DNA, 26 bp, Artificial Sequence
  Synthetic
gctatattuggagcagacacactugg

SEQ ID NO: 18560 - DNA, 29 bp, Artificial Sequence
  Synthetic
agatttggagaaaggauauttgtgauagg

SEQ ID NO: 18561 - DNA, 24 bp, Artificial Sequence
  Synthetic
gauttctgtaccatugagggcact

SEQ ID NO: 18562 - DNA, 21 bp, Artificial Sequence
  Synthetic
gtttccaagugggcacttcug

SEQ ID NO: 18563 - DNA, 25 bp, Artificial Sequence
  Synthetic
aaccccauggagtacuaggagaaaa

SEQ ID NO: 18564 - DNA, 24 bp, Artificial Sequence
  Synthetic
ttcttataggaaautcggcgccut

SEQ ID NO: 18565 - DNA, 27 bp, Artificial Sequence
  Synthetic
cagatgagagauctcattcaccttugt

SEQ ID NO: 18566 - DNA, 24 bp, Artificial Sequence
  Synthetic
tgcatcctucccagtctttuaact

SEQ ID NO: 18567 - DNA, 22 bp, Artificial Sequence
  Synthetic
ctcagttgugcctgtttcaugg

SEQ ID NO: 18568 - DNA, 20 bp, Artificial Sequence
  Synthetic
gttcgcacuccttccaucca

SEQ ID NO: 18569 - DNA, 29 bp, Artificial Sequence
  Synthetic
tccgtcattagutagaaacatcauaggga

SEQ ID NO: 18570 - DNA, 24 bp, Artificial Sequence
  Synthetic
catgcctttcuctgagtgtaugct

SEQ ID NO: 18571 - DNA, 25 bp, Artificial Sequence
  Synthetic
aaatcagtaagutacctgctuggct

SEQ ID NO: 18572 - DNA, 22 bp, Artificial Sequence
  Synthetic
agagggcaauattgtgcctugg

SEQ ID NO: 18573 - DNA, 28 bp, Artificial Sequence
  Synthetic
agtaatgctacucaacacagagtctgua

SEQ ID NO: 18574 - DNA, 23 bp, Artificial Sequence
  Synthetic
tgtttccaagutctttggcugga

SEQ ID NO: 18575 - DNA, 24 bp, Artificial Sequence
  Synthetic
tcttggttggcugggtactagtua

SEQ ID NO: 18576 - DNA, 22 bp, Artificial Sequence
  Synthetic
actcccctuccaacatcatucc

SEQ ID NO: 18577 - DNA, 22 bp, Artificial Sequence
  Synthetic
gatgcugagacctcactgucac

SEQ ID NO: 18578 - DNA, 22 bp, Artificial Sequence
  Synthetic
ccacctgctucctccttttcug

SEQ ID NO: 18579 - DNA, 20 bp, Artificial Sequence
  Synthetic
gagcaacaauggacgtggug

SEQ ID NO: 18580 - DNA, 22 bp, Artificial Sequence
  Synthetic
tttagcagcccagcutttggua

SEQ ID NO: 18581 - DNA, 20 bp, Artificial Sequence
  Synthetic
ggaacugaacccaggcugac

SEQ ID NO: 18582 - DNA, 30 bp, Artificial Sequence
  Synthetic
gttgtaaaagacucatccaatccaaatuga

SEQ ID NO: 18583 - DNA, 28 bp, Artificial Sequence
  Synthetic
gttgacgtgaaugaagacaaatgcauat

SEQ ID NO: 18584 - DNA, 21 bp, Artificial Sequence
  Synthetic
gcacuttcagctcuggaggag

SEQ ID NO: 18585 - DNA, 28 bp, Artificial Sequence
  Synthetic
actctcttaagauaaccacccuagagat

SEQ ID NO: 18586 - DNA, 23 bp, Artificial Sequence
  Synthetic
tcccaacagacutctggtttugg

SEQ ID NO: 18587 - DNA, 29 bp, Artificial Sequence
  Synthetic
aatactaaacagacuggtcagguaaaaca

SEQ ID NO: 18588 - DNA, 28 bp, Artificial Sequence
  Synthetic
aaacatgtgtttuaaaaaggctcctcug

SEQ ID NO: 18589 - DNA, 19 bp, Artificial Sequence
  Synthetic
ccagcaugcagucccagat

SEQ ID NO: 18590 - DNA, 17 bp, Artificial Sequence
  Synthetic
gaactgggcugcgguca

SEQ ID NO: 18591 - DNA, 17 bp, Artificial Sequence
  Synthetic
gccggagcutccugagt

SEQ ID NO: 18592 - DNA, 22 bp, Artificial Sequence
  Synthetic
gtagcucatcatcugggacagg

SEQ ID NO: 18593 - DNA, 21 bp, Artificial Sequence
  Synthetic
catggugccgaaccaauacaa

SEQ ID NO: 18594 - DNA, 18 bp, Artificial Sequence
  Synthetic
catcccaggcagguggut

SEQ ID NO: 18595 - DNA, 17 bp, Artificial Sequence
  Synthetic
agctccggcaugctcuc

SEQ ID NO: 18596 - DNA, 19 bp, Artificial Sequence
  Synthetic
tgcgcaccaggutgtacuc

SEQ ID NO: 18597 - DNA, 17 bp, Artificial Sequence
  Synthetic
ccaaggugctgcuggac

SEQ ID NO: 18598 - DNA, 21 bp, Artificial Sequence
  Synthetic
gttgaugaggtccuccagcat

SEQ ID NO: 18599 - DNA, 19 bp, Artificial Sequence
  Synthetic
ggaggcaucggtgtacguc

SEQ ID NO: 18600 - DNA, 19 bp, Artificial Sequence
  Synthetic
tgcggtcugtctggttgug

SEQ ID NO: 18601 - DNA, 18 bp, Artificial Sequence
  Synthetic
cacccgtcuctgcctcug

SEQ ID NO: 18602 - DNA, 21 bp, Artificial Sequence
  Synthetic
cgacucacccggaacttctug

SEQ ID NO: 18603 - DNA, 19 bp, Artificial Sequence
  Synthetic
tcctagggagcucgcucag

SEQ ID NO: 18604 - DNA, 17 bp, Artificial Sequence
  Synthetic
ctcugcacggccucgat

SEQ ID NO: 18605 - DNA, 19 bp, Artificial Sequence
  Synthetic
cuctctgattguccgccca

SEQ ID NO: 18606 - DNA, 21 bp, Artificial Sequence
  Synthetic
ggccacauccaagttcagguc

SEQ ID NO: 18607 - DNA, 20 bp, Artificial Sequence
  Synthetic
cagtctcugcagtgcuggaa

SEQ ID NO: 18608 - DNA, 19 bp, Artificial Sequence
  Synthetic
aggtccccuggttguagca

SEQ ID NO: 18609 - DNA, 17 bp, Artificial Sequence
  Synthetic
ggcggcacaugcatcuc

SEQ ID NO: 18610 - DNA, 17 bp, Artificial Sequence
  Synthetic
tcatugacgcgcugcac

SEQ ID NO: 18611 - DNA, 22 bp, Artificial Sequence
  Synthetic
gagccccaagugcttuaacaac

SEQ ID NO: 18612 - DNA, 21 bp, Artificial Sequence
  Synthetic
gccacaacccutacccuagga

SEQ ID NO: 18613 - DNA, 21 bp, Artificial Sequence
  Synthetic
ctacacaggcagcuactguga

SEQ ID NO: 18614 - DNA, 17 bp, Artificial Sequence
  Synthetic
cctucgggcacctcugt

SEQ ID NO: 18615 - DNA, 18 bp, Artificial Sequence
  Synthetic
gctucacgggcagcuact

SEQ ID NO: 18616 - DNA, 23 bp, Artificial Sequence
  Synthetic
cgttgaugtcctccucacagaaa

SEQ ID NO: 18617 - DNA, 19 bp, Artificial Sequence
  Synthetic
ctcacacucaccctuccgt

SEQ ID NO: 18618 - DNA, 17 bp, Artificial Sequence
  Synthetic
ccgccccucccacauag

SEQ ID NO: 18619 - DNA, 19 bp, Artificial Sequence
  Synthetic
gucccaacugccagaccaa

SEQ ID NO: 18620 - DNA, 22 bp, Artificial Sequence
  Synthetic
gggtttaggacugatgtguccc

SEQ ID NO: 18621 - DNA, 20 bp, Artificial Sequence
  Synthetic
ggacggcaucaatggctuca

SEQ ID NO: 18622 - DNA, 20 bp, Artificial Sequence
  Synthetic
gaagcagagguaggcgtugt

SEQ ID NO: 18623 - DNA, 19 bp, Artificial Sequence
  Synthetic
ccacuacggctccugcaag

SEQ ID NO: 18624 - DNA, 19 bp, Artificial Sequence
  Synthetic
ccagccucgactcggttuc

SEQ ID NO: 18625 - DNA, 18 bp, Artificial Sequence
  Synthetic
ccccgaugcgagaucgac

SEQ ID NO: 18626 - DNA, 17 bp, Artificial Sequence
  Synthetic
gggccucaaggcacuca

SEQ ID NO: 18627 - DNA, 18 bp, Artificial Sequence
  Synthetic
gtcaacggcuggacuggt

SEQ ID NO: 18628 - DNA, 17 bp, Artificial Sequence
  Synthetic
ggcacacucgtggguga

SEQ ID NO: 18629 - DNA, 19 bp, Artificial Sequence
  Synthetic
acaacgaggucggctccua

SEQ ID NO: 18630 - DNA, 19 bp, Artificial Sequence
  Synthetic
gtgaggcaggcautgucca

SEQ ID NO: 18631 - DNA, 17 bp, Artificial Sequence
  Synthetic
cucagcacccccugcaa

SEQ ID NO: 18632 - DNA, 28 bp, Artificial Sequence
  Synthetic
tcatccaaggtuttcatcttgacttugt

SEQ ID NO: 18633 - DNA, 28 bp, Artificial Sequence
  Synthetic
tgacatgcauggagatagtattaaugcc

SEQ ID NO: 18634 - DNA, 23 bp, Artificial Sequence
  Synthetic
ctggaatgtcutagaagccguga

SEQ ID NO: 18635 - DNA, 23 bp, Artificial Sequence
  Synthetic
aggaagauactctcuggcaacca

SEQ ID NO: 18636 - DNA, 31 bp, Artificial Sequence
  Synthetic
tttttggcagcauagcataaataacatgaut

SEQ ID NO: 18637 - DNA, 21 bp, Artificial Sequence
  Synthetic
acctgctcuggcatggagaua

SEQ ID NO: 18638 - DNA, 27 bp, Artificial Sequence
  Synthetic
caaagcagucataattgttcuggcaaa

SEQ ID NO: 18639 - DNA, 30 bp, Artificial Sequence
  Synthetic
gaatggctgtuacacttttgataactugat

SEQ ID NO: 18640 - DNA, 20 bp, Artificial Sequence
  Synthetic
acctgggcaauctgaagugc

SEQ ID NO: 18641 - DNA, 20 bp, Artificial Sequence
  Synthetic
ggctcugcacacctcctcua

SEQ ID NO: 18642 - DNA, 23 bp, Artificial Sequence
  Synthetic
tcauaaagaacagccccttgucg

SEQ ID NO: 18643 - DNA, 23 bp, Artificial Sequence
  Synthetic
cccagucagctgtgtuaaaggaa

SEQ ID NO: 18644 - DNA, 17 bp, Artificial Sequence
  Synthetic
ggcaagugaggguggga

SEQ ID NO: 18645 - DNA, 27 bp, Artificial Sequence
  Synthetic
aactactagaauccacatgggatcuga

SEQ ID NO: 18646 - DNA, 25 bp, Artificial Sequence
  Synthetic
caaaggaccaaugactctgttucct

SEQ ID NO: 18647 - DNA, 26 bp, Artificial Sequence
  Synthetic
ttgtctttcguagttggctgttttuc

SEQ ID NO: 18648 - DNA, 22 bp, Artificial Sequence
  Synthetic
cccagaguccttaaccugcaat

SEQ ID NO: 18649 - DNA, 29 bp, Artificial Sequence
  Synthetic
cacaatcatgttgcutttctaaaccctua

SEQ ID NO: 18650 - DNA, 22 bp, Artificial Sequence
  Synthetic
cgctgtggugaaggactatuct

SEQ ID NO: 18651 - DNA, 25 bp, Artificial Sequence
  Synthetic
ggtttcctugagaggtaacttuggg

SEQ ID NO: 18652 - DNA, 22 bp, Artificial Sequence
  Synthetic
catcaagaggccutcgaagcua

SEQ ID NO: 18653 - DNA, 19 bp, Artificial Sequence
  Synthetic
gccucaccatgaacugggt

SEQ ID NO: 18654 - DNA, 25 bp, Artificial Sequence
  Synthetic
gggtgctauacagattttgccttug

SEQ ID NO: 18655 - DNA, 24 bp, Artificial Sequence
  Synthetic
ctaatgggaaccccugagtgtuag

SEQ ID NO: 18656 - DNA, 26 bp, Artificial Sequence
  Synthetic
gaaugcacttacugcaagaacagaaa

SEQ ID NO: 18657 - DNA, 25 bp, Artificial Sequence
  Synthetic
tcactataccaagugtcagctguct

SEQ ID NO: 18658 - DNA, 28 bp, Artificial Sequence
  Synthetic
acaagaaacgaaccaaauctccaaaaut

SEQ ID NO: 18659 - DNA, 28 bp, Artificial Sequence
  Synthetic
tccaatgtctugccgaattcttcaauat

SEQ ID NO: 18660 - DNA, 27 bp, Artificial Sequence
  Synthetic
ggtgaucaaccaaaaactccugagaat

SEQ ID NO: 18661 - DNA, 22 bp, Artificial Sequence
  Synthetic
gagttgagucagggcctctaug

SEQ ID NO: 18662 - DNA, 28 bp, Artificial Sequence
  Synthetic
ctcacataucaactcagctacuaaccaa

SEQ ID NO: 18663 - DNA, 28 bp, Artificial Sequence
  Synthetic
gcaaatcatuggaacaattgucaagagt

SEQ ID NO: 18664 - DNA, 27 bp, Artificial Sequence
  Synthetic
cagttgacacaacutgcttcgataaut

SEQ ID NO: 18665 - DNA, 25 bp, Artificial Sequence
  Synthetic
tgtgtacactugaaggtggtttcug

SEQ ID NO: 18666 - DNA, 24 bp, Artificial Sequence
  Synthetic
gctcaaacgagguccattaugcaa

SEQ ID NO: 18667 - DNA, 29 bp, Artificial Sequence
  Synthetic
tccgttttaagaugaaataagctgaguga

SEQ ID NO: 18668 - DNA, 27 bp, Artificial Sequence
  Synthetic
gguttctaccaaaagugaagaggaagt

SEQ ID NO: 18669 - DNA, 29 bp, Artificial Sequence
  Synthetic
ggtgggcagtucagaatctttagttauag

SEQ ID NO: 18670 - DNA, 28 bp, Artificial Sequence
  Synthetic
gtcaaaaaggaaaugcaauaaggauaga

SEQ ID NO: 18671 - DNA, 26 bp, Artificial Sequence
  Synthetic
atcagctcuggaataacaagctucaa

SEQ ID NO: 18672 - DNA, 28 bp, Artificial Sequence
  Synthetic
ctctctgagguattgtaatgcttcauca

SEQ ID NO: 18673 - DNA, 25 bp, Artificial Sequence
  Synthetic
acuccaugaacagucaaaagagaat

SEQ ID NO: 18674 - DNA, 21 bp, Artificial Sequence
  Synthetic
caaggaaggucgtcccttcuc

SEQ ID NO: 18675 - DNA, 25 bp, Artificial Sequence
  Synthetic
gactgcagccuaagcatatagugat

SEQ ID NO: 18676 - DNA, 24 bp, Artificial Sequence
  Synthetic
cccgaaucaagcggaagaauaact

SEQ ID NO: 18677 - DNA, 26 bp, Artificial Sequence
  Synthetic
aagtccaaacacauctatccaucaaa

SEQ ID NO: 18678 - DNA, 20 bp, Artificial Sequence
  Synthetic
ctgtacgaugcctucgggaa

SEQ ID NO: 18679 - DNA, 20 bp, Artificial Sequence
  Synthetic
gctcagucacaccaguggaa

SEQ ID NO: 18680 - DNA, 20 bp, Artificial Sequence
  Synthetic
cacgcuaccactcctgtuga

SEQ ID NO: 18681 - DNA, 29 bp, Artificial Sequence
  Synthetic
agcttctttagccucaaacttaatctugt

SEQ ID NO: 18682 - DNA, 21 bp, Artificial Sequence
  Synthetic
ggccctauaaccattggguct

SEQ ID NO: 18683 - DNA, 28 bp, Artificial Sequence
  Synthetic
cagacttgaaaugggtgagatgaagaua

SEQ ID NO: 18684 - DNA, 21 bp, Artificial Sequence
  Synthetic
ggagcacauccccaaaaucca

SEQ ID NO: 18685 - DNA, 22 bp, Artificial Sequence
  Synthetic
gaggugaccttcauccaagcat

SEQ ID NO: 18686 - DNA, 23 bp, Artificial Sequence
  Synthetic
gagtttacccaggcugagtacug

SEQ ID NO: 18687 - DNA, 20 bp, Artificial Sequence
  Synthetic
cacaagaugacggcctccut

SEQ ID NO: 18688 - DNA, 22 bp, Artificial Sequence
  Synthetic
gtttgatuggaggactcugcct

SEQ ID NO: 18689 - DNA, 22 bp, Artificial Sequence
  Synthetic
agtacagcutcagcacugacac

SEQ ID NO: 18690 - DNA, 19 bp, Artificial Sequence
  Synthetic
ttcacagagggugcaggug

SEQ ID NO: 18691 - DNA, 18 bp, Artificial Sequence
  Synthetic
gcacgcucagagugcaag

SEQ ID NO: 18692 - DNA, 20 bp, Artificial Sequence
  Synthetic
ggucacgcagagcccatuag

SEQ ID NO: 18693 - DNA, 18 bp, Artificial Sequence
  Synthetic
cgccgccguaagtguagg

SEQ ID NO: 18694 - DNA, 21 bp, Artificial Sequence
  Synthetic
cagatcugcgagcuggagaag

SEQ ID NO: 18695 - DNA, 20 bp, Artificial Sequence
  Synthetic
cgcttgcucacctccactut

SEQ ID NO: 18696 - DNA, 18 bp, Artificial Sequence
  Synthetic
cactagcgucacgucggt

SEQ ID NO: 18697 - DNA, 18 bp, Artificial Sequence
  Synthetic
ccctccugggtgcaguct

SEQ ID NO: 18698 - DNA, 21 bp, Artificial Sequence
  Synthetic
acctccccuagtccuaaagcg

SEQ ID NO: 18699 - DNA, 22 bp, Artificial Sequence
  Synthetic
ccattccacacccuccctttug

SEQ ID NO: 18700 - DNA, 23 bp, Artificial Sequence
  Synthetic
ggtgccucaggaagaaagaacug

SEQ ID NO: 18701 - DNA, 27 bp, Artificial Sequence
  Synthetic
cgctgcctcugaagtttttgtatcaua

SEQ ID NO: 18702 - DNA, 28 bp, Artificial Sequence
  Synthetic
cttggctattgcaucatctcaactaauc

SEQ ID NO: 18703 - DNA, 20 bp, Artificial Sequence
  Synthetic
aaagtgggcuccagtcucac

SEQ ID NO: 18704 - DNA, 23 bp, Artificial Sequence
  Synthetic
tguttctgcaacugaaacgcaag

SEQ ID NO: 18705 - DNA, 26 bp, Artificial Sequence
  Synthetic
catctagctctugggaccttcttcua

SEQ ID NO: 18706 - DNA, 17 bp, Artificial Sequence
  Synthetic
gccccaugggctgcuac

SEQ ID NO: 18707 - DNA, 17 bp, Artificial Sequence
  Synthetic
gtgccccggaguccaua

SEQ ID NO: 18708 - DNA, 28 bp, Artificial Sequence
  Synthetic
tcattgagcagauagtctatgtcaucca

SEQ ID NO: 18709 - DNA, 20 bp, Artificial Sequence
  Synthetic
gagacccacutgcctuccaa

SEQ ID NO: 18710 - DNA, 21 bp, Artificial Sequence
  Synthetic
ggacgaacagccutgcatcua

SEQ ID NO: 18711 - DNA, 20 bp, Artificial Sequence
  Synthetic
gttgacaccacagcaugguc

SEQ ID NO: 18712 - DNA, 26 bp, Artificial Sequence
  Synthetic
aguatctggactuaaagacacaggct

SEQ ID NO: 18713 - DNA, 21 bp, Artificial Sequence
  Synthetic
gggatgccugatgcttcucac

SEQ ID NO: 18714 - DNA, 22 bp, Artificial Sequence
  Synthetic
ccattccugtccccattuaccc

SEQ ID NO: 18715 - DNA, 18 bp, Artificial Sequence
  Synthetic
gtcagugcaccugaggct

SEQ ID NO: 18716 - DNA, 18 bp, Artificial Sequence
  Synthetic
ggccttcgcutcgctcut

SEQ ID NO: 18717 - DNA, 20 bp, Artificial Sequence
  Synthetic
ggcgctutaacccttuccag

SEQ ID NO: 18718 - DNA, 25 bp, Artificial Sequence
  Synthetic
gccttgaacaaugaggatccttgua

SEQ ID NO: 18719 - DNA, 20 bp, Artificial Sequence
  Synthetic
catctgtgggucctctguca

SEQ ID NO: 18720 - DNA, 20 bp, Artificial Sequence
  Synthetic
caccttgggucaccagtuct

SEQ ID NO: 18721 - DNA, 20 bp, Artificial Sequence
  Synthetic
ggtcaucccaggcacactug

SEQ ID NO: 18722 - DNA, 19 bp, Artificial Sequence
  Synthetic
cggccaucattccccauga

SEQ ID NO: 18723 - DNA, 17 bp, Artificial Sequence
  Synthetic
gctgagcugggtgcugt

SEQ ID NO: 18724 - DNA, 21 bp, Artificial Sequence
  Synthetic
agaccacggugtattctgcua

SEQ ID NO: 18725 - DNA, 20 bp, Artificial Sequence
  Synthetic
gactgucgaacaccacguca

SEQ ID NO: 18726 - DNA, 20 bp, Artificial Sequence
  Synthetic
aacaaguggaggatgcugct

SEQ ID NO: 18727 - DNA, 18 bp, Artificial Sequence
  Synthetic
gctgtugggagcctguga

SEQ ID NO: 18728 - DNA, 24 bp, Artificial Sequence
  Synthetic
cagaaagagugaggaggtuagagg

SEQ ID NO: 18729 - DNA, 29 bp, Artificial Sequence
  Synthetic
gattaattggctuctctgcttctttguag

SEQ ID NO: 18730 - DNA, 21 bp, Artificial Sequence
  Synthetic
ggttccagugctcagcctuaa

SEQ ID NO: 18731 - DNA, 22 bp, Artificial Sequence
  Synthetic
gttggagaccccugaatctugg

SEQ ID NO: 18732 - DNA, 21 bp, Artificial Sequence
  Synthetic
gctcauggagcactcaaguga

SEQ ID NO: 18733 - DNA, 22 bp, Artificial Sequence
  Synthetic
cttcgtatcuggagggttcugg

SEQ ID NO: 18734 - DNA, 22 bp, Artificial Sequence
  Synthetic
cctcaaccucaaaccagctuca

SEQ ID NO: 18735 - DNA, 20 bp, Artificial Sequence
  Synthetic
tcaccaugcagttgguggac

SEQ ID NO: 18736 - DNA, 28 bp, Artificial Sequence
  Synthetic
cttcgctccagaauttgaatgtatucac

SEQ ID NO: 18737 - DNA, 28 bp, Artificial Sequence
  Synthetic
tgaagttgttguaagactttgtctcgua

SEQ ID NO: 18738 - DNA, 26 bp, Artificial Sequence
  Synthetic
ttcacctatcaugttgcctttcucaa

SEQ ID NO: 18739 - DNA, 25 bp, Artificial Sequence
  Synthetic
cccaactggacucttgctaatagug

SEQ ID NO: 18740 - DNA, 28 bp, Artificial Sequence
  Synthetic
tgggtuagaagaagaaaagugaaaagca

SEQ ID NO: 18741 - DNA, 21 bp, Artificial Sequence
  Synthetic
cctgcctuccaaagcagauac

SEQ ID NO: 18742 - DNA, 17 bp, Artificial Sequence
  Synthetic
cctcacgcccuccctug

SEQ ID NO: 18743 - DNA, 24 bp, Artificial Sequence
  Synthetic
acctccaccucagguagagaaaaa

SEQ ID NO: 18744 - DNA, 28 bp, Artificial Sequence
  Synthetic
gacuatacctuaaacacucaagaaccag

SEQ ID NO: 18745 - DNA, 23 bp, Artificial Sequence
  Synthetic
ggatggagttuggccaacagaua

SEQ ID NO: 18746 - DNA, 29 bp, Artificial Sequence
  Synthetic
atgtaggaaaaugaagattcagctaucaa

SEQ ID NO: 18747 - DNA, 25 bp, Artificial Sequence
  Synthetic
aggagagtgcautgtctctgattuc

SEQ ID NO: 18748 - DNA, 25 bp, Artificial Sequence
  Synthetic
gctgtgtttatutccagcacttuct

SEQ ID NO: 18749 - DNA, 27 bp, Artificial Sequence
  Synthetic
tcctttgcagauttagtttccuaagca

SEQ ID NO: 18750 - DNA, 23 bp, Artificial Sequence
  Synthetic
ggctgtgccugttgtttguaaag

SEQ ID NO: 18751 - DNA, 30 bp, Artificial Sequence
  Synthetic
ccttgatgctttugtttttcagagatugaa

SEQ ID NO: 18752 - DNA, 28 bp, Artificial Sequence
  Synthetic
aaaagccttctaaagugactgacactua

SEQ ID NO: 18753 - DNA, 23 bp, Artificial Sequence
  Synthetic
gacaggcauctttgttugggaac

SEQ ID NO: 18754 - DNA, 23 bp, Artificial Sequence
  Synthetic
gttgtaccaaaugaaggugcact

SEQ ID NO: 18755 - DNA, 20 bp, Artificial Sequence
  Synthetic
accccauacccaacccagua

SEQ ID NO: 18756 - DNA, 22 bp, Artificial Sequence
  Synthetic
ggtttgcugaagaggctgguag

SEQ ID NO: 18757 - DNA, 27 bp, Artificial Sequence
  Synthetic
caacaactggauaatggaaggtttugt

SEQ ID NO: 18758 - DNA, 26 bp, Artificial Sequence
  Synthetic
cactggtgcutggtacttatgtuagt

SEQ ID NO: 18759 - DNA, 25 bp, Artificial Sequence
  Synthetic
gggactagtuttagagttcaguggt

SEQ ID NO: 18760 - DNA, 22 bp, Artificial Sequence
  Synthetic
tgagaagagacuggtccctgug

SEQ ID NO: 18761 - DNA, 28 bp, Artificial Sequence
  Synthetic
gtacttaactttutccctccttcuccat

SEQ ID NO: 18762 - DNA, 28 bp, Artificial Sequence
  Synthetic
cttactctgtccaaaugttgaagttgug

SEQ ID NO: 18763 - DNA, 30 bp, Artificial Sequence
  Synthetic
attccattttgtgguctttaagagagugat

SEQ ID NO: 18764 - DNA, 27 bp, Artificial Sequence
  Synthetic
tctcttttatuagacacagccttcuca

SEQ ID NO: 18765 - DNA, 24 bp, Artificial Sequence
  Synthetic
ctcgttaaucaggcggtcauagag

SEQ ID NO: 18766 - DNA, 24 bp, Artificial Sequence
  Synthetic
agtacctcttugaaaagccacgut

SEQ ID NO: 18767 - DNA, 23 bp, Artificial Sequence
  Synthetic
ggttatguccatcactugaggca

SEQ ID NO: 18768 - DNA, 19 bp, Artificial Sequence
  Synthetic
gggttccacugcgagtgut

SEQ ID NO: 18769 - DNA, 20 bp, Artificial Sequence
  Synthetic
ggtcugacagcccttcctug

SEQ ID NO: 18770 - DNA, 17 bp, Artificial Sequence
  Synthetic
ggtggugatgccagugc

SEQ ID NO: 18771 - DNA, 20 bp, Artificial Sequence
  Synthetic
tccacugaccacctctucca

SEQ ID NO: 18772 - DNA, 22 bp, Artificial Sequence
  Synthetic
agutgccataaucgggagaacc

SEQ ID NO: 18773 - DNA, 24 bp, Artificial Sequence
  Synthetic
cactgcaacagautcactctguct

SEQ ID NO: 18774 - DNA, 22 bp, Artificial Sequence
  Synthetic
cctgauaaacagcaggcacucc

SEQ ID NO: 18775 - DNA, 23 bp, Artificial Sequence
  Synthetic
actgatgcttuaaagagccguga

SEQ ID NO: 18776 - DNA, 25 bp, Artificial Sequence
  Synthetic
tcttggcaucataatgtgtttuggc

SEQ ID NO: 18777 - DNA, 22 bp, Artificial Sequence
  Synthetic
tgagcactauaagctgcaggua

SEQ ID NO: 18778 - DNA, 21 bp, Artificial Sequence
  Synthetic
tcaugcaccaagactggucac

SEQ ID NO: 18779 - DNA, 23 bp, Artificial Sequence
  Synthetic
cttctttggccucatctcacuct

SEQ ID NO: 18780 - DNA, 19 bp, Artificial Sequence
  Synthetic
gctctgcauagctggccut

SEQ ID NO: 18781 - DNA, 17 bp, Artificial Sequence
  Synthetic
gccaccgugaggagcug

SEQ ID NO: 18782 - DNA, 20 bp, Artificial Sequence
  Synthetic
cgctgtttcucagcctccuc

SEQ ID NO: 18783 - DNA, 19 bp, Artificial Sequence
  Synthetic
agtugaagcggctggugat

SEQ ID NO: 18784 - DNA, 21 bp, Artificial Sequence
  Synthetic
cctgggccutctcctcuaact

SEQ ID NO: 18785 - DNA, 20 bp, Artificial Sequence
  Synthetic
gcuggaacagcaaugccaga

SEQ ID NO: 18786 - DNA, 19 bp, Artificial Sequence
  Synthetic
ccgcatcucaagctcugct

SEQ ID NO: 18787 - DNA, 18 bp, Artificial Sequence
  Synthetic
ggcaaugagcuggaacgg

SEQ ID NO: 18788 - DNA, 18 bp, Artificial Sequence
  Synthetic
acctctutgctgguggca

SEQ ID NO: 18789 - DNA, 21 bp, Artificial Sequence
  Synthetic
ccacagcgagcuccagauaag

SEQ ID NO: 18790 - DNA, 22 bp, Artificial Sequence
  Synthetic
aggacttcaguctcagccugat

SEQ ID NO: 18791 - DNA, 23 bp, Artificial Sequence
  Synthetic
gcgttgtauctctgagcugaagg

SEQ ID NO: 18792 - DNA, 19 bp, Artificial Sequence
  Synthetic
gctcagcuctgccttcucc

SEQ ID NO: 18793 - DNA, 18 bp, Artificial Sequence
  Synthetic
ggaugcggctcucaagca

SEQ ID NO: 18794 - DNA, 20 bp, Artificial Sequence
  Synthetic
gttgctggauggtggcatug

SEQ ID NO: 18795 - DNA, 22 bp, Artificial Sequence
  Synthetic
gtctagccugatcactgaccug

SEQ ID NO: 18796 - DNA, 23 bp, Artificial Sequence
  Synthetic
ttccagcugtgaaagtttuccct

SEQ ID NO: 18797 - DNA, 22 bp, Artificial Sequence
  Synthetic
caagatgaugggccccatgtut

SEQ ID NO: 18798 - DNA, 27 bp, Artificial Sequence
  Synthetic
cttaaaggaaagguctccattctccuc

SEQ ID NO: 18799 - DNA, 22 bp, Artificial Sequence
  Synthetic
agccaggaacccauactctcut

SEQ ID NO: 18800 - DNA, 28 bp, Artificial Sequence
  Synthetic
catccctatuacttctctcaucagcaag

SEQ ID NO: 18801 - DNA, 24 bp, Artificial Sequence
  Synthetic
attgcttcagaucttaggcgctua

SEQ ID NO: 18802 - DNA, 21 bp, Artificial Sequence
  Synthetic
caagtcaggugaggugaagca

SEQ ID NO: 18803 - DNA, 21 bp, Artificial Sequence
  Synthetic
tgcctccugtttggcttcuag

SEQ ID NO: 18804 - DNA, 25 bp, Artificial Sequence
  Synthetic
tcctctcctaacuctctcaagctuc

SEQ ID NO: 18805 - DNA, 24 bp, Artificial Sequence
  Synthetic
gcttttcttccuctcttgggtucc

SEQ ID NO: 18806 - DNA, 31 bp, Artificial Sequence
  Synthetic
ttccaaaagctguacctaggaaaatactuac

SEQ ID NO: 18807 - DNA, 25 bp, Artificial Sequence
  Synthetic
ttcctugaactcagtugacacacat

SEQ ID NO: 18808 - DNA, 22 bp, Artificial Sequence
  Synthetic
ggaaagccaaaucaacccucca

SEQ ID NO: 18809 - DNA, 27 bp, Artificial Sequence
  Synthetic
tgcgtctcgugttataaaatgctttut

SEQ ID NO: 18810 - DNA, 30 bp, Artificial Sequence
  Synthetic
cttacccccagaauctacaataacattugt

SEQ ID NO: 18811 - DNA, 28 bp, Artificial Sequence
  Synthetic
ttccattttgguttactcaggatucact

SEQ ID NO: 18812 - DNA, 30 bp, Artificial Sequence
  Synthetic
acaaataaguaaacaccacagaaugaggag

SEQ ID NO: 18813 - DNA, 22 bp, Artificial Sequence
  Synthetic
cttgattugcagcagccaacut

SEQ ID NO: 18814 - DNA, 28 bp, Artificial Sequence
  Synthetic
catttaagacuctaagtctgugcagagg

SEQ ID NO: 18815 - DNA, 27 bp, Artificial Sequence
  Synthetic
gtctatctcugaccaaagtggaugaaa

SEQ ID NO: 18816 - DNA, 25 bp, Artificial Sequence
  Synthetic
aggcaagtuaggagacagtcactua

SEQ ID NO: 18817 - DNA, 30 bp, Artificial Sequence
  Synthetic
gataugaaaaagaaccaaugcaaagaaggt

SEQ ID NO: 18818 - DNA, 26 bp, Artificial Sequence
  Synthetic
aggcagcatttautaccccatttgua

SEQ ID NO: 18819 - DNA, 33 bp, Artificial Sequence
  Synthetic
gcatgaatttacugtatcttaattugaaggaaa

SEQ ID NO: 18820 - DNA, 28 bp, Artificial Sequence
  Synthetic
catgtgggtgucattcttttgatttuct

SEQ ID NO: 18821 - DNA, 30 bp, Artificial Sequence
  Synthetic
gtgagatggcaguaccttaatatgatguaa

SEQ ID NO: 18822 - DNA, 17 bp, Artificial Sequence
  Synthetic
gcggucggcttcacuca

SEQ ID NO: 18823 - DNA, 19 bp, Artificial Sequence
  Synthetic
tgacggaccgaaucacugc

SEQ ID NO: 18824 - DNA, 20 bp, Artificial Sequence
  Synthetic
cagcttgucgatggucaacg

SEQ ID NO: 18825 - DNA, 20 bp, Artificial Sequence
  Synthetic
ctcagccccuttccacacua

SEQ ID NO: 18826 - DNA, 24 bp, Artificial Sequence
  Synthetic
acatactcggugtaaggtguccat

SEQ ID NO: 18827 - DNA, 29 bp, Artificial Sequence
  Synthetic
catctgaagttcugtaatttccttctucc

SEQ ID NO: 18828 - DNA, 22 bp, Artificial Sequence
  Synthetic
ccaatuccagaccaagctguga

SEQ ID NO: 18829 - DNA, 25 bp, Artificial Sequence
  Synthetic
gctucaaagagaaaagguaacaucc

SEQ ID NO: 18830 - DNA, 27 bp, Artificial Sequence
  Synthetic
cctgctcatauctcagcatttctucag

SEQ ID NO: 18831 - DNA, 28 bp, Artificial Sequence
  Synthetic
accattagtgaagguaaagatggcuaga

SEQ ID NO: 18832 - DNA, 26 bp, Artificial Sequence
  Synthetic
ctgggcttugctatttcaactaucac

SEQ ID NO: 18833 - DNA, 23 bp, Artificial Sequence
  Synthetic
gcutaatggcaugacaaagcaga

SEQ ID NO: 18834 - DNA, 28 bp, Artificial Sequence
  Synthetic
acattgcagucgaaagattaaacttucc

SEQ ID NO: 18835 - DNA, 27 bp, Artificial Sequence
  Synthetic
cagttctccautctttagtcuccacaa

SEQ ID NO: 18836 - DNA, 20 bp, Artificial Sequence
  Synthetic
tgtgccccaggguttgtuac

SEQ ID NO: 18837 - DNA, 19 bp, Artificial Sequence
  Synthetic
accguccgagugcacaaaa

SEQ ID NO: 18838 - DNA, 18 bp, Artificial Sequence
  Synthetic
ccttgcuccagcagguct

SEQ ID NO: 18839 - DNA, 17 bp, Artificial Sequence
  Synthetic
aggaguggacccugcca

SEQ ID NO: 18840 - DNA, 23 bp, Artificial Sequence
  Synthetic
agtagtutaggacagugccagga

SEQ ID NO: 18841 - DNA, 19 bp, Artificial Sequence
  Synthetic
gaagcugttcugccccagt

SEQ ID NO: 18842 - DNA, 23 bp, Artificial Sequence
  Synthetic
gaatcuaaggccacctgauaccc

SEQ ID NO: 18843 - DNA, 20 bp, Artificial Sequence
  Synthetic
ctctggcagcuggcatgaua

SEQ ID NO: 18844 - DNA, 25 bp, Artificial Sequence
  Synthetic
gcucacacattuagacacacacaga

SEQ ID NO: 18845 - DNA, 23 bp, Artificial Sequence
  Synthetic
aacacaacgacaacugcaacuac

SEQ ID NO: 18846 - DNA, 22 bp, Artificial Sequence
  Synthetic
gggtgcaggaaaugaagacugt

SEQ ID NO: 18847 - DNA, 20 bp, Artificial Sequence
  Synthetic
cgatgugcaggagagaucgc

SEQ ID NO: 18848 - DNA, 26 bp, Artificial Sequence
  Synthetic
ccattaaagaacuggactggaaccua

SEQ ID NO: 18849 - DNA, 18 bp, Artificial Sequence
  Synthetic
ctgggcaugaagctgugc

SEQ ID NO: 18850 - DNA, 22 bp, Artificial Sequence
  Synthetic
caugacccagggaaucaguaag

SEQ ID NO: 18851 - DNA, 25 bp, Artificial Sequence
  Synthetic
gttaccagcuctttgatctctucca

SEQ ID NO: 18852 - DNA, 23 bp, Artificial Sequence
  Synthetic
tcaccgacugaattcauccaaca

SEQ ID NO: 18853 - DNA, 29 bp, Artificial Sequence
  Synthetic
accgctaattaucttttctctgtuacagg

SEQ ID NO: 18854 - DNA, 25 bp, Artificial Sequence
  Synthetic
tcaccaauacgaacacaaugctaua

SEQ ID NO: 18855 - DNA, 24 bp, Artificial Sequence
  Synthetic
gcagctgcugagaaattcaaagut

SEQ ID NO: 18856 - DNA, 25 bp, Artificial Sequence
  Synthetic
cagttccacuctgtataaaggugct

SEQ ID NO: 18857 - DNA, 23 bp, Artificial Sequence
  Synthetic
gcagcagcugaaattgaugaaga

SEQ ID NO: 18858 - DNA, 23 bp, Artificial Sequence
  Synthetic
cgcaucacagggttagtatuggt

SEQ ID NO: 18859 - DNA, 24 bp, Artificial Sequence
  Synthetic
ctaaatctgcuggaatccctgucc

SEQ ID NO: 18860 - DNA, 22 bp, Artificial Sequence
  Synthetic
gctgcagagacagaugctgaut

SEQ ID NO: 18861 - DNA, 28 bp, Artificial Sequence
  Synthetic
cctgtucagaaagactctucaaagacag

SEQ ID NO: 18862 - DNA, 25 bp, Artificial Sequence
  Synthetic
cccattttacaugtgacagaagcug

SEQ ID NO: 18863 - DNA, 21 bp, Artificial Sequence
  Synthetic
cutctcctucccccaaagagg

SEQ ID NO: 18864 - DNA, 25 bp, Artificial Sequence
  Synthetic
ttttagagagaagagucgctgtugg

SEQ ID NO: 18865 - DNA, 22 bp, Artificial Sequence
  Synthetic
cccaaacaagutgccacttcut

SEQ ID NO: 18866 - DNA, 22 bp, Artificial Sequence
  Synthetic
gagatgggauagctggtccuct

SEQ ID NO: 18867 - DNA, 21 bp, Artificial Sequence
  Synthetic
ccagctacaacuccctccuct

SEQ ID NO: 18868 - DNA, 23 bp, Artificial Sequence
  Synthetic
ctcctttuagggagggaggagut

SEQ ID NO: 18869 - DNA, 21 bp, Artificial Sequence
  Synthetic
cccaaaaggagguctggcuac

SEQ ID NO: 18870 - DNA, 21 bp, Artificial Sequence
  Synthetic
gtagcuggacctcctttuggg

SEQ ID NO: 18871 - DNA, 19 bp, Artificial Sequence
  Synthetic
aguccagcagcuaccccat

SEQ ID NO: 18872 - DNA, 17 bp, Artificial Sequence
  Synthetic
gcucgggccttttuggg

SEQ ID NO: 18873 - DNA, 21 bp, Artificial Sequence
  Synthetic
cctcagctgugactcctcugt

SEQ ID NO: 18874 - DNA, 20 bp, Artificial Sequence
  Synthetic
gttgggcacucttugggaga

SEQ ID NO: 18875 - DNA, 21 bp, Artificial Sequence
  Synthetic
gtgctcctcuggctacctuag

SEQ ID NO: 18876 - DNA, 22 bp, Artificial Sequence
  Synthetic
ctgggccugcataagaatcugt

SEQ ID NO: 18877 - DNA, 27 bp, Artificial Sequence
  Synthetic
cctcttctccagagauacctctttcuc

SEQ ID NO: 18878 - DNA, 23 bp, Artificial Sequence
  Synthetic
tggtatccucagagtggttgcua

SEQ ID NO: 18879 - DNA, 22 bp, Artificial Sequence
  Synthetic
ctgcagcaccuactactaccut

SEQ ID NO: 18880 - DNA, 23 bp, Artificial Sequence
  Synthetic
gcaggaacuacctcatttcugga

SEQ ID NO: 18881 - DNA, 26 bp, Artificial Sequence
  Synthetic
atcagagttcutttggttctguccaa

SEQ ID NO: 18882 - DNA, 23 bp, Artificial Sequence
  Synthetic
gtcacacagugguaaggaacagt

SEQ ID NO: 18883 - DNA, 22 bp, Artificial Sequence
  Synthetic
cttcagtggcugtagctgaguc

SEQ ID NO: 18884 - DNA, 21 bp, Artificial Sequence
  Synthetic
gggucgaggcaataguagagg

SEQ ID NO: 18885 - DNA, 22 bp, Artificial Sequence
  Synthetic
ctttctccagcugtgctaccua

SEQ ID NO: 18886 - DNA, 22 bp, Artificial Sequence
  Synthetic
gacaagaggagutgauggcagt

SEQ ID NO: 18887 - DNA, 26 bp, Artificial Sequence
  Synthetic
accacttccuacctagaaaacacuct

SEQ ID NO: 18888 - DNA, 25 bp, Artificial Sequence
  Synthetic
guagttttcttguacgagagagcca

SEQ ID NO: 18889 - DNA, 23 bp, Artificial Sequence
  Synthetic
ggtaacatctugccagacccaut

SEQ ID NO: 18890 - DNA, 28 bp, Artificial Sequence
  Synthetic
agcagagtucgagaactaagcaaatuag

SEQ ID NO: 18891 - DNA, 24 bp, Artificial Sequence
  Synthetic
gtctcucaggtccaatuccaaaca

SEQ ID NO: 18892 - DNA, 30 bp, Artificial Sequence
  Synthetic
gtaactttaaggtguttgaaggattttcut

SEQ ID NO: 18893 - DNA, 23 bp, Artificial Sequence
  Synthetic
cactcgggagutttctuggaaca

SEQ ID NO: 18894 - DNA, 27 bp, Artificial Sequence
  Synthetic
tcttttctggtutttcttggctcuact

SEQ ID NO: 18895 - DNA, 18 bp, Artificial Sequence
  Synthetic
cggcccugcatccaugat

SEQ ID NO: 18896 - DNA, 26 bp, Artificial Sequence
  Synthetic
cagacagaagcacaguaccgattuat

SEQ ID NO: 18897 - DNA, 21 bp, Artificial Sequence
  Synthetic
gcgtauccaagaggccuagca

SEQ ID NO: 18898 - DNA, 18 bp, Artificial Sequence
  Synthetic
cuaaacgcggccaggtug

SEQ ID NO: 18899 - DNA, 20 bp, Artificial Sequence
  Synthetic
ctatacggucggacctggug

SEQ ID NO: 18900 - DNA, 17 bp, Artificial Sequence
  Synthetic
tggccuggcgcttcaut

SEQ ID NO: 18901 - DNA, 17 bp, Artificial Sequence
  Synthetic
cgggugctcttcucgca

SEQ ID NO: 18902 - DNA, 19 bp, Artificial Sequence
  Synthetic
cagaggcgcugttccucat

SEQ ID NO: 18903 - DNA, 18 bp, Artificial Sequence
  Synthetic
cgccgccuaccacaugac

SEQ ID NO: 18904 - DNA, 22 bp, Artificial Sequence
  Synthetic
tggaaacuccagttgtgtugct

SEQ ID NO: 18905 - DNA, 23 bp, Artificial Sequence
  Synthetic
gccattgactuctacacctccut

SEQ ID NO: 18906 - DNA, 26 bp, Artificial Sequence
  Synthetic
tggcaauaaagggatgtaaaacugga

SEQ ID NO: 18907 - DNA, 26 bp, Artificial Sequence
  Synthetic
actgtcauggaggaacgaatgauaga

SEQ ID NO: 18908 - DNA, 22 bp, Artificial Sequence
  Synthetic
gttgaagcugcagaaactgcuc

SEQ ID NO: 18909 - DNA, 21 bp, Artificial Sequence
  Synthetic
ctctgggautgaagggacuca

SEQ ID NO: 18910 - DNA, 26 bp, Artificial Sequence
  Synthetic
gattcatgguacctgatgggttuaga

SEQ ID NO: 18911 - DNA, 29 bp, Artificial Sequence
  Synthetic
aggacccaaguactgaattaaaacttucc

SEQ ID NO: 18912 - DNA, 24 bp, Artificial Sequence
  Synthetic
gtcagatttcauccgggacattug

SEQ ID NO: 18913 - DNA, 26 bp, Artificial Sequence
  Synthetic
aacagactugaaagttcttttgucct

SEQ ID NO: 18914 - DNA, 22 bp, Artificial Sequence
  Synthetic
ttgguacaaaggacaactggug

SEQ ID NO: 18915 - DNA, 23 bp, Artificial Sequence
  Synthetic
agacccauattgugcaacaggaa

SEQ ID NO: 18916 - DNA, 26 bp, Artificial Sequence
  Synthetic
cctggttttgagagutcttttggcua

SEQ ID NO: 18917 - DNA, 28 bp, Artificial Sequence
  Synthetic
tttagcacaaguagggtaacaagttuga

SEQ ID NO: 18918 - DNA, 18 bp, Artificial Sequence
  Synthetic
gcuggaccacgcttucct

SEQ ID NO: 18919 - DNA, 23 bp, Artificial Sequence
  Synthetic
gcaggaugagctgaagaaaaugg

SEQ ID NO: 18920 - DNA, 24 bp, Artificial Sequence
  Synthetic
gattcagtccuggtctcttcacug

SEQ ID NO: 18921 - DNA, 25 bp, Artificial Sequence
  Synthetic
tcctaagtgaccuggaagatgauga

SEQ ID NO: 18922 - DNA, 22 bp, Artificial Sequence
  Synthetic
tccacctccucctctcctauca

SEQ ID NO: 18923 - DNA, 23 bp, Artificial Sequence
  Synthetic
ctgugagacagcagaucgagaaa

SEQ ID NO: 18924 - DNA, 25 bp, Artificial Sequence
  Synthetic
cgaccatgcugttcaaatgttctut

SEQ ID NO: 18925 - DNA, 23 bp, Artificial Sequence
  Synthetic
cccagugggaattugagaaggac

SEQ ID NO: 18926 - DNA, 23 bp, Artificial Sequence
  Synthetic
tcaagagugtgtttcuccaccag

SEQ ID NO: 18927 - DNA, 22 bp, Artificial Sequence
  Synthetic
gctagacugacacaggcucaag

SEQ ID NO: 18928 - DNA, 22 bp, Artificial Sequence
  Synthetic
ccctacacacauaagcctguca

SEQ ID NO: 18929 - DNA, 27 bp, Artificial Sequence
  Synthetic
gcaatccatugaatatgagcatugagg

SEQ ID NO: 18930 - DNA, 25 bp, Artificial Sequence
  Synthetic
actgccgcucatattcatttcucat

SEQ ID NO: 18931 - DNA, 20 bp, Artificial Sequence
  Synthetic
gggucaaagaagggcacucg

SEQ ID NO: 18932 - DNA, 28 bp, Artificial Sequence
  Synthetic
ttctgtttttgccutttcaatttccugt

SEQ ID NO: 18933 - DNA, 21 bp, Artificial Sequence
  Synthetic
gtgatggcagcutgtccatut

SEQ ID NO: 18934 - DNA, 24 bp, Artificial Sequence
  Synthetic
ctggtgaaugctgttcttgguaac

SEQ ID NO: 18935 - DNA, 26 bp, Artificial Sequence
  Synthetic
ccttcacautttctgcttucagagga

SEQ ID NO: 18936 - DNA, 29 bp, Artificial Sequence
  Synthetic
gctgatggtguaagagattttccatttut

SEQ ID NO: 18937 - DNA, 26 bp, Artificial Sequence
  Synthetic
tgggccttgtauacttgaatggagua

SEQ ID NO: 18938 - DNA, 22 bp, Artificial Sequence
  Synthetic
gctccacacucatgauccagat

SEQ ID NO: 18939 - DNA, 20 bp, Artificial Sequence
  Synthetic
ttgcccgagutccaagaguc

SEQ ID NO: 18940 - DNA, 20 bp, Artificial Sequence
  Synthetic
tggcaaaggucggtgagtuc

SEQ ID NO: 18941 - DNA, 23 bp, Artificial Sequence
  Synthetic
cacaacctguccttgtctctguc

SEQ ID NO: 18942 - DNA, 17 bp, Artificial Sequence
  Synthetic
ctctgccutgcgcucct

SEQ ID NO: 18943 - DNA, 18 bp, Artificial Sequence
  Synthetic
gugcctccugggaacaga

SEQ ID NO: 18944 - DNA, 21 bp, Artificial Sequence
  Synthetic
gcagagctugcagtgactgut

SEQ ID NO: 18945 - DNA, 23 bp, Artificial Sequence
  Synthetic
tgcagcgutttcagaatcugaga

SEQ ID NO: 18946 - DNA, 26 bp, Artificial Sequence
  Synthetic
gaatcuaaccaaaagauccacactuc

SEQ ID NO: 18947 - DNA, 32 bp, Artificial Sequence
  Synthetic
cagtatacagtgcutacctaccaaatatttut

SEQ ID NO: 18948 - DNA, 22 bp, Artificial Sequence
  Synthetic
tgaucacttgctucccaccaag

SEQ ID NO: 18949 - DNA, 24 bp, Artificial Sequence
  Synthetic
ccaggactcauttgtgccttgtua

SEQ ID NO: 18950 - DNA, 27 bp, Artificial Sequence
  Synthetic
agacccagcutattgaattcatugagt

SEQ ID NO: 18951 - DNA, 20 bp, Artificial Sequence
  Synthetic
tcttgcagguggatgtuccc

SEQ ID NO: 18952 - DNA, 26 bp, Artificial Sequence
  Synthetic
agcattaagcaaaauacccccacaut

SEQ ID NO: 18953 - DNA, 22 bp, Artificial Sequence
  Synthetic
cctaucgacagccaaagcaugt

SEQ ID NO: 18954 - DNA, 24 bp, Artificial Sequence
  Synthetic
cagccacucttgataacauccagt

SEQ ID NO: 18955 - DNA, 18 bp, Artificial Sequence
  Synthetic
gggttgtuggcaggucaa

SEQ ID NO: 18956 - DNA, 27 bp, Artificial Sequence
  Synthetic
caaagagtacuggctagagtcaactuc

SEQ ID NO: 18957 - DNA, 32 bp, Artificial Sequence
  Synthetic
agtatagcaucatctttatauaaccaggaaca

SEQ ID NO: 18958 - DNA, 24 bp, Artificial Sequence
  Synthetic
gctgaattgguagggaagaaucca

SEQ ID NO: 18959 - DNA, 30 bp, Artificial Sequence
  Synthetic
cttaaatggagcuttttgtttctaauccaa

SEQ ID NO: 18960 - DNA, 17 bp, Artificial Sequence
  Synthetic
cguggctuccccgaagg

SEQ ID NO: 18961 - DNA, 23 bp, Artificial Sequence
  Synthetic
cgattccaucaactcggacttug

SEQ ID NO: 18962 - DNA, 24 bp, Artificial Sequence
  Synthetic
gaacgttcaccuttttgcagauca

SEQ ID NO: 18963 - DNA, 25 bp, Artificial Sequence
  Synthetic
agtagatcaggguctggaaacacut

SEQ ID NO: 18964 - DNA, 22 bp, Artificial Sequence
  Synthetic
ccaaacccaacutccgtgaugt

SEQ ID NO: 18965 - DNA, 27 bp, Artificial Sequence
  Synthetic
tcagaaattgcugattcatcacucact

SEQ ID NO: 18966 - DNA, 19 bp, Artificial Sequence
  Synthetic
ctggctguacctcgauggt

SEQ ID NO: 18967 - DNA, 22 bp, Artificial Sequence
  Synthetic
gctctggcucttgcttctuagg

SEQ ID NO: 18968 - DNA, 18 bp, Artificial Sequence
  Synthetic
cctcgguggtctcucgct

SEQ ID NO: 18969 - DNA, 23 bp, Artificial Sequence
  Synthetic
aagatgccauggaaagctcucat

SEQ ID NO: 18970 - DNA, 27 bp, Artificial Sequence
  Synthetic
gatcacttgaaugacagtcgatuagga

SEQ ID NO: 18971 - DNA, 25 bp, Artificial Sequence
  Synthetic
tgtctcugaccaaagaagcttugag

SEQ ID NO: 18972 - DNA, 25 bp, Artificial Sequence
  Synthetic
ccttttgaguagatccatgtgugaa

SEQ ID NO: 18973 - DNA, 25 bp, Artificial Sequence
  Synthetic
cagggacaggauaagcacaauacat

SEQ ID NO: 18974 - DNA, 22 bp, Artificial Sequence
  Synthetic
gcctggtttuggtggaattcug

SEQ ID NO: 18975 - DNA, 28 bp, Artificial Sequence
  Synthetic
aaaaagaaacacaagugaggacaaagug

SEQ ID NO: 18976 - DNA, 27 bp, Artificial Sequence
  Synthetic
gatttattcucctgaccauaccagcag

SEQ ID NO: 18977 - DNA, 27 bp, Artificial Sequence
  Synthetic
aaatatttccaaguagtcccaccagut

SEQ ID NO: 18978 - DNA, 28 bp, Artificial Sequence
  Synthetic
ctgctggtcacagugatatacatagtut

SEQ ID NO: 18979 - DNA, 27 bp, Artificial Sequence
  Synthetic
gagcatgatttuaccattgaagcugat

SEQ ID NO: 18980 - DNA, 30 bp, Artificial Sequence
  Synthetic
agcagtactaaugaagatgaggattugaac

SEQ ID NO: 18981 - DNA, 20 bp, Artificial Sequence
  Synthetic
ggccaagcuctttgaaugct

SEQ ID NO: 18982 - DNA, 25 bp, Artificial Sequence
  Synthetic
ccugcctuaagagaagggaagaaga

SEQ ID NO: 18983 - DNA, 21 bp, Artificial Sequence
  Synthetic
acccgtacutacctggcugat

SEQ ID NO: 18984 - DNA, 18 bp, Artificial Sequence
  Synthetic
ccgaagcugctgcctugt

SEQ ID NO: 18985 - DNA, 17 bp, Artificial Sequence
  Synthetic
ccgcugcagactcucga

SEQ ID NO: 18986 - DNA, 28 bp, Artificial Sequence
  Synthetic
cgtttuaagaggaaaaagucaggagagt

SEQ ID NO: 18987 - DNA, 19 bp, Artificial Sequence
  Synthetic
ctgtcgcugctggatcuct

SEQ ID NO: 18988 - DNA, 18 bp, Artificial Sequence
  Synthetic
gaagtgcuacgccucgga

SEQ ID NO: 18989 - DNA, 20 bp, Artificial Sequence
  Synthetic
ggtgaugcaagagcugaggt

SEQ ID NO: 18990 - DNA, 19 bp, Artificial Sequence
  Synthetic
tgccagtguacgccttcuc

SEQ ID NO: 18991 - DNA, 22 bp, Artificial Sequence
  Synthetic
ctgatctgaugaaggccuggat

SEQ ID NO: 18992 - DNA, 22 bp, Artificial Sequence
  Synthetic
caaggatucccataggugcaca

SEQ ID NO: 18993 - DNA, 20 bp, Artificial Sequence
  Synthetic
gtcctgggcugaacttcugg

SEQ ID NO: 18994 - DNA, 19 bp, Artificial Sequence
  Synthetic
cctcgccaguccagtcuct

SEQ ID NO: 18995 - DNA, 17 bp, Artificial Sequence
  Synthetic
gggcgcucctggtgauc

SEQ ID NO: 18996 - DNA, 22 bp, Artificial Sequence
  Synthetic
gctcctcccauttatcccagug

SEQ ID NO: 18997 - DNA, 21 bp, Artificial Sequence
  Synthetic
aacacctgcuccaagagtcug

SEQ ID NO: 18998 - DNA, 20 bp, Artificial Sequence
  Synthetic
guaacctugcagccaacacc

SEQ ID NO: 18999 - DNA, 17 bp, Artificial Sequence
  Synthetic
agguctcccugcccaga

SEQ ID NO: 19000 - DNA, 22 bp, Artificial Sequence
  Synthetic
gtctctagauggtgagucagca

SEQ ID NO: 19001 - DNA, 21 bp, Artificial Sequence
  Synthetic
ggaacttgcuttcccggtuca

SEQ ID NO: 19002 - DNA, 23 bp, Artificial Sequence
  Synthetic
gcagcttcaaacucaagaaccug

SEQ ID NO: 19003 - DNA, 20 bp, Artificial Sequence
  Synthetic
gcacugcaggctacugaagg

SEQ ID NO: 19004 - DNA, 18 bp, Artificial Sequence
  Synthetic
cguggctuggcagagagg

SEQ ID NO: 19005 - DNA, 26 bp, Artificial Sequence
  Synthetic
ggaactgatuctgaaccaaaugacaa

SEQ ID NO: 19006 - DNA, 21 bp, Artificial Sequence
  Synthetic
cttgatgtucaaccgctgcug

SEQ ID NO: 19007 - DNA, 21 bp, Artificial Sequence
  Synthetic
ggctgagcuttgggtguaact

SEQ ID NO: 19008 - DNA, 21 bp, Artificial Sequence
  Synthetic
atctctggacaugccgaaguc

SEQ ID NO: 19009 - DNA, 21 bp, Artificial Sequence
  Synthetic
caaatgcuccacatugccagt

SEQ ID NO: 19010 - DNA, 17 bp, Artificial Sequence
  Synthetic
ccagcccucctccuggt

SEQ ID NO: 19011 - DNA, 19 bp, Artificial Sequence
  Synthetic
cgtgcugaagcgagaacug

SEQ ID NO: 19012 - DNA, 22 bp, Artificial Sequence
  Synthetic
gggagagcautccatcccagua

SEQ ID NO: 19013 - DNA, 19 bp, Artificial Sequence
  Synthetic
aucaaccacggcaucacca

SEQ ID NO: 19014 - DNA, 22 bp, Artificial Sequence
  Synthetic
cccatcucccaagcttguagaa

SEQ ID NO: 19015 - DNA, 26 bp, Artificial Sequence
  Synthetic
acccactacaacaauggcaactauac

SEQ ID NO: 19016 - DNA, 21 bp, Artificial Sequence
  Synthetic
gccattgucctcactcgucac

SEQ ID NO: 19017 - DNA, 21 bp, Artificial Sequence
  Synthetic
ggtagcagagccauccttgua

SEQ ID NO: 19018 - DNA, 23 bp, Artificial Sequence
  Synthetic
gaugttcaugcggaagagaggaa

SEQ ID NO: 19019 - DNA, 20 bp, Artificial Sequence
  Synthetic
cccuctctcttugccgacag

SEQ ID NO: 19020 - DNA, 17 bp, Artificial Sequence
  Synthetic
gcggccgccugactuac

SEQ ID NO: 19021 - DNA, 24 bp, Artificial Sequence
  Synthetic
tctgcagcaagacugagatcaaut

SEQ ID NO: 19022 - DNA, 17 bp, Artificial Sequence
  Synthetic
ccucgccccuacaccca

SEQ ID NO: 19023 - DNA, 21 bp, Artificial Sequence
  Synthetic
gctcctuccccttccagatut

SEQ ID NO: 19024 - DNA, 22 bp, Artificial Sequence
  Synthetic
cutcacgcuaagggcgaaaaag

SEQ ID NO: 19025 - DNA, 18 bp, Artificial Sequence
  Synthetic
ccgatuaccggcgcauca

SEQ ID NO: 19026 - DNA, 21 bp, Artificial Sequence
  Synthetic
acgaagcaggcgaagutcaut

SEQ ID NO: 19027 - DNA, 19 bp, Artificial Sequence
  Synthetic
gcccagccaucugcaacat

SEQ ID NO: 19028 - DNA, 28 bp, Artificial Sequence
  Synthetic
gcagttttcgugctaatgtttttgcuaa

SEQ ID NO: 19029 - DNA, 23 bp, Artificial Sequence
  Synthetic
actgaaacucacaatagccaucc

SEQ ID NO: 19030 - DNA, 28 bp, Artificial Sequence
  Synthetic
gagtgctacggagauagagaaatcaaut

SEQ ID NO: 19031 - DNA, 25 bp, Artificial Sequence
  Synthetic
tccacagtuagaggacaaaaagcug

SEQ ID NO: 19032 - DNA, 21 bp, Artificial Sequence
  Synthetic
gatcucagcgcagagaagtug

SEQ ID NO: 19033 - DNA, 18 bp, Artificial Sequence
  Synthetic
ccugcaagaccagcugga

SEQ ID NO: 19034 - DNA, 20 bp, Artificial Sequence
  Synthetic
gtcctuggccagcttaaugg

SEQ ID NO: 19035 - DNA, 23 bp, Artificial Sequence
  Synthetic
acacctcaaguactagcccaugt

SEQ ID NO: 19036 - DNA, 23 bp, Artificial Sequence
  Synthetic
gtttgcacagugccttucagaat

SEQ ID NO: 19037 - DNA, 27 bp, Artificial Sequence
  Synthetic
ctgtgtttcagcucattgtgatuaacc

SEQ ID NO: 19038 - DNA, 22 bp, Artificial Sequence
  Synthetic
catcccutggaccucagcaaaa

SEQ ID NO: 19039 - DNA, 22 bp, Artificial Sequence
  Synthetic
gggctaccuagagactgcttua

SEQ ID NO: 19040 - DNA, 28 bp, Artificial Sequence
  Synthetic
acctgatctcuctgatttccaaattucc

SEQ ID NO: 19041 - DNA, 30 bp, Artificial Sequence
  Synthetic
tggautaaacaaaaaugaaacaaccaagca

SEQ ID NO: 19042 - DNA, 28 bp, Artificial Sequence
  Synthetic
cattcactaaggcauttcattcctucag

SEQ ID NO: 19043 - DNA, 29 bp, Artificial Sequence
  Synthetic
cacccattgagucattcactttuaaagaa

SEQ ID NO: 19044 - DNA, 24 bp, Artificial Sequence
  Synthetic
caucaggcgcaaucgtattuaaag

SEQ ID NO: 19045 - DNA, 24 bp, Artificial Sequence
  Synthetic
ctgagtccuaaacgcatggauaca

SEQ ID NO: 19046 - DNA, 24 bp, Artificial Sequence
  Synthetic
agaaaaggaagugccaggcaaaua

SEQ ID NO: 19047 - DNA, 23 bp, Artificial Sequence
  Synthetic
ccaacttcuagcctgtcgatugt

SEQ ID NO: 19048 - DNA, 22 bp, Artificial Sequence
  Synthetic
tgactctgaaugacagccucca

SEQ ID NO: 19049 - DNA, 22 bp, Artificial Sequence
  Synthetic
ctggaagcaaccuctcctctut

SEQ ID NO: 19050 - DNA, 29 bp, Artificial Sequence
  Synthetic
ggaggttatctguagagacagtcatttut

SEQ ID NO: 19051 - DNA, 25 bp, Artificial Sequence
  Synthetic
caccttgaacacautcctccuaaag

SEQ ID NO: 19052 - DNA, 27 bp, Artificial Sequence
  Synthetic
cctttagtctttucccagacaatcuga

SEQ ID NO: 19053 - DNA, 21 bp, Artificial Sequence
  Synthetic
catttuccccacagggucagt

SEQ ID NO: 19054 - DNA, 31 bp, Artificial Sequence
  Synthetic
tgaatggtctagauttacctgagtgtttuag

SEQ ID NO: 19055 - DNA, 23 bp, Artificial Sequence
  Synthetic
gctgttttugtctcctcuagcgt

SEQ ID NO: 19056 - DNA, 23 bp, Artificial Sequence
  Synthetic
acaaatcctucaaagaccugcct

SEQ ID NO: 19057 - DNA, 21 bp, Artificial Sequence
  Synthetic
gaaccucaggugcaacagaga

SEQ ID NO: 19058 - DNA, 24 bp, Artificial Sequence
  Synthetic
ggtagagtccauctttgcactucc

SEQ ID NO: 19059 - DNA, 20 bp, Artificial Sequence
  Synthetic
gacatcgguggaggttguct

SEQ ID NO: 19060 - DNA, 20 bp, Artificial Sequence
  Synthetic
cctgaucccaaguggccaac

SEQ ID NO: 19061 - DNA, 22 bp, Artificial Sequence
  Synthetic
gggaaagaccutccaugcaaga

SEQ ID NO: 19062 - DNA, 22 bp, Artificial Sequence
  Synthetic
aggtagagguggaaggtgacut

SEQ ID NO: 19063 - DNA, 24 bp, Artificial Sequence
  Synthetic
catagttcuggaaaaccccagcut

SEQ ID NO: 19064 - DNA, 18 bp, Artificial Sequence
  Synthetic
ccccctcacucaccggua

SEQ ID NO: 19065 - DNA, 20 bp, Artificial Sequence
  Synthetic
gccttcucctgcctcucaag

SEQ ID NO: 19066 - DNA, 20 bp, Artificial Sequence
  Synthetic
cucttccctcugcccagaag

SEQ ID NO: 19067 - DNA, 20 bp, Artificial Sequence
  Synthetic
gcctgaaggagcuagaccug

SEQ ID NO: 19068 - DNA, 22 bp, Artificial Sequence
  Synthetic
agcttctgccutggatctctuc

SEQ ID NO: 19069 - DNA, 22 bp, Artificial Sequence
  Synthetic
cagaaaccugaaggagcuggac

SEQ ID NO: 19070 - DNA, 23 bp, Artificial Sequence
  Synthetic
catcacttgtgucaggaacgtut

SEQ ID NO: 19071 - DNA, 25 bp, Artificial Sequence
  Synthetic
gggagagagagauggagaacatcut

SEQ ID NO: 19072 - DNA, 24 bp, Artificial Sequence
  Synthetic
gtcatctggacugaaaagggtcut

SEQ ID NO: 19073 - DNA, 25 bp, Artificial Sequence
  Synthetic
aaggaaaaacucacactgactucca

SEQ ID NO: 19074 - DNA, 25 bp, Artificial Sequence
  Synthetic
ggatgccucgggaagtatagtttuc

SEQ ID NO: 19075 - DNA, 21 bp, Artificial Sequence
  Synthetic
ctgctctucatcctcgauggt

SEQ ID NO: 19076 - DNA, 22 bp, Artificial Sequence
  Synthetic
ctccacataaucaggccagcut

SEQ ID NO: 19077 - DNA, 18 bp, Artificial Sequence
  Synthetic
ccacccaugggagcctuc

SEQ ID NO: 19078 - DNA, 18 bp, Artificial Sequence
  Synthetic
ctaggcugggctgaggug

SEQ ID NO: 19079 - DNA, 24 bp, Artificial Sequence
  Synthetic
agaaatctctgccucactcctcua

SEQ ID NO: 19080 - DNA, 21 bp, Artificial Sequence
  Synthetic
cccatacugagccaccaggua

SEQ ID NO: 19081 - DNA, 22 bp, Artificial Sequence
  Synthetic
gaaggaggagcugaaggagtuc

SEQ ID NO: 19082 - DNA, 26 bp, Artificial Sequence
  Synthetic
gaacaagaaguggagaatgtcaguct

SEQ ID NO: 19083 - DNA, 21 bp, Artificial Sequence
  Synthetic
cacagacccuctcactcaugt

SEQ ID NO: 19084 - DNA, 22 bp, Artificial Sequence
  Synthetic
cggagattcucttcctctgugc

SEQ ID NO: 19085 - DNA, 24 bp, Artificial Sequence
  Synthetic
gacctgatttccutactgcctcut

SEQ ID NO: 19086 - DNA, 22 bp, Artificial Sequence
  Synthetic
gcctcacaaccuccgtcatgug

SEQ ID NO: 19087 - DNA, 28 bp, Artificial Sequence
  Synthetic
tgtctccttccucttcctacagtacucc

SEQ ID NO: 19088 - DNA, 23 bp, Artificial Sequence
  Synthetic
cattcugggagcttcatcuggac

SEQ ID NO: 19089 - DNA, 22 bp, Artificial Sequence
  Synthetic
ctggtcctcugactgctcttut

SEQ ID NO: 19090 - DNA, 21 bp, Artificial Sequence
  Synthetic
tcatggacucctggagauggt

SEQ ID NO: 19091 - DNA, 21 bp, Artificial Sequence
  Synthetic
gccaaggcutcaagctcucag

SEQ ID NO: 19092 - DNA, 20 bp, Artificial Sequence
  Synthetic
gcuggtccucagaaaaccga

SEQ ID NO: 19093 - DNA, 21 bp, Artificial Sequence
  Synthetic
gaggaaggaugccagctucat

SEQ ID NO: 19094 - DNA, 20 bp, Artificial Sequence
  Synthetic
cutaggaagcuccgccaaga

SEQ ID NO: 19095 - DNA, 20 bp, Artificial Sequence
  Synthetic
ggttcaggcucccaugaagg

SEQ ID NO: 19096 - DNA, 19 bp, Artificial Sequence
  Synthetic
tccagcugcagcagatuga

SEQ ID NO: 19097 - DNA, 19 bp, Artificial Sequence
  Synthetic
actccagaccccugcugaa

SEQ ID NO: 19098 - DNA, 22 bp, Artificial Sequence
  Synthetic
agagaacacugggagaggguag

SEQ ID NO: 19099 - DNA, 19 bp, Artificial Sequence
  Synthetic
cugccgauccaaagccaag

SEQ ID NO: 19100 - DNA, 17 bp, Artificial Sequence
  Synthetic
agcacggccutggucag

SEQ ID NO: 19101 - DNA, 24 bp, Artificial Sequence
  Synthetic
agtggttctgaugacctttcccua

SEQ ID NO: 19102 - DNA, 22 bp, Artificial Sequence
  Synthetic
ggagguggtauaggaggaggag

SEQ ID NO: 19103 - DNA, 20 bp, Artificial Sequence
  Synthetic
ttctccaccucgggctcuaa

SEQ ID NO: 19104 - DNA, 21 bp, Artificial Sequence
  Synthetic
gggcgatuagagggtgaggua

SEQ ID NO: 19105 - DNA, 19 bp, Artificial Sequence
  Synthetic
ccacgggacuctguggagt

SEQ ID NO: 19106 - DNA, 21 bp, Artificial Sequence
  Synthetic
catggtgacauactccccgut

SEQ ID NO: 19107 - DNA, 22 bp, Artificial Sequence
  Synthetic
gccttggtcucctggatctcua

SEQ ID NO: 19108 - DNA, 21 bp, Artificial Sequence
  Synthetic
ccatcugagacccggatctug

SEQ ID NO: 19109 - DNA, 22 bp, Artificial Sequence
  Synthetic
gctgttgtcugctgtgacctua

SEQ ID NO: 19110 - DNA, 18 bp, Artificial Sequence
  Synthetic
gguaccccggaacacguc

SEQ ID NO: 19111 - DNA, 21 bp, Artificial Sequence
  Synthetic
ctactccttcucccacagcuc

SEQ ID NO: 19112 - DNA, 20 bp, Artificial Sequence
  Synthetic
gagctcucgaagtgctguca

SEQ ID NO: 19113 - DNA, 18 bp, Artificial Sequence
  Synthetic
gcagguacgtcgggugag

SEQ ID NO: 19114 - DNA, 19 bp, Artificial Sequence
  Synthetic
ccattgcugttggcaucgg

SEQ ID NO: 19115 - DNA, 19 bp, Artificial Sequence
  Synthetic
cccauggcccagacaugag

SEQ ID NO: 19116 - DNA, 30 bp, Artificial Sequence
  Synthetic
atttatggtcgtttutaaggataagctgut

SEQ ID NO: 19117 - DNA, 28 bp, Artificial Sequence
  Synthetic
gattagacattccutgttgtgctcagua

SEQ ID NO: 19118 - DNA, 21 bp, Artificial Sequence
  Synthetic
accugtcgugaaggaaaccag

SEQ ID NO: 19119 - DNA, 29 bp, Artificial Sequence
  Synthetic
tcatattacttcaguagtcccatguggat

SEQ ID NO: 19120 - DNA, 30 bp, Artificial Sequence
  Synthetic
tgccagggatttugttcctatctaataaug

SEQ ID NO: 19121 - DNA, 31 bp, Artificial Sequence
  Synthetic
ggattatttcuggacacaagauaaggagaat

SEQ ID NO: 19122 - DNA, 27 bp, Artificial Sequence
  Synthetic
cctgctttttaauccaagtaagccaut

SEQ ID NO: 19123 - DNA, 25 bp, Artificial Sequence
  Synthetic
atgctctcaccutaaagtgttggut

SEQ ID NO: 19124 - DNA, 32 bp, Artificial Sequence
  Synthetic
atagctattatccugagtcttatgtctgauac

SEQ ID NO: 19125 - DNA, 31 bp, Artificial Sequence
  Synthetic
gtttcaccauggauaagagaagatacttaua

SEQ ID NO: 19126 - DNA, 29 bp, Artificial Sequence
  Synthetic
aaatgtttgagugagtcttctctttguct

SEQ ID NO: 19127 - DNA, 32 bp, Artificial Sequence
  Synthetic
aagtacatatacctaauctcccaaaatgttuc

SEQ ID NO: 19128 - DNA, 29 bp, Artificial Sequence
  Synthetic
gtcatcaaatgctuagtagcacagaaaut

SEQ ID NO: 19129 - DNA, 31 bp, Artificial Sequence
  Synthetic
atctctcaccatuaccattccaaatattcut

SEQ ID NO: 19130 - DNA, 23 bp, Artificial Sequence
  Synthetic
gaagtggcccugtacatgttuct

SEQ ID NO: 19131 - DNA, 26 bp, Artificial Sequence
  Synthetic
agaggcaaacuccatgaatgtgtuat

SEQ ID NO: 19132 - DNA, 25 bp, Artificial Sequence
  Synthetic
aaggtttaautcatgcttugcacaa

SEQ ID NO: 19133 - DNA, 23 bp, Artificial Sequence
  Synthetic
atccattccugtagggagtcugt

SEQ ID NO: 19134 - DNA, 27 bp, Artificial Sequence
  Synthetic
ggacttcaaauacggaccaatgtuaag

SEQ ID NO: 19135 - DNA, 30 bp, Artificial Sequence
  Synthetic
agagaaaggtgaaaaauaagagaacactut

SEQ ID NO: 19136 - DNA, 30 bp, Artificial Sequence
  Synthetic
gcaattcaaauaaaaacgaaactgtgucaa

SEQ ID NO: 19137 - DNA, 32 bp, Artificial Sequence
  Synthetic
attggacatattaagauttacaagacccuaca

SEQ ID NO: 19138 - DNA, 19 bp, Artificial Sequence
  Synthetic
aaacguggcatgtcucgga

SEQ ID NO: 19139 - DNA, 26 bp, Artificial Sequence
  Synthetic
ctcttacatgccagutctctaggtut

SEQ ID NO: 19140 - DNA, 24 bp, Artificial Sequence
  Synthetic
ccaactgctcuggaacatgtttuc

SEQ ID NO: 19141 - DNA, 25 bp, Artificial Sequence
  Synthetic
cttgacataccucagcacacacaua

SEQ ID NO: 19142 - DNA, 23 bp, Artificial Sequence
  Synthetic
gtatgtagtcggugctgtgacut

SEQ ID NO: 19143 - DNA, 30 bp, Artificial Sequence
  Synthetic
agaaacagcuaataaaaagttcuccaaact

SEQ ID NO: 19144 - DNA, 25 bp, Artificial Sequence
  Synthetic
acataagtcugggtgtatctggugt

SEQ ID NO: 19145 - DNA, 28 bp, Artificial Sequence
  Synthetic
tgattgttccagaguagacgatguaaag

SEQ ID NO: 19146 - DNA, 32 bp, Artificial Sequence
  Synthetic
catactcaguagacaauataaagcctcauaat

SEQ ID NO: 19147 - DNA, 26 bp, Artificial Sequence
  Synthetic
aaaataggatucccagcttuggaagt

SEQ ID NO: 19148 - DNA, 31 bp, Artificial Sequence
  Synthetic
cagtctatatctauaactgtaactccugggt

SEQ ID NO: 19149 - DNA, 23 bp, Artificial Sequence
  Synthetic
ggcagcagguagtttctgttgut

SEQ ID NO: 19150 - DNA, 21 bp, Artificial Sequence
  Synthetic
caggagtgugaagccattguc

SEQ ID NO: 19151 - DNA, 25 bp, Artificial Sequence
  Synthetic
agtaatgcgauattgagcagtgucc

SEQ ID NO: 19152 - DNA, 21 bp, Artificial Sequence
  Synthetic
gagccacaccucacgtuagaa

SEQ ID NO: 19153 - DNA, 29 bp, Artificial Sequence
  Synthetic
gtgaaagtctucactggaaaattcugaaa

SEQ ID NO: 19154 - DNA, 26 bp, Artificial Sequence
  Synthetic
aataaaagctgaggugatggcagaua

SEQ ID NO: 19155 - DNA, 29 bp, Artificial Sequence
  Synthetic
aaacctcctgaugataaaacagataugct

SEQ ID NO: 19156 - DNA, 30 bp, Artificial Sequence
  Synthetic
tttctgtctttacutgttcctttattcuct

SEQ ID NO: 19157 - DNA, 24 bp, Artificial Sequence
  Synthetic
agcagctgacutgactttgcuaat

SEQ ID NO: 19158 - DNA, 27 bp, Artificial Sequence
  Synthetic
ttgttgtctutgggtgtatuagcaaac

SEQ ID NO: 19159 - DNA, 27 bp, Artificial Sequence
  Synthetic
agatatgcuttacaactugagaaccat

SEQ ID NO: 19160 - DNA, 21 bp, Artificial Sequence
  Synthetic
gctgcagcutgatgaggucaa

SEQ ID NO: 19161 - DNA, 26 bp, Artificial Sequence
  Synthetic
gagtaatcuaggaaccucaaggcaaa

SEQ ID NO: 19162 - DNA, 30 bp, Artificial Sequence
  Synthetic
cacuactaactctggtuaacaaacacagaa

SEQ ID NO: 19163 - DNA, 30 bp, Artificial Sequence
  Synthetic
tttgggtgatccutatatatagatguagca

SEQ ID NO: 19164 - DNA, 23 bp, Artificial Sequence
  Synthetic
ctcucccaaaggttcugaaggat

SEQ ID NO: 19165 - DNA, 32 bp, Artificial Sequence
  Synthetic
tttagataaacuaaccaaguaacttcttagug

SEQ ID NO: 19166 - DNA, 23 bp, Artificial Sequence
  Synthetic
tgctgcagaaacucagaggatut

SEQ ID NO: 19167 - DNA, 19 bp, Artificial Sequence
  Synthetic
guaagaagcagcgccugga

SEQ ID NO: 19168 - DNA, 25 bp, Artificial Sequence
  Synthetic
cctgttatcautgtgccaagaucca

SEQ ID NO: 19169 - DNA, 20 bp, Artificial Sequence
  Synthetic
gcgcgcaugttagcaagtuc

SEQ ID NO: 19170 - DNA, 26 bp, Artificial Sequence
  Synthetic
gcaatgaaautcagtccuggaaggaa

SEQ ID NO: 19171 - DNA, 21 bp, Artificial Sequence
  Synthetic
tttgcttcugcacttggctug

SEQ ID NO: 19172 - DNA, 17 bp, Artificial Sequence
  Synthetic
ctucgggcggcaaaucc

SEQ ID NO: 19173 - DNA, 20 bp, Artificial Sequence
  Synthetic
gcctggacgugctccattut

SEQ ID NO: 19174 - DNA, 25 bp, Artificial Sequence
  Synthetic
gccatatggugaagtcttactcgut

SEQ ID NO: 19175 - DNA, 26 bp, Artificial Sequence
  Synthetic
tcaatgaccatcutagtctccaguga

SEQ ID NO: 19176 - DNA, 22 bp, Artificial Sequence
  Synthetic
gcacaucaaagcccaaggacua

SEQ ID NO: 19177 - DNA, 30 bp, Artificial Sequence
  Synthetic
agaucaaaaagttggugaagagaaaagaaa

SEQ ID NO: 19178 - DNA, 24 bp, Artificial Sequence
  Synthetic
gcttttcctgutacctctctgugt

SEQ ID NO: 19179 - DNA, 30 bp, Artificial Sequence
  Synthetic
attctttcaacugtttttagaucaaaggca

SEQ ID NO: 19180 - DNA, 22 bp, Artificial Sequence
  Synthetic
gtaccttuaggcaggctcctuc

SEQ ID NO: 19181 - DNA, 24 bp, Artificial Sequence
  Synthetic
tgcatatgccuttttagcucaaca

SEQ ID NO: 19182 - DNA, 25 bp, Artificial Sequence
  Synthetic
ggtgttttgcaugaagcttcctuaa

SEQ ID NO: 19183 - DNA, 30 bp, Artificial Sequence
  Synthetic
tgtttgatttttcuagtcatcttctcauca

SEQ ID NO: 19184 - DNA, 27 bp, Artificial Sequence
  Synthetic
auccaacagaagaaattuaagggaagt

SEQ ID NO: 19185 - DNA, 25 bp, Artificial Sequence
  Synthetic
cagtgaaccucctttctttgcttut

SEQ ID NO: 19186 - DNA, 22 bp, Artificial Sequence
  Synthetic
cgcccgacugatacttgatuga

SEQ ID NO: 19187 - DNA, 25 bp, Artificial Sequence
  Synthetic
cauagggaaaatgaugagcccagag

SEQ ID NO: 19188 - DNA, 32 bp, Artificial Sequence
  Synthetic
ccatgactttatacucacttttccatttuaag

SEQ ID NO: 19189 - DNA, 20 bp, Artificial Sequence
  Synthetic
gctcccccuaccuccaaaaa

SEQ ID NO: 19190 - DNA, 21 bp, Artificial Sequence
  Synthetic
ctgacccccugaaagctguag

SEQ ID NO: 19191 - DNA, 25 bp, Artificial Sequence
  Synthetic
agucgagaugaaacagaaggaacag

SEQ ID NO: 19192 - DNA, 21 bp, Artificial Sequence
  Synthetic
tccagcucttcttccauggat

SEQ ID NO: 19193 - DNA, 27 bp, Artificial Sequence
  Synthetic
gcagtttcgaaaucaacgagatcuact

SEQ ID NO: 19194 - DNA, 24 bp, Artificial Sequence
  Synthetic
gggtgttcugaagtcagtccuaga

SEQ ID NO: 19195 - DNA, 22 bp, Artificial Sequence
  Synthetic
gcaccagugacattcaggauga

SEQ ID NO: 19196 - DNA, 26 bp, Artificial Sequence
  Synthetic
gctgtagatguctgatttcactgugg

SEQ ID NO: 19197 - DNA, 21 bp, Artificial Sequence
  Synthetic
atgagcgcugacttgtgagut

SEQ ID NO: 19198 - DNA, 20 bp, Artificial Sequence
  Synthetic
tgaugcgctcguacacaagg

SEQ ID NO: 19199 - DNA, 23 bp, Artificial Sequence
  Synthetic
tcctctcaccugccttatcugaa

SEQ ID NO: 19200 - DNA, 20 bp, Artificial Sequence
  Synthetic
gctgtcaguggcaacctcut

SEQ ID NO: 19201 - DNA, 32 bp, Artificial Sequence
  Synthetic
attattctggataugagtggttaattcugagg

SEQ ID NO: 19202 - DNA, 19 bp, Artificial Sequence
  Synthetic
ctctcaucgtggagucgca

SEQ ID NO: 19203 - DNA, 23 bp, Artificial Sequence
  Synthetic
gagcattgccauggacatcaaut

SEQ ID NO: 19204 - DNA, 27 bp, Artificial Sequence
  Synthetic
cttgtttgacauactcatgaagcugag

SEQ ID NO: 19205 - DNA, 24 bp, Artificial Sequence
  Synthetic
agttgtttcctugcatttctggut

SEQ ID NO: 19206 - DNA, 22 bp, Artificial Sequence
  Synthetic
gauttctcctccuccacccaac

SEQ ID NO: 19207 - DNA, 21 bp, Artificial Sequence
  Synthetic
caagtgggucccaaaagcauc

SEQ ID NO: 19208 - DNA, 28 bp, Artificial Sequence
  Synthetic
gggataactuctatgtgattgaucaagg

SEQ ID NO: 19209 - DNA, 27 bp, Artificial Sequence
  Synthetic
gggatgtaaugacccttcaaaaucact

SEQ ID NO: 19210 - DNA, 28 bp, Artificial Sequence
  Synthetic
acagcaccaaauaatacagagcagtuat

SEQ ID NO: 19211 - DNA, 20 bp, Artificial Sequence
  Synthetic
ggutctcccugcaccacaat

SEQ ID NO: 19212 - DNA, 25 bp, Artificial Sequence
  Synthetic
gacctagattugaacgtgttctugg

SEQ ID NO: 19213 - DNA, 22 bp, Artificial Sequence
  Synthetic
catgagugaagcatggatuggg

SEQ ID NO: 19214 - DNA, 22 bp, Artificial Sequence
  Synthetic
cttgtgtgaccuttgcccttug

SEQ ID NO: 19215 - DNA, 21 bp, Artificial Sequence
  Synthetic
cacaaacacacccaugagcug

SEQ ID NO: 19216 - DNA, 19 bp, Artificial Sequence
  Synthetic
cgcacugagctgtccatug

SEQ ID NO: 19217 - DNA, 17 bp, Artificial Sequence
  Synthetic
cggtgggcugactccug

SEQ ID NO: 19218 - DNA, 23 bp, Artificial Sequence
  Synthetic
agaccutggagaatucagagcct

SEQ ID NO: 19219 - DNA, 24 bp, Artificial Sequence
  Synthetic
cattaccacagcauccaagaccua

SEQ ID NO: 19220 - DNA, 20 bp, Artificial Sequence
  Synthetic
aagggcaccagcugtagaug

SEQ ID NO: 19221 - DNA, 22 bp, Artificial Sequence
  Synthetic
cagaatgcaaggucatccucct

SEQ ID NO: 19222 - DNA, 18 bp, Artificial Sequence
  Synthetic
cuccggagagaccccuga

SEQ ID NO: 19223 - DNA, 24 bp, Artificial Sequence
  Synthetic
atggacttgauctcgatggtctug

SEQ ID NO: 19224 - DNA, 27 bp, Artificial Sequence
  Synthetic
aagttcatcaaugaccaguacgagaaa

SEQ ID NO: 19225 - DNA, 18 bp, Artificial Sequence
  Synthetic
augaggacgccgacacug

SEQ ID NO: 19226 - DNA, 20 bp, Artificial Sequence
  Synthetic
gcagugaccacgaguaccag

SEQ ID NO: 19227 - DNA, 21 bp, Artificial Sequence
  Synthetic
tgggucagcagaagagacugt

SEQ ID NO: 19228 - DNA, 21 bp, Artificial Sequence
  Synthetic
caaggtcuacagcctgctgut

SEQ ID NO: 19229 - DNA, 20 bp, Artificial Sequence
  Synthetic
caguccccaucacagaccat

SEQ ID NO: 19230 - DNA, 20 bp, Artificial Sequence
  Synthetic
cgactgaucgacccucaggt

SEQ ID NO: 19231 - DNA, 22 bp, Artificial Sequence
  Synthetic
gggaccacguctttactgaugt

SEQ ID NO: 19232 - DNA, 22 bp, Artificial Sequence
  Synthetic
atcttcccaaaagucaccugca

SEQ ID NO: 19233 - DNA, 27 bp, Artificial Sequence
  Synthetic
aggtcttggtttugattgaatcgtcut

SEQ ID NO: 19234 - DNA, 21 bp, Artificial Sequence
  Synthetic
aagcacauggtcaccauggat

SEQ ID NO: 19235 - DNA, 20 bp, Artificial Sequence
  Synthetic
cgacacugccgttgatgtug

SEQ ID NO: 19236 - DNA, 27 bp, Artificial Sequence
  Synthetic
aggcttattaaatuccttagcgaccug

SEQ ID NO: 19237 - DNA, 22 bp, Artificial Sequence
  Synthetic
atggtguccaactgatgtuggt

SEQ ID NO: 19238 - DNA, 23 bp, Artificial Sequence
  Synthetic
gggacttuggacaactgagugac

SEQ ID NO: 19239 - DNA, 24 bp, Artificial Sequence
  Synthetic
acaaagctgcacucatcttctgut

SEQ ID NO: 19240 - DNA, 20 bp, Artificial Sequence
  Synthetic
ttttcuggacggcgtaccuc

SEQ ID NO: 19241 - DNA, 17 bp, Artificial Sequence
  Synthetic
auggcgtcugccacgat

SEQ ID NO: 19242 - DNA, 21 bp, Artificial Sequence
  Synthetic
acccaaaaugccccugaagac

SEQ ID NO: 19243 - DNA, 21 bp, Artificial Sequence
  Synthetic
gcugccacgugacacaaaaat

SEQ ID NO: 19244 - DNA, 23 bp, Artificial Sequence
  Synthetic
ggctgtcctuaggaacttcagug

SEQ ID NO: 19245 - DNA, 23 bp, Artificial Sequence
  Synthetic
cttcugagaaggcccaaagaugt

SEQ ID NO: 19246 - DNA, 22 bp, Artificial Sequence
  Synthetic
cctcuacgagagcctcuacgac

SEQ ID NO: 19247 - DNA, 23 bp, Artificial Sequence
  Synthetic
tcutcaatgacaaucaggcggaa

SEQ ID NO: 19248 - DNA, 19 bp, Artificial Sequence
  Synthetic
tcctgcugaactgcgcuac

SEQ ID NO: 19249 - DNA, 22 bp, Artificial Sequence
  Synthetic
gtgccugaaggaaatcugcaaa

SEQ ID NO: 19250 - DNA, 27 bp, Artificial Sequence
  Synthetic
ttgtagcctttaugtttcccatcacut

SEQ ID NO: 19251 - DNA, 19 bp, Artificial Sequence
  Synthetic
ggcgcuacggattccauct

SEQ ID NO: 19252 - DNA, 21 bp, Artificial Sequence
  Synthetic
cacugtgtcaguggcagaaac

SEQ ID NO: 19253 - DNA, 19 bp, Artificial Sequence
  Synthetic
catattgcgcgugcagcuc

SEQ ID NO: 19254 - DNA, 20 bp, Artificial Sequence
  Synthetic
ggcccatcuctcttctgugc

SEQ ID NO: 19255 - DNA, 21 bp, Artificial Sequence
  Synthetic
ggagtatcuggcctggucagt

SEQ ID NO: 19256 - DNA, 21 bp, Artificial Sequence
  Synthetic
cgctcctuggtttcctctcug

SEQ ID NO: 19257 - DNA, 27 bp, Artificial Sequence
  Synthetic
ccttcaaguaacactgaagaagtucct

SEQ ID NO: 19258 - DNA, 19 bp, Artificial Sequence
  Synthetic
cctgauggaagcccgtugg

SEQ ID NO: 19259 - DNA, 23 bp, Artificial Sequence
  Synthetic
gaaauctcccactuggaacacag

SEQ ID NO: 19260 - DNA, 21 bp, Artificial Sequence
  Synthetic
ccctgctaaugactcctgucc

SEQ ID NO: 19261 - DNA, 25 bp, Artificial Sequence
  Synthetic
cacagauccaaacctaaggtcucac

SEQ ID NO: 19262 - DNA, 23 bp, Artificial Sequence
  Synthetic
gagctgcctutttctttctggut

SEQ ID NO: 19263 - DNA, 27 bp, Artificial Sequence
  Synthetic
agaagcaagtcuccatgttgttctuac

SEQ ID NO: 19264 - DNA, 25 bp, Artificial Sequence
  Synthetic
ccagaaaugatgaacugaaccacct

SEQ ID NO: 19265 - DNA, 22 bp, Artificial Sequence
  Synthetic
agaggaaatcugcagctctguc

SEQ ID NO: 19266 - DNA, 22 bp, Artificial Sequence
  Synthetic
cgtucagacggttcttugcaag

SEQ ID NO: 19267 - DNA, 20 bp, Artificial Sequence
  Synthetic
gcacucgaggacagcttugg

SEQ ID NO: 19268 - DNA, 23 bp, Artificial Sequence
  Synthetic
attggcgaaugcaagatccttuc

SEQ ID NO: 19269 - DNA, 24 bp, Artificial Sequence
  Synthetic
ccatttctgucaccgttccaucaa

SEQ ID NO: 19270 - DNA, 21 bp, Artificial Sequence
  Synthetic
ggtactgcuccagaagtggut

SEQ ID NO: 19271 - DNA, 29 bp, Artificial Sequence
  Synthetic
cttaggaaatagaaucctgacccacauac

SEQ ID NO: 19272 - DNA, 25 bp, Artificial Sequence
  Synthetic
ctcatcagccaagauaagcgtauca

SEQ ID NO: 19273 - DNA, 25 bp, Artificial Sequence
  Synthetic
ttttcctgcagcuccaaatctuaga

SEQ ID NO: 19274 - DNA, 24 bp, Artificial Sequence
  Synthetic
gggttgctaucatacggttctuac

SEQ ID NO: 19275 - DNA, 21 bp, Artificial Sequence
  Synthetic
cctggaacgcutagtgguaca

SEQ ID NO: 19276 - DNA, 20 bp, Artificial Sequence
  Synthetic
ccgaggucactgaacugcat

SEQ ID NO: 19277 - DNA, 19 bp, Artificial Sequence
  Synthetic
ctgacgauctgccgcugaa

SEQ ID NO: 19278 - DNA, 23 bp, Artificial Sequence
  Synthetic
gtctgtcguagaagtcactcugg

SEQ ID NO: 19279 - DNA, 22 bp, Artificial Sequence
  Synthetic
gctgtgcugatttcctttucgg

SEQ ID NO: 19280 - DNA, 22 bp, Artificial Sequence
  Synthetic
cccggaaaaugctaagctccuc

SEQ ID NO: 19281 - DNA, 21 bp, Artificial Sequence
  Synthetic
ccccataggugtgcaaaucca

SEQ ID NO: 19282 - DNA, 24 bp, Artificial Sequence
  Synthetic
tgaugaaacagccacttauccaca

SEQ ID NO: 19283 - DNA, 26 bp, Artificial Sequence
  Synthetic
gacagtatggaaautaccagcaguga

SEQ ID NO: 19284 - DNA, 24 bp, Artificial Sequence
  Synthetic
actgtacaaagcuttaccguagcc

SEQ ID NO: 19285 - DNA, 24 bp, Artificial Sequence
  Synthetic
aggaaautcacagtauggccaaca

SEQ ID NO: 19286 - DNA, 27 bp, Artificial Sequence
  Synthetic
tttccaaatggaaucttaccctgtuga

SEQ ID NO: 19287 - DNA, 26 bp, Artificial Sequence
  Synthetic
agcctccttcucagcaatacaataug

SEQ ID NO: 19288 - DNA, 27 bp, Artificial Sequence
  Synthetic
aggcatattcauggaactgtttgucat

SEQ ID NO: 19289 - DNA, 27 bp, Artificial Sequence
  Synthetic
acttttgtauggaccatctgttuaact

SEQ ID NO: 19290 - DNA, 27 bp, Artificial Sequence
  Synthetic
tcttactgagaacacuctgaggtctut

SEQ ID NO: 19291 - DNA, 29 bp, Artificial Sequence
  Synthetic
acttgatgcacuagttttatgcuaaacct

SEQ ID NO: 19292 - DNA, 32 bp, Artificial Sequence
  Synthetic
acaaatggacaauatgtctattacgaauacac

SEQ ID NO: 19293 - DNA, 28 bp, Artificial Sequence
  Synthetic
cagcttcttuaccaaactttcaatugct

SEQ ID NO: 19294 - DNA, 30 bp, Artificial Sequence
  Synthetic
acatgttaaatattgucagtatgcgttuga

SEQ ID NO: 19295 - DNA, 32 bp, Artificial Sequence
  Synthetic
ttatgtttcttaggaugaaagcaaagtcuact

SEQ ID NO: 19296 - DNA, 24 bp, Artificial Sequence
  Synthetic
gtgaaggacugttgcagauagcat

SEQ ID NO: 19297 - DNA, 21 bp, Artificial Sequence
  Synthetic
gcccacaugggttaattugct

SEQ ID NO: 19298 - DNA, 28 bp, Artificial Sequence
  Synthetic
ccctattgttacugttgatggatacgug

SEQ ID NO: 19299 - DNA, 32 bp, Artificial Sequence
  Synthetic
taactatctgactauacaatcaatacctugct

SEQ ID NO: 19300 - DNA, 22 bp, Artificial Sequence
  Synthetic
gucatcgacagaugcagcagca

SEQ ID NO: 19301 - DNA, 31 bp, Artificial Sequence
  Synthetic
atgaaaagcatacutactgatagcuggagct

SEQ ID NO: 19302 - DNA, 25 bp, Artificial Sequence
  Synthetic
aaaatttuggagaagggaagucgga

SEQ ID NO: 19303 - DNA, 21 bp, Artificial Sequence
  Synthetic
gtccauacccaccgacaucag

SEQ ID NO: 19304 - DNA, 21 bp, Artificial Sequence
  Synthetic
gatccaggccaucatccugac

SEQ ID NO: 19305 - DNA, 22 bp, Artificial Sequence
  Synthetic
gucccaacacuggaaaggauat

SEQ ID NO: 19306 - DNA, 23 bp, Artificial Sequence
  Synthetic
gcaggtactuctgtcagctgaut

SEQ ID NO: 19307 - DNA, 18 bp, Artificial Sequence
  Synthetic
ccccuagcacgtgccuac

SEQ ID NO: 19308 - DNA, 21 bp, Artificial Sequence
  Synthetic
catgactguggtgccgtacut

SEQ ID NO: 19309 - DNA, 18 bp, Artificial Sequence
  Synthetic
ctgctcccgugggacauc

SEQ ID NO: 19310 - DNA, 22 bp, Artificial Sequence
  Synthetic
tgaggtguggatgtggaugaag

SEQ ID NO: 19311 - DNA, 20 bp, Artificial Sequence
  Synthetic
cccccagauggtgcttucag

SEQ ID NO: 19312 - DNA, 18 bp, Artificial Sequence
  Synthetic
ggtcugcgctttguccga

SEQ ID NO: 19313 - DNA, 21 bp, Artificial Sequence
  Synthetic
cugtcccuggaggagaaagac

SEQ ID NO: 19314 - DNA, 18 bp, Artificial Sequence
  Synthetic
gcucccgggcgttatugg

SEQ ID NO: 19315 - DNA, 20 bp, Artificial Sequence
  Synthetic
tcttcccccaaccucacugt

SEQ ID NO: 19316 - DNA, 17 bp, Artificial Sequence
  Synthetic
gggccggugaaaccuga

SEQ ID NO: 19317 - DNA, 17 bp, Artificial Sequence
  Synthetic
ctugggccccucaccac

SEQ ID NO: 19318 - DNA, 18 bp, Artificial Sequence
  Synthetic
ccagtguccccucggaga

SEQ ID NO: 19319 - DNA, 20 bp, Artificial Sequence
  Synthetic
tgcauggagcagaggugaac

SEQ ID NO: 19320 - DNA, 17 bp, Artificial Sequence
  Synthetic
cctgcccuaccguccct

SEQ ID NO: 19321 - DNA, 20 bp, Artificial Sequence
  Synthetic
ccagctcaggugaggacuac

SEQ ID NO: 19322 - DNA, 18 bp, Artificial Sequence
  Synthetic
gagcugccggaguaggag

SEQ ID NO: 19323 - DNA, 17 bp, Artificial Sequence
  Synthetic
cagcugggcgctttcug

SEQ ID NO: 19324 - DNA, 22 bp, Artificial Sequence
  Synthetic
acagacccutgatctccucact

SEQ ID NO: 19325 - DNA, 19 bp, Artificial Sequence
  Synthetic
ccctcccugcagatgtucc

SEQ ID NO: 19326 - DNA, 18 bp, Artificial Sequence
  Synthetic
gctccguggaaugcagga

SEQ ID NO: 19327 - DNA, 18 bp, Artificial Sequence
  Synthetic
ctgguacgagggcaugct

SEQ ID NO: 19328 - DNA, 18 bp, Artificial Sequence
  Synthetic
cauggcagcccagacuct

SEQ ID NO: 19329 - DNA, 18 bp, Artificial Sequence
  Synthetic
agcccuactguccccaca

SEQ ID NO: 19330 - DNA, 20 bp, Artificial Sequence
  Synthetic
ctuccagagagcaccacuca

SEQ ID NO: 19331 - DNA, 22 bp, Artificial Sequence
  Synthetic
ctaagcugaccatgcucaacac

SEQ ID NO: 19332 - DNA, 18 bp, Artificial Sequence
  Synthetic
ggccactguctgcagcuc

SEQ ID NO: 19333 - DNA, 17 bp, Artificial Sequence
  Synthetic
ctgggccccaucaugct

SEQ ID NO: 19334 - DNA, 20 bp, Artificial Sequence
  Synthetic
ccgcgcuacaaccagaugaa

SEQ ID NO: 19335 - DNA, 25 bp, Artificial Sequence
  Synthetic
aatgatctgaggacuctggagtaug

SEQ ID NO: 19336 - DNA, 18 bp, Artificial Sequence
  Synthetic
gggaugcagcagcagaug

SEQ ID NO: 19337 - DNA, 21 bp, Artificial Sequence
  Synthetic
cattcgctcugagacaccuga

SEQ ID NO: 19338 - DNA, 17 bp, Artificial Sequence
  Synthetic
cccatggugccacugca

SEQ ID NO: 19339 - DNA, 19 bp, Artificial Sequence
  Synthetic
ggcagugacctuggcaact

SEQ ID NO: 19340 - DNA, 23 bp, Artificial Sequence
  Synthetic
ccctcaaugctaaggccuacaag

SEQ ID NO: 19341 - DNA, 17 bp, Artificial Sequence
  Synthetic
ccggagcguacctggug

SEQ ID NO: 19342 - DNA, 20 bp, Artificial Sequence
  Synthetic
ccuacctctugcagcagaca

SEQ ID NO: 19343 - DNA, 18 bp, Artificial Sequence
  Synthetic
acgugaagacggctgcuc

SEQ ID NO: 19344 - DNA, 23 bp, Artificial Sequence
  Synthetic
ggaaagtgaautctgctggcuct

SEQ ID NO: 19345 - DNA, 24 bp, Artificial Sequence
  Synthetic
gaaagccaggaaaugcactctuac

SEQ ID NO: 19346 - DNA, 22 bp, Artificial Sequence
  Synthetic
ggatgtggcutaggcagaacuc

SEQ ID NO: 19347 - DNA, 21 bp, Artificial Sequence
  Synthetic
gatgccgtucaggttgttgut

SEQ ID NO: 19348 - DNA, 20 bp, Artificial Sequence
  Synthetic
ctcttccaccuggagcctuc

SEQ ID NO: 19349 - DNA, 22 bp, Artificial Sequence
  Synthetic
gcttgcaguggtggttctucat

SEQ ID NO: 19350 - DNA, 21 bp, Artificial Sequence
  Synthetic
gccctcgugagcattatgugt

SEQ ID NO: 19351 - DNA, 21 bp, Artificial Sequence
  Synthetic
cttgtccttcucggagccauc

SEQ ID NO: 19352 - DNA, 21 bp, Artificial Sequence
  Synthetic
tgcagggutccaggttuaaca

SEQ ID NO: 19353 - DNA, 21 bp, Artificial Sequence
  Synthetic
gcactttguggttggttgcuc

SEQ ID NO: 19354 - DNA, 23 bp, Artificial Sequence
  Synthetic
tcggcagacacugtgatcattut

SEQ ID NO: 19355 - DNA, 22 bp, Artificial Sequence
  Synthetic
gguccaagacaatguggaggag

SEQ ID NO: 19356 - DNA, 20 bp, Artificial Sequence
  Synthetic
cggcacugacagttugcaat

SEQ ID NO: 19357 - DNA, 20 bp, Artificial Sequence
  Synthetic
cagagugggatgccugaact

SEQ ID NO: 19358 - DNA, 22 bp, Artificial Sequence
  Synthetic
gtccggcagaagaaaucaucac

SEQ ID NO: 19359 - DNA, 20 bp, Artificial Sequence
  Synthetic
tggtgaggtugggtgggtua

SEQ ID NO: 19360 - DNA, 17 bp, Artificial Sequence
  Synthetic
cgggcccauccacucaa

SEQ ID NO: 19361 - DNA, 19 bp, Artificial Sequence
  Synthetic
cggatucggagccttccuc

SEQ ID NO: 19362 - DNA, 20 bp, Artificial Sequence
  Synthetic
ccaacgcacacuctctccuc

SEQ ID NO: 19363 - DNA, 21 bp, Artificial Sequence
  Synthetic
gctaaggccuatgccatcuca

SEQ ID NO: 19364 - DNA, 17 bp, Artificial Sequence
  Synthetic
ctgacccgutccucgct

SEQ ID NO: 19365 - DNA, 20 bp, Artificial Sequence
  Synthetic
gtacgucggaggccttctuc

SEQ ID NO: 19366 - DNA, 23 bp, Artificial Sequence
  Synthetic
cgtcctgaugagattgctcctug

SEQ ID NO: 19367 - DNA, 21 bp, Artificial Sequence
  Synthetic
cgtatttgcggucagcctcut

SEQ ID NO: 19368 - DNA, 18 bp, Artificial Sequence
  Synthetic
ctggcugggcctccttut

SEQ ID NO: 19369 - DNA, 17 bp, Artificial Sequence
  Synthetic
cugggugccaccacact

SEQ ID NO: 19370 - DNA, 19 bp, Artificial Sequence
  Synthetic
ccgcccutccttcttcucc

SEQ ID NO: 19371 - DNA, 20 bp, Artificial Sequence
  Synthetic
aacgtcctcautgcggagut

SEQ ID NO: 19372 - DNA, 24 bp, Artificial Sequence
  Synthetic
agagttgagaugggatagucacga

SEQ ID NO: 19373 - DNA, 20 bp, Artificial Sequence
  Synthetic
gaggactucctgcctuccac

SEQ ID NO: 19374 - DNA, 19 bp, Artificial Sequence
  Synthetic
catactgccugctgccuca

SEQ ID NO: 19375 - DNA, 21 bp, Artificial Sequence
  Synthetic
actcttgacgutgtccagcuc

SEQ ID NO: 19376 - DNA, 27 bp, Artificial Sequence
  Synthetic
ctaattctggugccttcactttgatut

SEQ ID NO: 19377 - DNA, 25 bp, Artificial Sequence
  Synthetic
cacagtcttucatcaggttcuggaa

SEQ ID NO: 19378 - DNA, 23 bp, Artificial Sequence
  Synthetic
gatgccaaccaacaugtcaaguc

SEQ ID NO: 19379 - DNA, 22 bp, Artificial Sequence
  Synthetic
ccacaaacccagagcugagauc

SEQ ID NO: 19380 - DNA, 21 bp, Artificial Sequence
  Synthetic
ggtgtaggutccatgggaugt

SEQ ID NO: 19381 - DNA, 21 bp, Artificial Sequence
  Synthetic
ctgctccugtgaaggtacuca

SEQ ID NO: 19382 - DNA, 20 bp, Artificial Sequence
  Synthetic
acatgcuacccacggttcug

SEQ ID NO: 19383 - DNA, 24 bp, Artificial Sequence
  Synthetic
ggtcaaagautaaggugcccacaa

SEQ ID NO: 19384 - DNA, 21 bp, Artificial Sequence
  Synthetic
gaacgugagcatgtgtgugat

SEQ ID NO: 19385 - DNA, 21 bp, Artificial Sequence
  Synthetic
ccagacaaacugctgcccuac

SEQ ID NO: 19386 - DNA, 19 bp, Artificial Sequence
  Synthetic
ggtgcaggaguccttcugg

SEQ ID NO: 19387 - DNA, 19 bp, Artificial Sequence
  Synthetic
aggacccacccaucaccua

SEQ ID NO: 19388 - DNA, 26 bp, Artificial Sequence
  Synthetic
tgcctggtacuttctgcgatttaaut

SEQ ID NO: 19389 - DNA, 21 bp, Artificial Sequence
  Synthetic
cccctattuggtggccacauc

SEQ ID NO: 19390 - DNA, 19 bp, Artificial Sequence
  Synthetic
gccccacugttcugacaca

SEQ ID NO: 19391 - DNA, 23 bp, Artificial Sequence
  Synthetic
tcacgtgtugttgacaatcugga

SEQ ID NO: 19392 - DNA, 18 bp, Artificial Sequence
  Synthetic
gtcagcaccauccuccgt

SEQ ID NO: 19393 - DNA, 20 bp, Artificial Sequence
  Synthetic
guatccgtuggccagcaaga

SEQ ID NO: 19394 - DNA, 18 bp, Artificial Sequence
  Synthetic
guccaagccgcagacuca

SEQ ID NO: 19395 - DNA, 17 bp, Artificial Sequence
  Synthetic
gtggaugcctcucccga

SEQ ID NO: 19396 - DNA, 18 bp, Artificial Sequence
  Synthetic
gcatggguggcaccugag

SEQ ID NO: 19397 - DNA, 20 bp, Artificial Sequence
  Synthetic
aggutctcucccaccaggat

SEQ ID NO: 19398 - DNA, 19 bp, Artificial Sequence
  Synthetic
ctucccccaccccacttuc

SEQ ID NO: 19399 - DNA, 18 bp, Artificial Sequence
  Synthetic
agggacucgggacacucc

SEQ ID NO: 19400 - DNA, 17 bp, Artificial Sequence
  Synthetic
ccucgagccuccggagt

SEQ ID NO: 19401 - DNA, 17 bp, Artificial Sequence
  Synthetic
gggccguaccugggaat

SEQ ID NO: 19402 - DNA, 28 bp, Artificial Sequence
  Synthetic
gtcctttcaagguactagttactgtugt

SEQ ID NO: 19403 - DNA, 20 bp, Artificial Sequence
  Synthetic
cuguccacucagagaaaggg

SEQ ID NO: 19404 - DNA, 22 bp, Artificial Sequence
  Synthetic
cccatgtuagacaaggcgauca

SEQ ID NO: 19405 - DNA, 23 bp, Artificial Sequence
  Synthetic
tctcuggaagaggctcatauggt

SEQ ID NO: 19406 - DNA, 28 bp, Artificial Sequence
  Synthetic
cctaagcaaatgugattttacccagaug

SEQ ID NO: 19407 - DNA, 26 bp, Artificial Sequence
  Synthetic
cacaattccagaautctccagaggut

SEQ ID NO: 19408 - DNA, 24 bp, Artificial Sequence
  Synthetic
cataaguggaaagaaguccggcat

SEQ ID NO: 19409 - DNA, 24 bp, Artificial Sequence
  Synthetic
aaaggttaucagcaccaugaacca

SEQ ID NO: 19410 - DNA, 23 bp, Artificial Sequence
  Synthetic
gcacaucaatcuacacccagagt

SEQ ID NO: 19411 - DNA, 26 bp, Artificial Sequence
  Synthetic
caacccatgcutgttgaataauggaa

SEQ ID NO: 19412 - DNA, 26 bp, Artificial Sequence
  Synthetic
ttcctctacagcucataacctuacca

SEQ ID NO: 19413 - DNA, 27 bp, Artificial Sequence
  Synthetic
cccaactttcacaauaccaggtacaua

SEQ ID NO: 19414 - DNA, 23 bp, Artificial Sequence
  Synthetic
ctttguttgcaggugcaagaagt

SEQ ID NO: 19415 - DNA, 24 bp, Artificial Sequence
  Synthetic
cactgttccucttcacagaacuct

SEQ ID NO: 19416 - DNA, 17 bp, Artificial Sequence
  Synthetic
ccgtcgucctgccucat

SEQ ID NO: 19417 - DNA, 21 bp, Artificial Sequence
  Synthetic
ggagtccutgctggguaaagg

SEQ ID NO: 19418 - DNA, 21 bp, Artificial Sequence
  Synthetic
accacctccaugagcatcuct

SEQ ID NO: 19419 - DNA, 21 bp, Artificial Sequence
  Synthetic
gttgcagaggcagaguaggua

SEQ ID NO: 19420 - DNA, 17 bp, Artificial Sequence
  Synthetic
ctgtcgccguctccgut

SEQ ID NO: 19421 - DNA, 17 bp, Artificial Sequence
  Synthetic
ctgcgtguggcgctuac

SEQ ID NO: 19422 - DNA, 23 bp, Artificial Sequence
  Synthetic
cgtctgtctucctttcactcaut

SEQ ID NO: 19423 - DNA, 21 bp, Artificial Sequence
  Synthetic
gaugaacacgcuaccacaagg

SEQ ID NO: 19424 - DNA, 22 bp, Artificial Sequence
  Synthetic
ctcctctccuggaagtttucgg

SEQ ID NO: 19425 - DNA, 17 bp, Artificial Sequence
  Synthetic
ccgctgcugccctuact

SEQ ID NO: 19426 - DNA, 22 bp, Artificial Sequence
  Synthetic
agctgcguctcaagaucaacag

SEQ ID NO: 19427 - DNA, 24 bp, Artificial Sequence
  Synthetic
ttggtgagcaugaggatgtagtug

SEQ ID NO: 19428 - DNA, 22 bp, Artificial Sequence
  Synthetic
ctactcaagtcuccgtctgcug

SEQ ID NO: 19429 - DNA, 18 bp, Artificial Sequence
  Synthetic
ccauagccgacacguggt

SEQ ID NO: 19430 - DNA, 19 bp, Artificial Sequence
  Synthetic
cctgaucgagcgctgtcug

SEQ ID NO: 19431 - DNA, 27 bp, Artificial Sequence
  Synthetic
aaguttttagaatctttucccggaggt

SEQ ID NO: 19432 - DNA, 25 bp, Artificial Sequence
  Synthetic
cgctgatggucatatccaatcucaa

SEQ ID NO: 19433 - DNA, 30 bp, Artificial Sequence
  Synthetic
ggttctactcugaatgtctataaactugct

SEQ ID NO: 19434 - DNA, 24 bp, Artificial Sequence
  Synthetic
tcaatgaugaggtaagugcgcaat

SEQ ID NO: 19435 - DNA, 26 bp, Artificial Sequence
  Synthetic
cgtggaggaguttaccatttgtgtua

SEQ ID NO: 19436 - DNA, 17 bp, Artificial Sequence
  Synthetic
ctccaccacgucgcuct

SEQ ID NO: 19437 - DNA, 17 bp, Artificial Sequence
  Synthetic
agcucgccctccuacca

SEQ ID NO: 19438 - DNA, 21 bp, Artificial Sequence
  Synthetic
gctcagcugcaaagaatgugt

SEQ ID NO: 19439 - DNA, 22 bp, Artificial Sequence
  Synthetic
tggtccuacgatcagtccuacc

SEQ ID NO: 19440 - DNA, 22 bp, Artificial Sequence
  Synthetic
agtgggcuccatctggtactua

SEQ ID NO: 19441 - DNA, 18 bp, Artificial Sequence
  Synthetic
cctttuccgagcggcuca

SEQ ID NO: 19442 - DNA, 20 bp, Artificial Sequence
  Synthetic
tctcagcucagccgaguagt

SEQ ID NO: 19443 - DNA, 28 bp, Artificial Sequence
  Synthetic
tgtataacatcccugatgtctgcattug

SEQ ID NO: 19444 - DNA, 19 bp, Artificial Sequence
  Synthetic
caacgccucgctcatctug

SEQ ID NO: 19445 - DNA, 21 bp, Artificial Sequence
  Synthetic
ccgtctgguaggagctgttug

SEQ ID NO: 19446 - DNA, 21 bp, Artificial Sequence
  Synthetic
agugccaaagucagacaagut

SEQ ID NO: 19447 - DNA, 23 bp, Artificial Sequence
  Synthetic
ctattugaacagguagacggcua

SEQ ID NO: 19448 - DNA, 23 bp, Artificial Sequence
  Synthetic
gctggtgtgaucaggttgtcaua

SEQ ID NO: 19449 - DNA, 21 bp, Artificial Sequence
  Synthetic
acactgggagcucaacaaguc

SEQ ID NO: 19450 - DNA, 17 bp, Artificial Sequence
  Synthetic
gcggcugtcacgaucca

SEQ ID NO: 19451 - DNA, 19 bp, Artificial Sequence
  Synthetic
tugaacucaagccgccaga

SEQ ID NO: 19452 - DNA, 26 bp, Artificial Sequence
  Synthetic
cggcacttgugttcagtttcauaaag

SEQ ID NO: 19453 - DNA, 28 bp, Artificial Sequence
  Synthetic
atttgtgtttgctuatgccttaaccaut

SEQ ID NO: 19454 - DNA, 19 bp, Artificial Sequence
  Synthetic
tcgaggcuccctgcactua

SEQ ID NO: 19455 - DNA, 22 bp, Artificial Sequence
  Synthetic
gttgcactcucctccttctucc

SEQ ID NO: 19456 - DNA, 21 bp, Artificial Sequence
  Synthetic
gtcccuaccctgttccaucct

SEQ ID NO: 19457 - DNA, 18 bp, Artificial Sequence
  Synthetic
cagugaccccagccacuc

SEQ ID NO: 19458 - DNA, 17 bp, Artificial Sequence
  Synthetic
ccugcccacagcuggaa

SEQ ID NO: 19459 - DNA, 23 bp, Artificial Sequence
  Synthetic
ggagaugaagtauaggcagcagt

SEQ ID NO: 19460 - DNA, 18 bp, Artificial Sequence
  Synthetic
cgcatugcgacttcguga

SEQ ID NO: 19461 - DNA, 17 bp, Artificial Sequence
  Synthetic
cgcgcaccuggtcauct

SEQ ID NO: 19462 - DNA, 17 bp, Artificial Sequence
  Synthetic
cgguccgcattucgcct

SEQ ID NO: 19463 - DNA, 19 bp, Artificial Sequence
  Synthetic
gctggaacutcacgggcut

SEQ ID NO: 19464 - DNA, 22 bp, Artificial Sequence
  Synthetic
cagagugacccagtgatgttug

SEQ ID NO: 19465 - DNA, 23 bp, Artificial Sequence
  Synthetic
ggacacagccutgtacttcucat

SEQ ID NO: 19466 - DNA, 24 bp, Artificial Sequence
  Synthetic
gtguagagagagaggcugaaaaut

SEQ ID NO: 19467 - DNA, 21 bp, Artificial Sequence
  Synthetic
cccatcgauctccatguccag

SEQ ID NO: 19468 - DNA, 21 bp, Artificial Sequence
  Synthetic
tgtgtccuttggttgtugcct

SEQ ID NO: 19469 - DNA, 22 bp, Artificial Sequence
  Synthetic
gtatgcgauggtggugacaaac

SEQ ID NO: 19470 - DNA, 20 bp, Artificial Sequence
  Synthetic
ggagcuggccccgactcaut

SEQ ID NO: 19471 - DNA, 24 bp, Artificial Sequence
  Synthetic
gcccaatctuctgagatgcuccgt

SEQ ID NO: 19472 - DNA, 30 bp, Artificial Sequence
  Synthetic
ggttttattaatgauttttgctcacagugt

SEQ ID NO: 19473 - DNA, 25 bp, Artificial Sequence
  Synthetic
ccactgtgtccutgattgtgtacug

SEQ ID NO: 19474 - DNA, 25 bp, Artificial Sequence
  Synthetic
ctcacagagtaucatgtctccctug

SEQ ID NO: 19475 - DNA, 28 bp, Artificial Sequence
  Synthetic
ccaaatuaacgcucaggaaaaatacaut

SEQ ID NO: 19476 - DNA, 20 bp, Artificial Sequence
  Synthetic
tcagcuggcgcttacaguag

SEQ ID NO: 19477 - DNA, 23 bp, Artificial Sequence
  Synthetic
catucuacgggaaggagatctug

SEQ ID NO: 19478 - DNA, 28 bp, Artificial Sequence
  Synthetic
cgggaaccaugatctatttaugaggaga

SEQ ID NO: 19479 - DNA, 22 bp, Artificial Sequence
  Synthetic
gactgaccacacagugacauca

SEQ ID NO: 19480 - DNA, 21 bp, Artificial Sequence
  Synthetic
ggtgtctttucctgctaccug

SEQ ID NO: 19481 - DNA, 22 bp, Artificial Sequence
  Synthetic
caatctccaggagcutctgcut

SEQ ID NO: 19482 - DNA, 20 bp, Artificial Sequence
  Synthetic
cccaagcccugatgcaugat

SEQ ID NO: 19483 - DNA, 24 bp, Artificial Sequence
  Synthetic
gaatatccagagcugtctcccuct

SEQ ID NO: 19484 - DNA, 23 bp, Artificial Sequence
  Synthetic
cctctcagcutcttctctgctut

SEQ ID NO: 19485 - DNA, 24 bp, Artificial Sequence
  Synthetic
ctctcttgauatctggtccauccc

SEQ ID NO: 19486 - DNA, 23 bp, Artificial Sequence
  Synthetic
ggacucgaggagagacatgtuct

SEQ ID NO: 19487 - DNA, 21 bp, Artificial Sequence
  Synthetic
agtacccaugccctgaatgug

SEQ ID NO: 19488 - DNA, 21 bp, Artificial Sequence
  Synthetic
ggaacaccguggtgggtttua

SEQ ID NO: 19489 - DNA, 20 bp, Artificial Sequence
  Synthetic
ccugggaatgcuagccagag

SEQ ID NO: 19490 - DNA, 20 bp, Artificial Sequence
  Synthetic
tccactgucaaccctcucca

SEQ ID NO: 19491 - DNA, 21 bp, Artificial Sequence
  Synthetic
atucccagccctugaaaacct

SEQ ID NO: 19492 - DNA, 22 bp, Artificial Sequence
  Synthetic
gcaggagccutttcaggacuaa

SEQ ID NO: 19493 - DNA, 24 bp, Artificial Sequence
  Synthetic
caagagaaaagaucgcaugtccua

SEQ ID NO: 19494 - DNA, 23 bp, Artificial Sequence
  Synthetic
gttggcatcagugaacacctuac

SEQ ID NO: 19495 - DNA, 20 bp, Artificial Sequence
  Synthetic
ccattccccagugtggcauc

SEQ ID NO: 19496 - DNA, 23 bp, Artificial Sequence
  Synthetic
ctgtttgaugacttccuggcaga

SEQ ID NO: 19497 - DNA, 21 bp, Artificial Sequence
  Synthetic
ggagctggagaugcacacuat

SEQ ID NO: 19498 - DNA, 17 bp, Artificial Sequence
  Synthetic
gtcgtucacccgcucca

SEQ ID NO: 19499 - DNA, 17 bp, Artificial Sequence
  Synthetic
guacacucggcgcacct

SEQ ID NO: 19500 - DNA, 21 bp, Artificial Sequence
  Synthetic
gccactguctcacactugcat

SEQ ID NO: 19501 - DNA, 22 bp, Artificial Sequence
  Synthetic
gtgtggtctcuacagaggcaut

SEQ ID NO: 19502 - DNA, 22 bp, Artificial Sequence
  Synthetic
cccccaugctaattugaaggac

SEQ ID NO: 19503 - DNA, 23 bp, Artificial Sequence
  Synthetic
ggtgtctgacugtgacttcucct

SEQ ID NO: 19504 - DNA, 21 bp, Artificial Sequence
  Synthetic
gtccaaagutcacugcaggga

SEQ ID NO: 19505 - DNA, 22 bp, Artificial Sequence
  Synthetic
tcttcctgtcuctctgctgcua

SEQ ID NO: 19506 - DNA, 17 bp, Artificial Sequence
  Synthetic
ccuccgcaggacuggaa

SEQ ID NO: 19507 - DNA, 18 bp, Artificial Sequence
  Synthetic
ccctccaggucaccucac

SEQ ID NO: 19508 - DNA, 27 bp, Artificial Sequence
  Synthetic
tctgtctagaguttgggaatcttuacc

SEQ ID NO: 19509 - DNA, 26 bp, Artificial Sequence
  Synthetic
ggttctctggucctgtagattugaga

SEQ ID NO: 19510 - DNA, 24 bp, Artificial Sequence
  Synthetic
aagggtcctguagctagaaaguct

SEQ ID NO: 19511 - DNA, 18 bp, Artificial Sequence
  Synthetic
ccctggaccacugctcug

SEQ ID NO: 19512 - DNA, 27 bp, Artificial Sequence
  Synthetic
tctctccagaguttggaaatcttuacc

SEQ ID NO: 19513 - DNA, 27 bp, Artificial Sequence
  Synthetic
acatccaugaaaggaaaaaggttcuct

SEQ ID NO: 19514 - DNA, 20 bp, Artificial Sequence
  Synthetic
caaaggucctgaggcuggaa

SEQ ID NO: 19515 - DNA, 18 bp, Artificial Sequence
  Synthetic
ccctccaggucaccucac

SEQ ID NO: 19516 - DNA, 28 bp, Artificial Sequence
  Synthetic
tctctctagaguttggaaatcttuacca

SEQ ID NO: 19517 - DNA, 20 bp, Artificial Sequence
  Synthetic
gtgcagggacaaacgutcuc

SEQ ID NO: 19518 - DNA, 19 bp, Artificial Sequence
  Synthetic
gggccugatcacatcucct

SEQ ID NO: 19519 - DNA, 19 bp, Artificial Sequence
  Synthetic
cagcagcutcagcauggaa

SEQ ID NO: 19520 - DNA, 20 bp, Artificial Sequence
  Synthetic
gguccagaagggcatcugag

SEQ ID NO: 19521 - DNA, 20 bp, Artificial Sequence
  Synthetic
cacgactucggcttcugaca

SEQ ID NO: 19522 - DNA, 18 bp, Artificial Sequence
  Synthetic
ggucccagcccagacuca

SEQ ID NO: 19523 - DNA, 23 bp, Artificial Sequence
  Synthetic
tcccactcttucttcctctccuc

SEQ ID NO: 19524 - DNA, 18 bp, Artificial Sequence
  Synthetic
gtgccuccgggcagauag

SEQ ID NO: 19525 - DNA, 23 bp, Artificial Sequence
  Synthetic
ccacattccccucccaaattcut

SEQ ID NO: 19526 - DNA, 23 bp, Artificial Sequence
  Synthetic
ctaggatcacucctcagucacca

SEQ ID NO: 19527 - DNA, 19 bp, Artificial Sequence
  Synthetic
ctctgtggutggcgtcuct

SEQ ID NO: 19528 - DNA, 21 bp, Artificial Sequence
  Synthetic
ggagaggagggcugaggaaut

SEQ ID NO: 19529 - DNA, 28 bp, Artificial Sequence
  Synthetic
tgctgacatagaautagaaaacgtccut

SEQ ID NO: 19530 - DNA, 17 bp, Artificial Sequence
  Synthetic
gccaucccgagctggut

SEQ ID NO: 19531 - DNA, 22 bp, Artificial Sequence
  Synthetic
cagtgctagcuccatggctuag

SEQ ID NO: 19532 - DNA, 27 bp, Artificial Sequence
  Synthetic
cautataaagatcaugcccaagaagcc

SEQ ID NO: 19533 - DNA, 25 bp, Artificial Sequence
  Synthetic
tctcgtgaatcutctcagagguagt

SEQ ID NO: 19534 - DNA, 22 bp, Artificial Sequence
  Synthetic
ccagacutgtctgtucccagaa

SEQ ID NO: 19535 - DNA, 28 bp, Artificial Sequence
  Synthetic
ccttcgatgatautgccaaatacttcuc

SEQ ID NO: 19536 - DNA, 25 bp, Artificial Sequence
  Synthetic
actuggagaaguaaaaccatacucc

SEQ ID NO: 19537 - DNA, 25 bp, Artificial Sequence
  Synthetic
ggaatccatutctactccaucacct

SEQ ID NO: 19538 - DNA, 17 bp, Artificial Sequence
  Synthetic
gctgcgugtgcgcttug

SEQ ID NO: 19539 - DNA, 18 bp, Artificial Sequence
  Synthetic
cctgagggccutccucga

SEQ ID NO: 19540 - DNA, 28 bp, Artificial Sequence
  Synthetic
gggtaattcuggacaaagttaguaacct

SEQ ID NO: 19541 - DNA, 21 bp, Artificial Sequence
  Synthetic
cttgatgtugcggtccactug

SEQ ID NO: 19542 - DNA, 28 bp, Artificial Sequence
  Synthetic
aatgcctctgucttaaatacattgguga

SEQ ID NO: 19543 - DNA, 20 bp, Artificial Sequence
  Synthetic
ggtacaucacgggcacaugg

SEQ ID NO: 19544 - DNA, 26 bp, Artificial Sequence
  Synthetic
aatagttgaauggaaatagccuccag

SEQ ID NO: 19545 - DNA, 22 bp, Artificial Sequence
  Synthetic
cattguagcagccugaccaaag

SEQ ID NO: 19546 - DNA, 28 bp, Artificial Sequence
  Synthetic
ccctaactcttcuataatggcagtctuc

SEQ ID NO: 19547 - DNA, 25 bp, Artificial Sequence
  Synthetic
ttgaatgtccuctttctttggcuaa

SEQ ID NO: 19548 - DNA, 24 bp, Artificial Sequence
  Synthetic
gggagauatgttcuagaagccact

SEQ ID NO: 19549 - DNA, 26 bp, Artificial Sequence
  Synthetic
tcactccatcutcatcagctctuact

SEQ ID NO: 19550 - DNA, 21 bp, Artificial Sequence
  Synthetic
ctcttugactcgcuggacgaa

SEQ ID NO: 19551 - DNA, 27 bp, Artificial Sequence
  Synthetic
tccaaaggaagaagaautaaccugacc

SEQ ID NO: 19552 - DNA, 22 bp, Artificial Sequence
  Synthetic
aatggucaggaaattgcuccca

SEQ ID NO: 19553 - DNA, 28 bp, Artificial Sequence
  Synthetic
cgaagagugagctaacaaagtucaaaat

SEQ ID NO: 19554 - DNA, 20 bp, Artificial Sequence
  Synthetic
ctaccaaccuccccacccua

SEQ ID NO: 19555 - DNA, 23 bp, Artificial Sequence
  Synthetic
accuatgaccuccaagagagcaa

SEQ ID NO: 19556 - DNA, 21 bp, Artificial Sequence
  Synthetic
ggcugacggacttatucacca

SEQ ID NO: 19557 - DNA, 21 bp, Artificial Sequence
  Synthetic
gcgagacccagacugctttua

SEQ ID NO: 19558 - DNA, 22 bp, Artificial Sequence
  Synthetic
tctgctggagutcatcctgcua

SEQ ID NO: 19559 - DNA, 18 bp, Artificial Sequence
  Synthetic
tgggaucugcgagcagac

SEQ ID NO: 19560 - DNA, 20 bp, Artificial Sequence
  Synthetic
cctccacguacccctcucag

SEQ ID NO: 19561 - DNA, 20 bp, Artificial Sequence
  Synthetic
cgtccuggacgaugcagaag

SEQ ID NO: 19562 - DNA, 20 bp, Artificial Sequence
  Synthetic
ggagcctcgucatcgtcaut

SEQ ID NO: 19563 - DNA, 20 bp, Artificial Sequence
  Synthetic
acagagcuccaagaggugac

SEQ ID NO: 19564 - DNA, 22 bp, Artificial Sequence
  Synthetic
ggtgtccaaacugacaatgcug

SEQ ID NO: 19565 - DNA, 20 bp, Artificial Sequence
  Synthetic
gcgcgggagacutactttug

SEQ ID NO: 19566 - DNA, 21 bp, Artificial Sequence
  Synthetic
gtcugggccaagaggaagaug

SEQ ID NO: 19567 - DNA, 28 bp, Artificial Sequence
  Synthetic
cccggcuttataaatagatugaacacaa

SEQ ID NO: 19568 - DNA, 20 bp, Artificial Sequence
  Synthetic
gcacugagaggctcuccaga

SEQ ID NO: 19569 - DNA, 20 bp, Artificial Sequence
  Synthetic
ggguagacgccttcctucac

SEQ ID NO: 19570 - DNA, 22 bp, Artificial Sequence
  Synthetic
cacugggaacaagctgtauggt

SEQ ID NO: 19571 - DNA, 22 bp, Artificial Sequence
  Synthetic
ggacttccagutgaaggcctug

SEQ ID NO: 19572 - DNA, 22 bp, Artificial Sequence
  Synthetic
cggctggcuttcccagtaatut

SEQ ID NO: 19573 - DNA, 21 bp, Artificial Sequence
  Synthetic
ttggagaacugcgtguaggac

SEQ ID NO: 19574 - DNA, 18 bp, Artificial Sequence
  Synthetic
gagccugcccttcuccac

SEQ ID NO: 19575 - DNA, 18 bp, Artificial Sequence
  Synthetic
gcgtccugggtgtggtuc

SEQ ID NO: 19576 - DNA, 17 bp, Artificial Sequence
  Synthetic
cuggacagcgacgugga

SEQ ID NO: 19577 - DNA, 19 bp, Artificial Sequence
  Synthetic
gcgggaagaaugagtgcug

SEQ ID NO: 19578 - DNA, 17 bp, Artificial Sequence
  Synthetic
gggacgcccucaaggug

SEQ ID NO: 19579 - DNA, 18 bp, Artificial Sequence
  Synthetic
gccgaugctcagguccag

SEQ ID NO: 19580 - DNA, 22 bp, Artificial Sequence
  Synthetic
gtacgtaacccuctgtgctgut

SEQ ID NO: 19581 - DNA, 19 bp, Artificial Sequence
  Synthetic
cctgaccugcacugaggac

SEQ ID NO: 19582 - DNA, 25 bp, Artificial Sequence
  Synthetic
cattagctugaaaccatttcuggga

SEQ ID NO: 19583 - DNA, 19 bp, Artificial Sequence
  Synthetic
acctaccugtacggcugct

SEQ ID NO: 19584 - DNA, 18 bp, Artificial Sequence
  Synthetic
cgttcgcggutggttugc

SEQ ID NO: 19585 - DNA, 22 bp, Artificial Sequence
  Synthetic
cgtctaaaagugcgtggttguc

SEQ ID NO: 19586 - DNA, 17 bp, Artificial Sequence
  Synthetic
ggccgccuacgaggaug

SEQ ID NO: 19587 - DNA, 18 bp, Artificial Sequence
  Synthetic
agggaugggcucacgagt

SEQ ID NO: 19588 - DNA, 19 bp, Artificial Sequence
  Synthetic
agggttctcuggacgctug

SEQ ID NO: 19589 - DNA, 18 bp, Artificial Sequence
  Synthetic
cgtccttcguggctggug

SEQ ID NO: 19590 - DNA, 28 bp, Artificial Sequence
  Synthetic
acgtaattcgtaacuctctttgctgtua

SEQ ID NO: 19591 - DNA, 25 bp, Artificial Sequence
  Synthetic
aaaaugttttagaaugcaagcacca

SEQ ID NO: 19592 - DNA, 22 bp, Artificial Sequence
  Synthetic
ttccatctuctacagggugggt

SEQ ID NO: 19593 - DNA, 26 bp, Artificial Sequence
  Synthetic
ttttccgacugactgaaacttcauct

SEQ ID NO: 19594 - DNA, 21 bp, Artificial Sequence
  Synthetic
catgctactuctggcgtguca

SEQ ID NO: 19595 - DNA, 23 bp, Artificial Sequence
  Synthetic
tccagagaugactucacagagga

SEQ ID NO: 19596 - DNA, 28 bp, Artificial Sequence
  Synthetic
cttcctgagatucatccttcttctucaa

SEQ ID NO: 19597 - DNA, 23 bp, Artificial Sequence
  Synthetic
aggtgatgauggaatctgaucct

SEQ ID NO: 19598 - DNA, 26 bp, Artificial Sequence
  Synthetic
caatagctggcuttcacagagauact

SEQ ID NO: 19599 - DNA, 17 bp, Artificial Sequence
  Synthetic
gccacagcuccccguat

SEQ ID NO: 19600 - DNA, 22 bp, Artificial Sequence
  Synthetic
acctctctccutctgcatcucc

SEQ ID NO: 19601 - DNA, 20 bp, Artificial Sequence
  Synthetic
tggtgggccauctccacuat

SEQ ID NO: 19602 - DNA, 24 bp, Artificial Sequence
  Synthetic
gctcctctgcuccaacaacttaua

SEQ ID NO: 19603 - DNA, 23 bp, Artificial Sequence
  Synthetic
gatgctgtgtutggccttcttut

SEQ ID NO: 19604 - DNA, 22 bp, Artificial Sequence
  Synthetic
ggtctacatgugttgcagcuct

SEQ ID NO: 19605 - DNA, 17 bp, Artificial Sequence
  Synthetic
gggugggaagcctccug

SEQ ID NO: 19606 - DNA, 22 bp, Artificial Sequence
  Synthetic
cactaauggcctttuccccaca

SEQ ID NO: 19607 - DNA, 21 bp, Artificial Sequence
  Synthetic
gtctcctggcutgatggaguc

SEQ ID NO: 19608 - DNA, 21 bp, Artificial Sequence
  Synthetic
ggccaaaaaugtgagcctcuc

SEQ ID NO: 19609 - DNA, 21 bp, Artificial Sequence
  Synthetic
gttagggtugggctgggaaut

SEQ ID NO: 19610 - DNA, 26 bp, Artificial Sequence
  Synthetic
acacaccuaagttgtgaaaaugagaa

SEQ ID NO: 19611 - DNA, 21 bp, Artificial Sequence
  Synthetic
ggtggtgguggcataggtuat

SEQ ID NO: 19612 - DNA, 24 bp, Artificial Sequence
  Synthetic
ggctgacttacuggatccatguag

SEQ ID NO: 19613 - DNA, 28 bp, Artificial Sequence
  Synthetic
cacttcagttatguacctgatgggtaut

SEQ ID NO: 19614 - DNA, 28 bp, Artificial Sequence
  Synthetic
agaataaacaagacaacutacgtcguca

SEQ ID NO: 19615 - DNA, 27 bp, Artificial Sequence
  Synthetic
ctgttgtaataguggatgatcguggaa

SEQ ID NO: 19616 - DNA, 26 bp, Artificial Sequence
  Synthetic
cccccacccuttttaattctacguaa

SEQ ID NO: 19617 - DNA, 27 bp, Artificial Sequence
  Synthetic
gtttgttgggaauctacctgctgauat

SEQ ID NO: 19618 - DNA, 17 bp, Artificial Sequence
  Synthetic
gaccugggccctgctua

SEQ ID NO: 19619 - DNA, 17 bp, Artificial Sequence
  Synthetic
ccgccugcagtcaccuc

SEQ ID NO: 19620 - DNA, 22 bp, Artificial Sequence
  Synthetic
cgctcttcucgctcaagatcug

SEQ ID NO: 19621 - DNA, 22 bp, Artificial Sequence
  Synthetic
acatccacaucgactgaugcaa

SEQ ID NO: 19622 - DNA, 21 bp, Artificial Sequence
  Synthetic
caagguccaggagccattcua

SEQ ID NO: 19623 - DNA, 19 bp, Artificial Sequence
  Synthetic
tgagauggccggctaucct

SEQ ID NO: 19624 - DNA, 17 bp, Artificial Sequence
  Synthetic
cgagtggugccggguat

SEQ ID NO: 19625 - DNA, 21 bp, Artificial Sequence
  Synthetic
gcagcactcucctccttcuga

SEQ ID NO: 19626 - DNA, 28 bp, Artificial Sequence
  Synthetic
cttgggtgauggaaaaatgaaatcugat

SEQ ID NO: 19627 - DNA, 28 bp, Artificial Sequence
  Synthetic
gctttgtccttaucttgatcatccauct

SEQ ID NO: 19628 - DNA, 23 bp, Artificial Sequence
  Synthetic
aguccaggagaaaagctcaucac

SEQ ID NO: 19629 - DNA, 21 bp, Artificial Sequence
  Synthetic
gagtccauccggacatugacc

SEQ ID NO: 19630 - DNA, 25 bp, Artificial Sequence
  Synthetic
cctggcccauaatgtgtttctttua

SEQ ID NO: 19631 - DNA, 23 bp, Artificial Sequence
  Synthetic
gcttttctugtttttggcugcct

SEQ ID NO: 19632 - DNA, 28 bp, Artificial Sequence
  Synthetic
gcttatctuttgataggcugagggaaaa

SEQ ID NO: 19633 - DNA, 22 bp, Artificial Sequence
  Synthetic
ttcccttgagugactggaguct

SEQ ID NO: 19634 - DNA, 22 bp, Artificial Sequence
  Synthetic
ccattccuggcatgatccttug

SEQ ID NO: 19635 - DNA, 28 bp, Artificial Sequence
  Synthetic
tttttgaaaatcgutgttgctgttgtug

SEQ ID NO: 19636 - DNA, 24 bp, Artificial Sequence
  Synthetic
caatauacagcccauaaccgagua

SEQ ID NO: 19637 - DNA, 22 bp, Artificial Sequence
  Synthetic
ctctcgcgguagtacaatcugt

SEQ ID NO: 19638 - DNA, 20 bp, Artificial Sequence
  Synthetic
gctttcccggutcgaaggut

SEQ ID NO: 19639 - DNA, 26 bp, Artificial Sequence
  Synthetic
cgcagatacgccaguattgagaaaua

SEQ ID NO: 19640 - DNA, 22 bp, Artificial Sequence
  Synthetic
cccactgugcttctgtctguat

SEQ ID NO: 19641 - DNA, 21 bp, Artificial Sequence
  Synthetic
gccccaauggtgtggattuga

SEQ ID NO: 19642 - DNA, 23 bp, Artificial Sequence
  Synthetic
ggttctggugcattcatgacuga

SEQ ID NO: 19643 - DNA, 25 bp, Artificial Sequence
  Synthetic
acacccagcccuaacattgttaaua

SEQ ID NO: 19644 - DNA, 31 bp, Artificial Sequence
  Synthetic
gtaggatgaaagacuaaatcaaagagaccut

SEQ ID NO: 19645 - DNA, 27 bp, Artificial Sequence
  Synthetic
ccaggtagugcatcttcatuaaaagca

SEQ ID NO: 19646 - DNA, 22 bp, Artificial Sequence
  Synthetic
cactgtgtcutcaacagcagut

SEQ ID NO: 19647 - DNA, 23 bp, Artificial Sequence
  Synthetic
ctgctgccagutttgttgatuac

SEQ ID NO: 19648 - DNA, 26 bp, Artificial Sequence
  Synthetic
tggacatccacutgggtgaaataaug

SEQ ID NO: 19649 - DNA, 27 bp, Artificial Sequence
  Synthetic
caggtgttgucagcatcatagtcauat

SEQ ID NO: 19650 - DNA, 24 bp, Artificial Sequence
  Synthetic
gatggcccautatgagaagauggt

SEQ ID NO: 19651 - DNA, 22 bp, Artificial Sequence
  Synthetic
gaagttgaagcuggagagccut

SEQ ID NO: 19652 - DNA, 28 bp, Artificial Sequence
  Synthetic
aggaattggtcutggagaaaaatctuca

SEQ ID NO: 19653 - DNA, 26 bp, Artificial Sequence
  Synthetic
gaaaacactggautaccaaaggctut

SEQ ID NO: 19654 - DNA, 23 bp, Artificial Sequence
  Synthetic
attccacacugtccaaactcucc

SEQ ID NO: 19655 - DNA, 21 bp, Artificial Sequence
  Synthetic
acuttggcgataugggcacat

SEQ ID NO: 19656 - DNA, 24 bp, Artificial Sequence
  Synthetic
gtgtattacctucgtctgctguca

SEQ ID NO: 19657 - DNA, 28 bp, Artificial Sequence
  Synthetic
tgttgtttttcagaaauccaaagctugt

SEQ ID NO: 19658 - DNA, 18 bp, Artificial Sequence
  Synthetic
cggcgggutactcagcuc

SEQ ID NO: 19659 - DNA, 22 bp, Artificial Sequence
  Synthetic
cctaacttcutgctccgcucac

SEQ ID NO: 19660 - DNA, 19 bp, Artificial Sequence
  Synthetic
gggagucacgttcctcugg

SEQ ID NO: 19661 - DNA, 21 bp, Artificial Sequence
  Synthetic
acacutacaucaccgaagcgt

SEQ ID NO: 19662 - DNA, 21 bp, Artificial Sequence
  Synthetic
cagagatcacuttccccuggt

SEQ ID NO: 19663 - DNA, 25 bp, Artificial Sequence
  Synthetic
agaacgggtaguctctttctctcuc

SEQ ID NO: 19664 - DNA, 28 bp, Artificial Sequence
  Synthetic
gccaaattagcaaugtctggcaaaatua

SEQ ID NO: 19665 - DNA, 24 bp, Artificial Sequence
  Synthetic
gtgccaaaucgatcaaattcucgt

SEQ ID NO: 19666 - DNA, 28 bp, Artificial Sequence
  Synthetic
ccacccttactauacagagatcgtgaua

SEQ ID NO: 19667 - DNA, 20 bp, Artificial Sequence
  Synthetic
guccaaggaccaaccauccc

SEQ ID NO: 19668 - DNA, 22 bp, Artificial Sequence
  Synthetic
gcgagaccguaaaaactcugca

SEQ ID NO: 19669 - DNA, 20 bp, Artificial Sequence
  Synthetic
gggacutcagctuggaggaa

SEQ ID NO: 19670 - DNA, 19 bp, Artificial Sequence
  Synthetic
gttcugacagccggtccuc

SEQ ID NO: 19671 - DNA, 24 bp, Artificial Sequence
  Synthetic
ggtgttttccutgtctttgtugcc

SEQ ID NO: 19672 - DNA, 30 bp, Artificial Sequence
  Synthetic
ggtaugagaauaagaagagagaaaactugg

SEQ ID NO: 19673 - DNA, 26 bp, Artificial Sequence
  Synthetic
cttcaggaatcucacttttcaacuct

SEQ ID NO: 19674 - DNA, 24 bp, Artificial Sequence
  Synthetic
cagttcgugggcttgttttgtauc

SEQ ID NO: 19675 - DNA, 29 bp, Artificial Sequence
  Synthetic
acccagcctaaucttgtttttcttatgut

SEQ ID NO: 19676 - DNA, 27 bp, Artificial Sequence
  Synthetic
catctacaaaguggttctggatuagct

SEQ ID NO: 19677 - DNA, 26 bp, Artificial Sequence
  Synthetic
caattaacccugattactggttucca

SEQ ID NO: 19678 - DNA, 20 bp, Artificial Sequence
  Synthetic
gaccactgugactgggtgut

SEQ ID NO: 19679 - DNA, 22 bp, Artificial Sequence
  Synthetic
caggtagcucagaccattcucc

SEQ ID NO: 19680 - DNA, 25 bp, Artificial Sequence
  Synthetic
ccaggaccauaccaaacatctcaut

SEQ ID NO: 19681 - DNA, 22 bp, Artificial Sequence
  Synthetic
ctcagugagccagttgctaucc

SEQ ID NO: 19682 - DNA, 21 bp, Artificial Sequence
  Synthetic
tttgcctccutggcaaggtua

SEQ ID NO: 19683 - DNA, 20 bp, Artificial Sequence
  Synthetic
aggcaccgugttgacttcug

SEQ ID NO: 19684 - DNA, 21 bp, Artificial Sequence
  Synthetic
ggtuggccccattttucaaca

SEQ ID NO: 19685 - DNA, 26 bp, Artificial Sequence
  Synthetic
gggagttuaagatttcattgugcaag

SEQ ID NO: 19686 - DNA, 19 bp, Artificial Sequence
  Synthetic
tgcauccaggagacgctug

SEQ ID NO: 19687 - DNA, 26 bp, Artificial Sequence
  Synthetic
tgagtgaugaagatgaagaugcagag

SEQ ID NO: 19688 - DNA, 23 bp, Artificial Sequence
  Synthetic
ccattcaggacacuctggagcua

SEQ ID NO: 19689 - DNA, 27 bp, Artificial Sequence
  Synthetic
tcagaagcuaacctaattggtacugga

SEQ ID NO: 19690 - DNA, 30 bp, Artificial Sequence
  Synthetic
cccagcagaauaataaacagaatgaugaca

SEQ ID NO: 19691 - DNA, 28 bp, Artificial Sequence
  Synthetic
aagttgcccuctaaatgaatctaaugct

SEQ ID NO: 19692 - DNA, 23 bp, Artificial Sequence
  Synthetic
catagcagcugacttcucaccat

SEQ ID NO: 19693 - DNA, 25 bp, Artificial Sequence
  Synthetic
accctggttautgtggtattgaugc

SEQ ID NO: 19694 - DNA, 22 bp, Artificial Sequence
  Synthetic
cagctcaucacactggttgtug

SEQ ID NO: 19695 - DNA, 21 bp, Artificial Sequence
  Synthetic
caguattgugccgacaaagct

SEQ ID NO: 19696 - DNA, 28 bp, Artificial Sequence
  Synthetic
aaaccaggtttaauctcagttctgtuca

SEQ ID NO: 19697 - DNA, 21 bp, Artificial Sequence
  Synthetic
gaatggagggacutgtgcugt

SEQ ID NO: 19698 - DNA, 24 bp, Artificial Sequence
  Synthetic
actgtagccuccaatcctauccat

SEQ ID NO: 19699 - DNA, 21 bp, Artificial Sequence
  Synthetic
aagggtggtuatcccttgcug

SEQ ID NO: 19700 - DNA, 21 bp, Artificial Sequence
  Synthetic
actcatcgagutgctccucac

SEQ ID NO: 19701 - DNA, 28 bp, Artificial Sequence
  Synthetic
atgttcttctaugacatttctcccucac

SEQ ID NO: 19702 - DNA, 24 bp, Artificial Sequence
  Synthetic
gctgcatucattgatctcauggag

SEQ ID NO: 19703 - DNA, 24 bp, Artificial Sequence
  Synthetic
aguagtaagucacaggcaccagat

SEQ ID NO: 19704 - DNA, 23 bp, Artificial Sequence
  Synthetic
gcttaagagcugactggcauact

SEQ ID NO: 19705 - DNA, 23 bp, Artificial Sequence
  Synthetic
attgacgagugtatcuccaagcc

SEQ ID NO: 19706 - DNA, 21 bp, Artificial Sequence
  Synthetic
acucaggcacugacaaagcaa

SEQ ID NO: 19707 - DNA, 29 bp, Artificial Sequence
  Synthetic
ggtgaatattgaugaatgtgcctcaaauc

SEQ ID NO: 19708 - DNA, 22 bp, Artificial Sequence
  Synthetic
cucaaagccccattugacaact

SEQ ID NO: 19709 - DNA, 22 bp, Artificial Sequence
  Synthetic
aatcccugcatccauggaaact

SEQ ID NO: 19710 - DNA, 24 bp, Artificial Sequence
  Synthetic
ggtauctgagcataugccaacagt

SEQ ID NO: 19711 - DNA, 20 bp, Artificial Sequence
  Synthetic
gaacgatggucgctgcatug

SEQ ID NO: 19712 - DNA, 21 bp, Artificial Sequence
  Synthetic
ccccatucagacacggaguac

SEQ ID NO: 19713 - DNA, 23 bp, Artificial Sequence
  Synthetic
acccattggtauaagccctgcua

SEQ ID NO: 19714 - DNA, 24 bp, Artificial Sequence
  Synthetic
aatggcactcautgatgtccauct

SEQ ID NO: 19715 - DNA, 24 bp, Artificial Sequence
  Synthetic
gtggaaacucaactgctttgaucc

SEQ ID NO: 19716 - DNA, 25 bp, Artificial Sequence
  Synthetic
tcaatgttctcacugcagtcatcuc

SEQ ID NO: 19717 - DNA, 22 bp, Artificial Sequence
  Synthetic
cagaggaugtggatgaaugcct

SEQ ID NO: 19718 - DNA, 22 bp, Artificial Sequence
  Synthetic
gtcccctaaucctgggacacua

SEQ ID NO: 19719 - DNA, 24 bp, Artificial Sequence
  Synthetic
cagtactgugacagcctgtatgug

SEQ ID NO: 19720 - DNA, 25 bp, Artificial Sequence
  Synthetic
gacattuaagagccagacaccauga

SEQ ID NO: 19721 - DNA, 21 bp, Artificial Sequence
  Synthetic
catatgcucagccgggauacc

SEQ ID NO: 19722 - DNA, 22 bp, Artificial Sequence
  Synthetic
accaguaacatuccacagaagc

SEQ ID NO: 19723 - DNA, 26 bp, Artificial Sequence
  Synthetic
gagatggctaugaaccctgtguaaat

SEQ ID NO: 19724 - DNA, 17 bp, Artificial Sequence
  Synthetic
ggacccucccguggact

SEQ ID NO: 19725 - DNA, 20 bp, Artificial Sequence
  Synthetic
ctgccatguactccagccut

SEQ ID NO: 19726 - DNA, 24 bp, Artificial Sequence
  Synthetic
aatgaactgtuccatgctctccut

SEQ ID NO: 19727 - DNA, 22 bp, Artificial Sequence
  Synthetic
gcctggtcaguaagagtctgut

SEQ ID NO: 19728 - DNA, 22 bp, Artificial Sequence
  Synthetic
ctgtctuagggcactgtaguca

SEQ ID NO: 19729 - DNA, 29 bp, Artificial Sequence
  Synthetic
cagaagattctgutgtgttgtcatttuct

SEQ ID NO: 19730 - DNA, 23 bp, Artificial Sequence
  Synthetic
agacaattgtucccctgaaugct

SEQ ID NO: 19731 - DNA, 24 bp, Artificial Sequence
  Synthetic
acaagtgcutggaaatactugggt

SEQ ID NO: 19732 - DNA, 20 bp, Artificial Sequence
  Synthetic
ggtccccucttaccuggagt

SEQ ID NO: 19733 - DNA, 20 bp, Artificial Sequence
  Synthetic
tcccaccutcaagagcugga

SEQ ID NO: 19734 - DNA, 27 bp, Artificial Sequence
  Synthetic
ctaaauagagccagaaauaggaagguc

SEQ ID NO: 19735 - DNA, 24 bp, Artificial Sequence
  Synthetic
tggaagagcaucttggtgaaaucc

SEQ ID NO: 19736 - DNA, 21 bp, Artificial Sequence
  Synthetic
gttctatggugcccctuggag

SEQ ID NO: 19737 - DNA, 25 bp, Artificial Sequence
  Synthetic
ctgacaccccauttgcttcttacua

SEQ ID NO: 19738 - DNA, 21 bp, Artificial Sequence
  Synthetic
tgctgttggautcggcctuag

SEQ ID NO: 19739 - DNA, 28 bp, Artificial Sequence
  Synthetic
aggattccagtuctctgtagaacaucat

SEQ ID NO: 19740 - DNA, 24 bp, Artificial Sequence
  Synthetic
gtcccaatcuctttcccagatuct

SEQ ID NO: 19741 - DNA, 25 bp, Artificial Sequence
  Synthetic
gggaccagccuaatttcttatcguc

SEQ ID NO: 19742 - DNA, 23 bp, Artificial Sequence
  Synthetic
aagaaaguacccaaacagugcca

SEQ ID NO: 19743 - DNA, 21 bp, Artificial Sequence
  Synthetic
tctactcuccagggctucagg

SEQ ID NO: 19744 - DNA, 23 bp, Artificial Sequence
  Synthetic
cagaggaacuagccagtgtugag

SEQ ID NO: 19745 - DNA, 24 bp, Artificial Sequence
  Synthetic
ccacaacagcacauccaactttua

SEQ ID NO: 19746 - DNA, 24 bp, Artificial Sequence
  Synthetic
gatagcgtugtttgcattgugaca

SEQ ID NO: 19747 - DNA, 23 bp, Artificial Sequence
  Synthetic
ctcagactgucctgatccctgua

SEQ ID NO: 19748 - DNA, 24 bp, Artificial Sequence
  Synthetic
ctactctcacucagaccctcttug

SEQ ID NO: 19749 - DNA, 21 bp, Artificial Sequence
  Synthetic
gaacaccaugctgagccttug

SEQ ID NO: 19750 - DNA, 23 bp, Artificial Sequence
  Synthetic
cctgaagacaccugttactgucc

SEQ ID NO: 19751 - DNA, 25 bp, Artificial Sequence
  Synthetic
ctcatgtttctcutgggtcctctut

SEQ ID NO: 19752 - DNA, 20 bp, Artificial Sequence
  Synthetic
gccagtgcucagtaggcaug

SEQ ID NO: 19753 - DNA, 22 bp, Artificial Sequence
  Synthetic
ttacgcagucggcuagaagaag

SEQ ID NO: 19754 - DNA, 31 bp, Artificial Sequence
  Synthetic
ggtttatattccaguaacttacctgttguct

SEQ ID NO: 19755 - DNA, 24 bp, Artificial Sequence
  Synthetic
caaatgcaacuggttgatccugaa

SEQ ID NO: 19756 - DNA, 27 bp, Artificial Sequence
  Synthetic
tttttagccaugagttcaagttccuct

SEQ ID NO: 19757 - DNA, 22 bp, Artificial Sequence
  Synthetic
cucaaaggagguagcagauacc

SEQ ID NO: 19758 - DNA, 21 bp, Artificial Sequence
  Synthetic
gttagagaugggtgctuggga

SEQ ID NO: 19759 - DNA, 24 bp, Artificial Sequence
  Synthetic
gtgatttccucttactaggcugct

SEQ ID NO: 19760 - DNA, 27 bp, Artificial Sequence
  Synthetic
ctgctgaatgauactctcttgttccut

SEQ ID NO: 19761 - DNA, 29 bp, Artificial Sequence
  Synthetic
actgattattgcuctctttatggctguag

SEQ ID NO: 19762 - DNA, 27 bp, Artificial Sequence
  Synthetic
tccagagcaacagcuttatcatgtaut

SEQ ID NO: 19763 - DNA, 29 bp, Artificial Sequence
  Synthetic
gaaactatttttgguctcaggaattucgg

SEQ ID NO: 19764 - DNA, 20 bp, Artificial Sequence
  Synthetic
ccagtuggcgctctttcugt

SEQ ID NO: 19765 - DNA, 20 bp, Artificial Sequence
  Synthetic
gcttgcccuccttgtgatug

SEQ ID NO: 19766 - DNA, 24 bp, Artificial Sequence
  Synthetic
ccctgctttucagagtttcctuga

SEQ ID NO: 19767 - DNA, 28 bp, Artificial Sequence
  Synthetic
catttgaggcuaaaagacatcatugacc

SEQ ID NO: 19768 - DNA, 24 bp, Artificial Sequence
  Synthetic
agggataacucacaggtgtctugt

SEQ ID NO: 19769 - DNA, 25 bp, Artificial Sequence
  Synthetic
tcttgattauaagcccauccagagc

SEQ ID NO: 19770 - DNA, 21 bp, Artificial Sequence
  Synthetic
aggagauacttcuggccacct

SEQ ID NO: 19771 - DNA, 24 bp, Artificial Sequence
  Synthetic
ggtggagaaugaggatcagaucca

SEQ ID NO: 19772 - DNA, 25 bp, Artificial Sequence
  Synthetic
gggcaataacugtgtcgaatcgaua

SEQ ID NO: 19773 - DNA, 18 bp, Artificial Sequence
  Synthetic
cgcuggatctuccacacg

SEQ ID NO: 19774 - DNA, 23 bp, Artificial Sequence
  Synthetic
gccaggctcugattcagttctuc

SEQ ID NO: 19775 - DNA, 25 bp, Artificial Sequence
  Synthetic
cctgctatacuagaccatgctauct

SEQ ID NO: 19776 - DNA, 23 bp, Artificial Sequence
  Synthetic
gaagagccuagaauagcgaccaa

SEQ ID NO: 19777 - DNA, 21 bp, Artificial Sequence
  Synthetic
tcaagcugcgcatctactucc

SEQ ID NO: 19778 - DNA, 24 bp, Artificial Sequence
  Synthetic
caaggaauatgtcugcacaaacgg

SEQ ID NO: 19779 - DNA, 27 bp, Artificial Sequence
  Synthetic
gaatgtgccagutagaatgatccuagt

SEQ ID NO: 19780 - DNA, 20 bp, Artificial Sequence
  Synthetic
ccgguaaggcgtgtagugag

SEQ ID NO: 19781 - DNA, 21 bp, Artificial Sequence
  Synthetic
aggaaccguagctaggacugg

SEQ ID NO: 19782 - DNA, 29 bp, Artificial Sequence
  Synthetic
ttctaactgccccaautaaaatgcaatut

SEQ ID NO: 19783 - DNA, 22 bp, Artificial Sequence
  Synthetic
gaagctaacgcugcatgatcug

SEQ ID NO: 19784 - DNA, 27 bp, Artificial Sequence
  Synthetic
atgggcagtcutcctctatatttcuct

SEQ ID NO: 19785 - DNA, 26 bp, Artificial Sequence
  Synthetic
ctttgtcttcauctctggttcugact

SEQ ID NO: 19786 - DNA, 25 bp, Artificial Sequence
  Synthetic
cttgctgtgggcutaatggttagua

SEQ ID NO: 19787 - DNA, 24 bp, Artificial Sequence
  Synthetic
tgttcctttutgacctttcuccct

SEQ ID NO: 19788 - DNA, 21 bp, Artificial Sequence
  Synthetic
tccatcaggcutcccuacaca

SEQ ID NO: 19789 - DNA, 21 bp, Artificial Sequence
  Synthetic
tccttcaaaugcaggcugagg

SEQ ID NO: 19790 - DNA, 21 bp, Artificial Sequence
  Synthetic
tgttccaugaacccacaagug

SEQ ID NO: 19791 - DNA, 28 bp, Artificial Sequence
  Synthetic
ggacaagtautctgaagcttugaaggat

SEQ ID NO: 19792 - DNA, 19 bp, Artificial Sequence
  Synthetic
ggcuagccctagaguacgg

SEQ ID NO: 19793 - DNA, 18 bp, Artificial Sequence
  Synthetic
tgcuggcguaagcaacca

SEQ ID NO: 19794 - DNA, 24 bp, Artificial Sequence
  Synthetic
ctgtcctaaaacagugaggcctua

SEQ ID NO: 19795 - DNA, 28 bp, Artificial Sequence
  Synthetic
gatactgtaagucctgtcttugaggaaa

SEQ ID NO: 19796 - DNA, 18 bp, Artificial Sequence
  Synthetic
ctgcccugcaggugacaa

SEQ ID NO: 19797 - DNA, 20 bp, Artificial Sequence
  Synthetic
gcagctctucagggacagug

SEQ ID NO: 19798 - DNA, 28 bp, Artificial Sequence
  Synthetic
tcacaaaatcautccataaactcuggct

SEQ ID NO: 19799 - DNA, 23 bp, Artificial Sequence
  Synthetic
gagctggtcaucacctttgauct

SEQ ID NO: 19800 - DNA, 26 bp, Artificial Sequence
  Synthetic
cagacccaagccaaauatggattcua

SEQ ID NO: 19801 - DNA, 23 bp, Artificial Sequence
  Synthetic
ggaaagagaucctgggctuagag

SEQ ID NO: 19802 - DNA, 17 bp, Artificial Sequence
  Synthetic
ctccucgggacugcgat

SEQ ID NO: 19803 - DNA, 17 bp, Artificial Sequence
  Synthetic
gcaatgccugcctgucc

SEQ ID NO: 19804 - DNA, 22 bp, Artificial Sequence
  Synthetic
ggccctttccutgactctgtug

SEQ ID NO: 19805 - DNA, 22 bp, Artificial Sequence
  Synthetic
ccatgacacugcagcttctgut

SEQ ID NO: 19806 - DNA, 22 bp, Artificial Sequence
  Synthetic
atgtcaccagugaccucaacag

SEQ ID NO: 19807 - DNA, 25 bp, Artificial Sequence
  Synthetic
tctttugagggaagaagagaugagt

SEQ ID NO: 19808 - DNA, 21 bp, Artificial Sequence
  Synthetic
acgucaacaacggcaacuaca

SEQ ID NO: 19809 - DNA, 18 bp, Artificial Sequence
  Synthetic
gggcagggutcaggaugg

SEQ ID NO: 19810 - DNA, 22 bp, Artificial Sequence
  Synthetic
catttcaugacattggguggca

SEQ ID NO: 19811 - DNA, 19 bp, Artificial Sequence
  Synthetic
ctgccctugacccagcaua

SEQ ID NO: 19812 - DNA, 19 bp, Artificial Sequence
  Synthetic
tgagctgcucaccatgcug

SEQ ID NO: 19813 - DNA, 18 bp, Artificial Sequence
  Synthetic
gugctgguaccggaggaa

SEQ ID NO: 19814 - DNA, 21 bp, Artificial Sequence
  Synthetic
cagggacuggtggtcaagaut

SEQ ID NO: 19815 - DNA, 23 bp, Artificial Sequence
  Synthetic
gggatccagggugtctacagtut

SEQ ID NO: 19816 - DNA, 21 bp, Artificial Sequence
  Synthetic
accagagguctacgccaucat

SEQ ID NO: 19817 - DNA, 18 bp, Artificial Sequence
  Synthetic
tccggcuaaccacuccca

SEQ ID NO: 19818 - DNA, 27 bp, Artificial Sequence
  Synthetic
actctctactauggtgtcatctttucc

SEQ ID NO: 19819 - DNA, 29 bp, Artificial Sequence
  Synthetic
acatatacataccugcactcaaagcaaua

SEQ ID NO: 19820 - DNA, 21 bp, Artificial Sequence
  Synthetic
gctttguccacagatguggga

SEQ ID NO: 19821 - DNA, 19 bp, Artificial Sequence
  Synthetic
gctgggagccucctttcut

SEQ ID NO: 19822 - DNA, 22 bp, Artificial Sequence
  Synthetic
ccccctuccctgtttatccuga

SEQ ID NO: 19823 - DNA, 17 bp, Artificial Sequence
  Synthetic
ctgggcugctcguccat

SEQ ID NO: 19824 - DNA, 26 bp, Artificial Sequence
  Synthetic
tgtagucaaagaacacaaaugtgtug

SEQ ID NO: 19825 - DNA, 19 bp, Artificial Sequence
  Synthetic
cgccutccgcuaacagcat

SEQ ID NO: 19826 - DNA, 22 bp, Artificial Sequence
  Synthetic
caaaggagautgagcggauggt

SEQ ID NO: 19827 - DNA, 21 bp, Artificial Sequence
  Synthetic
cagaucagggacucccagaga

SEQ ID NO: 19828 - DNA, 26 bp, Artificial Sequence
  Synthetic
ggaaataagcgaauccgguacaagaa

SEQ ID NO: 19829 - DNA, 21 bp, Artificial Sequence
  Synthetic
agttgagggcgagutagctug

SEQ ID NO: 19830 - DNA, 22 bp, Artificial Sequence
  Synthetic
ccaugttaucagccagacagga

SEQ ID NO: 19831 - DNA, 25 bp, Artificial Sequence
  Synthetic
ggccctauggctttgaaataatugg

SEQ ID NO: 19832 - DNA, 19 bp, Artificial Sequence
  Synthetic
ccatgaccuccagcuacgg

SEQ ID NO: 19833 - DNA, 20 bp, Artificial Sequence
  Synthetic
ggcttccuccaggtcuagca

SEQ ID NO: 19834 - DNA, 23 bp, Artificial Sequence
  Synthetic
ccttatgcctucttgcctccuaa

SEQ ID NO: 19835 - DNA, 19 bp, Artificial Sequence
  Synthetic
caggacgagguacgauggg

SEQ ID NO: 19836 - DNA, 22 bp, Artificial Sequence
  Synthetic
catcaacauggccaacagcaut

SEQ ID NO: 19837 - DNA, 29 bp, Artificial Sequence
  Synthetic
ggtttttgatttctucttaggcctgttua

SEQ ID NO: 19838 - DNA, 20 bp, Artificial Sequence
  Synthetic
gactggcugagcuggacaat

SEQ ID NO: 19839 - DNA, 20 bp, Artificial Sequence
  Synthetic
gatgtcuccgtacgtguggt

SEQ ID NO: 19840 - DNA, 20 bp, Artificial Sequence
  Synthetic
gagaaggugaacccggugag

SEQ ID NO: 19841 - DNA, 22 bp, Artificial Sequence
  Synthetic
tggtcttcuctctggtcaugga

SEQ ID NO: 19842 - DNA, 18 bp, Artificial Sequence
  Synthetic
atccagcugcacagcuca

SEQ ID NO: 19843 - DNA, 17 bp, Artificial Sequence
  Synthetic
gccccacugctguccat

SEQ ID NO: 19844 - DNA, 20 bp, Artificial Sequence
  Synthetic
agtggagugaagcacaccug

SEQ ID NO: 19845 - DNA, 21 bp, Artificial Sequence
  Synthetic
cttcatcugggcactgtccut

SEQ ID NO: 19846 - DNA, 17 bp, Artificial Sequence
  Synthetic
gcucacccacagccuct

SEQ ID NO: 19847 - DNA, 21 bp, Artificial Sequence
  Synthetic
tggctgatucctaggcagtug

SEQ ID NO: 19848 - DNA, 30 bp, Artificial Sequence
  Synthetic
cttgatuagagaaggaaauatggtgauaca

SEQ ID NO: 19849 - DNA, 26 bp, Artificial Sequence
  Synthetic
tctggtttuacactcaagctgucaat

SEQ ID NO: 19850 - DNA, 23 bp, Artificial Sequence
  Synthetic
tcttttggttutgcaggcttugg

SEQ ID NO: 19851 - DNA, 25 bp, Artificial Sequence
  Synthetic
gtatgctguagacgctcgtatucat

SEQ ID NO: 19852 - DNA, 26 bp, Artificial Sequence
  Synthetic
tgtcacagccaaaaucaatucaagag

SEQ ID NO: 19853 - DNA, 29 bp, Artificial Sequence
  Synthetic
ccaaaaatactatcugaaaaaggcagtut

SEQ ID NO: 19854 - DNA, 30 bp, Artificial Sequence
  Synthetic
ggttctaaguagaaataaaacctggugact

SEQ ID NO: 19855 - DNA, 24 bp, Artificial Sequence
  Synthetic
gctaagcatugtcccatcatucaa

SEQ ID NO: 19856 - DNA, 21 bp, Artificial Sequence
  Synthetic
gctcgtucatccacatugcca

SEQ ID NO: 19857 - DNA, 24 bp, Artificial Sequence
  Synthetic
tggttuaaggcaacattggcuaca

SEQ ID NO: 19858 - DNA, 22 bp, Artificial Sequence
  Synthetic
cttctctgccagutctccaguc

SEQ ID NO: 19859 - DNA, 29 bp, Artificial Sequence
  Synthetic
gagctgttgtcagautgaatcatttcaut

SEQ ID NO: 19860 - DNA, 22 bp, Artificial Sequence
  Synthetic
gaggguagcccctcagatauca

SEQ ID NO: 19861 - DNA, 27 bp, Artificial Sequence
  Synthetic
ggagctgatggucttttgattctttut

SEQ ID NO: 19862 - DNA, 20 bp, Artificial Sequence
  Synthetic
gcacagtugccaggcttaug

SEQ ID NO: 19863 - DNA, 25 bp, Artificial Sequence
  Synthetic
tttaaaaugaggtgttguccccaga

SEQ ID NO: 19864 - DNA, 25 bp, Artificial Sequence
  Synthetic
ctcttcttgaacagcuggtatccut

SEQ ID NO: 19865 - DNA, 30 bp, Artificial Sequence
  Synthetic
aataattttctagctucttagggctccauc

SEQ ID NO: 19866 - DNA, 21 bp, Artificial Sequence
  Synthetic
gtgcttttucacctggcaugg

SEQ ID NO: 19867 - DNA, 27 bp, Artificial Sequence
  Synthetic
aaguatcaactgcuaaacaagagcact

SEQ ID NO: 19868 - DNA, 22 bp, Artificial Sequence
  Synthetic
cctgaaugctcaaatgtuggca

SEQ ID NO: 19869 - DNA, 23 bp, Artificial Sequence
  Synthetic
ttccccattugaactggtagucc

SEQ ID NO: 19870 - DNA, 25 bp, Artificial Sequence
  Synthetic
gtgtcaattuacaggaatggtuccc

SEQ ID NO: 19871 - DNA, 21 bp, Artificial Sequence
  Synthetic
gccttcatguctggtgacuga

SEQ ID NO: 19872 - DNA, 28 bp, Artificial Sequence
  Synthetic
cctattacttttcugtcagtgagatugt

SEQ ID NO: 19873 - DNA, 21 bp, Artificial Sequence
  Synthetic
gagagcuggttgcaguagagg

SEQ ID NO: 19874 - DNA, 24 bp, Artificial Sequence
  Synthetic
ccagtgtacagugaatctgguagg

SEQ ID NO: 19875 - DNA, 22 bp, Artificial Sequence
  Synthetic
tcagtcaguagctgcugaagga

SEQ ID NO: 19876 - DNA, 21 bp, Artificial Sequence
  Synthetic
tccccauggcaactacagaug

SEQ ID NO: 19877 - DNA, 22 bp, Artificial Sequence
  Synthetic
agggaaggcuatggtgcaatut

SEQ ID NO: 19878 - DNA, 18 bp, Artificial Sequence
  Synthetic
cgggaccuccctgtcgua

SEQ ID NO: 19879 - DNA, 21 bp, Artificial Sequence
  Synthetic
cagttctagcuccacccctuc

SEQ ID NO: 19880 - DNA, 21 bp, Artificial Sequence
  Synthetic
tttgauggagcacaggcucat

SEQ ID NO: 19881 - DNA, 19 bp, Artificial Sequence
  Synthetic
cgctcgagugcccattuga

SEQ ID NO: 19882 - DNA, 22 bp, Artificial Sequence
  Synthetic
cccattgauggagtagguggag

SEQ ID NO: 19883 - DNA, 22 bp, Artificial Sequence
  Synthetic
gtaacuaccccagagucaccca

SEQ ID NO: 19884 - DNA, 22 bp, Artificial Sequence
  Synthetic
ccctgagaucagcuggagaagt

SEQ ID NO: 19885 - DNA, 19 bp, Artificial Sequence
  Synthetic
ccagcgcaucgtagaccug

SEQ ID NO: 19886 - DNA, 25 bp, Artificial Sequence
  Synthetic
ctggcutcttactttugggaacaag

SEQ ID NO: 19887 - DNA, 26 bp, Artificial Sequence
  Synthetic
tgacaaaagccutcacctacugaaaa

SEQ ID NO: 19888 - DNA, 27 bp, Artificial Sequence
  Synthetic
gaagucaacaauagggaggttaaugat

SEQ ID NO: 19889 - DNA, 24 bp, Artificial Sequence
  Synthetic
ctgtaagucctggtcaucggaaaa

SEQ ID NO: 19890 - DNA, 23 bp, Artificial Sequence
  Synthetic
gtggttttggutgaaagcttugc

SEQ ID NO: 19891 - DNA, 26 bp, Artificial Sequence
  Synthetic
cagtcaacacagautttggtgaugaa

SEQ ID NO: 19892 - DNA, 27 bp, Artificial Sequence
  Synthetic
ctccaatcctucctataaatagguggt

SEQ ID NO: 19893 - DNA, 26 bp, Artificial Sequence
  Synthetic
atttagacggtaugcaacaggacaut

SEQ ID NO: 19894 - DNA, 29 bp, Artificial Sequence
  Synthetic
ccaggttattttauacctcacctcatugt

SEQ ID NO: 19895 - DNA, 28 bp, Artificial Sequence
  Synthetic
ccatttttgtttucctttgtgtcatucc

SEQ ID NO: 19896 - DNA, 17 bp, Artificial Sequence
  Synthetic
ccgcggutccctagcuc

SEQ ID NO: 19897 - DNA, 18 bp, Artificial Sequence
  Synthetic
acacacgguccacagcuc

SEQ ID NO: 19898 - DNA, 28 bp, Artificial Sequence
  Synthetic
tggcaatgaaguactacaccucaaaaat

SEQ ID NO: 19899 - DNA, 32 bp, Artificial Sequence
  Synthetic
aaccaatataattaccutacctcagctauaca

SEQ ID NO: 19900 - DNA, 30 bp, Artificial Sequence
  Synthetic
ctacctguaagaaagcagttttacucaact

SEQ ID NO: 19901 - DNA, 29 bp, Artificial Sequence
  Synthetic
accttgttatguacaaagacaatcctuaa

SEQ ID NO: 19902 - DNA, 24 bp, Artificial Sequence
  Synthetic
gcagaccacuctttcactagtcut

SEQ ID NO: 19903 - DNA, 23 bp, Artificial Sequence
  Synthetic
agcaaattctuggaagcagucct

SEQ ID NO: 19904 - DNA, 27 bp, Artificial Sequence
  Synthetic
cagctgacaucgttcttaguaaaacag

SEQ ID NO: 19905 - DNA, 32 bp, Artificial Sequence
  Synthetic
ttccagattcatcautatgcatatcatttugg

SEQ ID NO: 19906 - DNA, 20 bp, Artificial Sequence
  Synthetic
ccgtuaagcacacccaguca

SEQ ID NO: 19907 - DNA, 30 bp, Artificial Sequence
  Synthetic
aatttttaagtatauttcccctgcuccact

SEQ ID NO: 19908 - DNA, 22 bp, Artificial Sequence
  Synthetic
cccatgucagcaagtgctctut

SEQ ID NO: 19909 - DNA, 24 bp, Artificial Sequence
  Synthetic
cattcaagtcacaugcaagctcug

SEQ ID NO: 19910 - DNA, 32 bp, Artificial Sequence
  Synthetic
attaaaatggtacagauccccttttctaugaa

SEQ ID NO: 19911 - DNA, 24 bp, Artificial Sequence
  Synthetic
atgtcatuagccatgcaucaggaa

SEQ ID NO: 19912 - DNA, 30 bp, Artificial Sequence
  Synthetic
ttatataaaaugacagcagaugaccaaaga

SEQ ID NO: 19913 - DNA, 32 bp, Artificial Sequence
  Synthetic
ccacatcagaaaauattaaaccacactaucat

SEQ ID NO: 19914 - DNA, 29 bp, Artificial Sequence
  Synthetic
cagggtatatcauggtaaaatgtgugact

SEQ ID NO: 19915 - DNA, 19 bp, Artificial Sequence
  Synthetic
ggcgaccaugaacacacuc

SEQ ID NO: 19916 - DNA, 29 bp, Artificial Sequence
  Synthetic
gatcttttcagtagugtgattaggcgtua

SEQ ID NO: 19917 - DNA, 24 bp, Artificial Sequence
  Synthetic
aagcatatgcacaaugttgggaug

SEQ ID NO: 19918 - DNA, 22 bp, Artificial Sequence
  Synthetic
gccctguactatctgcatuccc

SEQ ID NO: 19919 - DNA, 21 bp, Artificial Sequence
  Synthetic
ccgtgtggaacuggaagctua

SEQ ID NO: 19920 - DNA, 27 bp, Artificial Sequence
  Synthetic
gagactuaagggaagggaaagaaugac

SEQ ID NO: 19921 - DNA, 21 bp, Artificial Sequence
  Synthetic
ctgggaacccugatgacucac

SEQ ID NO: 19922 - DNA, 17 bp, Artificial Sequence
  Synthetic
cccctcugcccagacuc

SEQ ID NO: 19923 - DNA, 23 bp, Artificial Sequence
  Synthetic
tgtgcaagauacctcacccuaca

SEQ ID NO: 19924 - DNA, 30 bp, Artificial Sequence
  Synthetic
cttttacctcugaaaatatcaatcgtugcc

SEQ ID NO: 19925 - DNA, 21 bp, Artificial Sequence
  Synthetic
cucccggcagaaggaauacaa

SEQ ID NO: 19926 - DNA, 22 bp, Artificial Sequence
  Synthetic
acctttttcuggacctgtuggg

SEQ ID NO: 19927 - DNA, 22 bp, Artificial Sequence
  Synthetic
gaugggagaaauacggagaaug

SEQ ID NO: 19928 - DNA, 25 bp, Artificial Sequence
  Synthetic
gatataccuggagccatttcctcug

SEQ ID NO: 19929 - DNA, 23 bp, Artificial Sequence
  Synthetic
cctcctcaatucctctggcagua

SEQ ID NO: 19930 - DNA, 23 bp, Artificial Sequence
  Synthetic
gccgctuaccaacctccttuaat

SEQ ID NO: 19931 - DNA, 27 bp, Artificial Sequence
  Synthetic
ggaggagggugaaggttaaaaactuac

SEQ ID NO: 19932 - DNA, 25 bp, Artificial Sequence
  Synthetic
ccgccctctutcacttttatctcua

SEQ ID NO: 19933 - DNA, 21 bp, Artificial Sequence
  Synthetic
gatagcgaaagcucccctucc

SEQ ID NO: 19934 - DNA, 26 bp, Artificial Sequence
  Synthetic
agggaggaaugataaaggttaaguga

SEQ ID NO: 19935 - DNA, 24 bp, Artificial Sequence
  Synthetic
ccaagacaccuataaggaggucag

SEQ ID NO: 19936 - DNA, 20 bp, Artificial Sequence
  Synthetic
catacugccagggtcctguc

SEQ ID NO: 19937 - DNA, 20 bp, Artificial Sequence
  Synthetic
tgctgtgtuggagcaagugt

SEQ ID NO: 19938 - DNA, 23 bp, Artificial Sequence
  Synthetic
cctagaaauggcatguggagacc

SEQ ID NO: 19939 - DNA, 22 bp, Artificial Sequence
  Synthetic
ggccctgaucatcatggtucat

SEQ ID NO: 19940 - DNA, 22 bp, Artificial Sequence
  Synthetic
cgcacacaagcaaauggaaugt

SEQ ID NO: 19941 - DNA, 25 bp, Artificial Sequence
  Synthetic
agaagaggaagaccuggagcaauaa

SEQ ID NO: 19942 - DNA, 18 bp, Artificial Sequence
  Synthetic
gcccctgcuggaacaguc

SEQ ID NO: 19943 - DNA, 26 bp, Artificial Sequence
  Synthetic
gtatggacaaaguaagccttggacut

SEQ ID NO: 19944 - DNA, 26 bp, Artificial Sequence
  Synthetic
tgcctcagggaautgaatatttggut

SEQ ID NO: 19945 - DNA, 21 bp, Artificial Sequence
  Synthetic
caccaggcauggatttuccag

SEQ ID NO: 19946 - DNA, 19 bp, Artificial Sequence
  Synthetic
ccccgggaaugagatggut

SEQ ID NO: 19947 - DNA, 33 bp, Artificial Sequence
  Synthetic
agaatgtactattattucatcagtgaaatccut

SEQ ID NO: 19948 - DNA, 26 bp, Artificial Sequence
  Synthetic
cccctcacauttgaaaatcaactuca

SEQ ID NO: 19949 - DNA, 19 bp, Artificial Sequence
  Synthetic
ctcaggaaaggcccugguc

SEQ ID NO: 19950 - DNA, 22 bp, Artificial Sequence
  Synthetic
tgtttggccutcttctcgctut

SEQ ID NO: 19951 - DNA, 21 bp, Artificial Sequence
  Synthetic
ccctgctugtctcaaccaugt

SEQ ID NO: 19952 - DNA, 20 bp, Artificial Sequence
  Synthetic
aggacgtauggagccaguct

SEQ ID NO: 19953 - DNA, 21 bp, Artificial Sequence
  Synthetic
gcggugtttttaucaacggca

SEQ ID NO: 19954 - DNA, 18 bp, Artificial Sequence
  Synthetic
ggaccuctgcccuccaag

SEQ ID NO: 19955 - DNA, 18 bp, Artificial Sequence
  Synthetic
acaagucgggcaccaugt

SEQ ID NO: 19956 - DNA, 17 bp, Artificial Sequence
  Synthetic
acatcuggcgcctgcut

SEQ ID NO: 19957 - DNA, 21 bp, Artificial Sequence
  Synthetic
gactccagguctccagacugt

SEQ ID NO: 19958 - DNA, 22 bp, Artificial Sequence
  Synthetic
augaacaggatugacaccagca

SEQ ID NO: 19959 - DNA, 24 bp, Artificial Sequence
  Synthetic
gaugacaaggcctctuccaaaaac

SEQ ID NO: 19960 - DNA, 21 bp, Artificial Sequence
  Synthetic
ccccaggaagaaucccttguc

SEQ ID NO: 19961 - DNA, 21 bp, Artificial Sequence
  Synthetic
gtgagtcccautcccgtgtut

SEQ ID NO: 19962 - DNA, 18 bp, Artificial Sequence
  Synthetic
cccctuggccagacacuc

SEQ ID NO: 19963 - DNA, 24 bp, Artificial Sequence
  Synthetic
gctgaaaggccccuttatgtuaca

SEQ ID NO: 19964 - DNA, 22 bp, Artificial Sequence
  Synthetic
cctagcaccugttctgcagaut

SEQ ID NO: 19965 - DNA, 28 bp, Artificial Sequence
  Synthetic
caagccccauaaaactcacaattttuct

SEQ ID NO: 19966 - DNA, 17 bp, Artificial Sequence
  Synthetic
cuccaccagcccacuca

SEQ ID NO: 19967 - DNA, 28 bp, Artificial Sequence
  Synthetic
ctataacttccttgugccttgtgtctua

SEQ ID NO: 19968 - DNA, 27 bp, Artificial Sequence
  Synthetic
cactcacctccucattctctatctuga

SEQ ID NO: 19969 - DNA, 22 bp, Artificial Sequence
  Synthetic
caaccacagauggtggctgtua

SEQ ID NO: 19970 - DNA, 25 bp, Artificial Sequence
  Synthetic
gccagatugagcaagtagtcatucc

SEQ ID NO: 19971 - DNA, 22 bp, Artificial Sequence
  Synthetic
aaatcacaaaccccgucctcut

SEQ ID NO: 19972 - DNA, 20 bp, Artificial Sequence
  Synthetic
gcaaagaccugggacacgua

SEQ ID NO: 19973 - DNA, 24 bp, Artificial Sequence
  Synthetic
ttggtatcuggttctgcaucagac

SEQ ID NO: 19974 - DNA, 17 bp, Artificial Sequence
  Synthetic
cucccagcccgcatcuc

SEQ ID NO: 19975 - DNA, 28 bp, Artificial Sequence
  Synthetic
gaaataaaucaaacagcctgtcagtucc

SEQ ID NO: 19976 - DNA, 21 bp, Artificial Sequence
  Synthetic
cgtactcuagcctccacucct

SEQ ID NO: 19977 - DNA, 19 bp, Artificial Sequence
  Synthetic
ccaugccaggcagtgtuga

SEQ ID NO: 19978 - DNA, 23 bp, Artificial Sequence
  Synthetic
tcctggagutttggtaccuagga

SEQ ID NO: 19979 - DNA, 22 bp, Artificial Sequence
  Synthetic
gcgaugttgttgtuggaggaac

SEQ ID NO: 19980 - DNA, 19 bp, Artificial Sequence
  Synthetic
cgttacgugagtgccagug

SEQ ID NO: 19981 - DNA, 21 bp, Artificial Sequence
  Synthetic
caguagagaggguagctccua

SEQ ID NO: 19982 - DNA, 18 bp, Artificial Sequence
  Synthetic
gcccaagcggugagtgua

SEQ ID NO: 19983 - DNA, 22 bp, Artificial Sequence
  Synthetic
cgaaggcaaugagaatccacug

SEQ ID NO: 19984 - DNA, 22 bp, Artificial Sequence
  Synthetic
agaaatuccccaagcacctucc

SEQ ID NO: 19985 - DNA, 22 bp, Artificial Sequence
  Synthetic
tcaataucccccaccccatcut

SEQ ID NO: 19986 - DNA, 26 bp, Artificial Sequence
  Synthetic
gtcttgacucatgggtgtatucacaa

SEQ ID NO: 19987 - DNA, 22 bp, Artificial Sequence
  Synthetic
cgctttcugggtcaauaggaga

SEQ ID NO: 19988 - DNA, 26 bp, Artificial Sequence
  Synthetic
acattccatucacaagaacagaucca

SEQ ID NO: 19989 - DNA, 28 bp, Artificial Sequence
  Synthetic
gtctcuggagcattatttatuacagggt

SEQ ID NO: 19990 - DNA, 27 bp, Artificial Sequence
  Synthetic
tgatcttaacugtcggauccacaaaaa

SEQ ID NO: 19991 - DNA, 22 bp, Artificial Sequence
  Synthetic
gcaatggctutagtgtccacug

SEQ ID NO: 19992 - DNA, 29 bp, Artificial Sequence
  Synthetic
ttacataaacagutttctgaaccugggat

SEQ ID NO: 19993 - DNA, 25 bp, Artificial Sequence
  Synthetic
gggtgatgtguttgaacttgattut

SEQ ID NO: 19994 - DNA, 21 bp, Artificial Sequence
  Synthetic
ctgcgaaagccutttggugac

SEQ ID NO: 19995 - DNA, 22 bp, Artificial Sequence
  Synthetic
ccatcaucccaccctcttucat

SEQ ID NO: 19996 - DNA, 19 bp, Artificial Sequence
  Synthetic
gggutgaatuccccagggt

SEQ ID NO: 19997 - DNA, 26 bp, Artificial Sequence
  Synthetic
ccaaagaggacacugaattagaguga

SEQ ID NO: 19998 - DNA, 25 bp, Artificial Sequence
  Synthetic
gttcagattuaagcctgaggagcut

SEQ ID NO: 19999 - DNA, 27 bp, Artificial Sequence
  Synthetic
ccactgtgtttuctcctccattttuag

SEQ ID NO: 20000 - DNA, 26 bp, Artificial Sequence
  Synthetic
ccaaagacaaaguagacagccaauga

SEQ ID NO: 20001 - DNA, 21 bp, Artificial Sequence
  Synthetic
ccacaaggaguggtgguacag

SEQ ID NO: 20002 - DNA, 24 bp, Artificial Sequence
  Synthetic
tgacagacugttggtttgaauccc

SEQ ID NO: 20003 - DNA, 23 bp, Artificial Sequence
  Synthetic
gctcctguggaagtttccagtuc

SEQ ID NO: 20004 - DNA, 23 bp, Artificial Sequence
  Synthetic
gcatctgtugctgttgtttcuga

SEQ ID NO: 20005 - DNA, 22 bp, Artificial Sequence
  Synthetic
gggagcaacuttttgtggucct

SEQ ID NO: 20006 - DNA, 29 bp, Artificial Sequence
  Synthetic
caagttgaaaugaacaaaagatgctucct

SEQ ID NO: 20007 - DNA, 24 bp, Artificial Sequence
  Synthetic
gtgtgtctgaugtggagagugaaa

SEQ ID NO: 20008 - DNA, 22 bp, Artificial Sequence
  Synthetic
ccttctagcucactggtugcat

SEQ ID NO: 20009 - DNA, 21 bp, Artificial Sequence
  Synthetic
cctgatcctuccaccaagcug

SEQ ID NO: 20010 - DNA, 25 bp, Artificial Sequence
  Synthetic
cutcattcattcatucccaccacaa

SEQ ID NO: 20011 - DNA, 23 bp, Artificial Sequence
  Synthetic
cagcttaucccggctaatggtua

SEQ ID NO: 20012 - DNA, 29 bp, Artificial Sequence
  Synthetic
caatcgtgaacaaauacctcaaactcuaa

SEQ ID NO: 20013 - DNA, 26 bp, Artificial Sequence
  Synthetic
ttctcccagauaatagatgccacuca

SEQ ID NO: 20014 - DNA, 24 bp, Artificial Sequence
  Synthetic
cacatctgcaugctgttttctcug

SEQ ID NO: 20015 - DNA, 27 bp, Artificial Sequence
  Synthetic
aaagttactttggutcttttgctgcut

SEQ ID NO: 20016 - DNA, 26 bp, Artificial Sequence
  Synthetic
cactctctattucctgcctcctttut

SEQ ID NO: 20017 - DNA, 22 bp, Artificial Sequence
  Synthetic
gtgcaagcaccugaaauaagca

SEQ ID NO: 20018 - DNA, 26 bp, Artificial Sequence
  Synthetic
gtgguagaaggcttttctugagagaa

SEQ ID NO: 20019 - DNA, 21 bp, Artificial Sequence
  Synthetic
ctuggcaacagaccacttucc

SEQ ID NO: 20020 - DNA, 28 bp, Artificial Sequence
  Synthetic
ggacaggcttuacttgctatacttucaa

SEQ ID NO: 20021 - DNA, 22 bp, Artificial Sequence
  Synthetic
gcccauggaagaaacaagucct

SEQ ID NO: 20022 - DNA, 27 bp, Artificial Sequence
  Synthetic
atgtcctccttcucctctttcatcuaa

SEQ ID NO: 20023 - DNA, 24 bp, Artificial Sequence
  Synthetic
ccagggagaauaggcguaataaug

SEQ ID NO: 20024 - DNA, 23 bp, Artificial Sequence
  Synthetic
gtgctaccgaugctctgcttaua

SEQ ID NO: 20025 - DNA, 27 bp, Artificial Sequence
  Synthetic
actctgaagcugaaaatattgagccut

SEQ ID NO: 20026 - DNA, 28 bp, Artificial Sequence
  Synthetic
tccaagtcttttuctttgcacctacuaa

SEQ ID NO: 20027 - DNA, 20 bp, Artificial Sequence
  Synthetic
gggcagaauctgattuggca

SEQ ID NO: 20028 - DNA, 28 bp, Artificial Sequence
  Synthetic
gggagaacaacaucttttaattgctuca

SEQ ID NO: 20029 - DNA, 28 bp, Artificial Sequence
  Synthetic
acagagaccuaaggacatcatcctatuc

SEQ ID NO: 20030 - DNA, 20 bp, Artificial Sequence
  Synthetic
gccgtcgcuctctttcugat

SEQ ID NO: 20031 - DNA, 28 bp, Artificial Sequence
  Synthetic
agagattttaaaaagagcucagcaccut

SEQ ID NO: 20032 - DNA, 28 bp, Artificial Sequence
  Synthetic
tggaatttcttcauccttcccaataugg

SEQ ID NO: 20033 - DNA, 26 bp, Artificial Sequence
  Synthetic
agaagcagatacuaagcaggacacua

SEQ ID NO: 20034 - DNA, 21 bp, Artificial Sequence
  Synthetic
tggtaatggugctgcaugagt

SEQ ID NO: 20035 - DNA, 28 bp, Artificial Sequence
  Synthetic
tggtgauaccttatctacugcagaagaa

SEQ ID NO: 20036 - DNA, 19 bp, Artificial Sequence
  Synthetic
caggutccttcugccacct

SEQ ID NO: 20037 - DNA, 23 bp, Artificial Sequence
  Synthetic
gtccgagagaugtgcaaggaaut

SEQ ID NO: 20038 - DNA, 25 bp, Artificial Sequence
  Synthetic
gatgtcaaugagagccatcatguct

SEQ ID NO: 20039 - DNA, 19 bp, Artificial Sequence
  Synthetic
tccacccugaccgctauga

SEQ ID NO: 20040 - DNA, 21 bp, Artificial Sequence
  Synthetic
ccctggcutaggacctgugat

SEQ ID NO: 20041 - DNA, 19 bp, Artificial Sequence
  Synthetic
tctgactgccugccttguc

SEQ ID NO: 20042 - DNA, 21 bp, Artificial Sequence
  Synthetic
actccuagcactgugagggat

SEQ ID NO: 20043 - DNA, 22 bp, Artificial Sequence
  Synthetic
cgcagtugggcactataugagg

SEQ ID NO: 20044 - DNA, 19 bp, Artificial Sequence
  Synthetic
cagugtttcuccgcaccag

SEQ ID NO: 20045 - DNA, 22 bp, Artificial Sequence
  Synthetic
ccugcagaagaagaaguggcaa

SEQ ID NO: 20046 - DNA, 20 bp, Artificial Sequence
  Synthetic
ccaccucccttcuccacgat

SEQ ID NO: 20047 - DNA, 20 bp, Artificial Sequence
  Synthetic
tgaccaccacutggatgcug

SEQ ID NO: 20048 - DNA, 19 bp, Artificial Sequence
  Synthetic
ctgcutcgctcuagcacca

SEQ ID NO: 20049 - DNA, 17 bp, Artificial Sequence
  Synthetic
agccctugccacctucc

SEQ ID NO: 20050 - DNA, 23 bp, Artificial Sequence
  Synthetic
cttttcagccagugagaggguag

SEQ ID NO: 20051 - DNA, 23 bp, Artificial Sequence
  Synthetic
cgtcagaccutagaacugaggga

SEQ ID NO: 20052 - DNA, 30 bp, Artificial Sequence
  Synthetic
agcggaaaaagagaauatgaagatgagaut

SEQ ID NO: 20053 - DNA, 23 bp, Artificial Sequence
  Synthetic
ccagttgauggccttgtuagcat

SEQ ID NO: 20054 - DNA, 23 bp, Artificial Sequence
  Synthetic
ctttggtttugagtctgcugcaa

SEQ ID NO: 20055 - DNA, 25 bp, Artificial Sequence
  Synthetic
agatagtgaggucattgaaccucct

SEQ ID NO: 20056 - DNA, 28 bp, Artificial Sequence
  Synthetic
catctaccacuttagcagagagugaaaa

SEQ ID NO: 20057 - DNA, 22 bp, Artificial Sequence
  Synthetic
tccugcaggccaactgaaauac

SEQ ID NO: 20058 - DNA, 26 bp, Artificial Sequence
  Synthetic
gggtgactaauttctactggtuccaa

SEQ ID NO: 20059 - DNA, 22 bp, Artificial Sequence
  Synthetic
ccactactutgagcagcuccat

SEQ ID NO: 20060 - DNA, 30 bp, Artificial Sequence
  Synthetic
ttcttctcatcaucacctttatctgcatut

SEQ ID NO: 20061 - DNA, 28 bp, Artificial Sequence
  Synthetic
cggtattcugccaaaaccaaatctttua

SEQ ID NO: 20062 - DNA, 29 bp, Artificial Sequence
  Synthetic
cagtcatatctcacuaaactgtccttuga

SEQ ID NO: 20063 - DNA, 25 bp, Artificial Sequence
  Synthetic
agccaggacugtagcttuaaaaaca

SEQ ID NO: 20064 - DNA, 28 bp, Artificial Sequence
  Synthetic
agaagaatctcuccatttttgcagagut

SEQ ID NO: 20065 - DNA, 28 bp, Artificial Sequence
  Synthetic
acagcttgtatgucaatggatactctug

SEQ ID NO: 20066 - DNA, 21 bp, Artificial Sequence
  Synthetic
caggtctcugcgtgttucaag

SEQ ID NO: 20067 - DNA, 27 bp, Artificial Sequence
  Synthetic
atgatggccaacaaguaccaagataut

SEQ ID NO: 20068 - DNA, 26 bp, Artificial Sequence
  Synthetic
aaataatgaagtgugaggctgcctua

SEQ ID NO: 20069 - DNA, 30 bp, Artificial Sequence
  Synthetic
ggtttataatgaugcacatatccuggagaa

SEQ ID NO: 20070 - DNA, 23 bp, Artificial Sequence
  Synthetic
gtcacaaagucttctgccugaac

SEQ ID NO: 20071 - DNA, 31 bp, Artificial Sequence
  Synthetic
tttgtggtcatccguatattaagaaaacuga

SEQ ID NO: 20072 - DNA, 31 bp, Artificial Sequence
  Synthetic
tggcattttcaaacautaaattcagaucaca

SEQ ID NO: 20073 - DNA, 25 bp, Artificial Sequence
  Synthetic
agtgcttgucaagattttgcatugg

SEQ ID NO: 20074 - DNA, 25 bp, Artificial Sequence
  Synthetic
actaagaaggcauttcgctagucaa

SEQ ID NO: 20075 - DNA, 26 bp, Artificial Sequence
  Synthetic
acatccttcccugtctaattgcttut

SEQ ID NO: 20076 - DNA, 30 bp, Artificial Sequence
  Synthetic
catttcatgatgtucaatttcagcctttut

SEQ ID NO: 20077 - DNA, 21 bp, Artificial Sequence
  Synthetic
tgccatagaaggugcccatug

SEQ ID NO: 20078 - DNA, 27 bp, Artificial Sequence
  Synthetic
actgacatguacctgtttttaacugca

SEQ ID NO: 20079 - DNA, 24 bp, Artificial Sequence
  Synthetic
ccagtcttcuccagcttactugaa

SEQ ID NO: 20080 - DNA, 31 bp, Artificial Sequence
  Synthetic
tggtatcttccaatuggtatctttccaaaut

SEQ ID NO: 20081 - DNA, 22 bp, Artificial Sequence
  Synthetic
tggtttcucagcccattgacut

SEQ ID NO: 20082 - DNA, 24 bp, Artificial Sequence
  Synthetic
agagcagguagaaaccaugtaauc

SEQ ID NO: 20083 - DNA, 21 bp, Artificial Sequence
  Synthetic
aagaagagcuacctcccctuc

SEQ ID NO: 20084 - DNA, 28 bp, Artificial Sequence
  Synthetic
guttttatttcagttaauggccagccaa

SEQ ID NO: 20085 - DNA, 20 bp, Artificial Sequence
  Synthetic
ggttcuccaggtggtuccaa

SEQ ID NO: 20086 - DNA, 26 bp, Artificial Sequence
  Synthetic
gaaggcctugtgttggatacuaaact

SEQ ID NO: 20087 - DNA, 22 bp, Artificial Sequence
  Synthetic
cctgtatatgguggctgctgug

SEQ ID NO: 20088 - DNA, 25 bp, Artificial Sequence
  Synthetic
ttgcctttucagcaagctataguca

SEQ ID NO: 20089 - DNA, 20 bp, Artificial Sequence
  Synthetic
ctgagcaggcagutgtugag

SEQ ID NO: 20090 - DNA, 22 bp, Artificial Sequence
  Synthetic
cctaatccutatgcgcguaacc

SEQ ID NO: 20091 - DNA, 20 bp, Artificial Sequence
  Synthetic
ggaguctttugggaggccaa

SEQ ID NO: 20092 - DNA, 22 bp, Artificial Sequence
  Synthetic
ccuagacaaagcagugaggcat

SEQ ID NO: 20093 - DNA, 22 bp, Artificial Sequence
  Synthetic
gaagagccuggagacugaacac

SEQ ID NO: 20094 - DNA, 24 bp, Artificial Sequence
  Synthetic
gaaguccagccgaacatagaugat

SEQ ID NO: 20095 - DNA, 21 bp, Artificial Sequence
  Synthetic
ggtgagtcuaggctcccaugt

SEQ ID NO: 20096 - DNA, 28 bp, Artificial Sequence
  Synthetic
aatgaacacaccccauctataaagacug

SEQ ID NO: 20097 - DNA, 19 bp, Artificial Sequence
  Synthetic
ctcttuggcggguggaaga

SEQ ID NO: 20098 - DNA, 26 bp, Artificial Sequence
  Synthetic
agaacggauggaggatattccacuat

SEQ ID NO: 20099 - DNA, 23 bp, Artificial Sequence
  Synthetic
tgacccgagucattgaagtcuct

SEQ ID NO: 20100 - DNA, 23 bp, Artificial Sequence
  Synthetic
agcacatgggugtagactgttuc

SEQ ID NO: 20101 - DNA, 27 bp, Artificial Sequence
  Synthetic
ttgttgtgactutgaactgctacuact

SEQ ID NO: 20102 - DNA, 18 bp, Artificial Sequence
  Synthetic
acctcggccgucacctua

SEQ ID NO: 20103 - DNA, 21 bp, Artificial Sequence
  Synthetic
gtttctgcucctgttgctugg

SEQ ID NO: 20104 - DNA, 23 bp, Artificial Sequence
  Synthetic
gcaagaaaauaccccctccauca

SEQ ID NO: 20105 - DNA, 24 bp, Artificial Sequence
  Synthetic
cggttgccuactggttcaatuact

SEQ ID NO: 20106 - DNA, 30 bp, Artificial Sequence
  Synthetic
gcaatgtatgtcuatcctccaaatguagaa

SEQ ID NO: 20107 - DNA, 23 bp, Artificial Sequence
  Synthetic
tagacacagguagaagacugcac

SEQ ID NO: 20108 - DNA, 30 bp, Artificial Sequence
  Synthetic
ttaaaatgaaaaaccutacaggaaauggct

SEQ ID NO: 20109 - DNA, 25 bp, Artificial Sequence
  Synthetic
gcgtctggaauaagatggcattgua

SEQ ID NO: 20110 - DNA, 27 bp, Artificial Sequence
  Synthetic
gtatctaccauggaggagaaccctuat

SEQ ID NO: 20111 - DNA, 31 bp, Artificial Sequence
  Synthetic
ggatcatactgcuaaacactaatataaccut

SEQ ID NO: 20112 - DNA, 23 bp, Artificial Sequence
  Synthetic
tggccaguacctcatggatuaga

SEQ ID NO: 20113 - DNA, 25 bp, Artificial Sequence
  Synthetic
tggagttucctaagagauggaagaa

SEQ ID NO: 20114 - DNA, 32 bp, Artificial Sequence
  Synthetic
agtaacagactagcuagagacaatgaatuaag

SEQ ID NO: 20115 - DNA, 30 bp, Artificial Sequence
  Synthetic
cacttacctgtgacuccatagaaaatctut

SEQ ID NO: 20116 - DNA, 26 bp, Artificial Sequence
  Synthetic
cagtgtttuagatggctcatucacaa

SEQ ID NO: 20117 - DNA, 25 bp, Artificial Sequence
  Synthetic
gcaaaaccucgaaccataggatcug

SEQ ID NO: 20118 - DNA, 30 bp, Artificial Sequence
  Synthetic
ttaattttgcacgautcttttagatcugag

SEQ ID NO: 20119 - DNA, 22 bp, Artificial Sequence
  Synthetic
ccattgccucgacttgcctaut

SEQ ID NO: 20120 - DNA, 30 bp, Artificial Sequence
  Synthetic
aagcaaagguacctagtaaagttttuaact

SEQ ID NO: 20121 - DNA, 29 bp, Artificial Sequence
  Synthetic
aaagatgatctcautgttctgaaacagua

SEQ ID NO: 20122 - DNA, 28 bp, Artificial Sequence
  Synthetic
acactattaugcaaattcagugcaaagg

SEQ ID NO: 20123 - DNA, 25 bp, Artificial Sequence
  Synthetic
caaacaccgacagacucatcuaaca

SEQ ID NO: 20124 - DNA, 26 bp, Artificial Sequence
  Synthetic
tggacacuttttggaucacaagaaga

SEQ ID NO: 20125 - DNA, 28 bp, Artificial Sequence
  Synthetic
aaattctcttgtcuttgtgcattctugg

SEQ ID NO: 20126 - DNA, 25 bp, Artificial Sequence
  Synthetic
tgagcaagaggcuttggagtattuc

SEQ ID NO: 20127 - DNA, 31 bp, Artificial Sequence
  Synthetic
agagtgagctttcautttctcagttatctut

SEQ ID NO: 20128 - DNA, 17 bp, Artificial Sequence
  Synthetic
cgucaagcggcccauga

SEQ ID NO: 20129 - DNA, 23 bp, Artificial Sequence
  Synthetic
cgtcuccgacaaaagttuccact

SEQ ID NO: 20130 - DNA, 18 bp, Artificial Sequence
  Synthetic
cuggagcaacggcagcua

SEQ ID NO: 20131 - DNA, 20 bp, Artificial Sequence
  Synthetic
gcgagccgutcatgtagguc

SEQ ID NO: 20132 - DNA, 19 bp, Artificial Sequence
  Synthetic
ggccatuaacggcacacug

SEQ ID NO: 20133 - DNA, 21 bp, Artificial Sequence
  Synthetic
tttgagcguaccgggtttuct

SEQ ID NO: 20134 - DNA, 28 bp, Artificial Sequence
  Synthetic
ggaccutgtatagatcuggaggaaagaa

SEQ ID NO: 20135 - DNA, 29 bp, Artificial Sequence
  Synthetic
gtcgcttggagacuagctctaaatatuat

SEQ ID NO: 20136 - DNA, 26 bp, Artificial Sequence
  Synthetic
gagaggcttcutgctgaattttgaut

SEQ ID NO: 20137 - DNA, 29 bp, Artificial Sequence
  Synthetic
gagatggttcgccaguacttattctaaut

SEQ ID NO: 20138 - DNA, 24 bp, Artificial Sequence
  Synthetic
cttttgttcgaucccaacttucca

SEQ ID NO: 20139 - DNA, 30 bp, Artificial Sequence
  Synthetic
tacagagccgaaucttttaaaatacaacua

SEQ ID NO: 20140 - DNA, 26 bp, Artificial Sequence
  Synthetic
tgaataguccaagtagcuagagccaa

SEQ ID NO: 20141 - DNA, 24 bp, Artificial Sequence
  Synthetic
gtctccttuccgacatgtcttcug

SEQ ID NO: 20142 - DNA, 24 bp, Artificial Sequence
  Synthetic
acgtaattggaaucagtgcucacc

SEQ ID NO: 20143 - DNA, 22 bp, Artificial Sequence
  Synthetic
tcgctggucagttcgtgatuaa

SEQ ID NO: 20144 - DNA, 20 bp, Artificial Sequence
  Synthetic
cccacaagcucgtguccaat

SEQ ID NO: 20145 - DNA, 28 bp, Artificial Sequence
  Synthetic
acctttcctcagguaaagctaactttut

SEQ ID NO: 20146 - DNA, 25 bp, Artificial Sequence
  Synthetic
accgttctuccctaatcauaaaacc

SEQ ID NO: 20147 - DNA, 25 bp, Artificial Sequence
  Synthetic
tccttcaaucacactcagttuccac

SEQ ID NO: 20148 - DNA, 26 bp, Artificial Sequence
  Synthetic
attcaauagggaagagtctcaugcac

SEQ ID NO: 20149 - DNA, 28 bp, Artificial Sequence
  Synthetic
ggtgatcatagutgataagaacgguaga

SEQ ID NO: 20150 - DNA, 17 bp, Artificial Sequence
  Synthetic
acagcagcuggcacuca

SEQ ID NO: 20151 - DNA, 20 bp, Artificial Sequence
  Synthetic
gaguctccagugagggagga

SEQ ID NO: 20152 - DNA, 20 bp, Artificial Sequence
  Synthetic
gccgcaggautccagaucag

SEQ ID NO: 20153 - DNA, 17 bp, Artificial Sequence
  Synthetic
ggccccaucaccuccat

SEQ ID NO: 20154 - DNA, 17 bp, Artificial Sequence
  Synthetic
cgcgcguacctggacuc

SEQ ID NO: 20155 - DNA, 19 bp, Artificial Sequence
  Synthetic
gcauccgcaccacttucac

SEQ ID NO: 20156 - DNA, 23 bp, Artificial Sequence
  Synthetic
tgcaggaacugaagtcagcauag

SEQ ID NO: 20157 - DNA, 28 bp, Artificial Sequence
  Synthetic
gagccatccagaaccutttcaatgtaua

SEQ ID NO: 20158 - DNA, 24 bp, Artificial Sequence
  Synthetic
tccttttctcugagatgcttuggg

SEQ ID NO: 20159 - DNA, 21 bp, Artificial Sequence
  Synthetic
caagtguacaaccctgtgugg

SEQ ID NO: 20160 - DNA, 19 bp, Artificial Sequence
  Synthetic
tggtaccugcctccuacga

SEQ ID NO: 20161 - DNA, 32 bp, Artificial Sequence
  Synthetic
tgttactcttattuaaagaaggaaggagauga

SEQ ID NO: 20162 - DNA, 27 bp, Artificial Sequence
  Synthetic
ccatccatcaaautggtgtacacttug

SEQ ID NO: 20163 - DNA, 27 bp, Artificial Sequence
  Synthetic
gacaacugacatttuagaaagcggaat

SEQ ID NO: 20164 - DNA, 23 bp, Artificial Sequence
  Synthetic
cugatccgtgcuaaggaagaaga

SEQ ID NO: 20165 - DNA, 25 bp, Artificial Sequence
  Synthetic
ctttcctuggaagacactcatcuac

SEQ ID NO: 20166 - DNA, 20 bp, Artificial Sequence
  Synthetic
gagauccacucccgagacag

SEQ ID NO: 20167 - DNA, 23 bp, Artificial Sequence
  Synthetic
tgtcctgacugttgaggaacuca

SEQ ID NO: 20168 - DNA, 19 bp, Artificial Sequence
  Synthetic
cagagagcuggctacggug

SEQ ID NO: 20169 - DNA, 24 bp, Artificial Sequence
  Synthetic
tcactgcaacuttcatgacaggut

SEQ ID NO: 20170 - DNA, 30 bp, Artificial Sequence
  Synthetic
cttttctgttctucattttcatacccauct

SEQ ID NO: 20171 - DNA, 23 bp, Artificial Sequence
  Synthetic
cagctctttcuttggcttctcug

SEQ ID NO: 20172 - DNA, 22 bp, Artificial Sequence
  Synthetic
gcaacctgaugatttcctgcug

SEQ ID NO: 20173 - DNA, 26 bp, Artificial Sequence
  Synthetic
caacttgauaggtgaagcucaacaaa

SEQ ID NO: 20174 - DNA, 23 bp, Artificial Sequence
  Synthetic
ggtttaactguctccctcctucc

SEQ ID NO: 20175 - DNA, 20 bp, Artificial Sequence
  Synthetic
cagcaatgucaggcccauac

SEQ ID NO: 20176 - DNA, 30 bp, Artificial Sequence
  Synthetic
attcatttttgagguttggttgtuaacact

SEQ ID NO: 20177 - DNA, 25 bp, Artificial Sequence
  Synthetic
cctcguttttgtaggugacaccaat

SEQ ID NO: 20178 - DNA, 22 bp, Artificial Sequence
  Synthetic
gttccagcagutccacctucat

SEQ ID NO: 20179 - DNA, 20 bp, Artificial Sequence
  Synthetic
ggaaggaaccccucgaaucc

SEQ ID NO: 20180 - DNA, 25 bp, Artificial Sequence
  Synthetic
cctgtaugaagggaagccagaauag

SEQ ID NO: 20181 - DNA, 26 bp, Artificial Sequence
  Synthetic
tccattagccutttggtcttgttuca

SEQ ID NO: 20182 - DNA, 27 bp, Artificial Sequence
  Synthetic
ctaatgcctaauggtgctacagttuct

SEQ ID NO: 20183 - DNA, 25 bp, Artificial Sequence
  Synthetic
caggacaacucattagtagccugac

SEQ ID NO: 20184 - DNA, 25 bp, Artificial Sequence
  Synthetic
gcccatcucctgcagaaaauaacat

SEQ ID NO: 20185 - DNA, 23 bp, Artificial Sequence
  Synthetic
agtgaacacugagctttgctuga

SEQ ID NO: 20186 - DNA, 23 bp, Artificial Sequence
  Synthetic
catacagacugcagggacaauga

SEQ ID NO: 20187 - DNA, 24 bp, Artificial Sequence
  Synthetic
tgtctcgacccutcagaatctcut

SEQ ID NO: 20188 - DNA, 26 bp, Artificial Sequence
  Synthetic
caagttgaaatgaaucaagggcaguc

SEQ ID NO: 20189 - DNA, 25 bp, Artificial Sequence
  Synthetic
gtttgggaauctgctctttgtugaa

SEQ ID NO: 20190 - DNA, 25 bp, Artificial Sequence
  Synthetic
ctttggccagacuaaaguggaagaa

SEQ ID NO: 20191 - DNA, 28 bp, Artificial Sequence
  Synthetic
cctgtattttgcaugcacttgattucat

SEQ ID NO: 20192 - DNA, 28 bp, Artificial Sequence
  Synthetic
tccaaauaatgtgaucccaaagcaagat

SEQ ID NO: 20193 - DNA, 28 bp, Artificial Sequence
  Synthetic
catggttatgtaucaagtacctttgcug

SEQ ID NO: 20194 - DNA, 26 bp, Artificial Sequence
  Synthetic
aggtaacuaagcaagagaauccacct

SEQ ID NO: 20195 - DNA, 26 bp, Artificial Sequence
  Synthetic
tggccctgacauttcaacttttacut

SEQ ID NO: 20196 - DNA, 27 bp, Artificial Sequence
  Synthetic
agacacatggcguttatccagaatuag

SEQ ID NO: 20197 - DNA, 27 bp, Artificial Sequence
  Synthetic
aagugaagttctcttucacaagacaca

SEQ ID NO: 20198 - DNA, 18 bp, Artificial Sequence
  Synthetic
cccgugccatgtttuccc

SEQ ID NO: 20199 - DNA, 28 bp, Artificial Sequence
  Synthetic
gaagagugaagacgattacaactuacca

SEQ ID NO: 20200 - DNA, 26 bp, Artificial Sequence
  Synthetic
gtggcagcuattagagaaatcaugga

SEQ ID NO: 20201 - DNA, 25 bp, Artificial Sequence
  Synthetic
ggcaacccuagaatagctaagccua

SEQ ID NO: 20202 - DNA, 25 bp, Artificial Sequence
  Synthetic
gggtgccttutcattaagagguagg

SEQ ID NO: 20203 - DNA, 23 bp, Artificial Sequence
  Synthetic
actatttcugccaggccacuaga

SEQ ID NO: 20204 - DNA, 28 bp, Artificial Sequence
  Synthetic
gacagaaggguaaagctattaggatuga

SEQ ID NO: 20205 - DNA, 23 bp, Artificial Sequence
  Synthetic
ggtaacccaautctcagggucag

SEQ ID NO: 20206 - DNA, 28 bp, Artificial Sequence
  Synthetic
gcaccatatatugtgtttgggatucaaa

SEQ ID NO: 20207 - DNA, 22 bp, Artificial Sequence
  Synthetic
gttggugccataagaguggaca

SEQ ID NO: 20208 - DNA, 24 bp, Artificial Sequence
  Synthetic
gcgaaaagucaggatgtuagcaga

SEQ ID NO: 20209 - DNA, 27 bp, Artificial Sequence
  Synthetic
cgttttcagttugttttgtacgtgaug

SEQ ID NO: 20210 - DNA, 22 bp, Artificial Sequence
  Synthetic
ccacaucacccucagacagagt

SEQ ID NO: 20211 - DNA, 24 bp, Artificial Sequence
  Synthetic
gcagcttgagaugaggtggaauag

SEQ ID NO: 20212 - DNA, 27 bp, Artificial Sequence
  Synthetic
ttauggaaaccaaaataugcagggaga

SEQ ID NO: 20213 - DNA, 24 bp, Artificial Sequence
  Synthetic
ccatgtttggautgctcagatugg

SEQ ID NO: 20214 - DNA, 24 bp, Artificial Sequence
  Synthetic
gaugctaatggucaggaaaagcag

SEQ ID NO: 20215 - DNA, 25 bp, Artificial Sequence
  Synthetic
aatgagaatugacccatgagtugga

SEQ ID NO: 20216 - DNA, 21 bp, Artificial Sequence
  Synthetic
cccacttaccugcgtttcauc

SEQ ID NO: 20217 - DNA, 28 bp, Artificial Sequence
  Synthetic
gtctttucaagtgagguaaccaacaaaa

SEQ ID NO: 20218 - DNA, 24 bp, Artificial Sequence
  Synthetic
caactgttgcauggtagcagatut

SEQ ID NO: 20219 - DNA, 27 bp, Artificial Sequence
  Synthetic
ctactaaggacccuttattcacaguca

SEQ ID NO: 20220 - DNA, 31 bp, Artificial Sequence
  Synthetic
tcaactatccaaautaaatacaatgguggga

SEQ ID NO: 20221 - DNA, 21 bp, Artificial Sequence
  Synthetic
gccctcuagcagtctggtuac

SEQ ID NO: 20222 - DNA, 27 bp, Artificial Sequence
  Synthetic
ggaagtagtcgcutactcatttctcut

SEQ ID NO: 20223 - DNA, 30 bp, Artificial Sequence
  Synthetic
gagagagctugaagaaatgtttuaacaaat

SEQ ID NO: 20224 - DNA, 26 bp, Artificial Sequence
  Synthetic
gtgtgatgtaauaggtttcagugcag

SEQ ID NO: 20225 - DNA, 27 bp, Artificial Sequence
  Synthetic
aatccaggucttccatatuccaaacag

SEQ ID NO: 20226 - DNA, 25 bp, Artificial Sequence
  Synthetic
gagatgggaaauatggcttctcuga

SEQ ID NO: 20227 - DNA, 30 bp, Artificial Sequence
  Synthetic
cctgttggtattuggatactggataaagua

SEQ ID NO: 20228 - DNA, 29 bp, Artificial Sequence
  Synthetic
cttgcaguaagagattgttctaugaaagg

SEQ ID NO: 20229 - DNA, 24 bp, Artificial Sequence
  Synthetic
gtattctttgcugtaccgctctug

SEQ ID NO: 20230 - DNA, 24 bp, Artificial Sequence
  Synthetic
attggtgautgctacaatucagga

SEQ ID NO: 20231 - DNA, 32 bp, Artificial Sequence
  Synthetic
tcttctgctatcaccauctttagtaactacut

SEQ ID NO: 20232 - DNA, 22 bp, Artificial Sequence
  Synthetic
gcttugccgagccctataacut

SEQ ID NO: 20233 - DNA, 25 bp, Artificial Sequence
  Synthetic
aggatcaaagaguaagcgcttcauc

SEQ ID NO: 20234 - DNA, 24 bp, Artificial Sequence
  Synthetic
cctacaggaagcuatcctctgcut

SEQ ID NO: 20235 - DNA, 22 bp, Artificial Sequence
  Synthetic
ctcctcaaccauctcctgugac

SEQ ID NO: 20236 - DNA, 21 bp, Artificial Sequence
  Synthetic
gcagtauagaggacggagcug

SEQ ID NO: 20237 - DNA, 21 bp, Artificial Sequence
  Synthetic
cagaaguaccagcagguggat

SEQ ID NO: 20238 - DNA, 19 bp, Artificial Sequence
  Synthetic
aatctgtucctgcggucac

SEQ ID NO: 20239 - DNA, 20 bp, Artificial Sequence
  Synthetic
cggcuaggaacgtgctcauc

SEQ ID NO: 20240 - DNA, 21 bp, Artificial Sequence
  Synthetic
atgtgaagagcaucagccugt

SEQ ID NO: 20241 - DNA, 27 bp, Artificial Sequence
  Synthetic
tggacaugaaaggagaugtcaaataug

SEQ ID NO: 20242 - DNA, 19 bp, Artificial Sequence
  Synthetic
ccttggtggugggcactut

SEQ ID NO: 20243 - DNA, 26 bp, Artificial Sequence
  Synthetic
cttatgtcggagcugaagatcaugag

SEQ ID NO: 20244 - DNA, 20 bp, Artificial Sequence
  Synthetic
agctcccacguggagtcaua

SEQ ID NO: 20245 - DNA, 22 bp, Artificial Sequence
  Synthetic
ggcctgagacuccctctgauaa

SEQ ID NO: 20246 - DNA, 21 bp, Artificial Sequence
  Synthetic
tgtgcucaccacctcaaacuc

SEQ ID NO: 20247 - DNA, 18 bp, Artificial Sequence
  Synthetic
gcuggcagccaacccuac

SEQ ID NO: 20248 - DNA, 20 bp, Artificial Sequence
  Synthetic
gtgcggutgtcttugaacca

SEQ ID NO: 20249 - DNA, 17 bp, Artificial Sequence
  Synthetic
cctgacggucaccccut

SEQ ID NO: 20250 - DNA, 23 bp, Artificial Sequence
  Synthetic
ccacctcatucccgatcacaaug

SEQ ID NO: 20251 - DNA, 21 bp, Artificial Sequence
  Synthetic
gctgaagugctagtggcuggt

SEQ ID NO: 20252 - DNA, 22 bp, Artificial Sequence
  Synthetic
ctgatgccuccagtugacaaga

SEQ ID NO: 20253 - DNA, 21 bp, Artificial Sequence
  Synthetic
tcacacugaccaacctcacug

SEQ ID NO: 20254 - DNA, 21 bp, Artificial Sequence
  Synthetic
caaaguttcagugcgacgaga

SEQ ID NO: 20255 - DNA, 19 bp, Artificial Sequence
  Synthetic
ggtcgaugccgaagcugat

SEQ ID NO: 20256 - DNA, 17 bp, Artificial Sequence
  Synthetic
gggcccucctgtgtcuc

SEQ ID NO: 20257 - DNA, 18 bp, Artificial Sequence
  Synthetic
ggcgauggaagcgcttut

SEQ ID NO: 20258 - DNA, 19 bp, Artificial Sequence
  Synthetic
gccucaacgactccaucca

SEQ ID NO: 20259 - DNA, 17 bp, Artificial Sequence
  Synthetic
tggugggcucacaccag

SEQ ID NO: 20260 - DNA, 26 bp, Artificial Sequence
  Synthetic
aaaggccgacaaagautatcacttua

SEQ ID NO: 20261 - DNA, 29 bp, Artificial Sequence
  Synthetic
tagaaactaaaaggcugaaatcaaguagg

SEQ ID NO: 20262 - DNA, 25 bp, Artificial Sequence
  Synthetic
ctttgaaauaacaccaccagtgguc

SEQ ID NO: 20263 - DNA, 23 bp, Artificial Sequence
  Synthetic
agcaacugcacuaaagaggacaa

SEQ ID NO: 20264 - DNA, 22 bp, Artificial Sequence
  Synthetic
gggucagggacagtgatuaaga

SEQ ID NO: 20265 - DNA, 24 bp, Artificial Sequence
  Synthetic
cccacgtguaaatgtagccactua

SEQ ID NO: 20266 - DNA, 31 bp, Artificial Sequence
  Synthetic
gaattttctaaagguatctctctcggtguat

SEQ ID NO: 20267 - DNA, 26 bp, Artificial Sequence
  Synthetic
atcatguccccagaaaatccagtuac

SEQ ID NO: 20268 - DNA, 24 bp, Artificial Sequence
  Synthetic
gatggaucagacctgtgaacuacc

SEQ ID NO: 20269 - DNA, 24 bp, Artificial Sequence
  Synthetic
ccactgacagucgataactgcaua

SEQ ID NO: 20270 - DNA, 27 bp, Artificial Sequence
  Synthetic
actatcaagaauggctttctgcactut

SEQ ID NO: 20271 - DNA, 24 bp, Artificial Sequence
  Synthetic
agtctcataatugcaggtggcaut

SEQ ID NO: 20272 - DNA, 27 bp, Artificial Sequence
  Synthetic
ccagattccaguaccagtacatuagga

SEQ ID NO: 20273 - DNA, 23 bp, Artificial Sequence
  Synthetic
aagtttccctutaagtggccugt

SEQ ID NO: 20274 - DNA, 23 bp, Artificial Sequence
  Synthetic
caaucgtcatgttugaaggcaga

SEQ ID NO: 20275 - DNA, 29 bp, Artificial Sequence
  Synthetic
ggccattttctutctttttcttactugct

SEQ ID NO: 20276 - DNA, 28 bp, Artificial Sequence
  Synthetic
agctctgataauccaaaaaggactagug

SEQ ID NO: 20277 - DNA, 27 bp, Artificial Sequence
  Synthetic
ggctatttgcuatcctggaaagtucat

SEQ ID NO: 20278 - DNA, 24 bp, Artificial Sequence
  Synthetic
cccatagaacacagcucagaguct

SEQ ID NO: 20279 - DNA, 26 bp, Artificial Sequence
  Synthetic
cttctgttttgcutttaccctagugt

SEQ ID NO: 20280 - DNA, 28 bp, Artificial Sequence
  Synthetic
ttccgaaguataaagugcaaacacaaag

SEQ ID NO: 20281 - DNA, 26 bp, Artificial Sequence
  Synthetic
gtagtttuagaccatccacttuccca

SEQ ID NO: 20282 - DNA, 23 bp, Artificial Sequence
  Synthetic
gatgactgcucaaaacctgguct

SEQ ID NO: 20283 - DNA, 21 bp, Artificial Sequence
  Synthetic
ctaggatuggcggagttcuga

SEQ ID NO: 20284 - DNA, 25 bp, Artificial Sequence
  Synthetic
gggcagaagaucctaguaaagagga

SEQ ID NO: 20285 - DNA, 21 bp, Artificial Sequence
  Synthetic
tctgggccutttccgtttuca

SEQ ID NO: 20286 - DNA, 29 bp, Artificial Sequence
  Synthetic
acggttaaatgttugtgataaatccagug

SEQ ID NO: 20287 - DNA, 28 bp, Artificial Sequence
  Synthetic
tcagaaggacaaugtttatcagcactut

SEQ ID NO: 20288 - DNA, 23 bp, Artificial Sequence
  Synthetic
ggtcgauctagtgcucagaacaa

SEQ ID NO: 20289 - DNA, 21 bp, Artificial Sequence
  Synthetic
gcaactcagcaugtccaccuc

SEQ ID NO: 20290 - DNA, 28 bp, Artificial Sequence
  Synthetic
cattcctctguaaatggtgttgtttuca

SEQ ID NO: 20291 - DNA, 28 bp, Artificial Sequence
  Synthetic
cacttcaaacttacuactgcattacgut

SEQ ID NO: 20292 - DNA, 23 bp, Artificial Sequence
  Synthetic
ggagaacuaatgccucacaggac

SEQ ID NO: 20293 - DNA, 23 bp, Artificial Sequence
  Synthetic
cacaagugggcaaacatttcuct

SEQ ID NO: 20294 - DNA, 21 bp, Artificial Sequence
  Synthetic
ggtgctcccuccacatctgua

SEQ ID NO: 20295 - DNA, 30 bp, Artificial Sequence
  Synthetic
gaaaatatctgtugccaattaaacugaggt

SEQ ID NO: 20296 - DNA, 26 bp, Artificial Sequence
  Synthetic
tggatgtacacauacatgactugcag

SEQ ID NO: 20297 - DNA, 25 bp, Artificial Sequence
  Synthetic
ctgctttacagucattgcaauacca

SEQ ID NO: 20298 - DNA, 28 bp, Artificial Sequence
  Synthetic
gcaaaggaguggatgggacatauaaaaa

SEQ ID NO: 20299 - DNA, 23 bp, Artificial Sequence
  Synthetic
aaggcaguttcaaaauggagcat

SEQ ID NO: 20300 - DNA, 22 bp, Artificial Sequence
  Synthetic
ctttuccaagcgccaataucca

SEQ ID NO: 20301 - DNA, 28 bp, Artificial Sequence
  Synthetic
tgtcaaggaucaatgataucaagcaact

SEQ ID NO: 20302 - DNA, 24 bp, Artificial Sequence
  Synthetic
ccaactgugaaacacagaaguggt

SEQ ID NO: 20303 - DNA, 25 bp, Artificial Sequence
  Synthetic
caaaagcccugaaattcagatguca

SEQ ID NO: 20304 - DNA, 24 bp, Artificial Sequence
  Synthetic
aucacaaaggagugagaagaugag

SEQ ID NO: 20305 - DNA, 22 bp, Artificial Sequence
  Synthetic
atggagagaacgaguagcggua

SEQ ID NO: 20306 - DNA, 22 bp, Artificial Sequence
  Synthetic
agagcaaucaacaggaauggct

SEQ ID NO: 20307 - DNA, 26 bp, Artificial Sequence
  Synthetic
agtcagttctcucaagaggtcttuca

SEQ ID NO: 20308 - DNA, 23 bp, Artificial Sequence
  Synthetic
ggataaatccauaggtgcugcca

SEQ ID NO: 20309 - DNA, 22 bp, Artificial Sequence
  Synthetic
tcagtaggccugtctgaaguct

SEQ ID NO: 20310 - DNA, 21 bp, Artificial Sequence
  Synthetic
gcataugccgagagctgtuga

SEQ ID NO: 20311 - DNA, 25 bp, Artificial Sequence
  Synthetic
tcatauaaaaaggcctuggcaggag

SEQ ID NO: 20312 - DNA, 21 bp, Artificial Sequence
  Synthetic
ccugggaaaagcctcaucacg

SEQ ID NO: 20313 - DNA, 26 bp, Artificial Sequence
  Synthetic
ctggaagtgtautttgctctggttug

SEQ ID NO: 20314 - DNA, 24 bp, Artificial Sequence
  Synthetic
caggttttcttuccctagctccuc

SEQ ID NO: 20315 - DNA, 20 bp, Artificial Sequence
  Synthetic
actgcacugtactccucggt

SEQ ID NO: 20316 - DNA, 23 bp, Artificial Sequence
  Synthetic
tgcaggaacaaautctccaggut

SEQ ID NO: 20317 - DNA, 21 bp, Artificial Sequence
  Synthetic
cagaccccugtgatgctgtua

SEQ ID NO: 20318 - DNA, 23 bp, Artificial Sequence
  Synthetic
tcgagttcttuctgcagagctut

SEQ ID NO: 20319 - DNA, 21 bp, Artificial Sequence
  Synthetic
aggcagaggcacutcuacaga

SEQ ID NO: 20320 - DNA, 18 bp, Artificial Sequence
  Synthetic
gcacuagccccacuccaa

SEQ ID NO: 20321 - DNA, 18 bp, Artificial Sequence
  Synthetic
cuggagggccaggaaucg

SEQ ID NO: 20322 - DNA, 24 bp, Artificial Sequence
  Synthetic
gcttttggcuactatggaccacuc

SEQ ID NO: 20323 - DNA, 27 bp, Artificial Sequence
  Synthetic
acaagcaacacauttttatcagcguaa

SEQ ID NO: 20324 - DNA, 26 bp, Artificial Sequence
  Synthetic
tgcttgttuaggtccctttcuagaga

SEQ ID NO: 20325 - DNA, 25 bp, Artificial Sequence
  Synthetic
aagacaggccutagcatactatgua

SEQ ID NO: 20326 - DNA, 20 bp, Artificial Sequence
  Synthetic
gctcggtcuactcaggcauc

SEQ ID NO: 20327 - DNA, 19 bp, Artificial Sequence
  Synthetic
ccagggtcuccgtcaggut

SEQ ID NO: 20328 - DNA, 20 bp, Artificial Sequence
  Synthetic
ccggugcaagatctctucga

SEQ ID NO: 20329 - DNA, 19 bp, Artificial Sequence
  Synthetic
gccgcgautgaggtcgaua

SEQ ID NO: 20330 - DNA, 21 bp, Artificial Sequence
  Synthetic
gugggcctcugagaagcaaat

SEQ ID NO: 20331 - DNA, 25 bp, Artificial Sequence
  Synthetic
tggttctggatutcttcgaaggtug

SEQ ID NO: 20332 - DNA, 19 bp, Artificial Sequence
  Synthetic
gccagggucacagcacauc

SEQ ID NO: 20333 - DNA, 22 bp, Artificial Sequence
  Synthetic
gaaggatcuggacctcatgcuc

SEQ ID NO: 20334 - DNA, 19 bp, Artificial Sequence
  Synthetic
cctcttcgcuaggcagcuc

SEQ ID NO: 20335 - DNA, 20 bp, Artificial Sequence
  Synthetic
tggtgcccauaggtgtgtuc

SEQ ID NO: 20336 - DNA, 21 bp, Artificial Sequence
  Synthetic
agggaggagucgggtatucaa

SEQ ID NO: 20337 - DNA, 21 bp, Artificial Sequence
  Synthetic
ccugaatgtguacagcagcga

SEQ ID NO: 20338 - DNA, 20 bp, Artificial Sequence
  Synthetic
ggctatugggagcactgtug

SEQ ID NO: 20339 - DNA, 19 bp, Artificial Sequence
  Synthetic
cgggaguacctguccgaga

SEQ ID NO: 20340 - DNA, 24 bp, Artificial Sequence
  Synthetic
catgtaatgcaugacagcctgtug

SEQ ID NO: 20341 - DNA, 20 bp, Artificial Sequence
  Synthetic
aggaggacacgugcctcaua

SEQ ID NO: 20342 - DNA, 22 bp, Artificial Sequence
  Synthetic
tcagattccugggagccuagag

SEQ ID NO: 20343 - DNA, 22 bp, Artificial Sequence
  Synthetic
caggtgaagauggcgatgugat

SEQ ID NO: 20344 - DNA, 25 bp, Artificial Sequence
  Synthetic
caagaggccuaagattgtatgugca

SEQ ID NO: 20345 - DNA, 23 bp, Artificial Sequence
  Synthetic
gtcatcagccutatccagcucat

SEQ ID NO: 20346 - DNA, 27 bp, Artificial Sequence
  Synthetic
gacuggtatagtcttucacggaaacaa

SEQ ID NO: 20347 - DNA, 29 bp, Artificial Sequence
  Synthetic
agtttctcttctutacagacctacuaggg

SEQ ID NO: 20348 - DNA, 28 bp, Artificial Sequence
  Synthetic
gctttacgcaaauaagtaagaaggtcuc

SEQ ID NO: 20349 - DNA, 25 bp, Artificial Sequence
  Synthetic
ctaggactccugcttctgtcatauc

SEQ ID NO: 20350 - DNA, 24 bp, Artificial Sequence
  Synthetic
ttgcctaggugctccataatgaug

SEQ ID NO: 20351 - DNA, 27 bp, Artificial Sequence
  Synthetic
ggugacagtgcttauaaacgaagacaa

SEQ ID NO: 20352 - DNA, 27 bp, Artificial Sequence
  Synthetic
caccaaacccuagattatttgcagcua

SEQ ID NO: 20353 - DNA, 28 bp, Artificial Sequence
  Synthetic
cagaaccagaatutaaggtggaagauga

SEQ ID NO: 20354 - DNA, 30 bp, Artificial Sequence
  Synthetic
aactgaaacacagagutttctgagtatuga

SEQ ID NO: 20355 - DNA, 28 bp, Artificial Sequence
  Synthetic
ggtcctgctuatgtctgtaataucacaa

SEQ ID NO: 20356 - DNA, 24 bp, Artificial Sequence
  Synthetic
ctaccutctgtagcucaacccaaa

SEQ ID NO: 20357 - DNA, 23 bp, Artificial Sequence
  Synthetic
ccactcugaggaaatgtggtgua

SEQ ID NO: 20358 - DNA, 24 bp, Artificial Sequence
  Synthetic
tttaggtccauttggcttgugaga

SEQ ID NO: 20359 - DNA, 28 bp, Artificial Sequence
  Synthetic
cccaaactccatuacttctttccatcut

SEQ ID NO: 20360 - DNA, 21 bp, Artificial Sequence
  Synthetic
gtagggcuggtgatgccauac

SEQ ID NO: 20361 - DNA, 27 bp, Artificial Sequence
  Synthetic
gataaagcgttuctgtctctagctuca

SEQ ID NO: 20362 - DNA, 25 bp, Artificial Sequence
  Synthetic
caggtacugtgataactcuccaaca

SEQ ID NO: 20363 - DNA, 31 bp, Artificial Sequence
  Synthetic
caaaaggaatcaaugttcttgtaatgugact

SEQ ID NO: 20364 - DNA, 30 bp, Artificial Sequence
  Synthetic
ccttgtgttcaagaucaacatcaaatacut

SEQ ID NO: 20365 - DNA, 22 bp, Artificial Sequence
  Synthetic
ccactctctucttggctgtgut

SEQ ID NO: 20366 - DNA, 29 bp, Artificial Sequence
  Synthetic
cacacacacacgccuctaaattattatut

SEQ ID NO: 20367 - DNA, 28 bp, Artificial Sequence
  Synthetic
ggagaacactacugaatgcaattttugt

SEQ ID NO: 20368 - DNA, 29 bp, Artificial Sequence
  Synthetic
ccattccagatcaugaaaagtgagatuct

SEQ ID NO: 20369 - DNA, 28 bp, Artificial Sequence
  Synthetic
tctttctgtcacuccttatacctacugg

SEQ ID NO: 20370 - DNA, 24 bp, Artificial Sequence
  Synthetic
ggagtaggguaagcaggaaugaaa

SEQ ID NO: 20371 - DNA, 19 bp, Artificial Sequence
  Synthetic
gtggucggctgttcuggat

SEQ ID NO: 20372 - DNA, 24 bp, Artificial Sequence
  Synthetic
aggagtcugctttaagtacucaca

SEQ ID NO: 20373 - DNA, 27 bp, Artificial Sequence
  Synthetic
gaaagutcccttgtacuacagacacag

SEQ ID NO: 20374 - DNA, 23 bp, Artificial Sequence
  Synthetic
gagatauccgtcccatucagcag

SEQ ID NO: 20375 - DNA, 24 bp, Artificial Sequence
  Synthetic
tgaggtgcagaugtgatttgtuga

SEQ ID NO: 20376 - DNA, 24 bp, Artificial Sequence
  Synthetic
gagaacutgctcucacagaaacct

SEQ ID NO: 20377 - DNA, 23 bp, Artificial Sequence
  Synthetic
ctttgaatuaggcccttcugcct

SEQ ID NO: 20378 - DNA, 28 bp, Artificial Sequence
  Synthetic
ccaaacccaaatucttctatgtgacuca

SEQ ID NO: 20379 - DNA, 22 bp, Artificial Sequence
  Synthetic
ccatctcatccuacctcgcauc

SEQ ID NO: 20380 - DNA, 22 bp, Artificial Sequence
  Synthetic
aggtgcacuaatagagggugga

SEQ ID NO: 20381 - DNA, 27 bp, Artificial Sequence
  Synthetic
gtacaatuccaacagaacagatacuca

SEQ ID NO: 20382 - DNA, 23 bp, Artificial Sequence
  Synthetic
caccctcatucctgtgtagcuaa

SEQ ID NO: 20383 - DNA, 25 bp, Artificial Sequence
  Synthetic
gtgaaacacguctctccaaattgut

SEQ ID NO: 20384 - DNA, 21 bp, Artificial Sequence
  Synthetic
cgcugtgaagauccaaaccac

SEQ ID NO: 20385 - DNA, 24 bp, Artificial Sequence
  Synthetic
gggtgctgautctataatgcugat

SEQ ID NO: 20386 - DNA, 26 bp, Artificial Sequence
  Synthetic
tgcaaaugggaatcctctuacacaaa

SEQ ID NO: 20387 - DNA, 28 bp, Artificial Sequence
  Synthetic
actcaccattguctgttattgtctctug

SEQ ID NO: 20388 - DNA, 30 bp, Artificial Sequence
  Synthetic
gcttcggaauaagacagtaaatgttctuca

SEQ ID NO: 20389 - DNA, 27 bp, Artificial Sequence
  Synthetic
aaacaaagcaaaauccatcagctacuc

SEQ ID NO: 20390 - DNA, 25 bp, Artificial Sequence
  Synthetic
ttgactttccutctcttctccucct

SEQ ID NO: 20391 - DNA, 24 bp, Artificial Sequence
  Synthetic
cggaatttaaagutgcgtgtguct

SEQ ID NO: 20392 - DNA, 24 bp, Artificial Sequence
  Synthetic
cctaagggccucattttccttuct

SEQ ID NO: 20393 - DNA, 23 bp, Artificial Sequence
  Synthetic
gctgtcauagccgagaacaaugg

SEQ ID NO: 20394 - DNA, 24 bp, Artificial Sequence
  Synthetic
tttccttttggucttcaggtugga

SEQ ID NO: 20395 - DNA, 22 bp, Artificial Sequence
  Synthetic
cggaaggtuccatgggattcug

SEQ ID NO: 20396 - DNA, 20 bp, Artificial Sequence
  Synthetic
ggagaagccuatgagcccut

SEQ ID NO: 20397 - DNA, 21 bp, Artificial Sequence
  Synthetic
tgtgctgcacautcagtguga

SEQ ID NO: 20398 - DNA, 21 bp, Artificial Sequence
  Synthetic
caccagcgutccaagucagat

SEQ ID NO: 20399 - DNA, 21 bp, Artificial Sequence
  Synthetic
gcttttcugcacttgctcguc

SEQ ID NO: 20400 - DNA, 23 bp, Artificial Sequence
  Synthetic
gatctgccugttctttccacuca

SEQ ID NO: 20401 - DNA, 20 bp, Artificial Sequence
  Synthetic
tggttgggaugctgacacuc

SEQ ID NO: 20402 - DNA, 17 bp, Artificial Sequence
  Synthetic
gcctcccugctggacut

SEQ ID NO: 20403 - DNA, 20 bp, Artificial Sequence
  Synthetic
ctgtcauccaacctggcuca

SEQ ID NO: 20404 - DNA, 26 bp, Artificial Sequence
  Synthetic
ctgaatattuaaaagcaacgcuggga

SEQ ID NO: 20405 - DNA, 23 bp, Artificial Sequence
  Synthetic
gacgataccccugaggagatuct

SEQ ID NO: 20406 - DNA, 19 bp, Artificial Sequence
  Synthetic
gctuggcaaagccgaaguc

SEQ ID NO: 20407 - DNA, 19 bp, Artificial Sequence
  Synthetic
cctcccuctcctgcucagt

SEQ ID NO: 20408 - DNA, 17 bp, Artificial Sequence
  Synthetic
cgcugcacucacacagg

SEQ ID NO: 20409 - DNA, 23 bp, Artificial Sequence
  Synthetic
ggcuacgagaucaaggaggacat

SEQ ID NO: 20410 - DNA, 21 bp, Artificial Sequence
  Synthetic
caccgauagagggaaccacug

SEQ ID NO: 20411 - DNA, 26 bp, Artificial Sequence
  Synthetic
gccctgtctugctttccttgtatuaa

SEQ ID NO: 20412 - DNA, 17 bp, Artificial Sequence
  Synthetic
gggcaggcucaccauga

SEQ ID NO: 20413 - DNA, 22 bp, Artificial Sequence
  Synthetic
gaguaaggaggccatugaccac

SEQ ID NO: 20414 - DNA, 23 bp, Artificial Sequence
  Synthetic
caggctguggagatggtcuaaag

SEQ ID NO: 20415 - DNA, 27 bp, Artificial Sequence
  Synthetic
acaccagccauaaaacaagtuaaacgt

SEQ ID NO: 20416 - DNA, 22 bp, Artificial Sequence
  Synthetic
tccaggtgucctttgtgtucag

SEQ ID NO: 20417 - DNA, 23 bp, Artificial Sequence
  Synthetic
atgugaaggagggcttugagaag

SEQ ID NO: 20418 - DNA, 19 bp, Artificial Sequence
  Synthetic
ccagcaacugtgcgatugg

SEQ ID NO: 20419 - DNA, 17 bp, Artificial Sequence
  Synthetic
ctctgcguccctuggct

SEQ ID NO: 20420 - DNA, 32 bp, Artificial Sequence
  Synthetic
cgataaaaccaattautccatacagtgacuac

SEQ ID NO: 20421 - DNA, 24 bp, Artificial Sequence
  Synthetic
agcgagaugaagaaactgaucacc

SEQ ID NO: 20422 - DNA, 28 bp, Artificial Sequence
  Synthetic
cacccagccgcuatagttctaattaaua

SEQ ID NO: 20423 - DNA, 30 bp, Artificial Sequence
  Synthetic
caggatatggttugaatcatttttgtgtut

SEQ ID NO: 20424 - DNA, 26 bp, Artificial Sequence
  Synthetic
ctgtaattctgtuccccttcacttug

SEQ ID NO: 20425 - DNA, 32 bp, Artificial Sequence
  Synthetic
ctcaggttgatguagctgtgaaaattaauaag

SEQ ID NO: 20426 - DNA, 26 bp, Artificial Sequence
  Synthetic
ccacatcugaaaaagagtcgtcagut

SEQ ID NO: 20427 - DNA, 20 bp, Artificial Sequence
  Synthetic
gcagcactuccgtggatuct

SEQ ID NO: 20428 - DNA, 21 bp, Artificial Sequence
  Synthetic
tcgcaguctggaaauggacac

SEQ ID NO: 20429 - DNA, 22 bp, Artificial Sequence
  Synthetic
aggatagtcccugaccctctuc

SEQ ID NO: 20430 - DNA, 29 bp, Artificial Sequence
  Synthetic
gtcaaaggcauaaagaacaaacuaacaca

SEQ ID NO: 20431 - DNA, 22 bp, Artificial Sequence
  Synthetic
atttcacaaugcacgcauggag

SEQ ID NO: 20432 - DNA, 24 bp, Artificial Sequence
  Synthetic
gcaataagaggcgutgaaguaacc

SEQ ID NO: 20433 - DNA, 24 bp, Artificial Sequence
  Synthetic
actgtatcattucagcaggcaucc

SEQ ID NO: 20434 - DNA, 28 bp, Artificial Sequence
  Synthetic
gggtcaagtgaguggataaaaatatugt

SEQ ID NO: 20435 - DNA, 32 bp, Artificial Sequence
  Synthetic
tatcttagtcctuactttacactctcttucag

SEQ ID NO: 20436 - DNA, 29 bp, Artificial Sequence
  Synthetic
catccagactgtuttctactaactcctut

SEQ ID NO: 20437 - DNA, 30 bp, Artificial Sequence
  Synthetic
acttgatttgtttcutgtaactgatttcuc

SEQ ID NO: 20438 - DNA, 26 bp, Artificial Sequence
  Synthetic
tcttacgatutctaactgtuggccat

SEQ ID NO: 20439 - DNA, 27 bp, Artificial Sequence
  Synthetic
aaatgaagauagaacgtgctcacauga

SEQ ID NO: 20440 - DNA, 22 bp, Artificial Sequence
  Synthetic
ggttagctaugctgcagctgut

SEQ ID NO: 20441 - DNA, 26 bp, Artificial Sequence
  Synthetic
agacccactcagugtttgtaaatgut

SEQ ID NO: 20442 - DNA, 20 bp, Artificial Sequence
  Synthetic
ttaggcggauctggttggug

SEQ ID NO: 20443 - DNA, 19 bp, Artificial Sequence
  Synthetic
cactgguggttgggucagt

SEQ ID NO: 20444 - DNA, 21 bp, Artificial Sequence
  Synthetic
cgtcttttcccauccctggug

SEQ ID NO: 20445 - DNA, 20 bp, Artificial Sequence
  Synthetic
gtgcucagcctctgugaaga

SEQ ID NO: 20446 - DNA, 25 bp, Artificial Sequence
  Synthetic
gcctcaagugacacctcacctcuct

SEQ ID NO: 20447 - DNA, 23 bp, Artificial Sequence
  Synthetic
ccagggcttugaaggaagtgugc

SEQ ID NO: 20448 - DNA, 20 bp, Artificial Sequence
  Synthetic
tctgaggucccccttctgut

SEQ ID NO: 20449 - DNA, 17 bp, Artificial Sequence
  Synthetic
gtgcagugttgggcugg

SEQ ID NO: 20450 - DNA, 23 bp, Artificial Sequence
  Synthetic
ctccttcuctggaaagaauggca

SEQ ID NO: 20451 - DNA, 24 bp, Artificial Sequence
  Synthetic
cttagagaaggccutggcaaucat

SEQ ID NO: 20452 - DNA, 18 bp, Artificial Sequence
  Synthetic
ctguggctggtugaggca

SEQ ID NO: 20453 - DNA, 21 bp, Artificial Sequence
  Synthetic
aggcagucgaggaatgguact

SEQ ID NO: 20454 - DNA, 21 bp, Artificial Sequence
  Synthetic
ccuattcacucccgcaccaac

SEQ ID NO: 20455 - DNA, 21 bp, Artificial Sequence
  Synthetic
ggugaggaagaagagcctuga

SEQ ID NO: 20456 - DNA, 29 bp, Artificial Sequence
  Synthetic
agttaattgtuaaatccagtauggccaca

SEQ ID NO: 20457 - DNA, 27 bp, Artificial Sequence
  Synthetic
acattaauagccaacaacacaccauga

SEQ ID NO: 20458 - DNA, 25 bp, Artificial Sequence
  Synthetic
ctgatggcgaaacuaagaacatugg

SEQ ID NO: 20459 - DNA, 24 bp, Artificial Sequence
  Synthetic
gaagggcttucggttttcacuaag

SEQ ID NO: 20460 - DNA, 21 bp, Artificial Sequence
  Synthetic
tccccugcagattguaagcag

SEQ ID NO: 20461 - DNA, 27 bp, Artificial Sequence
  Synthetic
tgatctattagaugagtaaggcgcuca

SEQ ID NO: 20462 - DNA, 22 bp, Artificial Sequence
  Synthetic
tgcactuctagctcugcaacat

SEQ ID NO: 20463 - DNA, 27 bp, Artificial Sequence
  Synthetic
gtaataatcagcauccaccctgcaaua

SEQ ID NO: 20464 - DNA, 25 bp, Artificial Sequence
  Synthetic
cattaacuagggaggttucccagag

SEQ ID NO: 20465 - DNA, 28 bp, Artificial Sequence
  Synthetic
tgaattgttaagaugctgatcucgaagt

SEQ ID NO: 20466 - DNA, 19 bp, Artificial Sequence
  Synthetic
ggcaccggutgtcaaugga

SEQ ID NO: 20467 - DNA, 30 bp, Artificial Sequence
  Synthetic
gttttactggaguttttcagatggatugag

SEQ ID NO: 20468 - DNA, 23 bp, Artificial Sequence
  Synthetic
tgtgccutaaatgactucaggct

SEQ ID NO: 20469 - DNA, 23 bp, Artificial Sequence
  Synthetic
tgttggcagcagauctgttgtua

SEQ ID NO: 20470 - DNA, 28 bp, Artificial Sequence
  Synthetic
cagaagaugctgaattugaacagaagat

SEQ ID NO: 20471 - DNA, 31 bp, Artificial Sequence
  Synthetic
tugacaaataggttttuaaaagaccaagcaa

SEQ ID NO: 20472 - DNA, 25 bp, Artificial Sequence
  Synthetic
actgtgttatgutgtgcctaaugct

SEQ ID NO: 20473 - DNA, 30 bp, Artificial Sequence
  Synthetic
tctcctgaatgucaatcagtttctttctut

SEQ ID NO: 20474 - DNA, 27 bp, Artificial Sequence
  Synthetic
actcttttaggcuacagcaaauccaaa

SEQ ID NO: 20475 - DNA, 20 bp, Artificial Sequence
  Synthetic
cagctagaccutgcctccuc

SEQ ID NO: 20476 - DNA, 22 bp, Artificial Sequence
  Synthetic
gaatattggcccauaggccuga

SEQ ID NO: 20477 - DNA, 28 bp, Artificial Sequence
  Synthetic
cttgtcttggcuaaaggacgataattut

SEQ ID NO: 20478 - DNA, 26 bp, Artificial Sequence
  Synthetic
cctcaaguacacttcataaugcacca

SEQ ID NO: 20479 - DNA, 23 bp, Artificial Sequence
  Synthetic
ggtctugctcttttcucccagaa

SEQ ID NO: 20480 - DNA, 27 bp, Artificial Sequence
  Synthetic
tcagaatatcuctacacccagugaaca

SEQ ID NO: 20481 - DNA, 29 bp, Artificial Sequence
  Synthetic
aagactgtttacaaucagtaccttggtut

SEQ ID NO: 20482 - DNA, 24 bp, Artificial Sequence
  Synthetic
agcagtatgccugatccaguagat

SEQ ID NO: 20483 - DNA, 29 bp, Artificial Sequence
  Synthetic
tgtttttaactctgcutttcagctgagua

SEQ ID NO: 20484 - DNA, 26 bp, Artificial Sequence
  Synthetic
gaagagcctgutcaagcaaaagtaut

SEQ ID NO: 20485 - DNA, 30 bp, Artificial Sequence
  Synthetic
gctgaaaaccuccttatattaaugcaaacc

SEQ ID NO: 20486 - DNA, 30 bp, Artificial Sequence
  Synthetic
ccttccatctgcutttatttttgaatcugt

SEQ ID NO: 20487 - DNA, 27 bp, Artificial Sequence
  Synthetic
acattttctcctutttcatggctcuca

SEQ ID NO: 20488 - DNA, 28 bp, Artificial Sequence
  Synthetic
cacttagatcaagcautagccagaauga

SEQ ID NO: 20489 - DNA, 20 bp, Artificial Sequence
  Synthetic
cugtagtaccugcaccagca

SEQ ID NO: 20490 - DNA, 24 bp, Artificial Sequence
  Synthetic
aggattcacuggcaaaatttgcug

SEQ ID NO: 20491 - DNA, 28 bp, Artificial Sequence
  Synthetic
tgcttctatttuccttttgcatctcugt

SEQ ID NO: 20492 - DNA, 28 bp, Artificial Sequence
  Synthetic
ggtgtatgatggucccaaaaatguaaga

SEQ ID NO: 20493 - DNA, 30 bp, Artificial Sequence
  Synthetic
ccaaactgtuccaataaatgaccuacaaaa

SEQ ID NO: 20494 - DNA, 24 bp, Artificial Sequence
  Synthetic
cttgattgctcutattcaggcgua

SEQ ID NO: 20495 - DNA, 28 bp, Artificial Sequence
  Synthetic
cttccaagatatugaggtaacagggtut

SEQ ID NO: 20496 - DNA, 30 bp, Artificial Sequence
  Synthetic
ggatgactggttuggatctagagtatguat

SEQ ID NO: 20497 - DNA, 28 bp, Artificial Sequence
  Synthetic
tgtcagtttcaguggtaaatctucaact

SEQ ID NO: 20498 - DNA, 33 bp, Artificial Sequence
  Synthetic
acagagaacaatgutaaattctagtaatucgat

SEQ ID NO: 20499 - DNA, 25 bp, Artificial Sequence
  Synthetic
tgtaaggacagagutagaugagcct

SEQ ID NO: 20500 - DNA, 24 bp, Artificial Sequence
  Synthetic
ggatcctgaagaucctgtgttugt

SEQ ID NO: 20501 - DNA, 28 bp, Artificial Sequence
  Synthetic
ccagcattggauttttctcagttgttua

SEQ ID NO: 20502 - DNA, 27 bp, Artificial Sequence
  Synthetic
ggatgaacagugtccatatctatuggg

SEQ ID NO: 20503 - DNA, 26 bp, Artificial Sequence
  Synthetic
gtccttacctuccagtgaactgtuat

SEQ ID NO: 20504 - DNA, 20 bp, Artificial Sequence
  Synthetic
agacgactugcctgcaugag

SEQ ID NO: 20505 - DNA, 27 bp, Artificial Sequence
  Synthetic
agaatguggcaagaactacaauaccaa

SEQ ID NO: 20506 - DNA, 25 bp, Artificial Sequence
  Synthetic
agtcttgttguatgcacttguaggg

SEQ ID NO: 20507 - DNA, 21 bp, Artificial Sequence
  Synthetic
ggaaacguaagcgtggugaaa

SEQ ID NO: 20508 - DNA, 30 bp, Artificial Sequence
  Synthetic
ctggttgacaatauatctatgccactttug

SEQ ID NO: 20509 - DNA, 22 bp, Artificial Sequence
  Synthetic
cagctgccuggaatggatauga

SEQ ID NO: 20510 - DNA, 22 bp, Artificial Sequence
  Synthetic
gtcacaguggcggtaugaaaag

SEQ ID NO: 20511 - DNA, 21 bp, Artificial Sequence
  Synthetic
cttatgucaccccgaauggca

SEQ ID NO: 20512 - DNA, 24 bp, Artificial Sequence
  Synthetic
gttgctgatgcauttgtctctguc

SEQ ID NO: 20513 - DNA, 29 bp, Artificial Sequence
  Synthetic
tgctagcctcuctataatactcacttugt

SEQ ID NO: 20514 - DNA, 24 bp, Artificial Sequence
  Synthetic
catacggagugtggcataacuagg

SEQ ID NO: 20515 - DNA, 22 bp, Artificial Sequence
  Synthetic
caacaucatgcuggagcagaag

SEQ ID NO: 20516 - DNA, 19 bp, Artificial Sequence
  Synthetic
ctggucaggcaccgacuac

SEQ ID NO: 20517 - DNA, 24 bp, Artificial Sequence
  Synthetic
caacaagcucctccaaaucagact

SEQ ID NO: 20518 - DNA, 26 bp, Artificial Sequence
  Synthetic
acccaccaauaaagtaacagtgcaut

SEQ ID NO: 20519 - DNA, 28 bp, Artificial Sequence
  Synthetic
agaaacagtaguccctactcagtgauac

SEQ ID NO: 20520 - DNA, 22 bp, Artificial Sequence
  Synthetic
aggtcattgaugatggctugct

SEQ ID NO: 20521 - DNA, 29 bp, Artificial Sequence
  Synthetic
gtagactggauaaactcttctgtttguca

SEQ ID NO: 20522 - DNA, 21 bp, Artificial Sequence
  Synthetic
ggaacugctgtccugcaagag

SEQ ID NO: 20523 - DNA, 22 bp, Artificial Sequence
  Synthetic
gctgcugaccaccaaatcugat

SEQ ID NO: 20524 - DNA, 25 bp, Artificial Sequence
  Synthetic
caaattgcccauttttaggtcuggt

SEQ ID NO: 20525 - DNA, 23 bp, Artificial Sequence
  Synthetic
gttugcagcaguacaggaaauag

SEQ ID NO: 20526 - DNA, 22 bp, Artificial Sequence
  Synthetic
ccatttgttccuttgggccaut

SEQ ID NO: 20527 - DNA, 23 bp, Artificial Sequence
  Synthetic
tgtgtgtgtgaugaatccggauc

SEQ ID NO: 20528 - DNA, 21 bp, Artificial Sequence
  Synthetic
cccaaggugaacuccaggaat

SEQ ID NO: 20529 - DNA, 24 bp, Artificial Sequence
  Synthetic
aggtgtatucagaagttccaugcg

SEQ ID NO: 20530 - DNA, 29 bp, Artificial Sequence
  Synthetic
tgaaggaaguagcacaggaataaauacac

SEQ ID NO: 20531 - DNA, 25 bp, Artificial Sequence
  Synthetic
tgatucagaagaggagggtuaugat

SEQ ID NO: 20532 - DNA, 21 bp, Artificial Sequence
  Synthetic
cgttgcctuccaggttcacua

SEQ ID NO: 20533 - DNA, 26 bp, Artificial Sequence
  Synthetic
gtgtgaatugtgtttcctugaaaggg

SEQ ID NO: 20534 - DNA, 27 bp, Artificial Sequence
  Synthetic
cagtcctctuaccttgttctttgauct

SEQ ID NO: 20535 - DNA, 28 bp, Artificial Sequence
  Synthetic
agaactugcagagttgattttugcaaat

SEQ ID NO: 20536 - DNA, 27 bp, Artificial Sequence
  Synthetic
ctctcaaagguacatgagaaaggugaa

SEQ ID NO: 20537 - DNA, 29 bp, Artificial Sequence
  Synthetic
tcaccactgagcaaaugtttgaaattaug

SEQ ID NO: 20538 - DNA, 26 bp, Artificial Sequence
  Synthetic
ccagatggattuctggaagtagagut

SEQ ID NO: 20539 - DNA, 32 bp, Artificial Sequence
  Synthetic
tctttgttatttctuctctttcttacctaucc

SEQ ID NO: 20540 - DNA, 27 bp, Artificial Sequence
  Synthetic
agttattgtcugagtttgtguccacag

SEQ ID NO: 20541 - DNA, 27 bp, Artificial Sequence
  Synthetic
gcaaatcagcaagaauagaaacgtcut

SEQ ID NO: 20542 - DNA, 22 bp, Artificial Sequence
  Synthetic
gcttgtttugcaggactcctut

SEQ ID NO: 20543 - DNA, 30 bp, Artificial Sequence
  Synthetic
tttaccttgcautcttttctttttcuacag

SEQ ID NO: 20544 - DNA, 30 bp, Artificial Sequence
  Synthetic
aaataatgcttcaautacctgtacugggat

SEQ ID NO: 20545 - DNA, 32 bp, Artificial Sequence
  Synthetic
attttattctaauaggcaaggtuttagaccua

SEQ ID NO: 20546 - DNA, 32 bp, Artificial Sequence
  Synthetic
gcttataacataatuacctgtttggcatucaa

SEQ ID NO: 20547 - DNA, 30 bp, Artificial Sequence
  Synthetic
tatttttacagtttutacccacctctugat

SEQ ID NO: 20548 - DNA, 28 bp, Artificial Sequence
  Synthetic
tcctccaagtugcaatatagcttgatut

SEQ ID NO: 20549 - DNA, 23 bp, Artificial Sequence
  Synthetic
aaaattgccauctctgcaacuct

SEQ ID NO: 20550 - DNA, 22 bp, Artificial Sequence
  Synthetic
gcatgattucggctgaucgact

SEQ ID NO: 20551 - DNA, 27 bp, Artificial Sequence
  Synthetic
ttcgtgtacatgugtatgtgtctauca

SEQ ID NO: 20552 - DNA, 19 bp, Artificial Sequence
  Synthetic
tgctggtggugtgtccauc

SEQ ID NO: 20553 - DNA, 22 bp, Artificial Sequence
  Synthetic
gcccgatacugtggctcattut

SEQ ID NO: 20554 - DNA, 20 bp, Artificial Sequence
  Synthetic
gcugccagaacacgaaacuc

SEQ ID NO: 20555 - DNA, 24 bp, Artificial Sequence
  Synthetic
tgcttacagtacuctcctcctcuc

SEQ ID NO: 20556 - DNA, 22 bp, Artificial Sequence
  Synthetic
aacctcacuccagttgtttucc

SEQ ID NO: 20557 - DNA, 28 bp, Artificial Sequence
  Synthetic
acgtcaagaagaaaugattgaucacaga

SEQ ID NO: 20558 - DNA, 22 bp, Artificial Sequence
  Synthetic
ggctaatagugcatggtcgcut

SEQ ID NO: 20559 - DNA, 22 bp, Artificial Sequence
  Synthetic
actgaactgugctggtttcuga

SEQ ID NO: 20560 - DNA, 24 bp, Artificial Sequence
  Synthetic
gtgaaatgtcautgccaaacugct

SEQ ID NO: 20561 - DNA, 21 bp, Artificial Sequence
  Synthetic
gcaatgggccutcctcttcut

SEQ ID NO: 20562 - DNA, 22 bp, Artificial Sequence
  Synthetic
gcattguggagtgcttcucagt

SEQ ID NO: 20563 - DNA, 28 bp, Artificial Sequence
  Synthetic
gatgttgaattucttctgttcactugct

SEQ ID NO: 20564 - DNA, 30 bp, Artificial Sequence
  Synthetic
tgaaggaaaggutctccaattatgtucaaa

SEQ ID NO: 20565 - DNA, 20 bp, Artificial Sequence
  Synthetic
gctgccuctctcctcucaac

SEQ ID NO: 20566 - DNA, 24 bp, Artificial Sequence
  Synthetic
gaagaatccugtggagaugcagag

SEQ ID NO: 20567 - DNA, 27 bp, Artificial Sequence
  Synthetic
aatgttgcaagaugagatctgtcatut

SEQ ID NO: 20568 - DNA, 24 bp, Artificial Sequence
  Synthetic
catgatagtauggttggctuggga

SEQ ID NO: 20569 - DNA, 24 bp, Artificial Sequence
  Synthetic
ctatcttugaccagaggcaugaaa

SEQ ID NO: 20570 - DNA, 22 bp, Artificial Sequence
  Synthetic
ggtgttugccgtgcuagaaaaa

SEQ ID NO: 20571 - DNA, 22 bp, Artificial Sequence
  Synthetic
aaauccccacatugcacaaacc

SEQ ID NO: 20572 - DNA, 25 bp, Artificial Sequence
  Synthetic
ctttgacattcgcutctcatgctut

SEQ ID NO: 20573 - DNA, 27 bp, Artificial Sequence
  Synthetic
aaactgactaugcacatcttttccuca

SEQ ID NO: 20574 - DNA, 28 bp, Artificial Sequence
  Synthetic
cacaagacccautaaaacctattccuca

SEQ ID NO: 20575 - DNA, 25 bp, Artificial Sequence
  Synthetic
tttttccatuggattcctucgcaag

SEQ ID NO: 20576 - DNA, 30 bp, Artificial Sequence
  Synthetic
tgacaaaattcaaagaauccacatgactug

SEQ ID NO: 20577 - DNA, 23 bp, Artificial Sequence
  Synthetic
gcattgaggccutggatgaacut

SEQ ID NO: 20578 - DNA, 22 bp, Artificial Sequence
  Synthetic
ccctcaugggacatcatgctut

SEQ ID NO: 20579 - DNA, 26 bp, Artificial Sequence
  Synthetic
gagacaatccuttctctgctauccag

SEQ ID NO: 20580 - DNA, 26 bp, Artificial Sequence
  Synthetic
atccaagacagacaaautgctcucat

SEQ ID NO: 20581 - DNA, 24 bp, Artificial Sequence
  Synthetic
gtacagcuaaagaagcagcttugg

SEQ ID NO: 20582 - DNA, 23 bp, Artificial Sequence
  Synthetic
ggaactgccaucattttcugggt

SEQ ID NO: 20583 - DNA, 24 bp, Artificial Sequence
  Synthetic
ccatgctggauctctgtgaugaaa

SEQ ID NO: 20584 - DNA, 32 bp, Artificial Sequence
  Synthetic
atggacttatgagguatattcaaatagucaca

SEQ ID NO: 20585 - DNA, 25 bp, Artificial Sequence
  Synthetic
caaaattgtctucgggaaacagcua

SEQ ID NO: 20586 - DNA, 21 bp, Artificial Sequence
  Synthetic
ttgaatccuccgccgttctut

SEQ ID NO: 20587 - DNA, 23 bp, Artificial Sequence
  Synthetic
ccgaaaaccagcugtcattgaug

SEQ ID NO: 20588 - DNA, 29 bp, Artificial Sequence
  Synthetic
caacatgttctcaaugttctttcccatut

SEQ ID NO: 20589 - DNA, 23 bp, Artificial Sequence
  Synthetic
gttttctguggctgagcaucaag

SEQ ID NO: 20590 - DNA, 28 bp, Artificial Sequence
  Synthetic
gctgtgttgguttatttggaatctucac

SEQ ID NO: 20591 - DNA, 26 bp, Artificial Sequence
  Synthetic
tgaagattgaugatgaagtucacgct

SEQ ID NO: 20592 - DNA, 24 bp, Artificial Sequence
  Synthetic
cuttctgaaugggaaggaaaggct

SEQ ID NO: 20593 - DNA, 23 bp, Artificial Sequence
  Synthetic
tttgaagttccugggcctaacuc

SEQ ID NO: 20594 - DNA, 29 bp, Artificial Sequence
  Synthetic
tctttgccaggtutccgtttataatagut

SEQ ID NO: 20595 - DNA, 20 bp, Artificial Sequence
  Synthetic
ctcaggtgguggagagtugt

SEQ ID NO: 20596 - DNA, 26 bp, Artificial Sequence
  Synthetic
ggagagattccauggatctttcacut

SEQ ID NO: 20597 - DNA, 23 bp, Artificial Sequence
  Synthetic
ccccuccaaggagaguaagaagg

SEQ ID NO: 20598 - DNA, 24 bp, Artificial Sequence
  Synthetic
accttgcugaacattguaagccat

SEQ ID NO: 20599 - DNA, 24 bp, Artificial Sequence
  Synthetic
gaaaactucctgatggugacacag

SEQ ID NO: 20600 - DNA, 25 bp, Artificial Sequence
  Synthetic
gattgggaaaauttggacuccacag

SEQ ID NO: 20601 - DNA, 24 bp, Artificial Sequence
  Synthetic
ctgauacaggaagagcagauccag

SEQ ID NO: 20602 - DNA, 25 bp, Artificial Sequence
  Synthetic
aggtcccatcucagattctgaauca

SEQ ID NO: 20603 - DNA, 27 bp, Artificial Sequence
  Synthetic
aggataaggaccaagaugctatuacct

SEQ ID NO: 20604 - DNA, 21 bp, Artificial Sequence
  Synthetic
aagcctgccaagugcttctua

SEQ ID NO: 20605 - DNA, 19 bp, Artificial Sequence
  Synthetic
ctgccgccaucatgucaga

SEQ ID NO: 20606 - DNA, 20 bp, Artificial Sequence
  Synthetic
gggtcagugacggtcauagg

SEQ ID NO: 20607 - DNA, 22 bp, Artificial Sequence
  Synthetic
aggacagaaguggaggagacug

SEQ ID NO: 20608 - DNA, 19 bp, Artificial Sequence
  Synthetic
cacactgcucccgatguca

SEQ ID NO: 20609 - DNA, 21 bp, Artificial Sequence
  Synthetic
acgtggagutggcattugact

SEQ ID NO: 20610 - DNA, 30 bp, Artificial Sequence
  Synthetic
tgttttatgcagaautatctgtccauaaga

SEQ ID NO: 20611 - DNA, 19 bp, Artificial Sequence
  Synthetic
caaccagucccagctucca

SEQ ID NO: 20612 - DNA, 22 bp, Artificial Sequence
  Synthetic
gaaagaucaagggaagccucga

SEQ ID NO: 20613 - DNA, 22 bp, Artificial Sequence
  Synthetic
tgtaguccgccagaggatagug

SEQ ID NO: 20614 - DNA, 28 bp, Artificial Sequence
  Synthetic
aggttttgtgaagucgtaagtgtauacc

SEQ ID NO: 20615 - DNA, 23 bp, Artificial Sequence
  Synthetic
tcacgatgaucctgacaatgcuc

SEQ ID NO: 20616 - DNA, 29 bp, Artificial Sequence
  Synthetic
gatcaggattccautctttctctctucaa

SEQ ID NO: 20617 - DNA, 27 bp, Artificial Sequence
  Synthetic
atcttcccaacautgtagaactcagug

SEQ ID NO: 20618 - DNA, 25 bp, Artificial Sequence
  Synthetic
acagagatcaagcauggtcaagtut

SEQ ID NO: 20619 - DNA, 31 bp, Artificial Sequence
  Synthetic
ctaagcttccaaauctactacaacttcauct

SEQ ID NO: 20620 - DNA, 24 bp, Artificial Sequence
  Synthetic
gcattcacugacacagccuaaagt

SEQ ID NO: 20621 - DNA, 30 bp, Artificial Sequence
  Synthetic
tttttggagtcaaaguacattgccaataug

SEQ ID NO: 20622 - DNA, 17 bp, Artificial Sequence
  Synthetic
caggccguggtcaguct

SEQ ID NO: 20623 - DNA, 18 bp, Artificial Sequence
  Synthetic
ggctacugccagcccauc

SEQ ID NO: 20624 - DNA, 19 bp, Artificial Sequence
  Synthetic
cacuaccacggugggaaga

SEQ ID NO: 20625 - DNA, 19 bp, Artificial Sequence
  Synthetic
ggagctucggcacuacgag

SEQ ID NO: 20626 - DNA, 19 bp, Artificial Sequence
  Synthetic
cccggcccaaucacaauga

SEQ ID NO: 20627 - DNA, 18 bp, Artificial Sequence
  Synthetic
gcutgcccuggagcacat

SEQ ID NO: 20628 - DNA, 26 bp, Artificial Sequence
  Synthetic
ccacaaagccccutataatacacuca

SEQ ID NO: 20629 - DNA, 18 bp, Artificial Sequence
  Synthetic
cccaacggcuacccctuc

SEQ ID NO: 20630 - DNA, 19 bp, Artificial Sequence
  Synthetic
acccattcuggtcggtgug

SEQ ID NO: 20631 - DNA, 24 bp, Artificial Sequence
  Synthetic
gcctctgttcutcccgtttttgua

SEQ ID NO: 20632 - DNA, 27 bp, Artificial Sequence
  Synthetic
ccaacatgacauacttcacgttacuga

SEQ ID NO: 20633 - DNA, 22 bp, Artificial Sequence
  Synthetic
ggacautgtaccucgggaaacc

SEQ ID NO: 20634 - DNA, 19 bp, Artificial Sequence
  Synthetic
ctgagggugtcctgtguca

SEQ ID NO: 20635 - DNA, 19 bp, Artificial Sequence
  Synthetic
gcuttgcccaugaaacgca

SEQ ID NO: 20636 - DNA, 19 bp, Artificial Sequence
  Synthetic
ggaagtcagugccccgtuc

SEQ ID NO: 20637 - DNA, 21 bp, Artificial Sequence
  Synthetic
acgtccaucagcaatgucaca

SEQ ID NO: 20638 - DNA, 24 bp, Artificial Sequence
  Synthetic
gaaautccgatcaaugagcacagg

SEQ ID NO: 20639 - DNA, 21 bp, Artificial Sequence
  Synthetic
cttttgttctgugcccccaut

SEQ ID NO: 20640 - DNA, 21 bp, Artificial Sequence
  Synthetic
gctttgtccucgttccagtug

SEQ ID NO: 20641 - DNA, 22 bp, Artificial Sequence
  Synthetic
gtggaaacugcttccugggaat

SEQ ID NO: 20642 - DNA, 23 bp, Artificial Sequence
  Synthetic
ccatgtaaccaugaccaaccuca

SEQ ID NO: 20643 - DNA, 22 bp, Artificial Sequence
  Synthetic
ggctctttucatggtctcguct

SEQ ID NO: 20644 - DNA, 21 bp, Artificial Sequence
  Synthetic
cgccttaccugctgctcatua

SEQ ID NO: 20645 - DNA, 28 bp, Artificial Sequence
  Synthetic
tcaactcatgauacagaccccuaaagaa

SEQ ID NO: 20646 - DNA, 17 bp, Artificial Sequence
  Synthetic
ctccgcucctccgtcut

SEQ ID NO: 20647 - DNA, 24 bp, Artificial Sequence
  Synthetic
gggtttttacacuttccgttccut

SEQ ID NO: 20648 - DNA, 24 bp, Artificial Sequence
  Synthetic
gugtctatgcuaccagaaggagga

SEQ ID NO: 20649 - DNA, 21 bp, Artificial Sequence
  Synthetic
gctauattgggctuggacgca

SEQ ID NO: 20650 - DNA, 19 bp, Artificial Sequence
  Synthetic
aucaccagcagcagcauca

SEQ ID NO: 20651 - DNA, 19 bp, Artificial Sequence
  Synthetic
agtgccucgtcccauaacg

SEQ ID NO: 20652 - DNA, 21 bp, Artificial Sequence
  Synthetic
cttcccgcucttccactucaa

SEQ ID NO: 20653 - DNA, 19 bp, Artificial Sequence
  Synthetic
cgtacggguggctcucaag

SEQ ID NO: 20654 - DNA, 23 bp, Artificial Sequence
  Synthetic
gtcaggucctacctcttuccaga

SEQ ID NO: 20655 - DNA, 25 bp, Artificial Sequence
  Synthetic
ctgagacacutctgaaaucgacagt

SEQ ID NO: 20656 - DNA, 22 bp, Artificial Sequence
  Synthetic
ctgcatgaugaatgcccttguc

SEQ ID NO: 20657 - DNA, 29 bp, Artificial Sequence
  Synthetic
ccagacacaaaaucattcaatcaactcut

SEQ ID NO: 20658 - DNA, 23 bp, Artificial Sequence
  Synthetic
gtctgtgtgccugtgtgtcauaa

SEQ ID NO: 20659 - DNA, 22 bp, Artificial Sequence
  Synthetic
aaauccacgaaggcacugaagt

SEQ ID NO: 20660 - DNA, 21 bp, Artificial Sequence
  Synthetic
ccagcgcaucttctaccugaa

SEQ ID NO: 20661 - DNA, 22 bp, Artificial Sequence
  Synthetic
aacctatcccuttgctgcguag

SEQ ID NO: 20662 - DNA, 28 bp, Artificial Sequence
  Synthetic
ggtatatcaacttcutggtcaaggtcut

SEQ ID NO: 20663 - DNA, 21 bp, Artificial Sequence
  Synthetic
gctuggaccaggugaaggaac

SEQ ID NO: 20664 - DNA, 26 bp, Artificial Sequence
  Synthetic
ccactgtcaugtaaatatccctucca

SEQ ID NO: 20665 - DNA, 20 bp, Artificial Sequence
  Synthetic
gtggagacuggcgttuaggg

SEQ ID NO: 20666 - DNA, 24 bp, Artificial Sequence
  Synthetic
gctgacctguaattttctggccua

SEQ ID NO: 20667 - DNA, 28 bp, Artificial Sequence
  Synthetic
acaguggcaaacaagattaagtuagaga

SEQ ID NO: 20668 - DNA, 24 bp, Artificial Sequence
  Synthetic
ccataugaaagcaagtcucagcat

SEQ ID NO: 20669 - DNA, 22 bp, Artificial Sequence
  Synthetic
ctcccagggacuggagaaaaut

SEQ ID NO: 20670 - DNA, 29 bp, Artificial Sequence
  Synthetic
ttttgttgtacugaaattgggtctacuga

SEQ ID NO: 20671 - DNA, 20 bp, Artificial Sequence
  Synthetic
gcagacucgagcgttcctug

SEQ ID NO: 20672 - DNA, 21 bp, Artificial Sequence
  Synthetic
caatccaucacctggcctuga

SEQ ID NO: 20673 - DNA, 26 bp, Artificial Sequence
  Synthetic
caaggaaatcugcttagggttcucat

SEQ ID NO: 20674 - DNA, 27 bp, Artificial Sequence
  Synthetic
ttggtttgcuccattttcttgtttuca

SEQ ID NO: 20675 - DNA, 28 bp, Artificial Sequence
  Synthetic
gtgggcaacutaagaaaaattcugaagt

SEQ ID NO: 20676 - DNA, 23 bp, Artificial Sequence
  Synthetic
ctgtggattgguacctacgtcut

SEQ ID NO: 20677 - DNA, 23 bp, Artificial Sequence
  Synthetic
ccttgaaaucaaagccuccagct

SEQ ID NO: 20678 - DNA, 25 bp, Artificial Sequence
  Synthetic
auttgaacaatgtuaggaggaacca

SEQ ID NO: 20679 - DNA, 22 bp, Artificial Sequence
  Synthetic
acaggcaatucagctcgacuag

SEQ ID NO: 20680 - DNA, 28 bp, Artificial Sequence
  Synthetic
cacttgctttcuattatgtgaaccucca

SEQ ID NO: 20681 - DNA, 21 bp, Artificial Sequence
  Synthetic
gugatgaagguggcagagagg

SEQ ID NO: 20682 - DNA, 23 bp, Artificial Sequence
  Synthetic
ttttaagccuacccuggaaagca

SEQ ID NO: 20683 - DNA, 28 bp, Artificial Sequence
  Synthetic
acatccaatatutctacccaacucacag

SEQ ID NO: 20684 - DNA, 25 bp, Artificial Sequence
  Synthetic
acttcttttucaagcaggacgauct

SEQ ID NO: 20685 - DNA, 28 bp, Artificial Sequence
  Synthetic
cacaaacatugcaagctgaattuaaaca

SEQ ID NO: 20686 - DNA, 28 bp, Artificial Sequence
  Synthetic
caaacagaaagauttggacguaacaact

SEQ ID NO: 20687 - DNA, 26 bp, Artificial Sequence
  Synthetic
gcagataaccagagucacgatttcut

SEQ ID NO: 20688 - DNA, 28 bp, Artificial Sequence
  Synthetic
tttactgggagautcctttactugaacc

SEQ ID NO: 20689 - DNA, 22 bp, Artificial Sequence
  Synthetic
caggtgatucagcctcttccuc

SEQ ID NO: 20690 - DNA, 23 bp, Artificial Sequence
  Synthetic
gatttctugcagccaaactgucc

SEQ ID NO: 20691 - DNA, 22 bp, Artificial Sequence
  Synthetic
ccccaccacacccuatcacuat

SEQ ID NO: 20692 - DNA, 22 bp, Artificial Sequence
  Synthetic
tgttctcucacccacucacact

SEQ ID NO: 20693 - DNA, 21 bp, Artificial Sequence
  Synthetic
ggaaggacuaggtgcaccaug

SEQ ID NO: 20694 - DNA, 29 bp, Artificial Sequence
  Synthetic
aacataaacatttugcttgcattctgtua

SEQ ID NO: 20695 - DNA, 26 bp, Artificial Sequence
  Synthetic
tggagtgcutctttcactttucaaga

SEQ ID NO: 20696 - DNA, 26 bp, Artificial Sequence
  Synthetic
gtcaucttttgctaaauccaacccat

SEQ ID NO: 20697 - DNA, 22 bp, Artificial Sequence
  Synthetic
gatgtgattccugagggaggug

SEQ ID NO: 20698 - DNA, 25 bp, Artificial Sequence
  Synthetic
caaccaauaaggcttcauccacaag

SEQ ID NO: 20699 - DNA, 20 bp, Artificial Sequence
  Synthetic
ctgctgguggtgctacugag

SEQ ID NO: 20700 - DNA, 22 bp, Artificial Sequence
  Synthetic
acttcaucagctttgccugaga

SEQ ID NO: 20701 - DNA, 23 bp, Artificial Sequence
  Synthetic
ctgggcaagaacaggutctttut

SEQ ID NO: 20702 - DNA, 22 bp, Artificial Sequence
  Synthetic
acatcaaguacccccauagcct

SEQ ID NO: 20703 - DNA, 21 bp, Artificial Sequence
  Synthetic
gtgttgttggugagctggtug

SEQ ID NO: 20704 - DNA, 23 bp, Artificial Sequence
  Synthetic
gtgctgcaagugtcttttcctuc

SEQ ID NO: 20705 - DNA, 22 bp, Artificial Sequence
  Synthetic
gtgtugggagaagactguccaa

SEQ ID NO: 20706 - DNA, 25 bp, Artificial Sequence
  Synthetic
gatgacctctcaucctatcttgcut

SEQ ID NO: 20707 - DNA, 22 bp, Artificial Sequence
  Synthetic
gctgaaugggtttttgtuggct

SEQ ID NO: 20708 - DNA, 26 bp, Artificial Sequence
  Synthetic
cctatttctgttugtttgcctctgut

SEQ ID NO: 20709 - DNA, 20 bp, Artificial Sequence
  Synthetic
cccagagggcutguaaaggc

SEQ ID NO: 20710 - DNA, 21 bp, Artificial Sequence
  Synthetic
gggaccaccuttgtcttucga

SEQ ID NO: 20711 - DNA, 28 bp, Artificial Sequence
  Synthetic
cacacactuccaaccttatttaatgcut

SEQ ID NO: 20712 - DNA, 23 bp, Artificial Sequence
  Synthetic
gtttactugaaggccuccggaat

SEQ ID NO: 20713 - DNA, 19 bp, Artificial Sequence
  Synthetic
ctgagtccccugaccagug

SEQ ID NO: 20714 - DNA, 17 bp, Artificial Sequence
  Synthetic
ccagtggcugcacguct

SEQ ID NO: 20715 - DNA, 19 bp, Artificial Sequence
  Synthetic
ccugcagccagcaaacauc

SEQ ID NO: 20716 - DNA, 18 bp, Artificial Sequence
  Synthetic
ggccuaccatgccaugct

SEQ ID NO: 20717 - DNA, 20 bp, Artificial Sequence
  Synthetic
ggcccugaatttcactgugg

SEQ ID NO: 20718 - DNA, 20 bp, Artificial Sequence
  Synthetic
gtctgacagguagccauggg

SEQ ID NO: 20719 - DNA, 18 bp, Artificial Sequence
  Synthetic
ccuggcctguggaagcaa

SEQ ID NO: 20720 - DNA, 19 bp, Artificial Sequence
  Synthetic
tgatgucccggtuggcaaa

SEQ ID NO: 20721 - DNA, 21 bp, Artificial Sequence
  Synthetic
gcttccuctggtgauggaacc

SEQ ID NO: 20722 - DNA, 17 bp, Artificial Sequence
  Synthetic
cucccagggccacguaa

SEQ ID NO: 20723 - DNA, 20 bp, Artificial Sequence
  Synthetic
gcagaugccaacauccagga

SEQ ID NO: 20724 - DNA, 17 bp, Artificial Sequence
  Synthetic
ggctgcuggcaccctua

SEQ ID NO: 20725 - DNA, 18 bp, Artificial Sequence
  Synthetic
caguggacucagcagcac

SEQ ID NO: 20726 - DNA, 17 bp, Artificial Sequence
  Synthetic
ggcguccgctcactuga

SEQ ID NO: 20727 - DNA, 23 bp, Artificial Sequence
  Synthetic
cctttgtgctuctgttcttcgug

SEQ ID NO: 20728 - DNA, 17 bp, Artificial Sequence
  Synthetic
agcgaggccutcaccug

SEQ ID NO: 20729 - DNA, 20 bp, Artificial Sequence
  Synthetic
cacaccaacguggtctucaa

SEQ ID NO: 20730 - DNA, 18 bp, Artificial Sequence
  Synthetic
ctgtcacaguggccguca

SEQ ID NO: 20731 - DNA, 17 bp, Artificial Sequence
  Synthetic
cagccugcagugcaaca

SEQ ID NO: 20732 - DNA, 18 bp, Artificial Sequence
  Synthetic
cgggaacuggcatucggg

SEQ ID NO: 20733 - DNA, 19 bp, Artificial Sequence
  Synthetic
accgtccugtcttcccuct

SEQ ID NO: 20734 - DNA, 17 bp, Artificial Sequence
  Synthetic
caggugcagctguagcc

SEQ ID NO: 20735 - DNA, 19 bp, Artificial Sequence
  Synthetic
gctugggccacugacgaaa

SEQ ID NO: 20736 - DNA, 18 bp, Artificial Sequence
  Synthetic
gtgagcacucguccacca

SEQ ID NO: 20737 - DNA, 19 bp, Artificial Sequence
  Synthetic
ctgggccucacctgtcuac

SEQ ID NO: 20738 - DNA, 21 bp, Artificial Sequence
  Synthetic
agtcgcacucattgacaucgt

SEQ ID NO: 20739 - DNA, 17 bp, Artificial Sequence
  Synthetic
cccaccaaugcccucca

SEQ ID NO: 20740 - DNA, 17 bp, Artificial Sequence
  Synthetic
ccggcagucgtcgaugt

SEQ ID NO: 20741 - DNA, 21 bp, Artificial Sequence
  Synthetic
catcaacgagugcgttcugag

SEQ ID NO: 20742 - DNA, 20 bp, Artificial Sequence
  Synthetic
agcaggcagutgcacttgua

SEQ ID NO: 20743 - DNA, 18 bp, Artificial Sequence
  Synthetic
gtgcuggacaugccgagt

SEQ ID NO: 20744 - DNA, 19 bp, Artificial Sequence
  Synthetic
gaccucagacaggcaggug

SEQ ID NO: 20745 - DNA, 18 bp, Artificial Sequence
  Synthetic
ccugccctuagggagcat

SEQ ID NO: 20746 - DNA, 17 bp, Artificial Sequence
  Synthetic
gcaggugaagguggcga

SEQ ID NO: 20747 - DNA, 19 bp, Artificial Sequence
  Synthetic
caggtcuggtcatgggugt

SEQ ID NO: 20748 - DNA, 19 bp, Artificial Sequence
  Synthetic
ggtucgagacgcactcgut

SEQ ID NO: 20749 - DNA, 18 bp, Artificial Sequence
  Synthetic
ccuggagcagcctcucac

SEQ ID NO: 20750 - DNA, 20 bp, Artificial Sequence
  Synthetic
aatgttcucgctgcagucct

SEQ ID NO: 20751 - DNA, 18 bp, Artificial Sequence
  Synthetic
ggccgacagcucctgtuc

SEQ ID NO: 20752 - DNA, 18 bp, Artificial Sequence
  Synthetic
gguaggagccgaccucgt

SEQ ID NO: 20753 - DNA, 21 bp, Artificial Sequence
  Synthetic
cttcgaggccucctacatcug

SEQ ID NO: 20754 - DNA, 20 bp, Artificial Sequence
  Synthetic
catagtcugccacgcctcug

SEQ ID NO: 20755 - DNA, 20 bp, Artificial Sequence
  Synthetic
aactaacugcccuggcacat

SEQ ID NO: 20756 - DNA, 25 bp, Artificial Sequence
  Synthetic
tttgagggatgautcaaaggtggut

SEQ ID NO: 20757 - DNA, 20 bp, Artificial Sequence
  Synthetic
agtccctccgugcatcacua

SEQ ID NO: 20758 - DNA, 22 bp, Artificial Sequence
  Synthetic
ggtgtcatugtggctagtuggt

SEQ ID NO: 20759 - DNA, 31 bp, Artificial Sequence
  Synthetic
caagagucaaaagttaaaauacgcaaaaagg

SEQ ID NO: 20760 - DNA, 26 bp, Artificial Sequence
  Synthetic
gctcatgctagutcagcaaatatugg

SEQ ID NO: 20761 - DNA, 29 bp, Artificial Sequence
  Synthetic
aaaacccaaaggaaguataagccaaguaa

SEQ ID NO: 20762 - DNA, 24 bp, Artificial Sequence
  Synthetic
aaaactggcucctcaagagugaaa

SEQ ID NO: 20763 - DNA, 24 bp, Artificial Sequence
  Synthetic
gggagtcacuagccaatctgauag

SEQ ID NO: 20764 - DNA, 21 bp, Artificial Sequence
  Synthetic
tggcttguccagaaccaucag

SEQ ID NO: 20765 - DNA, 27 bp, Artificial Sequence
  Synthetic
gcatcccattttuatcctttccttcut

SEQ ID NO: 20766 - DNA, 21 bp, Artificial Sequence
  Synthetic
gccccaugaatacttccuggt

SEQ ID NO: 20767 - DNA, 27 bp, Artificial Sequence
  Synthetic
ccagtgctattutgatgtttatgcuca

SEQ ID NO: 20768 - DNA, 26 bp, Artificial Sequence
  Synthetic
gtatacctgtautgggaaatgagucg

SEQ ID NO: 20769 - DNA, 22 bp, Artificial Sequence
  Synthetic
agaaaggcugctcaactctugt

SEQ ID NO: 20770 - DNA, 20 bp, Artificial Sequence
  Synthetic
cuatgtctcgaucccgccat

SEQ ID NO: 20771 - DNA, 23 bp, Artificial Sequence
  Synthetic
ccagggctuaaagtcttgacuga

SEQ ID NO: 20772 - DNA, 24 bp, Artificial Sequence
  Synthetic
gccaaauccaaaaaggttccacut

SEQ ID NO: 20773 - DNA, 25 bp, Artificial Sequence
  Synthetic
tctataucaggaaggacttgggugt

SEQ ID NO: 20774 - DNA, 21 bp, Artificial Sequence
  Synthetic
acagtgtgugctcctttuccc

SEQ ID NO: 20775 - DNA, 28 bp, Artificial Sequence
  Synthetic
tgggatccagguaagaatcagataacut

SEQ ID NO: 20776 - DNA, 23 bp, Artificial Sequence
  Synthetic
acatcaatgggaacutcctggug

SEQ ID NO: 20777 - DNA, 25 bp, Artificial Sequence
  Synthetic
ctcccactcauaccaagagtttcut

SEQ ID NO: 20778 - DNA, 28 bp, Artificial Sequence
  Synthetic
caatgtagaaaaugagaagcaggtucat

SEQ ID NO: 20779 - DNA, 23 bp, Artificial Sequence
  Synthetic
ctctgtcugatttgcuaggacca

SEQ ID NO: 20780 - DNA, 26 bp, Artificial Sequence
  Synthetic
ttacaggcagauttugacaacaaacc

SEQ ID NO: 20781 - DNA, 23 bp, Artificial Sequence
  Synthetic
tgcctgtcaugctgtcttcatut

SEQ ID NO: 20782 - DNA, 27 bp, Artificial Sequence
  Synthetic
gtacactguttaccagcugaaacaaat

SEQ ID NO: 20783 - DNA, 28 bp, Artificial Sequence
  Synthetic
gatcacaacucatatcaguagcaacaga

SEQ ID NO: 20784 - DNA, 26 bp, Artificial Sequence
  Synthetic
ggagattaacatuggagcaagtggua

SEQ ID NO: 20785 - DNA, 27 bp, Artificial Sequence
  Synthetic
cttacagtguagaggatagcttugcag

SEQ ID NO: 20786 - DNA, 27 bp, Artificial Sequence
  Synthetic
caagcatccacaaagucacatgaauat

SEQ ID NO: 20787 - DNA, 21 bp, Artificial Sequence
  Synthetic
tcttgguggcaactgaugcaa

SEQ ID NO: 20788 - DNA, 26 bp, Artificial Sequence
  Synthetic
cagcaaaaauacaaucaggagaaggg

SEQ ID NO: 20789 - DNA, 28 bp, Artificial Sequence
  Synthetic
tgataacttacaacugtgggcttcttut

SEQ ID NO: 20790 - DNA, 23 bp, Artificial Sequence
  Synthetic
aaggtgaaggutgaaccatugga

SEQ ID NO: 20791 - DNA, 21 bp, Artificial Sequence
  Synthetic
gcacacuggttagguggagag

SEQ ID NO: 20792 - DNA, 28 bp, Artificial Sequence
  Synthetic
gccatgaactuctttactaacccuacaa

SEQ ID NO: 20793 - DNA, 28 bp, Artificial Sequence
  Synthetic
tcagtcatgatugaggtaatttgugcag

SEQ ID NO: 20794 - DNA, 25 bp, Artificial Sequence
  Synthetic
ccattgcatucaaatttggcauact

SEQ ID NO: 20795 - DNA, 21 bp, Artificial Sequence
  Synthetic
catcacagcagutggacagug

SEQ ID NO: 20796 - DNA, 26 bp, Artificial Sequence
  Synthetic
tcaaggaattgauccagagacttgug

SEQ ID NO: 20797 - DNA, 21 bp, Artificial Sequence
  Synthetic
acatguaagggagagctugga

SEQ ID NO: 20798 - DNA, 21 bp, Artificial Sequence
  Synthetic
aatgaatgugcacgacccgua

SEQ ID NO: 20799 - DNA, 22 bp, Artificial Sequence
  Synthetic
ttggagccaaacucatctgugt

SEQ ID NO: 20800 - DNA, 23 bp, Artificial Sequence
  Synthetic
aaaggcaaccccuaccaaaagua

SEQ ID NO: 20801 - DNA, 28 bp, Artificial Sequence
  Synthetic
tcagcgaataagutttagtgttgtcuga

SEQ ID NO: 20802 - DNA, 24 bp, Artificial Sequence
  Synthetic
gatggagccccucattaattcuga

SEQ ID NO: 20803 - DNA, 25 bp, Artificial Sequence
  Synthetic
agaatgctgcucatcttcttccaut

SEQ ID NO: 20804 - DNA, 23 bp, Artificial Sequence
  Synthetic
agccccaacauggttttgaacua

SEQ ID NO: 20805 - DNA, 29 bp, Artificial Sequence
  Synthetic
ggttcaattcattuacttcagaggacugt

SEQ ID NO: 20806 - DNA, 25 bp, Artificial Sequence
  Synthetic
acaagcttgguctaatgggaauacg

SEQ ID NO: 20807 - DNA, 23 bp, Artificial Sequence
  Synthetic
actatgucccccaaatgcttcug

SEQ ID NO: 20808 - DNA, 18 bp, Artificial Sequence
  Synthetic
tccguggcagugaaccag

SEQ ID NO: 20809 - DNA, 18 bp, Artificial Sequence
  Synthetic
ccgagacccaugccagug

SEQ ID NO: 20810 - DNA, 18 bp, Artificial Sequence
  Synthetic
gctcccgguaggttuggt

SEQ ID NO: 20811 - DNA, 19 bp, Artificial Sequence
  Synthetic
gcucacggacaacgaggug

SEQ ID NO: 20812 - DNA, 21 bp, Artificial Sequence
  Synthetic
ccccagcuctcacctguagaa

SEQ ID NO: 20813 - DNA, 20 bp, Artificial Sequence
  Synthetic
ctggacgugactccuaagcc

SEQ ID NO: 20814 - DNA, 18 bp, Artificial Sequence
  Synthetic
aggcacgaacutguggct

SEQ ID NO: 20815 - DNA, 18 bp, Artificial Sequence
  Synthetic
ccctccacccauggctuc

SEQ ID NO: 20816 - DNA, 17 bp, Artificial Sequence
  Synthetic
gaccaggguggcugcat

SEQ ID NO: 20817 - DNA, 21 bp, Artificial Sequence
  Synthetic
ccgggaccuccagtaccauag

SEQ ID NO: 20818 - DNA, 19 bp, Artificial Sequence
  Synthetic
tggcagguaacggcttgut

SEQ ID NO: 20819 - DNA, 19 bp, Artificial Sequence
  Synthetic
gagutgugcacgcacagag

SEQ ID NO: 20820 - DNA, 21 bp, Artificial Sequence
  Synthetic
cccacccccauttagatcuga

SEQ ID NO: 20821 - DNA, 22 bp, Artificial Sequence
  Synthetic
ctgggttguagcaactcuccat

SEQ ID NO: 20822 - DNA, 23 bp, Artificial Sequence
  Synthetic
cacaatgcuactatgccctugga

SEQ ID NO: 20823 - DNA, 19 bp, Artificial Sequence
  Synthetic
gcugtccactuagcccacc

SEQ ID NO: 20824 - DNA, 27 bp, Artificial Sequence
  Synthetic
cctgcatgugactaagaagaacaugat

SEQ ID NO: 20825 - DNA, 21 bp, Artificial Sequence
  Synthetic
cctcccugctccttccaugag

SEQ ID NO: 20826 - DNA, 23 bp, Artificial Sequence
  Synthetic
gccagggaagcuctaggguaaat

SEQ ID NO: 20827 - DNA, 21 bp, Artificial Sequence
  Synthetic
tgugggagagaaguccccaaa

SEQ ID NO: 20828 - DNA, 25 bp, Artificial Sequence
  Synthetic
gacacaataacugggctcaatcuca

SEQ ID NO: 20829 - DNA, 19 bp, Artificial Sequence
  Synthetic
ctcctccagcucctccgua

SEQ ID NO: 20830 - DNA, 20 bp, Artificial Sequence
  Synthetic
gagatgcugcagcgagguat

SEQ ID NO: 20831 - DNA, 17 bp, Artificial Sequence
  Synthetic
cggugacgccgtagucg

SEQ ID NO: 20832 - DNA, 20 bp, Artificial Sequence
  Synthetic
ctggcucaccctgcttucat

SEQ ID NO: 20833 - DNA, 20 bp, Artificial Sequence
  Synthetic
gccagatgcauggctgaguc

SEQ ID NO: 20834 - DNA, 20 bp, Artificial Sequence
  Synthetic
ggaccaugctgtggtgucaa

SEQ ID NO: 20835 - DNA, 19 bp, Artificial Sequence
  Synthetic
ccctgagggugagacugac

SEQ ID NO: 20836 - DNA, 23 bp, Artificial Sequence
  Synthetic
tgtctgtatgugtgtcccccuaa

SEQ ID NO: 20837 - DNA, 20 bp, Artificial Sequence
  Synthetic
gaggttguctgtcgguacgt

SEQ ID NO: 20838 - DNA, 17 bp, Artificial Sequence
  Synthetic
ccagccucaggugcact

SEQ ID NO: 20839 - DNA, 28 bp, Artificial Sequence
  Synthetic
atgagaatccttuatttgtcccaacuga

SEQ ID NO: 20840 - DNA, 17 bp, Artificial Sequence
  Synthetic
ggutggguggcccagac

SEQ ID NO: 20841 - DNA, 27 bp, Artificial Sequence
  Synthetic
ggataaagaacagguggcatatacuca

SEQ ID NO: 20842 - DNA, 25 bp, Artificial Sequence
  Synthetic
acagtgagucaagaatucagcacat

SEQ ID NO: 20843 - DNA, 20 bp, Artificial Sequence
  Synthetic
tucccacaggaaggctugag

SEQ ID NO: 20844 - DNA, 21 bp, Artificial Sequence
  Synthetic
ccaacctgaguggtgtcagug

SEQ ID NO: 20845 - DNA, 20 bp, Artificial Sequence
  Synthetic
aggaggaaggcugguggaat

SEQ ID NO: 20846 - DNA, 21 bp, Artificial Sequence
  Synthetic
ccagctccucactgtcuccat

SEQ ID NO: 20847 - DNA, 21 bp, Artificial Sequence
  Synthetic
ggatgcucctcaguggcaaag

SEQ ID NO: 20848 - DNA, 25 bp, Artificial Sequence
  Synthetic
ctgaaaagaagcugaaggtcuccat

SEQ ID NO: 20849 - DNA, 24 bp, Artificial Sequence
  Synthetic
aactgttacacuggaagtcacugg

SEQ ID NO: 20850 - DNA, 22 bp, Artificial Sequence
  Synthetic
ggaacctcugtgtggtgugaat

SEQ ID NO: 20851 - DNA, 21 bp, Artificial Sequence
  Synthetic
tgaggacuatgccauggacga

SEQ ID NO: 20852 - DNA, 24 bp, Artificial Sequence
  Synthetic
actaaggcctugtgaggtatcuga

SEQ ID NO: 20853 - DNA, 24 bp, Artificial Sequence
  Synthetic
gcagccuaattcaggatugggaaa

SEQ ID NO: 20854 - DNA, 27 bp, Artificial Sequence
  Synthetic
gcttctggguaaggaaagtctcttuag

SEQ ID NO: 20855 - DNA, 22 bp, Artificial Sequence
  Synthetic
ggcagccutctccatgaaugag

SEQ ID NO: 20856 - DNA, 21 bp, Artificial Sequence
  Synthetic
ttttgctccuccgctaucaca

SEQ ID NO: 20857 - DNA, 29 bp, Artificial Sequence
  Synthetic
tggcatctaguaaaactgattaggagcua

SEQ ID NO: 20858 - DNA, 21 bp, Artificial Sequence
  Synthetic
ggagtctgcutggagctgaug

SEQ ID NO: 20859 - DNA, 24 bp, Artificial Sequence
  Synthetic
tgttugacgaagtccauaaaccct

SEQ ID NO: 20860 - DNA, 23 bp, Artificial Sequence
  Synthetic
cctacuagactggugccaggaaa

SEQ ID NO: 20861 - DNA, 26 bp, Artificial Sequence
  Synthetic
ttgctgtcautcatgactaugcagat

SEQ ID NO: 20862 - DNA, 23 bp, Artificial Sequence
  Synthetic
catgagagccautcagctgtuct

SEQ ID NO: 20863 - DNA, 21 bp, Artificial Sequence
  Synthetic
ggtacacguaggcaacuaggc

SEQ ID NO: 20864 - DNA, 26 bp, Artificial Sequence
  Synthetic
agtcugggagaacagatttctugaga

SEQ ID NO: 20865 - DNA, 22 bp, Artificial Sequence
  Synthetic
gccutttgattcugggaagcac

SEQ ID NO: 20866 - DNA, 25 bp, Artificial Sequence
  Synthetic
cggattccatucaaattcactgucc

SEQ ID NO: 20867 - DNA, 22 bp, Artificial Sequence
  Synthetic
gaggaggagcauccgtcuaaaa

SEQ ID NO: 20868 - DNA, 28 bp, Artificial Sequence
  Synthetic
tgggctctttatuaaacaacgagatgut

SEQ ID NO: 20869 - DNA, 29 bp, Artificial Sequence
  Synthetic
tcactatttatgtgutaggtggctttcug

SEQ ID NO: 20870 - DNA, 26 bp, Artificial Sequence
  Synthetic
ctcacacttaccuttccgaccaauag

SEQ ID NO: 20871 - DNA, 29 bp, Artificial Sequence
  Synthetic
cacaggtattattcucactaaggttggut

SEQ ID NO: 20872 - DNA, 33 bp, Artificial Sequence
  Synthetic
tgagactataactcuctactaagaagaacucaa

SEQ ID NO: 20873 - DNA, 28 bp, Artificial Sequence
  Synthetic
ggaagagcatuaagaagttggtttugaa

SEQ ID NO: 20874 - DNA, 25 bp, Artificial Sequence
  Synthetic
agtaggtgtaguaagagccttcugg

SEQ ID NO: 20875 - DNA, 28 bp, Artificial Sequence
  Synthetic
aatgacaaagaugaggattgaaatcugg

SEQ ID NO: 20876 - DNA, 21 bp, Artificial Sequence
  Synthetic
gccctccaaucttaggtuggt

SEQ ID NO: 20877 - DNA, 27 bp, Artificial Sequence
  Synthetic
tttttaagtaacugacctcuggcacaa

SEQ ID NO: 20878 - DNA, 28 bp, Artificial Sequence
  Synthetic
tcaaattacagucaactgcagaaaccua

SEQ ID NO: 20879 - DNA, 22 bp, Artificial Sequence
  Synthetic
cctggaggucttttugggacag

SEQ ID NO: 20880 - DNA, 25 bp, Artificial Sequence
  Synthetic
tcaagtgcutactagtuccaaaggc

SEQ ID NO: 20881 - DNA, 18 bp, Artificial Sequence
  Synthetic
accaggugggagcaggua

SEQ ID NO: 20882 - DNA, 25 bp, Artificial Sequence
  Synthetic
ctgcaaagaaauatacaugcgggaa

SEQ ID NO: 20883 - DNA, 24 bp, Artificial Sequence
  Synthetic
tcttuggaaccacaaauaccacct

SEQ ID NO: 20884 - DNA, 29 bp, Artificial Sequence
  Synthetic
agaaggagggaaaaagutaagtacaucag

SEQ ID NO: 20885 - DNA, 25 bp, Artificial Sequence
  Synthetic
acatctgcauttggttcuagcaaca

SEQ ID NO: 20886 - DNA, 29 bp, Artificial Sequence
  Synthetic
agatgtttgtgguttgttcatttcagaug

SEQ ID NO: 20887 - DNA, 27 bp, Artificial Sequence
  Synthetic
tcaatcatgtccutttgggaatctgut

SEQ ID NO: 20888 - DNA, 23 bp, Artificial Sequence
  Synthetic
cacaugacagaaaagcagcugaa

SEQ ID NO: 20889 - DNA, 26 bp, Artificial Sequence
  Synthetic
tagactcaaaucagcctaaactgucc

SEQ ID NO: 20890 - DNA, 18 bp, Artificial Sequence
  Synthetic
cgggcaggcaucactguc

SEQ ID NO: 20891 - DNA, 24 bp, Artificial Sequence
  Synthetic
tgtctcttucaggcaaagcacuaa

SEQ ID NO: 20892 - DNA, 20 bp, Artificial Sequence
  Synthetic
gtcgcttcauccccctucag

SEQ ID NO: 20893 - DNA, 23 bp, Artificial Sequence
  Synthetic
ccauagtcuaagaaggccaccag

SEQ ID NO: 20894 - DNA, 22 bp, Artificial Sequence
  Synthetic
cctagtgcucaggctagaucag

SEQ ID NO: 20895 - DNA, 18 bp, Artificial Sequence
  Synthetic
gcagcgcaaucgagtgug

SEQ ID NO: 20896 - DNA, 23 bp, Artificial Sequence
  Synthetic
caaagaugccctugagaggaagt

SEQ ID NO: 20897 - DNA, 20 bp, Artificial Sequence
  Synthetic
cctggacucgggtcguaaga

SEQ ID NO: 20898 - DNA, 24 bp, Artificial Sequence
  Synthetic
caggctgucaatactcaaguccag

SEQ ID NO: 20899 - DNA, 21 bp, Artificial Sequence
  Synthetic
ccactgcugccttaggcttut

SEQ ID NO: 20900 - DNA, 22 bp, Artificial Sequence
  Synthetic
tgttttggcuttctccatcugt

SEQ ID NO: 20901 - DNA, 22 bp, Artificial Sequence
  Synthetic
gaatgaacugcaagcccagtug

SEQ ID NO: 20902 - DNA, 21 bp, Artificial Sequence
  Synthetic
gcucctgatcttugggagggt

SEQ ID NO: 20903 - DNA, 20 bp, Artificial Sequence
  Synthetic
ctggaggugatgacugccaa

SEQ ID NO: 20904 - DNA, 17 bp, Artificial Sequence
  Synthetic
ggccugcttgctcugct

SEQ ID NO: 20905 - DNA, 17 bp, Artificial Sequence
  Synthetic
ccugcagcucgagcaca

SEQ ID NO: 20906 - DNA, 22 bp, Artificial Sequence
  Synthetic
agcttcuggctcttctcugact

SEQ ID NO: 20907 - DNA, 25 bp, Artificial Sequence
  Synthetic
gagaggaaaaauagcctcaucagca

SEQ ID NO: 20908 - DNA, 18 bp, Artificial Sequence
  Synthetic
gctgtcagccugctccug

SEQ ID NO: 20909 - DNA, 22 bp, Artificial Sequence
  Synthetic
ctgaaggaacagcuggcuaaga

SEQ ID NO: 20910 - DNA, 20 bp, Artificial Sequence
  Synthetic
cttcuccagggcaaggucag

SEQ ID NO: 20911 - DNA, 19 bp, Artificial Sequence
  Synthetic
gcagagcagaugggcaaug

SEQ ID NO: 20912 - DNA, 22 bp, Artificial Sequence
  Synthetic
ggagctcagcuagttcgttcug

SEQ ID NO: 20913 - DNA, 24 bp, Artificial Sequence
  Synthetic
ccaggaacagcugatgacttugaa

SEQ ID NO: 20914 - DNA, 21 bp, Artificial Sequence
  Synthetic
ctttcgtucccgcttatgcug

SEQ ID NO: 20915 - DNA, 24 bp, Artificial Sequence
  Synthetic
caaagaguccttgaaggucaccaa

SEQ ID NO: 20916 - DNA, 21 bp, Artificial Sequence
  Synthetic
cagccttcuccttctccagug

SEQ ID NO: 20917 - DNA, 21 bp, Artificial Sequence
  Synthetic
gagcagcagutgaaggaggua

SEQ ID NO: 20918 - DNA, 21 bp, Artificial Sequence
  Synthetic
tgaggtuggagatggagcuct

SEQ ID NO: 20919 - DNA, 22 bp, Artificial Sequence
  Synthetic
cucttgcugcaaacaacacaca

SEQ ID NO: 20920 - DNA, 21 bp, Artificial Sequence
  Synthetic
actcagctutgcacatguggt

SEQ ID NO: 20921 - DNA, 21 bp, Artificial Sequence
  Synthetic
cagctacaggaugcccucaat

SEQ ID NO: 20922 - DNA, 21 bp, Artificial Sequence
  Synthetic
aggaaugcagggagagctgua

SEQ ID NO: 20923 - DNA, 22 bp, Artificial Sequence
  Synthetic
acagauagccatgaugcagcag

SEQ ID NO: 20924 - DNA, 28 bp, Artificial Sequence
  Synthetic
ctctagaagtuaggaatgtgaggaaugg

SEQ ID NO: 20925 - DNA, 21 bp, Artificial Sequence
  Synthetic
tgaagagctcuccccaccuag

SEQ ID NO: 20926 - DNA, 22 bp, Artificial Sequence
  Synthetic
cctccccaguctggtatuccat

SEQ ID NO: 20927 - DNA, 26 bp, Artificial Sequence
  Synthetic
tgttttctacgutgttgtcatugcag

SEQ ID NO: 20928 - DNA, 25 bp, Artificial Sequence
  Synthetic
ggaagtaaggautttgctgctugag

SEQ ID NO: 20929 - DNA, 29 bp, Artificial Sequence
  Synthetic
cagttaaatgguaaagaccacaaagcaut

SEQ ID NO: 20930 - DNA, 27 bp, Artificial Sequence
  Synthetic
tgtgaaaacaaguaatagcugaaaggt

SEQ ID NO: 20931 - DNA, 26 bp, Artificial Sequence
  Synthetic
gtaautgttctcccugggaaaaacag

SEQ ID NO: 20932 - DNA, 25 bp, Artificial Sequence
  Synthetic
agcautttauaacacgagacgcagt

SEQ ID NO: 20933 - DNA, 22 bp, Artificial Sequence
  Synthetic
cctcucagaaccagaacctucc

SEQ ID NO: 20934 - DNA, 20 bp, Artificial Sequence
  Synthetic
tggcugtgcaacuggagaag

SEQ ID NO: 20935 - DNA, 29 bp, Artificial Sequence
  Synthetic
gggaatttagtgcautttccattctatug

SEQ ID NO: 20936 - DNA, 25 bp, Artificial Sequence
  Synthetic
tgacataggaugtacagatggguga

SEQ ID NO: 20937 - DNA, 25 bp, Artificial Sequence
  Synthetic
aatgtttttatcugtggtgggugga

SEQ ID NO: 20938 - DNA, 22 bp, Artificial Sequence
  Synthetic
ctctaatgcugcctgctttucc

SEQ ID NO: 20939 - DNA, 23 bp, Artificial Sequence
  Synthetic
gaccatttcaugacctgggtgua

SEQ ID NO: 20940 - DNA, 30 bp, Artificial Sequence
  Synthetic
aggaacttcttauagatgtcaagacctuct

SEQ ID NO: 20941 - DNA, 27 bp, Artificial Sequence
  Synthetic
tcctttagagaccuatttggagctaut

SEQ ID NO: 20942 - DNA, 29 bp, Artificial Sequence
  Synthetic
atgtgaaaaacuagagtctgtgaaaacut

SEQ ID NO: 20943 - DNA, 26 bp, Artificial Sequence
  Synthetic
tcagaatcagauggatgcacttctug

SEQ ID NO: 20944 - DNA, 22 bp, Artificial Sequence
  Synthetic
acctttgtaccugggagctgut

SEQ ID NO: 20945 - DNA, 31 bp, Artificial Sequence
  Synthetic
ggtcttcaaatcuctcattacaactcaucat

SEQ ID NO: 20946 - DNA, 17 bp, Artificial Sequence
  Synthetic
ccggugacactgtgcug

SEQ ID NO: 20947 - DNA, 17 bp, Artificial Sequence
  Synthetic
gggacccuccggctcut

SEQ ID NO: 20948 - DNA, 19 bp, Artificial Sequence
  Synthetic
ggtacugcaggguggaggt

SEQ ID NO: 20949 - DNA, 18 bp, Artificial Sequence
  Synthetic
gggctgcuaaccctcugt

SEQ ID NO: 20950 - DNA, 24 bp, Artificial Sequence
  Synthetic
ggacctgugggaagaaggaaatua

SEQ ID NO: 20951 - DNA, 22 bp, Artificial Sequence
  Synthetic
cattgacccuggtcttctccuc

SEQ ID NO: 20952 - DNA, 22 bp, Artificial Sequence
  Synthetic
cacutacgttttugccagagca

SEQ ID NO: 20953 - DNA, 20 bp, Artificial Sequence
  Synthetic
ccaggaaacagccucagcuc

SEQ ID NO: 20954 - DNA, 27 bp, Artificial Sequence
  Synthetic
gaacatgaaagaugtgtgtttcucaca

SEQ ID NO: 20955 - DNA, 23 bp, Artificial Sequence
  Synthetic
ggautcaaauaagcagccggaag

SEQ ID NO: 20956 - DNA, 19 bp, Artificial Sequence
  Synthetic
ctgttgccaugctguggaa

SEQ ID NO: 20957 - DNA, 28 bp, Artificial Sequence
  Synthetic
atcttgtgatuaagagaagaaggctguc

SEQ ID NO: 20958 - DNA, 29 bp, Artificial Sequence
  Synthetic
agattttcatcuaaatgttggacgtucct

SEQ ID NO: 20959 - DNA, 21 bp, Artificial Sequence
  Synthetic
ctcgatcccaccugctactuc

SEQ ID NO: 20960 - DNA, 20 bp, Artificial Sequence
  Synthetic
caacgtgcagcucctggaua

SEQ ID NO: 20961 - DNA, 24 bp, Artificial Sequence
  Synthetic
tgtttccuccaacaactgcaugat

SEQ ID NO: 20962 - DNA, 23 bp, Artificial Sequence
  Synthetic
tgattctagcuctgtccctucct

SEQ ID NO: 20963 - DNA, 30 bp, Artificial Sequence
  Synthetic
ggactgtttactacaugctggaagtataut

SEQ ID NO: 20964 - DNA, 20 bp, Artificial Sequence
  Synthetic
cgccgaugagggacatcaug

SEQ ID NO: 20965 - DNA, 21 bp, Artificial Sequence
  Synthetic
gcccagccugactttcuacag

SEQ ID NO: 20966 - DNA, 19 bp, Artificial Sequence
  Synthetic
cgcaccugcagcatuaagg

SEQ ID NO: 20967 - DNA, 23 bp, Artificial Sequence
  Synthetic
cccagctugaactcagtctcuaa

SEQ ID NO: 20968 - DNA, 20 bp, Artificial Sequence
  Synthetic
gatggagutggcguagccat

SEQ ID NO: 20969 - DNA, 23 bp, Artificial Sequence
  Synthetic
ctttctgtgggutcctcaacuga

SEQ ID NO: 20970 - DNA, 20 bp, Artificial Sequence
  Synthetic
gaagcugttgtugggcacag

SEQ ID NO: 20971 - DNA, 23 bp, Artificial Sequence
  Synthetic
aatgaccacaugtcaccuccaaa

SEQ ID NO: 20972 - DNA, 20 bp, Artificial Sequence
  Synthetic
cttagcagccuctgctcuga

SEQ ID NO: 20973 - DNA, 18 bp, Artificial Sequence
  Synthetic
ggctggugaatgcuggac

SEQ ID NO: 20974 - DNA, 27 bp, Artificial Sequence
  Synthetic
gcagutactccttugagacaccaaaaa

SEQ ID NO: 20975 - DNA, 28 bp, Artificial Sequence
  Synthetic
tctcctgattugcctgtaagagtttuag

SEQ ID NO: 20976 - DNA, 25 bp, Artificial Sequence
  Synthetic
tgaatgttugagacagcttcaccut

SEQ ID NO: 20977 - DNA, 27 bp, Artificial Sequence
  Synthetic
aatgggttuacagagagttgugaaact

SEQ ID NO: 20978 - DNA, 25 bp, Artificial Sequence
  Synthetic
gactctgtttugctttactgacugg

SEQ ID NO: 20979 - DNA, 25 bp, Artificial Sequence
  Synthetic
tgtatttggaacugtgaacctucat

SEQ ID NO: 20980 - DNA, 27 bp, Artificial Sequence
  Synthetic
caaataccctugttgttcttcguaaca

SEQ ID NO: 20981 - DNA, 20 bp, Artificial Sequence
  Synthetic
tgatucccccggaaccaauc

SEQ ID NO: 20982 - DNA, 25 bp, Artificial Sequence
  Synthetic
ggaatgagaagcauctttgccttut

SEQ ID NO: 20983 - DNA, 23 bp, Artificial Sequence
  Synthetic
tcacctcctauatgcccagaucc

SEQ ID NO: 20984 - DNA, 20 bp, Artificial Sequence
  Synthetic
tcacagcuggaggaguaggt

SEQ ID NO: 20985 - DNA, 19 bp, Artificial Sequence
  Synthetic
cuccaaagaggccuccagt

SEQ ID NO: 20986 - DNA, 20 bp, Artificial Sequence
  Synthetic
ggaaucacagcuggcagagt

SEQ ID NO: 20987 - DNA, 18 bp, Artificial Sequence
  Synthetic
cccagcuaccccatccuc

SEQ ID NO: 20988 - DNA, 20 bp, Artificial Sequence
  Synthetic
tggagtagtugggcctccut

SEQ ID NO: 20989 - DNA, 18 bp, Artificial Sequence
  Synthetic
cagcugcaactccuccct

SEQ ID NO: 20990 - DNA, 19 bp, Artificial Sequence
  Synthetic
ggtagcugggcctccttut

SEQ ID NO: 20991 - DNA, 22 bp, Artificial Sequence
  Synthetic
aaggaggtcuagctaccccauc

SEQ ID NO: 20992 - DNA, 18 bp, Artificial Sequence
  Synthetic
gtgtggaugccccttugg

SEQ ID NO: 20993 - DNA, 17 bp, Artificial Sequence
  Synthetic
ccccagcugcaacucct

SEQ ID NO: 20994 - DNA, 22 bp, Artificial Sequence
  Synthetic
gggtagtgutactccttuggga

SEQ ID NO: 20995 - DNA, 27 bp, Artificial Sequence
  Synthetic
cagagaauagtctttcttuccaaggct

SEQ ID NO: 20996 - DNA, 22 bp, Artificial Sequence
  Synthetic
gcacagacuttgggattucagg

SEQ ID NO: 20997 - DNA, 27 bp, Artificial Sequence
  Synthetic
ctaaaaaccacccagutaaggaaggua

SEQ ID NO: 20998 - DNA, 23 bp, Artificial Sequence
  Synthetic
ttttctttgcuagggtggctuca

SEQ ID NO: 20999 - DNA, 23 bp, Artificial Sequence
  Synthetic
cucaccaucaagaaagacccuac

SEQ ID NO: 21000 - DNA, 25 bp, Artificial Sequence
  Synthetic
gaggagaaacacaaguagctaccuc

SEQ ID NO: 21001 - DNA, 27 bp, Artificial Sequence
  Synthetic
aaaagctctccuaatgccacttaucat

SEQ ID NO: 21002 - DNA, 25 bp, Artificial Sequence
  Synthetic
gcactaggaccugtttgaccuaaaa

SEQ ID NO: 21003 - DNA, 23 bp, Artificial Sequence
  Synthetic
tcaactcaguctcttcctguggt

SEQ ID NO: 21004 - DNA, 24 bp, Artificial Sequence
  Synthetic
gagctgacagagutatcacugacc

SEQ ID NO: 21005 - DNA, 24 bp, Artificial Sequence
  Synthetic
tgatagcuccaactcugaaaggga

SEQ ID NO: 21006 - DNA, 22 bp, Artificial Sequence
  Synthetic
agtgacacucaaggcugaagac

SEQ ID NO: 21007 - DNA, 24 bp, Artificial Sequence
  Synthetic
gtgtttccuaggaggcatgttgua

SEQ ID NO: 21008 - DNA, 26 bp, Artificial Sequence
  Synthetic
ctggtgtaacuctttatttgucccct

SEQ ID NO: 21009 - DNA, 27 bp, Artificial Sequence
  Synthetic
gatgttccaugtaatacuggaccaact

SEQ ID NO: 21010 - DNA, 29 bp, Artificial Sequence
  Synthetic
acatgagagtgcutgaaaacactaatgua

SEQ ID NO: 21011 - DNA, 25 bp, Artificial Sequence
  Synthetic
acccaatgttuccaccataggatuc

SEQ ID NO: 21012 - DNA, 27 bp, Artificial Sequence
  Synthetic
tctttttctgtgacuctttgacacgua

SEQ ID NO: 21013 - DNA, 32 bp, Artificial Sequence
  Synthetic
cagggcaggatguttttatatctatttttgut

SEQ ID NO: 21014 - DNA, 22 bp, Artificial Sequence
  Synthetic
ggtgaatgacutttggcggaug

SEQ ID NO: 21015 - DNA, 30 bp, Artificial Sequence
  Synthetic
atctgacatguctgatacttuaaaaacagt

SEQ ID NO: 21016 - DNA, 21 bp, Artificial Sequence
  Synthetic
ctggaggaggugcaccauaag

SEQ ID NO: 21017 - DNA, 24 bp, Artificial Sequence
  Synthetic
acagttaaagagcuaggagugggt

SEQ ID NO: 21018 - DNA, 25 bp, Artificial Sequence
  Synthetic
cacatgtgcacucttccaaattuca

SEQ ID NO: 21019 - DNA, 31 bp, Artificial Sequence
  Synthetic
ggtaaaaagaattuccttcagcactactuac

SEQ ID NO: 21020 - DNA, 17 bp, Artificial Sequence
  Synthetic
cagagcgcugggcuagg

SEQ ID NO: 21021 - DNA, 17 bp, Artificial Sequence
  Synthetic
gcugcagggccagguat

SEQ ID NO: 21022 - DNA, 19 bp, Artificial Sequence
  Synthetic
gctccagcucgtacaccug

SEQ ID NO: 21023 - DNA, 19 bp, Artificial Sequence
  Synthetic
cgcttacaguctcccgcut

SEQ ID NO: 21024 - DNA, 17 bp, Artificial Sequence
  Synthetic
gccgccgucatgtggua

SEQ ID NO: 21025 - DNA, 21 bp, Artificial Sequence
  Synthetic
tccccuggaggaaagcuacaa

SEQ ID NO: 21026 - DNA, 23 bp, Artificial Sequence
  Synthetic
ccctttggttuggctatgaccuc

SEQ ID NO: 21027 - DNA, 23 bp, Artificial Sequence
  Synthetic
cccagttgutgaaagctcuggaa

SEQ ID NO: 21028 - DNA, 30 bp, Artificial Sequence
  Synthetic
ccttttcactaguttcagtttctgtucaac

SEQ ID NO: 21029 - DNA, 23 bp, Artificial Sequence
  Synthetic
gctgtccttuctctaggcatcut

SEQ ID NO: 21030 - DNA, 23 bp, Artificial Sequence
  Synthetic
acaacgggaautcaatgccaugt

SEQ ID NO: 21031 - DNA, 28 bp, Artificial Sequence
  Synthetic
catttggaaaaugaaggccugaaaaaga

SEQ ID NO: 21032 - DNA, 23 bp, Artificial Sequence
  Synthetic
ccatgatgugcagcttcuccaat

SEQ ID NO: 21033 - DNA, 23 bp, Artificial Sequence
  Synthetic
cauaaccaguagaaaaggctguc

SEQ ID NO: 21034 - DNA, 26 bp, Artificial Sequence
  Synthetic
cgtgaagaugaaacaagaattgucca

SEQ ID NO: 21035 - DNA, 25 bp, Artificial Sequence
  Synthetic
acctcttttucccttccugaaacag

SEQ ID NO: 21036 - DNA, 24 bp, Artificial Sequence
  Synthetic
ccagttcatcuttgagaagguggt

SEQ ID NO: 21037 - DNA, 21 bp, Artificial Sequence
  Synthetic
ctggtaagttuccccagccua

SEQ ID NO: 21038 - DNA, 30 bp, Artificial Sequence
  Synthetic
gctattcattaccgugtgctgtaaattuat

SEQ ID NO: 21039 - DNA, 28 bp, Artificial Sequence
  Synthetic
aacggaaactguaaaacaagaaaaugct

SEQ ID NO: 21040 - DNA, 25 bp, Artificial Sequence
  Synthetic
gctgaggaaugtttcagtgactucc

SEQ ID NO: 21041 - DNA, 25 bp, Artificial Sequence
  Synthetic
gutgtatgaagatgugagccgagaa

SEQ ID NO: 21042 - DNA, 21 bp, Artificial Sequence
  Synthetic
acagagctcguccctgtacut

SEQ ID NO: 21043 - DNA, 22 bp, Artificial Sequence
  Synthetic
tttggaugagccagctacugag

SEQ ID NO: 21044 - DNA, 24 bp, Artificial Sequence
  Synthetic
gtctggagatutctgtgctcauct

SEQ ID NO: 21045 - DNA, 27 bp, Artificial Sequence
  Synthetic
gctggaaagacuagaaatggaacauga

SEQ ID NO: 21046 - DNA, 18 bp, Artificial Sequence
  Synthetic
cacacucctgggugagct

SEQ ID NO: 21047 - DNA, 24 bp, Artificial Sequence
  Synthetic
agaagcccaguttcagtctgatug

SEQ ID NO: 21048 - DNA, 20 bp, Artificial Sequence
  Synthetic
cttcccuctcccgcucaaag

SEQ ID NO: 21049 - DNA, 20 bp, Artificial Sequence
  Synthetic
acatcaugaggccactugca

SEQ ID NO: 21050 - DNA, 25 bp, Artificial Sequence
  Synthetic
tttcatctgtucaatgaccagcuct

SEQ ID NO: 21051 - DNA, 27 bp, Artificial Sequence
  Synthetic
cattccttagutaaactggatguccct

SEQ ID NO: 21052 - DNA, 25 bp, Artificial Sequence
  Synthetic
gcattgctccugttcttttgaguaa

SEQ ID NO: 21053 - DNA, 30 bp, Artificial Sequence
  Synthetic
tgagaatcugacaaacaaactucagagaaa

SEQ ID NO: 21054 - DNA, 18 bp, Artificial Sequence
  Synthetic
gguggtgggugaggagga

SEQ ID NO: 21055 - DNA, 26 bp, Artificial Sequence
  Synthetic
gaucaggtggucagagaaaaagagaa

SEQ ID NO: 21056 - DNA, 25 bp, Artificial Sequence
  Synthetic
ttcaacccttcuccagtttgtcaut

SEQ ID NO: 21057 - DNA, 20 bp, Artificial Sequence
  Synthetic
ggatgatgggaugggccaug

SEQ ID NO: 21058 - DNA, 27 bp, Artificial Sequence
  Synthetic
gcatgtggucaactacactttuaccat

SEQ ID NO: 21059 - DNA, 26 bp, Artificial Sequence
  Synthetic
actgcaagaaguttgtgaagattugg

SEQ ID NO: 21060 - DNA, 23 bp, Artificial Sequence
  Synthetic
gtcactucaggaaactccuccac

SEQ ID NO: 21061 - DNA, 22 bp, Artificial Sequence
  Synthetic
gagtggcagcuaagaacugaga

SEQ ID NO: 21062 - DNA, 31 bp, Artificial Sequence
  Synthetic
ccaggtagctcguattttactaatgaaauct

SEQ ID NO: 21063 - DNA, 20 bp, Artificial Sequence
  Synthetic
catcauggcgaaggcatcut

SEQ ID NO: 21064 - DNA, 22 bp, Artificial Sequence
  Synthetic
gagactagaggcugggtcuaca

SEQ ID NO: 21065 - DNA, 23 bp, Artificial Sequence
  Synthetic
tgttgctaatguggaaccgtgut

SEQ ID NO: 21066 - DNA, 23 bp, Artificial Sequence
  Synthetic
gctcttcauagggcagggtauct

SEQ ID NO: 21067 - DNA, 22 bp, Artificial Sequence
  Synthetic
tgggaggaagcaaauacugcaa

SEQ ID NO: 21068 - DNA, 21 bp, Artificial Sequence
  Synthetic
agatgtggguccatcctcugt

SEQ ID NO: 21069 - DNA, 25 bp, Artificial Sequence
  Synthetic
agaccacatggcuctgatatctgua

SEQ ID NO: 21070 - DNA, 27 bp, Artificial Sequence
  Synthetic
cctgatagaauaaaagaggctcagcua

SEQ ID NO: 21071 - DNA, 24 bp, Artificial Sequence
  Synthetic
ctttacctuggccaaacagttguc

SEQ ID NO: 21072 - DNA, 28 bp, Artificial Sequence
  Synthetic
atattattggaguctgtgcgactuaaga

SEQ ID NO: 21073 - DNA, 24 bp, Artificial Sequence
  Synthetic
actgggaaggaaguccucattaua

SEQ ID NO: 21074 - DNA, 25 bp, Artificial Sequence
  Synthetic
ggatagcttugccttgcaactttuc

SEQ ID NO: 21075 - DNA, 32 bp, Artificial Sequence
  Synthetic
aaaagtcauaagacctctttattucacagaac

SEQ ID NO: 21076 - DNA, 23 bp, Artificial Sequence
  Synthetic
gaaagaacccccuggttgtaaut

SEQ ID NO: 21077 - DNA, 30 bp, Artificial Sequence
  Synthetic
cactcatgtatctutgcttttcttttggua

SEQ ID NO: 21078 - DNA, 24 bp, Artificial Sequence
  Synthetic
tagtcaagcugtaccattugcaac

SEQ ID NO: 21079 - DNA, 28 bp, Artificial Sequence
  Synthetic
gagctctgucaaggagtaaagtacaaut

SEQ ID NO: 21080 - DNA, 28 bp, Artificial Sequence
  Synthetic
actagaatgcaagaautacaacacuaca

SEQ ID NO: 21081 - DNA, 30 bp, Artificial Sequence
  Synthetic
ccaagctttgauctgtattaagcaatucaa

SEQ ID NO: 21082 - DNA, 21 bp, Artificial Sequence
  Synthetic
gtagtgcagutcctcctgcuc

SEQ ID NO: 21083 - DNA, 19 bp, Artificial Sequence
  Synthetic
agcgacacugcgatuccat

SEQ ID NO: 21084 - DNA, 23 bp, Artificial Sequence
  Synthetic
ttcctgctaaguttccagaggug

SEQ ID NO: 21085 - DNA, 21 bp, Artificial Sequence
  Synthetic
cagaggcuctcaagctguaga

SEQ ID NO: 21086 - DNA, 24 bp, Artificial Sequence
  Synthetic
gtcuttctttctgauacagccact

SEQ ID NO: 21087 - DNA, 25 bp, Artificial Sequence
  Synthetic
cgatcaatgccutctctctctcuct

SEQ ID NO: 21088 - DNA, 17 bp, Artificial Sequence
  Synthetic
actgccuccccgagugt

SEQ ID NO: 21089 - DNA, 21 bp, Artificial Sequence
  Synthetic
cgcatgcugcccggatauaaa

SEQ ID NO: 21090 - DNA, 28 bp, Artificial Sequence
  Synthetic
tgtttgcaaggaauctagaagaattuca

SEQ ID NO: 21091 - DNA, 23 bp, Artificial Sequence
  Synthetic
cctgatccacugaattgacugct

SEQ ID NO: 21092 - DNA, 28 bp, Artificial Sequence
  Synthetic
gtttgattguctgtcaataaaugaaggg

SEQ ID NO: 21093 - DNA, 24 bp, Artificial Sequence
  Synthetic
cttactugacagcctggtaaucca

SEQ ID NO: 21094 - DNA, 28 bp, Artificial Sequence
  Synthetic
gctgtgtgcautagctacaaataguaac

SEQ ID NO: 21095 - DNA, 28 bp, Artificial Sequence
  Synthetic
gctatauaaagaaaaaggcutaccgtut

SEQ ID NO: 21096 - DNA, 28 bp, Artificial Sequence
  Synthetic
tctctttccauctagagttatccuccac

SEQ ID NO: 21097 - DNA, 23 bp, Artificial Sequence
  Synthetic
gctcaccuagaatgctgtcugat

SEQ ID NO: 21098 - DNA, 22 bp, Artificial Sequence
  Synthetic
cactgagtuaacccaggtgugt

SEQ ID NO: 21099 - DNA, 21 bp, Artificial Sequence
  Synthetic
agaggctctuaccagggagug

SEQ ID NO: 21100 - DNA, 27 bp, Artificial Sequence
  Synthetic
ccttaactttaggutggaactcaucgg

SEQ ID NO: 21101 - DNA, 28 bp, Artificial Sequence
  Synthetic
ctgtcugcattatttcugaaaaccaaca

SEQ ID NO: 21102 - DNA, 22 bp, Artificial Sequence
  Synthetic
gcttacgcgugcgggatatuaa

SEQ ID NO: 21103 - DNA, 25 bp, Artificial Sequence
  Synthetic
tgttctagacuaaggatgacugcca

SEQ ID NO: 21104 - DNA, 19 bp, Artificial Sequence
  Synthetic
gcucaagggacucagccaa

SEQ ID NO: 21105 - DNA, 17 bp, Artificial Sequence
  Synthetic
ggcatggugggctccug

SEQ ID NO: 21106 - DNA, 20 bp, Artificial Sequence
  Synthetic
ccgcccuggataacgtctut

SEQ ID NO: 21107 - DNA, 19 bp, Artificial Sequence
  Synthetic
gtgtgccucgaagcactug

SEQ ID NO: 21108 - DNA, 20 bp, Artificial Sequence
  Synthetic
tgagctcaagugcgacauca

SEQ ID NO: 21109 - DNA, 19 bp, Artificial Sequence
  Synthetic
gatcagcucctcggtcucg

SEQ ID NO: 21110 - DNA, 20 bp, Artificial Sequence
  Synthetic
tggctucgacgagtucaagg

SEQ ID NO: 21111 - DNA, 29 bp, Artificial Sequence
  Synthetic
tttctgtcaaauggagatgatctcttcug

SEQ ID NO: 21112 - DNA, 19 bp, Artificial Sequence
  Synthetic
cctgaccuggctctgugac

SEQ ID NO: 21113 - DNA, 19 bp, Artificial Sequence
  Synthetic
agccaaccutgcctcctuc

SEQ ID NO: 21114 - DNA, 20 bp, Artificial Sequence
  Synthetic
tcagaugccgaaaacucggt

SEQ ID NO: 21115 - DNA, 20 bp, Artificial Sequence
  Synthetic
gactgtccucagcacagcut

SEQ ID NO: 21116 - DNA, 19 bp, Artificial Sequence
  Synthetic
ccgatgcugagccucacag

SEQ ID NO: 21117 - DNA, 21 bp, Artificial Sequence
  Synthetic
ggagaccaaguccgaauaggg

SEQ ID NO: 21118 - DNA, 21 bp, Artificial Sequence
  Synthetic
gcttgacaugtcttccguggt

SEQ ID NO: 21119 - DNA, 24 bp, Artificial Sequence
  Synthetic
gtggugggaatgtaatuggagagg

SEQ ID NO: 21120 - DNA, 22 bp, Artificial Sequence
  Synthetic
tgaatcccugacgcttggttut

SEQ ID NO: 21121 - DNA, 22 bp, Artificial Sequence
  Synthetic
aaaccagagguctgtcttcugc

SEQ ID NO: 21122 - DNA, 21 bp, Artificial Sequence
  Synthetic
cugcccaguccagaagatuag

SEQ ID NO: 21123 - DNA, 22 bp, Artificial Sequence
  Synthetic
gagcucagaaagcugaggaagt

SEQ ID NO: 21124 - DNA, 19 bp, Artificial Sequence
  Synthetic
gctggcccagcaugtcuac

SEQ ID NO: 21125 - DNA, 20 bp, Artificial Sequence
  Synthetic
gcacucagcagctccaugaa

SEQ ID NO: 21126 - DNA, 22 bp, Artificial Sequence
  Synthetic
tgutgtatgtguagcaggcact

SEQ ID NO: 21127 - DNA, 24 bp, Artificial Sequence
  Synthetic
ccccaatcuacctggacattctug

SEQ ID NO: 21128 - DNA, 21 bp, Artificial Sequence
  Synthetic
tctuatgagcccucccccaat

SEQ ID NO: 21129 - DNA, 24 bp, Artificial Sequence
  Synthetic
gcatcatguaccggaagttcacua

SEQ ID NO: 21130 - DNA, 19 bp, Artificial Sequence
  Synthetic
accauacccgaggcgauct

SEQ ID NO: 21131 - DNA, 27 bp, Artificial Sequence
  Synthetic
tctccttgatcucctgatttctctcug

SEQ ID NO: 21132 - DNA, 21 bp, Artificial Sequence
  Synthetic
ccttuccaaaggctcccucac

SEQ ID NO: 21133 - DNA, 21 bp, Artificial Sequence
  Synthetic
tcuccctgtgucaccaaacga

SEQ ID NO: 21134 - DNA, 21 bp, Artificial Sequence
  Synthetic
catgccaaugaccacagtguc

SEQ ID NO: 21135 - DNA, 20 bp, Artificial Sequence
  Synthetic
ctgcgtcuctcttggtgugt

SEQ ID NO: 21136 - DNA, 22 bp, Artificial Sequence
  Synthetic
ccagtggguttttggcaaugag

SEQ ID NO: 21137 - DNA, 19 bp, Artificial Sequence
  Synthetic
ctgcacuggctgcacaaug

SEQ ID NO: 21138 - DNA, 24 bp, Artificial Sequence
  Synthetic
tcaagactacagugtgatcacucc

SEQ ID NO: 21139 - DNA, 22 bp, Artificial Sequence
  Synthetic
gagagggugacaacgctgtuat

SEQ ID NO: 21140 - DNA, 21 bp, Artificial Sequence
  Synthetic
ccagcacutcagtaccuggac

SEQ ID NO: 21141 - DNA, 28 bp, Artificial Sequence
  Synthetic
gagcattatttgugccagacttgtttua

SEQ ID NO: 21142 - DNA, 22 bp, Artificial Sequence
  Synthetic
tcccattgcugttccctgaauc

SEQ ID NO: 21143 - DNA, 21 bp, Artificial Sequence
  Synthetic
gautttcttgcugggaagcgt

SEQ ID NO: 21144 - DNA, 28 bp, Artificial Sequence
  Synthetic
catggtuccaggcaagtaauaacaaaat

SEQ ID NO: 21145 - DNA, 19 bp, Artificial Sequence
  Synthetic
cgagaaccuggctcgcauc

SEQ ID NO: 21146 - DNA, 17 bp, Artificial Sequence
  Synthetic
gcgtgaugcgccgguaa

SEQ ID NO: 21147 - DNA, 22 bp, Artificial Sequence
  Synthetic
cagaaccttccucctcttccuc

SEQ ID NO: 21148 - DNA, 27 bp, Artificial Sequence
  Synthetic
ttctttctgtagcucccttgttttcut

SEQ ID NO: 21149 - DNA, 27 bp, Artificial Sequence
  Synthetic
cgctgacatgtuagaggaggagtatua

SEQ ID NO: 21150 - DNA, 26 bp, Artificial Sequence
  Synthetic
ctcatgaccacautctctgtgaagut

SEQ ID NO: 21151 - DNA, 28 bp, Artificial Sequence
  Synthetic
tctcggaagaauaatttcatcaccaguc

SEQ ID NO: 21152 - DNA, 20 bp, Artificial Sequence
  Synthetic
cacgcccuctacctgaucaa

SEQ ID NO: 21153 - DNA, 21 bp, Artificial Sequence
  Synthetic
cggccgcutatgataaacugg

SEQ ID NO: 21154 - DNA, 23 bp, Artificial Sequence
  Synthetic
acctggaugttgagaguggagat

SEQ ID NO: 21155 - DNA, 23 bp, Artificial Sequence
  Synthetic
agaagcucaacgtgtcuacgaag

SEQ ID NO: 21156 - DNA, 32 bp, Artificial Sequence
  Synthetic
aaaaatacuaagaggcccaatatauccagaaa

SEQ ID NO: 21157 - DNA, 23 bp, Artificial Sequence
  Synthetic
tgaaatggucgggtacagacuct

SEQ ID NO: 21158 - DNA, 20 bp, Artificial Sequence
  Synthetic
ccacgcugagagtcgtctua

SEQ ID NO: 21159 - DNA, 29 bp, Artificial Sequence
  Synthetic
tatttttcctgacauactcttgacaguct

SEQ ID NO: 21160 - DNA, 27 bp, Artificial Sequence
  Synthetic
agatcctagtuacccaactttctcuga

SEQ ID NO: 21161 - DNA, 22 bp, Artificial Sequence
  Synthetic
ccugacaaagaggaggutagut

SEQ ID NO: 21162 - DNA, 24 bp, Artificial Sequence
  Synthetic
tttggtaagcugcccatctacaut

SEQ ID NO: 21163 - DNA, 27 bp, Artificial Sequence
  Synthetic
ccatgtaucataactgctugcgaagat

SEQ ID NO: 21164 - DNA, 24 bp, Artificial Sequence
  Synthetic
ggcatgtgtutctacagagcugat

SEQ ID NO: 21165 - DNA, 25 bp, Artificial Sequence
  Synthetic
actaaacaautcgacagtucaggca

SEQ ID NO: 21166 - DNA, 25 bp, Artificial Sequence
  Synthetic
aggtcctcttcuaagtcctccatut

SEQ ID NO: 21167 - DNA, 24 bp, Artificial Sequence
  Synthetic
cttgaaaaagugaagtcctgcuca

SEQ ID NO: 21168 - DNA, 23 bp, Artificial Sequence
  Synthetic
gtgacttctuccttggacctgut

SEQ ID NO: 21169 - DNA, 22 bp, Artificial Sequence
  Synthetic
gctgggcccacugaagataaug

SEQ ID NO: 21170 - DNA, 24 bp, Artificial Sequence
  Synthetic
gcactgugcaagaatgtttttcug

SEQ ID NO: 21171 - DNA, 25 bp, Artificial Sequence
  Synthetic
aaatctcccagugacactcttgaug

SEQ ID NO: 21172 - DNA, 25 bp, Artificial Sequence
  Synthetic
gtcgtgagtaguaagttcactgcua

SEQ ID NO: 21173 - DNA, 27 bp, Artificial Sequence
  Synthetic
accagaaaaaggugttgatacatucct

SEQ ID NO: 21174 - DNA, 21 bp, Artificial Sequence
  Synthetic
tgcttttgcucaccacuaggg

SEQ ID NO: 21175 - DNA, 29 bp, Artificial Sequence
  Synthetic
tggagaaaagacauctatcacacttgaug

SEQ ID NO: 21176 - DNA, 30 bp, Artificial Sequence
  Synthetic
taacaccttaatutgagaatacgatucact

SEQ ID NO: 21177 - DNA, 22 bp, Artificial Sequence
  Synthetic
ccactugcccagtattgtuggt

SEQ ID NO: 21178 - DNA, 21 bp, Artificial Sequence
  Synthetic
gctgcugggcactagtatcuc

SEQ ID NO: 21179 - DNA, 23 bp, Artificial Sequence
  Synthetic
gacctcuccaatctacugggact

SEQ ID NO: 21180 - DNA, 21 bp, Artificial Sequence
  Synthetic
acctgtccaugcagtttgucc

SEQ ID NO: 21181 - DNA, 21 bp, Artificial Sequence
  Synthetic
ttggagcccutctttgtucgt

SEQ ID NO: 21182 - DNA, 23 bp, Artificial Sequence
  Synthetic
ggcattcautcccagguaggact

SEQ ID NO: 21183 - DNA, 26 bp, Artificial Sequence
  Synthetic
ccactttataugggctgtcgtuacac

SEQ ID NO: 21184 - DNA, 23 bp, Artificial Sequence
  Synthetic
catttucaggaggacucccaagg

SEQ ID NO: 21185 - DNA, 27 bp, Artificial Sequence
  Synthetic
gtgcctctucaatccattctttuacag

SEQ ID NO: 21186 - DNA, 22 bp, Artificial Sequence
  Synthetic
gaagtcaucgtcaguccccaaa

SEQ ID NO: 21187 - DNA, 20 bp, Artificial Sequence
  Synthetic
gggagaauctggagcugacc

SEQ ID NO: 21188 - DNA, 22 bp, Artificial Sequence
  Synthetic
ccaacgtcauccaggttgtuct

SEQ ID NO: 21189 - DNA, 21 bp, Artificial Sequence
  Synthetic
cgagcccutaggacaaugacc

SEQ ID NO: 21190 - DNA, 21 bp, Artificial Sequence
  Synthetic
ggctcagcgaguttccactua

SEQ ID NO: 21191 - DNA, 23 bp, Artificial Sequence
  Synthetic
ccagacacaucacatctctccug

SEQ ID NO: 21192 - DNA, 20 bp, Artificial Sequence
  Synthetic
cccactgcaucaggttccuc

SEQ ID NO: 21193 - DNA, 28 bp, Artificial Sequence
  Synthetic
agatttggaaaagacgcuagaagcauat

SEQ ID NO: 21194 - DNA, 25 bp, Artificial Sequence
  Synthetic
gtaatguagauagagggttgtggug

SEQ ID NO: 21195 - DNA, 26 bp, Artificial Sequence
  Synthetic
gcaattagagccuttaggttggucaa

SEQ ID NO: 21196 - DNA, 22 bp, Artificial Sequence
  Synthetic
aagacccatccuggctcatcua

SEQ ID NO: 21197 - DNA, 24 bp, Artificial Sequence
  Synthetic
gtcttcuacttcagcugcagagag

SEQ ID NO: 21198 - DNA, 21 bp, Artificial Sequence
  Synthetic
tggaacagaggcuctctcuca

SEQ ID NO: 21199 - DNA, 26 bp, Artificial Sequence
  Synthetic
gttccttcttuccctcccttactuag

SEQ ID NO: 21200 - DNA, 20 bp, Artificial Sequence
  Synthetic
ctgautcacagcuccaccca

SEQ ID NO: 21201 - DNA, 19 bp, Artificial Sequence
  Synthetic
ccuccaccgcagtgcuaat

SEQ ID NO: 21202 - DNA, 20 bp, Artificial Sequence
  Synthetic
gctcctggagugcgcttuat

SEQ ID NO: 21203 - DNA, 21 bp, Artificial Sequence
  Synthetic
acccucttaacuccgggacag

SEQ ID NO: 21204 - DNA, 25 bp, Artificial Sequence
  Synthetic
gtagcatctguatcaggcaaaguca

SEQ ID NO: 21205 - DNA, 32 bp, Artificial Sequence
  Synthetic
tagctaactaactucagaacaccaacttauac

SEQ ID NO: 21206 - DNA, 20 bp, Artificial Sequence
  Synthetic
ccagtgugcaggguggcaag

SEQ ID NO: 21207 - DNA, 27 bp, Artificial Sequence
  Synthetic
ctcatcttgggccugtgttatctccua

SEQ ID NO: 21208 - DNA, 24 bp, Artificial Sequence
  Synthetic
agttggcaaaacaucttgtugagg

SEQ ID NO: 21209 - DNA, 18 bp, Artificial Sequence
  Synthetic
gggtugcaggaggtgcut

SEQ ID NO: 21210 - DNA, 20 bp, Artificial Sequence
  Synthetic
cagcccaacccutgtcctua

SEQ ID NO: 21211 - DNA, 22 bp, Artificial Sequence
  Synthetic
tgtgaguggatccatuggaagg

SEQ ID NO: 21212 - DNA, 23 bp, Artificial Sequence
  Synthetic
gccttcttccucctcctccauag

SEQ ID NO: 21213 - DNA, 22 bp, Artificial Sequence
  Synthetic
cttctcagagcuggatggacug

SEQ ID NO: 21214 - DNA, 23 bp, Artificial Sequence
  Synthetic
agaaaagaaaacugcccccacua

SEQ ID NO: 21215 - DNA, 24 bp, Artificial Sequence
  Synthetic
caggtgatuaagtacgtgcuccag

SEQ ID NO: 21216 - DNA, 21 bp, Artificial Sequence
  Synthetic
gggtacucacgagtgatgcug

SEQ ID NO: 21217 - DNA, 19 bp, Artificial Sequence
  Synthetic
ctccagugacctgcucgaa

SEQ ID NO: 21218 - DNA, 23 bp, Artificial Sequence
  Synthetic
ctcgagtugaacagtggagaguc

SEQ ID NO: 21219 - DNA, 25 bp, Artificial Sequence
  Synthetic
ctaactatctgtucccaaccccauc

SEQ ID NO: 21220 - DNA, 19 bp, Artificial Sequence
  Synthetic
agacauagcagggcgctuc

SEQ ID NO: 21221 - DNA, 22 bp, Artificial Sequence
  Synthetic
gtactaaccccaggutgagguc

SEQ ID NO: 21222 - DNA, 20 bp, Artificial Sequence
  Synthetic
ggagcuctagcugggagacc

SEQ ID NO: 21223 - DNA, 20 bp, Artificial Sequence
  Synthetic
gccaauaaggcggagagugt

SEQ ID NO: 21224 - DNA, 18 bp, Artificial Sequence
  Synthetic
gggtuagagcccgaggug

SEQ ID NO: 21225 - DNA, 20 bp, Artificial Sequence
  Synthetic
cactagccutggtcccugag

SEQ ID NO: 21226 - DNA, 20 bp, Artificial Sequence
  Synthetic
tgcuatcacuggaggaccca

SEQ ID NO: 21227 - DNA, 21 bp, Artificial Sequence
  Synthetic
ctgggaggugagaaaaggugt

SEQ ID NO: 21228 - DNA, 21 bp, Artificial Sequence
  Synthetic
ggcgagaggaacucactctuc

SEQ ID NO: 21229 - DNA, 19 bp, Artificial Sequence
  Synthetic
ctgatgccuccttcccgut

SEQ ID NO: 21230 - DNA, 21 bp, Artificial Sequence
  Synthetic
ggcagaggucttctccagtuc

SEQ ID NO: 21231 - DNA, 23 bp, Artificial Sequence
  Synthetic
cttagtggatucttcgcagccua

SEQ ID NO: 21232 - DNA, 23 bp, Artificial Sequence
  Synthetic
gcaagagcagautcaagagcugt

SEQ ID NO: 21233 - DNA, 21 bp, Artificial Sequence
  Synthetic
acctatacccuggaggagcug

SEQ ID NO: 21234 - DNA, 17 bp, Artificial Sequence
  Synthetic
cagccucacccgacgua

SEQ ID NO: 21235 - DNA, 22 bp, Artificial Sequence
  Synthetic
ctacctgtaacugggcctgtug

SEQ ID NO: 21236 - DNA, 19 bp, Artificial Sequence
  Synthetic
cccaucagccccttcuagg

SEQ ID NO: 21237 - DNA, 22 bp, Artificial Sequence
  Synthetic
ctggctgugatcgaacttcuca

SEQ ID NO: 21238 - DNA, 24 bp, Artificial Sequence
  Synthetic
agcagaacacacauaccaaaguca

SEQ ID NO: 21239 - DNA, 26 bp, Artificial Sequence
  Synthetic
aagcaaatuccccaaaacacaguaac

SEQ ID NO: 21240 - DNA, 28 bp, Artificial Sequence
  Synthetic
cacacctgucccctaatacttaattuga

SEQ ID NO: 21241 - DNA, 29 bp, Artificial Sequence
  Synthetic
tgcacaatccacautgatatactguaaca

SEQ ID NO: 21242 - DNA, 22 bp, Artificial Sequence
  Synthetic
cagcagtutggccacuacaaat

SEQ ID NO: 21243 - DNA, 28 bp, Artificial Sequence
  Synthetic
ccttgagtaaaauaaactgcttcacauc

SEQ ID NO: 21244 - DNA, 21 bp, Artificial Sequence
  Synthetic
gccattcucaagaggcaguca

SEQ ID NO: 21245 - DNA, 32 bp, Artificial Sequence
  Synthetic
atatagttagauaaaaaccaatgctcucacct

SEQ ID NO: 21246 - DNA, 24 bp, Artificial Sequence
  Synthetic
accuacagaccuggagacaagaag

SEQ ID NO: 21247 - DNA, 27 bp, Artificial Sequence
  Synthetic
cagctaaacccaautaacttagtguga

SEQ ID NO: 21248 - DNA, 21 bp, Artificial Sequence
  Synthetic
gtggaatccugatgctccugt

SEQ ID NO: 21249 - DNA, 26 bp, Artificial Sequence
  Synthetic
accataaaaccuttggaagtguaagt

SEQ ID NO: 21250 - DNA, 26 bp, Artificial Sequence
  Synthetic
ggttgtcagtgcutcagtaaagctua

SEQ ID NO: 21251 - DNA, 28 bp, Artificial Sequence
  Synthetic
gctccaggaguacgtagtaattctucat

SEQ ID NO: 21252 - DNA, 25 bp, Artificial Sequence
  Synthetic
tgaagtgtcagugcataacctctug

SEQ ID NO: 21253 - DNA, 21 bp, Artificial Sequence
  Synthetic
ccaugtgcttugaggcagact

SEQ ID NO: 21254 - DNA, 26 bp, Artificial Sequence
  Synthetic
ggaggaggauccatagatttgtcuga

SEQ ID NO: 21255 - DNA, 26 bp, Artificial Sequence
  Synthetic
tcatagaacccutacgttcacugact

SEQ ID NO: 21256 - DNA, 26 bp, Artificial Sequence
  Synthetic
gggcattgauggcaaatcattaaugt

SEQ ID NO: 21257 - DNA, 27 bp, Artificial Sequence
  Synthetic
gttcagagcugccttcagtatgatuat

SEQ ID NO: 21258 - DNA, 27 bp, Artificial Sequence
  Synthetic
cattgtttgcugtttctcttttcucca

SEQ ID NO: 21259 - DNA, 29 bp, Artificial Sequence
  Synthetic
cacaguaaaacccactaatactugaaggt

SEQ ID NO: 21260 - DNA, 27 bp, Artificial Sequence
  Synthetic
aaggccatgtuagtaaatttgcatcug

SEQ ID NO: 21261 - DNA, 24 bp, Artificial Sequence
  Synthetic
ctctcaaaccgaucagccaauact

SEQ ID NO: 21262 - DNA, 31 bp, Artificial Sequence
  Synthetic
caggtataataaacucctattcgtgcattuc

SEQ ID NO: 21263 - DNA, 27 bp, Artificial Sequence
  Synthetic
gcggttcuatgtgaaaagaugacaaac

SEQ ID NO: 21264 - DNA, 31 bp, Artificial Sequence
  Synthetic
caaaccttatacucaattctcaactcctugt

SEQ ID NO: 21265 - DNA, 23 bp, Artificial Sequence
  Synthetic
cttcatacggugagacaauggca

SEQ ID NO: 21266 - DNA, 23 bp, Artificial Sequence
  Synthetic
tcataagugacggcaatgtgcut

SEQ ID NO: 21267 - DNA, 30 bp, Artificial Sequence
  Synthetic
aatctaaattuaaauggagagtgttcacua

SEQ ID NO: 21268 - DNA, 29 bp, Artificial Sequence
  Synthetic
aggcatcagguacatgaaaaagaagaaut

SEQ ID NO: 21269 - DNA, 30 bp, Artificial Sequence
  Synthetic
ttctgtuaagagauccaaaacatagtatut

SEQ ID NO: 21270 - DNA, 21 bp, Artificial Sequence
  Synthetic
ctggcugagcacauagagcat

SEQ ID NO: 21271 - DNA, 30 bp, Artificial Sequence
  Synthetic
agaaaagcaaugaatcgttuacaaaacaca

SEQ ID NO: 21272 - DNA, 21 bp, Artificial Sequence
  Synthetic
atucggccaaaagatguccct

SEQ ID NO: 21273 - DNA, 26 bp, Artificial Sequence
  Synthetic
tgguctcatttuaaaagcaacaaacc

SEQ ID NO: 21274 - DNA, 31 bp, Artificial Sequence
  Synthetic
tgattttcattgaccaucacatgctaauagt

SEQ ID NO: 21275 - DNA, 27 bp, Artificial Sequence
  Synthetic
tcagcttgtcaagaauagcagtaacuc

SEQ ID NO: 21276 - DNA, 24 bp, Artificial Sequence
  Synthetic
gtgctaaaacuttgagtcccaugt

SEQ ID NO: 21277 - DNA, 32 bp, Artificial Sequence
  Synthetic
gcaatatcatcccacauaagatgttgttcuaa

SEQ ID NO: 21278 - DNA, 30 bp, Artificial Sequence
  Synthetic
gttctcattacccaaautttacttgctgut

SEQ ID NO: 21279 - DNA, 27 bp, Artificial Sequence
  Synthetic
caaagcaaaaguctctctctcauagga

SEQ ID NO: 21280 - DNA, 29 bp, Artificial Sequence
  Synthetic
aaattctgttttccuaaaaggcactugag

SEQ ID NO: 21281 - DNA, 30 bp, Artificial Sequence
  Synthetic
tgcactcattttcuatacagtaattaccut

SEQ ID NO: 21282 - DNA, 25 bp, Artificial Sequence
  Synthetic
gagccttuaaagaaagctactgugt

SEQ ID NO: 21283 - DNA, 30 bp, Artificial Sequence
  Synthetic
ttgaaattgaguccaacaaaatgatccaut

SEQ ID NO: 21284 - DNA, 22 bp, Artificial Sequence
  Synthetic
acctgccaccgutttcctttua

SEQ ID NO: 21285 - DNA, 32 bp, Artificial Sequence
  Synthetic
gatatgtatccauaggaacattttccatugaa

SEQ ID NO: 21286 - DNA, 32 bp, Artificial Sequence
  Synthetic
tcccatttatagacacugtagttaatgaacut

SEQ ID NO: 21287 - DNA, 26 bp, Artificial Sequence
  Synthetic
gttgtgatcccugattccatttctug

SEQ ID NO: 21288 - DNA, 28 bp, Artificial Sequence
  Synthetic
cagataacaatucagccacaaaguaaaa

SEQ ID NO: 21289 - DNA, 26 bp, Artificial Sequence
  Synthetic
acactggcctcugctaagtattcaua

SEQ ID NO: 21290 - DNA, 30 bp, Artificial Sequence
  Synthetic
tctgttacaatuaaaagataccttgctugt

SEQ ID NO: 21291 - DNA, 27 bp, Artificial Sequence
  Synthetic
acagaaaccttcautttgccaaaagut

SEQ ID NO: 21292 - DNA, 21 bp, Artificial Sequence
  Synthetic
cctaccacuggccactguaac

SEQ ID NO: 21293 - DNA, 32 bp, Artificial Sequence
  Synthetic
gtgaagagcccaugttaagttgatttuaaaaa

SEQ ID NO: 21294 - DNA, 21 bp, Artificial Sequence
  Synthetic
ggugttaccggugaagaagcc

SEQ ID NO: 21295 - DNA, 17 bp, Artificial Sequence
  Synthetic
gtcccauccccggtgut

SEQ ID NO: 21296 - DNA, 24 bp, Artificial Sequence
  Synthetic
tgtctattguggcagcugaacaaa

SEQ ID NO: 21297 - DNA, 24 bp, Artificial Sequence
  Synthetic
tggatcagagugacttgucagact

SEQ ID NO: 21298 - DNA, 26 bp, Artificial Sequence
  Synthetic
ctttctggtguaatgctatctuccct

SEQ ID NO: 21299 - DNA, 22 bp, Artificial Sequence
  Synthetic
agtcctgtttucttggctgtug

SEQ ID NO: 21300 - DNA, 22 bp, Artificial Sequence
  Synthetic
gtugccaaggacagcgtuaaaa

SEQ ID NO: 21301 - DNA, 24 bp, Artificial Sequence
  Synthetic
cctttggcutttgtgttgugacag

SEQ ID NO: 21302 - DNA, 21 bp, Artificial Sequence
  Synthetic
ctttgggcugactccaugagt

SEQ ID NO: 21303 - DNA, 32 bp, Artificial Sequence
  Synthetic
tggaacagtcaagaauttattcaaactttguc

SEQ ID NO: 21304 - DNA, 27 bp, Artificial Sequence
  Synthetic
attccctuaaaaccaagacttuacaca

SEQ ID NO: 21305 - DNA, 29 bp, Artificial Sequence
  Synthetic
ctcacaguactgaagaugaacaagaagag

SEQ ID NO: 21306 - DNA, 27 bp, Artificial Sequence
  Synthetic
aaaagaaauaaggcaauggagaaaggt

SEQ ID NO: 21307 - DNA, 31 bp, Artificial Sequence
  Synthetic
agatgaatttttaacuccagacggtgaauat

SEQ ID NO: 21308 - DNA, 23 bp, Artificial Sequence
  Synthetic
ccgtcttgucaaacttgccatut

SEQ ID NO: 21309 - DNA, 22 bp, Artificial Sequence
  Synthetic
tccttggcaucctcagaguagt

SEQ ID NO: 21310 - DNA, 26 bp, Artificial Sequence
  Synthetic
gagacacacagaaguctaaaggcaua

SEQ ID NO: 21311 - DNA, 27 bp, Artificial Sequence
  Synthetic
cagatgaacaauttcagtgcacucaag

SEQ ID NO: 21312 - DNA, 22 bp, Artificial Sequence
  Synthetic
gcccataaagacaugcgctcut

SEQ ID NO: 21313 - DNA, 24 bp, Artificial Sequence
  Synthetic
ccacgacugaggagtatctcauca

SEQ ID NO: 21314 - DNA, 24 bp, Artificial Sequence
  Synthetic
tcaucttccaaaaucaagcagcct

SEQ ID NO: 21315 - DNA, 21 bp, Artificial Sequence
  Synthetic
gccccagauccatgtctgaug

SEQ ID NO: 21316 - DNA, 26 bp, Artificial Sequence
  Synthetic
ccctattcucctgagttagguaagca

SEQ ID NO: 21317 - DNA, 27 bp, Artificial Sequence
  Synthetic
tcaggctuccgaaaccttactatgaua

SEQ ID NO: 21318 - DNA, 22 bp, Artificial Sequence
  Synthetic
tccccaagggagaucaactuca

SEQ ID NO: 21319 - DNA, 23 bp, Artificial Sequence
  Synthetic
ccctgagauacctgcattuccag

SEQ ID NO: 21320 - DNA, 19 bp, Artificial Sequence
  Synthetic
gccttgggcutccttcuca

SEQ ID NO: 21321 - DNA, 26 bp, Artificial Sequence
  Synthetic
gctgaaactctutcctgtccttguag

SEQ ID NO: 21322 - DNA, 21 bp, Artificial Sequence
  Synthetic
aaggctgggugatggagacua

SEQ ID NO: 21323 - DNA, 23 bp, Artificial Sequence
  Synthetic
ccatcauccagggcttctctuac

SEQ ID NO: 21324 - DNA, 24 bp, Artificial Sequence
  Synthetic
ctcatctuaacagcacaaccccua

SEQ ID NO: 21325 - DNA, 23 bp, Artificial Sequence
  Synthetic
cactttttgtugcggcgttatug

SEQ ID NO: 21326 - DNA, 28 bp, Artificial Sequence
  Synthetic
gcaagttaaaugccagattgacatttug

SEQ ID NO: 21327 - DNA, 23 bp, Artificial Sequence
  Synthetic
cagcgctugaatgttatgctuct

SEQ ID NO: 21328 - DNA, 28 bp, Artificial Sequence
  Synthetic
ggtttatggaatugtcatttgacctuca

SEQ ID NO: 21329 - DNA, 29 bp, Artificial Sequence
  Synthetic
aaaatagtgtuaagaaagagcctgtucct

SEQ ID NO: 21330 - DNA, 26 bp, Artificial Sequence
  Synthetic
tttgatgtcacutgcactttagguct

SEQ ID NO: 21331 - DNA, 25 bp, Artificial Sequence
  Synthetic
acatttgtcttugctttgacagugg

SEQ ID NO: 21332 - DNA, 22 bp, Artificial Sequence
  Synthetic
tgcaguttgaagaugggcagaa

SEQ ID NO: 21333 - DNA, 22 bp, Artificial Sequence
  Synthetic
cactctutccctctuagagcgt

SEQ ID NO: 21334 - DNA, 25 bp, Artificial Sequence
  Synthetic
aacagttttgtgucactgtctguct

SEQ ID NO: 21335 - DNA, 17 bp, Artificial Sequence
  Synthetic
caggaagcugcgaugcc

SEQ ID NO: 21336 - DNA, 22 bp, Artificial Sequence
  Synthetic
gtgttcccuagccatccatuca

SEQ ID NO: 21337 - DNA, 19 bp, Artificial Sequence
  Synthetic
ccacaguggctcggaguag

SEQ ID NO: 21338 - DNA, 22 bp, Artificial Sequence
  Synthetic
gacggagaucaccatcgucaaa

SEQ ID NO: 21339 - DNA, 22 bp, Artificial Sequence
  Synthetic
catctggatcuccaccctctug

SEQ ID NO: 21340 - DNA, 18 bp, Artificial Sequence
  Synthetic
gccggacacugtccucct

SEQ ID NO: 21341 - DNA, 21 bp, Artificial Sequence
  Synthetic
caggcctucccagaaactuga

SEQ ID NO: 21342 - DNA, 19 bp, Artificial Sequence
  Synthetic
tggtcaguggctucacagg

SEQ ID NO: 21343 - DNA, 19 bp, Artificial Sequence
  Synthetic
cccacaccuggctcucaga

SEQ ID NO: 21344 - DNA, 20 bp, Artificial Sequence
  Synthetic
aaaaucagccggaagucggt

SEQ ID NO: 21345 - DNA, 18 bp, Artificial Sequence
  Synthetic
accccugtgcuccaggaa

SEQ ID NO: 21346 - DNA, 19 bp, Artificial Sequence
  Synthetic
cgcacauccctctgctuca

SEQ ID NO: 21347 - DNA, 21 bp, Artificial Sequence
  Synthetic
ggcaaguagagauggaaccct

SEQ ID NO: 21348 - DNA, 20 bp, Artificial Sequence
  Synthetic
gcagagtutctccacuggga

SEQ ID NO: 21349 - DNA, 19 bp, Artificial Sequence
  Synthetic
ccgctguagggccctctua

SEQ ID NO: 21350 - DNA, 21 bp, Artificial Sequence
  Synthetic
ccgagaagacuaccagcucgt

SEQ ID NO: 21351 - DNA, 20 bp, Artificial Sequence
  Synthetic
cggtagtgaccugccaggua

SEQ ID NO: 21352 - DNA, 22 bp, Artificial Sequence
  Synthetic
tcgtgtcgugtgtttacaccuc

SEQ ID NO: 21353 - DNA, 24 bp, Artificial Sequence
  Synthetic
cgtcctccuttccaggattucaac

SEQ ID NO: 21354 - DNA, 29 bp, Artificial Sequence
  Synthetic
cgaaacttuccaaagaucttaccagtaut

SEQ ID NO: 21355 - DNA, 25 bp, Artificial Sequence
  Synthetic
ctctgaccaggaugggtttatuacc

SEQ ID NO: 21356 - DNA, 21 bp, Artificial Sequence
  Synthetic
cattcatcggcutccatcugc

SEQ ID NO: 21357 - DNA, 24 bp, Artificial Sequence
  Synthetic
tgtgtcugggcagtttaucaaagt

SEQ ID NO: 21358 - DNA, 23 bp, Artificial Sequence
  Synthetic
gaaaatgtggccutcgccaauaa

SEQ ID NO: 21359 - DNA, 24 bp, Artificial Sequence
  Synthetic
ctataataugcaggccagagucct

SEQ ID NO: 21360 - DNA, 21 bp, Artificial Sequence
  Synthetic
cctcucagggtttcaugagga

SEQ ID NO: 21361 - DNA, 24 bp, Artificial Sequence
  Synthetic
ggactuggagagaaaggcatucag

SEQ ID NO: 21362 - DNA, 20 bp, Artificial Sequence
  Synthetic
gctccaaguctcucgccaag

SEQ ID NO: 21363 - DNA, 20 bp, Artificial Sequence
  Synthetic
gccggaaggugctgatgaug

SEQ ID NO: 21364 - DNA, 21 bp, Artificial Sequence
  Synthetic
ccttgacccugccaagaugaa

SEQ ID NO: 21365 - DNA, 22 bp, Artificial Sequence
  Synthetic
caaaggacgcaaaguaccctug

SEQ ID NO: 21366 - DNA, 21 bp, Artificial Sequence
  Synthetic
ccccaugcagctgaucaaaca

SEQ ID NO: 21367 - DNA, 23 bp, Artificial Sequence
  Synthetic
gaagaatgtcugctgcaggauct

SEQ ID NO: 21368 - DNA, 20 bp, Artificial Sequence
  Synthetic
aaaugtcgggtucaccccaa

SEQ ID NO: 21369 - DNA, 19 bp, Artificial Sequence
  Synthetic
agagctccuccacgaugct

SEQ ID NO: 21370 - DNA, 23 bp, Artificial Sequence
  Synthetic
gcaggaguacttucacagacaga

SEQ ID NO: 21371 - DNA, 22 bp, Artificial Sequence
  Synthetic
tccugacacgagggattuagga

SEQ ID NO: 21372 - DNA, 21 bp, Artificial Sequence
  Synthetic
gcagtctguccacatcgauga

SEQ ID NO: 21373 - DNA, 19 bp, Artificial Sequence
  Synthetic
ccauctgccctuccaccac

SEQ ID NO: 21374 - DNA, 19 bp, Artificial Sequence
  Synthetic
ggctgcugagaagctgugt

SEQ ID NO: 21375 - DNA, 18 bp, Artificial Sequence
  Synthetic
gaggcucataccguggca

SEQ ID NO: 21376 - DNA, 23 bp, Artificial Sequence
  Synthetic
gacggcaaccuagagttacugac

SEQ ID NO: 21377 - DNA, 22 bp, Artificial Sequence
  Synthetic
ggaaagaaagccutccacucac

SEQ ID NO: 21378 - DNA, 20 bp, Artificial Sequence
  Synthetic
ggtttctugcccagcuccat

SEQ ID NO: 21379 - DNA, 20 bp, Artificial Sequence
  Synthetic
gcatccaguccccatcaugc

SEQ ID NO: 21380 - DNA, 17 bp, Artificial Sequence
  Synthetic
gccctgcugtccgtcuc

SEQ ID NO: 21381 - DNA, 17 bp, Artificial Sequence
  Synthetic
gctgccutgcatgugct

SEQ ID NO: 21382 - DNA, 24 bp, Artificial Sequence
  Synthetic
cagaactgautgcccttctuggat

SEQ ID NO: 21383 - DNA, 21 bp, Artificial Sequence
  Synthetic
tcauctgctcugaggcaaacc

SEQ ID NO: 21384 - DNA, 31 bp, Artificial Sequence
  Synthetic
aggaataatatttcuctttctgcagcttuca

SEQ ID NO: 21385 - DNA, 22 bp, Artificial Sequence
  Synthetic
aggcagttgaugaagagcaugt

SEQ ID NO: 21386 - DNA, 23 bp, Artificial Sequence
  Synthetic
cggttgaataccugcaagaggug

SEQ ID NO: 21387 - DNA, 28 bp, Artificial Sequence
  Synthetic
gaagaactagttucccatacttccugaa

SEQ ID NO: 21388 - DNA, 24 bp, Artificial Sequence
  Synthetic
atgaatacaaggcuctccgtgaug

SEQ ID NO: 21389 - DNA, 24 bp, Artificial Sequence
  Synthetic
tgacauaaaccagggaacaugcag

SEQ ID NO: 21390 - DNA, 20 bp, Artificial Sequence
  Synthetic
gttttgcaacaucgctcgug

SEQ ID NO: 21391 - DNA, 23 bp, Artificial Sequence
  Synthetic
gggagaaggccagautcttuagg

SEQ ID NO: 21392 - DNA, 26 bp, Artificial Sequence
  Synthetic
ctctgtcttgtgutctctcgttctut

SEQ ID NO: 21393 - DNA, 22 bp, Artificial Sequence
  Synthetic
cggauaaggaggaagaccacug

SEQ ID NO: 21394 - DNA, 27 bp, Artificial Sequence
  Synthetic
gctctaacccugtggccaaaataauat

SEQ ID NO: 21395 - DNA, 27 bp, Artificial Sequence
  Synthetic
tctttgccatttutctgttccacaaug

SEQ ID NO: 21396 - DNA, 21 bp, Artificial Sequence
  Synthetic
ccacgccuagattctgugagg

SEQ ID NO: 21397 - DNA, 23 bp, Artificial Sequence
  Synthetic
gtggcaagaggauctcaaacuca

SEQ ID NO: 21398 - DNA, 22 bp, Artificial Sequence
  Synthetic
gcaggagutcgatcuggagaag

SEQ ID NO: 21399 - DNA, 21 bp, Artificial Sequence
  Synthetic
gctgctuccctctcucgagaa

SEQ ID NO: 21400 - DNA, 22 bp, Artificial Sequence
  Synthetic
gcccccacucaggaattctaut

SEQ ID NO: 21401 - DNA, 26 bp, Artificial Sequence
  Synthetic
gaggaagagaucagacutactttgug

SEQ ID NO: 21402 - DNA, 22 bp, Artificial Sequence
  Synthetic
accatgcugaggagactgttut

SEQ ID NO: 21403 - DNA, 24 bp, Artificial Sequence
  Synthetic
cgagcaguatctcttcugggaact

SEQ ID NO: 21404 - DNA, 27 bp, Artificial Sequence
  Synthetic
gaggtgacaauatggctgctaauagat

SEQ ID NO: 21405 - DNA, 25 bp, Artificial Sequence
  Synthetic
atcttcttugcctgttatggucaaa

SEQ ID NO: 21406 - DNA, 20 bp, Artificial Sequence
  Synthetic
tgtcctggguaaccttgcug

SEQ ID NO: 21407 - DNA, 27 bp, Artificial Sequence
  Synthetic
tcctcttcuccaattatcctguaggaa

SEQ ID NO: 21408 - DNA, 24 bp, Artificial Sequence
  Synthetic
tggttaactugacccatcatuccc

SEQ ID NO: 21409 - DNA, 24 bp, Artificial Sequence
  Synthetic
tgttgtgtcutgtttcagguccaa

SEQ ID NO: 21410 - DNA, 27 bp, Artificial Sequence
  Synthetic
caactctggugttaatgtctuagagga

SEQ ID NO: 21411 - DNA, 22 bp, Artificial Sequence
  Synthetic
ggtccuggagggatgaaucaga

SEQ ID NO: 21412 - DNA, 19 bp, Artificial Sequence
  Synthetic
tcucccagaggcgguaagg

SEQ ID NO: 21413 - DNA, 20 bp, Artificial Sequence
  Synthetic
ctcgggacutgccgatagug

SEQ ID NO: 21414 - DNA, 27 bp, Artificial Sequence
  Synthetic
gtggagagagugaaacattugcaaaaa

SEQ ID NO: 21415 - DNA, 29 bp, Artificial Sequence
  Synthetic
catccaatgtuctctgtatgguaacacat

SEQ ID NO: 21416 - DNA, 32 bp, Artificial Sequence
  Synthetic
attttctatatagcuccatcaagtatgauggt

SEQ ID NO: 21417 - DNA, 22 bp, Artificial Sequence
  Synthetic
tgtcgaugcacgattactuggt

SEQ ID NO: 21418 - DNA, 30 bp, Artificial Sequence
  Synthetic
aagtaggcagccuttataaaagcaaatuaa

SEQ ID NO: 21419 - DNA, 20 bp, Artificial Sequence
  Synthetic
ctgaagauggccgtttuggt

SEQ ID NO: 21420 - DNA, 24 bp, Artificial Sequence
  Synthetic
ttcctaaggutgcacauaggcaaa

SEQ ID NO: 21421 - DNA, 27 bp, Artificial Sequence
  Synthetic
cttgggtagaucttatgaacagcauct

SEQ ID NO: 21422 - DNA, 30 bp, Artificial Sequence
  Synthetic
acagaaagctggucacttgattaattuaga

SEQ ID NO: 21423 - DNA, 26 bp, Artificial Sequence
  Synthetic
gcctttcacaaaacucatcctgagua

SEQ ID NO: 21424 - DNA, 18 bp, Artificial Sequence
  Synthetic
gcugggcatgtucacgga

SEQ ID NO: 21425 - DNA, 22 bp, Artificial Sequence
  Synthetic
ccatcagguacttgccgaugag

SEQ ID NO: 21426 - DNA, 17 bp, Artificial Sequence
  Synthetic
tcccugggcctgugagt

SEQ ID NO: 21427 - DNA, 20 bp, Artificial Sequence
  Synthetic
gcacacugggaaacgctuct

SEQ ID NO: 21428 - DNA, 17 bp, Artificial Sequence
  Synthetic
aggcacugcacccgtuc

SEQ ID NO: 21429 - DNA, 19 bp, Artificial Sequence
  Synthetic
cacutacagggugacccca

SEQ ID NO: 21430 - DNA, 19 bp, Artificial Sequence
  Synthetic
ctcagcucaggccacacut

SEQ ID NO: 21431 - DNA, 20 bp, Artificial Sequence
  Synthetic
gccctggauttggtgcucag

SEQ ID NO: 21432 - DNA, 22 bp, Artificial Sequence
  Synthetic
cacggaggcauaccttucacat

SEQ ID NO: 21433 - DNA, 21 bp, Artificial Sequence
  Synthetic
agcggaaccugaaucccaaag

SEQ ID NO: 21434 - DNA, 21 bp, Artificial Sequence
  Synthetic
cccggaaggccucgttaauat

SEQ ID NO: 21435 - DNA, 20 bp, Artificial Sequence
  Synthetic
cctuggcgcatcacuaacag

SEQ ID NO: 21436 - DNA, 18 bp, Artificial Sequence
  Synthetic
gggcctucagctcctuct

SEQ ID NO: 21437 - DNA, 19 bp, Artificial Sequence
  Synthetic
cctgacccuaggcctgtug

SEQ ID NO: 21438 - DNA, 21 bp, Artificial Sequence
  Synthetic
agcgtctgucctgcaaatuct

SEQ ID NO: 21439 - DNA, 18 bp, Artificial Sequence
  Synthetic
tcgcaccccautcacguc

SEQ ID NO: 21440 - DNA, 18 bp, Artificial Sequence
  Synthetic
ccauacccaggaggcugt

SEQ ID NO: 21441 - DNA, 18 bp, Artificial Sequence
  Synthetic
cagggcuaccagcugcat

SEQ ID NO: 21442 - DNA, 22 bp, Artificial Sequence
  Synthetic
ccatgtaccugccacguagaag

SEQ ID NO: 21443 - DNA, 18 bp, Artificial Sequence
  Synthetic
tgatcguggtcccuccgt

SEQ ID NO: 21444 - DNA, 20 bp, Artificial Sequence
  Synthetic
gggtgggugacagatttgut

SEQ ID NO: 21445 - DNA, 23 bp, Artificial Sequence
  Synthetic
cactaacctuccttctcccctug

SEQ ID NO: 21446 - DNA, 21 bp, Artificial Sequence
  Synthetic
tcctaccugaaccuccgaact

SEQ ID NO: 21447 - DNA, 21 bp, Artificial Sequence
  Synthetic
gactguagggtttggttugcc

SEQ ID NO: 21448 - DNA, 19 bp, Artificial Sequence
  Synthetic
gcaccuccacgtagcugag

SEQ ID NO: 21449 - DNA, 17 bp, Artificial Sequence
  Synthetic
tgcaaggcgcuguacga

SEQ ID NO: 21450 - DNA, 21 bp, Artificial Sequence
  Synthetic
cctcccaagggcauaggtcut

SEQ ID NO: 21451 - DNA, 21 bp, Artificial Sequence
  Synthetic
agatccccgaugaggagcuac

SEQ ID NO: 21452 - DNA, 17 bp, Artificial Sequence
  Synthetic
ccctccgacugcgggua

SEQ ID NO: 21453 - DNA, 17 bp, Artificial Sequence
  Synthetic
ggagugcaggccucaca

SEQ ID NO: 21454 - DNA, 17 bp, Artificial Sequence
  Synthetic
ccutccccuggagccat

SEQ ID NO: 21455 - DNA, 20 bp, Artificial Sequence
  Synthetic
gtgcatcuggtgcatgtugt

SEQ ID NO: 21456 - DNA, 27 bp, Artificial Sequence
  Synthetic
aggctgtaaaaaucacagacataugct

SEQ ID NO: 21457 - DNA, 19 bp, Artificial Sequence
  Synthetic
cugguccggaagacatcug

SEQ ID NO: 21458 - DNA, 22 bp, Artificial Sequence
  Synthetic
tgggacgcacugttttctctut

SEQ ID NO: 21459 - DNA, 22 bp, Artificial Sequence
  Synthetic
caccauagaagagggagcucac

SEQ ID NO: 21460 - DNA, 19 bp, Artificial Sequence
  Synthetic
caaccctcucaccgcctut

SEQ ID NO: 21461 - DNA, 21 bp, Artificial Sequence
  Synthetic
ctcaatggucgctttggtucg

SEQ ID NO: 21462 - DNA, 20 bp, Artificial Sequence
  Synthetic
tgtccaccaugctgcugaag

SEQ ID NO: 21463 - DNA, 23 bp, Artificial Sequence
  Synthetic
gccttggucagcttctggattut

SEQ ID NO: 21464 - DNA, 24 bp, Artificial Sequence
  Synthetic
gcctgaccgugtctctctctatut

SEQ ID NO: 21465 - DNA, 20 bp, Artificial Sequence
  Synthetic
gaccaacgccutagggcuag

SEQ ID NO: 21466 - DNA, 20 bp, Artificial Sequence
  Synthetic
gaggtgacaugggcttguct

SEQ ID NO: 21467 - DNA, 19 bp, Artificial Sequence
  Synthetic
ctgtgucgggacccctuac

SEQ ID NO: 21468 - DNA, 19 bp, Artificial Sequence
  Synthetic
agtggctggugtccctgua

SEQ ID NO: 21469 - DNA, 17 bp, Artificial Sequence
  Synthetic
tggcagcggguacucac

SEQ ID NO: 21470 - DNA, 25 bp, Artificial Sequence
  Synthetic
gaaguacatgattguggacgaaggt

SEQ ID NO: 21471 - DNA, 19 bp, Artificial Sequence
  Synthetic
gugggcagcaggaagtuga

SEQ ID NO: 21472 - DNA, 21 bp, Artificial Sequence
  Synthetic
cattatgugtccccugcaggt

SEQ ID NO: 21473 - DNA, 18 bp, Artificial Sequence
  Synthetic
gggcccaccutcttgucc

SEQ ID NO: 21474 - DNA, 29 bp, Artificial Sequence
  Synthetic
agcttcttgatagaautcttcccaaacuc

SEQ ID NO: 21475 - DNA, 21 bp, Artificial Sequence
  Synthetic
ccctguaagaaacgccucact

SEQ ID NO: 21476 - DNA, 24 bp, Artificial Sequence
  Synthetic
ccaccttcccutttatgaccucct

SEQ ID NO: 21477 - DNA, 20 bp, Artificial Sequence
  Synthetic
cttctccuccacgctgtuga

SEQ ID NO: 21478 - DNA, 19 bp, Artificial Sequence
  Synthetic
ctgcatgcugatgcctcuc

SEQ ID NO: 21479 - DNA, 18 bp, Artificial Sequence
  Synthetic
ctccgcgucgtcctugat

SEQ ID NO: 21480 - DNA, 18 bp, Artificial Sequence
  Synthetic
ggtgauagccgccggtuc

SEQ ID NO: 21481 - DNA, 22 bp, Artificial Sequence
  Synthetic
gcaggtacaacgucagggtuac

SEQ ID NO: 21482 - DNA, 20 bp, Artificial Sequence
  Synthetic
cgtcttgcagucggtctuca

SEQ ID NO: 21483 - DNA, 18 bp, Artificial Sequence
  Synthetic
cccccgggacucacatuc

SEQ ID NO: 21484 - DNA, 19 bp, Artificial Sequence
  Synthetic
cucaggaaguggcagcgaa

SEQ ID NO: 21485 - DNA, 25 bp, Artificial Sequence
  Synthetic
ctccaagtcugaaactacatcugct

SEQ ID NO: 21486 - DNA, 25 bp, Artificial Sequence
  Synthetic
acgcaccuccagaagaaacuaaaag

SEQ ID NO: 21487 - DNA, 18 bp, Artificial Sequence
  Synthetic
cgcatcccugcacacgua

SEQ ID NO: 21488 - DNA, 25 bp, Artificial Sequence
  Synthetic
atgaggagaagauggagatucagga

SEQ ID NO: 21489 - DNA, 22 bp, Artificial Sequence
  Synthetic
gcagatgcatutcctcccacut

SEQ ID NO: 21490 - DNA, 22 bp, Artificial Sequence
  Synthetic
ggctggtctugaagccatgaua

SEQ ID NO: 21491 - DNA, 27 bp, Artificial Sequence
  Synthetic
aggcaaacattuagatggtaaccucat

SEQ ID NO: 21492 - DNA, 20 bp, Artificial Sequence
  Synthetic
ccatcgcggugctcauagac

SEQ ID NO: 21493 - DNA, 19 bp, Artificial Sequence
  Synthetic
cagcgaacgcugagtctuc

SEQ ID NO: 21494 - DNA, 22 bp, Artificial Sequence
  Synthetic
gagctguccagtgactttgugt

SEQ ID NO: 21495 - DNA, 21 bp, Artificial Sequence
  Synthetic
cttcacuagcggcacaaagug

SEQ ID NO: 21496 - DNA, 19 bp, Artificial Sequence
  Synthetic
gggagttugccaaggugct

SEQ ID NO: 21497 - DNA, 21 bp, Artificial Sequence
  Synthetic
ccttgctgagcuctgggatuc

SEQ ID NO: 21498 - DNA, 21 bp, Artificial Sequence
  Synthetic
ggccugagaucaccaagacag

SEQ ID NO: 21499 - DNA, 22 bp, Artificial Sequence
  Synthetic
gatgtgcuagttccaccuccag

SEQ ID NO: 21500 - DNA, 25 bp, Artificial Sequence
  Synthetic
ggagatguccataaaagttgaugca

SEQ ID NO: 21501 - DNA, 20 bp, Artificial Sequence
  Synthetic
cggatgccaaucacctcgut

SEQ ID NO: 21502 - DNA, 21 bp, Artificial Sequence
  Synthetic
tctctctcacccucaccctuc

SEQ ID NO: 21503 - DNA, 20 bp, Artificial Sequence
  Synthetic
gtagtcaugcggtgcaggua

SEQ ID NO: 21504 - DNA, 22 bp, Artificial Sequence
  Synthetic
tctctctcccugtctccttucg

SEQ ID NO: 21505 - DNA, 21 bp, Artificial Sequence
  Synthetic
gctccgtgcuttctaggtcut

SEQ ID NO: 21506 - DNA, 22 bp, Artificial Sequence
  Synthetic
agtttatugggcatgcgucagt

SEQ ID NO: 21507 - DNA, 25 bp, Artificial Sequence
  Synthetic
gcctgttaacaccutgttccttauc

SEQ ID NO: 21508 - DNA, 20 bp, Artificial Sequence
  Synthetic
cctgagcucccagttccuga

SEQ ID NO: 21509 - DNA, 25 bp, Artificial Sequence
  Synthetic
ataagttattccgutggtggctuct

SEQ ID NO: 21510 - DNA, 18 bp, Artificial Sequence
  Synthetic
tctccagcucgctcucca

SEQ ID NO: 21511 - DNA, 17 bp, Artificial Sequence
  Synthetic
gggccccugagccttuc

SEQ ID NO: 21512 - DNA, 25 bp, Artificial Sequence
  Synthetic
gtggccctcuatgactatgagtcua

SEQ ID NO: 21513 - DNA, 20 bp, Artificial Sequence
  Synthetic
cuttgaagucccaccaccca

SEQ ID NO: 21514 - DNA, 17 bp, Artificial Sequence
  Synthetic
gcaggugcctacugcct

SEQ ID NO: 21515 - DNA, 18 bp, Artificial Sequence
  Synthetic
ctgcugcaggctgtugaa

SEQ ID NO: 21516 - DNA, 20 bp, Artificial Sequence
  Synthetic
ccactgagucagcctgcauc

SEQ ID NO: 21517 - DNA, 21 bp, Artificial Sequence
  Synthetic
agcatacaacugcaccagcut

SEQ ID NO: 21518 - DNA, 22 bp, Artificial Sequence
  Synthetic
gtacguggagcggatgaacuac

SEQ ID NO: 21519 - DNA, 19 bp, Artificial Sequence
  Synthetic
gcgccgugtactcattguc

SEQ ID NO: 21520 - DNA, 17 bp, Artificial Sequence
  Synthetic
tggugaaccgcgaggug

SEQ ID NO: 21521 - DNA, 19 bp, Artificial Sequence
  Synthetic
ccugcaggtacucgaaggt

SEQ ID NO: 21522 - DNA, 27 bp, Artificial Sequence
  Synthetic
agatagctcaugactcctgttaacuga

SEQ ID NO: 21523 - DNA, 24 bp, Artificial Sequence
  Synthetic
ggacttgctugattccaccctuac

SEQ ID NO: 21524 - DNA, 25 bp, Artificial Sequence
  Synthetic
tctagcactcugaccagcaatttut

SEQ ID NO: 21525 - DNA, 23 bp, Artificial Sequence
  Synthetic
ctcatcctcauctcgaggtcuct

SEQ ID NO: 21526 - DNA, 28 bp, Artificial Sequence
  Synthetic
ggcatcaaguggaaattcctagaacaua

SEQ ID NO: 21527 - DNA, 23 bp, Artificial Sequence
  Synthetic
agcagatutcttttccuggccaa

SEQ ID NO: 21528 - DNA, 26 bp, Artificial Sequence
  Synthetic
atgcattaguagagaacagcaatcug

SEQ ID NO: 21529 - DNA, 24 bp, Artificial Sequence
  Synthetic
aagtccaggaggcuctatctugaa

SEQ ID NO: 21530 - DNA, 25 bp, Artificial Sequence
  Synthetic
agtctgtctutactacactguccca

SEQ ID NO: 21531 - DNA, 25 bp, Artificial Sequence
  Synthetic
ccggactttcauctctttggactuc

SEQ ID NO: 21532 - DNA, 26 bp, Artificial Sequence
  Synthetic
ctaaatctgtugctttgtctccucca

SEQ ID NO: 21533 - DNA, 25 bp, Artificial Sequence
  Synthetic
ccctatcuggccaagcaatactuac

SEQ ID NO: 21534 - DNA, 22 bp, Artificial Sequence
  Synthetic
cctggttcutgaggacttugct

SEQ ID NO: 21535 - DNA, 26 bp, Artificial Sequence
  Synthetic
cagataattgaguttggaggtuccca

SEQ ID NO: 21536 - DNA, 29 bp, Artificial Sequence
  Synthetic
gacatggctgaugaagactatgagtttua

SEQ ID NO: 21537 - DNA, 24 bp, Artificial Sequence
  Synthetic
tttgttaagacutgctgcctcuct

SEQ ID NO: 21538 - DNA, 24 bp, Artificial Sequence
  Synthetic
tcgctctccguaaattaaccgtut

SEQ ID NO: 21539 - DNA, 19 bp, Artificial Sequence
  Synthetic
gctgauggcgtcacucagg

SEQ ID NO: 21540 - DNA, 18 bp, Artificial Sequence
  Synthetic
ggcctctgucctgtcgut

SEQ ID NO: 21541 - DNA, 18 bp, Artificial Sequence
  Synthetic
tgccccaucatgctgcuc

SEQ ID NO: 21542 - DNA, 22 bp, Artificial Sequence
  Synthetic
atttctgtguctcctccuccct

SEQ ID NO: 21543 - DNA, 18 bp, Artificial Sequence
  Synthetic
accgtgcucgcctctuac

SEQ ID NO: 21544 - DNA, 25 bp, Artificial Sequence
  Synthetic
gccagtatggaaautaccagcagua

SEQ ID NO: 21545 - DNA, 22 bp, Artificial Sequence
  Synthetic
catgaaaugagcacgctucaca

SEQ ID NO: 21546 - DNA, 22 bp, Artificial Sequence
  Synthetic
agagcccgaugacctttttcug

SEQ ID NO: 21547 - DNA, 20 bp, Artificial Sequence
  Synthetic
cctagcttguccccaggaug

SEQ ID NO: 21548 - DNA, 18 bp, Artificial Sequence
  Synthetic
gucatgccguacgcacac

SEQ ID NO: 21549 - DNA, 17 bp, Artificial Sequence
  Synthetic
tgguggcccccguagat

SEQ ID NO: 21550 - DNA, 17 bp, Artificial Sequence
  Synthetic
cccugcagcatgugcca

SEQ ID NO: 21551 - DNA, 17 bp, Artificial Sequence
  Synthetic
gccagucctcgctuccc

SEQ ID NO: 21552 - DNA, 24 bp, Artificial Sequence
  Synthetic
cattcctcacuagaactcauccga

SEQ ID NO: 21553 - DNA, 22 bp, Artificial Sequence
  Synthetic
caatgtguccccctcccauaac

SEQ ID NO: 21554 - DNA, 27 bp, Artificial Sequence
  Synthetic
ctgtggatgtuccttcttcaacaguat

SEQ ID NO: 21555 - DNA, 25 bp, Artificial Sequence
  Synthetic
cttagagaaggaaagaugagucggt

SEQ ID NO: 21556 - DNA, 28 bp, Artificial Sequence
  Synthetic
cctctatttuggtttattttugccacgt

SEQ ID NO: 21557 - DNA, 22 bp, Artificial Sequence
  Synthetic
cgaucagaggaagggtgtuaca

SEQ ID NO: 21558 - DNA, 22 bp, Artificial Sequence
  Synthetic
caccauggagaactgguaggag

SEQ ID NO: 21559 - DNA, 17 bp, Artificial Sequence
  Synthetic
catcggcaucggcaugt

SEQ ID NO: 21560 - DNA, 22 bp, Artificial Sequence
  Synthetic
agaggcaauggatcccagguat

SEQ ID NO: 21561 - DNA, 24 bp, Artificial Sequence
  Synthetic
gacatattugaacaagggccacuc

SEQ ID NO: 21562 - DNA, 18 bp, Artificial Sequence
  Synthetic
gtgtgggcugacccucat

SEQ ID NO: 21563 - DNA, 20 bp, Artificial Sequence
  Synthetic
cctccctgcuccccacaaua

SEQ ID NO: 21564 - DNA, 18 bp, Artificial Sequence
  Synthetic
tctccgggccaguaccut

SEQ ID NO: 21565 - DNA, 17 bp, Artificial Sequence
  Synthetic
gcagcauggtggaggug

SEQ ID NO: 21566 - DNA, 18 bp, Artificial Sequence
  Synthetic
tcgtgcuggcatcuacgg

SEQ ID NO: 21567 - DNA, 22 bp, Artificial Sequence
  Synthetic
cgcagtaauaaaggccccugaa

SEQ ID NO: 21568 - DNA, 29 bp, Artificial Sequence
  Synthetic
caaagccagacaagutcactgtttaauaa

SEQ ID NO: 21569 - DNA, 21 bp, Artificial Sequence
  Synthetic
ttugaacagguagacggcuaa

SEQ ID NO: 21570 - DNA, 23 bp, Artificial Sequence
  Synthetic
gggttcaguaggatctgguaagg

SEQ ID NO: 21571 - DNA, 24 bp, Artificial Sequence
  Synthetic
acagagaugcaacagcagataugt

SEQ ID NO: 21572 - DNA, 27 bp, Artificial Sequence
  Synthetic
ggtcttggagucataatttggaugaga

SEQ ID NO: 21573 - DNA, 26 bp, Artificial Sequence
  Synthetic
ctctgtgtttauggctctgagauact

SEQ ID NO: 21574 - DNA, 21 bp, Artificial Sequence
  Synthetic
cccatggugtctcctagtuga

SEQ ID NO: 21575 - DNA, 22 bp, Artificial Sequence
  Synthetic
ggaauagtggaugacagcggat

SEQ ID NO: 21576 - DNA, 20 bp, Artificial Sequence
  Synthetic
ccaaggucaaggctgacuca

SEQ ID NO: 21577 - DNA, 25 bp, Artificial Sequence
  Synthetic
acctctctuctgttttctcugcaag

SEQ ID NO: 21578 - DNA, 22 bp, Artificial Sequence
  Synthetic
ctaacgcagcuccttctctgua

SEQ ID NO: 21579 - DNA, 17 bp, Artificial Sequence
  Synthetic
gggccacucacccucag

SEQ ID NO: 21580 - DNA, 17 bp, Artificial Sequence
  Synthetic
ccacccutggctgcuct

SEQ ID NO: 21581 - DNA, 17 bp, Artificial Sequence
  Synthetic
gctcacccgcucctuca

SEQ ID NO: 21582 - DNA, 19 bp, Artificial Sequence
  Synthetic
cgcatugcgacttcgugaa

SEQ ID NO: 21583 - DNA, 17 bp, Artificial Sequence
  Synthetic
cgcgcaccuggtcauct

SEQ ID NO: 21584 - DNA, 18 bp, Artificial Sequence
  Synthetic
ccctccugatcccucgca

SEQ ID NO: 21585 - DNA, 19 bp, Artificial Sequence
  Synthetic
ctaccucggagccgaucat

SEQ ID NO: 21586 - DNA, 23 bp, Artificial Sequence
  Synthetic
tggaagagautctggauggcaac

SEQ ID NO: 21587 - DNA, 28 bp, Artificial Sequence
  Synthetic
agtguttcaatttaactucaacccaacc

SEQ ID NO: 21588 - DNA, 23 bp, Artificial Sequence
  Synthetic
ctgtgatccaugagaacgcauct

SEQ ID NO: 21589 - DNA, 21 bp, Artificial Sequence
  Synthetic
tgutcccacguaacacacagg

SEQ ID NO: 21590 - DNA, 21 bp, Artificial Sequence
  Synthetic
gaagtttgcccugaagctgug

SEQ ID NO: 21591 - DNA, 24 bp, Artificial Sequence
  Synthetic
tcucaaaacagtttugcagggaga

SEQ ID NO: 21592 - DNA, 17 bp, Artificial Sequence
  Synthetic
gcggaugaggcgtctug

SEQ ID NO: 21593 - DNA, 17 bp, Artificial Sequence
  Synthetic
tgtccccucgcctcugt

SEQ ID NO: 21594 - DNA, 22 bp, Artificial Sequence
  Synthetic
ctccgagaaaccuggttcttug

SEQ ID NO: 21595 - DNA, 22 bp, Artificial Sequence
  Synthetic
cctgcucagggaaaaacuggaa

SEQ ID NO: 21596 - DNA, 30 bp, Artificial Sequence
  Synthetic
gttcagaaatggcagutatctttagaauct

SEQ ID NO: 21597 - DNA, 32 bp, Artificial Sequence
  Synthetic
tgtcttccugaaaagggaatttaatutctuac

SEQ ID NO: 21598 - DNA, 26 bp, Artificial Sequence
  Synthetic
catttatgacccugagaacagacuga

SEQ ID NO: 21599 - DNA, 22 bp, Artificial Sequence
  Synthetic
agacagggaaagauctgcugga

SEQ ID NO: 21600 - DNA, 21 bp, Artificial Sequence
  Synthetic
tgtttttctucaccccucgca

SEQ ID NO: 21601 - DNA, 20 bp, Artificial Sequence
  Synthetic
cccagccccucagaaaucac

SEQ ID NO: 21602 - DNA, 21 bp, Artificial Sequence
  Synthetic
gcagaucagcugaagcaggac

SEQ ID NO: 21603 - DNA, 25 bp, Artificial Sequence
  Synthetic
aggaaagagaacaucaccaggacua

SEQ ID NO: 21604 - DNA, 25 bp, Artificial Sequence
  Synthetic
agaaatcgaggccutgaaacugaaa

SEQ ID NO: 21605 - DNA, 24 bp, Artificial Sequence
  Synthetic
cattaatgauggtcctgaucagca

SEQ ID NO: 21606 - DNA, 23 bp, Artificial Sequence
  Synthetic
gtggccttcuttgaagagctcua

SEQ ID NO: 21607 - DNA, 18 bp, Artificial Sequence
  Synthetic
cuggagcucccacggaaa

SEQ ID NO: 21608 - DNA, 22 bp, Artificial Sequence
  Synthetic
ggactuagagcggaagaagcuc

SEQ ID NO: 21609 - DNA, 24 bp, Artificial Sequence
  Synthetic
gactcctauggtgacctcucagat

SEQ ID NO: 21610 - DNA, 21 bp, Artificial Sequence
  Synthetic
agggtgatugagacaccccua

SEQ ID NO: 21611 - DNA, 20 bp, Artificial Sequence
  Synthetic
agtactugcgggcagcauac

SEQ ID NO: 21612 - DNA, 22 bp, Artificial Sequence
  Synthetic
gaagagagtgutgctggagugt

SEQ ID NO: 21613 - DNA, 21 bp, Artificial Sequence
  Synthetic
gccccuggaacctcttccuag

SEQ ID NO: 21614 - DNA, 19 bp, Artificial Sequence
  Synthetic
catcaugggaccgcacaug

SEQ ID NO: 21615 - DNA, 24 bp, Artificial Sequence
  Synthetic
ggcaagatctuccgtgatgtguat

SEQ ID NO: 21616 - DNA, 18 bp, Artificial Sequence
  Synthetic
gcctcgcutgccagucag

SEQ ID NO: 21617 - DNA, 19 bp, Artificial Sequence
  Synthetic
gccaagccuctttgccugt

SEQ ID NO: 21618 - DNA, 21 bp, Artificial Sequence
  Synthetic
gtccccaaauacctuggagct

SEQ ID NO: 21619 - DNA, 18 bp, Artificial Sequence
  Synthetic
cgccugcagcgagtacut

SEQ ID NO: 21620 - DNA, 27 bp, Artificial Sequence
  Synthetic
ttctatggaaaaaucctttccccugac

SEQ ID NO: 21621 - DNA, 21 bp, Artificial Sequence
  Synthetic
gcaugacaagacggcacugaa

SEQ ID NO: 21622 - DNA, 19 bp, Artificial Sequence
  Synthetic
actcugcccagucaaggaa

SEQ ID NO: 21623 - DNA, 17 bp, Artificial Sequence
  Synthetic
aaccgcaacgugcagug

SEQ ID NO: 21624 - DNA, 22 bp, Artificial Sequence
  Synthetic
cagacgucaagaaggagggaug

SEQ ID NO: 21625 - DNA, 22 bp, Artificial Sequence
  Synthetic
ccgctccuttgatgatcuccaa

SEQ ID NO: 21626 - DNA, 18 bp, Artificial Sequence
  Synthetic
gccguggcaactcaccuc

SEQ ID NO: 21627 - DNA, 17 bp, Artificial Sequence
  Synthetic
cggcgcgcucgatcuac

SEQ ID NO: 21628 - DNA, 25 bp, Artificial Sequence
  Synthetic
cctagttgagucactgccagaatut

SEQ ID NO: 21629 - DNA, 28 bp, Artificial Sequence
  Synthetic
cctcatactutctcttcataugcacaca

SEQ ID NO: 21630 - DNA, 28 bp, Artificial Sequence
  Synthetic
cactgatactgtutatctgtgacctuca

SEQ ID NO: 21631 - DNA, 26 bp, Artificial Sequence
  Synthetic
atcttctcagagcuacttgctttucc

SEQ ID NO: 21632 - DNA, 26 bp, Artificial Sequence
  Synthetic
catacctagcugagtcacugacaaat

SEQ ID NO: 21633 - DNA, 28 bp, Artificial Sequence
  Synthetic
tctgttacctagtutagtcatggcctua

SEQ ID NO: 21634 - DNA, 27 bp, Artificial Sequence
  Synthetic
cautataaagatcaugcccaagaagcc

SEQ ID NO: 21635 - DNA, 28 bp, Artificial Sequence
  Synthetic
gttcccaaaucatttcctctuaccagat

SEQ ID NO: 21636 - DNA, 21 bp, Artificial Sequence
  Synthetic
gcagacaugcctagctgaguc

SEQ ID NO: 21637 - DNA, 27 bp, Artificial Sequence
  Synthetic
acatagacgatttuctccgaggattuc

SEQ ID NO: 21638 - DNA, 25 bp, Artificial Sequence
  Synthetic
tgtttatcugcgaccttcacatugt

SEQ ID NO: 21639 - DNA, 28 bp, Artificial Sequence
  Synthetic
ccagatgtcutgttaatcttcuccaagg

SEQ ID NO: 21640 - DNA, 22 bp, Artificial Sequence
  Synthetic
tcatcctgacuggtcctcctut

SEQ ID NO: 21641 - DNA, 20 bp, Artificial Sequence
  Synthetic
tcccctgcuctcttcagugt

SEQ ID NO: 21642 - DNA, 20 bp, Artificial Sequence
  Synthetic
cctcaatguccagctgcuct

SEQ ID NO: 21643 - DNA, 25 bp, Artificial Sequence
  Synthetic
tgagggactcugaaccctacttauc

SEQ ID NO: 21644 - DNA, 19 bp, Artificial Sequence
  Synthetic
gcacacgcuctctggctua

SEQ ID NO: 21645 - DNA, 23 bp, Artificial Sequence
  Synthetic
atctgcatgugtttcttgcctuc

SEQ ID NO: 21646 - DNA, 22 bp, Artificial Sequence
  Synthetic
gaggtttggcugtagcctctua

SEQ ID NO: 21647 - DNA, 17 bp, Artificial Sequence
  Synthetic
ctucccaggcccucacc

SEQ ID NO: 21648 - DNA, 19 bp, Artificial Sequence
  Synthetic
tggacggcucaatgtgugg

SEQ ID NO: 21649 - DNA, 18 bp, Artificial Sequence
  Synthetic
cugcggcagcagctaaug

SEQ ID NO: 21650 - DNA, 22 bp, Artificial Sequence
  Synthetic
agctcguagaagctgucaggat

SEQ ID NO: 21651 - DNA, 26 bp, Artificial Sequence
  Synthetic
gggaataagguccttcattcaaucac

SEQ ID NO: 21652 - DNA, 17 bp, Artificial Sequence
  Synthetic
tucggccgcaugagaca

SEQ ID NO: 21653 - DNA, 17 bp, Artificial Sequence
  Synthetic
gcgcagugctagcucca

SEQ ID NO: 21654 - DNA, 26 bp, Artificial Sequence
  Synthetic
ctctggucctttagatcugagagaca

SEQ ID NO: 21655 - DNA, 28 bp, Artificial Sequence
  Synthetic
tctctctagaguttggaaaccttuacca

SEQ ID NO: 21656 - DNA, 27 bp, Artificial Sequence
  Synthetic
cacatagaagattutctccgaggctut

SEQ ID NO: 21657 - DNA, 20 bp, Artificial Sequence
  Synthetic
gcagacaugcctagcugagt

SEQ ID NO: 21658 - DNA, 28 bp, Artificial Sequence
  Synthetic
ctatttccccagucttttaagtgacugt

SEQ ID NO: 21659 - DNA, 21 bp, Artificial Sequence
  Synthetic
cucagtgatgucgggaggaag

SEQ ID NO: 21660 - DNA, 22 bp, Artificial Sequence
  Synthetic
agggctgtagucattgtggaug

SEQ ID NO: 21661 - DNA, 28 bp, Artificial Sequence
  Synthetic
gaattagcaatcuaaggtctacgtcuga

SEQ ID NO: 21662 - DNA, 23 bp, Artificial Sequence
  Synthetic
tcautgagauggagaagcagcag

SEQ ID NO: 21663 - DNA, 29 bp, Artificial Sequence
  Synthetic
gtcattttgtcctutcagctttaagacut

SEQ ID NO: 21664 - DNA, 29 bp, Artificial Sequence
  Synthetic
tgttatcactctauctacttcccttagug

SEQ ID NO: 21665 - DNA, 26 bp, Artificial Sequence
  Synthetic
agagccattaaccucctaagtcctua

SEQ ID NO: 21666 - DNA, 24 bp, Artificial Sequence
  Synthetic
cttuaagacccuaccaacaacuga

SEQ ID NO: 21667 - DNA, 30 bp, Artificial Sequence
  Synthetic
gttttgagaaacuagacactgcaacttaut

SEQ ID NO: 21668 - DNA, 23 bp, Artificial Sequence
  Synthetic
gagcutgaagtacauggcaggat

SEQ ID NO: 21669 - DNA, 23 bp, Artificial Sequence
  Synthetic
ttccttugcagtaatccauggct

SEQ ID NO: 21670 - DNA, 20 bp, Artificial Sequence
  Synthetic
ccagagcagccugctactua

SEQ ID NO: 21671 - DNA, 27 bp, Artificial Sequence
  Synthetic
agaaatccctggaugatgaagtgaaug

SEQ ID NO: 21672 - DNA, 20 bp, Artificial Sequence
  Synthetic
gagcgguacctgaagggtut

SEQ ID NO: 21673 - DNA, 21 bp, Artificial Sequence
  Synthetic
gattcgggucaacauggagga

SEQ ID NO: 21674 - DNA, 22 bp, Artificial Sequence
  Synthetic
tgacaagcucgctggtgattut

SEQ ID NO: 21675 - DNA, 21 bp, Artificial Sequence
  Synthetic
atgctgcuatcagtugcaggt

SEQ ID NO: 21676 - DNA, 22 bp, Artificial Sequence
  Synthetic
caaagccaacugtgcuaacgat

SEQ ID NO: 21677 - DNA, 24 bp, Artificial Sequence
  Synthetic
ctgtucaacaccaaatucgaaggg

SEQ ID NO: 21678 - DNA, 19 bp, Artificial Sequence
  Synthetic
gtctccutgacccucacca

SEQ ID NO: 21679 - DNA, 19 bp, Artificial Sequence
  Synthetic
ctgtgcaguagctcccgut

SEQ ID NO: 21680 - DNA, 18 bp, Artificial Sequence
  Synthetic
gccagggcaucucccaat

SEQ ID NO: 21681 - DNA, 18 bp, Artificial Sequence
  Synthetic
ccaaagggcugcaccuac

SEQ ID NO: 21682 - DNA, 18 bp, Artificial Sequence
  Synthetic
acagagaacgccgugugt

SEQ ID NO: 21683 - DNA, 19 bp, Artificial Sequence
  Synthetic
gggaccaggguggaaaugg

SEQ ID NO: 21684 - DNA, 19 bp, Artificial Sequence
  Synthetic
gggtcuccacgattcgugt

SEQ ID NO: 21685 - DNA, 21 bp, Artificial Sequence
  Synthetic
agagtctgugggtcagtggut

SEQ ID NO: 21686 - DNA, 20 bp, Artificial Sequence
  Synthetic
acgctgcgutgtctccttua

SEQ ID NO: 21687 - DNA, 19 bp, Artificial Sequence
  Synthetic
ggtgaagucctcgctggug

SEQ ID NO: 21688 - DNA, 22 bp, Artificial Sequence
  Synthetic
gttcugcccccaccattuagaa

SEQ ID NO: 21689 - DNA, 18 bp, Artificial Sequence
  Synthetic
cagggcgagcuctccuac

SEQ ID NO: 21690 - DNA, 24 bp, Artificial Sequence
  Synthetic
gtcautaaggacatugagccaggt

SEQ ID NO: 21691 - DNA, 20 bp, Artificial Sequence
  Synthetic
ccaggcatcugctcctctuc

SEQ ID NO: 21692 - DNA, 22 bp, Artificial Sequence
  Synthetic
gagtacaaaugcgaccagtguc

SEQ ID NO: 21693 - DNA, 17 bp, Artificial Sequence
  Synthetic
gtcugcagcctccugct

SEQ ID NO: 21694 - DNA, 22 bp, Artificial Sequence
  Synthetic
gttttaggugaggtcugccaca

SEQ ID NO: 21695 - DNA, 19 bp, Artificial Sequence
  Synthetic
gutcttgcccucgcagaag

SEQ ID NO: 21696 - DNA, 19 bp, Artificial Sequence
  Synthetic
cccacaucgctgcucaaga

SEQ ID NO: 21697 - DNA, 19 bp, Artificial Sequence
  Synthetic
gcggctcucgaacttcucc

SEQ ID NO: 21698 - DNA, 21 bp, Artificial Sequence
  Synthetic
ccgaggugcctgtcttctaut

SEQ ID NO: 21699 - DNA, 22 bp, Artificial Sequence
  Synthetic
cttcttctccugcatccccaug

SEQ ID NO: 21700 - DNA, 21 bp, Artificial Sequence
  Synthetic
caaagacgugaagcccaucct

SEQ ID NO: 21701 - DNA, 21 bp, Artificial Sequence
  Synthetic
ccccauagacgtggttctugc

SEQ ID NO: 21702 - DNA, 26 bp, Artificial Sequence
  Synthetic
accctaagauatgctgttguacagaa

SEQ ID NO: 21703 - DNA, 22 bp, Artificial Sequence
  Synthetic
aaagctcuccagcttctctguc

SEQ ID NO: 21704 - DNA, 22 bp, Artificial Sequence
  Synthetic
aatcucaccagacaccugagga

SEQ ID NO: 21705 - DNA, 22 bp, Artificial Sequence
  Synthetic
gccctgggaauggcatactuac

SEQ ID NO: 21706 - DNA, 20 bp, Artificial Sequence
  Synthetic
gtcctcucccaccucagagt

SEQ ID NO: 21707 - DNA, 20 bp, Artificial Sequence
  Synthetic
ccagcccgcgauagtttuct

SEQ ID NO: 21708 - DNA, 18 bp, Artificial Sequence
  Synthetic
ctcuccccggtcatuggt

SEQ ID NO: 21709 - DNA, 27 bp, Artificial Sequence
  Synthetic
tctttaactucaaatgcttccucagct

SEQ ID NO: 21710 - DNA, 20 bp, Artificial Sequence
  Synthetic
tcaccccaucaaccaccuct

SEQ ID NO: 21711 - DNA, 24 bp, Artificial Sequence
  Synthetic
gaaaagtcggaaugaaccatggug

SEQ ID NO: 21712 - DNA, 22 bp, Artificial Sequence
  Synthetic
acacacacacutccctcctgua

SEQ ID NO: 21713 - DNA, 28 bp, Artificial Sequence
  Synthetic
caagaaaggaucaaagugaacggaaaag

SEQ ID NO: 21714 - DNA, 18 bp, Artificial Sequence
  Synthetic
cucacgcggagccauact

SEQ ID NO: 21715 - DNA, 21 bp, Artificial Sequence
  Synthetic
ggcguggcaaagtgattagug

SEQ ID NO: 21716 - DNA, 22 bp, Artificial Sequence
  Synthetic
guggcagcggtauagagagaat

SEQ ID NO: 21717 - DNA, 21 bp, Artificial Sequence
  Synthetic
tgttgatuggcagctcagcua

SEQ ID NO: 21718 - DNA, 25 bp, Artificial Sequence
  Synthetic
caaaaccagagagaugcagaaacuc

SEQ ID NO: 21719 - DNA, 23 bp, Artificial Sequence
  Synthetic
aacatcaauggaggcaacacuct

SEQ ID NO: 21720 - DNA, 21 bp, Artificial Sequence
  Synthetic
gtctctguggctttccugact

SEQ ID NO: 21721 - DNA, 20 bp, Artificial Sequence
  Synthetic
tgacgucaggagccaagaug

SEQ ID NO: 21722 - DNA, 20 bp, Artificial Sequence
  Synthetic
ccuaaccacauccgccacaa

SEQ ID NO: 21723 - DNA, 19 bp, Artificial Sequence
  Synthetic
ggacccgguctcctgguag

SEQ ID NO: 21724 - DNA, 25 bp, Artificial Sequence
  Synthetic
gcucagaatcaagtucgggaagaaa

SEQ ID NO: 21725 - DNA, 19 bp, Artificial Sequence
  Synthetic
agcccagggaagutcccua

SEQ ID NO: 21726 - DNA, 19 bp, Artificial Sequence
  Synthetic
cggcgtucaaccacctuct

SEQ ID NO: 21727 - DNA, 20 bp, Artificial Sequence
  Synthetic
caccacugagauggcaggac

SEQ ID NO: 21728 - DNA, 18 bp, Artificial Sequence
  Synthetic
tcggccaccuccatcuca

SEQ ID NO: 21729 - DNA, 21 bp, Artificial Sequence
  Synthetic
cgtacuggccgtactgauagc

SEQ ID NO: 21730 - DNA, 20 bp, Artificial Sequence
  Synthetic
gaaacuggccaggcctacua

SEQ ID NO: 21731 - DNA, 19 bp, Artificial Sequence
  Synthetic
gggcuggtgaugagaagca

SEQ ID NO: 21732 - DNA, 21 bp, Artificial Sequence
  Synthetic
gtggaacgccaggautagcut

SEQ ID NO: 21733 - DNA, 26 bp, Artificial Sequence
  Synthetic
agtagagaguagtatcctgguggagt

SEQ ID NO: 21734 - DNA, 22 bp, Artificial Sequence
  Synthetic
tgatgtucacgcacaggtctut

SEQ ID NO: 21735 - DNA, 23 bp, Artificial Sequence
  Synthetic
tcagcgauggaagtctttggaug

SEQ ID NO: 21736 - DNA, 27 bp, Artificial Sequence
  Synthetic
caaattcaacaaugcctttccctguag

SEQ ID NO: 21737 - DNA, 29 bp, Artificial Sequence
  Synthetic
tgttcgtaatctutcaccttatgttucca

SEQ ID NO: 21738 - DNA, 28 bp, Artificial Sequence
  Synthetic
caaatagtcttutgaattcatccuccgt

SEQ ID NO: 21739 - DNA, 25 bp, Artificial Sequence
  Synthetic
agaggtctcuggtgtttgaaaacut

SEQ ID NO: 21740 - DNA, 17 bp, Artificial Sequence
  Synthetic
ggtggcugttgctgcug

SEQ ID NO: 21741 - DNA, 19 bp, Artificial Sequence
  Synthetic
cctccacgacutccgtuct

SEQ ID NO: 21742 - DNA, 27 bp, Artificial Sequence
  Synthetic
acatttgtctcuttcctttccatucca

SEQ ID NO: 21743 - DNA, 21 bp, Artificial Sequence
  Synthetic
acgcccacggaaauaauaggg

SEQ ID NO: 21744 - DNA, 25 bp, Artificial Sequence
  Synthetic
tctguaaaggagaaaaagucctcut

SEQ ID NO: 21745 - DNA, 21 bp, Artificial Sequence
  Synthetic
atggctucgagctctcagaug

SEQ ID NO: 21746 - DNA, 21 bp, Artificial Sequence
  Synthetic
ctggcuccacatatggcucat

SEQ ID NO: 21747 - DNA, 24 bp, Artificial Sequence
  Synthetic
caattaaacugccagctagugaga

SEQ ID NO: 21748 - DNA, 24 bp, Artificial Sequence
  Synthetic
gaagaagauggctgactuccacaa

SEQ ID NO: 21749 - DNA, 22 bp, Artificial Sequence
  Synthetic
cctcccattugcctgacttcuc

SEQ ID NO: 21750 - DNA, 28 bp, Artificial Sequence
  Synthetic
gaaagtcttccutttccattacucgaga

SEQ ID NO: 21751 - DNA, 20 bp, Artificial Sequence
  Synthetic
gcuaggcgacaccactuagg

SEQ ID NO: 21752 - DNA, 24 bp, Artificial Sequence
  Synthetic
tgggtccucaggaatgacatuaca

SEQ ID NO: 21753 - DNA, 22 bp, Artificial Sequence
  Synthetic
acctccaguataaggccauggt

SEQ ID NO: 21754 - DNA, 26 bp, Artificial Sequence
  Synthetic
gaggtaaaucgagagaatcaguggat

SEQ ID NO: 21755 - DNA, 25 bp, Artificial Sequence
  Synthetic
gggacagacaagaaacutaagaguc

SEQ ID NO: 21756 - DNA, 25 bp, Artificial Sequence
  Synthetic
agaggcaactacuctgggaacaaua

SEQ ID NO: 21757 - DNA, 22 bp, Artificial Sequence
  Synthetic
ctgtgtgucaaaggccctcuaa

SEQ ID NO: 21758 - DNA, 22 bp, Artificial Sequence
  Synthetic
ggctgcuaccaagaaacaguga

SEQ ID NO: 21759 - DNA, 28 bp, Artificial Sequence
  Synthetic
tgtaaaacguctcagacagtuaccaaaa

SEQ ID NO: 21760 - DNA, 28 bp, Artificial Sequence
  Synthetic
tgcttttgtcugcaaaacttcatttgua

SEQ ID NO: 21761 - DNA, 22 bp, Artificial Sequence
  Synthetic
gtccataccugaacagctuggt

SEQ ID NO: 21762 - DNA, 24 bp, Artificial Sequence
  Synthetic
cagagctauagcatttgccuccat

SEQ ID NO: 21763 - DNA, 28 bp, Artificial Sequence
  Synthetic
atgatggcttacuactttgtgtcttuca

SEQ ID NO: 21764 - DNA, 29 bp, Artificial Sequence
  Synthetic
accttctcaaaaagaugaaatgctcuaca

SEQ ID NO: 21765 - DNA, 23 bp, Artificial Sequence
  Synthetic
gggtgccaguaacaattcugaaa

SEQ ID NO: 21766 - DNA, 27 bp, Artificial Sequence
  Synthetic
atgttgctctctucaaaactgggaaua

SEQ ID NO: 21767 - DNA, 28 bp, Artificial Sequence
  Synthetic
aagatgauaccaaaatttccagugagga

SEQ ID NO: 21768 - DNA, 29 bp, Artificial Sequence
  Synthetic
aautaatagaacuaggaaagcaccaagca

SEQ ID NO: 21769 - DNA, 25 bp, Artificial Sequence
  Synthetic
acccaagacugagtcagataaugga

SEQ ID NO: 21770 - DNA, 28 bp, Artificial Sequence
  Synthetic
cttgccaagaatutagcggactatatug

SEQ ID NO: 21771 - DNA, 24 bp, Artificial Sequence
  Synthetic
tcccaaccacacgautttgtttut

SEQ ID NO: 21772 - DNA, 29 bp, Artificial Sequence
  Synthetic
ctggtttaactgauttggtattcctcuca

SEQ ID NO: 21773 - DNA, 23 bp, Artificial Sequence
  Synthetic
cctctgccuactccatuggaaat

SEQ ID NO: 21774 - DNA, 29 bp, Artificial Sequence
  Synthetic
accctaaacagucactaatgtacuagaca

SEQ ID NO: 21775 - DNA, 27 bp, Artificial Sequence
  Synthetic
tgagttttatgaaugcttcccttguga

SEQ ID NO: 21776 - DNA, 23 bp, Artificial Sequence
  Synthetic
caagtugtcaatgaaucgcacct

SEQ ID NO: 21777 - DNA, 28 bp, Artificial Sequence
  Synthetic
tcgagaagtaccugaatgcctagaaaua

SEQ ID NO: 21778 - DNA, 23 bp, Artificial Sequence
  Synthetic
gatgaaatcuccagttggcgtug

SEQ ID NO: 21779 - DNA, 28 bp, Artificial Sequence
  Synthetic
ccaagtttgctautccttgtgcttuaat

SEQ ID NO: 21780 - DNA, 20 bp, Artificial Sequence
  Synthetic
ggtggugaggactcgactuc

SEQ ID NO: 21781 - DNA, 21 bp, Artificial Sequence
  Synthetic
ggacttguccagguggagact

SEQ ID NO: 21782 - DNA, 21 bp, Artificial Sequence
  Synthetic
acggcctguttcatgagtuca

SEQ ID NO: 21783 - DNA, 17 bp, Artificial Sequence
  Synthetic
cctcuggcatgctuggc

SEQ ID NO: 21784 - DNA, 19 bp, Artificial Sequence
  Synthetic
caccautgccucgagacct

SEQ ID NO: 21785 - DNA, 19 bp, Artificial Sequence
  Synthetic
gtccggtuagctcgcugat

SEQ ID NO: 21786 - DNA, 20 bp, Artificial Sequence
  Synthetic
gggacctugggttcctctug

SEQ ID NO: 21787 - DNA, 20 bp, Artificial Sequence
  Synthetic
cauatggguccaggcagcat

SEQ ID NO: 21788 - DNA, 22 bp, Artificial Sequence
  Synthetic
ccactggauagcctagaucgca

SEQ ID NO: 21789 - DNA, 18 bp, Artificial Sequence
  Synthetic
ttttcgugggcggucact

SEQ ID NO: 21790 - DNA, 19 bp, Artificial Sequence
  Synthetic
ggagugcaccuagcaccag

SEQ ID NO: 21791 - DNA, 25 bp, Artificial Sequence
  Synthetic
cagatgcatgtuggaaggaaagtug

SEQ ID NO: 21792 - DNA, 19 bp, Artificial Sequence
  Synthetic
gtgatcagccuccctgugg

SEQ ID NO: 21793 - DNA, 23 bp, Artificial Sequence
  Synthetic
ccacggacaaugatcaugaccag

SEQ ID NO: 21794 - DNA, 30 bp, Artificial Sequence
  Synthetic
acuaagatttgtaattaugccaagaaacca

SEQ ID NO: 21795 - DNA, 26 bp, Artificial Sequence
  Synthetic
gaaatacgccaguaccgaaugaaaaa

SEQ ID NO: 21796 - DNA, 32 bp, Artificial Sequence
  Synthetic
acaaagatcatccuttcagagaaaataaugct

SEQ ID NO: 21797 - DNA, 25 bp, Artificial Sequence
  Synthetic
catactggauacagcuggacaagaa

SEQ ID NO: 21798 - DNA, 27 bp, Artificial Sequence
  Synthetic
tcttctctttccuacctctagaagcug

SEQ ID NO: 21799 - DNA, 24 bp, Artificial Sequence
  Synthetic
ccacacaacaacaugcaggttuat

SEQ ID NO: 21800 - DNA, 21 bp, Artificial Sequence
  Synthetic
gcugggaaaggatgauaggct

SEQ ID NO: 21801 - DNA, 17 bp, Artificial Sequence
  Synthetic
cccuccagctgtugcgg

SEQ ID NO: 21802 - DNA, 21 bp, Artificial Sequence
  Synthetic
cactgccuggagacacaaugt

SEQ ID NO: 21803 - DNA, 21 bp, Artificial Sequence
  Synthetic
ccaaccctaugttggccacug

SEQ ID NO: 21804 - DNA, 22 bp, Artificial Sequence
  Synthetic
cccacagaugacaggugagaga

SEQ ID NO: 21805 - DNA, 24 bp, Artificial Sequence
  Synthetic
accattttgccaaucgagacauca

SEQ ID NO: 21806 - DNA, 27 bp, Artificial Sequence
  Synthetic
agttctctaagggucacgtaactcuat

SEQ ID NO: 21807 - DNA, 22 bp, Artificial Sequence
  Synthetic
tggtggcagaacugatcaacug

SEQ ID NO: 21808 - DNA, 26 bp, Artificial Sequence
  Synthetic
gtcugtgatgatgtuagcagaagagt

SEQ ID NO: 21809 - DNA, 26 bp, Artificial Sequence
  Synthetic
caaccatagggutaactaccttcucc

SEQ ID NO: 21810 - DNA, 22 bp, Artificial Sequence
  Synthetic
tcatcgacccagugttcactug

SEQ ID NO: 21811 - DNA, 23 bp, Artificial Sequence
  Synthetic
tgtaatauagccacgggagtgug

SEQ ID NO: 21812 - DNA, 21 bp, Artificial Sequence
  Synthetic
cccccaautgacactctuccc

SEQ ID NO: 21813 - DNA, 23 bp, Artificial Sequence
  Synthetic
ccagtgugttcaagacucagacc

SEQ ID NO: 21814 - DNA, 20 bp, Artificial Sequence
  Synthetic
ccuggagcagttgtucaggt

SEQ ID NO: 21815 - DNA, 24 bp, Artificial Sequence
  Synthetic
tgacaaatactgugcagaccacut

SEQ ID NO: 21816 - DNA, 20 bp, Artificial Sequence
  Synthetic
cctcaucacagacgccaucc

SEQ ID NO: 21817 - DNA, 24 bp, Artificial Sequence
  Synthetic
cctccttattacucctgccagugt

SEQ ID NO: 21818 - DNA, 24 bp, Artificial Sequence
  Synthetic
tgaaaccaucaggcatgttacugg

SEQ ID NO: 21819 - DNA, 27 bp, Artificial Sequence
  Synthetic
caaagtttgtugagtaacttgcaguga

SEQ ID NO: 21820 - DNA, 23 bp, Artificial Sequence
  Synthetic
acttaagacaaugccctggaugg

SEQ ID NO: 21821 - DNA, 26 bp, Artificial Sequence
  Synthetic
ctatcagggtgucaactgtgagtaug

SEQ ID NO: 21822 - DNA, 26 bp, Artificial Sequence
  Synthetic
tgataccttcuctaaatgccacugga

SEQ ID NO: 21823 - DNA, 21 bp, Artificial Sequence
  Synthetic
gcctatguccatctggauggg

SEQ ID NO: 21824 - DNA, 24 bp, Artificial Sequence
  Synthetic
tctccctttcuctcgtaagaugct

SEQ ID NO: 21825 - DNA, 22 bp, Artificial Sequence
  Synthetic
gtaagaauggagggacctgcuc

SEQ ID NO: 21826 - DNA, 24 bp, Artificial Sequence
  Synthetic
gttauggcagagaccatggtucat

SEQ ID NO: 21827 - DNA, 21 bp, Artificial Sequence
  Synthetic
gaauagctccaugcaccccaa

SEQ ID NO: 21828 - DNA, 21 bp, Artificial Sequence
  Synthetic
caggtuccttggtucaggcat

SEQ ID NO: 21829 - DNA, 28 bp, Artificial Sequence
  Synthetic
tttctgatgtgtucagtttttaccccua

SEQ ID NO: 21830 - DNA, 21 bp, Artificial Sequence
  Synthetic
cacccacugagacctccagua

SEQ ID NO: 21831 - DNA, 20 bp, Artificial Sequence
  Synthetic
cctccaauccctgucgcaag

SEQ ID NO: 21832 - DNA, 21 bp, Artificial Sequence
  Synthetic
gttgcacuggtagccatugac

SEQ ID NO: 21833 - DNA, 22 bp, Artificial Sequence
  Synthetic
catggtcagugtcaggatggua

SEQ ID NO: 21834 - DNA, 23 bp, Artificial Sequence
  Synthetic
acacattctcuccctgctctcut

SEQ ID NO: 21835 - DNA, 23 bp, Artificial Sequence
  Synthetic
gagcaacccutgtgtgaacaaug

SEQ ID NO: 21836 - DNA, 28 bp, Artificial Sequence
  Synthetic
tgcttctacaguaaaatgtgcttcagut

SEQ ID NO: 21837 - DNA, 23 bp, Artificial Sequence
  Synthetic
caatatauttgcaccugcccaca

SEQ ID NO: 21838 - DNA, 21 bp, Artificial Sequence
  Synthetic
cccccatttugacaggcatug

SEQ ID NO: 21839 - DNA, 25 bp, Artificial Sequence
  Synthetic
tttcagacaggucacatgaagauga

SEQ ID NO: 21840 - DNA, 21 bp, Artificial Sequence
  Synthetic
aggtgccuccatugacacaag

SEQ ID NO: 21841 - DNA, 24 bp, Artificial Sequence
  Synthetic
caatgagugtgacatuccaggaca

SEQ ID NO: 21842 - DNA, 21 bp, Artificial Sequence
  Synthetic
cgactugacaggtgcacucat

SEQ ID NO: 21843 - DNA, 20 bp, Artificial Sequence
  Synthetic
ccgatgtgccucagggttua

SEQ ID NO: 21844 - DNA, 26 bp, Artificial Sequence
  Synthetic
attgtggtagguaacacacattccut

SEQ ID NO: 21845 - DNA, 22 bp, Artificial Sequence
  Synthetic
aggtgggaaugaatgctgauct

SEQ ID NO: 21846 - DNA, 18 bp, Artificial Sequence
  Synthetic
ccuggaaggcaaggguca

SEQ ID NO: 21847 - DNA, 21 bp, Artificial Sequence
  Synthetic
gctttggucaccacgtagcuc

SEQ ID NO: 21848 - DNA, 25 bp, Artificial Sequence
  Synthetic
tcctgattttcuggaaaagctguga

SEQ ID NO: 21849 - DNA, 22 bp, Artificial Sequence
  Synthetic
cttccctccucaccatgttcug

SEQ ID NO: 21850 - DNA, 21 bp, Artificial Sequence
  Synthetic
ctgggcccuttagttgccaua

SEQ ID NO: 21851 - DNA, 21 bp, Artificial Sequence
  Synthetic
gtggttgccuttacccccuag

SEQ ID NO: 21852 - DNA, 23 bp, Artificial Sequence
  Synthetic
tagctucccatgatcuccacaac

SEQ ID NO: 21853 - DNA, 22 bp, Artificial Sequence
  Synthetic
tctttgaguccctccagucaga

SEQ ID NO: 21854 - DNA, 20 bp, Artificial Sequence
  Synthetic
ctgccttuccaccttcuggt

SEQ ID NO: 21855 - DNA, 27 bp, Artificial Sequence
  Synthetic
tggccccatgauaataaatcaatccug

SEQ ID NO: 21856 - DNA, 20 bp, Artificial Sequence
  Synthetic
gttccagtugctcccguagg

SEQ ID NO: 21857 - DNA, 22 bp, Artificial Sequence
  Synthetic
ggattctccauctcccaccuct

SEQ ID NO: 21858 - DNA, 22 bp, Artificial Sequence
  Synthetic
cacacaaaugcagaagtgcuca

SEQ ID NO: 21859 - DNA, 18 bp, Artificial Sequence
  Synthetic
aggcaccautgcccucag

SEQ ID NO: 21860 - DNA, 23 bp, Artificial Sequence
  Synthetic
cctgtttccugagttctccacuc

SEQ ID NO: 21861 - DNA, 20 bp, Artificial Sequence
  Synthetic
aagcctgcuctgacauggac

SEQ ID NO: 21862 - DNA, 23 bp, Artificial Sequence
  Synthetic
ctgagagtatuccaaagcccugt

SEQ ID NO: 21863 - DNA, 28 bp, Artificial Sequence
  Synthetic
tcctaaggagcaaugacattgactacua

SEQ ID NO: 21864 - DNA, 24 bp, Artificial Sequence
  Synthetic
gatgagactcuccaggtcctttut

SEQ ID NO: 21865 - DNA, 28 bp, Artificial Sequence
  Synthetic
gtgattatucgtctagtcuggaaagacc

SEQ ID NO: 21866 - DNA, 19 bp, Artificial Sequence
  Synthetic
cccacacccugtgctctua

SEQ ID NO: 21867 - DNA, 23 bp, Artificial Sequence
  Synthetic
ctgtaacaccugcttctctuccc

SEQ ID NO: 21868 - DNA, 26 bp, Artificial Sequence
  Synthetic
ttttcactcaatcuaagcccacacut

SEQ ID NO: 21869 - DNA, 26 bp, Artificial Sequence
  Synthetic
gaataaacacagaacuggttggtucc

SEQ ID NO: 21870 - DNA, 22 bp, Artificial Sequence
  Synthetic
ctttcagcuccgcattcucaag

SEQ ID NO: 21871 - DNA, 22 bp, Artificial Sequence
  Synthetic
tgagttaatugcgggcugagat

SEQ ID NO: 21872 - DNA, 18 bp, Artificial Sequence
  Synthetic
ccgagcagcccutcgaug

SEQ ID NO: 21873 - DNA, 29 bp, Artificial Sequence
  Synthetic
ctttgcccctatutattctctgtagcuat

SEQ ID NO: 21874 - DNA, 21 bp, Artificial Sequence
  Synthetic
cgcuccaagcttctuccaaga

SEQ ID NO: 21875 - DNA, 24 bp, Artificial Sequence
  Synthetic
ggctaatccacuttccttccaugt

SEQ ID NO: 21876 - DNA, 21 bp, Artificial Sequence
  Synthetic
ggcgttccauagctggtaugt

SEQ ID NO: 21877 - DNA, 28 bp, Artificial Sequence
  Synthetic
ggcagaatattucaagacatttgtuccc

SEQ ID NO: 21878 - DNA, 30 bp, Artificial Sequence
  Synthetic
gagaaaagagtctuggccaaacctataaua

SEQ ID NO: 21879 - DNA, 24 bp, Artificial Sequence
  Synthetic
acutcattgacugccaaagaggat

SEQ ID NO: 21880 - DNA, 30 bp, Artificial Sequence
  Synthetic
gcttcctattugcagactataaatgcacua

SEQ ID NO: 21881 - DNA, 22 bp, Artificial Sequence
  Synthetic
atgctgcaggaccutctaagug

SEQ ID NO: 21882 - DNA, 25 bp, Artificial Sequence
  Synthetic
caccaagucagagataggtttugct

SEQ ID NO: 21883 - DNA, 29 bp, Artificial Sequence
  Synthetic
gggctatagaugaaaaattctctgctcua

SEQ ID NO: 21884 - DNA, 27 bp, Artificial Sequence
  Synthetic
caaatutcagagttctaugagcccagt

SEQ ID NO: 21885 - DNA, 23 bp, Artificial Sequence
  Synthetic
gaataagagucaacagcutcgug

SEQ ID NO: 21886 - DNA, 25 bp, Artificial Sequence
  Synthetic
actgagcucccacaaagacuaaaaa

SEQ ID NO: 21887 - DNA, 25 bp, Artificial Sequence
  Synthetic
aggtcaaaaugacacaauggcaaag

SEQ ID NO: 21888 - DNA, 24 bp, Artificial Sequence
  Synthetic
cagtcacatccucaggaaaaccut

SEQ ID NO: 21889 - DNA, 26 bp, Artificial Sequence
  Synthetic
gctgaaacaacaaaagcugaatucac

SEQ ID NO: 21890 - DNA, 19 bp, Artificial Sequence
  Synthetic
tggaaucggaagcctgcuc

SEQ ID NO: 21891 - DNA, 23 bp, Artificial Sequence
  Synthetic
tgaggagacugagagaagugcaa

SEQ ID NO: 21892 - DNA, 21 bp, Artificial Sequence
  Synthetic
ggttuccagggccttcugaac

SEQ ID NO: 21893 - DNA, 22 bp, Artificial Sequence
  Synthetic
gacggttgacaugtccgtctua

SEQ ID NO: 21894 - DNA, 22 bp, Artificial Sequence
  Synthetic
gaacctggagautgagctugga

SEQ ID NO: 21895 - DNA, 21 bp, Artificial Sequence
  Synthetic
attgagtggucacccaguagc

SEQ ID NO: 21896 - DNA, 20 bp, Artificial Sequence
  Synthetic
accgaaggcaccuacttguc

SEQ ID NO: 21897 - DNA, 19 bp, Artificial Sequence
  Synthetic
gatggcagcuctgguggaa

SEQ ID NO: 21898 - DNA, 18 bp, Artificial Sequence
  Synthetic
tctgttgcaugcgcucct

SEQ ID NO: 21899 - DNA, 20 bp, Artificial Sequence
  Synthetic
gcaccatgutcctgggtuga

SEQ ID NO: 21900 - DNA, 20 bp, Artificial Sequence
  Synthetic
gcccacagcauccttaccug

SEQ ID NO: 21901 - DNA, 21 bp, Artificial Sequence
  Synthetic
ggtgtctuctcctcgauccct

SEQ ID NO: 21902 - DNA, 18 bp, Artificial Sequence
  Synthetic
cagccaaagucgcaucgg

SEQ ID NO: 21903 - DNA, 17 bp, Artificial Sequence
  Synthetic
ccuggcagucccggaag

SEQ ID NO: 21904 - DNA, 21 bp, Artificial Sequence
  Synthetic
agtggtgugagcagtaagcuc

SEQ ID NO: 21905 - DNA, 22 bp, Artificial Sequence
  Synthetic
ccttctctugtgttccccucct

SEQ ID NO: 21906 - DNA, 24 bp, Artificial Sequence
  Synthetic
gctcaccuccttgagtttaucagt

SEQ ID NO: 21907 - DNA, 29 bp, Artificial Sequence
  Synthetic
ttagtgcaagaggauattcaatgtaagut

SEQ ID NO: 21908 - DNA, 26 bp, Artificial Sequence
  Synthetic
gggaagggauaaattggtaaugacaa

SEQ ID NO: 21909 - DNA, 26 bp, Artificial Sequence
  Synthetic
gtaaatggcucctttgcttcacuaag

SEQ ID NO: 21910 - DNA, 18 bp, Artificial Sequence
  Synthetic
ctccugagcacgguccag

SEQ ID NO: 21911 - DNA, 26 bp, Artificial Sequence
  Synthetic
gctttttcatgguagtcaacccugat

SEQ ID NO: 21912 - DNA, 21 bp, Artificial Sequence
  Synthetic
ttctctgccagutccagctuc

SEQ ID NO: 21913 - DNA, 23 bp, Artificial Sequence
  Synthetic
caaccctgcautgttgtgttugt

SEQ ID NO: 21914 - DNA, 17 bp, Artificial Sequence
  Synthetic
cucatcugccggcaagg

SEQ ID NO: 21915 - DNA, 19 bp, Artificial Sequence
  Synthetic
cuaaagcgggcccagaugt

SEQ ID NO: 21916 - DNA, 26 bp, Artificial Sequence
  Synthetic
ctgttgttttuggtgttgctaguaca

SEQ ID NO: 21917 - DNA, 26 bp, Artificial Sequence
  Synthetic
ctgttagtctctutcacagtcaggut

SEQ ID NO: 21918 - DNA, 21 bp, Artificial Sequence
  Synthetic
gagccatacccutaccccauc

SEQ ID NO: 21919 - DNA, 20 bp, Artificial Sequence
  Synthetic
tgtagtcguccccaggctua

SEQ ID NO: 21920 - DNA, 26 bp, Artificial Sequence
  Synthetic
gagggagagaagaaaucaactttgug

SEQ ID NO: 21921 - DNA, 23 bp, Artificial Sequence
  Synthetic
ttcccaagcugaccactcaauag

SEQ ID NO: 21922 - DNA, 22 bp, Artificial Sequence
  Synthetic
gtcacugacacagagugcagat

SEQ ID NO: 21923 - DNA, 27 bp, Artificial Sequence
  Synthetic
agagagagagaaugaaaaugaggagua

SEQ ID NO: 21924 - DNA, 19 bp, Artificial Sequence
  Synthetic
gtgggcaugggaacucaag

SEQ ID NO: 21925 - DNA, 19 bp, Artificial Sequence
  Synthetic
acagtccccguttcccuca

SEQ ID NO: 21926 - DNA, 21 bp, Artificial Sequence
  Synthetic
ggaaccctcugcactgttcut

SEQ ID NO: 21927 - DNA, 20 bp, Artificial Sequence
  Synthetic
ccttacaccaccucccucac

SEQ ID NO: 21928 - DNA, 20 bp, Artificial Sequence
  Synthetic
gacctccugctgttgctcut

SEQ ID NO: 21929 - DNA, 20 bp, Artificial Sequence
  Synthetic
cuggtctcatugagcacgga

SEQ ID NO: 21930 - DNA, 22 bp, Artificial Sequence
  Synthetic
gggttacuggaggctacagugt

SEQ ID NO: 21931 - DNA, 25 bp, Artificial Sequence
  Synthetic
gcacaagctuctacttcctatcuca

SEQ ID NO: 21932 - DNA, 19 bp, Artificial Sequence
  Synthetic
agacaguccccgcuacaac

SEQ ID NO: 21933 - DNA, 21 bp, Artificial Sequence
  Synthetic
cucagcaaggaagacctuccc

SEQ ID NO: 21934 - DNA, 23 bp, Artificial Sequence
  Synthetic
ggagttctaucctcccagccuat

SEQ ID NO: 21935 - DNA, 18 bp, Artificial Sequence
  Synthetic
cccgccagguacaccauc

SEQ ID NO: 21936 - DNA, 17 bp, Artificial Sequence
  Synthetic
ctugacgggctguccca

SEQ ID NO: 21937 - DNA, 21 bp, Artificial Sequence
  Synthetic
cgctctcgguggtgaactuac

SEQ ID NO: 21938 - DNA, 21 bp, Artificial Sequence
  Synthetic
ctacctggaugtcctgggcua

SEQ ID NO: 21939 - DNA, 19 bp, Artificial Sequence
  Synthetic
caccugtccctucccacat

SEQ ID NO: 21940 - DNA, 27 bp, Artificial Sequence
  Synthetic
ttgtgtgtttctutacagttggtcuct

SEQ ID NO: 21941 - DNA, 27 bp, Artificial Sequence
  Synthetic
cagccaagttttucaaagaagcacaua

SEQ ID NO: 21942 - DNA, 24 bp, Artificial Sequence
  Synthetic
gaccuaggaaaagguctgaagaut

SEQ ID NO: 21943 - DNA, 28 bp, Artificial Sequence
  Synthetic
gaatgacaaacagaaagaugggtgaaug

SEQ ID NO: 21944 - DNA, 17 bp, Artificial Sequence
  Synthetic
gggcugccgtagcctut

SEQ ID NO: 21945 - DNA, 22 bp, Artificial Sequence
  Synthetic
gtctccaatgucctgcttccuc

SEQ ID NO: 21946 - DNA, 18 bp, Artificial Sequence
  Synthetic
gctgaugcggcuggacaa

SEQ ID NO: 21947 - DNA, 23 bp, Artificial Sequence
  Synthetic
gtctgatcugtgagagttuggct

SEQ ID NO: 21948 - DNA, 28 bp, Artificial Sequence
  Synthetic
ggtgtgagccuttttgttattattucct

SEQ ID NO: 21949 - DNA, 23 bp, Artificial Sequence
  Synthetic
gctaactccuctttggcttccuc

SEQ ID NO: 21950 - DNA, 21 bp, Artificial Sequence
  Synthetic
gcuaccaatgtgucagcccat

SEQ ID NO: 21951 - DNA, 23 bp, Artificial Sequence
  Synthetic
tcccaatguaggaacagccagua

SEQ ID NO: 21952 - DNA, 22 bp, Artificial Sequence
  Synthetic
acccaatcucagaggacugact

SEQ ID NO: 21953 - DNA, 19 bp, Artificial Sequence
  Synthetic
ggaugcgattgcugggaga

SEQ ID NO: 21954 - DNA, 25 bp, Artificial Sequence
  Synthetic
gaaaaagaactuctccgtcagucac

SEQ ID NO: 21955 - DNA, 17 bp, Artificial Sequence
  Synthetic
catgcgccccucacuca

SEQ ID NO: 21956 - DNA, 22 bp, Artificial Sequence
  Synthetic
tcctacucaggagacgtgacug

SEQ ID NO: 21957 - DNA, 22 bp, Artificial Sequence
  Synthetic
ccgcugagaaacatguggaagt

SEQ ID NO: 21958 - DNA, 20 bp, Artificial Sequence
  Synthetic
ccaggugccaacagucaact

SEQ ID NO: 21959 - DNA, 27 bp, Artificial Sequence
  Synthetic
tctgccatggucccaatattttagtuc

SEQ ID NO: 21960 - DNA, 18 bp, Artificial Sequence
  Synthetic
gcgagguccaggcagaug

SEQ ID NO: 21961 - DNA, 21 bp, Artificial Sequence
  Synthetic
ctggagcucccttccctaaug

SEQ ID NO: 21962 - DNA, 19 bp, Artificial Sequence
  Synthetic
gactgcucgagugccgaat

SEQ ID NO: 21963 - DNA, 20 bp, Artificial Sequence
  Synthetic
ctcccaggcuctgtctgaug

SEQ ID NO: 21964 - DNA, 17 bp, Artificial Sequence
  Synthetic
cggcauggacagcagug

SEQ ID NO: 21965 - DNA, 21 bp, Artificial Sequence
  Synthetic
cctgcucaccctcatctucct

SEQ ID NO: 21966 - DNA, 22 bp, Artificial Sequence
  Synthetic
ggaugagaaagaggcucagcag

SEQ ID NO: 21967 - DNA, 28 bp, Artificial Sequence
  Synthetic
ccattgactcauactacttcccttctug

SEQ ID NO: 21968 - DNA, 26 bp, Artificial Sequence
  Synthetic
gagttactgtcugccaacattaguga

SEQ ID NO: 21969 - DNA, 26 bp, Artificial Sequence
  Synthetic
tgucttaauaacaaaguacacagcca

SEQ ID NO: 21970 - DNA, 28 bp, Artificial Sequence
  Synthetic
gctacttaggtuacaatcaggaggaaut

SEQ ID NO: 21971 - DNA, 32 bp, Artificial Sequence
  Synthetic
atataaggagaagauacagagagctagtatuc

SEQ ID NO: 21972 - DNA, 29 bp, Artificial Sequence
  Synthetic
cattaatggcgagugatagatauaaacca

SEQ ID NO: 21973 - DNA, 26 bp, Artificial Sequence
  Synthetic
tgcttggtcauaaaggattcuacacc

SEQ ID NO: 21974 - DNA, 24 bp, Artificial Sequence
  Synthetic
ctccagccccucctatagatucat

SEQ ID NO: 21975 - DNA, 28 bp, Artificial Sequence
  Synthetic
tgaagctctccaaauaagtagtaccugt

SEQ ID NO: 21976 - DNA, 19 bp, Artificial Sequence
  Synthetic
tgcucacccggaagucaga

SEQ ID NO: 21977 - DNA, 23 bp, Artificial Sequence
  Synthetic
ttgccaauccagaagtaaccugt

SEQ ID NO: 21978 - DNA, 31 bp, Artificial Sequence
  Synthetic
ccaaagataacaaagagautgcctcaattut

SEQ ID NO: 21979 - DNA, 28 bp, Artificial Sequence
  Synthetic
cactagtttgtgacuggtttgagaguat

SEQ ID NO: 21980 - DNA, 29 bp, Artificial Sequence
  Synthetic
ccagtataaaacuagaactggatgctuca

SEQ ID NO: 21981 - DNA, 25 bp, Artificial Sequence
  Synthetic
tggatccatcugttctttctttucc

SEQ ID NO: 21982 - DNA, 28 bp, Artificial Sequence
  Synthetic
tcctccacugagataatgacttctuacc

SEQ ID NO: 21983 - DNA, 31 bp, Artificial Sequence
  Synthetic
ctgatttactctgauttatagctgtcacugt

SEQ ID NO: 21984 - DNA, 30 bp, Artificial Sequence
  Synthetic
ttctagaaauacggaaguatgttacttaut

SEQ ID NO: 21985 - DNA, 20 bp, Artificial Sequence
  Synthetic
tgatcaaagguggcgtugct

SEQ ID NO: 21986 - DNA, 28 bp, Artificial Sequence
  Synthetic
ttgtgttactttauaaggcccgtgtuat

SEQ ID NO: 21987 - DNA, 22 bp, Artificial Sequence
  Synthetic
atttgctgtugcatgcctgauc

SEQ ID NO: 21988 - DNA, 21 bp, Artificial Sequence
  Synthetic
gaacaaccuccctccctcauc

SEQ ID NO: 21989 - DNA, 23 bp, Artificial Sequence
  Synthetic
ggatgctucaggatttgctgcua

SEQ ID NO: 21990 - DNA, 24 bp, Artificial Sequence
  Synthetic
tcagagutctcttcuccagcaaac

SEQ ID NO: 21991 - DNA, 29 bp, Artificial Sequence
  Synthetic
caaggatttaucacagtatcaaggaugct

SEQ ID NO: 21992 - DNA, 24 bp, Artificial Sequence
  Synthetic
gataaatgaucccgcacugagaca

SEQ ID NO: 21993 - DNA, 25 bp, Artificial Sequence
  Synthetic
atgacctctgugcatctagaguaca

SEQ ID NO: 21994 - DNA, 21 bp, Artificial Sequence
  Synthetic
cagaagagccucctucagcag

SEQ ID NO: 21995 - DNA, 27 bp, Artificial Sequence
  Synthetic
atggctgcagautgagataucaaaaat

SEQ ID NO: 21996 - DNA, 21 bp, Artificial Sequence
  Synthetic
aggactcccagcuttcaggua

SEQ ID NO: 21997 - DNA, 20 bp, Artificial Sequence
  Synthetic
ccctacucctccuacagcga

SEQ ID NO: 21998 - DNA, 25 bp, Artificial Sequence
  Synthetic
atccaaaaagguggagcuagauaaa

SEQ ID NO: 21999 - DNA, 22 bp, Artificial Sequence
  Synthetic
acccctctcuccttgttgtcuc

SEQ ID NO: 22000 - DNA, 20 bp, Artificial Sequence
  Synthetic
gcataggccuctgggtagug

SEQ ID NO: 22001 - DNA, 21 bp, Artificial Sequence
  Synthetic
tgatcaggauagcugccgact

SEQ ID NO: 22002 - DNA, 24 bp, Artificial Sequence
  Synthetic
tgtacacgagcaugtgtgtgtauc

SEQ ID NO: 22003 - DNA, 25 bp, Artificial Sequence
  Synthetic
catggccttucttctcttcaucaca

SEQ ID NO: 22004 - DNA, 19 bp, Artificial Sequence
  Synthetic
gatgucgcagggcctuaca

SEQ ID NO: 22005 - DNA, 22 bp, Artificial Sequence
  Synthetic
caaactccuacctgacccugac

SEQ ID NO: 22006 - DNA, 26 bp, Artificial Sequence
  Synthetic
cttcgagatauaaggtgctgagtugt

SEQ ID NO: 22007 - DNA, 31 bp, Artificial Sequence
  Synthetic
tcagaatugcagaaaaagaaaacuggaaaat

SEQ ID NO: 22008 - DNA, 27 bp, Artificial Sequence
  Synthetic
cttgaatgttugtcttttgtgaauggg

SEQ ID NO: 22009 - DNA, 28 bp, Artificial Sequence
  Synthetic
ggtcctaaaacaccaguacattcttcug

SEQ ID NO: 22010 - DNA, 26 bp, Artificial Sequence
  Synthetic
gggctcagcuatgaaagcagaauaaa

SEQ ID NO: 22011 - DNA, 30 bp, Artificial Sequence
  Synthetic
ctgtagtccacautttcttaatgctttuga

SEQ ID NO: 22012 - DNA, 25 bp, Artificial Sequence
  Synthetic
gataatagcucctcccaaactugct

SEQ ID NO: 22013 - DNA, 22 bp, Artificial Sequence
  Synthetic
tcggctacguttcagtcactug

SEQ ID NO: 22014 - DNA, 26 bp, Artificial Sequence
  Synthetic
cagtgtttccutaaacctgccauaac

SEQ ID NO: 22015 - DNA, 26 bp, Artificial Sequence
  Synthetic
gcctttttcgcucagttacaacuaga

SEQ ID NO: 22016 - DNA, 23 bp, Artificial Sequence
  Synthetic
ccatttgucctgttggucaggaa

SEQ ID NO: 22017 - DNA, 28 bp, Artificial Sequence
  Synthetic
caataagctcutttacaacacugaccac

SEQ ID NO: 22018 - DNA, 32 bp, Artificial Sequence
  Synthetic
cccatcgcaatauctaaagtgttagttttaut

SEQ ID NO: 22019 - DNA, 28 bp, Artificial Sequence
  Synthetic
aaagctacuttcttacctugaccaagat

SEQ ID NO: 22020 - DNA, 27 bp, Artificial Sequence
  Synthetic
agctgaggaugaatgcaaaatauagga

SEQ ID NO: 22021 - DNA, 20 bp, Artificial Sequence
  Synthetic
cagcaguccccagaacugac

SEQ ID NO: 22022 - DNA, 28 bp, Artificial Sequence
  Synthetic
ctcagttgaattugctgggttttatugt

SEQ ID NO: 22023 - DNA, 26 bp, Artificial Sequence
  Synthetic
cagctguaggaacatcgatttucaga

SEQ ID NO: 22024 - DNA, 30 bp, Artificial Sequence
  Synthetic
tattcaaatgttgauacttcagtcatucca

SEQ ID NO: 22025 - DNA, 30 bp, Artificial Sequence
  Synthetic
tgttagaaattucactactacaaugaccat

SEQ ID NO: 22026 - DNA, 27 bp, Artificial Sequence
  Synthetic
gaaaactctucggaaatttcugcagat

SEQ ID NO: 22027 - DNA, 30 bp, Artificial Sequence
  Synthetic
aagattcatttgtucagggattggataaut

SEQ ID NO: 22028 - DNA, 32 bp, Artificial Sequence
  Synthetic
tttctattcttagauatgaagagaaggcuact

SEQ ID NO: 22029 - DNA, 22 bp, Artificial Sequence
  Synthetic
gcgctggugggttttatcttut

SEQ ID NO: 22030 - DNA, 24 bp, Artificial Sequence
  Synthetic
ccttgcttgauccacaatcucagg

SEQ ID NO: 22031 - DNA, 24 bp, Artificial Sequence
  Synthetic
tggctcugcaggaagtttatgaut

SEQ ID NO: 22032 - DNA, 30 bp, Artificial Sequence
  Synthetic
ttttaatggacaugttctggaataugaact

SEQ ID NO: 22033 - DNA, 24 bp, Artificial Sequence
  Synthetic
tgctacuccatagaaugggagaca

SEQ ID NO: 22034 - DNA, 30 bp, Artificial Sequence
  Synthetic
aatgaagcaccaguttggaaatgaaatuaa

SEQ ID NO: 22035 - DNA, 25 bp, Artificial Sequence
  Synthetic
tcaugctgttttaugacagaaccaa

SEQ ID NO: 22036 - DNA, 26 bp, Artificial Sequence
  Synthetic
gaggaattugcaacgagagatugaaa

SEQ ID NO: 22037 - DNA, 22 bp, Artificial Sequence
  Synthetic
tgggaaattccuggaaccctug

SEQ ID NO: 22038 - DNA, 30 bp, Artificial Sequence
  Synthetic
agtagtgaccagguttagaatatctttucc

SEQ ID NO: 22039 - DNA, 25 bp, Artificial Sequence
  Synthetic
caccagctcuggagacatauagagt

SEQ ID NO: 22040 - DNA, 22 bp, Artificial Sequence
  Synthetic
caaguggacacagggactaugg

SEQ ID NO: 22041 - DNA, 21 bp, Artificial Sequence
  Synthetic
gatgggccugttcgtccttua

SEQ ID NO: 22042 - DNA, 23 bp, Artificial Sequence
  Synthetic
gtcataggttuggaacccgtuct

SEQ ID NO: 22043 - DNA, 22 bp, Artificial Sequence
  Synthetic
agtaagagacccuagggcucac

SEQ ID NO: 22044 - DNA, 21 bp, Artificial Sequence
  Synthetic
ccagctgcagugattctgtug

SEQ ID NO: 22045 - DNA, 28 bp, Artificial Sequence
  Synthetic
agataaauccaagaaaaagaacctcugt

SEQ ID NO: 22046 - DNA, 26 bp, Artificial Sequence
  Synthetic
tttttacacuaagcccagtcttcuga

SEQ ID NO: 22047 - DNA, 21 bp, Artificial Sequence
  Synthetic
catccaagacaaccugctgug

SEQ ID NO: 22048 - DNA, 24 bp, Artificial Sequence
  Synthetic
catgtggauaggattgagcctuca

SEQ ID NO: 22049 - DNA, 26 bp, Artificial Sequence
  Synthetic
gtgatgccaggagutaagaggatuac

SEQ ID NO: 22050 - DNA, 24 bp, Artificial Sequence
  Synthetic
gcctgtccugaatgccattuagat

SEQ ID NO: 22051 - DNA, 20 bp, Artificial Sequence
  Synthetic
cattccaugggctggagguc

SEQ ID NO: 22052 - DNA, 20 bp, Artificial Sequence
  Synthetic
gttttguggcaccgcttcuc

SEQ ID NO: 22053 - DNA, 25 bp, Artificial Sequence
  Synthetic
agagagaucaatgcacucccaaaaa

SEQ ID NO: 22054 - DNA, 20 bp, Artificial Sequence
  Synthetic
cctttgcgcuggacauggat

SEQ ID NO: 22055 - DNA, 26 bp, Artificial Sequence
  Synthetic
attagaggauacaaggttggctauct

SEQ ID NO: 22056 - DNA, 22 bp, Artificial Sequence
  Synthetic
ggcacacacutataggctccug

SEQ ID NO: 22057 - DNA, 19 bp, Artificial Sequence
  Synthetic
cugcatugcccacagcaaa

SEQ ID NO: 22058 - DNA, 22 bp, Artificial Sequence
  Synthetic
ccaccatttcugagcctcaugt

SEQ ID NO: 22059 - DNA, 24 bp, Artificial Sequence
  Synthetic
gaatgagttucctgcagtgttugg

SEQ ID NO: 22060 - DNA, 28 bp, Artificial Sequence
  Synthetic
ccattgcctuaaaatgttgcatttguct

SEQ ID NO: 22061 - DNA, 28 bp, Artificial Sequence
  Synthetic
acaaaggagagugattgattttctucct

SEQ ID NO: 22062 - DNA, 21 bp, Artificial Sequence
  Synthetic
ccaggagaaautgcccccuaa

SEQ ID NO: 22063 - DNA, 22 bp, Artificial Sequence
  Synthetic
acagtcugccaacatctcaguc

SEQ ID NO: 22064 - DNA, 23 bp, Artificial Sequence
  Synthetic
ggaggcacaaagcugtctgtaua

SEQ ID NO: 22065 - DNA, 20 bp, Artificial Sequence
  Synthetic
ccgtucacagaccucaaccg

SEQ ID NO: 22066 - DNA, 24 bp, Artificial Sequence
  Synthetic
ttgtttgtttccugtctggacuga

SEQ ID NO: 22067 - DNA, 29 bp, Artificial Sequence
  Synthetic
cttttgagagaacucattaccctgacaut

SEQ ID NO: 22068 - DNA, 25 bp, Artificial Sequence
  Synthetic
tctctcctttaaugcgaggaaacuc

SEQ ID NO: 22069 - DNA, 26 bp, Artificial Sequence
  Synthetic
gctctcactcugttgccattaaaugt

SEQ ID NO: 22070 - DNA, 20 bp, Artificial Sequence
  Synthetic
ggtgatuacgtctgggucga

SEQ ID NO: 22071 - DNA, 27 bp, Artificial Sequence
  Synthetic
ggaaauccgagacaaattacucaagga

SEQ ID NO: 22072 - DNA, 20 bp, Artificial Sequence
  Synthetic
ggccatcuccacgatctugt

SEQ ID NO: 22073 - DNA, 29 bp, Artificial Sequence
  Synthetic
ctgttctttgcuttttattttccuccagt

SEQ ID NO: 22074 - DNA, 17 bp, Artificial Sequence
  Synthetic
cttctcggugggcguca

SEQ ID NO: 22075 - DNA, 21 bp, Artificial Sequence
  Synthetic
ccgagatgaugaccacctuca

SEQ ID NO: 22076 - DNA, 17 bp, Artificial Sequence
  Synthetic
cttcccgcuggccctua

SEQ ID NO: 22077 - DNA, 24 bp, Artificial Sequence
  Synthetic
gcaucaactacccugacaagaagg

SEQ ID NO: 22078 - DNA, 21 bp, Artificial Sequence
  Synthetic
gtaatccgagaugtgcuccgt

SEQ ID NO: 22079 - DNA, 22 bp, Artificial Sequence
  Synthetic
ggaaggtgccuccaattcaugt

SEQ ID NO: 22080 - DNA, 28 bp, Artificial Sequence
  Synthetic
tcctattcaauggcaataacaaugacga

SEQ ID NO: 22081 - DNA, 28 bp, Artificial Sequence
  Synthetic
agtcatcaaaaccaucatcatccaucat

SEQ ID NO: 22082 - DNA, 25 bp, Artificial Sequence
  Synthetic
tagctcaacuccaacaatgattugt

SEQ ID NO: 22083 - DNA, 28 bp, Artificial Sequence
  Synthetic
agatatcaattcagucgctggtgtttua

SEQ ID NO: 22084 - DNA, 23 bp, Artificial Sequence
  Synthetic
aagacagttuccatcacggugaa

SEQ ID NO: 22085 - DNA, 25 bp, Artificial Sequence
  Synthetic
cttttctttttcucctgctctgcug

SEQ ID NO: 22086 - DNA, 18 bp, Artificial Sequence
  Synthetic
ggcccaggaugccactua

SEQ ID NO: 22087 - DNA, 20 bp, Artificial Sequence
  Synthetic
tctccgaugcctuccaacac

SEQ ID NO: 22088 - DNA, 19 bp, Artificial Sequence
  Synthetic
ggcuccaggaggaagccua

SEQ ID NO: 22089 - DNA, 19 bp, Artificial Sequence
  Synthetic
cacgaagggcuggatguca

SEQ ID NO: 22090 - DNA, 19 bp, Artificial Sequence
  Synthetic
tttgugccctguccccaat

SEQ ID NO: 22091 - DNA, 24 bp, Artificial Sequence
  Synthetic
gcaggaggagaaguagutcaauaa

SEQ ID NO: 22092 - DNA, 20 bp, Artificial Sequence
  Synthetic
attgaggguggcatggtcuc

SEQ ID NO: 22093 - DNA, 23 bp, Artificial Sequence
  Synthetic
gacagutccaatguagccaacct

SEQ ID NO: 22094 - DNA, 29 bp, Artificial Sequence
  Synthetic
gcaatgatctcttugtctttcttgaacut

SEQ ID NO: 22095 - DNA, 22 bp, Artificial Sequence
  Synthetic
gtgaaaucgaccagagctgugt

SEQ ID NO: 22096 - DNA, 22 bp, Artificial Sequence
  Synthetic
guaggauaggagggaccccaaa

SEQ ID NO: 22097 - DNA, 24 bp, Artificial Sequence
  Synthetic
cctcagtctgagucagtgtccaua

SEQ ID NO: 22098 - DNA, 26 bp, Artificial Sequence
  Synthetic
cccatcgaaugccttttctctttuat

SEQ ID NO: 22099 - DNA, 24 bp, Artificial Sequence
  Synthetic
catggtaggugacatcaucaagct

SEQ ID NO: 22100 - DNA, 20 bp, Artificial Sequence
  Synthetic
tgcugcccttctuccacaag

SEQ ID NO: 22101 - DNA, 20 bp, Artificial Sequence
  Synthetic
ccagctguagtcacgtuggg

SEQ ID NO: 22102 - DNA, 21 bp, Artificial Sequence
  Synthetic
tggcccuaaaggactcuccag

SEQ ID NO: 22103 - DNA, 20 bp, Artificial Sequence
  Synthetic
cacctguaggaggguggagt

SEQ ID NO: 22104 - DNA, 24 bp, Artificial Sequence
  Synthetic
aaatcaagcagucagttugcacaa

SEQ ID NO: 22105 - DNA, 21 bp, Artificial Sequence
  Synthetic
ccctaccacucctcacugcat

SEQ ID NO: 22106 - DNA, 24 bp, Artificial Sequence
  Synthetic
tgttatgggugaaactcugggaga

SEQ ID NO: 22107 - DNA, 24 bp, Artificial Sequence
  Synthetic
ccuggaagacaaacuacaagagca

SEQ ID NO: 22108 - DNA, 21 bp, Artificial Sequence
  Synthetic
gccctgutgccttttuaggac

SEQ ID NO: 22109 - DNA, 21 bp, Artificial Sequence
  Synthetic
tgagggagtuggaaggctcut

SEQ ID NO: 22110 - DNA, 23 bp, Artificial Sequence
  Synthetic
cacagtgtgugttcagagcagua

SEQ ID NO: 22111 - DNA, 20 bp, Artificial Sequence
  Synthetic
gtcagcggacuctggatuca

SEQ ID NO: 22112 - DNA, 29 bp, Artificial Sequence
  Synthetic
gacatgaautccttaatgaugggagaaga

SEQ ID NO: 22113 - DNA, 23 bp, Artificial Sequence
  Synthetic
gcatactcugtgatctccugcac

SEQ ID NO: 22114 - DNA, 24 bp, Artificial Sequence
  Synthetic
ccccctgtugtgttttccataugt

SEQ ID NO: 22115 - DNA, 23 bp, Artificial Sequence
  Synthetic
ctgtcattttcuggagcagctug

SEQ ID NO: 22116 - DNA, 21 bp, Artificial Sequence
  Synthetic
tcttaccugaccacccaucct

SEQ ID NO: 22117 - DNA, 20 bp, Artificial Sequence
  Synthetic
ggaccuggagtgcaaugaga

SEQ ID NO: 22118 - DNA, 25 bp, Artificial Sequence
  Synthetic
aggaaauacatgtguaagccacact

SEQ ID NO: 22119 - DNA, 24 bp, Artificial Sequence
  Synthetic
gcatggctguttttgtctcttuct

SEQ ID NO: 22120 - DNA, 22 bp, Artificial Sequence
  Synthetic
ctgccctggugcaactattgua

SEQ ID NO: 22121 - DNA, 28 bp, Artificial Sequence
  Synthetic
ttttaucttttagagttaugcccagcca

SEQ ID NO: 22122 - DNA, 21 bp, Artificial Sequence
  Synthetic
ccatcactcugggccacauac

SEQ ID NO: 22123 - DNA, 24 bp, Artificial Sequence
  Synthetic
tctcctgcuccttatgatcaugct

SEQ ID NO: 22124 - DNA, 21 bp, Artificial Sequence
  Synthetic
aacucacacaggccactuacc

SEQ ID NO: 22125 - DNA, 28 bp, Artificial Sequence
  Synthetic
gacucctaataggucaagagagagagac

SEQ ID NO: 22126 - DNA, 24 bp, Artificial Sequence
  Synthetic
tgttttatcuggctgttctuggct

SEQ ID NO: 22127 - DNA, 23 bp, Artificial Sequence
  Synthetic
aaccagaagcugacgctgaaaua

SEQ ID NO: 22128 - DNA, 26 bp, Artificial Sequence
  Synthetic
cattagtttctugggagtgtctgugt

SEQ ID NO: 22129 - DNA, 22 bp, Artificial Sequence
  Synthetic
tcagacuaagactgctguccct

SEQ ID NO: 22130 - DNA, 28 bp, Artificial Sequence
  Synthetic
aggtaagtttcugctccaaagttucaat

SEQ ID NO: 22131 - DNA, 21 bp, Artificial Sequence
  Synthetic
tttgctgtgguaggtggaugg

SEQ ID NO: 22132 - DNA, 23 bp, Artificial Sequence
  Synthetic
tcaatggcuccttcaaaccuaac

SEQ ID NO: 22133 - DNA, 28 bp, Artificial Sequence
  Synthetic
tggagaggtacucgatcataaagagtut

SEQ ID NO: 22134 - DNA, 28 bp, Artificial Sequence
  Synthetic
gttgaguaaaagccgaguattctaatut

SEQ ID NO: 22135 - DNA, 27 bp, Artificial Sequence
  Synthetic
tctcatcgagauattaagcgaaugcag

SEQ ID NO: 22136 - DNA, 28 bp, Artificial Sequence
  Synthetic
cacagctaaagugtccttaatggaatug

SEQ ID NO: 22137 - DNA, 25 bp, Artificial Sequence
  Synthetic
accagattcccuaacagatgaucgt

SEQ ID NO: 22138 - DNA, 24 bp, Artificial Sequence
  Synthetic
cccagtctacuatctggcctgtut

SEQ ID NO: 22139 - DNA, 22 bp, Artificial Sequence
  Synthetic
ctctgggucacccaaatucaga

SEQ ID NO: 22140 - DNA, 23 bp, Artificial Sequence
  Synthetic
acuttgactgcuccgagaagaac

SEQ ID NO: 22141 - DNA, 28 bp, Artificial Sequence
  Synthetic
gtgattcagaagauacagattcggauga

SEQ ID NO: 22142 - DNA, 26 bp, Artificial Sequence
  Synthetic
cctcttgcaaacauttcccagauaac

SEQ ID NO: 22143 - DNA, 27 bp, Artificial Sequence
  Synthetic
ttctggatgcagugctaaagaguaaaa

SEQ ID NO: 22144 - DNA, 27 bp, Artificial Sequence
  Synthetic
tggttttgatuccaaatgcacatucat

SEQ ID NO: 22145 - DNA, 24 bp, Artificial Sequence
  Synthetic
gcugcaaaaccaaagatucagaca

SEQ ID NO: 22146 - DNA, 23 bp, Artificial Sequence
  Synthetic
agacccagccutttctcttucag

SEQ ID NO: 22147 - DNA, 28 bp, Artificial Sequence
  Synthetic
cctttcaaaaccuatacccaagtcugat

SEQ ID NO: 22148 - DNA, 27 bp, Artificial Sequence
  Synthetic
ctcagttttacagucccgatcagatut

SEQ ID NO: 22149 - DNA, 24 bp, Artificial Sequence
  Synthetic
acgagagagutctgacucagaaga

SEQ ID NO: 22150 - DNA, 27 bp, Artificial Sequence
  Synthetic
gaaggtttcccuagatcctcactttut

SEQ ID NO: 22151 - DNA, 24 bp, Artificial Sequence
  Synthetic
tgaaggcauctttcttggtucaga

SEQ ID NO: 22152 - DNA, 28 bp, Artificial Sequence
  Synthetic
tgaggaaatatcugcttgctcatucaat

SEQ ID NO: 22153 - DNA, 22 bp, Artificial Sequence
  Synthetic
agcaccaguacccttaccagua

SEQ ID NO: 22154 - DNA, 23 bp, Artificial Sequence
  Synthetic
ccaattccacccutgacttuggt

SEQ ID NO: 22155 - DNA, 25 bp, Artificial Sequence
  Synthetic
cagaataggttuctcactgcactug

SEQ ID NO: 22156 - DNA, 19 bp, Artificial Sequence
  Synthetic
tgcacacugactggagcug

SEQ ID NO: 22157 - DNA, 18 bp, Artificial Sequence
  Synthetic
cgaccugcaggccauact

SEQ ID NO: 22158 - DNA, 20 bp, Artificial Sequence
  Synthetic
cacagggcauggaagtggua

SEQ ID NO: 22159 - DNA, 27 bp, Artificial Sequence
  Synthetic
cctgtctatacccaugtccttcctuag

SEQ ID NO: 22160 - DNA, 21 bp, Artificial Sequence
  Synthetic
acccuccagauagcaggaagt

SEQ ID NO: 22161 - DNA, 20 bp, Artificial Sequence
  Synthetic
gctgctccucaagtgcttug

SEQ ID NO: 22162 - DNA, 18 bp, Artificial Sequence
  Synthetic
cagcggaugacacccuca

SEQ ID NO: 22163 - DNA, 19 bp, Artificial Sequence
  Synthetic
gagtcaugccttgcccuct

SEQ ID NO: 22164 - DNA, 21 bp, Artificial Sequence
  Synthetic
tcagaggcugaggttguacca

SEQ ID NO: 22165 - DNA, 19 bp, Artificial Sequence
  Synthetic
agcuccagcccatcugaac

SEQ ID NO: 22166 - DNA, 19 bp, Artificial Sequence
  Synthetic
agcucgacacaccccatug

SEQ ID NO: 22167 - DNA, 26 bp, Artificial Sequence
  Synthetic
caatagtcttccugtccttccaucag

SEQ ID NO: 22168 - DNA, 29 bp, Artificial Sequence
  Synthetic
aaaatggccttgugatgtacagtaaaaug

SEQ ID NO: 22169 - DNA, 28 bp, Artificial Sequence
  Synthetic
gccaagcauacaacctagaaaatgttua

SEQ ID NO: 22170 - DNA, 26 bp, Artificial Sequence
  Synthetic
agcttugaggaagcatgtattucaca

SEQ ID NO: 22171 - DNA, 21 bp, Artificial Sequence
  Synthetic
guttgtagcucccccaccaaa

SEQ ID NO: 22172 - DNA, 19 bp, Artificial Sequence
  Synthetic
cagggugaagtggcugcat

SEQ ID NO: 22173 - DNA, 25 bp, Artificial Sequence
  Synthetic
gggttggttgutattacttagcuca

SEQ ID NO: 22174 - DNA, 21 bp, Artificial Sequence
  Synthetic
gggtcugaagctgagguagag

SEQ ID NO: 22175 - DNA, 26 bp, Artificial Sequence
  Synthetic
agaaaaccaautgttccucagaagga

SEQ ID NO: 22176 - DNA, 27 bp, Artificial Sequence
  Synthetic
gctctcauaaagcagaaugtcatttuc

SEQ ID NO: 22177 - DNA, 33 bp, Artificial Sequence
  Synthetic
gttaaaacagttaguaactatgaccacagttua

SEQ ID NO: 22178 - DNA, 22 bp, Artificial Sequence
  Synthetic
accttcagccacaugtcatugt

SEQ ID NO: 22179 - DNA, 26 bp, Artificial Sequence
  Synthetic
aagtctgcttucgtttcttacctuct

SEQ ID NO: 22180 - DNA, 21 bp, Artificial Sequence
  Synthetic
aaacctgacugagctgauggg

SEQ ID NO: 22181 - DNA, 27 bp, Artificial Sequence
  Synthetic
ccaggaauactttaagttaugcccaga

SEQ ID NO: 22182 - DNA, 28 bp, Artificial Sequence
  Synthetic
atagacgtaatcuccaacatggtacaug

SEQ ID NO: 22183 - DNA, 22 bp, Artificial Sequence
  Synthetic
gcatcccttuggtgagtaccut

SEQ ID NO: 22184 - DNA, 31 bp, Artificial Sequence
  Synthetic
agcacatatccucaaaataaaaatggcttug

SEQ ID NO: 22185 - DNA, 28 bp, Artificial Sequence
  Synthetic
ccacccctuacatttgacataatuagga

SEQ ID NO: 22186 - DNA, 26 bp, Artificial Sequence
  Synthetic
catgacaaagucctcaaccauagagt

SEQ ID NO: 22187 - DNA, 25 bp, Artificial Sequence
  Synthetic
ccatatttcugaggcttccctcuag

SEQ ID NO: 22188 - DNA, 21 bp, Artificial Sequence
  Synthetic
gaagtgugaggctgcctuact

SEQ ID NO: 22189 - DNA, 32 bp, Artificial Sequence
  Synthetic
tggaatgtaggttuataatgatgcacataucc

SEQ ID NO: 22190 - DNA, 22 bp, Artificial Sequence
  Synthetic
ggaactgagaugtccccagcua

SEQ ID NO: 22191 - DNA, 26 bp, Artificial Sequence
  Synthetic
caactcctgagauctgctctgtttua

SEQ ID NO: 22192 - DNA, 27 bp, Artificial Sequence
  Synthetic
ggaagaaatacautatgtgcaggcuca

SEQ ID NO: 22193 - DNA, 28 bp, Artificial Sequence
  Synthetic
aaccttttuaccatttgcctucaaagaa

SEQ ID NO: 22194 - DNA, 29 bp, Artificial Sequence
  Synthetic
acccaaaaatautccttcaagauagccat

SEQ ID NO: 22195 - DNA, 22 bp, Artificial Sequence
  Synthetic
agacugacaggtcctucacaca

SEQ ID NO: 22196 - DNA, 33 bp, Artificial Sequence
  Synthetic
actgacctuaaattatctactatuaccaaggaa

SEQ ID NO: 22197 - DNA, 27 bp, Artificial Sequence
  Synthetic
aaaaguattcatgcaauggccaaagat

SEQ ID NO: 22198 - DNA, 22 bp, Artificial Sequence
  Synthetic
caagaagctgcuccaggatcuc

SEQ ID NO: 22199 - DNA, 28 bp, Artificial Sequence
  Synthetic
aaaagttgctgtuttgaattagctcuac

SEQ ID NO: 22200 - DNA, 27 bp, Artificial Sequence
  Synthetic
ctgttggatttucatcaagtcaauggg

SEQ ID NO: 22201 - DNA, 26 bp, Artificial Sequence
  Synthetic
tctgtcactuggaatgttgaacatua

SEQ ID NO: 22202 - DNA, 23 bp, Artificial Sequence
  Synthetic
agaatggugcccatcaucaaagt

SEQ ID NO: 22203 - DNA, 21 bp, Artificial Sequence
  Synthetic
ccagcugaagacttggugaca

SEQ ID NO: 22204 - DNA, 25 bp, Artificial Sequence
  Synthetic
atctccgucgagaactgauagaact

SEQ ID NO: 22205 - DNA, 28 bp, Artificial Sequence
  Synthetic
cagaatacaauggattcagggttuacca

SEQ ID NO: 22206 - DNA, 21 bp, Artificial Sequence
  Synthetic
cgacagcatugcttcctccuc

SEQ ID NO: 22207 - DNA, 28 bp, Artificial Sequence
  Synthetic
aacacttcuacacatgtacttucccaaa

SEQ ID NO: 22208 - DNA, 20 bp, Artificial Sequence
  Synthetic
gctcctgccutttctgguca

SEQ ID NO: 22209 - DNA, 20 bp, Artificial Sequence
  Synthetic
ggagccautccaggtugaga

SEQ ID NO: 22210 - DNA, 17 bp, Artificial Sequence
  Synthetic
cgcagggccuggttuct

SEQ ID NO: 22211 - DNA, 20 bp, Artificial Sequence
  Synthetic
cacatccuggatgccctgua

SEQ ID NO: 22212 - DNA, 22 bp, Artificial Sequence
  Synthetic
agtgcaauctcactggucaagg

SEQ ID NO: 22213 - DNA, 24 bp, Artificial Sequence
  Synthetic
agagaataggccuttaccgucact

SEQ ID NO: 22214 - DNA, 22 bp, Artificial Sequence
  Synthetic
gagggacagaaggugagttcut

SEQ ID NO: 22215 - DNA, 26 bp, Artificial Sequence
  Synthetic
cactacacctauctggacacattugg

SEQ ID NO: 22216 - DNA, 24 bp, Artificial Sequence
  Synthetic
aggttguagccaacgatgtaaugg

SEQ ID NO: 22217 - DNA, 25 bp, Artificial Sequence
  Synthetic
tttattaccgggaugagatuggcaa

SEQ ID NO: 22218 - DNA, 24 bp, Artificial Sequence
  Synthetic
ctuccacagcaatatuaccccagt

SEQ ID NO: 22219 - DNA, 21 bp, Artificial Sequence
  Synthetic
ggtgcautctctgtugccaaa

SEQ ID NO: 22220 - DNA, 23 bp, Artificial Sequence
  Synthetic
tgaucccatatgaucccaaccct

SEQ ID NO: 22221 - DNA, 27 bp, Artificial Sequence
  Synthetic
guaaagggagaagaugaggaagagaac

SEQ ID NO: 22222 - DNA, 22 bp, Artificial Sequence
  Synthetic
gcttcacgucctcattgaucag

SEQ ID NO: 22223 - DNA, 17 bp, Artificial Sequence
  Synthetic
cctggcgcacugctcut

SEQ ID NO: 22224 - DNA, 26 bp, Artificial Sequence
  Synthetic
ccttcggcttuttcaacccttttuaa

SEQ ID NO: 22225 - DNA, 26 bp, Artificial Sequence
  Synthetic
agggacaacagutaagctttatggut

SEQ ID NO: 22226 - DNA, 30 bp, Artificial Sequence
  Synthetic
aatgaaagagagauggtgattgcatcuaat

SEQ ID NO: 22227 - DNA, 26 bp, Artificial Sequence
  Synthetic
tctggtacacagucatggttgattut

SEQ ID NO: 22228 - DNA, 23 bp, Artificial Sequence
  Synthetic
ttctcaacugccaatggactgut

SEQ ID NO: 22229 - DNA, 30 bp, Artificial Sequence
  Synthetic
tcacgtaggtugcacaaagaatttttatuc

SEQ ID NO: 22230 - DNA, 29 bp, Artificial Sequence
  Synthetic
aaaattttacauaggtggaatgaauggct

SEQ ID NO: 22231 - DNA, 30 bp, Artificial Sequence
  Synthetic
attgttccttcugaaatactttacctctut

SEQ ID NO: 22232 - DNA, 25 bp, Artificial Sequence
  Synthetic
ttttatggcagucaaaccttctcuc

SEQ ID NO: 22233 - DNA, 23 bp, Artificial Sequence
  Synthetic
ggcatgcucttcaatcacugaca

SEQ ID NO: 22234 - DNA, 28 bp, Artificial Sequence
  Synthetic
caaagaacagcucaaagcaatttcuaca

SEQ ID NO: 22235 - DNA, 27 bp, Artificial Sequence
  Synthetic
gtaaaaacaugctgagaucagccaaat

SEQ ID NO: 22236 - DNA, 25 bp, Artificial Sequence
  Synthetic
aatcaaaccugaacaggctauggaa

SEQ ID NO: 22237 - DNA, 32 bp, Artificial Sequence
  Synthetic
actagctgaattaaauactgagaaagtttguc

SEQ ID NO: 22238 - DNA, 24 bp, Artificial Sequence
  Synthetic
atgugggatgtattugaagcacct

SEQ ID NO: 22239 - DNA, 27 bp, Artificial Sequence
  Synthetic
tctcaaacacaaacuagagucacacac

SEQ ID NO: 22240 - DNA, 24 bp, Artificial Sequence
  Synthetic
gutgaatugggagaauccagacat

SEQ ID NO: 22241 - DNA, 26 bp, Artificial Sequence
  Synthetic
tggctttcaguagttttcatggtuca

SEQ ID NO: 22242 - DNA, 21 bp, Artificial Sequence
  Synthetic
tctcaagtuggcctgaaucac

SEQ ID NO: 22243 - DNA, 28 bp, Artificial Sequence
  Synthetic
cccaaaatgaagguagctacacagtauc

SEQ ID NO: 22244 - DNA, 30 bp, Artificial Sequence
  Synthetic
tgttttgacacaggauttcttaatagugat

SEQ ID NO: 22245 - DNA, 26 bp, Artificial Sequence
  Synthetic
autgtttctaauagagcagccagaac

SEQ ID NO: 22246 - DNA, 27 bp, Artificial Sequence
  Synthetic
cacaattaaacagcaugcattgaacug

SEQ ID NO: 22247 - DNA, 25 bp, Artificial Sequence
  Synthetic
ctaatgctgutcatggattgugcaa

SEQ ID NO: 22248 - DNA, 20 bp, Artificial Sequence
  Synthetic
gcacaacucggagaucagca

SEQ ID NO: 22249 - DNA, 23 bp, Artificial Sequence
  Synthetic
cttcatgagcgucttggtttucc

SEQ ID NO: 22250 - DNA, 22 bp, Artificial Sequence
  Synthetic
ctgcaguacaactccaugacca

SEQ ID NO: 22251 - DNA, 21 bp, Artificial Sequence
  Synthetic
agugggaggaagagguaacca

SEQ ID NO: 22252 - DNA, 22 bp, Artificial Sequence
  Synthetic
gggugcaaaagaggagaguaag

SEQ ID NO: 22253 - DNA, 20 bp, Artificial Sequence
  Synthetic
cggttttugcgtgagtgugg

SEQ ID NO: 22254 - DNA, 26 bp, Artificial Sequence
  Synthetic
gcaggaagttugcaaaagtcttuacc

SEQ ID NO: 22255 - DNA, 26 bp, Artificial Sequence
  Synthetic
aacaatggacautttgattgccaugt

SEQ ID NO: 22256 - DNA, 27 bp, Artificial Sequence
  Synthetic
aatttaggacagutgcaaacgugaaaa

SEQ ID NO: 22257 - DNA, 27 bp, Artificial Sequence
  Synthetic
cccttttuaaacaagaccacagagaug

SEQ ID NO: 22258 - DNA, 26 bp, Artificial Sequence
  Synthetic
gatcccaacuttccattttgtucaga

SEQ ID NO: 22259 - DNA, 30 bp, Artificial Sequence
  Synthetic
aatacagagccgaaucttttaaaauacaac

SEQ ID NO: 22260 - DNA, 22 bp, Artificial Sequence
  Synthetic
aagttcuccagtaaagcuggca

SEQ ID NO: 22261 - DNA, 22 bp, Artificial Sequence
  Synthetic
ggctgtguaaattgccttgugt

SEQ ID NO: 22262 - DNA, 27 bp, Artificial Sequence
  Synthetic
ccaggttcaatucaacatcatgggtua

SEQ ID NO: 22263 - DNA, 24 bp, Artificial Sequence
  Synthetic
ggtaccaccauggacacctauaag

SEQ ID NO: 22264 - DNA, 28 bp, Artificial Sequence
  Synthetic
gcagtgcaccaauattcaaaagaaucaa

SEQ ID NO: 22265 - DNA, 19 bp, Artificial Sequence
  Synthetic
ggcccagagagaugcaugg

SEQ ID NO: 22266 - DNA, 21 bp, Artificial Sequence
  Synthetic
ggcaaucctgaugaccgagat

SEQ ID NO: 22267 - DNA, 29 bp, Artificial Sequence
  Synthetic
acagagaagtttugaggaagtatgtgaug

SEQ ID NO: 22268 - DNA, 24 bp, Artificial Sequence
  Synthetic
gccttactauacgccacauaaccc

SEQ ID NO: 22269 - DNA, 28 bp, Artificial Sequence
  Synthetic
ttttggaaggaugaccttaggcttatut

SEQ ID NO: 22270 - DNA, 22 bp, Artificial Sequence
  Synthetic
tcccaatauaagcgacgtgcug

SEQ ID NO: 22271 - DNA, 25 bp, Artificial Sequence
  Synthetic
ttcagctcuggaactttgtctctut

SEQ ID NO: 22272 - DNA, 17 bp, Artificial Sequence
  Synthetic
cagtgcugtccggguca

SEQ ID NO: 22273 - DNA, 19 bp, Artificial Sequence
  Synthetic
gccaggugtggtuccagaa

SEQ ID NO: 22274 - DNA, 23 bp, Artificial Sequence
  Synthetic
aagacccttuccagctcttugag

SEQ ID NO: 22275 - DNA, 23 bp, Artificial Sequence
  Synthetic
ctcactttcugtctcctctguca

SEQ ID NO: 22276 - DNA, 29 bp, Artificial Sequence
  Synthetic
gcagaggaatugaggtaagaatatuccat

SEQ ID NO: 22277 - DNA, 22 bp, Artificial Sequence
  Synthetic
gtaguaaggaggccagttugga

SEQ ID NO: 22278 - DNA, 23 bp, Artificial Sequence
  Synthetic
ttttgtgacggucttggaaguga

SEQ ID NO: 22279 - DNA, 23 bp, Artificial Sequence
  Synthetic
ggaagagaagaagcutggtccug

SEQ ID NO: 22280 - DNA, 28 bp, Artificial Sequence
  Synthetic
ccaaactttauaagatcctggctaucct

SEQ ID NO: 22281 - DNA, 26 bp, Artificial Sequence
  Synthetic
cacaatcgttucccctgacttauaca

SEQ ID NO: 22282 - DNA, 21 bp, Artificial Sequence
  Synthetic
gctgctcgggauccatatgug

SEQ ID NO: 22283 - DNA, 22 bp, Artificial Sequence
  Synthetic
ggatatccugggaggtggguag

SEQ ID NO: 22284 - DNA, 24 bp, Artificial Sequence
  Synthetic
aguctcatatgttcugggacacga

SEQ ID NO: 22285 - DNA, 27 bp, Artificial Sequence
  Synthetic
atatcauccactcaataucaggaagcg

SEQ ID NO: 22286 - DNA, 22 bp, Artificial Sequence
  Synthetic
tgcctctctcucttgtcacgua

SEQ ID NO: 22287 - DNA, 25 bp, Artificial Sequence
  Synthetic
gcttgttcucattggctucaaagat

SEQ ID NO: 22288 - DNA, 18 bp, Artificial Sequence
  Synthetic
cccacaggucgggtctug

SEQ ID NO: 22289 - DNA, 24 bp, Artificial Sequence
  Synthetic
ccaggaaggagcacutacgtttua

SEQ ID NO: 22290 - DNA, 21 bp, Artificial Sequence
  Synthetic
gauagcttccugagccaccac

SEQ ID NO: 22291 - DNA, 26 bp, Artificial Sequence
  Synthetic
ctttccatttgugatgcctguaagat

SEQ ID NO: 22292 - DNA, 30 bp, Artificial Sequence
  Synthetic
atgataacucagaaggucttactttatugg

SEQ ID NO: 22293 - DNA, 21 bp, Artificial Sequence
  Synthetic
gtccacacuccactcacugaa

SEQ ID NO: 22294 - DNA, 29 bp, Artificial Sequence
  Synthetic
ggatctgaaaggutttctaacagtgtuct

SEQ ID NO: 22295 - DNA, 21 bp, Artificial Sequence
  Synthetic
ccatccgguacccactctuga

SEQ ID NO: 22296 - DNA, 23 bp, Artificial Sequence
  Synthetic
cgtgtggacucagacaatgcaua

SEQ ID NO: 22297 - DNA, 22 bp, Artificial Sequence
  Synthetic
caggcagaggaaugatguagcc

SEQ ID NO: 22298 - DNA, 20 bp, Artificial Sequence
  Synthetic
ctgguggaagacagctucct

SEQ ID NO: 22299 - DNA, 17 bp, Artificial Sequence
  Synthetic
gcccutggcugggaact

SEQ ID NO: 22300 - DNA, 22 bp, Artificial Sequence
  Synthetic
tctctgggcuccttcagaucaa

SEQ ID NO: 22301 - DNA, 24 bp, Artificial Sequence
  Synthetic
tgcatttucttgggcuacagaact

SEQ ID NO: 22302 - DNA, 25 bp, Artificial Sequence
  Synthetic
ggtgcagaaaaccacauctcacaua

SEQ ID NO: 22303 - DNA, 20 bp, Artificial Sequence
  Synthetic
catcacaggccucacucacc

SEQ ID NO: 22304 - DNA, 25 bp, Artificial Sequence
  Synthetic
tggcagctcugaacggtattuaaaa

SEQ ID NO: 22305 - DNA, 22 bp, Artificial Sequence
  Synthetic
ctgaaggaagcugaggaaccug

SEQ ID NO: 22306 - DNA, 22 bp, Artificial Sequence
  Synthetic
actgccagcagutgaugagaaa

SEQ ID NO: 22307 - DNA, 27 bp, Artificial Sequence
  Synthetic
tgcctcattacgutttagatgggatuc

SEQ ID NO: 22308 - DNA, 25 bp, Artificial Sequence
  Synthetic
gtcactgtguggcactagattucat

SEQ ID NO: 22309 - DNA, 24 bp, Artificial Sequence
  Synthetic
gtgtttgtgcugcctgtttaugag

SEQ ID NO: 22310 - DNA, 26 bp, Artificial Sequence
  Synthetic
aatgggacuggaggaagtacagaaua

SEQ ID NO: 22311 - DNA, 25 bp, Artificial Sequence
  Synthetic
gggtcttgttucctgcaaaaagtuc

SEQ ID NO: 22312 - DNA, 19 bp, Artificial Sequence
  Synthetic
ggucaacaagcugcgcaac

SEQ ID NO: 22313 - DNA, 23 bp, Artificial Sequence
  Synthetic
tgctgctgtucttgcttctguaa

SEQ ID NO: 22314 - DNA, 27 bp, Artificial Sequence
  Synthetic
ccataaggcucttactctcaaaucaca

SEQ ID NO: 22315 - DNA, 22 bp, Artificial Sequence
  Synthetic
aagcagctgutcttttggtugg

SEQ ID NO: 22316 - DNA, 27 bp, Artificial Sequence
  Synthetic
gtgcatgtttatutttccctctctuca

SEQ ID NO: 22317 - DNA, 26 bp, Artificial Sequence
  Synthetic
gtacattagacugcctatggtcgtua

SEQ ID NO: 22318 - DNA, 22 bp, Artificial Sequence
  Synthetic
aagttgccucactgggcuaaaa

SEQ ID NO: 22319 - DNA, 26 bp, Artificial Sequence
  Synthetic
tgatgagagaaaaucctggagaguca

SEQ ID NO: 22320 - DNA, 23 bp, Artificial Sequence
  Synthetic
gcctucacacacaaagcaguaaa

SEQ ID NO: 22321 - DNA, 19 bp, Artificial Sequence
  Synthetic
ggcatccaucgcaaagugg

SEQ ID NO: 22322 - DNA, 23 bp, Artificial Sequence
  Synthetic
tggccuggcagaaatagtgaaut

SEQ ID NO: 22323 - DNA, 25 bp, Artificial Sequence
  Synthetic
gaggctggcaaauagttagtaucca

SEQ ID NO: 22324 - DNA, 22 bp, Artificial Sequence
  Synthetic
tgattctcaucctggtguggga

SEQ ID NO: 22325 - DNA, 21 bp, Artificial Sequence
  Synthetic
ccuatcaguggccgcaaagag

SEQ ID NO: 22326 - DNA, 21 bp, Artificial Sequence
  Synthetic
cacacacacgutttcttuggg

SEQ ID NO: 22327 - DNA, 25 bp, Artificial Sequence
  Synthetic
caaactcatccacgucagagactut

SEQ ID NO: 22328 - DNA, 29 bp, Artificial Sequence
  Synthetic
ctcttatctttgcutaatgggtgtcguat

SEQ ID NO: 22329 - DNA, 21 bp, Artificial Sequence
  Synthetic
gctgcaugactggtccugaaa

SEQ ID NO: 22330 - DNA, 25 bp, Artificial Sequence
  Synthetic
ttacccugggcttttgaaucagaat

SEQ ID NO: 22331 - DNA, 24 bp, Artificial Sequence
  Synthetic
gtggtagacugagctuagacagag

SEQ ID NO: 22332 - DNA, 27 bp, Artificial Sequence
  Synthetic
acataatccataacuacagtgcagcuc

SEQ ID NO: 22333 - DNA, 27 bp, Artificial Sequence
  Synthetic
ggacacaagcagutctatcatggtuaa

SEQ ID NO: 22334 - DNA, 19 bp, Artificial Sequence
  Synthetic
ccaccaggauctcccucgt

SEQ ID NO: 22335 - DNA, 24 bp, Artificial Sequence
  Synthetic
tgggatttcugaggcacataguct

SEQ ID NO: 22336 - DNA, 24 bp, Artificial Sequence
  Synthetic
attgacttgcacutgggtgacaua

SEQ ID NO: 22337 - DNA, 24 bp, Artificial Sequence
  Synthetic
cccctguggtttcattauagccat

SEQ ID NO: 22338 - DNA, 23 bp, Artificial Sequence
  Synthetic
ggttcuccagagagctgtgttut

SEQ ID NO: 22339 - DNA, 24 bp, Artificial Sequence
  Synthetic
gcatttctagcuctgtgacacuca

SEQ ID NO: 22340 - DNA, 25 bp, Artificial Sequence
  Synthetic
tcatcagtatuggcttacgctucag

SEQ ID NO: 22341 - DNA, 29 bp, Artificial Sequence
  Synthetic
ccaaaatacatgttugtctcctttcacut

SEQ ID NO: 22342 - DNA, 28 bp, Artificial Sequence
  Synthetic
caaggaaactcutgcacaaatguacaat

SEQ ID NO: 22343 - DNA, 32 bp, Artificial Sequence
  Synthetic
gccacgaaattaacuaactctctacaataaua

SEQ ID NO: 22344 - DNA, 32 bp, Artificial Sequence
  Synthetic
atgaatctctagcucagtataatcccaaatug

SEQ ID NO: 22345 - DNA, 30 bp, Artificial Sequence
  Synthetic
agtattaaaaggaucttgtctaaacaucgt

SEQ ID NO: 22346 - DNA, 31 bp, Artificial Sequence
  Synthetic
ccataaaaatatutgaagaacagugccagac

SEQ ID NO: 22347 - DNA, 28 bp, Artificial Sequence
  Synthetic
gaggatttuggttatctcuagcacaaga

SEQ ID NO: 22348 - DNA, 22 bp, Artificial Sequence
  Synthetic
gatggctccugcactcttcaut

SEQ ID NO: 22349 - DNA, 22 bp, Artificial Sequence
  Synthetic
ttcagctttguttcggttgcug

SEQ ID NO: 22350 - DNA, 24 bp, Artificial Sequence
  Synthetic
cuacccagtataugcacagcagag

SEQ ID NO: 22351 - DNA, 25 bp, Artificial Sequence
  Synthetic
agaaagctcuagtcccauccaaaga

SEQ ID NO: 22352 - DNA, 19 bp, Artificial Sequence
  Synthetic
ctggctcuggttcgtccug

SEQ ID NO: 22353 - DNA, 20 bp, Artificial Sequence
  Synthetic
ggaatcctccugggctccut

SEQ ID NO: 22354 - DNA, 21 bp, Artificial Sequence
  Synthetic
cccctacccugcctcaacaua

SEQ ID NO: 22355 - DNA, 21 bp, Artificial Sequence
  Synthetic
gccctgacccutctccctauc

SEQ ID NO: 22356 - DNA, 23 bp, Artificial Sequence
  Synthetic
agtcacagatcutgaccagctug

SEQ ID NO: 22357 - DNA, 22 bp, Artificial Sequence
  Synthetic
atgaagggucttuccccacaat

SEQ ID NO: 22358 - DNA, 23 bp, Artificial Sequence
  Synthetic
tgtagtuggaggactcgatguct

SEQ ID NO: 22359 - DNA, 22 bp, Artificial Sequence
  Synthetic
gctctcctgugatgctccttua

SEQ ID NO: 22360 - DNA, 21 bp, Artificial Sequence
  Synthetic
caacaggtugaccacgtucag

SEQ ID NO: 22361 - DNA, 18 bp, Artificial Sequence
  Synthetic
ggagccuccatgacuggg

SEQ ID NO: 22362 - DNA, 20 bp, Artificial Sequence
  Synthetic
gatgugccagtctucaccca

SEQ ID NO: 22363 - DNA, 21 bp, Artificial Sequence
  Synthetic
tcatggccugctctcatcuct

SEQ ID NO: 22364 - DNA, 17 bp, Artificial Sequence
  Synthetic
aggcccagguctgcuca

SEQ ID NO: 22365 - DNA, 23 bp, Artificial Sequence
  Synthetic
tcctaacucagtgctctcuccat

SEQ ID NO: 22366 - DNA, 20 bp, Artificial Sequence
  Synthetic
gggagcgutgaaggaatugg

SEQ ID NO: 22367 - DNA, 20 bp, Artificial Sequence
  Synthetic
catccccagugccgagtuag

SEQ ID NO: 22368 - DNA, 24 bp, Artificial Sequence
  Synthetic
gttatactugcctctgcugagcat

SEQ ID NO: 22369 - DNA, 25 bp, Artificial Sequence
  Synthetic
ggcttttcuggtatcttugaggaca

SEQ ID NO: 22370 - DNA, 25 bp, Artificial Sequence
  Synthetic
gtgcaaaagtatuctcccgtgtcua

SEQ ID NO: 22371 - DNA, 21 bp, Artificial Sequence
  Synthetic
aatgtcuccagcaccttcgut

SEQ ID NO: 22372 - DNA, 18 bp, Artificial Sequence
  Synthetic
gcacgagcccaucagcut

SEQ ID NO: 22373 - DNA, 19 bp, Artificial Sequence
  Synthetic
ggcagagacggguatgugg

SEQ ID NO: 22374 - DNA, 19 bp, Artificial Sequence
  Synthetic
cctttucccgggugcagat

SEQ ID NO: 22375 - DNA, 18 bp, Artificial Sequence
  Synthetic
cgggucaggcctctcuca

SEQ ID NO: 22376 - DNA, 21 bp, Artificial Sequence
  Synthetic
tcgcgagaucttcagggtcua

SEQ ID NO: 22377 - DNA, 24 bp, Artificial Sequence
  Synthetic
gtccatguccatcgaatctuccat

SEQ ID NO: 22378 - DNA, 30 bp, Artificial Sequence
  Synthetic
aaataggtggaacucaaaagttgaaguagt

SEQ ID NO: 22379 - DNA, 25 bp, Artificial Sequence
  Synthetic
cgttggctguacagacatttucaaa

SEQ ID NO: 22380 - DNA, 33 bp, Artificial Sequence
  Synthetic
gtctcagtttttagaguatttactatcagtgut

SEQ ID NO: 22381 - DNA, 28 bp, Artificial Sequence
  Synthetic
agaccgcttuccagatatactuaagagt

SEQ ID NO: 22382 - DNA, 28 bp, Artificial Sequence
  Synthetic
aaaactccuaaaacaccaaaaggaccua

SEQ ID NO: 22383 - DNA, 21 bp, Artificial Sequence
  Synthetic
ccagacacgugcaattugagg

SEQ ID NO: 22384 - DNA, 28 bp, Artificial Sequence
  Synthetic
tttattgatgtcuatgaagtgttguggt

SEQ ID NO: 22385 - DNA, 30 bp, Artificial Sequence
  Synthetic
ctgutacagaaatgaaauaagacggaaaat

SEQ ID NO: 22386 - DNA, 27 bp, Artificial Sequence
  Synthetic
atttttctgagccacutaatgggtgua

SEQ ID NO: 22387 - DNA, 30 bp, Artificial Sequence
  Synthetic
tcagcagacccauttaaatactctacatug

SEQ ID NO: 22388 - DNA, 26 bp, Artificial Sequence
  Synthetic
gaggagatcuttgaggaaacucagac

SEQ ID NO: 22389 - DNA, 22 bp, Artificial Sequence
  Synthetic
agctaauggcaagaauggcgat

SEQ ID NO: 22390 - DNA, 30 bp, Artificial Sequence
  Synthetic
catacattgctttutcagaaggctaauagg

SEQ ID NO: 22391 - DNA, 25 bp, Artificial Sequence
  Synthetic
cgtctcttgaautttgcccagauga

SEQ ID NO: 22392 - DNA, 26 bp, Artificial Sequence
  Synthetic
agcttctgattucatctccctttucc

SEQ ID NO: 22393 - DNA, 22 bp, Artificial Sequence
  Synthetic
tctttgaccccutgggaacauc

SEQ ID NO: 22394 - DNA, 25 bp, Artificial Sequence
  Synthetic
ggatatatctgauacgcaggccuct

SEQ ID NO: 22395 - DNA, 24 bp, Artificial Sequence
  Synthetic
gcaagcccaauaaagagucaccat

SEQ ID NO: 22396 - DNA, 25 bp, Artificial Sequence
  Synthetic
aaagtattcuaggtttgcugccaca

SEQ ID NO: 22397 - DNA, 25 bp, Artificial Sequence
  Synthetic
gtgaacaagaguagatgcctucaga

SEQ ID NO: 22398 - DNA, 25 bp, Artificial Sequence
  Synthetic
tctccttuggccagcatttcuaaaa

SEQ ID NO: 22399 - DNA, 27 bp, Artificial Sequence
  Synthetic
catcctcaccuaaggatctguaagaga

SEQ ID NO: 22400 - DNA, 25 bp, Artificial Sequence
  Synthetic
aatucagagaaaaagggagauggca

SEQ ID NO: 22401 - DNA, 23 bp, Artificial Sequence
  Synthetic
gcctaguaacacagtcugaacga

SEQ ID NO: 22402 - DNA, 31 bp, Artificial Sequence
  Synthetic
cctggtaaaatttcugaaaaaggactctcut

SEQ ID NO: 22403 - DNA, 22 bp, Artificial Sequence
  Synthetic
catgcgctuacgaggtttagug

SEQ ID NO: 22404 - DNA, 24 bp, Artificial Sequence
  Synthetic
tcccatcuggttactttugggagt

SEQ ID NO: 22405 - DNA, 21 bp, Artificial Sequence
  Synthetic
cttggcttccuaaggcgttuc

SEQ ID NO: 22406 - DNA, 21 bp, Artificial Sequence
  Synthetic
cccttggcucagtcagaacut

SEQ ID NO: 22407 - DNA, 23 bp, Artificial Sequence
  Synthetic
tgcucaaatacugagaccccaac

SEQ ID NO: 22408 - DNA, 26 bp, Artificial Sequence
  Synthetic
gattttggacaugtgtgttaguagcc

SEQ ID NO: 22409 - DNA, 29 bp, Artificial Sequence
  Synthetic
tctcttttgacgagucatcattttucact

SEQ ID NO: 22410 - DNA, 26 bp, Artificial Sequence
  Synthetic
agaattgtgaaaaautgggtgagcug

SEQ ID NO: 22411 - DNA, 26 bp, Artificial Sequence
  Synthetic
gaggaagaccgutcgatatctactut

SEQ ID NO: 22412 - DNA, 25 bp, Artificial Sequence
  Synthetic
tcttttgcttguccctgatttucct

SEQ ID NO: 22413 - DNA, 30 bp, Artificial Sequence
  Synthetic
ggtaaagtgatuagggcagatgatactaut

SEQ ID NO: 22414 - DNA, 27 bp, Artificial Sequence
  Synthetic
cctgaacautgatatcccugaaggaaa

SEQ ID NO: 22415 - DNA, 27 bp, Artificial Sequence
  Synthetic
tgtatcugagaggtcucaagaaacaga

SEQ ID NO: 22416 - DNA, 23 bp, Artificial Sequence
  Synthetic
ttgaagtgacutgtgctgtcugt

SEQ ID NO: 22417 - DNA, 22 bp, Artificial Sequence
  Synthetic
gtcccccaagautttctccuca

SEQ ID NO: 22418 - DNA, 26 bp, Artificial Sequence
  Synthetic
tgtatacattuggataccagtgucct

SEQ ID NO: 22419 - DNA, 27 bp, Artificial Sequence
  Synthetic
gtgatatcatgutcttgagcauagcga

SEQ ID NO: 22420 - DNA, 26 bp, Artificial Sequence
  Synthetic
aattaatctgttcucttgggagtugg

SEQ ID NO: 22421 - DNA, 23 bp, Artificial Sequence
  Synthetic
gctccacattugcaaacagtcut

SEQ ID NO: 22422 - DNA, 21 bp, Artificial Sequence
  Synthetic
catagcctuggcccatgugat

SEQ ID NO: 22423 - DNA, 23 bp, Artificial Sequence
  Synthetic
gatgctgctuacaaaaggagcug

SEQ ID NO: 22424 - DNA, 22 bp, Artificial Sequence
  Synthetic
gacttgucagaggccattgcua

SEQ ID NO: 22425 - DNA, 20 bp, Artificial Sequence
  Synthetic
gccuctggcuggaaaccaag

SEQ ID NO: 22426 - DNA, 24 bp, Artificial Sequence
  Synthetic
ctcautactagcagucccaaaccc

SEQ ID NO: 22427 - DNA, 24 bp, Artificial Sequence
  Synthetic
acaggcctcagugctttttcttua

SEQ ID NO: 22428 - DNA, 21 bp, Artificial Sequence
  Synthetic
ccaggccagacutctttcuca

SEQ ID NO: 22429 - DNA, 19 bp, Artificial Sequence
  Synthetic
cctccgaccauctgctucg

SEQ ID NO: 22430 - DNA, 22 bp, Artificial Sequence
  Synthetic
guctctuggaagagggcaagac

SEQ ID NO: 22431 - DNA, 27 bp, Artificial Sequence
  Synthetic
agcttgtttgtucatgtgacattgaut

SEQ ID NO: 22432 - DNA, 19 bp, Artificial Sequence
  Synthetic
cutcccccucagggaaagg

SEQ ID NO: 22433 - DNA, 26 bp, Artificial Sequence
  Synthetic
actaugcacaaugagaggatttugag

SEQ ID NO: 22434 - DNA, 22 bp, Artificial Sequence
  Synthetic
ccagtgauggaagcaauggaaa

SEQ ID NO: 22435 - DNA, 21 bp, Artificial Sequence
  Synthetic
ctttgaggcuctgcagctuag

SEQ ID NO: 22436 - DNA, 19 bp, Artificial Sequence
  Synthetic
cgtguggccccaaggaaua

SEQ ID NO: 22437 - DNA, 21 bp, Artificial Sequence
  Synthetic
catcccttggaugtgccagut

SEQ ID NO: 22438 - DNA, 17 bp, Artificial Sequence
  Synthetic
cucagagccuggcccaa

SEQ ID NO: 22439 - DNA, 17 bp, Artificial Sequence
  Synthetic
cttcucgcccccuccag

SEQ ID NO: 22440 - DNA, 25 bp, Artificial Sequence
  Synthetic
gctttaatacgcaugtcagaaaguc

SEQ ID NO: 22441 - DNA, 23 bp, Artificial Sequence
  Synthetic
gtgggccacgauttctacttcut

SEQ ID NO: 22442 - DNA, 18 bp, Artificial Sequence
  Synthetic
cccaggcauagcctucgg

SEQ ID NO: 22443 - DNA, 17 bp, Artificial Sequence
  Synthetic
cgtgcaggucgtugcag

SEQ ID NO: 22444 - DNA, 17 bp, Artificial Sequence
  Synthetic
gcacgggcgugcttuag

SEQ ID NO: 22445 - DNA, 18 bp, Artificial Sequence
  Synthetic
ccccacccacucatccug

SEQ ID NO: 22446 - DNA, 23 bp, Artificial Sequence
  Synthetic
cgacaucaaggacgaaaacaucc

SEQ ID NO: 22447 - DNA, 17 bp, Artificial Sequence
  Synthetic
agtcaccugggcagcuc

SEQ ID NO: 22448 - DNA, 21 bp, Artificial Sequence
  Synthetic
gcccugagaccatcagauagg

SEQ ID NO: 22449 - DNA, 22 bp, Artificial Sequence
  Synthetic
ccagaaaggcugctatttgcug

SEQ ID NO: 22450 - DNA, 18 bp, Artificial Sequence
  Synthetic
ccagcgguagcagugagt

SEQ ID NO: 22451 - DNA, 18 bp, Artificial Sequence
  Synthetic
cacagccugagcttuggg

SEQ ID NO: 22452 - DNA, 21 bp, Artificial Sequence
  Synthetic
agccaggutaagggucagagt

SEQ ID NO: 22453 - DNA, 23 bp, Artificial Sequence
  Synthetic
tcugtggattacauccggaggat

SEQ ID NO: 22454 - DNA, 19 bp, Artificial Sequence
  Synthetic
cctgtgagcuctcgctuct

SEQ ID NO: 22455 - DNA, 22 bp, Artificial Sequence
  Synthetic
ggatactcaugggtctcccuca

SEQ ID NO: 22456 - DNA, 22 bp, Artificial Sequence
  Synthetic
gggcagcaaacutgttcccaua

SEQ ID NO: 22457 - DNA, 20 bp, Artificial Sequence
  Synthetic
ccctagagcccutgccttut

SEQ ID NO: 22458 - DNA, 26 bp, Artificial Sequence
  Synthetic
ccaagattagaaaucaggaacgtugc

SEQ ID NO: 22459 - DNA, 27 bp, Artificial Sequence
  Synthetic
agtggatatggagaugggtctgatuaa

SEQ ID NO: 22460 - DNA, 28 bp, Artificial Sequence
  Synthetic
ctggcataaugtcatctgaatucaaaca

SEQ ID NO: 22461 - DNA, 29 bp, Artificial Sequence
  Synthetic
atgtgtaaagtuggtgttgctataatuct

SEQ ID NO: 22462 - DNA, 27 bp, Artificial Sequence
  Synthetic
gcacatagttuaacacatcaaggtugg

SEQ ID NO: 22463 - DNA, 28 bp, Artificial Sequence
  Synthetic
ggaaaaatgttgutggagaaactacugt

SEQ ID NO: 22464 - DNA, 29 bp, Artificial Sequence
  Synthetic
tttaattatcttgugtgctttaccugcac

SEQ ID NO: 22465 - DNA, 28 bp, Artificial Sequence
  Synthetic
tgaccttgtagaccugtgtgtagataut

SEQ ID NO: 22466 - DNA, 27 bp, Artificial Sequence
  Synthetic
agtcaagcggacutaaaacttctuacc

SEQ ID NO: 22467 - DNA, 29 bp, Artificial Sequence
  Synthetic
tctgctatactgautcctgacttgtttut

SEQ ID NO: 22468 - DNA, 24 bp, Artificial Sequence
  Synthetic
tcagccaacuctttgtcttcgtut

SEQ ID NO: 22469 - DNA, 29 bp, Artificial Sequence
  Synthetic
cacttcaaatgcacugttaacatttccua

SEQ ID NO: 22470 - DNA, 27 bp, Artificial Sequence
  Synthetic
caaacactacugcaggatccatuaaat

SEQ ID NO: 22471 - DNA, 23 bp, Artificial Sequence
  Synthetic
ctctggcgutcagtcacuaagaa

SEQ ID NO: 22472 - DNA, 24 bp, Artificial Sequence
  Synthetic
tggaagtgaggugctattttcucc

SEQ ID NO: 22473 - DNA, 24 bp, Artificial Sequence
  Synthetic
ccatgutaaaacttcaugcagcca

SEQ ID NO: 22474 - DNA, 23 bp, Artificial Sequence
  Synthetic
ccacagugacaggatgactcuct

SEQ ID NO: 22475 - DNA, 28 bp, Artificial Sequence
  Synthetic
gttaaagguacagtgagtttacuaggca

SEQ ID NO: 22476 - DNA, 27 bp, Artificial Sequence
  Synthetic
caauattctgctugagaaacccacaac

SEQ ID NO: 22477 - DNA, 30 bp, Artificial Sequence
  Synthetic
agctcttattgaagauttacaaccatttuc

SEQ ID NO: 22478 - DNA, 24 bp, Artificial Sequence
  Synthetic
ccctaaatugggagaacaagcuga

SEQ ID NO: 22479 - DNA, 24 bp, Artificial Sequence
  Synthetic
acagcacacagauttaucaggcaa

SEQ ID NO: 22480 - DNA, 25 bp, Artificial Sequence
  Synthetic
gccattgcuccacttaactcaaaut

SEQ ID NO: 22481 - DNA, 25 bp, Artificial Sequence
  Synthetic
agtcgcttgtautggacagaagtut

SEQ ID NO: 22482 - DNA, 30 bp, Artificial Sequence
  Synthetic
agtgtcatatgcaaauacttcacttcctut

SEQ ID NO: 22483 - DNA, 27 bp, Artificial Sequence
  Synthetic
gtttgctacacagcugataatgagaug

SEQ ID NO: 22484 - DNA, 28 bp, Artificial Sequence
  Synthetic
gccatttacacugtaacataucccagaa

SEQ ID NO: 22485 - DNA, 24 bp, Artificial Sequence
  Synthetic
caatgtcacuccctcagtgatguc

SEQ ID NO: 22486 - DNA, 24 bp, Artificial Sequence
  Synthetic
tcgaagugacagagatgtttuggg

SEQ ID NO: 22487 - DNA, 27 bp, Artificial Sequence
  Synthetic
tttagtucttggctagugaacaacact

SEQ ID NO: 22488 - DNA, 30 bp, Artificial Sequence
  Synthetic
ttcttgagttgtgauaatcctaaagccaut

SEQ ID NO: 22489 - DNA, 25 bp, Artificial Sequence
  Synthetic
accacuccagaaacacacactaaut

SEQ ID NO: 22490 - DNA, 25 bp, Artificial Sequence
  Synthetic
gucaccttttucccagaaaaccaag

SEQ ID NO: 22491 - DNA, 22 bp, Artificial Sequence
  Synthetic
cccacgugaagctattggugaa

SEQ ID NO: 22492 - DNA, 31 bp, Artificial Sequence
  Synthetic
ccctattcttttgautcattgaatgatgugg

SEQ ID NO: 22493 - DNA, 23 bp, Artificial Sequence
  Synthetic
cttugguccaggagagttctuat

SEQ ID NO: 22494 - DNA, 22 bp, Artificial Sequence
  Synthetic
cacctcauaggtccagttcugc

SEQ ID NO: 22495 - DNA, 23 bp, Artificial Sequence
  Synthetic
ggtagcggauattacugcccaat

SEQ ID NO: 22496 - DNA, 25 bp, Artificial Sequence
  Synthetic
gcaaaacutttcacaucagcaaagg

SEQ ID NO: 22497 - DNA, 24 bp, Artificial Sequence
  Synthetic
cgtattgtggagagutgcacgtua

SEQ ID NO: 22498 - DNA, 28 bp, Artificial Sequence
  Synthetic
tcactattccuctttaacttcucggact

SEQ ID NO: 22499 - DNA, 21 bp, Artificial Sequence
  Synthetic
cucataugggcgaagaaggct

SEQ ID NO: 22500 - DNA, 23 bp, Artificial Sequence
  Synthetic
gccatgctggutacattttccuc

SEQ ID NO: 22501 - DNA, 22 bp, Artificial Sequence
  Synthetic
cctcaatucccaggtggaccua

SEQ ID NO: 22502 - DNA, 22 bp, Artificial Sequence
  Synthetic
tgagguacaaaggcagccttuc

SEQ ID NO: 22503 - DNA, 22 bp, Artificial Sequence
  Synthetic
tgctcccttugcttcttccaut

SEQ ID NO: 22504 - DNA, 29 bp, Artificial Sequence
  Synthetic
tgtgataaaatcugatcattgtccctuca

SEQ ID NO: 22505 - DNA, 28 bp, Artificial Sequence
  Synthetic
ggtgtttactaccuccttcttcattuca

SEQ ID NO: 22506 - DNA, 26 bp, Artificial Sequence
  Synthetic
gaggagtcgtautaaagtcaggcuaa

SEQ ID NO: 22507 - DNA, 24 bp, Artificial Sequence
  Synthetic
gtcttctggagutctctcccguat

SEQ ID NO: 22508 - DNA, 21 bp, Artificial Sequence
  Synthetic
tgtucagcacgcucaaggaaa

SEQ ID NO: 22509 - DNA, 19 bp, Artificial Sequence
  Synthetic
ggguaccctaugcccacca

SEQ ID NO: 22510 - DNA, 23 bp, Artificial Sequence
  Synthetic
ctgcccaggaaugctacagauac

SEQ ID NO: 22511 - DNA, 27 bp, Artificial Sequence
  Synthetic
aaaaccctgatguttcagtgtctagut

SEQ ID NO: 22512 - DNA, 26 bp, Artificial Sequence
  Synthetic
tgaguacaagaaauggcaggaaaaca

SEQ ID NO: 22513 - DNA, 24 bp, Artificial Sequence
  Synthetic
ggtgutcacagacaugaagaaggg

SEQ ID NO: 22514 - DNA, 21 bp, Artificial Sequence
  Synthetic
gtgagaccacugccaugaagt

SEQ ID NO: 22515 - DNA, 20 bp, Artificial Sequence
  Synthetic
gggatccaagugccttgugt

SEQ ID NO: 22516 - DNA, 19 bp, Artificial Sequence
  Synthetic
ctguctcaagcugcacgga

SEQ ID NO: 22517 - DNA, 20 bp, Artificial Sequence
  Synthetic
gccgctgugttaggaaguca

SEQ ID NO: 22518 - DNA, 18 bp, Artificial Sequence
  Synthetic
cagcgaggagcucugcat

SEQ ID NO: 22519 - DNA, 19 bp, Artificial Sequence
  Synthetic
cagtagccgutgcactugg

SEQ ID NO: 22520 - DNA, 22 bp, Artificial Sequence
  Synthetic
cgtgagtctcutcatgcctcug

SEQ ID NO: 22521 - DNA, 23 bp, Artificial Sequence
  Synthetic
gctctcacccutgtcttctgtut

SEQ ID NO: 22522 - DNA, 24 bp, Artificial Sequence
  Synthetic
gtcagataucgagtcccagttucc

SEQ ID NO: 22523 - DNA, 30 bp, Artificial Sequence
  Synthetic
ggttgtaaaauacaagctcatuaccacaaa

SEQ ID NO: 22524 - DNA, 20 bp, Artificial Sequence
  Synthetic
gttttggtucctgcccugaa

SEQ ID NO: 22525 - DNA, 21 bp, Artificial Sequence
  Synthetic
ccggcagagauacttcucgga

SEQ ID NO: 22526 - DNA, 22 bp, Artificial Sequence
  Synthetic
acatcgctugcacactgaguag

SEQ ID NO: 22527 - DNA, 21 bp, Artificial Sequence
  Synthetic
gtgagggtuccgacaactcut

SEQ ID NO: 22528 - DNA, 21 bp, Artificial Sequence
  Synthetic
gggactguggcatgcaactua

SEQ ID NO: 22529 - DNA, 31 bp, Artificial Sequence
  Synthetic
catcttggatttgtuctgatgatcatttcug

SEQ ID NO: 22530 - DNA, 17 bp, Artificial Sequence
  Synthetic
gtgtccucgccggtuca

SEQ ID NO: 22531 - DNA, 19 bp, Artificial Sequence
  Synthetic
ccagagacugaggcagugt

SEQ ID NO: 22532 - DNA, 20 bp, Artificial Sequence
  Synthetic
cccucgagucccagacagaa

SEQ ID NO: 22533 - DNA, 21 bp, Artificial Sequence
  Synthetic
tcaaaatgcggguctctgucc

SEQ ID NO: 22534 - DNA, 21 bp, Artificial Sequence
  Synthetic
cttcagcagcucaaacuggga

SEQ ID NO: 22535 - DNA, 18 bp, Artificial Sequence
  Synthetic
gactccucgcggtgtgut

SEQ ID NO: 22536 - DNA, 19 bp, Artificial Sequence
  Synthetic
tggtccauctcccccaugt

SEQ ID NO: 22537 - DNA, 21 bp, Artificial Sequence
  Synthetic
agctgccautctgacgucaaa

SEQ ID NO: 22538 - DNA, 22 bp, Artificial Sequence
  Synthetic
gggagtcugggaatgaacacua

SEQ ID NO: 22539 - DNA, 32 bp, Artificial Sequence
  Synthetic
acctgggatttauaataaccaaactgaaugag

SEQ ID NO: 22540 - DNA, 29 bp, Artificial Sequence
  Synthetic
ttagctaaagaacucatagaaaaguccag

SEQ ID NO: 22541 - DNA, 30 bp, Artificial Sequence
  Synthetic
gaaattctttccagutctgacatttgucaa

SEQ ID NO: 22542 - DNA, 20 bp, Artificial Sequence
  Synthetic
ccgtgtcugggatgcugaac

SEQ ID NO: 22543 - DNA, 20 bp, Artificial Sequence
  Synthetic
ctgacaaaggcguccugaga

SEQ ID NO: 22544 - DNA, 30 bp, Artificial Sequence
  Synthetic
gctttagaagctguttgtacactgtattut

SEQ ID NO: 22545 - DNA, 27 bp, Artificial Sequence
  Synthetic
ttgttggcagtuttaaagacctcttug

SEQ ID NO: 22546 - DNA, 31 bp, Artificial Sequence
  Synthetic
gataaagaaaaactguctgtctgttgaacuc

SEQ ID NO: 22547 - DNA, 28 bp, Artificial Sequence
  Synthetic
cgtatttctaauccctttcactcuggaa

SEQ ID NO: 22548 - DNA, 23 bp, Artificial Sequence
  Synthetic
tccaagctgautggtgcaactua

SEQ ID NO: 22549 - DNA, 23 bp, Artificial Sequence
  Synthetic
ccttgcgtuggatgttgtaacut

SEQ ID NO: 22550 - DNA, 25 bp, Artificial Sequence
  Synthetic
tttttgcattucccaagacagtgut

SEQ ID NO: 22551 - DNA, 28 bp, Artificial Sequence
  Synthetic
aagcttaaggacuatggagtggatctua

SEQ ID NO: 22552 - DNA, 18 bp, Artificial Sequence
  Synthetic
gccgugggtcucaaagag

SEQ ID NO: 22553 - DNA, 19 bp, Artificial Sequence
  Synthetic
ccuggagggaacttuccca

SEQ ID NO: 22554 - DNA, 27 bp, Artificial Sequence
  Synthetic
cttttctttcagcutcttgccttcaut

SEQ ID NO: 22555 - DNA, 27 bp, Artificial Sequence
  Synthetic
aaattgcattcucgattttgtctuggt

SEQ ID NO: 22556 - DNA, 23 bp, Artificial Sequence
  Synthetic
tcatctgtuccaaacgcacugat

SEQ ID NO: 22557 - DNA, 21 bp, Artificial Sequence
  Synthetic
gactttctcucctgcccucac

SEQ ID NO: 22558 - DNA, 18 bp, Artificial Sequence
  Synthetic
gcgcuacaacgtgugcct

SEQ ID NO: 22559 - DNA, 18 bp, Artificial Sequence
  Synthetic
atctuaccgcggcaccuc

SEQ ID NO: 22560 - DNA, 19 bp, Artificial Sequence
  Synthetic
gcauccagugccagaaccc

SEQ ID NO: 22561 - DNA, 19 bp, Artificial Sequence
  Synthetic
gctctctucccacgtucca

SEQ ID NO: 22562 - DNA, 20 bp, Artificial Sequence
  Synthetic
tgtggtccucacctaugcct

SEQ ID NO: 22563 - DNA, 20 bp, Artificial Sequence
  Synthetic
tcccgtucctaccagucact

SEQ ID NO: 22564 - DNA, 19 bp, Artificial Sequence
  Synthetic
gggcttgguaacgtccugt

SEQ ID NO: 22565 - DNA, 18 bp, Artificial Sequence
  Synthetic
ctccaugcccctcacuca

SEQ ID NO: 22566 - DNA, 21 bp, Artificial Sequence
  Synthetic
gcagagugacgaugagccaaa

SEQ ID NO: 22567 - DNA, 18 bp, Artificial Sequence
  Synthetic
cggcuccgguagaggagg

SEQ ID NO: 22568 - DNA, 19 bp, Artificial Sequence
  Synthetic
cuccccagagcugcagaag

SEQ ID NO: 22569 - DNA, 18 bp, Artificial Sequence
  Synthetic
gcagcugaggcagucgag

SEQ ID NO: 22570 - DNA, 21 bp, Artificial Sequence
  Synthetic
ggatgcagacucggacttcug

SEQ ID NO: 22571 - DNA, 20 bp, Artificial Sequence
  Synthetic
agucagcccacaggttcuct

SEQ ID NO: 22572 - DNA, 24 bp, Artificial Sequence
  Synthetic
ttttccuggtttgauacaggccat

SEQ ID NO: 22573 - DNA, 23 bp, Artificial Sequence
  Synthetic
ggtgacgacuccggagaaatauc

SEQ ID NO: 22574 - DNA, 23 bp, Artificial Sequence
  Synthetic
aacagctgcuaacaacaaacguc

SEQ ID NO: 22575 - DNA, 29 bp, Artificial Sequence
  Synthetic
cattactuaaagcagaaguaaacaacuct

SEQ ID NO: 22576 - DNA, 21 bp, Artificial Sequence
  Synthetic
tctgctaatgutgagcgccut

SEQ ID NO: 22577 - DNA, 29 bp, Artificial Sequence
  Synthetic
ggcatcagaaugtcatcagtaaauacaca

SEQ ID NO: 22578 - DNA, 30 bp, Artificial Sequence
  Synthetic
agttactaatttcuttccagttgtugcaga

SEQ ID NO: 22579 - DNA, 27 bp, Artificial Sequence
  Synthetic
acatctaggutacctgagaaucacgaa

SEQ ID NO: 22580 - DNA, 27 bp, Artificial Sequence
  Synthetic
tggacaaattgcutggagaacttcaua

SEQ ID NO: 22581 - DNA, 24 bp, Artificial Sequence
  Synthetic
tgaggagcuatgtgttcatucacc

SEQ ID NO: 22582 - DNA, 30 bp, Artificial Sequence
  Synthetic
ctaaattttgtttcugttagctgctaugat

SEQ ID NO: 22583 - DNA, 27 bp, Artificial Sequence
  Synthetic
agctcattcaauctctttcgaactuca

SEQ ID NO: 22584 - DNA, 28 bp, Artificial Sequence
  Synthetic
gggcgaacagutaattctaattgugaaa

SEQ ID NO: 22585 - DNA, 29 bp, Artificial Sequence
  Synthetic
aactttuaaaggaaagagcacacaugaac

SEQ ID NO: 22586 - DNA, 31 bp, Artificial Sequence
  Synthetic
ctaaggtatgaautggataatgtctugaggt

SEQ ID NO: 22587 - DNA, 27 bp, Artificial Sequence
  Synthetic
ttgaattttgctuggtgtcttcttcug

SEQ ID NO: 22588 - DNA, 26 bp, Artificial Sequence
  Synthetic
agagagagcuaaaacaatugcaggaa

SEQ ID NO: 22589 - DNA, 31 bp, Artificial Sequence
  Synthetic
agtactttcagtugacctaaggtttuaaaca

SEQ ID NO: 22590 - DNA, 23 bp, Artificial Sequence
  Synthetic
tgaagctctgauggctgaacauc

SEQ ID NO: 22591 - DNA, 28 bp, Artificial Sequence
  Synthetic
ggcaggtgacauttttagaaaagtgaut

SEQ ID NO: 22592 - DNA, 22 bp, Artificial Sequence
  Synthetic
caautgcccttttucggcagat

SEQ ID NO: 22593 - DNA, 29 bp, Artificial Sequence
  Synthetic
attgatttgttctugccattgttcttuct

SEQ ID NO: 22594 - DNA, 23 bp, Artificial Sequence
  Synthetic
cuaaatgaacttaugcgccagca

SEQ ID NO: 22595 - DNA, 26 bp, Artificial Sequence
  Synthetic
agagattuacaggctgtgtuggaaag

SEQ ID NO: 22596 - DNA, 22 bp, Artificial Sequence
  Synthetic
gcagutcctctatuggagcaga

SEQ ID NO: 22597 - DNA, 21 bp, Artificial Sequence
  Synthetic
atcacaaacgucctcccuagt

SEQ ID NO: 22598 - DNA, 29 bp, Artificial Sequence
  Synthetic
tcccaagtcaaaaaguaagaagaggaaut

SEQ ID NO: 22599 - DNA, 25 bp, Artificial Sequence
  Synthetic
cctgcacauctagccttacugaaac

SEQ ID NO: 22600 - DNA, 33 bp, Artificial Sequence
  Synthetic
gataatttaaagcugagagtaatgatacuagct

SEQ ID NO: 22601 - DNA, 24 bp, Artificial Sequence
  Synthetic
tcgcaaagcutcaaacauggaaaa

SEQ ID NO: 22602 - DNA, 27 bp, Artificial Sequence
  Synthetic
agtatccagacauatttcugagagcca

SEQ ID NO: 22603 - DNA, 27 bp, Artificial Sequence
  Synthetic
cagcttacaucatcagtaguagcaagg

SEQ ID NO: 22604 - DNA, 33 bp, Artificial Sequence
  Synthetic
aataggctttgtuaggctaatgtattttcttut

SEQ ID NO: 22605 - DNA, 26 bp, Artificial Sequence
  Synthetic
gctgctgaguatcaattcuaggacat

SEQ ID NO: 22606 - DNA, 30 bp, Artificial Sequence
  Synthetic
agtgttgttcaaugaattggctttcttuaa

SEQ ID NO: 22607 - DNA, 26 bp, Artificial Sequence
  Synthetic
acgtuatttacctcttuggcacaaga

SEQ ID NO: 22608 - DNA, 25 bp, Artificial Sequence
  Synthetic
tttgtcuaaagctgaaacucaggct

SEQ ID NO: 22609 - DNA, 28 bp, Artificial Sequence
  Synthetic
tgttcattttctucagtagcttcagugt

SEQ ID NO: 22610 - DNA, 27 bp, Artificial Sequence
  Synthetic
gacagatgaccaaaauaactgtccugt

SEQ ID NO: 22611 - DNA, 23 bp, Artificial Sequence
  Synthetic
aggcacuaagggttccattucag

SEQ ID NO: 22612 - DNA, 28 bp, Artificial Sequence
  Synthetic
agttgaagattuaccactgaaacugaca

SEQ ID NO: 22613 - DNA, 30 bp, Artificial Sequence
  Synthetic
cttagatctgccuttggaatgaaaatuaaa

SEQ ID NO: 22614 - DNA, 21 bp, Artificial Sequence
  Synthetic
ggugggaguccagagtataug

SEQ ID NO: 22615 - DNA, 24 bp, Artificial Sequence
  Synthetic
gggagaaaugaccacacctaucaa

SEQ ID NO: 22616 - DNA, 31 bp, Artificial Sequence
  Synthetic
gattatagggaggaucauttaaaggtaugaa

SEQ ID NO: 22617 - DNA, 23 bp, Artificial Sequence
  Synthetic
gctagggtuggatcctcagatug

SEQ ID NO: 22618 - DNA, 24 bp, Artificial Sequence
  Synthetic
tgcaaagtgttugtgaatggctut

SEQ ID NO: 22619 - DNA, 25 bp, Artificial Sequence
  Synthetic
acaatcaagagcutctgaaggucaa

SEQ ID NO: 22620 - DNA, 24 bp, Artificial Sequence
  Synthetic
ggccaagugacgtttaaauccaag

SEQ ID NO: 22621 - DNA, 25 bp, Artificial Sequence
  Synthetic
ctccugagaaaauccacaagtguaa

SEQ ID NO: 22622 - DNA, 22 bp, Artificial Sequence
  Synthetic
tgucacacagtuggcaaggaaa

SEQ ID NO: 22623 - DNA, 23 bp, Artificial Sequence
  Synthetic
tccaacaagaaggccuggttuag

SEQ ID NO: 22624 - DNA, 22 bp, Artificial Sequence
  Synthetic
tgttgtgtcuccctcctgctua

SEQ ID NO: 22625 - DNA, 23 bp, Artificial Sequence
  Synthetic
ccacttgtttuccagtgcacuct

SEQ ID NO: 22626 - DNA, 24 bp, Artificial Sequence
  Synthetic
gttgcatcaugggactctgtguat

SEQ ID NO: 22627 - DNA, 25 bp, Artificial Sequence
  Synthetic
cccccaccaguctctacaatauaac

SEQ ID NO: 22628 - DNA, 27 bp, Artificial Sequence
  Synthetic
ctucagagaggaagaaaugacaaaagc

SEQ ID NO: 22629 - DNA, 25 bp, Artificial Sequence
  Synthetic
tttagaaucgccagccacttaugaa

SEQ ID NO: 22630 - DNA, 22 bp, Artificial Sequence
  Synthetic
gagatgcauactgctgugggaa

SEQ ID NO: 22631 - DNA, 28 bp, Artificial Sequence
  Synthetic
gagaaaacagccutatattgactcugct

SEQ ID NO: 22632 - DNA, 23 bp, Artificial Sequence
  Synthetic
gcaaaagacgccuggtctauagg

SEQ ID NO: 22633 - DNA, 22 bp, Artificial Sequence
  Synthetic
tcttcuccctttcuagggccat

SEQ ID NO: 22634 - DNA, 23 bp, Artificial Sequence
  Synthetic
gattacccaucattcctggcuga

SEQ ID NO: 22635 - DNA, 21 bp, Artificial Sequence
  Synthetic
acugggcaggttatugccaaa

SEQ ID NO: 22636 - DNA, 29 bp, Artificial Sequence
  Synthetic
atccttgatggauacagattaguacacct

SEQ ID NO: 22637 - DNA, 26 bp, Artificial Sequence
  Synthetic
gaaauaacccccaaactugagagact

SEQ ID NO: 22638 - DNA, 22 bp, Artificial Sequence
  Synthetic
atccgacaaagagcuggcuaag

SEQ ID NO: 22639 - DNA, 22 bp, Artificial Sequence
  Synthetic
ggaaacaaaugaccccaaccug

SEQ ID NO: 22640 - DNA, 27 bp, Artificial Sequence
  Synthetic
cattgagggagcugttggtataacuat

SEQ ID NO: 22641 - DNA, 21 bp, Artificial Sequence
  Synthetic
ctttcaccaaggcaucgcaug

SEQ ID NO: 22642 - DNA, 21 bp, Artificial Sequence
  Synthetic
ttccccatcguttgtccaguc

SEQ ID NO: 22643 - DNA, 26 bp, Artificial Sequence
  Synthetic
ttcttttaaggugaagaggccatauc

SEQ ID NO: 22644 - DNA, 23 bp, Artificial Sequence
  Synthetic
ggacacagautctccttcaugct

SEQ ID NO: 22645 - DNA, 27 bp, Artificial Sequence
  Synthetic
gatcaacatguaggtataatgccugct

SEQ ID NO: 22646 - DNA, 27 bp, Artificial Sequence
  Synthetic
tttcatatttcugatgagcttccuggt

SEQ ID NO: 22647 - DNA, 27 bp, Artificial Sequence
  Synthetic
gtaaaactggautacttttgcctugct

SEQ ID NO: 22648 - DNA, 30 bp, Artificial Sequence
  Synthetic
agtgtggattcuccttaaattatatucacc

SEQ ID NO: 22649 - DNA, 19 bp, Artificial Sequence
  Synthetic
tcuacagggcagggtguca

SEQ ID NO: 22650 - DNA, 28 bp, Artificial Sequence
  Synthetic
gcacatttgucaggtttgaagtuaaagt

SEQ ID NO: 22651 - DNA, 26 bp, Artificial Sequence
  Synthetic
tcutctttuaagcccuaaaaggaaca

SEQ ID NO: 22652 - DNA, 25 bp, Artificial Sequence
  Synthetic
caccataauggaccaaagtgcaaut

SEQ ID NO: 22653 - DNA, 25 bp, Artificial Sequence
  Synthetic
gcaggaaaactuccacacatcatug

SEQ ID NO: 22654 - DNA, 29 bp, Artificial Sequence
  Synthetic
cctgttagcatuctaagcttctatguact

SEQ ID NO: 22655 - DNA, 28 bp, Artificial Sequence
  Synthetic
tgaaagtucaaaaacaggaggaagaugt

SEQ ID NO: 22656 - DNA, 27 bp, Artificial Sequence
  Synthetic
gcaggttgugtttgttcuaaaagagaa

SEQ ID NO: 22657 - DNA, 29 bp, Artificial Sequence
  Synthetic
tggttacttagcugtgttcattttctugt

SEQ ID NO: 22658 - DNA, 29 bp, Artificial Sequence
  Synthetic
aacaatagtacgguaatgaagaagcttua

SEQ ID NO: 22659 - DNA, 20 bp, Artificial Sequence
  Synthetic
gccttucacaaggcgtguca

SEQ ID NO: 22660 - DNA, 32 bp, Artificial Sequence
  Synthetic
aaagaataattctauacctttggagcataucc

SEQ ID NO: 22661 - DNA, 32 bp, Artificial Sequence
  Synthetic
gttgataacagaagagaaugaagaagaacaua

SEQ ID NO: 22662 - DNA, 30 bp, Artificial Sequence
  Synthetic
tcaatgctatcatauaagtgacatcttgut

SEQ ID NO: 22663 - DNA, 30 bp, Artificial Sequence
  Synthetic
gacgtccaattguaaagccagaatatttua

SEQ ID NO: 22664 - DNA, 21 bp, Artificial Sequence
  Synthetic
tggcugaaacaaagctgucca

SEQ ID NO: 22665 - DNA, 32 bp, Artificial Sequence
  Synthetic
attctaagtatgguacctttgttaaugaggaa

SEQ ID NO: 22666 - DNA, 22 bp, Artificial Sequence
  Synthetic
cagtcgcuaccgggaaaauagg

SEQ ID NO: 22667 - DNA, 18 bp, Artificial Sequence
  Synthetic
gtcuagcagccccggtua

SEQ ID NO: 22668 - DNA, 22 bp, Artificial Sequence
  Synthetic
gcttctcccaguctttgtgcug

SEQ ID NO: 22669 - DNA, 28 bp, Artificial Sequence
  Synthetic
aacagtgtattaacutgggatcttgcut

SEQ ID NO: 22670 - DNA, 29 bp, Artificial Sequence
  Synthetic
gtcagcatuaacagcataagaaatatgug

SEQ ID NO: 22671 - DNA, 22 bp, Artificial Sequence
  Synthetic
cagugacgccgaggactuaaaa

SEQ ID NO: 22672 - DNA, 23 bp, Artificial Sequence
  Synthetic
actcttcugcccattctctguct

SEQ ID NO: 22673 - DNA, 24 bp, Artificial Sequence
  Synthetic
gtgtgtttaugggttgtgtacuga

SEQ ID NO: 22674 - DNA, 23 bp, Artificial Sequence
  Synthetic
cctcaugccacaggtaugggaaa

SEQ ID NO: 22675 - DNA, 21 bp, Artificial Sequence
  Synthetic
gcatgaacagcugcttcugga

SEQ ID NO: 22676 - DNA, 23 bp, Artificial Sequence
  Synthetic
gutgatuagucagagaggaggag

SEQ ID NO: 22677 - DNA, 27 bp, Artificial Sequence
  Synthetic
ttcctcatgcaugttctctgtaagtut

SEQ ID NO: 22678 - DNA, 28 bp, Artificial Sequence
  Synthetic
cutcatuggaaaaauagagagaacacag

SEQ ID NO: 22679 - DNA, 19 bp, Artificial Sequence
  Synthetic
tcctctcugctgccacuca

SEQ ID NO: 22680 - DNA, 23 bp, Artificial Sequence
  Synthetic
gatctgtcccauctccctuaggt

SEQ ID NO: 22681 - DNA, 21 bp, Artificial Sequence
  Synthetic
agccccaucgagctactttuc

SEQ ID NO: 22682 - DNA, 23 bp, Artificial Sequence
  Synthetic
atggtctcuagaggcatctccut

SEQ ID NO: 22683 - DNA, 31 bp, Artificial Sequence
  Synthetic
gcaaaagacccaaaacuatatccatagauga

SEQ ID NO: 22684 - DNA, 33 bp, Artificial Sequence
  Synthetic
ggtcactctttauactacatttaaggtucaaaa

SEQ ID NO: 22685 - DNA, 28 bp, Artificial Sequence
  Synthetic
ctggagtcttcaaugtatcagaactugt

SEQ ID NO: 22686 - DNA, 21 bp, Artificial Sequence
  Synthetic
tgaugtggcuggacacaaagt

SEQ ID NO: 22687 - DNA, 19 bp, Artificial Sequence
  Synthetic
gagaaucgactgccugcga

SEQ ID NO: 22688 - DNA, 21 bp, Artificial Sequence
  Synthetic
tgtgcggaggutaacucaagc

SEQ ID NO: 22689 - DNA, 23 bp, Artificial Sequence
  Synthetic
aaagtgcgttutaaggcgaaguc

SEQ ID NO: 22690 - DNA, 25 bp, Artificial Sequence
  Synthetic
ttttaaaagcagucctggcaaaugg

SEQ ID NO: 22691 - DNA, 28 bp, Artificial Sequence
  Synthetic
gctgaataaauctcttgcugaacaaaga

SEQ ID NO: 22692 - DNA, 30 bp, Artificial Sequence
  Synthetic
agaatccacatgacutgaaatcacttacut

SEQ ID NO: 22693 - DNA, 26 bp, Artificial Sequence
  Synthetic
tcatgaaggatgugaacagatgcaut

SEQ ID NO: 22694 - DNA, 24 bp, Artificial Sequence
  Synthetic
cagagtcactuccactttcacuca

SEQ ID NO: 22695 - DNA, 26 bp, Artificial Sequence
  Synthetic
gaugaagaggaaggaactguacaaca

SEQ ID NO: 22696 - DNA, 24 bp, Artificial Sequence
  Synthetic
tccaggcttuctaattctgctucc

SEQ ID NO: 22697 - DNA, 29 bp, Artificial Sequence
  Synthetic
agtgttaagtataauggacctgagaguca

SEQ ID NO: 22698 - DNA, 31 bp, Artificial Sequence
  Synthetic
gcgagctaattugtcttctttctcttuaagt

SEQ ID NO: 22699 - DNA, 22 bp, Artificial Sequence
  Synthetic
gcgtaaatgccuctacccauct

SEQ ID NO: 22700 - DNA, 22 bp, Artificial Sequence
  Synthetic
cgaacctcaugcacattcucaa

SEQ ID NO: 22701 - DNA, 29 bp, Artificial Sequence
  Synthetic
ctctattatcaaacaaaugtgccacctuc

SEQ ID NO: 22702 - DNA, 32 bp, Artificial Sequence
  Synthetic
tgaatgaatttctcaucttttgtagtccguat

SEQ ID NO: 22703 - DNA, 27 bp, Artificial Sequence
  Synthetic
acactgtctcaagauttatcgcacaut

SEQ ID NO: 22704 - DNA, 22 bp, Artificial Sequence
  Synthetic
gctgggaagugattgatguggt

SEQ ID NO: 22705 - DNA, 24 bp, Artificial Sequence
  Synthetic
gctgacatucctctttguaacgct

SEQ ID NO: 22706 - DNA, 21 bp, Artificial Sequence
  Synthetic
cccutgtggtgtuccaaggag

SEQ ID NO: 22707 - DNA, 21 bp, Artificial Sequence
  Synthetic
gcugcaaagcaacgacugaag

SEQ ID NO: 22708 - DNA, 31 bp, Artificial Sequence
  Synthetic
cggtaaataaaaaccugtagaaagtcucgaa

SEQ ID NO: 22709 - DNA, 27 bp, Artificial Sequence
  Synthetic
ctgautttctgatcatucggacaagac

SEQ ID NO: 22710 - DNA, 21 bp, Artificial Sequence
  Synthetic
tcctgaggugtgcgcauaaaa

SEQ ID NO: 22711 - DNA, 22 bp, Artificial Sequence
  Synthetic
tcgcccaccuctgaaaaaguac

SEQ ID NO: 22712 - DNA, 29 bp, Artificial Sequence
  Synthetic
agagaattcgacucttcttcagagaugat

SEQ ID NO: 22713 - DNA, 22 bp, Artificial Sequence
  Synthetic
gctgttggaaccucctgtttug

SEQ ID NO: 22714 - DNA, 22 bp, Artificial Sequence
  Synthetic
cctccccaucccagatgauaga

SEQ ID NO: 22715 - DNA, 27 bp, Artificial Sequence
  Synthetic
agaaagacacaacaugaacctgtgaua

SEQ ID NO: 22716 - DNA, 25 bp, Artificial Sequence
  Synthetic
tctgattcuactgagcatuccacct

SEQ ID NO: 22717 - DNA, 24 bp, Artificial Sequence
  Synthetic
tggaaaagtgutacgcttccuaca

SEQ ID NO: 22718 - DNA, 25 bp, Artificial Sequence
  Synthetic
gatgtctuctccacttucagacaca

SEQ ID NO: 22719 - DNA, 19 bp, Artificial Sequence
  Synthetic
gagctugcagccccttuac

SEQ ID NO: 22720 - DNA, 22 bp, Artificial Sequence
  Synthetic
ggccaccuccagatgaatctuc

SEQ ID NO: 22721 - DNA, 21 bp, Artificial Sequence
  Synthetic
gctggtaggguaagggagcua

SEQ ID NO: 22722 - DNA, 19 bp, Artificial Sequence
  Synthetic
ggguagctgauggcccaag

SEQ ID NO: 22723 - DNA, 22 bp, Artificial Sequence
  Synthetic
ttctctcuccacccaccauaca

SEQ ID NO: 22724 - DNA, 18 bp, Artificial Sequence
  Synthetic
cgtgcaucacgaggcgua

SEQ ID NO: 22725 - DNA, 21 bp, Artificial Sequence
  Synthetic
gacttccuccggaagcagaug

SEQ ID NO: 22726 - DNA, 31 bp, Artificial Sequence
  Synthetic
tttttaaaagttccucttacctatgctguga

SEQ ID NO: 22727 - DNA, 22 bp, Artificial Sequence
  Synthetic
ggttgtctgugcatagctggut

SEQ ID NO: 22728 - DNA, 23 bp, Artificial Sequence
  Synthetic
cctgacaccutgatgagcaagut

SEQ ID NO: 22729 - DNA, 22 bp, Artificial Sequence
  Synthetic
gtgcttcucctatgtgacuggt

SEQ ID NO: 22730 - DNA, 22 bp, Artificial Sequence
  Synthetic
ctccttcttgutctgggctcuc

SEQ ID NO: 22731 - DNA, 28 bp, Artificial Sequence
  Synthetic
caacgaagcacuaatggtcaaacaauac

SEQ ID NO: 22732 - DNA, 24 bp, Artificial Sequence
  Synthetic
gcttgctucaatttgttgtgucca

SEQ ID NO: 22733 - DNA, 26 bp, Artificial Sequence
  Synthetic
cccgaaaaatacutcgacaaactucc

SEQ ID NO: 22734 - DNA, 29 bp, Artificial Sequence
  Synthetic
ccagagattuaggaagaggaaauggaaat

SEQ ID NO: 22735 - DNA, 27 bp, Artificial Sequence
  Synthetic
cctcagucacaacaaaautaaatcuca

SEQ ID NO: 22736 - DNA, 28 bp, Artificial Sequence
  Synthetic
gtcatagtcttcaucccactgataagut

SEQ ID NO: 22737 - DNA, 28 bp, Artificial Sequence
  Synthetic
agcgtattctgaguttactcactttcuc

SEQ ID NO: 22738 - DNA, 18 bp, Artificial Sequence
  Synthetic
cagaagccgucacagugg

SEQ ID NO: 22739 - DNA, 28 bp, Artificial Sequence
  Synthetic
cagagacgctuttgaaatttctacugaa

SEQ ID NO: 22740 - DNA, 20 bp, Artificial Sequence
  Synthetic
tgtggctuccacgatcacut

SEQ ID NO: 22741 - DNA, 17 bp, Artificial Sequence
  Synthetic
tggtccgcutcgccaug

SEQ ID NO: 22742 - DNA, 19 bp, Artificial Sequence
  Synthetic
cauccaggacgggugcaaa

SEQ ID NO: 22743 - DNA, 24 bp, Artificial Sequence
  Synthetic
gcutgtaacattuaggacagagct

SEQ ID NO: 22744 - DNA, 21 bp, Artificial Sequence
  Synthetic
cgaugtactgcucccagaaga

SEQ ID NO: 22745 - DNA, 22 bp, Artificial Sequence
  Synthetic
ccctttctaccucaacggctug

SEQ ID NO: 22746 - DNA, 18 bp, Artificial Sequence
  Synthetic
ctgucaagcagccuccac

SEQ ID NO: 22747 - DNA, 22 bp, Artificial Sequence
  Synthetic
tggatcagacgauggagtccut

SEQ ID NO: 22748 - DNA, 31 bp, Artificial Sequence
  Synthetic
ttgaattgtgcagcaauaaagtcatattcuc

SEQ ID NO: 22749 - DNA, 22 bp, Artificial Sequence
  Synthetic
ctgaccttgugcctcttctgut

SEQ ID NO: 22750 - DNA, 22 bp, Artificial Sequence
  Synthetic
ggacaguggactgcatgguaat

SEQ ID NO: 22751 - DNA, 23 bp, Artificial Sequence
  Synthetic
gcaacatgttucccctccttuca

SEQ ID NO: 22752 - DNA, 22 bp, Artificial Sequence
  Synthetic
gatuaacgcggccaugaagaag

SEQ ID NO: 22753 - DNA, 20 bp, Artificial Sequence
  Synthetic
atgtccagugcagctcucag

SEQ ID NO: 22754 - DNA, 19 bp, Artificial Sequence
  Synthetic
agcatggcaucgagcgtua

SEQ ID NO: 22755 - DNA, 22 bp, Artificial Sequence
  Synthetic
gttcaucagagtgucgcacaga

SEQ ID NO: 22756 - DNA, 24 bp, Artificial Sequence
  Synthetic
guggctttugaggaaaggaagaag

SEQ ID NO: 22757 - DNA, 26 bp, Artificial Sequence
  Synthetic
cttgttttgaauggtggatgtcaugg

SEQ ID NO: 22758 - DNA, 25 bp, Artificial Sequence
  Synthetic
ctgagtccuagagaagucacagaca

SEQ ID NO: 22759 - DNA, 27 bp, Artificial Sequence
  Synthetic
catggcctcutctttttaacttugaca

SEQ ID NO: 22760 - DNA, 22 bp, Artificial Sequence
  Synthetic
gtggtcaggacautagcaccut

SEQ ID NO: 22761 - DNA, 32 bp, Artificial Sequence
  Synthetic
gtttgcagtgautttgctattctaatuaaacc

SEQ ID NO: 22762 - DNA, 22 bp, Artificial Sequence
  Synthetic
ctcctccucctccgtcttuaca

SEQ ID NO: 22763 - DNA, 18 bp, Artificial Sequence
  Synthetic
gagggccauggaacugct

SEQ ID NO: 22764 - DNA, 24 bp, Artificial Sequence
  Synthetic
ccttttctctguccctgcagauat

SEQ ID NO: 22765 - DNA, 22 bp, Artificial Sequence
  Synthetic
ccatggtcagcutggtgtaguc

SEQ ID NO: 22766 - DNA, 23 bp, Artificial Sequence
  Synthetic
cctccatguacttcaagcagucc

SEQ ID NO: 22767 - DNA, 17 bp, Artificial Sequence
  Synthetic
cttcaucggcgggucca

SEQ ID NO: 22768 - DNA, 18 bp, Artificial Sequence
  Synthetic
gctugagagccacccgua

SEQ ID NO: 22769 - DNA, 17 bp, Artificial Sequence
  Synthetic
acgacgagcucctgcug

SEQ ID NO: 22770 - DNA, 21 bp, Artificial Sequence
  Synthetic
agacgucgaaaccgatgucag

SEQ ID NO: 22771 - DNA, 27 bp, Artificial Sequence
  Synthetic
gaactagaaaaatucaccatcccaaug

SEQ ID NO: 22772 - DNA, 31 bp, Artificial Sequence
  Synthetic
gatcagggtctcuatttatggctactaguaa

SEQ ID NO: 22773 - DNA, 28 bp, Artificial Sequence
  Synthetic
aatggatgcacugaattgctaaaugaag

SEQ ID NO: 22774 - DNA, 21 bp, Artificial Sequence
  Synthetic
gcaatggacutgtcctgcauc

SEQ ID NO: 22775 - DNA, 22 bp, Artificial Sequence
  Synthetic
gttttggcaagguggtgctuac

SEQ ID NO: 22776 - DNA, 23 bp, Artificial Sequence
  Synthetic
ttcctggacacccuacctttcua

SEQ ID NO: 22777 - DNA, 25 bp, Artificial Sequence
  Synthetic
aaaguctttgctttcuacaggagct

SEQ ID NO: 22778 - DNA, 24 bp, Artificial Sequence
  Synthetic
cagaactcugcttgagaacuacca

SEQ ID NO: 22779 - DNA, 26 bp, Artificial Sequence
  Synthetic
cttcacgagutatcatcaggucaact

SEQ ID NO: 22780 - DNA, 21 bp, Artificial Sequence
  Synthetic
gggactuccctaacagcaugg

SEQ ID NO: 22781 - DNA, 26 bp, Artificial Sequence
  Synthetic
ccaataaaactuagcgcagaaacgua

SEQ ID NO: 22782 - DNA, 28 bp, Artificial Sequence
  Synthetic
tttggttggaagaccugttcatattuct

SEQ ID NO: 22783 - DNA, 26 bp, Artificial Sequence
  Synthetic
agatttccatutgatttcgguggact

SEQ ID NO: 22784 - DNA, 26 bp, Artificial Sequence
  Synthetic
caggaggaugaaggagaagatgacua

SEQ ID NO: 22785 - DNA, 28 bp, Artificial Sequence
  Synthetic
gaguagagaaaagagaccucaagaacag

SEQ ID NO: 22786 - DNA, 25 bp, Artificial Sequence
  Synthetic
gaatctttgacucccctgaggaaut

SEQ ID NO: 22787 - DNA, 30 bp, Artificial Sequence
  Synthetic
ggatcatcuccgggtttattttgaauaaga

SEQ ID NO: 22788 - DNA, 30 bp, Artificial Sequence
  Synthetic
ttgagataccttgugtattcagtaattucc

SEQ ID NO: 22789 - DNA, 25 bp, Artificial Sequence
  Synthetic
gcctcctgcauctttcaaaagctua

SEQ ID NO: 22790 - DNA, 26 bp, Artificial Sequence
  Synthetic
ggaacagguagcatctaaggaauaga

SEQ ID NO: 22791 - DNA, 27 bp, Artificial Sequence
  Synthetic
cctctgacaggaugatctgactcauaa

SEQ ID NO: 22792 - DNA, 25 bp, Artificial Sequence
  Synthetic
gtgggatcugagaaaaatugcacat

SEQ ID NO: 22793 - DNA, 25 bp, Artificial Sequence
  Synthetic
gctcaccatucctcaatgtaacuga

SEQ ID NO: 22794 - DNA, 23 bp, Artificial Sequence
  Synthetic
gggaatcutggctacuggaggat

SEQ ID NO: 22795 - DNA, 30 bp, Artificial Sequence
  Synthetic
gaaagaagactauttctgcactaacuacca

SEQ ID NO: 22796 - DNA, 22 bp, Artificial Sequence
  Synthetic
cccacagaaacuggatgctuct

SEQ ID NO: 22797 - DNA, 21 bp, Artificial Sequence
  Synthetic
ccagtgaccguagcagaugac

SEQ ID NO: 22798 - DNA, 25 bp, Artificial Sequence
  Synthetic
agaatcttcuagcaggctcttcuga

SEQ ID NO: 22799 - DNA, 20 bp, Artificial Sequence
  Synthetic
gcugagtgguccagaagcag

SEQ ID NO: 22800 - DNA, 28 bp, Artificial Sequence
  Synthetic
gaagctatgacutgcagttttuaaacct

SEQ ID NO: 22801 - DNA, 27 bp, Artificial Sequence
  Synthetic
ctacttucagaaaaacacccucaggaa

SEQ ID NO: 22802 - DNA, 25 bp, Artificial Sequence
  Synthetic
gtugaggaagucagagaacaaaaug

SEQ ID NO: 22803 - DNA, 27 bp, Artificial Sequence
  Synthetic
aaagagguagcaattgttacaugagct

SEQ ID NO: 22804 - DNA, 25 bp, Artificial Sequence
  Synthetic
aacaaucgggaaatcaucaaccaac

SEQ ID NO: 22805 - DNA, 27 bp, Artificial Sequence
  Synthetic
cccatatttatugagtgcaagtccuct

SEQ ID NO: 22806 - DNA, 28 bp, Artificial Sequence
  Synthetic
agtgaaaattactuagcttttgggctug

SEQ ID NO: 22807 - DNA, 22 bp, Artificial Sequence
  Synthetic
cttcactcuccagagacuggga

SEQ ID NO: 22808 - DNA, 20 bp, Artificial Sequence
  Synthetic
ctugccacgaaaaccgugaa

SEQ ID NO: 22809 - DNA, 25 bp, Artificial Sequence
  Synthetic
ctgtgacucagacagctcataauca

SEQ ID NO: 22810 - DNA, 21 bp, Artificial Sequence
  Synthetic
acaggcugagcuacagggaat

SEQ ID NO: 22811 - DNA, 22 bp, Artificial Sequence
  Synthetic
gggttgaagucacagctgttuc

SEQ ID NO: 22812 - DNA, 25 bp, Artificial Sequence
  Synthetic
caaaccttctuatgaggccatucct

SEQ ID NO: 22813 - DNA, 23 bp, Artificial Sequence
  Synthetic
ggaaagagcagutccagaaggug

SEQ ID NO: 22814 - DNA, 21 bp, Artificial Sequence
  Synthetic
tgtgacaucctcugcaaccac

SEQ ID NO: 22815 - DNA, 27 bp, Artificial Sequence
  Synthetic
cttccaaaugaaaaactagtctugcca

SEQ ID NO: 22816 - DNA, 24 bp, Artificial Sequence
  Synthetic
cacttcuagaggagcaacagucag

SEQ ID NO: 22817 - DNA, 25 bp, Artificial Sequence
  Synthetic
ctctgcagaaagugctacaagacua

SEQ ID NO: 22818 - DNA, 21 bp, Artificial Sequence
  Synthetic
ctgccagtuctagctcagcut

SEQ ID NO: 22819 - DNA, 19 bp, Artificial Sequence
  Synthetic
gctgtgcuaccagtcugct

SEQ ID NO: 22820 - DNA, 23 bp, Artificial Sequence
  Synthetic
ccagtagcuccagttccttcuca

SEQ ID NO: 22821 - DNA, 22 bp, Artificial Sequence
  Synthetic
cugagguaccaccaaagacaga

SEQ ID NO: 22822 - DNA, 22 bp, Artificial Sequence
  Synthetic
ggaggaaaacccagucaggaug

SEQ ID NO: 22823 - DNA, 26 bp, Artificial Sequence
  Synthetic
gtcactgaagcuttgataacacccua

SEQ ID NO: 22824 - DNA, 19 bp, Artificial Sequence
  Synthetic
gtgccagcautcggtucag

SEQ ID NO: 22825 - DNA, 20 bp, Artificial Sequence
  Synthetic
agtacaggccccuagtgcut

SEQ ID NO: 22826 - DNA, 23 bp, Artificial Sequence
  Synthetic
aatctgagucctgaccttugcac

SEQ ID NO: 22827 - DNA, 20 bp, Artificial Sequence
  Synthetic
ggaucgaaaggcctgcugac

SEQ ID NO: 22828 - DNA, 21 bp, Artificial Sequence
  Synthetic
ccagucggagacgttggaaug

SEQ ID NO: 22829 - DNA, 19 bp, Artificial Sequence
  Synthetic
acagctacucctcgccugt

SEQ ID NO: 22830 - DNA, 20 bp, Artificial Sequence
  Synthetic
gctctccacucaggaagcuc

SEQ ID NO: 22831 - DNA, 22 bp, Artificial Sequence
  Synthetic
acutacagaugcagcagcagaa

SEQ ID NO: 22832 - DNA, 23 bp, Artificial Sequence
  Synthetic
cgcattgaccautcaaactggug

SEQ ID NO: 22833 - DNA, 17 bp, Artificial Sequence
  Synthetic
ccggcuggccttugaga

SEQ ID NO: 22834 - DNA, 17 bp, Artificial Sequence
  Synthetic
cttgccguccugggact

SEQ ID NO: 22835 - DNA, 18 bp, Artificial Sequence
  Synthetic
ctaccugggcagccucaa

SEQ ID NO: 22836 - DNA, 20 bp, Artificial Sequence
  Synthetic
gattcagcccucacgtcucc

SEQ ID NO: 22837 - DNA, 23 bp, Artificial Sequence
  Synthetic
cctaccccauctgcttcttucac

SEQ ID NO: 22838 - DNA, 21 bp, Artificial Sequence
  Synthetic
cctaccuggaagacacctugt

SEQ ID NO: 22839 - DNA, 20 bp, Artificial Sequence
  Synthetic
gctacucacgctctgaugcc

SEQ ID NO: 22840 - DNA, 18 bp, Artificial Sequence
  Synthetic
ccatgcagucggcgucaa

SEQ ID NO: 22841 - DNA, 21 bp, Artificial Sequence
  Synthetic
ggctctgcucactccctcuat

SEQ ID NO: 22842 - DNA, 21 bp, Artificial Sequence
  Synthetic
actutgaagcccucagggaac

SEQ ID NO: 22843 - DNA, 17 bp, Artificial Sequence
  Synthetic
gcgcagcugcactucat

SEQ ID NO: 22844 - DNA, 19 bp, Artificial Sequence
  Synthetic
gatcatcugctggccgugt

SEQ ID NO: 22845 - DNA, 19 bp, Artificial Sequence
  Synthetic
actgugcggagcatguacc

SEQ ID NO: 22846 - DNA, 17 bp, Artificial Sequence
  Synthetic
cgcacgcguggttgtug

SEQ ID NO: 22847 - DNA, 19 bp, Artificial Sequence
  Synthetic
ggctctugtgccacaucct

SEQ ID NO: 22848 - DNA, 17 bp, Artificial Sequence
  Synthetic
ctgcaccccugcaccua

SEQ ID NO: 22849 - DNA, 19 bp, Artificial Sequence
  Synthetic
cactgcccugctctuaccc

SEQ ID NO: 22850 - DNA, 17 bp, Artificial Sequence
  Synthetic
ctgcccuggccauggat

SEQ ID NO: 22851 - DNA, 17 bp, Artificial Sequence
  Synthetic
gacgagugcctcuccca

SEQ ID NO: 22852 - DNA, 19 bp, Artificial Sequence
  Synthetic
gggtgguagacaggugagg

SEQ ID NO: 22853 - DNA, 17 bp, Artificial Sequence
  Synthetic
cccaguaccgcugcgag

SEQ ID NO: 22854 - DNA, 17 bp, Artificial Sequence
  Synthetic
gutccctuccacggcct

SEQ ID NO: 22855 - DNA, 20 bp, Artificial Sequence
  Synthetic
catcaacgagugtgccagug

SEQ ID NO: 22856 - DNA, 17 bp, Artificial Sequence
  Synthetic
cgccgugggtgttcugg

SEQ ID NO: 22857 - DNA, 19 bp, Artificial Sequence
  Synthetic
agaggcacugtaggugggt

SEQ ID NO: 22858 - DNA, 20 bp, Artificial Sequence
  Synthetic
ggcccuctgcacugagaaac

SEQ ID NO: 22859 - DNA, 22 bp, Artificial Sequence
  Synthetic
gtgggaccaacugtgacaucaa

SEQ ID NO: 22860 - DNA, 18 bp, Artificial Sequence
  Synthetic
gagcacagugcagucagc

SEQ ID NO: 22861 - DNA, 17 bp, Artificial Sequence
  Synthetic
acacgugccacccctuc

SEQ ID NO: 22862 - DNA, 21 bp, Artificial Sequence
  Synthetic
ccttgucagtttcacugccct

SEQ ID NO: 22863 - DNA, 19 bp, Artificial Sequence
  Synthetic
gccaguacgatguggacga

SEQ ID NO: 22864 - DNA, 17 bp, Artificial Sequence
  Synthetic
ccctgtgcuggcaccua

SEQ ID NO: 22865 - DNA, 21 bp, Artificial Sequence
  Synthetic
atcagcaaccccuguaacgag

SEQ ID NO: 22866 - DNA, 24 bp, Artificial Sequence
  Synthetic
tgtgagtgcaguttagtaaguggg

SEQ ID NO: 22867 - DNA, 26 bp, Artificial Sequence
  Synthetic
aauatcgacgattguccaggaaacaa

SEQ ID NO: 22868 - DNA, 20 bp, Artificial Sequence
  Synthetic
gccacacucgttgacaucct

SEQ ID NO: 22869 - DNA, 21 bp, Artificial Sequence
  Synthetic
cctcttguccccttgtcucca

SEQ ID NO: 22870 - DNA, 19 bp, Artificial Sequence
  Synthetic
ggcuctgcccucgacaaag

SEQ ID NO: 22871 - DNA, 23 bp, Artificial Sequence
  Synthetic
tgagactgaccuctcttctccug

SEQ ID NO: 22872 - DNA, 26 bp, Artificial Sequence
  Synthetic
cagtaauagagaacccctttugaggt

SEQ ID NO: 22873 - DNA, 22 bp, Artificial Sequence
  Synthetic
gctcaaaucagccctgtgucaa

SEQ ID NO: 22874 - DNA, 30 bp, Artificial Sequence
  Synthetic
tcacaatttggcutttgttttagaugaagt

SEQ ID NO: 22875 - DNA, 23 bp, Artificial Sequence
  Synthetic
gctucaaagagcaggacagtuga

SEQ ID NO: 22876 - DNA, 30 bp, Artificial Sequence
  Synthetic
ctttctactgcatutgacattccttgttut

SEQ ID NO: 22877 - DNA, 22 bp, Artificial Sequence
  Synthetic
gtgctggguatgtaaggagcut

SEQ ID NO: 22878 - DNA, 24 bp, Artificial Sequence
  Synthetic
gcttcctgaucaagatgagaugga

SEQ ID NO: 22879 - DNA, 25 bp, Artificial Sequence
  Synthetic
agtctugacaagccaatcatucaca

SEQ ID NO: 22880 - DNA, 24 bp, Artificial Sequence
  Synthetic
ggctctgtauaagtggcttcugaa

SEQ ID NO: 22881 - DNA, 29 bp, Artificial Sequence
  Synthetic
gcctttggtgcuttagtttgttctatuac

SEQ ID NO: 22882 - DNA, 24 bp, Artificial Sequence
  Synthetic
agataagttgguctcatgccucct

SEQ ID NO: 22883 - DNA, 25 bp, Artificial Sequence
  Synthetic
caactutaagctgcauacaggcaaa

SEQ ID NO: 22884 - DNA, 24 bp, Artificial Sequence
  Synthetic
tgtgggtgtcuctttacagatgug

SEQ ID NO: 22885 - DNA, 28 bp, Artificial Sequence
  Synthetic
tgctttacuagttcaaaatuaggcagga

SEQ ID NO: 22886 - DNA, 23 bp, Artificial Sequence
  Synthetic
ccaagggagucaacaaaaaugug

SEQ ID NO: 22887 - DNA, 21 bp, Artificial Sequence
  Synthetic
ccagctctugtcagaaggcut

SEQ ID NO: 22888 - DNA, 26 bp, Artificial Sequence
  Synthetic
cagaaaatgatucggttccaaugcaa

SEQ ID NO: 22889 - DNA, 28 bp, Artificial Sequence
  Synthetic
gtagggatattgaucttggaatccucaa

SEQ ID NO: 22890 - DNA, 25 bp, Artificial Sequence
  Synthetic
gagttgggtucacgagtagaatcuc

SEQ ID NO: 22891 - DNA, 22 bp, Artificial Sequence
  Synthetic
guaggagacguagacccaccaa

SEQ ID NO: 22892 - DNA, 27 bp, Artificial Sequence
  Synthetic
ccaaggagagguctttggtactattut

SEQ ID NO: 22893 - DNA, 25 bp, Artificial Sequence
  Synthetic
caagtccataugagacagtgcttug

SEQ ID NO: 22894 - DNA, 22 bp, Artificial Sequence
  Synthetic
ggtauagcccaactctcucagg

SEQ ID NO: 22895 - DNA, 25 bp, Artificial Sequence
  Synthetic
agtcgguagcaaagtggtauaggaa

SEQ ID NO: 22896 - DNA, 28 bp, Artificial Sequence
  Synthetic
ggaatugaacccacatactgtugaaaat

SEQ ID NO: 22897 - DNA, 28 bp, Artificial Sequence
  Synthetic
ggacattagcacuaaaatctccttucac

SEQ ID NO: 22898 - DNA, 26 bp, Artificial Sequence
  Synthetic
cactgcaaaccauaaaaacgctauga

SEQ ID NO: 22899 - DNA, 25 bp, Artificial Sequence
  Synthetic
gtgtgaagaatguggaatggaacug

SEQ ID NO: 22900 - DNA, 26 bp, Artificial Sequence
  Synthetic
gcagagaacagccaguttgcttaaua

SEQ ID NO: 22901 - DNA, 25 bp, Artificial Sequence
  Synthetic
ccgtgttgcaugaactttgttttuc

SEQ ID NO: 22902 - DNA, 28 bp, Artificial Sequence
  Synthetic
tcttgacaatugttccaatgattugcat

SEQ ID NO: 22903 - DNA, 26 bp, Artificial Sequence
  Synthetic
caacatcttccucaatttgggtaugg

SEQ ID NO: 22904 - DNA, 25 bp, Artificial Sequence
  Synthetic
gacaaaauccaccccaucaagagat

SEQ ID NO: 22905 - DNA, 26 bp, Artificial Sequence
  Synthetic
tcatgtggacaaaautgcccaaaaut

SEQ ID NO: 22906 - DNA, 24 bp, Artificial Sequence
  Synthetic
caatcagaaagcccauccttugac

SEQ ID NO: 22907 - DNA, 26 bp, Artificial Sequence
  Synthetic
gtaagggtguttcatgagagauacca

SEQ ID NO: 22908 - DNA, 25 bp, Artificial Sequence
  Synthetic
tgcaattctguaaagctttggguct

SEQ ID NO: 22909 - DNA, 27 bp, Artificial Sequence
  Synthetic
tgatttuaacagggaagcgtattucct

SEQ ID NO: 22910 - DNA, 28 bp, Artificial Sequence
  Synthetic
caggtttuaagaagaagcagtgaugaag

SEQ ID NO: 22911 - DNA, 21 bp, Artificial Sequence
  Synthetic
ccatuggaagagggaugccat

SEQ ID NO: 22912 - DNA, 26 bp, Artificial Sequence
  Synthetic
accttaaacacaugaaggtgcgatua

SEQ ID NO: 22913 - DNA, 25 bp, Artificial Sequence
  Synthetic
tgattttgguaagctacuggagcat

SEQ ID NO: 22914 - DNA, 28 bp, Artificial Sequence
  Synthetic
ccatgtgctaccuctttataagcttuca

SEQ ID NO: 22915 - DNA, 21 bp, Artificial Sequence
  Synthetic
gcccucttcttuccagaacgg

SEQ ID NO: 22916 - DNA, 28 bp, Artificial Sequence
  Synthetic
agtgaaaucgaaccccautttatctuaa

SEQ ID NO: 22917 - DNA, 22 bp, Artificial Sequence
  Synthetic
tcattcttcaguggagctggug

SEQ ID NO: 22918 - DNA, 22 bp, Artificial Sequence
  Synthetic
cctcaagaccutgcctcttcuc

SEQ ID NO: 22919 - DNA, 23 bp, Artificial Sequence
  Synthetic
gcatccaaaaagaugtgcucact

SEQ ID NO: 22920 - DNA, 21 bp, Artificial Sequence
  Synthetic
caggcagcuaatgaaggucca

SEQ ID NO: 22921 - DNA, 22 bp, Artificial Sequence
  Synthetic
gcaacgtgugtgagagcauaag

SEQ ID NO: 22922 - DNA, 18 bp, Artificial Sequence
  Synthetic
ccccacuccggtttccug

SEQ ID NO: 22923 - DNA, 21 bp, Artificial Sequence
  Synthetic
tgtgatcaggcucccaaguct

SEQ ID NO: 22924 - DNA, 17 bp, Artificial Sequence
  Synthetic
gcugagccauggcacac

SEQ ID NO: 22925 - DNA, 17 bp, Artificial Sequence
  Synthetic
gcacgugctgcuggaca

SEQ ID NO: 22926 - DNA, 19 bp, Artificial Sequence
  Synthetic
ctcgacagucaggcagucc

SEQ ID NO: 22927 - DNA, 23 bp, Artificial Sequence
  Synthetic
gcctaccucaggcttatcuccaa

SEQ ID NO: 22928 - DNA, 21 bp, Artificial Sequence
  Synthetic
cacagacacaugcacatugct

SEQ ID NO: 22929 - DNA, 18 bp, Artificial Sequence
  Synthetic
cugccagcgccatguaac

SEQ ID NO: 22930 - DNA, 21 bp, Artificial Sequence
  Synthetic
cctcccccutctacttuagcc

SEQ ID NO: 22931 - DNA, 17 bp, Artificial Sequence
  Synthetic
ggacccaggugcuccat

SEQ ID NO: 22932 - DNA, 18 bp, Artificial Sequence
  Synthetic
aggcgccuacactuacgg

SEQ ID NO: 22933 - DNA, 22 bp, Artificial Sequence
  Synthetic
ccaaggccaugttcacgttgua

SEQ ID NO: 22934 - DNA, 18 bp, Artificial Sequence
  Synthetic
caagcgaaccgcauccuc

SEQ ID NO: 22935 - DNA, 19 bp, Artificial Sequence
  Synthetic
gaccacggcugcagatuct

SEQ ID NO: 22936 - DNA, 26 bp, Artificial Sequence
  Synthetic
guctaaaattcugggaagcagaacct

SEQ ID NO: 22937 - DNA, 17 bp, Artificial Sequence
  Synthetic
gcucgggcagacaggug

SEQ ID NO: 22938 - DNA, 18 bp, Artificial Sequence
  Synthetic
tgctggagggugggcuaa

SEQ ID NO: 22939 - DNA, 19 bp, Artificial Sequence
  Synthetic
cagactgugggcaugagca

SEQ ID NO: 22940 - DNA, 20 bp, Artificial Sequence
  Synthetic
catgggaggugctcauggaa

SEQ ID NO: 22941 - DNA, 22 bp, Artificial Sequence
  Synthetic
agccgcacuatactcagaucca

SEQ ID NO: 22942 - DNA, 26 bp, Artificial Sequence
  Synthetic
ctatgaggaugatgagaatggauggc

SEQ ID NO: 22943 - DNA, 22 bp, Artificial Sequence
  Synthetic
acagggtgucagtgagtcctua

SEQ ID NO: 22944 - DNA, 18 bp, Artificial Sequence
  Synthetic
cttcucccagccctucgg

SEQ ID NO: 22945 - DNA, 22 bp, Artificial Sequence
  Synthetic
tcctccacagcutctctuacct

SEQ ID NO: 22946 - DNA, 20 bp, Artificial Sequence
  Synthetic
cccgtagcucgagaguacaa

SEQ ID NO: 22947 - DNA, 19 bp, Artificial Sequence
  Synthetic
caggcccuctgttgccuac

SEQ ID NO: 22948 - DNA, 19 bp, Artificial Sequence
  Synthetic
gctctgcuggatcggcaug

SEQ ID NO: 22949 - DNA, 21 bp, Artificial Sequence
  Synthetic
cccccttagucaggtgagaug

SEQ ID NO: 22950 - DNA, 22 bp, Artificial Sequence
  Synthetic
ccccgactutgcagtcctuaat

SEQ ID NO: 22951 - DNA, 20 bp, Artificial Sequence
  Synthetic
tgtccttcucaggccctuca

SEQ ID NO: 22952 - DNA, 17 bp, Artificial Sequence
  Synthetic
ctgcgcagccugguaga

SEQ ID NO: 22953 - DNA, 19 bp, Artificial Sequence
  Synthetic
catggtuagggcatgugct

SEQ ID NO: 22954 - DNA, 18 bp, Artificial Sequence
  Synthetic
ccagccucaggtgcacug

SEQ ID NO: 22955 - DNA, 21 bp, Artificial Sequence
  Synthetic
tcctccccutcccaugagaat

SEQ ID NO: 22956 - DNA, 29 bp, Artificial Sequence
  Synthetic
caagagagtgttuttcctaaggtaatuga

SEQ ID NO: 22957 - DNA, 23 bp, Artificial Sequence
  Synthetic
cccaguttctctctucagacgaa

SEQ ID NO: 22958 - DNA, 20 bp, Artificial Sequence
  Synthetic
ggguggccatuaacacacaa

SEQ ID NO: 22959 - DNA, 21 bp, Artificial Sequence
  Synthetic
ccacctugcatgggtacucac

SEQ ID NO: 22960 - DNA, 21 bp, Artificial Sequence
  Synthetic
gggcaactuagtggtgtcgut

SEQ ID NO: 22961 - DNA, 18 bp, Artificial Sequence
  Synthetic
cutgtuccagcccaggga

SEQ ID NO: 22962 - DNA, 21 bp, Artificial Sequence
  Synthetic
catggccaucacgtttgtcuc

SEQ ID NO: 22963 - DNA, 22 bp, Artificial Sequence
  Synthetic
ggugggcaaggaagtctaugaa

SEQ ID NO: 22964 - DNA, 21 bp, Artificial Sequence
  Synthetic
gttcgacaguccgctacacua

SEQ ID NO: 22965 - DNA, 18 bp, Artificial Sequence
  Synthetic
ctgcgcagucttccucac

SEQ ID NO: 22966 - DNA, 22 bp, Artificial Sequence
  Synthetic
gcagauaggactggguaaggct

SEQ ID NO: 22967 - DNA, 24 bp, Artificial Sequence
  Synthetic
tgagtctgcaucatcctcctgaua

SEQ ID NO: 22968 - DNA, 22 bp, Artificial Sequence
  Synthetic
guccagguaaacaagcccagat

SEQ ID NO: 22969 - DNA, 25 bp, Artificial Sequence
  Synthetic
ttttggaaacuatgcacttgugcag

SEQ ID NO: 22970 - DNA, 21 bp, Artificial Sequence
  Synthetic
ggttcaacggcutctcacuca

SEQ ID NO: 22971 - DNA, 23 bp, Artificial Sequence
  Synthetic
gtgctgagggcucttaacuacac

SEQ ID NO: 22972 - DNA, 21 bp, Artificial Sequence
  Synthetic
ctggcuccgcttcaattugac

SEQ ID NO: 22973 - DNA, 20 bp, Artificial Sequence
  Synthetic
ggaaacgcuccctggctauc

SEQ ID NO: 22974 - DNA, 22 bp, Artificial Sequence
  Synthetic
ggtaggaggcagugaguaggaa

SEQ ID NO: 22975 - DNA, 27 bp, Artificial Sequence
  Synthetic
gaagaggaaguctcctuaacccaaaaa

SEQ ID NO: 22976 - DNA, 27 bp, Artificial Sequence
  Synthetic
gtaagtctccugatgcttcttuaaccc

SEQ ID NO: 22977 - DNA, 26 bp, Artificial Sequence
  Synthetic
acaaagaaagccagaugaagacauga

SEQ ID NO: 22978 - DNA, 24 bp, Artificial Sequence
  Synthetic
tgacagactttucacgagggacua

SEQ ID NO: 22979 - DNA, 21 bp, Artificial Sequence
  Synthetic
gtacucccagagcagcatcut

SEQ ID NO: 22980 - DNA, 27 bp, Artificial Sequence
  Synthetic
gacctgatccuatgcaatggagauaaa

SEQ ID NO: 22981 - DNA, 23 bp, Artificial Sequence
  Synthetic
accatgtuagaagagagcaugcc

SEQ ID NO: 22982 - DNA, 27 bp, Artificial Sequence
  Synthetic
ggagcagtctucaacttctttgtacua

SEQ ID NO: 22983 - DNA, 22 bp, Artificial Sequence
  Synthetic
gcaagatugcaaaggcagguat

SEQ ID NO: 22984 - DNA, 30 bp, Artificial Sequence
  Synthetic
agctacagaagcauacatctaaacacatut

SEQ ID NO: 22985 - DNA, 23 bp, Artificial Sequence
  Synthetic
gugcatauccggaggaaagaagt

SEQ ID NO: 22986 - DNA, 28 bp, Artificial Sequence
  Synthetic
ccauatgttgaatatcugcaacaagcaa

SEQ ID NO: 22987 - DNA, 26 bp, Artificial Sequence
  Synthetic
gaagcagugaagaaacgtctttucat

SEQ ID NO: 22988 - DNA, 29 bp, Artificial Sequence
  Synthetic
acgatuaauaggagaaaagagattgcuat

SEQ ID NO: 22989 - DNA, 22 bp, Artificial Sequence
  Synthetic
tgcaccatuggactccagttut

SEQ ID NO: 22990 - DNA, 28 bp, Artificial Sequence
  Synthetic
acattctgcacautcagtttctcttuct

SEQ ID NO: 22991 - DNA, 23 bp, Artificial Sequence
  Synthetic
tgttcuccagcagcacatcaaua

SEQ ID NO: 22992 - DNA, 24 bp, Artificial Sequence
  Synthetic
agtcaagctgugtcacttccuaga

SEQ ID NO: 22993 - DNA, 28 bp, Artificial Sequence
  Synthetic
tacaatccacucattcttttgtctucct

SEQ ID NO: 22994 - DNA, 21 bp, Artificial Sequence
  Synthetic
gtcccagugctggtgtttgua

SEQ ID NO: 22995 - DNA, 29 bp, Artificial Sequence
  Synthetic
gagattcgtuacggaaactatuacaggat

SEQ ID NO: 22996 - DNA, 18 bp, Artificial Sequence
  Synthetic
cctgtugcgctggaagug

SEQ ID NO: 22997 - DNA, 22 bp, Artificial Sequence
  Synthetic
gttttcccuccctucaggaact

SEQ ID NO: 22998 - DNA, 24 bp, Artificial Sequence
  Synthetic
ccagatgtgcugccaaaaggatua

SEQ ID NO: 22999 - DNA, 21 bp, Artificial Sequence
  Synthetic
gatgcuagtgccauagcccaa

SEQ ID NO: 23000 - DNA, 24 bp, Artificial Sequence
  Synthetic
gaatttucaaagaggccuccagua

SEQ ID NO: 23001 - DNA, 27 bp, Artificial Sequence
  Synthetic
aatgccttttcauttggtcatctuacg

SEQ ID NO: 23002 - DNA, 24 bp, Artificial Sequence
  Synthetic
tgctcagugtgacatcatucagac

SEQ ID NO: 23003 - DNA, 28 bp, Artificial Sequence
  Synthetic
ggctcttttgguttctatggattcauca

SEQ ID NO: 23004 - DNA, 26 bp, Artificial Sequence
  Synthetic
ctcataccugagcattgactgacuat

SEQ ID NO: 23005 - DNA, 24 bp, Artificial Sequence
  Synthetic
gcagtctcugctctttgttttugt

SEQ ID NO: 23006 - DNA, 21 bp, Artificial Sequence
  Synthetic
aggcacugagagggacaguag

SEQ ID NO: 23007 - DNA, 21 bp, Artificial Sequence
  Synthetic
ggtgcaggcuagtaucgcaag

SEQ ID NO: 23008 - DNA, 20 bp, Artificial Sequence
  Synthetic
ctgttugcgcccttcatguc

SEQ ID NO: 23009 - DNA, 23 bp, Artificial Sequence
  Synthetic
ttgactuacaaggtccacucagc

SEQ ID NO: 23010 - DNA, 23 bp, Artificial Sequence
  Synthetic
ggatagcaggucttcagatgugg

SEQ ID NO: 23011 - DNA, 22 bp, Artificial Sequence
  Synthetic
gctcatttgutcccactuccct

SEQ ID NO: 23012 - DNA, 22 bp, Artificial Sequence
  Synthetic
gatgttgatgauctgcgtggug

SEQ ID NO: 23013 - DNA, 21 bp, Artificial Sequence
  Synthetic
cccaagguagaatcccuggag

SEQ ID NO: 23014 - DNA, 23 bp, Artificial Sequence
  Synthetic
agtggaauaggagtgaggugagt

SEQ ID NO: 23015 - DNA, 21 bp, Artificial Sequence
  Synthetic
aaaacaaagagcugcgagcug

SEQ ID NO: 23016 - DNA, 21 bp, Artificial Sequence
  Synthetic
gcttatagugctcagcugcct

SEQ ID NO: 23017 - DNA, 21 bp, Artificial Sequence
  Synthetic
cagaccagcuttcctgagugg

SEQ ID NO: 23018 - DNA, 21 bp, Artificial Sequence
  Synthetic
cttgacctuggcaccctcaua

SEQ ID NO: 23019 - DNA, 23 bp, Artificial Sequence
  Synthetic
agtttcuggaagtggagtuggac

SEQ ID NO: 23020 - DNA, 19 bp, Artificial Sequence
  Synthetic
tgcuggcagaggtgctuag

SEQ ID NO: 23021 - DNA, 17 bp, Artificial Sequence
  Synthetic
ccucacaggcugagcgt

SEQ ID NO: 23022 - DNA, 20 bp, Artificial Sequence
  Synthetic
cctggcgautcaggauggac

SEQ ID NO: 23023 - DNA, 21 bp, Artificial Sequence
  Synthetic
ctuccgcaccaagguacaaga

SEQ ID NO: 23024 - DNA, 21 bp, Artificial Sequence
  Synthetic
ccagatgcgugctcctttuct

SEQ ID NO: 23025 - DNA, 19 bp, Artificial Sequence
  Synthetic
gcucatgcccugacggaaa

SEQ ID NO: 23026 - DNA, 17 bp, Artificial Sequence
  Synthetic
gcagccgutccagcuca

SEQ ID NO: 23027 - DNA, 20 bp, Artificial Sequence
  Synthetic
gttagucaaggagccugcga

SEQ ID NO: 23028 - DNA, 20 bp, Artificial Sequence
  Synthetic
cgggcctuctcacattccuc

SEQ ID NO: 23029 - DNA, 21 bp, Artificial Sequence
  Synthetic
tgtgagcagcucgucaaagaa

SEQ ID NO: 23030 - DNA, 21 bp, Artificial Sequence
  Synthetic
cctgcgcutctcctctucaag

SEQ ID NO: 23031 - DNA, 21 bp, Artificial Sequence
  Synthetic
gttgcagagcuagagtugcag

SEQ ID NO: 23032 - DNA, 20 bp, Artificial Sequence
  Synthetic
gcctagtugcctcctgctuc

SEQ ID NO: 23033 - DNA, 20 bp, Artificial Sequence
  Synthetic
gcuagcacagacccuccaac

SEQ ID NO: 23034 - DNA, 22 bp, Artificial Sequence
  Synthetic
tcagtcuccagcatctcuaccc

SEQ ID NO: 23035 - DNA, 23 bp, Artificial Sequence
  Synthetic
ttcctccattuccagaggaguct

SEQ ID NO: 23036 - DNA, 21 bp, Artificial Sequence
  Synthetic
tgcttctcuagccactccuga

SEQ ID NO: 23037 - DNA, 20 bp, Artificial Sequence
  Synthetic
agcgttgacuctgggtgaug

SEQ ID NO: 23038 - DNA, 22 bp, Artificial Sequence
  Synthetic
cttctcatucagcagggcuagg

SEQ ID NO: 23039 - DNA, 22 bp, Artificial Sequence
  Synthetic
ccccttgugcacatagttcugt

SEQ ID NO: 23040 - DNA, 21 bp, Artificial Sequence
  Synthetic
ggaagcgaauctccctctugg

SEQ ID NO: 23041 - DNA, 27 bp, Artificial Sequence
  Synthetic
agttctcaaautgcataaaggugcaaa

SEQ ID NO: 23042 - DNA, 23 bp, Artificial Sequence
  Synthetic
gctgaggaagcagcutcttcaua

SEQ ID NO: 23043 - DNA, 28 bp, Artificial Sequence
  Synthetic
ctctggtcctaauacttgctcttttuct

SEQ ID NO: 23044 - DNA, 31 bp, Artificial Sequence
  Synthetic
tcatattcctuccaaatcaaacacatuacca

SEQ ID NO: 23045 - DNA, 25 bp, Artificial Sequence
  Synthetic
cctgtaaugacgcaaccaacctuaa

SEQ ID NO: 23046 - DNA, 29 bp, Artificial Sequence
  Synthetic
aactgttagtctaucaggagcttttucaa

SEQ ID NO: 23047 - DNA, 26 bp, Artificial Sequence
  Synthetic
atgtaaattggagucaaccaggugaa

SEQ ID NO: 23048 - DNA, 21 bp, Artificial Sequence
  Synthetic
gctaggugggagttuggcaac

SEQ ID NO: 23049 - DNA, 25 bp, Artificial Sequence
  Synthetic
ggagaaaagguaaagaccuccttua

SEQ ID NO: 23050 - DNA, 29 bp, Artificial Sequence
  Synthetic
ggtacttuaccaacaaacatttcaugagt

SEQ ID NO: 23051 - DNA, 23 bp, Artificial Sequence
  Synthetic
tgtagatgcugttgatgaugcca

SEQ ID NO: 23052 - DNA, 29 bp, Artificial Sequence
  Synthetic
caaaggtaacctuaacttctactccuacc

SEQ ID NO: 23053 - DNA, 26 bp, Artificial Sequence
  Synthetic
gccuaaaagaactugcaaagaaacct

SEQ ID NO: 23054 - DNA, 22 bp, Artificial Sequence
  Synthetic
tcactctggcuttttggccuac

SEQ ID NO: 23055 - DNA, 28 bp, Artificial Sequence
  Synthetic
accagtggccuaattatcatgaaatuct

SEQ ID NO: 23056 - DNA, 28 bp, Artificial Sequence
  Synthetic
tttagccagcuttaagtaacaacucagt

SEQ ID NO: 23057 - DNA, 25 bp, Artificial Sequence
  Synthetic
actgttugcagcatacaaugaagga

SEQ ID NO: 23058 - DNA, 29 bp, Artificial Sequence
  Synthetic
tggtacagttttuaggagtttttctgugt

SEQ ID NO: 23059 - DNA, 27 bp, Artificial Sequence
  Synthetic
gcaacttggtuctctgttttaguagaa

SEQ ID NO: 23060 - DNA, 26 bp, Artificial Sequence
  Synthetic
gcttacctcatutccatacaccauca

SEQ ID NO: 23061 - DNA, 31 bp, Artificial Sequence
  Synthetic
ttttattgcagacutaattcagugcacaaat

SEQ ID NO: 23062 - DNA, 27 bp, Artificial Sequence
  Synthetic
ggtttacagguctacaattctagcugt

SEQ ID NO: 23063 - DNA, 25 bp, Artificial Sequence
  Synthetic
cactctctctguggaaggctttuag

SEQ ID NO: 23064 - DNA, 20 bp, Artificial Sequence
  Synthetic
gcagtccugcctttgtguga

SEQ ID NO: 23065 - DNA, 21 bp, Artificial Sequence
  Synthetic
gtatgtgccccaugaagcugt

SEQ ID NO: 23066 - DNA, 25 bp, Artificial Sequence
  Synthetic
acatacactcucacactatcccuga

SEQ ID NO: 23067 - DNA, 20 bp, Artificial Sequence
  Synthetic
cgtgugaaggagccagugaa

SEQ ID NO: 23068 - DNA, 24 bp, Artificial Sequence
  Synthetic
cagcatttccucttccctgtttuc

SEQ ID NO: 23069 - DNA, 18 bp, Artificial Sequence
  Synthetic
gggugggaagaccccuca

SEQ ID NO: 23070 - DNA, 22 bp, Artificial Sequence
  Synthetic
ggttgtcagugttttgctccug

SEQ ID NO: 23071 - DNA, 27 bp, Artificial Sequence
  Synthetic
agcaaacaaacugagcagacaactaua

SEQ ID NO: 23072 - DNA, 29 bp, Artificial Sequence
  Synthetic
aaccttcctgtuaacaaatgaaacaugac

SEQ ID NO: 23073 - DNA, 27 bp, Artificial Sequence
  Synthetic
gtgaatgatacacaugcacttccttut

SEQ ID NO: 23074 - DNA, 28 bp, Artificial Sequence
  Synthetic
gaacaaauaaccacgaaaauacagcaga

SEQ ID NO: 23075 - DNA, 28 bp, Artificial Sequence
  Synthetic
atttctaaaaagautcctcagcugacct

SEQ ID NO: 23076 - DNA, 26 bp, Artificial Sequence
  Synthetic
gtttgatuttctgcatcugacaggag

SEQ ID NO: 23077 - DNA, 29 bp, Artificial Sequence
  Synthetic
ggaagctgagaugctattaacactgauaa

SEQ ID NO: 23078 - DNA, 23 bp, Artificial Sequence
  Synthetic
tgattggaagccacautcctcug

SEQ ID NO: 23079 - DNA, 22 bp, Artificial Sequence
  Synthetic
tcattgucctgggcugagaaag

SEQ ID NO: 23080 - DNA, 23 bp, Artificial Sequence
  Synthetic
tcaggcctaagautaacccccut

SEQ ID NO: 23081 - DNA, 24 bp, Artificial Sequence
  Synthetic
ccatccccucctttcctttcauag

SEQ ID NO: 23082 - DNA, 21 bp, Artificial Sequence
  Synthetic
aacagugagaagcgctgugat

SEQ ID NO: 23083 - DNA, 21 bp, Artificial Sequence
  Synthetic
gagggacgcaugcctttcuat

SEQ ID NO: 23084 - DNA, 20 bp, Artificial Sequence
  Synthetic
gggtcaacutgcagcagtuc

SEQ ID NO: 23085 - DNA, 29 bp, Artificial Sequence
  Synthetic
tgtcccctcuaggtatttatttcucaaca

SEQ ID NO: 23086 - DNA, 23 bp, Artificial Sequence
  Synthetic
attuggcccaaagacctcuagaa

SEQ ID NO: 23087 - DNA, 20 bp, Artificial Sequence
  Synthetic
tggtgguagtggaugacgga

SEQ ID NO: 23088 - DNA, 21 bp, Artificial Sequence
  Synthetic
caggcuggacaaagagguagt

SEQ ID NO: 23089 - DNA, 20 bp, Artificial Sequence
  Synthetic
ggaaagccuggaaggugacg

SEQ ID NO: 23090 - DNA, 23 bp, Artificial Sequence
  Synthetic
cacucataattggucagggcaga

SEQ ID NO: 23091 - DNA, 26 bp, Artificial Sequence
  Synthetic
tgaattggtcaugtcacaagcaaaug

SEQ ID NO: 23092 - DNA, 23 bp, Artificial Sequence
  Synthetic
gguctggaacaaugcccaagaaa

SEQ ID NO: 23093 - DNA, 23 bp, Artificial Sequence
  Synthetic
cttcggcaggutacaggagtuac

SEQ ID NO: 23094 - DNA, 27 bp, Artificial Sequence
  Synthetic
tttcctttaugaaggttcacagtucca

SEQ ID NO: 23095 - DNA, 27 bp, Artificial Sequence
  Synthetic
gaatctgacagugatgaatcaguacca

SEQ ID NO: 23096 - DNA, 20 bp, Artificial Sequence
  Synthetic
atgtugacgaggaccgacug

SEQ ID NO: 23097 - DNA, 24 bp, Artificial Sequence
  Synthetic
actctgccucctaaacagcaatut

SEQ ID NO: 23098 - DNA, 26 bp, Artificial Sequence
  Synthetic
ggtccttuagaaccattcttagcuga

SEQ ID NO: 23099 - DNA, 24 bp, Artificial Sequence
  Synthetic
gctctgaaagaaguacttgtugcc

SEQ ID NO: 23100 - DNA, 22 bp, Artificial Sequence
  Synthetic
gtaaguggaaggagtcacugct

SEQ ID NO: 23101 - DNA, 26 bp, Artificial Sequence
  Synthetic
tctcuaaaaagacccuagcaactcua

SEQ ID NO: 23102 - DNA, 18 bp, Artificial Sequence
  Synthetic
ggagggugggatccccut

SEQ ID NO: 23103 - DNA, 21 bp, Artificial Sequence
  Synthetic
agcaacuccagucaccagaga

SEQ ID NO: 23104 - DNA, 21 bp, Artificial Sequence
  Synthetic
gggtaccugggcttcctttug

SEQ ID NO: 23105 - DNA, 22 bp, Artificial Sequence
  Synthetic
ctccctcccuaaaaggagguct

SEQ ID NO: 23106 - DNA, 17 bp, Artificial Sequence
  Synthetic
ggttgtgggugccccut

SEQ ID NO: 23107 - DNA, 17 bp, Artificial Sequence
  Synthetic
agcugcgactccuccct

SEQ ID NO: 23108 - DNA, 20 bp, Artificial Sequence
  Synthetic
gggauggagtagcuggacct

SEQ ID NO: 23109 - DNA, 18 bp, Artificial Sequence
  Synthetic
gcutccccaucccccaaa

SEQ ID NO: 23110 - DNA, 21 bp, Artificial Sequence
  Synthetic
gtcgtggcuggtgagtcttua

SEQ ID NO: 23111 - DNA, 22 bp, Artificial Sequence
  Synthetic
gggttagugtgtctccucagac

SEQ ID NO: 23112 - DNA, 28 bp, Artificial Sequence
  Synthetic
tgtaggaaccaaggguaaagtaguaaga

SEQ ID NO: 23113 - DNA, 24 bp, Artificial Sequence
  Synthetic
catttccttuggaaagtgcugacc

SEQ ID NO: 23114 - DNA, 22 bp, Artificial Sequence
  Synthetic
gctgccuggactaacggtaaua

SEQ ID NO: 23115 - DNA, 24 bp, Artificial Sequence
  Synthetic
cctcaaaaauctccccagtucagt

SEQ ID NO: 23116 - DNA, 22 bp, Artificial Sequence
  Synthetic
ggcattugggccacuaaaggat

SEQ ID NO: 23117 - DNA, 23 bp, Artificial Sequence
  Synthetic
tgacaaagguccctctaccauct

SEQ ID NO: 23118 - DNA, 22 bp, Artificial Sequence
  Synthetic
ccgcaguctttugagaagaggt

SEQ ID NO: 23119 - DNA, 21 bp, Artificial Sequence
  Synthetic
tcgctucccctcaagucaaag

SEQ ID NO: 23120 - DNA, 22 bp, Artificial Sequence
  Synthetic
agcuaagggagcugaagaggaa

SEQ ID NO: 23121 - DNA, 22 bp, Artificial Sequence
  Synthetic
ctctggaacagcccuaccttug

SEQ ID NO: 23122 - DNA, 22 bp, Artificial Sequence
  Synthetic
gcaaggaggguagggaaaccua

SEQ ID NO: 23123 - DNA, 27 bp, Artificial Sequence
  Synthetic
ggcaagtgaatguatcccaatcaatut

SEQ ID NO: 23124 - DNA, 22 bp, Artificial Sequence
  Synthetic
ggagaaatutgccacttuggct

SEQ ID NO: 23125 - DNA, 24 bp, Artificial Sequence
  Synthetic
cagcagactutgtggtcacuaaaa

SEQ ID NO: 23126 - DNA, 31 bp, Artificial Sequence
  Synthetic
tgattctttgacagaucttgtggaacatuat

SEQ ID NO: 23127 - DNA, 29 bp, Artificial Sequence
  Synthetic
ctgtctacctcugtatgtttgcaaaatuc

SEQ ID NO: 23128 - DNA, 25 bp, Artificial Sequence
  Synthetic
caaacutctcuacagccgaaaagag

SEQ ID NO: 23129 - DNA, 24 bp, Artificial Sequence
  Synthetic
aggtgcuaggaatcaaaatcucca

SEQ ID NO: 23130 - DNA, 26 bp, Artificial Sequence
  Synthetic
ggtggttatuaagcaagactugaaca

SEQ ID NO: 23131 - DNA, 20 bp, Artificial Sequence
  Synthetic
cgttccuaacacgcaugacg

SEQ ID NO: 23132 - DNA, 23 bp, Artificial Sequence
  Synthetic
ttttgagtcugaaacccccauga

SEQ ID NO: 23133 - DNA, 23 bp, Artificial Sequence
  Synthetic
aaacagaaacugtcgcttctugc

SEQ ID NO: 23134 - DNA, 22 bp, Artificial Sequence
  Synthetic
gtaagctuaaacagcgtgguct

SEQ ID NO: 23135 - DNA, 26 bp, Artificial Sequence
  Synthetic
catctgaaacutttctgctgtugcat

SEQ ID NO: 23136 - DNA, 17 bp, Artificial Sequence
  Synthetic
cgcugcccacggagaug

SEQ ID NO: 23137 - DNA, 19 bp, Artificial Sequence
  Synthetic
ccggucctggugaaagacg

SEQ ID NO: 23138 - DNA, 18 bp, Artificial Sequence
  Synthetic
gccttcuggacggctcuc

SEQ ID NO: 23139 - DNA, 21 bp, Artificial Sequence
  Synthetic
guaccaggacaccaugaggaa

SEQ ID NO: 23140 - DNA, 18 bp, Artificial Sequence
  Synthetic
gccctccaugcccactut

SEQ ID NO: 23141 - DNA, 20 bp, Artificial Sequence
  Synthetic
ccttcccccuctccctttut

SEQ ID NO: 23142 - DNA, 23 bp, Artificial Sequence
  Synthetic
tgttttctgucgctgttcaguca

SEQ ID NO: 23143 - DNA, 31 bp, Artificial Sequence
  Synthetic
actgaaggttuaagaagagttacagaaaugg

SEQ ID NO: 23144 - DNA, 25 bp, Artificial Sequence
  Synthetic
catctgtcugccatggtaagaaaug

SEQ ID NO: 23145 - DNA, 25 bp, Artificial Sequence
  Synthetic
tgacatgagggugaagtgtacuact

SEQ ID NO: 23146 - DNA, 24 bp, Artificial Sequence
  Synthetic
agctgctcauccagttttactugt

SEQ ID NO: 23147 - DNA, 29 bp, Artificial Sequence
  Synthetic
acaactcaagtguttttgtttctgttuca

SEQ ID NO: 23148 - DNA, 24 bp, Artificial Sequence
  Synthetic
catcagatgauccaacttguccca

SEQ ID NO: 23149 - DNA, 24 bp, Artificial Sequence
  Synthetic
ttgggtaaacaugacacctgtcuc

SEQ ID NO: 23150 - DNA, 30 bp, Artificial Sequence
  Synthetic
tggtgtgtattguatacgatgatgguaaag

SEQ ID NO: 23151 - DNA, 25 bp, Artificial Sequence
  Synthetic
cgatcuctctgactuccagcaaaaa

SEQ ID NO: 23152 - DNA, 22 bp, Artificial Sequence
  Synthetic
aaaaagctgucaggtggcuaca

SEQ ID NO: 23153 - DNA, 27 bp, Artificial Sequence
  Synthetic
gaaaugctaugucagaaggaaaaagag

SEQ ID NO: 23154 - DNA, 30 bp, Artificial Sequence
  Synthetic
aattttcctgtugaagcttttcagatucat

SEQ ID NO: 23155 - DNA, 27 bp, Artificial Sequence
  Synthetic
tggcattgaauactcatcctttuggaa

SEQ ID NO: 23156 - DNA, 21 bp, Artificial Sequence
  Synthetic
gctcttccugaaggcagucat

SEQ ID NO: 23157 - DNA, 25 bp, Artificial Sequence
  Synthetic
actgtgaucgagcttcugaaaagaa

SEQ ID NO: 23158 - DNA, 26 bp, Artificial Sequence
  Synthetic
tgtttgtuccgcagtattuccaaaaa

SEQ ID NO: 23159 - DNA, 22 bp, Artificial Sequence
  Synthetic
cttaagccugcagagagcucat

SEQ ID NO: 23160 - DNA, 23 bp, Artificial Sequence
  Synthetic
gacatcatttccugcctttccug

SEQ ID NO: 23161 - DNA, 25 bp, Artificial Sequence
  Synthetic
tgtctgaccagauacttgagcugaa

SEQ ID NO: 23162 - DNA, 25 bp, Artificial Sequence
  Synthetic
tttcacacctcucagtgactttcug

SEQ ID NO: 23163 - DNA, 24 bp, Artificial Sequence
  Synthetic
agtgcaugggaaaatggttttugt

SEQ ID NO: 23164 - DNA, 25 bp, Artificial Sequence
  Synthetic
tcaagcttcacutgcagttgtttut

SEQ ID NO: 23165 - DNA, 24 bp, Artificial Sequence
  Synthetic
aacaugaagcaaaggcaugagaac

SEQ ID NO: 23166 - DNA, 30 bp, Artificial Sequence
  Synthetic
gaaccacgttuctaaaaacaagaguaaagg

SEQ ID NO: 23167 - DNA, 22 bp, Artificial Sequence
  Synthetic
aauatcgugcacaaggcagagt

SEQ ID NO: 23168 - DNA, 30 bp, Artificial Sequence
  Synthetic
gtttaccttttcugctaacacatttuccaa

SEQ ID NO: 23169 - DNA, 25 bp, Artificial Sequence
  Synthetic
tccccauacttgtucaggaaaacag

SEQ ID NO: 23170 - DNA, 22 bp, Artificial Sequence
  Synthetic
ccttgtccagauctgaccguag

SEQ ID NO: 23171 - DNA, 23 bp, Artificial Sequence
  Synthetic
tgcutctgtattgaugcaagcca

SEQ ID NO: 23172 - DNA, 25 bp, Artificial Sequence
  Synthetic
ggtgtccaguattctcuccacagat

SEQ ID NO: 23173 - DNA, 23 bp, Artificial Sequence
  Synthetic
cctggaaucaagctaggctuact

SEQ ID NO: 23174 - DNA, 20 bp, Artificial Sequence
  Synthetic
ggtgaccaucacgggtgauc

SEQ ID NO: 23175 - DNA, 23 bp, Artificial Sequence
  Synthetic
tcctttggaaaccgugcaacaua

SEQ ID NO: 23176 - DNA, 26 bp, Artificial Sequence
  Synthetic
gcagagaagagaagugagtgacctua

SEQ ID NO: 23177 - DNA, 29 bp, Artificial Sequence
  Synthetic
tgcattcttagagcugtggaaattactut

SEQ ID NO: 23178 - DNA, 25 bp, Artificial Sequence
  Synthetic
gattttccgaugaaagccugaaacc

SEQ ID NO: 23179 - DNA, 22 bp, Artificial Sequence
  Synthetic
gactggttcugagagccttgut

SEQ ID NO: 23180 - DNA, 29 bp, Artificial Sequence
  Synthetic
tgattctucaaaacaggcttagaaatugg

SEQ ID NO: 23181 - DNA, 22 bp, Artificial Sequence
  Synthetic
gagattgcaggguctggtgtua

SEQ ID NO: 23182 - DNA, 23 bp, Artificial Sequence
  Synthetic
tccugcaaagggucacatattut

SEQ ID NO: 23183 - DNA, 21 bp, Artificial Sequence
  Synthetic
ggaggctuccgaggaacaaug

SEQ ID NO: 23184 - DNA, 21 bp, Artificial Sequence
  Synthetic
aaaaauaggccgaggccauga

SEQ ID NO: 23185 - DNA, 22 bp, Artificial Sequence
  Synthetic
ggagaatugggaagccagtgut

SEQ ID NO: 23186 - DNA, 25 bp, Artificial Sequence
  Synthetic
gggcaatgguacggatcttauaaaa

SEQ ID NO: 23187 - DNA, 26 bp, Artificial Sequence
  Synthetic
gcctgatttuccttcgattttctuac

SEQ ID NO: 23188 - DNA, 23 bp, Artificial Sequence
  Synthetic
accugtgaagaaguggacagaga

SEQ ID NO: 23189 - DNA, 22 bp, Artificial Sequence
  Synthetic
tgaagtgcuagaacccaugcag

SEQ ID NO: 23190 - DNA, 21 bp, Artificial Sequence
  Synthetic
cgtgggcccaguaaacaatua

SEQ ID NO: 23191 - DNA, 26 bp, Artificial Sequence
  Synthetic
ggatgttatcaagaguggctgtagug

SEQ ID NO: 23192 - DNA, 28 bp, Artificial Sequence
  Synthetic
caagcctcuaaaagtcaactatcucaga

SEQ ID NO: 23193 - DNA, 28 bp, Artificial Sequence
  Synthetic
gcccatttccautaagtgaaaacuaacc

SEQ ID NO: 23194 - DNA, 24 bp, Artificial Sequence
  Synthetic
ccaactgcccagauatcagactug

SEQ ID NO: 23195 - DNA, 30 bp, Artificial Sequence
  Synthetic
tgttaacatagtuacctcagaaaagaagut

SEQ ID NO: 23196 - DNA, 28 bp, Artificial Sequence
  Synthetic
tgagtcuaagaaagtcttgcuggaaaag

SEQ ID NO: 23197 - DNA, 24 bp, Artificial Sequence
  Synthetic
cgtcgtgaugccttgaatgagaut

SEQ ID NO: 23198 - DNA, 19 bp, Artificial Sequence
  Synthetic
cgctcccaaaguccgagut

SEQ ID NO: 23199 - DNA, 18 bp, Artificial Sequence
  Synthetic
gttgcugggcugacggat

SEQ ID NO: 23200 - DNA, 21 bp, Artificial Sequence
  Synthetic
ctttgcagcaguccatugacc

SEQ ID NO: 23201 - DNA, 25 bp, Artificial Sequence
  Synthetic
tttctcacttgcugtgtcttctuca

SEQ ID NO: 23202 - DNA, 22 bp, Artificial Sequence
  Synthetic
cgauggacctcugggagaaaga

SEQ ID NO: 23203 - DNA, 22 bp, Artificial Sequence
  Synthetic
cctaugacccccacccagauag

SEQ ID NO: 23204 - DNA, 27 bp, Artificial Sequence
  Synthetic
agatgtttuccccacctgttaatagug

SEQ ID NO: 23205 - DNA, 29 bp, Artificial Sequence
  Synthetic
tutctactaaaatgtaucacaccaccaaa

SEQ ID NO: 23206 - DNA, 22 bp, Artificial Sequence
  Synthetic
aggttugggtcagtaucagcag

SEQ ID NO: 23207 - DNA, 27 bp, Artificial Sequence
  Synthetic
aatgaatagtatgcugtcccaggttut

SEQ ID NO: 23208 - DNA, 28 bp, Artificial Sequence
  Synthetic
aattttaagguatatgcaccauccccaa

SEQ ID NO: 23209 - DNA, 27 bp, Artificial Sequence
  Synthetic
gcagtagtattuggcaattgtttggua

SEQ ID NO: 23210 - DNA, 19 bp, Artificial Sequence
  Synthetic
agctttcaucgcggcagua

SEQ ID NO: 23211 - DNA, 21 bp, Artificial Sequence
  Synthetic
gggtcacugaaaguccacaaa

SEQ ID NO: 23212 - DNA, 26 bp, Artificial Sequence
  Synthetic
aatctaacagaugccagcaauaacca

SEQ ID NO: 23213 - DNA, 20 bp, Artificial Sequence
  Synthetic
aggcaaacuggtggaagguc

SEQ ID NO: 23214 - DNA, 30 bp, Artificial Sequence
  Synthetic
atgagtctcgucttttattttatcttucct

SEQ ID NO: 23215 - DNA, 26 bp, Artificial Sequence
  Synthetic
ggaggattcaucatctgacttcaugt

SEQ ID NO: 23216 - DNA, 28 bp, Artificial Sequence
  Synthetic
ccccaaacaaaacuccttattcttcauc

SEQ ID NO: 23217 - DNA, 24 bp, Artificial Sequence
  Synthetic
aacagaaatguctgcccatcugaa

SEQ ID NO: 23218 - DNA, 18 bp, Artificial Sequence
  Synthetic
ggtccauggagccugcac

SEQ ID NO: 23219 - DNA, 22 bp, Artificial Sequence
  Synthetic
agcttaaccccaucatccccua

SEQ ID NO: 23220 - DNA, 21 bp, Artificial Sequence
  Synthetic
cgacttctggugctttgagug

SEQ ID NO: 23221 - DNA, 24 bp, Artificial Sequence
  Synthetic
gagcagaagaugttgttggtctug

SEQ ID NO: 23222 - DNA, 17 bp, Artificial Sequence
  Synthetic
cggtucacgcgcagaug

SEQ ID NO: 23223 - DNA, 18 bp, Artificial Sequence
  Synthetic
ctcgtagucgcgctggua

SEQ ID NO: 23224 - DNA, 21 bp, Artificial Sequence
  Synthetic
cccaggucaggatgtccctua

SEQ ID NO: 23225 - DNA, 23 bp, Artificial Sequence
  Synthetic
ttcagaccucaaacccatcucac

SEQ ID NO: 23226 - DNA, 24 bp, Artificial Sequence
  Synthetic
gtcatcaagauggagtcugaggag

SEQ ID NO: 23227 - DNA, 19 bp, Artificial Sequence
  Synthetic
ggutgctgtugggcaggaa

SEQ ID NO: 23228 - DNA, 23 bp, Artificial Sequence
  Synthetic
gggaatttuccagtgaggcatug

SEQ ID NO: 23229 - DNA, 26 bp, Artificial Sequence
  Synthetic
tcutggacatuccagaaaagagacag

SEQ ID NO: 23230 - DNA, 20 bp, Artificial Sequence
  Synthetic
gctugcaccctcaatugcat

SEQ ID NO: 23231 - DNA, 18 bp, Artificial Sequence
  Synthetic
gctgaugccccttugcag

SEQ ID NO: 23232 - DNA, 22 bp, Artificial Sequence
  Synthetic
ctctcaaguccaagtgcctcug

SEQ ID NO: 23233 - DNA, 22 bp, Artificial Sequence
  Synthetic
tgttggcugcaaggtuacaaga

SEQ ID NO: 23234 - DNA, 20 bp, Artificial Sequence
  Synthetic
ggacgagaaccutgcugacc

SEQ ID NO: 23235 - DNA, 25 bp, Artificial Sequence
  Synthetic
gcacttctutttgggacucagagac

SEQ ID NO: 23236 - DNA, 24 bp, Artificial Sequence
  Synthetic
ccttctucagcatctacuccaagg

SEQ ID NO: 23237 - DNA, 22 bp, Artificial Sequence
  Synthetic
cacagccugttaatgtccucca

SEQ ID NO: 23238 - DNA, 19 bp, Artificial Sequence
  Synthetic
tggcccuacacaacgugag

SEQ ID NO: 23239 - DNA, 22 bp, Artificial Sequence
  Synthetic
ccutcaaagtaggugcccagag

SEQ ID NO: 23240 - DNA, 22 bp, Artificial Sequence
  Synthetic
aggauggaaggagttgugaggt

SEQ ID NO: 23241 - DNA, 27 bp, Artificial Sequence
  Synthetic
agatctacaaaaucctccatgcttugg

SEQ ID NO: 23242 - DNA, 23 bp, Artificial Sequence
  Synthetic
cgaagctccauacatcactcuct

SEQ ID NO: 23243 - DNA, 25 bp, Artificial Sequence
  Synthetic
agataacactcautctggccatcug

SEQ ID NO: 23244 - DNA, 19 bp, Artificial Sequence
  Synthetic
caagggtucggtgggacug

SEQ ID NO: 23245 - DNA, 23 bp, Artificial Sequence
  Synthetic
cagcatgagcacautgtcaagut

SEQ ID NO: 23246 - DNA, 17 bp, Artificial Sequence
  Synthetic
gggcacuggtggcucat

SEQ ID NO: 23247 - DNA, 21 bp, Artificial Sequence
  Synthetic
gcaaaggacgucatggcttut

SEQ ID NO: 23248 - DNA, 21 bp, Artificial Sequence
  Synthetic
ccccaugacgccctugaaaat

SEQ ID NO: 23249 - DNA, 24 bp, Artificial Sequence
  Synthetic
ctctctgttuctggttccucacag

SEQ ID NO: 23250 - DNA, 20 bp, Artificial Sequence
  Synthetic
gaucttggacucccgcagag

SEQ ID NO: 23251 - DNA, 19 bp, Artificial Sequence
  Synthetic
gcaggcutctccctugaca

SEQ ID NO: 23252 - DNA, 21 bp, Artificial Sequence
  Synthetic
tgauccagagccatugcaagt

SEQ ID NO: 23253 - DNA, 23 bp, Artificial Sequence
  Synthetic
agagcttccuttgggtaguaagt

SEQ ID NO: 23254 - DNA, 21 bp, Artificial Sequence
  Synthetic
cccaagaguacctgccatgug

SEQ ID NO: 23255 - DNA, 27 bp, Artificial Sequence
  Synthetic
tgctgatcctcuttttctctctgtcua

SEQ ID NO: 23256 - DNA, 23 bp, Artificial Sequence
  Synthetic
cagtcttgcugcagacacaatut

SEQ ID NO: 23257 - DNA, 22 bp, Artificial Sequence
  Synthetic
ttagaagcagcgaucggagaug

SEQ ID NO: 23258 - DNA, 18 bp, Artificial Sequence
  Synthetic
ggaugcgagccaggtuct

SEQ ID NO: 23259 - DNA, 18 bp, Artificial Sequence
  Synthetic
ccgcgagagcutcgacug

SEQ ID NO: 23260 - DNA, 17 bp, Artificial Sequence
  Synthetic
gcgugcgaacggaaugt

SEQ ID NO: 23261 - DNA, 17 bp, Artificial Sequence
  Synthetic
gguggcagccgacaaug

SEQ ID NO: 23262 - DNA, 27 bp, Artificial Sequence
  Synthetic
gcataccttgucaacttcgatgttcut

SEQ ID NO: 23263 - DNA, 27 bp, Artificial Sequence
  Synthetic
gcagtccatauagacagaatagtucac

SEQ ID NO: 23264 - DNA, 25 bp, Artificial Sequence
  Synthetic
gcuaacattgaccuggaaaagagca

SEQ ID NO: 23265 - DNA, 20 bp, Artificial Sequence
  Synthetic
ggttgcgccutcctccauag

SEQ ID NO: 23266 - DNA, 23 bp, Artificial Sequence
  Synthetic
gctgaagccugttcttggtctut

SEQ ID NO: 23267 - DNA, 21 bp, Artificial Sequence
  Synthetic
cttgtagcuctccgacucgaa

SEQ ID NO: 23268 - DNA, 17 bp, Artificial Sequence
  Synthetic
caggcugttccgcucct

SEQ ID NO: 23269 - DNA, 18 bp, Artificial Sequence
  Synthetic
ggtgagugtccugccaca

SEQ ID NO: 23270 - DNA, 24 bp, Artificial Sequence
  Synthetic
cauctttttguccagccagcaaat

SEQ ID NO: 23271 - DNA, 21 bp, Artificial Sequence
  Synthetic
ctgugcagcagcaatctugac

SEQ ID NO: 23272 - DNA, 21 bp, Artificial Sequence
  Synthetic
gtggucccagccagtcatuac

SEQ ID NO: 23273 - DNA, 30 bp, Artificial Sequence
  Synthetic
gttggaagaatgugatcagcttatttatut

SEQ ID NO: 23274 - DNA, 21 bp, Artificial Sequence
  Synthetic
cagaaagggucccactgcuac

SEQ ID NO: 23275 - DNA, 24 bp, Artificial Sequence
  Synthetic
gttactcctcacaucaccccatut

SEQ ID NO: 23276 - DNA, 27 bp, Artificial Sequence
  Synthetic
catccagagctutccaaagagaaacua

SEQ ID NO: 23277 - DNA, 21 bp, Artificial Sequence
  Synthetic
actcgagugccacttuaacag

SEQ ID NO: 23278 - DNA, 21 bp, Artificial Sequence
  Synthetic
gggtggtaugtggttttgcug

SEQ ID NO: 23279 - DNA, 19 bp, Artificial Sequence
  Synthetic
tggcccucaaggctccuat

SEQ ID NO: 23280 - DNA, 22 bp, Artificial Sequence
  Synthetic
tcaaagggcuccactggtttut

SEQ ID NO: 23281 - DNA, 21 bp, Artificial Sequence
  Synthetic
tgatgcttucacggctccaut

SEQ ID NO: 23282 - DNA, 22 bp, Artificial Sequence
  Synthetic
ggcaacugccttccuagacaag

SEQ ID NO: 23283 - DNA, 24 bp, Artificial Sequence
  Synthetic
ccaatgaggaaacugaccaaagug

SEQ ID NO: 23284 - DNA, 30 bp, Artificial Sequence
  Synthetic
gttgacttagaauctcactttccugaagat

SEQ ID NO: 23285 - DNA, 30 bp, Artificial Sequence
  Synthetic
agaggcaaatattucatgttctctaaauga

SEQ ID NO: 23286 - DNA, 23 bp, Artificial Sequence
  Synthetic
gccctggugaaattaggtctuct

SEQ ID NO: 23287 - DNA, 30 bp, Artificial Sequence
  Synthetic
actgaaataagaacucaccttttaagtcut

SEQ ID NO: 23288 - DNA, 24 bp, Artificial Sequence
  Synthetic
ccatctccagggutaaaggacuca

SEQ ID NO: 23289 - DNA, 32 bp, Artificial Sequence
  Synthetic
cctcctcagaaccuaaaaataaaatatgtgut

SEQ ID NO: 23290 - DNA, 24 bp, Artificial Sequence
  Synthetic
ccagcaaaggcaucatcaaagtuc

SEQ ID NO: 23291 - DNA, 18 bp, Artificial Sequence
  Synthetic
gactccugccacucagca

SEQ ID NO: 23292 - DNA, 21 bp, Artificial Sequence
  Synthetic
cctgtggtcuctgagagcugt

SEQ ID NO: 23293 - DNA, 31 bp, Artificial Sequence
  Synthetic
tgtgtgttaataacutagcactgttucagat

SEQ ID NO: 23294 - DNA, 23 bp, Artificial Sequence
  Synthetic
gtattuccagcatcccugaacca

SEQ ID NO: 23295 - DNA, 22 bp, Artificial Sequence
  Synthetic
ggcagaagccucccttaaucat

SEQ ID NO: 23296 - DNA, 23 bp, Artificial Sequence
  Synthetic
cctccctatccutccctgttgut

SEQ ID NO: 23297 - DNA, 22 bp, Artificial Sequence
  Synthetic
aattctgtgtgugggaccagut

SEQ ID NO: 23298 - DNA, 21 bp, Artificial Sequence
  Synthetic
cagcctugccccttcaaacua

SEQ ID NO: 23299 - DNA, 28 bp, Artificial Sequence
  Synthetic
ccaagatctuaggcagaatgaacaatuc

SEQ ID NO: 23300 - DNA, 19 bp, Artificial Sequence
  Synthetic
tcatgguggcaggcagtuc

SEQ ID NO: 23301 - DNA, 20 bp, Artificial Sequence
  Synthetic
tcaatgtgcucacggaugct

SEQ ID NO: 23302 - DNA, 20 bp, Artificial Sequence
  Synthetic
gtcacucgggcttauggact

SEQ ID NO: 23303 - DNA, 24 bp, Artificial Sequence
  Synthetic
ggagctcttagugtgcactttcug

SEQ ID NO: 23304 - DNA, 21 bp, Artificial Sequence
  Synthetic
ccccaaacaggccaugtatuc

SEQ ID NO: 23305 - DNA, 23 bp, Artificial Sequence
  Synthetic
cctctgagcuacagcttcatuca

SEQ ID NO: 23306 - DNA, 21 bp, Artificial Sequence
  Synthetic
ggcccagagcuctttgttuga

SEQ ID NO: 23307 - DNA, 23 bp, Artificial Sequence
  Synthetic
acctcautccttcttuggagcag

SEQ ID NO: 23308 - DNA, 20 bp, Artificial Sequence
  Synthetic
cgagacucaccacctuggac

SEQ ID NO: 23309 - DNA, 24 bp, Artificial Sequence
  Synthetic
ccaagaaccucgcatagtcauact

SEQ ID NO: 23310 - DNA, 23 bp, Artificial Sequence
  Synthetic
tttgtccauacatttgcctcucc

SEQ ID NO: 23311 - DNA, 17 bp, Artificial Sequence
  Synthetic
cucagcccagccuagca

SEQ ID NO: 23312 - DNA, 20 bp, Artificial Sequence
  Synthetic
ccggcaautcatggauccag

SEQ ID NO: 23313 - DNA, 20 bp, Artificial Sequence
  Synthetic
cccctcugatgtgtcuccaa

SEQ ID NO: 23314 - DNA, 26 bp, Artificial Sequence
  Synthetic
cttcttcaggaacuccaaguaacagg

SEQ ID NO: 23315 - DNA, 22 bp, Artificial Sequence
  Synthetic
gcaaaggacagcacugttcuct

SEQ ID NO: 23316 - DNA, 26 bp, Artificial Sequence
  Synthetic
caagaagaaaacggcautttgagugt

SEQ ID NO: 23317 - DNA, 24 bp, Artificial Sequence
  Synthetic
cacctttcctugcctctttccuag

SEQ ID NO: 23318 - DNA, 19 bp, Artificial Sequence
  Synthetic
cucccagagaucccagtug

SEQ ID NO: 23319 - DNA, 27 bp, Artificial Sequence
  Synthetic
ctctgattccucactgattgctctuag

SEQ ID NO: 23320 - DNA, 21 bp, Artificial Sequence
  Synthetic
ctcauggaagccagccccuca

SEQ ID NO: 23321 - DNA, 23 bp, Artificial Sequence
  Synthetic
ctcctggccccugtcatcttcug

SEQ ID NO: 23322 - DNA, 21 bp, Artificial Sequence
  Synthetic
cccttccaauggatccacuca

SEQ ID NO: 23323 - DNA, 22 bp, Artificial Sequence
  Synthetic
tcatgctggauccccactttuc

SEQ ID NO: 23324 - DNA, 19 bp, Artificial Sequence
  Synthetic
cctctuccatgggcuccag

SEQ ID NO: 23325 - DNA, 20 bp, Artificial Sequence
  Synthetic
ctggcaggutagcagugaga

SEQ ID NO: 23326 - DNA, 20 bp, Artificial Sequence
  Synthetic
ccaugagcagccaaauggga

SEQ ID NO: 23327 - DNA, 24 bp, Artificial Sequence
  Synthetic
gcagccauacaagcaaauacttug

SEQ ID NO: 23328 - DNA, 20 bp, Artificial Sequence
  Synthetic
cgagucctctugcagcagaa

SEQ ID NO: 23329 - DNA, 21 bp, Artificial Sequence
  Synthetic
cctcuccccacaaccaguaag

SEQ ID NO: 23330 - DNA, 23 bp, Artificial Sequence
  Synthetic
tctggagugccccataaggauag

SEQ ID NO: 23331 - DNA, 20 bp, Artificial Sequence
  Synthetic
tcccagtgutctctccucga

SEQ ID NO: 23332 - DNA, 22 bp, Artificial Sequence
  Synthetic
ggagcagaaacaccuccctuaa

SEQ ID NO: 23333 - DNA, 21 bp, Artificial Sequence
  Synthetic
gacucgacagctctuccacag

SEQ ID NO: 23334 - DNA, 23 bp, Artificial Sequence
  Synthetic
ctgaagcuacactgactggugac

SEQ ID NO: 23335 - DNA, 22 bp, Artificial Sequence
  Synthetic
tggtaacuggcaccatctcuct

SEQ ID NO: 23336 - DNA, 20 bp, Artificial Sequence
  Synthetic
agcagcuggaggcttcttuc

SEQ ID NO: 23337 - DNA, 27 bp, Artificial Sequence
  Synthetic
aggctattttccuctttctctcttugc

SEQ ID NO: 23338 - DNA, 20 bp, Artificial Sequence
  Synthetic
gctccctcuccgctactcuc

SEQ ID NO: 23339 - DNA, 24 bp, Artificial Sequence
  Synthetic
gctggattcacucttcactcuaca

SEQ ID NO: 23340 - DNA, 20 bp, Artificial Sequence
  Synthetic
gctgcccucgtctcctcuag

SEQ ID NO: 23341 - DNA, 22 bp, Artificial Sequence
  Synthetic
cattcuggacgaaacccaguga

SEQ ID NO: 23342 - DNA, 22 bp, Artificial Sequence
  Synthetic
tccacuaagggaaagtcugggt

SEQ ID NO: 23343 - DNA, 20 bp, Artificial Sequence
  Synthetic
cccaggatgugggagtctuc

SEQ ID NO: 23344 - DNA, 22 bp, Artificial Sequence
  Synthetic
gtgtacucagacgtgatgugct

SEQ ID NO: 23345 - DNA, 21 bp, Artificial Sequence
  Synthetic
tgaggcagccuccttacugaa

SEQ ID NO: 23346 - DNA, 21 bp, Artificial Sequence
  Synthetic
tgcctgcucacaagaccatuc

SEQ ID NO: 23347 - DNA, 21 bp, Artificial Sequence
  Synthetic
gcatgagtcuagaggcgcauc

SEQ ID NO: 23348 - DNA, 17 bp, Artificial Sequence
  Synthetic
acacugggagccugcac

SEQ ID NO: 23349 - DNA, 17 bp, Artificial Sequence
  Synthetic
ggccuggacccatucca

SEQ ID NO: 23350 - DNA, 29 bp, Artificial Sequence
  Synthetic
tgattggtagcagaaagugaaactaacut

SEQ ID NO: 23351 - DNA, 30 bp, Artificial Sequence
  Synthetic
agcctgcctacutaagatcaatttactuac

SEQ ID NO: 23352 - DNA, 32 bp, Artificial Sequence
  Synthetic
cagaagacaatgutgatgttcatgatauagaa

SEQ ID NO: 23353 - DNA, 26 bp, Artificial Sequence
  Synthetic
tcatgatactaguttttgacccagug

SEQ ID NO: 23354 - DNA, 27 bp, Artificial Sequence
  Synthetic
gctacatctggaauagaagaaactuca

SEQ ID NO: 23355 - DNA, 26 bp, Artificial Sequence
  Synthetic
ctttacacagttugacacaggcaaut

SEQ ID NO: 23356 - DNA, 26 bp, Artificial Sequence
  Synthetic
agagcatacaacucacgtaatttugt

SEQ ID NO: 23357 - DNA, 27 bp, Artificial Sequence
  Synthetic
caaacauatttcgaagtucaaccgagt

SEQ ID NO: 23358 - DNA, 24 bp, Artificial Sequence
  Synthetic
ccutgcagaauccaagaaaacagg

SEQ ID NO: 23359 - DNA, 24 bp, Artificial Sequence
  Synthetic
cattttccccutacctccatugct

SEQ ID NO: 23360 - DNA, 32 bp, Artificial Sequence
  Synthetic
gaaacattttgggagautaggtatatgtacut

SEQ ID NO: 23361 - DNA, 27 bp, Artificial Sequence
  Synthetic
accataaaacctutggaagtgtaagut

SEQ ID NO: 23362 - DNA, 27 bp, Artificial Sequence
  Synthetic
ggaaataccagucaaatgtccauggat

SEQ ID NO: 23363 - DNA, 27 bp, Artificial Sequence
  Synthetic
tcatucagaaaacaaauagagcacaua

SEQ ID NO: 23364 - DNA, 27 bp, Artificial Sequence
  Synthetic
gtgcagtaactugatttgctgttguat

SEQ ID NO: 23365 - DNA, 22 bp, Artificial Sequence
  Synthetic
aagaggcutccaaatugagggt

SEQ ID NO: 23366 - DNA, 23 bp, Artificial Sequence
  Synthetic
caattctggccuggcaacctaua

SEQ ID NO: 23367 - DNA, 26 bp, Artificial Sequence
  Synthetic
cattaaggauaacagccgauccauaa

SEQ ID NO: 23368 - DNA, 30 bp, Artificial Sequence
  Synthetic
acaaaccatagcuataatgaagaactugct

SEQ ID NO: 23369 - DNA, 32 bp, Artificial Sequence
  Synthetic
gaggtttttcttauctcttaaaatgtttcugc

SEQ ID NO: 23370 - DNA, 30 bp, Artificial Sequence
  Synthetic
agaacttgaaagatucatggtctctaaaut

SEQ ID NO: 23371 - DNA, 25 bp, Artificial Sequence
  Synthetic
aattccacaccauctccttctucag

SEQ ID NO: 23372 - DNA, 26 bp, Artificial Sequence
  Synthetic
cacagaattugacacactugcagaaa

SEQ ID NO: 23373 - DNA, 24 bp, Artificial Sequence
  Synthetic
tcttccccgcutactctaaucact

SEQ ID NO: 23374 - DNA, 23 bp, Artificial Sequence
  Synthetic
aggutagaaccaucagagagcct

SEQ ID NO: 23375 - DNA, 25 bp, Artificial Sequence
  Synthetic
tggtataaacaguggcacacactuc

SEQ ID NO: 23376 - DNA, 22 bp, Artificial Sequence
  Synthetic
tgcagtaggaagugccatgtuc

SEQ ID NO: 23377 - DNA, 30 bp, Artificial Sequence
  Synthetic
aataattcaccuttgacattaactucaagc

SEQ ID NO: 23378 - DNA, 27 bp, Artificial Sequence
  Synthetic
tgtgtagtgcuaaatgtgaactgcuaa

SEQ ID NO: 23379 - DNA, 20 bp, Artificial Sequence
  Synthetic
gctcuggaggacccagguat

SEQ ID NO: 23380 - DNA, 28 bp, Artificial Sequence
  Synthetic
tgtcattttccutaggttcaaaacuggt

SEQ ID NO: 23381 - DNA, 29 bp, Artificial Sequence
  Synthetic
agagaaagtctgtuttaaagcgattgcua

SEQ ID NO: 23382 - DNA, 19 bp, Artificial Sequence
  Synthetic
tctccactucaccccguca

SEQ ID NO: 23383 - DNA, 26 bp, Artificial Sequence
  Synthetic
aactggtuctcatctacuaggcagat

SEQ ID NO: 23384 - DNA, 28 bp, Artificial Sequence
  Synthetic
acaacttcattugtgttttctccuaggt

SEQ ID NO: 23385 - DNA, 25 bp, Artificial Sequence
  Synthetic
ggtgttgtuggcagggatacauaaa

SEQ ID NO: 23386 - DNA, 25 bp, Artificial Sequence
  Synthetic
gcauaatgatgaugccaaacgacaa

SEQ ID NO: 23387 - DNA, 32 bp, Artificial Sequence
  Synthetic
gtgcacaaaggagauactagataaatattuga

SEQ ID NO: 23388 - DNA, 27 bp, Artificial Sequence
  Synthetic
caagacatgctuatctccaactccuac

SEQ ID NO: 23389 - DNA, 21 bp, Artificial Sequence
  Synthetic
gcggaccugtggctacuaaga

SEQ ID NO: 23390 - DNA, 22 bp, Artificial Sequence
  Synthetic
gttaccgggacaggucattcuc

SEQ ID NO: 23391 - DNA, 32 bp, Artificial Sequence
  Synthetic
acttagtttcttaucattttggcttctauacc

SEQ ID NO: 23392 - DNA, 30 bp, Artificial Sequence
  Synthetic
gacacttacaacagucaagttctgauagaa

SEQ ID NO: 23393 - DNA, 28 bp, Artificial Sequence
  Synthetic
aaagtaacatucaacactgauacccaaa

SEQ ID NO: 23394 - DNA, 32 bp, Artificial Sequence
  Synthetic
tctttaatagaguccagaggaagtatttaugg

SEQ ID NO: 23395 - DNA, 23 bp, Artificial Sequence
  Synthetic
aaaggtguccaaccaaugcaaag

SEQ ID NO: 23396 - DNA, 27 bp, Artificial Sequence
  Synthetic
gcagcctaaaacauagaaagtcactuc

SEQ ID NO: 23397 - DNA, 32 bp, Artificial Sequence
  Synthetic
atgtaattataggagaguaaatccactuacct

SEQ ID NO: 23398 - DNA, 28 bp, Artificial Sequence
  Synthetic
tgataucagauacaaaggctccuaaaag

SEQ ID NO: 23399 - DNA, 25 bp, Artificial Sequence
  Synthetic
gactttcatgtacuctcccacctua

SEQ ID NO: 23400 - DNA, 27 bp, Artificial Sequence
  Synthetic
cacagatgagtutgatcaacgaatuct

SEQ ID NO: 23401 - DNA, 27 bp, Artificial Sequence
  Synthetic
gguaagcatttaactuaaagacaggca

SEQ ID NO: 23402 - DNA, 30 bp, Artificial Sequence
  Synthetic
taattucctattttccatuacagcaaacac

SEQ ID NO: 23403 - DNA, 21 bp, Artificial Sequence
  Synthetic
agugcaggaggguaaggagat

SEQ ID NO: 23404 - DNA, 28 bp, Artificial Sequence
  Synthetic
ggcagttucaaacgtaatagcatuaaga

SEQ ID NO: 23405 - DNA, 27 bp, Artificial Sequence
  Synthetic
caaaccggaugggttcattauaaaaca

SEQ ID NO: 23406 - DNA, 27 bp, Artificial Sequence
  Synthetic
tgtttaccttugcaggatgtaagtugt

SEQ ID NO: 23407 - DNA, 28 bp, Artificial Sequence
  Synthetic
accatatggctgutactaggttcaaaut

SEQ ID NO: 23408 - DNA, 21 bp, Artificial Sequence
  Synthetic
ctcaaacucaggccaggaguc

SEQ ID NO: 23409 - DNA, 25 bp, Artificial Sequence
  Synthetic
acacataccaacucgaaacttccut

SEQ ID NO: 23410 - DNA, 29 bp, Artificial Sequence
  Synthetic
ccacttccugaaaaagaagaaaaggatuc

SEQ ID NO: 23411 - DNA, 28 bp, Artificial Sequence
  Synthetic
ctccattctcutcacttgtcctuaaaca

SEQ ID NO: 23412 - DNA, 25 bp, Artificial Sequence
  Synthetic
acataacuaacagggccgagaagua

SEQ ID NO: 23413 - DNA, 24 bp, Artificial Sequence
  Synthetic
aggagggugttaagacatttuccc

SEQ ID NO: 23414 - DNA, 28 bp, Artificial Sequence
  Synthetic
ctctctctcggacacutataaagtcauc

SEQ ID NO: 23415 - DNA, 23 bp, Artificial Sequence
  Synthetic
agtaacctuccgcttttcuccaa

SEQ ID NO: 23416 - DNA, 31 bp, Artificial Sequence
  Synthetic
atcatacatgtcttuctctttcagttcctut

SEQ ID NO: 23417 - DNA, 26 bp, Artificial Sequence
  Synthetic
agttagugtactttgtucacagaggg

SEQ ID NO: 23418 - DNA, 26 bp, Artificial Sequence
  Synthetic
gttttcttgagcagucgaggaguaaa

SEQ ID NO: 23419 - DNA, 25 bp, Artificial Sequence
  Synthetic
agggatutcgttacaaugaacagca

SEQ ID NO: 23420 - DNA, 22 bp, Artificial Sequence
  Synthetic
tcagcctcgcuctctaaaguca

SEQ ID NO: 23421 - DNA, 23 bp, Artificial Sequence
  Synthetic
gaaagcctgugtttccagtgtut

SEQ ID NO: 23422 - DNA, 24 bp, Artificial Sequence
  Synthetic
ctgcttgttuccaaactgtcctug

SEQ ID NO: 23423 - DNA, 23 bp, Artificial Sequence
  Synthetic
acagtgaagagagugggaatuct

SEQ ID NO: 23424 - DNA, 29 bp, Artificial Sequence
  Synthetic
gcataatctttagauccagcacacactua

SEQ ID NO: 23425 - DNA, 21 bp, Artificial Sequence
  Synthetic
ttttgatgacugggacuggca

SEQ ID NO: 23426 - DNA, 24 bp, Artificial Sequence
  Synthetic
agcatcttgautctgagtcuccct

SEQ ID NO: 23427 - DNA, 24 bp, Artificial Sequence
  Synthetic
ctgcttagcugccaaatatgtuca

SEQ ID NO: 23428 - DNA, 22 bp, Artificial Sequence
  Synthetic
gacgtggaugcctgactuaaca

SEQ ID NO: 23429 - DNA, 30 bp, Artificial Sequence
  Synthetic
tggtttcctaauttactcttttgtaugact

SEQ ID NO: 23430 - DNA, 21 bp, Artificial Sequence
  Synthetic
ctgagggagcgguggauaaac

SEQ ID NO: 23431 - DNA, 22 bp, Artificial Sequence
  Synthetic
tcgtggcauttcatctctugct

SEQ ID NO: 23432 - DNA, 21 bp, Artificial Sequence
  Synthetic
cccactctucccctgaaacug

SEQ ID NO: 23433 - DNA, 23 bp, Artificial Sequence
  Synthetic
cggtcatuggagaaaaggaagug

SEQ ID NO: 23434 - DNA, 24 bp, Artificial Sequence
  Synthetic
gggaguctatcttctucaggaggt

SEQ ID NO: 23435 - DNA, 23 bp, Artificial Sequence
  Synthetic
agcttccatuccattgagaacug

SEQ ID NO: 23436 - DNA, 27 bp, Artificial Sequence
  Synthetic
caccagaacaucaacgaatttccuaag

SEQ ID NO: 23437 - DNA, 31 bp, Artificial Sequence
  Synthetic
tccttctcaggaaautttctgatattugcat

SEQ ID NO: 23438 - DNA, 24 bp, Artificial Sequence
  Synthetic
cttcgagaatgugagctctacguc

SEQ ID NO: 23439 - DNA, 21 bp, Artificial Sequence
  Synthetic
tcaccucatcatcuccccaca

SEQ ID NO: 23440 - DNA, 30 bp, Artificial Sequence
  Synthetic
ctaagctuaatgtttgaaatucacggaaga

SEQ ID NO: 23441 - DNA, 24 bp, Artificial Sequence
  Synthetic
tctcccguaacaatattgcaugct

SEQ ID NO: 23442 - DNA, 25 bp, Artificial Sequence
  Synthetic
cutgctttgatttauggaacaccga

SEQ ID NO: 23443 - DNA, 23 bp, Artificial Sequence
  Synthetic
cacactcucaaacaccatgguct

SEQ ID NO: 23444 - DNA, 27 bp, Artificial Sequence
  Synthetic
gtttgagagtgugtgtttgtttagcut

SEQ ID NO: 23445 - DNA, 31 bp, Artificial Sequence
  Synthetic
agaaaccatgtattuattgtgagggaatuca

SEQ ID NO: 23446 - DNA, 17 bp, Artificial Sequence
  Synthetic
cggtcggugcacuccag

SEQ ID NO: 23447 - DNA, 24 bp, Artificial Sequence
  Synthetic
cccacctgaguaagacttctucat

SEQ ID NO: 23448 - DNA, 20 bp, Artificial Sequence
  Synthetic
gucgagacacccaacuccac

SEQ ID NO: 23449 - DNA, 21 bp, Artificial Sequence
  Synthetic
gttggcutagggaguccacat

SEQ ID NO: 23450 - DNA, 17 bp, Artificial Sequence
  Synthetic
ccaagguccccgaggug

SEQ ID NO: 23451 - DNA, 22 bp, Artificial Sequence
  Synthetic
caggcuctgaattcuccaaggt

SEQ ID NO: 23452 - DNA, 18 bp, Artificial Sequence
  Synthetic
gaccugaagugcccccat

SEQ ID NO: 23453 - DNA, 23 bp, Artificial Sequence
  Synthetic
cagtctcctuactttgcctcgua

SEQ ID NO: 23454 - DNA, 22 bp, Artificial Sequence
  Synthetic
cctgttccgcuctaactccuct

SEQ ID NO: 23455 - DNA, 20 bp, Artificial Sequence
  Synthetic
ggccttcucgttccgtgaug

SEQ ID NO: 23456 - DNA, 20 bp, Artificial Sequence
  Synthetic
gtcttccguctcccctcuga

SEQ ID NO: 23457 - DNA, 17 bp, Artificial Sequence
  Synthetic
cccccgcuagtgcucct

SEQ ID NO: 23458 - DNA, 22 bp, Artificial Sequence
  Synthetic
gcccatctcuctccctcctuat

SEQ ID NO: 23459 - DNA, 22 bp, Artificial Sequence
  Synthetic
ctgggaacaacaucctagugga

SEQ ID NO: 23460 - DNA, 20 bp, Artificial Sequence
  Synthetic
ggacgcacaugcagaacauc

SEQ ID NO: 23461 - DNA, 19 bp, Artificial Sequence
  Synthetic
gcaggguggcgtctacauc

SEQ ID NO: 23462 - DNA, 18 bp, Artificial Sequence
  Synthetic
ccucgaggccauccaagc

SEQ ID NO: 23463 - DNA, 18 bp, Artificial Sequence
  Synthetic
accctgccgcuctcctua

SEQ ID NO: 23464 - DNA, 23 bp, Artificial Sequence
  Synthetic
cggaaccccugccatttgtauat

SEQ ID NO: 23465 - DNA, 20 bp, Artificial Sequence
  Synthetic
agtctccuaaacgcgccaut

SEQ ID NO: 23466 - DNA, 22 bp, Artificial Sequence
  Synthetic
ccagcattucctgtttcacugc

SEQ ID NO: 23467 - DNA, 22 bp, Artificial Sequence
  Synthetic
gaacttctugaagccccucagt

SEQ ID NO: 23468 - DNA, 20 bp, Artificial Sequence
  Synthetic
agagggugcccttcaatguc

SEQ ID NO: 23469 - DNA, 26 bp, Artificial Sequence
  Synthetic
gcaaggattutaagcatattgucggt

SEQ ID NO: 23470 - DNA, 24 bp, Artificial Sequence
  Synthetic
cctgtgtgaucatatggtggaugg

SEQ ID NO: 23471 - DNA, 21 bp, Artificial Sequence
  Synthetic
cggccgtcucctccatacuaa

SEQ ID NO: 23472 - DNA, 19 bp, Artificial Sequence
  Synthetic
gcacagcgcgaugctctua

SEQ ID NO: 23473 - DNA, 26 bp, Artificial Sequence
  Synthetic
cgatggcttuccgatatgagtcttuc

SEQ ID NO: 23474 - DNA, 19 bp, Artificial Sequence
  Synthetic
cagauctctuccgcagcct

SEQ ID NO: 23475 - DNA, 23 bp, Artificial Sequence
  Synthetic
tcuaacaccacuacagagacgua

SEQ ID NO: 23476 - DNA, 20 bp, Artificial Sequence
  Synthetic
tgctccucagacatccucgt

SEQ ID NO: 23477 - DNA, 24 bp, Artificial Sequence
  Synthetic
ctgcagcaaagaccautttgauga

SEQ ID NO: 23478 - DNA, 27 bp, Artificial Sequence
  Synthetic
ctacttactcgugctgaccaaaaacua

SEQ ID NO: 23479 - DNA, 24 bp, Artificial Sequence
  Synthetic
cacacgautgatgtttcugcagag

SEQ ID NO: 23480 - DNA, 21 bp, Artificial Sequence
  Synthetic
ggtgcuggagaaauggcagaa

SEQ ID NO: 23481 - DNA, 20 bp, Artificial Sequence
  Synthetic
cuatgaccugcagcaccaca

SEQ ID NO: 23482 - DNA, 23 bp, Artificial Sequence
  Synthetic
cagactugcaacctttcctugaa

SEQ ID NO: 23483 - DNA, 17 bp, Artificial Sequence
  Synthetic
gttucggagcccugcct

SEQ ID NO: 23484 - DNA, 22 bp, Artificial Sequence
  Synthetic
gagtgguaacgcaatcacgtut

SEQ ID NO: 23485 - DNA, 25 bp, Artificial Sequence
  Synthetic
cccaccttcucagaactttctgtut

SEQ ID NO: 23486 - DNA, 23 bp, Artificial Sequence
  Synthetic
tttctgccttugtacagcctcut

SEQ ID NO: 23487 - DNA, 19 bp, Artificial Sequence
  Synthetic
ctggagagcgucctggtug

SEQ ID NO: 23488 - DNA, 26 bp, Artificial Sequence
  Synthetic
ctcacaaacccucttcttatcauccc

SEQ ID NO: 23489 - DNA, 21 bp, Artificial Sequence
  Synthetic
cacagctccuccagatagucc

SEQ ID NO: 23490 - DNA, 21 bp, Artificial Sequence
  Synthetic
ctgtggucctgcacuaggaaa

SEQ ID NO: 23491 - DNA, 26 bp, Artificial Sequence
  Synthetic
gatggtcaggautctggaaaagtuct

SEQ ID NO: 23492 - DNA, 21 bp, Artificial Sequence
  Synthetic
catctcttcucccgtcuccct

SEQ ID NO: 23493 - DNA, 20 bp, Artificial Sequence
  Synthetic
gctcucggttccuaggagca

SEQ ID NO: 23494 - DNA, 22 bp, Artificial Sequence
  Synthetic
caccatccaccugtcttctgut

SEQ ID NO: 23495 - DNA, 24 bp, Artificial Sequence
  Synthetic
ggctctcaaucacttccttcucag

SEQ ID NO: 23496 - DNA, 31 bp, Artificial Sequence
  Synthetic
ctttctgcagcttucatgatgtaaaagatua

SEQ ID NO: 23497 - DNA, 28 bp, Artificial Sequence
  Synthetic
caaaagaaatucagggaagagagagtuc

SEQ ID NO: 23498 - DNA, 20 bp, Artificial Sequence
  Synthetic
cctaagucaccagccacuca

SEQ ID NO: 23499 - DNA, 19 bp, Artificial Sequence
  Synthetic
gctuccgcaccagguacac

SEQ ID NO: 23500 - DNA, 19 bp, Artificial Sequence
  Synthetic
aagccagcagucagccuac

SEQ ID NO: 23501 - DNA, 27 bp, Artificial Sequence
  Synthetic
cctccaaauactgagacttugaacaca

SEQ ID NO: 23502 - DNA, 19 bp, Artificial Sequence
  Synthetic
acccaggugacaagcucac

SEQ ID NO: 23503 - DNA, 24 bp, Artificial Sequence
  Synthetic
ggtcatcuagaccccaacactuac

SEQ ID NO: 23504 - DNA, 21 bp, Artificial Sequence
  Synthetic
ggagagacguggtgacatgug

SEQ ID NO: 23505 - DNA, 24 bp, Artificial Sequence
  Synthetic
gaagcgaaagcaggutcttaacug

SEQ ID NO: 23506 - DNA, 23 bp, Artificial Sequence
  Synthetic
gcagccaguctcaaagtctguaa

SEQ ID NO: 23507 - DNA, 21 bp, Artificial Sequence
  Synthetic
cttgcuggacgttcuggaact

SEQ ID NO: 23508 - DNA, 21 bp, Artificial Sequence
  Synthetic
gcactgacutggatcuggaca

SEQ ID NO: 23509 - DNA, 18 bp, Artificial Sequence
  Synthetic
gguggctcgugcacaaac

SEQ ID NO: 23510 - DNA, 23 bp, Artificial Sequence
  Synthetic
tgtcatcugctggaaatguccac

SEQ ID NO: 23511 - DNA, 24 bp, Artificial Sequence
  Synthetic
caggatcagguttatcgggaucac

SEQ ID NO: 23512 - DNA, 24 bp, Artificial Sequence
  Synthetic
gtctgcucataagtcugaacagct

SEQ ID NO: 23513 - DNA, 24 bp, Artificial Sequence
  Synthetic
ccuaaaacgauggaagagcaaaug

SEQ ID NO: 23514 - DNA, 27 bp, Artificial Sequence
  Synthetic
agtgaaattctucctgaaatggcauct

SEQ ID NO: 23515 - DNA, 31 bp, Artificial Sequence
  Synthetic
aaagtcatccaaagauagctgaggaaauaat

SEQ ID NO: 23516 - DNA, 28 bp, Artificial Sequence
  Synthetic
tcacctaatcgagagugaagaaacaaug

SEQ ID NO: 23517 - DNA, 25 bp, Artificial Sequence
  Synthetic
cctcaguatcctaacuacccacagg

SEQ ID NO: 23518 - DNA, 28 bp, Artificial Sequence
  Synthetic
gggatatataugtgtatgtgtgugaagg

SEQ ID NO: 23519 - DNA, 27 bp, Artificial Sequence
  Synthetic
ttcctgtctctugtcgaattgatguag

SEQ ID NO: 23520 - DNA, 28 bp, Artificial Sequence
  Synthetic
tcaaaggctaauagagcactctagucaa

SEQ ID NO: 23521 - DNA, 27 bp, Artificial Sequence
  Synthetic
ccagtacagaaucagatgacaaugagt

SEQ ID NO: 23522 - DNA, 23 bp, Artificial Sequence
  Synthetic
ccatcugaaggcatgttgugaga

SEQ ID NO: 23523 - DNA, 28 bp, Artificial Sequence
  Synthetic
ccctatgcatcuttcgtatattagtcug

SEQ ID NO: 23524 - DNA, 19 bp, Artificial Sequence
  Synthetic
agtgatcuccccctugcct

SEQ ID NO: 23525 - DNA, 18 bp, Artificial Sequence
  Synthetic
cgcatucccgaggtggut

SEQ ID NO: 23526 - DNA, 27 bp, Artificial Sequence
  Synthetic
gctataactacaaauggagctcaucct

SEQ ID NO: 23527 - DNA, 30 bp, Artificial Sequence
  Synthetic
gcacaaattaaatuaccctgtagtagctug

SEQ ID NO: 23528 - DNA, 26 bp, Artificial Sequence
  Synthetic
acattcaatucaaaccatccagcauc

SEQ ID NO: 23529 - DNA, 28 bp, Artificial Sequence
  Synthetic
tgctgactacauctgattctagaacuca

SEQ ID NO: 23530 - DNA, 22 bp, Artificial Sequence
  Synthetic
acctggacuggaagtaggacug

SEQ ID NO: 23531 - DNA, 26 bp, Artificial Sequence
  Synthetic
gccctuacaacaaaaacaagagctua

SEQ ID NO: 23532 - DNA, 30 bp, Artificial Sequence
  Synthetic
tgtacagagutactactuagacagagaagc

SEQ ID NO: 23533 - DNA, 24 bp, Artificial Sequence
  Synthetic
ttccattcctuccacccagattuc

SEQ ID NO: 23534 - DNA, 25 bp, Artificial Sequence
  Synthetic
tgttgatgaccutcgtcgcttaugc

SEQ ID NO: 23535 - DNA, 27 bp, Artificial Sequence
  Synthetic
gtctgcaatcggcauggtatgaaguac

SEQ ID NO: 23536 - DNA, 25 bp, Artificial Sequence
  Synthetic
catcgacuccaccgaggtcatcuac

SEQ ID NO: 23537 - DNA, 21 bp, Artificial Sequence
  Synthetic
gatctugacggccctccugca

SEQ ID NO: 23538 - DNA, 25 bp, Artificial Sequence
  Synthetic
gtatatggtgauggagtactgcgug

SEQ ID NO: 23539 - DNA, 19 bp, Artificial Sequence
  Synthetic
agugtggccucacggaaag

SEQ ID NO: 23540 - DNA, 21 bp, Artificial Sequence
  Synthetic
tcttcccucccctcgaaauga

SEQ ID NO: 23541 - DNA, 18 bp, Artificial Sequence
  Synthetic
agagggaugaggcuccca

SEQ ID NO: 23542 - DNA, 21 bp, Artificial Sequence
  Synthetic
cgugtgtaugaacggcacaga

SEQ ID NO: 23543 - DNA, 18 bp, Artificial Sequence
  Synthetic
ccagccucactgctgcut

SEQ ID NO: 23544 - DNA, 21 bp, Artificial Sequence
  Synthetic
gggagcugaaagcaccatcug

SEQ ID NO: 23545 - DNA, 23 bp, Artificial Sequence
  Synthetic
cacctcacauctttctccuccct

SEQ ID NO: 23546 - DNA, 17 bp, Artificial Sequence
  Synthetic
cccacugaccucgcact

SEQ ID NO: 23547 - DNA, 23 bp, Artificial Sequence
  Synthetic
gacaucaacgaggccttuaagga

SEQ ID NO: 23548 - DNA, 20 bp, Artificial Sequence
  Synthetic
cccaacuggaaccaggaguc

SEQ ID NO: 23549 - DNA, 19 bp, Artificial Sequence
  Synthetic
gcaccagccucaugcacaa

SEQ ID NO: 23550 - DNA, 20 bp, Artificial Sequence
  Synthetic
ccaaacccucacagaccuca

SEQ ID NO: 23551 - DNA, 17 bp, Artificial Sequence
  Synthetic
ccugaccgcccatcuct

SEQ ID NO: 23552 - DNA, 17 bp, Artificial Sequence
  Synthetic
ccctgcccugggtccua

SEQ ID NO: 23553 - DNA, 18 bp, Artificial Sequence
  Synthetic
cagccgagcuctggaguc

SEQ ID NO: 23554 - DNA, 17 bp, Artificial Sequence
  Synthetic
ggcacugccacugacga

SEQ ID NO: 23555 - DNA, 19 bp, Artificial Sequence
  Synthetic
gccggttcucaccccttut

SEQ ID NO: 23556 - DNA, 19 bp, Artificial Sequence
  Synthetic
cccacguctgcacatcugt

SEQ ID NO: 23557 - DNA, 20 bp, Artificial Sequence
  Synthetic
tctcauccccaccccatcuc

SEQ ID NO: 23558 - DNA, 20 bp, Artificial Sequence
  Synthetic
tgaacuguggaggcaaaggg

SEQ ID NO: 23559 - DNA, 19 bp, Artificial Sequence
  Synthetic
cuggccccaggagaaugaa

SEQ ID NO: 23560 - DNA, 18 bp, Artificial Sequence
  Synthetic
ggcagcacugaggucgag

SEQ ID NO: 23561 - DNA, 18 bp, Artificial Sequence
  Synthetic
cugcccgaccgtttugag

SEQ ID NO: 23562 - DNA, 21 bp, Artificial Sequence
  Synthetic
tggactccucgaacttcucca

SEQ ID NO: 23563 - DNA, 20 bp, Artificial Sequence
  Synthetic
gctactggugtgacccaugt

SEQ ID NO: 23564 - DNA, 17 bp, Artificial Sequence
  Synthetic
gggttgggcugcaggua

SEQ ID NO: 23565 - DNA, 18 bp, Artificial Sequence
  Synthetic
ggtcttgugtgcctuggg

SEQ ID NO: 23566 - DNA, 19 bp, Artificial Sequence
  Synthetic
cucagcaggauaccccauc

SEQ ID NO: 23567 - DNA, 17 bp, Artificial Sequence
  Synthetic
ctgccugcagcccuagt

SEQ ID NO: 23568 - DNA, 17 bp, Artificial Sequence
  Synthetic
gccaguggcccgtctuc

SEQ ID NO: 23569 - DNA, 22 bp, Artificial Sequence
  Synthetic
tgtaggccaugatctgagcuct

SEQ ID NO: 23570 - DNA, 17 bp, Artificial Sequence
  Synthetic
tggccccutgccttcuc

SEQ ID NO: 23571 - DNA, 17 bp, Artificial Sequence
  Synthetic
gggtcugcggtggcauc

SEQ ID NO: 23572 - DNA, 26 bp, Artificial Sequence
  Synthetic
gaattcaggaacutgaaaacctuccc

SEQ ID NO: 23573 - DNA, 20 bp, Artificial Sequence
  Synthetic
agcagcagugttggugacaa

SEQ ID NO: 23574 - DNA, 24 bp, Artificial Sequence
  Synthetic
ggaataucacagatccgucacagg

SEQ ID NO: 23575 - DNA, 21 bp, Artificial Sequence
  Synthetic
atguagaagagcgcacgucaa

SEQ ID NO: 23576 - DNA, 22 bp, Artificial Sequence
  Synthetic
cctcagtgucacacgaaugact

SEQ ID NO: 23577 - DNA, 19 bp, Artificial Sequence
  Synthetic
ctcaccccgggutcatcuc

SEQ ID NO: 23578 - DNA, 22 bp, Artificial Sequence
  Synthetic
ccagcacautgtcacagauagg

SEQ ID NO: 23579 - DNA, 23 bp, Artificial Sequence
  Synthetic
cttgtccacuctctcagugacag

SEQ ID NO: 23580 - DNA, 22 bp, Artificial Sequence
  Synthetic
gcacagugagccattgaugaga

SEQ ID NO: 23581 - DNA, 24 bp, Artificial Sequence
  Synthetic
gtaguaagagaggaaaccucagug

SEQ ID NO: 23582 - DNA, 20 bp, Artificial Sequence
  Synthetic
gaacaagctucccgagcuct

SEQ ID NO: 23583 - DNA, 19 bp, Artificial Sequence
  Synthetic
caccuggaaccgucagcat

SEQ ID NO: 23584 - DNA, 20 bp, Artificial Sequence
  Synthetic
tccctcucatctgcctucca

SEQ ID NO: 23585 - DNA, 20 bp, Artificial Sequence
  Synthetic
gccuaggagcucagcagaca

SEQ ID NO: 23586 - DNA, 21 bp, Artificial Sequence
  Synthetic
ccactcuacccctgaggucac

SEQ ID NO: 23587 - DNA, 25 bp, Artificial Sequence
  Synthetic
tgagcaggaagaugaagtacucaga

SEQ ID NO: 23588 - DNA, 17 bp, Artificial Sequence
  Synthetic
gaacgaggugcgtgugc

SEQ ID NO: 23589 - DNA, 22 bp, Artificial Sequence
  Synthetic
tggaggacutctggucgaacat

SEQ ID NO: 23590 - DNA, 18 bp, Artificial Sequence
  Synthetic
cgagcucccctcguggat

SEQ ID NO: 23591 - DNA, 19 bp, Artificial Sequence
  Synthetic
tgggcctcuccagcatgua

SEQ ID NO: 23592 - DNA, 21 bp, Artificial Sequence
  Synthetic
ggtccugaggtaagaccugct

SEQ ID NO: 23593 - DNA, 21 bp, Artificial Sequence
  Synthetic
cctccaggutgaaggtctgug

SEQ ID NO: 23594 - DNA, 22 bp, Artificial Sequence
  Synthetic
ccagagcucaaggctgtcttuc

SEQ ID NO: 23595 - DNA, 22 bp, Artificial Sequence
  Synthetic
cctcactgucatcgtcacucac

SEQ ID NO: 23596 - DNA, 18 bp, Artificial Sequence
  Synthetic
gcacccugggaggcuaua

SEQ ID NO: 23597 - DNA, 24 bp, Artificial Sequence
  Synthetic
cattttcttcutgatggccuccat

SEQ ID NO: 23598 - DNA, 22 bp, Artificial Sequence
  Synthetic
gtggctggccugatacttctua

SEQ ID NO: 23599 - DNA, 18 bp, Artificial Sequence
  Synthetic
gtggccagucgttccuga

SEQ ID NO: 23600 - DNA, 17 bp, Artificial Sequence
  Synthetic
ggctcagcugggcctut

SEQ ID NO: 23601 - DNA, 17 bp, Artificial Sequence
  Synthetic
cagccucgctcagucct

SEQ ID NO: 23602 - DNA, 26 bp, Artificial Sequence
  Synthetic
ctttccccauactcttaatccucacc

SEQ ID NO: 23603 - DNA, 27 bp, Artificial Sequence
  Synthetic
tctgttggaacaagacucttctgttut

SEQ ID NO: 23604 - DNA, 20 bp, Artificial Sequence
  Synthetic
tgtcagaacucacgcgtguc

SEQ ID NO: 23605 - DNA, 22 bp, Artificial Sequence
  Synthetic
gctcactucgggtccttucaac

SEQ ID NO: 23606 - DNA, 20 bp, Artificial Sequence
  Synthetic
agtcctuacgggccatcuca

SEQ ID NO: 23607 - DNA, 21 bp, Artificial Sequence
  Synthetic
ccttcacagcacuggacacuc

SEQ ID NO: 23608 - DNA, 22 bp, Artificial Sequence
  Synthetic
cactgttccuctcctctcccua

SEQ ID NO: 23609 - DNA, 20 bp, Artificial Sequence
  Synthetic
gcgccaggacutgtctucag

SEQ ID NO: 23610 - DNA, 21 bp, Artificial Sequence
  Synthetic
ctggagguggaacuagcacat

SEQ ID NO: 23611 - DNA, 26 bp, Artificial Sequence
  Synthetic
gttcctcccaucaaactctctgtuac

SEQ ID NO: 23612 - DNA, 25 bp, Artificial Sequence
  Synthetic
acatcatctcuaacctggactgugt

SEQ ID NO: 23613 - DNA, 20 bp, Artificial Sequence
  Synthetic
ctcctcacucaccagctguc

SEQ ID NO: 23614 - DNA, 22 bp, Artificial Sequence
  Synthetic
ccacaatcauccccaaggtcut

SEQ ID NO: 23615 - DNA, 21 bp, Artificial Sequence
  Synthetic
cctctagcauccctcctcucc

SEQ ID NO: 23616 - DNA, 22 bp, Artificial Sequence
  Synthetic
agagagggcuctggttctgaut

SEQ ID NO: 23617 - DNA, 21 bp, Artificial Sequence
  Synthetic
tcuccccaaagagggactugt

SEQ ID NO: 23618 - DNA, 20 bp, Artificial Sequence
  Synthetic
ccagtcccuccccttgagut

SEQ ID NO: 23619 - DNA, 17 bp, Artificial Sequence
  Synthetic
acuccugcacccccaga

SEQ ID NO: 23620 - DNA, 19 bp, Artificial Sequence
  Synthetic
gggagcauttgggagcuga

SEQ ID NO: 23621 - DNA, 19 bp, Artificial Sequence
  Synthetic
ggcgttucccaccccauag

SEQ ID NO: 23622 - DNA, 22 bp, Artificial Sequence
  Synthetic
agctgcacugttttctgggaut

SEQ ID NO: 23623 - DNA, 24 bp, Artificial Sequence
  Synthetic
cctacagautgaagaggucggaag

SEQ ID NO: 23624 - DNA, 22 bp, Artificial Sequence
  Synthetic
tctcctttccuccctccttcug

SEQ ID NO: 23625 - DNA, 20 bp, Artificial Sequence
  Synthetic
actcacucctcagccuggat

SEQ ID NO: 23626 - DNA, 20 bp, Artificial Sequence
  Synthetic
acaagauccgcaagcuggac

SEQ ID NO: 23627 - DNA, 20 bp, Artificial Sequence
  Synthetic
gagtctgcagcugaggctut

SEQ ID NO: 23628 - DNA, 21 bp, Artificial Sequence
  Synthetic
catgaagaagcugaggcauga

SEQ ID NO: 23629 - DNA, 17 bp, Artificial Sequence
  Synthetic
ctgcccugtccggagug

SEQ ID NO: 23630 - DNA, 21 bp, Artificial Sequence
  Synthetic
ggtcaugacaggaggucagag

SEQ ID NO: 23631 - DNA, 21 bp, Artificial Sequence
  Synthetic
cctttgtggugagctcaguca

SEQ ID NO: 23632 - DNA, 19 bp, Artificial Sequence
  Synthetic
gacctcaugtgccagugct

SEQ ID NO: 23633 - DNA, 18 bp, Artificial Sequence
  Synthetic
cgcctgugcctagaggut

SEQ ID NO: 23634 - DNA, 21 bp, Artificial Sequence
  Synthetic
actctgggcuaacgctttgug

SEQ ID NO: 23635 - DNA, 28 bp, Artificial Sequence
  Synthetic
actctgtaccttutcctcttttcgttut

SEQ ID NO: 23636 - DNA, 28 bp, Artificial Sequence
  Synthetic
tgttaactgtgtautcatgttcccctut

SEQ ID NO: 23637 - DNA, 25 bp, Artificial Sequence
  Synthetic
gaaaactcccacutccaaacucaag

SEQ ID NO: 23638 - DNA, 20 bp, Artificial Sequence
  Synthetic
gucatgaagcugagccccaa

SEQ ID NO: 23639 - DNA, 28 bp, Artificial Sequence
  Synthetic
actaggatatuaacacatgggcuacagt

SEQ ID NO: 23640 - DNA, 27 bp, Artificial Sequence
  Synthetic
ggauaaccauaaagagaggattgcuaa

SEQ ID NO: 23641 - DNA, 23 bp, Artificial Sequence
  Synthetic
cccttttuggcccataggaugaa

SEQ ID NO: 23642 - DNA, 23 bp, Artificial Sequence
  Synthetic
ccggaaccaguaucgagaagact

SEQ ID NO: 23643 - DNA, 24 bp, Artificial Sequence
  Synthetic
gcagaaacuccctttgttaagcuc

SEQ ID NO: 23644 - DNA, 26 bp, Artificial Sequence
  Synthetic
gtgttcactttuggtgtacaaacuga

SEQ ID NO: 23645 - DNA, 28 bp, Artificial Sequence
  Synthetic
ctctgatggutacaaagaatugcaacag

SEQ ID NO: 23646 - DNA, 25 bp, Artificial Sequence
  Synthetic
ccgagaggaaaauaaacagatugcc

SEQ ID NO: 23647 - DNA, 22 bp, Artificial Sequence
  Synthetic
ggaacccccuccacctttctua

SEQ ID NO: 23648 - DNA, 19 bp, Artificial Sequence
  Synthetic
cgcgacugcggataaugag

SEQ ID NO: 23649 - DNA, 21 bp, Artificial Sequence
  Synthetic
caccttcuggatggtttgcug

SEQ ID NO: 23650 - DNA, 17 bp, Artificial Sequence
  Synthetic
cagggccugcactcuca

SEQ ID NO: 23651 - DNA, 17 bp, Artificial Sequence
  Synthetic
gccttgguggcctcgua

SEQ ID NO: 23652 - DNA, 17 bp, Artificial Sequence
  Synthetic
ggccacgucgcacuaca

SEQ ID NO: 23653 - DNA, 17 bp, Artificial Sequence
  Synthetic
ccgggcgutacctugct

SEQ ID NO: 23654 - DNA, 20 bp, Artificial Sequence
  Synthetic
ctcacggtucctggtgtcut

SEQ ID NO: 23655 - DNA, 22 bp, Artificial Sequence
  Synthetic
gcttgcctgutcatagccguag

SEQ ID NO: 23656 - DNA, 17 bp, Artificial Sequence
  Synthetic
cggcgcuatgggctcug

SEQ ID NO: 23657 - DNA, 22 bp, Artificial Sequence
  Synthetic
gcttcttguccttcttggugga

SEQ ID NO: 23658 - DNA, 17 bp, Artificial Sequence
  Synthetic
cggugcaccaccccauc

SEQ ID NO: 23659 - DNA, 21 bp, Artificial Sequence
  Synthetic
cagcagacggagacutgagua

SEQ ID NO: 23660 - DNA, 18 bp, Artificial Sequence
  Synthetic
ccuccgacgccaagugag

SEQ ID NO: 23661 - DNA, 20 bp, Artificial Sequence
  Synthetic
gaugctggaauccccaccat

SEQ ID NO: 23662 - DNA, 20 bp, Artificial Sequence
  Synthetic
tgacttgcagacucggctug

SEQ ID NO: 23663 - DNA, 18 bp, Artificial Sequence
  Synthetic
gtcgggcugttgcttcug

SEQ ID NO: 23664 - DNA, 28 bp, Artificial Sequence
  Synthetic
ggcgggtgcautgtagttattatttuaa

SEQ ID NO: 23665 - DNA, 25 bp, Artificial Sequence
  Synthetic
gtttccacagcaacugcctttuaat

SEQ ID NO: 23666 - DNA, 21 bp, Artificial Sequence
  Synthetic
aaactgggcuttgtagcguct

SEQ ID NO: 23667 - DNA, 28 bp, Artificial Sequence
  Synthetic
tccgttttugcaaccaaacaagtaauaa

SEQ ID NO: 23668 - DNA, 18 bp, Artificial Sequence
  Synthetic
cggcagguaggtgtggua

SEQ ID NO: 23669 - DNA, 17 bp, Artificial Sequence
  Synthetic
ctgcccuccatcuccga

SEQ ID NO: 23670 - DNA, 24 bp, Artificial Sequence
  Synthetic
aattacagacccacautctgccut

SEQ ID NO: 23671 - DNA, 21 bp, Artificial Sequence
  Synthetic
cacagcacccuggagatgtua

SEQ ID NO: 23672 - DNA, 20 bp, Artificial Sequence
  Synthetic
gtaccagccccaaguggaug

SEQ ID NO: 23673 - DNA, 28 bp, Artificial Sequence
  Synthetic
aacctcattcugttttgttctctaucgt

SEQ ID NO: 23674 - DNA, 19 bp, Artificial Sequence
  Synthetic
ccgggccaguacctugaaa

SEQ ID NO: 23675 - DNA, 17 bp, Artificial Sequence
  Synthetic
gcagcauggtggaggug

SEQ ID NO: 23676 - DNA, 23 bp, Artificial Sequence
  Synthetic
gctgccauttcatuacaggcaaa

SEQ ID NO: 23677 - DNA, 22 bp, Artificial Sequence
  Synthetic
catttucaggaggaagcgaugg

SEQ ID NO: 23678 - DNA, 22 bp, Artificial Sequence
  Synthetic
gaggaaucggagaacacaguca

SEQ ID NO: 23679 - DNA, 26 bp, Artificial Sequence
  Synthetic
cgaagaacaatauctggtggctgaua

SEQ ID NO: 23680 - DNA, 17 bp, Artificial Sequence
  Synthetic
gcccugcagtcctgugt

SEQ ID NO: 23681 - DNA, 28 bp, Artificial Sequence
  Synthetic
ctcactgtgutttctcttctugaaacag

SEQ ID NO: 23682 - DNA, 19 bp, Artificial Sequence
  Synthetic
cgtggacgutctggacgug

SEQ ID NO: 23683 - DNA, 21 bp, Artificial Sequence
  Synthetic
cactggccucctgtttgucat

SEQ ID NO: 23684 - DNA, 24 bp, Artificial Sequence
  Synthetic
tctcgtgtttcugctgtctgtuac

SEQ ID NO: 23685 - DNA, 25 bp, Artificial Sequence
  Synthetic
aggtgtactcauctcagaggaaguc

SEQ ID NO: 23686 - DNA, 22 bp, Artificial Sequence
  Synthetic
gaccccggguttatuacaggaa

SEQ ID NO: 23687 - DNA, 21 bp, Artificial Sequence
  Synthetic
gtgcatccggcucagtacuac

SEQ ID NO: 23688 - DNA, 17 bp, Artificial Sequence
  Synthetic
ccttccaguggccccut

SEQ ID NO: 23689 - DNA, 19 bp, Artificial Sequence
  Synthetic
tctcagcaggccucacuca

SEQ ID NO: 23690 - DNA, 21 bp, Artificial Sequence
  Synthetic
gggacttguctggccucaaat

SEQ ID NO: 23691 - DNA, 20 bp, Artificial Sequence
  Synthetic
ccaccaguctgcatgtucac

SEQ ID NO: 23692 - DNA, 17 bp, Artificial Sequence
  Synthetic
ggcgcaugcaggagaug

SEQ ID NO: 23693 - DNA, 17 bp, Artificial Sequence
  Synthetic
cuccgggucgggaacag

SEQ ID NO: 23694 - DNA, 19 bp, Artificial Sequence
  Synthetic
gtggtgcugcgaccctuat

SEQ ID NO: 23695 - DNA, 27 bp, Artificial Sequence
  Synthetic
ccatgtgacgaugcaactattttctuc

SEQ ID NO: 23696 - DNA, 24 bp, Artificial Sequence
  Synthetic
ctcctatactgacugggaggacut

SEQ ID NO: 23697 - DNA, 22 bp, Artificial Sequence
  Synthetic
aaggttcucttcttgtcucggc

SEQ ID NO: 23698 - DNA, 25 bp, Artificial Sequence
  Synthetic
ggagaugtttggctucaaagaagaa

SEQ ID NO: 23699 - DNA, 20 bp, Artificial Sequence
  Synthetic
acaaacgucagcgggtucaa

SEQ ID NO: 23700 - DNA, 27 bp, Artificial Sequence
  Synthetic
ctgaggattcuccatctatagcuggaa

SEQ ID NO: 23701 - DNA, 23 bp, Artificial Sequence
  Synthetic
tcttcttctccauctcagcguct

SEQ ID NO: 23702 - DNA, 17 bp, Artificial Sequence
  Synthetic
accatgguggcccugag

SEQ ID NO: 23703 - DNA, 22 bp, Artificial Sequence
  Synthetic
tgggttgcutcctctugagaga

SEQ ID NO: 23704 - DNA, 21 bp, Artificial Sequence
  Synthetic
gcacaggaggaagugccaaua

SEQ ID NO: 23705 - DNA, 26 bp, Artificial Sequence
  Synthetic
ctcctcttcagcautctcaggauaaa

SEQ ID NO: 23706 - DNA, 31 bp, Artificial Sequence
  Synthetic
ggcaaacaataccaaauttacttcatgtgua

SEQ ID NO: 23707 - DNA, 21 bp, Artificial Sequence
  Synthetic
ccaacaaugaatgggccucac

SEQ ID NO: 23708 - DNA, 22 bp, Artificial Sequence
  Synthetic
gctgtcggacugaaactgtgut

SEQ ID NO: 23709 - DNA, 30 bp, Artificial Sequence
  Synthetic
tcagtaatgaaaaucaggauctcaactuac

SEQ ID NO: 23710 - DNA, 22 bp, Artificial Sequence
  Synthetic
gatcccacutcagcuaagagca

SEQ ID NO: 23711 - DNA, 20 bp, Artificial Sequence
  Synthetic
cgaatcgcugtggcctugat

SEQ ID NO: 23712 - DNA, 23 bp, Artificial Sequence
  Synthetic
cagtagtguccttctgtgctugt

SEQ ID NO: 23713 - DNA, 22 bp, Artificial Sequence
  Synthetic
aagacaggcugtcaccaaugag

SEQ ID NO: 23714 - DNA, 25 bp, Artificial Sequence
  Synthetic
tggcattgttgauatcacaggguat

SEQ ID NO: 23715 - DNA, 24 bp, Artificial Sequence
  Synthetic
agagagtaccugggaacaaccuac

SEQ ID NO: 23716 - DNA, 22 bp, Artificial Sequence
  Synthetic
aauctctcagcuacagaaccca

SEQ ID NO: 23717 - DNA, 27 bp, Artificial Sequence
  Synthetic
tctttagtagaucctgaggtugaccag

SEQ ID NO: 23718 - DNA, 22 bp, Artificial Sequence
  Synthetic
agaaagagccautggcactcug

SEQ ID NO: 23719 - DNA, 21 bp, Artificial Sequence
  Synthetic
tggcctcaucgctctcctaua

SEQ ID NO: 23720 - DNA, 21 bp, Artificial Sequence
  Synthetic
gctgtgctucttcaggtgguc

SEQ ID NO: 23721 - DNA, 26 bp, Artificial Sequence
  Synthetic
acatcatcccautttcttttcugcct

SEQ ID NO: 23722 - DNA, 21 bp, Artificial Sequence
  Synthetic
aaagtcccaugatggcagguc

SEQ ID NO: 23723 - DNA, 20 bp, Artificial Sequence
  Synthetic
tgatuagcccgggcagagua

SEQ ID NO: 23724 - DNA, 21 bp, Artificial Sequence
  Synthetic
acagcttgugccggtuaagat

SEQ ID NO: 23725 - DNA, 21 bp, Artificial Sequence
  Synthetic
ggctacaucgaccttccucct

SEQ ID NO: 23726 - DNA, 17 bp, Artificial Sequence
  Synthetic
cgguccaccccagguaa

SEQ ID NO: 23727 - DNA, 18 bp, Artificial Sequence
  Synthetic
cctgggaccucggactug

SEQ ID NO: 23728 - DNA, 17 bp, Artificial Sequence
  Synthetic
gcgcugaacaccgacuc

SEQ ID NO: 23729 - DNA, 21 bp, Artificial Sequence
  Synthetic
cauaccaggugagcagacaca

SEQ ID NO: 23730 - DNA, 20 bp, Artificial Sequence
  Synthetic
ccctaggcuccaagggtcuc

SEQ ID NO: 23731 - DNA, 22 bp, Artificial Sequence
  Synthetic
cacatgcugacgaggtcttuct

SEQ ID NO: 23732 - DNA, 18 bp, Artificial Sequence
  Synthetic
gagccuacgcaccuggac

SEQ ID NO: 23733 - DNA, 17 bp, Artificial Sequence
  Synthetic
tcucccggcgcctcaua

SEQ ID NO: 23734 - DNA, 21 bp, Artificial Sequence
  Synthetic
gggcgaggautccattuacct

SEQ ID NO: 23735 - DNA, 20 bp, Artificial Sequence
  Synthetic
agctcacucagcctttuggt

SEQ ID NO: 23736 - DNA, 26 bp, Artificial Sequence
  Synthetic
gagtgggaaaagaugaaattcucgga

SEQ ID NO: 23737 - DNA, 22 bp, Artificial Sequence
  Synthetic
gcaggaaaagggaugctcaugt

SEQ ID NO: 23738 - DNA, 21 bp, Artificial Sequence
  Synthetic
gatucgaagggagugccagaa

SEQ ID NO: 23739 - DNA, 23 bp, Artificial Sequence
  Synthetic
ggttgttcccaaaucgtttccuc

SEQ ID NO: 23740 - DNA, 28 bp, Artificial Sequence
  Synthetic
ccacatacttcuctaagaaagaguggaa

SEQ ID NO: 23741 - DNA, 22 bp, Artificial Sequence
  Synthetic
gcaggaaaagggaugctcaugt

SEQ ID NO: 23742 - DNA, 22 bp, Artificial Sequence
  Synthetic
gaagggagugtcagaagcauct

SEQ ID NO: 23743 - DNA, 24 bp, Artificial Sequence
  Synthetic
gccagagaagutgttcccaaauca

SEQ ID NO: 23744 - DNA, 28 bp, Artificial Sequence
  Synthetic
ccttcgatgatautgccaaatacttcuc

SEQ ID NO: 23745 - DNA, 20 bp, Artificial Sequence
  Synthetic
gtccccagacutgtctgcut

SEQ ID NO: 23746 - DNA, 26 bp, Artificial Sequence
  Synthetic
gcagaggaagaaaauggttugaagga

SEQ ID NO: 23747 - DNA, 26 bp, Artificial Sequence
  Synthetic
ggttgttcccgaautctttcctctua

SEQ ID NO: 23748 - DNA, 18 bp, Artificial Sequence
  Synthetic
ctgcuggcctuggagaca

SEQ ID NO: 23749 - DNA, 18 bp, Artificial Sequence
  Synthetic
cugggagacccctuccac

SEQ ID NO: 23750 - DNA, 24 bp, Artificial Sequence
  Synthetic
ccaccaccauctcctctttucaaa

SEQ ID NO: 23751 - DNA, 24 bp, Artificial Sequence
  Synthetic
gattatauccgcaagcugcagaag

SEQ ID NO: 23752 - DNA, 21 bp, Artificial Sequence
  Synthetic
gggccaagacccuatcaccua

SEQ ID NO: 23753 - DNA, 20 bp, Artificial Sequence
  Synthetic
ggtggttcuctgccctcuct

SEQ ID NO: 23754 - DNA, 17 bp, Artificial Sequence
  Synthetic
gcagtggcugggcacut

SEQ ID NO: 23755 - DNA, 21 bp, Artificial Sequence
  Synthetic
gacccaucuggagaacccaac

SEQ ID NO: 23756 - DNA, 17 bp, Artificial Sequence
  Synthetic
cctgtucccgacgcuca

SEQ ID NO: 23757 - DNA, 23 bp, Artificial Sequence
  Synthetic
ctacactctcugcatcgtctuct

SEQ ID NO: 23758 - DNA, 17 bp, Artificial Sequence
  Synthetic
agaucaggccccuggga

SEQ ID NO: 23759 - DNA, 18 bp, Artificial Sequence
  Synthetic
agctcgggauggcguaga

SEQ ID NO: 23760 - DNA, 21 bp, Artificial Sequence
  Synthetic
gggatgaguggaaggttcuct

SEQ ID NO: 23761 - DNA, 27 bp, Artificial Sequence
  Synthetic
cctcacttuccaactattctccaucac

SEQ ID NO: 23762 - DNA, 20 bp, Artificial Sequence
  Synthetic
gaaaagcagcugggctugag

SEQ ID NO: 23763 - DNA, 25 bp, Artificial Sequence
  Synthetic
ccctcccaccuttcatgtgtaauaa

SEQ ID NO: 23764 - DNA, 23 bp, Artificial Sequence
  Synthetic
ggctatttcucttgcaggucaga

SEQ ID NO: 23765 - DNA, 17 bp, Artificial Sequence
  Synthetic
cgggucaccccacacug

SEQ ID NO: 23766 - DNA, 22 bp, Artificial Sequence
  Synthetic
gaagccguctttttgugggaaa

SEQ ID NO: 23767 - DNA, 22 bp, Artificial Sequence
  Synthetic
cctcaaaagccaacagutgcuc

SEQ ID NO: 23768 - DNA, 22 bp, Artificial Sequence
  Synthetic
atcctgagcccuagctaatuca

SEQ ID NO: 23769 - DNA, 22 bp, Artificial Sequence
  Synthetic
gcttctcuggaagtccctctuc

SEQ ID NO: 23770 - DNA, 26 bp, Artificial Sequence
  Synthetic
aggaattagatccuctttgctttcug

SEQ ID NO: 23771 - DNA, 23 bp, Artificial Sequence
  Synthetic
cgtttttgcaccucttggttgug

SEQ ID NO: 23772 - DNA, 24 bp, Artificial Sequence
  Synthetic
tgtcttactuagcccagaggtcut

SEQ ID NO: 23773 - DNA, 23 bp, Artificial Sequence
  Synthetic
catggcaccuctgttgtttaugc

SEQ ID NO: 23774 - DNA, 22 bp, Artificial Sequence
  Synthetic
gagcugaattugccccaaacaa

SEQ ID NO: 23775 - DNA, 22 bp, Artificial Sequence
  Synthetic
ccuagagtaguacaggcagggt

SEQ ID NO: 23776 - DNA, 27 bp, Artificial Sequence
  Synthetic
gcttaaaaggcuaaatggagtccaguc

SEQ ID NO: 23777 - DNA, 22 bp, Artificial Sequence
  Synthetic
atggagtugacctggcaaugat

SEQ ID NO: 23778 - DNA, 22 bp, Artificial Sequence
  Synthetic
cgccgtcuttctttgctugaaa

SEQ ID NO: 23779 - DNA, 22 bp, Artificial Sequence
  Synthetic
ctctccaatcuccctgtgctuc

SEQ ID NO: 23780 - DNA, 21 bp, Artificial Sequence
  Synthetic
gcggcgauacagctcatagug

SEQ ID NO: 23781 - DNA, 29 bp, Artificial Sequence
  Synthetic
ttcaacatacttucaataccccaaaucct

SEQ ID NO: 23782 - DNA, 25 bp, Artificial Sequence
  Synthetic
acttugcacaagagatcaguaagag

SEQ ID NO: 23783 - DNA, 21 bp, Artificial Sequence
  Synthetic
acaccuaccatgacucccgaa

SEQ ID NO: 23784 - DNA, 27 bp, Artificial Sequence
  Synthetic
ttggaggtcauaggtattagacuggag

SEQ ID NO: 23785 - DNA, 24 bp, Artificial Sequence
  Synthetic
tgctttucaggagagacaggttug

SEQ ID NO: 23786 - DNA, 23 bp, Artificial Sequence
  Synthetic
cttaccaccuggcgagctatauc

SEQ ID NO: 23787 - DNA, 17 bp, Artificial Sequence
  Synthetic
gucgcgcccgaagtgua

SEQ ID NO: 23788 - DNA, 21 bp, Artificial Sequence
  Synthetic
gacttgcgaagutcccacuct

SEQ ID NO: 23789 - DNA, 22 bp, Artificial Sequence
  Synthetic
acttgctuaggccattgaggug

SEQ ID NO: 23790 - DNA, 20 bp, Artificial Sequence
  Synthetic
tgtccguccctctcttcuca

SEQ ID NO: 23791 - DNA, 19 bp, Artificial Sequence
  Synthetic
ctcccccgggutcactuac

SEQ ID NO: 23792 - DNA, 20 bp, Artificial Sequence
  Synthetic
tggccguggaggagacaaua

SEQ ID NO: 23793 - DNA, 17 bp, Artificial Sequence
  Synthetic
ggtggtuccgccaggug

SEQ ID NO: 23794 - DNA, 19 bp, Artificial Sequence
  Synthetic
cgaggacagugccatgucg

SEQ ID NO: 23795 - DNA, 20 bp, Artificial Sequence
  Synthetic
actctcggagcucgaaguct

SEQ ID NO: 23796 - DNA, 19 bp, Artificial Sequence
  Synthetic
tgactcccgcutcgcttuc

SEQ ID NO: 23797 - DNA, 22 bp, Artificial Sequence
  Synthetic
acatggtgaggutctggtcauc

SEQ ID NO: 23798 - DNA, 19 bp, Artificial Sequence
  Synthetic
ctcaccaccaccucgtuct

SEQ ID NO: 23799 - DNA, 18 bp, Artificial Sequence
  Synthetic
gctugagctccucagcca

SEQ ID NO: 23800 - DNA, 18 bp, Artificial Sequence
  Synthetic
ccaacggcauccgtcucc

SEQ ID NO: 23801 - DNA, 22 bp, Artificial Sequence
  Synthetic
tggatatgcutgtgctgctuga

SEQ ID NO: 23802 - DNA, 20 bp, Artificial Sequence
  Synthetic
ccucctcccucaacaagcac

SEQ ID NO: 23803 - DNA, 22 bp, Artificial Sequence
  Synthetic
agggaaaguactcgtugaagcc

SEQ ID NO: 23804 - DNA, 17 bp, Artificial Sequence
  Synthetic
tcuccgccgucagcaac

SEQ ID NO: 23805 - DNA, 18 bp, Artificial Sequence
  Synthetic
gtcacugccguccgacat

SEQ ID NO: 23806 - DNA, 23 bp, Artificial Sequence
  Synthetic
tccatugccgagaagtacttugg

SEQ ID NO: 23807 - DNA, 20 bp, Artificial Sequence
  Synthetic
gcctugaccagcaagttgug

SEQ ID NO: 23808 - DNA, 18 bp, Artificial Sequence
  Synthetic
gctggaccugagcaucgg

SEQ ID NO: 23809 - DNA, 17 bp, Artificial Sequence
  Synthetic
agggctuggcgtagugg

SEQ ID NO: 23810 - DNA, 23 bp, Artificial Sequence
  Synthetic
acagatgucagccauagagacca

SEQ ID NO: 23811 - DNA, 20 bp, Artificial Sequence
  Synthetic
gtgtatcgcuccttgcccut

SEQ ID NO: 23812 - DNA, 17 bp, Artificial Sequence
  Synthetic
gggccugcacugaggag

SEQ ID NO: 23813 - DNA, 19 bp, Artificial Sequence
  Synthetic
ggtccaggutggtctgcug

SEQ ID NO: 23814 - DNA, 22 bp, Artificial Sequence
  Synthetic
cagtcaatcucctcctgcauca

SEQ ID NO: 23815 - DNA, 20 bp, Artificial Sequence
  Synthetic
ggtgtcaucctgcgactucc

SEQ ID NO: 23816 - DNA, 20 bp, Artificial Sequence
  Synthetic
gaugccgactttugggaagg

SEQ ID NO: 23817 - DNA, 18 bp, Artificial Sequence
  Synthetic
ggctcuggcgggtaccua

SEQ ID NO: 23818 - DNA, 28 bp, Artificial Sequence
  Synthetic
tttccaattttctgutcaatccacacug

SEQ ID NO: 23819 - DNA, 26 bp, Artificial Sequence
  Synthetic
cutccagatuaaccaggacgaagaag

SEQ ID NO: 23820 - DNA, 21 bp, Artificial Sequence
  Synthetic
gctcctutcgatggucaccac

SEQ ID NO: 23821 - DNA, 26 bp, Artificial Sequence
  Synthetic
tgttgagacagaugaacttgtcacut

SEQ ID NO: 23822 - DNA, 27 bp, Artificial Sequence
  Synthetic
acaugctgtattcauggaaaaccaaga

SEQ ID NO: 23823 - DNA, 28 bp, Artificial Sequence
  Synthetic
caacctauaaggagaagaaagctucagt

SEQ ID NO: 23824 - DNA, 27 bp, Artificial Sequence
  Synthetic
gcttgagttucaatttctctuaaagca

SEQ ID NO: 23825 - DNA, 23 bp, Artificial Sequence
  Synthetic
gcctctctuttctccccauacag

SEQ ID NO: 23826 - DNA, 26 bp, Artificial Sequence
  Synthetic
ccttattgaggtuggtgtcaatccut

SEQ ID NO: 23827 - DNA, 20 bp, Artificial Sequence
  Synthetic
ggcaggacugattccggaua

SEQ ID NO: 23828 - DNA, 17 bp, Artificial Sequence
  Synthetic
ctccgccaagggutgug

SEQ ID NO: 23829 - DNA, 18 bp, Artificial Sequence
  Synthetic
cggctagugggtccucag

SEQ ID NO: 23830 - DNA, 22 bp, Artificial Sequence
  Synthetic
gctgcgtcuccaagattcttug

SEQ ID NO: 23831 - DNA, 20 bp, Artificial Sequence
  Synthetic
cctggugccacgaggtagua

SEQ ID NO: 23832 - DNA, 18 bp, Artificial Sequence
  Synthetic
ccctctccuccggctgua

SEQ ID NO: 23833 - DNA, 24 bp, Artificial Sequence
  Synthetic
gtatatgtcugggtagtgggucct

SEQ ID NO: 23834 - DNA, 23 bp, Artificial Sequence
  Synthetic
cacttgctuaggacctctctugg

SEQ ID NO: 23835 - DNA, 22 bp, Artificial Sequence
  Synthetic
cagagtagcuggagaagctgug

SEQ ID NO: 23836 - DNA, 17 bp, Artificial Sequence
  Synthetic
ccggcuacagcguggac

SEQ ID NO: 23837 - DNA, 24 bp, Artificial Sequence
  Synthetic
guagctctccauaaacaagcagga

SEQ ID NO: 23838 - DNA, 23 bp, Artificial Sequence
  Synthetic
ttttgtttgggccutcgtacuct

SEQ ID NO: 23839 - DNA, 22 bp, Artificial Sequence
  Synthetic
caatagcgtacugagcgcttug

SEQ ID NO: 23840 - DNA, 25 bp, Artificial Sequence
  Synthetic
ttacaacuccaccaggatactacuc

SEQ ID NO: 23841 - DNA, 25 bp, Artificial Sequence
  Synthetic
gctgtgggtauagtgcaggtataut

SEQ ID NO: 23842 - DNA, 25 bp, Artificial Sequence
  Synthetic
ttgttcccttugctgtttttccaut

SEQ ID NO: 23843 - DNA, 26 bp, Artificial Sequence
  Synthetic
gcaagtatttuctggtatgcatucac

SEQ ID NO: 23844 - DNA, 25 bp, Artificial Sequence
  Synthetic
gctaaaggctucttccaacagtuca

SEQ ID NO: 23845 - DNA, 22 bp, Artificial Sequence
  Synthetic
aagccgaacuggatgauacacc

SEQ ID NO: 23846 - DNA, 17 bp, Artificial Sequence
  Synthetic
ccccuggtgatgcugct

SEQ ID NO: 23847 - DNA, 17 bp, Artificial Sequence
  Synthetic
gtccggguggucccaaa

SEQ ID NO: 23848 - DNA, 25 bp, Artificial Sequence
  Synthetic
gttcacattugcaaaggaacucact

SEQ ID NO: 23849 - DNA, 28 bp, Artificial Sequence
  Synthetic
cgaaaaugaacgagaaugagatctugat

SEQ ID NO: 23850 - DNA, 22 bp, Artificial Sequence
  Synthetic
gaaacuaccgctcaaatuggca

SEQ ID NO: 23851 - DNA, 25 bp, Artificial Sequence
  Synthetic
ggtcagaagacgacutatcagagut

SEQ ID NO: 23852 - DNA, 20 bp, Artificial Sequence
  Synthetic
cgaagcccagcucucaaaag

SEQ ID NO: 23853 - DNA, 20 bp, Artificial Sequence
  Synthetic
tgacctuggtgtgucccaga

SEQ ID NO: 23854 - DNA, 29 bp, Artificial Sequence
  Synthetic
gacagagaauggaaaagauaaggaacaga

SEQ ID NO: 23855 - DNA, 24 bp, Artificial Sequence
  Synthetic
ccgaaaaggcutctcagaaucagt

SEQ ID NO: 23856 - DNA, 25 bp, Artificial Sequence
  Synthetic
gagtcttucccagagagauccaaaa

SEQ ID NO: 23857 - DNA, 20 bp, Artificial Sequence
  Synthetic
cagcttguctcggctcucag

SEQ ID NO: 23858 - DNA, 24 bp, Artificial Sequence
  Synthetic
gttucgttccatttuccagcacat

SEQ ID NO: 23859 - DNA, 26 bp, Artificial Sequence
  Synthetic
tcattcatccutcttctaagtgugga

SEQ ID NO: 23860 - DNA, 25 bp, Artificial Sequence
  Synthetic
gatggttgagutgacagctcugaat

SEQ ID NO: 23861 - DNA, 29 bp, Artificial Sequence
  Synthetic
gatttacctcgttuaagatctctctccut

SEQ ID NO: 23862 - DNA, 26 bp, Artificial Sequence
  Synthetic
aguacacugaagagauagaggaaaga

SEQ ID NO: 23863 - DNA, 22 bp, Artificial Sequence
  Synthetic
aggagcaagggucucagagaaa

SEQ ID NO: 23864 - DNA, 21 bp, Artificial Sequence
  Synthetic
gccggutcatgtuccggaaat

SEQ ID NO: 23865 - DNA, 19 bp, Artificial Sequence
  Synthetic
ggcaggaaucccgucaagg

SEQ ID NO: 23866 - DNA, 26 bp, Artificial Sequence
  Synthetic
catgctattcauctgctttagcgtut

SEQ ID NO: 23867 - DNA, 23 bp, Artificial Sequence
  Synthetic
aacctuaaaccaagtccugcagt

SEQ ID NO: 23868 - DNA, 27 bp, Artificial Sequence
  Synthetic
gggaggttccucttcatcttcactaut

SEQ ID NO: 23869 - DNA, 24 bp, Artificial Sequence
  Synthetic
gacccatucagccttctccataut

SEQ ID NO: 23870 - DNA, 28 bp, Artificial Sequence
  Synthetic
gcttcttagttgcutaagagttgcatua

SEQ ID NO: 23871 - DNA, 23 bp, Artificial Sequence
  Synthetic
agccgtcuaccaaagcagtaaut

SEQ ID NO: 23872 - DNA, 19 bp, Artificial Sequence
  Synthetic
ttacuggcaccccctgtug

SEQ ID NO: 23873 - DNA, 27 bp, Artificial Sequence
  Synthetic
acattatatatccutcccagcagcuct

SEQ ID NO: 23874 - DNA, 23 bp, Artificial Sequence
  Synthetic
tgaaatuacctgtgcucacagca

SEQ ID NO: 23875 - DNA, 21 bp, Artificial Sequence
  Synthetic
tgatgcccugttccccuaaga

SEQ ID NO: 23876 - DNA, 23 bp, Artificial Sequence
  Synthetic
gcgatggtucaatattgctgugg

SEQ ID NO: 23877 - DNA, 23 bp, Artificial Sequence
  Synthetic
agtcugaagccctucaaaagcat

SEQ ID NO: 23878 - DNA, 28 bp, Artificial Sequence
  Synthetic
gcctagaattaagugtggagggtctuat

SEQ ID NO: 23879 - DNA, 24 bp, Artificial Sequence
  Synthetic
acccccauaccaggaacagtatua

SEQ ID NO: 23880 - DNA, 28 bp, Artificial Sequence
  Synthetic
gacttaggtcuctaaccacaaaagugaa

SEQ ID NO: 23881 - DNA, 25 bp, Artificial Sequence
  Synthetic
gatgccaatacaugatcacgacuct

SEQ ID NO: 23882 - DNA, 22 bp, Artificial Sequence
  Synthetic
ctgcucaagtttctugccagag

SEQ ID NO: 23883 - DNA, 28 bp, Artificial Sequence
  Synthetic
ctgctttcccuaagagttcatatcacut

SEQ ID NO: 23884 - DNA, 22 bp, Artificial Sequence
  Synthetic
cgtgagcacuggtccattttua

SEQ ID NO: 23885 - DNA, 23 bp, Artificial Sequence
  Synthetic
tgactgagaagaccauccgacut

SEQ ID NO: 23886 - DNA, 26 bp, Artificial Sequence
  Synthetic
gagactguagaagagagagcaatugg

SEQ ID NO: 23887 - DNA, 19 bp, Artificial Sequence
  Synthetic
cttcattgutgcgggucgt

SEQ ID NO: 23888 - DNA, 24 bp, Artificial Sequence
  Synthetic
gtagccgcutgcatagttauagct

SEQ ID NO: 23889 - DNA, 28 bp, Artificial Sequence
  Synthetic
ctcgcttatctucagagtcttgtatucc

SEQ ID NO: 23890 - DNA, 22 bp, Artificial Sequence
  Synthetic
ccgcuccccttuagacaaagat

SEQ ID NO: 23891 - DNA, 23 bp, Artificial Sequence
  Synthetic
gguagtctctgtaucccaaagca

SEQ ID NO: 23892 - DNA, 28 bp, Artificial Sequence
  Synthetic
gctttggagtcaucacagaagtagauat

SEQ ID NO: 23893 - DNA, 31 bp, Artificial Sequence
  Synthetic
tgtagctttaccauaaccaattttgauagga

SEQ ID NO: 23894 - DNA, 23 bp, Artificial Sequence
  Synthetic
acatcgtuaccagcagcagtauc

SEQ ID NO: 23895 - DNA, 25 bp, Artificial Sequence
  Synthetic
cccaatcagagucaggataaagguc

SEQ ID NO: 23896 - DNA, 24 bp, Artificial Sequence
  Synthetic
gatcgtuacaacagcgacaaugat

SEQ ID NO: 23897 - DNA, 22 bp, Artificial Sequence
  Synthetic
ggtgctucctatctcgtucagc

SEQ ID NO: 23898 - DNA, 22 bp, Artificial Sequence
  Synthetic
ctcaagatcacucagcgtcucc

SEQ ID NO: 23899 - DNA, 24 bp, Artificial Sequence
  Synthetic
tgagtagaaguggcagtgtcugat

SEQ ID NO: 23900 - DNA, 24 bp, Artificial Sequence
  Synthetic
tgagaagagggccutaatgaccut

SEQ ID NO: 23901 - DNA, 27 bp, Artificial Sequence
  Synthetic
cactataaccacuataacagggucagc

SEQ ID NO: 23902 - DNA, 29 bp, Artificial Sequence
  Synthetic
tggatcacatcuctaccagagttaaucaa

SEQ ID NO: 23903 - DNA, 23 bp, Artificial Sequence
  Synthetic
tgugattugccaacaaggacagt

SEQ ID NO: 23904 - DNA, 27 bp, Artificial Sequence
  Synthetic
gtaaagatgauccgacaagugagagac

SEQ ID NO: 23905 - DNA, 21 bp, Artificial Sequence
  Synthetic
gggaaaagcgcacugacaauc

SEQ ID NO: 23906 - DNA, 22 bp, Artificial Sequence
  Synthetic
ggtcacauctgaccagucagaa

SEQ ID NO: 23907 - DNA, 24 bp, Artificial Sequence
  Synthetic
gttatgcttccucaaatgctgcug

SEQ ID NO: 23908 - DNA, 23 bp, Artificial Sequence
  Synthetic
ggatgagcuggaaagtcacaaug

SEQ ID NO: 23909 - DNA, 23 bp, Artificial Sequence
  Synthetic
atggaggtgaaugagacccagua

SEQ ID NO: 23910 - DNA, 22 bp, Artificial Sequence
  Synthetic
ggtgtcggaaacauacgtguga

SEQ ID NO: 23911 - DNA, 22 bp, Artificial Sequence
  Synthetic
agtaccatgccuactagccucc

SEQ ID NO: 23912 - DNA, 23 bp, Artificial Sequence
  Synthetic
agctguaaggagaaacgggaaug

SEQ ID NO: 23913 - DNA, 27 bp, Artificial Sequence
  Synthetic
gtcaataatguggaggcaactctttug

SEQ ID NO: 23914 - DNA, 29 bp, Artificial Sequence
  Synthetic
ttcaagtgactcutctcatgttcttuacc

SEQ ID NO: 23915 - DNA, 18 bp, Artificial Sequence
  Synthetic
cgctacucacgggcugat

SEQ ID NO: 23916 - DNA, 19 bp, Artificial Sequence
  Synthetic
cagcgauggtgtccuacgg

SEQ ID NO: 23917 - DNA, 25 bp, Artificial Sequence
  Synthetic
caccttctgautagcagtttcuggt

SEQ ID NO: 23918 - DNA, 20 bp, Artificial Sequence
  Synthetic
acgacgctugtgattgctug

SEQ ID NO: 23919 - DNA, 23 bp, Artificial Sequence
  Synthetic
cctctatctccutgctgttgcug

SEQ ID NO: 23920 - DNA, 26 bp, Artificial Sequence
  Synthetic
tgctatatgtcaaagugctaggctuc

SEQ ID NO: 23921 - DNA, 23 bp, Artificial Sequence
  Synthetic
gggaactcauggtgtaccccuat

SEQ ID NO: 23922 - DNA, 26 bp, Artificial Sequence
  Synthetic
acgagaaacugaagtgtgttagugac

SEQ ID NO: 23923 - DNA, 23 bp, Artificial Sequence
  Synthetic
cccacttcccugctgggattaua

SEQ ID NO: 23924 - DNA, 20 bp, Artificial Sequence
  Synthetic
ctacuggcacagcctgacuc

SEQ ID NO: 23925 - DNA, 28 bp, Artificial Sequence
  Synthetic
gccatttttattucctcactgattucca

SEQ ID NO: 23926 - DNA, 26 bp, Artificial Sequence
  Synthetic
acaggtagtcatuggtgagctgtaua

SEQ ID NO: 23927 - DNA, 23 bp, Artificial Sequence
  Synthetic
cattgccttaauggtggtcagug

SEQ ID NO: 23928 - DNA, 23 bp, Artificial Sequence
  Synthetic
gttgtacaatcucctgggagguc

SEQ ID NO: 23929 - DNA, 22 bp, Artificial Sequence
  Synthetic
cctgggctauactgggagcuac

SEQ ID NO: 23930 - DNA, 24 bp, Artificial Sequence
  Synthetic
ctgagtgaaugggaaggaagucaa

SEQ ID NO: 23931 - DNA, 22 bp, Artificial Sequence
  Synthetic
tgggtttcacuggatccttcug

SEQ ID NO: 23932 - DNA, 28 bp, Artificial Sequence
  Synthetic
ggagaaagtatucactccatccauacag

SEQ ID NO: 23933 - DNA, 22 bp, Artificial Sequence
  Synthetic
cccccagcaugacttagtucag

SEQ ID NO: 23934 - DNA, 22 bp, Artificial Sequence
  Synthetic
agcagcattcucacaagggtut

SEQ ID NO: 23935 - DNA, 26 bp, Artificial Sequence
  Synthetic
tcaggacttutgacttgaatucagag

SEQ ID NO: 23936 - DNA, 22 bp, Artificial Sequence
  Synthetic
ctccattcuggcatggatucga

SEQ ID NO: 23937 - DNA, 26 bp, Artificial Sequence
  Synthetic
cttcaccaagucctgtatttcacuct

SEQ ID NO: 23938 - DNA, 22 bp, Artificial Sequence
  Synthetic
ggccttgcaguaaaaggagcut

SEQ ID NO: 23939 - DNA, 22 bp, Artificial Sequence
  Synthetic
tccgttgggutttctctuccag

SEQ ID NO: 23940 - DNA, 24 bp, Artificial Sequence
  Synthetic
ggacagggacaaucaccctattut

SEQ ID NO: 23941 - DNA, 27 bp, Artificial Sequence
  Synthetic
tgccagattgauattgatgactgtucc

SEQ ID NO: 23942 - DNA, 23 bp, Artificial Sequence
  Synthetic
gaagttcagaacaguccctccuc

SEQ ID NO: 23943 - DNA, 21 bp, Artificial Sequence
  Synthetic
ggttaugcaggacctcgtugt

SEQ ID NO: 23944 - DNA, 25 bp, Artificial Sequence
  Synthetic
tgtttctagauccgtccttctgcua

SEQ ID NO: 23945 - DNA, 21 bp, Artificial Sequence
  Synthetic
gtgtatgtgucaacggcugga

SEQ ID NO: 23946 - DNA, 24 bp, Artificial Sequence
  Synthetic
ctccattcugacacctgtggtuag

SEQ ID NO: 23947 - DNA, 28 bp, Artificial Sequence
  Synthetic
catgaagcggguctattctaauaaccat

SEQ ID NO: 23948 - DNA, 22 bp, Artificial Sequence
  Synthetic
cattugcaggagaactggtugg

SEQ ID NO: 23949 - DNA, 22 bp, Artificial Sequence
  Synthetic
gggccatcucctatttctgugg

SEQ ID NO: 23950 - DNA, 25 bp, Artificial Sequence
  Synthetic
ctcgatgutgacaatatucccccaa

SEQ ID NO: 23951 - DNA, 25 bp, Artificial Sequence
  Synthetic
aatctcgugctttcttgatuggact

SEQ ID NO: 23952 - DNA, 19 bp, Artificial Sequence
  Synthetic
gcccgauactcaccaugcg

SEQ ID NO: 23953 - DNA, 19 bp, Artificial Sequence
  Synthetic
ccccuccccatgtggauct

SEQ ID NO: 23954 - DNA, 24 bp, Artificial Sequence
  Synthetic
cctgatcacutctcatcugaagca

SEQ ID NO: 23955 - DNA, 23 bp, Artificial Sequence
  Synthetic
gcacaacugagcatcugaagaac

SEQ ID NO: 23956 - DNA, 22 bp, Artificial Sequence
  Synthetic
gcacctaaagcutcaggtguga

SEQ ID NO: 23957 - DNA, 21 bp, Artificial Sequence
  Synthetic
gccatgtcautggccacatug

SEQ ID NO: 23958 - DNA, 19 bp, Artificial Sequence
  Synthetic
gtgctggcugggaagtuct

SEQ ID NO: 23959 - DNA, 18 bp, Artificial Sequence
  Synthetic
guggcagagguacgagct

SEQ ID NO: 23960 - DNA, 26 bp, Artificial Sequence
  Synthetic
cttgccaataucccttcctcttguaa

SEQ ID NO: 23961 - DNA, 23 bp, Artificial Sequence
  Synthetic
gcattucagggaggaacgtctut

SEQ ID NO: 23962 - DNA, 22 bp, Artificial Sequence
  Synthetic
ttgtcttcccugaggactcugt

SEQ ID NO: 23963 - DNA, 28 bp, Artificial Sequence
  Synthetic
tgagagataacgaaugggaaactttuga

SEQ ID NO: 23964 - DNA, 23 bp, Artificial Sequence
  Synthetic
ccagatacacuccctttcugagg

SEQ ID NO: 23965 - DNA, 21 bp, Artificial Sequence
  Synthetic
tggaagccgacucttccuact

SEQ ID NO: 23966 - DNA, 25 bp, Artificial Sequence
  Synthetic
cagagaaagaggagaugaagctuct

SEQ ID NO: 23967 - DNA, 23 bp, Artificial Sequence
  Synthetic
ccatcaucaaccagtgcatcuca

SEQ ID NO: 23968 - DNA, 18 bp, Artificial Sequence
  Synthetic
gugagggaccgagcaucc

SEQ ID NO: 23969 - DNA, 22 bp, Artificial Sequence
  Synthetic
ccttggctuacttggctttucc

SEQ ID NO: 23970 - DNA, 29 bp, Artificial Sequence
  Synthetic
agataacaaataccuctcccttctcguat

SEQ ID NO: 23971 - DNA, 24 bp, Artificial Sequence
  Synthetic
cagaagcccccauaactccauaag

SEQ ID NO: 23972 - DNA, 23 bp, Artificial Sequence
  Synthetic
gctgggccutcagatctttgaug

SEQ ID NO: 23973 - DNA, 18 bp, Artificial Sequence
  Synthetic
cugtgctcugagcaggga

SEQ ID NO: 23974 - DNA, 28 bp, Artificial Sequence
  Synthetic
cataactctgtattuctccagctcgtua

SEQ ID NO: 23975 - DNA, 21 bp, Artificial Sequence
  Synthetic
agtcagcguttagccuaccag

SEQ ID NO: 23976 - DNA, 29 bp, Artificial Sequence
  Synthetic
ctctggagtaaguttactattccctucct

SEQ ID NO: 23977 - DNA, 23 bp, Artificial Sequence
  Synthetic
ggtgatggtugagactgtgguaa

SEQ ID NO: 23978 - DNA, 21 bp, Artificial Sequence
  Synthetic
gggacacugaggagaatccug

SEQ ID NO: 23979 - DNA, 22 bp, Artificial Sequence
  Synthetic
tttttccccuccttctccgaug

SEQ ID NO: 23980 - DNA, 20 bp, Artificial Sequence
  Synthetic
ggaagucccagacccugaca

SEQ ID NO: 23981 - DNA, 28 bp, Artificial Sequence
  Synthetic
catctgtgaagggaaucacttttcttut

SEQ ID NO: 23982 - DNA, 22 bp, Artificial Sequence
  Synthetic
cttacctctcuggatgggcaug

SEQ ID NO: 23983 - DNA, 22 bp, Artificial Sequence
  Synthetic
tctcactgugccatttgcguat

SEQ ID NO: 23984 - DNA, 30 bp, Artificial Sequence
  Synthetic
gagatcttctttaauctgtatgttccuggt

SEQ ID NO: 23985 - DNA, 24 bp, Artificial Sequence
  Synthetic
acatggcagacautgtttcctcut

SEQ ID NO: 23986 - DNA, 30 bp, Artificial Sequence
  Synthetic
ctcaaatguaaaaaggaaatggaaucagca

SEQ ID NO: 23987 - DNA, 21 bp, Artificial Sequence
  Synthetic
gcccugcgccaatattuagga

SEQ ID NO: 23988 - DNA, 26 bp, Artificial Sequence
  Synthetic
cccaatcugaagagtcctaauccaag

SEQ ID NO: 23989 - DNA, 23 bp, Artificial Sequence
  Synthetic
gaaaccaaauttagccgtuggca

SEQ ID NO: 23990 - DNA, 26 bp, Artificial Sequence
  Synthetic
gaataatccauagcatagugggcgaa

SEQ ID NO: 23991 - DNA, 27 bp, Artificial Sequence
  Synthetic
cgagataacucagacaaaaccctugaa

SEQ ID NO: 23992 - DNA, 23 bp, Artificial Sequence
  Synthetic
gcaaagucagcattuagggcaat

SEQ ID NO: 23993 - DNA, 20 bp, Artificial Sequence
  Synthetic
gaagcuccagagggtgguac

SEQ ID NO: 23994 - DNA, 27 bp, Artificial Sequence
  Synthetic
gctagtcugacaatatccatttugaca

SEQ ID NO: 23995 - DNA, 29 bp, Artificial Sequence
  Synthetic
ctcaaaagcaagauggtacaatucagaac

SEQ ID NO: 23996 - DNA, 24 bp, Artificial Sequence
  Synthetic
cagaggccagcuagctataaucag

SEQ ID NO: 23997 - DNA, 25 bp, Artificial Sequence
  Synthetic
ccttaacagguctttgaaaccccut

SEQ ID NO: 23998 - DNA, 23 bp, Artificial Sequence
  Synthetic
ctcttccuccatgctttcuccat

SEQ ID NO: 23999 - DNA, 24 bp, Artificial Sequence
  Synthetic
gaagccattugtaaggtaccucga

SEQ ID NO: 24000 - DNA, 24 bp, Artificial Sequence
  Synthetic
ccgatacauactggcaaugcagaa

SEQ ID NO: 24001 - DNA, 24 bp, Artificial Sequence
  Synthetic
gtgtgcttucatgcttgaucgaat

SEQ ID NO: 24002 - DNA, 22 bp, Artificial Sequence
  Synthetic
gtgcttcuggatgtacugacca

SEQ ID NO: 24003 - DNA, 28 bp, Artificial Sequence
  Synthetic
ccttacttutcctttgctucaggagaat

SEQ ID NO: 24004 - DNA, 22 bp, Artificial Sequence
  Synthetic
gctctccacutcaacctucagc

SEQ ID NO: 24005 - DNA, 20 bp, Artificial Sequence
  Synthetic
ggugagaggctguggaccaa

SEQ ID NO: 24006 - DNA, 26 bp, Artificial Sequence
  Synthetic
ggcatcactatuccatagtactgcut

SEQ ID NO: 24007 - DNA, 24 bp, Artificial Sequence
  Synthetic
gatcuggagaagtggugaaaaggt

SEQ ID NO: 24008 - DNA, 20 bp, Artificial Sequence
  Synthetic
gcagctgcutcttcctccuc

SEQ ID NO: 24009 - DNA, 18 bp, Artificial Sequence
  Synthetic
gactttggcugctgcugt

SEQ ID NO: 24010 - DNA, 25 bp, Artificial Sequence
  Synthetic
ctcctctttggugcatttcagttua

SEQ ID NO: 24011 - DNA, 25 bp, Artificial Sequence
  Synthetic
gatgtaatagcucacttctguggct

SEQ ID NO: 24012 - DNA, 23 bp, Artificial Sequence
  Synthetic
agccccacuctactgtcagauag

SEQ ID NO: 24013 - DNA, 26 bp, Artificial Sequence
  Synthetic
atctgcttcugaaactcttcactcug

SEQ ID NO: 24014 - DNA, 21 bp, Artificial Sequence
  Synthetic
gcctgagccucaagagactug

SEQ ID NO: 24015 - DNA, 29 bp, Artificial Sequence
  Synthetic
tctctacatataggutcaattcacgtcua

SEQ ID NO: 24016 - DNA, 24 bp, Artificial Sequence
  Synthetic
ctgcaatgugcttagcttcttuga

SEQ ID NO: 24017 - DNA, 22 bp, Artificial Sequence
  Synthetic
cagttcugagacccttggagug

SEQ ID NO: 24018 - DNA, 20 bp, Artificial Sequence
  Synthetic
agaacctggaucttgcgcut

SEQ ID NO: 24019 - DNA, 18 bp, Artificial Sequence
  Synthetic
ggcgggutggtgagtucc

SEQ ID NO: 24020 - DNA, 27 bp, Artificial Sequence
  Synthetic
ttcagcatctgcauctttttcttgaug

SEQ ID NO: 24021 - DNA, 25 bp, Artificial Sequence
  Synthetic
ggtggagcuatgagcacagauaaag

SEQ ID NO: 24022 - DNA, 21 bp, Artificial Sequence
  Synthetic
ctcaatcugccccctccaaut

SEQ ID NO: 24023 - DNA, 21 bp, Artificial Sequence
  Synthetic
ctccuacagccgacucaaacc

SEQ ID NO: 24024 - DNA, 23 bp, Artificial Sequence
  Synthetic
cctgatacuaagcccuccagact

SEQ ID NO: 24025 - DNA, 22 bp, Artificial Sequence
  Synthetic
cgtcttcttccugcgtgatcug

SEQ ID NO: 24026 - DNA, 23 bp, Artificial Sequence
  Synthetic
gccctcagutggtgtgttttuct

SEQ ID NO: 24027 - DNA, 28 bp, Artificial Sequence
  Synthetic
tcaaagatggucacttgtgctttctuaa

SEQ ID NO: 24028 - DNA, 23 bp, Artificial Sequence
  Synthetic
ggacagcguttctcagaatucca

SEQ ID NO: 24029 - DNA, 22 bp, Artificial Sequence
  Synthetic
ctgggagcaaucagtuccagag

SEQ ID NO: 24030 - DNA, 17 bp, Artificial Sequence
  Synthetic
cagcutggcuggcacag

SEQ ID NO: 24031 - DNA, 18 bp, Artificial Sequence
  Synthetic
gcaggtgguggaggcuat

SEQ ID NO: 24032 - DNA, 19 bp, Artificial Sequence
  Synthetic
agtgaggucgggtcacuca

SEQ ID NO: 24033 - DNA, 21 bp, Artificial Sequence
  Synthetic
acacacacacutggtgctcut

SEQ ID NO: 24034 - DNA, 20 bp, Artificial Sequence
  Synthetic
ccaagcuggctaaagcucct

SEQ ID NO: 24035 - DNA, 19 bp, Artificial Sequence
  Synthetic
cccagcacgucacgttcut

SEQ ID NO: 24036 - DNA, 25 bp, Artificial Sequence
  Synthetic
cttcatctucactgagttccuggag

SEQ ID NO: 24037 - DNA, 20 bp, Artificial Sequence
  Synthetic
tccaugaaggcagccaugat

SEQ ID NO: 24038 - DNA, 20 bp, Artificial Sequence
  Synthetic
gcggctgugtctcctctcua

SEQ ID NO: 24039 - DNA, 20 bp, Artificial Sequence
  Synthetic
ctcgatgaugtggcctugga

SEQ ID NO: 24040 - DNA, 17 bp, Artificial Sequence
  Synthetic
gtcccugccgctuccat

SEQ ID NO: 24041 - DNA, 24 bp, Artificial Sequence
  Synthetic
gccgcatauactcaaagaccauga

SEQ ID NO: 24042 - DNA, 18 bp, Artificial Sequence
  Synthetic
gtgtaccuggcgggtcug

SEQ ID NO: 24043 - DNA, 26 bp, Artificial Sequence
  Synthetic
acggtaatagucggtgctgtagauat

SEQ ID NO: 24044 - DNA, 17 bp, Artificial Sequence
  Synthetic
gguggccccaggcaauc

SEQ ID NO: 24045 - DNA, 20 bp, Artificial Sequence
  Synthetic
gtgcacauccttgatgcugt

SEQ ID NO: 24046 - DNA, 24 bp, Artificial Sequence
  Synthetic
gagatggagcggutctggaauaag

SEQ ID NO: 24047 - DNA, 25 bp, Artificial Sequence
  Synthetic
caaccttcagaacuttcacccacua

SEQ ID NO: 24048 - DNA, 21 bp, Artificial Sequence
  Synthetic
ttgtgaaguccctgtgtcugg

SEQ ID NO: 24049 - DNA, 24 bp, Artificial Sequence
  Synthetic
cccactcccutcacagagaaaaug

SEQ ID NO: 24050 - DNA, 27 bp, Artificial Sequence
  Synthetic
tcacccatcttuctgtttgtcattcut

SEQ ID NO: 24051 - DNA, 27 bp, Artificial Sequence
  Synthetic
cccttttccacuattatggtcuaccag

SEQ ID NO: 24052 - DNA, 23 bp, Artificial Sequence
  Synthetic
tcggcagttugatcttgagaguc

SEQ ID NO: 24053 - DNA, 28 bp, Artificial Sequence
  Synthetic
ggccaaagaaaaugctaaaatgtuggaa

SEQ ID NO: 24054 - DNA, 20 bp, Artificial Sequence
  Synthetic
ggaccctcaaugacggtgut

SEQ ID NO: 24055 - DNA, 21 bp, Artificial Sequence
  Synthetic
ctgaactugcggtggatgaug

SEQ ID NO: 24056 - DNA, 26 bp, Artificial Sequence
  Synthetic
tcttctgcaaugtttctgaaggauga

SEQ ID NO: 24057 - DNA, 28 bp, Artificial Sequence
  Synthetic
tggcttcctctugaaatttacctatgut

SEQ ID NO: 24058 - DNA, 21 bp, Artificial Sequence
  Synthetic
ctgcctgaugatgatcugcct

SEQ ID NO: 24059 - DNA, 22 bp, Artificial Sequence
  Synthetic
gctgcgaguccatcactgtauc

SEQ ID NO: 24060 - DNA, 20 bp, Artificial Sequence
  Synthetic
cccccuctttctuccccact

SEQ ID NO: 24061 - DNA, 17 bp, Artificial Sequence
  Synthetic
tgccgcuccagaacgug

SEQ ID NO: 24062 - DNA, 23 bp, Artificial Sequence
  Synthetic
tgtcttugagcggacacactauc

SEQ ID NO: 24063 - DNA, 29 bp, Artificial Sequence
  Synthetic
gtttttaaacagutttcagagatgugcct

SEQ ID NO: 24064 - DNA, 22 bp, Artificial Sequence
  Synthetic
cacagactugcagctttgugaa

SEQ ID NO: 24065 - DNA, 21 bp, Artificial Sequence
  Synthetic
ttggcctucagtctcaggtug

SEQ ID NO: 24066 - DNA, 22 bp, Artificial Sequence
  Synthetic
tgtgcuggaagttttcuacgct

SEQ ID NO: 24067 - DNA, 20 bp, Artificial Sequence
  Synthetic
tggccccauccctgtttaug

SEQ ID NO: 24068 - DNA, 18 bp, Artificial Sequence
  Synthetic
cuccacccacuggccaat

SEQ ID NO: 24069 - DNA, 19 bp, Artificial Sequence
  Synthetic
catgcctgucccacagugt

SEQ ID NO: 24070 - DNA, 19 bp, Artificial Sequence
  Synthetic
cgcccacgaaauccgtgua

SEQ ID NO: 24071 - DNA, 19 bp, Artificial Sequence
  Synthetic
cttggcttuccggaaccug

SEQ ID NO: 24072 - DNA, 21 bp, Artificial Sequence
  Synthetic
gcccccaagacugatcaugaa

SEQ ID NO: 24073 - DNA, 19 bp, Artificial Sequence
  Synthetic
gctggcacugctcatccug

SEQ ID NO: 24074 - DNA, 20 bp, Artificial Sequence
  Synthetic
caccuccaggccaaaggtua

SEQ ID NO: 24075 - DNA, 19 bp, Artificial Sequence
  Synthetic
ttctggagugccugaacgg

SEQ ID NO: 24076 - DNA, 28 bp, Artificial Sequence
  Synthetic
ttgaaatttgguggatctatgtctucgt

SEQ ID NO: 24077 - DNA, 27 bp, Artificial Sequence
  Synthetic
tccttgactacutgatgagatgtcuga

SEQ ID NO: 24078 - DNA, 28 bp, Artificial Sequence
  Synthetic
agcagatggcutaaagtacatctttugt

SEQ ID NO: 24079 - DNA, 26 bp, Artificial Sequence
  Synthetic
ggtgaattagcaucctgcagtuaaag

SEQ ID NO: 24080 - DNA, 20 bp, Artificial Sequence
  Synthetic
acctcggccuccagctatua

SEQ ID NO: 24081 - DNA, 31 bp, Artificial Sequence
  Synthetic
ctggatataattagutttaagggcagaguca

SEQ ID NO: 24082 - DNA, 30 bp, Artificial Sequence
  Synthetic
caacctttcatcaugggaattcatatcauc

SEQ ID NO: 24083 - DNA, 25 bp, Artificial Sequence
  Synthetic
agaatttctgcuttctagccaucaa

SEQ ID NO: 24084 - DNA, 22 bp, Artificial Sequence
  Synthetic
gcacagutcatgtcuccaagga

SEQ ID NO: 24085 - DNA, 31 bp, Artificial Sequence
  Synthetic
gttactgggatgtutgaataagatcggtuat

SEQ ID NO: 24086 - DNA, 26 bp, Artificial Sequence
  Synthetic
tgacagacttucagatggagacagua

SEQ ID NO: 24087 - DNA, 22 bp, Artificial Sequence
  Synthetic
gagtuagcagaggcagagtugg

SEQ ID NO: 24088 - DNA, 25 bp, Artificial Sequence
  Synthetic
agcctggaugatgtaaaggugaaag

SEQ ID NO: 24089 - DNA, 27 bp, Artificial Sequence
  Synthetic
actaagaaugaccattctgugaagcaa

SEQ ID NO: 24090 - DNA, 26 bp, Artificial Sequence
  Synthetic
ggcgatcagautccatggacaaauaa

SEQ ID NO: 24091 - DNA, 28 bp, Artificial Sequence
  Synthetic
cacaaaataccacugtagactgaaaugt

SEQ ID NO: 24092 - DNA, 30 bp, Artificial Sequence
  Synthetic
atgtatuatcagagagattuccaccacaac

SEQ ID NO: 24093 - DNA, 22 bp, Artificial Sequence
  Synthetic
cctuggaaagggcuagggagat

SEQ ID NO: 24094 - DNA, 23 bp, Artificial Sequence
  Synthetic
ctgctcctgutggcatcaataug

SEQ ID NO: 24095 - DNA, 24 bp, Artificial Sequence
  Synthetic
agatcagcucacagaccattucaa

SEQ ID NO: 24096 - DNA, 22 bp, Artificial Sequence
  Synthetic
ttcuaccagcccgtttucacaa

SEQ ID NO: 24097 - DNA, 21 bp, Artificial Sequence
  Synthetic
ccttccuacctgctccuggat

SEQ ID NO: 24098 - DNA, 28 bp, Artificial Sequence
  Synthetic
tcatgatcagtggaugtaatctggatug

SEQ ID NO: 24099 - DNA, 23 bp, Artificial Sequence
  Synthetic
ggccatcatugggttcatgtuct

SEQ ID NO: 24100 - DNA, 23 bp, Artificial Sequence
  Synthetic
gtgtgaacttuccagaacccuga

SEQ ID NO: 24101 - DNA, 26 bp, Artificial Sequence
  Synthetic
gggtactactugaagtggaaacucac

SEQ ID NO: 24102 - DNA, 25 bp, Artificial Sequence
  Synthetic
tccttcagcagcuactgactgaaua

SEQ ID NO: 24103 - DNA, 21 bp, Artificial Sequence
  Synthetic
tgctccaaaugctacgaccug

SEQ ID NO: 24104 - DNA, 20 bp, Artificial Sequence
  Synthetic
actcagcaagcuggagtugg

SEQ ID NO: 24105 - DNA, 21 bp, Artificial Sequence
  Synthetic
gcattgaugcccttcaccuca

SEQ ID NO: 24106 - DNA, 18 bp, Artificial Sequence
  Synthetic
ccacaccutccgccugac

SEQ ID NO: 24107 - DNA, 19 bp, Artificial Sequence
  Synthetic
cccugacccctuccaacac

SEQ ID NO: 24108 - DNA, 21 bp, Artificial Sequence
  Synthetic
gctgctcugtgagtcaaugct

SEQ ID NO: 24109 - DNA, 21 bp, Artificial Sequence
  Synthetic
gtgagucagcttggagucagt

SEQ ID NO: 24110 - DNA, 23 bp, Artificial Sequence
  Synthetic
accagaggcugctttctctctua

SEQ ID NO: 24111 - DNA, 22 bp, Artificial Sequence
  Synthetic
caaggtgguggagaagatuggg

SEQ ID NO: 24112 - DNA, 20 bp, Artificial Sequence
  Synthetic
ctgaccacaccgcgutctua

SEQ ID NO: 24113 - DNA, 21 bp, Artificial Sequence
  Synthetic
catcgcatcucatgccctuct

SEQ ID NO: 24114 - DNA, 30 bp, Artificial Sequence
  Synthetic
tgtcattttctccuttttctttgagcaaut

SEQ ID NO: 24115 - DNA, 28 bp, Artificial Sequence
  Synthetic
gctcaacttgcautaattcgggatauac

SEQ ID NO: 24116 - DNA, 24 bp, Artificial Sequence
  Synthetic
ggtgacaagggutgtaccataucc

SEQ ID NO: 24117 - DNA, 21 bp, Artificial Sequence
  Synthetic
ggcaucaccagaacacucagt

SEQ ID NO: 24118 - DNA, 22 bp, Artificial Sequence
  Synthetic
agaggatgcugctgaaggaauc

SEQ ID NO: 24119 - DNA, 26 bp, Artificial Sequence
  Synthetic
gaaaatgacaagcuggttgagacuac

SEQ ID NO: 24120 - DNA, 22 bp, Artificial Sequence
  Synthetic
gatgugaccgggaataucagga

SEQ ID NO: 24121 - DNA, 23 bp, Artificial Sequence
  Synthetic
cagaactgcagcugattccatut

SEQ ID NO: 24122 - DNA, 26 bp, Artificial Sequence
  Synthetic
attgggagaaatucacctgtctctuc

SEQ ID NO: 24123 - DNA, 28 bp, Artificial Sequence
  Synthetic
ggagtaagucgagaagtatttgactuca

SEQ ID NO: 24124 - DNA, 28 bp, Artificial Sequence
  Synthetic
tcctttcaagttcucagatcatcactuc

SEQ ID NO: 24125 - DNA, 22 bp, Artificial Sequence
  Synthetic
aacatgtguccagaccctttuc

SEQ ID NO: 24126 - DNA, 26 bp, Artificial Sequence
  Synthetic
gccacatacttuctcagaaacctuca

SEQ ID NO: 24127 - DNA, 23 bp, Artificial Sequence
  Synthetic
cuagcctttaucaggaccaagcc

SEQ ID NO: 24128 - DNA, 26 bp, Artificial Sequence
  Synthetic
agtatcagaucacaagatggctcuca

SEQ ID NO: 24129 - DNA, 30 bp, Artificial Sequence
  Synthetic
aaatatgtgaacagcutcatgagtaaauca

SEQ ID NO: 24130 - DNA, 30 bp, Artificial Sequence
  Synthetic
cgacatcattacaauctgaaatgccuaaag

SEQ ID NO: 24131 - DNA, 30 bp, Artificial Sequence
  Synthetic
tgtaataatacttggcutttatctggtgut

SEQ ID NO: 24132 - DNA, 27 bp, Artificial Sequence
  Synthetic
caccagataaguattggtgacttuggt

SEQ ID NO: 24133 - DNA, 24 bp, Artificial Sequence
  Synthetic
ccgtctgagagutctcccatgaua

SEQ ID NO: 24134 - DNA, 29 bp, Artificial Sequence
  Synthetic
aacctgtgaaaautttagtgccugaaaaa

SEQ ID NO: 24135 - DNA, 30 bp, Artificial Sequence
  Synthetic
agtaaatcauaagctgtaactttuccagat

SEQ ID NO: 24136 - DNA, 27 bp, Artificial Sequence
  Synthetic
tcacaaatgucactaaaagauggcaga

SEQ ID NO: 24137 - DNA, 25 bp, Artificial Sequence
  Synthetic
tttgggacugaaggagttcaucaag

SEQ ID NO: 24138 - DNA, 28 bp, Artificial Sequence
  Synthetic
aagccctgctauttaaaagacttctuga

SEQ ID NO: 24139 - DNA, 23 bp, Artificial Sequence
  Synthetic
cattcccaaccutctacctucga

SEQ ID NO: 24140 - DNA, 32 bp, Artificial Sequence
  Synthetic
gaaaattacttggaaauagaaggaatggcuaa

SEQ ID NO: 24141 - DNA, 28 bp, Artificial Sequence
  Synthetic
ctttgcgagguctacattcataaactuc

SEQ ID NO: 24142 - DNA, 25 bp, Artificial Sequence
  Synthetic
gugaaaaagaggaaaagguaaggug

SEQ ID NO: 24143 - DNA, 23 bp, Artificial Sequence
  Synthetic
tccaacacguggtactttuccat

SEQ ID NO: 24144 - DNA, 24 bp, Artificial Sequence
  Synthetic
atttcccaaccucagaatgcauga

SEQ ID NO: 24145 - DNA, 25 bp, Artificial Sequence
  Synthetic
gagaagtugaaggcagaaagcauac

SEQ ID NO: 24146 - DNA, 22 bp, Artificial Sequence
  Synthetic
cugacatccaucaaaggcacac

SEQ ID NO: 24147 - DNA, 22 bp, Artificial Sequence
  Synthetic
gctgaccagcugaaagatgcut

SEQ ID NO: 24148 - DNA, 21 bp, Artificial Sequence
  Synthetic
ctacccccagaacutcagguc

SEQ ID NO: 24149 - DNA, 23 bp, Artificial Sequence
  Synthetic
cagtcacuagcctggtcattuca

SEQ ID NO: 24150 - DNA, 27 bp, Artificial Sequence
  Synthetic
gggatctacuaccttagactuacacac

SEQ ID NO: 24151 - DNA, 24 bp, Artificial Sequence
  Synthetic
gcagaagucaggatuacacagcaa

SEQ ID NO: 24152 - DNA, 24 bp, Artificial Sequence
  Synthetic
ccttcacatugcccttactctcut

SEQ ID NO: 24153 - DNA, 28 bp, Artificial Sequence
  Synthetic
aacaatgcaaaagcacutcttatccuac

SEQ ID NO: 24154 - DNA, 22 bp, Artificial Sequence
  Synthetic
ccttttacuccagcttgcugac

SEQ ID NO: 24155 - DNA, 23 bp, Artificial Sequence
  Synthetic
gagcctgaccuatgcaacaagua

SEQ ID NO: 24156 - DNA, 22 bp, Artificial Sequence
  Synthetic
cagactcctuccttctcccuca

SEQ ID NO: 24157 - DNA, 20 bp, Artificial Sequence
  Synthetic
caaccuctggcugagacagt

SEQ ID NO: 24158 - DNA, 22 bp, Artificial Sequence
  Synthetic
gtctatugggacagcttgguca

SEQ ID NO: 24159 - DNA, 24 bp, Artificial Sequence
  Synthetic
cagtcctagugtctgacucagaga

SEQ ID NO: 24160 - DNA, 23 bp, Artificial Sequence
  Synthetic
cctgttccatugggtctccatut

SEQ ID NO: 24161 - DNA, 22 bp, Artificial Sequence
  Synthetic
caaagcagaugcttcaggaugg

SEQ ID NO: 24162 - DNA, 27 bp, Artificial Sequence
  Synthetic
tgaatccttttaccucctgttctcuca

SEQ ID NO: 24163 - DNA, 23 bp, Artificial Sequence
  Synthetic
gaaacgagacgauggttcuaggg

SEQ ID NO: 24164 - DNA, 21 bp, Artificial Sequence
  Synthetic
gctuggagacaaggatccugt

SEQ ID NO: 24165 - DNA, 19 bp, Artificial Sequence
  Synthetic
caacatugcgccggauacc

SEQ ID NO: 24166 - DNA, 21 bp, Artificial Sequence
  Synthetic
gggaaucagtcacugccacac

SEQ ID NO: 24167 - DNA, 26 bp, Artificial Sequence
  Synthetic
agaauaagaaagagcuggcaaccaaa

SEQ ID NO: 24168 - DNA, 25 bp, Artificial Sequence
  Synthetic
tgtcgaacgugttcaaaaggattug

SEQ ID NO: 24169 - DNA, 21 bp, Artificial Sequence
  Synthetic
ccctgttuctggtctucgcag

SEQ ID NO: 24170 - DNA, 22 bp, Artificial Sequence
  Synthetic
tgctataggugggtggacagua

SEQ ID NO: 24171 - DNA, 20 bp, Artificial Sequence
  Synthetic
ccagactgautacgcgcuct

SEQ ID NO: 24172 - DNA, 22 bp, Artificial Sequence
  Synthetic
gctttggtguacagtgctugga

SEQ ID NO: 24173 - DNA, 22 bp, Artificial Sequence
  Synthetic
ggtggcugatgaactttugcac

SEQ ID NO: 24174 - DNA, 21 bp, Artificial Sequence
  Synthetic
gggccagtucctccctaguat

SEQ ID NO: 24175 - DNA, 28 bp, Artificial Sequence
  Synthetic
accagauttaccacuaaagaggaaacag

SEQ ID NO: 24176 - DNA, 27 bp, Artificial Sequence
  Synthetic
atgtttgtttugattcctagtguccct

SEQ ID NO: 24177 - DNA, 17 bp, Artificial Sequence
  Synthetic
gcgcacutgctggguga

SEQ ID NO: 24178 - DNA, 21 bp, Artificial Sequence
  Synthetic
gcacggugtttcgaucacaga

SEQ ID NO: 24179 - DNA, 21 bp, Artificial Sequence
  Synthetic
tgcccgccugttctctuaaag

SEQ ID NO: 24180 - DNA, 18 bp, Artificial Sequence
  Synthetic
cgctgaggcccuccctua

SEQ ID NO: 24181 - DNA, 25 bp, Artificial Sequence
  Synthetic
tggatataattuccgagcgaagcug

SEQ ID NO: 24182 - DNA, 17 bp, Artificial Sequence
  Synthetic
cggacagggcuggctug

SEQ ID NO: 24183 - DNA, 18 bp, Artificial Sequence
  Synthetic
cccuggagccccugaaga

SEQ ID NO: 24184 - DNA, 18 bp, Artificial Sequence
  Synthetic
ctgctgugcctgguggaa

SEQ ID NO: 24185 - DNA, 20 bp, Artificial Sequence
  Synthetic
cccacaaaaucccccucacc

SEQ ID NO: 24186 - DNA, 24 bp, Artificial Sequence
  Synthetic
cttcacagaautctcgacuccact

SEQ ID NO: 24187 - DNA, 18 bp, Artificial Sequence
  Synthetic
gtccccgcgugagctauc

SEQ ID NO: 24188 - DNA, 26 bp, Artificial Sequence
  Synthetic
gcatttttcauacacaggtccctcua

SEQ ID NO: 24189 - DNA, 19 bp, Artificial Sequence
  Synthetic
ccatctgcutcgggccuac

SEQ ID NO: 24190 - DNA, 25 bp, Artificial Sequence
  Synthetic
ttttccagtccucggaaatacagut

SEQ ID NO: 24191 - DNA, 23 bp, Artificial Sequence
  Synthetic
ctgactccutcccaagcugaaat

SEQ ID NO: 24192 - DNA, 21 bp, Artificial Sequence
  Synthetic
ggacagaggcugccatuacat

SEQ ID NO: 24193 - DNA, 27 bp, Artificial Sequence
  Synthetic
ctaaaccacagaaaaugaggagaccua

SEQ ID NO: 24194 - DNA, 21 bp, Artificial Sequence
  Synthetic
gactugacggactctgucgat

SEQ ID NO: 24195 - DNA, 25 bp, Artificial Sequence
  Synthetic
tttttgtcaauctgctgtgttuccc

SEQ ID NO: 24196 - DNA, 22 bp, Artificial Sequence
  Synthetic
caggttguccactgcattcuca

SEQ ID NO: 24197 - DNA, 21 bp, Artificial Sequence
  Synthetic
tggctgucacccataacctuc

SEQ ID NO: 24198 - DNA, 21 bp, Artificial Sequence
  Synthetic
gttcatgcugaggtctccuga

SEQ ID NO: 24199 - DNA, 22 bp, Artificial Sequence
  Synthetic
gctgctgatutcccctactugt

SEQ ID NO: 24200 - DNA, 21 bp, Artificial Sequence
  Synthetic
gtgcacccauacccaactuct

SEQ ID NO: 24201 - DNA, 25 bp, Artificial Sequence
  Synthetic
gcttcaagaccuccaggagttttuc

SEQ ID NO: 24202 - DNA, 17 bp, Artificial Sequence
  Synthetic
gtgugggcgaggcctua

SEQ ID NO: 24203 - DNA, 18 bp, Artificial Sequence
  Synthetic
agtacgaugccccaugcg

SEQ ID NO: 24204 - DNA, 22 bp, Artificial Sequence
  Synthetic
gagtggtguactagcggaucaa

SEQ ID NO: 24205 - DNA, 24 bp, Artificial Sequence
  Synthetic
cagttgagccaggguaacatcuag

SEQ ID NO: 24206 - DNA, 20 bp, Artificial Sequence
  Synthetic
cttttggaccucggctcauc

SEQ ID NO: 24207 - DNA, 27 bp, Artificial Sequence
  Synthetic
gggagaaaugaacagatctugaaagct

SEQ ID NO: 24208 - DNA, 23 bp, Artificial Sequence
  Synthetic
tggatgtccauatgtggcacaut

SEQ ID NO: 24209 - DNA, 26 bp, Artificial Sequence
  Synthetic
agagagagagaaguttctaccauccc

SEQ ID NO: 24210 - DNA, 21 bp, Artificial Sequence
  Synthetic
actagtcucaccagcccugac

SEQ ID NO: 24211 - DNA, 20 bp, Artificial Sequence
  Synthetic
tggaacccuttctgcgctut

SEQ ID NO: 24212 - DNA, 21 bp, Artificial Sequence
  Synthetic
tgugcaggacagcaatcucat

SEQ ID NO: 24213 - DNA, 22 bp, Artificial Sequence
  Synthetic
tgtgaatccccuctcccgauag

SEQ ID NO: 24214 - DNA, 25 bp, Artificial Sequence
  Synthetic
tgaaactctgugagattgctgtgut

SEQ ID NO: 24215 - DNA, 24 bp, Artificial Sequence
  Synthetic
gtggtcttccautacggagagauc

SEQ ID NO: 24216 - DNA, 26 bp, Artificial Sequence
  Synthetic
agactcagcuctacaataagccucat

SEQ ID NO: 24217 - DNA, 28 bp, Artificial Sequence
  Synthetic
ttttaattaccutgcatcctucacaagc

SEQ ID NO: 24218 - DNA, 23 bp, Artificial Sequence
  Synthetic
gagatcuccagtgataucgacca

SEQ ID NO: 24219 - DNA, 27 bp, Artificial Sequence
  Synthetic
tttgtctgtugtctttcctgucaagat

SEQ ID NO: 24220 - DNA, 18 bp, Artificial Sequence
  Synthetic
tcagggcugccagttucg

SEQ ID NO: 24221 - DNA, 21 bp, Artificial Sequence
  Synthetic
tcaucaaggaggccagcatug

SEQ ID NO: 24222 - DNA, 22 bp, Artificial Sequence
  Synthetic
cctgagtccucacagctgttug

SEQ ID NO: 24223 - DNA, 28 bp, Artificial Sequence
  Synthetic
gctagtacaaguccttgtagatctccug

SEQ ID NO: 24224 - DNA, 26 bp, Artificial Sequence
  Synthetic
tgtactcctuggttttgtgttucaca

SEQ ID NO: 24225 - DNA, 28 bp, Artificial Sequence
  Synthetic
cccctcatataauttctgctctgatugg

SEQ ID NO: 24226 - DNA, 19 bp, Artificial Sequence
  Synthetic
cgcccauacagctcctcut

SEQ ID NO: 24227 - DNA, 29 bp, Artificial Sequence
  Synthetic
tggttgtgacaaauaatctcttggatcug

SEQ ID NO: 24228 - DNA, 27 bp, Artificial Sequence
  Synthetic
ttaacuaacatcccaugaacagaccat

SEQ ID NO: 24229 - DNA, 29 bp, Artificial Sequence
  Synthetic
gcacagtcucaagcaaccatatattauca

SEQ ID NO: 24230 - DNA, 23 bp, Artificial Sequence
  Synthetic
ggttcugtagaatgucccaccaa

SEQ ID NO: 24231 - DNA, 22 bp, Artificial Sequence
  Synthetic
cgcatcatcccuttgctggtua

SEQ ID NO: 24232 - DNA, 29 bp, Artificial Sequence
  Synthetic
gagcttcttcgtutccttttctctttaut

SEQ ID NO: 24233 - DNA, 22 bp, Artificial Sequence
  Synthetic
ccacccutttccctuagcaact

SEQ ID NO: 24234 - DNA, 22 bp, Artificial Sequence
  Synthetic
gttttgtgccgutgctctctut

SEQ ID NO: 24235 - DNA, 25 bp, Artificial Sequence
  Synthetic
guagaggaagaggaagaatugcagt

SEQ ID NO: 24236 - DNA, 27 bp, Artificial Sequence
  Synthetic
ctagaatacccauctccttcacucaac

SEQ ID NO: 24237 - DNA, 22 bp, Artificial Sequence
  Synthetic
agacttuggaacactugcccat

SEQ ID NO: 24238 - DNA, 28 bp, Artificial Sequence
  Synthetic
atgcaaacttacugaatccttctuacga

SEQ ID NO: 24239 - DNA, 28 bp, Artificial Sequence
  Synthetic
tgacttcttucctatgctcttugaacag

SEQ ID NO: 24240 - DNA, 22 bp, Artificial Sequence
  Synthetic
gcatactcctucactcgagcut

SEQ ID NO: 24241 - DNA, 23 bp, Artificial Sequence
  Synthetic
tgttttcccuactgctccuaggt

SEQ ID NO: 24242 - DNA, 27 bp, Artificial Sequence
  Synthetic
agatcaaaguaacatggcatttuccct

SEQ ID NO: 24243 - DNA, 24 bp, Artificial Sequence
  Synthetic
ggugagctucaggacagaaagaaa

SEQ ID NO: 24244 - DNA, 26 bp, Artificial Sequence
  Synthetic
ctgttgatcccaautctcctcttcut

SEQ ID NO: 24245 - DNA, 21 bp, Artificial Sequence
  Synthetic
gcagaacaguatggugggaca

SEQ ID NO: 24246 - DNA, 25 bp, Artificial Sequence
  Synthetic
gaaggtatttuggctttcacggtut

SEQ ID NO: 24247 - DNA, 26 bp, Artificial Sequence
  Synthetic
tccggaaattucttttacacagucca

SEQ ID NO: 24248 - DNA, 24 bp, Artificial Sequence
  Synthetic
gagacggttucttggaatacugct

SEQ ID NO: 24249 - DNA, 28 bp, Artificial Sequence
  Synthetic
aagacagtgatggugtaacttatgcaut

SEQ ID NO: 24250 - DNA, 27 bp, Artificial Sequence
  Synthetic
cctgcatgcttuaaaaactctgaacut

SEQ ID NO: 24251 - DNA, 27 bp, Artificial Sequence
  Synthetic
gagttcaggtautgcttcatctctuca

SEQ ID NO: 24252 - DNA, 27 bp, Artificial Sequence
  Synthetic
gggttgctatcgutcaaagtacaguat

SEQ ID NO: 24253 - DNA, 23 bp, Artificial Sequence
  Synthetic
gagaaacagaaccuctggtguca

SEQ ID NO: 24254 - DNA, 28 bp, Artificial Sequence
  Synthetic
ctacctttugaacaaggtgtctguaaac

SEQ ID NO: 24255 - DNA, 27 bp, Artificial Sequence
  Synthetic
tgacagtagtgcutcccgttataaauc

SEQ ID NO: 24256 - DNA, 28 bp, Artificial Sequence
  Synthetic
aggtacgcctugagtatgtcttcttaua

SEQ ID NO: 24257 - DNA, 26 bp, Artificial Sequence
  Synthetic
ctattccaggucagaacgatctcaut

SEQ ID NO: 24258 - DNA, 27 bp, Artificial Sequence
  Synthetic
agaagtccguacagaatcttcaucaga

SEQ ID NO: 24259 - DNA, 28 bp, Artificial Sequence
  Synthetic
gggaaggaugaagaaattccagatagut

SEQ ID NO: 24260 - DNA, 28 bp, Artificial Sequence
  Synthetic
ggttctttcagagauctaactgcuacat

SEQ ID NO: 24261 - DNA, 22 bp, Artificial Sequence
  Synthetic
caagccacaacacuctcaucac

SEQ ID NO: 24262 - DNA, 28 bp, Artificial Sequence
  Synthetic
ggtttggagtaucactttgcttttcaut

SEQ ID NO: 24263 - DNA, 25 bp, Artificial Sequence
  Synthetic
cttcuagtcgattttugcccaaagg

SEQ ID NO: 24264 - DNA, 20 bp, Artificial Sequence
  Synthetic
cctccucattcaggaugcgt

SEQ ID NO: 24265 - DNA, 17 bp, Artificial Sequence
  Synthetic
gctggccugctctuccc

SEQ ID NO: 24266 - DNA, 19 bp, Artificial Sequence
  Synthetic
gccugagagccaccatgug

SEQ ID NO: 24267 - DNA, 20 bp, Artificial Sequence
  Synthetic
ccttucgcccagttccuact

SEQ ID NO: 24268 - DNA, 22 bp, Artificial Sequence
  Synthetic
atgacacaagcguggagaugat

SEQ ID NO: 24269 - DNA, 25 bp, Artificial Sequence
  Synthetic
gggtaauggagagacctagatagug

SEQ ID NO: 24270 - DNA, 20 bp, Artificial Sequence
  Synthetic
ctggacaagugtgugacggt

SEQ ID NO: 24271 - DNA, 21 bp, Artificial Sequence
  Synthetic
catcggcaucatagtggguca

SEQ ID NO: 24272 - DNA, 17 bp, Artificial Sequence
  Synthetic
gugagcagcuggagcct

SEQ ID NO: 24273 - DNA, 20 bp, Artificial Sequence
  Synthetic
tggcccagcutctacucact

SEQ ID NO: 24274 - DNA, 22 bp, Artificial Sequence
  Synthetic
acttcacucccctcaacacuca

SEQ ID NO: 24275 - DNA, 22 bp, Artificial Sequence
  Synthetic
gccttcagguctaactgctguc

SEQ ID NO: 24276 - DNA, 29 bp, Artificial Sequence
  Synthetic
aaaatggctactgauccacaactcttuat

SEQ ID NO: 24277 - DNA, 20 bp, Artificial Sequence
  Synthetic
ggcgcctucgagatttgaug

SEQ ID NO: 24278 - DNA, 18 bp, Artificial Sequence
  Synthetic
gugaagaagccgcugggt

SEQ ID NO: 24279 - DNA, 19 bp, Artificial Sequence
  Synthetic
caccatguggtcctgugct

SEQ ID NO: 24280 - DNA, 20 bp, Artificial Sequence
  Synthetic
acacccccutgctucgaaag

SEQ ID NO: 24281 - DNA, 24 bp, Artificial Sequence
  Synthetic
gtgagaugagggctgtgatuaagg

SEQ ID NO: 24282 - DNA, 24 bp, Artificial Sequence
  Synthetic
cttctttuccagcaaaggtgaugg

SEQ ID NO: 24283 - DNA, 24 bp, Artificial Sequence
  Synthetic
ttgcaggaagucacttctagtugt

SEQ ID NO: 24284 - DNA, 28 bp, Artificial Sequence
  Synthetic
aaaagcacaaauacctaccgagaauaca

SEQ ID NO: 24285 - DNA, 25 bp, Artificial Sequence
  Synthetic
cccaucttcatucacccagaagaaa

SEQ ID NO: 24286 - DNA, 31 bp, Artificial Sequence
  Synthetic
ttgttgctcttttuctaagtttgaatactut

SEQ ID NO: 24287 - DNA, 27 bp, Artificial Sequence
  Synthetic
acagtcgagcugaagacaatttuaact

SEQ ID NO: 24288 - DNA, 24 bp, Artificial Sequence
  Synthetic
cctagggaaugagtgagacttugg

SEQ ID NO: 24289 - DNA, 25 bp, Artificial Sequence
  Synthetic
cacctggcuacacgaaaatttcuag

SEQ ID NO: 24290 - DNA, 25 bp, Artificial Sequence
  Synthetic
gagaacaccuagaagacagtgcaut

SEQ ID NO: 24291 - DNA, 31 bp, Artificial Sequence
  Synthetic
cagctataucacaaaacauttgcataaugat

SEQ ID NO: 24292 - DNA, 27 bp, Artificial Sequence
  Synthetic
cgacggtagcgautattttcaacatuc

SEQ ID NO: 24293 - DNA, 29 bp, Artificial Sequence
  Synthetic
caatctttttgtgucagtcatgagtcauc

SEQ ID NO: 24294 - DNA, 25 bp, Artificial Sequence
  Synthetic
tcagatagtagucaggcaacucaga

SEQ ID NO: 24295 - DNA, 22 bp, Artificial Sequence
  Synthetic
aggaagaguggcatttctccua

SEQ ID NO: 24296 - DNA, 21 bp, Artificial Sequence
  Synthetic
cccgcaaaaugtgcctactuc

SEQ ID NO: 24297 - DNA, 30 bp, Artificial Sequence
  Synthetic
ttgaaaataatugagcataacauccgcaat

SEQ ID NO: 24298 - DNA, 27 bp, Artificial Sequence
  Synthetic
ggatcacacaucttacuagaacacact

SEQ ID NO: 24299 - DNA, 27 bp, Artificial Sequence
  Synthetic
gccatcuacaagcgagttctaaaatug

SEQ ID NO: 24300 - DNA, 28 bp, Artificial Sequence
  Synthetic
gtgatatgggcautttaatttgctggua

SEQ ID NO: 24301 - DNA, 30 bp, Artificial Sequence
  Synthetic
tcacttcctttauggatgtttcaaatccut

SEQ ID NO: 24302 - DNA, 22 bp, Artificial Sequence
  Synthetic
ctcttcaccaaggcugccttua

SEQ ID NO: 24303 - DNA, 27 bp, Artificial Sequence
  Synthetic
agaagagaagaaaauggttgtgtgugt

SEQ ID NO: 24304 - DNA, 28 bp, Artificial Sequence
  Synthetic
ccaggctcattauaagttttggcattut

SEQ ID NO: 24305 - DNA, 30 bp, Artificial Sequence
  Synthetic
aggttgtactgaugaactctcatuaaaagg

SEQ ID NO: 24306 - DNA, 22 bp, Artificial Sequence
  Synthetic
agagcccauccatcacaagtuc

SEQ ID NO: 24307 - DNA, 25 bp, Artificial Sequence
  Synthetic
gaatataaagccgcutgcaaacuct

SEQ ID NO: 24308 - DNA, 23 bp, Artificial Sequence
  Synthetic
cattccugccaacaaaaagcuca

SEQ ID NO: 24309 - DNA, 22 bp, Artificial Sequence
  Synthetic
ggaugaacaggguagacttcuc

SEQ ID NO: 24310 - DNA, 26 bp, Artificial Sequence
  Synthetic
ctttgctcucaacttttacggtaugt

SEQ ID NO: 24311 - DNA, 23 bp, Artificial Sequence
  Synthetic
ctccccaagutgagctttgauga

SEQ ID NO: 24312 - DNA, 27 bp, Artificial Sequence
  Synthetic
ttttacagatacugtggatgguaggga

SEQ ID NO: 24313 - DNA, 24 bp, Artificial Sequence
  Synthetic
tctgtuaagccaaacgctgacaua

SEQ ID NO: 24314 - DNA, 26 bp, Artificial Sequence
  Synthetic
ctctttgccacautaaacatgcctut

SEQ ID NO: 24315 - DNA, 22 bp, Artificial Sequence
  Synthetic
ccatactgtugaggctgcugag

SEQ ID NO: 24316 - DNA, 25 bp, Artificial Sequence
  Synthetic
acaaacttacacugcccaaactuct

SEQ ID NO: 24317 - DNA, 24 bp, Artificial Sequence
  Synthetic
gtcatggtacutccaggaagugaa

SEQ ID NO: 24318 - DNA, 19 bp, Artificial Sequence
  Synthetic
cugccacagcaaagugcag

SEQ ID NO: 24319 - DNA, 20 bp, Artificial Sequence
  Synthetic
tggcuggcaagcucaagaaa

SEQ ID NO: 24320 - DNA, 25 bp, Artificial Sequence
  Synthetic
attgcttgtaccuattgacggtcuc

SEQ ID NO: 24321 - DNA, 21 bp, Artificial Sequence
  Synthetic
aagccuggatgttgucacaca

SEQ ID NO: 24322 - DNA, 28 bp, Artificial Sequence
  Synthetic
tgtgctgttcuaccagatttttcttgua

SEQ ID NO: 24323 - DNA, 28 bp, Artificial Sequence
  Synthetic
ggttggaggcuatattttattcccauct

SEQ ID NO: 24324 - DNA, 25 bp, Artificial Sequence
  Synthetic
aaataaggagguggctgguagaaac

SEQ ID NO: 24325 - DNA, 21 bp, Artificial Sequence
  Synthetic
ggatcttggugcaggaaguct

SEQ ID NO: 24326 - DNA, 21 bp, Artificial Sequence
  Synthetic
gctggacuccacctgagctua

SEQ ID NO: 24327 - DNA, 23 bp, Artificial Sequence
  Synthetic
cuctccctauccaacgaagacac

SEQ ID NO: 24328 - DNA, 27 bp, Artificial Sequence
  Synthetic
ccttaattttgguttcacgtactucca

SEQ ID NO: 24329 - DNA, 30 bp, Artificial Sequence
  Synthetic
tctaaagcactuggttaattattgacucaa

SEQ ID NO: 24330 - DNA, 30 bp, Artificial Sequence
  Synthetic
atgtaaaactugcaaagaatcagaacaaug

SEQ ID NO: 24331 - DNA, 22 bp, Artificial Sequence
  Synthetic
ccucacggaggcattcuaaagt

SEQ ID NO: 24332 - DNA, 25 bp, Artificial Sequence
  Synthetic
tctacagagutccctgttugcaaaa

SEQ ID NO: 24333 - DNA, 28 bp, Artificial Sequence
  Synthetic
cgttcagaatattucttcggaagtccug

SEQ ID NO: 24334 - DNA, 31 bp, Artificial Sequence
  Synthetic
ctccaaataaugacaagcagaagtatacuct

SEQ ID NO: 24335 - DNA, 32 bp, Artificial Sequence
  Synthetic
cacacttttaaaatauacttgccctgatatuc

SEQ ID NO: 24336 - DNA, 29 bp, Artificial Sequence
  Synthetic
tgaatggagaaacauctacaaaatcccut

SEQ ID NO: 24337 - DNA, 30 bp, Artificial Sequence
  Synthetic
aataataagcaucagcatttgacttuacct

SEQ ID NO: 24338 - DNA, 22 bp, Artificial Sequence
  Synthetic
attcctgatcutcctcgtgcug

SEQ ID NO: 24339 - DNA, 28 bp, Artificial Sequence
  Synthetic
tcagcggtauaatcaggagttttuaaag

SEQ ID NO: 24340 - DNA, 23 bp, Artificial Sequence
  Synthetic
gcagtguggtaaagtucccagat

SEQ ID NO: 24341 - DNA, 32 bp, Artificial Sequence
  Synthetic
tccatagagaaaguatctacctaaauccacag

SEQ ID NO: 24342 - DNA, 23 bp, Artificial Sequence
  Synthetic
tcaacctttugaacagcaugcaa

SEQ ID NO: 24343 - DNA, 32 bp, Artificial Sequence
  Synthetic
tacttcatctcuagaattccattuaacagaca

SEQ ID NO: 24344 - DNA, 19 bp, Artificial Sequence
  Synthetic
cggccaugcagaaacugac

SEQ ID NO: 24345 - DNA, 25 bp, Artificial Sequence
  Synthetic
ccaaaagaaaaagugcccaatccut

SEQ ID NO: 24346 - DNA, 24 bp, Artificial Sequence
  Synthetic
tgtacagtacugaggttctcaugt

SEQ ID NO: 24347 - DNA, 22 bp, Artificial Sequence
  Synthetic
acagaaagcccugtagagcauc

SEQ ID NO: 24348 - DNA, 21 bp, Artificial Sequence
  Synthetic
tgatggcgugatccccaaaut

SEQ ID NO: 24349 - DNA, 24 bp, Artificial Sequence
  Synthetic
acaggttgccutactggttaccua

SEQ ID NO: 24350 - DNA, 23 bp, Artificial Sequence
  Synthetic
gccattgaccugtttacacgtuc

SEQ ID NO: 24351 - DNA, 30 bp, Artificial Sequence
  Synthetic
tttaaacagagaaaaccautacttguccat

SEQ ID NO: 24352 - DNA, 28 bp, Artificial Sequence
  Synthetic
agacctgaagguattaacatcattugct

SEQ ID NO: 24353 - DNA, 22 bp, Artificial Sequence
  Synthetic
catuccagagucaagcatcaut

SEQ ID NO: 24354 - DNA, 20 bp, Artificial Sequence
  Synthetic
gcccgcaugtacaacaugat

SEQ ID NO: 24355 - DNA, 19 bp, Artificial Sequence
  Synthetic
cattcaugggccgctugac

SEQ ID NO: 24356 - DNA, 26 bp, Artificial Sequence
  Synthetic
gaaggaguacccggautataaauacc

SEQ ID NO: 24357 - DNA, 18 bp, Artificial Sequence
  Synthetic
gtccaugcgctggtucac

SEQ ID NO: 24358 - DNA, 19 bp, Artificial Sequence
  Synthetic
gttcgguggtcaaguccga

SEQ ID NO: 24359 - DNA, 21 bp, Artificial Sequence
  Synthetic
gtgctgggacaugtgaaguct

SEQ ID NO: 24360 - DNA, 22 bp, Artificial Sequence
  Synthetic
acagcaaaugacagcugcaaaa

SEQ ID NO: 24361 - DNA, 20 bp, Artificial Sequence
  Synthetic
cacccuccccaggttttcuc

SEQ ID NO: 24362 - DNA, 22 bp, Artificial Sequence
  Synthetic
gcuagtcuccaagcgacgaaaa

SEQ ID NO: 24363 - DNA, 27 bp, Artificial Sequence
  Synthetic
agcaagaagccuctccttgaaaaauat

SEQ ID NO: 24364 - DNA, 29 bp, Artificial Sequence
  Synthetic
aattagaataagtacuggcgaaccatcuc

SEQ ID NO: 24365 - DNA, 28 bp, Artificial Sequence
  Synthetic
gaaagttgggaucgaacaaaagctatua

SEQ ID NO: 24366 - DNA, 27 bp, Artificial Sequence
  Synthetic
tctagtaguaccaagatgatgggaugg

SEQ ID NO: 24367 - DNA, 28 bp, Artificial Sequence
  Synthetic
cgtttgggacautgacaatgagtttuaa

SEQ ID NO: 24368 - DNA, 26 bp, Artificial Sequence
  Synthetic
cacatacttuagttcctccttuccca

SEQ ID NO: 24369 - DNA, 22 bp, Artificial Sequence
  Synthetic
gacttctuccgtgctactucca

SEQ ID NO: 24370 - DNA, 26 bp, Artificial Sequence
  Synthetic
caactcaggaaucctctcaatcagut

SEQ ID NO: 24371 - DNA, 23 bp, Artificial Sequence
  Synthetic
gaatgtgaggcucttgctctuag

SEQ ID NO: 24372 - DNA, 19 bp, Artificial Sequence
  Synthetic
gggcgguctttacctggut

SEQ ID NO: 24373 - DNA, 25 bp, Artificial Sequence
  Synthetic
ccctctgacuggaaaacagactcua

SEQ ID NO: 24374 - DNA, 29 bp, Artificial Sequence
  Synthetic
gaactcaaaacggugatttacucaagaaa

SEQ ID NO: 24375 - DNA, 26 bp, Artificial Sequence
  Synthetic
ggttgcaaatgcugaaagcttaaaug

SEQ ID NO: 24376 - DNA, 27 bp, Artificial Sequence
  Synthetic
atttagcacaccugaaaatagctacut

SEQ ID NO: 24377 - DNA, 28 bp, Artificial Sequence
  Synthetic
tgcgttgtatgutgaaaatcaattucgt

SEQ ID NO: 24378 - DNA, 28 bp, Artificial Sequence
  Synthetic
acattgaagttuggaatggtcattcuca

SEQ ID NO: 24379 - DNA, 28 bp, Artificial Sequence
  Synthetic
acttgctgtagaugaagaagaaaaugct

SEQ ID NO: 24380 - DNA, 20 bp, Artificial Sequence
  Synthetic
ctcctgcutgcgaaactugg

SEQ ID NO: 24381 - DNA, 22 bp, Artificial Sequence
  Synthetic
agtagaactugggccacccuaa

SEQ ID NO: 24382 - DNA, 23 bp, Artificial Sequence
  Synthetic
gctgagaaagcugaaggtcctua

SEQ ID NO: 24383 - DNA, 22 bp, Artificial Sequence
  Synthetic
gccagtggcutccagtauaacc

SEQ ID NO: 24384 - DNA, 22 bp, Artificial Sequence
  Synthetic
ctaggcuccagggttgtttcua

SEQ ID NO: 24385 - DNA, 25 bp, Artificial Sequence
  Synthetic
caaacaaggaacucagagaggacug

SEQ ID NO: 24386 - DNA, 29 bp, Artificial Sequence
  Synthetic
atacctaataucaataatgccagugggat

SEQ ID NO: 24387 - DNA, 24 bp, Artificial Sequence
  Synthetic
gcagaatcatcaucctccacgaug

SEQ ID NO: 24388 - DNA, 29 bp, Artificial Sequence
  Synthetic
tggatctagaaauggaagctctuaaaacc

SEQ ID NO: 24389 - DNA, 21 bp, Artificial Sequence
  Synthetic
ccattgcacgutttgagggua

SEQ ID NO: 24390 - DNA, 29 bp, Artificial Sequence
  Synthetic
atgaagtcaaacautttgttgtagaggug

SEQ ID NO: 24391 - DNA, 22 bp, Artificial Sequence
  Synthetic
ggcatactugggcagagagtut

SEQ ID NO: 24392 - DNA, 21 bp, Artificial Sequence
  Synthetic
tgatcaccauggctcaacugg

SEQ ID NO: 24393 - DNA, 26 bp, Artificial Sequence
  Synthetic
caagggagaaauattcugaccacgaa

SEQ ID NO: 24394 - DNA, 22 bp, Artificial Sequence
  Synthetic
ctctggtgcacugggacttugg

SEQ ID NO: 24395 - DNA, 28 bp, Artificial Sequence
  Synthetic
ggaaactcccaucttgagtcauaaggca

SEQ ID NO: 24396 - DNA, 24 bp, Artificial Sequence
  Synthetic
gagaacaggaagutggtagcucag

SEQ ID NO: 24397 - DNA, 27 bp, Artificial Sequence
  Synthetic
ccagcaagttuacaatgttcaaatgug

SEQ ID NO: 24398 - DNA, 22 bp, Artificial Sequence
  Synthetic
ggcacccugggtaagatttcuc

SEQ ID NO: 24399 - DNA, 30 bp, Artificial Sequence
  Synthetic
ctggatgtcggaauatttagaaacctctut

SEQ ID NO: 24400 - DNA, 22 bp, Artificial Sequence
  Synthetic
gggtgaugctattcagcuacag

SEQ ID NO: 24401 - DNA, 28 bp, Artificial Sequence
  Synthetic
gccaaagtcacagaucttcacaatttut

SEQ ID NO: 24402 - DNA, 32 bp, Artificial Sequence
  Synthetic
gcatgatggtggautctactttctacaauaag

SEQ ID NO: 24403 - DNA, 21 bp, Artificial Sequence
  Synthetic
cccuagacccacagactguga

SEQ ID NO: 24404 - DNA, 19 bp, Artificial Sequence
  Synthetic
cagagacugagcgcugaca

SEQ ID NO: 24405 - DNA, 21 bp, Artificial Sequence
  Synthetic
gggaaaatgggucctctccut

SEQ ID NO: 24406 - DNA, 20 bp, Artificial Sequence
  Synthetic
caacuagagggcagcctugt

SEQ ID NO: 24407 - DNA, 19 bp, Artificial Sequence
  Synthetic
ctctcaggcagugggctuc

SEQ ID NO: 24408 - DNA, 24 bp, Artificial Sequence
  Synthetic
cagtcaaccaaaugtctccgatut

SEQ ID NO: 24409 - DNA, 25 bp, Artificial Sequence
  Synthetic
ggtaattagcacutttcccctccug

SEQ ID NO: 24410 - DNA, 24 bp, Artificial Sequence
  Synthetic
cataccucagggcagatcaatucc

SEQ ID NO: 24411 - DNA, 28 bp, Artificial Sequence
  Synthetic
tgttgttgtagtugttctggtttcugaa

SEQ ID NO: 24412 - DNA, 22 bp, Artificial Sequence
  Synthetic
ggttccucagcttcctucagaa

SEQ ID NO: 24413 - DNA, 28 bp, Artificial Sequence
  Synthetic
tgcatacatgugtagatggatuaggact

SEQ ID NO: 24414 - DNA, 28 bp, Artificial Sequence
  Synthetic
cactatcugaaaccaggatggatugaat

SEQ ID NO: 24415 - DNA, 21 bp, Artificial Sequence
  Synthetic
cccccaggcaugttggaatut

SEQ ID NO: 24416 - DNA, 25 bp, Artificial Sequence
  Synthetic
gcttcagagacugagccatttucaa

SEQ ID NO: 24417 - DNA, 26 bp, Artificial Sequence
  Synthetic
gggtgaggaaaaguctggagtattuc

SEQ ID NO: 24418 - DNA, 26 bp, Artificial Sequence
  Synthetic
gtgcatgcaaaauacaggtttctugt

SEQ ID NO: 24419 - DNA, 25 bp, Artificial Sequence
  Synthetic
gcacctgugaagaagatcttgctut

SEQ ID NO: 24420 - DNA, 24 bp, Artificial Sequence
  Synthetic
cactcaaaagcaugctgctcuaag

SEQ ID NO: 24421 - DNA, 23 bp, Artificial Sequence
  Synthetic
ttttgttttcuggtggtgctgug

SEQ ID NO: 24422 - DNA, 21 bp, Artificial Sequence
  Synthetic
gauagccacacuccagcttua

SEQ ID NO: 24423 - DNA, 27 bp, Artificial Sequence
  Synthetic
gggaaatcauattgagtctugacaggt

SEQ ID NO: 24424 - DNA, 26 bp, Artificial Sequence
  Synthetic
ccataggcaguctaatgtacgaacut

SEQ ID NO: 24425 - DNA, 27 bp, Artificial Sequence
  Synthetic
aauggagaaaaggaaacttuaggagca

SEQ ID NO: 24426 - DNA, 28 bp, Artificial Sequence
  Synthetic
tgactctccaggautttctctcatcaua

SEQ ID NO: 24427 - DNA, 24 bp, Artificial Sequence
  Synthetic
ctctaucccacccucagaatatug

SEQ ID NO: 24428 - DNA, 24 bp, Artificial Sequence
  Synthetic
cttgcctttacucctgcatguaga

SEQ ID NO: 24429 - DNA, 21 bp, Artificial Sequence
  Synthetic
gtcctagcugccccaatguat

SEQ ID NO: 24430 - DNA, 20 bp, Artificial Sequence
  Synthetic
tttgctuggcgtagaccugt

SEQ ID NO: 24431 - DNA, 26 bp, Artificial Sequence
  Synthetic
ccttctguccaaacctuaaagaaacc

SEQ ID NO: 24432 - DNA, 28 bp, Artificial Sequence
  Synthetic
tgctatccatagcaaugaatttggtcut

SEQ ID NO: 24433 - DNA, 25 bp, Artificial Sequence
  Synthetic
cagcttaaactuccttgggatctug

SEQ ID NO: 24434 - DNA, 24 bp, Artificial Sequence
  Synthetic
gcagcttcacgutctgcctttaua

SEQ ID NO: 24435 - DNA, 20 bp, Artificial Sequence
  Synthetic
tgtcggcaagucttgacugg

SEQ ID NO: 24436 - DNA, 22 bp, Artificial Sequence
  Synthetic
cctguccacagaactttugcga

SEQ ID NO: 24437 - DNA, 27 bp, Artificial Sequence
  Synthetic
ggatccagaagcagaauaagagtugac

SEQ ID NO: 24438 - DNA, 27 bp, Artificial Sequence
  Synthetic
gauctgtataggtauccaagccaagac

SEQ ID NO: 24439 - DNA, 25 bp, Artificial Sequence
  Synthetic
gtctaatgguacaactgcugaaacc

SEQ ID NO: 24440 - DNA, 27 bp, Artificial Sequence
  Synthetic
cacacagctaaugggttatcaaagaug

SEQ ID NO: 24441 - DNA, 21 bp, Artificial Sequence
  Synthetic
caccctggacuagtgccaaug

SEQ ID NO: 24442 - DNA, 28 bp, Artificial Sequence
  Synthetic
agaaagaggaagagugtgaaaagtaugg

SEQ ID NO: 24443 - DNA, 21 bp, Artificial Sequence
  Synthetic
cauggtccttucggcaagaga

SEQ ID NO: 24444 - DNA, 23 bp, Artificial Sequence
  Synthetic
ggcctgaagaaautggctggtua

SEQ ID NO: 24445 - DNA, 23 bp, Artificial Sequence
  Synthetic
gtttucgaagaacctggugcaac

SEQ ID NO: 24446 - DNA, 32 bp, Artificial Sequence
  Synthetic
gcccaactgatguattctataaaataaatguc

SEQ ID NO: 24447 - DNA, 22 bp, Artificial Sequence
  Synthetic
tgctggaaugacaggattuggt

SEQ ID NO: 24448 - DNA, 30 bp, Artificial Sequence
  Synthetic
aaactctctttctuacagctctgataauac

SEQ ID NO: 24449 - DNA, 30 bp, Artificial Sequence
  Synthetic
aatgagagaaugttaaatgcucaaaaagca

SEQ ID NO: 24450 - DNA, 26 bp, Artificial Sequence
  Synthetic
tgggatugcgaacaactttttcttut

SEQ ID NO: 24451 - DNA, 30 bp, Artificial Sequence
  Synthetic
tctctgaaaatgaaguttctgtagcctuac

SEQ ID NO: 24452 - DNA, 29 bp, Artificial Sequence
  Synthetic
aatctttcuaggatcaagttgucaaagaa

SEQ ID NO: 24453 - DNA, 21 bp, Artificial Sequence
  Synthetic
acctgggaugtgcgggtauat

SEQ ID NO: 24454 - DNA, 22 bp, Artificial Sequence
  Synthetic
accgutcctgatguacccagat

SEQ ID NO: 24455 - DNA, 24 bp, Artificial Sequence
  Synthetic
caatttctcgauactcagcugcct

SEQ ID NO: 24456 - DNA, 27 bp, Artificial Sequence
  Synthetic
atgatgagaagacauggaatgtuggaa

SEQ ID NO: 24457 - DNA, 28 bp, Artificial Sequence
  Synthetic
gagatgttguaaagaaaagtttgcugga

SEQ ID NO: 24458 - DNA, 21 bp, Artificial Sequence
  Synthetic
gucaggagcagaaagctucca

SEQ ID NO: 24459 - DNA, 24 bp, Artificial Sequence
  Synthetic
gaagcagaggauagcttcctguag

SEQ ID NO: 24460 - DNA, 22 bp, Artificial Sequence
  Synthetic
acacacacugtgcacaattucc

SEQ ID NO: 24461 - DNA, 28 bp, Artificial Sequence
  Synthetic
caatgagggugacaacgactatatcauc

SEQ ID NO: 24462 - DNA, 23 bp, Artificial Sequence
  Synthetic
ccaaatgcaugagactccacuca

SEQ ID NO: 24463 - DNA, 24 bp, Artificial Sequence
  Synthetic
cctgtgtatcucttgtctctgcuc

SEQ ID NO: 24464 - DNA, 17 bp, Artificial Sequence
  Synthetic
gctgggugacccaccuc

SEQ ID NO: 24465 - DNA, 23 bp, Artificial Sequence
  Synthetic
gagtctccagugctaagcuacat

SEQ ID NO: 24466 - DNA, 24 bp, Artificial Sequence
  Synthetic
aggtaucccaaagattcaguccct

SEQ ID NO: 24467 - DNA, 20 bp, Artificial Sequence
  Synthetic
acggagaccuggtggacuac

SEQ ID NO: 24468 - DNA, 20 bp, Artificial Sequence
  Synthetic
tggagggcuccaaggacuac

SEQ ID NO: 24469 - DNA, 23 bp, Artificial Sequence
  Synthetic
gctaatggaucatctcugcacca

SEQ ID NO: 24470 - DNA, 26 bp, Artificial Sequence
  Synthetic
aattaggcaggautaaggtagggaut

SEQ ID NO: 24471 - DNA, 17 bp, Artificial Sequence
  Synthetic
gaucggccactgucggt

SEQ ID NO: 24472 - DNA, 17 bp, Artificial Sequence
  Synthetic
gggcgugctcaucacca

SEQ ID NO: 24473 - DNA, 20 bp, Artificial Sequence
  Synthetic
ctctgacagcugccttucct

SEQ ID NO: 24474 - DNA, 19 bp, Artificial Sequence
  Synthetic
ggtgtagguccccgaguct

SEQ ID NO: 24475 - DNA, 18 bp, Artificial Sequence
  Synthetic
ccggccccucctgattug

SEQ ID NO: 24476 - DNA, 23 bp, Artificial Sequence
  Synthetic
tggtggtttugcagatgtagcut

SEQ ID NO: 24477 - DNA, 22 bp, Artificial Sequence
  Synthetic
attccaugccgaguaacagacc

SEQ ID NO: 24478 - DNA, 18 bp, Artificial Sequence
  Synthetic
gcugaacccgagcagguc

SEQ ID NO: 24479 - DNA, 24 bp, Artificial Sequence
  Synthetic
ccctgtttccugatgtctgauacc

SEQ ID NO: 24480 - DNA, 22 bp, Artificial Sequence
  Synthetic
ggcaucgaccagatcctuaaca

SEQ ID NO: 24481 - DNA, 17 bp, Artificial Sequence
  Synthetic
gatcccgcguccucgaa

SEQ ID NO: 24482 - DNA, 21 bp, Artificial Sequence
  Synthetic
gcatgacgguactgtcccuct

SEQ ID NO: 24483 - DNA, 22 bp, Artificial Sequence
  Synthetic
tggagtcgtugaggctctttug

SEQ ID NO: 24484 - DNA, 22 bp, Artificial Sequence
  Synthetic
gccttctcucctacctaagugc

SEQ ID NO: 24485 - DNA, 17 bp, Artificial Sequence
  Synthetic
ggatucccgccccucac

SEQ ID NO: 24486 - DNA, 26 bp, Artificial Sequence
  Synthetic
cagtccaatuaaagtaacacuggcaa

SEQ ID NO: 24487 - DNA, 28 bp, Artificial Sequence
  Synthetic
cagtgacagaagauaaagaaccacttuc

SEQ ID NO: 24488 - DNA, 24 bp, Artificial Sequence
  Synthetic
agaagaugaagaggaggaggaugt

SEQ ID NO: 24489 - DNA, 27 bp, Artificial Sequence
  Synthetic
aagatacgtacucatgaacaagagcug

SEQ ID NO: 24490 - DNA, 25 bp, Artificial Sequence
  Synthetic
tcactgattttugtcccttggauac

SEQ ID NO: 24491 - DNA, 23 bp, Artificial Sequence
  Synthetic
gtctctccutttcctttcucccc

SEQ ID NO: 24492 - DNA, 23 bp, Artificial Sequence
  Synthetic
tggcaguggaggaagtctcttua

SEQ ID NO: 24493 - DNA, 26 bp, Artificial Sequence
  Synthetic
ggacaacattuatcaaacacgguagg

SEQ ID NO: 24494 - DNA, 22 bp, Artificial Sequence
  Synthetic
ctacaggattuggcctccauga

SEQ ID NO: 24495 - DNA, 22 bp, Artificial Sequence
  Synthetic
catagcaagugctguaggacca

SEQ ID NO: 24496 - DNA, 20 bp, Artificial Sequence
  Synthetic
gagtagacacggugcaguca

SEQ ID NO: 24497 - DNA, 25 bp, Artificial Sequence
  Synthetic
tgtttgtguctcctagugaaaaggg

SEQ ID NO: 24498 - DNA, 25 bp, Artificial Sequence
  Synthetic
gccacugaagtatgaagtuggagat

SEQ ID NO: 24499 - DNA, 28 bp, Artificial Sequence
  Synthetic
aggcaactgccuttaacatgtataauca

SEQ ID NO: 24500 - DNA, 23 bp, Artificial Sequence
  Synthetic
agtgttggacutgcagaacagua

SEQ ID NO: 24501 - DNA, 23 bp, Artificial Sequence
  Synthetic
gccagtgattucaaacagccaut

SEQ ID NO: 24502 - DNA, 28 bp, Artificial Sequence
  Synthetic
cactgcaaagaaagaauttgagactuca

SEQ ID NO: 24503 - DNA, 24 bp, Artificial Sequence
  Synthetic
ctcatcaccugctccaatauagca

SEQ ID NO: 24504 - DNA, 24 bp, Artificial Sequence
  Synthetic
agacgtctcaggutaatctctcug

SEQ ID NO: 24505 - DNA, 26 bp, Artificial Sequence
  Synthetic
ccctttatuaacgagttctcacugga

SEQ ID NO: 24506 - DNA, 26 bp, Artificial Sequence
  Synthetic
aacatgtttuatccgagtugaaggaa

SEQ ID NO: 24507 - DNA, 30 bp, Artificial Sequence
  Synthetic
caatgtactgaauttgtagtctggtucaat

SEQ ID NO: 24508 - DNA, 22 bp, Artificial Sequence
  Synthetic
gacctcccugcttctgguaaaa

SEQ ID NO: 24509 - DNA, 25 bp, Artificial Sequence
  Synthetic
gaagctgatucagttttctttugcg

SEQ ID NO: 24510 - DNA, 22 bp, Artificial Sequence
  Synthetic
gguggcagcgttuaaaccaaag

SEQ ID NO: 24511 - DNA, 24 bp, Artificial Sequence
  Synthetic
ctcaaguatgcttgcugaaggagt

SEQ ID NO: 24512 - DNA, 22 bp, Artificial Sequence
  Synthetic
cttttagcugtgcggucagaga

SEQ ID NO: 24513 - DNA, 23 bp, Artificial Sequence
  Synthetic
aaggaccagugaaagtttgcuga

SEQ ID NO: 24514 - DNA, 31 bp, Artificial Sequence
  Synthetic
ttgtgcccagttuctaaatcatctaatguaa

SEQ ID NO: 24515 - DNA, 22 bp, Artificial Sequence
  Synthetic
ccccttctugggcataaaucca

SEQ ID NO: 24516 - DNA, 22 bp, Artificial Sequence
  Synthetic
gcagccaagaugcagtguaaaa

SEQ ID NO: 24517 - DNA, 21 bp, Artificial Sequence
  Synthetic
gaaagagggaugtggcctcug

SEQ ID NO: 24518 - DNA, 30 bp, Artificial Sequence
  Synthetic
acctaatggttuagcatttggtagattcut

SEQ ID NO: 24519 - DNA, 27 bp, Artificial Sequence
  Synthetic
gacacactctucatggtaaaacttucc

SEQ ID NO: 24520 - DNA, 22 bp, Artificial Sequence
  Synthetic
ctgggtcaaagauccttgcauc

SEQ ID NO: 24521 - DNA, 28 bp, Artificial Sequence
  Synthetic
gaaatgattucttaccttcugagcacac

SEQ ID NO: 24522 - DNA, 24 bp, Artificial Sequence
  Synthetic
ccttgcagccutctagaggtttuc

SEQ ID NO: 24523 - DNA, 30 bp, Artificial Sequence
  Synthetic
gtgagtccacaaauagtcattagauccaaa

SEQ ID NO: 24524 - DNA, 24 bp, Artificial Sequence
  Synthetic
gtgaattgtcutctgctgactugt

SEQ ID NO: 24525 - DNA, 25 bp, Artificial Sequence
  Synthetic
gatgcatucagagtctaucccacag

SEQ ID NO: 24526 - DNA, 24 bp, Artificial Sequence
  Synthetic
atgaagaagaaugcagagcucgaa

SEQ ID NO: 24527 - DNA, 23 bp, Artificial Sequence
  Synthetic
gaactgcgutacatgccuacaaa

SEQ ID NO: 24528 - DNA, 27 bp, Artificial Sequence
  Synthetic
ctacaacctagaaugtcttgggaaugg

SEQ ID NO: 24529 - DNA, 28 bp, Artificial Sequence
  Synthetic
ttaaaatgtagacugccctaacactgut

SEQ ID NO: 24530 - DNA, 21 bp, Artificial Sequence
  Synthetic
cagcctccutctgtgagaugt

SEQ ID NO: 24531 - DNA, 20 bp, Artificial Sequence
  Synthetic
cccaggtuccagaggatugg

SEQ ID NO: 24532 - DNA, 21 bp, Artificial Sequence
  Synthetic
ggucagggaccaaaucccaat

SEQ ID NO: 24533 - DNA, 22 bp, Artificial Sequence
  Synthetic
ccagaggtcuttccagtggtug

SEQ ID NO: 24534 - DNA, 20 bp, Artificial Sequence
  Synthetic
ctgtgguccagacccttgua

SEQ ID NO: 24535 - DNA, 22 bp, Artificial Sequence
  Synthetic
atcttctcaucagcctgtggug

SEQ ID NO: 24536 - DNA, 20 bp, Artificial Sequence
  Synthetic
cagggccucttagccaaucc

SEQ ID NO: 24537 - DNA, 27 bp, Artificial Sequence
  Synthetic
tgtggttaccaacutcttttctucagt

SEQ ID NO: 24538 - DNA, 26 bp, Artificial Sequence
  Synthetic
aagtgtgcagaaucagaacagaagua

SEQ ID NO: 24539 - DNA, 29 bp, Artificial Sequence
  Synthetic
tgttgggataugaggaaagaataacagug

SEQ ID NO: 24540 - DNA, 20 bp, Artificial Sequence
  Synthetic
acactggucccccugagaaa

SEQ ID NO: 24541 - DNA, 25 bp, Artificial Sequence
  Synthetic
cgtctcagcucattgtctaatguca

SEQ ID NO: 24542 - DNA, 23 bp, Artificial Sequence
  Synthetic
cgcagctuacacatgttctugaa

SEQ ID NO: 24543 - DNA, 22 bp, Artificial Sequence
  Synthetic
tggtaagcutggatcucagggt

SEQ ID NO: 24544 - DNA, 18 bp, Artificial Sequence
  Synthetic
caaccccgucgaagcuca

SEQ ID NO: 24545 - DNA, 20 bp, Artificial Sequence
  Synthetic
gctuggagacctcucagcct

SEQ ID NO: 24546 - DNA, 18 bp, Artificial Sequence
  Synthetic
ctggcccaucaccuccac

SEQ ID NO: 24547 - DNA, 19 bp, Artificial Sequence
  Synthetic
aaggcuagtgggugggact

SEQ ID NO: 24548 - DNA, 23 bp, Artificial Sequence
  Synthetic
agtggaacugtcgaatggugaaa

SEQ ID NO: 24549 - DNA, 26 bp, Artificial Sequence
  Synthetic
ctgctcctacuagctactccatuaca

SEQ ID NO: 24550 - DNA, 24 bp, Artificial Sequence
  Synthetic
tgggatgcucttgtccaaaaucaa

SEQ ID NO: 24551 - DNA, 18 bp, Artificial Sequence
  Synthetic
cuccccacccaggagauc

SEQ ID NO: 24552 - DNA, 17 bp, Artificial Sequence
  Synthetic
cccgacucccgcccuaa

SEQ ID NO: 24553 - DNA, 20 bp, Artificial Sequence
  Synthetic
cgaaccaguccaggagccua

SEQ ID NO: 24554 - DNA, 26 bp, Artificial Sequence
  Synthetic
gttttctcttcuattcccttggcuca

SEQ ID NO: 24555 - DNA, 24 bp, Artificial Sequence
  Synthetic
gatgatctcutcgtcatgcucgaa

SEQ ID NO: 24556 - DNA, 18 bp, Artificial Sequence
  Synthetic
ccaccuccacagcctguc

SEQ ID NO: 24557 - DNA, 28 bp, Artificial Sequence
  Synthetic
tgtaaatgtugttcctgtaucaagcact

SEQ ID NO: 24558 - DNA, 21 bp, Artificial Sequence
  Synthetic
cagauccttctuggacaggct

SEQ ID NO: 24559 - DNA, 19 bp, Artificial Sequence
  Synthetic
ccagccaccauccccatuc

SEQ ID NO: 24560 - DNA, 22 bp, Artificial Sequence
  Synthetic
tggactttugcaggtccttcug

SEQ ID NO: 24561 - DNA, 22 bp, Artificial Sequence
  Synthetic
atttggccacucttcugagcat

SEQ ID NO: 24562 - DNA, 20 bp, Artificial Sequence
  Synthetic
ctcccuagaaccctugcaca

SEQ ID NO: 24563 - DNA, 25 bp, Artificial Sequence
  Synthetic
cccagatggacutttctctttucca

SEQ ID NO: 24564 - DNA, 19 bp, Artificial Sequence
  Synthetic
ccagaacaggcccuaccut

SEQ ID NO: 24565 - DNA, 23 bp, Artificial Sequence
  Synthetic
caacaggcugtcatgcatuacat

SEQ ID NO: 24566 - DNA, 25 bp, Artificial Sequence
  Synthetic
aacuctctattucccaaacaacgct

SEQ ID NO: 24567 - DNA, 26 bp, Artificial Sequence
  Synthetic
gaaccacaugcagacaaagatttcug

SEQ ID NO: 24568 - DNA, 26 bp, Artificial Sequence
  Synthetic
gtgcagcgaaaacuagaaaattcuga

SEQ ID NO: 24569 - DNA, 25 bp, Artificial Sequence
  Synthetic
cccgaccaaagaccuacttttcaua

SEQ ID NO: 24570 - DNA, 26 bp, Artificial Sequence
  Synthetic
tgattctgtcagcautactctgtguc

SEQ ID NO: 24571 - DNA, 29 bp, Artificial Sequence
  Synthetic
gactcgccagagacauctataaaaaugat

SEQ ID NO: 24572 - DNA, 24 bp, Artificial Sequence
  Synthetic
gttccaaguagacacagcctttug

SEQ ID NO: 24573 - DNA, 30 bp, Artificial Sequence
  Synthetic
atttcatgcaaacuagataactacctguaa

SEQ ID NO: 24574 - DNA, 28 bp, Artificial Sequence
  Synthetic
tccaggtcaatcuttgtagatatgguga

SEQ ID NO: 24575 - DNA, 25 bp, Artificial Sequence
  Synthetic
ggagccttuggagaagtgtaugaag

SEQ ID NO: 24576 - DNA, 24 bp, Artificial Sequence
  Synthetic
acttaccaaaggucagtgggatug

SEQ ID NO: 24577 - DNA, 23 bp, Artificial Sequence
  Synthetic
ctctgtgtgcutaggtagagcug

SEQ ID NO: 24578 - DNA, 29 bp, Artificial Sequence
  Synthetic
gtcauttacaagtacttugcaaacacaca

SEQ ID NO: 24579 - DNA, 25 bp, Artificial Sequence
  Synthetic
aggcatucccaaattacuagaaggg

SEQ ID NO: 24580 - DNA, 28 bp, Artificial Sequence
  Synthetic
gtgatattacagacauaagcaggaccut

SEQ ID NO: 24581 - DNA, 31 bp, Artificial Sequence
  Synthetic
cacttgctataagccuatacatttttgtgut

SEQ ID NO: 24582 - DNA, 22 bp, Artificial Sequence
  Synthetic
gcaggcaagaaccutttgguaa

SEQ ID NO: 24583 - DNA, 25 bp, Artificial Sequence
  Synthetic
gaatttccaaauggaaggctcacuc

SEQ ID NO: 24584 - DNA, 28 bp, Artificial Sequence
  Synthetic
caaatctcttttccuggtggtaaatgut

SEQ ID NO: 24585 - DNA, 30 bp, Artificial Sequence
  Synthetic
aattacaggaattucaggacagtatagcuc

SEQ ID NO: 24586 - DNA, 19 bp, Artificial Sequence
  Synthetic
gggccutcaccugggaaac

SEQ ID NO: 24587 - DNA, 25 bp, Artificial Sequence
  Synthetic
agcaggaaaaacccutgttagctua

SEQ ID NO: 24588 - DNA, 29 bp, Artificial Sequence
  Synthetic
tgtagtagaacatcuggtagccaaaatug

SEQ ID NO: 24589 - DNA, 24 bp, Artificial Sequence
  Synthetic
tccctcacagucattagcaauagt

SEQ ID NO: 24590 - DNA, 25 bp, Artificial Sequence
  Synthetic
agagtgaguccccttcagcataaua

SEQ ID NO: 24591 - DNA, 29 bp, Artificial Sequence
  Synthetic
cacctcataacucttcttgguaacaagat

SEQ ID NO: 24592 - DNA, 24 bp, Artificial Sequence
  Synthetic
gggactcaugccttcaagtugaaa

SEQ ID NO: 24593 - DNA, 24 bp, Artificial Sequence
  Synthetic
gguggaatttagguggaacaaacc

SEQ ID NO: 24594 - DNA, 22 bp, Artificial Sequence
  Synthetic
caaggcugacacagatgguaca

SEQ ID NO: 24595 - DNA, 27 bp, Artificial Sequence
  Synthetic
caagttttcaaaucctgtggaatgguc

SEQ ID NO: 24596 - DNA, 30 bp, Artificial Sequence
  Synthetic
tccatgcatuatcatttatgacugacaagt

SEQ ID NO: 24597 - DNA, 25 bp, Artificial Sequence
  Synthetic
ctcctgtautggttggtucaagaca

SEQ ID NO: 24598 - DNA, 22 bp, Artificial Sequence
  Synthetic
ccaactgaauccaccaccaugt

SEQ ID NO: 24599 - DNA, 24 bp, Artificial Sequence
  Synthetic
acttgaaagccautaacuggccat

SEQ ID NO: 24600 - DNA, 28 bp, Artificial Sequence
  Synthetic
gggtttaccugacacatttcctatauca

SEQ ID NO: 24601 - DNA, 28 bp, Artificial Sequence
  Synthetic
tttttacuaaacagctagugaaccacca

SEQ ID NO: 24602 - DNA, 22 bp, Artificial Sequence
  Synthetic
gccaagcagutcaaacctucct

SEQ ID NO: 24603 - DNA, 20 bp, Artificial Sequence
  Synthetic
gagcttucggtgctgttugg

SEQ ID NO: 24604 - DNA, 22 bp, Artificial Sequence
  Synthetic
tgtggctugattgcaaagucct

SEQ ID NO: 24605 - DNA, 24 bp, Artificial Sequence
  Synthetic
cctttggacugaatctcaugaggt

SEQ ID NO: 24606 - DNA, 27 bp, Artificial Sequence
  Synthetic
ctcaggtcagauacatcagacatgtug

SEQ ID NO: 24607 - DNA, 21 bp, Artificial Sequence
  Synthetic
aatgtgtgugcacttgcaugg

SEQ ID NO: 24608 - DNA, 27 bp, Artificial Sequence
  Synthetic
ctgatcagccutaagttauaacccaaa

SEQ ID NO: 24609 - DNA, 27 bp, Artificial Sequence
  Synthetic
cttgcacattttuctgctcattatguc

SEQ ID NO: 24610 - DNA, 27 bp, Artificial Sequence
  Synthetic
tccatcgtaatgucatattgtggctuc

SEQ ID NO: 24611 - DNA, 25 bp, Artificial Sequence
  Synthetic
caagagaauacggagagcccuagat

SEQ ID NO: 24612 - DNA, 30 bp, Artificial Sequence
  Synthetic
tcagttataacaagcugaatgctacatgut

SEQ ID NO: 24613 - DNA, 25 bp, Artificial Sequence
  Synthetic
ctatggatttcugtggtgcagtgua

SEQ ID NO: 24614 - DNA, 22 bp, Artificial Sequence
  Synthetic
gcaataugcggaaagctgugaa

SEQ ID NO: 24615 - DNA, 23 bp, Artificial Sequence
  Synthetic
atgagggcttugtggatgatcuc

SEQ ID NO: 24616 - DNA, 26 bp, Artificial Sequence
  Synthetic
gggagtacaggauacattcaagctut

SEQ ID NO: 24617 - DNA, 28 bp, Artificial Sequence
  Synthetic
aggatgtugcaaaggauaaatatgtgua

SEQ ID NO: 24618 - DNA, 23 bp, Artificial Sequence
  Synthetic
ccttagaaauccgagctgtucca

SEQ ID NO: 24619 - DNA, 17 bp, Artificial Sequence
  Synthetic
gccatggucccagccut

SEQ ID NO: 24620 - DNA, 29 bp, Artificial Sequence
  Synthetic
agctttctctcauggatgtaaaatgugaa

SEQ ID NO: 24621 - DNA, 23 bp, Artificial Sequence
  Synthetic
ggagttcagcuttgggagttugt

SEQ ID NO: 24622 - DNA, 22 bp, Artificial Sequence
  Synthetic
ggattttgugaacgtugccaca

SEQ ID NO: 24623 - DNA, 20 bp, Artificial Sequence
  Synthetic
aggcctcugctgtagtccut

SEQ ID NO: 24624 - DNA, 24 bp, Artificial Sequence
  Synthetic
ggtgaccccuatgtggtacuaact

SEQ ID NO: 24625 - DNA, 20 bp, Artificial Sequence
  Synthetic
aacauggtgctuccaagggt

SEQ ID NO: 24626 - DNA, 22 bp, Artificial Sequence
  Synthetic
cgcctgugatcatttuggcaat

SEQ ID NO: 24627 - DNA, 22 bp, Artificial Sequence
  Synthetic
gcaccatgaugactgacagcuc

SEQ ID NO: 24628 - DNA, 22 bp, Artificial Sequence
  Synthetic
tcaggctcutttctgggttucc

SEQ ID NO: 24629 - DNA, 21 bp, Artificial Sequence
  Synthetic
cgaugcaagtgcucaaacacc

SEQ ID NO: 24630 - DNA, 22 bp, Artificial Sequence
  Synthetic
gtctcctccugacacctgttug

SEQ ID NO: 24631 - DNA, 27 bp, Artificial Sequence
  Synthetic
gtcaatctgaaugtccttagugaaggg

SEQ ID NO: 24632 - DNA, 18 bp, Artificial Sequence
  Synthetic
ggugcacaggacgucact

SEQ ID NO: 24633 - DNA, 17 bp, Artificial Sequence
  Synthetic
gcgccccutctccacuc

SEQ ID NO: 24634 - DNA, 21 bp, Artificial Sequence
  Synthetic
agagucacccatcauccaagt

SEQ ID NO: 24635 - DNA, 22 bp, Artificial Sequence
  Synthetic
gattcagcuttgtggccucaag

SEQ ID NO: 24636 - DNA, 20 bp, Artificial Sequence
  Synthetic
ccgttugaagagagcucgca

SEQ ID NO: 24637 - DNA, 28 bp, Artificial Sequence
  Synthetic
tctttatagcttguccttgttctccuaa

SEQ ID NO: 24638 - DNA, 21 bp, Artificial Sequence
  Synthetic
aagguaccagggctgagauga

SEQ ID NO: 24639 - DNA, 29 bp, Artificial Sequence
  Synthetic
tctctttctaaagcauctgttttctcucc

SEQ ID NO: 24640 - DNA, 23 bp, Artificial Sequence
  Synthetic
cctgggtccuctttaaagtguca

SEQ ID NO: 24641 - DNA, 29 bp, Artificial Sequence
  Synthetic
gcctcatgaaagccuttatctttttacut

SEQ ID NO: 24642 - DNA, 23 bp, Artificial Sequence
  Synthetic
cuccccaaauaaagcagagtgua

SEQ ID NO: 24643 - DNA, 31 bp, Artificial Sequence
  Synthetic
gcaatgctaaccauctttaacatctatctut

SEQ ID NO: 24644 - DNA, 22 bp, Artificial Sequence
  Synthetic
gctgacagccaggcuttcttua

SEQ ID NO: 24645 - DNA, 21 bp, Artificial Sequence
  Synthetic
ccaggacgucgatgaacugat

SEQ ID NO: 24646 - DNA, 25 bp, Artificial Sequence
  Synthetic
gcatgctgguccactatgaagauat

SEQ ID NO: 24647 - DNA, 30 bp, Artificial Sequence
  Synthetic
atgtctgataatuaacattttctaccugca

SEQ ID NO: 24648 - DNA, 22 bp, Artificial Sequence
  Synthetic
agaggctgacaugtcctgagua

SEQ ID NO: 24649 - DNA, 27 bp, Artificial Sequence
  Synthetic
accaggaagauaccggatgtaaattuc

SEQ ID NO: 24650 - DNA, 22 bp, Artificial Sequence
  Synthetic
ctggaacucactgcctcttuct

SEQ ID NO: 24651 - DNA, 20 bp, Artificial Sequence
  Synthetic
gccucacagcccaaagacuc

SEQ ID NO: 24652 - DNA, 25 bp, Artificial Sequence
  Synthetic
ctgctgacugacatttagcttgtug

SEQ ID NO: 24653 - DNA, 32 bp, Artificial Sequence
  Synthetic
tgatatcaatgutactccagauaaaaggcaaa

SEQ ID NO: 24654 - DNA, 30 bp, Artificial Sequence
  Synthetic
aaaagctctcaggauaaaatgttcaatugt

SEQ ID NO: 24655 - DNA, 25 bp, Artificial Sequence
  Synthetic
gcaaagccucattccttttgtucag

SEQ ID NO: 24656 - DNA, 30 bp, Artificial Sequence
  Synthetic
tactcttgaaaaucaggautaatttacugt

SEQ ID NO: 24657 - DNA, 31 bp, Artificial Sequence
  Synthetic
actgatgtttgaucacaatgggaaaattauc

SEQ ID NO: 24658 - DNA, 26 bp, Artificial Sequence
  Synthetic
tttcttcttcuaccccacatccatug

SEQ ID NO: 24659 - DNA, 23 bp, Artificial Sequence
  Synthetic
aaaaactgauagcatggguccgt

SEQ ID NO: 24660 - DNA, 20 bp, Artificial Sequence
  Synthetic
gaaacagugccgucggaaac

SEQ ID NO: 24661 - DNA, 29 bp, Artificial Sequence
  Synthetic
gcttccgagaaautgatgagctaauaaaa

SEQ ID NO: 24662 - DNA, 28 bp, Artificial Sequence
  Synthetic
ttcagagaaaacugatttccatggcuat

SEQ ID NO: 24663 - DNA, 28 bp, Artificial Sequence
  Synthetic
tgaatccugaaacaaagagaccauacac

SEQ ID NO: 24664 - DNA, 17 bp, Artificial Sequence
  Synthetic
ggaggugacggcucagg

SEQ ID NO: 24665 - DNA, 21 bp, Artificial Sequence
  Synthetic
ctaaccaatguggccgtggua

SEQ ID NO: 24666 - DNA, 17 bp, Artificial Sequence
  Synthetic
gctgcguctgtggguca

SEQ ID NO: 24667 - DNA, 17 bp, Artificial Sequence
  Synthetic
gcagaggguacggcugg

SEQ ID NO: 24668 - DNA, 23 bp, Artificial Sequence
  Synthetic
agggaagggucatgaucagaagg

SEQ ID NO: 24669 - DNA, 27 bp, Artificial Sequence
  Synthetic
acgcattgacguagaagagaauaacag

SEQ ID NO: 24670 - DNA, 20 bp, Artificial Sequence
  Synthetic
ggccaguaacccaccttcug

SEQ ID NO: 24671 - DNA, 21 bp, Artificial Sequence
  Synthetic
gaagtagccucccacgaugag

SEQ ID NO: 24672 - DNA, 21 bp, Artificial Sequence
  Synthetic
acctgtcuacgttcccucact

SEQ ID NO: 24673 - DNA, 18 bp, Artificial Sequence
  Synthetic
ccaggugctcauggcgat

SEQ ID NO: 24674 - DNA, 24 bp, Artificial Sequence
  Synthetic
gggaagatgaauggcactgacuat

SEQ ID NO: 24675 - DNA, 21 bp, Artificial Sequence
  Synthetic
gagccaccaucttggugacat

SEQ ID NO: 24676 - DNA, 18 bp, Artificial Sequence
  Synthetic
cccugcccccaguaccat

SEQ ID NO: 24677 - DNA, 21 bp, Artificial Sequence
  Synthetic
ctgggcagaaauggatccuga

SEQ ID NO: 24678 - DNA, 30 bp, Artificial Sequence
  Synthetic
tggtgtagaaagugataaaagaguaaccaa

SEQ ID NO: 24679 - DNA, 22 bp, Artificial Sequence
  Synthetic
gctcugggacagacatcugact

SEQ ID NO: 24680 - DNA, 24 bp, Artificial Sequence
  Synthetic
aaacgattggaucagcacagtgua

SEQ ID NO: 24681 - DNA, 29 bp, Artificial Sequence
  Synthetic
ttgaggttugtgtaaagaaugagcaaaag

SEQ ID NO: 24682 - DNA, 27 bp, Artificial Sequence
  Synthetic
cattgataatugaaaccgcaacaugga

SEQ ID NO: 24683 - DNA, 31 bp, Artificial Sequence
  Synthetic
gctcctgctgtugtaacattctttttaauaa

SEQ ID NO: 24684 - DNA, 30 bp, Artificial Sequence
  Synthetic
gttactaatttcuttccagttgtugcagaa

SEQ ID NO: 24685 - DNA, 27 bp, Artificial Sequence
  Synthetic
acatctaggutacctgagaaucacgaa

SEQ ID NO: 24686 - DNA, 33 bp, Artificial Sequence
  Synthetic
atttttacttttuagttttcaatauccaagcca

SEQ ID NO: 24687 - DNA, 24 bp, Artificial Sequence
  Synthetic
cttctctgaucgacactccttugt

SEQ ID NO: 24688 - DNA, 31 bp, Artificial Sequence
  Synthetic
tcaggaagttaaaugaagttcgaaagagaut

SEQ ID NO: 24689 - DNA, 28 bp, Artificial Sequence
  Synthetic
gctcggaatttucatgctcagaatcaua

SEQ ID NO: 24690 - DNA, 28 bp, Artificial Sequence
  Synthetic
tgtgctcttucctttaaaagttacuggt

SEQ ID NO: 24691 - DNA, 26 bp, Artificial Sequence
  Synthetic
ctagataatgaagcuccactgacucc

SEQ ID NO: 24692 - DNA, 29 bp, Artificial Sequence
  Synthetic
ccagtgcatcaaauttggatgatttcuac

SEQ ID NO: 24693 - DNA, 26 bp, Artificial Sequence
  Synthetic
tgaaggccaaaagcutaacataccut

SEQ ID NO: 24694 - DNA, 29 bp, Artificial Sequence
  Synthetic
cactagagccutagtgccatattuaaagt

SEQ ID NO: 24695 - DNA, 25 bp, Artificial Sequence
  Synthetic
gggttgaaguaacagctggcataua

SEQ ID NO: 24696 - DNA, 29 bp, Artificial Sequence
  Synthetic
ctccagaatgacauctgttttatgtcuct

SEQ ID NO: 24697 - DNA, 22 bp, Artificial Sequence
  Synthetic
ggaactggcaucttgctctuct

SEQ ID NO: 24698 - DNA, 25 bp, Artificial Sequence
  Synthetic
ggtgtcagagcuctcttacguagaa

SEQ ID NO: 24699 - DNA, 28 bp, Artificial Sequence
  Synthetic
ctttcatagcaaautttacctgctgguc

SEQ ID NO: 24700 - DNA, 27 bp, Artificial Sequence
  Synthetic
ctccttctcccaguttattttgtccut

SEQ ID NO: 24701 - DNA, 26 bp, Artificial Sequence
  Synthetic
ggcaatagacaaautacgttgtucca

SEQ ID NO: 24702 - DNA, 22 bp, Artificial Sequence
  Synthetic
aaaactgccugaagaggaggug

SEQ ID NO: 24703 - DNA, 29 bp, Artificial Sequence
  Synthetic
gcgtcttctuccgtttgtatctaatugat

SEQ ID NO: 24704 - DNA, 28 bp, Artificial Sequence
  Synthetic
ttgagttacctguactgttacacaaugg

SEQ ID NO: 24705 - DNA, 25 bp, Artificial Sequence
  Synthetic
gcaaggttcacaugtgctagacaua

SEQ ID NO: 24706 - DNA, 28 bp, Artificial Sequence
  Synthetic
ggtcttttatguattccagaaacuggga

SEQ ID NO: 24707 - DNA, 28 bp, Artificial Sequence
  Synthetic
gtctcaagtagtcugtgtttagtagcug

SEQ ID NO: 24708 - DNA, 27 bp, Artificial Sequence
  Synthetic
tgagagccaugaaaaaggagaaaaugt

SEQ ID NO: 24709 - DNA, 33 bp, Artificial Sequence
  Synthetic
ctacaattcactaaucattatcagcttacauca

SEQ ID NO: 24710 - DNA, 20 bp, Artificial Sequence
  Synthetic
gcagcuggaccggcaaatua

SEQ ID NO: 24711 - DNA, 30 bp, Artificial Sequence
  Synthetic
cgttgaactttaucacaataaggtcttcug

SEQ ID NO: 24712 - DNA, 28 bp, Artificial Sequence
  Synthetic
ggaaaatagaagcaacuggagtgauaca

SEQ ID NO: 24713 - DNA, 26 bp, Artificial Sequence
  Synthetic
actacttttgcugaggtaaaatguga

SEQ ID NO: 24714 - DNA, 30 bp, Artificial Sequence
  Synthetic
tgaggatgaagaaauggaagaattugaaga

SEQ ID NO: 24715 - DNA, 22 bp, Artificial Sequence
  Synthetic
gctgatggaagugtgtcaguca

SEQ ID NO: 24716 - DNA, 24 bp, Artificial Sequence
  Synthetic
cctaacccttugccgttacgttua

SEQ ID NO: 24717 - DNA, 29 bp, Artificial Sequence
  Synthetic
catagtcattcacuaacactggagatuca

SEQ ID NO: 24718 - DNA, 32 bp, Artificial Sequence
  Synthetic
atttttaattttcatuccaaaggcagatcuaa

SEQ ID NO: 24719 - DNA, 28 bp, Artificial Sequence
  Synthetic
actcttaccaggutcttttagtgtcuca

SEQ ID NO: 24720 - DNA, 30 bp, Artificial Sequence
  Synthetic
aggcactaaaauaaaaatggtcatcuaggg

SEQ ID NO: 24721 - DNA, 24 bp, Artificial Sequence
  Synthetic
ccagcagtutaagcacaaguacca

SEQ ID NO: 24722 - DNA, 21 bp, Artificial Sequence
  Synthetic
ctccugcaccatcatcuaggg

SEQ ID NO: 24723 - DNA, 26 bp, Artificial Sequence
  Synthetic
ccugaaaaagaacagccatuaaaggg

SEQ ID NO: 24724 - DNA, 24 bp, Artificial Sequence
  Synthetic
gtcaaggaaauccactggttcugt

SEQ ID NO: 24725 - DNA, 20 bp, Artificial Sequence
  Synthetic
atguccggagacacatggug

SEQ ID NO: 24726 - DNA, 28 bp, Artificial Sequence
  Synthetic
ctttccggugaaacattttctcacaaua

SEQ ID NO: 24727 - DNA, 28 bp, Artificial Sequence
  Synthetic
ctgtgttagcauagtagtttagctucca

SEQ ID NO: 24728 - DNA, 24 bp, Artificial Sequence
  Synthetic
acaaatcaccaggaaugacagugg

SEQ ID NO: 24729 - DNA, 26 bp, Artificial Sequence
  Synthetic
ccttuttgctttctttuacgaccaca

SEQ ID NO: 24730 - DNA, 22 bp, Artificial Sequence
  Synthetic
aaagccgugataugaagccact

SEQ ID NO: 24731 - DNA, 19 bp, Artificial Sequence
  Synthetic
augtgtccauggcgaccaa

SEQ ID NO: 24732 - DNA, 23 bp, Artificial Sequence
  Synthetic
ggagaaaggacuggtgaaaggug

SEQ ID NO: 24733 - DNA, 22 bp, Artificial Sequence
  Synthetic
catggtggcucctagtggtaug

SEQ ID NO: 24734 - DNA, 27 bp, Artificial Sequence
  Synthetic
gttcacatuggaaacattgctgattug

SEQ ID NO: 24735 - DNA, 23 bp, Artificial Sequence
  Synthetic
gagggcagtuacttgggaaacut

SEQ ID NO: 24736 - DNA, 21 bp, Artificial Sequence
  Synthetic
gcagaccguggagtacctgua

SEQ ID NO: 24737 - DNA, 20 bp, Artificial Sequence
  Synthetic
ctgtatcuggcctugcggaa

SEQ ID NO: 24738 - DNA, 30 bp, Artificial Sequence
  Synthetic
gcataaaagtuaaaagcaaacagcacuaga

SEQ ID NO: 24739 - DNA, 21 bp, Artificial Sequence
  Synthetic
gctaccaccagugccaugaac

SEQ ID NO: 24740 - DNA, 28 bp, Artificial Sequence
  Synthetic
gcaatgtgatgucaagtggtaaattcug

SEQ ID NO: 24741 - DNA, 29 bp, Artificial Sequence
  Synthetic
tcattttacagacautgtcccuaaacact

SEQ ID NO: 24742 - DNA, 23 bp, Artificial Sequence
  Synthetic
ctggcaggauctgtcttactguc

SEQ ID NO: 24743 - DNA, 22 bp, Artificial Sequence
  Synthetic
agctccuggatcagaagugact

SEQ ID NO: 24744 - DNA, 20 bp, Artificial Sequence
  Synthetic
cagctcuctcactgcucacg

SEQ ID NO: 24745 - DNA, 24 bp, Artificial Sequence
  Synthetic
agatgggaagcutggacucaaaag

SEQ ID NO: 24746 - DNA, 21 bp, Artificial Sequence
  Synthetic
aaactgacugggtgggatucg

SEQ ID NO: 24747 - DNA, 23 bp, Artificial Sequence
  Synthetic
gcaaccacucctcagggtaguaa

SEQ ID NO: 24748 - DNA, 30 bp, Artificial Sequence
  Synthetic
gctgcttttgtaauatctcctcttaactug

SEQ ID NO: 24749 - DNA, 21 bp, Artificial Sequence
  Synthetic
cucttgttgcugcacaaacga

SEQ ID NO: 24750 - DNA, 29 bp, Artificial Sequence
  Synthetic
actagcatcctuacagtcttctaaauaga

SEQ ID NO: 24751 - DNA, 24 bp, Artificial Sequence
  Synthetic
gttcccaugaaggaaagaccagut

SEQ ID NO: 24752 - DNA, 24 bp, Artificial Sequence
  Synthetic
tgatccactucaaccaagacacug

SEQ ID NO: 24753 - DNA, 27 bp, Artificial Sequence
  Synthetic
agtgtatatagcaucttgcatgtuggg

SEQ ID NO: 24754 - DNA, 24 bp, Artificial Sequence
  Synthetic
atgtgctaccucaagcatcauagg

SEQ ID NO: 24755 - DNA, 25 bp, Artificial Sequence
  Synthetic
gtcactcugtccttgaaauagcact

SEQ ID NO: 24756 - DNA, 22 bp, Artificial Sequence
  Synthetic
acaaagaagcacucatguggct

SEQ ID NO: 24757 - DNA, 24 bp, Artificial Sequence
  Synthetic
ggatgggagaaaauacctcugacc

SEQ ID NO: 24758 - DNA, 28 bp, Artificial Sequence
  Synthetic
agcatgatgagcuattagatctgaucct

SEQ ID NO: 24759 - DNA, 27 bp, Artificial Sequence
  Synthetic
acttatgcatgauttaccatcttugct

SEQ ID NO: 24760 - DNA, 26 bp, Artificial Sequence
  Synthetic
tccatcctuggcctttttctaacaut

SEQ ID NO: 24761 - DNA, 28 bp, Artificial Sequence
  Synthetic
catgctgcagaaaagcuaagatcaaaua

SEQ ID NO: 24762 - DNA, 30 bp, Artificial Sequence
  Synthetic
tttttcagagacaugagagaagttaucaaa

SEQ ID NO: 24763 - DNA, 32 bp, Artificial Sequence
  Synthetic
gctttcaccaacuaaattgccaagtataaaua

SEQ ID NO: 24764 - DNA, 25 bp, Artificial Sequence
  Synthetic
gcgcttggcautagtttttcaucaa

SEQ ID NO: 24765 - DNA, 25 bp, Artificial Sequence
  Synthetic
cccctcagcauggtatagtcuaaca

SEQ ID NO: 24766 - DNA, 29 bp, Artificial Sequence
  Synthetic
tctgtgagttugttattcctgtaucaaca

SEQ ID NO: 24767 - DNA, 25 bp, Artificial Sequence
  Synthetic
agcataagaaautgagtuccgcagt

SEQ ID NO: 24768 - DNA, 32 bp, Artificial Sequence
  Synthetic
atacataatauacctttcaatttguggaggct

SEQ ID NO: 24769 - DNA, 30 bp, Artificial Sequence
  Synthetic
acatgttttcttcautgtagacaatatgug

SEQ ID NO: 24770 - DNA, 22 bp, Artificial Sequence
  Synthetic
cgggaaaagccautctgcatut

SEQ ID NO: 24771 - DNA, 25 bp, Artificial Sequence
  Synthetic
tctctgagaagugaatgtacugagt

SEQ ID NO: 24772 - DNA, 27 bp, Artificial Sequence
  Synthetic
gttaggttctcucttgctgaagtacug

SEQ ID NO: 24773 - DNA, 22 bp, Artificial Sequence
  Synthetic
ccatagagauaaccccucgcua

SEQ ID NO: 24774 - DNA, 20 bp, Artificial Sequence
  Synthetic
caagatgccucacctcgcut

SEQ ID NO: 24775 - DNA, 18 bp, Artificial Sequence
  Synthetic
cugcagaaggccgtguct

SEQ ID NO: 24776 - DNA, 23 bp, Artificial Sequence
  Synthetic
gttacctagugcaactgggtcug

SEQ ID NO: 24777 - DNA, 23 bp, Artificial Sequence
  Synthetic
cgtacuaaggcggtgucaagaag

SEQ ID NO: 24778 - DNA, 21 bp, Artificial Sequence
  Synthetic
caagcacccaaucccguaaga

SEQ ID NO: 24779 - DNA, 22 bp, Artificial Sequence
  Synthetic
tccaccucagcattaccgttug

SEQ ID NO: 24780 - DNA, 21 bp, Artificial Sequence
  Synthetic
gagtcaacaggugaggtggug

SEQ ID NO: 24781 - DNA, 22 bp, Artificial Sequence
  Synthetic
ccgtcctcucattcctgtcaut

SEQ ID NO: 24782 - DNA, 26 bp, Artificial Sequence
  Synthetic
ctgaaacucaaaagcctgaaaugact

SEQ ID NO: 24783 - DNA, 23 bp, Artificial Sequence
  Synthetic
tggatgugaagacgcaatcuagg

SEQ ID NO: 24784 - DNA, 28 bp, Artificial Sequence
  Synthetic
atttgtctgttccutaccttgacaauat

SEQ ID NO: 24785 - DNA, 23 bp, Artificial Sequence
  Synthetic
aggaaatuagcagagcgatuggt

SEQ ID NO: 24786 - DNA, 24 bp, Artificial Sequence
  Synthetic
gggaggatauctgattgttggaug

SEQ ID NO: 24787 - DNA, 23 bp, Artificial Sequence
  Synthetic
ggagcaauaaggtaaccagcuga

SEQ ID NO: 24788 - DNA, 26 bp, Artificial Sequence
  Synthetic
tctcctgtaggacutggttccataut

SEQ ID NO: 24789 - DNA, 29 bp, Artificial Sequence
  Synthetic
aaaattttcacaguaaggatcttcucaga

SEQ ID NO: 24790 - DNA, 28 bp, Artificial Sequence
  Synthetic
caagttctgauacattgaagacuccaga

SEQ ID NO: 24791 - DNA, 28 bp, Artificial Sequence
  Synthetic
tgttcaaaccatuggctttaaaacacut

SEQ ID NO: 24792 - DNA, 21 bp, Artificial Sequence
  Synthetic
gauccagacgccagacttugt

SEQ ID NO: 24793 - DNA, 21 bp, Artificial Sequence
  Synthetic
cutgccaaacugcgcaaagat

SEQ ID NO: 24794 - DNA, 26 bp, Artificial Sequence
  Synthetic
agtgagacagaugggagaatacauca

SEQ ID NO: 24795 - DNA, 20 bp, Artificial Sequence
  Synthetic
gagccccgucctgattgauc

SEQ ID NO: 24796 - DNA, 24 bp, Artificial Sequence
  Synthetic
tggttttatucgcttcctcaugct

SEQ ID NO: 24797 - DNA, 26 bp, Artificial Sequence
  Synthetic
ctcagauacggcgattcaaagtuagt

SEQ ID NO: 24798 - DNA, 33 bp, Artificial Sequence
  Synthetic
tcccttaaatttacauactcataagatcatgug

SEQ ID NO: 24799 - DNA, 28 bp, Artificial Sequence
  Synthetic
cgacttcaaaggauacatgctgagatua

SEQ ID NO: 24800 - DNA, 22 bp, Artificial Sequence
  Synthetic
cctcauacaggacactggctuc

SEQ ID NO: 24801 - DNA, 25 bp, Artificial Sequence
  Synthetic
tgaggaagacuctgatgtggatgut

SEQ ID NO: 24802 - DNA, 26 bp, Artificial Sequence
  Synthetic
acaatctccugagcagtcttagtgua

SEQ ID NO: 24803 - DNA, 26 bp, Artificial Sequence
  Synthetic
gtcaauccagtggattuagagaccat

SEQ ID NO: 24804 - DNA, 23 bp, Artificial Sequence
  Synthetic
cagatgctcuctgaactctuccc

SEQ ID NO: 24805 - DNA, 27 bp, Artificial Sequence
  Synthetic
acatgagagaucttccaaauacacacc

SEQ ID NO: 24806 - DNA, 23 bp, Artificial Sequence
  Synthetic
tcttctgtcauggcaacaggtut

SEQ ID NO: 24807 - DNA, 24 bp, Artificial Sequence
  Synthetic
ccaagaaaaugaaagagcgtccug

SEQ ID NO: 24808 - DNA, 25 bp, Artificial Sequence
  Synthetic
catactcttucccctcttcatcucg

SEQ ID NO: 24809 - DNA, 21 bp, Artificial Sequence
  Synthetic
ctacggcgaaugctactggua

SEQ ID NO: 24810 - DNA, 23 bp, Artificial Sequence
  Synthetic
gagcctgttcugttgacattgug

SEQ ID NO: 24811 - DNA, 21 bp, Artificial Sequence
  Synthetic
aggaacagaugcagacctucg

SEQ ID NO: 24812 - DNA, 23 bp, Artificial Sequence
  Synthetic
ggauttctcaccauagccagcat

SEQ ID NO: 24813 - DNA, 23 bp, Artificial Sequence
  Synthetic
tcaaactggugggtgcttaaguc

SEQ ID NO: 24814 - DNA, 32 bp, Artificial Sequence
  Synthetic
aaatatccactaautcccgaatataguaaccc

SEQ ID NO: 24815 - DNA, 23 bp, Artificial Sequence
  Synthetic
ctctctccaucctggccaatuac

SEQ ID NO: 24816 - DNA, 21 bp, Artificial Sequence
  Synthetic
ggcugagagagugcaccaaat

SEQ ID NO: 24817 - DNA, 29 bp, Artificial Sequence
  Synthetic
tggagggaatatuatccagcattcaatuc

SEQ ID NO: 24818 - DNA, 26 bp, Artificial Sequence
  Synthetic
ttggtactccauttttcccatugaca

SEQ ID NO: 24819 - DNA, 25 bp, Artificial Sequence
  Synthetic
gaggttctcaucattgggaucaagt

SEQ ID NO: 24820 - DNA, 32 bp, Artificial Sequence
  Synthetic
aagtttcctaaattccuccatcattctagaut

SEQ ID NO: 24821 - DNA, 23 bp, Artificial Sequence
  Synthetic
cagauaccaaaccaagaguggct

SEQ ID NO: 24822 - DNA, 24 bp, Artificial Sequence
  Synthetic
gacattctuccctgguccaaaaag

SEQ ID NO: 24823 - DNA, 23 bp, Artificial Sequence
  Synthetic
cccttccatuggctgggattaug

SEQ ID NO: 24824 - DNA, 30 bp, Artificial Sequence
  Synthetic
catcatagtcaucttcatcataauccgagt

SEQ ID NO: 24825 - DNA, 20 bp, Artificial Sequence
  Synthetic
ggcggugccttggtaaauga

SEQ ID NO: 24826 - DNA, 20 bp, Artificial Sequence
  Synthetic
agtcgcccggaagugatcua

SEQ ID NO: 24827 - DNA, 18 bp, Artificial Sequence
  Synthetic
gcgacgtugcgagacucc

SEQ ID NO: 24828 - DNA, 17 bp, Artificial Sequence
  Synthetic
gctgccugctguggaga

SEQ ID NO: 24829 - DNA, 27 bp, Artificial Sequence
  Synthetic
ctgtgatttgtugctttgattccucag

SEQ ID NO: 24830 - DNA, 21 bp, Artificial Sequence
  Synthetic
ctgctgtgugaacaagtcucc

SEQ ID NO: 24831 - DNA, 22 bp, Artificial Sequence
  Synthetic
tctcagggtcugacctgtctut

SEQ ID NO: 24832 - DNA, 21 bp, Artificial Sequence
  Synthetic
ccatcccuccaaauccccaac

SEQ ID NO: 24833 - DNA, 25 bp, Artificial Sequence
  Synthetic
gctgaatauaaacgccaaaauccca

SEQ ID NO: 24834 - DNA, 20 bp, Artificial Sequence
  Synthetic
tgtcccggaguttgcacauc

SEQ ID NO: 24835 - DNA, 25 bp, Artificial Sequence
  Synthetic
aacttttcccugtccattccaucaa

SEQ ID NO: 24836 - DNA, 27 bp, Artificial Sequence
  Synthetic
tggaaatctccugaaaacttgtgtcut

SEQ ID NO: 24837 - DNA, 31 bp, Artificial Sequence
  Synthetic
gtguggaccaaaataaacuaaaagaaccaat

SEQ ID NO: 24838 - DNA, 31 bp, Artificial Sequence
  Synthetic
tgttgtgtgacatucttagagtatgaagtut

SEQ ID NO: 24839 - DNA, 22 bp, Artificial Sequence
  Synthetic
agctcaaccuctgcaguaacag

SEQ ID NO: 24840 - DNA, 28 bp, Artificial Sequence
  Synthetic
gcttaguaaacacaccauaatcaatcut

SEQ ID NO: 24841 - DNA, 27 bp, Artificial Sequence
  Synthetic
caagactaucccaaatattccgaugca

SEQ ID NO: 24842 - DNA, 20 bp, Artificial Sequence
  Synthetic
ctctttgccuggctcuaggt

SEQ ID NO: 24843 - DNA, 22 bp, Artificial Sequence
  Synthetic
gagggatucgaaggtggaaguc

SEQ ID NO: 24844 - DNA, 18 bp, Artificial Sequence
  Synthetic
tgcuagggccagaaugcc

SEQ ID NO: 24845 - DNA, 17 bp, Artificial Sequence
  Synthetic
agccccaccuggacuca

SEQ ID NO: 24846 - DNA, 20 bp, Artificial Sequence
  Synthetic
cgagucggaggaaucagacc

SEQ ID NO: 24847 - DNA, 28 bp, Artificial Sequence
  Synthetic
agcaggtaaauggacaagaacactttua

SEQ ID NO: 24848 - DNA, 23 bp, Artificial Sequence
  Synthetic
gccagaggaaaugggttgtttut

SEQ ID NO: 24849 - DNA, 23 bp, Artificial Sequence
  Synthetic
cctcatcggaaucaagctcagug

SEQ ID NO: 24850 - DNA, 23 bp, Artificial Sequence
  Synthetic
caattgccuccacaaagtcugag

SEQ ID NO: 24851 - DNA, 28 bp, Artificial Sequence
  Synthetic
tgcaaagttctuctctctttccatugaa

SEQ ID NO: 24852 - DNA, 22 bp, Artificial Sequence
  Synthetic
gttugcaccaggagtttguagg

SEQ ID NO: 24853 - DNA, 21 bp, Artificial Sequence
  Synthetic
gtccttcuggctgcgagtuat

SEQ ID NO: 24854 - DNA, 27 bp, Artificial Sequence
  Synthetic
aagtagaagcaauctgatgaacuccaa

SEQ ID NO: 24855 - DNA, 22 bp, Artificial Sequence
  Synthetic
ctgtacgaaguggacactcuca

SEQ ID NO: 24856 - DNA, 23 bp, Artificial Sequence
  Synthetic
ataaguccacaggcugaaagagt

SEQ ID NO: 24857 - DNA, 25 bp, Artificial Sequence
  Synthetic
ctcattttucctgcaattcucagca

SEQ ID NO: 24858 - DNA, 22 bp, Artificial Sequence
  Synthetic
tgatguccccaaagctctctuc

SEQ ID NO: 24859 - DNA, 25 bp, Artificial Sequence
  Synthetic
tctaatgccaccaucctctgtttut

SEQ ID NO: 24860 - DNA, 23 bp, Artificial Sequence
  Synthetic
aggaaagcaccutttgaguggag

SEQ ID NO: 24861 - DNA, 22 bp, Artificial Sequence
  Synthetic
gtgtcaccugagatctgtgcug

SEQ ID NO: 24862 - DNA, 27 bp, Artificial Sequence
  Synthetic
ctgccagtgcauatactttctggauaa

SEQ ID NO: 24863 - DNA, 23 bp, Artificial Sequence
  Synthetic
gutctctcugaaacacacaagcc

SEQ ID NO: 24864 - DNA, 21 bp, Artificial Sequence
  Synthetic
aaagaagaggccaugcgtuag

SEQ ID NO: 24865 - DNA, 29 bp, Artificial Sequence
  Synthetic
tttgtgttacaaaucaggagagcttauca

SEQ ID NO: 24866 - DNA, 23 bp, Artificial Sequence
  Synthetic
gagagtcugaaatgcacctugga

SEQ ID NO: 24867 - DNA, 17 bp, Artificial Sequence
  Synthetic
gcagcggcugtaucggt

SEQ ID NO: 24868 - DNA, 29 bp, Artificial Sequence
  Synthetic
ggactcacaatuacaagcctgtttctaut

SEQ ID NO: 24869 - DNA, 23 bp, Artificial Sequence
  Synthetic
ctgatagcacgutcctcgagtut

SEQ ID NO: 24870 - DNA, 24 bp, Artificial Sequence
  Synthetic
aatacaccacggagaucaugaacc

SEQ ID NO: 24871 - DNA, 21 bp, Artificial Sequence
  Synthetic
tgcauttgguacacgcaggaa

SEQ ID NO: 24872 - DNA, 20 bp, Artificial Sequence
  Synthetic
cgttaugggacgaggcacug

SEQ ID NO: 24873 - DNA, 17 bp, Artificial Sequence
  Synthetic
ggcgagggcutgaagug

SEQ ID NO: 24874 - DNA, 17 bp, Artificial Sequence
  Synthetic
cctgcugggcgagaguc

SEQ ID NO: 24875 - DNA, 21 bp, Artificial Sequence
  Synthetic
gctcacctugaaaaagcccut

SEQ ID NO: 24876 - DNA, 30 bp, Artificial Sequence
  Synthetic
tgattgctcaacugtaatgtgtttttatuc

SEQ ID NO: 24877 - DNA, 21 bp, Artificial Sequence
  Synthetic
agacgaccuctcctcccttuc

SEQ ID NO: 24878 - DNA, 23 bp, Artificial Sequence
  Synthetic
gaagcaggauaatgctgctcuct

SEQ ID NO: 24879 - DNA, 23 bp, Artificial Sequence
  Synthetic
gggagaucagtaaaucccggaat

SEQ ID NO: 24880 - DNA, 26 bp, Artificial Sequence
  Synthetic
gacacagaccucaattagggatucaa

SEQ ID NO: 24881 - DNA, 23 bp, Artificial Sequence
  Synthetic
gtcccttacuctggtggtcttut

SEQ ID NO: 24882 - DNA, 23 bp, Artificial Sequence
  Synthetic
catgtgataccaaucaggccuct

SEQ ID NO: 24883 - DNA, 21 bp, Artificial Sequence
  Synthetic
gggatgagcutcctcagctug

SEQ ID NO: 24884 - DNA, 23 bp, Artificial Sequence
  Synthetic
tggacagacutttgcatgtucca

SEQ ID NO: 24885 - DNA, 19 bp, Artificial Sequence
  Synthetic
ggtaggccgcuctaccuga

SEQ ID NO: 24886 - DNA, 31 bp, Artificial Sequence
  Synthetic
ctatcattgtcaacauctcttttcattugct

SEQ ID NO: 24887 - DNA, 25 bp, Artificial Sequence
  Synthetic
gcgatcaattcugacctcttcugaa

SEQ ID NO: 24888 - DNA, 24 bp, Artificial Sequence
  Synthetic
tatagggaguttgggtgttaugga

SEQ ID NO: 24889 - DNA, 25 bp, Artificial Sequence
  Synthetic
acctgcaucagaatggtcaguaaac

SEQ ID NO: 24890 - DNA, 17 bp, Artificial Sequence
  Synthetic
gccggaaaugcgagguc

SEQ ID NO: 24891 - DNA, 19 bp, Artificial Sequence
  Synthetic
gcatccauctcgtcuccca

SEQ ID NO: 24892 - DNA, 27 bp, Artificial Sequence
  Synthetic
gtggcttgcagauttttcctacuaaaa

SEQ ID NO: 24893 - DNA, 26 bp, Artificial Sequence
  Synthetic
agaaugacttctugggaaggaaacac

SEQ ID NO: 24894 - DNA, 23 bp, Artificial Sequence
  Synthetic
gcaaaaacgcccauttgcctauc

SEQ ID NO: 24895 - DNA, 28 bp, Artificial Sequence
  Synthetic
gaagagttgcacauactttcactgttuc

SEQ ID NO: 24896 - DNA, 24 bp, Artificial Sequence
  Synthetic
aaaaagtcatuccttgtccuccgt

SEQ ID NO: 24897 - DNA, 21 bp, Artificial Sequence
  Synthetic
ccaauacctcacugagcaggt

SEQ ID NO: 24898 - DNA, 25 bp, Artificial Sequence
  Synthetic
cacggagagacagcaucattacuac

SEQ ID NO: 24899 - DNA, 28 bp, Artificial Sequence
  Synthetic
caatcagaaaagauttcaacaugggaca

SEQ ID NO: 24900 - DNA, 23 bp, Artificial Sequence
  Synthetic
gctcaggcccutaaattcactug

SEQ ID NO: 24901 - DNA, 29 bp, Artificial Sequence
  Synthetic
gagagactuaaccccaggattttgatuaa

SEQ ID NO: 24902 - DNA, 27 bp, Artificial Sequence
  Synthetic
tgttctccttuggttcttcatcttuga

SEQ ID NO: 24903 - DNA, 21 bp, Artificial Sequence
  Synthetic
gcuagggaggcttuagaaggg

SEQ ID NO: 24904 - DNA, 22 bp, Artificial Sequence
  Synthetic
ccattctcutctgccuccaagc

SEQ ID NO: 24905 - DNA, 23 bp, Artificial Sequence
  Synthetic
agggctgagguctaaagttguct

SEQ ID NO: 24906 - DNA, 26 bp, Artificial Sequence
  Synthetic
gtaagcacgauagcagtgacatuact

SEQ ID NO: 24907 - DNA, 22 bp, Artificial Sequence
  Synthetic
tgttcgcagcaucttcatcucc

SEQ ID NO: 24908 - DNA, 26 bp, Artificial Sequence
  Synthetic
gactgtttugatacatctucccccaa

SEQ ID NO: 24909 - DNA, 28 bp, Artificial Sequence
  Synthetic
tctagaacaucattcacatctuggacag

SEQ ID NO: 24910 - DNA, 22 bp, Artificial Sequence
  Synthetic
gcctccgauctttcagctccua

SEQ ID NO: 24911 - DNA, 28 bp, Artificial Sequence
  Synthetic
gttaaaagacugggaaggatgcaatuac

SEQ ID NO: 24912 - DNA, 23 bp, Artificial Sequence
  Synthetic
gaagtcagcucaacgtcatcugt

SEQ ID NO: 24913 - DNA, 23 bp, Artificial Sequence
  Synthetic
atttagcaaaaggugctgcaugg

SEQ ID NO: 24914 - DNA, 30 bp, Artificial Sequence
  Synthetic
tttgctggaattaauatggtgttctctcut

SEQ ID NO: 24915 - DNA, 25 bp, Artificial Sequence
  Synthetic
gaaacacacugcagtcagaacauac

SEQ ID NO: 24916 - DNA, 25 bp, Artificial Sequence
  Synthetic
ccauaattucagggauagccaagat

SEQ ID NO: 24917 - DNA, 26 bp, Artificial Sequence
  Synthetic
gggaagctaautgctagtaattugcc

SEQ ID NO: 24918 - DNA, 20 bp, Artificial Sequence
  Synthetic
gcatcuagcagcagaccugt

SEQ ID NO: 24919 - DNA, 24 bp, Artificial Sequence
  Synthetic
gtcctgaaaaacutcccagaguct

SEQ ID NO: 24920 - DNA, 25 bp, Artificial Sequence
  Synthetic
agttttggugggacatctctaagug

SEQ ID NO: 24921 - DNA, 24 bp, Artificial Sequence
  Synthetic
aggaggcuaccaaatgacaatgug

SEQ ID NO: 24922 - DNA, 21 bp, Artificial Sequence
  Synthetic
ctggcacugcagcatctagua

SEQ ID NO: 24923 - DNA, 21 bp, Artificial Sequence
  Synthetic
ggccugcacttgagauagcag

SEQ ID NO: 24924 - DNA, 19 bp, Artificial Sequence
  Synthetic
cgcaccaaguctgttuggg

SEQ ID NO: 24925 - DNA, 22 bp, Artificial Sequence
  Synthetic
ccgaaggutgtctguccaaaga

SEQ ID NO: 24926 - DNA, 20 bp, Artificial Sequence
  Synthetic
cucctgctttugggcagagt

SEQ ID NO: 24927 - DNA, 27 bp, Artificial Sequence
  Synthetic
cagagagggaaacaaguaaaaagctuc

SEQ ID NO: 24928 - DNA, 23 bp, Artificial Sequence
  Synthetic
gacatttgtcuccctctgaccuc

SEQ ID NO: 24929 - DNA, 19 bp, Artificial Sequence
  Synthetic
gccttgggaugccacacut

SEQ ID NO: 24930 - DNA, 22 bp, Artificial Sequence
  Synthetic
ccactgaccucagtctgttuct

SEQ ID NO: 24931 - DNA, 21 bp, Artificial Sequence
  Synthetic
agagaauccgctactcugggt

SEQ ID NO: 24932 - DNA, 19 bp, Artificial Sequence
  Synthetic
gttutggtggcuggcgaag

SEQ ID NO: 24933 - DNA, 27 bp, Artificial Sequence
  Synthetic
ccttgtgagtttuggtttctgttgtut

SEQ ID NO: 24934 - DNA, 18 bp, Artificial Sequence
  Synthetic
gcucaggcacctguagct

SEQ ID NO: 24935 - DNA, 19 bp, Artificial Sequence
  Synthetic
cctggcggugcacactaut

SEQ ID NO: 24936 - DNA, 19 bp, Artificial Sequence
  Synthetic
ctgctgcuggatgttugct

SEQ ID NO: 24937 - DNA, 19 bp, Artificial Sequence
  Synthetic
gctgcacaguagcctugct

SEQ ID NO: 24938 - DNA, 17 bp, Artificial Sequence
  Synthetic
acgaggugggccaguct

SEQ ID NO: 24939 - DNA, 17 bp, Artificial Sequence
  Synthetic
cagcaguctccguccgt

SEQ ID NO: 24940 - DNA, 18 bp, Artificial Sequence
  Synthetic
gggctugcggaccttcut

SEQ ID NO: 24941 - DNA, 20 bp, Artificial Sequence
  Synthetic
tgcaucacgacatcgugagg

SEQ ID NO: 24942 - DNA, 18 bp, Artificial Sequence
  Synthetic
tgggcucacccaggucat

SEQ ID NO: 24943 - DNA, 20 bp, Artificial Sequence
  Synthetic
agaucctgauccggaaccga

SEQ ID NO: 24944 - DNA, 22 bp, Artificial Sequence
  Synthetic
gttgtccuggatgttggcauct

SEQ ID NO: 24945 - DNA, 24 bp, Artificial Sequence
  Synthetic
cgtcatcuccgacttcatcuacca

SEQ ID NO: 24946 - DNA, 24 bp, Artificial Sequence
  Synthetic
ctccucgaactacauagagggagt

SEQ ID NO: 24947 - DNA, 19 bp, Artificial Sequence
  Synthetic
cttcagacggugcccucat

SEQ ID NO: 24948 - DNA, 18 bp, Artificial Sequence
  Synthetic
gctcacacccguggguag

SEQ ID NO: 24949 - DNA, 21 bp, Artificial Sequence
  Synthetic
cagccucaacatccccuacaa

SEQ ID NO: 24950 - DNA, 17 bp, Artificial Sequence
  Synthetic
ctgtugcgcagctgcuc

SEQ ID NO: 24951 - DNA, 22 bp, Artificial Sequence
  Synthetic
ccagtacugcaaggaccactuc

SEQ ID NO: 24952 - DNA, 19 bp, Artificial Sequence
  Synthetic
cacccccgaagcugtaguc

SEQ ID NO: 24953 - DNA, 18 bp, Artificial Sequence
  Synthetic
ccccgaaugccagtuccc

SEQ ID NO: 24954 - DNA, 20 bp, Artificial Sequence
  Synthetic
guaagagcagggcagugaga

SEQ ID NO: 24955 - DNA, 19 bp, Artificial Sequence
  Synthetic
gtcaacgagugcctgucca

SEQ ID NO: 24956 - DNA, 21 bp, Artificial Sequence
  Synthetic
gcaggagcacutgtaggtgut

SEQ ID NO: 24957 - DNA, 18 bp, Artificial Sequence
  Synthetic
cgttcugtcgccugcaca

SEQ ID NO: 24958 - DNA, 17 bp, Artificial Sequence
  Synthetic
tgggcacgucgcaguaa

SEQ ID NO: 24959 - DNA, 20 bp, Artificial Sequence
  Synthetic
ccagcugaccccaatctguc

SEQ ID NO: 24960 - DNA, 19 bp, Artificial Sequence
  Synthetic
tgtagctguccacgcaguc

SEQ ID NO: 24961 - DNA, 19 bp, Artificial Sequence
  Synthetic
ggcaucaacacggcctuct

SEQ ID NO: 24962 - DNA, 17 bp, Artificial Sequence
  Synthetic
ctggccagccucaccut

SEQ ID NO: 24963 - DNA, 20 bp, Artificial Sequence
  Synthetic
gtcacgtgugtctcctuccc

SEQ ID NO: 24964 - DNA, 24 bp, Artificial Sequence
  Synthetic
aagggttggautcacactcatugt

SEQ ID NO: 24965 - DNA, 19 bp, Artificial Sequence
  Synthetic
gccagcccauagggcatug

SEQ ID NO: 24966 - DNA, 17 bp, Artificial Sequence
  Synthetic
ggcacgugtcggucagt

SEQ ID NO: 24967 - DNA, 21 bp, Artificial Sequence
  Synthetic
caacaucaacgagtgcuccag

SEQ ID NO: 24968 - DNA, 21 bp, Artificial Sequence
  Synthetic
cactuggcaccattctugcag

SEQ ID NO: 24969 - DNA, 21 bp, Artificial Sequence
  Synthetic
ctgaagggccauagtgctgut

SEQ ID NO: 24970 - DNA, 19 bp, Artificial Sequence
  Synthetic
ggttggugtcgcagtugga

SEQ ID NO: 24971 - DNA, 17 bp, Artificial Sequence
  Synthetic
ggtggugtgccaugcct

SEQ ID NO: 24972 - DNA, 20 bp, Artificial Sequence
  Synthetic
gcggcagutgtaggtgtuca

SEQ ID NO: 24973 - DNA, 20 bp, Artificial Sequence
  Synthetic
ggacuggaccucagggaaga

SEQ ID NO: 24974 - DNA, 18 bp, Artificial Sequence
  Synthetic
cctcaggcugtgggucct

SEQ ID NO: 24975 - DNA, 17 bp, Artificial Sequence
  Synthetic
ctgtgcccugggctuct

SEQ ID NO: 24976 - DNA, 30 bp, Artificial Sequence
  Synthetic
aactcactattctutgggaaacatcatuct

SEQ ID NO: 24977 - DNA, 23 bp, Artificial Sequence
  Synthetic
tccacctgtucatacagccauac

SEQ ID NO: 24978 - DNA, 24 bp, Artificial Sequence
  Synthetic
cagtttgacccutaagccugaaga

SEQ ID NO: 24979 - DNA, 21 bp, Artificial Sequence
  Synthetic
agctgugaggccacagataug

SEQ ID NO: 24980 - DNA, 21 bp, Artificial Sequence
  Synthetic
agcaaaccugccagtggtuat

SEQ ID NO: 24981 - DNA, 28 bp, Artificial Sequence
  Synthetic
tgattagtaacuaactccacctacugct

SEQ ID NO: 24982 - DNA, 30 bp, Artificial Sequence
  Synthetic
tgaaaccagtgagaaguttaagctcttaut

SEQ ID NO: 24983 - DNA, 20 bp, Artificial Sequence
  Synthetic
tggccuccaagtggtcatuc

SEQ ID NO: 24984 - DNA, 28 bp, Artificial Sequence
  Synthetic
ctgaatatguggctctgtccuagaaaag

SEQ ID NO: 24985 - DNA, 26 bp, Artificial Sequence
  Synthetic
ttccttgggacutccttctttgtaug

SEQ ID NO: 24986 - DNA, 21 bp, Artificial Sequence
  Synthetic
cctcccugcagtttgtgauct

SEQ ID NO: 24987 - DNA, 29 bp, Artificial Sequence
  Synthetic
gagccaagtaugacttcatatguaagaca

SEQ ID NO: 24988 - DNA, 28 bp, Artificial Sequence
  Synthetic
ctgttgttattucagaccaaaacctugt

SEQ ID NO: 24989 - DNA, 19 bp, Artificial Sequence
  Synthetic
cauggcgggaucgagacat

SEQ ID NO: 24990 - DNA, 19 bp, Artificial Sequence
  Synthetic
cuaaaccacccgugccagt

SEQ ID NO: 24991 - DNA, 22 bp, Artificial Sequence
  Synthetic
cttcguagcgccattguaaacc

SEQ ID NO: 24992 - DNA, 24 bp, Artificial Sequence
  Synthetic
acaacucagttttggucccaaaga

SEQ ID NO: 24993 - DNA, 27 bp, Artificial Sequence
  Synthetic
ccactggtatcautcaatgtctctuca

SEQ ID NO: 24994 - DNA, 26 bp, Artificial Sequence
  Synthetic
cctgacttgaaccutagaaactgcut

SEQ ID NO: 24995 - DNA, 28 bp, Artificial Sequence
  Synthetic
gtggtatcagaaacutcctgttgattug

SEQ ID NO: 24996 - DNA, 26 bp, Artificial Sequence
  Synthetic
tccaattgctaccuttaatgctccut

SEQ ID NO: 24997 - DNA, 27 bp, Artificial Sequence
  Synthetic
tgagtttgatgaugattgaggagtgug

SEQ ID NO: 24998 - DNA, 22 bp, Artificial Sequence
  Synthetic
ccaatggtcaguacctcctcut

SEQ ID NO: 24999 - DNA, 28 bp, Artificial Sequence
  Synthetic
ttcttttcttacagauctgatggctgut

SEQ ID NO: 25000 - DNA, 26 bp, Artificial Sequence
  Synthetic
guggacacaaaacaagaaaucacagt

SEQ ID NO: 25001 - DNA, 29 bp, Artificial Sequence
  Synthetic
acatgtttaatgccauttcttacggttug

SEQ ID NO: 25002 - DNA, 22 bp, Artificial Sequence
  Synthetic
gtattccagcagccuggcttua

SEQ ID NO: 25003 - DNA, 24 bp, Artificial Sequence
  Synthetic
gttgaacgggagauccatctttug

SEQ ID NO: 25004 - DNA, 28 bp, Artificial Sequence
  Synthetic
caccaaaacttaaucactgtccatctut

SEQ ID NO: 25005 - DNA, 27 bp, Artificial Sequence
  Synthetic
gaatattcatgugactttgtggaugct

SEQ ID NO: 25006 - DNA, 27 bp, Artificial Sequence
  Synthetic
cagatgatctaucatgtcaggaugcaa

SEQ ID NO: 25007 - DNA, 24 bp, Artificial Sequence
  Synthetic
aggcttgtuggtgtacttucaact

SEQ ID NO: 25008 - DNA, 25 bp, Artificial Sequence
  Synthetic
gcgacatttggauagcatcgaaaut

SEQ ID NO: 25009 - DNA, 25 bp, Artificial Sequence
  Synthetic
gtgagtgguggaaatactgtttugg

SEQ ID NO: 25010 - DNA, 22 bp, Artificial Sequence
  Synthetic
tgcatcagagacugccaacaut

SEQ ID NO: 25011 - DNA, 28 bp, Artificial Sequence
  Synthetic
ggaaaattctgaugttccaaaacuggat

SEQ ID NO: 25012 - DNA, 24 bp, Artificial Sequence
  Synthetic
agccttcaaguacagattgcaaut

SEQ ID NO: 25013 - DNA, 26 bp, Artificial Sequence
  Synthetic
ccatgagagcutttcccttcttuacc

SEQ ID NO: 25014 - DNA, 20 bp, Artificial Sequence
  Synthetic
ggtggtgcucatcatggugt

SEQ ID NO: 25015 - DNA, 25 bp, Artificial Sequence
  Synthetic
acttttcatugagggtgcatctuct

SEQ ID NO: 25016 - DNA, 25 bp, Artificial Sequence
  Synthetic
ctctcttaagautgtgctccaugct

SEQ ID NO: 25017 - DNA, 23 bp, Artificial Sequence
  Synthetic
tcatgttgtgaaugtccctgugg

SEQ ID NO: 25018 - DNA, 21 bp, Artificial Sequence
  Synthetic
cgtgtttcacucagcctgtuc

SEQ ID NO: 25019 - DNA, 26 bp, Artificial Sequence
  Synthetic
aaggcttactgutgtttgttgttgut

SEQ ID NO: 25020 - DNA, 19 bp, Artificial Sequence
  Synthetic
gtccccgaagacugctuca

SEQ ID NO: 25021 - DNA, 19 bp, Artificial Sequence
  Synthetic
tgcatuggcaccacugagt

SEQ ID NO: 25022 - DNA, 25 bp, Artificial Sequence
  Synthetic
cccacattgaugagtattggucaga

SEQ ID NO: 25023 - DNA, 22 bp, Artificial Sequence
  Synthetic
gggttggaugattacggtuggg

SEQ ID NO: 25024 - DNA, 29 bp, Artificial Sequence
  Synthetic
agtcctcugaagtaaatgaatugaaccaa

SEQ ID NO: 25025 - DNA, 24 bp, Artificial Sequence
  Synthetic
ctgcacuagcaaaggcatuaagag

SEQ ID NO: 25026 - DNA, 22 bp, Artificial Sequence
  Synthetic
gttgcatcucacctcaugggaa

SEQ ID NO: 25027 - DNA, 24 bp, Artificial Sequence
  Synthetic
caataacaaccccauctggucagt

SEQ ID NO: 25028 - DNA, 17 bp, Artificial Sequence
  Synthetic
cagggcccucctcagug

SEQ ID NO: 25029 - DNA, 19 bp, Artificial Sequence
  Synthetic
cctgctgutcgggauccag

SEQ ID NO: 25030 - DNA, 19 bp, Artificial Sequence
  Synthetic
ggatgaagugggtgccgua

SEQ ID NO: 25031 - DNA, 22 bp, Artificial Sequence
  Synthetic
ccagctgagguctctctctuct

SEQ ID NO: 25032 - DNA, 22 bp, Artificial Sequence
  Synthetic
gcttcaguggagctgacttugg

SEQ ID NO: 25033 - DNA, 22 bp, Artificial Sequence
  Synthetic
agtggacacacaaaggutccug

SEQ ID NO: 25034 - DNA, 17 bp, Artificial Sequence
  Synthetic
ccucccagcccctgcua

SEQ ID NO: 25035 - DNA, 19 bp, Artificial Sequence
  Synthetic
ggatcuggtcgaugccgaa

SEQ ID NO: 25036 - DNA, 21 bp, Artificial Sequence
  Synthetic
gccctcucacccttcactgua

SEQ ID NO: 25037 - DNA, 19 bp, Artificial Sequence
  Synthetic
ggtacttcuggcgguggaa

SEQ ID NO: 25038 - DNA, 17 bp, Artificial Sequence
  Synthetic
gtgcgugcacaacucgt

SEQ ID NO: 25039 - DNA, 19 bp, Artificial Sequence
  Synthetic
ggucccacagggcagaaug

SEQ ID NO: 25040 - DNA, 19 bp, Artificial Sequence
  Synthetic
gggtgcugagagtcggaug

SEQ ID NO: 25041 - DNA, 20 bp, Artificial Sequence
  Synthetic
tcccccgcuttaggacuagg

SEQ ID NO: 25042 - DNA, 22 bp, Artificial Sequence
  Synthetic
gtaacacacagugacccaccuc

SEQ ID NO: 25043 - DNA, 18 bp, Artificial Sequence
  Synthetic
acuggcagacgggcauac

SEQ ID NO: 25044 - DNA, 23 bp, Artificial Sequence
  Synthetic
aggccaaagaacugaagaaggug

SEQ ID NO: 25045 - DNA, 20 bp, Artificial Sequence
  Synthetic
caccccaggcaaucaggaua

SEQ ID NO: 25046 - DNA, 24 bp, Artificial Sequence
  Synthetic
gggctaaatuaggctaaggacuca

SEQ ID NO: 25047 - DNA, 23 bp, Artificial Sequence
  Synthetic
actgtttggaaucagacacgucc

SEQ ID NO: 25048 - DNA, 18 bp, Artificial Sequence
  Synthetic
ccacagcccugcctguat

SEQ ID NO: 25049 - DNA, 17 bp, Artificial Sequence
  Synthetic
gcttccuccccggaguc

SEQ ID NO: 25050 - DNA, 22 bp, Artificial Sequence
  Synthetic
ttgaaagcgaaggaugctcuga

SEQ ID NO: 25051 - DNA, 20 bp, Artificial Sequence
  Synthetic
gtuggtgaggtugacaacgc

SEQ ID NO: 25052 - DNA, 22 bp, Artificial Sequence
  Synthetic
ggttgagcaucctgcatcctua

SEQ ID NO: 25053 - DNA, 20 bp, Artificial Sequence
  Synthetic
ccagctccuccatctctgug

SEQ ID NO: 25054 - DNA, 21 bp, Artificial Sequence
  Synthetic
cctctgauagcgacucggact

SEQ ID NO: 25055 - DNA, 21 bp, Artificial Sequence
  Synthetic
agatactcuggaccccgucac

SEQ ID NO: 25056 - DNA, 24 bp, Artificial Sequence
  Synthetic
tcagacctcautcctctgtctuct

SEQ ID NO: 25057 - DNA, 20 bp, Artificial Sequence
  Synthetic
ccagauccacctuccaggga

SEQ ID NO: 25058 - DNA, 20 bp, Artificial Sequence
  Synthetic
gtcgtttgcccuctccagut

SEQ ID NO: 25059 - DNA, 19 bp, Artificial Sequence
  Synthetic
ccgtagauggcgtgcaguc

SEQ ID NO: 25060 - DNA, 25 bp, Artificial Sequence
  Synthetic
ctagtggtttuggctttgagtugac

SEQ ID NO: 25061 - DNA, 20 bp, Artificial Sequence
  Synthetic
ggcucauggcaaaaggacca

SEQ ID NO: 25062 - DNA, 21 bp, Artificial Sequence
  Synthetic
ccccagacccucagtuaccat

SEQ ID NO: 25063 - DNA, 28 bp, Artificial Sequence
  Synthetic
agaaaggttttccucactcaagacauac

SEQ ID NO: 25064 - DNA, 21 bp, Artificial Sequence
  Synthetic
cttgctccuccctgagcttut

SEQ ID NO: 25065 - DNA, 27 bp, Artificial Sequence
  Synthetic
gttgaatttcagaugtacgctcucaag

SEQ ID NO: 25066 - DNA, 17 bp, Artificial Sequence
  Synthetic
agcctgccutgtgccut

SEQ ID NO: 25067 - DNA, 20 bp, Artificial Sequence
  Synthetic
agagacgggaccugttguca

SEQ ID NO: 25068 - DNA, 20 bp, Artificial Sequence
  Synthetic
tctggugttgagucggaggt

SEQ ID NO: 25069 - DNA, 24 bp, Artificial Sequence
  Synthetic
tgattatuacaccccacccucagt

SEQ ID NO: 25070 - DNA, 25 bp, Artificial Sequence
  Synthetic
agtcttauttccagtcugaccccat

SEQ ID NO: 25071 - DNA, 22 bp, Artificial Sequence
  Synthetic
gcactuagaggccctttgctua

SEQ ID NO: 25072 - DNA, 20 bp, Artificial Sequence
  Synthetic
tcacacugcgctgagagaug

SEQ ID NO: 25073 - DNA, 22 bp, Artificial Sequence
  Synthetic
ctcctggcugtgtatgtugact

SEQ ID NO: 25074 - DNA, 25 bp, Artificial Sequence
  Synthetic
gttgguggaagcaaauaccaaagat

SEQ ID NO: 25075 - DNA, 23 bp, Artificial Sequence
  Synthetic
tcagugttatugcacacacaggt

SEQ ID NO: 25076 - DNA, 22 bp, Artificial Sequence
  Synthetic
gtagctgaauacagccuccaca

SEQ ID NO: 25077 - DNA, 22 bp, Artificial Sequence
  Synthetic
tgacagccagcuaaaugaaccc

SEQ ID NO: 25078 - DNA, 26 bp, Artificial Sequence
  Synthetic
tgagctccagaggugtctgatauaat

SEQ ID NO: 25079 - DNA, 29 bp, Artificial Sequence
  Synthetic
ggttgaagtaaaaaucctagcttctguct

SEQ ID NO: 25080 - DNA, 27 bp, Artificial Sequence
  Synthetic
caagaggatguggatgggatattcaut

SEQ ID NO: 25081 - DNA, 29 bp, Artificial Sequence
  Synthetic
ttgtgttttgtaauagtctttctccccut

SEQ ID NO: 25082 - DNA, 22 bp, Artificial Sequence
  Synthetic
cagacacaggutcctgatccuc

SEQ ID NO: 25083 - DNA, 23 bp, Artificial Sequence
  Synthetic
gctgcttucctgatctttcugct

SEQ ID NO: 25084 - DNA, 29 bp, Artificial Sequence
  Synthetic
tcaatagaattuagcaaaggatccctucc

SEQ ID NO: 25085 - DNA, 25 bp, Artificial Sequence
  Synthetic
tcaattcaaagaauaccggccugaa

SEQ ID NO: 25086 - DNA, 26 bp, Artificial Sequence
  Synthetic
agacaactacttcuttcctccggaua

SEQ ID NO: 25087 - DNA, 31 bp, Artificial Sequence
  Synthetic
ttgtaaagtagguatttgccttcauacagaa

SEQ ID NO: 25088 - DNA, 22 bp, Artificial Sequence
  Synthetic
cggtcatccugaagtgacucat

SEQ ID NO: 25089 - DNA, 23 bp, Artificial Sequence
  Synthetic
tgccaaaccuattccucaaaccc

SEQ ID NO: 25090 - DNA, 30 bp, Artificial Sequence
  Synthetic
ctgttaacaaaaauaaactcactugggcat

SEQ ID NO: 25091 - DNA, 20 bp, Artificial Sequence
  Synthetic
ccacuagaguccggccaaag

SEQ ID NO: 25092 - DNA, 28 bp, Artificial Sequence
  Synthetic
agagtctccaaaaggugagtatgtuaga

SEQ ID NO: 25093 - DNA, 25 bp, Artificial Sequence
  Synthetic
cgagctctgugttacaaatgcatug

SEQ ID NO: 25094 - DNA, 29 bp, Artificial Sequence
  Synthetic
gtatagucagtgtaacttuaagagagcca

SEQ ID NO: 25095 - DNA, 26 bp, Artificial Sequence
  Synthetic
cutactacattuggaagcagcacaac

SEQ ID NO: 25096 - DNA, 25 bp, Artificial Sequence
  Synthetic
catggaggtaaguaagggtctgtut

SEQ ID NO: 25097 - DNA, 22 bp, Artificial Sequence
  Synthetic
cttuggccaacagaaucagcag

SEQ ID NO: 25098 - DNA, 29 bp, Artificial Sequence
  Synthetic
caaaaccattttuaaaagctgcatuccaa

SEQ ID NO: 25099 - DNA, 28 bp, Artificial Sequence
  Synthetic
cagatactatggucaaagctggagtuag

SEQ ID NO: 25100 - DNA, 30 bp, Artificial Sequence
  Synthetic
aaacggagaaaagauaacacautcaauaag

SEQ ID NO: 25101 - DNA, 25 bp, Artificial Sequence
  Synthetic
gcaaataccutgtttggaacugcaa

SEQ ID NO: 25102 - DNA, 27 bp, Artificial Sequence
  Synthetic
aattcccaccuaaagcttatcagagug

SEQ ID NO: 25103 - DNA, 18 bp, Artificial Sequence
  Synthetic
gtggcacagguggcttug

SEQ ID NO: 25104 - DNA, 24 bp, Artificial Sequence
  Synthetic
tgattgaaauccctttgccuccat

SEQ ID NO: 25105 - DNA, 28 bp, Artificial Sequence
  Synthetic
aaagactccuagtcccataccuaagaag

SEQ ID NO: 25106 - DNA, 23 bp, Artificial Sequence
  Synthetic
ccctgcugagagactttgcuaaa

SEQ ID NO: 25107 - DNA, 23 bp, Artificial Sequence
  Synthetic
gttaccauccacagacugaaccc

SEQ ID NO: 25108 - DNA, 19 bp, Artificial Sequence
  Synthetic
catcctgccagugcctcua

SEQ ID NO: 25109 - DNA, 21 bp, Artificial Sequence
  Synthetic
tcaaagaaggcccuguccaag

SEQ ID NO: 25110 - DNA, 20 bp, Artificial Sequence
  Synthetic
ctgagcacagugctggagua

SEQ ID NO: 25111 - DNA, 22 bp, Artificial Sequence
  Synthetic
agcatgcagccaauccagauag

SEQ ID NO: 25112 - DNA, 22 bp, Artificial Sequence
  Synthetic
gtaagtcccugtagtccccuca

SEQ ID NO: 25113 - DNA, 24 bp, Artificial Sequence
  Synthetic
cctcctctacucagtctctagcuc

SEQ ID NO: 25114 - DNA, 23 bp, Artificial Sequence
  Synthetic
agggaugggagtgaaguagagac

SEQ ID NO: 25115 - DNA, 22 bp, Artificial Sequence
  Synthetic
ccttctagcgugaaggactgua

SEQ ID NO: 25116 - DNA, 20 bp, Artificial Sequence
  Synthetic
ccagcctgcugtagctcaug

SEQ ID NO: 25117 - DNA, 21 bp, Artificial Sequence
  Synthetic
tctcugcccacagauggagaa

SEQ ID NO: 25118 - DNA, 23 bp, Artificial Sequence
  Synthetic
ccccagagcutagagaatagcut

SEQ ID NO: 25119 - DNA, 24 bp, Artificial Sequence
  Synthetic
cctgagtcttcugtcctcctctuc

SEQ ID NO: 25120 - DNA, 24 bp, Artificial Sequence
  Synthetic
gccaactctuggacatacttcucc

SEQ ID NO: 25121 - DNA, 18 bp, Artificial Sequence
  Synthetic
agcagcugagcatgcuga

SEQ ID NO: 25122 - DNA, 20 bp, Artificial Sequence
  Synthetic
aattctuggcccagctccuc

SEQ ID NO: 25123 - DNA, 18 bp, Artificial Sequence
  Synthetic
cagaacgcagcuctgcuc

SEQ ID NO: 25124 - DNA, 22 bp, Artificial Sequence
  Synthetic
actcatctucagccttgctgug

SEQ ID NO: 25125 - DNA, 21 bp, Artificial Sequence
  Synthetic
ggacagtgcuctggagacuct

SEQ ID NO: 25126 - DNA, 19 bp, Artificial Sequence
  Synthetic
caactccuggtcctugcct

SEQ ID NO: 25127 - DNA, 19 bp, Artificial Sequence
  Synthetic
ctgaccutgcccuggagaa

SEQ ID NO: 25128 - DNA, 20 bp, Artificial Sequence
  Synthetic
cugttgctctuccagccact

SEQ ID NO: 25129 - DNA, 22 bp, Artificial Sequence
  Synthetic
tccactcugcaggaaaagaugg

SEQ ID NO: 25130 - DNA, 21 bp, Artificial Sequence
  Synthetic
tggctatccucataccgcuca

SEQ ID NO: 25131 - DNA, 21 bp, Artificial Sequence
  Synthetic
ctggaggcucgatuacagcag

SEQ ID NO: 25132 - DNA, 21 bp, Artificial Sequence
  Synthetic
ttgctttutgctgcucagacc

SEQ ID NO: 25133 - DNA, 19 bp, Artificial Sequence
  Synthetic
tgcccagaccucagugaca

SEQ ID NO: 25134 - DNA, 21 bp, Artificial Sequence
  Synthetic
gctactgcutagctgcuccac

SEQ ID NO: 25135 - DNA, 20 bp, Artificial Sequence
  Synthetic
gaccuctgagcucaccacac

SEQ ID NO: 25136 - DNA, 22 bp, Artificial Sequence
  Synthetic
gcacacagguctttctgugcat

SEQ ID NO: 25137 - DNA, 26 bp, Artificial Sequence
  Synthetic
gcctugaagagaagaaugaaatccut

SEQ ID NO: 25138 - DNA, 21 bp, Artificial Sequence
  Synthetic
aggtgcugggacattcttcuc

SEQ ID NO: 25139 - DNA, 24 bp, Artificial Sequence
  Synthetic
ggatcgcaaaaucaaccagcttuc

SEQ ID NO: 25140 - DNA, 21 bp, Artificial Sequence
  Synthetic
gacatcctuccggcaagtcua

SEQ ID NO: 25141 - DNA, 21 bp, Artificial Sequence
  Synthetic
gaugagacggcugaagaagca

SEQ ID NO: 25142 - DNA, 22 bp, Artificial Sequence
  Synthetic
gggattcucaggagtgtguacc

SEQ ID NO: 25143 - DNA, 26 bp, Artificial Sequence
  Synthetic
ctaagtgatgcuctttttctcccugt

SEQ ID NO: 25144 - DNA, 22 bp, Artificial Sequence
  Synthetic
ccagcaaucagctttgcctuag

SEQ ID NO: 25145 - DNA, 26 bp, Artificial Sequence
  Synthetic
actaggctgutccctttgattuacag

SEQ ID NO: 25146 - DNA, 21 bp, Artificial Sequence
  Synthetic
ctcatgacaggcuggctguat

SEQ ID NO: 25147 - DNA, 23 bp, Artificial Sequence
  Synthetic
aaggtacuaggacctgtcauccc

SEQ ID NO: 25148 - DNA, 26 bp, Artificial Sequence
  Synthetic
ccagttagaucccccagttaactuct

SEQ ID NO: 25149 - DNA, 24 bp, Artificial Sequence
  Synthetic
ccagccucaagtctctatctuact

SEQ ID NO: 25150 - DNA, 30 bp, Artificial Sequence
  Synthetic
aagcagcattatttutccttacacagaauc

SEQ ID NO: 25151 - DNA, 28 bp, Artificial Sequence
  Synthetic
gccttaatgttgacuttgaatctgtgut

SEQ ID NO: 25152 - DNA, 26 bp, Artificial Sequence
  Synthetic
ttgtgaggaaaggauttaagctugga

SEQ ID NO: 25153 - DNA, 31 bp, Artificial Sequence
  Synthetic
gttactactttucactttgcatctttugact

SEQ ID NO: 25154 - DNA, 22 bp, Artificial Sequence
  Synthetic
gcugaggtggauacaggagagg

SEQ ID NO: 25155 - DNA, 25 bp, Artificial Sequence
  Synthetic
cagaggctguacaaagaaatcuggt

SEQ ID NO: 25156 - DNA, 27 bp, Artificial Sequence
  Synthetic
cttgtacacaacagauagtggatuggt

SEQ ID NO: 25157 - DNA, 27 bp, Artificial Sequence
  Synthetic
agccgtgatgucatttttccaaattut

SEQ ID NO: 25158 - DNA, 26 bp, Artificial Sequence
  Synthetic
ggcuacagcagtattuacccaacaaa

SEQ ID NO: 25159 - DNA, 31 bp, Artificial Sequence
  Synthetic
tccaatttttcccuaggttaatagcaaugaa

SEQ ID NO: 25160 - DNA, 25 bp, Artificial Sequence
  Synthetic
tgcaacttguctgtatgaaacugct

SEQ ID NO: 25161 - DNA, 29 bp, Artificial Sequence
  Synthetic
tgagttgtttttcuaggcatattgggaut

SEQ ID NO: 25162 - DNA, 25 bp, Artificial Sequence
  Synthetic
aactgtgggaugttcacattcauct

SEQ ID NO: 25163 - DNA, 26 bp, Artificial Sequence
  Synthetic
cactttgtgtuaaatcttttgccugt

SEQ ID NO: 25164 - DNA, 22 bp, Artificial Sequence
  Synthetic
cagttucagggaacaggacuca

SEQ ID NO: 25165 - DNA, 22 bp, Artificial Sequence
  Synthetic
gtccutcaggacauggaagacc

SEQ ID NO: 25166 - DNA, 24 bp, Artificial Sequence
  Synthetic
cacatacatgucagctgaguaggg

SEQ ID NO: 25167 - DNA, 22 bp, Artificial Sequence
  Synthetic
gaaggttctgugtctgcaguga

SEQ ID NO: 25168 - DNA, 20 bp, Artificial Sequence
  Synthetic
cgcttccucctcagcagtuc

SEQ ID NO: 25169 - DNA, 20 bp, Artificial Sequence
  Synthetic
gcucgtcugagaaggaccat

SEQ ID NO: 25170 - DNA, 25 bp, Artificial Sequence
  Synthetic
tgtcagtcctgutaaaggagaggut

SEQ ID NO: 25171 - DNA, 21 bp, Artificial Sequence
  Synthetic
accattcugggataggucggt

SEQ ID NO: 25172 - DNA, 19 bp, Artificial Sequence
  Synthetic
gggcctuggacaagttgut

SEQ ID NO: 25173 - DNA, 20 bp, Artificial Sequence
  Synthetic
ctuccacagcauggcaacag

SEQ ID NO: 25174 - DNA, 23 bp, Artificial Sequence
  Synthetic
ccagccagaagugccagttaaua

SEQ ID NO: 25175 - DNA, 22 bp, Artificial Sequence
  Synthetic
cgctcatcccutccaccttuac

SEQ ID NO: 25176 - DNA, 24 bp, Artificial Sequence
  Synthetic
gccaaauggagatgtuccaggaat

SEQ ID NO: 25177 - DNA, 24 bp, Artificial Sequence
  Synthetic
tcaaaggatugggtttctcaccuc

SEQ ID NO: 25178 - DNA, 24 bp, Artificial Sequence
  Synthetic
cugaggagaaauaaaccaccatug

SEQ ID NO: 25179 - DNA, 26 bp, Artificial Sequence
  Synthetic
tcctcccctucaaacactagatauga

SEQ ID NO: 25180 - DNA, 17 bp, Artificial Sequence
  Synthetic
ggccctucccctgugac

SEQ ID NO: 25181 - DNA, 20 bp, Artificial Sequence
  Synthetic
gagtcautccaggucggcat

SEQ ID NO: 25182 - DNA, 19 bp, Artificial Sequence
  Synthetic
cccugccaacacctgtuca

SEQ ID NO: 25183 - DNA, 23 bp, Artificial Sequence
  Synthetic
ctaaccaggaccuctgtccttuc

SEQ ID NO: 25184 - DNA, 22 bp, Artificial Sequence
  Synthetic
agcatggaggcacautcttcug

SEQ ID NO: 25185 - DNA, 23 bp, Artificial Sequence
  Synthetic
ccccaggauggtaacuccaagat

SEQ ID NO: 25186 - DNA, 20 bp, Artificial Sequence
  Synthetic
cggatttgucccaggtgcuc

SEQ ID NO: 25187 - DNA, 20 bp, Artificial Sequence
  Synthetic
gctgtggccutcattgccua

SEQ ID NO: 25188 - DNA, 22 bp, Artificial Sequence
  Synthetic
caatgtccuggatggtgtgtuc

SEQ ID NO: 25189 - DNA, 22 bp, Artificial Sequence
  Synthetic
ggctgtgcuatgtgtcactgua

SEQ ID NO: 25190 - DNA, 21 bp, Artificial Sequence
  Synthetic
gctgcuccagagtctctucct

SEQ ID NO: 25191 - DNA, 19 bp, Artificial Sequence
  Synthetic
ctggaatuagccgggcuct

SEQ ID NO: 25192 - DNA, 20 bp, Artificial Sequence
  Synthetic
ggactgccuttgctcucgac

SEQ ID NO: 25193 - DNA, 29 bp, Artificial Sequence
  Synthetic
aaaactagatucaggagacuccaaagaac

SEQ ID NO: 25194 - DNA, 31 bp, Artificial Sequence
  Synthetic
ggatattcttagattuccggatagtgacuct

SEQ ID NO: 25195 - DNA, 28 bp, Artificial Sequence
  Synthetic
aaggctttgcttuggatgttgtattaug

SEQ ID NO: 25196 - DNA, 23 bp, Artificial Sequence
  Synthetic
ggtggaaucctgttctucaagct

SEQ ID NO: 25197 - DNA, 22 bp, Artificial Sequence
  Synthetic
gcatgaggcautcacctcuagt

SEQ ID NO: 25198 - DNA, 23 bp, Artificial Sequence
  Synthetic
gggttuagagggtgatuccaaca

SEQ ID NO: 25199 - DNA, 25 bp, Artificial Sequence
  Synthetic
ctttgagaagguccttccuaaacct

SEQ ID NO: 25200 - DNA, 22 bp, Artificial Sequence
  Synthetic
gtgatgatuggcgtgctttcug

SEQ ID NO: 25201 - DNA, 22 bp, Artificial Sequence
  Synthetic
actcctucctcccucaaagact

SEQ ID NO: 25202 - DNA, 20 bp, Artificial Sequence
  Synthetic
ggaaugagggcctcttuggg

SEQ ID NO: 25203 - DNA, 21 bp, Artificial Sequence
  Synthetic
tgccagctgugattccttcut

SEQ ID NO: 25204 - DNA, 23 bp, Artificial Sequence
  Synthetic
gagtgagauctcctttggauggg

SEQ ID NO: 25205 - DNA, 20 bp, Artificial Sequence
  Synthetic
aaggaggucccgctaugact

SEQ ID NO: 25206 - DNA, 21 bp, Artificial Sequence
  Synthetic
gagttacaacugcgggatugg

SEQ ID NO: 25207 - DNA, 19 bp, Artificial Sequence
  Synthetic
cucctcccuccccaaaagg

SEQ ID NO: 25208 - DNA, 19 bp, Artificial Sequence
  Synthetic
ggtagcugggcctccttut

SEQ ID NO: 25209 - DNA, 19 bp, Artificial Sequence
  Synthetic
ggaaguccagcagcuaccc

SEQ ID NO: 25210 - DNA, 20 bp, Artificial Sequence
  Synthetic
gggtagcugggcctccttua

SEQ ID NO: 25211 - DNA, 25 bp, Artificial Sequence
  Synthetic
ctgctctatccaugacttcttccuc

SEQ ID NO: 25212 - DNA, 23 bp, Artificial Sequence
  Synthetic
cccttcttggutggaggtcttut

SEQ ID NO: 25213 - DNA, 21 bp, Artificial Sequence
  Synthetic
acttcagcatuggcacctgut

SEQ ID NO: 25214 - DNA, 22 bp, Artificial Sequence
  Synthetic
ttgaggtaccuttggcagtugt

SEQ ID NO: 25215 - DNA, 22 bp, Artificial Sequence
  Synthetic
actccucggcctctgtaaucaa

SEQ ID NO: 25216 - DNA, 29 bp, Artificial Sequence
  Synthetic
aggtctttttgugttggaaattuaaccaa

SEQ ID NO: 25217 - DNA, 23 bp, Artificial Sequence
  Synthetic
ctcccaaagagccutctacucaa

SEQ ID NO: 25218 - DNA, 21 bp, Artificial Sequence
  Synthetic
gaagggcugcaggttatgcua

SEQ ID NO: 25219 - DNA, 25 bp, Artificial Sequence
  Synthetic
agagatctgtaautcctcccctucc

SEQ ID NO: 25220 - DNA, 27 bp, Artificial Sequence
  Synthetic
gaaatcagaacugaggaaatggtggua

SEQ ID NO: 25221 - DNA, 22 bp, Artificial Sequence
  Synthetic
ccagcccuccatgtatagucag

SEQ ID NO: 25222 - DNA, 25 bp, Artificial Sequence
  Synthetic
gccctatuaggtttgguaggaaggt

SEQ ID NO: 25223 - DNA, 21 bp, Artificial Sequence
  Synthetic
cctctcucagctgcuaaccag

SEQ ID NO: 25224 - DNA, 24 bp, Artificial Sequence
  Synthetic
agctgtgttgutgtggaaaguagt

SEQ ID NO: 25225 - DNA, 26 bp, Artificial Sequence
  Synthetic
gttactttuactaggcctugccaaaa

SEQ ID NO: 25226 - DNA, 28 bp, Artificial Sequence
  Synthetic
gaacaacatgaacccauagtagagcuaa

SEQ ID NO: 25227 - DNA, 21 bp, Artificial Sequence
  Synthetic
aacaaaatcuccaggguggct

SEQ ID NO: 25228 - DNA, 30 bp, Artificial Sequence
  Synthetic
gcattaacaccgutttctgtaatatttuct

SEQ ID NO: 25229 - DNA, 27 bp, Artificial Sequence
  Synthetic
ccttgtttgacuttatctgtggtcuca

SEQ ID NO: 25230 - DNA, 23 bp, Artificial Sequence
  Synthetic
cctgaagcaguccaggacttaug

SEQ ID NO: 25231 - DNA, 27 bp, Artificial Sequence
  Synthetic
ggucagaaaacactgugaaaagcaaag

SEQ ID NO: 25232 - DNA, 30 bp, Artificial Sequence
  Synthetic
ggcctgatgaguatgctctaaaagaataug

SEQ ID NO: 25233 - DNA, 24 bp, Artificial Sequence
  Synthetic
ctacacaccaucaacagtucccaa

SEQ ID NO: 25234 - DNA, 23 bp, Artificial Sequence
  Synthetic
cctggctcugcagtttctcttua

SEQ ID NO: 25235 - DNA, 28 bp, Artificial Sequence
  Synthetic
tttcaatataatgcuggaccgccataua

SEQ ID NO: 25236 - DNA, 27 bp, Artificial Sequence
  Synthetic
aagacagtgcuagagtctaugaaaacg

SEQ ID NO: 25237 - DNA, 25 bp, Artificial Sequence
  Synthetic
cccaaattgcutgcctgctuaaaaa

SEQ ID NO: 25238 - DNA, 17 bp, Artificial Sequence
  Synthetic
gcugcccacggagaugg

SEQ ID NO: 25239 - DNA, 18 bp, Artificial Sequence
  Synthetic
gtgccggucctggugaaa

SEQ ID NO: 25240 - DNA, 17 bp, Artificial Sequence
  Synthetic
gggcggccucactuact

SEQ ID NO: 25241 - DNA, 19 bp, Artificial Sequence
  Synthetic
ctacugcaacggcaaccug

SEQ ID NO: 25242 - DNA, 23 bp, Artificial Sequence
  Synthetic
ttggactcaucgacatgatucgg

SEQ ID NO: 25243 - DNA, 20 bp, Artificial Sequence
  Synthetic
ggtccacuccgttacgtgua

SEQ ID NO: 25244 - DNA, 24 bp, Artificial Sequence
  Synthetic
gggtgataugagggatagcaaauc

SEQ ID NO: 25245 - DNA, 23 bp, Artificial Sequence
  Synthetic
cccacctcacautccagcttuaa

SEQ ID NO: 25246 - DNA, 28 bp, Artificial Sequence
  Synthetic
aggtgatctacuagagtagagagagcut

SEQ ID NO: 25247 - DNA, 18 bp, Artificial Sequence
  Synthetic
gcaagccugtccgauggt

SEQ ID NO: 25248 - DNA, 23 bp, Artificial Sequence
  Synthetic
gugagaacacagatguacgccat

SEQ ID NO: 25249 - DNA, 25 bp, Artificial Sequence
  Synthetic
aaucttctucccaagcaccaaaaac

SEQ ID NO: 25250 - DNA, 22 bp, Artificial Sequence
  Synthetic
agaacaaaucacctugccacca

SEQ ID NO: 25251 - DNA, 22 bp, Artificial Sequence
  Synthetic
acaccgugcagaatguaaacct

SEQ ID NO: 25252 - DNA, 30 bp, Artificial Sequence
  Synthetic
gtttttcgttguagcttagaacacuagaga

SEQ ID NO: 25253 - DNA, 24 bp, Artificial Sequence
  Synthetic
gcaaauagcagcagctgugaaaat

SEQ ID NO: 25254 - DNA, 22 bp, Artificial Sequence
  Synthetic
ttcctccaaugcactgttucct

SEQ ID NO: 25255 - DNA, 30 bp, Artificial Sequence
  Synthetic
accaacaatuggatttggaaaauacagaac

SEQ ID NO: 25256 - DNA, 23 bp, Artificial Sequence
  Synthetic
gaagttagauctggtgaggugct

SEQ ID NO: 25257 - DNA, 22 bp, Artificial Sequence
  Synthetic
agctgaaggcaaugatgcauga

SEQ ID NO: 25258 - DNA, 27 bp, Artificial Sequence
  Synthetic
cacagaaacaucaaaaagtaggtccug

SEQ ID NO: 25259 - DNA, 26 bp, Artificial Sequence
  Synthetic
agtagaggguttttctgagctugaaa

SEQ ID NO: 25260 - DNA, 24 bp, Artificial Sequence
  Synthetic
tcacattttccutcactgcctgut

SEQ ID NO: 25261 - DNA, 24 bp, Artificial Sequence
  Synthetic
tctctcaatgcutcagagtggtug

SEQ ID NO: 25262 - DNA, 22 bp, Artificial Sequence
  Synthetic
tcagttcccutttgtgacugct

SEQ ID NO: 25263 - DNA, 26 bp, Artificial Sequence
  Synthetic
gagagagagaugctggagaaaacaua

SEQ ID NO: 25264 - DNA, 23 bp, Artificial Sequence
  Synthetic
ccaggtagcutcatttccctuca

SEQ ID NO: 25265 - DNA, 24 bp, Artificial Sequence
  Synthetic
gaacuagagcagttucaccaggag

SEQ ID NO: 25266 - DNA, 29 bp, Artificial Sequence
  Synthetic
acttatttgtttttcuaaggtgtgcgtut

SEQ ID NO: 25267 - DNA, 23 bp, Artificial Sequence
  Synthetic
ctttcagugaccttgagcugagt

SEQ ID NO: 25268 - DNA, 25 bp, Artificial Sequence
  Synthetic
caacttcttcugacggtgagttcut

SEQ ID NO: 25269 - DNA, 27 bp, Artificial Sequence
  Synthetic
ccagtgttggtutttaaatcccaggua

SEQ ID NO: 25270 - DNA, 21 bp, Artificial Sequence
  Synthetic
atgcccactuccaaagctgua

SEQ ID NO: 25271 - DNA, 22 bp, Artificial Sequence
  Synthetic
ggcaagcagcguttagaactug

SEQ ID NO: 25272 - DNA, 19 bp, Artificial Sequence
  Synthetic
gtccauccaaggcauccga

SEQ ID NO: 25273 - DNA, 25 bp, Artificial Sequence
  Synthetic
cactggcccutgaaaatgaacttut

SEQ ID NO: 25274 - DNA, 29 bp, Artificial Sequence
  Synthetic
cttttatucacaaagaaagcacttcugct

SEQ ID NO: 25275 - DNA, 23 bp, Artificial Sequence
  Synthetic
gatcctgacgguacaatgagugt

SEQ ID NO: 25276 - DNA, 21 bp, Artificial Sequence
  Synthetic
tggccugcagcataagagauc

SEQ ID NO: 25277 - DNA, 27 bp, Artificial Sequence
  Synthetic
cacactaatcttcucttgccttctcua

SEQ ID NO: 25278 - DNA, 20 bp, Artificial Sequence
  Synthetic
cccauagccacgttctuccc

SEQ ID NO: 25279 - DNA, 24 bp, Artificial Sequence
  Synthetic
gctguttgacagtttugacacgac

SEQ ID NO: 25280 - DNA, 17 bp, Artificial Sequence
  Synthetic
gacggugaccucagcca

SEQ ID NO: 25281 - DNA, 28 bp, Artificial Sequence
  Synthetic
gtttttcatgttguaatgatctgccgua

SEQ ID NO: 25282 - DNA, 22 bp, Artificial Sequence
  Synthetic
tuctgttgtucagccagacact

SEQ ID NO: 25283 - DNA, 22 bp, Artificial Sequence
  Synthetic
cctcctgcaauctccttctugt

SEQ ID NO: 25284 - DNA, 21 bp, Artificial Sequence
  Synthetic
cttccattccucggtctgcut

SEQ ID NO: 25285 - DNA, 24 bp, Artificial Sequence
  Synthetic
caaagctgtcuatttctgtgcugt

SEQ ID NO: 25286 - DNA, 22 bp, Artificial Sequence
  Synthetic
ccatgtguccagaaagctugaa

SEQ ID NO: 25287 - DNA, 21 bp, Artificial Sequence
  Synthetic
tctgggaaucaacctgtuggg

SEQ ID NO: 25288 - DNA, 31 bp, Artificial Sequence
  Synthetic
aaattccaaccuagagaaattctgatgaugt

SEQ ID NO: 25289 - DNA, 22 bp, Artificial Sequence
  Synthetic
gggacauttctgtugacccagt

SEQ ID NO: 25290 - DNA, 24 bp, Artificial Sequence
  Synthetic
ctggattgcugaggaagaagtuca

SEQ ID NO: 25291 - DNA, 30 bp, Artificial Sequence
  Synthetic
agataaaataagtcagucctttgatggaut

SEQ ID NO: 25292 - DNA, 23 bp, Artificial Sequence
  Synthetic
tgaccacagcaaagugggtatuc

SEQ ID NO: 25293 - DNA, 27 bp, Artificial Sequence
  Synthetic
gtaacatuacgaaccagugaagtcuat

SEQ ID NO: 25294 - DNA, 26 bp, Artificial Sequence
  Synthetic
gggaaatacgaaacugaagtgaaugt

SEQ ID NO: 25295 - DNA, 22 bp, Artificial Sequence
  Synthetic
gaagatcgugcaaggaatucgg

SEQ ID NO: 25296 - DNA, 21 bp, Artificial Sequence
  Synthetic
caagggcaacacauaccguct

SEQ ID NO: 25297 - DNA, 27 bp, Artificial Sequence
  Synthetic
tgtgtgaacttaauttgcagcatctut

SEQ ID NO: 25298 - DNA, 21 bp, Artificial Sequence
  Synthetic
gctgcagcagugccagaauaa

SEQ ID NO: 25299 - DNA, 23 bp, Artificial Sequence
  Synthetic
gaggaaaagcacgauacctcugt

SEQ ID NO: 25300 - DNA, 19 bp, Artificial Sequence
  Synthetic
cgcagtgucgctcgtacuc

SEQ ID NO: 25301 - DNA, 18 bp, Artificial Sequence
  Synthetic
gttgcugggcugacggat

SEQ ID NO: 25302 - DNA, 29 bp, Artificial Sequence
  Synthetic
ggcccttctttuctctcatttacacauat

SEQ ID NO: 25303 - DNA, 22 bp, Artificial Sequence
  Synthetic
gctccaaacugtagccagauca

SEQ ID NO: 25304 - DNA, 21 bp, Artificial Sequence
  Synthetic
acatgauaggcagcaggctug

SEQ ID NO: 25305 - DNA, 25 bp, Artificial Sequence
  Synthetic
ctgaaagtaugccctgtcctttuct

SEQ ID NO: 25306 - DNA, 23 bp, Artificial Sequence
  Synthetic
tcaattagcgggacugccaaaua

SEQ ID NO: 25307 - DNA, 28 bp, Artificial Sequence
  Synthetic
catcagatttgagutcatgaaaggtgut

SEQ ID NO: 25308 - DNA, 23 bp, Artificial Sequence
  Synthetic
cccagcacagcuatcttctucag

SEQ ID NO: 25309 - DNA, 27 bp, Artificial Sequence
  Synthetic
aaaacaacaacaacauatgtgggaugg

SEQ ID NO: 25310 - DNA, 25 bp, Artificial Sequence
  Synthetic
cuttttgtcttagaugggacccaca

SEQ ID NO: 25311 - DNA, 27 bp, Artificial Sequence
  Synthetic
gttgccauaactactggatugagacat

SEQ ID NO: 25312 - DNA, 24 bp, Artificial Sequence
  Synthetic
gatttgtgtaugtgctgttgucac

SEQ ID NO: 25313 - DNA, 23 bp, Artificial Sequence
  Synthetic
gtgaaggtgauccaactggtgut

SEQ ID NO: 25314 - DNA, 26 bp, Artificial Sequence
  Synthetic
cgtttagacagacuggatgaugcaat

SEQ ID NO: 25315 - DNA, 25 bp, Artificial Sequence
  Synthetic
cttccaattggugcattatgggaug

SEQ ID NO: 25316 - DNA, 26 bp, Artificial Sequence
  Synthetic
aaagtcagtcuggaactgttgtuaca

SEQ ID NO: 25317 - DNA, 25 bp, Artificial Sequence
  Synthetic
ccttgttcugcctctagaugaaacc

SEQ ID NO: 25318 - DNA, 23 bp, Artificial Sequence
  Synthetic
cccccugtttuagagaggaacct

SEQ ID NO: 25319 - DNA, 24 bp, Artificial Sequence
  Synthetic
tgguagtttcacuaagcccaggat

SEQ ID NO: 25320 - DNA, 21 bp, Artificial Sequence
  Synthetic
gggctttugggacttcuccag

SEQ ID NO: 25321 - DNA, 18 bp, Artificial Sequence
  Synthetic
atccugagcacagcgugt

SEQ ID NO: 25322 - DNA, 18 bp, Artificial Sequence
  Synthetic
ccagtcggugcgtgagut

SEQ ID NO: 25323 - DNA, 24 bp, Artificial Sequence
  Synthetic
gtgactcttuggatctttgcucct

SEQ ID NO: 25324 - DNA, 17 bp, Artificial Sequence
  Synthetic
gagctgcuggaggcugt

SEQ ID NO: 25325 - DNA, 18 bp, Artificial Sequence
  Synthetic
cgugcatguccagcacct

SEQ ID NO: 25326 - DNA, 25 bp, Artificial Sequence
  Synthetic
ctgactcaatuttcccaacttugca

SEQ ID NO: 25327 - DNA, 23 bp, Artificial Sequence
  Synthetic
tctccauaggaagggccttugat

SEQ ID NO: 25328 - DNA, 21 bp, Artificial Sequence
  Synthetic
ccccgucataggaagugaggt

SEQ ID NO: 25329 - DNA, 20 bp, Artificial Sequence
  Synthetic
ttggcttugggctttcugga

SEQ ID NO: 25330 - DNA, 25 bp, Artificial Sequence
  Synthetic
gaggttctgtautggaaagtgcaug

SEQ ID NO: 25331 - DNA, 17 bp, Artificial Sequence
  Synthetic
caggcuggaggctccut

SEQ ID NO: 25332 - DNA, 20 bp, Artificial Sequence
  Synthetic
ccaaugcccaggaacaucct

SEQ ID NO: 25333 - DNA, 19 bp, Artificial Sequence
  Synthetic
caagcugggaagccaugga

SEQ ID NO: 25334 - DNA, 21 bp, Artificial Sequence
  Synthetic
gcctctgagagugctacccut

SEQ ID NO: 25335 - DNA, 25 bp, Artificial Sequence
  Synthetic
gccattcatucgttgattcatucct

SEQ ID NO: 25336 - DNA, 22 bp, Artificial Sequence
  Synthetic
ctacccccaccccuttctaaut

SEQ ID NO: 25337 - DNA, 17 bp, Artificial Sequence
  Synthetic
ccaggugagccggagug

SEQ ID NO: 25338 - DNA, 20 bp, Artificial Sequence
  Synthetic
tggccucccaaacttctucc

SEQ ID NO: 25339 - DNA, 21 bp, Artificial Sequence
  Synthetic
tgtttcucgccaggtagguct

SEQ ID NO: 25340 - DNA, 19 bp, Artificial Sequence
  Synthetic
cccagccugcttucaacct

SEQ ID NO: 25341 - DNA, 21 bp, Artificial Sequence
  Synthetic
cagagacuccaagctggucac

SEQ ID NO: 25342 - DNA, 24 bp, Artificial Sequence
  Synthetic
gccaagaatguccaggtagatugg

SEQ ID NO: 25343 - DNA, 24 bp, Artificial Sequence
  Synthetic
caaagaggtguacgatgtcaugct

SEQ ID NO: 25344 - DNA, 22 bp, Artificial Sequence
  Synthetic
tgccagagugacagggttaaug

SEQ ID NO: 25345 - DNA, 23 bp, Artificial Sequence
  Synthetic
ggagcgaauctgctagugaagat

SEQ ID NO: 25346 - DNA, 19 bp, Artificial Sequence
  Synthetic
catcgccgcacacuccaua

SEQ ID NO: 25347 - DNA, 21 bp, Artificial Sequence
  Synthetic
cccctgcccugtagttgtuaa

SEQ ID NO: 25348 - DNA, 26 bp, Artificial Sequence
  Synthetic
aaacaaggaggcutaaaaggagttut

SEQ ID NO: 25349 - DNA, 30 bp, Artificial Sequence
  Synthetic
aggtttcagagaaautatgttgaauccaat

SEQ ID NO: 25350 - DNA, 26 bp, Artificial Sequence
  Synthetic
tctgaaaatgacuatgccagucaaca

SEQ ID NO: 25351 - DNA, 23 bp, Artificial Sequence
  Synthetic
gaagctaactgucctcctcctut

SEQ ID NO: 25352 - DNA, 21 bp, Artificial Sequence
  Synthetic
acagccaucccccacaauaac

SEQ ID NO: 25353 - DNA, 22 bp, Artificial Sequence
  Synthetic
ccatcaactugacgctggugaa

SEQ ID NO: 25354 - DNA, 21 bp, Artificial Sequence
  Synthetic
atctctggtguctgagggaug

SEQ ID NO: 25355 - DNA, 22 bp, Artificial Sequence
  Synthetic
gccagaaccuctactgcaucaa

SEQ ID NO: 25356 - DNA, 18 bp, Artificial Sequence
  Synthetic
ggcauccacccctuccac

SEQ ID NO: 25357 - DNA, 20 bp, Artificial Sequence
  Synthetic
ggctgaccgutaccttucct

SEQ ID NO: 25358 - DNA, 18 bp, Artificial Sequence
  Synthetic
gcuccagcagcucgaaga

SEQ ID NO: 25359 - DNA, 17 bp, Artificial Sequence
  Synthetic
gtgggcaccutccuggt

SEQ ID NO: 25360 - DNA, 19 bp, Artificial Sequence
  Synthetic
ctctgcugctguggagact

SEQ ID NO: 25361 - DNA, 19 bp, Artificial Sequence
  Synthetic
ccccagcucacctcttugt

SEQ ID NO: 25362 - DNA, 28 bp, Artificial Sequence
  Synthetic
cataaaggtgugaccaattcagugaaag

SEQ ID NO: 25363 - DNA, 27 bp, Artificial Sequence
  Synthetic
caccatcaaaccaaccugtgttttuaa

SEQ ID NO: 25364 - DNA, 23 bp, Artificial Sequence
  Synthetic
gactcugaccattgcttuccact

SEQ ID NO: 25365 - DNA, 27 bp, Artificial Sequence
  Synthetic
cgagtcgaaauggttaattaccuagca

SEQ ID NO: 25366 - DNA, 22 bp, Artificial Sequence
  Synthetic
gaacctcttcutcccctctucc

SEQ ID NO: 25367 - DNA, 21 bp, Artificial Sequence
  Synthetic
ggagacauggtcttcgctuct

SEQ ID NO: 25368 - DNA, 18 bp, Artificial Sequence
  Synthetic
cccaggucccctggauga

SEQ ID NO: 25369 - DNA, 26 bp, Artificial Sequence
  Synthetic
cttagaatgaagutgagagcgucaca

SEQ ID NO: 25370 - DNA, 23 bp, Artificial Sequence
  Synthetic
tcccaaauggcaattgtuccaga

SEQ ID NO: 25371 - DNA, 22 bp, Artificial Sequence
  Synthetic
ctgtugctggtttugggaacat

SEQ ID NO: 25372 - DNA, 31 bp, Artificial Sequence
  Synthetic
acaatgttgtucataatagtaguaccaagca

SEQ ID NO: 25373 - DNA, 30 bp, Artificial Sequence
  Synthetic
tcauactgttttaatuacagaggcaaagaa

SEQ ID NO: 25374 - DNA, 25 bp, Artificial Sequence
  Synthetic
ccagcugacagagacaaagaugaag

SEQ ID NO: 25375 - DNA, 28 bp, Artificial Sequence
  Synthetic
agatagttccagugcctgatgtgtauaa

SEQ ID NO: 25376 - DNA, 32 bp, Artificial Sequence
  Synthetic
tcautaaagttttcatatguaagacacgagac

SEQ ID NO: 25377 - DNA, 30 bp, Artificial Sequence
  Synthetic
agtgtagactaaugatgtgacttttgttut

SEQ ID NO: 25378 - DNA, 26 bp, Artificial Sequence
  Synthetic
tccagcaactuctgtagatgctttut

SEQ ID NO: 25379 - DNA, 31 bp, Artificial Sequence
  Synthetic
gggcctttctucatccatattactttauact

SEQ ID NO: 25380 - DNA, 27 bp, Artificial Sequence
  Synthetic
ctttaaactcagcautccatccctaug

SEQ ID NO: 25381 - DNA, 30 bp, Artificial Sequence
  Synthetic
ttgttgggttttgutactattttgtgacut

SEQ ID NO: 25382 - DNA, 23 bp, Artificial Sequence
  Synthetic
tgcatgugccagacatcctaaut

SEQ ID NO: 25383 - DNA, 22 bp, Artificial Sequence
  Synthetic
caatugccagaggaaaguagcc

SEQ ID NO: 25384 - DNA, 29 bp, Artificial Sequence
  Synthetic
tcatttgctgguaagttattgtaggugag

SEQ ID NO: 25385 - DNA, 23 bp, Artificial Sequence
  Synthetic
accugtaagttuggaggcacaag

SEQ ID NO: 25386 - DNA, 25 bp, Artificial Sequence
  Synthetic
gttctggagaauctggaagtucaga

SEQ ID NO: 25387 - DNA, 23 bp, Artificial Sequence
  Synthetic
actgtgtcttuggcactgatuca

SEQ ID NO: 25388 - DNA, 26 bp, Artificial Sequence
  Synthetic
agccaaaatauacctgggaaaugaat

SEQ ID NO: 25389 - DNA, 32 bp, Artificial Sequence
  Synthetic
ccaaagagctgaaaagautaagcattctatua

SEQ ID NO: 25390 - DNA, 23 bp, Artificial Sequence
  Synthetic
caagggcuggtgttgatactuca

SEQ ID NO: 25391 - DNA, 20 bp, Artificial Sequence
  Synthetic
ctgttcagcutgagccaguc

SEQ ID NO: 25392 - DNA, 27 bp, Artificial Sequence
  Synthetic
ccttcattgautttctttctccuccca

SEQ ID NO: 25393 - DNA, 22 bp, Artificial Sequence
  Synthetic
accagctgtuctcggagttcua

SEQ ID NO: 25394 - DNA, 24 bp, Artificial Sequence
  Synthetic
gctgcatttugtgtttaccgucaa

SEQ ID NO: 25395 - DNA, 19 bp, Artificial Sequence
  Synthetic
ctttaccaccgcguccauc

SEQ ID NO: 25396 - DNA, 20 bp, Artificial Sequence
  Synthetic
tgctgugggttgatcucacc

SEQ ID NO: 25397 - DNA, 20 bp, Artificial Sequence
  Synthetic
agtgtctgccuctccctcut

SEQ ID NO: 25398 - DNA, 20 bp, Artificial Sequence
  Synthetic
ggucagccagagggagtuct

SEQ ID NO: 25399 - DNA, 20 bp, Artificial Sequence
  Synthetic
cggctcccuttgtgcttuca

SEQ ID NO: 25400 - DNA, 21 bp, Artificial Sequence
  Synthetic
gtctcuggcaaaggtgttugg

SEQ ID NO: 25401 - DNA, 21 bp, Artificial Sequence
  Synthetic
gaagaccaugggtgtgtguct

SEQ ID NO: 25402 - DNA, 21 bp, Artificial Sequence
  Synthetic
cacguggcggctgaattuaat

SEQ ID NO: 25403 - DNA, 21 bp, Artificial Sequence
  Synthetic
tgcttguacgagacucggaac

SEQ ID NO: 25404 - DNA, 25 bp, Artificial Sequence
  Synthetic
ctgcaaagaacuctuggaaacagag

SEQ ID NO: 25405 - DNA, 20 bp, Artificial Sequence
  Synthetic
gcugagggcatcuggcaaaa

SEQ ID NO: 25406 - DNA, 21 bp, Artificial Sequence
  Synthetic
ccttccugctggacucagaga

SEQ ID NO: 25407 - DNA, 18 bp, Artificial Sequence
  Synthetic
tgcactgcugggcagtut

SEQ ID NO: 25408 - DNA, 22 bp, Artificial Sequence
  Synthetic
gttgacutcccaatuccagcag

SEQ ID NO: 25409 - DNA, 20 bp, Artificial Sequence
  Synthetic
ccaagaucccctggucaaga

SEQ ID NO: 25410 - DNA, 21 bp, Artificial Sequence
  Synthetic
tttcauccagaggccatuggg

SEQ ID NO: 25411 - DNA, 20 bp, Artificial Sequence
  Synthetic
agtcuccaagccaggaguca

SEQ ID NO: 25412 - DNA, 18 bp, Artificial Sequence
  Synthetic
gggtccuctgtccacuca

SEQ ID NO: 25413 - DNA, 18 bp, Artificial Sequence
  Synthetic
gacgaguggcauggaggt

SEQ ID NO: 25414 - DNA, 21 bp, Artificial Sequence
  Synthetic
aaatggaagucctgggtgcut

SEQ ID NO: 25415 - DNA, 21 bp, Artificial Sequence
  Synthetic
gtucaagacagaagggccuga

SEQ ID NO: 25416 - DNA, 23 bp, Artificial Sequence
  Synthetic
tgaggcataacugcaccctuggt

SEQ ID NO: 25417 - DNA, 23 bp, Artificial Sequence
  Synthetic
tttgugcctgtccugggagagac

SEQ ID NO: 25418 - DNA, 21 bp, Artificial Sequence
  Synthetic
gggccagaccuaagagcaauc

SEQ ID NO: 25419 - DNA, 21 bp, Artificial Sequence
  Synthetic
ggccatcuacaagcagucaca

SEQ ID NO: 25420 - DNA, 22 bp, Artificial Sequence
  Synthetic
ctgguaggttttcugggaaggg

SEQ ID NO: 25421 - DNA, 28 bp, Artificial Sequence
  Synthetic
acgatattgaacaauggttcacugaaga

SEQ ID NO: 25422 - DNA, 17 bp, Artificial Sequence
  Synthetic
ggcccccuatgguggga

SEQ ID NO: 25423 - DNA, 20 bp, Artificial Sequence
  Synthetic
gcaggaaacugcaccagcua

SEQ ID NO: 25424 - DNA, 17 bp, Artificial Sequence
  Synthetic
cccgucccaggcttcuc

SEQ ID NO: 25425 - DNA, 18 bp, Artificial Sequence
  Synthetic
gcuccgagccaugcagaa

SEQ ID NO: 25426 - DNA, 20 bp, Artificial Sequence
  Synthetic
cctcggaagagucgatgcug

SEQ ID NO: 25427 - DNA, 20 bp, Artificial Sequence
  Synthetic
ccactgggauggacatgugg

SEQ ID NO: 25428 - DNA, 18 bp, Artificial Sequence
  Synthetic
gggucagtgcucaccagt

SEQ ID NO: 25429 - DNA, 20 bp, Artificial Sequence
  Synthetic
gatgcagcuctccacuccag

SEQ ID NO: 25430 - DNA, 24 bp, Artificial Sequence
  Synthetic
gggtugggaacagatagtuaggga

SEQ ID NO: 25431 - DNA, 18 bp, Artificial Sequence
  Synthetic
ctucccagcggttgucca

SEQ ID NO: 25432 - DNA, 18 bp, Artificial Sequence
  Synthetic
gcuacctcgcucgccaag

SEQ ID NO: 25433 - DNA, 18 bp, Artificial Sequence
  Synthetic
agacgccuaccguccagt

SEQ ID NO: 25434 - DNA, 20 bp, Artificial Sequence
  Synthetic
gagcagggugcattggauct

SEQ ID NO: 25435 - DNA, 23 bp, Artificial Sequence
  Synthetic
cagcaccacuaagcgtaaatgug

SEQ ID NO: 25436 - DNA, 24 bp, Artificial Sequence
  Synthetic
gtctctucacccacacatcaucat

SEQ ID NO: 25437 - DNA, 20 bp, Artificial Sequence
  Synthetic
gttctgcucactgtggugct

SEQ ID NO: 25438 - DNA, 19 bp, Artificial Sequence
  Synthetic
cacugccctauccccaacg

SEQ ID NO: 25439 - DNA, 20 bp, Artificial Sequence
  Synthetic
actccccuatccgcttcugt

SEQ ID NO: 25440 - DNA, 23 bp, Artificial Sequence
  Synthetic
tcatgtcuggccatgaggaaaug

SEQ ID NO: 25441 - DNA, 19 bp, Artificial Sequence
  Synthetic
tccgccuaaccccgtaugt

SEQ ID NO: 25442 - DNA, 21 bp, Artificial Sequence
  Synthetic
gagauggagcaguggaaccat

SEQ ID NO: 25443 - DNA, 24 bp, Artificial Sequence
  Synthetic
cgaaucgtctacattucggagcag

SEQ ID NO: 25444 - DNA, 21 bp, Artificial Sequence
  Synthetic
ccautccctctugggacacac

SEQ ID NO: 25445 - DNA, 22 bp, Artificial Sequence
  Synthetic
ggcaaggacucagaaggaacuc

SEQ ID NO: 25446 - DNA, 18 bp, Artificial Sequence
  Synthetic
ggctgaguccttgccgut

SEQ ID NO: 25447 - DNA, 17 bp, Artificial Sequence
  Synthetic
ccagccuggccgaugac

SEQ ID NO: 25448 - DNA, 19 bp, Artificial Sequence
  Synthetic
gcacuccacagaccctcuc

SEQ ID NO: 25449 - DNA, 17 bp, Artificial Sequence
  Synthetic
acggccuggacccatuc

SEQ ID NO: 25450 - DNA, 30 bp, Artificial Sequence
  Synthetic
tgugattatttctatttuagcaaccaaagg

SEQ ID NO: 25451 - DNA, 23 bp, Artificial Sequence
  Synthetic
agaattccgaagutcagcugcat

SEQ ID NO: 25452 - DNA, 33 bp, Artificial Sequence
  Synthetic
ctgagttgtattugtgttaacttattcuagagt

SEQ ID NO: 25453 - DNA, 28 bp, Artificial Sequence
  Synthetic
ggttgtaacttaccutttccaggctaut

SEQ ID NO: 25454 - DNA, 22 bp, Artificial Sequence
  Synthetic
agtaggcagcugacagaaagug

SEQ ID NO: 25455 - DNA, 30 bp, Artificial Sequence
  Synthetic
aagtttgtaguagagaaagaataagcaugt

SEQ ID NO: 25456 - DNA, 26 bp, Artificial Sequence
  Synthetic
ggcctaagatugatgctgtgtatugt

SEQ ID NO: 25457 - DNA, 28 bp, Artificial Sequence
  Synthetic
aaatgcaauagaaaggaggtgagatuca

SEQ ID NO: 25458 - DNA, 22 bp, Artificial Sequence
  Synthetic
acacaugccagagattgcucag

SEQ ID NO: 25459 - DNA, 28 bp, Artificial Sequence
  Synthetic
tccagaaatgacauctacctgttacuca

SEQ ID NO: 25460 - DNA, 32 bp, Artificial Sequence
  Synthetic
gcattaggttattgaugatgctagtaacaaug

SEQ ID NO: 25461 - DNA, 25 bp, Artificial Sequence
  Synthetic
gatcaatattucccgcaaccactug

SEQ ID NO: 25462 - DNA, 30 bp, Artificial Sequence
  Synthetic
aaattacccaagtugcaaatatatgtctuc

SEQ ID NO: 25463 - DNA, 20 bp, Artificial Sequence
  Synthetic
gcttcagugtcagggtucca

SEQ ID NO: 25464 - DNA, 30 bp, Artificial Sequence
  Synthetic
atgtttagctcuagactaagttgcttucaa

SEQ ID NO: 25465 - DNA, 31 bp, Artificial Sequence
  Synthetic
agttaacagacaaaagucaacttuacagact

SEQ ID NO: 25466 - DNA, 29 bp, Artificial Sequence
  Synthetic
gtaagggttctaugatttcagtgatguct

SEQ ID NO: 25467 - DNA, 25 bp, Artificial Sequence
  Synthetic
ggacucaattcuagacccaccagat

SEQ ID NO: 25468 - DNA, 28 bp, Artificial Sequence
  Synthetic
agaatgccttcucttttgtctatatcug

SEQ ID NO: 25469 - DNA, 26 bp, Artificial Sequence
  Synthetic
ctctcctugccatcattactucaact

SEQ ID NO: 25470 - DNA, 25 bp, Artificial Sequence
  Synthetic
gatacggccutcactatguaaaggt

SEQ ID NO: 25471 - DNA, 19 bp, Artificial Sequence
  Synthetic
gaccguacagtgccucagt

SEQ ID NO: 25472 - DNA, 30 bp, Artificial Sequence
  Synthetic
cttcctaccuaagaataaaaatgggatugt

SEQ ID NO: 25473 - DNA, 27 bp, Artificial Sequence
  Synthetic
catggagtcugccaattctacttctut

SEQ ID NO: 25474 - DNA, 23 bp, Artificial Sequence
  Synthetic
cggaacctccutcagatgacuga

SEQ ID NO: 25475 - DNA, 31 bp, Artificial Sequence
  Synthetic
aataatggtaatcuctaactgtaagcauacc

SEQ ID NO: 25476 - DNA, 32 bp, Artificial Sequence
  Synthetic
tataaccctgtttuattgtgtagatactucag

SEQ ID NO: 25477 - DNA, 25 bp, Artificial Sequence
  Synthetic
gcaacugagtaaguggcaagaaaat

SEQ ID NO: 25478 - DNA, 28 bp, Artificial Sequence
  Synthetic
ccttttgataagauggcaacacttctug

SEQ ID NO: 25479 - DNA, 30 bp, Artificial Sequence
  Synthetic
tctcaaucaaaaagaaagcaaucaactaut

SEQ ID NO: 25480 - DNA, 27 bp, Artificial Sequence
  Synthetic
gaaattgtaguggaccttacccauacc

SEQ ID NO: 25481 - DNA, 25 bp, Artificial Sequence
  Synthetic
gctcatgauacttggtgtacuccct

SEQ ID NO: 25482 - DNA, 30 bp, Artificial Sequence
  Synthetic
tgacatttattaugcttcggaaatugaaga

SEQ ID NO: 25483 - DNA, 25 bp, Artificial Sequence
  Synthetic
cgggtccggauatgaatgauagact

SEQ ID NO: 25484 - DNA, 24 bp, Artificial Sequence
  Synthetic
agggccagutactagagacaucag

SEQ ID NO: 25485 - DNA, 30 bp, Artificial Sequence
  Synthetic
tgctaaatccagaaauacactctuccaaaa

SEQ ID NO: 25486 - DNA, 29 bp, Artificial Sequence
  Synthetic
tccttcttcaacuagattacagatcugct

SEQ ID NO: 25487 - DNA, 24 bp, Artificial Sequence
  Synthetic
acattuccagaagccaaagcuaca

SEQ ID NO: 25488 - DNA, 23 bp, Artificial Sequence
  Synthetic
cctacctctuccacgttgtuact

SEQ ID NO: 25489 - DNA, 28 bp, Artificial Sequence
  Synthetic
ggagaaaggaacuggtaaacacaaatuc

SEQ ID NO: 25490 - DNA, 30 bp, Artificial Sequence
  Synthetic
aacacaaaggtutttataagttctguggat

SEQ ID NO: 25491 - DNA, 23 bp, Artificial Sequence
  Synthetic
gctttauctgcccaugagacact

SEQ ID NO: 25492 - DNA, 31 bp, Artificial Sequence
  Synthetic
gttttgaaagagacuatgtcatgattcauct

SEQ ID NO: 25493 - DNA, 21 bp, Artificial Sequence
  Synthetic
tgcgguacctgctgaauacaa

SEQ ID NO: 25494 - DNA, 24 bp, Artificial Sequence
  Synthetic
ttttgtaggguacaggcatcctuc

SEQ ID NO: 25495 - DNA, 21 bp, Artificial Sequence
  Synthetic
gtaggccacgcuctgtgtaut

SEQ ID NO: 25496 - DNA, 24 bp, Artificial Sequence
  Synthetic
aaacgatggutgtatttgucacca

SEQ ID NO: 25497 - DNA, 20 bp, Artificial Sequence
  Synthetic
ctggccgacagutggauagg

SEQ ID NO: 25498 - DNA, 26 bp, Artificial Sequence
  Synthetic
aggtgaagtgautatccaggtgttug

SEQ ID NO: 25499 - DNA, 29 bp, Artificial Sequence
  Synthetic
caagagaacattugattcagacacugaaa

SEQ ID NO: 25500 - DNA, 30 bp, Artificial Sequence
  Synthetic
ttttcctctaaaatgutcctctgttgacut

SEQ ID NO: 25501 - DNA, 30 bp, Artificial Sequence
  Synthetic
gcacaattccauggattggattuaacaaat

SEQ ID NO: 25502 - DNA, 22 bp, Artificial Sequence
  Synthetic
ccagtgaagaauccctccugac

SEQ ID NO: 25503 - DNA, 30 bp, Artificial Sequence
  Synthetic
attgttgctcaaagucatataaagaucaca

SEQ ID NO: 25504 - DNA, 17 bp, Artificial Sequence
  Synthetic
gcgauggcgccucagaa

SEQ ID NO: 25505 - DNA, 17 bp, Artificial Sequence
  Synthetic
cacccccuccacagcuc

SEQ ID NO: 25506 - DNA, 24 bp, Artificial Sequence
  Synthetic
ccugacctcaaucaaacaaaaccc

SEQ ID NO: 25507 - DNA, 27 bp, Artificial Sequence
  Synthetic
ttcttcctggacgagucactctaaaua

SEQ ID NO: 25508 - DNA, 29 bp, Artificial Sequence
  Synthetic
gtctgcttctgutgtctataaacaugact

SEQ ID NO: 25509 - DNA, 31 bp, Artificial Sequence
  Synthetic
accctttgaccuagaaattaatcatgttgut

SEQ ID NO: 25510 - DNA, 23 bp, Artificial Sequence
  Synthetic
cctttcaacaguccagctttucc

SEQ ID NO: 25511 - DNA, 29 bp, Artificial Sequence
  Synthetic
gaucaaaggcactuagaagaacaagaaac

SEQ ID NO: 25512 - DNA, 24 bp, Artificial Sequence
  Synthetic
aagcatcaattuaagcctcctuga

SEQ ID NO: 25513 - DNA, 20 bp, Artificial Sequence
  Synthetic
ggaucccccagccttgtuaa

SEQ ID NO: 25514 - DNA, 22 bp, Artificial Sequence
  Synthetic
gctgtaaguccttcuccccaaa

SEQ ID NO: 25515 - DNA, 26 bp, Artificial Sequence
  Synthetic
gtatctcctaugaaccagacagcuct

SEQ ID NO: 25516 - DNA, 32 bp, Artificial Sequence
  Synthetic
gcatctatgagttugaaactgcataagauaat

SEQ ID NO: 25517 - DNA, 29 bp, Artificial Sequence
  Synthetic
tttattctttcaggugaggaaaagtucca

SEQ ID NO: 25518 - DNA, 23 bp, Artificial Sequence
  Synthetic
ctttgggtucaacttggcttucc

SEQ ID NO: 25519 - DNA, 26 bp, Artificial Sequence
  Synthetic
ttgaccctgacugtgttacaatcaut

SEQ ID NO: 25520 - DNA, 32 bp, Artificial Sequence
  Synthetic
gtctaataaaacccaugactttatactcacut

SEQ ID NO: 25521 - DNA, 21 bp, Artificial Sequence
  Synthetic
aacccgugcaattcaggauga

SEQ ID NO: 25522 - DNA, 24 bp, Artificial Sequence
  Synthetic
ccacaaccauttcttttccuggat

SEQ ID NO: 25523 - DNA, 30 bp, Artificial Sequence
  Synthetic
ccctccatcttuaaactatattcctccugt

SEQ ID NO: 25524 - DNA, 23 bp, Artificial Sequence
  Synthetic
ctgagtgaacugagtgaaccgut

SEQ ID NO: 25525 - DNA, 25 bp, Artificial Sequence
  Synthetic
ggacctaaccagguagatgaacuga

SEQ ID NO: 25526 - DNA, 25 bp, Artificial Sequence
  Synthetic
tcatgtgactcucagaacacattug

SEQ ID NO: 25527 - DNA, 22 bp, Artificial Sequence
  Synthetic
ctccatcccgaugtcaatguct

SEQ ID NO: 25528 - DNA, 26 bp, Artificial Sequence
  Synthetic
atgcaaccuaagaatagggacttugg

SEQ ID NO: 25529 - DNA, 24 bp, Artificial Sequence
  Synthetic
ccagaagugatctuacagaaggca

SEQ ID NO: 25530 - DNA, 22 bp, Artificial Sequence
  Synthetic
gaagaaacugggaggucagcaa

SEQ ID NO: 25531 - DNA, 23 bp, Artificial Sequence
  Synthetic
tcucccaggaccuagagaaaacc

SEQ ID NO: 25532 - DNA, 21 bp, Artificial Sequence
  Synthetic
tgggctcaucatcagctugaa

SEQ ID NO: 25533 - DNA, 22 bp, Artificial Sequence
  Synthetic
agctggcugataagattcugga

SEQ ID NO: 25534 - DNA, 22 bp, Artificial Sequence
  Synthetic
tgactcucagcccagtactcut

SEQ ID NO: 25535 - DNA, 23 bp, Artificial Sequence
  Synthetic
gatccttagcaaacugctggaug

SEQ ID NO: 25536 - DNA, 26 bp, Artificial Sequence
  Synthetic
tgaacgctatucagaaatgtguacca

SEQ ID NO: 25537 - DNA, 26 bp, Artificial Sequence
  Synthetic
gtaccttaagaaaugactcccuggaa

SEQ ID NO: 25538 - DNA, 21 bp, Artificial Sequence
  Synthetic
ccagcuttacaugccgaagga

SEQ ID NO: 25539 - DNA, 22 bp, Artificial Sequence
  Synthetic
tcgccucctaccttuaaccact

SEQ ID NO: 25540 - DNA, 31 bp, Artificial Sequence
  Synthetic
tcacagtaccacugtaaaataagtttatugt

SEQ ID NO: 25541 - DNA, 26 bp, Artificial Sequence
  Synthetic
ccgtctctccutgatcaatcacauag

SEQ ID NO: 25542 - DNA, 22 bp, Artificial Sequence
  Synthetic
cacacugagaaagcggaagaug

SEQ ID NO: 25543 - DNA, 28 bp, Artificial Sequence
  Synthetic
cttttcccaaguccatccaattctaaut

SEQ ID NO: 25544 - DNA, 28 bp, Artificial Sequence
  Synthetic
catagaagttagccugttacccatctut

SEQ ID NO: 25545 - DNA, 22 bp, Artificial Sequence
  Synthetic
gtttgaggaugtctgagcaugg

SEQ ID NO: 25546 - DNA, 21 bp, Artificial Sequence
  Synthetic
ctcttcccgccutcctacuac

SEQ ID NO: 25547 - DNA, 22 bp, Artificial Sequence
  Synthetic
agcccaccugagtaagactuct

SEQ ID NO: 25548 - DNA, 21 bp, Artificial Sequence
  Synthetic
gcgugaagaacucagaaccct

SEQ ID NO: 25549 - DNA, 20 bp, Artificial Sequence
  Synthetic
ccacctgcutggacgagaug

SEQ ID NO: 25550 - DNA, 22 bp, Artificial Sequence
  Synthetic
ccaagaggguggagauccagat

SEQ ID NO: 25551 - DNA, 19 bp, Artificial Sequence
  Synthetic
gugtagccucagccacagg

SEQ ID NO: 25552 - DNA, 18 bp, Artificial Sequence
  Synthetic
ggctgcuccagtgugcat

SEQ ID NO: 25553 - DNA, 20 bp, Artificial Sequence
  Synthetic
ccgtguccaggagaaagcug

SEQ ID NO: 25554 - DNA, 18 bp, Artificial Sequence
  Synthetic
cagagaugccgggcucaa

SEQ ID NO: 25555 - DNA, 19 bp, Artificial Sequence
  Synthetic
gtggcaugcaaggugagga

SEQ ID NO: 25556 - DNA, 21 bp, Artificial Sequence
  Synthetic
catctcatgugcctgcugact

SEQ ID NO: 25557 - DNA, 22 bp, Artificial Sequence
  Synthetic
gatgaaguagaggcagcagugg

SEQ ID NO: 25558 - DNA, 20 bp, Artificial Sequence
  Synthetic
cctucccgcacatgtguaac

SEQ ID NO: 25559 - DNA, 22 bp, Artificial Sequence
  Synthetic
gatggtaccccacutggtctuc

SEQ ID NO: 25560 - DNA, 18 bp, Artificial Sequence
  Synthetic
cgaggcguaccgtgugaa

SEQ ID NO: 25561 - DNA, 19 bp, Artificial Sequence
  Synthetic
gggacggaaaugactuggg

SEQ ID NO: 25562 - DNA, 28 bp, Artificial Sequence
  Synthetic
ctcccagcccuaatttctgtattaaugt

SEQ ID NO: 25563 - DNA, 19 bp, Artificial Sequence
  Synthetic
cccaggacucggctcucat

SEQ ID NO: 25564 - DNA, 24 bp, Artificial Sequence
  Synthetic
gataacguggagggtuaagacaca

SEQ ID NO: 25565 - DNA, 24 bp, Artificial Sequence
  Synthetic
ctccatgtcuatcacctcttuggg

SEQ ID NO: 25566 - DNA, 23 bp, Artificial Sequence
  Synthetic
caatccgagutttatuggcgaca

SEQ ID NO: 25567 - DNA, 23 bp, Artificial Sequence
  Synthetic
cgctagaucttcttcccuaaccc

SEQ ID NO: 25568 - DNA, 22 bp, Artificial Sequence
  Synthetic
ccgacaaaacguatgagcucac

SEQ ID NO: 25569 - DNA, 21 bp, Artificial Sequence
  Synthetic
tgtcagcautgguaccaccac

SEQ ID NO: 25570 - DNA, 20 bp, Artificial Sequence
  Synthetic
tcagctgguttgggcuacag

SEQ ID NO: 25571 - DNA, 24 bp, Artificial Sequence
  Synthetic
gctggatguagagctttucagcaa

SEQ ID NO: 25572 - DNA, 26 bp, Artificial Sequence
  Synthetic
ggtgtgtuaccatgcctcttuagaaa

SEQ ID NO: 25573 - DNA, 22 bp, Artificial Sequence
  Synthetic
gttcttggcgauggttttccuc

SEQ ID NO: 25574 - DNA, 17 bp, Artificial Sequence
  Synthetic
gggcuggcggaagacuc

SEQ ID NO: 25575 - DNA, 21 bp, Artificial Sequence
  Synthetic
ggttcatctuggcagggucaa

SEQ ID NO: 25576 - DNA, 21 bp, Artificial Sequence
  Synthetic
cgggctucgtgactacuacag

SEQ ID NO: 25577 - DNA, 23 bp, Artificial Sequence
  Synthetic
tccaaagctuggatgtcatccut

SEQ ID NO: 25578 - DNA, 22 bp, Artificial Sequence
  Synthetic
gttuccccaaggaucaagagua

SEQ ID NO: 25579 - DNA, 23 bp, Artificial Sequence
  Synthetic
gtggacgtaguactggttgagug

SEQ ID NO: 25580 - DNA, 20 bp, Artificial Sequence
  Synthetic
cgtctucatcggcuaccact

SEQ ID NO: 25581 - DNA, 17 bp, Artificial Sequence
  Synthetic
gggcguagcgcagtuca

SEQ ID NO: 25582 - DNA, 19 bp, Artificial Sequence
  Synthetic
ggcuccgaaacccacacuc

SEQ ID NO: 25583 - DNA, 17 bp, Artificial Sequence
  Synthetic
gguaccaucgccacgca

SEQ ID NO: 25584 - DNA, 18 bp, Artificial Sequence
  Synthetic
cagugggctuggaacacc

SEQ ID NO: 25585 - DNA, 23 bp, Artificial Sequence
  Synthetic
gtttccttucccaccttcucaga

SEQ ID NO: 25586 - DNA, 24 bp, Artificial Sequence
  Synthetic
tctttcttgcggguatccaagaug

SEQ ID NO: 25587 - DNA, 22 bp, Artificial Sequence
  Synthetic
agccactccutgcttccttuag

SEQ ID NO: 25588 - DNA, 23 bp, Artificial Sequence
  Synthetic
cgtcccttucagctggaaaauca

SEQ ID NO: 25589 - DNA, 22 bp, Artificial Sequence
  Synthetic
ttgcaattcuagccacccauct

SEQ ID NO: 25590 - DNA, 22 bp, Artificial Sequence
  Synthetic
ctgcacuaggaaacugaaagcg

SEQ ID NO: 25591 - DNA, 19 bp, Artificial Sequence
  Synthetic
ttccaacgggcutccauca

SEQ ID NO: 25592 - DNA, 22 bp, Artificial Sequence
  Synthetic
gattttcuccaccgcactctuc

SEQ ID NO: 25593 - DNA, 23 bp, Artificial Sequence
  Synthetic
tgutcttccttucggaaaagggt

SEQ ID NO: 25594 - DNA, 22 bp, Artificial Sequence
  Synthetic
cauttgctucaaggacaacgct

SEQ ID NO: 25595 - DNA, 22 bp, Artificial Sequence
  Synthetic
caugagacaugcagaagcgaga

SEQ ID NO: 25596 - DNA, 20 bp, Artificial Sequence
  Synthetic
ccacagucacatuggcgact

SEQ ID NO: 25597 - DNA, 25 bp, Artificial Sequence
  Synthetic
ccttaaggaaacgaccutcctctuc

SEQ ID NO: 25598 - DNA, 19 bp, Artificial Sequence
  Synthetic
cugcagcaagucaagcagt

SEQ ID NO: 25599 - DNA, 19 bp, Artificial Sequence
  Synthetic
gctugacaacgtcctuggg

SEQ ID NO: 25600 - DNA, 28 bp, Artificial Sequence
  Synthetic
ttgatgtgtattuggtgtcagtgtaugt

SEQ ID NO: 25601 - DNA, 23 bp, Artificial Sequence
  Synthetic
cgatgtugcaaaacggctgauat

SEQ ID NO: 25602 - DNA, 23 bp, Artificial Sequence
  Synthetic
tcattagccaaugtgtgtccugt

SEQ ID NO: 25603 - DNA, 20 bp, Artificial Sequence
  Synthetic
actctccugacccacgaucc

SEQ ID NO: 25604 - DNA, 24 bp, Artificial Sequence
  Synthetic
gctcaccaucttctcuacaaacca

SEQ ID NO: 25605 - DNA, 18 bp, Artificial Sequence
  Synthetic
gcactgtgucccagcauc

SEQ ID NO: 25606 - DNA, 24 bp, Artificial Sequence
  Synthetic
gcctugcaaagggatctagugaag

SEQ ID NO: 25607 - DNA, 21 bp, Artificial Sequence
  Synthetic
cctgttccccuatgcagugat

SEQ ID NO: 25608 - DNA, 22 bp, Artificial Sequence
  Synthetic
gctccaacugtgagaaauggga

SEQ ID NO: 25609 - DNA, 23 bp, Artificial Sequence
  Synthetic
ccgctccacutcataactgauga

SEQ ID NO: 25610 - DNA, 22 bp, Artificial Sequence
  Synthetic
gacatcccuctcctgctttuca

SEQ ID NO: 25611 - DNA, 21 bp, Artificial Sequence
  Synthetic
gcaugtttggauccccaccag

SEQ ID NO: 25612 - DNA, 22 bp, Artificial Sequence
  Synthetic
ccttctcccugcaggcttuaat

SEQ ID NO: 25613 - DNA, 23 bp, Artificial Sequence
  Synthetic
gccagtcugatttaggaatgugc

SEQ ID NO: 25614 - DNA, 28 bp, Artificial Sequence
  Synthetic
tgctgaaatggaaucgagaaatgagaua

SEQ ID NO: 25615 - DNA, 22 bp, Artificial Sequence
  Synthetic
ccttggtcutgaattcggugct

SEQ ID NO: 25616 - DNA, 22 bp, Artificial Sequence
  Synthetic
tcctccatacugctgacctugt

SEQ ID NO: 25617 - DNA, 24 bp, Artificial Sequence
  Synthetic
ttccctgagutctagggactuacc

SEQ ID NO: 25618 - DNA, 25 bp, Artificial Sequence
  Synthetic
ccatcaggguaatattgctggtuca

SEQ ID NO: 25619 - DNA, 28 bp, Artificial Sequence
  Synthetic
aagcctttgaugacatagagaacacaut

SEQ ID NO: 25620 - DNA, 24 bp, Artificial Sequence
  Synthetic
catagttucccattggttguccct

SEQ ID NO: 25621 - DNA, 22 bp, Artificial Sequence
  Synthetic
gaccuggacccaatcaacucaa

SEQ ID NO: 25622 - DNA, 26 bp, Artificial Sequence
  Synthetic
cttactgcuggtaaaagagacugcat

SEQ ID NO: 25623 - DNA, 29 bp, Artificial Sequence
  Synthetic
gtacttaggcagguaggaagaaaattaut

SEQ ID NO: 25624 - DNA, 27 bp, Artificial Sequence
  Synthetic
acatgtcuaacaattttcctugcaacg

SEQ ID NO: 25625 - DNA, 24 bp, Artificial Sequence
  Synthetic
tgctcagacaggcaucattactug

SEQ ID NO: 25626 - DNA, 18 bp, Artificial Sequence
  Synthetic
tctagguggctggucgga

SEQ ID NO: 25627 - DNA, 30 bp, Artificial Sequence
  Synthetic
tggattcacauagacacuatcacatttuaa

SEQ ID NO: 25628 - DNA, 32 bp, Artificial Sequence
  Synthetic
catctatgaatguaccatgttaatgtcttcut

SEQ ID NO: 25629 - DNA, 24 bp, Artificial Sequence
  Synthetic
gtaaatccatuctgctgctgucct

SEQ ID NO: 25630 - DNA, 24 bp, Artificial Sequence
  Synthetic
catgggaggaugttctttcccaut

SEQ ID NO: 25631 - DNA, 23 bp, Artificial Sequence
  Synthetic
acaaaagcgauctccuccagaag

SEQ ID NO: 25632 - DNA, 28 bp, Artificial Sequence
  Synthetic
agtcaggcatuggtttttaatgtaugga

SEQ ID NO: 25633 - DNA, 17 bp, Artificial Sequence
  Synthetic
tguttccugccacggct

SEQ ID NO: 25634 - DNA, 18 bp, Artificial Sequence
  Synthetic
gcccuccagctccuagac

SEQ ID NO: 25635 - DNA, 28 bp, Artificial Sequence
  Synthetic
aaacaggatugtattttgtaguccacca

SEQ ID NO: 25636 - DNA, 20 bp, Artificial Sequence
  Synthetic
gtgaaggaggugctggacuc

SEQ ID NO: 25637 - DNA, 20 bp, Artificial Sequence
  Synthetic
gaaccaucagcaccgugact

SEQ ID NO: 25638 - DNA, 20 bp, Artificial Sequence
  Synthetic
ggcucccaggcagcugcaaa

SEQ ID NO: 25639 - DNA, 22 bp, Artificial Sequence
  Synthetic
tgccctggcuatgcaggtacuc

SEQ ID NO: 25640 - DNA, 19 bp, Artificial Sequence
  Synthetic
ccactgctuctgggcgtut

SEQ ID NO: 25641 - DNA, 19 bp, Artificial Sequence
  Synthetic
tcgaagaggucctcgucct

SEQ ID NO: 25642 - DNA, 20 bp, Artificial Sequence
  Synthetic
gcagcugagcaccaaaucca

SEQ ID NO: 25643 - DNA, 17 bp, Artificial Sequence
  Synthetic
cgttguccccacaugcc

SEQ ID NO: 25644 - DNA, 17 bp, Artificial Sequence
  Synthetic
tctgcaccugggtgugg

SEQ ID NO: 25645 - DNA, 20 bp, Artificial Sequence
  Synthetic
atgtgccagaugcaccucaa

SEQ ID NO: 25646 - DNA, 19 bp, Artificial Sequence
  Synthetic
tgaggugcagtuggcacat

SEQ ID NO: 25647 - DNA, 19 bp, Artificial Sequence
  Synthetic
gacgaggacgaccutcucc

SEQ ID NO: 25648 - DNA, 22 bp, Artificial Sequence
  Synthetic
tcaagggcutaccactguagga

SEQ ID NO: 25649 - DNA, 17 bp, Artificial Sequence
  Synthetic
ccctgaugcacccguct

SEQ ID NO: 25650 - DNA, 18 bp, Artificial Sequence
  Synthetic
cggcctcucaggtcacut

SEQ ID NO: 25651 - DNA, 19 bp, Artificial Sequence
  Synthetic
gtgggccucacctctctuc

SEQ ID NO: 25652 - DNA, 18 bp, Artificial Sequence
  Synthetic
ctgctgcutccactgcug

SEQ ID NO: 25653 - DNA, 17 bp, Artificial Sequence
  Synthetic
acucggcccccacctua

SEQ ID NO: 25654 - DNA, 18 bp, Artificial Sequence
  Synthetic
taccucccttugcaggct

SEQ ID NO: 25655 - DNA, 18 bp, Artificial Sequence
  Synthetic
gtccccutcgggcaugaa

SEQ ID NO: 25656 - DNA, 21 bp, Artificial Sequence
  Synthetic
ggacaggaaacucagggtcuc

SEQ ID NO: 25657 - DNA, 23 bp, Artificial Sequence
  Synthetic
gagggtgacccauaactctcuct

SEQ ID NO: 25658 - DNA, 21 bp, Artificial Sequence
  Synthetic
gtcactgagcuccttgtcugt

SEQ ID NO: 25659 - DNA, 22 bp, Artificial Sequence
  Synthetic
tcttctccccuccctgtttcuc

SEQ ID NO: 25660 - DNA, 18 bp, Artificial Sequence
  Synthetic
gggctccaugccccatua

SEQ ID NO: 25661 - DNA, 19 bp, Artificial Sequence
  Synthetic
cacgccuctccctucacag

SEQ ID NO: 25662 - DNA, 19 bp, Artificial Sequence
  Synthetic
ggagcagcaccuggatcuc

SEQ ID NO: 25663 - DNA, 19 bp, Artificial Sequence
  Synthetic
gctucccccaccacttcuc

SEQ ID NO: 25664 - DNA, 20 bp, Artificial Sequence
  Synthetic
agcacgcaguttcttccuca

SEQ ID NO: 25665 - DNA, 22 bp, Artificial Sequence
  Synthetic
tcctgtcctcutcttcctccua

SEQ ID NO: 25666 - DNA, 18 bp, Artificial Sequence
  Synthetic
ctgccaccucacgtucca

SEQ ID NO: 25667 - DNA, 18 bp, Artificial Sequence
  Synthetic
tgaccgcauccccatucc

SEQ ID NO: 25668 - DNA, 23 bp, Artificial Sequence
  Synthetic
cattuaaccagaaccagcugcac

SEQ ID NO: 25669 - DNA, 18 bp, Artificial Sequence
  Synthetic
acaccgaggguggaggua

SEQ ID NO: 25670 - DNA, 20 bp, Artificial Sequence
  Synthetic
gcaccccucagaagctgaut

SEQ ID NO: 25671 - DNA, 18 bp, Artificial Sequence
  Synthetic
ggtgaugcggctctgcut

SEQ ID NO: 25672 - DNA, 21 bp, Artificial Sequence
  Synthetic
ggcttgtccucttccctccua

SEQ ID NO: 25673 - DNA, 23 bp, Artificial Sequence
  Synthetic
gcttctccagcutctcagtgaug

SEQ ID NO: 25674 - DNA, 22 bp, Artificial Sequence
  Synthetic
gtgctcacagacaugcacatug

SEQ ID NO: 25675 - DNA, 21 bp, Artificial Sequence
  Synthetic
tgaggtuagccacgtacucgt

SEQ ID NO: 25676 - DNA, 19 bp, Artificial Sequence
  Synthetic
cggugaaggtgauccacgt

SEQ ID NO: 25677 - DNA, 20 bp, Artificial Sequence
  Synthetic
gacttggauccccacugcat

SEQ ID NO: 25678 - DNA, 19 bp, Artificial Sequence
  Synthetic
ctacuatgccguggcccat

SEQ ID NO: 25679 - DNA, 17 bp, Artificial Sequence
  Synthetic
cugcaccgaggcagcua

SEQ ID NO: 25680 - DNA, 19 bp, Artificial Sequence
  Synthetic
cgagctgugcatcctgcut

SEQ ID NO: 25681 - DNA, 22 bp, Artificial Sequence
  Synthetic
cattucccauagggacacgtua

SEQ ID NO: 25682 - DNA, 21 bp, Artificial Sequence
  Synthetic
acgcttgctuctcctgtctug

SEQ ID NO: 25683 - DNA, 20 bp, Artificial Sequence
  Synthetic
ggctccccucaaaacuccat

SEQ ID NO: 25684 - DNA, 21 bp, Artificial Sequence
  Synthetic
gtcactgaccccuctctccut

SEQ ID NO: 25685 - DNA, 21 bp, Artificial Sequence
  Synthetic
acagaaaaccuctggguggac

SEQ ID NO: 25686 - DNA, 23 bp, Artificial Sequence
  Synthetic
gcatgctgcugaaaacctucaac

SEQ ID NO: 25687 - DNA, 21 bp, Artificial Sequence
  Synthetic
gtgaggatuccagtcgctguc

SEQ ID NO: 25688 - DNA, 21 bp, Artificial Sequence
  Synthetic
caacguggaccagaaggugat

SEQ ID NO: 25689 - DNA, 18 bp, Artificial Sequence
  Synthetic
gctcacgcguccaccaut

SEQ ID NO: 25690 - DNA, 18 bp, Artificial Sequence
  Synthetic
cttgucgacctgggugct

SEQ ID NO: 25691 - DNA, 17 bp, Artificial Sequence
  Synthetic
cgtcgcugtctcgctug

SEQ ID NO: 25692 - DNA, 22 bp, Artificial Sequence
  Synthetic
cagccucaacgaccuagagaag

SEQ ID NO: 25693 - DNA, 18 bp, Artificial Sequence
  Synthetic
gggucaaagcccagcugt

SEQ ID NO: 25694 - DNA, 20 bp, Artificial Sequence
  Synthetic
agaucaagctuggccggaag

SEQ ID NO: 25695 - DNA, 18 bp, Artificial Sequence
  Synthetic
cggccucacctcctctug

SEQ ID NO: 25696 - DNA, 18 bp, Artificial Sequence
  Synthetic
gcucactcugccccacag

SEQ ID NO: 25697 - DNA, 20 bp, Artificial Sequence
  Synthetic
cggtcgauggcattctccut

SEQ ID NO: 25698 - DNA, 21 bp, Artificial Sequence
  Synthetic
cagctcgtugaggaggagtug

SEQ ID NO: 25699 - DNA, 20 bp, Artificial Sequence
  Synthetic
aacacggaugccaccagaut

SEQ ID NO: 25700 - DNA, 23 bp, Artificial Sequence
  Synthetic
tgctattatugccggctguaagg

SEQ ID NO: 25701 - DNA, 20 bp, Artificial Sequence
  Synthetic
cagcucaagccaaccaccua

SEQ ID NO: 25702 - DNA, 28 bp, Artificial Sequence
  Synthetic
ggatcagacacuaaacgaacttaacugt

SEQ ID NO: 25703 - DNA, 22 bp, Artificial Sequence
  Synthetic
cutgacattuccagcaaagcga

SEQ ID NO: 25704 - DNA, 22 bp, Artificial Sequence
  Synthetic
catcaagaagcugtccaccauc

SEQ ID NO: 25705 - DNA, 28 bp, Artificial Sequence
  Synthetic
tctcttatatagugaaaaccaccuccca

SEQ ID NO: 25706 - DNA, 20 bp, Artificial Sequence
  Synthetic
ggcctcttcuccgtctgcua

SEQ ID NO: 25707 - DNA, 23 bp, Artificial Sequence
  Synthetic
gaccaaaaggaguctgaggctut

SEQ ID NO: 25708 - DNA, 18 bp, Artificial Sequence
  Synthetic
ccctggugatgcccacuc

SEQ ID NO: 25709 - DNA, 24 bp, Artificial Sequence
  Synthetic
tggaaaccucagctcctataugct

SEQ ID NO: 25710 - DNA, 23 bp, Artificial Sequence
  Synthetic
gcagaagcaggutattgtctcut

SEQ ID NO: 25711 - DNA, 23 bp, Artificial Sequence
  Synthetic
agagagacccaugatgacugagg

SEQ ID NO: 25712 - DNA, 22 bp, Artificial Sequence
  Synthetic
tcattgaguacatgccccucct

SEQ ID NO: 25713 - DNA, 22 bp, Artificial Sequence
  Synthetic
cctccacuaagcctucaaagcc

SEQ ID NO: 25714 - DNA, 23 bp, Artificial Sequence
  Synthetic
gaggcagcaggaaaugagagtua

SEQ ID NO: 25715 - DNA, 21 bp, Artificial Sequence
  Synthetic
atugaagcggacatuggcaac

SEQ ID NO: 25716 - DNA, 25 bp, Artificial Sequence
  Synthetic
cctgttttccuagttctgtctcucg

SEQ ID NO: 25717 - DNA, 19 bp, Artificial Sequence
  Synthetic
ccaugcacagggagugaca

SEQ ID NO: 25718 - DNA, 20 bp, Artificial Sequence
  Synthetic
tggagucagcgcatttccug

SEQ ID NO: 25719 - DNA, 22 bp, Artificial Sequence
  Synthetic
ccuccagagaaagagacacugt

SEQ ID NO: 25720 - DNA, 18 bp, Artificial Sequence
  Synthetic
gggauccgcactcaccua

SEQ ID NO: 25721 - DNA, 21 bp, Artificial Sequence
  Synthetic
tggagtttgugtcaggtgguc

SEQ ID NO: 25722 - DNA, 24 bp, Artificial Sequence
  Synthetic
catacccttcuctctgctccaaut

SEQ ID NO: 25723 - DNA, 17 bp, Artificial Sequence
  Synthetic
cggctgcugagccugat

SEQ ID NO: 25724 - DNA, 21 bp, Artificial Sequence
  Synthetic
gcucagagagggagautggug

SEQ ID NO: 25725 - DNA, 17 bp, Artificial Sequence
  Synthetic
ctcugcaccggcagugt

SEQ ID NO: 25726 - DNA, 19 bp, Artificial Sequence
  Synthetic
aagacccgccuaactgcuc

SEQ ID NO: 25727 - DNA, 19 bp, Artificial Sequence
  Synthetic
gggatcucccaggcaucct

SEQ ID NO: 25728 - DNA, 17 bp, Artificial Sequence
  Synthetic
aggagcuggagcugggt

SEQ ID NO: 25729 - DNA, 19 bp, Artificial Sequence
  Synthetic
cugggtgctugaggaccaa

SEQ ID NO: 25730 - DNA, 22 bp, Artificial Sequence
  Synthetic
ccaaatuccccatcaaguggac

SEQ ID NO: 25731 - DNA, 22 bp, Artificial Sequence
  Synthetic
acaggccaugaggaccttctua

SEQ ID NO: 25732 - DNA, 17 bp, Artificial Sequence
  Synthetic
agucucgggcccacagt

SEQ ID NO: 25733 - DNA, 19 bp, Artificial Sequence
  Synthetic
ggaggtgguccccacucat

SEQ ID NO: 25734 - DNA, 28 bp, Artificial Sequence
  Synthetic
cgctttgtgacutaactttttacaguga

SEQ ID NO: 25735 - DNA, 27 bp, Artificial Sequence
  Synthetic
aaactctgtaccutttcctctttucgt

SEQ ID NO: 25736 - DNA, 25 bp, Artificial Sequence
  Synthetic
gtgctttcucaccatgtttcttugt

SEQ ID NO: 25737 - DNA, 25 bp, Artificial Sequence
  Synthetic
cattttaacccagugctgagatgut

SEQ ID NO: 25738 - DNA, 26 bp, Artificial Sequence
  Synthetic
tcgttgtttutctttcatcuccccat

SEQ ID NO: 25739 - DNA, 23 bp, Artificial Sequence
  Synthetic
cttccgtcugggctttgaaauac

SEQ ID NO: 25740 - DNA, 28 bp, Artificial Sequence
  Synthetic
tgaaaggtgaaatuattcctcacatcut

SEQ ID NO: 25741 - DNA, 26 bp, Artificial Sequence
  Synthetic
ggaaaccagccaaguaaccttgtuat

SEQ ID NO: 25742 - DNA, 27 bp, Artificial Sequence
  Synthetic
tgtctcttccatucatgctcatcttut

SEQ ID NO: 25743 - DNA, 25 bp, Artificial Sequence
  Synthetic
ctctaccacauattcctgaccaucc

SEQ ID NO: 25744 - DNA, 27 bp, Artificial Sequence
  Synthetic
agatcctttcttauaaccgtgccaauc

SEQ ID NO: 25745 - DNA, 21 bp, Artificial Sequence
  Synthetic
acagcagacacagutccctuc

SEQ ID NO: 25746 - DNA, 22 bp, Artificial Sequence
  Synthetic
cagataugggccattgcugagt

SEQ ID NO: 25747 - DNA, 27 bp, Artificial Sequence
  Synthetic
ctcatagtctucatcagccatgucaat

SEQ ID NO: 25748 - DNA, 17 bp, Artificial Sequence
  Synthetic
ccgcucacgctctcucc

SEQ ID NO: 25749 - DNA, 23 bp, Artificial Sequence
  Synthetic
tctgtgctuagactctgcaugac

SEQ ID NO: 25750 - DNA, 17 bp, Artificial Sequence
  Synthetic
gccacgugtccaugcag

SEQ ID NO: 25751 - DNA, 21 bp, Artificial Sequence
  Synthetic
ttgguccgagacacgtagtug

SEQ ID NO: 25752 - DNA, 19 bp, Artificial Sequence
  Synthetic
caggctctucccagcagua

SEQ ID NO: 25753 - DNA, 18 bp, Artificial Sequence
  Synthetic
cagctgcuctgcgtucct

SEQ ID NO: 25754 - DNA, 18 bp, Artificial Sequence
  Synthetic
gggagccccgucacagua

SEQ ID NO: 25755 - DNA, 21 bp, Artificial Sequence
  Synthetic
ggaugggcacatcuggaaaca

SEQ ID NO: 25756 - DNA, 19 bp, Artificial Sequence
  Synthetic
cctcgtcguctacgtcguc

SEQ ID NO: 25757 - DNA, 20 bp, Artificial Sequence
  Synthetic
gcgatgtugaggtcgugcat

SEQ ID NO: 25758 - DNA, 17 bp, Artificial Sequence
  Synthetic
cggcuccatccguccac

SEQ ID NO: 25759 - DNA, 17 bp, Artificial Sequence
  Synthetic
ggcaccuggcacaugct

SEQ ID NO: 25760 - DNA, 18 bp, Artificial Sequence
  Synthetic
gcgcaggaccauggacug

SEQ ID NO: 25761 - DNA, 24 bp, Artificial Sequence
  Synthetic
ctactggaccagcucaggtuaaag

SEQ ID NO: 25762 - DNA, 19 bp, Artificial Sequence
  Synthetic
ggtgggagacuccggguag

SEQ ID NO: 25763 - DNA, 20 bp, Artificial Sequence
  Synthetic
gggugtggatugacccagat

SEQ ID NO: 25764 - DNA, 28 bp, Artificial Sequence
  Synthetic
gttattttgguacctgagaacguaacag

SEQ ID NO: 25765 - DNA, 22 bp, Artificial Sequence
  Synthetic
gtcacgugagcaaacagctuag

SEQ ID NO: 25766 - DNA, 31 bp, Artificial Sequence
  Synthetic
tcgcagagagtguatcatctgttttatttut

SEQ ID NO: 25767 - DNA, 20 bp, Artificial Sequence
  Synthetic
gtggcacacggauggaaauc

SEQ ID NO: 25768 - DNA, 19 bp, Artificial Sequence
  Synthetic
tgaaggcgccuggatagug

SEQ ID NO: 25769 - DNA, 20 bp, Artificial Sequence
  Synthetic
ctactcactuccgctccgut

SEQ ID NO: 25770 - DNA, 24 bp, Artificial Sequence
  Synthetic
gggauggacagaagaautgactuc

SEQ ID NO: 25771 - DNA, 21 bp, Artificial Sequence
  Synthetic
aatgcatucgcggctctauaa

SEQ ID NO: 25772 - DNA, 27 bp, Artificial Sequence
  Synthetic
aaacgtgttucaagcatagtttugaca

SEQ ID NO: 25773 - DNA, 22 bp, Artificial Sequence
  Synthetic
tgtgatggcuggcaatgaugaa

SEQ ID NO: 25774 - DNA, 18 bp, Artificial Sequence
  Synthetic
cagcaccuccaccaugct

SEQ ID NO: 25775 - DNA, 19 bp, Artificial Sequence
  Synthetic
cgtauccccgtagaugcca

SEQ ID NO: 25776 - DNA, 28 bp, Artificial Sequence
  Synthetic
aggaaatgacucaaatatgctgtcugaa

SEQ ID NO: 25777 - DNA, 26 bp, Artificial Sequence
  Synthetic
ggagaagaaagagagaugtagggcua

SEQ ID NO: 25778 - DNA, 21 bp, Artificial Sequence
  Synthetic
cagaaccccagcutgtauccc

SEQ ID NO: 25779 - DNA, 20 bp, Artificial Sequence
  Synthetic
tgcggcagautgtgactuga

SEQ ID NO: 25780 - DNA, 27 bp, Artificial Sequence
  Synthetic
aacatctcuttaagattcugccaacct

SEQ ID NO: 25781 - DNA, 26 bp, Artificial Sequence
  Synthetic
gccggauaccaagtagaaaaagugat

SEQ ID NO: 25782 - DNA, 28 bp, Artificial Sequence
  Synthetic
tgaaagtagagagcutttcctagtuaga

SEQ ID NO: 25783 - DNA, 23 bp, Artificial Sequence
  Synthetic
ccgcactaucgtgaccagaatut

SEQ ID NO: 25784 - DNA, 24 bp, Artificial Sequence
  Synthetic
gtagttctcgtuccagtcgtctug

SEQ ID NO: 25785 - DNA, 28 bp, Artificial Sequence
  Synthetic
agaaagaaacucatggataatccuccct

SEQ ID NO: 25786 - DNA, 17 bp, Artificial Sequence
  Synthetic
ggaagccugcgucagga

SEQ ID NO: 25787 - DNA, 19 bp, Artificial Sequence
  Synthetic
gggucaccaccagctatug

SEQ ID NO: 25788 - DNA, 17 bp, Artificial Sequence
  Synthetic
cctggccucaccuccct

SEQ ID NO: 25789 - DNA, 20 bp, Artificial Sequence
  Synthetic
cagtgcacucggttgtctug

SEQ ID NO: 25790 - DNA, 19 bp, Artificial Sequence
  Synthetic
aattacgcucaccgggugt

SEQ ID NO: 25791 - DNA, 23 bp, Artificial Sequence
  Synthetic
ctgguaccccaagactctacuca

SEQ ID NO: 25792 - DNA, 20 bp, Artificial Sequence
  Synthetic
augaagcagcagaugcagga

SEQ ID NO: 25793 - DNA, 24 bp, Artificial Sequence
  Synthetic
gggtggtgcugagaataaatuagg

SEQ ID NO: 25794 - DNA, 22 bp, Artificial Sequence
  Synthetic
cgacuagccactguggaagaga

SEQ ID NO: 25795 - DNA, 24 bp, Artificial Sequence
  Synthetic
atcttcatgacauaagcgaguggt

SEQ ID NO: 25796 - DNA, 22 bp, Artificial Sequence
  Synthetic
cuccacaaccaucaacaggaac

SEQ ID NO: 25797 - DNA, 24 bp, Artificial Sequence
  Synthetic
cacaaggucaaagcagagtgttut

SEQ ID NO: 25798 - DNA, 24 bp, Artificial Sequence
  Synthetic
agaaatcctcugtgacgatcugga

SEQ ID NO: 25799 - DNA, 20 bp, Artificial Sequence
  Synthetic
cagtgcugggtgagaaguca

SEQ ID NO: 25800 - DNA, 18 bp, Artificial Sequence
  Synthetic
cccactgcuggagacuct

SEQ ID NO: 25801 - DNA, 22 bp, Artificial Sequence
  Synthetic
gtcucagagaccaugggagact

SEQ ID NO: 25802 - DNA, 19 bp, Artificial Sequence
  Synthetic
gcttcccgcaugagctuca

SEQ ID NO: 25803 - DNA, 20 bp, Artificial Sequence
  Synthetic
agaacctcucgagctuccac

SEQ ID NO: 25804 - DNA, 23 bp, Artificial Sequence
  Synthetic
tcacctutcacttctuggccaaa

SEQ ID NO: 25805 - DNA, 20 bp, Artificial Sequence
  Synthetic
ccactccugggcaagttcuc

SEQ ID NO: 25806 - DNA, 22 bp, Artificial Sequence
  Synthetic
cgctcuccacccatctcactua

SEQ ID NO: 25807 - DNA, 23 bp, Artificial Sequence
  Synthetic
agcucagagaggttucaacacac

SEQ ID NO: 25808 - DNA, 25 bp, Artificial Sequence
  Synthetic
ccagtaggcagugaagtaaattugt

SEQ ID NO: 25809 - DNA, 24 bp, Artificial Sequence
  Synthetic
gaacttccaaagaaucggcttucc

SEQ ID NO: 25810 - DNA, 20 bp, Artificial Sequence
  Synthetic
cagaggcugagcaggaaaug

SEQ ID NO: 25811 - DNA, 17 bp, Artificial Sequence
  Synthetic
agcctccucgccaguct

SEQ ID NO: 25812 - DNA, 23 bp, Artificial Sequence
  Synthetic
cctcctgacauaccaagctucaa

SEQ ID NO: 25813 - DNA, 20 bp, Artificial Sequence
  Synthetic
ggccccaaucactcagtcua

SEQ ID NO: 25814 - DNA, 21 bp, Artificial Sequence
  Synthetic
tgguttagccucaagcccaag

SEQ ID NO: 25815 - DNA, 18 bp, Artificial Sequence
  Synthetic
ccctcguaagggcucagt

SEQ ID NO: 25816 - DNA, 20 bp, Artificial Sequence
  Synthetic
cauttccctucaggccccat

SEQ ID NO: 25817 - DNA, 21 bp, Artificial Sequence
  Synthetic
ggctcaccuttctctccucag

SEQ ID NO: 25818 - DNA, 20 bp, Artificial Sequence
  Synthetic
cugcgcagagaaguaaagug

SEQ ID NO: 25819 - DNA, 24 bp, Artificial Sequence
  Synthetic
ctgcctccuacttaaaggtccaug

SEQ ID NO: 25820 - DNA, 22 bp, Artificial Sequence
  Synthetic
tctgacaugggaaagacuccga

SEQ ID NO: 25821 - DNA, 18 bp, Artificial Sequence
  Synthetic
ccagtggccugttggcua

SEQ ID NO: 25822 - DNA, 22 bp, Artificial Sequence
  Synthetic
gaccgugagaacagcatcauct

SEQ ID NO: 25823 - DNA, 24 bp, Artificial Sequence
  Synthetic
tccctcttggutctctctttucca

SEQ ID NO: 25824 - DNA, 21 bp, Artificial Sequence
  Synthetic
gatggguagcccattcucacc

SEQ ID NO: 25825 - DNA, 22 bp, Artificial Sequence
  Synthetic
catccttccaugcggtctaugt

SEQ ID NO: 25826 - DNA, 22 bp, Artificial Sequence
  Synthetic
cgutggtcatguccaaagggaa

SEQ ID NO: 25827 - DNA, 22 bp, Artificial Sequence
  Synthetic
gctgatgaggucggttaucgag

SEQ ID NO: 25828 - DNA, 19 bp, Artificial Sequence
  Synthetic
ggttgugcagcatcuccgt

SEQ ID NO: 25829 - DNA, 18 bp, Artificial Sequence
  Synthetic
cgcttcucgctgcugagg

SEQ ID NO: 25830 - DNA, 21 bp, Artificial Sequence
  Synthetic
ctgagccuggaaaggtggtua

SEQ ID NO: 25831 - DNA, 22 bp, Artificial Sequence
  Synthetic
tcttuaagaaggccacggugac

SEQ ID NO: 25832 - DNA, 19 bp, Artificial Sequence
  Synthetic
ccaggaagutggcgtuggt

SEQ ID NO: 25833 - DNA, 19 bp, Artificial Sequence
  Synthetic
gctccugacccaggttucg

SEQ ID NO: 25834 - DNA, 23 bp, Artificial Sequence
  Synthetic
ggaagacaagacguggagaggua

SEQ ID NO: 25835 - DNA, 23 bp, Artificial Sequence
  Synthetic
atttggaggauctggugcaagag

SEQ ID NO: 25836 - DNA, 22 bp, Artificial Sequence
  Synthetic
ccaggccuaagtttgtccctua

SEQ ID NO: 25837 - DNA, 22 bp, Artificial Sequence
  Synthetic
cagtccctucccatctacucac

SEQ ID NO: 25838 - DNA, 22 bp, Artificial Sequence
  Synthetic
accctcatcucccaactctuct

SEQ ID NO: 25839 - DNA, 22 bp, Artificial Sequence
  Synthetic
ggtgagccgaaggutcactuat

SEQ ID NO: 25840 - DNA, 22 bp, Artificial Sequence
  Synthetic
ccaggccuaagtttgtccctua

SEQ ID NO: 25841 - DNA, 22 bp, Artificial Sequence
  Synthetic
cagccactucccatctacucac

SEQ ID NO: 25842 - DNA, 22 bp, Artificial Sequence
  Synthetic
caacguacccaaccctcatcut

SEQ ID NO: 25843 - DNA, 22 bp, Artificial Sequence
  Synthetic
ggtgagccgaaggutcactuac

SEQ ID NO: 25844 - DNA, 22 bp, Artificial Sequence
  Synthetic
gcccaagcutgcctctuaagaa

SEQ ID NO: 25845 - DNA, 20 bp, Artificial Sequence
  Synthetic
ctttccagccccutccaguc

SEQ ID NO: 25846 - DNA, 25 bp, Artificial Sequence
  Synthetic
caatcuacccaaccctcatttucca

SEQ ID NO: 25847 - DNA, 23 bp, Artificial Sequence
  Synthetic
gggtgguccgaaagttcactuac

SEQ ID NO: 25848 - DNA, 22 bp, Artificial Sequence
  Synthetic
tcctcctccuccatcagaaugt

SEQ ID NO: 25849 - DNA, 20 bp, Artificial Sequence
  Synthetic
cccagaaugctccccaucag

SEQ ID NO: 25850 - DNA, 19 bp, Artificial Sequence
  Synthetic
ggctcuccaggtcttugga

SEQ ID NO: 25851 - DNA, 23 bp, Artificial Sequence
  Synthetic
aaactcctcaugtggcattucct

SEQ ID NO: 25852 - DNA, 26 bp, Artificial Sequence
  Synthetic
gtcttggtgauacagaaatgcccuaa

SEQ ID NO: 25853 - DNA, 27 bp, Artificial Sequence
  Synthetic
agtccagttacaaugatgaaatgcuca

SEQ ID NO: 25854 - DNA, 22 bp, Artificial Sequence
  Synthetic
gtggacagguactgttucacct

SEQ ID NO: 25855 - DNA, 22 bp, Artificial Sequence
  Synthetic
tttgagtccugttctgcctugt

SEQ ID NO: 25856 - DNA, 23 bp, Artificial Sequence
  Synthetic
atgaagaagaugacgacauggca

SEQ ID NO: 25857 - DNA, 24 bp, Artificial Sequence
  Synthetic
ggcttgggaugagacttttagcut

SEQ ID NO: 25858 - DNA, 17 bp, Artificial Sequence
  Synthetic
cgcaccugagcagcuga

SEQ ID NO: 25859 - DNA, 18 bp, Artificial Sequence
  Synthetic
ccgggcgucatgtcucat

SEQ ID NO: 25860 - DNA, 22 bp, Artificial Sequence
  Synthetic
gccagagggautgttccugaat

SEQ ID NO: 25861 - DNA, 22 bp, Artificial Sequence
  Synthetic
aaatgatucggaggaagugcca

SEQ ID NO: 25862 - DNA, 28 bp, Artificial Sequence
  Synthetic
cccaagcttguctcttaaggaauaaaca

SEQ ID NO: 25863 - DNA, 22 bp, Artificial Sequence
  Synthetic
ccacggtuagggtcattaucca

SEQ ID NO: 25864 - DNA, 26 bp, Artificial Sequence
  Synthetic
acatataagtcaucaggaagguggct

SEQ ID NO: 25865 - DNA, 24 bp, Artificial Sequence
  Synthetic
gtggtgatgutgatgatgcttuct

SEQ ID NO: 25866 - DNA, 22 bp, Artificial Sequence
  Synthetic
ttgatggcugctaaggtgtuct

SEQ ID NO: 25867 - DNA, 23 bp, Artificial Sequence
  Synthetic
aactgtaagggaugcactauggc

SEQ ID NO: 25868 - DNA, 22 bp, Artificial Sequence
  Synthetic
agcccauggaccagttagauga

SEQ ID NO: 25869 - DNA, 22 bp, Artificial Sequence
  Synthetic
gaacatgugcagcaaagaccug

SEQ ID NO: 25870 - DNA, 21 bp, Artificial Sequence
  Synthetic
acutcggaggauggaagagct

SEQ ID NO: 25871 - DNA, 21 bp, Artificial Sequence
  Synthetic
cgagguagcatggcaguagga

SEQ ID NO: 25872 - DNA, 24 bp, Artificial Sequence
  Synthetic
cactactctgccutaggtgctaug

SEQ ID NO: 25873 - DNA, 29 bp, Artificial Sequence
  Synthetic
ccaccattuagaattactgtuaaggcact

SEQ ID NO: 25874 - DNA, 21 bp, Artificial Sequence
  Synthetic
tgtggtguatgtgtgtgugct

SEQ ID NO: 25875 - DNA, 25 bp, Artificial Sequence
  Synthetic
tctctttctctcucctttccagcut

SEQ ID NO: 25876 - DNA, 28 bp, Artificial Sequence
  Synthetic
gaatactattcaguacacagccauggat

SEQ ID NO: 25877 - DNA, 21 bp, Artificial Sequence
  Synthetic
gtgaaguagagagcccuccct

SEQ ID NO: 25878 - DNA, 22 bp, Artificial Sequence
  Synthetic
caccaggcucacatttaccuct

SEQ ID NO: 25879 - DNA, 27 bp, Artificial Sequence
  Synthetic
gttuacaggagacataugaggccaaaa

SEQ ID NO: 25880 - DNA, 20 bp, Artificial Sequence
  Synthetic
gcttcctgugtgtagcccut

SEQ ID NO: 25881 - DNA, 22 bp, Artificial Sequence
  Synthetic
gctttcgttugccttcggttuc

SEQ ID NO: 25882 - DNA, 25 bp, Artificial Sequence
  Synthetic
ggcaatgaaauacaagcagacaugg

SEQ ID NO: 25883 - DNA, 22 bp, Artificial Sequence
  Synthetic
tctgtcccugctctccctttua

SEQ ID NO: 25884 - DNA, 28 bp, Artificial Sequence
  Synthetic
tccagccatuaaggatccatattctgua

SEQ ID NO: 25885 - DNA, 20 bp, Artificial Sequence
  Synthetic
tttgacagcutgccugacca

SEQ ID NO: 25886 - DNA, 22 bp, Artificial Sequence
  Synthetic
accaaagcaaauccgtctucca

SEQ ID NO: 25887 - DNA, 25 bp, Artificial Sequence
  Synthetic
tgaacaaaagagggcgucttctuag

SEQ ID NO: 25888 - DNA, 26 bp, Artificial Sequence
  Synthetic
catatggttuctgtaatcaugaggct

SEQ ID NO: 25889 - DNA, 21 bp, Artificial Sequence
  Synthetic
gtattgctcugacccctccuc

SEQ ID NO: 25890 - DNA, 22 bp, Artificial Sequence
  Synthetic
cccagatcaguttactgtggug

SEQ ID NO: 25891 - DNA, 22 bp, Artificial Sequence
  Synthetic
tgggcugaaacaactttccuga

SEQ ID NO: 25892 - DNA, 25 bp, Artificial Sequence
  Synthetic
gttttuaagccaagaagtcugcagt

SEQ ID NO: 25893 - DNA, 22 bp, Artificial Sequence
  Synthetic
ctaaagcggaaugaggaugcct

SEQ ID NO: 25894 - DNA, 25 bp, Artificial Sequence
  Synthetic
gagtagtctatutagggccacucct

SEQ ID NO: 25895 - DNA, 25 bp, Artificial Sequence
  Synthetic
ccaagctctugacttttgctttugg

SEQ ID NO: 25896 - DNA, 23 bp, Artificial Sequence
  Synthetic
cctcucccatctgcuaaggagaa

SEQ ID NO: 25897 - DNA, 27 bp, Artificial Sequence
  Synthetic
gatgattttgcuctttctttgctucct

SEQ ID NO: 25898 - DNA, 28 bp, Artificial Sequence
  Synthetic
gttgttctaagccuttaagttttguggt

SEQ ID NO: 25899 - DNA, 24 bp, Artificial Sequence
  Synthetic
gctcaaggataucagcagctttuc

SEQ ID NO: 25900 - DNA, 25 bp, Artificial Sequence
  Synthetic
cagaatcacagucccagtagattuc

SEQ ID NO: 25901 - DNA, 29 bp, Artificial Sequence
  Synthetic
ggagggttgautgatggactauagaaaat

SEQ ID NO: 25902 - DNA, 21 bp, Artificial Sequence
  Synthetic
agcactcugcctaactcccua

SEQ ID NO: 25903 - DNA, 27 bp, Artificial Sequence
  Synthetic
cctatcatctcugtgtttctcctucag

SEQ ID NO: 25904 - DNA, 27 bp, Artificial Sequence
  Synthetic
ctgaaaatttgacutactgtgccaucc

SEQ ID NO: 25905 - DNA, 28 bp, Artificial Sequence
  Synthetic
tgaggagcagguttctatatgagagtut

SEQ ID NO: 25906 - DNA, 24 bp, Artificial Sequence
  Synthetic
tcaggagguggtgaataaaugaac

SEQ ID NO: 25907 - DNA, 27 bp, Artificial Sequence
  Synthetic
ctaactggatgccutattcttggtgua

SEQ ID NO: 25908 - DNA, 23 bp, Artificial Sequence
  Synthetic
tgtcuaccccaaattcuccaggt

SEQ ID NO: 25909 - DNA, 22 bp, Artificial Sequence
  Synthetic
tctgcccgucttcctgtagtua

SEQ ID NO: 25910 - DNA, 26 bp, Artificial Sequence
  Synthetic
agattcaccuccaatcagttuggaag

SEQ ID NO: 25911 - DNA, 26 bp, Artificial Sequence
  Synthetic
tcacgttggaaugtgctttttcttut

SEQ ID NO: 25912 - DNA, 27 bp, Artificial Sequence
  Synthetic
ggaggauggagagaattatgcaaauca

SEQ ID NO: 25913 - DNA, 30 bp, Artificial Sequence
  Synthetic
gtctgtaacatttcuctttttcccacaaut

SEQ ID NO: 25914 - DNA, 19 bp, Artificial Sequence
  Synthetic
gcagcagagcucaggguag

SEQ ID NO: 25915 - DNA, 17 bp, Artificial Sequence
  Synthetic
cgacgacutcgcucgga

SEQ ID NO: 25916 - DNA, 22 bp, Artificial Sequence
  Synthetic
gcatatcuttgagggugggaca

SEQ ID NO: 25917 - DNA, 28 bp, Artificial Sequence
  Synthetic
tgtcttggtagagacugtgatatgtcut

SEQ ID NO: 25918 - DNA, 22 bp, Artificial Sequence
  Synthetic
gggctggutctccaaaucagaa

SEQ ID NO: 25919 - DNA, 26 bp, Artificial Sequence
  Synthetic
caatagaagcugaatttggtgtgcug

SEQ ID NO: 25920 - DNA, 26 bp, Artificial Sequence
  Synthetic
cagaatccttaucactgtcactguca

SEQ ID NO: 25921 - DNA, 23 bp, Artificial Sequence
  Synthetic
ctttucagacagccgatcaucag

SEQ ID NO: 25922 - DNA, 25 bp, Artificial Sequence
  Synthetic
tgccgtgttutgtattttcgttucc

SEQ ID NO: 25923 - DNA, 29 bp, Artificial Sequence
  Synthetic
ccagagctcatuattctagacagtctuca

SEQ ID NO: 25924 - DNA, 23 bp, Artificial Sequence
  Synthetic
cgatctctatutctgctccguga

SEQ ID NO: 25925 - DNA, 28 bp, Artificial Sequence
  Synthetic
gaaagcatcaugggaagaaaagaaugaa

SEQ ID NO: 25926 - DNA, 25 bp, Artificial Sequence
  Synthetic
ttcaggtttcugggagatgacaaug

SEQ ID NO: 25927 - DNA, 30 bp, Artificial Sequence
  Synthetic
tctgattctgaggacutaggttcttaugag

SEQ ID NO: 25928 - DNA, 21 bp, Artificial Sequence
  Synthetic
tgtatcugagacgtggcucct

SEQ ID NO: 25929 - DNA, 23 bp, Artificial Sequence
  Synthetic
aaggcagccautctgattctuca

SEQ ID NO: 25930 - DNA, 27 bp, Artificial Sequence
  Synthetic
tcttaaaucagacacaaatgccugact

SEQ ID NO: 25931 - DNA, 29 bp, Artificial Sequence
  Synthetic
gtgctcgagtuagaaatattgaagauggt

SEQ ID NO: 25932 - DNA, 28 bp, Artificial Sequence
  Synthetic
gaggaatttcaacauctctaggtctugt

SEQ ID NO: 25933 - DNA, 27 bp, Artificial Sequence
  Synthetic
cagaagatgacutcaaggagtatgucc

SEQ ID NO: 25934 - DNA, 28 bp, Artificial Sequence
  Synthetic
gcagcgatcuaagtaagacacattauca

SEQ ID NO: 25935 - DNA, 31 bp, Artificial Sequence
  Synthetic
gcatttttgtugagactatttagtcatucct

SEQ ID NO: 25936 - DNA, 17 bp, Artificial Sequence
  Synthetic
ggauccgcgaaggcgua

SEQ ID NO: 25937 - DNA, 21 bp, Artificial Sequence
  Synthetic
gaaggcgggugttgtgtttug

SEQ ID NO: 25938 - DNA, 20 bp, Artificial Sequence
  Synthetic
cagcccagucagtcagucac

SEQ ID NO: 25939 - DNA, 19 bp, Artificial Sequence
  Synthetic
agutaccgttugcccggaa

SEQ ID NO: 25940 - DNA, 24 bp, Artificial Sequence
  Synthetic
agagagctcugaggactgatctug

SEQ ID NO: 25941 - DNA, 20 bp, Artificial Sequence
  Synthetic
tgcagggcuctacaggctua

SEQ ID NO: 25942 - DNA, 21 bp, Artificial Sequence
  Synthetic
caggtaaccuggctccaacug

SEQ ID NO: 25943 - DNA, 27 bp, Artificial Sequence
  Synthetic
caactctgguttgaaagttguaagagg

SEQ ID NO: 25944 - DNA, 25 bp, Artificial Sequence
  Synthetic
aguaacatttctgttuccacagggt

SEQ ID NO: 25945 - DNA, 25 bp, Artificial Sequence
  Synthetic
cattaatccugttcccatguccaca

SEQ ID NO: 25946 - DNA, 22 bp, Artificial Sequence
  Synthetic
gcctatttgcugaccacacucc

SEQ ID NO: 25947 - DNA, 23 bp, Artificial Sequence
  Synthetic
aggatcctacutgggagacugac

SEQ ID NO: 25948 - DNA, 26 bp, Artificial Sequence
  Synthetic
gataactguaaaagggctctctcucc

SEQ ID NO: 25949 - DNA, 22 bp, Artificial Sequence
  Synthetic
gccagactgutctgagtccuga

SEQ ID NO: 25950 - DNA, 24 bp, Artificial Sequence
  Synthetic
cttcctgaggutcattaccaccug

SEQ ID NO: 25951 - DNA, 28 bp, Artificial Sequence
  Synthetic
aaggttcacacucctctgatatuagagt

SEQ ID NO: 25952 - DNA, 23 bp, Artificial Sequence
  Synthetic
cagctcaagcucttcaaaacgug

SEQ ID NO: 25953 - DNA, 22 bp, Artificial Sequence
  Synthetic
cctattgugggtggugaacact

SEQ ID NO: 25954 - DNA, 25 bp, Artificial Sequence
  Synthetic
atcttcatgugaccccttagttugg

SEQ ID NO: 25955 - DNA, 26 bp, Artificial Sequence
  Synthetic
tctctaggccucagtttcccttttua

SEQ ID NO: 25956 - DNA, 21 bp, Artificial Sequence
  Synthetic
tgggcugggacacatuaaagg

SEQ ID NO: 25957 - DNA, 25 bp, Artificial Sequence
  Synthetic
aaattgattcctcutcacccctgut

SEQ ID NO: 25958 - DNA, 22 bp, Artificial Sequence
  Synthetic
cttttcuggcatctucccacag

SEQ ID NO: 25959 - DNA, 23 bp, Artificial Sequence
  Synthetic
tcatgccttucaagacactgcut

SEQ ID NO: 25960 - DNA, 23 bp, Artificial Sequence
  Synthetic
tcattcaucccccaagucacaag

SEQ ID NO: 25961 - DNA, 21 bp, Artificial Sequence
  Synthetic
cctagccucaccccttcatug

SEQ ID NO: 25962 - DNA, 21 bp, Artificial Sequence
  Synthetic
ccacatctucacctggcagut

SEQ ID NO: 25963 - DNA, 22 bp, Artificial Sequence
  Synthetic
ccgtgtccucctatcccttuag

SEQ ID NO: 25964 - DNA, 24 bp, Artificial Sequence
  Synthetic
agtctggaggaccacutaaaggua

SEQ ID NO: 25965 - DNA, 23 bp, Artificial Sequence
  Synthetic
gcttctggutgtccttcttuccc

SEQ ID NO: 25966 - DNA, 20 bp, Artificial Sequence
  Synthetic
caagacggucagcacucaac

SEQ ID NO: 25967 - DNA, 23 bp, Artificial Sequence
  Synthetic
gatggaggaugaggtgctactuc

SEQ ID NO: 25968 - DNA, 23 bp, Artificial Sequence
  Synthetic
ccctgccccgaguaattataucg

SEQ ID NO: 25969 - DNA, 20 bp, Artificial Sequence
  Synthetic
tgacaaccccuccctcaugt

SEQ ID NO: 25970 - DNA, 18 bp, Artificial Sequence
  Synthetic
cccacagagguggtcugg

SEQ ID NO: 25971 - DNA, 19 bp, Artificial Sequence
  Synthetic
cgtcccauctgtccuggaa

SEQ ID NO: 25972 - DNA, 23 bp, Artificial Sequence
  Synthetic
ccatgtctgtucctggaggtcua

SEQ ID NO: 25973 - DNA, 25 bp, Artificial Sequence
  Synthetic
ggccagtcacuatatccacattguc

SEQ ID NO: 25974 - DNA, 22 bp, Artificial Sequence
  Synthetic
ggctgggccauatgatatcuga

SEQ ID NO: 25975 - DNA, 25 bp, Artificial Sequence
  Synthetic
gactgcttttccutctcactctgut

SEQ ID NO: 25976 - DNA, 21 bp, Artificial Sequence
  Synthetic
cguatgcttcaaugcacccat

SEQ ID NO: 25977 - DNA, 23 bp, Artificial Sequence
  Synthetic
gcacccucagtgatttctauccc

SEQ ID NO: 25978 - DNA, 23 bp, Artificial Sequence
  Synthetic
cacagttgccaucattgtcuacc

SEQ ID NO: 25979 - DNA, 28 bp, Artificial Sequence
  Synthetic
ctcatcagcatuatttccttgtgttugt

SEQ ID NO: 25980 - DNA, 28 bp, Artificial Sequence
  Synthetic
gcttccacacacauctgtaggatuaaat

SEQ ID NO: 25981 - DNA, 29 bp, Artificial Sequence
  Synthetic
tcctatagcagugtctaatttgtcaugaa

SEQ ID NO: 25982 - DNA, 30 bp, Artificial Sequence
  Synthetic
ggcacttagaguttcaagaatatggucaat

SEQ ID NO: 25983 - DNA, 27 bp, Artificial Sequence
  Synthetic
ccacttaacatguatggcagaagcaua

SEQ ID NO: 25984 - DNA, 28 bp, Artificial Sequence
  Synthetic
actcacgtatguataaagcctagucagt

SEQ ID NO: 25985 - DNA, 25 bp, Artificial Sequence
  Synthetic
tgaccagttuatacagttggtugcc

SEQ ID NO: 25986 - DNA, 24 bp, Artificial Sequence
  Synthetic
gatgagcaagauaggaaggcagut

SEQ ID NO: 25987 - DNA, 30 bp, Artificial Sequence
  Synthetic
accactgacatuaagcattccataaaaaug

SEQ ID NO: 25988 - DNA, 26 bp, Artificial Sequence
  Synthetic
tctgacaaaaacagccautagacuga

SEQ ID NO: 25989 - DNA, 28 bp, Artificial Sequence
  Synthetic
tctatcagacaugccataacaaaacugg

SEQ ID NO: 25990 - DNA, 22 bp, Artificial Sequence
  Synthetic
ggcatcaaaccugtctccauga

SEQ ID NO: 25991 - DNA, 29 bp, Artificial Sequence
  Synthetic
gttcttatatctttauttctccccggcut

SEQ ID NO: 25992 - DNA, 28 bp, Artificial Sequence
  Synthetic
caagtaccacaacaucaagtucaaagaa

SEQ ID NO: 25993 - DNA, 30 bp, Artificial Sequence
  Synthetic
ggcaattucaggaactctatttuaagaacc

SEQ ID NO: 25994 - DNA, 25 bp, Artificial Sequence
  Synthetic
ctctgcagauaaccataggttucca

SEQ ID NO: 25995 - DNA, 22 bp, Artificial Sequence
  Synthetic
cctacttucgagctactgucca

SEQ ID NO: 25996 - DNA, 19 bp, Artificial Sequence
  Synthetic
tggtgccacucaagctucc

SEQ ID NO: 25997 - DNA, 21 bp, Artificial Sequence
  Synthetic
ctccaacacauccauggcaga

SEQ ID NO: 25998 - DNA, 21 bp, Artificial Sequence
  Synthetic
catctgcautgggatcugcac

SEQ ID NO: 25999 - DNA, 21 bp, Artificial Sequence
  Synthetic
ccagugagcaatgugagcaac

SEQ ID NO: 26000 - DNA, 21 bp, Artificial Sequence
  Synthetic
gaactcgtuccagcacucgat

SEQ ID NO: 26001 - DNA, 23 bp, Artificial Sequence
  Synthetic
ccatcatguacggcaagttcucc

SEQ ID NO: 26002 - DNA, 19 bp, Artificial Sequence
  Synthetic
gccagguccttgugaacca

SEQ ID NO: 26003 - DNA, 21 bp, Artificial Sequence
  Synthetic
ccccugagcatgatctucagc

SEQ ID NO: 26004 - DNA, 24 bp, Artificial Sequence
  Synthetic
gctttgtcctucagcgttttgaug

SEQ ID NO: 26005 - DNA, 21 bp, Artificial Sequence
  Synthetic
cggtgacagugatgttucacg

SEQ ID NO: 26006 - DNA, 21 bp, Artificial Sequence
  Synthetic
ccutctgcttatuccggcaca

SEQ ID NO: 26007 - DNA, 29 bp, Artificial Sequence
  Synthetic
ggttgguagagaacttagaguagaaaagg

SEQ ID NO: 26008 - DNA, 17 bp, Artificial Sequence
  Synthetic
gggtuccggcaguaggc

SEQ ID NO: 26009 - DNA, 24 bp, Artificial Sequence
  Synthetic
gtgtaggcagaauggttttgtugt

SEQ ID NO: 26010 - DNA, 19 bp, Artificial Sequence
  Synthetic
gggcgauggtgtactccug

SEQ ID NO: 26011 - DNA, 17 bp, Artificial Sequence
  Synthetic
cccgcuaacgcgaguct

SEQ ID NO: 26012 - DNA, 22 bp, Artificial Sequence
  Synthetic
aaagacatgagcuggcaggaut

SEQ ID NO: 26013 - DNA, 31 bp, Artificial Sequence
  Synthetic
aagaaggttgtatuccaaatcatggagtaut

SEQ ID NO: 26014 - DNA, 22 bp, Artificial Sequence
  Synthetic
ggattcgcagucgtgaaccaua

SEQ ID NO: 26015 - DNA, 22 bp, Artificial Sequence
  Synthetic
tcttttgugaccgctctcctug

SEQ ID NO: 26016 - DNA, 18 bp, Artificial Sequence
  Synthetic
caagcgagccgugagcua

SEQ ID NO: 26017 - DNA, 19 bp, Artificial Sequence
  Synthetic
cgaagctcugagggctucc

SEQ ID NO: 26018 - DNA, 22 bp, Artificial Sequence
  Synthetic
aggagaacctugtcctcctcut

SEQ ID NO: 26019 - DNA, 19 bp, Artificial Sequence
  Synthetic
actgaccacggccugttug

SEQ ID NO: 26020 - DNA, 20 bp, Artificial Sequence
  Synthetic
gaagccgucacagtggugat

SEQ ID NO: 26021 - DNA, 22 bp, Artificial Sequence
  Synthetic
gcgcagagacgcutttgaaaut

SEQ ID NO: 26022 - DNA, 24 bp, Artificial Sequence
  Synthetic
cgtctgggaacuatactccgaguc

SEQ ID NO: 26023 - DNA, 20 bp, Artificial Sequence
  Synthetic
agtguggccagcagguaaat

SEQ ID NO: 26024 - DNA, 22 bp, Artificial Sequence
  Synthetic
ccggcccaaucacaatgattuc

SEQ ID NO: 26025 - DNA, 25 bp, Artificial Sequence
  Synthetic
gatcttgugaacatcctcatugcac

SEQ ID NO: 26026 - DNA, 21 bp, Artificial Sequence
  Synthetic
cagaagcgaucaggaugacca

SEQ ID NO: 26027 - DNA, 23 bp, Artificial Sequence
  Synthetic
tgatcugaaccgaggacacctua

SEQ ID NO: 26028 - DNA, 21 bp, Artificial Sequence
  Synthetic
cccaggcucgtatagttgcug

SEQ ID NO: 26029 - DNA, 27 bp, Artificial Sequence
  Synthetic
agtcagtaagcuttcatgcaaagtuct

SEQ ID NO: 26030 - DNA, 19 bp, Artificial Sequence
  Synthetic
tgacccaagccgucaggua

SEQ ID NO: 26031 - DNA, 21 bp, Artificial Sequence
  Synthetic
tgtaatgctgugcgaagcuca

SEQ ID NO: 26032 - DNA, 23 bp, Artificial Sequence
  Synthetic
acaaaggaaccugttgaagcuga

SEQ ID NO: 26033 - DNA, 28 bp, Artificial Sequence
  Synthetic
aacaugtatatagucacccagaaagcag

SEQ ID NO: 26034 - DNA, 26 bp, Artificial Sequence
  Synthetic
aagtagaagcaauctgatgaacucca

SEQ ID NO: 26035 - DNA, 19 bp, Artificial Sequence
  Synthetic
tgctcucccagttcuccga

SEQ ID NO: 26036 - DNA, 20 bp, Artificial Sequence
  Synthetic
tgtagtacacgugcgtgugg

SEQ ID NO: 26037 - DNA, 22 bp, Artificial Sequence
  Synthetic
tgcaacatgtutcccctcctut

SEQ ID NO: 26038 - DNA, 22 bp, Artificial Sequence
  Synthetic
ggaucaccacagccttcaucac

SEQ ID NO: 26039 - DNA, 20 bp, Artificial Sequence
  Synthetic
catgtccagugcagctcuca

SEQ ID NO: 26040 - DNA, 22 bp, Artificial Sequence
  Synthetic
cauttgucaacggacagcagat

SEQ ID NO: 26041 - DNA, 20 bp, Artificial Sequence
  Synthetic
tgttctgugcccccattgut

SEQ ID NO: 26042 - DNA, 20 bp, Artificial Sequence
  Synthetic
gccgatucgaaggtgggtut

SEQ ID NO: 26043 - DNA, 22 bp, Artificial Sequence
  Synthetic
actgatgatgugccttccctug

SEQ ID NO: 26044 - DNA, 22 bp, Artificial Sequence
  Synthetic
gtgttttgcuctccaccctuct

SEQ ID NO: 26045 - DNA, 25 bp, Artificial Sequence
  Synthetic
gaaatgctgaauaaggctgaggtug

SEQ ID NO: 26046 - DNA, 27 bp, Artificial Sequence
  Synthetic
tgutcaaaactgaaauggaacaaacaa

SEQ ID NO: 26047 - DNA, 27 bp, Artificial Sequence
  Synthetic
catggcctcutctttttaacttugaca

SEQ ID NO: 26048 - DNA, 20 bp, Artificial Sequence
  Synthetic
cgccttaccugctgctcaut

SEQ ID NO: 26049 - DNA, 24 bp, Artificial Sequence
  Synthetic
agaccccuaaagaagaaggtgcua

SEQ ID NO: 26050 - DNA, 19 bp, Artificial Sequence
  Synthetic
tcuaucaaccgcgaggagg

SEQ ID NO: 26051 - DNA, 20 bp, Artificial Sequence
  Synthetic
tcgcggugggatuaaaagca

SEQ ID NO: 26052 - DNA, 23 bp, Artificial Sequence
  Synthetic
aagugggaggagagagtcugaaa

SEQ ID NO: 26053 - DNA, 17 bp, Artificial Sequence
  Synthetic
catggccucggctggua

SEQ ID NO: 26054 - DNA, 28 bp, Artificial Sequence
  Synthetic
ctttttcttctccuccgttttcttctuc

SEQ ID NO: 26055 - DNA, 23 bp, Artificial Sequence
  Synthetic
gagggccauggaactgcttaaua

SEQ ID NO: 26056 - DNA, 31 bp, Artificial Sequence
  Synthetic
aataaatagaattgcutgttgtctgcugaag

SEQ ID NO: 26057 - DNA, 24 bp, Artificial Sequence
  Synthetic
gaucaacagaagaacccaguggaa

SEQ ID NO: 26058 - DNA, 28 bp, Artificial Sequence
  Synthetic
tccaatctctccutatactgctgatcut

SEQ ID NO: 26059 - DNA, 29 bp, Artificial Sequence
  Synthetic
tttgctgatacaguctattttctccucag

SEQ ID NO: 26060 - DNA, 28 bp, Artificial Sequence
  Synthetic
tgtactgcctautcactattgtttgugg

SEQ ID NO: 26061 - DNA, 28 bp, Artificial Sequence
  Synthetic
gctactcaggaggcutaaaaatatcugt

SEQ ID NO: 26062 - DNA, 21 bp, Artificial Sequence
  Synthetic
ggcggaucaccaagcaatcua

SEQ ID NO: 26063 - DNA, 28 bp, Artificial Sequence
  Synthetic
caaactatttuccattctgcatcuccag

SEQ ID NO: 26064 - DNA, 24 bp, Artificial Sequence
  Synthetic
tcaugaaccucagaagacaagaga

SEQ ID NO: 26065 - DNA, 24 bp, Artificial Sequence
  Synthetic
gtcttcttccugttcccttgucag

SEQ ID NO: 26066 - DNA, 27 bp, Artificial Sequence
  Synthetic
aatgattgtactuacctgccagagtuc

SEQ ID NO: 26067 - DNA, 22 bp, Artificial Sequence
  Synthetic
cctgaugcaggagcacatguat

SEQ ID NO: 26068 - DNA, 23 bp, Artificial Sequence
  Synthetic
tttgaagccaaggauggtgtuat

SEQ ID NO: 26069 - DNA, 26 bp, Artificial Sequence
  Synthetic
gtctttgtgugaatctttttccugca

SEQ ID NO: 26070 - DNA, 24 bp, Artificial Sequence
  Synthetic
ttaaatctguggtgtggcaaugac

SEQ ID NO: 26071 - DNA, 29 bp, Artificial Sequence
  Synthetic
cattctggtgtucttcacttattaccuca

SEQ ID NO: 26072 - DNA, 33 bp, Artificial Sequence
  Synthetic
ttttcttctctagcuatttatgcttgattucct

SEQ ID NO: 26073 - DNA, 26 bp, Artificial Sequence
  Synthetic
ggtaggtgtutcttggaaatguggaa

SEQ ID NO: 26074 - DNA, 32 bp, Artificial Sequence
  Synthetic
acttattgtcttcacacauaaatcacaagcua

SEQ ID NO: 26075 - DNA, 28 bp, Artificial Sequence
  Synthetic
gttaggtaaaatggugtatcctggcuat

SEQ ID NO: 26076 - DNA, 29 bp, Artificial Sequence
  Synthetic
tcaaaaagucatcaagacuccaaaagaca

SEQ ID NO: 26077 - DNA, 26 bp, Artificial Sequence
  Synthetic
ctccgagtaauctagctagcttucac

SEQ ID NO: 26078 - DNA, 22 bp, Artificial Sequence
  Synthetic
caaagcccacgcuctttcuact

SEQ ID NO: 26079 - DNA, 28 bp, Artificial Sequence
  Synthetic
tttgtgaactagauctgtgaatctugca

SEQ ID NO: 26080 - DNA, 28 bp, Artificial Sequence
  Synthetic
tcaaccttgaucaatagaagucaaaagt

SEQ ID NO: 26081 - DNA, 24 bp, Artificial Sequence
  Synthetic
ggtctgtcatucaccatttgacug

SEQ ID NO: 26082 - DNA, 21 bp, Artificial Sequence
  Synthetic
atttaggacugcatgcuggct

SEQ ID NO: 26083 - DNA, 29 bp, Artificial Sequence
  Synthetic
accatccccttaguattaggtgaaatcut

SEQ ID NO: 26084 - DNA, 24 bp, Artificial Sequence
  Synthetic
tuactggcatcuagaacagcaagg

SEQ ID NO: 26085 - DNA, 29 bp, Artificial Sequence
  Synthetic
tccctaggtctaaucctcttctttcttut

SEQ ID NO: 26086 - DNA, 20 bp, Artificial Sequence
  Synthetic
gtcagucgtccagugccaat

SEQ ID NO: 26087 - DNA, 25 bp, Artificial Sequence
  Synthetic
gccttctttucattttccctugcag

SEQ ID NO: 26088 - DNA, 29 bp, Artificial Sequence
  Synthetic
aaattccctctauagctatggaaagucct

SEQ ID NO: 26089 - DNA, 28 bp, Artificial Sequence
  Synthetic
tcgatattgtaacacuctgagtttgcut

SEQ ID NO: 26090 - DNA, 30 bp, Artificial Sequence
  Synthetic
actgcaatatattuccatacctgtttcugg

SEQ ID NO: 26091 - DNA, 25 bp, Artificial Sequence
  Synthetic
ctgaggcttguttgattctgggaua

SEQ ID NO: 26092 - DNA, 24 bp, Artificial Sequence
  Synthetic
tgacauggctattagugcacaagg

SEQ ID NO: 26093 - DNA, 29 bp, Artificial Sequence
  Synthetic
aggtacttaggaauggcaaatttgtuaca

SEQ ID NO: 26094 - DNA, 22 bp, Artificial Sequence
  Synthetic
ccctcacuggagtcttccacut

SEQ ID NO: 26095 - DNA, 29 bp, Artificial Sequence
  Synthetic
ggttaatttgctugtgtttactttgguga

SEQ ID NO: 26096 - DNA, 21 bp, Artificial Sequence
  Synthetic
actgaggatuccctggaccut

SEQ ID NO: 26097 - DNA, 28 bp, Artificial Sequence
  Synthetic
tcttcacccccugaatcatttcattuaa

SEQ ID NO: 26098 - DNA, 19 bp, Artificial Sequence
  Synthetic
ctgctcaguctctccugct

SEQ ID NO: 26099 - DNA, 17 bp, Artificial Sequence
  Synthetic
gccaggacccugaccuc

SEQ ID NO: 26100 - DNA, 22 bp, Artificial Sequence
  Synthetic
cctactgtgaccucagccacua

SEQ ID NO: 26101 - DNA, 21 bp, Artificial Sequence
  Synthetic
gccagggaguaaaccuggaag

SEQ ID NO: 26102 - DNA, 21 bp, Artificial Sequence
  Synthetic
ccggtttugggtatggguact

SEQ ID NO: 26103 - DNA, 19 bp, Artificial Sequence
  Synthetic
gtggcccuacctacccaug

SEQ ID NO: 26104 - DNA, 19 bp, Artificial Sequence
  Synthetic
caggtgggutagcacguga

SEQ ID NO: 26105 - DNA, 22 bp, Artificial Sequence
  Synthetic
gttggcttaguctccccatcug

SEQ ID NO: 26106 - DNA, 21 bp, Artificial Sequence
  Synthetic
gggaggaaccagaugtccaug

SEQ ID NO: 26107 - DNA, 17 bp, Artificial Sequence
  Synthetic
ctggccugcctctgcua

SEQ ID NO: 26108 - DNA, 20 bp, Artificial Sequence
  Synthetic
gccacaaugctggcatugag

SEQ ID NO: 26109 - DNA, 20 bp, Artificial Sequence
  Synthetic
gtggcacagacugtguccat

SEQ ID NO: 26110 - DNA, 17 bp, Artificial Sequence
  Synthetic
ccauacccggccgagug

SEQ ID NO: 26111 - DNA, 17 bp, Artificial Sequence
  Synthetic
aggtgcgcgugtctcug

SEQ ID NO: 26112 - DNA, 20 bp, Artificial Sequence
  Synthetic
gggtuggagggaacacacuc

SEQ ID NO: 26113 - DNA, 22 bp, Artificial Sequence
  Synthetic
tctgactggacugtgtgtguct

SEQ ID NO: 26114 - DNA, 17 bp, Artificial Sequence
  Synthetic
gggcgugagcucaggat

SEQ ID NO: 26115 - DNA, 17 bp, Artificial Sequence
  Synthetic
gcccugccacuggacac

SEQ ID NO: 26116 - DNA, 23 bp, Artificial Sequence
  Synthetic
tcagccactcugcttacaatguc

SEQ ID NO: 26117 - DNA, 23 bp, Artificial Sequence
  Synthetic
gtggaugaacagcaccttgttuc

SEQ ID NO: 26118 - DNA, 21 bp, Artificial Sequence
  Synthetic
catcatgucctagcccugacc

SEQ ID NO: 26119 - DNA, 27 bp, Artificial Sequence
  Synthetic
gtgttcgctttutccccttttaatuca

SEQ ID NO: 26120 - DNA, 19 bp, Artificial Sequence
  Synthetic
ctgtucagaccacccucgt

SEQ ID NO: 26121 - DNA, 24 bp, Artificial Sequence
  Synthetic
actcctgatuggctttgtcttucc

SEQ ID NO: 26122 - DNA, 21 bp, Artificial Sequence
  Synthetic
tgtctcagggucactcaggut

SEQ ID NO: 26123 - DNA, 17 bp, Artificial Sequence
  Synthetic
ccaggucgctcccucac

SEQ ID NO: 26124 - DNA, 23 bp, Artificial Sequence
  Synthetic
ctgtccttgccuacttcttccut

SEQ ID NO: 26125 - DNA, 21 bp, Artificial Sequence
  Synthetic
aggagguagcggtcctcauac

SEQ ID NO: 26126 - DNA, 20 bp, Artificial Sequence
  Synthetic
ctccugacagccctctgtuc

SEQ ID NO: 26127 - DNA, 21 bp, Artificial Sequence
  Synthetic
gatgctagugctccctgcuaa

SEQ ID NO: 26128 - DNA, 21 bp, Artificial Sequence
  Synthetic
cacctgugctgtctcttucct

SEQ ID NO: 26129 - DNA, 19 bp, Artificial Sequence
  Synthetic
aggaccaaggaugggugga

SEQ ID NO: 26130 - DNA, 21 bp, Artificial Sequence
  Synthetic
ggtguccagggactggtaugt

SEQ ID NO: 26131 - DNA, 20 bp, Artificial Sequence
  Synthetic
ccttcgagucccaacaggug

SEQ ID NO: 26132 - DNA, 20 bp, Artificial Sequence
  Synthetic
ggtgggtgacuctgagccut

SEQ ID NO: 26133 - DNA, 20 bp, Artificial Sequence
  Synthetic
cagggatcuctgggttugct

SEQ ID NO: 26134 - DNA, 22 bp, Artificial Sequence
  Synthetic
gcctccctaguggtatcctgut

SEQ ID NO: 26135 - DNA, 24 bp, Artificial Sequence
  Synthetic
ctcctcattguagagagacagugg

SEQ ID NO: 26136 - DNA, 22 bp, Artificial Sequence
  Synthetic
gctgagcugacaagcttcuact

SEQ ID NO: 26137 - DNA, 21 bp, Artificial Sequence
  Synthetic
cctttacaccuggaggctcug

SEQ ID NO: 26138 - DNA, 21 bp, Artificial Sequence
  Synthetic
gggaaggucaagaggcattuc

SEQ ID NO: 26139 - DNA, 27 bp, Artificial Sequence
  Synthetic
aatgagactcaucatgaacacagcuaa

SEQ ID NO: 26140 - DNA, 23 bp, Artificial Sequence
  Synthetic
caagtcttugcccagttctguct

SEQ ID NO: 26141 - DNA, 19 bp, Artificial Sequence
  Synthetic
cattcagcagucgguggga

SEQ ID NO: 26142 - DNA, 20 bp, Artificial Sequence
  Synthetic
ggtcttgguctcaccgtugt

SEQ ID NO: 26143 - DNA, 25 bp, Artificial Sequence
  Synthetic
cagtgtgagugagtgtcagtguaat

SEQ ID NO: 26144 - DNA, 21 bp, Artificial Sequence
  Synthetic
cctgcagcugtcctcugaaag

SEQ ID NO: 26145 - DNA, 24 bp, Artificial Sequence
  Synthetic
gcutgataccucccaaaaacggat

SEQ ID NO: 26146 - DNA, 23 bp, Artificial Sequence
  Synthetic
ggagacatacugtctgggtcuga

SEQ ID NO: 26147 - DNA, 28 bp, Artificial Sequence
  Synthetic
tcggatttttcacuttgctcatgtttut

SEQ ID NO: 26148 - DNA, 21 bp, Artificial Sequence
  Synthetic
agcugaacaagucaaggacac

SEQ ID NO: 26149 - DNA, 26 bp, Artificial Sequence
  Synthetic
gaacaagctagauacaatcagcucca

SEQ ID NO: 26150 - DNA, 22 bp, Artificial Sequence
  Synthetic
caaaaagcaagcuccacctguc

SEQ ID NO: 26151 - DNA, 22 bp, Artificial Sequence
  Synthetic
ccctcccuctgctttacaauca

SEQ ID NO: 26152 - DNA, 26 bp, Artificial Sequence
  Synthetic
gtgggagtgugaagaatgattctugt

SEQ ID NO: 26153 - DNA, 25 bp, Artificial Sequence
  Synthetic
acugaggagctgtuaaagaaagcaa

SEQ ID NO: 26154 - DNA, 23 bp, Artificial Sequence
  Synthetic
ggactgggagugaagatacuggt

SEQ ID NO: 26155 - DNA, 22 bp, Artificial Sequence
  Synthetic
agacagtcucccaggttcucag

SEQ ID NO: 26156 - DNA, 23 bp, Artificial Sequence
  Synthetic
cctgtgagcaauggcacaaaauc

SEQ ID NO: 26157 - DNA, 28 bp, Artificial Sequence
  Synthetic
tgacttcagttguctttgtttctctuca

SEQ ID NO: 26158 - DNA, 22 bp, Artificial Sequence
  Synthetic
gcttctcaaagugaggctugca

SEQ ID NO: 26159 - DNA, 27 bp, Artificial Sequence
  Synthetic
gtgttcatatatgutctgcccttguct

SEQ ID NO: 26160 - DNA, 27 bp, Artificial Sequence
  Synthetic
tttcccaaccacauactaaatcugacc

SEQ ID NO: 26161 - DNA, 26 bp, Artificial Sequence
  Synthetic
cccctgtgttcutctcttccatttua

SEQ ID NO: 26162 - DNA, 27 bp, Artificial Sequence
  Synthetic
gctgagatttggugagacacagaauag

SEQ ID NO: 26163 - DNA, 29 bp, Artificial Sequence
  Synthetic
gcactgagtugacactctgaagtattuaa

SEQ ID NO: 26164 - DNA, 30 bp, Artificial Sequence
  Synthetic
acaguatactaaguagcaaacaaacaagca

SEQ ID NO: 26165 - DNA, 25 bp, Artificial Sequence
  Synthetic
ctcttctcaacgggutccttttcua

SEQ ID NO: 26166 - DNA, 30 bp, Artificial Sequence
  Synthetic
ccatttcattcaaauccttacaaacaucct

SEQ ID NO: 26167 - DNA, 27 bp, Artificial Sequence
  Synthetic
gactgccctugttcttttacatttuca

SEQ ID NO: 26168 - DNA, 24 bp, Artificial Sequence
  Synthetic
tgtatcagcaggautctaguggct

SEQ ID NO: 26169 - DNA, 20 bp, Artificial Sequence
  Synthetic
gcctucgagcgagagaaugg

SEQ ID NO: 26170 - DNA, 17 bp, Artificial Sequence
  Synthetic
ccagtguccgtcgcguc

SEQ ID NO: 26171 - DNA, 20 bp, Artificial Sequence
  Synthetic
ggcagaacucaccttugcct

SEQ ID NO: 26172 - DNA, 20 bp, Artificial Sequence
  Synthetic
cagcatctcuacggcacgua

SEQ ID NO: 26173 - DNA, 21 bp, Artificial Sequence
  Synthetic
ccatgccaagcutcagtguca

SEQ ID NO: 26174 - DNA, 21 bp, Artificial Sequence
  Synthetic
cuctgctucccagagacaagg

SEQ ID NO: 26175 - DNA, 26 bp, Artificial Sequence
  Synthetic
tgaagaataaaccagauggcttgugt

SEQ ID NO: 26176 - DNA, 19 bp, Artificial Sequence
  Synthetic
ggtggtgauggtgccctuc

SEQ ID NO: 26177 - DNA, 18 bp, Artificial Sequence
  Synthetic
acacggtugggtggcuac

SEQ ID NO: 26178 - DNA, 21 bp, Artificial Sequence
  Synthetic
cagacgtgguacctgcaucag

SEQ ID NO: 26179 - DNA, 21 bp, Artificial Sequence
  Synthetic
atgaagagugagcaccucaut

SEQ ID NO: 26180 - DNA, 23 bp, Artificial Sequence
  Synthetic
ggtcaaugactcagactuccagg

SEQ ID NO: 26181 - DNA, 23 bp, Artificial Sequence
  Synthetic
ccuttcaatctuccccagacagg

SEQ ID NO: 26182 - DNA, 23 bp, Artificial Sequence
  Synthetic
ccugtttgtgaaugacaccaagg

SEQ ID NO: 26183 - DNA, 22 bp, Artificial Sequence
  Synthetic
tgcagctguactgcttttcuca

SEQ ID NO: 26184 - DNA, 20 bp, Artificial Sequence
  Synthetic
gcaggauctgccuaggaggt

SEQ ID NO: 26185 - DNA, 22 bp, Artificial Sequence
  Synthetic
atgccctgautaaaccctgcut

SEQ ID NO: 26186 - DNA, 19 bp, Artificial Sequence
  Synthetic
cagagcauacgcagccugt

SEQ ID NO: 26187 - DNA, 20 bp, Artificial Sequence
  Synthetic
cctccggaaggucatcucag

SEQ ID NO: 26188 - DNA, 20 bp, Artificial Sequence
  Synthetic
ttcctccccugtcatccuca

SEQ ID NO: 26189 - DNA, 17 bp, Artificial Sequence
  Synthetic
cctgtgccuggcaggua

SEQ ID NO: 26190 - DNA, 20 bp, Artificial Sequence
  Synthetic
ctccuggaagacccaagcug

SEQ ID NO: 26191 - DNA, 21 bp, Artificial Sequence
  Synthetic
aatgagatgaggucgcccaug

SEQ ID NO: 26192 - DNA, 22 bp, Artificial Sequence
  Synthetic
catggccugacgactcgtgcua

SEQ ID NO: 26193 - DNA, 21 bp, Artificial Sequence
  Synthetic
catggugcacctgggauccct

SEQ ID NO: 26194 - DNA, 22 bp, Artificial Sequence
  Synthetic
cactggtccuttcactctcugc

SEQ ID NO: 26195 - DNA, 21 bp, Artificial Sequence
  Synthetic
agggaaugcacacagatgucc

SEQ ID NO: 26196 - DNA, 26 bp, Artificial Sequence
  Synthetic
ctgagttguatctagttguggcacat

SEQ ID NO: 26197 - DNA, 29 bp, Artificial Sequence
  Synthetic
aaatgcatgggaaautctaccatagagut

SEQ ID NO: 26198 - DNA, 26 bp, Artificial Sequence
  Synthetic
gttcttcagugcagaacaaatgauct

SEQ ID NO: 26199 - DNA, 29 bp, Artificial Sequence
  Synthetic
gagtccattaccuttcacaaagaaatgut

SEQ ID NO: 26200 - DNA, 20 bp, Artificial Sequence
  Synthetic
gcaccccaaggcuggaauaa

SEQ ID NO: 26201 - DNA, 21 bp, Artificial Sequence
  Synthetic
cctcttctucgctgtccucag

SEQ ID NO: 26202 - DNA, 17 bp, Artificial Sequence
  Synthetic
gaagugcggccagctug

SEQ ID NO: 26203 - DNA, 17 bp, Artificial Sequence
  Synthetic
ctctccucggctcugct

SEQ ID NO: 26204 - DNA, 21 bp, Artificial Sequence
  Synthetic
gagggtttgugacaggccuat

SEQ ID NO: 26205 - DNA, 22 bp, Artificial Sequence
  Synthetic
gagagggcuccaaaagtcacuc

SEQ ID NO: 26206 - DNA, 19 bp, Artificial Sequence
  Synthetic
tgcaugcgacacttggugt

SEQ ID NO: 26207 - DNA, 24 bp, Artificial Sequence
  Synthetic
ccctcttctaugggttccttguct

SEQ ID NO: 26208 - DNA, 18 bp, Artificial Sequence
  Synthetic
ccugggaggaagggcuca

SEQ ID NO: 26209 - DNA, 24 bp, Artificial Sequence
  Synthetic
acagagcuggaaaaagacaagguc

SEQ ID NO: 26210 - DNA, 22 bp, Artificial Sequence
  Synthetic
gccccttugcatgaagcaauac

SEQ ID NO: 26211 - DNA, 23 bp, Artificial Sequence
  Synthetic
cggagaagguaatggacgugaac

SEQ ID NO: 26212 - DNA, 23 bp, Artificial Sequence
  Synthetic
gggatctgutcactcagtugaga

SEQ ID NO: 26213 - DNA, 22 bp, Artificial Sequence
  Synthetic
catgagaugggcatggagaugt

SEQ ID NO: 26214 - DNA, 21 bp, Artificial Sequence
  Synthetic
cactcccuctttcctgtugca

SEQ ID NO: 26215 - DNA, 24 bp, Artificial Sequence
  Synthetic
gttaagacgcuttccagacugaca

SEQ ID NO: 26216 - DNA, 22 bp, Artificial Sequence
  Synthetic
cuaggacacagaucaggctcua

SEQ ID NO: 26217 - DNA, 30 bp, Artificial Sequence
  Synthetic
catttctgctucttaatgaatgtttuccca

SEQ ID NO: 26218 - DNA, 23 bp, Artificial Sequence
  Synthetic
accatgtgccautcatcctucat

SEQ ID NO: 26219 - DNA, 20 bp, Artificial Sequence
  Synthetic
gcagccucactggtttccug

SEQ ID NO: 26220 - DNA, 22 bp, Artificial Sequence
  Synthetic
gcccacttcucatctcctgtuc

SEQ ID NO: 26221 - DNA, 22 bp, Artificial Sequence
  Synthetic
acactactcutgggcgauagct

SEQ ID NO: 26222 - DNA, 22 bp, Artificial Sequence
  Synthetic
agccagagaccauccttttcug

SEQ ID NO: 26223 - DNA, 23 bp, Artificial Sequence
  Synthetic
cctcgtggcuttttcctttgtug

SEQ ID NO: 26224 - DNA, 31 bp, Artificial Sequence
  Synthetic
aaacgattaattgauaacaatgtgagugcaa

SEQ ID NO: 26225 - DNA, 28 bp, Artificial Sequence
  Synthetic
cctccatataccaaugacaaaactguga

SEQ ID NO: 26226 - DNA, 28 bp, Artificial Sequence
  Synthetic
tgatgttcttacugtcaatcatggacuc

SEQ ID NO: 26227 - DNA, 26 bp, Artificial Sequence
  Synthetic
cacatgaggagaaugtacctcugaac

SEQ ID NO: 26228 - DNA, 27 bp, Artificial Sequence
  Synthetic
gccgttgatatuactgtggatacuagg

SEQ ID NO: 26229 - DNA, 28 bp, Artificial Sequence
  Synthetic
gttttggattucacaggcaatgtaauca

SEQ ID NO: 26230 - DNA, 21 bp, Artificial Sequence
  Synthetic
gtacctgauagccccauggac

SEQ ID NO: 26231 - DNA, 29 bp, Artificial Sequence
  Synthetic
aagaaccuaagauggaagaagaagaacac

SEQ ID NO: 26232 - DNA, 25 bp, Artificial Sequence
  Synthetic
gactctgtggautccgattcttcug

SEQ ID NO: 26233 - DNA, 23 bp, Artificial Sequence
  Synthetic
gaaacucactcuggaccaagagg

SEQ ID NO: 26234 - DNA, 24 bp, Artificial Sequence
  Synthetic
gggaatattcuggctctctuccat

SEQ ID NO: 26235 - DNA, 27 bp, Artificial Sequence
  Synthetic
gctgacactucaattgcatttucacaa

SEQ ID NO: 26236 - DNA, 23 bp, Artificial Sequence
  Synthetic
cctcaccauattcctcctgucca

SEQ ID NO: 26237 - DNA, 22 bp, Artificial Sequence
  Synthetic
tcgautgaauggcggaagaaaa

SEQ ID NO: 26238 - DNA, 30 bp, Artificial Sequence
  Synthetic
gggtaaaataatagagucttctttgacgut

SEQ ID NO: 26239 - DNA, 27 bp, Artificial Sequence
  Synthetic
gtgccctucagaagtaacaaataugga

SEQ ID NO: 26240 - DNA, 23 bp, Artificial Sequence
  Synthetic
ctgaggaugccttttggttcuct

SEQ ID NO: 26241 - DNA, 23 bp, Artificial Sequence
  Synthetic
caccaccuccttctattcctugc

SEQ ID NO: 26242 - DNA, 25 bp, Artificial Sequence
  Synthetic
gacgtugaaacggaaaguggaaaaa

SEQ ID NO: 26243 - DNA, 24 bp, Artificial Sequence
  Synthetic
aattttgcccauccaccaaacauc

SEQ ID NO: 26244 - DNA, 30 bp, Artificial Sequence
  Synthetic
actgatgacattaggutctgatttgagtuc

SEQ ID NO: 26245 - DNA, 27 bp, Artificial Sequence
  Synthetic
gtacaaacaaaagagguagcagcaauc

SEQ ID NO: 26246 - DNA, 24 bp, Artificial Sequence
  Synthetic
agcctctgaaucttttctctuggg

SEQ ID NO: 26247 - DNA, 25 bp, Artificial Sequence
  Synthetic
gtagacggaucactuaagagcaaca

SEQ ID NO: 26248 - DNA, 30 bp, Artificial Sequence
  Synthetic
cuttgttgaaaatgguagagaaggaaaaga

SEQ ID NO: 26249 - DNA, 28 bp, Artificial Sequence
  Synthetic
cttgctttaguaggttagtgttgttugg

SEQ ID NO: 26250 - DNA, 24 bp, Artificial Sequence
  Synthetic
gcaccaucaatatttuacaacgca

SEQ ID NO: 26251 - DNA, 28 bp, Artificial Sequence
  Synthetic
accagcatuaaaaagagaggagaaaguc

SEQ ID NO: 26252 - DNA, 28 bp, Artificial Sequence
  Synthetic
aagtacttatagccucaagtcagaauca

SEQ ID NO: 26253 - DNA, 28 bp, Artificial Sequence
  Synthetic
ttccctagaagautacaccaaatgugac

SEQ ID NO: 26254 - DNA, 30 bp, Artificial Sequence
  Synthetic
cctgcacatgtaucccctgaatctaaaaua

SEQ ID NO: 26255 - DNA, 21 bp, Artificial Sequence
  Synthetic
ctttcagguctccgtggucaa

SEQ ID NO: 26256 - DNA, 28 bp, Artificial Sequence
  Synthetic
cttgaaacttgaaguaggatctccucat

SEQ ID NO: 26257 - DNA, 31 bp, Artificial Sequence
  Synthetic
ccatttcataagggutatcttttcctgctua

SEQ ID NO: 26258 - DNA, 31 bp, Artificial Sequence
  Synthetic
ttgtccactgagaaugatattttagacauag

SEQ ID NO: 26259 - DNA, 26 bp, Artificial Sequence
  Synthetic
tgtgaatggaccuctggattaugaga

SEQ ID NO: 26260 - DNA, 28 bp, Artificial Sequence
  Synthetic
ctaagtttacuggttgatggugagaaca

SEQ ID NO: 26261 - DNA, 29 bp, Artificial Sequence
  Synthetic
aatacatcatcutctctaaaccugcagac

SEQ ID NO: 26262 - DNA, 26 bp, Artificial Sequence
  Synthetic
aaaaatgtgcugtcatctgtuaagcc

SEQ ID NO: 26263 - DNA, 26 bp, Artificial Sequence
  Synthetic
ctgccaguatttttgaaguggaagaa

SEQ ID NO: 26264 - DNA, 31 bp, Artificial Sequence
  Synthetic
gagtgttaaggatutttctcagtacagtuca

SEQ ID NO: 26265 - DNA, 28 bp, Artificial Sequence
  Synthetic
cctaacctggtutcaactgaagtacuaa

SEQ ID NO: 26266 - DNA, 23 bp, Artificial Sequence
  Synthetic
ttcttggtcuggaaatgccucat

SEQ ID NO: 26267 - DNA, 31 bp, Artificial Sequence
  Synthetic
ctgcatttctttatuttggtaacgtcacuaa

SEQ ID NO: 26268 - DNA, 23 bp, Artificial Sequence
  Synthetic
ccagcuggcaaattctctucaac

SEQ ID NO: 26269 - DNA, 27 bp, Artificial Sequence
  Synthetic
acagagaagucagggactactaugaac

SEQ ID NO: 26270 - DNA, 30 bp, Artificial Sequence
  Synthetic
aacagattacatuagctgagtttctttuga

SEQ ID NO: 26271 - DNA, 28 bp, Artificial Sequence
  Synthetic
agtgttugatccttatcugccaagaaat

SEQ ID NO: 26272 - DNA, 21 bp, Artificial Sequence
  Synthetic
cctucacagggagcatacuca

SEQ ID NO: 26273 - DNA, 31 bp, Artificial Sequence
  Synthetic
agaagactctcctugtgacataatatctcut

SEQ ID NO: 26274 - DNA, 30 bp, Artificial Sequence
  Synthetic
gccaagcttgucactttagaatttauacac

SEQ ID NO: 26275 - DNA, 28 bp, Artificial Sequence
  Synthetic
cgtaaccatctucttttcctctcttuct

SEQ ID NO: 26276 - DNA, 21 bp, Artificial Sequence
  Synthetic
gcgatggtgauaagccctgut

SEQ ID NO: 26277 - DNA, 24 bp, Artificial Sequence
  Synthetic
gacatgguggtgaaaagtugagac

SEQ ID NO: 26278 - DNA, 21 bp, Artificial Sequence
  Synthetic
agggaaggtuggcgtgttauc

SEQ ID NO: 26279 - DNA, 30 bp, Artificial Sequence
  Synthetic
ttgttaaactguaagagcaaactctguact

SEQ ID NO: 26280 - DNA, 30 bp, Artificial Sequence
  Synthetic
aagtaataccuacgtgttttagugaagaaa

SEQ ID NO: 26281 - DNA, 27 bp, Artificial Sequence
  Synthetic
gtgcggttgugatcatttacattuaca

SEQ ID NO: 26282 - DNA, 22 bp, Artificial Sequence
  Synthetic
agactgtccgaaauggttgcuc

SEQ ID NO: 26283 - DNA, 26 bp, Artificial Sequence
  Synthetic
gtgaaacuccaaaaagauagcacgac

SEQ ID NO: 26284 - DNA, 24 bp, Artificial Sequence
  Synthetic
tttactggcuccaggagacuaagt

SEQ ID NO: 26285 - DNA, 23 bp, Artificial Sequence
  Synthetic
gctttgttccucagctgaugaag

SEQ ID NO: 26286 - DNA, 31 bp, Artificial Sequence
  Synthetic
tgtctacaaaatactugaacatgatcccaut

SEQ ID NO: 26287 - DNA, 25 bp, Artificial Sequence
  Synthetic
tccaatgtttctuccttgtgtccut

SEQ ID NO: 26288 - DNA, 23 bp, Artificial Sequence
  Synthetic
gcacagagcuctccaagagtauc

SEQ ID NO: 26289 - DNA, 29 bp, Artificial Sequence
  Synthetic
cccctaatgttgacuggaaatatagtgut

SEQ ID NO: 26290 - DNA, 27 bp, Artificial Sequence
  Synthetic
aggtatttacauaccggatcatcugga

SEQ ID NO: 26291 - DNA, 26 bp, Artificial Sequence
  Synthetic
atttctggtgugcagttgataaaaug

SEQ ID NO: 26292 - DNA, 29 bp, Artificial Sequence
  Synthetic
cttcatggtagauaatagtgcccacttut

SEQ ID NO: 26293 - DNA, 27 bp, Artificial Sequence
  Synthetic
gaaaaatgtacugaatgaacgagugct

SEQ ID NO: 26294 - DNA, 31 bp, Artificial Sequence
  Synthetic
cacccagtaauccacattatccttuaaagaa

SEQ ID NO: 26295 - DNA, 20 bp, Artificial Sequence
  Synthetic
gccgcgguttaagagcauga

SEQ ID NO: 26296 - DNA, 22 bp, Artificial Sequence
  Synthetic
caggaagctuctcaccctctuc

SEQ ID NO: 26297 - DNA, 22 bp, Artificial Sequence
  Synthetic
gucccagagcacaaagaugaac

SEQ ID NO: 26298 - DNA, 20 bp, Artificial Sequence
  Synthetic
tctgctctcucccttggcua

SEQ ID NO: 26299 - DNA, 21 bp, Artificial Sequence
  Synthetic
ctguccccaggagagaatugg

SEQ ID NO: 26300 - DNA, 22 bp, Artificial Sequence
  Synthetic
tcacaggattuctggaccccua

SEQ ID NO: 26301 - DNA, 24 bp, Artificial Sequence
  Synthetic
ggtctctgauaccctcaaggguaa

SEQ ID NO: 26302 - DNA, 22 bp, Artificial Sequence
  Synthetic
cccaattcutcgccatugacag

SEQ ID NO: 26303 - DNA, 23 bp, Artificial Sequence
  Synthetic
ctgggtcaaugtcccatuggaat

SEQ ID NO: 26304 - DNA, 24 bp, Artificial Sequence
  Synthetic
caaactcaaguccctcctctctuc

SEQ ID NO: 26305 - DNA, 21 bp, Artificial Sequence
  Synthetic
tcagagccugagatgccuact

SEQ ID NO: 26306 - DNA, 22 bp, Artificial Sequence
  Synthetic
gggtgactgauctctgtccaua

SEQ ID NO: 26307 - DNA, 22 bp, Artificial Sequence
  Synthetic
ccaccuggatgaagaguggaag

SEQ ID NO: 26308 - DNA, 22 bp, Artificial Sequence
  Synthetic
ccttcctgacuggcttcttcug

SEQ ID NO: 26309 - DNA, 22 bp, Artificial Sequence
  Synthetic
ccactccaaaaugccagugagt

SEQ ID NO: 26310 - DNA, 25 bp, Artificial Sequence
  Synthetic
ctatgccaaggugaagatcactcuc

SEQ ID NO: 26311 - DNA, 21 bp, Artificial Sequence
  Synthetic
ccttccctgautgctgagguc

SEQ ID NO: 26312 - DNA, 22 bp, Artificial Sequence
  Synthetic
gcctggcaguaatgacttctug

SEQ ID NO: 26313 - DNA, 26 bp, Artificial Sequence
  Synthetic
gaaaagttcccagauctcatgaguct

SEQ ID NO: 26314 - DNA, 21 bp, Artificial Sequence
  Synthetic
ccgggucaggatcaatgtgut

SEQ ID NO: 26315 - DNA, 27 bp, Artificial Sequence
  Synthetic
gtacagggagaaggcuaagataaaugg

SEQ ID NO: 26316 - DNA, 24 bp, Artificial Sequence
  Synthetic
ctcaagtctgcutacagagggauc

SEQ ID NO: 26317 - DNA, 23 bp, Artificial Sequence
  Synthetic
agcactcaccaucccttacacua

SEQ ID NO: 26318 - DNA, 20 bp, Artificial Sequence
  Synthetic
cccacctutttcccccugaa

SEQ ID NO: 26319 - DNA, 20 bp, Artificial Sequence
  Synthetic
gtggaggaccaggguactug

SEQ ID NO: 26320 - DNA, 18 bp, Artificial Sequence
  Synthetic
aagatugcccgugggcat

SEQ ID NO: 26321 - DNA, 19 bp, Artificial Sequence
  Synthetic
ctgctcugccaccaccuac

SEQ ID NO: 26322 - DNA, 19 bp, Artificial Sequence
  Synthetic
gcacccuggtguacagcat

SEQ ID NO: 26323 - DNA, 18 bp, Artificial Sequence
  Synthetic
cccgcagccuaaggtgug

SEQ ID NO: 26324 - DNA, 22 bp, Artificial Sequence
  Synthetic
gagaagcauccatcccagtguc

SEQ ID NO: 26325 - DNA, 18 bp, Artificial Sequence
  Synthetic
cagcuggtacuccgcgat

SEQ ID NO: 26326 - DNA, 23 bp, Artificial Sequence
  Synthetic
attcattcccuacttggtcuggt

SEQ ID NO: 26327 - DNA, 19 bp, Artificial Sequence
  Synthetic
tcgttguccgtgcagtuca

SEQ ID NO: 26328 - DNA, 19 bp, Artificial Sequence
  Synthetic
ccagcucaggagcagaguc

SEQ ID NO: 26329 - DNA, 18 bp, Artificial Sequence
  Synthetic
gtgcgggacuggtgcaua

SEQ ID NO: 26330 - DNA, 24 bp, Artificial Sequence
  Synthetic
actgtccuggatgtgaaugacaac

SEQ ID NO: 26331 - DNA, 19 bp, Artificial Sequence
  Synthetic
ctctggugccacugagcat

SEQ ID NO: 26332 - DNA, 18 bp, Artificial Sequence
  Synthetic
gggtcugtcccuccacac

SEQ ID NO: 26333 - DNA, 18 bp, Artificial Sequence
  Synthetic
ccgtccugaggucagcac

SEQ ID NO: 26334 - DNA, 22 bp, Artificial Sequence
  Synthetic
ccccacucagttctatcuggga

SEQ ID NO: 26335 - DNA, 24 bp, Artificial Sequence
  Synthetic
cgacacatucatcatgtagcuggt

SEQ ID NO: 26336 - DNA, 22 bp, Artificial Sequence
  Synthetic
ggcactggguactgagattgug

SEQ ID NO: 26337 - DNA, 28 bp, Artificial Sequence
  Synthetic
gacattttaugacaaagaggagagugct

SEQ ID NO: 26338 - DNA, 22 bp, Artificial Sequence
  Synthetic
ctgtaggtcuctgaccacgtuc

SEQ ID NO: 26339 - DNA, 21 bp, Artificial Sequence
  Synthetic
ggtggatccuggctgttucac

SEQ ID NO: 26340 - DNA, 21 bp, Artificial Sequence
  Synthetic
gctttagcccugactccagut

SEQ ID NO: 26341 - DNA, 22 bp, Artificial Sequence
  Synthetic
cccccgtaugtccagctataug

SEQ ID NO: 26342 - DNA, 19 bp, Artificial Sequence
  Synthetic
ccgcaucagcggtgagauc

SEQ ID NO: 26343 - DNA, 25 bp, Artificial Sequence
  Synthetic
ggaattccatuctcacccatctugt

SEQ ID NO: 26344 - DNA, 20 bp, Artificial Sequence
  Synthetic
ccaacggcacagucaccuat

SEQ ID NO: 26345 - DNA, 21 bp, Artificial Sequence
  Synthetic
agactgcauctttgctccauc

SEQ ID NO: 26346 - DNA, 26 bp, Artificial Sequence
  Synthetic
gaggcagaatuatcaggtccattuca

SEQ ID NO: 26347 - DNA, 23 bp, Artificial Sequence
  Synthetic
cagtgactucaaatggtcccuca

SEQ ID NO: 26348 - DNA, 21 bp, Artificial Sequence
  Synthetic
gagugaggcttgcuagaggaa

SEQ ID NO: 26349 - DNA, 22 bp, Artificial Sequence
  Synthetic
ggttguagaaggcgatggtcuc

SEQ ID NO: 26350 - DNA, 19 bp, Artificial Sequence
  Synthetic
cgaacctccucctcggtug

SEQ ID NO: 26351 - DNA, 19 bp, Artificial Sequence
  Synthetic
agggctgtuctcgctgaug

SEQ ID NO: 26352 - DNA, 25 bp, Artificial Sequence
  Synthetic
aaguagaaaguagggaaaaggtcuc

SEQ ID NO: 26353 - DNA, 20 bp, Artificial Sequence
  Synthetic
tctctctccaugcgcctcua

SEQ ID NO: 26354 - DNA, 18 bp, Artificial Sequence
  Synthetic
gggctgggutggtctugt

SEQ ID NO: 26355 - DNA, 20 bp, Artificial Sequence
  Synthetic
ccagaaucaggctgggagug

SEQ ID NO: 26356 - DNA, 24 bp, Artificial Sequence
  Synthetic
ctcatcaccaucctggaugacaat

SEQ ID NO: 26357 - DNA, 20 bp, Artificial Sequence
  Synthetic
gcaaacuccgtguccaacct

SEQ ID NO: 26358 - DNA, 21 bp, Artificial Sequence
  Synthetic
tgttggtaaugccaccaucga

SEQ ID NO: 26359 - DNA, 22 bp, Artificial Sequence
  Synthetic
tggtcaauggccgtgatatugg

SEQ ID NO: 26360 - DNA, 22 bp, Artificial Sequence
  Synthetic
ccugggaagggcagatttuagg

SEQ ID NO: 26361 - DNA, 23 bp, Artificial Sequence
  Synthetic
caatgagagaugtcugcagggaa

SEQ ID NO: 26362 - DNA, 22 bp, Artificial Sequence
  Synthetic
gccctttgggaucacctacuac

SEQ ID NO: 26363 - DNA, 26 bp, Artificial Sequence
  Synthetic
cctcctcugacagatttctaaccuac

SEQ ID NO: 26364 - DNA, 20 bp, Artificial Sequence
  Synthetic
ggactgaccutggcctacuc

SEQ ID NO: 26365 - DNA, 23 bp, Artificial Sequence
  Synthetic
gtccttcccacutccaaatucca

SEQ ID NO: 26366 - DNA, 21 bp, Artificial Sequence
  Synthetic
cctttggccutgacctccauc

SEQ ID NO: 26367 - DNA, 21 bp, Artificial Sequence
  Synthetic
tguccaaggaaggccacauac

SEQ ID NO: 26368 - DNA, 21 bp, Artificial Sequence
  Synthetic
cgagaagutcagtcugaccgt

SEQ ID NO: 26369 - DNA, 23 bp, Artificial Sequence
  Synthetic
gccacagcuggaagaaggaaaua

SEQ ID NO: 26370 - DNA, 25 bp, Artificial Sequence
  Synthetic
agttcttcatcaucgacccaaucag

SEQ ID NO: 26371 - DNA, 21 bp, Artificial Sequence
  Synthetic
agttccccuagggacttucca

SEQ ID NO: 26372 - DNA, 20 bp, Artificial Sequence
  Synthetic
ggccccaugtgatgacaucc

SEQ ID NO: 26373 - DNA, 23 bp, Artificial Sequence
  Synthetic
gtaatcagggcacuagctctguc

SEQ ID NO: 26374 - DNA, 20 bp, Artificial Sequence
  Synthetic
ttcatcgucaaggccuccag

SEQ ID NO: 26375 - DNA, 19 bp, Artificial Sequence
  Synthetic
gcagguggtgtaaguggca

SEQ ID NO: 26376 - DNA, 21 bp, Artificial Sequence
  Synthetic
gcactgagtcuctgagccgua

SEQ ID NO: 26377 - DNA, 26 bp, Artificial Sequence
  Synthetic
gggatctcgutaatgacgatctugac

SEQ ID NO: 26378 - DNA, 21 bp, Artificial Sequence
  Synthetic
cctaaaagaggccugcccauc

SEQ ID NO: 26379 - DNA, 21 bp, Artificial Sequence
  Synthetic
acaggcugacaguccaaacac

SEQ ID NO: 26380 - DNA, 23 bp, Artificial Sequence
  Synthetic
aaggagcagcuacggaatcttut

SEQ ID NO: 26381 - DNA, 20 bp, Artificial Sequence
  Synthetic
aggacgatgaucgccatcug

SEQ ID NO: 26382 - DNA, 18 bp, Artificial Sequence
  Synthetic
gcaccccaucctcccuca

SEQ ID NO: 26383 - DNA, 18 bp, Artificial Sequence
  Synthetic
ctgggagacugcagcuct

SEQ ID NO: 26384 - DNA, 21 bp, Artificial Sequence
  Synthetic
gctccagcuaacatccccuct

SEQ ID NO: 26385 - DNA, 23 bp, Artificial Sequence
  Synthetic
tctctaccacccugtgttctcug

SEQ ID NO: 26386 - DNA, 21 bp, Artificial Sequence
  Synthetic
gcggcucaaaaagctcttugc

SEQ ID NO: 26387 - DNA, 25 bp, Artificial Sequence
  Synthetic
agagcuccagagacauagagaagga

SEQ ID NO: 26388 - DNA, 17 bp, Artificial Sequence
  Synthetic
cuggccaccgaccucaa

SEQ ID NO: 26389 - DNA, 22 bp, Artificial Sequence
  Synthetic
cacaaggctuccctgtctaguc

SEQ ID NO: 26390 - DNA, 19 bp, Artificial Sequence
  Synthetic
ggccguaggcagccuaaat

SEQ ID NO: 26391 - DNA, 18 bp, Artificial Sequence
  Synthetic
cucggauacgcggcagat

SEQ ID NO: 26392 - DNA, 23 bp, Artificial Sequence
  Synthetic
aaatgguaaggaagggcacauca

SEQ ID NO: 26393 - DNA, 28 bp, Artificial Sequence
  Synthetic
gtcttgtacatuttggctagttttuccc

SEQ ID NO: 26394 - DNA, 28 bp, Artificial Sequence
  Synthetic
ccagagtggugggtaatgattttaaugt

SEQ ID NO: 26395 - DNA, 30 bp, Artificial Sequence
  Synthetic
attttccttaaugaactataccttttugcc

SEQ ID NO: 26396 - DNA, 30 bp, Artificial Sequence
  Synthetic
ctaataattgttgugcatgagtgttacuac

SEQ ID NO: 26397 - DNA, 25 bp, Artificial Sequence
  Synthetic
agtcccaggaaacugcaaatacaut

SEQ ID NO: 26398 - DNA, 20 bp, Artificial Sequence
  Synthetic
cgtguggacatguggcagat

SEQ ID NO: 26399 - DNA, 20 bp, Artificial Sequence
  Synthetic
gcttcuggcaaguggaggac

SEQ ID NO: 26400 - DNA, 20 bp, Artificial Sequence
  Synthetic
ctctctgguctgggccacua

SEQ ID NO: 26401 - DNA, 20 bp, Artificial Sequence
  Synthetic
gggagguctttggcattugg

SEQ ID NO: 26402 - DNA, 29 bp, Artificial Sequence
  Synthetic
tgaacaatgccucagctatacattuacat

SEQ ID NO: 26403 - DNA, 25 bp, Artificial Sequence
  Synthetic
ggcctaactautcaaacagggauga

SEQ ID NO: 26404 - DNA, 23 bp, Artificial Sequence
  Synthetic
actgggaugaaatcagacuccga

SEQ ID NO: 26405 - DNA, 26 bp, Artificial Sequence
  Synthetic
tcctaactctuaagaagggctgcaua

SEQ ID NO: 26406 - DNA, 28 bp, Artificial Sequence
  Synthetic
actcttcutttaggattcuccaaaagcc

SEQ ID NO: 26407 - DNA, 27 bp, Artificial Sequence
  Synthetic
tcaattctagguagcctggttactgua

SEQ ID NO: 26408 - DNA, 29 bp, Artificial Sequence
  Synthetic
tttctgagggaaggauaatggtauagaga

SEQ ID NO: 26409 - DNA, 28 bp, Artificial Sequence
  Synthetic
ggaataaatgcutcatcctgtuccaaat

SEQ ID NO: 26410 - DNA, 24 bp, Artificial Sequence
  Synthetic
tgggtacaccaugctttttgauga

SEQ ID NO: 26411 - DNA, 26 bp, Artificial Sequence
  Synthetic
catacttctccauatcggccttuacc

SEQ ID NO: 26412 - DNA, 26 bp, Artificial Sequence
  Synthetic
aatgagcattactuctccctagccua

SEQ ID NO: 26413 - DNA, 26 bp, Artificial Sequence
  Synthetic
gcagctgaauaagccaattuaagcag

SEQ ID NO: 26414 - DNA, 23 bp, Artificial Sequence
  Synthetic
tcaacttggaccutggctttcut

SEQ ID NO: 26415 - DNA, 24 bp, Artificial Sequence
  Synthetic
cagaaacuactcaaacucccacct

SEQ ID NO: 26416 - DNA, 24 bp, Artificial Sequence
  Synthetic
agtccccugaagaagtgattcgua

SEQ ID NO: 26417 - DNA, 27 bp, Artificial Sequence
  Synthetic
ctagagtttcucctccgatggttuaac

SEQ ID NO: 26418 - DNA, 17 bp, Artificial Sequence
  Synthetic
gcaggcccucctcgtua

SEQ ID NO: 26419 - DNA, 17 bp, Artificial Sequence
  Synthetic
cgaugggcgcguagagc

SEQ ID NO: 26420 - DNA, 17 bp, Artificial Sequence
  Synthetic
cuagacccgcgcgtcuc

SEQ ID NO: 26421 - DNA, 20 bp, Artificial Sequence
  Synthetic
ctcucaggaagcacctucgt

SEQ ID NO: 26422 - DNA, 18 bp, Artificial Sequence
  Synthetic
ccacuccccaggtgcauc

SEQ ID NO: 26423 - DNA, 19 bp, Artificial Sequence
  Synthetic
catgacauccagccaugcc

SEQ ID NO: 26424 - DNA, 18 bp, Artificial Sequence
  Synthetic
ggctguggcgaucacgaa

SEQ ID NO: 26425 - DNA, 21 bp, Artificial Sequence
  Synthetic
gcatcugagcaaggtggaugg

SEQ ID NO: 26426 - DNA, 22 bp, Artificial Sequence
  Synthetic
acactgtgtgutttctggccua

SEQ ID NO: 26427 - DNA, 22 bp, Artificial Sequence
  Synthetic
tgcctggaaguttccgactuac

SEQ ID NO: 26428 - DNA, 19 bp, Artificial Sequence
  Synthetic
gaccgguaaccacgtccug

SEQ ID NO: 26429 - DNA, 28 bp, Artificial Sequence
  Synthetic
acaataacagugaccaaaatgacaguga

SEQ ID NO: 26430 - DNA, 21 bp, Artificial Sequence
  Synthetic
cgatguccaggaaccgcuaat

SEQ ID NO: 26431 - DNA, 22 bp, Artificial Sequence
  Synthetic
catagccgucgacagagaagug

SEQ ID NO: 26432 - DNA, 19 bp, Artificial Sequence
  Synthetic
ggaggccuaacgtgctguc

SEQ ID NO: 26433 - DNA, 20 bp, Artificial Sequence
  Synthetic
gactcctugagctccagucc

SEQ ID NO: 26434 - DNA, 21 bp, Artificial Sequence
  Synthetic
gaggagaagugatgcgtguct

SEQ ID NO: 26435 - DNA, 17 bp, Artificial Sequence
  Synthetic
gcaccgcugatcaugca

SEQ ID NO: 26436 - DNA, 20 bp, Artificial Sequence
  Synthetic
cagcactuggccctgattug

SEQ ID NO: 26437 - DNA, 19 bp, Artificial Sequence
  Synthetic
cctgcaggagcutcacgut

SEQ ID NO: 26438 - DNA, 22 bp, Artificial Sequence
  Synthetic
actcaucaccgacatgctucac

SEQ ID NO: 26439 - DNA, 20 bp, Artificial Sequence
  Synthetic
cctccucaggacccctcauc

SEQ ID NO: 26440 - DNA, 23 bp, Artificial Sequence
  Synthetic
tttaaatgcacugaccucccaca

SEQ ID NO: 26441 - DNA, 22 bp, Artificial Sequence
  Synthetic
cctggcccacaaguatcacuaa

SEQ ID NO: 26442 - DNA, 25 bp, Artificial Sequence
  Synthetic
tgtaccctgtuacttatcccctucc

SEQ ID NO: 26443 - DNA, 22 bp, Artificial Sequence
  Synthetic
ctaaggugaaggctcauggcaa

SEQ ID NO: 26444 - DNA, 24 bp, Artificial Sequence
  Synthetic
acatgcccaguttctattggtcuc

SEQ ID NO: 26445 - DNA, 23 bp, Artificial Sequence
  Synthetic
cauaaaagucagggcagagccat

SEQ ID NO: 26446 - DNA, 18 bp, Artificial Sequence
  Synthetic
gucugcacggacgaagga

SEQ ID NO: 26447 - DNA, 17 bp, Artificial Sequence
  Synthetic
cccugcccagcaucgag

SEQ ID NO: 26448 - DNA, 21 bp, Artificial Sequence
  Synthetic
cctagcaucccacuaaaccct

SEQ ID NO: 26449 - DNA, 18 bp, Artificial Sequence
  Synthetic
catcuccccgggctgtut

SEQ ID NO: 26450 - DNA, 17 bp, Artificial Sequence
  Synthetic
cggatggugccgcugaa

SEQ ID NO: 26451 - DNA, 19 bp, Artificial Sequence
  Synthetic
ctcacugggacccaugcag

SEQ ID NO: 26452 - DNA, 18 bp, Artificial Sequence
  Synthetic
cgcctgucctgcagcaut

SEQ ID NO: 26453 - DNA, 20 bp, Artificial Sequence
  Synthetic
ggauactagctguggcccat

SEQ ID NO: 26454 - DNA, 18 bp, Artificial Sequence
  Synthetic
gggagtgcuggtgtcuga

SEQ ID NO: 26455 - DNA, 20 bp, Artificial Sequence
  Synthetic
ctgtggcuctaaccccugag

SEQ ID NO: 26456 - DNA, 21 bp, Artificial Sequence
  Synthetic
cccctgtuccactcctaccut

SEQ ID NO: 26457 - DNA, 25 bp, Artificial Sequence
  Synthetic
ctcttaactgutccactctgtuccc

SEQ ID NO: 26458 - DNA, 22 bp, Artificial Sequence
  Synthetic
tggatgaaguagcacacgaugg

SEQ ID NO: 26459 - DNA, 26 bp, Artificial Sequence
  Synthetic
agcactcuaaacacagtcaauaccaa

SEQ ID NO: 26460 - DNA, 25 bp, Artificial Sequence
  Synthetic
ctaaggcucagagaacagtgactug

SEQ ID NO: 26461 - DNA, 20 bp, Artificial Sequence
  Synthetic
cacgtcugtcactguggagt

SEQ ID NO: 26462 - DNA, 19 bp, Artificial Sequence
  Synthetic
cacucccaacctcugccat

SEQ ID NO: 26463 - DNA, 17 bp, Artificial Sequence
  Synthetic
cgagccugcgccaagua

SEQ ID NO: 26464 - DNA, 21 bp, Artificial Sequence
  Synthetic
tctctguggctgaucagacct

SEQ ID NO: 26465 - DNA, 28 bp, Artificial Sequence
  Synthetic
ccaccaaccatauatcctgaagacatug

SEQ ID NO: 26466 - DNA, 19 bp, Artificial Sequence
  Synthetic
ctgcccccuatagccugac

SEQ ID NO: 26467 - DNA, 23 bp, Artificial Sequence
  Synthetic
tccctacccuctactctctucct

SEQ ID NO: 26468 - DNA, 21 bp, Artificial Sequence
  Synthetic
ccccucagaggctgctacuaa

SEQ ID NO: 26469 - DNA, 20 bp, Artificial Sequence
  Synthetic
ccaactcugaccaggcugac

SEQ ID NO: 26470 - DNA, 19 bp, Artificial Sequence
  Synthetic
cacccuggagggagtugac

SEQ ID NO: 26471 - DNA, 23 bp, Artificial Sequence
  Synthetic
gagagctcaguatgcctttccuc

SEQ ID NO: 26472 - DNA, 24 bp, Artificial Sequence
  Synthetic
tgaggaggauggtuaaaaggagat

SEQ ID NO: 26473 - DNA, 22 bp, Artificial Sequence
  Synthetic
gggtaatggutgttcagacucc

SEQ ID NO: 26474 - DNA, 19 bp, Artificial Sequence
  Synthetic
cctctgggagutggtgcug

SEQ ID NO: 26475 - DNA, 20 bp, Artificial Sequence
  Synthetic
agtgggucctcaccuccaaa

SEQ ID NO: 26476 - DNA, 18 bp, Artificial Sequence
  Synthetic
agcctugaggcugacaca

SEQ ID NO: 26477 - DNA, 20 bp, Artificial Sequence
  Synthetic
tcacttgugcctctguccac

SEQ ID NO: 26478 - DNA, 19 bp, Artificial Sequence
  Synthetic
tccutgcatguacgcagca

SEQ ID NO: 26479 - DNA, 23 bp, Artificial Sequence
  Synthetic
agtattccaaugagcggcugaag

SEQ ID NO: 26480 - DNA, 20 bp, Artificial Sequence
  Synthetic
acacacaccuttgggcacuc

SEQ ID NO: 26481 - DNA, 20 bp, Artificial Sequence
  Synthetic
agggcaaccaucaggucaaa

SEQ ID NO: 26482 - DNA, 32 bp, Artificial Sequence
  Synthetic
atggacattattccuaataatggttcttaugg

SEQ ID NO: 26483 - DNA, 26 bp, Artificial Sequence
  Synthetic
catttctgcaagcaucctactatgug

SEQ ID NO: 26484 - DNA, 27 bp, Artificial Sequence
  Synthetic
tctcagaaacaacugaaaaccatcuag

SEQ ID NO: 26485 - DNA, 21 bp, Artificial Sequence
  Synthetic
actgtgcauctttgggaucgt

SEQ ID NO: 26486 - DNA, 23 bp, Artificial Sequence
  Synthetic
ctctcugtgacccuaaaccagaa

SEQ ID NO: 26487 - DNA, 21 bp, Artificial Sequence
  Synthetic
ccttcgugaatctgctgucca

SEQ ID NO: 26488 - DNA, 17 bp, Artificial Sequence
  Synthetic
ggccagagccuctgcut

SEQ ID NO: 26489 - DNA, 25 bp, Artificial Sequence
  Synthetic
atcaccaagaccaucaagtttguca

SEQ ID NO: 26490 - DNA, 21 bp, Artificial Sequence
  Synthetic
ctccctccuacacctcaccua

SEQ ID NO: 26491 - DNA, 23 bp, Artificial Sequence
  Synthetic
tcctgtcugtttctctcucccat

SEQ ID NO: 26492 - DNA, 18 bp, Artificial Sequence
  Synthetic
gcctccucctcccuccct

SEQ ID NO: 26493 - DNA, 20 bp, Artificial Sequence
  Synthetic
tcaacaacggcugctttgug

SEQ ID NO: 26494 - DNA, 17 bp, Artificial Sequence
  Synthetic
aagaguggcccgagcug

SEQ ID NO: 26495 - DNA, 25 bp, Artificial Sequence
  Synthetic
ggacctucttctgaaguccaaaagg

SEQ ID NO: 26496 - DNA, 18 bp, Artificial Sequence
  Synthetic
agcagauggccacugcaa

SEQ ID NO: 26497 - DNA, 24 bp, Artificial Sequence
  Synthetic
gttttgtgttucttgctctgcuct

SEQ ID NO: 26498 - DNA, 23 bp, Artificial Sequence
  Synthetic
tgaggcaucctattgugagacct

SEQ ID NO: 26499 - DNA, 21 bp, Artificial Sequence
  Synthetic
gttggccaaucagcctcauct

SEQ ID NO: 26500 - DNA, 22 bp, Artificial Sequence
  Synthetic
cccaggagugaccttgagagua

SEQ ID NO: 26501 - DNA, 25 bp, Artificial Sequence
  Synthetic
ctcaaagctucccactgtcttttuc

SEQ ID NO: 26502 - DNA, 25 bp, Artificial Sequence
  Synthetic
aggtacucccagagagaaagaagug

SEQ ID NO: 26503 - DNA, 29 bp, Artificial Sequence
  Synthetic
ctattggtaacauccaatgtggaacttut

SEQ ID NO: 26504 - DNA, 22 bp, Artificial Sequence
  Synthetic
ggacaugggaaacagcagtuct

SEQ ID NO: 26505 - DNA, 22 bp, Artificial Sequence
  Synthetic
gaagaagcacugagcaaccauc

SEQ ID NO: 26506 - DNA, 20 bp, Artificial Sequence
  Synthetic
ctgcacccauggagaggaug

SEQ ID NO: 26507 - DNA, 19 bp, Artificial Sequence
  Synthetic
acaccacugaccuggacga

SEQ ID NO: 26508 - DNA, 22 bp, Artificial Sequence
  Synthetic
agcaggaggguctatguggaaa

SEQ ID NO: 26509 - DNA, 23 bp, Artificial Sequence
  Synthetic
ttcaaatgugccctttgtccuct

SEQ ID NO: 26510 - DNA, 26 bp, Artificial Sequence
  Synthetic
tcacaccauttagtgttgauaggaca

SEQ ID NO: 26511 - DNA, 26 bp, Artificial Sequence
  Synthetic
gctgaactgtguctcatcattttgut

SEQ ID NO: 26512 - DNA, 23 bp, Artificial Sequence
  Synthetic
gggccagcauttctgactagtuc

SEQ ID NO: 26513 - DNA, 23 bp, Artificial Sequence
  Synthetic
gttcugactccaguaacaggcat

SEQ ID NO: 26514 - DNA, 17 bp, Artificial Sequence
  Synthetic
ggctggcugcacucact

SEQ ID NO: 26515 - DNA, 20 bp, Artificial Sequence
  Synthetic
gggcctcutttctcccauga

SEQ ID NO: 26516 - DNA, 20 bp, Artificial Sequence
  Synthetic
guggagaugacaagggccaa

SEQ ID NO: 26517 - DNA, 19 bp, Artificial Sequence
  Synthetic
ctgtccugcagaugagcga

SEQ ID NO: 26518 - DNA, 21 bp, Artificial Sequence
  Synthetic
gcaaggttucctcggaagugg

SEQ ID NO: 26519 - DNA, 28 bp, Artificial Sequence
  Synthetic
cgtgattctgcutctatctctcttucag

SEQ ID NO: 26520 - DNA, 20 bp, Artificial Sequence
  Synthetic
cctcccaccgucatggagua

SEQ ID NO: 26521 - DNA, 21 bp, Artificial Sequence
  Synthetic
ctgcctcuctctgtggucaag

SEQ ID NO: 26522 - DNA, 18 bp, Artificial Sequence
  Synthetic
cgcccagggugatctcuc

SEQ ID NO: 26523 - DNA, 19 bp, Artificial Sequence
  Synthetic
gcatucccggcatcuccac

SEQ ID NO: 26524 - DNA, 17 bp, Artificial Sequence
  Synthetic
ggtguccacccccuacc

SEQ ID NO: 26525 - DNA, 18 bp, Artificial Sequence
  Synthetic
cggctcuttccagcucct

SEQ ID NO: 26526 - DNA, 28 bp, Artificial Sequence
  Synthetic
tgtaaatcatagugtgagatacagcugc

SEQ ID NO: 26527 - DNA, 26 bp, Artificial Sequence
  Synthetic
acaacccagugaagagttctaccaua

SEQ ID NO: 26528 - DNA, 28 bp, Artificial Sequence
  Synthetic
caagatggccutcatggatuagaaaaag

SEQ ID NO: 26529 - DNA, 26 bp, Artificial Sequence
  Synthetic
aatttctcautctgtgguacaaccca

SEQ ID NO: 26530 - DNA, 20 bp, Artificial Sequence
  Synthetic
gctguggaacacccagguaa

SEQ ID NO: 26531 - DNA, 28 bp, Artificial Sequence
  Synthetic
agcttctgccgutaactaggttaauaaa

SEQ ID NO: 26532 - DNA, 20 bp, Artificial Sequence
  Synthetic
ggacggaucacaaggucagg

SEQ ID NO: 26533 - DNA, 21 bp, Artificial Sequence
  Synthetic
tgtgatcacugctcagugcaa

SEQ ID NO: 26534 - DNA, 24 bp, Artificial Sequence
  Synthetic
tgctttaaacauttgtctgugcgt

SEQ ID NO: 26535 - DNA, 24 bp, Artificial Sequence
  Synthetic
ggtttgaaaagcugttggcctauc

SEQ ID NO: 26536 - DNA, 28 bp, Artificial Sequence
  Synthetic
gctgctttttctutaaacggtacacaua

SEQ ID NO: 26537 - DNA, 22 bp, Artificial Sequence
  Synthetic
ctggcatguagtgtcacggaut

SEQ ID NO: 26538 - DNA, 24 bp, Artificial Sequence
  Synthetic
cagatgcuaagaccaggtactuca

SEQ ID NO: 26539 - DNA, 24 bp, Artificial Sequence
  Synthetic
aacgtttgcacuatgacctucaga

SEQ ID NO: 26540 - DNA, 22 bp, Artificial Sequence
  Synthetic
gcagcaaagacutccgaatucc

SEQ ID NO: 26541 - DNA, 21 bp, Artificial Sequence
  Synthetic
cgcttgccucagaacaactuc

SEQ ID NO: 26542 - DNA, 24 bp, Artificial Sequence
  Synthetic
catcagagagucctcctggagaut

SEQ ID NO: 26543 - DNA, 20 bp, Artificial Sequence
  Synthetic
gggaugcagctcgtuaccac

SEQ ID NO: 26544 - DNA, 18 bp, Artificial Sequence
  Synthetic
cuccagagccgugcgaat

SEQ ID NO: 26545 - DNA, 19 bp, Artificial Sequence
  Synthetic
gagagucgccgtcuccaag

SEQ ID NO: 26546 - DNA, 31 bp, Artificial Sequence
  Synthetic
cccatagtcacugactgaattaacacaauat

SEQ ID NO: 26547 - DNA, 28 bp, Artificial Sequence
  Synthetic
ccatgtctgttuctcaaagggaatauct

SEQ ID NO: 26548 - DNA, 21 bp, Artificial Sequence
  Synthetic
cctgagccacucctcactuct

SEQ ID NO: 26549 - DNA, 26 bp, Artificial Sequence
  Synthetic
ctctgactacugtcatttctctugcc

SEQ ID NO: 26550 - DNA, 24 bp, Artificial Sequence
  Synthetic
agtactctguacaagcacctcugt

SEQ ID NO: 26551 - DNA, 30 bp, Artificial Sequence
  Synthetic
ggcacaatatggaaaaucaacttactctut

SEQ ID NO: 26552 - DNA, 21 bp, Artificial Sequence
  Synthetic
tcagctgaagucgcattugag

SEQ ID NO: 26553 - DNA, 26 bp, Artificial Sequence
  Synthetic
gctcttggaguttaagacuacaccag

SEQ ID NO: 26554 - DNA, 24 bp, Artificial Sequence
  Synthetic
acacagacuaagagacaguggaga

SEQ ID NO: 26555 - DNA, 24 bp, Artificial Sequence
  Synthetic
gcgacuccagaagttguaagcaaa

SEQ ID NO: 26556 - DNA, 25 bp, Artificial Sequence
  Synthetic
gggaaguggacagaaaaccacatua

SEQ ID NO: 26557 - DNA, 29 bp, Artificial Sequence
  Synthetic
gctctctacaguaagttctcataccatug

SEQ ID NO: 26558 - DNA, 17 bp, Artificial Sequence
  Synthetic
cgtcgcgaguccctgug

SEQ ID NO: 26559 - DNA, 29 bp, Artificial Sequence
  Synthetic
ccgaggattaacucctattttcttgcuaa

SEQ ID NO: 26560 - DNA, 24 bp, Artificial Sequence
  Synthetic
acttgaaagcagutcacacacugt

SEQ ID NO: 26561 - DNA, 24 bp, Artificial Sequence
  Synthetic
tgtctctttgutgcaagtgtcuct

SEQ ID NO: 26562 - DNA, 29 bp, Artificial Sequence
  Synthetic
aacaacaaagagaaucatgaaaucaaccc

SEQ ID NO: 26563 - DNA, 25 bp, Artificial Sequence
  Synthetic
gcctttaaugagatcccctttucca

SEQ ID NO: 26564 - DNA, 22 bp, Artificial Sequence
  Synthetic
agggccaaagaguccatcagua

SEQ ID NO: 26565 - DNA, 24 bp, Artificial Sequence
  Synthetic
actgagcctutttcccttcttugt

SEQ ID NO: 26566 - DNA, 27 bp, Artificial Sequence
  Synthetic
agttctaagcaccuttgaaatggtuca

SEQ ID NO: 26567 - DNA, 27 bp, Artificial Sequence
  Synthetic
ccattgctttugaagaaacagttgugt

SEQ ID NO: 26568 - DNA, 21 bp, Artificial Sequence
  Synthetic
gggagaaggacuccactuggt

SEQ ID NO: 26569 - DNA, 21 bp, Artificial Sequence
  Synthetic
cgctgacacugtgcttctcuc

SEQ ID NO: 26570 - DNA, 20 bp, Artificial Sequence
  Synthetic
agugaacuggccggaaaagt

SEQ ID NO: 26571 - DNA, 19 bp, Artificial Sequence
  Synthetic
cttcggctuacgggtcgut

SEQ ID NO: 26572 - DNA, 17 bp, Artificial Sequence
  Synthetic
gcugctguaggcaccca

SEQ ID NO: 26573 - DNA, 17 bp, Artificial Sequence
  Synthetic
gtccgcucccccactuc

SEQ ID NO: 26574 - DNA, 18 bp, Artificial Sequence
  Synthetic
cgctctucccatcuccca

SEQ ID NO: 26575 - DNA, 18 bp, Artificial Sequence
  Synthetic
ccgctuccgcatgtucag

SEQ ID NO: 26576 - DNA, 20 bp, Artificial Sequence
  Synthetic
ccagcgccuaaagttcccua

SEQ ID NO: 26577 - DNA, 22 bp, Artificial Sequence
  Synthetic
gtaccaagucctgucaccaaca

SEQ ID NO: 26578 - DNA, 17 bp, Artificial Sequence
  Synthetic
cccagacccugggcuca

SEQ ID NO: 26579 - DNA, 18 bp, Artificial Sequence
  Synthetic
tgacccccugctcacugt

SEQ ID NO: 26580 - DNA, 22 bp, Artificial Sequence
  Synthetic
tgtcctccaugttctcaaugcg

SEQ ID NO: 26581 - DNA, 24 bp, Artificial Sequence
  Synthetic
caggttcagggutaagctttucct

SEQ ID NO: 26582 - DNA, 19 bp, Artificial Sequence
  Synthetic
gtcaauggcgggtcttgug

SEQ ID NO: 26583 - DNA, 23 bp, Artificial Sequence
  Synthetic
cacacaucgatactggugaagga

SEQ ID NO: 26584 - DNA, 21 bp, Artificial Sequence
  Synthetic
tcaatggcaaggugagcaugt

SEQ ID NO: 26585 - DNA, 20 bp, Artificial Sequence
  Synthetic
gctcagaccccuctcugacc

SEQ ID NO: 26586 - DNA, 19 bp, Artificial Sequence
  Synthetic
cgtagacgcgcauctcgua

SEQ ID NO: 26587 - DNA, 21 bp, Artificial Sequence
  Synthetic
aaacagauccgagggaaggug

SEQ ID NO: 26588 - DNA, 21 bp, Artificial Sequence
  Synthetic
cgtgatguttgtcgaguggct

SEQ ID NO: 26589 - DNA, 21 bp, Artificial Sequence
  Synthetic
ggaagaugagggcgtcuacac

SEQ ID NO: 26590 - DNA, 19 bp, Artificial Sequence
  Synthetic
tcggcaccacguagguaga

SEQ ID NO: 26591 - DNA, 20 bp, Artificial Sequence
  Synthetic
gtcagctccuctgctcccua

SEQ ID NO: 26592 - DNA, 24 bp, Artificial Sequence
  Synthetic
ttttgatcctugctcttccctcug

SEQ ID NO: 26593 - DNA, 18 bp, Artificial Sequence
  Synthetic
ctccaggguagggugggt

SEQ ID NO: 26594 - DNA, 17 bp, Artificial Sequence
  Synthetic
catccaccugcccugca

SEQ ID NO: 26595 - DNA, 18 bp, Artificial Sequence
  Synthetic
acacccucccgagcucaa

SEQ ID NO: 26596 - DNA, 24 bp, Artificial Sequence
  Synthetic
gttgatgatcagguggtgtctcug

SEQ ID NO: 26597 - DNA, 25 bp, Artificial Sequence
  Synthetic
gcaagtcaaauggtgagtuccagaa

SEQ ID NO: 26598 - DNA, 19 bp, Artificial Sequence
  Synthetic
catctccuccccaggtucc

SEQ ID NO: 26599 - DNA, 18 bp, Artificial Sequence
  Synthetic
ggtguccgcagcttucct

SEQ ID NO: 26600 - DNA, 24 bp, Artificial Sequence
  Synthetic
cattcttgagccauttgaccucag

SEQ ID NO: 26601 - DNA, 19 bp, Artificial Sequence
  Synthetic
ccacagccacaguagctug

SEQ ID NO: 26602 - DNA, 20 bp, Artificial Sequence
  Synthetic
ggctccuggcagaatuaggg

SEQ ID NO: 26603 - DNA, 21 bp, Artificial Sequence
  Synthetic
aggaaguaaaggcccaugggt

SEQ ID NO: 26604 - DNA, 19 bp, Artificial Sequence
  Synthetic
gaacugccacccaggacuc

SEQ ID NO: 26605 - DNA, 21 bp, Artificial Sequence
  Synthetic
ggctagtguccctttcuccct

SEQ ID NO: 26606 - DNA, 21 bp, Artificial Sequence
  Synthetic
acgaggcaucctccttagugt

SEQ ID NO: 26607 - DNA, 19 bp, Artificial Sequence
  Synthetic
cguccctccaugcacacag

SEQ ID NO: 26608 - DNA, 18 bp, Artificial Sequence
  Synthetic
cccctucccaccccaaug

SEQ ID NO: 26609 - DNA, 30 bp, Artificial Sequence
  Synthetic
caagacuccatcucaaacaaacagaaaaag

SEQ ID NO: 26610 - DNA, 20 bp, Artificial Sequence
  Synthetic
caaaccucagggaaggcuga

SEQ ID NO: 26611 - DNA, 18 bp, Artificial Sequence
  Synthetic
cgggcaggagugaaggug

SEQ ID NO: 26612 - DNA, 20 bp, Artificial Sequence
  Synthetic
tcctcgucaacccccucaag

SEQ ID NO: 26613 - DNA, 25 bp, Artificial Sequence
  Synthetic
cccauatatagugggaaggacagga

SEQ ID NO: 26614 - DNA, 21 bp, Artificial Sequence
  Synthetic
ccuagagugccccgaagagat

SEQ ID NO: 26615 - DNA, 20 bp, Artificial Sequence
  Synthetic
cacgtugtgaggtuccacga

SEQ ID NO: 26616 - DNA, 21 bp, Artificial Sequence
  Synthetic
ctcatgacgugagtaggcuca

SEQ ID NO: 26617 - DNA, 20 bp, Artificial Sequence
  Synthetic
ctggcctaugctcacctucc

SEQ ID NO: 26618 - DNA, 22 bp, Artificial Sequence
  Synthetic
gggatggaaucaggctgtauca

SEQ ID NO: 26619 - DNA, 19 bp, Artificial Sequence
  Synthetic
ggtgguggcagaggaguag

SEQ ID NO: 26620 - DNA, 20 bp, Artificial Sequence
  Synthetic
ctcauggcccggtactucag

SEQ ID NO: 26621 - DNA, 20 bp, Artificial Sequence
  Synthetic
cctgccccuacctgctgtua

SEQ ID NO: 26622 - DNA, 23 bp, Artificial Sequence
  Synthetic
gtcatcattgutgtgggcauagc

SEQ ID NO: 26623 - DNA, 23 bp, Artificial Sequence
  Synthetic
tgcgagttucacaagaccatcuc

SEQ ID NO: 26624 - DNA, 18 bp, Artificial Sequence
  Synthetic
cagccugacccucgaacg

SEQ ID NO: 26625 - DNA, 22 bp, Artificial Sequence
  Synthetic
tguaccaguccaaccagacaga

SEQ ID NO: 26626 - DNA, 21 bp, Artificial Sequence
  Synthetic
ccaatcggugtccctctcuac

SEQ ID NO: 26627 - DNA, 18 bp, Artificial Sequence
  Synthetic
cagcccugccagcttuac

SEQ ID NO: 26628 - DNA, 17 bp, Artificial Sequence
  Synthetic
cctccugcccaggctuc

SEQ ID NO: 26629 - DNA, 17 bp, Artificial Sequence
  Synthetic
cugcgcaggaugagcac

SEQ ID NO: 26630 - DNA, 22 bp, Artificial Sequence
  Synthetic
caaaggagtgcugaggttccua

SEQ ID NO: 26631 - DNA, 22 bp, Artificial Sequence
  Synthetic
cautgacaggtuggcaaaccac

SEQ ID NO: 26632 - DNA, 21 bp, Artificial Sequence
  Synthetic
gcccuggtaccuggagaagag

SEQ ID NO: 26633 - DNA, 24 bp, Artificial Sequence
  Synthetic
ttctagccucagttucccaaaagg

SEQ ID NO: 26634 - DNA, 20 bp, Artificial Sequence
  Synthetic
catgagcuggacctcgtugt

SEQ ID NO: 26635 - DNA, 22 bp, Artificial Sequence
  Synthetic
gagacctucctttccugacact

SEQ ID NO: 26636 - DNA, 23 bp, Artificial Sequence
  Synthetic
gagagggagagautccuccaagt

SEQ ID NO: 26637 - DNA, 24 bp, Artificial Sequence
  Synthetic
ctcgggcttautccagtacatguc

SEQ ID NO: 26638 - DNA, 21 bp, Artificial Sequence
  Synthetic
aagtaaggccaggugttgguc

SEQ ID NO: 26639 - DNA, 25 bp, Artificial Sequence
  Synthetic
ccacagtagttuggtccttgagtut

SEQ ID NO: 26640 - DNA, 20 bp, Artificial Sequence
  Synthetic
tgtggacgccutcaagtcug

SEQ ID NO: 26641 - DNA, 27 bp, Artificial Sequence
  Synthetic
ccagaactcacaguctttaagctttug

SEQ ID NO: 26642 - DNA, 24 bp, Artificial Sequence
  Synthetic
agatccccgaaaaucaccucaaag

SEQ ID NO: 26643 - DNA, 23 bp, Artificial Sequence
  Synthetic
cccuaggaaattguggaggaagg

SEQ ID NO: 26644 - DNA, 21 bp, Artificial Sequence
  Synthetic
gggaccaggugaaggaagaug

SEQ ID NO: 26645 - DNA, 18 bp, Artificial Sequence
  Synthetic
cctgccacccuttccugt

SEQ ID NO: 26646 - DNA, 24 bp, Artificial Sequence
  Synthetic
ctcactagggaugaagcacatucc

SEQ ID NO: 26647 - DNA, 30 bp, Artificial Sequence
  Synthetic
tgaataaaaggcautaaaggctgaaguagt

SEQ ID NO: 26648 - DNA, 19 bp, Artificial Sequence
  Synthetic
cccacagggcutctcccua

SEQ ID NO: 26649 - DNA, 22 bp, Artificial Sequence
  Synthetic
cctgctgcccuacttctacauc

SEQ ID NO: 26650 - DNA, 18 bp, Artificial Sequence
  Synthetic
cccaucggcggatgtgua

SEQ ID NO: 26651 - DNA, 17 bp, Artificial Sequence
  Synthetic
accgctugacccctucc

SEQ ID NO: 26652 - DNA, 19 bp, Artificial Sequence
  Synthetic
gguaccacccgaagtgguc

SEQ ID NO: 26653 - DNA, 20 bp, Artificial Sequence
  Synthetic
gcatctgcguggagtgugat

SEQ ID NO: 26654 - DNA, 21 bp, Artificial Sequence
  Synthetic
gacaggtugatgaggguccag

SEQ ID NO: 26655 - DNA, 21 bp, Artificial Sequence
  Synthetic
ctgggcuctcgctaaguaagg

SEQ ID NO: 26656 - DNA, 20 bp, Artificial Sequence
  Synthetic
agacggcauagccaaggaug

SEQ ID NO: 26657 - DNA, 22 bp, Artificial Sequence
  Synthetic
ggaaagcgccutcatttcugaa

SEQ ID NO: 26658 - DNA, 19 bp, Artificial Sequence
  Synthetic
ccaccugctgtgucccaac

SEQ ID NO: 26659 - DNA, 23 bp, Artificial Sequence
  Synthetic
cccccttcaucgtctactactuc

SEQ ID NO: 26660 - DNA, 24 bp, Artificial Sequence
  Synthetic
gtccttcattccuttgggtccaua

SEQ ID NO: 26661 - DNA, 25 bp, Artificial Sequence
  Synthetic
gtaagcaaggutctctttctugcag

SEQ ID NO: 26662 - DNA, 22 bp, Artificial Sequence
  Synthetic
ctgagactcuctctcgcccaua

SEQ ID NO: 26663 - DNA, 24 bp, Artificial Sequence
  Synthetic
ctttcgatcauctccctgcaucaa

SEQ ID NO: 26664 - DNA, 23 bp, Artificial Sequence
  Synthetic
agagcccaagagcuttcuagagt

SEQ ID NO: 26665 - DNA, 24 bp, Artificial Sequence
  Synthetic
catctccccaaucttcttgtuggt

SEQ ID NO: 26666 - DNA, 20 bp, Artificial Sequence
  Synthetic
cctgggcugagttccagtug

SEQ ID NO: 26667 - DNA, 20 bp, Artificial Sequence
  Synthetic
ccctcggaacuctggtccua

SEQ ID NO: 26668 - DNA, 20 bp, Artificial Sequence
  Synthetic
gcactgugcccacatttuca

SEQ ID NO: 26669 - DNA, 21 bp, Artificial Sequence
  Synthetic
ccctacaaucctagggugggt

SEQ ID NO: 26670 - DNA, 23 bp, Artificial Sequence
  Synthetic
caugttcacugacaccgagaact

SEQ ID NO: 26671 - DNA, 23 bp, Artificial Sequence
  Synthetic
gtgcuaggacagaaactgagcug

SEQ ID NO: 26672 - DNA, 17 bp, Artificial Sequence
  Synthetic
gcaggcuggcaggugag

SEQ ID NO: 26673 - DNA, 22 bp, Artificial Sequence
  Synthetic
caucaagagcccaactucccaa

SEQ ID NO: 26674 - DNA, 21 bp, Artificial Sequence
  Synthetic
gggccugaacaacaccctuac

SEQ ID NO: 26675 - DNA, 22 bp, Artificial Sequence
  Synthetic
ttgtcagugaactcgatgugca

SEQ ID NO: 26676 - DNA, 17 bp, Artificial Sequence
  Synthetic
aggagagggugggcuca

SEQ ID NO: 26677 - DNA, 23 bp, Artificial Sequence
  Synthetic
gggtctcauagtagacgaugcct

SEQ ID NO: 26678 - DNA, 21 bp, Artificial Sequence
  Synthetic
gagaggugactgctgttugct

SEQ ID NO: 26679 - DNA, 21 bp, Artificial Sequence
  Synthetic
ctcagcugaagctgtuggaca

SEQ ID NO: 26680 - DNA, 21 bp, Artificial Sequence
  Synthetic
gcctttgtcugggttggucaa

SEQ ID NO: 26681 - DNA, 22 bp, Artificial Sequence
  Synthetic
ctctacgaagcugtagcggaug

SEQ ID NO: 26682 - DNA, 22 bp, Artificial Sequence
  Synthetic
gctgtccatucccttgtgtucc

SEQ ID NO: 26683 - DNA, 23 bp, Artificial Sequence
  Synthetic
cagcccacaucatgggaattuac

SEQ ID NO: 26684 - DNA, 21 bp, Artificial Sequence
  Synthetic
ctgaucccaaacccacctgua

SEQ ID NO: 26685 - DNA, 20 bp, Artificial Sequence
  Synthetic
cagcaaggcugggtucaaag

SEQ ID NO: 26686 - DNA, 20 bp, Artificial Sequence
  Synthetic
agcgcaucatccagtuccag

SEQ ID NO: 26687 - DNA, 20 bp, Artificial Sequence
  Synthetic
ctgagggugatgcauggaca

SEQ ID NO: 26688 - DNA, 23 bp, Artificial Sequence
  Synthetic
gtgtcttctgugtcaccccaaut

SEQ ID NO: 26689 - DNA, 24 bp, Artificial Sequence
  Synthetic
cttgtccaccaugtctgagtgaut

SEQ ID NO: 26690 - DNA, 22 bp, Artificial Sequence
  Synthetic
agggcataccucttgtctccut

SEQ ID NO: 26691 - DNA, 22 bp, Artificial Sequence
  Synthetic
ggtagagcaguggctgttugag

SEQ ID NO: 26692 - DNA, 22 bp, Artificial Sequence
  Synthetic
gccaggtcautttgacagctut

SEQ ID NO: 26693 - DNA, 27 bp, Artificial Sequence
  Synthetic
ctcataaaucttggtcaucacagggat

SEQ ID NO: 26694 - DNA, 19 bp, Artificial Sequence
  Synthetic
ccccgcaaagucttgcugt

SEQ ID NO: 26695 - DNA, 18 bp, Artificial Sequence
  Synthetic
ccuaggccaccuaaggca

SEQ ID NO: 26696 - DNA, 18 bp, Artificial Sequence
  Synthetic
ccagcacuccggtcagug

SEQ ID NO: 26697 - DNA, 22 bp, Artificial Sequence
  Synthetic
tccaagggaugcctgtttuagg

SEQ ID NO: 26698 - DNA, 18 bp, Artificial Sequence
  Synthetic
cctcagcggguactcugg

SEQ ID NO: 26699 - DNA, 20 bp, Artificial Sequence
  Synthetic
catutacacacgugcgcaca

SEQ ID NO: 26700 - DNA, 22 bp, Artificial Sequence
  Synthetic
autcatggaugggaccaccaag

SEQ ID NO: 26701 - DNA, 20 bp, Artificial Sequence
  Synthetic
tgaauagccccggcaaguag

SEQ ID NO: 26702 - DNA, 19 bp, Artificial Sequence
  Synthetic
tctcccagugcgagcagua

SEQ ID NO: 26703 - DNA, 21 bp, Artificial Sequence
  Synthetic
cggaagatuccctcccacuca

SEQ ID NO: 26704 - DNA, 25 bp, Artificial Sequence
  Synthetic
gcagctgattuttagagcaaacuca

SEQ ID NO: 26705 - DNA, 20 bp, Artificial Sequence
  Synthetic
gcuacagagcaagggacugg

SEQ ID NO: 26706 - DNA, 21 bp, Artificial Sequence
  Synthetic
gggcatgacugactcaacugg

SEQ ID NO: 26707 - DNA, 22 bp, Artificial Sequence
  Synthetic
gtattcgucccccttgatggug

SEQ ID NO: 26708 - DNA, 25 bp, Artificial Sequence
  Synthetic
gcagacatgagugataacaccucag

SEQ ID NO: 26709 - DNA, 21 bp, Artificial Sequence
  Synthetic
gtcctctcautgatgccgtug

SEQ ID NO: 26710 - DNA, 20 bp, Artificial Sequence
  Synthetic
gccacagguagagagcugac

SEQ ID NO: 26711 - DNA, 19 bp, Artificial Sequence
  Synthetic
cctgtggcucccatcctuc

SEQ ID NO: 26712 - DNA, 21 bp, Artificial Sequence
  Synthetic
tctatucggcacaagccctuc

SEQ ID NO: 26713 - DNA, 19 bp, Artificial Sequence
  Synthetic
gtgaggtcugcccctcauc

SEQ ID NO: 26714 - DNA, 21 bp, Artificial Sequence
  Synthetic
ctttucccacccagcaacauc

SEQ ID NO: 26715 - DNA, 22 bp, Artificial Sequence
  Synthetic
aactgctatguggtcctcaucc

SEQ ID NO: 26716 - DNA, 21 bp, Artificial Sequence
  Synthetic
gggctcaguataggaggcaua

SEQ ID NO: 26717 - DNA, 23 bp, Artificial Sequence
  Synthetic
gaatcccuctgaggactugagga

SEQ ID NO: 26718 - DNA, 20 bp, Artificial Sequence
  Synthetic
agacaggccutaggugggaa

SEQ ID NO: 26719 - DNA, 20 bp, Artificial Sequence
  Synthetic
gccucagatgaucccaggac

SEQ ID NO: 26720 - DNA, 21 bp, Artificial Sequence
  Synthetic
tgtgaccugctctgtctcuga

SEQ ID NO: 26721 - DNA, 17 bp, Artificial Sequence
  Synthetic
gaugcccaccccaugct

SEQ ID NO: 26722 - DNA, 22 bp, Artificial Sequence
  Synthetic
ggctucattcctguccccaaat

SEQ ID NO: 26723 - DNA, 22 bp, Artificial Sequence
  Synthetic
guctgtggtucaggcagagaag

SEQ ID NO: 26724 - DNA, 21 bp, Artificial Sequence
  Synthetic
attcctgggagcugtgctaug

SEQ ID NO: 26725 - DNA, 20 bp, Artificial Sequence
  Synthetic
ctccccgugactgttcacut

SEQ ID NO: 26726 - DNA, 19 bp, Artificial Sequence
  Synthetic
gutccaatucccgcccaga

SEQ ID NO: 26727 - DNA, 20 bp, Artificial Sequence
  Synthetic
gcautgccgtuaccagacat

SEQ ID NO: 26728 - DNA, 23 bp, Artificial Sequence
  Synthetic
aagutcctttctuccaagccagt

SEQ ID NO: 26729 - DNA, 27 bp, Artificial Sequence
  Synthetic
atcataactgttcugacaaacctccuc

SEQ ID NO: 26730 - DNA, 23 bp, Artificial Sequence
  Synthetic
ggattatgugcctctguccccat

SEQ ID NO: 26731 - DNA, 25 bp, Artificial Sequence
  Synthetic
gaauccctucagggaaggaaagaag

SEQ ID NO: 26732 - DNA, 22 bp, Artificial Sequence
  Synthetic
ctaggcuccaccactgaaguag

SEQ ID NO: 26733 - DNA, 23 bp, Artificial Sequence
  Synthetic
gccccttacutgcaagactctua

SEQ ID NO: 26734 - DNA, 23 bp, Artificial Sequence
  Synthetic
gaaaggaacagugactgccuagt

SEQ ID NO: 26735 - DNA, 23 bp, Artificial Sequence
  Synthetic
gtcactctuccaaaaggauccgt

SEQ ID NO: 26736 - DNA, 24 bp, Artificial Sequence
  Synthetic
tacccaggcuttctagatgauagg

SEQ ID NO: 26737 - DNA, 23 bp, Artificial Sequence
  Synthetic
gggaaggcauatgtcaccatgug

SEQ ID NO: 26738 - DNA, 23 bp, Artificial Sequence
  Synthetic
cccacagtugccttttcagugat

SEQ ID NO: 26739 - DNA, 23 bp, Artificial Sequence
  Synthetic
agaaatgccacagucctccttuc

SEQ ID NO: 26740 - DNA, 23 bp, Artificial Sequence
  Synthetic
cttgttcucaccaaaucccacct

SEQ ID NO: 26741 - DNA, 20 bp, Artificial Sequence
  Synthetic
tgugccccacaaaccagtua

SEQ ID NO: 26742 - DNA, 23 bp, Artificial Sequence
  Synthetic
gcttggguacctcagtuccaaac

SEQ ID NO: 26743 - DNA, 22 bp, Artificial Sequence
  Synthetic
caagaacacucactgccucaga

SEQ ID NO: 26744 - DNA, 22 bp, Artificial Sequence
  Synthetic
ctcagatgccuatgggctucat

SEQ ID NO: 26745 - DNA, 28 bp, Artificial Sequence
  Synthetic
guaaaaacacagugggcaagagaaaaat

SEQ ID NO: 26746 - DNA, 25 bp, Artificial Sequence
  Synthetic
aagtaacagagugttttcacgugga

SEQ ID NO: 26747 - DNA, 27 bp, Artificial Sequence
  Synthetic
gggaccagucagtctcattataaucct

SEQ ID NO: 26748 - DNA, 22 bp, Artificial Sequence
  Synthetic
gtggcuaagagggtcagtugaa

SEQ ID NO: 26749 - DNA, 27 bp, Artificial Sequence
  Synthetic
gattcggaaagagguatctgaacucac

SEQ ID NO: 26750 - DNA, 21 bp, Artificial Sequence
  Synthetic
ggtgaguacagggtcctctug

SEQ ID NO: 26751 - DNA, 24 bp, Artificial Sequence
  Synthetic
ggactggaaagugacaatgtccua

SEQ ID NO: 26752 - DNA, 22 bp, Artificial Sequence
  Synthetic
gggtggtcaugatggatcucct

SEQ ID NO: 26753 - DNA, 28 bp, Artificial Sequence
  Synthetic
aagttctggaaccugaaaaacuaagagt

SEQ ID NO: 26754 - DNA, 22 bp, Artificial Sequence
  Synthetic
cttgagagcgagauggtgagug

SEQ ID NO: 26755 - DNA, 22 bp, Artificial Sequence
  Synthetic
ctcacccacaccuttcagtgua

SEQ ID NO: 26756 - DNA, 21 bp, Artificial Sequence
  Synthetic
tgtgagctucaccaacgaguc

SEQ ID NO: 26757 - DNA, 22 bp, Artificial Sequence
  Synthetic
gtcaccctccuactgggactua

SEQ ID NO: 26758 - DNA, 21 bp, Artificial Sequence
  Synthetic
attgacccugatgtgcagugt

SEQ ID NO: 26759 - DNA, 23 bp, Artificial Sequence
  Synthetic
cttcccaacaaauggctctucaa

SEQ ID NO: 26760 - DNA, 21 bp, Artificial Sequence
  Synthetic
tgacuaaccagccctagctut

SEQ ID NO: 26761 - DNA, 24 bp, Artificial Sequence
  Synthetic
cuaacatagacaaugccaaacgca

SEQ ID NO: 26762 - DNA, 29 bp, Artificial Sequence
  Synthetic
catttaagguaaaagctaacagtcugcat

SEQ ID NO: 26763 - DNA, 30 bp, Artificial Sequence
  Synthetic
gaagaaaaagaagucaaagacaaagtgugt

SEQ ID NO: 26764 - DNA, 26 bp, Artificial Sequence
  Synthetic
gttgccaccutgttaccttuaaaaga

SEQ ID NO: 26765 - DNA, 32 bp, Artificial Sequence
  Synthetic
acagactttaaagaagutgtgttttacaaugc

SEQ ID NO: 26766 - DNA, 29 bp, Artificial Sequence
  Synthetic
aattccataactucttgctaagtccugag

SEQ ID NO: 26767 - DNA, 29 bp, Artificial Sequence
  Synthetic
ttgtggacaggutttgaaagatatttgug

SEQ ID NO: 26768 - DNA, 21 bp, Artificial Sequence
  Synthetic
cctccccagucctcatguact

SEQ ID NO: 26769 - DNA, 32 bp, Artificial Sequence
  Synthetic
tttttgaagtaaaaggugcactgtaataaucc

SEQ ID NO: 26770 - DNA, 23 bp, Artificial Sequence
  Synthetic
gctgtatcgucaaggcactctug

SEQ ID NO: 26771 - DNA, 28 bp, Artificial Sequence
  Synthetic
tgagtttgtatuaaaaggtactggugga

SEQ ID NO: 26772 - DNA, 26 bp, Artificial Sequence
  Synthetic
cagccgagaauactttgtcatttucc

SEQ ID NO: 26773 - DNA, 24 bp, Artificial Sequence
  Synthetic
cttgacutgacccugggaagaaat

SEQ ID NO: 26774 - DNA, 21 bp, Artificial Sequence
  Synthetic
gtcaugaccgcacatucacaa

SEQ ID NO: 26775 - DNA, 30 bp, Artificial Sequence
  Synthetic
tgaacaacataauccaaaacagtuaccaga

SEQ ID NO: 26776 - DNA, 22 bp, Artificial Sequence
  Synthetic
catctttgugaacgggagguga

SEQ ID NO: 26777 - DNA, 23 bp, Artificial Sequence
  Synthetic
gaaagatgcugcatgttggugac

SEQ ID NO: 26778 - DNA, 27 bp, Artificial Sequence
  Synthetic
aaaagtaggaaaucaggcccaatacuc

SEQ ID NO: 26779 - DNA, 23 bp, Artificial Sequence
  Synthetic
tggattccttutgtgtgtgguca

SEQ ID NO: 26780 - DNA, 26 bp, Artificial Sequence
  Synthetic
cgactgccaaaacauccaatacttut

SEQ ID NO: 26781 - DNA, 30 bp, Artificial Sequence
  Synthetic
acacctgcaaggauatctatatgtauacga

SEQ ID NO: 26782 - DNA, 20 bp, Artificial Sequence
  Synthetic
ggcaggguacaggtagcaut

SEQ ID NO: 26783 - DNA, 29 bp, Artificial Sequence
  Synthetic
gttttcatggtaacuctgtgcttttcuag

SEQ ID NO: 26784 - DNA, 24 bp, Artificial Sequence
  Synthetic
aucaatcatttgcuccaggaaact

SEQ ID NO: 26785 - DNA, 23 bp, Artificial Sequence
  Synthetic
caacaaatuggaggtggcugaac

SEQ ID NO: 26786 - DNA, 27 bp, Artificial Sequence
  Synthetic
agtgtgcaaagucaccataauagaagt

SEQ ID NO: 26787 - DNA, 24 bp, Artificial Sequence
  Synthetic
ctgaatctgugcctgtttgtcuag

SEQ ID NO: 26788 - DNA, 20 bp, Artificial Sequence
  Synthetic
gctguggaaggagctcugat

SEQ ID NO: 26789 - DNA, 20 bp, Artificial Sequence
  Synthetic
cagcauggctctgtuagcga

SEQ ID NO: 26790 - DNA, 20 bp, Artificial Sequence
  Synthetic
aatcgctgugcgtgtaguga

SEQ ID NO: 26791 - DNA, 31 bp, Artificial Sequence
  Synthetic
gtaattagtccucagcaaagttgaaattuga

SEQ ID NO: 26792 - DNA, 19 bp, Artificial Sequence
  Synthetic
gcgggauaggaggagguga

SEQ ID NO: 26793 - DNA, 18 bp, Artificial Sequence
  Synthetic
cuccgaggccaagcugaa

SEQ ID NO: 26794 - DNA, 27 bp, Artificial Sequence
  Synthetic
gaacaccgagautttattttgcaguct

SEQ ID NO: 26795 - DNA, 20 bp, Artificial Sequence
  Synthetic
ggccgguctgcttcttguaa

SEQ ID NO: 26796 - DNA, 21 bp, Artificial Sequence
  Synthetic
cacaggcagcucttctctcug

SEQ ID NO: 26797 - DNA, 23 bp, Artificial Sequence
  Synthetic
cagaacaucacctaccacugcaa

SEQ ID NO: 26798 - DNA, 23 bp, Artificial Sequence
  Synthetic
tgcuaaaagctuccagggagaaa

SEQ ID NO: 26799 - DNA, 22 bp, Artificial Sequence
  Synthetic
gagacttgcguctaccccaauc

SEQ ID NO: 26800 - DNA, 20 bp, Artificial Sequence
  Synthetic
catctccucccttgctgcua

SEQ ID NO: 26801 - DNA, 19 bp, Artificial Sequence
  Synthetic
ggccugagacagcaugacg

SEQ ID NO: 26802 - DNA, 24 bp, Artificial Sequence
  Synthetic
ccuaaaagaggcccugagcaaaaa

SEQ ID NO: 26803 - DNA, 22 bp, Artificial Sequence
  Synthetic
tcctcacgaccuctctctctug

SEQ ID NO: 26804 - DNA, 20 bp, Artificial Sequence
  Synthetic
gctcaagugggctctgtgug

SEQ ID NO: 26805 - DNA, 24 bp, Artificial Sequence
  Synthetic
gactcaatcggugtctgtcttgut

SEQ ID NO: 26806 - DNA, 23 bp, Artificial Sequence
  Synthetic
cttaguccagagacugcggaaac

SEQ ID NO: 26807 - DNA, 23 bp, Artificial Sequence
  Synthetic
attcttcuctgagccugagacct

SEQ ID NO: 26808 - DNA, 20 bp, Artificial Sequence
  Synthetic
tgggactugtccttgcugac

SEQ ID NO: 26809 - DNA, 24 bp, Artificial Sequence
  Synthetic
cactcatcauccttgtctctgucc

SEQ ID NO: 26810 - DNA, 19 bp, Artificial Sequence
  Synthetic
gggcctggugagggactua

SEQ ID NO: 26811 - DNA, 24 bp, Artificial Sequence
  Synthetic
acttcccgcautttctccttcuag

SEQ ID NO: 26812 - DNA, 17 bp, Artificial Sequence
  Synthetic
cgccaugggagcctcug

SEQ ID NO: 26813 - DNA, 18 bp, Artificial Sequence
  Synthetic
cgucttcctugggccact

SEQ ID NO: 26814 - DNA, 22 bp, Artificial Sequence
  Synthetic
catccattuccctcccugacaa

SEQ ID NO: 26815 - DNA, 20 bp, Artificial Sequence
  Synthetic
catgcccccutctcucacag

SEQ ID NO: 26816 - DNA, 19 bp, Artificial Sequence
  Synthetic
ccgccttuggcaggagaua

SEQ ID NO: 26817 - DNA, 18 bp, Artificial Sequence
  Synthetic
cgcaccaaggutggctug

SEQ ID NO: 26818 - DNA, 22 bp, Artificial Sequence
  Synthetic
ccauaagggaauggaagcgauc

SEQ ID NO: 26819 - DNA, 24 bp, Artificial Sequence
  Synthetic
tgtccacuacagactccctctuac

SEQ ID NO: 26820 - DNA, 22 bp, Artificial Sequence
  Synthetic
cttgccucctaggcaucagaaa

SEQ ID NO: 26821 - DNA, 23 bp, Artificial Sequence
  Synthetic
ctttgggtcugccctatactgug

SEQ ID NO: 26822 - DNA, 20 bp, Artificial Sequence
  Synthetic
ggaggcugggcaggtactua

SEQ ID NO: 26823 - DNA, 20 bp, Artificial Sequence
  Synthetic
cuggaaactcugggccagaa

SEQ ID NO: 26824 - DNA, 23 bp, Artificial Sequence
  Synthetic
ccctggtuaaactctacucagga

SEQ ID NO: 26825 - DNA, 26 bp, Artificial Sequence
  Synthetic
tctgagaatggugttctgtcttucag

SEQ ID NO: 26826 - DNA, 22 bp, Artificial Sequence
  Synthetic
gcaacagcagcuctgctactua

SEQ ID NO: 26827 - DNA, 22 bp, Artificial Sequence
  Synthetic
atcgctgaggucacatggtauc

SEQ ID NO: 26828 - DNA, 21 bp, Artificial Sequence
  Synthetic
ggatggagccuccacatucac

SEQ ID NO: 26829 - DNA, 26 bp, Artificial Sequence
  Synthetic
tgaaggctcacuctgtttctctttut

SEQ ID NO: 26830 - DNA, 22 bp, Artificial Sequence
  Synthetic
gggtttgacuccagagatguca

SEQ ID NO: 26831 - DNA, 21 bp, Artificial Sequence
  Synthetic
gacuttgcuaccccaggagag

SEQ ID NO: 26832 - DNA, 24 bp, Artificial Sequence
  Synthetic
ccacaactgucagagcaaaguaca

SEQ ID NO: 26833 - DNA, 26 bp, Artificial Sequence
  Synthetic
cttcatttcatccuccctgtctctuc

SEQ ID NO: 26834 - DNA, 21 bp, Artificial Sequence
  Synthetic
tgctgtggutgcacccaauac

SEQ ID NO: 26835 - DNA, 23 bp, Artificial Sequence
  Synthetic
catggtcacutccttcttgcuca

SEQ ID NO: 26836 - DNA, 26 bp, Artificial Sequence
  Synthetic
acaacacagaauatgaacttugcaca

SEQ ID NO: 26837 - DNA, 22 bp, Artificial Sequence
  Synthetic
cttttggcgucttcccuaggag

SEQ ID NO: 26838 - DNA, 22 bp, Artificial Sequence
  Synthetic
ttcugggaaacccaagtuggaa

SEQ ID NO: 26839 - DNA, 22 bp, Artificial Sequence
  Synthetic
acaccuccactttggatugcag

SEQ ID NO: 26840 - DNA, 23 bp, Artificial Sequence
  Synthetic
cagctccucatttgtctacucgt

SEQ ID NO: 26841 - DNA, 27 bp, Artificial Sequence
  Synthetic
ggcttccaaaacuacaatgtcaaagut

SEQ ID NO: 26842 - DNA, 23 bp, Artificial Sequence
  Synthetic
aatgaggauaccaggtcaauccc

SEQ ID NO: 26843 - DNA, 27 bp, Artificial Sequence
  Synthetic
tgtagtaaaccccucattttctgtucc

SEQ ID NO: 26844 - DNA, 23 bp, Artificial Sequence
  Synthetic
caggtaagugcaagcagcaatut

SEQ ID NO: 26845 - DNA, 28 bp, Artificial Sequence
  Synthetic
attgatgccuttttctctttaugccaag

SEQ ID NO: 26846 - DNA, 25 bp, Artificial Sequence
  Synthetic
tgaagaacauggtaagaugacagca

SEQ ID NO: 26847 - DNA, 25 bp, Artificial Sequence
  Synthetic
gctctcctcuaacttaccatccugt

SEQ ID NO: 26848 - DNA, 27 bp, Artificial Sequence
  Synthetic
acagactggatuaacatagcattgcut

SEQ ID NO: 26849 - DNA, 31 bp, Artificial Sequence
  Synthetic
atgagtgtttgagugacaagaataggtatut

SEQ ID NO: 26850 - DNA, 22 bp, Artificial Sequence
  Synthetic
ctgaggcaguctttcacgtcut

SEQ ID NO: 26851 - DNA, 25 bp, Artificial Sequence
  Synthetic
actgcaacctcuctctttttctcuc

SEQ ID NO: 26852 - DNA, 17 bp, Artificial Sequence
  Synthetic
cuggcccugacaccgaa

SEQ ID NO: 26853 - DNA, 17 bp, Artificial Sequence
  Synthetic
gcttcccccucctgcuc

SEQ ID NO: 26854 - DNA, 22 bp, Artificial Sequence
  Synthetic
cttgcagcaggutcttagcuct

SEQ ID NO: 26855 - DNA, 19 bp, Artificial Sequence
  Synthetic
ggaggtctugccggaggua

SEQ ID NO: 26856 - DNA, 27 bp, Artificial Sequence
  Synthetic
ggaaaaguttggatcuagaaacagcag

SEQ ID NO: 26857 - DNA, 27 bp, Artificial Sequence
  Synthetic
tgggagctgtuaacccttaattcaaut

SEQ ID NO: 26858 - DNA, 20 bp, Artificial Sequence
  Synthetic
gtaaguggcgatcuccacgt

SEQ ID NO: 26859 - DNA, 23 bp, Artificial Sequence
  Synthetic
accccactcucctcctttctauc

SEQ ID NO: 26860 - DNA, 23 bp, Artificial Sequence
  Synthetic
cctcacucaggagacagtcauca

SEQ ID NO: 26861 - DNA, 23 bp, Artificial Sequence
  Synthetic
aaccagaugaccgactccaaauc

SEQ ID NO: 26862 - DNA, 21 bp, Artificial Sequence
  Synthetic
gatgautggcacugcacacac

SEQ ID NO: 26863 - DNA, 23 bp, Artificial Sequence
  Synthetic
ctgacaaacacutcccatcccut

SEQ ID NO: 26864 - DNA, 21 bp, Artificial Sequence
  Synthetic
ctgcctccugaggttgtugat

SEQ ID NO: 26865 - DNA, 23 bp, Artificial Sequence
  Synthetic
cttuagagggauggaaagaggug

SEQ ID NO: 26866 - DNA, 22 bp, Artificial Sequence
  Synthetic
tcaggagacuctggtugacagt

SEQ ID NO: 26867 - DNA, 20 bp, Artificial Sequence
  Synthetic
gcactagtgguggcagctuc

SEQ ID NO: 26868 - DNA, 21 bp, Artificial Sequence
  Synthetic
cauagccacccacuccacaag

SEQ ID NO: 26869 - DNA, 21 bp, Artificial Sequence
  Synthetic
cucttgcuccaccaggaacaa

SEQ ID NO: 26870 - DNA, 28 bp, Artificial Sequence
  Synthetic
ccatggauaaataaacacuaggaacgca

SEQ ID NO: 26871 - DNA, 21 bp, Artificial Sequence
  Synthetic
cucaccaugcaagaagacuca

SEQ ID NO: 26872 - DNA, 26 bp, Artificial Sequence
  Synthetic
caaggacaaggccautaagaaatucg

SEQ ID NO: 26873 - DNA, 23 bp, Artificial Sequence
  Synthetic
ccugagaggcuccaaagaacaga

SEQ ID NO: 26874 - DNA, 27 bp, Artificial Sequence
  Synthetic
tgaagctacatuactgtgtgagttgug

SEQ ID NO: 26875 - DNA, 26 bp, Artificial Sequence
  Synthetic
accctccaggaugaaatttuaaccat

SEQ ID NO: 26876 - DNA, 24 bp, Artificial Sequence
  Synthetic
gctcaacacacaagutttcagugg

SEQ ID NO: 26877 - DNA, 28 bp, Artificial Sequence
  Synthetic
agctagtcccaaucgaatcagagtauag

SEQ ID NO: 26878 - DNA, 33 bp, Artificial Sequence
  Synthetic
gtgtatcattttcuaaaacattcagatgcuagt

SEQ ID NO: 26879 - DNA, 27 bp, Artificial Sequence
  Synthetic
agggcttaucgagacaaattgaagtut

SEQ ID NO: 26880 - DNA, 25 bp, Artificial Sequence
  Synthetic
ggaacatggautcatagaaguccct

SEQ ID NO: 26881 - DNA, 27 bp, Artificial Sequence
  Synthetic
ggaatccacauccttgttttgtuaggt

SEQ ID NO: 26882 - DNA, 26 bp, Artificial Sequence
  Synthetic
aaaagccagaccuttgtgattacuct

SEQ ID NO: 26883 - DNA, 29 bp, Artificial Sequence
  Synthetic
tcagctctgatgugatatctgatctacut

SEQ ID NO: 26884 - DNA, 23 bp, Artificial Sequence
  Synthetic
actgcgccugaccagaatuaaat

SEQ ID NO: 26885 - DNA, 29 bp, Artificial Sequence
  Synthetic
cagccactgaauatatctcaagtcttuga

SEQ ID NO: 26886 - DNA, 28 bp, Artificial Sequence
  Synthetic
gcacatttcaaguagccttagttcugaa

SEQ ID NO: 26887 - DNA, 27 bp, Artificial Sequence
  Synthetic
acatttgcagatuccctcagatatgua

SEQ ID NO: 26888 - DNA, 23 bp, Artificial Sequence
  Synthetic
gcatgagaaagaaugaggcugga

SEQ ID NO: 26889 - DNA, 27 bp, Artificial Sequence
  Synthetic
cuggaaagccagaugacaaaagaaaag

SEQ ID NO: 26890 - DNA, 27 bp, Artificial Sequence
  Synthetic
catgaccattcacutttacactcacug

SEQ ID NO: 26891 - DNA, 23 bp, Artificial Sequence
  Synthetic
aagtcagcctugctgagatcaut

SEQ ID NO: 26892 - DNA, 23 bp, Artificial Sequence
  Synthetic
ctgggctcuccttgttgagtuaa

SEQ ID NO: 26893 - DNA, 29 bp, Artificial Sequence
  Synthetic
ctcacgttucaaaatacaaacgaugaaga

SEQ ID NO: 26894 - DNA, 28 bp, Artificial Sequence
  Synthetic
gttggcaauagaagcatgtcgaattaut

SEQ ID NO: 26895 - DNA, 26 bp, Artificial Sequence
  Synthetic
gaaaacagaggaaaaaugcccagtua

SEQ ID NO: 26896 - DNA, 24 bp, Artificial Sequence
  Synthetic
caggaattcgcacauccctgatua

SEQ ID NO: 26897 - DNA, 28 bp, Artificial Sequence
  Synthetic
gtaattacagcaagaauccctcttctuc

SEQ ID NO: 26898 - DNA, 25 bp, Artificial Sequence
  Synthetic
atcccaaucgcaggctgaattatua

SEQ ID NO: 26899 - DNA, 31 bp, Artificial Sequence
  Synthetic
acucaagaataaaatgtaucagaagccagaa

SEQ ID NO: 26900 - DNA, 26 bp, Artificial Sequence
  Synthetic
atccttcccaaacaugacatcaucat

SEQ ID NO: 26901 - DNA, 27 bp, Artificial Sequence
  Synthetic
caaacagctcucattcactctctttut

SEQ ID NO: 26902 - DNA, 26 bp, Artificial Sequence
  Synthetic
ggtgacaaugaaaatatuccgaaccc

SEQ ID NO: 26903 - DNA, 27 bp, Artificial Sequence
  Synthetic
ggauaaagaggaggagguatgactuaa

SEQ ID NO: 26904 - DNA, 22 bp, Artificial Sequence
  Synthetic
gagaatgugccaggctaatugc

SEQ ID NO: 26905 - DNA, 24 bp, Artificial Sequence
  Synthetic
ccagcctcaugatgtggaaaauga

SEQ ID NO: 26906 - DNA, 30 bp, Artificial Sequence
  Synthetic
ccactcagaatuttgttattcaaacaucca

SEQ ID NO: 26907 - DNA, 28 bp, Artificial Sequence
  Synthetic
cctgccatcuctttatccttctttucat

SEQ ID NO: 26908 - DNA, 23 bp, Artificial Sequence
  Synthetic
aaacacaaaaucctgtguaccca

SEQ ID NO: 26909 - DNA, 28 bp, Artificial Sequence
  Synthetic
gggaggtataguagcccatatgtatgua

SEQ ID NO: 26910 - DNA, 26 bp, Artificial Sequence
  Synthetic
taactcagaaagaucccutaaacugt

SEQ ID NO: 26911 - DNA, 26 bp, Artificial Sequence
  Synthetic
agtctttgaugcgaagaaaacgttuc

SEQ ID NO: 26912 - DNA, 23 bp, Artificial Sequence
  Synthetic
caggcagguataggtctgtcuct

SEQ ID NO: 26913 - DNA, 17 bp, Artificial Sequence
  Synthetic
cgccggagcugcaauga

SEQ ID NO: 26914 - DNA, 22 bp, Artificial Sequence
  Synthetic
cacagcugacagaccacatuct

SEQ ID NO: 26915 - DNA, 23 bp, Artificial Sequence
  Synthetic
ccaagaagcccacutatccccua

SEQ ID NO: 26916 - DNA, 21 bp, Artificial Sequence
  Synthetic
agagctaguggctcaccttug

SEQ ID NO: 26917 - DNA, 28 bp, Artificial Sequence
  Synthetic
gggaatactgaucctgatttaacaguga

SEQ ID NO: 26918 - DNA, 26 bp, Artificial Sequence
  Synthetic
ggagtaggaaaguttcaaagaccuga

SEQ ID NO: 26919 - DNA, 28 bp, Artificial Sequence
  Synthetic
ccaatuacaggaauagaacaggttcuat

SEQ ID NO: 26920 - DNA, 22 bp, Artificial Sequence
  Synthetic
ggaaaagauggcgctcattgug

SEQ ID NO: 26921 - DNA, 29 bp, Artificial Sequence
  Synthetic
gtgatgagcttugagttttctttcttcut

SEQ ID NO: 26922 - DNA, 27 bp, Artificial Sequence
  Synthetic
gttatcttcauggaagccacagtacut

SEQ ID NO: 26923 - DNA, 28 bp, Artificial Sequence
  Synthetic
agacacctatttugtgcctgtattcuag

SEQ ID NO: 26924 - DNA, 25 bp, Artificial Sequence
  Synthetic
agtgaacaaguacattgcuccaagt

SEQ ID NO: 26925 - DNA, 22 bp, Artificial Sequence
  Synthetic
gtactcaggacgutgccttcuc

SEQ ID NO: 26926 - DNA, 26 bp, Artificial Sequence
  Synthetic
aagatcttgaugatgtttgucagagc

SEQ ID NO: 26927 - DNA, 24 bp, Artificial Sequence
  Synthetic
ttcctgttcuggttctgcatctut

SEQ ID NO: 26928 - DNA, 21 bp, Artificial Sequence
  Synthetic
ccagcagtcutcggatctcut

SEQ ID NO: 26929 - DNA, 24 bp, Artificial Sequence
  Synthetic
ctaaaaagucagagaccucacucc

SEQ ID NO: 26930 - DNA, 20 bp, Artificial Sequence
  Synthetic
cagggucagggacagaaucc

SEQ ID NO: 26931 - DNA, 20 bp, Artificial Sequence
  Synthetic
ccgagtcugagggactcuga

SEQ ID NO: 26932 - DNA, 21 bp, Artificial Sequence
  Synthetic
gctgctacutcccacagauga

SEQ ID NO: 26933 - DNA, 22 bp, Artificial Sequence
  Synthetic
tgttgagccccauaatgucacg

SEQ ID NO: 26934 - DNA, 22 bp, Artificial Sequence
  Synthetic
cccatgtgugtctgtcacugaa

SEQ ID NO: 26935 - DNA, 20 bp, Artificial Sequence
  Synthetic
cctcatggcagutccctcug

SEQ ID NO: 26936 - DNA, 22 bp, Artificial Sequence
  Synthetic
gccccaggugacacaaagagua

SEQ ID NO: 26937 - DNA, 30 bp, Artificial Sequence
  Synthetic
acaggcaaattcuttttcctttttctucat

SEQ ID NO: 26938 - DNA, 24 bp, Artificial Sequence
  Synthetic
aagtggcugcaaagaattuggaag

SEQ ID NO: 26939 - DNA, 28 bp, Artificial Sequence
  Synthetic
cccactcaccagauactgatgtttatut

SEQ ID NO: 26940 - DNA, 18 bp, Artificial Sequence
  Synthetic
cgtctuccacgcccugag

SEQ ID NO: 26941 - DNA, 17 bp, Artificial Sequence
  Synthetic
gccagcugtggguggag

SEQ ID NO: 26942 - DNA, 24 bp, Artificial Sequence
  Synthetic
gguagaagcaguagaagggaggag

SEQ ID NO: 26943 - DNA, 23 bp, Artificial Sequence
  Synthetic
agcuagcacgaggatagttuaca

SEQ ID NO: 26944 - DNA, 22 bp, Artificial Sequence
  Synthetic
aatgggctguagtgcacttuga

SEQ ID NO: 26945 - DNA, 23 bp, Artificial Sequence
  Synthetic
cccagugaaaggaacacagtuga

SEQ ID NO: 26946 - DNA, 25 bp, Artificial Sequence
  Synthetic
ggatggatcguaaagacagtctgut

SEQ ID NO: 26947 - DNA, 23 bp, Artificial Sequence
  Synthetic
aattctttccugtcgcttugcag

SEQ ID NO: 26948 - DNA, 30 bp, Artificial Sequence
  Synthetic
acaaggaaaatatugttcaacaagtcuact

SEQ ID NO: 26949 - DNA, 27 bp, Artificial Sequence
  Synthetic
gaaaatgcacaccucaaaaggctaaut

SEQ ID NO: 26950 - DNA, 22 bp, Artificial Sequence
  Synthetic
agagttaggccutaccagccut

SEQ ID NO: 26951 - DNA, 22 bp, Artificial Sequence
  Synthetic
cagcatcaucagagtgccauga

SEQ ID NO: 26952 - DNA, 24 bp, Artificial Sequence
  Synthetic
gttactcaatucatgcagcaugca

SEQ ID NO: 26953 - DNA, 23 bp, Artificial Sequence
  Synthetic
ttctcatgccuagctctcuagca

SEQ ID NO: 26954 - DNA, 26 bp, Artificial Sequence
  Synthetic
actaaaacaaaautcagauggcaggt

SEQ ID NO: 26955 - DNA, 28 bp, Artificial Sequence
  Synthetic
gtccatgtagattucactggcctttaua

SEQ ID NO: 26956 - DNA, 21 bp, Artificial Sequence
  Synthetic
gctggaaguctgaacccctug

SEQ ID NO: 26957 - DNA, 28 bp, Artificial Sequence
  Synthetic
gatcaaagacaaaautgaaccaagugct

SEQ ID NO: 26958 - DNA, 28 bp, Artificial Sequence
  Synthetic
atgtttctgactguatacataacgcaut

SEQ ID NO: 26959 - DNA, 33 bp, Artificial Sequence
  Synthetic
taaacctgtgtctuaacagttcttaatttuaca

SEQ ID NO: 26960 - DNA, 29 bp, Artificial Sequence
  Synthetic
cctctaacatucaatttcacagcugagat

SEQ ID NO: 26961 - DNA, 25 bp, Artificial Sequence
  Synthetic
gcttctccccaagcuggtattatuc

SEQ ID NO: 26962 - DNA, 22 bp, Artificial Sequence
  Synthetic
agagttgtagcucagccctcut

SEQ ID NO: 26963 - DNA, 24 bp, Artificial Sequence
  Synthetic
gaaatcacagaguttctgcuggga

SEQ ID NO: 26964 - DNA, 29 bp, Artificial Sequence
  Synthetic
gacaaacaaaaacaugaacaaattguggt

SEQ ID NO: 26965 - DNA, 21 bp, Artificial Sequence
  Synthetic
ctaccagucaggtcccaacuc

SEQ ID NO: 26966 - DNA, 25 bp, Artificial Sequence
  Synthetic
acaagtctggucaaaatactugcct

SEQ ID NO: 26967 - DNA, 28 bp, Artificial Sequence
  Synthetic
ctcctggacaaagaaauagagaagucat

SEQ ID NO: 26968 - DNA, 24 bp, Artificial Sequence
  Synthetic
acacagaccutgagttgtgtaucc

SEQ ID NO: 26969 - DNA, 22 bp, Artificial Sequence
  Synthetic
tcaagtgcccaguacaaagcuc

SEQ ID NO: 26970 - DNA, 28 bp, Artificial Sequence
  Synthetic
aagctgatgaaaaucaaagacaaaugca

SEQ ID NO: 26971 - DNA, 28 bp, Artificial Sequence
  Synthetic
tgaaugaaagggaauaactacttugaca

SEQ ID NO: 26972 - DNA, 29 bp, Artificial Sequence
  Synthetic
gtaagatcactgugaaaatctttgctuga

SEQ ID NO: 26973 - DNA, 28 bp, Artificial Sequence
  Synthetic
ccgaaacgugaagaaataatggagagua

SEQ ID NO: 26974 - DNA, 30 bp, Artificial Sequence
  Synthetic
agtggctttaaaaacuaggtaaaacacuga

SEQ ID NO: 26975 - DNA, 26 bp, Artificial Sequence
  Synthetic
gtgaccggguagtatactgtttctut

SEQ ID NO: 26976 - DNA, 24 bp, Artificial Sequence
  Synthetic
ggcatttgguctgtggtuagagat

SEQ ID NO: 26977 - DNA, 32 bp, Artificial Sequence
  Synthetic
ggaaatatttttcagcutatttagcctgtuga

SEQ ID NO: 26978 - DNA, 17 bp, Artificial Sequence
  Synthetic
ccauacaccggcucgca

SEQ ID NO: 26979 - DNA, 17 bp, Artificial Sequence
  Synthetic
ggcggcuccttggtcuc

SEQ ID NO: 26980 - DNA, 17 bp, Artificial Sequence
  Synthetic
gggcagcugcacaguct

SEQ ID NO: 26981 - DNA, 17 bp, Artificial Sequence
  Synthetic
cucctcaccuccgcgat

SEQ ID NO: 26982 - DNA, 25 bp, Artificial Sequence
  Synthetic
tcaacacutaggtaaaauccgacgt

SEQ ID NO: 26983 - DNA, 25 bp, Artificial Sequence
  Synthetic
ctcccctccauacaggtcataguaa

SEQ ID NO: 26984 - DNA, 25 bp, Artificial Sequence
  Synthetic
aattgtgttuaggagagctgacugt

SEQ ID NO: 26985 - DNA, 31 bp, Artificial Sequence
  Synthetic
aagaaaactaccaugttttcctttttcagut

SEQ ID NO: 26986 - DNA, 23 bp, Artificial Sequence
  Synthetic
gcagtgaacaugagagtgctuga

SEQ ID NO: 26987 - DNA, 25 bp, Artificial Sequence
  Synthetic
ggagaaagctugagctttccaauct

SEQ ID NO: 26988 - DNA, 28 bp, Artificial Sequence
  Synthetic
ttccttaaagaaguaatgctgauccagg

SEQ ID NO: 26989 - DNA, 26 bp, Artificial Sequence
  Synthetic
caagagugactattacugagcggaat

SEQ ID NO: 26990 - DNA, 30 bp, Artificial Sequence
  Synthetic
ctgaccatacattuctagcctatttttgua

SEQ ID NO: 26991 - DNA, 23 bp, Artificial Sequence
  Synthetic
tcacucgggagttttctuggaac

SEQ ID NO: 26992 - DNA, 28 bp, Artificial Sequence
  Synthetic
tttaggctttuatttcagagtucacaga

SEQ ID NO: 26993 - DNA, 27 bp, Artificial Sequence
  Synthetic
cagttcccaaaguctctagaauacgac

SEQ ID NO: 26994 - DNA, 21 bp, Artificial Sequence
  Synthetic
ggcaauaccacttucggacct

SEQ ID NO: 26995 - DNA, 26 bp, Artificial Sequence
  Synthetic
gttaaagagcuaggagtgggtaggua

SEQ ID NO: 26996 - DNA, 31 bp, Artificial Sequence
  Synthetic
gcagtttctcttuattcttcatgatgttucc

SEQ ID NO: 26997 - DNA, 22 bp, Artificial Sequence
  Synthetic
agagaatgagaauccgcaugcc

SEQ ID NO: 26998 - DNA, 24 bp, Artificial Sequence
  Synthetic
tcatgtaagcutaaacagcguggt

SEQ ID NO: 26999 - DNA, 30 bp, Artificial Sequence
  Synthetic
aaacaattaaccaauagagcacttgcatut

SEQ ID NO: 27000 - DNA, 22 bp, Artificial Sequence
  Synthetic
tgtgaagcaggccucacttuag

SEQ ID NO: 27001 - DNA, 21 bp, Artificial Sequence
  Synthetic
ctgggagagggaaugtuccag

SEQ ID NO: 27002 - DNA, 20 bp, Artificial Sequence
  Synthetic
cagcugctguaggaaggcat

SEQ ID NO: 27003 - DNA, 25 bp, Artificial Sequence
  Synthetic
catccctauaagaagccctacaugg

SEQ ID NO: 27004 - DNA, 23 bp, Artificial Sequence
  Synthetic
aatgaatactccucacccccuca

SEQ ID NO: 27005 - DNA, 23 bp, Artificial Sequence
  Synthetic
accagtgugagaatggtgttucc

SEQ ID NO: 27006 - DNA, 23 bp, Artificial Sequence
  Synthetic
tgctggctuacctgggtaattug

SEQ ID NO: 27007 - DNA, 27 bp, Artificial Sequence
  Synthetic
cttgttctctcutcctctttcctucag

SEQ ID NO: 27008 - DNA, 22 bp, Artificial Sequence
  Synthetic
cgtgagugcagaacgctgtaut

SEQ ID NO: 27009 - DNA, 25 bp, Artificial Sequence
  Synthetic
gcagggutttatcuggagacaaagg

SEQ ID NO: 27010 - DNA, 30 bp, Artificial Sequence
  Synthetic
ctgatacaacutttcaacttttugggagaa

SEQ ID NO: 27011 - DNA, 21 bp, Artificial Sequence
  Synthetic
ccctccguccctctctctuag

SEQ ID NO: 27012 - DNA, 19 bp, Artificial Sequence
  Synthetic
gaagcgcgagguctcctua

SEQ ID NO: 27013 - DNA, 20 bp, Artificial Sequence
  Synthetic
cccctgcutcttgtccucag

SEQ ID NO: 27014 - DNA, 19 bp, Artificial Sequence
  Synthetic
gcagagcuccattguggca

SEQ ID NO: 27015 - DNA, 32 bp, Artificial Sequence
  Synthetic
tgctaattagatatugttctgggaagucaaaa

SEQ ID NO: 27016 - DNA, 22 bp, Artificial Sequence
  Synthetic
ctgtgaagacagucttcuccgt

SEQ ID NO: 27017 - DNA, 24 bp, Artificial Sequence
  Synthetic
gaggagaucaaaacccagaagguc

SEQ ID NO: 27018 - DNA, 20 bp, Artificial Sequence
  Synthetic
cguggacacgaagaucagct

SEQ ID NO: 27019 - DNA, 22 bp, Artificial Sequence
  Synthetic
agcattggaaagauctggcuca

SEQ ID NO: 27020 - DNA, 17 bp, Artificial Sequence
  Synthetic
gctccuaggcgggucct

SEQ ID NO: 27021 - DNA, 19 bp, Artificial Sequence
  Synthetic
cccagucuccgagggaaga

SEQ ID NO: 27022 - DNA, 26 bp, Artificial Sequence
  Synthetic
gacgcagcuacattttacctugaaat

SEQ ID NO: 27023 - DNA, 21 bp, Artificial Sequence
  Synthetic
gctgcttaacguggcagagut

SEQ ID NO: 27024 - DNA, 24 bp, Artificial Sequence
  Synthetic
ggtgguacccattguaaaggaagt

SEQ ID NO: 27025 - DNA, 22 bp, Artificial Sequence
  Synthetic
ccatgcatguggcctacuacag

SEQ ID NO: 27026 - DNA, 21 bp, Artificial Sequence
  Synthetic
cgaagtccucttgctcgucac

SEQ ID NO: 27027 - DNA, 22 bp, Artificial Sequence
  Synthetic
tcccaaggccucttccacuaat

SEQ ID NO: 27028 - DNA, 23 bp, Artificial Sequence
  Synthetic
gcatgaagagggcguacaagtua

SEQ ID NO: 27029 - DNA, 30 bp, Artificial Sequence
  Synthetic
cttatgtcttctcutctgaattctgagugt

SEQ ID NO: 27030 - DNA, 26 bp, Artificial Sequence
  Synthetic
tacacgttucagaagacatccuaaag

SEQ ID NO: 27031 - DNA, 23 bp, Artificial Sequence
  Synthetic
tccatccucaggcgtagaagtua

SEQ ID NO: 27032 - DNA, 21 bp, Artificial Sequence
  Synthetic
aggaugaaccgggaggaatug

SEQ ID NO: 27033 - DNA, 21 bp, Artificial Sequence
  Synthetic
agcaaggcuccgtcucaaaaa

SEQ ID NO: 27034 - DNA, 19 bp, Artificial Sequence
  Synthetic
cagaugcaccgacugcaag

SEQ ID NO: 27035 - DNA, 22 bp, Artificial Sequence
  Synthetic
ttcccagtgucttagccctgua

SEQ ID NO: 27036 - DNA, 30 bp, Artificial Sequence
  Synthetic
gtaccaaggttacugattcacttaattuct

SEQ ID NO: 27037 - DNA, 22 bp, Artificial Sequence
  Synthetic
gcatgcauagaccaatgggtut

SEQ ID NO: 27038 - DNA, 25 bp, Artificial Sequence
  Synthetic
gagacaagagggagguattctuact

SEQ ID NO: 27039 - DNA, 21 bp, Artificial Sequence
  Synthetic
cagctgaugatggcaacucac

SEQ ID NO: 27040 - DNA, 17 bp, Artificial Sequence
  Synthetic
ccctcccugccauggac

SEQ ID NO: 27041 - DNA, 21 bp, Artificial Sequence
  Synthetic
gggacccaaaugtggtacuca

SEQ ID NO: 27042 - DNA, 30 bp, Artificial Sequence
  Synthetic
aaccttagtgggaagautaaattcacacut

SEQ ID NO: 27043 - DNA, 24 bp, Artificial Sequence
  Synthetic
tgcatttuggaggagctctactuc

SEQ ID NO: 27044 - DNA, 30 bp, Artificial Sequence
  Synthetic
tcatatttatacucccttttaccaaugcgt

SEQ ID NO: 27045 - DNA, 23 bp, Artificial Sequence
  Synthetic
ccccttccugtaccatcttucct

SEQ ID NO: 27046 - DNA, 22 bp, Artificial Sequence
  Synthetic
tccacccucctctacccuaaga

SEQ ID NO: 27047 - DNA, 24 bp, Artificial Sequence
  Synthetic
ctggtggaugtgcagtucaaaaag

SEQ ID NO: 27048 - DNA, 23 bp, Artificial Sequence
  Synthetic
acctcccaguatgtgauggagac

SEQ ID NO: 27049 - DNA, 24 bp, Artificial Sequence
  Synthetic
gaaattctgcautggtgctuagga

SEQ ID NO: 27050 - DNA, 24 bp, Artificial Sequence
  Synthetic
cccttttccucaatccaugaccaa

SEQ ID NO: 27051 - DNA, 25 bp, Artificial Sequence
  Synthetic
gaatcgagccuggtctctaaaguag

SEQ ID NO: 27052 - DNA, 25 bp, Artificial Sequence
  Synthetic
gggaaggaaguagataaggtgcuga

SEQ ID NO: 27053 - DNA, 22 bp, Artificial Sequence
  Synthetic
ctggttucaggaagctcucagg

SEQ ID NO: 27054 - DNA, 28 bp, Artificial Sequence
  Synthetic
gagagaaatgaaguctaacactagtucc

SEQ ID NO: 27055 - DNA, 26 bp, Artificial Sequence
  Synthetic
ccccaugaggaggttttctctuagat

SEQ ID NO: 27056 - DNA, 30 bp, Artificial Sequence
  Synthetic
agcuaatattuaaaaagaagguaggaagga

SEQ ID NO: 27057 - DNA, 26 bp, Artificial Sequence
  Synthetic
cctcttccucgtgctgattttuaaag

SEQ ID NO: 27058 - DNA, 21 bp, Artificial Sequence
  Synthetic
gtgaccagacaguggatugga

SEQ ID NO: 27059 - DNA, 29 bp, Artificial Sequence
  Synthetic
cgtatgcaatgatuactccagtgtactua

SEQ ID NO: 27060 - DNA, 22 bp, Artificial Sequence
  Synthetic
cttcuacccagaggcagaagug

SEQ ID NO: 27061 - DNA, 23 bp, Artificial Sequence
  Synthetic
atcagacttccucaccccaguaa

SEQ ID NO: 27062 - DNA, 28 bp, Artificial Sequence
  Synthetic
aagcattaagaguatcaacagtgcugaa

SEQ ID NO: 27063 - DNA, 23 bp, Artificial Sequence
  Synthetic
tgactcacugtctagctctugct

SEQ ID NO: 27064 - DNA, 24 bp, Artificial Sequence
  Synthetic
gctgctgtccuccatgctattuac

SEQ ID NO: 27065 - DNA, 30 bp, Artificial Sequence
  Synthetic
tcattagatugagagacactagacaucaca

SEQ ID NO: 27066 - DNA, 17 bp, Artificial Sequence
  Synthetic
agtcugagcggcgaugg

SEQ ID NO: 27067 - DNA, 17 bp, Artificial Sequence
  Synthetic
cuccagcagcagcucct

SEQ ID NO: 27068 - DNA, 22 bp, Artificial Sequence
  Synthetic
tggtgguggaagtgcaacauat

SEQ ID NO: 27069 - DNA, 31 bp, Artificial Sequence
  Synthetic
cggagatgttccuttcaggactattaaauaa

SEQ ID NO: 27070 - DNA, 22 bp, Artificial Sequence
  Synthetic
gctcactttcauggctgtggut

SEQ ID NO: 27071 - DNA, 27 bp, Artificial Sequence
  Synthetic
tgttaacaccaaauaacttactgcuca

SEQ ID NO: 27072 - DNA, 25 bp, Artificial Sequence
  Synthetic
gtgtataaactcuccaggttgccut

SEQ ID NO: 27073 - DNA, 21 bp, Artificial Sequence
  Synthetic
ggagcagcccauctatccuga

SEQ ID NO: 27074 - DNA, 25 bp, Artificial Sequence
  Synthetic
cgacatcatgguattccccttacua

SEQ ID NO: 27075 - DNA, 18 bp, Artificial Sequence
  Synthetic
tgggcctucccctacucc

SEQ ID NO: 27076 - DNA, 24 bp, Artificial Sequence
  Synthetic
aatgtggaagugactagugaagcc

SEQ ID NO: 27077 - DNA, 23 bp, Artificial Sequence
  Synthetic
catagcccauctccagctcatuc

SEQ ID NO: 27078 - DNA, 24 bp, Artificial Sequence
  Synthetic
ggccagagaagaaacutccacauc

SEQ ID NO: 27079 - DNA, 18 bp, Artificial Sequence
  Synthetic
cgagcagaucgcccucaa

SEQ ID NO: 27080 - DNA, 23 bp, Artificial Sequence
  Synthetic
aaggccttguttctgtcttuagg

SEQ ID NO: 27081 - DNA, 30 bp, Artificial Sequence
  Synthetic
atatttgatcattttuctctctccatguct

SEQ ID NO: 27082 - DNA, 21 bp, Artificial Sequence
  Synthetic
gctggtcucaatcagctccug

SEQ ID NO: 27083 - DNA, 21 bp, Artificial Sequence
  Synthetic
ctcacacccacuctcctgaug

SEQ ID NO: 27084 - DNA, 19 bp, Artificial Sequence
  Synthetic
gtguctctgcauccaggga

SEQ ID NO: 27085 - DNA, 18 bp, Artificial Sequence
  Synthetic
ctctcaacccugcccugt

SEQ ID NO: 27086 - DNA, 21 bp, Artificial Sequence
  Synthetic
actcatctcuggcctctugga

SEQ ID NO: 27087 - DNA, 20 bp, Artificial Sequence
  Synthetic
ggctgaagagugagcctugt

SEQ ID NO: 27088 - DNA, 22 bp, Artificial Sequence
  Synthetic
ctctacguccaccatcaagucc

SEQ ID NO: 27089 - DNA, 22 bp, Artificial Sequence
  Synthetic
cagtgtugcccagtagagucac

SEQ ID NO: 27090 - DNA, 21 bp, Artificial Sequence
  Synthetic
tgtctcctccucgtactgcuc

SEQ ID NO: 27091 - DNA, 22 bp, Artificial Sequence
  Synthetic
gctgggctuggttgaagtacua

SEQ ID NO: 27092 - DNA, 23 bp, Artificial Sequence
  Synthetic
ggccattucacaagtcatgucct

SEQ ID NO: 27093 - DNA, 22 bp, Artificial Sequence
  Synthetic
ccttcctgucttgcttccugaa

SEQ ID NO: 27094 - DNA, 17 bp, Artificial Sequence
  Synthetic
cguggcctccuccaggt

SEQ ID NO: 27095 - DNA, 20 bp, Artificial Sequence
  Synthetic
cuttgtgtcugacccaggca

SEQ ID NO: 27096 - DNA, 22 bp, Artificial Sequence
  Synthetic
gcctcagtuacctcagggcuat

SEQ ID NO: 27097 - DNA, 22 bp, Artificial Sequence
  Synthetic
gaaggaaggcuacctgtcacuc

SEQ ID NO: 27098 - DNA, 23 bp, Artificial Sequence
  Synthetic
cattggtgtugcctgcaaaauct

SEQ ID NO: 27099 - DNA, 21 bp, Artificial Sequence
  Synthetic
caucgctaagcugaccaagga

SEQ ID NO: 27100 - DNA, 23 bp, Artificial Sequence
  Synthetic
aggaccaggauaacacuctaguc

SEQ ID NO: 27101 - DNA, 23 bp, Artificial Sequence
  Synthetic
tggaggaugaggaggagaugaac

SEQ ID NO: 27102 - DNA, 21 bp, Artificial Sequence
  Synthetic
cctggttgugagatgggcuat

SEQ ID NO: 27103 - DNA, 22 bp, Artificial Sequence
  Synthetic
ccaccaugaaggaagagtucgg

SEQ ID NO: 27104 - DNA, 20 bp, Artificial Sequence
  Synthetic
ttgacatugcggatcugcct

SEQ ID NO: 27105 - DNA, 21 bp, Artificial Sequence
  Synthetic
gcctgttgcauctacccctug

SEQ ID NO: 27106 - DNA, 22 bp, Artificial Sequence
  Synthetic
ctcccccugttctatgagcuct

SEQ ID NO: 27107 - DNA, 23 bp, Artificial Sequence
  Synthetic
actttacccuaaggctgacccut

SEQ ID NO: 27108 - DNA, 24 bp, Artificial Sequence
  Synthetic
tttcctcaucaaactcaagcauca

SEQ ID NO: 27109 - DNA, 29 bp, Artificial Sequence
  Synthetic
tgttgattatttcucctctcgctgttuag

SEQ ID NO: 27110 - DNA, 22 bp, Artificial Sequence
  Synthetic
ccaggaugttgtaguccacagt

SEQ ID NO: 27111 - DNA, 24 bp, Artificial Sequence
  Synthetic
tgattctctcuttgcctctucacc

SEQ ID NO: 27112 - DNA, 23 bp, Artificial Sequence
  Synthetic
ctcagcaaauggctgttgaaugt

SEQ ID NO: 27113 - DNA, 22 bp, Artificial Sequence
  Synthetic
gcagcaggugtactactccauc

SEQ ID NO: 27114 - DNA, 18 bp, Artificial Sequence
  Synthetic
gtcagcaccucaggccut

SEQ ID NO: 27115 - DNA, 22 bp, Artificial Sequence
  Synthetic
ctctttgtcuctcgctctgucc

SEQ ID NO: 27116 - DNA, 18 bp, Artificial Sequence
  Synthetic
tgcaugcaggagtcgtug

SEQ ID NO: 27117 - DNA, 25 bp, Artificial Sequence
  Synthetic
ctctactcuctttccttccucacct

SEQ ID NO: 27118 - DNA, 26 bp, Artificial Sequence
  Synthetic
aagccagauacagtacaatcaacugg

SEQ ID NO: 27119 - DNA, 24 bp, Artificial Sequence
  Synthetic
catgcagttcugctcctttcauag

SEQ ID NO: 27120 - DNA, 20 bp, Artificial Sequence
  Synthetic
tgcaaucccagcctuaaacc

SEQ ID NO: 27121 - DNA, 19 bp, Artificial Sequence
  Synthetic
cagatccucagcccugacc

SEQ ID NO: 27122 - DNA, 21 bp, Artificial Sequence
  Synthetic
cctggctuatttaggccucca

SEQ ID NO: 27123 - DNA, 18 bp, Artificial Sequence
  Synthetic
cttaugcgcccccuccag

SEQ ID NO: 27124 - DNA, 24 bp, Artificial Sequence
  Synthetic
tggcttugacaaactcttcctugt

SEQ ID NO: 27125 - DNA, 22 bp, Artificial Sequence
  Synthetic
gggctcccucaggagtaacaua

SEQ ID NO: 27126 - DNA, 20 bp, Artificial Sequence
  Synthetic
agggtgcuctgtctggguat

SEQ ID NO: 27127 - DNA, 19 bp, Artificial Sequence
  Synthetic
tcaccucatgcucccacct

SEQ ID NO: 27128 - DNA, 22 bp, Artificial Sequence
  Synthetic
cattctccucagctggttguca

SEQ ID NO: 27129 - DNA, 19 bp, Artificial Sequence
  Synthetic
cgagcagaucgcccucaag

SEQ ID NO: 27130 - DNA, 21 bp, Artificial Sequence
  Synthetic
cggagagacacuggtcuggat

SEQ ID NO: 27131 - DNA, 23 bp, Artificial Sequence
  Synthetic
gatgctcaaugcttttcctgcuc

SEQ ID NO: 27132 - DNA, 22 bp, Artificial Sequence
  Synthetic
acccgcucactagtctcaauca

SEQ ID NO: 27133 - DNA, 21 bp, Artificial Sequence
  Synthetic
ctcatgcccacuctcctgauc

SEQ ID NO: 27134 - DNA, 18 bp, Artificial Sequence
  Synthetic
gcgtguctctgcguccag

SEQ ID NO: 27135 - DNA, 17 bp, Artificial Sequence
  Synthetic
ccctgugccctgacugt

SEQ ID NO: 27136 - DNA, 17 bp, Artificial Sequence
  Synthetic
ccuccccagcctctugg

SEQ ID NO: 27137 - DNA, 20 bp, Artificial Sequence
  Synthetic
ggctgaagagugagcctugt

SEQ ID NO: 27138 - DNA, 22 bp, Artificial Sequence
  Synthetic
ctacgtccaccaucaagtccuc

SEQ ID NO: 27139 - DNA, 22 bp, Artificial Sequence
  Synthetic
gtttcctcutgtccccauccac

SEQ ID NO: 27140 - DNA, 23 bp, Artificial Sequence
  Synthetic
gtctcatactuggtcctccacug

SEQ ID NO: 27141 - DNA, 25 bp, Artificial Sequence
  Synthetic
gggttgcttuatggagaaagcugaa

SEQ ID NO: 27142 - DNA, 20 bp, Artificial Sequence
  Synthetic
gagacugtggugggaaccat

SEQ ID NO: 27143 - DNA, 28 bp, Artificial Sequence
  Synthetic
catcatataactcuccttcccttcucag

SEQ ID NO: 27144 - DNA, 17 bp, Artificial Sequence
  Synthetic
cguggcctccuccaggt

SEQ ID NO: 27145 - DNA, 18 bp, Artificial Sequence
  Synthetic
tcugaccaggcacgcauc

SEQ ID NO: 27146 - DNA, 23 bp, Artificial Sequence
  Synthetic
ccugtaatgctgugaacaggaca

SEQ ID NO: 27147 - DNA, 22 bp, Artificial Sequence
  Synthetic
ccttaccucaccatccctccut

SEQ ID NO: 27148 - DNA, 23 bp, Artificial Sequence
  Synthetic
gggcacagauagacatggcauat

SEQ ID NO: 27149 - DNA, 22 bp, Artificial Sequence
  Synthetic
gatcatugccaagcugaccaag

SEQ ID NO: 27150 - DNA, 25 bp, Artificial Sequence
  Synthetic
agtatggtcugagagtcctgaugag

SEQ ID NO: 27151 - DNA, 24 bp, Artificial Sequence
  Synthetic
caaggugaaggagaugaacgagag

SEQ ID NO: 27152 - DNA, 21 bp, Artificial Sequence
  Synthetic
ggguggaagagccaacaguag

SEQ ID NO: 27153 - DNA, 25 bp, Artificial Sequence
  Synthetic
gcugaagagugcagaaagagagaag

SEQ ID NO: 27154 - DNA, 22 bp, Artificial Sequence
  Synthetic
cgggaaaccucctcttgagauc

SEQ ID NO: 27155 - DNA, 22 bp, Artificial Sequence
  Synthetic
cccaccatcuctttccctcgua

SEQ ID NO: 27156 - DNA, 22 bp, Artificial Sequence
  Synthetic
ctcccccugttctatgagcuct

SEQ ID NO: 27157 - DNA, 25 bp, Artificial Sequence
  Synthetic
acagactccucctacttccttctug

SEQ ID NO: 27158 - DNA, 17 bp, Artificial Sequence
  Synthetic
gggctgugtcccacuca

SEQ ID NO: 27159 - DNA, 25 bp, Artificial Sequence
  Synthetic
caaaugccagcaaggatguaaagag

SEQ ID NO: 27160 - DNA, 24 bp, Artificial Sequence
  Synthetic
ccaatgatgtugtagtccacgaug

SEQ ID NO: 27161 - DNA, 22 bp, Artificial Sequence
  Synthetic
cactcagtgaugctctctccug

SEQ ID NO: 27162 - DNA, 22 bp, Artificial Sequence
  Synthetic
gggagcgagugagtgattgtuc

SEQ ID NO: 27163 - DNA, 23 bp, Artificial Sequence
  Synthetic
aatatgggtcuctcctccaccut

SEQ ID NO: 27164 - DNA, 21 bp, Artificial Sequence
  Synthetic
gagaugactgcugagcagaca

SEQ ID NO: 27165 - DNA, 27 bp, Artificial Sequence
  Synthetic
cttcactucagaggagaaaaacuccat

SEQ ID NO: 27166 - DNA, 22 bp, Artificial Sequence
  Synthetic
gcgtctuagctctgctttugga

SEQ ID NO: 27167 - DNA, 22 bp, Artificial Sequence
  Synthetic
gtgtcccacccuaaccatgtut

SEQ ID NO: 27168 - DNA, 24 bp, Artificial Sequence
  Synthetic
agagagagaggucaagaccagaug

SEQ ID NO: 27169 - DNA, 22 bp, Artificial Sequence
  Synthetic
agauatgagcctucccccaact

SEQ ID NO: 27170 - DNA, 21 bp, Artificial Sequence
  Synthetic
caggugagagctcttcuccct

SEQ ID NO: 27171 - DNA, 22 bp, Artificial Sequence
  Synthetic
ccaauaagcccctgtctucaca

SEQ ID NO: 27172 - DNA, 23 bp, Artificial Sequence
  Synthetic
cctatcccagutccctucaggaa

SEQ ID NO: 27173 - DNA, 25 bp, Artificial Sequence
  Synthetic
gcaagtcacugctccttttctaucc

SEQ ID NO: 27174 - DNA, 23 bp, Artificial Sequence
  Synthetic
cgatcctugaggttguagagcac

SEQ ID NO: 27175 - DNA, 23 bp, Artificial Sequence
  Synthetic
ctcttgagcacuattgccctguc

SEQ ID NO: 27176 - DNA, 23 bp, Artificial Sequence
  Synthetic
aaactccugtttgtcaucaggca

SEQ ID NO: 27177 - DNA, 21 bp, Artificial Sequence
  Synthetic
aagggaagaaugggcagaugg

SEQ ID NO: 27178 - DNA, 20 bp, Artificial Sequence
  Synthetic
ctgcuccaggaatccctucg

SEQ ID NO: 27179 - DNA, 20 bp, Artificial Sequence
  Synthetic
ccttctgcugcagggcaaua

SEQ ID NO: 27180 - DNA, 17 bp, Artificial Sequence
  Synthetic
ccuagggucgcccgagt

SEQ ID NO: 27181 - DNA, 22 bp, Artificial Sequence
  Synthetic
ggagaccagcuactgctucaag

SEQ ID NO: 27182 - DNA, 19 bp, Artificial Sequence
  Synthetic
cgagaacuggtggctcucc

SEQ ID NO: 27183 - DNA, 18 bp, Artificial Sequence
  Synthetic
tcgatgcugccgtcgtut

SEQ ID NO: 27184 - DNA, 17 bp, Artificial Sequence
  Synthetic
cccagcaggcugtgcuc

SEQ ID NO: 27185 - DNA, 18 bp, Artificial Sequence
  Synthetic
gucccaaggugaccagca

SEQ ID NO: 27186 - DNA, 28 bp, Artificial Sequence
  Synthetic
tttttaacgtatcutagtgtgagcucgt

SEQ ID NO: 27187 - DNA, 23 bp, Artificial Sequence
  Synthetic
gcatggcccuttggagacuaaag

SEQ ID NO: 27188 - DNA, 23 bp, Artificial Sequence
  Synthetic
gggactccutgctaaccauagga

SEQ ID NO: 27189 - DNA, 30 bp, Artificial Sequence
  Synthetic
ctaaagaaaagatagugggtgtacctcaut

SEQ ID NO: 27190 - DNA, 21 bp, Artificial Sequence
  Synthetic
ggtggtuaatgtgtccucggt

SEQ ID NO: 27191 - DNA, 21 bp, Artificial Sequence
  Synthetic
ccaagttgcugtggacctcua

SEQ ID NO: 27192 - DNA, 23 bp, Artificial Sequence
  Synthetic
ctcttcuccccctttgucaagac

SEQ ID NO: 27193 - DNA, 22 bp, Artificial Sequence
  Synthetic
atcaggcacaaacucagctuct

SEQ ID NO: 27194 - DNA, 23 bp, Artificial Sequence
  Synthetic
cttctaggaauccggtgggagua

SEQ ID NO: 27195 - DNA, 20 bp, Artificial Sequence
  Synthetic
aggtguccacaactcaugcc

SEQ ID NO: 27196 - DNA, 24 bp, Artificial Sequence
  Synthetic
gttgttaaucccaggtcuaaccgt

SEQ ID NO: 27197 - DNA, 24 bp, Artificial Sequence
  Synthetic
gccatatttcaaugtcagctccuc

SEQ ID NO: 27198 - DNA, 24 bp, Artificial Sequence
  Synthetic
ggtaatgtggutggtgatcuccat

SEQ ID NO: 27199 - DNA, 24 bp, Artificial Sequence
  Synthetic
caaagatctgugtctcatgcucac

SEQ ID NO: 27200 - DNA, 30 bp, Artificial Sequence
  Synthetic
tattaatatctaatguttgggagccaucac

SEQ ID NO: 27201 - DNA, 23 bp, Artificial Sequence
  Synthetic
catucccaccacaccaaaatucc

SEQ ID NO: 27202 - DNA, 26 bp, Artificial Sequence
  Synthetic
cctaccacccauttacaagttuagcc

SEQ ID NO: 27203 - DNA, 27 bp, Artificial Sequence
  Synthetic
tgcttcagtuccgataaattcuacact

SEQ ID NO: 27204 - DNA, 26 bp, Artificial Sequence
  Synthetic
gagctgtaactuccactttctctuga

SEQ ID NO: 27205 - DNA, 28 bp, Artificial Sequence
  Synthetic
actttgcaacauagagaaatgcacauac

SEQ ID NO: 27206 - DNA, 24 bp, Artificial Sequence
  Synthetic
tgtgaatgtgugtctttcccauct

SEQ ID NO: 27207 - DNA, 30 bp, Artificial Sequence
  Synthetic
gggattutaaccgcaaauatgctagataua

SEQ ID NO: 27208 - DNA, 22 bp, Artificial Sequence
  Synthetic
ccgaagacagcacugttaccug

SEQ ID NO: 27209 - DNA, 21 bp, Artificial Sequence
  Synthetic
ccaagtcucccctcttcaugg

SEQ ID NO: 27210 - DNA, 22 bp, Artificial Sequence
  Synthetic
cctacagauaccagggugcaac

SEQ ID NO: 27211 - DNA, 25 bp, Artificial Sequence
  Synthetic
gccttgaauttcttttcugcacgac

SEQ ID NO: 27212 - DNA, 23 bp, Artificial Sequence
  Synthetic
acagcttctuacagtgctggaug

SEQ ID NO: 27213 - DNA, 24 bp, Artificial Sequence
  Synthetic
gctacactcutccaaacctucact

SEQ ID NO: 27214 - DNA, 27 bp, Artificial Sequence
  Synthetic
aaggcttctgaguggtacaacttttua

SEQ ID NO: 27215 - DNA, 21 bp, Artificial Sequence
  Synthetic
caaggcugacactcacgauga

SEQ ID NO: 27216 - DNA, 22 bp, Artificial Sequence
  Synthetic
gggtgatcutgttgaaggtugg

SEQ ID NO: 27217 - DNA, 24 bp, Artificial Sequence
  Synthetic
ctgatcacugggagtcatcatgug

SEQ ID NO: 27218 - DNA, 22 bp, Artificial Sequence
  Synthetic
tgagttggccuacaggtatugt

SEQ ID NO: 27219 - DNA, 30 bp, Artificial Sequence
  Synthetic
cttacatttttctgutgggtagtttgtgut

SEQ ID NO: 27220 - DNA, 21 bp, Artificial Sequence
  Synthetic
gcttcagaaucacagcucggt

SEQ ID NO: 27221 - DNA, 20 bp, Artificial Sequence
  Synthetic
acagaugcgctaaugacggt

SEQ ID NO: 27222 - DNA, 28 bp, Artificial Sequence
  Synthetic
cgcaattttccuattatcggagugaaag

SEQ ID NO: 27223 - DNA, 20 bp, Artificial Sequence
  Synthetic
gagugagaggactccuccgt

SEQ ID NO: 27224 - DNA, 20 bp, Artificial Sequence
  Synthetic
gcaggagugctcacgatcug

SEQ ID NO: 27225 - DNA, 27 bp, Artificial Sequence
  Synthetic
gccctcttaacuacactctcatuacct

SEQ ID NO: 27226 - DNA, 25 bp, Artificial Sequence
  Synthetic
cacagcauccaagaggtaaagtuct

SEQ ID NO: 27227 - DNA, 27 bp, Artificial Sequence
  Synthetic
ggctttcttcaugatcttgtacatguc

SEQ ID NO: 27228 - DNA, 21 bp, Artificial Sequence
  Synthetic
cccctgugttgttcccuacat

SEQ ID NO: 27229 - DNA, 26 bp, Artificial Sequence
  Synthetic
gtcagttctgauaatcggaggtguac

SEQ ID NO: 27230 - DNA, 25 bp, Artificial Sequence
  Synthetic
agacagaagautcccttuccagaga

SEQ ID NO: 27231 - DNA, 21 bp, Artificial Sequence
  Synthetic
tctcauggctcagtucccaac

SEQ ID NO: 27232 - DNA, 20 bp, Artificial Sequence
  Synthetic
cctgctcccauatggctcuc

SEQ ID NO: 27233 - DNA, 20 bp, Artificial Sequence
  Synthetic
cccaucaagagcatcuccca

SEQ ID NO: 27234 - DNA, 20 bp, Artificial Sequence
  Synthetic
gagtugggaagggaccctug

SEQ ID NO: 27235 - DNA, 25 bp, Artificial Sequence
  Synthetic
catgttgatguaggttttgctccug

SEQ ID NO: 27236 - DNA, 21 bp, Artificial Sequence
  Synthetic
gcttgcttcuggtgacacuga

SEQ ID NO: 27237 - DNA, 20 bp, Artificial Sequence
  Synthetic
cattctccccugcaccauct

SEQ ID NO: 27238 - DNA, 23 bp, Artificial Sequence
  Synthetic
tgtgcctgtucagactgtaaucc

SEQ ID NO: 27239 - DNA, 20 bp, Artificial Sequence
  Synthetic
gcauaggaagcccctguagc

SEQ ID NO: 27240 - DNA, 22 bp, Artificial Sequence
  Synthetic
acacagccagguggaatttgut

SEQ ID NO: 27241 - DNA, 23 bp, Artificial Sequence
  Synthetic
cccatttgguttgagcaacucac

SEQ ID NO: 27242 - DNA, 22 bp, Artificial Sequence
  Synthetic
ctccuagaccctcccuccaaat

SEQ ID NO: 27243 - DNA, 23 bp, Artificial Sequence
  Synthetic
tgactcccacgcutcattttcuc

SEQ ID NO: 27244 - DNA, 22 bp, Artificial Sequence
  Synthetic
ctccacguccacctctaacaug

SEQ ID NO: 27245 - DNA, 25 bp, Artificial Sequence
  Synthetic
agattatcaggugagatgcctgtug

SEQ ID NO: 27246 - DNA, 21 bp, Artificial Sequence
  Synthetic
ctttcctcutgccccguaaga

SEQ ID NO: 27247 - DNA, 26 bp, Artificial Sequence
  Synthetic
gtgaaactgaaaucctgagtgaucct

SEQ ID NO: 27248 - DNA, 24 bp, Artificial Sequence
  Synthetic
agtattggcugtcttgaggaaugc

SEQ ID NO: 27249 - DNA, 24 bp, Artificial Sequence
  Synthetic
gcttcagcauctgcatcttctuct

SEQ ID NO: 27250 - DNA, 17 bp, Artificial Sequence
  Synthetic
cgacgcccgugtgtugt

SEQ ID NO: 27251 - DNA, 18 bp, Artificial Sequence
  Synthetic
gctgtccuccgccttgug

SEQ ID NO: 27252 - DNA, 21 bp, Artificial Sequence
  Synthetic
ccctgtccutctggttctgug

SEQ ID NO: 27253 - DNA, 25 bp, Artificial Sequence
  Synthetic
gcatcttugagagcctcagagtaut

SEQ ID NO: 27254 - DNA, 17 bp, Artificial Sequence
  Synthetic
gcgactuccggacugct

SEQ ID NO: 27255 - DNA, 19 bp, Artificial Sequence
  Synthetic
caggcuccggatcttccug

SEQ ID NO: 27256 - DNA, 22 bp, Artificial Sequence
  Synthetic
agccattucctgaagcuaccac

SEQ ID NO: 27257 - DNA, 22 bp, Artificial Sequence
  Synthetic
agatggctgaugaggcattcuc

SEQ ID NO: 27258 - DNA, 21 bp, Artificial Sequence
  Synthetic
gggcctgaugggatctgauct

SEQ ID NO: 27259 - DNA, 24 bp, Artificial Sequence
  Synthetic
tcatgctgttuagtcactgctcug

SEQ ID NO: 27260 - DNA, 24 bp, Artificial Sequence
  Synthetic
ccatccctcucctttttctcucct

SEQ ID NO: 27261 - DNA, 24 bp, Artificial Sequence
  Synthetic
cagctctuaaaagatgccttuccc

SEQ ID NO: 27262 - DNA, 27 bp, Artificial Sequence
  Synthetic
tataggtgatgugcttcattttcaucc

SEQ ID NO: 27263 - DNA, 22 bp, Artificial Sequence
  Synthetic
tgccaggutggtatucaaccat

SEQ ID NO: 27264 - DNA, 23 bp, Artificial Sequence
  Synthetic
tcccaccuttttatctucacgca

SEQ ID NO: 27265 - DNA, 28 bp, Artificial Sequence
  Synthetic
gtttatttgacacugaaacgaagagcut

SEQ ID NO: 27266 - DNA, 22 bp, Artificial Sequence
  Synthetic
actaaagcuggccctgaaugag

SEQ ID NO: 27267 - DNA, 31 bp, Artificial Sequence
  Synthetic
agagaacgtaatuattccagccatauagaga

SEQ ID NO: 27268 - DNA, 29 bp, Artificial Sequence
  Synthetic
ctggatcagacuttactggagtuaaacaa

SEQ ID NO: 27269 - DNA, 18 bp, Artificial Sequence
  Synthetic
accaggaucgcccugaca

SEQ ID NO: 27270 - DNA, 22 bp, Artificial Sequence
  Synthetic
aggutcatggacugaggcaaag

SEQ ID NO: 27271 - DNA, 22 bp, Artificial Sequence
  Synthetic
cctaccuccaggagaagccaua

SEQ ID NO: 27272 - DNA, 22 bp, Artificial Sequence
  Synthetic
cgggaagcacuatggcatcuat

SEQ ID NO: 27273 - DNA, 21 bp, Artificial Sequence
  Synthetic
ggctuggacattttugcccaa

SEQ ID NO: 27274 - DNA, 20 bp, Artificial Sequence
  Synthetic
gaugaaccaggacggugagg

SEQ ID NO: 27275 - DNA, 21 bp, Artificial Sequence
  Synthetic
ggactcagugttggacuccat

SEQ ID NO: 27276 - DNA, 21 bp, Artificial Sequence
  Synthetic
cgagaagcaggcgcuaagauc

SEQ ID NO: 27277 - DNA, 22 bp, Artificial Sequence
  Synthetic
cacttgacggccaugaagagua

SEQ ID NO: 27278 - DNA, 22 bp, Artificial Sequence
  Synthetic
aagctgtgugtctgccauaaca

SEQ ID NO: 27279 - DNA, 23 bp, Artificial Sequence
  Synthetic
ccggaaccgagagauagttucct

SEQ ID NO: 27280 - DNA, 21 bp, Artificial Sequence
  Synthetic
gccagcctuataacagccgua

SEQ ID NO: 27281 - DNA, 24 bp, Artificial Sequence
  Synthetic
gttagaggucagggacagaugagt

SEQ ID NO: 27282 - DNA, 21 bp, Artificial Sequence
  Synthetic
gactagtgcucagaagcuggt

SEQ ID NO: 27283 - DNA, 27 bp, Artificial Sequence
  Synthetic
gaacataucacaaaggagcttcuccat

SEQ ID NO: 27284 - DNA, 28 bp, Artificial Sequence
  Synthetic
aatgccacatuactctttattgaaugcg

SEQ ID NO: 27285 - DNA, 23 bp, Artificial Sequence
  Synthetic
ttctgugagcaggagttugaaca

SEQ ID NO: 27286 - DNA, 31 bp, Artificial Sequence
  Synthetic
agtgttagctatugttaattattgtctucct

SEQ ID NO: 27287 - DNA, 23 bp, Artificial Sequence
  Synthetic
tggagcaacaagutgacatcuga

SEQ ID NO: 27288 - DNA, 22 bp, Artificial Sequence
  Synthetic
gaagggtacuagtccagaggug

SEQ ID NO: 27289 - DNA, 24 bp, Artificial Sequence
  Synthetic
ctgttgttgcutgttttcccucag

SEQ ID NO: 27290 - DNA, 25 bp, Artificial Sequence
  Synthetic
gaccagtuccagctccttcatauag

SEQ ID NO: 27291 - DNA, 23 bp, Artificial Sequence
  Synthetic
gcacataccugttgtcccatgut

SEQ ID NO: 27292 - DNA, 21 bp, Artificial Sequence
  Synthetic
gcctgacucggtauggaaagg

SEQ ID NO: 27293 - DNA, 24 bp, Artificial Sequence
  Synthetic
gcattaggcuttcaggatgtugaa

SEQ ID NO: 27294 - DNA, 23 bp, Artificial Sequence
  Synthetic
tgggaagacagagcugacttcua

SEQ ID NO: 27295 - DNA, 21 bp, Artificial Sequence
  Synthetic
cttacgtguaggactgugcgt

SEQ ID NO: 27296 - DNA, 22 bp, Artificial Sequence
  Synthetic
actggcuggttaggaugagaga

SEQ ID NO: 27297 - DNA, 25 bp, Artificial Sequence
  Synthetic
tcacagtgugcactttaaccuacag

SEQ ID NO: 27298 - DNA, 27 bp, Artificial Sequence
  Synthetic
ccaggatccuaaggcaaaacaagatut

SEQ ID NO: 27299 - DNA, 28 bp, Artificial Sequence
  Synthetic
tttactctgccuctctacatcttccuag

SEQ ID NO: 27300 - DNA, 22 bp, Artificial Sequence
  Synthetic
ggccatccagagutacagctuc

SEQ ID NO: 27301 - DNA, 23 bp, Artificial Sequence
  Synthetic
accaagctuaccctgtcttccua

SEQ ID NO: 27302 - DNA, 27 bp, Artificial Sequence
  Synthetic
ctgacatcgtacuggaattgaaagtug

SEQ ID NO: 27303 - DNA, 19 bp, Artificial Sequence
  Synthetic
ccugaccagggtcucacgt

SEQ ID NO: 27304 - DNA, 20 bp, Artificial Sequence
  Synthetic
ccacaccgaugttggcauct

SEQ ID NO: 27305 - DNA, 19 bp, Artificial Sequence
  Synthetic
gaagccagccuggaccaua

SEQ ID NO: 27306 - DNA, 28 bp, Artificial Sequence
  Synthetic
ctcagatccuatgtgtaaugaggaacaa

SEQ ID NO: 27307 - DNA, 26 bp, Artificial Sequence
  Synthetic
gtgagagtagautgggtctcttucag

SEQ ID NO: 27308 - DNA, 21 bp, Artificial Sequence
  Synthetic
acctcgtcauggatgctgaug

SEQ ID NO: 27309 - DNA, 22 bp, Artificial Sequence
  Synthetic
ggccagagugaagcttctctug

SEQ ID NO: 27310 - DNA, 22 bp, Artificial Sequence
  Synthetic
caaagcauccaagctcttcugg

SEQ ID NO: 27311 - DNA, 24 bp, Artificial Sequence
  Synthetic
cgtggaatgauggtgataacacug

SEQ ID NO: 27312 - DNA, 23 bp, Artificial Sequence
  Synthetic
catuagtaagcgcucagcaaagg

SEQ ID NO: 27313 - DNA, 22 bp, Artificial Sequence
  Synthetic
gcagaatgtucctgagctgcut

SEQ ID NO: 27314 - DNA, 23 bp, Artificial Sequence
  Synthetic
ccucagagcccagtttcuacaga

SEQ ID NO: 27315 - DNA, 23 bp, Artificial Sequence
  Synthetic
cctgcuaagacccatttcctucc

SEQ ID NO: 27316 - DNA, 20 bp, Artificial Sequence
  Synthetic
ggaaaggcaucccaggacuc

SEQ ID NO: 27317 - DNA, 21 bp, Artificial Sequence
  Synthetic
ctgcttccuttgctctgucca

SEQ ID NO: 27318 - DNA, 22 bp, Artificial Sequence
  Synthetic
gaactctggcugggaagaacua

SEQ ID NO: 27319 - DNA, 22 bp, Artificial Sequence
  Synthetic
ctactttgguccttggacugct

SEQ ID NO: 27320 - DNA, 22 bp, Artificial Sequence
  Synthetic
acccaaacuctttccacuagcc

SEQ ID NO: 27321 - DNA, 21 bp, Artificial Sequence
  Synthetic
gcacttaccugggatggctuc

SEQ ID NO: 27322 - DNA, 22 bp, Artificial Sequence
  Synthetic
tcctgagaauggagcaagggua

SEQ ID NO: 27323 - DNA, 24 bp, Artificial Sequence
  Synthetic
cttctcctgcucctgattgtctuc

SEQ ID NO: 27324 - DNA, 22 bp, Artificial Sequence
  Synthetic
ctaaggcuaagccgaaggcuag

SEQ ID NO: 27325 - DNA, 21 bp, Artificial Sequence
  Synthetic
caaccagaacugggagcgtua

SEQ ID NO: 27326 - DNA, 20 bp, Artificial Sequence
  Synthetic
agcgccaccugattacagug

SEQ ID NO: 27327 - DNA, 20 bp, Artificial Sequence
  Synthetic
gtggtgguaatgggauggct

SEQ ID NO: 27328 - DNA, 17 bp, Artificial Sequence
  Synthetic
caccggcagugtgcuct

SEQ ID NO: 27329 - DNA, 22 bp, Artificial Sequence
  Synthetic
ccttttctccucctcctccuca

SEQ ID NO: 27330 - DNA, 21 bp, Artificial Sequence
  Synthetic
cactaactgcucctgccaguc

SEQ ID NO: 27331 - DNA, 26 bp, Artificial Sequence
  Synthetic
tggttgttguggagtggaagttuaat

SEQ ID NO: 27332 - DNA, 19 bp, Artificial Sequence
  Synthetic
cagaccuccacgucgaaca

SEQ ID NO: 27333 - DNA, 20 bp, Artificial Sequence
  Synthetic
acaaccuggaccagcactuc

SEQ ID NO: 27334 - DNA, 18 bp, Artificial Sequence
  Synthetic
gcatcucccctcctugcc

SEQ ID NO: 27335 - DNA, 17 bp, Artificial Sequence
  Synthetic
tgggtcuccagcuccgt

SEQ ID NO: 27336 - DNA, 17 bp, Artificial Sequence
  Synthetic
gggccggcacucttcug

SEQ ID NO: 27337 - DNA, 17 bp, Artificial Sequence
  Synthetic
ttgaggguggcctgugg

SEQ ID NO: 27338 - DNA, 18 bp, Artificial Sequence
  Synthetic
guggacgacaugcccaac

SEQ ID NO: 27339 - DNA, 18 bp, Artificial Sequence
  Synthetic
gcuacaccucccgcaacc

SEQ ID NO: 27340 - DNA, 21 bp, Artificial Sequence
  Synthetic
tggacaagtucctggcttcug

SEQ ID NO: 27341 - DNA, 21 bp, Artificial Sequence
  Synthetic
ctccattgutggcacatuccg

SEQ ID NO: 27342 - DNA, 22 bp, Artificial Sequence
  Synthetic
ctggaaaaugcagtgggaguct

SEQ ID NO: 27343 - DNA, 29 bp, Artificial Sequence
  Synthetic
ctctctagtagcucaactggataaaccua

SEQ ID NO: 27344 - DNA, 25 bp, Artificial Sequence
  Synthetic
gctgatcctguggcttttgtcttua

SEQ ID NO: 27345 - DNA, 21 bp, Artificial Sequence
  Synthetic
cgucaaggucagagaaaccuc

SEQ ID NO: 27346 - DNA, 22 bp, Artificial Sequence
  Synthetic
ccatgcgugttattgacgucat

SEQ ID NO: 27347 - DNA, 20 bp, Artificial Sequence
  Synthetic
cucccagaaaccagggugaa

SEQ ID NO: 27348 - DNA, 20 bp, Artificial Sequence
  Synthetic
cccugacacgcattgtguct

SEQ ID NO: 27349 - DNA, 22 bp, Artificial Sequence
  Synthetic
aggactctcuaagccagtgugt

SEQ ID NO: 27350 - DNA, 19 bp, Artificial Sequence
  Synthetic
ctcaggcgugctactcucg

SEQ ID NO: 27351 - DNA, 26 bp, Artificial Sequence
  Synthetic
ctatacttcttgaugagcctggugat

SEQ ID NO: 27352 - DNA, 19 bp, Artificial Sequence
  Synthetic
ccatgcggugggtgtguag

SEQ ID NO: 27353 - DNA, 19 bp, Artificial Sequence
  Synthetic
gagacccguggaactcgut

SEQ ID NO: 27354 - DNA, 21 bp, Artificial Sequence
  Synthetic
caacaccggcucttctttuga

SEQ ID NO: 27355 - DNA, 20 bp, Artificial Sequence
  Synthetic
ctcaucgggcatccugagac

SEQ ID NO: 27356 - DNA, 18 bp, Artificial Sequence
  Synthetic
cgagatguggccctcgut

SEQ ID NO: 27357 - DNA, 18 bp, Artificial Sequence
  Synthetic
cggguacaacggctcuca

SEQ ID NO: 27358 - DNA, 17 bp, Artificial Sequence
  Synthetic
ggtgagcugcgtccuct

SEQ ID NO: 27359 - DNA, 20 bp, Artificial Sequence
  Synthetic
gctuccaggaaccacaccug

SEQ ID NO: 27360 - DNA, 22 bp, Artificial Sequence
  Synthetic
ctcagctgcutctcttgctuct

SEQ ID NO: 27361 - DNA, 18 bp, Artificial Sequence
  Synthetic
caacgugggacggauggt

SEQ ID NO: 27362 - DNA, 22 bp, Artificial Sequence
  Synthetic
ggagaggttucatgcctggaut

SEQ ID NO: 27363 - DNA, 21 bp, Artificial Sequence
  Synthetic
tgtcctgcuctgacctccuac

SEQ ID NO: 27364 - DNA, 24 bp, Artificial Sequence
  Synthetic
agatgccugacatcatcaucaagg

SEQ ID NO: 27365 - DNA, 20 bp, Artificial Sequence
  Synthetic
ggtuccccaaggagtccuga

SEQ ID NO: 27366 - DNA, 18 bp, Artificial Sequence
  Synthetic
cctgagcgccucggttut

SEQ ID NO: 27367 - DNA, 21 bp, Artificial Sequence
  Synthetic
cuaccgagagauacagcctuc

SEQ ID NO: 27368 - DNA, 19 bp, Artificial Sequence
  Synthetic
cccctccacuggcttgtuc

SEQ ID NO: 27369 - DNA, 17 bp, Artificial Sequence
  Synthetic
cccgacagucccgcuac

SEQ ID NO: 27370 - DNA, 23 bp, Artificial Sequence
  Synthetic
gatagccugaaaaaccuccacct

SEQ ID NO: 27371 - DNA, 22 bp, Artificial Sequence
  Synthetic
cuagaagacagggagcgugaaa

SEQ ID NO: 27372 - DNA, 19 bp, Artificial Sequence
  Synthetic
ctaaguccaccctgugcgt

SEQ ID NO: 27373 - DNA, 20 bp, Artificial Sequence
  Synthetic
cttccugaacacugggacca

SEQ ID NO: 27374 - DNA, 20 bp, Artificial Sequence
  Synthetic
cgaaaccugagaaggccuca

SEQ ID NO: 27375 - DNA, 24 bp, Artificial Sequence
  Synthetic
caaataucccaagagggucaaguc

SEQ ID NO: 27376 - DNA, 20 bp, Artificial Sequence
  Synthetic
gagctgtcuaacgcccucat

SEQ ID NO: 27377 - DNA, 18 bp, Artificial Sequence
  Synthetic
ggagccacautgccguca

SEQ ID NO: 27378 - DNA, 20 bp, Artificial Sequence
  Synthetic
ggtcaggagaaggcuggtuc

SEQ ID NO: 27379 - DNA, 19 bp, Artificial Sequence
  Synthetic
ggctcugagccacacucac

SEQ ID NO: 27380 - DNA, 21 bp, Artificial Sequence
  Synthetic
tctgtggaccuctcctuccag

SEQ ID NO: 27381 - DNA, 18 bp, Artificial Sequence
  Synthetic
agcacttuccccguccag

SEQ ID NO: 27382 - DNA, 22 bp, Artificial Sequence
  Synthetic
cgaggtuacaccatcuccgact

SEQ ID NO: 27383 - DNA, 19 bp, Artificial Sequence
  Synthetic
caagugaggcaccaggtuc

SEQ ID NO: 27384 - DNA, 18 bp, Artificial Sequence
  Synthetic
cctaagcuccctguggca

SEQ ID NO: 27385 - DNA, 18 bp, Artificial Sequence
  Synthetic
gccctguccaggcaccua

SEQ ID NO: 27386 - DNA, 21 bp, Artificial Sequence
  Synthetic
gctcatcgagcugaaggacug

SEQ ID NO: 27387 - DNA, 20 bp, Artificial Sequence
  Synthetic
ggtagcaggacuggauggga

SEQ ID NO: 27388 - DNA, 20 bp, Artificial Sequence
  Synthetic
ccugggcaacgactttgugt

SEQ ID NO: 27389 - DNA, 19 bp, Artificial Sequence
  Synthetic
cctcgugaccgaagcucag

SEQ ID NO: 27390 - DNA, 19 bp, Artificial Sequence
  Synthetic
ggcgugaccaccaagtcuc

SEQ ID NO: 27391 - DNA, 21 bp, Artificial Sequence
  Synthetic
tgagctcacuatcagguggca

SEQ ID NO: 27392 - DNA, 20 bp, Artificial Sequence
  Synthetic
ctcccagacutacugcccaa

SEQ ID NO: 27393 - DNA, 18 bp, Artificial Sequence
  Synthetic
ccggccucacacaaacuc

SEQ ID NO: 27394 - DNA, 20 bp, Artificial Sequence
  Synthetic
ggagttgcgguccaggaauc

SEQ ID NO: 27395 - DNA, 19 bp, Artificial Sequence
  Synthetic
cauccacgucgaagaggca

SEQ ID NO: 27396 - DNA, 28 bp, Artificial Sequence
  Synthetic
tgtacttgtgtuacccttagagtttugg

SEQ ID NO: 27397 - DNA, 28 bp, Artificial Sequence
  Synthetic
accagatgtaatuagcaacccatcatut

SEQ ID NO: 27398 - DNA, 22 bp, Artificial Sequence
  Synthetic
ctgaagacccugggtttgcuat

SEQ ID NO: 27399 - DNA, 23 bp, Artificial Sequence
  Synthetic
gtgacgccuctttgtuaaaagca

SEQ ID NO: 27400 - DNA, 24 bp, Artificial Sequence
  Synthetic
gataatccuacctttguggccagt

SEQ ID NO: 27401 - DNA, 29 bp, Artificial Sequence
  Synthetic
caagttuggaacacaggcaatatauacaa

SEQ ID NO: 27402 - DNA, 22 bp, Artificial Sequence
  Synthetic
gggagcctucatctgtactucg

SEQ ID NO: 27403 - DNA, 20 bp, Artificial Sequence
  Synthetic
aatgccctaugctggctugt

SEQ ID NO: 27404 - DNA, 17 bp, Artificial Sequence
  Synthetic
cgtugcccaggcuggag

SEQ ID NO: 27405 - DNA, 23 bp, Artificial Sequence
  Synthetic
aatggaaucaaggccagugaaua

SEQ ID NO: 27406 - DNA, 24 bp, Artificial Sequence
  Synthetic
gcatugggcagaaaagaaauggat

SEQ ID NO: 27407 - DNA, 27 bp, Artificial Sequence
  Synthetic
gaatatactuaaccgggctccttctug

SEQ ID NO: 27408 - DNA, 18 bp, Artificial Sequence
  Synthetic
ctgcggtuggcgttgaug

SEQ ID NO: 27409 - DNA, 22 bp, Artificial Sequence
  Synthetic
cgagcaguacaaggagcaggua

SEQ ID NO: 27410 - DNA, 23 bp, Artificial Sequence
  Synthetic
ggtggactugaacttggactuga

SEQ ID NO: 27411 - DNA, 20 bp, Artificial Sequence
  Synthetic
ggtctcagugcgctctctug

SEQ ID NO: 27412 - DNA, 25 bp, Artificial Sequence
  Synthetic
ccctcttccuccattcagtttccua

SEQ ID NO: 27413 - DNA, 22 bp, Artificial Sequence
  Synthetic
gagttgtcaggguggactctug

SEQ ID NO: 27414 - DNA, 20 bp, Artificial Sequence
  Synthetic
catgccccaagcucctagug

SEQ ID NO: 27415 - DNA, 22 bp, Artificial Sequence
  Synthetic
ggcagcacacauctctatucct

SEQ ID NO: 27416 - DNA, 23 bp, Artificial Sequence
  Synthetic
gcttggagauccctttcgaacug

SEQ ID NO: 27417 - DNA, 26 bp, Artificial Sequence
  Synthetic
ttcatgaagtugagcctcatagaaug

SEQ ID NO: 27418 - DNA, 23 bp, Artificial Sequence
  Synthetic
cggctttgagcautttgttgguc

SEQ ID NO: 27419 - DNA, 22 bp, Artificial Sequence
  Synthetic
agaagtcaccuctgggtctugt

SEQ ID NO: 27420 - DNA, 23 bp, Artificial Sequence
  Synthetic
gctgaagccugttcttggtctut

SEQ ID NO: 27421 - DNA, 20 bp, Artificial Sequence
  Synthetic
cctcucaccctacccuggac

SEQ ID NO: 27422 - DNA, 22 bp, Artificial Sequence
  Synthetic
ctccugcaaaagggaugcaaag

SEQ ID NO: 27423 - DNA, 21 bp, Artificial Sequence
  Synthetic
ccagtctctuggcaccctuag

SEQ ID NO: 27424 - DNA, 19 bp, Artificial Sequence
  Synthetic
ccatcgcugcactuggact

SEQ ID NO: 27425 - DNA, 21 bp, Artificial Sequence
  Synthetic
tgttatcccucccctctgcut

SEQ ID NO: 27426 - DNA, 22 bp, Artificial Sequence
  Synthetic
ggatagcaggauggtgggatug

SEQ ID NO: 27427 - DNA, 25 bp, Artificial Sequence
  Synthetic
agaagaacaaugcccugaagaagat

SEQ ID NO: 27428 - DNA, 18 bp, Artificial Sequence
  Synthetic
cagcaaaugcccctugcc

SEQ ID NO: 27429 - DNA, 23 bp, Artificial Sequence
  Synthetic
tcctgaagagcaccutggtttut

SEQ ID NO: 27430 - DNA, 21 bp, Artificial Sequence
  Synthetic
gtgctcggautataggcguga

SEQ ID NO: 27431 - DNA, 26 bp, Artificial Sequence
  Synthetic
gtuactcttttcccuccacaacaaag

SEQ ID NO: 27432 - DNA, 24 bp, Artificial Sequence
  Synthetic
ctccatctcaugcagtatctccuc

SEQ ID NO: 27433 - DNA, 22 bp, Artificial Sequence
  Synthetic
gtacctguatggatgcauggct

SEQ ID NO: 27434 - DNA, 23 bp, Artificial Sequence
  Synthetic
caaatgtgaaggcuccagaguga

SEQ ID NO: 27435 - DNA, 19 bp, Artificial Sequence
  Synthetic
agggtguggcttcaugacc

SEQ ID NO: 27436 - DNA, 22 bp, Artificial Sequence
  Synthetic
gccagtgaugacatggguaaga

SEQ ID NO: 27437 - DNA, 24 bp, Artificial Sequence
  Synthetic
ggtgacttcugctctgtgttucaa

SEQ ID NO: 27438 - DNA, 18 bp, Artificial Sequence
  Synthetic
ggacagcccuggcttcug

SEQ ID NO: 27439 - DNA, 20 bp, Artificial Sequence
  Synthetic
gauggccaagaugacggaga

SEQ ID NO: 27440 - DNA, 24 bp, Artificial Sequence
  Synthetic
tgttcaatuctccagcucaaagca

SEQ ID NO: 27441 - DNA, 27 bp, Artificial Sequence
  Synthetic
gccttggtttcuaagtttctagttucc

SEQ ID NO: 27442 - DNA, 21 bp, Artificial Sequence
  Synthetic
ctccacgaaagacutguccgt

SEQ ID NO: 27443 - DNA, 22 bp, Artificial Sequence
  Synthetic
ggatgcccaugcgttgtgtaua

SEQ ID NO: 27444 - DNA, 21 bp, Artificial Sequence
  Synthetic
gatgaagtuccactcgaugcc

SEQ ID NO: 27445 - DNA, 24 bp, Artificial Sequence
  Synthetic
ggctccttgucttctgacttcaua

SEQ ID NO: 27446 - DNA, 21 bp, Artificial Sequence
  Synthetic
tttgtucacgcgggtgaguat

SEQ ID NO: 27447 - DNA, 23 bp, Artificial Sequence
  Synthetic
gcacccggucaagaauaaaaauc

SEQ ID NO: 27448 - DNA, 21 bp, Artificial Sequence
  Synthetic
ccaaccccaaagucattgguc

SEQ ID NO: 27449 - DNA, 23 bp, Artificial Sequence
  Synthetic
agtggcttuaggctccaaaacuc

SEQ ID NO: 27450 - DNA, 26 bp, Artificial Sequence
  Synthetic
caggatcugagactgttttaauagcc

SEQ ID NO: 27451 - DNA, 23 bp, Artificial Sequence
  Synthetic
gaatcccuaactcccuccaaacc

SEQ ID NO: 27452 - DNA, 24 bp, Artificial Sequence
  Synthetic
caggagaugacaccaaagctttuc

SEQ ID NO: 27453 - DNA, 30 bp, Artificial Sequence
  Synthetic
ggttgctttcuccaataactagatgugaat

SEQ ID NO: 27454 - DNA, 24 bp, Artificial Sequence
  Synthetic
cctgagttcutgcaatgatgtuct

SEQ ID NO: 27455 - DNA, 26 bp, Artificial Sequence
  Synthetic
catagatgatgtucccgtgtcttuca

SEQ ID NO: 27456 - DNA, 22 bp, Artificial Sequence
  Synthetic
aaacuccacattccuggcaaga

SEQ ID NO: 27457 - DNA, 21 bp, Artificial Sequence
  Synthetic
ctgcccauctacucggagaag

SEQ ID NO: 27458 - DNA, 26 bp, Artificial Sequence
  Synthetic
tcccaacacatutctaatgcctacut

SEQ ID NO: 27459 - DNA, 22 bp, Artificial Sequence
  Synthetic
tggagaauggcaagaaggucac

SEQ ID NO: 27460 - DNA, 21 bp, Artificial Sequence
  Synthetic
ccacugggctgttgaugaagt

SEQ ID NO: 27461 - DNA, 21 bp, Artificial Sequence
  Synthetic
tctgcagaccgagutccuaga

SEQ ID NO: 27462 - DNA, 20 bp, Artificial Sequence
  Synthetic
ccttacuccgccttctccuc

SEQ ID NO: 27463 - DNA, 18 bp, Artificial Sequence
  Synthetic
cuccaccgagctcuccac

SEQ ID NO: 27464 - DNA, 25 bp, Artificial Sequence
  Synthetic
cctaaaacuaaatgtguggcccact

SEQ ID NO: 27465 - DNA, 22 bp, Artificial Sequence
  Synthetic
cgctaugacaggaaagaugggt

SEQ ID NO: 27466 - DNA, 30 bp, Artificial Sequence
  Synthetic
ctgtggttatguaagagaaattcattgucc

SEQ ID NO: 27467 - DNA, 17 bp, Artificial Sequence
  Synthetic
guggcgcacgggttuac

SEQ ID NO: 27468 - DNA, 19 bp, Artificial Sequence
  Synthetic
cacttuaccccagcugcgt

SEQ ID NO: 27469 - DNA, 26 bp, Artificial Sequence
  Synthetic
agagggacttgucacttctttgttuc

SEQ ID NO: 27470 - DNA, 21 bp, Artificial Sequence
  Synthetic
gugagggcacuaaaaggtgua

SEQ ID NO: 27471 - DNA, 21 bp, Artificial Sequence
  Synthetic
ttggccgguatgtatgtcugg

SEQ ID NO: 27472 - DNA, 22 bp, Artificial Sequence
  Synthetic
gcacagagggugacatttcugg

SEQ ID NO: 27473 - DNA, 21 bp, Artificial Sequence
  Synthetic
gaagacccucatcaccaucgg

SEQ ID NO: 27474 - DNA, 20 bp, Artificial Sequence
  Synthetic
ggagtcuctgtgcugcgaat

SEQ ID NO: 27475 - DNA, 20 bp, Artificial Sequence
  Synthetic
gtgttcaugcgctgtgtucc

SEQ ID NO: 27476 - DNA, 20 bp, Artificial Sequence
  Synthetic
acacgaagaugccagtgucg

SEQ ID NO: 27477 - DNA, 22 bp, Artificial Sequence
  Synthetic
caccctggagucatccgtttua

SEQ ID NO: 27478 - DNA, 17 bp, Artificial Sequence
  Synthetic
tcagugcccuggaggct

SEQ ID NO: 27479 - DNA, 22 bp, Artificial Sequence
  Synthetic
ccactggcugctgatggatuac

SEQ ID NO: 27480 - DNA, 24 bp, Artificial Sequence
  Synthetic
tctcctgcuctctcatctuacaca

SEQ ID NO: 27481 - DNA, 22 bp, Artificial Sequence
  Synthetic
ggtcaccaaugtcaucccacag

SEQ ID NO: 27482 - DNA, 22 bp, Artificial Sequence
  Synthetic
gctcctugaagagctucaccag

SEQ ID NO: 27483 - DNA, 21 bp, Artificial Sequence
  Synthetic
tgucagaaggugggacacaga

SEQ ID NO: 27484 - DNA, 26 bp, Artificial Sequence
  Synthetic
aaaguccaagagaagcauaaaaggua

SEQ ID NO: 27485 - DNA, 24 bp, Artificial Sequence
  Synthetic
tctctctcugactttctcctcucc

SEQ ID NO: 27486 - DNA, 22 bp, Artificial Sequence
  Synthetic
ctcctttucagcctcctctuca

SEQ ID NO: 27487 - DNA, 23 bp, Artificial Sequence
  Synthetic
gatcuaacaggagctgcugagac

SEQ ID NO: 27488 - DNA, 22 bp, Artificial Sequence
  Synthetic
gtucccagacaggugagcaaat

SEQ ID NO: 27489 - DNA, 24 bp, Artificial Sequence
  Synthetic
aatagaggcaggagguagacucag

SEQ ID NO: 27490 - DNA, 19 bp, Artificial Sequence
  Synthetic
tgutctggtcugggaggct

SEQ ID NO: 27491 - DNA, 19 bp, Artificial Sequence
  Synthetic
gggagcuggaggtctcuga

SEQ ID NO: 27492 - DNA, 22 bp, Artificial Sequence
  Synthetic
cccacauacagucagacccaag

SEQ ID NO: 27493 - DNA, 22 bp, Artificial Sequence
  Synthetic
ggtcaaggucacgtgcuagaag

SEQ ID NO: 27494 - DNA, 17 bp, Artificial Sequence
  Synthetic
ggcgcugcatugagggt

SEQ ID NO: 27495 - DNA, 19 bp, Artificial Sequence
  Synthetic
tgcttuccccgctgctuag

SEQ ID NO: 27496 - DNA, 24 bp, Artificial Sequence
  Synthetic
catatactcaacuccctgcctcuc

SEQ ID NO: 27497 - DNA, 17 bp, Artificial Sequence
  Synthetic
cccgaggugggctgtua

SEQ ID NO: 27498 - DNA, 18 bp, Artificial Sequence
  Synthetic
ccuccagccccagcagua

SEQ ID NO: 27499 - DNA, 20 bp, Artificial Sequence
  Synthetic
tcgagggccucattgagcua

SEQ ID NO: 27500 - DNA, 17 bp, Artificial Sequence
  Synthetic
cagcctcgugggctcug

SEQ ID NO: 27501 - DNA, 26 bp, Artificial Sequence
  Synthetic
tcacctaggacutacatgatcctgut

SEQ ID NO: 27502 - DNA, 21 bp, Artificial Sequence
  Synthetic
gattcggutctggtuccacct

SEQ ID NO: 27503 - DNA, 26 bp, Artificial Sequence
  Synthetic
tgtacaactcauaagagtggcccaua

SEQ ID NO: 27504 - DNA, 19 bp, Artificial Sequence
  Synthetic
ggtgcagcagagcuggaut

SEQ ID NO: 27505 - DNA, 17 bp, Artificial Sequence
  Synthetic
gcgccuagccgtgtcug

SEQ ID NO: 27506 - DNA, 26 bp, Artificial Sequence
  Synthetic
gaaatatgtgugggttcttcugacac

SEQ ID NO: 27507 - DNA, 23 bp, Artificial Sequence
  Synthetic
ggtgatuacgccatctacctuac

SEQ ID NO: 27508 - DNA, 21 bp, Artificial Sequence
  Synthetic
gccctgggaguaggagctuaa

SEQ ID NO: 27509 - DNA, 27 bp, Artificial Sequence
  Synthetic
ctccaggtttucgattttctgtatucc

SEQ ID NO: 27510 - DNA, 25 bp, Artificial Sequence
  Synthetic
tttgacttctgcugaccttacctuc

SEQ ID NO: 27511 - DNA, 28 bp, Artificial Sequence
  Synthetic
ggtgctttttcgutgtttttgttttugt

SEQ ID NO: 27512 - DNA, 26 bp, Artificial Sequence
  Synthetic
cccggttaucagacagattcctaaut

SEQ ID NO: 27513 - DNA, 28 bp, Artificial Sequence
  Synthetic
aatgtgatcagaaggcutttctcttcut

SEQ ID NO: 27514 - DNA, 26 bp, Artificial Sequence
  Synthetic
gaagaagaucacagacagcatugaag

SEQ ID NO: 27515 - DNA, 25 bp, Artificial Sequence
  Synthetic
ttgcctaatcucaaaggaactcugg

SEQ ID NO: 27516 - DNA, 25 bp, Artificial Sequence
  Synthetic
gaaacaaggcagaagauggagcuat

SEQ ID NO: 27517 - DNA, 20 bp, Artificial Sequence
  Synthetic
tgacgacaguagcaggguct

SEQ ID NO: 27518 - DNA, 22 bp, Artificial Sequence
  Synthetic
gauggagaucaagagccagagg

SEQ ID NO: 27519 - DNA, 20 bp, Artificial Sequence
  Synthetic
tgtgtgttuctccgcucaca

SEQ ID NO: 27520 - DNA, 26 bp, Artificial Sequence
  Synthetic
tgauggaacgagaauggaagattuag

SEQ ID NO: 27521 - DNA, 33 bp, Artificial Sequence
  Synthetic
ctaacagtaaaactgauacttatctccaagaut

SEQ ID NO: 27522 - DNA, 27 bp, Artificial Sequence
  Synthetic
agaatatgtgcuttccgaagatugagg

SEQ ID NO: 27523 - DNA, 24 bp, Artificial Sequence
  Synthetic
tggtgtctugttttcggattucca

SEQ ID NO: 27524 - DNA, 20 bp, Artificial Sequence
  Synthetic
acaggucacccttcctucca

SEQ ID NO: 27525 - DNA, 23 bp, Artificial Sequence
  Synthetic
gggaaaacuatgatgcttucggt

SEQ ID NO: 27526 - DNA, 22 bp, Artificial Sequence
  Synthetic
gggatcuggaaccgagtuacat

SEQ ID NO: 27527 - DNA, 18 bp, Artificial Sequence
  Synthetic
gccctgguacgtgtugcc

SEQ ID NO: 27528 - DNA, 19 bp, Artificial Sequence
  Synthetic
cgaguggacgcacggatuc

SEQ ID NO: 27529 - DNA, 20 bp, Artificial Sequence
  Synthetic
ggaggacgcagcucaactuc

SEQ ID NO: 27530 - DNA, 18 bp, Artificial Sequence
  Synthetic
ggcagagcgucccgtaug

SEQ ID NO: 27531 - DNA, 21 bp, Artificial Sequence
  Synthetic
aaacagccccutcttctugct

SEQ ID NO: 27532 - DNA, 17 bp, Artificial Sequence
  Synthetic
gagcaccgucagcucca

SEQ ID NO: 27533 - DNA, 17 bp, Artificial Sequence
  Synthetic
cggttgcuggcccacuc

SEQ ID NO: 27534 - DNA, 23 bp, Artificial Sequence
  Synthetic
gcaaguacaagcagaacatccuc

SEQ ID NO: 27535 - DNA, 22 bp, Artificial Sequence
  Synthetic
ctgaacagacugggcucacaaa

SEQ ID NO: 27536 - DNA, 17 bp, Artificial Sequence
  Synthetic
cggccucgctguggaat

SEQ ID NO: 27537 - DNA, 18 bp, Artificial Sequence
  Synthetic
tcaggucggagggagugg

SEQ ID NO: 27538 - DNA, 19 bp, Artificial Sequence
  Synthetic
acaaggucgcccacttcuc

SEQ ID NO: 27539 - DNA, 17 bp, Artificial Sequence
  Synthetic
gaaccucgggugcggaa

SEQ ID NO: 27540 - DNA, 21 bp, Artificial Sequence
  Synthetic
gaagcugagcaacuaccggat

SEQ ID NO: 27541 - DNA, 23 bp, Artificial Sequence
  Synthetic
gcctgaagtuctccttgttcugg

SEQ ID NO: 27542 - DNA, 21 bp, Artificial Sequence
  Synthetic
gcgttgggacutgaccttcuc

SEQ ID NO: 27543 - DNA, 21 bp, Artificial Sequence
  Synthetic
gcuggaaacccucaggaaaca

SEQ ID NO: 27544 - DNA, 23 bp, Artificial Sequence
  Synthetic
catcggagucgccattctgttua

SEQ ID NO: 27545 - DNA, 22 bp, Artificial Sequence
  Synthetic
aggcaaacugtgagtgauaccc

SEQ ID NO: 27546 - DNA, 26 bp, Artificial Sequence
  Synthetic
acgatttttaguctgcattgcttugg

SEQ ID NO: 27547 - DNA, 29 bp, Artificial Sequence
  Synthetic
gctcagctgctuctttaaacagatacaua

SEQ ID NO: 27548 - DNA, 25 bp, Artificial Sequence
  Synthetic
gtgtctgttgcucatgtgtttgtut

SEQ ID NO: 27549 - DNA, 21 bp, Artificial Sequence
  Synthetic
cagcatctcguggacaaaguc

SEQ ID NO: 27550 - DNA, 20 bp, Artificial Sequence
  Synthetic
gtagggtugctcgtctgucc

SEQ ID NO: 27551 - DNA, 29 bp, Artificial Sequence
  Synthetic
gttcaagcaucaacaaatacauccaacat

SEQ ID NO: 27552 - DNA, 17 bp, Artificial Sequence
  Synthetic
ctggcaucgtgctgcug

SEQ ID NO: 27553 - DNA, 19 bp, Artificial Sequence
  Synthetic
cctctgcucacaccuccct

SEQ ID NO: 27554 - DNA, 18 bp, Artificial Sequence
  Synthetic
ctgugggaagacgcugct

SEQ ID NO: 27555 - DNA, 19 bp, Artificial Sequence
  Synthetic
acccgtguccctttcaguc

SEQ ID NO: 27556 - DNA, 21 bp, Artificial Sequence
  Synthetic
gtgcggagccucttuaaggaa

SEQ ID NO: 27557 - DNA, 24 bp, Artificial Sequence
  Synthetic
caacctgtuctgaaagacaucgga

SEQ ID NO: 27558 - DNA, 19 bp, Artificial Sequence
  Synthetic
agggtcatucgctctgcug

SEQ ID NO: 27559 - DNA, 22 bp, Artificial Sequence
  Synthetic
ggctctgcauaaagggactugt

SEQ ID NO: 27560 - DNA, 23 bp, Artificial Sequence
  Synthetic
ctgtggcaguaactaggctugag

SEQ ID NO: 27561 - DNA, 19 bp, Artificial Sequence
  Synthetic
gctgcgggutgagaacgua

SEQ ID NO: 27562 - DNA, 21 bp, Artificial Sequence
  Synthetic
ccaactcauaccccggcatuc

SEQ ID NO: 27563 - DNA, 20 bp, Artificial Sequence
  Synthetic
ccccagucagcuacagacac

SEQ ID NO: 27564 - DNA, 18 bp, Artificial Sequence
  Synthetic
ggtggtgcugcctcagug

SEQ ID NO: 27565 - DNA, 19 bp, Artificial Sequence
  Synthetic
caggtgccaucccaaacug

SEQ ID NO: 27566 - DNA, 21 bp, Artificial Sequence
  Synthetic
tgacacagtuccctccacuca

SEQ ID NO: 27567 - DNA, 24 bp, Artificial Sequence
  Synthetic
gccutggaaatactucacgagagg

SEQ ID NO: 27568 - DNA, 22 bp, Artificial Sequence
  Synthetic
cccaugggccgaagaaaaugat

SEQ ID NO: 27569 - DNA, 22 bp, Artificial Sequence
  Synthetic
ctcagcugaaaagcaacucagg

SEQ ID NO: 27570 - DNA, 19 bp, Artificial Sequence
  Synthetic
ttccuctgctcugggacca

SEQ ID NO: 27571 - DNA, 21 bp, Artificial Sequence
  Synthetic
cccaggagccucatctctuct

SEQ ID NO: 27572 - DNA, 22 bp, Artificial Sequence
  Synthetic
aggcagcugtcaattctcaugt

SEQ ID NO: 27573 - DNA, 24 bp, Artificial Sequence
  Synthetic
cctgtgagttugcctgttttcuct

SEQ ID NO: 27574 - DNA, 23 bp, Artificial Sequence
  Synthetic
aggtgaaacugtgcttgtauccc

SEQ ID NO: 27575 - DNA, 22 bp, Artificial Sequence
  Synthetic
gctccacagaugagcagtaucc

SEQ ID NO: 27576 - DNA, 22 bp, Artificial Sequence
  Synthetic
ctcaaggagggcucgttctuaa

SEQ ID NO: 27577 - DNA, 21 bp, Artificial Sequence
  Synthetic
ttggtctccugcggttuacag

SEQ ID NO: 27578 - DNA, 27 bp, Artificial Sequence
  Synthetic
gattgaaaccaagcutgcgagaaaaua

SEQ ID NO: 27579 - DNA, 20 bp, Artificial Sequence
  Synthetic
tgcaaugaccccgttctcuc

SEQ ID NO: 27580 - DNA, 21 bp, Artificial Sequence
  Synthetic
ctgtggaguctcccactcauc

SEQ ID NO: 27581 - DNA, 24 bp, Artificial Sequence
  Synthetic
ttcactctacuagttgtgggucct

SEQ ID NO: 27582 - DNA, 20 bp, Artificial Sequence
  Synthetic
acugacagaucggacggaca

SEQ ID NO: 27583 - DNA, 23 bp, Artificial Sequence
  Synthetic
ccaccaauacagccccttcttuc

SEQ ID NO: 27584 - DNA, 24 bp, Artificial Sequence
  Synthetic
ccgcgccuggcaataaatatctua

SEQ ID NO: 27585 - DNA, 28 bp, Artificial Sequence
  Synthetic
ggcgatacugaggaggattttattguat

SEQ ID NO: 27586 - DNA, 21 bp, Artificial Sequence
  Synthetic
ggccaggguagctctttucaa

SEQ ID NO: 27587 - DNA, 26 bp, Artificial Sequence
  Synthetic
tttataaacctgucggtggattgugt

SEQ ID NO: 27588 - DNA, 23 bp, Artificial Sequence
  Synthetic
ggutctgtgtguccagagagaga

SEQ ID NO: 27589 - DNA, 22 bp, Artificial Sequence
  Synthetic
ggtctgttuccacctgagcaut

SEQ ID NO: 27590 - DNA, 23 bp, Artificial Sequence
  Synthetic
gctgcacaaaguatctcgugact

SEQ ID NO: 27591 - DNA, 28 bp, Artificial Sequence
  Synthetic
cggaatgcacuaaattcagttttaugaa

SEQ ID NO: 27592 - DNA, 21 bp, Artificial Sequence
  Synthetic
aatccctcgucctacagguca

SEQ ID NO: 27593 - DNA, 24 bp, Artificial Sequence
  Synthetic
cctggaaaautccagctuggaaga

SEQ ID NO: 27594 - DNA, 20 bp, Artificial Sequence
  Synthetic
agacgagcucatgaguccct

SEQ ID NO: 27595 - DNA, 23 bp, Artificial Sequence
  Synthetic
cgctcatgagaacugtgtctcug

SEQ ID NO: 27596 - DNA, 22 bp, Artificial Sequence
  Synthetic
gcacacaugagacacagcauga

SEQ ID NO: 27597 - DNA, 26 bp, Artificial Sequence
  Synthetic
atctggtttcutccttcttcucacag

SEQ ID NO: 27598 - DNA, 30 bp, Artificial Sequence
  Synthetic
ggtctaacaaattuctctacagaagaucca

SEQ ID NO: 27599 - DNA, 24 bp, Artificial Sequence
  Synthetic
tgtgaccagutgtguagaaagcaa

SEQ ID NO: 27600 - DNA, 23 bp, Artificial Sequence
  Synthetic
catcagagcagaguctgcacaua

SEQ ID NO: 27601 - DNA, 26 bp, Artificial Sequence
  Synthetic
ttctttttccttucctccctgtaugg

SEQ ID NO: 27602 - DNA, 26 bp, Artificial Sequence
  Synthetic
tcuatagaaacctucagggaagacac

SEQ ID NO: 27603 - DNA, 22 bp, Artificial Sequence
  Synthetic
tgcgctcugctatctatccuca

SEQ ID NO: 27604 - DNA, 22 bp, Artificial Sequence
  Synthetic
ggccttcugggaagatcaggua

SEQ ID NO: 27605 - DNA, 27 bp, Artificial Sequence
  Synthetic
gctgtgactaugtcatggttctuaact

SEQ ID NO: 27606 - DNA, 23 bp, Artificial Sequence
  Synthetic
gcaggcagcaugacaagtacuag

SEQ ID NO: 27607 - DNA, 28 bp, Artificial Sequence
  Synthetic
tgatctctgacutgaagtttttgtcugt

SEQ ID NO: 27608 - DNA, 21 bp, Artificial Sequence
  Synthetic
gggacaaacautggugcagga

SEQ ID NO: 27609 - DNA, 29 bp, Artificial Sequence
  Synthetic
tgtctgccaaatuaaagagccaagataut

SEQ ID NO: 27610 - DNA, 26 bp, Artificial Sequence
  Synthetic
cagaggagaaauacctcaaauggaaa

SEQ ID NO: 27611 - DNA, 30 bp, Artificial Sequence
  Synthetic
gcaggtatcacacaaautacagaagatuac

SEQ ID NO: 27612 - DNA, 25 bp, Artificial Sequence
  Synthetic
ctugagaguagaaggcattaucaca

SEQ ID NO: 27613 - DNA, 24 bp, Artificial Sequence
  Synthetic
gggatttagtugagccttacguct

SEQ ID NO: 27614 - DNA, 23 bp, Artificial Sequence
  Synthetic
agatcaacagaacautgccugga

SEQ ID NO: 27615 - DNA, 29 bp, Artificial Sequence
  Synthetic
ggttgggaaaauaggacatagctttagua

SEQ ID NO: 27616 - DNA, 28 bp, Artificial Sequence
  Synthetic
tgaactagaatgautagcataggccuca

SEQ ID NO: 27617 - DNA, 23 bp, Artificial Sequence
  Synthetic
cctcccaaaguactgggatuaca

SEQ ID NO: 27618 - DNA, 17 bp, Artificial Sequence
  Synthetic
gccatgccugggcugac

SEQ ID NO: 27619 - DNA, 20 bp, Artificial Sequence
  Synthetic
cttctcugggatcccugcac

SEQ ID NO: 27620 - DNA, 20 bp, Artificial Sequence
  Synthetic
ggugagcttgguggagaacg

SEQ ID NO: 27621 - DNA, 21 bp, Artificial Sequence
  Synthetic
ctgcaggugatcacgtcaaug

SEQ ID NO: 27622 - DNA, 19 bp, Artificial Sequence
  Synthetic
tggccagugtcgtctucag

SEQ ID NO: 27623 - DNA, 20 bp, Artificial Sequence
  Synthetic
caggatggugagggugacag

SEQ ID NO: 27624 - DNA, 24 bp, Artificial Sequence
  Synthetic
cctcatcatcugcaatgccaucat

SEQ ID NO: 27625 - DNA, 27 bp, Artificial Sequence
  Synthetic
catttaguccatcctcttugacaaacg

SEQ ID NO: 27626 - DNA, 20 bp, Artificial Sequence
  Synthetic
ctccaggcaggacutcucac

SEQ ID NO: 27627 - DNA, 20 bp, Artificial Sequence
  Synthetic
cttcacaucccagcugacga

SEQ ID NO: 27628 - DNA, 23 bp, Artificial Sequence
  Synthetic
ctccugcaaaaggaggtgaaauc

SEQ ID NO: 27629 - DNA, 22 bp, Artificial Sequence
  Synthetic
ctggtcacugagtcaggcatut

SEQ ID NO: 27630 - DNA, 20 bp, Artificial Sequence
  Synthetic
acaaaccagccccugaacuc

SEQ ID NO: 27631 - DNA, 17 bp, Artificial Sequence
  Synthetic
cugcggaucgggaggac

SEQ ID NO: 27632 - DNA, 22 bp, Artificial Sequence
  Synthetic
tccctactgcuatccccacauc

SEQ ID NO: 27633 - DNA, 21 bp, Artificial Sequence
  Synthetic
ctgtacacugacggccuacaa

SEQ ID NO: 27634 - DNA, 21 bp, Artificial Sequence
  Synthetic
ccccaccauacttccucccaa

SEQ ID NO: 27635 - DNA, 28 bp, Artificial Sequence
  Synthetic
attcagctctguactcctctttaccuat

SEQ ID NO: 27636 - DNA, 26 bp, Artificial Sequence
  Synthetic
gtctgagtttuaggcacaaaaugagt

SEQ ID NO: 27637 - DNA, 23 bp, Artificial Sequence
  Synthetic
tgacactcccugcctgttttuag

SEQ ID NO: 27638 - DNA, 22 bp, Artificial Sequence
  Synthetic
gaggtgaugatctcaucgccat

SEQ ID NO: 27639 - DNA, 26 bp, Artificial Sequence
  Synthetic
gggauccttgtaatauaacccacacc

SEQ ID NO: 27640 - DNA, 23 bp, Artificial Sequence
  Synthetic
aagatcagauccttgagcugcac

SEQ ID NO: 27641 - DNA, 24 bp, Artificial Sequence
  Synthetic
accccactcutccaaatctttucc

SEQ ID NO: 27642 - DNA, 23 bp, Artificial Sequence
  Synthetic
gatgagaaacagccugaagguct

SEQ ID NO: 27643 - DNA, 27 bp, Artificial Sequence
  Synthetic
ttgatctgggaggguagagactaaaut

SEQ ID NO: 27644 - DNA, 21 bp, Artificial Sequence
  Synthetic
gccttctucccagcatgtgua

SEQ ID NO: 27645 - DNA, 27 bp, Artificial Sequence
  Synthetic
actgagccutatttgtcttcucagaac

SEQ ID NO: 27646 - DNA, 22 bp, Artificial Sequence
  Synthetic
gcctggccugaaaatacauggt

SEQ ID NO: 27647 - DNA, 26 bp, Artificial Sequence
  Synthetic
ccacccagaaauactggattgacauc

SEQ ID NO: 27648 - DNA, 24 bp, Artificial Sequence
  Synthetic
ggcagacaggacaautccuaaagt

SEQ ID NO: 27649 - DNA, 28 bp, Artificial Sequence
  Synthetic
catataagaugaactcttcctgugcaga

SEQ ID NO: 27650 - DNA, 19 bp, Artificial Sequence
  Synthetic
cctcucccctcgatuccag

SEQ ID NO: 27651 - DNA, 28 bp, Artificial Sequence
  Synthetic
ctcttgatctcuaatgtcacattgucgt

SEQ ID NO: 27652 - DNA, 22 bp, Artificial Sequence
  Synthetic
ggttgtgacagguccctcuaag

SEQ ID NO: 27653 - DNA, 19 bp, Artificial Sequence
  Synthetic
tgcctgccutgccatcuag

SEQ ID NO: 27654 - DNA, 21 bp, Artificial Sequence
  Synthetic
cctgaacuccacacggtucaa

SEQ ID NO: 27655 - DNA, 22 bp, Artificial Sequence
  Synthetic
cttguaccgctacauacagcca

SEQ ID NO: 27656 - DNA, 23 bp, Artificial Sequence
  Synthetic
ggcctgagcaauagggttuagaa

SEQ ID NO: 27657 - DNA, 25 bp, Artificial Sequence
  Synthetic
ccagacacgtaucaagattggacuc

SEQ ID NO: 27658 - DNA, 23 bp, Artificial Sequence
  Synthetic
ggugtgaaaugagcagaggacag

SEQ ID NO: 27659 - DNA, 28 bp, Artificial Sequence
  Synthetic
gacatgttaaccutgactttgtggttua

SEQ ID NO: 27660 - DNA, 22 bp, Artificial Sequence
  Synthetic
cgaagccacacaugtugaacag

SEQ ID NO: 27661 - DNA, 26 bp, Artificial Sequence
  Synthetic
tttgaagggaagutcctuccaagaaa

SEQ ID NO: 27662 - DNA, 21 bp, Artificial Sequence
  Synthetic
agtacccugcaaggcuaggaa

SEQ ID NO: 27663 - DNA, 26 bp, Artificial Sequence
  Synthetic
agtattatggccuggtgatggattug

SEQ ID NO: 27664 - DNA, 23 bp, Artificial Sequence
  Synthetic
gacaagcacuccacacacaatuc

SEQ ID NO: 27665 - DNA, 28 bp, Artificial Sequence
  Synthetic
ccgctttgagaagaugtatgagaagauc

SEQ ID NO: 27666 - DNA, 26 bp, Artificial Sequence
  Synthetic
catcaagagaguaaaccaatcaugct

SEQ ID NO: 27667 - DNA, 22 bp, Artificial Sequence
  Synthetic
gatgcttaccuggaccaguacc

SEQ ID NO: 27668 - DNA, 22 bp, Artificial Sequence
  Synthetic
gguagaaccaaaggcaacugct

SEQ ID NO: 27669 - DNA, 22 bp, Artificial Sequence
  Synthetic
cacccttcccautgcttttguc

SEQ ID NO: 27670 - DNA, 25 bp, Artificial Sequence
  Synthetic
cagaacaaggutcagtcacaacuct

SEQ ID NO: 27671 - DNA, 22 bp, Artificial Sequence
  Synthetic
ccactguggacaagactgttug

SEQ ID NO: 27672 - DNA, 21 bp, Artificial Sequence
  Synthetic
ggagccagauagcccccuaat

SEQ ID NO: 27673 - DNA, 24 bp, Artificial Sequence
  Synthetic
gcatgatatuctggacatgaugcc

SEQ ID NO: 27674 - DNA, 22 bp, Artificial Sequence
  Synthetic
gggcagguactttugaagcaat

SEQ ID NO: 27675 - DNA, 29 bp, Artificial Sequence
  Synthetic
gtattcttaacttcugcttgggatcguag

SEQ ID NO: 27676 - DNA, 23 bp, Artificial Sequence
  Synthetic
cccatcagaccuggagctuaaac

SEQ ID NO: 27677 - DNA, 23 bp, Artificial Sequence
  Synthetic
cgggaagttcugcgtttgacuaa

SEQ ID NO: 27678 - DNA, 23 bp, Artificial Sequence
  Synthetic
gagcaauggacccaactgatgua

SEQ ID NO: 27679 - DNA, 23 bp, Artificial Sequence
  Synthetic
gcaaaaaccucaactaccugcac

SEQ ID NO: 27680 - DNA, 23 bp, Artificial Sequence
  Synthetic
gaggtgggaacauggagaguaag

SEQ ID NO: 27681 - DNA, 24 bp, Artificial Sequence
  Synthetic
ccaaactctggugggcttatttut

SEQ ID NO: 27682 - DNA, 22 bp, Artificial Sequence
  Synthetic
gcaatgccautggctgtatugt

SEQ ID NO: 27683 - DNA, 27 bp, Artificial Sequence
  Synthetic
ctcatcttaaguctgtgcctagtucag

SEQ ID NO: 27684 - DNA, 22 bp, Artificial Sequence
  Synthetic
ccaaccuaaacagcagcctuct

SEQ ID NO: 27685 - DNA, 28 bp, Artificial Sequence
  Synthetic
gtctgcttattctugatgttgtacccua

SEQ ID NO: 27686 - DNA, 22 bp, Artificial Sequence
  Synthetic
aaggccutcaaaucaaacaggt

SEQ ID NO: 27687 - DNA, 25 bp, Artificial Sequence
  Synthetic
tttgtctagcugcttacttgaggug

SEQ ID NO: 27688 - DNA, 21 bp, Artificial Sequence
  Synthetic
cctccaguggctcaacatcua

SEQ ID NO: 27689 - DNA, 25 bp, Artificial Sequence
  Synthetic
tgggtagaaauggttgtgtgatguc

SEQ ID NO: 27690 - DNA, 22 bp, Artificial Sequence
  Synthetic
ccaccaagaugagctgucaaag

SEQ ID NO: 27691 - DNA, 24 bp, Artificial Sequence
  Synthetic
ggaagatcautcgagaccauggag

SEQ ID NO: 27692 - DNA, 17 bp, Artificial Sequence
  Synthetic
gccgcuccacactcucg

SEQ ID NO: 27693 - DNA, 20 bp, Artificial Sequence
  Synthetic
cctttctgcugcgcttctug

SEQ ID NO: 27694 - DNA, 31 bp, Artificial Sequence
  Synthetic
caaaggagggacauaccactatatcagauaa

SEQ ID NO: 27695 - DNA, 23 bp, Artificial Sequence
  Synthetic
agaagagaccucccaaagctgua

SEQ ID NO: 27696 - DNA, 28 bp, Artificial Sequence
  Synthetic
ctttgtctugaggatcatagtuaagcca

SEQ ID NO: 27697 - DNA, 32 bp, Artificial Sequence
  Synthetic
aatgcagaagaatgutattttcagaaagttua

SEQ ID NO: 27698 - DNA, 24 bp, Artificial Sequence
  Synthetic
aatttacgtcagguggacctctug

SEQ ID NO: 27699 - DNA, 23 bp, Artificial Sequence
  Synthetic
gcctcccgutaagtctgctttua

SEQ ID NO: 27700 - DNA, 27 bp, Artificial Sequence
  Synthetic
catggtaaaaucccatggtcaatugat

SEQ ID NO: 27701 - DNA, 28 bp, Artificial Sequence
  Synthetic
gctgatgccttutcaactaaacttacut

SEQ ID NO: 27702 - DNA, 22 bp, Artificial Sequence
  Synthetic
ggccaaaucaagatggcacuct

SEQ ID NO: 27703 - DNA, 30 bp, Artificial Sequence
  Synthetic
tcagataucagcaataaaaccaugaagaca

SEQ ID NO: 27704 - DNA, 28 bp, Artificial Sequence
  Synthetic
tgtttttaaggugggtcatgataacugg

SEQ ID NO: 27705 - DNA, 28 bp, Artificial Sequence
  Synthetic
cactccaaaauctaatgtucagagacct

SEQ ID NO: 27706 - DNA, 27 bp, Artificial Sequence
  Synthetic
cagcgtagaucaaacagtaaaagtgug

SEQ ID NO: 27707 - DNA, 29 bp, Artificial Sequence
  Synthetic
agtatacaatttggautcaccatgcauga

SEQ ID NO: 27708 - DNA, 21 bp, Artificial Sequence
  Synthetic
gacccagugcctcatgtcaut

SEQ ID NO: 27709 - DNA, 24 bp, Artificial Sequence
  Synthetic
ctgaaatcugaacagacugagcca

SEQ ID NO: 27710 - DNA, 23 bp, Artificial Sequence
  Synthetic
gcatcggatugaacctcagtcut

SEQ ID NO: 27711 - DNA, 20 bp, Artificial Sequence
  Synthetic
tcugaaggagacucccacgt

SEQ ID NO: 27712 - DNA, 17 bp, Artificial Sequence
  Synthetic
ccccugccctgtctugt

SEQ ID NO: 27713 - DNA, 21 bp, Artificial Sequence
  Synthetic
ccatgugggcagagatguagg

SEQ ID NO: 27714 - DNA, 23 bp, Artificial Sequence
  Synthetic
tcaaauaccccaacggagugaac

SEQ ID NO: 27715 - DNA, 21 bp, Artificial Sequence
  Synthetic
ctctgccgugtcttctgucaa

SEQ ID NO: 27716 - DNA, 22 bp, Artificial Sequence
  Synthetic
tcgcatttgucaccatgaucgt

SEQ ID NO: 27717 - DNA, 20 bp, Artificial Sequence
  Synthetic
gccatguagctctcaccuct

SEQ ID NO: 27718 - DNA, 23 bp, Artificial Sequence
  Synthetic
ccaaccuaacaccagcttctguc

SEQ ID NO: 27719 - DNA, 23 bp, Artificial Sequence
  Synthetic
ggtgctagtucagctggtcauac

SEQ ID NO: 27720 - DNA, 18 bp, Artificial Sequence
  Synthetic
ggagaccacuctgcucct

SEQ ID NO: 27721 - DNA, 18 bp, Artificial Sequence
  Synthetic
cttcggcugcaagctugg

SEQ ID NO: 27722 - DNA, 23 bp, Artificial Sequence
  Synthetic
gagcctatgugaaccctttccuc

SEQ ID NO: 27723 - DNA, 19 bp, Artificial Sequence
  Synthetic
cgccgtguatccagcctua

SEQ ID NO: 27724 - DNA, 21 bp, Artificial Sequence
  Synthetic
gtcaguaaagaggcagcugca

SEQ ID NO: 27725 - DNA, 18 bp, Artificial Sequence
  Synthetic
cccaccccggugtttucc

SEQ ID NO: 27726 - DNA, 24 bp, Artificial Sequence
  Synthetic
tggctttttcaguatcagctccuc

SEQ ID NO: 27727 - DNA, 20 bp, Artificial Sequence
  Synthetic
gggcttcguactaaccucgt

SEQ ID NO: 27728 - DNA, 17 bp, Artificial Sequence
  Synthetic
gtccgcugggacacgut

SEQ ID NO: 27729 - DNA, 20 bp, Artificial Sequence
  Synthetic
guaccaggagaagucgtgut

SEQ ID NO: 27730 - DNA, 18 bp, Artificial Sequence
  Synthetic
cuggagggagagccagug

SEQ ID NO: 27731 - DNA, 21 bp, Artificial Sequence
  Synthetic
gaagccgcucttctacgucat

SEQ ID NO: 27732 - DNA, 23 bp, Artificial Sequence
  Synthetic
cgtcuagaagcgggtttttcuga

SEQ ID NO: 27733 - DNA, 20 bp, Artificial Sequence
  Synthetic
cgctagaucccagctuccag

SEQ ID NO: 27734 - DNA, 20 bp, Artificial Sequence
  Synthetic
ggtcugcaccctcucagagt

SEQ ID NO: 27735 - DNA, 19 bp, Artificial Sequence
  Synthetic
ttccaucccccacccctua

SEQ ID NO: 27736 - DNA, 22 bp, Artificial Sequence
  Synthetic
ccagaagugggatttttggcut

SEQ ID NO: 27737 - DNA, 23 bp, Artificial Sequence
  Synthetic
gccaatgacccutccttctugac

SEQ ID NO: 27738 - DNA, 17 bp, Artificial Sequence
  Synthetic
gccagagcugggucaga

SEQ ID NO: 27739 - DNA, 22 bp, Artificial Sequence
  Synthetic
guccctcttgucacacacagac

SEQ ID NO: 27740 - DNA, 21 bp, Artificial Sequence
  Synthetic
ggaagtcccutccctgaacut

SEQ ID NO: 27741 - DNA, 22 bp, Artificial Sequence
  Synthetic
ggcaaattucagggctctggut

SEQ ID NO: 27742 - DNA, 17 bp, Artificial Sequence
  Synthetic
gggccaggguggttucc

SEQ ID NO: 27743 - DNA, 21 bp, Artificial Sequence
  Synthetic
aagccccgagucattcctuac

SEQ ID NO: 27744 - DNA, 21 bp, Artificial Sequence
  Synthetic
gccagugacaaccccagatuc

SEQ ID NO: 27745 - DNA, 20 bp, Artificial Sequence
  Synthetic
gctctccuagggttgccuca

SEQ ID NO: 27746 - DNA, 20 bp, Artificial Sequence
  Synthetic
ccacgcccugaataucccat

SEQ ID NO: 27747 - DNA, 21 bp, Artificial Sequence
  Synthetic
cccccaacccaaautcacuca

SEQ ID NO: 27748 - DNA, 22 bp, Artificial Sequence
  Synthetic
gctucaaacacagcagaggugt

SEQ ID NO: 27749 - DNA, 26 bp, Artificial Sequence
  Synthetic
agtgagacttcugtttgggttaccua

SEQ ID NO: 27750 - DNA, 22 bp, Artificial Sequence
  Synthetic
gccaagtcugacaaagccctut

SEQ ID NO: 27751 - DNA, 20 bp, Artificial Sequence
  Synthetic
cugagcacccaaacuggact

SEQ ID NO: 27752 - DNA, 21 bp, Artificial Sequence
  Synthetic
cacatcucagcacgggcauat

SEQ ID NO: 27753 - DNA, 21 bp, Artificial Sequence
  Synthetic
cagcagucaggactcactguc

SEQ ID NO: 27754 - DNA, 20 bp, Artificial Sequence
  Synthetic
caggguggtgtauggcaact

SEQ ID NO: 27755 - DNA, 18 bp, Artificial Sequence
  Synthetic
cggctgcaguccctgaug

SEQ ID NO: 27756 - DNA, 23 bp, Artificial Sequence
  Synthetic
ccctttcctcuccttgagacuaa

SEQ ID NO: 27757 - DNA, 17 bp, Artificial Sequence
  Synthetic
ctgcggcucaggcatuc

SEQ ID NO: 27758 - DNA, 18 bp, Artificial Sequence
  Synthetic
gctgccaagcucagguga

SEQ ID NO: 27759 - DNA, 17 bp, Artificial Sequence
  Synthetic
gcccuggccgggaguat

SEQ ID NO: 27760 - DNA, 18 bp, Artificial Sequence
  Synthetic
gcaccagggcugcactua

SEQ ID NO: 27761 - DNA, 17 bp, Artificial Sequence
  Synthetic
gctggccugaccuccac

SEQ ID NO: 27762 - DNA, 23 bp, Artificial Sequence
  Synthetic
ggcttccuttggaaaucccaagt

SEQ ID NO: 27763 - DNA, 21 bp, Artificial Sequence
  Synthetic
cgggcttuggaagttctccua

SEQ ID NO: 27764 - DNA, 22 bp, Artificial Sequence
  Synthetic
gttctcuggcagctctagugac

SEQ ID NO: 27765 - DNA, 25 bp, Artificial Sequence
  Synthetic
aatgatagagcccauggatguagga

SEQ ID NO: 27766 - DNA, 22 bp, Artificial Sequence
  Synthetic
tctacctggucaacgtcatugc

SEQ ID NO: 27767 - DNA, 22 bp, Artificial Sequence
  Synthetic
tgaugctttggatuggcaggaa

SEQ ID NO: 27768 - DNA, 25 bp, Artificial Sequence
  Synthetic
tgacaaagtaccugagacctcacua

SEQ ID NO: 27769 - DNA, 25 bp, Artificial Sequence
  Synthetic
ggttggaggaggagauctttctuac

SEQ ID NO: 27770 - DNA, 20 bp, Artificial Sequence
  Synthetic
actggctguctttgcgttug

SEQ ID NO: 27771 - DNA, 19 bp, Artificial Sequence
  Synthetic
tccacccccgutggacaua

SEQ ID NO: 27772 - DNA, 20 bp, Artificial Sequence
  Synthetic
cccuccagacccctttccut

SEQ ID NO: 27773 - DNA, 28 bp, Artificial Sequence
  Synthetic
cccaaagaguaaatcagatgatacugca

SEQ ID NO: 27774 - DNA, 26 bp, Artificial Sequence
  Synthetic
caagaagtggagaaugtcagtcugag

SEQ ID NO: 27775 - DNA, 25 bp, Artificial Sequence
  Synthetic
cttcaaagcautggucagggaaaag

SEQ ID NO: 27776 - DNA, 22 bp, Artificial Sequence
  Synthetic
caaatgccccaautgcagguaa

SEQ ID NO: 27777 - DNA, 24 bp, Artificial Sequence
  Synthetic
cacctttcctugcctctttccuag

SEQ ID NO: 27778 - DNA, 21 bp, Artificial Sequence
  Synthetic
cagtgtgcaggguggcaagug

SEQ ID NO: 27779 - DNA, 26 bp, Artificial Sequence
  Synthetic
gcctcatctugggcctgtgttatcuc

SEQ ID NO: 27780 - DNA, 21 bp, Artificial Sequence
  Synthetic
gggccagaccuaagagcaauc

SEQ ID NO: 27781 - DNA, 22 bp, Artificial Sequence
  Synthetic
catggccauctacaagcaguca

SEQ ID NO: 27782 - DNA, 20 bp, Artificial Sequence
  Synthetic
acaucttgtugagggcaggg

SEQ ID NO: 27783 - DNA, 20 bp, Artificial Sequence
  Synthetic
tccugaggtguagacgccaa

SEQ ID NO: 27784 - DNA, 22 bp, Artificial Sequence
  Synthetic
cugggaagggauagaagaugac

SEQ ID NO: 27785 - DNA, 24 bp, Artificial Sequence
  Synthetic
tgactgctctuttcacccatcuac

SEQ ID NO: 27786 - DNA, 24 bp, Artificial Sequence
  Synthetic
aaagtcagucccatggaatttucg

SEQ ID NO: 27787 - DNA, 23 bp, Artificial Sequence
  Synthetic
ctggatccccacutttcctctug

SEQ ID NO: 27788 - DNA, 17 bp, Artificial Sequence
  Synthetic
ctgctucgcgcatucgg

SEQ ID NO: 27789 - DNA, 17 bp, Artificial Sequence
  Synthetic
ctccucgcacccugcaa

SEQ ID NO: 27790 - DNA, 19 bp, Artificial Sequence
  Synthetic
ggtcttccugccctucgac

SEQ ID NO: 27791 - DNA, 17 bp, Artificial Sequence
  Synthetic
cucccgggaccgtcuac

SEQ ID NO: 27792 - DNA, 17 bp, Artificial Sequence
  Synthetic
agcccccautcgtgcug

SEQ ID NO: 27793 - DNA, 21 bp, Artificial Sequence
  Synthetic
tccatggcgautgtctcagug

SEQ ID NO: 27794 - DNA, 23 bp, Artificial Sequence
  Synthetic
ctggtctctuctgacggaactug

SEQ ID NO: 27795 - DNA, 27 bp, Artificial Sequence
  Synthetic
ccaaattuacggaaagaagacaacugg

SEQ ID NO: 27796 - DNA, 23 bp, Artificial Sequence
  Synthetic
ctccccaucgtgggatttuaaga

SEQ ID NO: 27797 - DNA, 22 bp, Artificial Sequence
  Synthetic
ctgagaccuacctctguaccca

SEQ ID NO: 27798 - DNA, 22 bp, Artificial Sequence
  Synthetic
accucctcgcucagagagaaat

SEQ ID NO: 27799 - DNA, 24 bp, Artificial Sequence
  Synthetic
cccttggaaugggtaggguaagag

SEQ ID NO: 27800 - DNA, 20 bp, Artificial Sequence
  Synthetic
tggtgagggugggagtctut

SEQ ID NO: 27801 - DNA, 21 bp, Artificial Sequence
  Synthetic
actgcggcacacuacttctug

SEQ ID NO: 27802 - DNA, 19 bp, Artificial Sequence
  Synthetic
ggucagaggcagccttugt

SEQ ID NO: 27803 - DNA, 17 bp, Artificial Sequence
  Synthetic
ccacucccagccccuga

SEQ ID NO: 27804 - DNA, 19 bp, Artificial Sequence
  Synthetic
tcactgccugccatcccua

SEQ ID NO: 27805 - DNA, 23 bp, Artificial Sequence
  Synthetic
gtgtagagaucgttgagcagguc

SEQ ID NO: 27806 - DNA, 20 bp, Artificial Sequence
  Synthetic
acaagaggcaaucgctucgt

SEQ ID NO: 27807 - DNA, 20 bp, Artificial Sequence
  Synthetic
gggaaccucaggcatauggc

SEQ ID NO: 27808 - DNA, 23 bp, Artificial Sequence
  Synthetic
gtggagauaatgggugcgaagat

SEQ ID NO: 27809 - DNA, 20 bp, Artificial Sequence
  Synthetic
gtcttguccccgtcacacuc

SEQ ID NO: 27810 - DNA, 18 bp, Artificial Sequence
  Synthetic
tcaccccaguccgccuaa

SEQ ID NO: 27811 - DNA, 17 bp, Artificial Sequence
  Synthetic
ccacgucatcgcugcct

SEQ ID NO: 27812 - DNA, 20 bp, Artificial Sequence
  Synthetic
ggaaguggcccgtctgaauc

SEQ ID NO: 27813 - DNA, 23 bp, Artificial Sequence
  Synthetic
ctgctgguagttctgttgttugc

SEQ ID NO: 27814 - DNA, 24 bp, Artificial Sequence
  Synthetic
gcucgccaaggactattauaaccc

SEQ ID NO: 27815 - DNA, 20 bp, Artificial Sequence
  Synthetic
aggctctccucaccagcaua

SEQ ID NO: 27816 - DNA, 23 bp, Artificial Sequence
  Synthetic
ggtggccaaguatgaugagaact

SEQ ID NO: 27817 - DNA, 23 bp, Artificial Sequence
  Synthetic
ggaatgcugaggaaagtggguac

SEQ ID NO: 27818 - DNA, 18 bp, Artificial Sequence
  Synthetic
caugacaggccgcugact

SEQ ID NO: 27819 - DNA, 21 bp, Artificial Sequence
  Synthetic
cccgtagugctgatactuggc

SEQ ID NO: 27820 - DNA, 21 bp, Artificial Sequence
  Synthetic
cutcctacagtuccacaccgt

SEQ ID NO: 27821 - DNA, 21 bp, Artificial Sequence
  Synthetic
caggttcucagggagcttguc

SEQ ID NO: 27822 - DNA, 20 bp, Artificial Sequence
  Synthetic
gcauaaaagccagcacugca

SEQ ID NO: 27823 - DNA, 20 bp, Artificial Sequence
  Synthetic
ggcctucgagttgctgtuga

SEQ ID NO: 27824 - DNA, 19 bp, Artificial Sequence
  Synthetic
agagccuacacggcaguct

SEQ ID NO: 27825 - DNA, 20 bp, Artificial Sequence
  Synthetic
guggttcuccagcgagaagg

SEQ ID NO: 27826 - DNA, 20 bp, Artificial Sequence
  Synthetic
gcaaugccaaggactucagc

SEQ ID NO: 27827 - DNA, 20 bp, Artificial Sequence
  Synthetic
ggutgtguccgggaaacagt

SEQ ID NO: 27828 - DNA, 18 bp, Artificial Sequence
  Synthetic
gctuaccaagggccugga

SEQ ID NO: 27829 - DNA, 19 bp, Artificial Sequence
  Synthetic
cacctgccucctcctucac

SEQ ID NO: 27830 - DNA, 21 bp, Artificial Sequence
  Synthetic
cctggaagcugaggaggagua

SEQ ID NO: 27831 - DNA, 20 bp, Artificial Sequence
  Synthetic
ctctggaccuttgacucggt

SEQ ID NO: 27832 - DNA, 22 bp, Artificial Sequence
  Synthetic
caucgcaaagaaagaguctgug

SEQ ID NO: 27833 - DNA, 24 bp, Artificial Sequence
  Synthetic
gtgagagaacgaguacacatccug

SEQ ID NO: 27834 - DNA, 18 bp, Artificial Sequence
  Synthetic
cccgaugggcuccaagac

SEQ ID NO: 27835 - DNA, 20 bp, Artificial Sequence
  Synthetic
ggctgcuggagacctugaat

SEQ ID NO: 27836 - DNA, 22 bp, Artificial Sequence
  Synthetic
tcaaaaggaagucggcctucat

SEQ ID NO: 27837 - DNA, 18 bp, Artificial Sequence
  Synthetic
attgccctuggtgggcut

SEQ ID NO: 27838 - DNA, 22 bp, Artificial Sequence
  Synthetic
ccatcgugcagaagatcaccuc

SEQ ID NO: 27839 - DNA, 21 bp, Artificial Sequence
  Synthetic
cauaacggaucagccccagaa

SEQ ID NO: 27840 - DNA, 21 bp, Artificial Sequence
  Synthetic
caaaaccgaggccutcacauc

SEQ ID NO: 27841 - DNA, 21 bp, Artificial Sequence
  Synthetic
tctttggctucttgcctccuc

SEQ ID NO: 27842 - DNA, 22 bp, Artificial Sequence
  Synthetic
acaccaccucttcaccctguaa

SEQ ID NO: 27843 - DNA, 21 bp, Artificial Sequence
  Synthetic
cagtgcauatggtggugaacg

SEQ ID NO: 27844 - DNA, 21 bp, Artificial Sequence
  Synthetic
cctcgttcuccttggaugcag

SEQ ID NO: 27845 - DNA, 21 bp, Artificial Sequence
  Synthetic
cttgaagtuggccgggtttug

SEQ ID NO: 27846 - DNA, 20 bp, Artificial Sequence
  Synthetic
tgccgctugagagaacacuc

SEQ ID NO: 27847 - DNA, 21 bp, Artificial Sequence
  Synthetic
actcatgttugcgaccctugt

SEQ ID NO: 27848 - DNA, 20 bp, Artificial Sequence
  Synthetic
ggccuaccagcctguaaagc

SEQ ID NO: 27849 - DNA, 20 bp, Artificial Sequence
  Synthetic
gctccaaugccctcctgtuc

SEQ ID NO: 27850 - DNA, 18 bp, Artificial Sequence
  Synthetic
agtccgaggucgtcggua

SEQ ID NO: 27851 - DNA, 21 bp, Artificial Sequence
  Synthetic
gatcaaggaucggctcuggac

SEQ ID NO: 27852 - DNA, 23 bp, Artificial Sequence
  Synthetic
cccacucctaacaaugaccagag

SEQ ID NO: 27853 - DNA, 21 bp, Artificial Sequence
  Synthetic
gtcctucgcaccaagaacuga

SEQ ID NO: 27854 - DNA, 18 bp, Artificial Sequence
  Synthetic
cggagccccuagccaaug

SEQ ID NO: 27855 - DNA, 25 bp, Artificial Sequence
  Synthetic
cccaccatguatctaatgatccugt

SEQ ID NO: 27856 - DNA, 20 bp, Artificial Sequence
  Synthetic
gucttcacguccagcaggat

SEQ ID NO: 27857 - DNA, 20 bp, Artificial Sequence
  Synthetic
acggccacacucactaaucg

SEQ ID NO: 27858 - DNA, 22 bp, Artificial Sequence
  Synthetic
gaaugccatucacaccagaagg

SEQ ID NO: 27859 - DNA, 21 bp, Artificial Sequence
  Synthetic
gtcaaugtggagauggacgct

SEQ ID NO: 27860 - DNA, 25 bp, Artificial Sequence
  Synthetic
cctccctgcauttcttttaagcuga

SEQ ID NO: 27861 - DNA, 20 bp, Artificial Sequence
  Synthetic
gtggaagccgacaucaaugg

SEQ ID NO: 27862 - DNA, 21 bp, Artificial Sequence
  Synthetic
ggatgttcuggcccaccatut

SEQ ID NO: 27863 - DNA, 25 bp, Artificial Sequence
  Synthetic
atgaagcaagagcutaatguaggct

SEQ ID NO: 27864 - DNA, 18 bp, Artificial Sequence
  Synthetic
ccaggcggucatugaggt

SEQ ID NO: 27865 - DNA, 20 bp, Artificial Sequence
  Synthetic
gtctcatccucccgcttcuc

SEQ ID NO: 27866 - DNA, 20 bp, Artificial Sequence
  Synthetic
cccttcauggagcuggagga

SEQ ID NO: 27867 - DNA, 20 bp, Artificial Sequence
  Synthetic
gggaauggaaagugccagac

SEQ ID NO: 27868 - DNA, 24 bp, Artificial Sequence
  Synthetic
ccactttguaagctcattctuggg

SEQ ID NO: 27869 - DNA, 27 bp, Artificial Sequence
  Synthetic
tgaattgacacuaatctctgcttgugt

SEQ ID NO: 27870 - DNA, 22 bp, Artificial Sequence
  Synthetic
gcatccauagggacugacaggt

SEQ ID NO: 27871 - DNA, 26 bp, Artificial Sequence
  Synthetic
gcctgggttaaguatgcagattacug

SEQ ID NO: 27872 - DNA, 22 bp, Artificial Sequence
  Synthetic
gucttacaaaaugaagcggccc

SEQ ID NO: 27873 - DNA, 24 bp, Artificial Sequence
  Synthetic
ttatcctgaugggttgtgttuggt

SEQ ID NO: 27874 - DNA, 23 bp, Artificial Sequence
  Synthetic
agacucagcaucagcaaaaacct

SEQ ID NO: 27875 - DNA, 32 bp, Artificial Sequence
  Synthetic
caacttctaatccuttgagtgtttttcatuct

SEQ ID NO: 27876 - DNA, 31 bp, Artificial Sequence
  Synthetic
gtcattagggagauacatatggatacacuca

SEQ ID NO: 27877 - DNA, 24 bp, Artificial Sequence
  Synthetic
ctctgcatugaaagttccccaaut

SEQ ID NO: 27878 - DNA, 31 bp, Artificial Sequence
  Synthetic
ggttaaccagaauatctttatgtaggatuca

SEQ ID NO: 27879 - DNA, 25 bp, Artificial Sequence
  Synthetic
ccatcucaagaggagctcatuaagg

SEQ ID NO: 27880 - DNA, 29 bp, Artificial Sequence
  Synthetic
gtcagataccacagcauctttacatugat

SEQ ID NO: 27881 - DNA, 30 bp, Artificial Sequence
  Synthetic
aaccugaattatcactaucagaacaaagca

SEQ ID NO: 27882 - DNA, 27 bp, Artificial Sequence
  Synthetic
agatatcagtguttggccaacaauaca

SEQ ID NO: 27883 - DNA, 27 bp, Artificial Sequence
  Synthetic
tcttggtgccauttatcgttttugaag

SEQ ID NO: 27884 - DNA, 26 bp, Artificial Sequence
  Synthetic
gcaaacacaaaaaccuggttccaaua

SEQ ID NO: 27885 - DNA, 29 bp, Artificial Sequence
  Synthetic
aattggaagacutgactgcaaauacaaac

SEQ ID NO: 27886 - DNA, 25 bp, Artificial Sequence
  Synthetic
tccuctgtgttctuagacagacact

SEQ ID NO: 27887 - DNA, 22 bp, Artificial Sequence
  Synthetic
cctagcccuttcacccauacac

SEQ ID NO: 27888 - DNA, 24 bp, Artificial Sequence
  Synthetic
caucaggtgtcucagaacaaacct

SEQ ID NO: 27889 - DNA, 22 bp, Artificial Sequence
  Synthetic
cagagggccaaaautgaaugct

SEQ ID NO: 27890 - DNA, 30 bp, Artificial Sequence
  Synthetic
ttctctaatgttautacggctaattgugct

SEQ ID NO: 27891 - DNA, 28 bp, Artificial Sequence
  Synthetic
aacgaaactggacucattactccaaaua

SEQ ID NO: 27892 - DNA, 25 bp, Artificial Sequence
  Synthetic
gcctgcagugatattaactgtcugt

SEQ ID NO: 27893 - DNA, 28 bp, Artificial Sequence
  Synthetic
gctcagtattugcagaatacatucaagg

SEQ ID NO: 27894 - DNA, 22 bp, Artificial Sequence
  Synthetic
gggttutcaaatgcugcacact

SEQ ID NO: 27895 - DNA, 22 bp, Artificial Sequence
  Synthetic
gcugaagaccccaaagatcuca

SEQ ID NO: 27896 - DNA, 26 bp, Artificial Sequence
  Synthetic
tttgttaacutcagctcugggaaagt

SEQ ID NO: 27897 - DNA, 30 bp, Artificial Sequence
  Synthetic
gaaatctaagcccaccuaattgtacugaat

SEQ ID NO: 27898 - DNA, 28 bp, Artificial Sequence
  Synthetic
cttatactgctgcutataggttcagcut

SEQ ID NO: 27899 - DNA, 29 bp, Artificial Sequence
  Synthetic
aagactccugaaatgataaaucagggaac

SEQ ID NO: 27900 - DNA, 25 bp, Artificial Sequence
  Synthetic
gtggctcaguaacaaatgctccuat

SEQ ID NO: 27901 - DNA, 31 bp, Artificial Sequence
  Synthetic
cgttctaaatgagguagatgaatattcuggt

SEQ ID NO: 27902 - DNA, 28 bp, Artificial Sequence
  Synthetic
ttcatcacttcuggaaaaccactcatua

SEQ ID NO: 27903 - DNA, 22 bp, Artificial Sequence
  Synthetic
ccaacauaacagatgggcugga

SEQ ID NO: 27904 - DNA, 23 bp, Artificial Sequence
  Synthetic
gctccacaugcaagttugaaaca

SEQ ID NO: 27905 - DNA, 27 bp, Artificial Sequence
  Synthetic
ccacctccaaggugtatgaagtatgua

SEQ ID NO: 27906 - DNA, 28 bp, Artificial Sequence
  Synthetic
aggaaaauaccagcttcauagacaaagg

SEQ ID NO: 27907 - DNA, 32 bp, Artificial Sequence
  Synthetic
agttgaatatctgtutttcaacaagtacatut

SEQ ID NO: 27908 - DNA, 19 bp, Artificial Sequence
  Synthetic
gcutctagccugggccaca

SEQ ID NO: 27909 - DNA, 28 bp, Artificial Sequence
  Synthetic
ctatcatccaaaguatgggcuacagaaa

SEQ ID NO: 27910 - DNA, 27 bp, Artificial Sequence
  Synthetic
taaaaggtcttaucaccacgtcauaga

SEQ ID NO: 27911 - DNA, 30 bp, Artificial Sequence
  Synthetic
tgctgagtgtgtutctcaaacaatttaaut

SEQ ID NO: 27912 - DNA, 27 bp, Artificial Sequence
  Synthetic
aagttaggtgtutcctgggttaugaag

SEQ ID NO: 27913 - DNA, 32 bp, Artificial Sequence
  Synthetic
acagctcaaagutgaacttattcacuaagaat

SEQ ID NO: 27914 - DNA, 17 bp, Artificial Sequence
  Synthetic
gtcgcggcuccgctaua

SEQ ID NO: 27915 - DNA, 17 bp, Artificial Sequence
  Synthetic
cgggagcucaccugcac

SEQ ID NO: 27916 - DNA, 21 bp, Artificial Sequence
  Synthetic
actcucagcccaccttctcuc

SEQ ID NO: 27917 - DNA, 20 bp, Artificial Sequence
  Synthetic
ttggacaguccacgttugct

SEQ ID NO: 27918 - DNA, 21 bp, Artificial Sequence
  Synthetic
ggcaggagacaaugtcccauc

SEQ ID NO: 27919 - DNA, 23 bp, Artificial Sequence
  Synthetic
cutatatggcaagucggaccagt

SEQ ID NO: 27920 - DNA, 21 bp, Artificial Sequence
  Synthetic
gggtaguccaggcccttcaua

SEQ ID NO: 27921 - DNA, 28 bp, Artificial Sequence
  Synthetic
tctctgaatccuaagaagaagctcucag

SEQ ID NO: 27922 - DNA, 20 bp, Artificial Sequence
  Synthetic
ccttcucccaccctcacuga

SEQ ID NO: 27923 - DNA, 22 bp, Artificial Sequence
  Synthetic
acaguccagacgaccttcucat

SEQ ID NO: 27924 - DNA, 19 bp, Artificial Sequence
  Synthetic
ctgcugagccccatcacut

SEQ ID NO: 27925 - DNA, 20 bp, Artificial Sequence
  Synthetic
gtgagccaucaucgcaggaa

SEQ ID NO: 27926 - DNA, 17 bp, Artificial Sequence
  Synthetic
ccccgcgccutccuaag

SEQ ID NO: 27927 - DNA, 21 bp, Artificial Sequence
  Synthetic
tgctcgtcggucatcttcaug

SEQ ID NO: 27928 - DNA, 19 bp, Artificial Sequence
  Synthetic
caagttccccgugtgcauc

SEQ ID NO: 27929 - DNA, 18 bp, Artificial Sequence
  Synthetic
gtactgguccgcgagcut

SEQ ID NO: 27930 - DNA, 20 bp, Artificial Sequence
  Synthetic
gaccugacagttuggcggat

SEQ ID NO: 27931 - DNA, 20 bp, Artificial Sequence
  Synthetic
cccgttctucaccgactucc

SEQ ID NO: 27932 - DNA, 28 bp, Artificial Sequence
  Synthetic
ttttctcgtgcutgttcttttattgucc

SEQ ID NO: 27933 - DNA, 23 bp, Artificial Sequence
  Synthetic
aactcgttgacaucgaaggtcuc

SEQ ID NO: 27934 - DNA, 18 bp, Artificial Sequence
  Synthetic
gcuacggcaucagcagca

SEQ ID NO: 27935 - DNA, 17 bp, Artificial Sequence
  Synthetic
ctcagcguggucagcgt

SEQ ID NO: 27936 - DNA, 20 bp, Artificial Sequence
  Synthetic
tccagcucctacuacagcca

SEQ ID NO: 27937 - DNA, 18 bp, Artificial Sequence
  Synthetic
gccatctucgccctucgt

SEQ ID NO: 27938 - DNA, 21 bp, Artificial Sequence
  Synthetic
gtggaggccucatgtgucaat

SEQ ID NO: 27939 - DNA, 24 bp, Artificial Sequence
  Synthetic
gtttaggugagacaccgtgagauc

SEQ ID NO: 27940 - DNA, 19 bp, Artificial Sequence
  Synthetic
ccagugaccccctgtccut

SEQ ID NO: 27941 - DNA, 23 bp, Artificial Sequence
  Synthetic
ccataaauagccaggcugagcat

SEQ ID NO: 27942 - DNA, 22 bp, Artificial Sequence
  Synthetic
tggacctguacatcctcaugga

SEQ ID NO: 27943 - DNA, 18 bp, Artificial Sequence
  Synthetic
ggtgcagcugtccugagt

SEQ ID NO: 27944 - DNA, 20 bp, Artificial Sequence
  Synthetic
gacactcuctctcccuccca

SEQ ID NO: 27945 - DNA, 17 bp, Artificial Sequence
  Synthetic
gcuggcagcaccctucc

SEQ ID NO: 27946 - DNA, 22 bp, Artificial Sequence
  Synthetic
ccttccacuatgaggctgaugg

SEQ ID NO: 27947 - DNA, 24 bp, Artificial Sequence
  Synthetic
agtagttggugacagcaaagaugg

SEQ ID NO: 27948 - DNA, 22 bp, Artificial Sequence
  Synthetic
ccacagagcacugatcaaccuc

SEQ ID NO: 27949 - DNA, 25 bp, Artificial Sequence
  Synthetic
tgttttaaacgautccactcggugt

SEQ ID NO: 27950 - DNA, 23 bp, Artificial Sequence
  Synthetic
gaagggcaacauccatcugaaac

SEQ ID NO: 27951 - DNA, 22 bp, Artificial Sequence
  Synthetic
gcacaggagucctgcttcatuc

SEQ ID NO: 27952 - DNA, 22 bp, Artificial Sequence
  Synthetic
ggaatgaccagutcctcctuca

SEQ ID NO: 27953 - DNA, 23 bp, Artificial Sequence
  Synthetic
cactggaagutgtcatacucgca

SEQ ID NO: 27954 - DNA, 23 bp, Artificial Sequence
  Synthetic
cctggacuacaggcacagatgua

SEQ ID NO: 27955 - DNA, 23 bp, Artificial Sequence
  Synthetic
ccatagggutctctcuggagagg

SEQ ID NO: 27956 - DNA, 19 bp, Artificial Sequence
  Synthetic
cccaacacagugcctguct

SEQ ID NO: 27957 - DNA, 19 bp, Artificial Sequence
  Synthetic
ccuaggctcucagcaaccc

SEQ ID NO: 27958 - DNA, 19 bp, Artificial Sequence
  Synthetic
cccctcutgaccatuggca

SEQ ID NO: 27959 - DNA, 23 bp, Artificial Sequence
  Synthetic
gcucagagaaagagcagucagag

SEQ ID NO: 27960 - DNA, 17 bp, Artificial Sequence
  Synthetic
cucaagggccgugacgt

SEQ ID NO: 27961 - DNA, 22 bp, Artificial Sequence
  Synthetic
cagagaagaggcaugctgugat

SEQ ID NO: 27962 - DNA, 17 bp, Artificial Sequence
  Synthetic
ccuaggcccagccucac

SEQ ID NO: 27963 - DNA, 19 bp, Artificial Sequence
  Synthetic
cctgaaguggaggccugat

SEQ ID NO: 27964 - DNA, 19 bp, Artificial Sequence
  Synthetic
ctgaaccutccacccucga

SEQ ID NO: 27965 - DNA, 22 bp, Artificial Sequence
  Synthetic
ggtctgcagugagggtgtagua

SEQ ID NO: 27966 - DNA, 19 bp, Artificial Sequence
  Synthetic
acctcugaccaccuccgaa

SEQ ID NO: 27967 - DNA, 26 bp, Artificial Sequence
  Synthetic
tccttgatgauggtgatgttuaccag

SEQ ID NO: 27968 - DNA, 21 bp, Artificial Sequence
  Synthetic
cccagcacacuctgacaaaug

SEQ ID NO: 27969 - DNA, 17 bp, Artificial Sequence
  Synthetic
cacccucgaccctgugg

SEQ ID NO: 27970 - DNA, 21 bp, Artificial Sequence
  Synthetic
tggaaagagcugcaggugaag

SEQ ID NO: 27971 - DNA, 22 bp, Artificial Sequence
  Synthetic
gtcttccctcucctcctgctua

SEQ ID NO: 27972 - DNA, 23 bp, Artificial Sequence
  Synthetic
tctgugcaaagaggacaguaagg

SEQ ID NO: 27973 - DNA, 23 bp, Artificial Sequence
  Synthetic
caatacggguacaggttggugag

SEQ ID NO: 27974 - DNA, 22 bp, Artificial Sequence
  Synthetic
cactgacagcacucttcctgua

SEQ ID NO: 27975 - DNA, 23 bp, Artificial Sequence
  Synthetic
gcaggaaagaaggauctggtuct

SEQ ID NO: 27976 - DNA, 20 bp, Artificial Sequence
  Synthetic
gcccatguccagtgaguggt

SEQ ID NO: 27977 - DNA, 25 bp, Artificial Sequence
  Synthetic
gtacataaggaagcugtcgtagucc

SEQ ID NO: 27978 - DNA, 17 bp, Artificial Sequence
  Synthetic
ggctgcggcuggaagut

SEQ ID NO: 27979 - DNA, 17 bp, Artificial Sequence
  Synthetic
gcgggugagcctgucac

SEQ ID NO: 27980 - DNA, 19 bp, Artificial Sequence
  Synthetic
gaugaccacgaccagugct

SEQ ID NO: 27981 - DNA, 20 bp, Artificial Sequence
  Synthetic
ggttggcugaggtcacucac

SEQ ID NO: 27982 - DNA, 21 bp, Artificial Sequence
  Synthetic
tgactcccacugagacccuag

SEQ ID NO: 27983 - DNA, 22 bp, Artificial Sequence
  Synthetic
cagctggtacuccacactguag

SEQ ID NO: 27984 - DNA, 22 bp, Artificial Sequence
  Synthetic
actaggtcucgatggcagctua

SEQ ID NO: 27985 - DNA, 21 bp, Artificial Sequence
  Synthetic
cggaacacguaggagtggtug

SEQ ID NO: 27986 - DNA, 22 bp, Artificial Sequence
  Synthetic
acaggctgaugctcttcctcua

SEQ ID NO: 27987 - DNA, 22 bp, Artificial Sequence
  Synthetic
ccatctcacaggucaccaggua

SEQ ID NO: 27988 - DNA, 20 bp, Artificial Sequence
  Synthetic
gcagacgcugaaggcatcut

SEQ ID NO: 27989 - DNA, 21 bp, Artificial Sequence
  Synthetic
gggugaaggaaaggacaggug

SEQ ID NO: 27990 - DNA, 22 bp, Artificial Sequence
  Synthetic
caagccaggucatctaaugcct

SEQ ID NO: 27991 - DNA, 22 bp, Artificial Sequence
  Synthetic
tgcggucaagttuggaagaact

SEQ ID NO: 27992 - DNA, 21 bp, Artificial Sequence
  Synthetic
ccucctaatccauccccagca

SEQ ID NO: 27993 - DNA, 21 bp, Artificial Sequence
  Synthetic
atagcccggucagtttcucac

SEQ ID NO: 27994 - DNA, 23 bp, Artificial Sequence
  Synthetic
gagagucagaaacaugggaaggt

SEQ ID NO: 27995 - DNA, 20 bp, Artificial Sequence
  Synthetic
ggacttgccugttgctucct

SEQ ID NO: 27996 - DNA, 30 bp, Artificial Sequence
  Synthetic
agtaaataaacagaugtgcagaatucagga

SEQ ID NO: 27997 - DNA, 23 bp, Artificial Sequence
  Synthetic
cggaataacugcccauagggaat

SEQ ID NO: 27998 - DNA, 21 bp, Artificial Sequence
  Synthetic
cggaagcugcaatugaagagg

SEQ ID NO: 27999 - DNA, 19 bp, Artificial Sequence
  Synthetic
agccuccccgctaacacua

SEQ ID NO: 28000 - DNA, 22 bp, Artificial Sequence
  Synthetic
tcagtggcaautaagccctgut

SEQ ID NO: 28001 - DNA, 18 bp, Artificial Sequence
  Synthetic
tgtgcagguggctcaucg

SEQ ID NO: 28002 - DNA, 23 bp, Artificial Sequence
  Synthetic
gcaggaggguaaccagaaaggua

SEQ ID NO: 28003 - DNA, 21 bp, Artificial Sequence
  Synthetic
guagccacaaccuggaccaaa

SEQ ID NO: 28004 - DNA, 20 bp, Artificial Sequence
  Synthetic
cacctgguacaccugcagaa

SEQ ID NO: 28005 - DNA, 21 bp, Artificial Sequence
  Synthetic
ctggccauggtacauggagac

SEQ ID NO: 28006 - DNA, 21 bp, Artificial Sequence
  Synthetic
gggctgctuctcatcctgtut

SEQ ID NO: 28007 - DNA, 20 bp, Artificial Sequence
  Synthetic
gagggucgaacacugagagc

SEQ ID NO: 28008 - DNA, 20 bp, Artificial Sequence
  Synthetic
gccttagugagctcccucgt

SEQ ID NO: 28009 - DNA, 29 bp, Artificial Sequence
  Synthetic
cttttcttcctccutcatgatggattuct

SEQ ID NO: 28010 - DNA, 24 bp, Artificial Sequence
  Synthetic
gcagagccagutcaataccuacag

SEQ ID NO: 28011 - DNA, 26 bp, Artificial Sequence
  Synthetic
gagtaucatttgttccuggagacaag

SEQ ID NO: 28012 - DNA, 19 bp, Artificial Sequence
  Synthetic
gaagacggaugctgccauc

SEQ ID NO: 28013 - DNA, 19 bp, Artificial Sequence
  Synthetic
ggacggcutgccctcauat

SEQ ID NO: 28014 - DNA, 22 bp, Artificial Sequence
  Synthetic
agucaacgagctcaucaccaac

SEQ ID NO: 28015 - DNA, 23 bp, Artificial Sequence
  Synthetic
cttccaggagutcatgtcugacc

SEQ ID NO: 28016 - DNA, 19 bp, Artificial Sequence
  Synthetic
ctgaucgacgagcacgaug

SEQ ID NO: 28017 - DNA, 20 bp, Artificial Sequence
  Synthetic
gagctcguctcagcaucact

SEQ ID NO: 28018 - DNA, 24 bp, Artificial Sequence
  Synthetic
gatgaataaaaaccggugcagcuc

SEQ ID NO: 28019 - DNA, 23 bp, Artificial Sequence
  Synthetic
gggtgtggaaautacatccuggt

SEQ ID NO: 28020 - DNA, 24 bp, Artificial Sequence
  Synthetic
tttcttacacugcctctccuacct

SEQ ID NO: 28021 - DNA, 18 bp, Artificial Sequence
  Synthetic
ccttggtguggccagguc

SEQ ID NO: 28022 - DNA, 22 bp, Artificial Sequence
  Synthetic
ccagcatggucctgtgattcuc

SEQ ID NO: 28023 - DNA, 21 bp, Artificial Sequence
  Synthetic
gacctccugggacacgttuac

SEQ ID NO: 28024 - DNA, 20 bp, Artificial Sequence
  Synthetic
tccaagcaguccctagugct

SEQ ID NO: 28025 - DNA, 24 bp, Artificial Sequence
  Synthetic
aacacaattccggauctcttccug

SEQ ID NO: 28026 - DNA, 31 bp, Artificial Sequence
  Synthetic
tgtatgggttacutattctctctttgtugac

SEQ ID NO: 28027 - DNA, 21 bp, Artificial Sequence
  Synthetic
ggccagccucagacacaaaua

SEQ ID NO: 28028 - DNA, 30 bp, Artificial Sequence
  Synthetic
accacaaagaauaaatcctttcactcugat

SEQ ID NO: 28029 - DNA, 22 bp, Artificial Sequence
  Synthetic
ggagggttcuttggcaactuac

SEQ ID NO: 28030 - DNA, 23 bp, Artificial Sequence
  Synthetic
ggtggtcagucatgtgtgtcauc

SEQ ID NO: 28031 - DNA, 21 bp, Artificial Sequence
  Synthetic
aggtccacuggaggagaaguc

SEQ ID NO: 28032 - DNA, 20 bp, Artificial Sequence
  Synthetic
gccgguaccgagaggaacua

SEQ ID NO: 28033 - DNA, 18 bp, Artificial Sequence
  Synthetic
cacccuccacuccagcag

SEQ ID NO: 28034 - DNA, 19 bp, Artificial Sequence
  Synthetic
ggcctcucagtcccgtgua

SEQ ID NO: 28035 - DNA, 18 bp, Artificial Sequence
  Synthetic
gggtccuccaggauccct

SEQ ID NO: 28036 - DNA, 21 bp, Artificial Sequence
  Synthetic
actcagcugaaagcccugaac

SEQ ID NO: 28037 - DNA, 18 bp, Artificial Sequence
  Synthetic
ccacacguccgtgctuct

SEQ ID NO: 28038 - DNA, 22 bp, Artificial Sequence
  Synthetic
ccttttcucccgactgttgcua

SEQ ID NO: 28039 - DNA, 20 bp, Artificial Sequence
  Synthetic
actgtucacacggcctctuc

SEQ ID NO: 28040 - DNA, 26 bp, Artificial Sequence
  Synthetic
cttaaactgtuacgcttggcaagaug

SEQ ID NO: 28041 - DNA, 31 bp, Artificial Sequence
  Synthetic
ccctggaagtauacatatttcttcacagtua

SEQ ID NO: 28042 - DNA, 25 bp, Artificial Sequence
  Synthetic
attgcgguaacttttcctttugcat

SEQ ID NO: 28043 - DNA, 20 bp, Artificial Sequence
  Synthetic
gccagatguccctctcguct

SEQ ID NO: 28044 - DNA, 17 bp, Artificial Sequence
  Synthetic
gaucctgugcgcagggt

SEQ ID NO: 28045 - DNA, 18 bp, Artificial Sequence
  Synthetic
tctgccggccuctttucc

SEQ ID NO: 28046 - DNA, 17 bp, Artificial Sequence
  Synthetic
ccugcagcaccgaguct

SEQ ID NO: 28047 - DNA, 19 bp, Artificial Sequence
  Synthetic
tcctccucctcctccaugc

SEQ ID NO: 28048 - DNA, 28 bp, Artificial Sequence
  Synthetic
tgtacacactgacuactatgccaaguat

SEQ ID NO: 28049 - DNA, 19 bp, Artificial Sequence
  Synthetic
cccgcgucttctctaucgg

SEQ ID NO: 28050 - DNA, 19 bp, Artificial Sequence
  Synthetic
cacgtggucaacccugact

SEQ ID NO: 28051 - DNA, 21 bp, Artificial Sequence
  Synthetic
gtgcaugaaccaacagctguc

SEQ ID NO: 28052 - DNA, 19 bp, Artificial Sequence
  Synthetic
gatgccggutctucccaag

SEQ ID NO: 28053 - DNA, 22 bp, Artificial Sequence
  Synthetic
gcaagctugaagagccctcaut

SEQ ID NO: 28054 - DNA, 19 bp, Artificial Sequence
  Synthetic
ggtgaagagcugccugacg

SEQ ID NO: 28055 - DNA, 19 bp, Artificial Sequence
  Synthetic
aggugcacagcucagcaat

SEQ ID NO: 28056 - DNA, 21 bp, Artificial Sequence
  Synthetic
cgttugccacaagcatcucac

SEQ ID NO: 28057 - DNA, 19 bp, Artificial Sequence
  Synthetic
gtcggucaggcttcagucc

SEQ ID NO: 28058 - DNA, 17 bp, Artificial Sequence
  Synthetic
gtcgggugtcgccugag

SEQ ID NO: 28059 - DNA, 18 bp, Artificial Sequence
  Synthetic
tcttccaucccgcggtug

SEQ ID NO: 28060 - DNA, 24 bp, Artificial Sequence
  Synthetic
cccaaatugcaagacagagtugct

SEQ ID NO: 28061 - DNA, 21 bp, Artificial Sequence
  Synthetic
cacatccacutcctgcugaac

SEQ ID NO: 28062 - DNA, 21 bp, Artificial Sequence
  Synthetic
gcgcaggaacuttggtaguca

SEQ ID NO: 28063 - DNA, 23 bp, Artificial Sequence
  Synthetic
ctgcaggaucatgtccttgauct

SEQ ID NO: 28064 - DNA, 21 bp, Artificial Sequence
  Synthetic
cagctgaugctctttccuggt

SEQ ID NO: 28065 - DNA, 24 bp, Artificial Sequence
  Synthetic
gtaatgauaaggaccccacccauc

SEQ ID NO: 28066 - DNA, 20 bp, Artificial Sequence
  Synthetic
tgtctgccacuccctgguat

SEQ ID NO: 28067 - DNA, 23 bp, Artificial Sequence
  Synthetic
ggccgaaagutcttgtactccuc

SEQ ID NO: 28068 - DNA, 25 bp, Artificial Sequence
  Synthetic
ggtaaaagaacaguaaacccuggct

SEQ ID NO: 28069 - DNA, 22 bp, Artificial Sequence
  Synthetic
gtggaagaugcgattgatucgg

SEQ ID NO: 28070 - DNA, 21 bp, Artificial Sequence
  Synthetic
ggagagaacgutccccagaug

SEQ ID NO: 28071 - DNA, 22 bp, Artificial Sequence
  Synthetic
gtgactctccucgtggaactug

SEQ ID NO: 28072 - DNA, 21 bp, Artificial Sequence
  Synthetic
cactgtcccugggtgtcttuc

SEQ ID NO: 28073 - DNA, 25 bp, Artificial Sequence
  Synthetic
gcggagaugagaacaaaacctgtua

SEQ ID NO: 28074 - DNA, 22 bp, Artificial Sequence
  Synthetic
ttggccttguactcacagugac

SEQ ID NO: 28075 - DNA, 24 bp, Artificial Sequence
  Synthetic
tccttggatcugagagtgaggaut

SEQ ID NO: 28076 - DNA, 18 bp, Artificial Sequence
  Synthetic
ctaagcugcgcgcttucc

SEQ ID NO: 28077 - DNA, 21 bp, Artificial Sequence
  Synthetic
agtgacugagttcugcccaga

SEQ ID NO: 28078 - DNA, 18 bp, Artificial Sequence
  Synthetic
gacccauggcagggucaa

SEQ ID NO: 28079 - DNA, 19 bp, Artificial Sequence
  Synthetic
ctgcttccuctcccaggug

SEQ ID NO: 28080 - DNA, 21 bp, Artificial Sequence
  Synthetic
gggtgauacacaagccugacc

SEQ ID NO: 28081 - DNA, 21 bp, Artificial Sequence
  Synthetic
ggtgctgaugtcaccgaugat

SEQ ID NO: 28082 - DNA, 24 bp, Artificial Sequence
  Synthetic
ggctcctacuccatctgtatcugt

SEQ ID NO: 28083 - DNA, 20 bp, Artificial Sequence
  Synthetic
ggucactgtuggcaaacacg

SEQ ID NO: 28084 - DNA, 21 bp, Artificial Sequence
  Synthetic
ccccuccccacctgtcttuat

SEQ ID NO: 28085 - DNA, 19 bp, Artificial Sequence
  Synthetic
ccccagaccacugaagcuc

SEQ ID NO: 28086 - DNA, 24 bp, Artificial Sequence
  Synthetic
ccagaagcaugaaacactgtucaa

SEQ ID NO: 28087 - DNA, 24 bp, Artificial Sequence
  Synthetic
gagctgctgucgggaaaaatuaac

SEQ ID NO: 28088 - DNA, 26 bp, Artificial Sequence
  Synthetic
gatgtaggaagagutaatcacgugct

SEQ ID NO: 28089 - DNA, 28 bp, Artificial Sequence
  Synthetic
ctgagcutcatgtattuccaaaggaaaa

SEQ ID NO: 28090 - DNA, 26 bp, Artificial Sequence
  Synthetic
gcaccaatgutctcaaattcugagag

SEQ ID NO: 28091 - DNA, 23 bp, Artificial Sequence
  Synthetic
ggtgtguggcctctttgtaugat

SEQ ID NO: 28092 - DNA, 21 bp, Artificial Sequence
  Synthetic
ccatgcagcaautgtccagua

SEQ ID NO: 28093 - DNA, 27 bp, Artificial Sequence
  Synthetic
gcatagaguacgactggaactuaacat

SEQ ID NO: 28094 - DNA, 27 bp, Artificial Sequence
  Synthetic
catccctggcucagttaagtatttuat

SEQ ID NO: 28095 - DNA, 29 bp, Artificial Sequence
  Synthetic
ggaaagaaatugagagcagctaatcttut

SEQ ID NO: 28096 - DNA, 26 bp, Artificial Sequence
  Synthetic
gattttccatucaggttcttctgguc

SEQ ID NO: 28097 - DNA, 28 bp, Artificial Sequence
  Synthetic
cgtcattcctgauccttcatgagtauat

SEQ ID NO: 28098 - DNA, 18 bp, Artificial Sequence
  Synthetic
cutacaccuccgccacca

SEQ ID NO: 28099 - DNA, 24 bp, Artificial Sequence
  Synthetic
agttgtgacgggagutgtagttuc

SEQ ID NO: 28100 - DNA, 19 bp, Artificial Sequence
  Synthetic
ggcctguggtctgcaguat

SEQ ID NO: 28101 - DNA, 19 bp, Artificial Sequence
  Synthetic
cctcuccctccugcacaga

SEQ ID NO: 28102 - DNA, 23 bp, Artificial Sequence
  Synthetic
gggatctgugcttattctgtucc

SEQ ID NO: 28103 - DNA, 25 bp, Artificial Sequence
  Synthetic
gatactagggtugtagagggagguc

SEQ ID NO: 28104 - DNA, 20 bp, Artificial Sequence
  Synthetic
ccattccauccccacccaua

SEQ ID NO: 28105 - DNA, 22 bp, Artificial Sequence
  Synthetic
gcaaacccauggtgagaagaug

SEQ ID NO: 28106 - DNA, 21 bp, Artificial Sequence
  Synthetic
agcctcccautgaccaactuc

SEQ ID NO: 28107 - DNA, 24 bp, Artificial Sequence
  Synthetic
cctaatccuactcataggguccca

SEQ ID NO: 28108 - DNA, 19 bp, Artificial Sequence
  Synthetic
tctgacuccccttggcuct

SEQ ID NO: 28109 - DNA, 17 bp, Artificial Sequence
  Synthetic
gggcutcaggugaggga

SEQ ID NO: 28110 - DNA, 20 bp, Artificial Sequence
  Synthetic
cagaccuctgtcuccccact

SEQ ID NO: 28111 - DNA, 24 bp, Artificial Sequence
  Synthetic
tgaaagaggccaagugtatggaug

SEQ ID NO: 28112 - DNA, 18 bp, Artificial Sequence
  Synthetic
ggagccuggacagctuca

SEQ ID NO: 28113 - DNA, 17 bp, Artificial Sequence
  Synthetic
ccucgccacgtccucac

SEQ ID NO: 28114 - DNA, 21 bp, Artificial Sequence
  Synthetic
ccccagauccccagtcctaut

SEQ ID NO: 28115 - DNA, 21 bp, Artificial Sequence
  Synthetic
cccagaaugagaggugaagcg

SEQ ID NO: 28116 - DNA, 21 bp, Artificial Sequence
  Synthetic
ctggtgccuacacacccttua

SEQ ID NO: 28117 - DNA, 23 bp, Artificial Sequence
  Synthetic
gagggtugagaggttctgagtuc

SEQ ID NO: 28118 - DNA, 23 bp, Artificial Sequence
  Synthetic
gactccattuctgacagcucagg

SEQ ID NO: 28119 - DNA, 27 bp, Artificial Sequence
  Synthetic
tgtatggtcagagacutagaaatgcug

SEQ ID NO: 28120 - DNA, 20 bp, Artificial Sequence
  Synthetic
ccccugaagacgtgaucagc

SEQ ID NO: 28121 - DNA, 20 bp, Artificial Sequence
  Synthetic
ggaagcugtctcaggucagt

SEQ ID NO: 28122 - DNA, 21 bp, Artificial Sequence
  Synthetic
gctatgcuccatgccaugagg

SEQ ID NO: 28123 - DNA, 21 bp, Artificial Sequence
  Synthetic
cucgccagaaaaccttugcag

SEQ ID NO: 28124 - DNA, 20 bp, Artificial Sequence
  Synthetic
catggagtugaccctgggut

SEQ ID NO: 28125 - DNA, 24 bp, Artificial Sequence
  Synthetic
ctctctctcaguctctacctccug

SEQ ID NO: 28126 - DNA, 22 bp, Artificial Sequence
  Synthetic
tcagcagucagggatcccauat

SEQ ID NO: 28127 - DNA, 21 bp, Artificial Sequence
  Synthetic
acacgttgugcccattttcug

SEQ ID NO: 28128 - DNA, 19 bp, Artificial Sequence
  Synthetic
ctaccgccugctggaugaa

SEQ ID NO: 28129 - DNA, 21 bp, Artificial Sequence
  Synthetic
gggcugagtcaggucagagat

SEQ ID NO: 28130 - DNA, 24 bp, Artificial Sequence
  Synthetic
cgggcagagaaaucctatacagug

SEQ ID NO: 28131 - DNA, 22 bp, Artificial Sequence
  Synthetic
agaguagacaagctgugggaga

SEQ ID NO: 28132 - DNA, 21 bp, Artificial Sequence
  Synthetic
cgttggcugtatgaucgacct

SEQ ID NO: 28133 - DNA, 22 bp, Artificial Sequence
  Synthetic
ggaggtagggaugggagagtug

SEQ ID NO: 28134 - DNA, 23 bp, Artificial Sequence
  Synthetic
tctgaggttcuttgccatctgug

SEQ ID NO: 28135 - DNA, 27 bp, Artificial Sequence
  Synthetic
aaagagaaacucaaagaagagcacugt

SEQ ID NO: 28136 - DNA, 22 bp, Artificial Sequence
  Synthetic
cctggtggagaugcttttccug

SEQ ID NO: 28137 - DNA, 21 bp, Artificial Sequence
  Synthetic
cagtccctuctttgccgtuct

SEQ ID NO: 28138 - DNA, 21 bp, Artificial Sequence
  Synthetic
ggcatgaauattgcgguggga

SEQ ID NO: 28139 - DNA, 24 bp, Artificial Sequence
  Synthetic
aaaattgagggutactgguccaca

SEQ ID NO: 28140 - DNA, 20 bp, Artificial Sequence
  Synthetic
gcagtgaccgcutctgtcuc

SEQ ID NO: 28141 - DNA, 21 bp, Artificial Sequence
  Synthetic
ctaaattgcugtggccuggac

SEQ ID NO: 28142 - DNA, 20 bp, Artificial Sequence
  Synthetic
gggcaauccaagaggtcucc

SEQ ID NO: 28143 - DNA, 19 bp, Artificial Sequence
  Synthetic
ccaccugcaggaagtggut

SEQ ID NO: 28144 - DNA, 20 bp, Artificial Sequence
  Synthetic
tggaggaagagaugguggct

SEQ ID NO: 28145 - DNA, 18 bp, Artificial Sequence
  Synthetic
gtgcagcagcugagctug

SEQ ID NO: 28146 - DNA, 20 bp, Artificial Sequence
  Synthetic
catcacgcucttccctccug

SEQ ID NO: 28147 - DNA, 20 bp, Artificial Sequence
  Synthetic
cagcatccucagtgcctugt

SEQ ID NO: 28148 - DNA, 23 bp, Artificial Sequence
  Synthetic
acagugaagaaccgagacttugt

SEQ ID NO: 28149 - DNA, 24 bp, Artificial Sequence
  Synthetic
cctcatcttccutttcctgtgcug

SEQ ID NO: 28150 - DNA, 25 bp, Artificial Sequence
  Synthetic
gaagttucaaggaagtcctgauggt

SEQ ID NO: 28151 - DNA, 23 bp, Artificial Sequence
  Synthetic
gcttttaugaggaggccauagcg

SEQ ID NO: 28152 - DNA, 24 bp, Artificial Sequence
  Synthetic
tctctgatcucagagttcctgcut

SEQ ID NO: 28153 - DNA, 24 bp, Artificial Sequence
  Synthetic
gtctcgagagaaagutagcauggg

SEQ ID NO: 28154 - DNA, 23 bp, Artificial Sequence
  Synthetic
cctcaugagcctgtuggagaaag

SEQ ID NO: 28155 - DNA, 22 bp, Artificial Sequence
  Synthetic
atctgtcctcaugccctcttug

SEQ ID NO: 28156 - DNA, 21 bp, Artificial Sequence
  Synthetic
gtacaccatcucaccgtccuc

SEQ ID NO: 28157 - DNA, 27 bp, Artificial Sequence
  Synthetic
agggaatgttatugtatcctgagggua

SEQ ID NO: 28158 - DNA, 17 bp, Artificial Sequence
  Synthetic
ctgaccacccugccugt

SEQ ID NO: 28159 - DNA, 18 bp, Artificial Sequence
  Synthetic
gtgccaggagugggtuct

SEQ ID NO: 28160 - DNA, 21 bp, Artificial Sequence
  Synthetic
atgggtcuggtctctgacuga

SEQ ID NO: 28161 - DNA, 23 bp, Artificial Sequence
  Synthetic
gtgaccagugactccatactucc

SEQ ID NO: 28162 - DNA, 20 bp, Artificial Sequence
  Synthetic
aggagaacgccaaugtggug

SEQ ID NO: 28163 - DNA, 20 bp, Artificial Sequence
  Synthetic
cgggtugccctatugaggag

SEQ ID NO: 28164 - DNA, 20 bp, Artificial Sequence
  Synthetic
gcagagcagucactgagugg

SEQ ID NO: 28165 - DNA, 21 bp, Artificial Sequence
  Synthetic
gcatcactccutcgccaagut

SEQ ID NO: 28166 - DNA, 23 bp, Artificial Sequence
  Synthetic
ccaaagatgucagcatcctucgt

SEQ ID NO: 28167 - DNA, 20 bp, Artificial Sequence
  Synthetic
ctgctcuaccgtgacccauc

SEQ ID NO: 28168 - DNA, 17 bp, Artificial Sequence
  Synthetic
gtgugcgccgctcttug

SEQ ID NO: 28169 - DNA, 17 bp, Artificial Sequence
  Synthetic
ccugccccacccugaag

SEQ ID NO: 28170 - DNA, 22 bp, Artificial Sequence
  Synthetic
atttgtgtguccccctcttgut

SEQ ID NO: 28171 - DNA, 22 bp, Artificial Sequence
  Synthetic
cctccacauaggccatttuggg

SEQ ID NO: 28172 - DNA, 24 bp, Artificial Sequence
  Synthetic
cugggagauagagaggaagattuc

SEQ ID NO: 28173 - DNA, 24 bp, Artificial Sequence
  Synthetic
tgaggguttcttggauaggaggac

SEQ ID NO: 28174 - DNA, 22 bp, Artificial Sequence
  Synthetic
ctagccacauggtcagggttut

SEQ ID NO: 28175 - DNA, 23 bp, Artificial Sequence
  Synthetic
gccttctcuatcgtccatuccca

SEQ ID NO: 28176 - DNA, 20 bp, Artificial Sequence
  Synthetic
cctcccatcutccccttguc

SEQ ID NO: 28177 - DNA, 21 bp, Artificial Sequence
  Synthetic
ggctagautcagaggaugcca

SEQ ID NO: 28178 - DNA, 20 bp, Artificial Sequence
  Synthetic
ccagagcccugatttcuggt

SEQ ID NO: 28179 - DNA, 19 bp, Artificial Sequence
  Synthetic
ctttgccgggugtgttcug

SEQ ID NO: 28180 - DNA, 22 bp, Artificial Sequence
  Synthetic
cagcauccttcccaucagaaca

SEQ ID NO: 28181 - DNA, 23 bp, Artificial Sequence
  Synthetic
gggagauaaagggtccaaugagg

SEQ ID NO: 28182 - DNA, 23 bp, Artificial Sequence
  Synthetic
tctctgtcccugtctcctcuaat

SEQ ID NO: 28183 - DNA, 22 bp, Artificial Sequence
  Synthetic
ctgggagcuatttctucagggt

SEQ ID NO: 28184 - DNA, 23 bp, Artificial Sequence
  Synthetic
gtctcctagacuctccgatucca

SEQ ID NO: 28185 - DNA, 20 bp, Artificial Sequence
  Synthetic
gcagugccacagtggtguag

SEQ ID NO: 28186 - DNA, 22 bp, Artificial Sequence
  Synthetic
cactgcaugggcctattugaga

SEQ ID NO: 28187 - DNA, 20 bp, Artificial Sequence
  Synthetic
cgatggcuccctctcctuac

SEQ ID NO: 28188 - DNA, 21 bp, Artificial Sequence
  Synthetic
ggtgauggcttgacatuccct

SEQ ID NO: 28189 - DNA, 19 bp, Artificial Sequence
  Synthetic
gggcagcgugatctcgaug

SEQ ID NO: 28190 - DNA, 21 bp, Artificial Sequence
  Synthetic
cacctcugaccacctcaacuc

SEQ ID NO: 28191 - DNA, 21 bp, Artificial Sequence
  Synthetic
cccttucagaccatcugccaa

SEQ ID NO: 28192 - DNA, 19 bp, Artificial Sequence
  Synthetic
tgtucgcacagcccatugt

SEQ ID NO: 28193 - DNA, 20 bp, Artificial Sequence
  Synthetic
ggatacagggcguagagguc

SEQ ID NO: 28194 - DNA, 21 bp, Artificial Sequence
  Synthetic
ccccauctcctccuccaagat

SEQ ID NO: 28195 - DNA, 18 bp, Artificial Sequence
  Synthetic
cggctccuctggttgugg

SEQ ID NO: 28196 - DNA, 19 bp, Artificial Sequence
  Synthetic
gctgaggcaugggatuggg

SEQ ID NO: 28197 - DNA, 20 bp, Artificial Sequence
  Synthetic
tgggcgcacacauatucagg

SEQ ID NO: 28198 - DNA, 21 bp, Artificial Sequence
  Synthetic
gccuggaaggaaagggttgug

SEQ ID NO: 28199 - DNA, 22 bp, Artificial Sequence
  Synthetic
tgcutcttttgctugcagagga

SEQ ID NO: 28200 - DNA, 19 bp, Artificial Sequence
  Synthetic
gctggcagauggctctgua

SEQ ID NO: 28201 - DNA, 20 bp, Artificial Sequence
  Synthetic
ccacccacaucctugaagcc

SEQ ID NO: 28202 - DNA, 17 bp, Artificial Sequence
  Synthetic
gcaugggaggucgggaa

SEQ ID NO: 28203 - DNA, 18 bp, Artificial Sequence
  Synthetic
cccagcccuatccagcuc

SEQ ID NO: 28204 - DNA, 22 bp, Artificial Sequence
  Synthetic
acccugcccagaagctcttaua

SEQ ID NO: 28205 - DNA, 22 bp, Artificial Sequence
  Synthetic
ctttttguggacaagcacugca

SEQ ID NO: 28206 - DNA, 22 bp, Artificial Sequence
  Synthetic
gggcagaagugagaatgugagg

SEQ ID NO: 28207 - DNA, 22 bp, Artificial Sequence
  Synthetic
aagagtccagugcacatgugag

SEQ ID NO: 28208 - DNA, 23 bp, Artificial Sequence
  Synthetic
gguaacagagguaaagggactuc

SEQ ID NO: 28209 - DNA, 23 bp, Artificial Sequence
  Synthetic
agaagagguccactcgaaccuac

SEQ ID NO: 28210 - DNA, 22 bp, Artificial Sequence
  Synthetic
ctgtcccugactgtcattgugt

SEQ ID NO: 28211 - DNA, 20 bp, Artificial Sequence
  Synthetic
cccagatccucagccccuag

SEQ ID NO: 28212 - DNA, 23 bp, Artificial Sequence
  Synthetic
actgttcauctccccuagcacat

SEQ ID NO: 28213 - DNA, 20 bp, Artificial Sequence
  Synthetic
ccaagucacaccugaaccgt

SEQ ID NO: 28214 - DNA, 23 bp, Artificial Sequence
  Synthetic
gcaaggaugtcatugaagagcag

SEQ ID NO: 28215 - DNA, 21 bp, Artificial Sequence
  Synthetic
ggaauccccgagaagggauca

SEQ ID NO: 28216 - DNA, 17 bp, Artificial Sequence
  Synthetic
ggcgcacagucgccuat

SEQ ID NO: 28217 - DNA, 20 bp, Artificial Sequence
  Synthetic
ggagcacucgggugacaaac

SEQ ID NO: 28218 - DNA, 20 bp, Artificial Sequence
  Synthetic
cucctgggcuggaaagagag

SEQ ID NO: 28219 - DNA, 26 bp, Artificial Sequence
  Synthetic
ttgagttucaggaacatgucgaagaa

SEQ ID NO: 28220 - DNA, 22 bp, Artificial Sequence
  Synthetic
agagaatugaggctcuccaggt

SEQ ID NO: 28221 - DNA, 19 bp, Artificial Sequence
  Synthetic
cacatgcuccgacaggtug

SEQ ID NO: 28222 - DNA, 17 bp, Artificial Sequence
  Synthetic
cgcggugaccccttgua

SEQ ID NO: 28223 - DNA, 18 bp, Artificial Sequence
  Synthetic
ctcgggcuccgagatcug

SEQ ID NO: 28224 - DNA, 17 bp, Artificial Sequence
  Synthetic
ctgcgaggccucagcua

SEQ ID NO: 28225 - DNA, 17 bp, Artificial Sequence
  Synthetic
gagctcggucaccguca

SEQ ID NO: 28226 - DNA, 27 bp, Artificial Sequence
  Synthetic
gggaaauaagagagaaaggagaugaga

SEQ ID NO: 28227 - DNA, 21 bp, Artificial Sequence
  Synthetic
cuactcuaggagggaggcagt

SEQ ID NO: 28228 - DNA, 22 bp, Artificial Sequence
  Synthetic
ctgatctgugagcgctttcuct

SEQ ID NO: 28229 - DNA, 25 bp, Artificial Sequence
  Synthetic
ggaggaacccugaaattctgauagg

SEQ ID NO: 28230 - DNA, 24 bp, Artificial Sequence
  Synthetic
cgatgaggaugagaacatggtgua

SEQ ID NO: 28231 - DNA, 19 bp, Artificial Sequence
  Synthetic
ccagccaauaagccctugc

SEQ ID NO: 28232 - DNA, 24 bp, Artificial Sequence
  Synthetic
gaaaaacaguggagttucagccaa

SEQ ID NO: 28233 - DNA, 18 bp, Artificial Sequence
  Synthetic
gcctgtgauggcctggug

SEQ ID NO: 28234 - DNA, 22 bp, Artificial Sequence
  Synthetic
ggtgactggaguctgacacuca

SEQ ID NO: 28235 - DNA, 20 bp, Artificial Sequence
  Synthetic
gacgtugggaaccctccuaa

SEQ ID NO: 28236 - DNA, 27 bp, Artificial Sequence
  Synthetic
ggacacuacaacaacttcttcttugct

SEQ ID NO: 28237 - DNA, 22 bp, Artificial Sequence
  Synthetic
cttatccctucaccacccacug

SEQ ID NO: 28238 - DNA, 22 bp, Artificial Sequence
  Synthetic
catgtctucagccctgcctauc

SEQ ID NO: 28239 - DNA, 23 bp, Artificial Sequence
  Synthetic
ctgtagagcucgtattcgucacc

SEQ ID NO: 28240 - DNA, 21 bp, Artificial Sequence
  Synthetic
gtctgaaccaggucagagguc

SEQ ID NO: 28241 - DNA, 22 bp, Artificial Sequence
  Synthetic
ctgtgaguggcaagagacauca

SEQ ID NO: 28242 - DNA, 29 bp, Artificial Sequence
  Synthetic
gcaacatagcaagacutcctctctacuat

SEQ ID NO: 28243 - DNA, 22 bp, Artificial Sequence
  Synthetic
cccactgucctcccatuaacac

SEQ ID NO: 28244 - DNA, 21 bp, Artificial Sequence
  Synthetic
ccagcuggtgattgttuccgt

SEQ ID NO: 28245 - DNA, 23 bp, Artificial Sequence
  Synthetic
ccactccuccaaaattucagcag

SEQ ID NO: 28246 - DNA, 21 bp, Artificial Sequence
  Synthetic
ggtggtctccuctgctctcut

SEQ ID NO: 28247 - DNA, 20 bp, Artificial Sequence
  Synthetic
ggttgatgauctggcctugc

SEQ ID NO: 28248 - DNA, 21 bp, Artificial Sequence
  Synthetic
tctcctctcuggtcccaacug

SEQ ID NO: 28249 - DNA, 21 bp, Artificial Sequence
  Synthetic
ccttuggcccaaacacaggua

SEQ ID NO: 28250 - DNA, 20 bp, Artificial Sequence
  Synthetic
gtactgcccacucggcuaac

SEQ ID NO: 28251 - DNA, 20 bp, Artificial Sequence
  Synthetic
caagguacagggcatgcauc

SEQ ID NO: 28252 - DNA, 19 bp, Artificial Sequence
  Synthetic
ttcgcugccacactugagt

SEQ ID NO: 28253 - DNA, 20 bp, Artificial Sequence
  Synthetic
gcaggaagguggcaggatug

SEQ ID NO: 28254 - DNA, 23 bp, Artificial Sequence
  Synthetic
ccactccuccttccctagtucat

SEQ ID NO: 28255 - DNA, 28 bp, Artificial Sequence
  Synthetic
cctgtttatcccaguaattgacctcauc

SEQ ID NO: 28256 - DNA, 17 bp, Artificial Sequence
  Synthetic
gcccacugccccatguc

SEQ ID NO: 28257 - DNA, 18 bp, Artificial Sequence
  Synthetic
gtgggcugagcaggtcuc

SEQ ID NO: 28258 - DNA, 20 bp, Artificial Sequence
  Synthetic
gcuggagcgaaaggatuggg

SEQ ID NO: 28259 - DNA, 21 bp, Artificial Sequence
  Synthetic
ccacccgutttgaaccucagt

SEQ ID NO: 28260 - DNA, 27 bp, Artificial Sequence
  Synthetic
acagtgagaautagctgttuacacaca

SEQ ID NO: 28261 - DNA, 22 bp, Artificial Sequence
  Synthetic
gtttctctgacgucccccauag

SEQ ID NO: 28262 - DNA, 21 bp, Artificial Sequence
  Synthetic
cttctugagaagcctggcuca

SEQ ID NO: 28263 - DNA, 24 bp, Artificial Sequence
  Synthetic
tgacgaaguatgggcttuggaaat

SEQ ID NO: 28264 - DNA, 19 bp, Artificial Sequence
  Synthetic
ccggcuacaaggaccctuc

SEQ ID NO: 28265 - DNA, 17 bp, Artificial Sequence
  Synthetic
gcgctcccugaacccua

SEQ ID NO: 28266 - DNA, 19 bp, Artificial Sequence
  Synthetic
ccgcaaaugcgcagcuaag

SEQ ID NO: 28267 - DNA, 21 bp, Artificial Sequence
  Synthetic
acctgtcccutctctcuccag

SEQ ID NO: 28268 - DNA, 22 bp, Artificial Sequence
  Synthetic
cttccctccuccaggtgtcuat

SEQ ID NO: 28269 - DNA, 20 bp, Artificial Sequence
  Synthetic
cggacucaccgtcctuacct

SEQ ID NO: 28270 - DNA, 18 bp, Artificial Sequence
  Synthetic
tggttguccgtgcggaug

SEQ ID NO: 28271 - DNA, 21 bp, Artificial Sequence
  Synthetic
gautcctagccuggaaccagt

SEQ ID NO: 28272 - DNA, 24 bp, Artificial Sequence
  Synthetic
caagactgatccugcaactccaut

SEQ ID NO: 28273 - DNA, 21 bp, Artificial Sequence
  Synthetic
ctcacatcugtgtgtctugcg

SEQ ID NO: 28274 - DNA, 22 bp, Artificial Sequence
  Synthetic
caccaagucgaagttgcatgug

SEQ ID NO: 28275 - DNA, 21 bp, Artificial Sequence
  Synthetic
agacttcatucagcggtugct

SEQ ID NO: 28276 - DNA, 22 bp, Artificial Sequence
  Synthetic
ggcgtcugcccatagaacatut

SEQ ID NO: 28277 - DNA, 21 bp, Artificial Sequence
  Synthetic
gctctgcuccttttgguccag

SEQ ID NO: 28278 - DNA, 22 bp, Artificial Sequence
  Synthetic
ccagggaacaagcutgctaucc

SEQ ID NO: 28279 - DNA, 21 bp, Artificial Sequence
  Synthetic
cuaccaaccacccaugacgaa

SEQ ID NO: 28280 - DNA, 18 bp, Artificial Sequence
  Synthetic
tcaccucgcccctctuca

SEQ ID NO: 28281 - DNA, 17 bp, Artificial Sequence
  Synthetic
gugcagaagcgggugga

SEQ ID NO: 28282 - DNA, 22 bp, Artificial Sequence
  Synthetic
tcagaatcucgaagtcguccct

SEQ ID NO: 28283 - DNA, 25 bp, Artificial Sequence
  Synthetic
agaacctuacacggtgtttatgugg

SEQ ID NO: 28284 - DNA, 17 bp, Artificial Sequence
  Synthetic
cccgaggguaggcacuc

SEQ ID NO: 28285 - DNA, 17 bp, Artificial Sequence
  Synthetic
gccatggugctgccugt

SEQ ID NO: 28286 - DNA, 22 bp, Artificial Sequence
  Synthetic
atggcaaccaggauggaatuct

SEQ ID NO: 28287 - DNA, 20 bp, Artificial Sequence
  Synthetic
ctcacgggcauagacgtcug

SEQ ID NO: 28288 - DNA, 20 bp, Artificial Sequence
  Synthetic
acccccauctccgctctuat

SEQ ID NO: 28289 - DNA, 23 bp, Artificial Sequence
  Synthetic
gtaggaauctgagaugcccagag

SEQ ID NO: 28290 - DNA, 20 bp, Artificial Sequence
  Synthetic
cagagucccctttgccugag

SEQ ID NO: 28291 - DNA, 21 bp, Artificial Sequence
  Synthetic
gcaccaugggagaaagguagg

SEQ ID NO: 28292 - DNA, 25 bp, Artificial Sequence
  Synthetic
gtgcctggaaguttcagatcttgua

SEQ ID NO: 28293 - DNA, 19 bp, Artificial Sequence
  Synthetic
cugtgagctgucccaggag

SEQ ID NO: 28294 - DNA, 23 bp, Artificial Sequence
  Synthetic
gaggagacacagcuggatcttuc

SEQ ID NO: 28295 - DNA, 22 bp, Artificial Sequence
  Synthetic
gacagtcagaauccagcacuct

SEQ ID NO: 28296 - DNA, 25 bp, Artificial Sequence
  Synthetic
gggtagggauttagatacucacacc

SEQ ID NO: 28297 - DNA, 18 bp, Artificial Sequence
  Synthetic
gcgugagggacgucacac

SEQ ID NO: 28298 - DNA, 23 bp, Artificial Sequence
  Synthetic
cagtgtcccuaagaagagaccug

SEQ ID NO: 28299 - DNA, 20 bp, Artificial Sequence
  Synthetic
cctcccucgaagcggacaua

SEQ ID NO: 28300 - DNA, 18 bp, Artificial Sequence
  Synthetic
cttccuccctcccuccca

SEQ ID NO: 28301 - DNA, 18 bp, Artificial Sequence
  Synthetic
catgacgcagugggcuca

SEQ ID NO: 28302 - DNA, 17 bp, Artificial Sequence
  Synthetic
agcagcugcaggaccuc

SEQ ID NO: 28303 - DNA, 19 bp, Artificial Sequence
  Synthetic
gcttcucccctccaugacc

SEQ ID NO: 28304 - DNA, 17 bp, Artificial Sequence
  Synthetic
gggccuggtcgcugaac

SEQ ID NO: 28305 - DNA, 18 bp, Artificial Sequence
  Synthetic
cctggguctggcccauac

SEQ ID NO: 28306 - DNA, 24 bp, Artificial Sequence
  Synthetic
cttctcctcaccuaacccatcauc

SEQ ID NO: 28307 - DNA, 21 bp, Artificial Sequence
  Synthetic
cttggacacacgcagucatuc

SEQ ID NO: 28308 - DNA, 18 bp, Artificial Sequence
  Synthetic
gcugtgagaugcggcact

SEQ ID NO: 28309 - DNA, 22 bp, Artificial Sequence
  Synthetic
cccagagcutaaaccgaaugga

SEQ ID NO: 28310 - DNA, 23 bp, Artificial Sequence
  Synthetic
gggcttcucttctctgtcuacca

SEQ ID NO: 28311 - DNA, 23 bp, Artificial Sequence
  Synthetic
cagcugaaccagaucaaaaaccc

SEQ ID NO: 28312 - DNA, 28 bp, Artificial Sequence
  Synthetic
tctactatcaucacacaaactaguccca

SEQ ID NO: 28313 - DNA, 28 bp, Artificial Sequence
  Synthetic
ctctcaagtcugacaattgttttuccag

SEQ ID NO: 28314 - DNA, 25 bp, Artificial Sequence
  Synthetic
ctagggagaaguagatcctagcuca

SEQ ID NO: 28315 - DNA, 24 bp, Artificial Sequence
  Synthetic
caaagtgcaccuctgactcctaut

SEQ ID NO: 28316 - DNA, 24 bp, Artificial Sequence
  Synthetic
agaaaaacagaagcuggcagctua

SEQ ID NO: 28317 - DNA, 22 bp, Artificial Sequence
  Synthetic
aataaactgcucacccgtcucc

SEQ ID NO: 28318 - DNA, 24 bp, Artificial Sequence
  Synthetic
aagggaatgguggctttgttttua

SEQ ID NO: 28319 - DNA, 25 bp, Artificial Sequence
  Synthetic
accaaggtgguctttgctttctuag

SEQ ID NO: 28320 - DNA, 23 bp, Artificial Sequence
  Synthetic
ctgcttcuggtttccatugcaag

SEQ ID NO: 28321 - DNA, 26 bp, Artificial Sequence
  Synthetic
tggtcgtgtcugctcttcttttauag

SEQ ID NO: 28322 - DNA, 24 bp, Artificial Sequence
  Synthetic
gacacatgcacutaaaagcauccc

SEQ ID NO: 28323 - DNA, 22 bp, Artificial Sequence
  Synthetic
gtaagtgguagttggcctugga

SEQ ID NO: 28324 - DNA, 21 bp, Artificial Sequence
  Synthetic
gttgaagugggatcccuccaa

SEQ ID NO: 28325 - DNA, 25 bp, Artificial Sequence
  Synthetic
gcttcacaaguccttcagttcttut

SEQ ID NO: 28326 - DNA, 19 bp, Artificial Sequence
  Synthetic
gtcuggagacagccagguc

SEQ ID NO: 28327 - DNA, 25 bp, Artificial Sequence
  Synthetic
ccccttttcgcugttcctgatatut

SEQ ID NO: 28328 - DNA, 27 bp, Artificial Sequence
  Synthetic
auttttaaatcucacagggacagagct

SEQ ID NO: 28329 - DNA, 24 bp, Artificial Sequence
  Synthetic
cctgagcugagaaggctttucaat

SEQ ID NO: 28330 - DNA, 21 bp, Artificial Sequence
  Synthetic
ccacacgcucgtcttctguaa

SEQ ID NO: 28331 - DNA, 23 bp, Artificial Sequence
  Synthetic
cccctccutttcttgtugaccag

SEQ ID NO: 28332 - DNA, 29 bp, Artificial Sequence
  Synthetic
agctgaguacagaaaaatuagacaaaggg

SEQ ID NO: 28333 - DNA, 27 bp, Artificial Sequence
  Synthetic
ctcttagtgacuccaggatcttttugg

SEQ ID NO: 28334 - DNA, 29 bp, Artificial Sequence
  Synthetic
aaaagaggcauagtcacaataaagucagt

SEQ ID NO: 28335 - DNA, 22 bp, Artificial Sequence
  Synthetic
tgacacgcccutctctgtttut

SEQ ID NO: 28336 - DNA, 26 bp, Artificial Sequence
  Synthetic
gccaaagccauagtagtagtcaucac

SEQ ID NO: 28337 - DNA, 30 bp, Artificial Sequence
  Synthetic
aaggctgcaatgugaatattaacatgatuc

SEQ ID NO: 28338 - DNA, 21 bp, Artificial Sequence
  Synthetic
cctcctucccgagtagucact

SEQ ID NO: 28339 - DNA, 24 bp, Artificial Sequence
  Synthetic
cgacgagtgugacacatactucaa

SEQ ID NO: 28340 - DNA, 20 bp, Artificial Sequence
  Synthetic
ggagaagggcucctacctug

SEQ ID NO: 28341 - DNA, 25 bp, Artificial Sequence
  Synthetic
ctccaaucggcggagtatatuagag

SEQ ID NO: 28342 - DNA, 22 bp, Artificial Sequence
  Synthetic
gaaatuggacagccugacacac

SEQ ID NO: 28343 - DNA, 21 bp, Artificial Sequence
  Synthetic
agaacucccacugaggaacct

SEQ ID NO: 28344 - DNA, 19 bp, Artificial Sequence
  Synthetic
gauggtacccuggcccaac

SEQ ID NO: 28345 - DNA, 18 bp, Artificial Sequence
  Synthetic
cctgaggcuccctgcuca

SEQ ID NO: 28346 - DNA, 22 bp, Artificial Sequence
  Synthetic
gggttggautagctcugcagat

SEQ ID NO: 28347 - DNA, 24 bp, Artificial Sequence
  Synthetic
tgttctttccutcttctgcctugg

SEQ ID NO: 28348 - DNA, 22 bp, Artificial Sequence
  Synthetic
ggattgagtuccaggctgtucc

SEQ ID NO: 28349 - DNA, 25 bp, Artificial Sequence
  Synthetic
agttcagaccuccgaatagguagac

SEQ ID NO: 28350 - DNA, 22 bp, Artificial Sequence
  Synthetic
cccctcacutacagcctctuct

SEQ ID NO: 28351 - DNA, 19 bp, Artificial Sequence
  Synthetic
ggtgcccacuccaaggauc

SEQ ID NO: 28352 - DNA, 22 bp, Artificial Sequence
  Synthetic
ggagtagtgagugcccgaagua

SEQ ID NO: 28353 - DNA, 22 bp, Artificial Sequence
  Synthetic
cagauctgccugacaaacacca

SEQ ID NO: 28354 - DNA, 18 bp, Artificial Sequence
  Synthetic
gggagggugagctgguca

SEQ ID NO: 28355 - DNA, 19 bp, Artificial Sequence
  Synthetic
tgtccccugccaacucaga

SEQ ID NO: 28356 - DNA, 23 bp, Artificial Sequence
  Synthetic
ctgtcaccugaggtggtgaatua

SEQ ID NO: 28357 - DNA, 21 bp, Artificial Sequence
  Synthetic
gugggaccacctuaccaagac

SEQ ID NO: 28358 - DNA, 25 bp, Artificial Sequence
  Synthetic
ccctaaacaacgutctatcuggcaa

SEQ ID NO: 28359 - DNA, 21 bp, Artificial Sequence
  Synthetic
gccagcacucagacacacuaa

SEQ ID NO: 28360 - DNA, 21 bp, Artificial Sequence
  Synthetic
ttgactgggacuccctctcut

SEQ ID NO: 28361 - DNA, 20 bp, Artificial Sequence
  Synthetic
tgccttttcuggccttcugg

SEQ ID NO: 28362 - DNA, 18 bp, Artificial Sequence
  Synthetic
gggccttuagcccaaguc

SEQ ID NO: 28363 - DNA, 18 bp, Artificial Sequence
  Synthetic
gtcgtguggctgcaggua

SEQ ID NO: 28364 - DNA, 22 bp, Artificial Sequence
  Synthetic
cagtggaaagccucgtacucaa

SEQ ID NO: 28365 - DNA, 22 bp, Artificial Sequence
  Synthetic
aatgagatuaaggcccgctcug

SEQ ID NO: 28366 - DNA, 20 bp, Artificial Sequence
  Synthetic
cagcugggccgagttctuaa

SEQ ID NO: 28367 - DNA, 17 bp, Artificial Sequence
  Synthetic
gagcugcggatctugcg

SEQ ID NO: 28368 - DNA, 21 bp, Artificial Sequence
  Synthetic
gcttugaaagcccctccatuc

SEQ ID NO: 28369 - DNA, 20 bp, Artificial Sequence
  Synthetic
caucacaccccacgaguaca

SEQ ID NO: 28370 - DNA, 20 bp, Artificial Sequence
  Synthetic
cgggaagcugtcctttuggg

SEQ ID NO: 28371 - DNA, 18 bp, Artificial Sequence
  Synthetic
gggccaccaaugccaaug

SEQ ID NO: 28372 - DNA, 20 bp, Artificial Sequence
  Synthetic
cctctgcuttggccaaucct

SEQ ID NO: 28373 - DNA, 24 bp, Artificial Sequence
  Synthetic
cgctgttctcuttggtgtcatuca

SEQ ID NO: 28374 - DNA, 27 bp, Artificial Sequence
  Synthetic
tctagagatttcacugtgtctgcatug

SEQ ID NO: 28375 - DNA, 21 bp, Artificial Sequence
  Synthetic
ggccaccuccgttgtgaauaa

SEQ ID NO: 28376 - DNA, 24 bp, Artificial Sequence
  Synthetic
gccaggattuccttgggaaagaut

SEQ ID NO: 28377 - DNA, 26 bp, Artificial Sequence
  Synthetic
atccataugcagattgattctuggct

SEQ ID NO: 28378 - DNA, 20 bp, Artificial Sequence
  Synthetic
gtccgcucgtggatcugaag

SEQ ID NO: 28379 - DNA, 19 bp, Artificial Sequence
  Synthetic
ccgccgaccuatgucaagg

SEQ ID NO: 28380 - DNA, 22 bp, Artificial Sequence
  Synthetic
tgcttcaagucatactcuccgt

SEQ ID NO: 28381 - DNA, 25 bp, Artificial Sequence
  Synthetic
gatatccuggaaaccacatcctucc

SEQ ID NO: 28382 - DNA, 21 bp, Artificial Sequence
  Synthetic
tctccacggaaccgutttcuc

SEQ ID NO: 28383 - DNA, 24 bp, Artificial Sequence
  Synthetic
cgctatcugccatgatgatgucat

SEQ ID NO: 28384 - DNA, 24 bp, Artificial Sequence
  Synthetic
catgtgcauccgaatatgttgcug

SEQ ID NO: 28385 - DNA, 22 bp, Artificial Sequence
  Synthetic
tcttaagcugtcagagcuccct

SEQ ID NO: 28386 - DNA, 19 bp, Artificial Sequence
  Synthetic
cuccctuggaagccaccag

SEQ ID NO: 28387 - DNA, 28 bp, Artificial Sequence
  Synthetic
ccatagaugaaccgagtctttcttuaga

SEQ ID NO: 28388 - DNA, 19 bp, Artificial Sequence
  Synthetic
gttgcccutggtggugaag

SEQ ID NO: 28389 - DNA, 18 bp, Artificial Sequence
  Synthetic
ccactguggcgcuagaca

SEQ ID NO: 28390 - DNA, 18 bp, Artificial Sequence
  Synthetic
agggatgutggcgugagg

SEQ ID NO: 28391 - DNA, 18 bp, Artificial Sequence
  Synthetic
gcagauccagcucaccga

SEQ ID NO: 28392 - DNA, 24 bp, Artificial Sequence
  Synthetic
gtcacattagugttggccacttug

SEQ ID NO: 28393 - DNA, 19 bp, Artificial Sequence
  Synthetic
caccagucccggcaguaag

SEQ ID NO: 28394 - DNA, 25 bp, Artificial Sequence
  Synthetic
gaactcagagaugctgaagaacucc

SEQ ID NO: 28395 - DNA, 26 bp, Artificial Sequence
  Synthetic
catcttttactugggcagagtcctua

SEQ ID NO: 28396 - DNA, 21 bp, Artificial Sequence
  Synthetic
gtcctccuccgagttgatgug

SEQ ID NO: 28397 - DNA, 23 bp, Artificial Sequence
  Synthetic
tcagggcucatgataaaucgcaa

SEQ ID NO: 28398 - DNA, 17 bp, Artificial Sequence
  Synthetic
cgugcgaggcgatuggt

SEQ ID NO: 28399 - DNA, 23 bp, Artificial Sequence
  Synthetic
gaaattgatgaugccctgcacug

SEQ ID NO: 28400 - DNA, 24 bp, Artificial Sequence
  Synthetic
ggctgctttutacttcactgugag

SEQ ID NO: 28401 - DNA, 22 bp, Artificial Sequence
  Synthetic
gaacaaguatgggucaccagca

SEQ ID NO: 28402 - DNA, 27 bp, Artificial Sequence
  Synthetic
gccctaatccauctgatgcttttucat

SEQ ID NO: 28403 - DNA, 29 bp, Artificial Sequence
  Synthetic
gcgactaacaaucaaagtgaaaagauaca

SEQ ID NO: 28404 - DNA, 23 bp, Artificial Sequence
  Synthetic
cgtttggctugtggtgtaatugg

SEQ ID NO: 28405 - DNA, 29 bp, Artificial Sequence
  Synthetic
cagtttctcacuacaggtacttuaaagca

SEQ ID NO: 28406 - DNA, 21 bp, Artificial Sequence
  Synthetic
cccuccaagccaaagttgaug

SEQ ID NO: 28407 - DNA, 24 bp, Artificial Sequence
  Synthetic
ttttcctgccagucctctacaaug

SEQ ID NO: 28408 - DNA, 23 bp, Artificial Sequence
  Synthetic
gagaaagguaccaagcuaacauc

SEQ ID NO: 28409 - DNA, 26 bp, Artificial Sequence
  Synthetic
cttcagcacaaaauattgcuccaaca

SEQ ID NO: 28410 - DNA, 26 bp, Artificial Sequence
  Synthetic
ggaaccacugacagtctaucacaaaa

SEQ ID NO: 28411 - DNA, 21 bp, Artificial Sequence
  Synthetic
cttccugagacgaagcctucc

SEQ ID NO: 28412 - DNA, 22 bp, Artificial Sequence
  Synthetic
catcggacucgatgtagacgut

SEQ ID NO: 28413 - DNA, 20 bp, Artificial Sequence
  Synthetic
gccctttcugaccaagcugt

SEQ ID NO: 28414 - DNA, 19 bp, Artificial Sequence
  Synthetic
gagcggccuttgctcttug

SEQ ID NO: 28415 - DNA, 17 bp, Artificial Sequence
  Synthetic
ccucagaagccggcgua

SEQ ID NO: 28416 - DNA, 21 bp, Artificial Sequence
  Synthetic
ggagcuccaccctctagucat

SEQ ID NO: 28417 - DNA, 22 bp, Artificial Sequence
  Synthetic
catagcgcuccaggttgtaguc

SEQ ID NO: 28418 - DNA, 20 bp, Artificial Sequence
  Synthetic
ccacccuaccccuggagaaa

SEQ ID NO: 28419 - DNA, 20 bp, Artificial Sequence
  Synthetic
tctgaggccutcctctuggt

SEQ ID NO: 28420 - DNA, 17 bp, Artificial Sequence
  Synthetic
cccagcucccccatuca

SEQ ID NO: 28421 - DNA, 18 bp, Artificial Sequence
  Synthetic
tctgaccccugaccccut

SEQ ID NO: 28422 - DNA, 17 bp, Artificial Sequence
  Synthetic
ggaccagccggcaucuc

SEQ ID NO: 28423 - DNA, 21 bp, Artificial Sequence
  Synthetic
cagggaaggucaggtgctuac

SEQ ID NO: 28424 - DNA, 24 bp, Artificial Sequence
  Synthetic
aagtgaggtctuctcaggctctua

SEQ ID NO: 28425 - DNA, 21 bp, Artificial Sequence
  Synthetic
gtgccaaguggtcaagatcug

SEQ ID NO: 28426 - DNA, 18 bp, Artificial Sequence
  Synthetic
gaggtcautgccgugcag

SEQ ID NO: 28427 - DNA, 20 bp, Artificial Sequence
  Synthetic
ccggaacuguacaccaacca

SEQ ID NO: 28428 - DNA, 23 bp, Artificial Sequence
  Synthetic
tgtctgtuggagaccagauggat

SEQ ID NO: 28429 - DNA, 22 bp, Artificial Sequence
  Synthetic
cgtccucattcttcuggcacag

SEQ ID NO: 28430 - DNA, 19 bp, Artificial Sequence
  Synthetic
gatctgucacccgctguct

SEQ ID NO: 28431 - DNA, 18 bp, Artificial Sequence
  Synthetic
cguggccatguggacagg

SEQ ID NO: 28432 - DNA, 19 bp, Artificial Sequence
  Synthetic
cggcauggacacgactcut

SEQ ID NO: 28433 - DNA, 20 bp, Artificial Sequence
  Synthetic
tgaattcauccgccccguag

SEQ ID NO: 28434 - DNA, 17 bp, Artificial Sequence
  Synthetic
gcuggcagcccctcauc

SEQ ID NO: 28435 - DNA, 19 bp, Artificial Sequence
  Synthetic
agaugtgcucccccaacac

SEQ ID NO: 28436 - DNA, 23 bp, Artificial Sequence
  Synthetic
acttagagggaaggutggauggt

SEQ ID NO: 28437 - DNA, 21 bp, Artificial Sequence
  Synthetic
aggtgtccutctcagcacuct

SEQ ID NO: 28438 - DNA, 24 bp, Artificial Sequence
  Synthetic
gctgtaaacagcuctgtgtttcug

SEQ ID NO: 28439 - DNA, 24 bp, Artificial Sequence
  Synthetic
ctcccgagutcaagtgattcucat

SEQ ID NO: 28440 - DNA, 25 bp, Artificial Sequence
  Synthetic
cttttcagtucagtggcatucacat

SEQ ID NO: 28441 - DNA, 29 bp, Artificial Sequence
  Synthetic
ggagaagtcauagagacagaaaguagagt

SEQ ID NO: 28442 - DNA, 17 bp, Artificial Sequence
  Synthetic
gctuccccagccuccag

SEQ ID NO: 28443 - DNA, 22 bp, Artificial Sequence
  Synthetic
cagaggucgaagaatcgctcut

SEQ ID NO: 28444 - DNA, 19 bp, Artificial Sequence
  Synthetic
cguggaccttcuggaggag

SEQ ID NO: 28445 - DNA, 19 bp, Artificial Sequence
  Synthetic
ccttgugggcaatcuggga

SEQ ID NO: 28446 - DNA, 26 bp, Artificial Sequence
  Synthetic
gaaatgaaccaaucattgagcacuga

SEQ ID NO: 28447 - DNA, 20 bp, Artificial Sequence
  Synthetic
tcctcagccuccgauaagca

SEQ ID NO: 28448 - DNA, 20 bp, Artificial Sequence
  Synthetic
gtcagggaagcugatuccca

SEQ ID NO: 28449 - DNA, 21 bp, Artificial Sequence
  Synthetic
gggagagtcuccacctctuac

SEQ ID NO: 28450 - DNA, 18 bp, Artificial Sequence
  Synthetic
gctccgcauccgtgacug

SEQ ID NO: 28451 - DNA, 18 bp, Artificial Sequence
  Synthetic
cctgctggucctgcttug

SEQ ID NO: 28452 - DNA, 19 bp, Artificial Sequence
  Synthetic
gggcuaaagggcucagagt

SEQ ID NO: 28453 - DNA, 19 bp, Artificial Sequence
  Synthetic
cgagctuccacctcgacug

SEQ ID NO: 28454 - DNA, 21 bp, Artificial Sequence
  Synthetic
gcacaggaggaagugccaaua

SEQ ID NO: 28455 - DNA, 21 bp, Artificial Sequence
  Synthetic
tcctgggcaagutctcucaga

SEQ ID NO: 28456 - DNA, 25 bp, Artificial Sequence
  Synthetic
tttagaatctcaaucgcctgctcuc

SEQ ID NO: 28457 - DNA, 29 bp, Artificial Sequence
  Synthetic
agctttctttuagaccacatatctgcuat

SEQ ID NO: 28458 - DNA, 22 bp, Artificial Sequence
  Synthetic
cgctcuccacccatctcactua

SEQ ID NO: 28459 - DNA, 25 bp, Artificial Sequence
  Synthetic
gtctacuacacaaggagcucagaga

SEQ ID NO: 28460 - DNA, 22 bp, Artificial Sequence
  Synthetic
gctgtcggacugaaactgtgut

SEQ ID NO: 28461 - DNA, 32 bp, Artificial Sequence
  Synthetic
ttcaattctcagaaaagcuaccattatcagua

SEQ ID NO: 28462 - DNA, 24 bp, Artificial Sequence
  Synthetic
gccctgtgautcaatgactgttut

SEQ ID NO: 28463 - DNA, 21 bp, Artificial Sequence
  Synthetic
gccaaggaaguccccaaguag

SEQ ID NO: 28464 - DNA, 20 bp, Artificial Sequence
  Synthetic
cagaggcugagcaggaaaug

SEQ ID NO: 28465 - DNA, 17 bp, Artificial Sequence
  Synthetic
agcctccucgccaguct

SEQ ID NO: 28466 - DNA, 23 bp, Artificial Sequence
  Synthetic
gcttgtaugacccaagctccuaa

SEQ ID NO: 28467 - DNA, 24 bp, Artificial Sequence
  Synthetic
ccccaatcacucagtctagtucac

SEQ ID NO: 28468 - DNA, 25 bp, Artificial Sequence
  Synthetic
tggcattgttgauatcacaggguat

SEQ ID NO: 28469 - DNA, 22 bp, Artificial Sequence
  Synthetic
gcacgggutagtaucacagagg

SEQ ID NO: 28470 - DNA, 24 bp, Artificial Sequence
  Synthetic
ctctcagctucttctctgcttuct

SEQ ID NO: 28471 - DNA, 26 bp, Artificial Sequence
  Synthetic
ctccctatggauggctctcttgauat

SEQ ID NO: 28472 - DNA, 20 bp, Artificial Sequence
  Synthetic
ccagugaggagccaucacat

SEQ ID NO: 28473 - DNA, 18 bp, Artificial Sequence
  Synthetic
ccccagaggugcugcaag

SEQ ID NO: 28474 - DNA, 19 bp, Artificial Sequence
  Synthetic
gggtuaccctgggugaaga

SEQ ID NO: 28475 - DNA, 20 bp, Artificial Sequence
  Synthetic
aggtatgugcagtgctuggg

SEQ ID NO: 28476 - DNA, 18 bp, Artificial Sequence
  Synthetic
ttcgccaucaaggtuggg

SEQ ID NO: 28477 - DNA, 19 bp, Artificial Sequence
  Synthetic
ctgtggcuccatggcucat

SEQ ID NO: 28478 - DNA, 20 bp, Artificial Sequence
  Synthetic
gggtugggccaagatcacut

SEQ ID NO: 28479 - DNA, 19 bp, Artificial Sequence
  Synthetic
ggtccccaucccactgtug

SEQ ID NO: 28480 - DNA, 17 bp, Artificial Sequence
  Synthetic
tugggaggugggagggt

SEQ ID NO: 28481 - DNA, 21 bp, Artificial Sequence
  Synthetic
cgaggctaccucacaggaaug

SEQ ID NO: 28482 - DNA, 21 bp, Artificial Sequence
  Synthetic
tccatugggaggaaagggaug

SEQ ID NO: 28483 - DNA, 18 bp, Artificial Sequence
  Synthetic
ccgacgaccucggctaug

SEQ ID NO: 28484 - DNA, 20 bp, Artificial Sequence
  Synthetic
gggctcutccattcucacac

SEQ ID NO: 28485 - DNA, 22 bp, Artificial Sequence
  Synthetic
cccaacccauggagacctauga

SEQ ID NO: 28486 - DNA, 22 bp, Artificial Sequence
  Synthetic
cccgggacaaagaaucctcuaa

SEQ ID NO: 28487 - DNA, 21 bp, Artificial Sequence
  Synthetic
actgaugccccaugaaaaccc

SEQ ID NO: 28488 - DNA, 25 bp, Artificial Sequence
  Synthetic
gtgagaccutgtctcugaagcaaat

SEQ ID NO: 28489 - DNA, 25 bp, Artificial Sequence
  Synthetic
cctgctgccautttctttcuaacag

SEQ ID NO: 28490 - DNA, 24 bp, Artificial Sequence
  Synthetic
agaatuccaggacaacatgtguca

SEQ ID NO: 28491 - DNA, 27 bp, Artificial Sequence
  Synthetic
agaatgacttuggttttcctctcucag

SEQ ID NO: 28492 - DNA, 23 bp, Artificial Sequence
  Synthetic
tgtctgcaacacugcaaaauact

SEQ ID NO: 28493 - DNA, 23 bp, Artificial Sequence
  Synthetic
gacattttgaugcaggctctucc

SEQ ID NO: 28494 - DNA, 18 bp, Artificial Sequence
  Synthetic
gtggacucaccgcacucc

SEQ ID NO: 28495 - DNA, 26 bp, Artificial Sequence
  Synthetic
atttttccaaaguaagaagucagcut

SEQ ID NO: 28496 - DNA, 17 bp, Artificial Sequence
  Synthetic
cggcuggaagcucagca

SEQ ID NO: 28497 - DNA, 18 bp, Artificial Sequence
  Synthetic
accgagccuggctcuact

SEQ ID NO: 28498 - DNA, 20 bp, Artificial Sequence
  Synthetic
catcaggcacacutgcugac

SEQ ID NO: 28499 - DNA, 22 bp, Artificial Sequence
  Synthetic
gcuccagaaaggaauccttcut

SEQ ID NO: 28500 - DNA, 23 bp, Artificial Sequence
  Synthetic
gtcatccacucatcgatgucaca

SEQ ID NO: 28501 - DNA, 22 bp, Artificial Sequence
  Synthetic
gctttutgcagacaugcacagg

SEQ ID NO: 28502 - DNA, 23 bp, Artificial Sequence
  Synthetic
aagaauaccagcccacatacugc

SEQ ID NO: 28503 - DNA, 24 bp, Artificial Sequence
  Synthetic
tgttatttcagucacctggtgcut

SEQ ID NO: 28504 - DNA, 31 bp, Artificial Sequence
  Synthetic
aaagtgatagtccuctatgttattttuggct

SEQ ID NO: 28505 - DNA, 27 bp, Artificial Sequence
  Synthetic
gtgatgctgtuggatttctctttcaut

SEQ ID NO: 28506 - DNA, 29 bp, Artificial Sequence
  Synthetic
tttgtacaatugcatagacgtguaaaacc

SEQ ID NO: 28507 - DNA, 28 bp, Artificial Sequence
  Synthetic
catgacagaugaagaaggagcagaauaa

SEQ ID NO: 28508 - DNA, 22 bp, Artificial Sequence
  Synthetic
gcgugcacacacacaattctua

SEQ ID NO: 28509 - DNA, 25 bp, Artificial Sequence
  Synthetic
ttccctttctgauatctctgccuct

SEQ ID NO: 28510 - DNA, 24 bp, Artificial Sequence
  Synthetic
ccaagatgagucaaacactuacgg

SEQ ID NO: 28511 - DNA, 25 bp, Artificial Sequence
  Synthetic
tcctctcctuctacctctcuacaga

SEQ ID NO: 28512 - DNA, 27 bp, Artificial Sequence
  Synthetic
gaattgatgctugttgcacctauaaaa

SEQ ID NO: 28513 - DNA, 21 bp, Artificial Sequence
  Synthetic
caagcuactgcgucaacacaa

SEQ ID NO: 28514 - DNA, 30 bp, Artificial Sequence
  Synthetic
agacataaaatgacuctaagtgaagatucc

SEQ ID NO: 28515 - DNA, 22 bp, Artificial Sequence
  Synthetic
cctgcccagaucttgattucct

SEQ ID NO: 28516 - DNA, 28 bp, Artificial Sequence
  Synthetic
tgctaattcctauatcctgtgctaucct

SEQ ID NO: 28517 - DNA, 31 bp, Artificial Sequence
  Synthetic
cgtcacataagtttuaatgagcttttacgut

SEQ ID NO: 28518 - DNA, 23 bp, Artificial Sequence
  Synthetic
agaaattgucaagtgacguggga

SEQ ID NO: 28519 - DNA, 22 bp, Artificial Sequence
  Synthetic
gccagugcagactgtctuagag

SEQ ID NO: 28520 - DNA, 24 bp, Artificial Sequence
  Synthetic
caggtgaacuaactctcacgucag

SEQ ID NO: 28521 - DNA, 27 bp, Artificial Sequence
  Synthetic
gtgttcttugggaatttgatucgaaga

SEQ ID NO: 28522 - DNA, 23 bp, Artificial Sequence
  Synthetic
gttacattuggcctgatgctugg

SEQ ID NO: 28523 - DNA, 26 bp, Artificial Sequence
  Synthetic
gaactgatauacacctccttugccat

SEQ ID NO: 28524 - DNA, 22 bp, Artificial Sequence
  Synthetic
caaaggaugcaactucacccaa

SEQ ID NO: 28525 - DNA, 25 bp, Artificial Sequence
  Synthetic
ggaattgagtuggatgtcaggtuct

SEQ ID NO: 28526 - DNA, 23 bp, Artificial Sequence
  Synthetic
agggccctgutgtaatgctaaut

SEQ ID NO: 28527 - DNA, 23 bp, Artificial Sequence
  Synthetic
ctatttaugaccgccuggagcaa

SEQ ID NO: 28528 - DNA, 29 bp, Artificial Sequence
  Synthetic
ctgtttctccccuctctaagtaaaaaugt

SEQ ID NO: 28529 - DNA, 27 bp, Artificial Sequence
  Synthetic
tgggttgtcugttatttctgauggaat

SEQ ID NO: 28530 - DNA, 20 bp, Artificial Sequence
  Synthetic
gttttgaccgccucagctug

SEQ ID NO: 28531 - DNA, 21 bp, Artificial Sequence
  Synthetic
gtgctttcagcugtgagctug

SEQ ID NO: 28532 - DNA, 31 bp, Artificial Sequence
  Synthetic
agtgataaaagcugaaaatgacttacuggaa

SEQ ID NO: 28533 - DNA, 28 bp, Artificial Sequence
  Synthetic
gtcttggagacucaaagtatcttaucag

SEQ ID NO: 28534 - DNA, 21 bp, Artificial Sequence
  Synthetic
gggcccugaagcaaagaagua

SEQ ID NO: 28535 - DNA, 29 bp, Artificial Sequence
  Synthetic
gcagagaaaaauagatgagaccctugaaa

SEQ ID NO: 28536 - DNA, 21 bp, Artificial Sequence
  Synthetic
ctccgucaccactgatcctuc

SEQ ID NO: 28537 - DNA, 29 bp, Artificial Sequence
  Synthetic
gccaaataagcacutcttttcatctcaut

SEQ ID NO: 28538 - DNA, 24 bp, Artificial Sequence
  Synthetic
ggcctttttgcuccacatctttuc

SEQ ID NO: 28539 - DNA, 25 bp, Artificial Sequence
  Synthetic
catattcttctucctgctgtccugt

SEQ ID NO: 28540 - DNA, 23 bp, Artificial Sequence
  Synthetic
actattttgutttgtcccuggct

SEQ ID NO: 28541 - DNA, 21 bp, Artificial Sequence
  Synthetic
acaggaugctacccguaagga

SEQ ID NO: 28542 - DNA, 26 bp, Artificial Sequence
  Synthetic
caguttagctggatuggaaaaacaaa

SEQ ID NO: 28543 - DNA, 29 bp, Artificial Sequence
  Synthetic
cagatgataucagaaaaguccacatgaua

SEQ ID NO: 28544 - DNA, 30 bp, Artificial Sequence
  Synthetic
ggtatctttgatacuaaccttggtttcugt

SEQ ID NO: 28545 - DNA, 24 bp, Artificial Sequence
  Synthetic
cggaggcaacagutgaatgaaaug

SEQ ID NO: 28546 - DNA, 29 bp, Artificial Sequence
  Synthetic
ttttattgaaactugtcatgcatctugct

SEQ ID NO: 28547 - DNA, 27 bp, Artificial Sequence
  Synthetic
gctgaagaacccugatactaagggaua

SEQ ID NO: 28548 - DNA, 22 bp, Artificial Sequence
  Synthetic
aagccagucggtaagttctguc

SEQ ID NO: 28549 - DNA, 29 bp, Artificial Sequence
  Synthetic
gaaattggctctutagcttgtgtttcuaa

SEQ ID NO: 28550 - DNA, 28 bp, Artificial Sequence
  Synthetic
tgattataaataguccacgtcaauggca

SEQ ID NO: 28551 - DNA, 26 bp, Artificial Sequence
  Synthetic
atctgcactauatgggttctttuccc

SEQ ID NO: 28552 - DNA, 26 bp, Artificial Sequence
  Synthetic
cuaataggagauaaccacagcagcag

SEQ ID NO: 28553 - DNA, 29 bp, Artificial Sequence
  Synthetic
tggcttatgcctugagaattatttaccut

SEQ ID NO: 28554 - DNA, 26 bp, Artificial Sequence
  Synthetic
aauaacctaaugggcagaaaaccaat

SEQ ID NO: 28555 - DNA, 29 bp, Artificial Sequence
  Synthetic
agataacattgcuagtatcccactugaac

SEQ ID NO: 28556 - DNA, 24 bp, Artificial Sequence
  Synthetic
gcctttcacccugcttataatcuc

SEQ ID NO: 28557 - DNA, 28 bp, Artificial Sequence
  Synthetic
aaacagaugccagtattcuacaggaaaa

SEQ ID NO: 28558 - DNA, 30 bp, Artificial Sequence
  Synthetic
agtccagatgtgcugaagataaatacaaut

SEQ ID NO: 28559 - DNA, 21 bp, Artificial Sequence
  Synthetic
tgcttttaccugcaggcgaut

SEQ ID NO: 28560 - DNA, 22 bp, Artificial Sequence
  Synthetic
actttgcaaugctgctgtctuc

SEQ ID NO: 28561 - DNA, 23 bp, Artificial Sequence
  Synthetic
caccatttgcuacctttgggaut

SEQ ID NO: 28562 - DNA, 23 bp, Artificial Sequence
  Synthetic
gaggtcaggagcautgagaagut

SEQ ID NO: 28563 - DNA, 28 bp, Artificial Sequence
  Synthetic
ggaggtttcacugttaggaagcuaaaaa

SEQ ID NO: 28564 - DNA, 22 bp, Artificial Sequence
  Synthetic
cttgctgagcuggatctgagut

SEQ ID NO: 28565 - DNA, 26 bp, Artificial Sequence
  Synthetic
gacaacagccuttgaaatttugagag

SEQ ID NO: 28566 - DNA, 27 bp, Artificial Sequence
  Synthetic
aatatgtgctcugaaaattcagtugga

SEQ ID NO: 28567 - DNA, 30 bp, Artificial Sequence
  Synthetic
ggaattggagcaguttaactcagatauaca

SEQ ID NO: 28568 - DNA, 25 bp, Artificial Sequence
  Synthetic
tttccacctuggagtagatctucct

SEQ ID NO: 28569 - DNA, 26 bp, Artificial Sequence
  Synthetic
caagtcctauctcttgctcauggaat

SEQ ID NO: 28570 - DNA, 27 bp, Artificial Sequence
  Synthetic
tcaaacacagaautgttactggucact

SEQ ID NO: 28571 - DNA, 27 bp, Artificial Sequence
  Synthetic
gttggtggaagauaaactcagtctuct

SEQ ID NO: 28572 - DNA, 31 bp, Artificial Sequence
  Synthetic
gtgttttcacgtaugttcaaaataacctuca

SEQ ID NO: 28573 - DNA, 27 bp, Artificial Sequence
  Synthetic
gtaagaugcgaaaggaaatgaatguct

SEQ ID NO: 28574 - DNA, 27 bp, Artificial Sequence
  Synthetic
tgcccgtugctttacaatttauaagga

SEQ ID NO: 28575 - DNA, 31 bp, Artificial Sequence
  Synthetic
aacttgtataaaaguctgagtgaagugaagt

SEQ ID NO: 28576 - DNA, 27 bp, Artificial Sequence
  Synthetic
ccaatcttgccaauaatcaagttgucc

SEQ ID NO: 28577 - DNA, 27 bp, Artificial Sequence
  Synthetic
ctgactaauaatgctatccucccaaca

SEQ ID NO: 28578 - DNA, 25 bp, Artificial Sequence
  Synthetic
caatataagcugccaactgcttguc

SEQ ID NO: 28579 - DNA, 27 bp, Artificial Sequence
  Synthetic
ttgttcagcaggautacagaaaagcua

SEQ ID NO: 28580 - DNA, 28 bp, Artificial Sequence
  Synthetic
agcaaacaaaactauaggatcagggauc

SEQ ID NO: 28581 - DNA, 28 bp, Artificial Sequence
  Synthetic
tgaccctattcuaagcaaaccaaatcuc

SEQ ID NO: 28582 - DNA, 22 bp, Artificial Sequence
  Synthetic
ccatgacuccgccatctgtuag

SEQ ID NO: 28583 - DNA, 26 bp, Artificial Sequence
  Synthetic
tcagaagatacugagcatttgcugat

SEQ ID NO: 28584 - DNA, 26 bp, Artificial Sequence
  Synthetic
catgttctuaaccactatgccucaca

SEQ ID NO: 28585 - DNA, 31 bp, Artificial Sequence
  Synthetic
gaaagtgaaactccutactgagtctguaaat

SEQ ID NO: 28586 - DNA, 26 bp, Artificial Sequence
  Synthetic
aggaaagagcagacugtatacaacut

SEQ ID NO: 28587 - DNA, 31 bp, Artificial Sequence
  Synthetic
ctgaagaagagtaucttgagagagatttuga

SEQ ID NO: 28588 - DNA, 25 bp, Artificial Sequence
  Synthetic
aggaacaaagccutaaccaaaagua

SEQ ID NO: 28589 - DNA, 22 bp, Artificial Sequence
  Synthetic
gccagagttugcttcgagacut

SEQ ID NO: 28590 - DNA, 22 bp, Artificial Sequence
  Synthetic
caaaauccaccccagctguaaa

SEQ ID NO: 28591 - DNA, 23 bp, Artificial Sequence
  Synthetic
tgccttauaacgggtctcgttuc

SEQ ID NO: 28592 - DNA, 23 bp, Artificial Sequence
  Synthetic
ctuttgacaatgcucaaccagct

SEQ ID NO: 28593 - DNA, 25 bp, Artificial Sequence
  Synthetic
aggcttuacaaagttctcugcaaga

SEQ ID NO: 28594 - DNA, 26 bp, Artificial Sequence
  Synthetic
ggtatggagaguttggtttctgacug

SEQ ID NO: 28595 - DNA, 28 bp, Artificial Sequence
  Synthetic
agtttgctgacaauttaggaaaacaugg

SEQ ID NO: 28596 - DNA, 21 bp, Artificial Sequence
  Synthetic
ggaacatggguccttgtccut

SEQ ID NO: 28597 - DNA, 30 bp, Artificial Sequence
  Synthetic
cttgccttactgcuttttaataccttctut

SEQ ID NO: 28598 - DNA, 22 bp, Artificial Sequence
  Synthetic
gcagtagtugtcatctgcucca

SEQ ID NO: 28599 - DNA, 27 bp, Artificial Sequence
  Synthetic
agatcatttcttucagtctgtgggtuc

SEQ ID NO: 28600 - DNA, 27 bp, Artificial Sequence
  Synthetic
guagaatcacagauaacaaagcacgga

SEQ ID NO: 28601 - DNA, 25 bp, Artificial Sequence
  Synthetic
tttgctgtctuaggttggatgtuga

SEQ ID NO: 28602 - DNA, 22 bp, Artificial Sequence
  Synthetic
ggtggaagutcctctugagcat

SEQ ID NO: 28603 - DNA, 26 bp, Artificial Sequence
  Synthetic
tgaagtctttcuagcaatgtcugacc

SEQ ID NO: 28604 - DNA, 23 bp, Artificial Sequence
  Synthetic
gcaaagttauccagccatgctuc

SEQ ID NO: 28605 - DNA, 25 bp, Artificial Sequence
  Synthetic
caacccaggcutattctgtgatcut

SEQ ID NO: 28606 - DNA, 28 bp, Artificial Sequence
  Synthetic
tttaaagccagtugtgtgaatcttgtuc

SEQ ID NO: 28607 - DNA, 28 bp, Artificial Sequence
  Synthetic
catgtgugagaaactagctguaaaagac

SEQ ID NO: 28608 - DNA, 28 bp, Artificial Sequence
  Synthetic
tttctaguagaaagcacgcaacauaaga

SEQ ID NO: 28609 - DNA, 27 bp, Artificial Sequence
  Synthetic
tgctttcaaagaggucataataggcut

SEQ ID NO: 28610 - DNA, 23 bp, Artificial Sequence
  Synthetic
cctgaggcautcccatctugaat

SEQ ID NO: 28611 - DNA, 30 bp, Artificial Sequence
  Synthetic
cacaccgattuacctagagttctaatuaca

SEQ ID NO: 28612 - DNA, 22 bp, Artificial Sequence
  Synthetic
gcaaugtgtccucagcagaaag

SEQ ID NO: 28613 - DNA, 29 bp, Artificial Sequence
  Synthetic
gcaaagacautaattgtguaacacccaat

SEQ ID NO: 28614 - DNA, 30 bp, Artificial Sequence
  Synthetic
agaaaacatcttgaauagtagctgtcctut

SEQ ID NO: 28615 - DNA, 25 bp, Artificial Sequence
  Synthetic
ctcttccaagutttgccucaacaag

SEQ ID NO: 28616 - DNA, 25 bp, Artificial Sequence
  Synthetic
agcagtgguagtccagaaattuacc

SEQ ID NO: 28617 - DNA, 30 bp, Artificial Sequence
  Synthetic
gcatggaagtaaauctcatggaacattcua

SEQ ID NO: 28618 - DNA, 23 bp, Artificial Sequence
  Synthetic
agctggtggugaagttgatuaca

SEQ ID NO: 28619 - DNA, 29 bp, Artificial Sequence
  Synthetic
cttgctcaaggaaugcattttcttaugaa

SEQ ID NO: 28620 - DNA, 25 bp, Artificial Sequence
  Synthetic
tttactcaccagaugagaccucaga

SEQ ID NO: 28621 - DNA, 25 bp, Artificial Sequence
  Synthetic
aaacaggugcaaaaagattgtgugt

SEQ ID NO: 28622 - DNA, 23 bp, Artificial Sequence
  Synthetic
cuctacttctucccaccaaagca

SEQ ID NO: 28623 - DNA, 22 bp, Artificial Sequence
  Synthetic
ggatcactcacuttcccccuac

SEQ ID NO: 28624 - DNA, 17 bp, Artificial Sequence
  Synthetic
cacccugccctgcagua

SEQ ID NO: 28625 - DNA, 28 bp, Artificial Sequence
  Synthetic
tgcattgttuaacaggatcctcagatua

SEQ ID NO: 28626 - DNA, 27 bp, Artificial Sequence
  Synthetic
caatgaatcaccauagtacatggguct

SEQ ID NO: 28627 - DNA, 28 bp, Artificial Sequence
  Synthetic
tcagatctgctgauagccatagcataua

SEQ ID NO: 28628 - DNA, 26 bp, Artificial Sequence
  Synthetic
guatttgcctttatugcaagggaagt

SEQ ID NO: 28629 - DNA, 23 bp, Artificial Sequence
  Synthetic
gttgcuagaggcagacaaauccc

SEQ ID NO: 28630 - DNA, 30 bp, Artificial Sequence
  Synthetic
cttagattatcuttttcttggttugccaca

SEQ ID NO: 28631 - DNA, 22 bp, Artificial Sequence
  Synthetic
gtgaggtaaucagccaggauct

SEQ ID NO: 28632 - DNA, 22 bp, Artificial Sequence
  Synthetic
gcgaattuacgcctggattuca

SEQ ID NO: 28633 - DNA, 28 bp, Artificial Sequence
  Synthetic
attgcatcugaggatgattuaagagagg

SEQ ID NO: 28634 - DNA, 24 bp, Artificial Sequence
  Synthetic
ttgcctttuactgtcccaugaagt

SEQ ID NO: 28635 - DNA, 26 bp, Artificial Sequence
  Synthetic
aaccttcagagaggcaucaatttgua

SEQ ID NO: 28636 - DNA, 22 bp, Artificial Sequence
  Synthetic
aaccctgcaaagcugaaaccua

SEQ ID NO: 28637 - DNA, 31 bp, Artificial Sequence
  Synthetic
cttctttctugacaagtaacacaacaucaaa

SEQ ID NO: 28638 - DNA, 17 bp, Artificial Sequence
  Synthetic
gccuggcgggcaaacua

SEQ ID NO: 28639 - DNA, 22 bp, Artificial Sequence
  Synthetic
ccguctctuggagaagaagcag

SEQ ID NO: 28640 - DNA, 24 bp, Artificial Sequence
  Synthetic
atttcagcacuaagaactgugcct

SEQ ID NO: 28641 - DNA, 29 bp, Artificial Sequence
  Synthetic
agatgttacagttcucacagtcttgaaug

SEQ ID NO: 28642 - DNA, 22 bp, Artificial Sequence
  Synthetic
gcagcgtguttttccggaatug

SEQ ID NO: 28643 - DNA, 25 bp, Artificial Sequence
  Synthetic
ctgcatcttugaactggaaagcuaa

SEQ ID NO: 28644 - DNA, 24 bp, Artificial Sequence
  Synthetic
gatgctgtggutcaggactatgut

SEQ ID NO: 28645 - DNA, 31 bp, Artificial Sequence
  Synthetic
gtgtatgactatttcucttctctttctccut

SEQ ID NO: 28646 - DNA, 26 bp, Artificial Sequence
  Synthetic
tcagacaaaggaagugtccaugaaag

SEQ ID NO: 28647 - DNA, 28 bp, Artificial Sequence
  Synthetic
aggcaatguaaaacaaatgtuaaaggca

SEQ ID NO: 28648 - DNA, 26 bp, Artificial Sequence
  Synthetic
cctgttattgccutggagtttaaugg

SEQ ID NO: 28649 - DNA, 30 bp, Artificial Sequence
  Synthetic
aagcaacatuagggacaaaagtatuaaagt

SEQ ID NO: 28650 - DNA, 23 bp, Artificial Sequence
  Synthetic
gggcaaaaggguaattcucaagt

SEQ ID NO: 28651 - DNA, 24 bp, Artificial Sequence
  Synthetic
gttacacccuaaagccugaaacct

SEQ ID NO: 28652 - DNA, 22 bp, Artificial Sequence
  Synthetic
gaauctcacugacgaggcagag

SEQ ID NO: 28653 - DNA, 25 bp, Artificial Sequence
  Synthetic
gcagacatcaugagtactccttugg

SEQ ID NO: 28654 - DNA, 23 bp, Artificial Sequence
  Synthetic
actccuaaagacccugcaaaacc

SEQ ID NO: 28655 - DNA, 30 bp, Artificial Sequence
  Synthetic
acaacaaatataagguccactttgctttuc

SEQ ID NO: 28656 - DNA, 26 bp, Artificial Sequence
  Synthetic
ggttgaatcctutagccctacttuct

SEQ ID NO: 28657 - DNA, 25 bp, Artificial Sequence
  Synthetic
gaccacataugcacacatatcucca

SEQ ID NO: 28658 - DNA, 23 bp, Artificial Sequence
  Synthetic
ggucctggagcugaacaacaaat

SEQ ID NO: 28659 - DNA, 25 bp, Artificial Sequence
  Synthetic
ctggatatcugcagtacccagatug

SEQ ID NO: 28660 - DNA, 20 bp, Artificial Sequence
  Synthetic
gatctctguacggcccctuc

SEQ ID NO: 28661 - DNA, 24 bp, Artificial Sequence
  Synthetic
gttccugacacagacagacuacac

SEQ ID NO: 28662 - DNA, 18 bp, Artificial Sequence
  Synthetic
cuacgggcugggcaagat

SEQ ID NO: 28663 - DNA, 19 bp, Artificial Sequence
  Synthetic
ccatucccagccgtcagug

SEQ ID NO: 28664 - DNA, 21 bp, Artificial Sequence
  Synthetic
tcccacccugaggtacactut

SEQ ID NO: 28665 - DNA, 22 bp, Artificial Sequence
  Synthetic
tgttaatggcacuctgggaucg

SEQ ID NO: 28666 - DNA, 28 bp, Artificial Sequence
  Synthetic
aatagagaccucactatttgcaatgucc

SEQ ID NO: 28667 - DNA, 25 bp, Artificial Sequence
  Synthetic
agtacacctggugttaggagtuact

SEQ ID NO: 28668 - DNA, 20 bp, Artificial Sequence
  Synthetic
gctgtggutccacgauaggg

SEQ ID NO: 28669 - DNA, 23 bp, Artificial Sequence
  Synthetic
gcagattcugttctctacuggca

SEQ ID NO: 28670 - DNA, 27 bp, Artificial Sequence
  Synthetic
gggagtcuaagaagaattugaggaaga

SEQ ID NO: 28671 - DNA, 29 bp, Artificial Sequence
  Synthetic
gcttgttgacugagcagatataacaugag

SEQ ID NO: 28672 - DNA, 23 bp, Artificial Sequence
  Synthetic
gggtaaccauggtgaatgagtug

SEQ ID NO: 28673 - DNA, 24 bp, Artificial Sequence
  Synthetic
gtaccaggcuagtggtcagacaua

SEQ ID NO: 28674 - DNA, 26 bp, Artificial Sequence
  Synthetic
atgtagatcuaagagccagaaugcac

SEQ ID NO: 28675 - DNA, 25 bp, Artificial Sequence
  Synthetic
tccttctatuccccttttcgctuac

SEQ ID NO: 28676 - DNA, 23 bp, Artificial Sequence
  Synthetic
ggcctacacautgaggagugaag

SEQ ID NO: 28677 - DNA, 25 bp, Artificial Sequence
  Synthetic
cagaggtaacuagagagtgguaggg

SEQ ID NO: 28678 - DNA, 26 bp, Artificial Sequence
  Synthetic
acttagtactgcugttctgtgaacug

SEQ ID NO: 28679 - DNA, 27 bp, Artificial Sequence
  Synthetic
gaagaaacgauctagugcaaggaaaag

SEQ ID NO: 28680 - DNA, 23 bp, Artificial Sequence
  Synthetic
ccttggaucttcccattaugcct

SEQ ID NO: 28681 - DNA, 23 bp, Artificial Sequence
  Synthetic
tcccttcaaucttctcctugggt

SEQ ID NO: 28682 - DNA, 21 bp, Artificial Sequence
  Synthetic
agatcggugctggagtcugat

SEQ ID NO: 28683 - DNA, 23 bp, Artificial Sequence
  Synthetic
ctgttuaaggagccucaaaccca

SEQ ID NO: 28684 - DNA, 21 bp, Artificial Sequence
  Synthetic
actggtcccuttcaactgucc

SEQ ID NO: 28685 - DNA, 25 bp, Artificial Sequence
  Synthetic
cuagcagggagaagauagggaagaa

SEQ ID NO: 28686 - DNA, 22 bp, Artificial Sequence
  Synthetic
ttgcatttcucacccccgttua

SEQ ID NO: 28687 - DNA, 25 bp, Artificial Sequence
  Synthetic
tcagttatuccgaagctctgctuac

SEQ ID NO: 28688 - DNA, 24 bp, Artificial Sequence
  Synthetic
gcaggcctucttcaacactacuat

SEQ ID NO: 28689 - DNA, 21 bp, Artificial Sequence
  Synthetic
caaagctguagcggtuagcag

SEQ ID NO: 28690 - DNA, 23 bp, Artificial Sequence
  Synthetic
aggtttttccugagggcattugt

SEQ ID NO: 28691 - DNA, 20 bp, Artificial Sequence
  Synthetic
gtcacugccccacuagcaaa

SEQ ID NO: 28692 - DNA, 25 bp, Artificial Sequence
  Synthetic
gcacacacauaaacccacauacagt

SEQ ID NO: 28693 - DNA, 23 bp, Artificial Sequence
  Synthetic
ctggttcagaucagggtcactua

SEQ ID NO: 28694 - DNA, 20 bp, Artificial Sequence
  Synthetic
cctatcucccacccgugaac

SEQ ID NO: 28695 - DNA, 22 bp, Artificial Sequence
  Synthetic
gtgggaggaaggugaaacugac

SEQ ID NO: 28696 - DNA, 23 bp, Artificial Sequence
  Synthetic
cctcatgcagcucatttgctauc

SEQ ID NO: 28697 - DNA, 29 bp, Artificial Sequence
  Synthetic
tccttttctcaaggutcctattgtttcuc

SEQ ID NO: 28698 - DNA, 24 bp, Artificial Sequence
  Synthetic
ctcctaccauctgctttcctucac

SEQ ID NO: 28699 - DNA, 25 bp, Artificial Sequence
  Synthetic
tgggtccuaacatgtttctauccga

SEQ ID NO: 28700 - DNA, 30 bp, Artificial Sequence
  Synthetic
ctcttctcttctcutctcttctttctctug

SEQ ID NO: 28701 - DNA, 23 bp, Artificial Sequence
  Synthetic
agtaacccctuaggtgcatccut

SEQ ID NO: 28702 - DNA, 26 bp, Artificial Sequence
  Synthetic
ctcagattggaacuaagctttccuga

SEQ ID NO: 28703 - DNA, 22 bp, Artificial Sequence
  Synthetic
cttggguatgaaacugcaggga

SEQ ID NO: 28704 - DNA, 26 bp, Artificial Sequence
  Synthetic
tgtatctctgaacucttgtcccauct

SEQ ID NO: 28705 - DNA, 20 bp, Artificial Sequence
  Synthetic
gggcagacaauggaacaugc

SEQ ID NO: 28706 - DNA, 21 bp, Artificial Sequence
  Synthetic
gtttggaacaguccgagugga

SEQ ID NO: 28707 - DNA, 22 bp, Artificial Sequence
  Synthetic
gctcuggagcctttttcucagg

SEQ ID NO: 28708 - DNA, 22 bp, Artificial Sequence
  Synthetic
ctacaacccacucaccctctuc

SEQ ID NO: 28709 - DNA, 22 bp, Artificial Sequence
  Synthetic
gtaggtcccuccagcattccua

SEQ ID NO: 28710 - DNA, 24 bp, Artificial Sequence
  Synthetic
tcatgggttuagaaccctcctcut

SEQ ID NO: 28711 - DNA, 23 bp, Artificial Sequence
  Synthetic
gtgaagaucccaagtgtctccuc

SEQ ID NO: 28712 - DNA, 21 bp, Artificial Sequence
  Synthetic
aagctgctcugcatactcucg

SEQ ID NO: 28713 - DNA, 20 bp, Artificial Sequence
  Synthetic
caggtggcggguaggatcua

SEQ ID NO: 28714 - DNA, 22 bp, Artificial Sequence
  Synthetic
cctgcuaacgtttcttucaggt

SEQ ID NO: 28715 - DNA, 21 bp, Artificial Sequence
  Synthetic
gtaggauggctgtugaacgga

SEQ ID NO: 28716 - DNA, 22 bp, Artificial Sequence
  Synthetic
cagcccttuagttctgaggcut

SEQ ID NO: 28717 - DNA, 20 bp, Artificial Sequence
  Synthetic
ggctgtaguccagcagcuac

SEQ ID NO: 28718 - DNA, 22 bp, Artificial Sequence
  Synthetic
attccatccccutccctcgaua

SEQ ID NO: 28719 - DNA, 25 bp, Artificial Sequence
  Synthetic
ggautgggaatuaagaggaaagggt

SEQ ID NO: 28720 - DNA, 23 bp, Artificial Sequence
  Synthetic
cctttccccuctgttttgagcut

SEQ ID NO: 28721 - DNA, 20 bp, Artificial Sequence
  Synthetic
cctccagcggaaucttcguc

SEQ ID NO: 28722 - DNA, 23 bp, Artificial Sequence
  Synthetic
gtgggagucgtaggtttagtugt

SEQ ID NO: 28723 - DNA, 26 bp, Artificial Sequence
  Synthetic
gtacatacauagtaggtggcuagcct

SEQ ID NO: 28724 - DNA, 22 bp, Artificial Sequence
  Synthetic
tgaguggcaaggaagctuaagg

SEQ ID NO: 28725 - DNA, 27 bp, Artificial Sequence
  Synthetic
ctcctcagacaaaaguagacaatcuct

SEQ ID NO: 28726 - DNA, 23 bp, Artificial Sequence
  Synthetic
ttccuctttggccucagagaaag

SEQ ID NO: 28727 - DNA, 24 bp, Artificial Sequence
  Synthetic
gcaatcugagcattcuccacagaa

SEQ ID NO: 28728 - DNA, 24 bp, Artificial Sequence
  Synthetic
ctgauacaggaagagcagauccag

SEQ ID NO: 28729 - DNA, 26 bp, Artificial Sequence
  Synthetic
tgttcctctcauaggccttaatcuca

SEQ ID NO: 28730 - DNA, 27 bp, Artificial Sequence
  Synthetic
tccaaatttucccaatcaacuggagat

SEQ ID NO: 28731 - DNA, 26 bp, Artificial Sequence
  Synthetic
ctttcttacauaccagtgttgcucac

SEQ ID NO: 28732 - DNA, 25 bp, Artificial Sequence
  Synthetic
tgatgaaaacutcctgatggugaca

SEQ ID NO: 28733 - DNA, 25 bp, Artificial Sequence
  Synthetic
gagcccacttauggtgactaagaut

SEQ ID NO: 28734 - DNA, 25 bp, Artificial Sequence
  Synthetic
caaaccttgguactccattttuccc

SEQ ID NO: 28735 - DNA, 28 bp, Artificial Sequence
  Synthetic
ccgttgacatuaacagcaagtttucaaa

SEQ ID NO: 28736 - DNA, 22 bp, Artificial Sequence
  Synthetic
gggcutggtgttuagaagaaca

SEQ ID NO: 28737 - DNA, 27 bp, Artificial Sequence
  Synthetic
gutctcctctaucacagaaaagacact

SEQ ID NO: 28738 - DNA, 22 bp, Artificial Sequence
  Synthetic
ggaatuacggcagcccttctut

SEQ ID NO: 28739 - DNA, 30 bp, Artificial Sequence
  Synthetic
ctggtacatucccttaatttauaccccaat

SEQ ID NO: 28740 - DNA, 24 bp, Artificial Sequence
  Synthetic
ttcaggtgguggagagatgtttut

SEQ ID NO: 28741 - DNA, 28 bp, Artificial Sequence
  Synthetic
tggaagcauaagcagaattatgtauggg

SEQ ID NO: 28742 - DNA, 26 bp, Artificial Sequence
  Synthetic
ttaagauggagagcaataagctuggt

SEQ ID NO: 28743 - DNA, 27 bp, Artificial Sequence
  Synthetic
gaatgatcaagaaaucagtttcuggca

SEQ ID NO: 28744 - DNA, 29 bp, Artificial Sequence
  Synthetic
tgccaaataaaauacacttggtttgtugg

SEQ ID NO: 28745 - DNA, 27 bp, Artificial Sequence
  Synthetic
aggcagacaaauaactagucacaacag

SEQ ID NO: 28746 - DNA, 22 bp, Artificial Sequence
  Synthetic
cccactgcccugagaatcttut

SEQ ID NO: 28747 - DNA, 30 bp, Artificial Sequence
  Synthetic
gtttgtttggaatcutcacataggagaauc

SEQ ID NO: 28748 - DNA, 27 bp, Artificial Sequence
  Synthetic
ttaaggtagcagaaugacttagaugcc

SEQ ID NO: 28749 - DNA, 28 bp, Artificial Sequence
  Synthetic
actctaaatttuccacttccacacucac

SEQ ID NO: 28750 - DNA, 23 bp, Artificial Sequence
  Synthetic
ggatcaaggutttctgtggcuga

SEQ ID NO: 28751 - DNA, 29 bp, Artificial Sequence
  Synthetic
gtcaaacttttaggugacctcctcttuat

SEQ ID NO: 28752 - DNA, 25 bp, Artificial Sequence
  Synthetic
gctcagcugaagatagtgacttuga

SEQ ID NO: 28753 - DNA, 23 bp, Artificial Sequence
  Synthetic
tgcagttacguaggctcctttut

SEQ ID NO: 28754 - DNA, 21 bp, Artificial Sequence
  Synthetic
tgatgacacagcutccgugac

SEQ ID NO: 28755 - DNA, 24 bp, Artificial Sequence
  Synthetic
agagcaagacuctgtccucaaaga

SEQ ID NO: 28756 - DNA, 28 bp, Artificial Sequence
  Synthetic
ctgcatatacugagggatgactttatut

SEQ ID NO: 28757 - DNA, 23 bp, Artificial Sequence
  Synthetic
gaaggtggcgcauttgtttgaua

SEQ ID NO: 28758 - DNA, 23 bp, Artificial Sequence
  Synthetic
tcccccugggaactagaaauagg

SEQ ID NO: 28759 - DNA, 24 bp, Artificial Sequence
  Synthetic
agaaggaagcaaugcacatacuca

SEQ ID NO: 28760 - DNA, 24 bp, Artificial Sequence
  Synthetic
agtgttgauagccaggtagauagg

SEQ ID NO: 28761 - DNA, 26 bp, Artificial Sequence
  Synthetic
attggccgagugatgattttgtagua

SEQ ID NO: 28762 - DNA, 28 bp, Artificial Sequence
  Synthetic
tgcattaaaaggauaaagaagtgtuggc

SEQ ID NO: 28763 - DNA, 26 bp, Artificial Sequence
  Synthetic
ttccactgccuttctctcattcuaac

SEQ ID NO: 28764 - DNA, 27 bp, Artificial Sequence
  Synthetic
gaatatttguaacccaacaaagguggt

SEQ ID NO: 28765 - DNA, 28 bp, Artificial Sequence
  Synthetic
cacacacagucacttgatuacaaaaagg

SEQ ID NO: 28766 - DNA, 27 bp, Artificial Sequence
  Synthetic
ttttctagguctaggataaugggacac

SEQ ID NO: 28767 - DNA, 24 bp, Artificial Sequence
  Synthetic
aggacctccauctttaccaccuac

SEQ ID NO: 28768 - DNA, 24 bp, Artificial Sequence
  Synthetic
gtactgcuaaagaagcagcttugg

SEQ ID NO: 28769 - DNA, 28 bp, Artificial Sequence
  Synthetic
agagaagaauggtatctcaguaaacgga

SEQ ID NO: 28770 - DNA, 28 bp, Artificial Sequence
  Synthetic
cttatgtggtcagutgataggacttuga

SEQ ID NO: 28771 - DNA, 22 bp, Artificial Sequence
  Synthetic
agaagcaatggutgaggccuac

SEQ ID NO: 28772 - DNA, 23 bp, Artificial Sequence
  Synthetic
gctucaggagaacacaaggaugg

SEQ ID NO: 28773 - DNA, 21 bp, Artificial Sequence
  Synthetic
gttgggccccucaacatcaua

SEQ ID NO: 28774 - DNA, 22 bp, Artificial Sequence
  Synthetic
catcggtggguatgaggtauca

SEQ ID NO: 28775 - DNA, 22 bp, Artificial Sequence
  Synthetic
cccaaaggaagccucattcauc

SEQ ID NO: 28776 - DNA, 27 bp, Artificial Sequence
  Synthetic
agaaguagaaccaagaagcttatuggc

SEQ ID NO: 28777 - DNA, 26 bp, Artificial Sequence
  Synthetic
aacatttgctgcutactcattgcaut

SEQ ID NO: 28778 - DNA, 21 bp, Artificial Sequence
  Synthetic
ctgtagagacguaggcctugg

SEQ ID NO: 28779 - DNA, 22 bp, Artificial Sequence
  Synthetic
ggaagacuaggacccctgcuat

SEQ ID NO: 28780 - DNA, 30 bp, Artificial Sequence
  Synthetic
agaaaaggagaggautaaaactguaacacc

SEQ ID NO: 28781 - DNA, 23 bp, Artificial Sequence
  Synthetic
tcactggtcuctgtttgcacuac

SEQ ID NO: 28782 - DNA, 23 bp, Artificial Sequence
  Synthetic
atctcccucaggtagtucaggag

SEQ ID NO: 28783 - DNA, 23 bp, Artificial Sequence
  Synthetic
ccccagccccuttattgctatua

SEQ ID NO: 28784 - DNA, 25 bp, Artificial Sequence
  Synthetic
attcatcttcagacauggagcctuc

SEQ ID NO: 28785 - DNA, 28 bp, Artificial Sequence
  Synthetic
ccaaagaaucacaccaagactttatugt

SEQ ID NO: 28786 - DNA, 24 bp, Artificial Sequence
  Synthetic
cctcttatcaccutgtcctgcaut

SEQ ID NO: 28787 - DNA, 27 bp, Artificial Sequence
  Synthetic
gttactgacuaagcatccacttctuca

SEQ ID NO: 28788 - DNA, 21 bp, Artificial Sequence
  Synthetic
cagaacaggcccucagtucaa

SEQ ID NO: 28789 - DNA, 24 bp, Artificial Sequence
  Synthetic
ctccaauctgcttaugaccaggag

SEQ ID NO: 28790 - DNA, 22 bp, Artificial Sequence
  Synthetic
gaggatgcugatcacgggaaut

SEQ ID NO: 28791 - DNA, 23 bp, Artificial Sequence
  Synthetic
caaatgauctacagcugcggaag

SEQ ID NO: 28792 - DNA, 22 bp, Artificial Sequence
  Synthetic
actgccaagucccagggtaaut

SEQ ID NO: 28793 - DNA, 23 bp, Artificial Sequence
  Synthetic
atcactggcutcttgtttugcag

SEQ ID NO: 28794 - DNA, 28 bp, Artificial Sequence
  Synthetic
ctcgtttctctcutccttctttccttut

SEQ ID NO: 28795 - DNA, 23 bp, Artificial Sequence
  Synthetic
aagtcugtgttttcaucgaccca

SEQ ID NO: 28796 - DNA, 22 bp, Artificial Sequence
  Synthetic
gttgcacagcaucaccagtcua

SEQ ID NO: 28797 - DNA, 30 bp, Artificial Sequence
  Synthetic
ctccattttctucctcattctacttcucag

SEQ ID NO: 28798 - DNA, 21 bp, Artificial Sequence
  Synthetic
agagtttgugcacggucaaga

SEQ ID NO: 28799 - DNA, 28 bp, Artificial Sequence
  Synthetic
ggtccucaggaactttcattaucaacag

SEQ ID NO: 28800 - DNA, 22 bp, Artificial Sequence
  Synthetic
gcutcctttucacagggaggag

SEQ ID NO: 28801 - DNA, 23 bp, Artificial Sequence
  Synthetic
ctaagcaaccacacuttctuggt

SEQ ID NO: 28802 - DNA, 23 bp, Artificial Sequence
  Synthetic
gggtcctgautgatggcaatuac

SEQ ID NO: 28803 - DNA, 29 bp, Artificial Sequence
  Synthetic
agaatgtttcctccuctcttgtttgaaut

SEQ ID NO: 28804 - DNA, 25 bp, Artificial Sequence
  Synthetic
gtccagcaacaucaacaattctcuc

SEQ ID NO: 28805 - DNA, 28 bp, Artificial Sequence
  Synthetic
cctcctttaaacugttttcatcucacaa

SEQ ID NO: 28806 - DNA, 31 bp, Artificial Sequence
  Synthetic
tgacagggtattuaaaattctgaagatuggt

SEQ ID NO: 28807 - DNA, 22 bp, Artificial Sequence
  Synthetic
gacattgaugcccagaccttug

SEQ ID NO: 28808 - DNA, 22 bp, Artificial Sequence
  Synthetic
ggccaugagggctgtttcuaaa

SEQ ID NO: 28809 - DNA, 24 bp, Artificial Sequence
  Synthetic
gcaggttatgaguacctctgcaut

SEQ ID NO: 28810 - DNA, 24 bp, Artificial Sequence
  Synthetic
gggaagggaguacccaatatcuga

SEQ ID NO: 28811 - DNA, 21 bp, Artificial Sequence
  Synthetic
tgacaaugcagcugaggaacc

SEQ ID NO: 28812 - DNA, 18 bp, Artificial Sequence
  Synthetic
guggatcaguggcccaga

SEQ ID NO: 28813 - DNA, 23 bp, Artificial Sequence
  Synthetic
actcgcttggugattccatguaa

SEQ ID NO: 28814 - DNA, 27 bp, Artificial Sequence
  Synthetic
cttaatgtgcugttgagttagaaugga

SEQ ID NO: 28815 - DNA, 24 bp, Artificial Sequence
  Synthetic
tccttttctctugctttgggcuag

SEQ ID NO: 28816 - DNA, 25 bp, Artificial Sequence
  Synthetic
tcatgcauagatgtttuccacacca

SEQ ID NO: 28817 - DNA, 27 bp, Artificial Sequence
  Synthetic
caatcagtgttuctgctttctccauag

SEQ ID NO: 28818 - DNA, 27 bp, Artificial Sequence
  Synthetic
agtttgatggctuctgtgatatcagug

SEQ ID NO: 28819 - DNA, 24 bp, Artificial Sequence
  Synthetic
cccaactgguctgtcaacguaaaa

SEQ ID NO: 28820 - DNA, 27 bp, Artificial Sequence
  Synthetic
tcaaagcaaccgaagaaugtaaccaua

SEQ ID NO: 28821 - DNA, 25 bp, Artificial Sequence
  Synthetic
atctctgtcugacaacatcaaccug

SEQ ID NO: 28822 - DNA, 22 bp, Artificial Sequence
  Synthetic
cattacucagtgccugcaaggt

SEQ ID NO: 28823 - DNA, 25 bp, Artificial Sequence
  Synthetic
ccctttttgttuttgcctctctuca

SEQ ID NO: 28824 - DNA, 27 bp, Artificial Sequence
  Synthetic
acattaaaacuggcatctgtttccuca

SEQ ID NO: 28825 - DNA, 25 bp, Artificial Sequence
  Synthetic
gaaaacacucccccttcatagucat

SEQ ID NO: 28826 - DNA, 21 bp, Artificial Sequence
  Synthetic
gggtcagautctcagcuccca

SEQ ID NO: 28827 - DNA, 17 bp, Artificial Sequence
  Synthetic
ctcuccggcggauacgg

SEQ ID NO: 28828 - DNA, 22 bp, Artificial Sequence
  Synthetic
tccgaaggagacccutgacuag

SEQ ID NO: 28829 - DNA, 21 bp, Artificial Sequence
  Synthetic
tggcutcaguaggaggacagt

SEQ ID NO: 28830 - DNA, 29 bp, Artificial Sequence
  Synthetic
tgactgagagaagcagutatttagtuagg

SEQ ID NO: 28831 - DNA, 28 bp, Artificial Sequence
  Synthetic
cccaaaaggugtcttaaatgtagugagt

SEQ ID NO: 28832 - DNA, 20 bp, Artificial Sequence
  Synthetic
gagagcgccgcuttgaaauc

SEQ ID NO: 28833 - DNA, 22 bp, Artificial Sequence
  Synthetic
aggtautttgccaauggccact

SEQ ID NO: 28834 - DNA, 23 bp, Artificial Sequence
  Synthetic
tcaaagcccugttaccctggaua

SEQ ID NO: 28835 - DNA, 28 bp, Artificial Sequence
  Synthetic
ggcaaatatgtttucacatgggactuac

SEQ ID NO: 28836 - DNA, 27 bp, Artificial Sequence
  Synthetic
agctctttguaccaaatacccaatcug

SEQ ID NO: 28837 - DNA, 27 bp, Artificial Sequence
  Synthetic
atgtcttaaataucaacaggccacugt

SEQ ID NO: 28838 - DNA, 22 bp, Artificial Sequence
  Synthetic
ggacaggagguagccagagaua

SEQ ID NO: 28839 - DNA, 30 bp, Artificial Sequence
  Synthetic
ggtgagccctauttagtcatacactuaaaa

SEQ ID NO: 28840 - DNA, 25 bp, Artificial Sequence
  Synthetic
tggtgagtuactttggaaaugagct

SEQ ID NO: 28841 - DNA, 25 bp, Artificial Sequence
  Synthetic
agatgggaautgacaaugcaaaagg

SEQ ID NO: 28842 - DNA, 31 bp, Artificial Sequence
  Synthetic
ttttatgctaatcgcuacttctgttcauaca

SEQ ID NO: 28843 - DNA, 28 bp, Artificial Sequence
  Synthetic
cctcccataacuctaacaatctcatcuc

SEQ ID NO: 28844 - DNA, 25 bp, Artificial Sequence
  Synthetic
tgtaacaagagagccuaacccugat

SEQ ID NO: 28845 - DNA, 30 bp, Artificial Sequence
  Synthetic
catgtgactccgauaattaagctgatuaac

SEQ ID NO: 28846 - DNA, 24 bp, Artificial Sequence
  Synthetic
tctccaagggagaugagcuagaag

SEQ ID NO: 28847 - DNA, 28 bp, Artificial Sequence
  Synthetic
gcagtagauagggagaucatgtatttut

SEQ ID NO: 28848 - DNA, 28 bp, Artificial Sequence
  Synthetic
ttttagaggacacutttctgttggtuct

SEQ ID NO: 28849 - DNA, 28 bp, Artificial Sequence
  Synthetic
tcttcaatcttatcutctcccgagtuca

SEQ ID NO: 28850 - DNA, 26 bp, Artificial Sequence
  Synthetic
ccaaagtctttatuctgagaccccut

SEQ ID NO: 28851 - DNA, 27 bp, Artificial Sequence
  Synthetic
ttgtagggaagguctactctcactuac

SEQ ID NO: 28852 - DNA, 23 bp, Artificial Sequence
  Synthetic
tggagctccuttcccttgactua

SEQ ID NO: 28853 - DNA, 22 bp, Artificial Sequence
  Synthetic
cacauccccaggtcaguagaac

SEQ ID NO: 28854 - DNA, 23 bp, Artificial Sequence
  Synthetic
gccctgaggutttgcttaggtua

SEQ ID NO: 28855 - DNA, 31 bp, Artificial Sequence
  Synthetic
gtctgcttctagaauatcagagaacaguaaa

SEQ ID NO: 28856 - DNA, 27 bp, Artificial Sequence
  Synthetic
gctaccacuaaaatgtatcttccucca

SEQ ID NO: 28857 - DNA, 21 bp, Artificial Sequence
  Synthetic
gcttcttcutcctggugcact

SEQ ID NO: 28858 - DNA, 28 bp, Artificial Sequence
  Synthetic
ccatttttagautacatttgggucagca

SEQ ID NO: 28859 - DNA, 26 bp, Artificial Sequence
  Synthetic
atgcattccuggttgttttcttucag

SEQ ID NO: 28860 - DNA, 27 bp, Artificial Sequence
  Synthetic
tggtgcaautaatggagauagaagaca

SEQ ID NO: 28861 - DNA, 23 bp, Artificial Sequence
  Synthetic
ctatagtgctutgcctggcuaca

SEQ ID NO: 28862 - DNA, 28 bp, Artificial Sequence
  Synthetic
aagtttcactctaguggtttttgaccut

SEQ ID NO: 28863 - DNA, 29 bp, Artificial Sequence
  Synthetic
cgccaatatagauctgcttattatccuga

SEQ ID NO: 28864 - DNA, 22 bp, Artificial Sequence
  Synthetic
cucaccccaauaaggcccaaat

SEQ ID NO: 28865 - DNA, 27 bp, Artificial Sequence
  Synthetic
tggagatugacaagtacuggagagaat

SEQ ID NO: 28866 - DNA, 26 bp, Artificial Sequence
  Synthetic
aacttcaggugatcagttgtgtugat

SEQ ID NO: 28867 - DNA, 22 bp, Artificial Sequence
  Synthetic
gacagcctguttccagtcauct

SEQ ID NO: 28868 - DNA, 24 bp, Artificial Sequence
  Synthetic
caaactcaaaagcutgtggaguca

SEQ ID NO: 28869 - DNA, 28 bp, Artificial Sequence
  Synthetic
gtctcaaattcatuttcacactggatut

SEQ ID NO: 28870 - DNA, 17 bp, Artificial Sequence
  Synthetic
ctagcgcgcucagggua

SEQ ID NO: 28871 - DNA, 17 bp, Artificial Sequence
  Synthetic
ggtggcgaugctgcuca

SEQ ID NO: 28872 - DNA, 23 bp, Artificial Sequence
  Synthetic
ccgtttgctcucagttgccauat

SEQ ID NO: 28873 - DNA, 31 bp, Artificial Sequence
  Synthetic
gcaaggaaagagauagauaaatctgaaaaut

SEQ ID NO: 28874 - DNA, 24 bp, Artificial Sequence
  Synthetic
gtgccattugttgtgtatctuggt

SEQ ID NO: 28875 - DNA, 31 bp, Artificial Sequence
  Synthetic
ctttaacagttagggucatctttatggtcut

SEQ ID NO: 28876 - DNA, 31 bp, Artificial Sequence
  Synthetic
acaggattcttcuctaatacttgatgtucct

SEQ ID NO: 28877 - DNA, 24 bp, Artificial Sequence
  Synthetic
tcattcaacacuaacgtgcctugt

SEQ ID NO: 28878 - DNA, 29 bp, Artificial Sequence
  Synthetic
actataataguagactgttcctucacgct

SEQ ID NO: 28879 - DNA, 28 bp, Artificial Sequence
  Synthetic
gttcatcacauaccagacaatagcauct

SEQ ID NO: 28880 - DNA, 25 bp, Artificial Sequence
  Synthetic
acttcttgauaaccgtcagtgctut

SEQ ID NO: 28881 - DNA, 31 bp, Artificial Sequence
  Synthetic
cctgataacaucgagatatttctcatcauct

SEQ ID NO: 28882 - DNA, 33 bp, Artificial Sequence
  Synthetic
aagtttctgatgaaauagaaaactcaactgaut

SEQ ID NO: 28883 - DNA, 28 bp, Artificial Sequence
  Synthetic
aactggacaaccaaugagattcttcuac

SEQ ID NO: 28884 - DNA, 27 bp, Artificial Sequence
  Synthetic
actccctacugactcacgtattttuct

SEQ ID NO: 28885 - DNA, 29 bp, Artificial Sequence
  Synthetic
caatgctcctauagaagctatccaacauc

SEQ ID NO: 28886 - DNA, 25 bp, Artificial Sequence
  Synthetic
gaaggcacatugctgaattgtatug

SEQ ID NO: 28887 - DNA, 27 bp, Artificial Sequence
  Synthetic
tgagttgaatguattttcatcccucat

SEQ ID NO: 28888 - DNA, 26 bp, Artificial Sequence
  Synthetic
atttgatgcugaactgtattgcuaca

SEQ ID NO: 28889 - DNA, 25 bp, Artificial Sequence
  Synthetic
gacgcatacuggcaactggatauaa

SEQ ID NO: 28890 - DNA, 26 bp, Artificial Sequence
  Synthetic
agtgtaactcaaguctctggttcuct

SEQ ID NO: 28891 - DNA, 19 bp, Artificial Sequence
  Synthetic
gagctcuaatgcggugcca

SEQ ID NO: 28892 - DNA, 19 bp, Artificial Sequence
  Synthetic
gggagatcugcccaagcug

SEQ ID NO: 28893 - DNA, 17 bp, Artificial Sequence
  Synthetic
ctgccguggcccuagaa

SEQ ID NO: 28894 - DNA, 24 bp, Artificial Sequence
  Synthetic
aaccatccucgttgaacugaacat

SEQ ID NO: 28895 - DNA, 19 bp, Artificial Sequence
  Synthetic
ctcggcagugctctcacuc

SEQ ID NO: 28896 - DNA, 17 bp, Artificial Sequence
  Synthetic
gcgaggugctcctcuct

SEQ ID NO: 28897 - DNA, 18 bp, Artificial Sequence
  Synthetic
gctggtguctcacccuca

SEQ ID NO: 28898 - DNA, 18 bp, Artificial Sequence
  Synthetic
ggcccccuttcacgctua

SEQ ID NO: 28899 - DNA, 19 bp, Artificial Sequence
  Synthetic
ccacacuctcctcgtuccc

SEQ ID NO: 28900 - DNA, 18 bp, Artificial Sequence
  Synthetic
ccccuccacctccctucc

SEQ ID NO: 28901 - DNA, 18 bp, Artificial Sequence
  Synthetic
cctgccacucggttcugt

SEQ ID NO: 28902 - DNA, 22 bp, Artificial Sequence
  Synthetic
ccaggtgguaggagctauaggg

SEQ ID NO: 28903 - DNA, 22 bp, Artificial Sequence
  Synthetic
ttgagaggaggguccccatuaa

SEQ ID NO: 28904 - DNA, 21 bp, Artificial Sequence
  Synthetic
caatgcugagaggtguggaca

SEQ ID NO: 28905 - DNA, 19 bp, Artificial Sequence
  Synthetic
ccaacacguccacctucgt

SEQ ID NO: 28906 - DNA, 22 bp, Artificial Sequence
  Synthetic
catcagccccutcctttgcaua

SEQ ID NO: 28907 - DNA, 30 bp, Artificial Sequence
  Synthetic
gcattgatgtgutaatactttccttuccag

SEQ ID NO: 28908 - DNA, 26 bp, Artificial Sequence
  Synthetic
tgtttatggcaguaaccctaaaggug

SEQ ID NO: 28909 - DNA, 25 bp, Artificial Sequence
  Synthetic
tcactccattgucggttcatttcut

SEQ ID NO: 28910 - DNA, 19 bp, Artificial Sequence
  Synthetic
ccttctggaguggaggcut

SEQ ID NO: 28911 - DNA, 17 bp, Artificial Sequence
  Synthetic
gctccuccgcagguact

SEQ ID NO: 28912 - DNA, 22 bp, Artificial Sequence
  Synthetic
agtcactcugttgtccuccaga

SEQ ID NO: 28913 - DNA, 21 bp, Artificial Sequence
  Synthetic
acgaacgctucttcccctaug

SEQ ID NO: 28914 - DNA, 20 bp, Artificial Sequence
  Synthetic
ggacacgacacucaccacua

SEQ ID NO: 28915 - DNA, 20 bp, Artificial Sequence
  Synthetic
ctgtctccugaggctgtucc

SEQ ID NO: 28916 - DNA, 20 bp, Artificial Sequence
  Synthetic
cctcacccucctcttccuct

SEQ ID NO: 28917 - DNA, 18 bp, Artificial Sequence
  Synthetic
gctcuccccttccuccca

SEQ ID NO: 28918 - DNA, 18 bp, Artificial Sequence
  Synthetic
gcagcgguactcgccauc

SEQ ID NO: 28919 - DNA, 22 bp, Artificial Sequence
  Synthetic
ggtgattggccutgtccttuct

SEQ ID NO: 28920 - DNA, 20 bp, Artificial Sequence
  Synthetic
agagagugcagagcctcuga

SEQ ID NO: 28921 - DNA, 20 bp, Artificial Sequence
  Synthetic
gtcatgactucggcctccut

SEQ ID NO: 28922 - DNA, 21 bp, Artificial Sequence
  Synthetic
cccacaaucccacacgaacuc

SEQ ID NO: 28923 - DNA, 19 bp, Artificial Sequence
  Synthetic
cutcaccaucacgggcaac

SEQ ID NO: 28924 - DNA, 21 bp, Artificial Sequence
  Synthetic
gggcttcugggcttagaagut

SEQ ID NO: 28925 - DNA, 21 bp, Artificial Sequence
  Synthetic
gctctcuccaccctgtctuca

SEQ ID NO: 28926 - DNA, 19 bp, Artificial Sequence
  Synthetic
tgcaatccgcuccgtguaa

SEQ ID NO: 28927 - DNA, 20 bp, Artificial Sequence
  Synthetic
cagaggaggcucacuggaga

SEQ ID NO: 28928 - DNA, 17 bp, Artificial Sequence
  Synthetic
gggctcagguggaggug

SEQ ID NO: 28929 - DNA, 19 bp, Artificial Sequence
  Synthetic
tccacccucggugagaaga

SEQ ID NO: 28930 - DNA, 20 bp, Artificial Sequence
  Synthetic
gtctccugcacagaucggat

SEQ ID NO: 28931 - DNA, 22 bp, Artificial Sequence
  Synthetic
cacccaggucatggtgaucaaa

SEQ ID NO: 28932 - DNA, 21 bp, Artificial Sequence
  Synthetic
cccaggacutttcuccaggac

SEQ ID NO: 28933 - DNA, 25 bp, Artificial Sequence
  Synthetic
atccctggacccuaatgatttugac

SEQ ID NO: 28934 - DNA, 22 bp, Artificial Sequence
  Synthetic
cctgcccugtagagauaggagt

SEQ ID NO: 28935 - DNA, 22 bp, Artificial Sequence
  Synthetic
cagagacaucagaagggucagg

SEQ ID NO: 28936 - DNA, 29 bp, Artificial Sequence
  Synthetic
cttgccctcttuctcttctttcttatcut

SEQ ID NO: 28937 - DNA, 26 bp, Artificial Sequence
  Synthetic
ctggcatgtuctctgtgatactuaca

SEQ ID NO: 28938 - DNA, 17 bp, Artificial Sequence
  Synthetic
gcggucccacucacagt

SEQ ID NO: 28939 - DNA, 17 bp, Artificial Sequence
  Synthetic
cgctcccucctcucgga

SEQ ID NO: 28940 - DNA, 18 bp, Artificial Sequence
  Synthetic
ggtgggugggtccuagca

SEQ ID NO: 28941 - DNA, 17 bp, Artificial Sequence
  Synthetic
cgggccccgauaccauc

SEQ ID NO: 28942 - DNA, 27 bp, Artificial Sequence
  Synthetic
ccttgttttcugtttaaaaggcauaca

SEQ ID NO: 28943 - DNA, 28 bp, Artificial Sequence
  Synthetic
catctgatgcacgautttaaccacauac

SEQ ID NO: 28944 - DNA, 25 bp, Artificial Sequence
  Synthetic
tcagatttgutgtttcacuggagca

SEQ ID NO: 28945 - DNA, 20 bp, Artificial Sequence
  Synthetic
ggcucgttctaugcacacga

SEQ ID NO: 28946 - DNA, 22 bp, Artificial Sequence
  Synthetic
ctgtgcaaaaugggagtgacug

SEQ ID NO: 28947 - DNA, 24 bp, Artificial Sequence
  Synthetic
gtcctcccuacaattgcagactua

SEQ ID NO: 28948 - DNA, 26 bp, Artificial Sequence
  Synthetic
ggataactgcauttctcaaccaguga

SEQ ID NO: 28949 - DNA, 25 bp, Artificial Sequence
  Synthetic
aaacttcuagccccgtaacacauac

SEQ ID NO: 28950 - DNA, 22 bp, Artificial Sequence
  Synthetic
cccttacactuggtgccatcuc

SEQ ID NO: 28951 - DNA, 29 bp, Artificial Sequence
  Synthetic
atacacctagtaugtaaccacaaacatut

SEQ ID NO: 28952 - DNA, 24 bp, Artificial Sequence
  Synthetic
accagggaggaaccutgttctaut

SEQ ID NO: 28953 - DNA, 21 bp, Artificial Sequence
  Synthetic
tctgaaacaucctgcccucac

SEQ ID NO: 28954 - DNA, 25 bp, Artificial Sequence
  Synthetic
actcactgaaccuttcttgtccaut

SEQ ID NO: 28955 - DNA, 22 bp, Artificial Sequence
  Synthetic
ggaaccugaacgtgttuccaca

SEQ ID NO: 28956 - DNA, 27 bp, Artificial Sequence
  Synthetic
agcaaaagagguagaattggtttcuga

SEQ ID NO: 28957 - DNA, 25 bp, Artificial Sequence
  Synthetic
ccacccauatcctuaaaacaggaca

SEQ ID NO: 28958 - DNA, 26 bp, Artificial Sequence
  Synthetic
gattuagcacaaagguagaaggcaag

SEQ ID NO: 28959 - DNA, 22 bp, Artificial Sequence
  Synthetic
tgtggugaactctcuagaccca

SEQ ID NO: 28960 - DNA, 24 bp, Artificial Sequence
  Synthetic
ctttcttuccaaggagaccagcut

SEQ ID NO: 28961 - DNA, 24 bp, Artificial Sequence
  Synthetic
ctagtccaacuctattgcccucag

SEQ ID NO: 28962 - DNA, 21 bp, Artificial Sequence
  Synthetic
agtcacccuacccatggtuga

SEQ ID NO: 28963 - DNA, 30 bp, Artificial Sequence
  Synthetic
ccatgtatttgugctaatctctccauacag

SEQ ID NO: 28964 - DNA, 27 bp, Artificial Sequence
  Synthetic
aattaagtttguggaagctaagagugt

SEQ ID NO: 28965 - DNA, 29 bp, Artificial Sequence
  Synthetic
cctctacatctcucagtttatcatcaugt

SEQ ID NO: 28966 - DNA, 27 bp, Artificial Sequence
  Synthetic
ttcatagaaucctttgagctugcaaga

SEQ ID NO: 28967 - DNA, 29 bp, Artificial Sequence
  Synthetic
actaacccagcugaatttaatctctgtut

SEQ ID NO: 28968 - DNA, 22 bp, Artificial Sequence
  Synthetic
gctgagtagguagggaaccuct

SEQ ID NO: 28969 - DNA, 28 bp, Artificial Sequence
  Synthetic
gcataaaccaatguatctcatgctcaut

SEQ ID NO: 28970 - DNA, 24 bp, Artificial Sequence
  Synthetic
acagtgaacacaugtccacugaaa

SEQ ID NO: 28971 - DNA, 26 bp, Artificial Sequence
  Synthetic
ggtggaguggagagaaagaaactuat

SEQ ID NO: 28972 - DNA, 23 bp, Artificial Sequence
  Synthetic
gagccctgcaguttctttccaua

SEQ ID NO: 28973 - DNA, 24 bp, Artificial Sequence
  Synthetic
aggattgatgucttccctcccuag

SEQ ID NO: 28974 - DNA, 24 bp, Artificial Sequence
  Synthetic
tgccatatgaugttgcacttucca

SEQ ID NO: 28975 - DNA, 31 bp, Artificial Sequence
  Synthetic
gaccttaagatccuagaagattattctugct

SEQ ID NO: 28976 - DNA, 27 bp, Artificial Sequence
  Synthetic
gtcccaaatgutcatttagttcuccac

SEQ ID NO: 28977 - DNA, 24 bp, Artificial Sequence
  Synthetic
gatgtgaggcauttctacccacut

SEQ ID NO: 28978 - DNA, 31 bp, Artificial Sequence
  Synthetic
aatcttccttctucatttcaactgatauggt

SEQ ID NO: 28979 - DNA, 27 bp, Artificial Sequence
  Synthetic
gaaagcaatcaugcaatagcagcaaua

SEQ ID NO: 28980 - DNA, 23 bp, Artificial Sequence
  Synthetic
ccaatagctuggagggagtctut

SEQ ID NO: 28981 - DNA, 26 bp, Artificial Sequence
  Synthetic
ggcaaagutgaattgctuccaaaagt

SEQ ID NO: 28982 - DNA, 31 bp, Artificial Sequence
  Synthetic
caaggttagaatggcuaaagaaaggttatut

SEQ ID NO: 28983 - DNA, 22 bp, Artificial Sequence
  Synthetic
gagtcauagcatcccucaagca

SEQ ID NO: 28984 - DNA, 28 bp, Artificial Sequence
  Synthetic
tcaaatgtttcatguttttggaccacug

SEQ ID NO: 28985 - DNA, 24 bp, Artificial Sequence
  Synthetic
agaaaactuggaaggctugggaaa

SEQ ID NO: 28986 - DNA, 28 bp, Artificial Sequence
  Synthetic
cattttgccuagtgctcaguaagaaaag

SEQ ID NO: 28987 - DNA, 27 bp, Artificial Sequence
  Synthetic
gacgtaggacucaaagagatggtttut

SEQ ID NO: 28988 - DNA, 27 bp, Artificial Sequence
  Synthetic
agagttcagagagutctttccaugagt

SEQ ID NO: 28989 - DNA, 27 bp, Artificial Sequence
  Synthetic
tgattcaugacagaatgcttauggaca

SEQ ID NO: 28990 - DNA, 25 bp, Artificial Sequence
  Synthetic
gggccatcaaugtgagtctttcuat

SEQ ID NO: 28991 - DNA, 30 bp, Artificial Sequence
  Synthetic
tcaggtttaatgaauagccaagaaagtuca

SEQ ID NO: 28992 - DNA, 28 bp, Artificial Sequence
  Synthetic
actatcataaugaactggcatactuggg

SEQ ID NO: 28993 - DNA, 22 bp, Artificial Sequence
  Synthetic
gggacatgguatttaccccuga

SEQ ID NO: 28994 - DNA, 22 bp, Artificial Sequence
  Synthetic
cccatgtggaguaggactcugt

SEQ ID NO: 28995 - DNA, 29 bp, Artificial Sequence
  Synthetic
agtaaaaacaaugccatugaaccaagaag

SEQ ID NO: 28996 - DNA, 27 bp, Artificial Sequence
  Synthetic
atgctataaaugacagcatgtgagcua

SEQ ID NO: 28997 - DNA, 26 bp, Artificial Sequence
  Synthetic
ggtctaugaagacacautcacccuat

SEQ ID NO: 28998 - DNA, 22 bp, Artificial Sequence
  Synthetic
ccactggacutaagtgctgcut

SEQ ID NO: 28999 - DNA, 27 bp, Artificial Sequence
  Synthetic
aacatcagtagcauttctttaccccut

SEQ ID NO: 29000 - DNA, 26 bp, Artificial Sequence
  Synthetic
gattcuttgtagcagaugaggagagg

SEQ ID NO: 29001 - DNA, 27 bp, Artificial Sequence
  Synthetic
gctatttatggtuttgcttgtggguag

SEQ ID NO: 29002 - DNA, 24 bp, Artificial Sequence
  Synthetic
acaaaggacggacaucagtgatuc

SEQ ID NO: 29003 - DNA, 30 bp, Artificial Sequence
  Synthetic
gatagaggccacutttatttatctggagut

SEQ ID NO: 29004 - DNA, 27 bp, Artificial Sequence
  Synthetic
ccataaagtaaaggucccaagatucct

SEQ ID NO: 29005 - DNA, 30 bp, Artificial Sequence
  Synthetic
gaatttttctucccaacctutcatctttut

SEQ ID NO: 29006 - DNA, 28 bp, Artificial Sequence
  Synthetic
aatgtacccaagutttaggatgcttcut

SEQ ID NO: 29007 - DNA, 25 bp, Artificial Sequence
  Synthetic
acattgtttgguttgtctgacucca

SEQ ID NO: 29008 - DNA, 24 bp, Artificial Sequence
  Synthetic
cagtagaaacugtccaagguccat

SEQ ID NO: 29009 - DNA, 29 bp, Artificial Sequence
  Synthetic
gccataggtgucttattcctacttuacag

SEQ ID NO: 29010 - DNA, 31 bp, Artificial Sequence
  Synthetic
cttaataguagcagaggatttcttucaggaa

SEQ ID NO: 29011 - DNA, 26 bp, Artificial Sequence
  Synthetic
gatgaagaactguctcctcctaguga

SEQ ID NO: 29012 - DNA, 27 bp, Artificial Sequence
  Synthetic
ctgaattcaagucttttaccaggucca

SEQ ID NO: 29013 - DNA, 29 bp, Artificial Sequence
  Synthetic
tgagtguacagtggatauagaaaggacaa

SEQ ID NO: 29014 - DNA, 31 bp, Artificial Sequence
  Synthetic
aagatacccaatutcataaatagcatucaac

SEQ ID NO: 29015 - DNA, 24 bp, Artificial Sequence
  Synthetic
gtgtccaccaaaaugaacgactut

SEQ ID NO: 29016 - DNA, 21 bp, Artificial Sequence
  Synthetic
cagguggagagctctattugc

SEQ ID NO: 29017 - DNA, 25 bp, Artificial Sequence
  Synthetic
cccactgauaaaaaggaagcaaucc

SEQ ID NO: 29018 - DNA, 26 bp, Artificial Sequence
  Synthetic
agucctttaaactuagggacagagga

SEQ ID NO: 29019 - DNA, 27 bp, Artificial Sequence
  Synthetic
gaacatctcacagcauttccatcttut

SEQ ID NO: 29020 - DNA, 21 bp, Artificial Sequence
  Synthetic
caagcaatgtuccagggccua

SEQ ID NO: 29021 - DNA, 22 bp, Artificial Sequence
  Synthetic
gcaagttctccugtctccctut

SEQ ID NO: 29022 - DNA, 23 bp, Artificial Sequence
  Synthetic
cccatgucagaaaagcgcatcua

SEQ ID NO: 29023 - DNA, 25 bp, Artificial Sequence
  Synthetic
gctaatggctcuttttccctttgut

SEQ ID NO: 29024 - DNA, 22 bp, Artificial Sequence
  Synthetic
caggaaaugggcaagauggaac

SEQ ID NO: 29025 - DNA, 23 bp, Artificial Sequence
  Synthetic
gcuaagaacaaggctttcuggga

SEQ ID NO: 29026 - DNA, 25 bp, Artificial Sequence
  Synthetic
ccacatatccautttctcaguggga

SEQ ID NO: 29027 - DNA, 26 bp, Artificial Sequence
  Synthetic
ccttctcuaccccttttcttucacag

SEQ ID NO: 29028 - DNA, 21 bp, Artificial Sequence
  Synthetic
caagaaggcutggagggagug

SEQ ID NO: 29029 - DNA, 25 bp, Artificial Sequence
  Synthetic
cgtgatccctutcttcttgtcttug

SEQ ID NO: 29030 - DNA, 24 bp, Artificial Sequence
  Synthetic
acacaaatccutctcaagctcucg

SEQ ID NO: 29031 - DNA, 24 bp, Artificial Sequence
  Synthetic
ctggcacauagcttttctcaucat

SEQ ID NO: 29032 - DNA, 22 bp, Artificial Sequence
  Synthetic
ccctttgutgctctuggagcat

SEQ ID NO: 29033 - DNA, 25 bp, Artificial Sequence
  Synthetic
cccctaattcugtgttttgtgtuca

SEQ ID NO: 29034 - DNA, 24 bp, Artificial Sequence
  Synthetic
gggataagcuacttttgcuaccac

SEQ ID NO: 29035 - DNA, 29 bp, Artificial Sequence
  Synthetic
gtggagtttagagutgatgttttccatut

SEQ ID NO: 29036 - DNA, 27 bp, Artificial Sequence
  Synthetic
tgcccaaatgutttagacagatuacca

SEQ ID NO: 29037 - DNA, 24 bp, Artificial Sequence
  Synthetic
ctcccactaautgtcctccaucac

SEQ ID NO: 29038 - DNA, 28 bp, Artificial Sequence
  Synthetic
aataaaagtagagaaacaugagccccut

SEQ ID NO: 29039 - DNA, 26 bp, Artificial Sequence
  Synthetic
gaccttttagcuttgtgcatctugag

SEQ ID NO: 29040 - DNA, 20 bp, Artificial Sequence
  Synthetic
caagttgggauacgccucca

SEQ ID NO: 29041 - DNA, 28 bp, Artificial Sequence
  Synthetic
gattgttctttgutgtctgtcttuccag

SEQ ID NO: 29042 - DNA, 22 bp, Artificial Sequence
  Synthetic
ggaatuccagcacttugagagg

SEQ ID NO: 29043 - DNA, 24 bp, Artificial Sequence
  Synthetic
ggacaagaccutttgtttccctug

SEQ ID NO: 29044 - DNA, 21 bp, Artificial Sequence
  Synthetic
atcctuaccccagagcucgat

SEQ ID NO: 29045 - DNA, 28 bp, Artificial Sequence
  Synthetic
tttcctctgccutgcgttttaatttuag

SEQ ID NO: 29046 - DNA, 17 bp, Artificial Sequence
  Synthetic
ccuggcacaggacugca

SEQ ID NO: 29047 - DNA, 19 bp, Artificial Sequence
  Synthetic
cutggguggagccacaact

SEQ ID NO: 29048 - DNA, 26 bp, Artificial Sequence
  Synthetic
tctcaatgaaaugctttggcagttut

SEQ ID NO: 29049 - DNA, 26 bp, Artificial Sequence
  Synthetic
gatguaagagaagagaguaccttugt

SEQ ID NO: 29050 - DNA, 25 bp, Artificial Sequence
  Synthetic
gtgtggcaataucacattccttguc

SEQ ID NO: 29051 - DNA, 25 bp, Artificial Sequence
  Synthetic
cacgtuccccagttgtaatuaccat

SEQ ID NO: 29052 - DNA, 27 bp, Artificial Sequence
  Synthetic
ttctccttttgugttttgtctctcugt

SEQ ID NO: 29053 - DNA, 23 bp, Artificial Sequence
  Synthetic
ggtgagaaaugaaaagccuggag

SEQ ID NO: 29054 - DNA, 29 bp, Artificial Sequence
  Synthetic
gaaaaggacugaactctaaattcuggact

SEQ ID NO: 29055 - DNA, 27 bp, Artificial Sequence
  Synthetic
cgtagcagugatcatgguaaaagaaga

SEQ ID NO: 29056 - DNA, 23 bp, Artificial Sequence
  Synthetic
ccctgcttcuggatcgtttacut

SEQ ID NO: 29057 - DNA, 31 bp, Artificial Sequence
  Synthetic
aaaucaaagaaggaagagaaaugatcuacat

SEQ ID NO: 29058 - DNA, 27 bp, Artificial Sequence
  Synthetic
ttcttgtgtctucactgtctccattut

SEQ ID NO: 29059 - DNA, 26 bp, Artificial Sequence
  Synthetic
agttcagaugaagaacttgucacagg

SEQ ID NO: 29060 - DNA, 28 bp, Artificial Sequence
  Synthetic
cagcctcatcuggagatattgttaugac

SEQ ID NO: 29061 - DNA, 27 bp, Artificial Sequence
  Synthetic
gagtaatgttacucgctatgactugga

SEQ ID NO: 29062 - DNA, 23 bp, Artificial Sequence
  Synthetic
tcagctgaaauatccctguagcg

SEQ ID NO: 29063 - DNA, 26 bp, Artificial Sequence
  Synthetic
agtactgttugaagggttaggcatut

SEQ ID NO: 29064 - DNA, 28 bp, Artificial Sequence
  Synthetic
acaaaagaaccatuatacgaaggcctua

SEQ ID NO: 29065 - DNA, 31 bp, Artificial Sequence
  Synthetic
ctgattctaagtgucctatatgcttggauag

SEQ ID NO: 29066 - DNA, 17 bp, Artificial Sequence
  Synthetic
aacucccacggccctuc

SEQ ID NO: 29067 - DNA, 17 bp, Artificial Sequence
  Synthetic
tcccgctucggagggua

SEQ ID NO: 29068 - DNA, 17 bp, Artificial Sequence
  Synthetic
ctgcugccgcctcctua

SEQ ID NO: 29069 - DNA, 25 bp, Artificial Sequence
  Synthetic
ggaagaucgtatccuccaggaagag

SEQ ID NO: 29070 - DNA, 20 bp, Artificial Sequence
  Synthetic
gcaguggaaccgatccucag

SEQ ID NO: 29071 - DNA, 20 bp, Artificial Sequence
  Synthetic
gggatgagcgutccaaccut

SEQ ID NO: 29072 - DNA, 22 bp, Artificial Sequence
  Synthetic
ccttgtagccugtccagtctut

SEQ ID NO: 29073 - DNA, 21 bp, Artificial Sequence
  Synthetic
gtcccucaagaggtcuagcca

SEQ ID NO: 29074 - DNA, 25 bp, Artificial Sequence
  Synthetic
cctacctcucggttatcttttcucc

SEQ ID NO: 29075 - DNA, 22 bp, Artificial Sequence
  Synthetic
ccagaaccaaagcutcaucacc

SEQ ID NO: 29076 - DNA, 23 bp, Artificial Sequence
  Synthetic
ggtaaaggaccugcctgttctuc

SEQ ID NO: 29077 - DNA, 28 bp, Artificial Sequence
  Synthetic
tctcatgggauaagaaagttagggacuc

SEQ ID NO: 29078 - DNA, 21 bp, Artificial Sequence
  Synthetic
ctaggcacuggatggaggtug

SEQ ID NO: 29079 - DNA, 28 bp, Artificial Sequence
  Synthetic
gggctaaauataggtactugaaaagcct

SEQ ID NO: 29080 - DNA, 23 bp, Artificial Sequence
  Synthetic
aatgaagtccaugccaccatuct

SEQ ID NO: 29081 - DNA, 28 bp, Artificial Sequence
  Synthetic
gcttaatucagcaagactgtugaaaaca

SEQ ID NO: 29082 - DNA, 20 bp, Artificial Sequence
  Synthetic
aatgacutggtgguggcaga

SEQ ID NO: 29083 - DNA, 23 bp, Artificial Sequence
  Synthetic
tgccaaagtcutgtgacctguag

SEQ ID NO: 29084 - DNA, 24 bp, Artificial Sequence
  Synthetic
tttcagtgtucaccacccacaaua

SEQ ID NO: 29085 - DNA, 23 bp, Artificial Sequence
  Synthetic
gactcugaagaggctagaucgga

SEQ ID NO: 29086 - DNA, 23 bp, Artificial Sequence
  Synthetic
gccgacgucatgcaagtauacat

SEQ ID NO: 29087 - DNA, 23 bp, Artificial Sequence
  Synthetic
acttcttgactutgggagtgguc

SEQ ID NO: 29088 - DNA, 21 bp, Artificial Sequence
  Synthetic
ctcaccaacucaggucccaat

SEQ ID NO: 29089 - DNA, 23 bp, Artificial Sequence
  Synthetic
catctctgcuacccaagatgucc

SEQ ID NO: 29090 - DNA, 27 bp, Artificial Sequence
  Synthetic
aattgcagtcutgctgtattucaaagg

SEQ ID NO: 29091 - DNA, 28 bp, Artificial Sequence
  Synthetic
tgttagcuaagagagaacattcucagga

SEQ ID NO: 29092 - DNA, 23 bp, Artificial Sequence
  Synthetic
ttgctagtatgugcttggtcugg

SEQ ID NO: 29093 - DNA, 28 bp, Artificial Sequence
  Synthetic
aggaagtatggcucccaaagattauaga

SEQ ID NO: 29094 - DNA, 24 bp, Artificial Sequence
  Synthetic
acataatgcutgtggttuccccaa

SEQ ID NO: 29095 - DNA, 23 bp, Artificial Sequence
  Synthetic
ctctatagcccuctccaagcuca

SEQ ID NO: 29096 - DNA, 21 bp, Artificial Sequence
  Synthetic
gatgatgcuactgcagcugga

SEQ ID NO: 29097 - DNA, 20 bp, Artificial Sequence
  Synthetic
tgtgggacuctgtcctucgt

SEQ ID NO: 29098 - DNA, 23 bp, Artificial Sequence
  Synthetic
ctcccatcuccctgcaataacut

SEQ ID NO: 29099 - DNA, 24 bp, Artificial Sequence
  Synthetic
gtaagaccaacautgttgcuccag

SEQ ID NO: 29100 - DNA, 21 bp, Artificial Sequence
  Synthetic
cagggaucttgaggcugcaaa

SEQ ID NO: 29101 - DNA, 21 bp, Artificial Sequence
  Synthetic
ctaagtccgcutctggtcucc

SEQ ID NO: 29102 - DNA, 21 bp, Artificial Sequence
  Synthetic
gggaaaggugactcuggaaga

SEQ ID NO: 29103 - DNA, 23 bp, Artificial Sequence
  Synthetic
acuacacaacacguaggatcuac

SEQ ID NO: 29104 - DNA, 20 bp, Artificial Sequence
  Synthetic
tgctggcgaaugacgtctut

SEQ ID NO: 29105 - DNA, 29 bp, Artificial Sequence
  Synthetic
gattttggcttcuctcagaaactcattut

SEQ ID NO: 29106 - DNA, 25 bp, Artificial Sequence
  Synthetic
tcagtgttcagcugtctttggaaut

SEQ ID NO: 29107 - DNA, 21 bp, Artificial Sequence
  Synthetic
ctgautgttcctguggaagcc

SEQ ID NO: 29108 - DNA, 23 bp, Artificial Sequence
  Synthetic
ctaaggcagagutguaaccacct

SEQ ID NO: 29109 - DNA, 22 bp, Artificial Sequence
  Synthetic
acactttgcauctccctgtgug

SEQ ID NO: 29110 - DNA, 23 bp, Artificial Sequence
  Synthetic
ctcaggcaugcatcacaagtuag

SEQ ID NO: 29111 - DNA, 29 bp, Artificial Sequence
  Synthetic
gaacttgttgttutctcttttagggugaa

SEQ ID NO: 29112 - DNA, 28 bp, Artificial Sequence
  Synthetic
ttgtgtatgttuctagtcttacctucca

SEQ ID NO: 29113 - DNA, 28 bp, Artificial Sequence
  Synthetic
tcctgugaaggagaatatctcucaagat

SEQ ID NO: 29114 - DNA, 28 bp, Artificial Sequence
  Synthetic
aaagctctgtuaggatgattaaacagug

SEQ ID NO: 29115 - DNA, 26 bp, Artificial Sequence
  Synthetic
cccacttccaaauccttgtaatgugt

SEQ ID NO: 29116 - DNA, 22 bp, Artificial Sequence
  Synthetic
tcccaatcauacagccagcaug

SEQ ID NO: 29117 - DNA, 24 bp, Artificial Sequence
  Synthetic
tttacgugggctatactugccaat

SEQ ID NO: 29118 - DNA, 31 bp, Artificial Sequence
  Synthetic
cttgttaaatgagauaagtgcatccaatgut

SEQ ID NO: 29119 - DNA, 28 bp, Artificial Sequence
  Synthetic
acttagagtctugctttcagaattugct

SEQ ID NO: 29120 - DNA, 23 bp, Artificial Sequence
  Synthetic
ggtgcagcacacaugataaugag

SEQ ID NO: 29121 - DNA, 25 bp, Artificial Sequence
  Synthetic
gcctgaagccugatatcatgatugt

SEQ ID NO: 29122 - DNA, 22 bp, Artificial Sequence
  Synthetic
ggaatttgaagcugggcccaua

SEQ ID NO: 29123 - DNA, 24 bp, Artificial Sequence
  Synthetic
tgtttggcatuaaaaccgaaccug

SEQ ID NO: 29124 - DNA, 28 bp, Artificial Sequence
  Synthetic
gctttcctctucctctttgtaatttucc

SEQ ID NO: 29125 - DNA, 22 bp, Artificial Sequence
  Synthetic
aaccacacuaggguacagagct

SEQ ID NO: 29126 - DNA, 18 bp, Artificial Sequence
  Synthetic
gcagggcagcuctctgug

SEQ ID NO: 29127 - DNA, 19 bp, Artificial Sequence
  Synthetic
cacuctgcagguggacgag

SEQ ID NO: 29128 - DNA, 20 bp, Artificial Sequence
  Synthetic
gggcgttcugtgtgtcauca

SEQ ID NO: 29129 - DNA, 21 bp, Artificial Sequence
  Synthetic
ctaccugcccaacttcuaccc

SEQ ID NO: 29130 - DNA, 17 bp, Artificial Sequence
  Synthetic
gctugggccccacguag

SEQ ID NO: 29131 - DNA, 19 bp, Artificial Sequence
  Synthetic
cctgggugtatgcccucat

SEQ ID NO: 29132 - DNA, 23 bp, Artificial Sequence
  Synthetic
taggaccagaugtctgagucgat

SEQ ID NO: 29133 - DNA, 21 bp, Artificial Sequence
  Synthetic
ggaguacctauccagccacca

SEQ ID NO: 29134 - DNA, 17 bp, Artificial Sequence
  Synthetic
tcgccgugcgaacagua

SEQ ID NO: 29135 - DNA, 22 bp, Artificial Sequence
  Synthetic
tctacaaaggucacctgtucgg

SEQ ID NO: 29136 - DNA, 22 bp, Artificial Sequence
  Synthetic
gggaaacaaccccugaggatua

SEQ ID NO: 29137 - DNA, 24 bp, Artificial Sequence
  Synthetic
cttgcctttucttcttggttugca

SEQ ID NO: 29138 - DNA, 21 bp, Artificial Sequence
  Synthetic
gccctcaucacaaggtucact

SEQ ID NO: 29139 - DNA, 21 bp, Artificial Sequence
  Synthetic
gcacagactuccctgagctug

SEQ ID NO: 29140 - DNA, 22 bp, Artificial Sequence
  Synthetic
cacattucaagggcccuacact

SEQ ID NO: 29141 - DNA, 18 bp, Artificial Sequence
  Synthetic
gcuggagagcgacctgug

SEQ ID NO: 29142 - DNA, 22 bp, Artificial Sequence
  Synthetic
gatggctgugtgcatgcttauc

SEQ ID NO: 29143 - DNA, 29 bp, Artificial Sequence
  Synthetic
ctctaacagacuttgtgtgtttctuacca

SEQ ID NO: 29144 - DNA, 25 bp, Artificial Sequence
  Synthetic
agtttcaaauagcaactggaccuct

SEQ ID NO: 29145 - DNA, 23 bp, Artificial Sequence
  Synthetic
ggaucatcauccggaagacagaa

SEQ ID NO: 29146 - DNA, 22 bp, Artificial Sequence
  Synthetic
auttggaggacauggagagcac

SEQ ID NO: 29147 - DNA, 29 bp, Artificial Sequence
  Synthetic
ggctccugaaaggaaaacttgtttaauac

SEQ ID NO: 29148 - DNA, 20 bp, Artificial Sequence
  Synthetic
gaaguccgggacacugagag

SEQ ID NO: 29149 - DNA, 18 bp, Artificial Sequence
  Synthetic
cctcgaaguggacccgut

SEQ ID NO: 29150 - DNA, 19 bp, Artificial Sequence
  Synthetic
cucacaccggacguggaaa

SEQ ID NO: 29151 - DNA, 20 bp, Artificial Sequence
  Synthetic
ttcucacaacccucggaacc

SEQ ID NO: 29152 - DNA, 21 bp, Artificial Sequence
  Synthetic
cctggttcugcagagtcacut

SEQ ID NO: 29153 - DNA, 20 bp, Artificial Sequence
  Synthetic
cacagcggguctgattccuc

SEQ ID NO: 29154 - DNA, 21 bp, Artificial Sequence
  Synthetic
gggaggcaccuaagtaucgaa

SEQ ID NO: 29155 - DNA, 23 bp, Artificial Sequence
  Synthetic
tgttcccgttucctcttgatcuc

SEQ ID NO: 29156 - DNA, 22 bp, Artificial Sequence
  Synthetic
ggagaatgcaaggutcccacut

SEQ ID NO: 29157 - DNA, 23 bp, Artificial Sequence
  Synthetic
cctcatcggaaucaagctcagug

SEQ ID NO: 29158 - DNA, 26 bp, Artificial Sequence
  Synthetic
ccacaaagccccutataatacacuca

SEQ ID NO: 29159 - DNA, 27 bp, Artificial Sequence
  Synthetic
aggcaattgaaaaaguaaggaccauct

SEQ ID NO: 29160 - DNA, 22 bp, Artificial Sequence
  Synthetic
gctgtugctgagttuggagaac

SEQ ID NO: 29161 - DNA, 26 bp, Artificial Sequence
  Synthetic
tcattaatcccagcgcuttctacauc

SEQ ID NO: 29162 - DNA, 17 bp, Artificial Sequence
  Synthetic
cuggaagcgcccucagt

SEQ ID NO: 29163 - DNA, 27 bp, Artificial Sequence
  Synthetic
ggctgcgagtuataatgtgttacaauc

SEQ ID NO: 29164 - DNA, 25 bp, Artificial Sequence
  Synthetic
agtaagtgcuggatattcggguagt

SEQ ID NO: 29165 - DNA, 21 bp, Artificial Sequence
  Synthetic
ccttgtgccucttctgtucca

SEQ ID NO: 29166 - DNA, 24 bp, Artificial Sequence
  Synthetic
agcaaaagaugagagtgtccacut

SEQ ID NO: 29167 - DNA, 18 bp, Artificial Sequence
  Synthetic
cuccgcacggaguacgac

SEQ ID NO: 29168 - DNA, 23 bp, Artificial Sequence
  Synthetic
acaggcugaaagagttctcucac

SEQ ID NO: 29169 - DNA, 25 bp, Artificial Sequence
  Synthetic
gcatgttggugacctctgaatttut

SEQ ID NO: 29170 - DNA, 25 bp, Artificial Sequence
  Synthetic
atctttacugggtcagacugaggaa

SEQ ID NO: 29171 - DNA, 24 bp, Artificial Sequence
  Synthetic
caccatcctcugtttttgctguag

SEQ ID NO: 29172 - DNA, 26 bp, Artificial Sequence
  Synthetic
gacuaaaacaaccaaaccaaacucca

SEQ ID NO: 29173 - DNA, 23 bp, Artificial Sequence
  Synthetic
gcatttcgcautctgttgugacc

SEQ ID NO: 29174 - DNA, 25 bp, Artificial Sequence
  Synthetic
gaaaggaagaagacuacagggcaua

SEQ ID NO: 29175 - DNA, 27 bp, Artificial Sequence
  Synthetic
gtgacctgccuactaattcccataaut

SEQ ID NO: 29176 - DNA, 20 bp, Artificial Sequence
  Synthetic
gcggtccaugtaaccaugac

SEQ ID NO: 29177 - DNA, 28 bp, Artificial Sequence
  Synthetic
tcttttcatggtcucgtctcctaattuc

SEQ ID NO: 29178 - DNA, 26 bp, Artificial Sequence
  Synthetic
tgttccugagaaattttugccaacaa

SEQ ID NO: 29179 - DNA, 29 bp, Artificial Sequence
  Synthetic
acagtgagaaattuttgtctctgctttuc

SEQ ID NO: 29180 - DNA, 20 bp, Artificial Sequence
  Synthetic
cgcutctgtggucaggacat

SEQ ID NO: 29181 - DNA, 28 bp, Artificial Sequence
  Synthetic
catgagtttgcagugattttgctatuct

SEQ ID NO: 29182 - DNA, 20 bp, Artificial Sequence
  Synthetic
ccacgttgguctcgaggtuc

SEQ ID NO: 29183 - DNA, 20 bp, Artificial Sequence
  Synthetic
actcctcccutctgctucgt

SEQ ID NO: 29184 - DNA, 17 bp, Artificial Sequence
  Synthetic
ggacgcugggctuggat

SEQ ID NO: 29185 - DNA, 24 bp, Artificial Sequence
  Synthetic
ccutttguaaagauggaggaggag

SEQ ID NO: 29186 - DNA, 25 bp, Artificial Sequence
  Synthetic
ggactcacaatuacaagcctgttuc

SEQ ID NO: 29187 - DNA, 18 bp, Artificial Sequence
  Synthetic
gggagcgccugttuaccc

SEQ ID NO: 29188 - DNA, 22 bp, Artificial Sequence
  Synthetic
ctgcagucactcagtcuagcag

SEQ ID NO: 29189 - DNA, 23 bp, Artificial Sequence
  Synthetic
aaactccaccugcctagtttgut

SEQ ID NO: 29190 - DNA, 22 bp, Artificial Sequence
  Synthetic
aaatgcacaccguctcugagaa

SEQ ID NO: 29191 - DNA, 31 bp, Artificial Sequence
  Synthetic
gctgggaatauaacttaccactcttucaaat

SEQ ID NO: 29192 - DNA, 22 bp, Artificial Sequence
  Synthetic
caccgucccaguagaaaaccaa

SEQ ID NO: 29193 - DNA, 26 bp, Artificial Sequence
  Synthetic
atcggcttcuggttcttcttttcuag

SEQ ID NO: 29194 - DNA, 29 bp, Artificial Sequence
  Synthetic
agaaaacacagtaaauaggaggagacuct

SEQ ID NO: 29195 - DNA, 28 bp, Artificial Sequence
  Synthetic
ccagtgacuagaagttttccttccuaaa

SEQ ID NO: 29196 - DNA, 28 bp, Artificial Sequence
  Synthetic
caattatgcacagutcctttaacttuca

SEQ ID NO: 29197 - DNA, 26 bp, Artificial Sequence
  Synthetic
tcaactgcugcttattgtctcuacag

SEQ ID NO: 29198 - DNA, 21 bp, Artificial Sequence
  Synthetic
ggctgagagagcuttctcgug

SEQ ID NO: 29199 - DNA, 27 bp, Artificial Sequence
  Synthetic
aagtataggaacuaaggcagcuacact

SEQ ID NO: 29200 - DNA, 30 bp, Artificial Sequence
  Synthetic
caagaaccaaauggcataaaaguaagaact

SEQ ID NO: 29201 - DNA, 27 bp, Artificial Sequence
  Synthetic
ccccaaatgatugtgttctgttttgut

SEQ ID NO: 29202 - DNA, 22 bp, Artificial Sequence
  Synthetic
gcuggacaaggacaacuacaca

SEQ ID NO: 29203 - DNA, 26 bp, Artificial Sequence
  Synthetic
accattccauacacacctgttctuag

SEQ ID NO: 29204 - DNA, 26 bp, Artificial Sequence
  Synthetic
aggacaaaacaucttcgttcagauca

SEQ ID NO: 29205 - DNA, 29 bp, Artificial Sequence
  Synthetic
catggagctcaguttttgtgaatatctut

SEQ ID NO: 29206 - DNA, 26 bp, Artificial Sequence
  Synthetic
agaattatgctuggtacttggcugaa

SEQ ID NO: 29207 - DNA, 31 bp, Artificial Sequence
  Synthetic
tggcttgttgtgauaattaaggcttatuagt

SEQ ID NO: 29208 - DNA, 23 bp, Artificial Sequence
  Synthetic
gcatgggugaaagctagcuagat

SEQ ID NO: 29209 - DNA, 31 bp, Artificial Sequence
  Synthetic
tggtagaactatgugatagaaaaggtaggut

SEQ ID NO: 29210 - DNA, 30 bp, Artificial Sequence
  Synthetic
gcatctatgtaagucataacatgcttucct

SEQ ID NO: 29211 - DNA, 26 bp, Artificial Sequence
  Synthetic
gtctgtttacacucccttctccttut

SEQ ID NO: 29212 - DNA, 26 bp, Artificial Sequence
  Synthetic
ctcttcatccauctcagaagaagcug

SEQ ID NO: 29213 - DNA, 27 bp, Artificial Sequence
  Synthetic
aggaacgtcucagtggtttttaagtut

SEQ ID NO: 29214 - DNA, 24 bp, Artificial Sequence
  Synthetic
gaaacacuagacctauggcaacac

SEQ ID NO: 29215 - DNA, 27 bp, Artificial Sequence
  Synthetic
cttagcacacccucaaaagagtaauga

SEQ ID NO: 29216 - DNA, 27 bp, Artificial Sequence
  Synthetic
caaataaagatuccccactgtuccagt

SEQ ID NO: 29217 - DNA, 21 bp, Artificial Sequence
  Synthetic
gctggcatuacctcgcctaug

SEQ ID NO: 29218 - DNA, 25 bp, Artificial Sequence
  Synthetic
agggactaaguagaagggaugaagg

SEQ ID NO: 29219 - DNA, 28 bp, Artificial Sequence
  Synthetic
cataactgaaagccaaugacagatctut

SEQ ID NO: 29220 - DNA, 28 bp, Artificial Sequence
  Synthetic
tctgtatcatcugtatccatgtguacca

SEQ ID NO: 29221 - DNA, 24 bp, Artificial Sequence
  Synthetic
tgtatgtgtguttgactccacucc

SEQ ID NO: 29222 - DNA, 25 bp, Artificial Sequence
  Synthetic
gttcattacuggcatctaaguggac

SEQ ID NO: 29223 - DNA, 28 bp, Artificial Sequence
  Synthetic
gcttattagttgucttgccaattgtuct

SEQ ID NO: 29224 - DNA, 25 bp, Artificial Sequence
  Synthetic
gaaattcaagcagccuaaagcugat

SEQ ID NO: 29225 - DNA, 29 bp, Artificial Sequence
  Synthetic
agatgctagtgtutgaatctctctttuca

SEQ ID NO: 29226 - DNA, 26 bp, Artificial Sequence
  Synthetic
agaagagaaaucaagggtcauaccca

SEQ ID NO: 29227 - DNA, 23 bp, Artificial Sequence
  Synthetic
gaccctggagutcagggatatuc

SEQ ID NO: 29228 - DNA, 20 bp, Artificial Sequence
  Synthetic
caaggtgtuccaagccagug

SEQ ID NO: 29229 - DNA, 19 bp, Artificial Sequence
  Synthetic
caccagcagcauggcauag

SEQ ID NO: 29230 - DNA, 22 bp, Artificial Sequence
  Synthetic
tcaatcccucagaggctucact

SEQ ID NO: 29231 - DNA, 19 bp, Artificial Sequence
  Synthetic
cagaguggcagtgctgaug

SEQ ID NO: 29232 - DNA, 20 bp, Artificial Sequence
  Synthetic
gccatgucccttccugcaaa

SEQ ID NO: 29233 - DNA, 22 bp, Artificial Sequence
  Synthetic
cagcttccucctccacttcuac

SEQ ID NO: 29234 - DNA, 19 bp, Artificial Sequence
  Synthetic
gtgacaggcaugccaggua

SEQ ID NO: 29235 - DNA, 21 bp, Artificial Sequence
  Synthetic
cgccagatugaccaagtcucc

SEQ ID NO: 29236 - DNA, 20 bp, Artificial Sequence
  Synthetic
caaccaggcuggtcctgaua

SEQ ID NO: 29237 - DNA, 20 bp, Artificial Sequence
  Synthetic
ctgatggugcccctctctuc

SEQ ID NO: 29238 - DNA, 20 bp, Artificial Sequence
  Synthetic
aagcucacacagaggtgcut

SEQ ID NO: 29239 - DNA, 24 bp, Artificial Sequence
  Synthetic
gaaaaacatucgtggctucaagct

SEQ ID NO: 29240 - DNA, 21 bp, Artificial Sequence
  Synthetic
cagaggtugggagtttgggut

SEQ ID NO: 29241 - DNA, 21 bp, Artificial Sequence
  Synthetic
tgtccgctucagtgttccauc

SEQ ID NO: 29242 - DNA, 22 bp, Artificial Sequence
  Synthetic
tgagcaguatcaugagcccaga

SEQ ID NO: 29243 - DNA, 20 bp, Artificial Sequence
  Synthetic
ctgagccuccacatgtcucc

SEQ ID NO: 29244 - DNA, 20 bp, Artificial Sequence
  Synthetic
ccttggagcutcctcugagc

SEQ ID NO: 29245 - DNA, 22 bp, Artificial Sequence
  Synthetic
ggcctcttuccggatgtttcuc

SEQ ID NO: 29246 - DNA, 24 bp, Artificial Sequence
  Synthetic
ggactgagugttgtttctttucca

SEQ ID NO: 29247 - DNA, 25 bp, Artificial Sequence
  Synthetic
gtcccgaggcuatgaaattgaugaa

SEQ ID NO: 29248 - DNA, 24 bp, Artificial Sequence
  Synthetic
taacacttagggugcaggatuagg

SEQ ID NO: 29249 - DNA, 24 bp, Artificial Sequence
  Synthetic
tccttacccacugggattgtttug

SEQ ID NO: 29250 - DNA, 20 bp, Artificial Sequence
  Synthetic
ccccaaacccgaugacaucc

SEQ ID NO: 29251 - DNA, 27 bp, Artificial Sequence
  Synthetic
tcagcaagatcaucgcagagaatatut

SEQ ID NO: 29252 - DNA, 17 bp, Artificial Sequence
  Synthetic
gcctacccucccggcua

SEQ ID NO: 29253 - DNA, 17 bp, Artificial Sequence
  Synthetic
cggguccgggcaugaag

SEQ ID NO: 29254 - DNA, 23 bp, Artificial Sequence
  Synthetic
aacatuggccagaaggaagacut

SEQ ID NO: 29255 - DNA, 19 bp, Artificial Sequence
  Synthetic
accacugccctccacauca

SEQ ID NO: 29256 - DNA, 18 bp, Artificial Sequence
  Synthetic
cauccaguccagcgcact

SEQ ID NO: 29257 - DNA, 17 bp, Artificial Sequence
  Synthetic
ccctccgccuccatcuc

SEQ ID NO: 29258 - DNA, 21 bp, Artificial Sequence
  Synthetic
ggctcugaccccttgtccuat

SEQ ID NO: 29259 - DNA, 18 bp, Artificial Sequence
  Synthetic
gggagacucggccauacc

SEQ ID NO: 29260 - DNA, 20 bp, Artificial Sequence
  Synthetic
cccagcugaccctgtcttuc

SEQ ID NO: 29261 - DNA, 20 bp, Artificial Sequence
  Synthetic
gagcugcuaccaccaaaggt

SEQ ID NO: 29262 - DNA, 19 bp, Artificial Sequence
  Synthetic
gccctctcutcccacccua

SEQ ID NO: 29263 - DNA, 18 bp, Artificial Sequence
  Synthetic
cagggcugcagacacuca

SEQ ID NO: 29264 - DNA, 21 bp, Artificial Sequence
  Synthetic
ccctgccuggaaaaatggcua

SEQ ID NO: 29265 - DNA, 20 bp, Artificial Sequence
  Synthetic
cccttgugaggcggtuagag

SEQ ID NO: 29266 - DNA, 21 bp, Artificial Sequence
  Synthetic
ctcaagggccaggugtacauc

SEQ ID NO: 29267 - DNA, 23 bp, Artificial Sequence
  Synthetic
tccagtcaaaagauaggctcugt

SEQ ID NO: 29268 - DNA, 26 bp, Artificial Sequence
  Synthetic
acccagtgtgugttgttattgtuaat

SEQ ID NO: 29269 - DNA, 21 bp, Artificial Sequence
  Synthetic
ccccagcucctcattguacac

SEQ ID NO: 29270 - DNA, 28 bp, Artificial Sequence
  Synthetic
caagttaacacugattgaccatcatucc

SEQ ID NO: 29271 - DNA, 24 bp, Artificial Sequence
  Synthetic
ccagtagcctutctgagagccuaa

SEQ ID NO: 29272 - DNA, 21 bp, Artificial Sequence
  Synthetic
agacgctuctcccatagucgt

SEQ ID NO: 29273 - DNA, 22 bp, Artificial Sequence
  Synthetic
atgguagggcacaaugaagagg

SEQ ID NO: 29274 - DNA, 24 bp, Artificial Sequence
  Synthetic
gcttagucccaaggtcatgaauca

SEQ ID NO: 29275 - DNA, 29 bp, Artificial Sequence
  Synthetic
ctatattctggcuggtctgtatcttucag

SEQ ID NO: 29276 - DNA, 23 bp, Artificial Sequence
  Synthetic
ccaggugagattccagtuccaaa

SEQ ID NO: 29277 - DNA, 31 bp, Artificial Sequence
  Synthetic
tctcagtcctucttacattgtctttucaaaa

SEQ ID NO: 29278 - DNA, 25 bp, Artificial Sequence
  Synthetic
acctgtcugaaggaagaatgtuagc

SEQ ID NO: 29279 - DNA, 25 bp, Artificial Sequence
  Synthetic
tcaaacttcatguccacgtctctut

SEQ ID NO: 29280 - DNA, 20 bp, Artificial Sequence
  Synthetic
accatagtgucacgctgcuc

SEQ ID NO: 29281 - DNA, 27 bp, Artificial Sequence
  Synthetic
tgactatucagatgaaatgtucgcagt

SEQ ID NO: 29282 - DNA, 23 bp, Artificial Sequence
  Synthetic
gggctggatutggagctaaagua

SEQ ID NO: 29283 - DNA, 31 bp, Artificial Sequence
  Synthetic
ggaagtgatcuaactttgctgcaaauaaaag

SEQ ID NO: 29284 - DNA, 24 bp, Artificial Sequence
  Synthetic
caccatcttccuctgtgtttccut

SEQ ID NO: 29285 - DNA, 23 bp, Artificial Sequence
  Synthetic
gggaaugccagacttcttuggag

SEQ ID NO: 29286 - DNA, 21 bp, Artificial Sequence
  Synthetic
tgtaaaggcucagggtucacg

SEQ ID NO: 29287 - DNA, 24 bp, Artificial Sequence
  Synthetic
tggaataccgacugccatttctut

SEQ ID NO: 29288 - DNA, 25 bp, Artificial Sequence
  Synthetic
atcccagaattuccttgtttccaut

SEQ ID NO: 29289 - DNA, 28 bp, Artificial Sequence
  Synthetic
atgtgcaacattuttcgtcttgtgauat

SEQ ID NO: 29290 - DNA, 25 bp, Artificial Sequence
  Synthetic
tagatctaaaagagagcucctccug

SEQ ID NO: 29291 - DNA, 28 bp, Artificial Sequence
  Synthetic
tgccactgctgaugtactttattaacut

SEQ ID NO: 29292 - DNA, 28 bp, Artificial Sequence
  Synthetic
aatgtttuccagagacaaagtugcaaaa

SEQ ID NO: 29293 - DNA, 25 bp, Artificial Sequence
  Synthetic
ccacagaagccucatatgaagaugg

SEQ ID NO: 29294 - DNA, 27 bp, Artificial Sequence
  Synthetic
cccaaatataccucaacagggatuacc

SEQ ID NO: 29295 - DNA, 29 bp, Artificial Sequence
  Synthetic
gttccacaaacatucagccctttataaut

SEQ ID NO: 29296 - DNA, 25 bp, Artificial Sequence
  Synthetic
cccaacaggtauatgaggagatcug

SEQ ID NO: 29297 - DNA, 25 bp, Artificial Sequence
  Synthetic
agacgtttccugtttgacctttuct

SEQ ID NO: 29298 - DNA, 24 bp, Artificial Sequence
  Synthetic
gaataagcucaggacaagtugcac

SEQ ID NO: 29299 - DNA, 28 bp, Artificial Sequence
  Synthetic
gtatcatccatugcccttttcttgatut

SEQ ID NO: 29300 - DNA, 21 bp, Artificial Sequence
  Synthetic
ctccccgacauttgcttgtug

SEQ ID NO: 29301 - DNA, 24 bp, Artificial Sequence
  Synthetic
cattgcatugaacacgtgcatuag

SEQ ID NO: 29302 - DNA, 23 bp, Artificial Sequence
  Synthetic
ccttattcucaccatcccucact

SEQ ID NO: 29303 - DNA, 20 bp, Artificial Sequence
  Synthetic
cagutgttctcaugcagccg

SEQ ID NO: 29304 - DNA, 21 bp, Artificial Sequence
  Synthetic
ccccacagaccugacttcuct

SEQ ID NO: 29305 - DNA, 19 bp, Artificial Sequence
  Synthetic
ggttcucccgaaugcggaa

SEQ ID NO: 29306 - DNA, 18 bp, Artificial Sequence
  Synthetic
cccctguctgcttggugc

SEQ ID NO: 29307 - DNA, 19 bp, Artificial Sequence
  Synthetic
gagtcgucctcgtcguaca

SEQ ID NO: 29308 - DNA, 20 bp, Artificial Sequence
  Synthetic
tgggacgugcagcattcuaa

SEQ ID NO: 29309 - DNA, 19 bp, Artificial Sequence
  Synthetic
cttgtguaccgccucacca

SEQ ID NO: 29310 - DNA, 22 bp, Artificial Sequence
  Synthetic
gggaagaggugtgctacacaug

SEQ ID NO: 29311 - DNA, 22 bp, Artificial Sequence
  Synthetic
acacgutgaaguggagcaagag

SEQ ID NO: 29312 - DNA, 20 bp, Artificial Sequence
  Synthetic
ctggctaaggugttccccug

SEQ ID NO: 29313 - DNA, 23 bp, Artificial Sequence
  Synthetic
atgtagtgaagutcggcacacut

SEQ ID NO: 29314 - DNA, 19 bp, Artificial Sequence
  Synthetic
gctggtgcugttccctguc

SEQ ID NO: 29315 - DNA, 18 bp, Artificial Sequence
  Synthetic
ggcgttuccagggctuac

SEQ ID NO: 29316 - DNA, 19 bp, Artificial Sequence
  Synthetic
gctgagugggctacgtcug

SEQ ID NO: 29317 - DNA, 22 bp, Artificial Sequence
  Synthetic
ctcagaugtgctgtugagacct

SEQ ID NO: 29318 - DNA, 20 bp, Artificial Sequence
  Synthetic
caagccacccauctccucag

SEQ ID NO: 29319 - DNA, 18 bp, Artificial Sequence
  Synthetic
tggccuctgtcuccccag

SEQ ID NO: 29320 - DNA, 18 bp, Artificial Sequence
  Synthetic
caaggcgaugcaggucca

SEQ ID NO: 29321 - DNA, 17 bp, Artificial Sequence
  Synthetic
ccctgcagcuggcctua

SEQ ID NO: 29322 - DNA, 23 bp, Artificial Sequence
  Synthetic
ctcatcgtggaguacgccaaaua

SEQ ID NO: 29323 - DNA, 19 bp, Artificial Sequence
  Synthetic
gugcagagccataugcacg

SEQ ID NO: 29324 - DNA, 24 bp, Artificial Sequence
  Synthetic
ggttactgaaagcucagggauagg

SEQ ID NO: 29325 - DNA, 27 bp, Artificial Sequence
  Synthetic
tgtataagggugtttctgtaaccucca

SEQ ID NO: 29326 - DNA, 21 bp, Artificial Sequence
  Synthetic
ctggcccugcttggatcauat

SEQ ID NO: 29327 - DNA, 23 bp, Artificial Sequence
  Synthetic
ctttcagcutgtgggaatuggac

SEQ ID NO: 29328 - DNA, 24 bp, Artificial Sequence
  Synthetic
tccctuccacatggatugaaaaca

SEQ ID NO: 29329 - DNA, 32 bp, Artificial Sequence
  Synthetic
tccttttagaaaaacauagttgcaataaugcc

SEQ ID NO: 29330 - DNA, 29 bp, Artificial Sequence
  Synthetic
ggcaaaattaauggacacgtttgatagut

SEQ ID NO: 29331 - DNA, 23 bp, Artificial Sequence
  Synthetic
gtctgcuaggagggaaaaucacc

SEQ ID NO: 29332 - DNA, 19 bp, Artificial Sequence
  Synthetic
gaagcgcuccgggtagaut

SEQ ID NO: 29333 - DNA, 20 bp, Artificial Sequence
  Synthetic
cgacuggagaaagcaagcug

SEQ ID NO: 29334 - DNA, 17 bp, Artificial Sequence
  Synthetic
caccccutccggcucac

SEQ ID NO: 29335 - DNA, 17 bp, Artificial Sequence
  Synthetic
cggtgcugtcccuggat

SEQ ID NO: 29336 - DNA, 27 bp, Artificial Sequence
  Synthetic
cagaacaauacagatacuagggaccaa

SEQ ID NO: 29337 - DNA, 22 bp, Artificial Sequence
  Synthetic
ctcttccugaactgctccucag

SEQ ID NO: 29338 - DNA, 22 bp, Artificial Sequence
  Synthetic
gctgtcaggaugggactgttug

SEQ ID NO: 29339 - DNA, 23 bp, Artificial Sequence
  Synthetic
gutatgagcuaggagcaccaagg

SEQ ID NO: 29340 - DNA, 28 bp, Artificial Sequence
  Synthetic
ccattttgccugatcaagttacaauaaa

SEQ ID NO: 29341 - DNA, 22 bp, Artificial Sequence
  Synthetic
gguaggaggagaagaguccaua

SEQ ID NO: 29342 - DNA, 21 bp, Artificial Sequence
  Synthetic
ccaagcutacctgugaaggct

SEQ ID NO: 29343 - DNA, 26 bp, Artificial Sequence
  Synthetic
tcgttggaagccautttgactatcut

SEQ ID NO: 29344 - DNA, 18 bp, Artificial Sequence
  Synthetic
gacaggugctagggcugt

SEQ ID NO: 29345 - DNA, 17 bp, Artificial Sequence
  Synthetic
gccaccuggacggctua

SEQ ID NO: 29346 - DNA, 18 bp, Artificial Sequence
  Synthetic
cctcaggaggutgccuct

SEQ ID NO: 29347 - DNA, 24 bp, Artificial Sequence
  Synthetic
ctcaaaggagacutcggttaucct

SEQ ID NO: 29348 - DNA, 30 bp, Artificial Sequence
  Synthetic
cctcagaataguaaagaaccttgactucat

SEQ ID NO: 29349 - DNA, 22 bp, Artificial Sequence
  Synthetic
tccctccaggaugcttcuagac

SEQ ID NO: 29350 - DNA, 22 bp, Artificial Sequence
  Synthetic
cctcugaccaccagatgcttug

SEQ ID NO: 29351 - DNA, 21 bp, Artificial Sequence
  Synthetic
tcaagugcagtgttgugaggt

SEQ ID NO: 29352 - DNA, 21 bp, Artificial Sequence
  Synthetic
gcatuccagaacaagcagcuc

SEQ ID NO: 29353 - DNA, 24 bp, Artificial Sequence
  Synthetic
agaagtctcuttgcagctgugaaa

SEQ ID NO: 29354 - DNA, 22 bp, Artificial Sequence
  Synthetic
gcctacugagagcaagccatug

SEQ ID NO: 29355 - DNA, 21 bp, Artificial Sequence
  Synthetic
cctaacacuccggctctgugt

SEQ ID NO: 29356 - DNA, 30 bp, Artificial Sequence
  Synthetic
ttttctcagtgacaauaaaaagcacagtut

SEQ ID NO: 29357 - DNA, 23 bp, Artificial Sequence
  Synthetic
ggcugaaaagcacagtugaacag

SEQ ID NO: 29358 - DNA, 27 bp, Artificial Sequence
  Synthetic
agtagaaaauggcccctttgataaugt

SEQ ID NO: 29359 - DNA, 23 bp, Artificial Sequence
  Synthetic
gtcagagaaaccguctucaccat

SEQ ID NO: 29360 - DNA, 24 bp, Artificial Sequence
  Synthetic
tcctcccttucaagtgtcacttug

SEQ ID NO: 29361 - DNA, 24 bp, Artificial Sequence
  Synthetic
gtagtagcgaaagucagtcuggag

SEQ ID NO: 29362 - DNA, 25 bp, Artificial Sequence
  Synthetic
ctggtccacuttcttcttcttcuga

SEQ ID NO: 29363 - DNA, 21 bp, Artificial Sequence
  Synthetic
aggagagtuccaccccugaat

SEQ ID NO: 29364 - DNA, 26 bp, Artificial Sequence
  Synthetic
tgattctacagugctttctgttgcut

SEQ ID NO: 29365 - DNA, 23 bp, Artificial Sequence
  Synthetic
gcagcugagcctacauacacaac

SEQ ID NO: 29366 - DNA, 23 bp, Artificial Sequence
  Synthetic
gctgaaatgtuctacagccgcua

SEQ ID NO: 29367 - DNA, 21 bp, Artificial Sequence
  Synthetic
gccgucgattgtuaccaccag

SEQ ID NO: 29368 - DNA, 27 bp, Artificial Sequence
  Synthetic
aaaatctgaagaugtacccatgcucat

SEQ ID NO: 29369 - DNA, 28 bp, Artificial Sequence
  Synthetic
tgttttgagaatcauggaattctaggug

SEQ ID NO: 29370 - DNA, 26 bp, Artificial Sequence
  Synthetic
tccccttgtttugttcagatgtgaut

SEQ ID NO: 29371 - DNA, 24 bp, Artificial Sequence
  Synthetic
acagtgtguaaaacagacccucag

SEQ ID NO: 29372 - DNA, 23 bp, Artificial Sequence
  Synthetic
gaaatgaagcugaaggaggugga

SEQ ID NO: 29373 - DNA, 29 bp, Artificial Sequence
  Synthetic
ctcctgacatttcucctttttctctttut

SEQ ID NO: 29374 - DNA, 23 bp, Artificial Sequence
  Synthetic
ggcagaaggagagaugtttggug

SEQ ID NO: 29375 - DNA, 24 bp, Artificial Sequence
  Synthetic
ttgccaactguttcaagaactgug

SEQ ID NO: 29376 - DNA, 27 bp, Artificial Sequence
  Synthetic
aatttgcctctucagttgtaagcaaug

SEQ ID NO: 29377 - DNA, 24 bp, Artificial Sequence
  Synthetic
caagccaagaguaagtctcugagg

SEQ ID NO: 29378 - DNA, 29 bp, Artificial Sequence
  Synthetic
aaatgtgaattttcutgcagacttcagut

SEQ ID NO: 29379 - DNA, 28 bp, Artificial Sequence
  Synthetic
gtgtcacaactugtttccttacattuca

SEQ ID NO: 29380 - DNA, 24 bp, Artificial Sequence
  Synthetic
acccaactacutctcagagtucct

SEQ ID NO: 29381 - DNA, 30 bp, Artificial Sequence
  Synthetic
agttttacaagccauccttactttauccaa

SEQ ID NO: 29382 - DNA, 22 bp, Artificial Sequence
  Synthetic
aaggcccctuctgtgtatccua

SEQ ID NO: 29383 - DNA, 31 bp, Artificial Sequence
  Synthetic
gctctttctctgcuagcatcattaatttuac

SEQ ID NO: 29384 - DNA, 23 bp, Artificial Sequence
  Synthetic
gggtcaatugcatagacagucaa

SEQ ID NO: 29385 - DNA, 28 bp, Artificial Sequence
  Synthetic
ggactgtcatguttgtactttgttugat

SEQ ID NO: 29386 - DNA, 25 bp, Artificial Sequence
  Synthetic
ctgaaaacacugacctatggcuagt

SEQ ID NO: 29387 - DNA, 31 bp, Artificial Sequence
  Synthetic
gcttatcaaaacugctatgctcttccauaat

SEQ ID NO: 29388 - DNA, 23 bp, Artificial Sequence
  Synthetic
tgcaaacuacaggcttacagcut

SEQ ID NO: 29389 - DNA, 22 bp, Artificial Sequence
  Synthetic
tgcatcgtutcttgtccuccag

SEQ ID NO: 29390 - DNA, 25 bp, Artificial Sequence
  Synthetic
gactcgaaguacatagcttgtccug

SEQ ID NO: 29391 - DNA, 27 bp, Artificial Sequence
  Synthetic
agtgtttttgaaaucacagtgccttut

SEQ ID NO: 29392 - DNA, 28 bp, Artificial Sequence
  Synthetic
acatttcgugtatttcaaaaucggacag

SEQ ID NO: 29393 - DNA, 26 bp, Artificial Sequence
  Synthetic
tgtgctgtuacgctgttcttactuat

SEQ ID NO: 29394 - DNA, 30 bp, Artificial Sequence
  Synthetic
attgactcgtgttautactcttccagaauc

SEQ ID NO: 29395 - DNA, 28 bp, Artificial Sequence
  Synthetic
tcattgcactgugttttaacttgguaac

SEQ ID NO: 29396 - DNA, 22 bp, Artificial Sequence
  Synthetic
gcaggcaaccagaagucatcuc

SEQ ID NO: 29397 - DNA, 31 bp, Artificial Sequence
  Synthetic
ggagaactatcgcutttaaggagtttagaut

SEQ ID NO: 29398 - DNA, 31 bp, Artificial Sequence
  Synthetic
cttggtatgttgtautgttacttgctaatut

SEQ ID NO: 29399 - DNA, 26 bp, Artificial Sequence
  Synthetic
tcaccaattcaacauacactgtccut

SEQ ID NO: 29400 - DNA, 22 bp, Artificial Sequence
  Synthetic
ccauctgtugccacaacaacaa

SEQ ID NO: 29401 - DNA, 27 bp, Artificial Sequence
  Synthetic
catttacaguagcccgtcaaaactuac

SEQ ID NO: 29402 - DNA, 24 bp, Artificial Sequence
  Synthetic
ggcttcttctuccaccacagauaa

SEQ ID NO: 29403 - DNA, 31 bp, Artificial Sequence
  Synthetic
agacaaatgccagaaugactacttaaaugaa

SEQ ID NO: 29404 - DNA, 22 bp, Artificial Sequence
  Synthetic
acaaacagcugaaagcctcuga

SEQ ID NO: 29405 - DNA, 23 bp, Artificial Sequence
  Synthetic
tgagtgggcgccauatcaatuac

SEQ ID NO: 29406 - DNA, 24 bp, Artificial Sequence
  Synthetic
gataaaagaatacutgccgcgcut

SEQ ID NO: 29407 - DNA, 29 bp, Artificial Sequence
  Synthetic
gctcagggagacutcatcatcaauaaaac

SEQ ID NO: 29408 - DNA, 29 bp, Artificial Sequence
  Synthetic
ttcttcatgagcauatcgtataaugcaca

SEQ ID NO: 29409 - DNA, 28 bp, Artificial Sequence
  Synthetic
cgtcaatatucaagtgatggaugcaaat

SEQ ID NO: 29410 - DNA, 30 bp, Artificial Sequence
  Synthetic
tttcagtttuaaccagacatctcttucagt

SEQ ID NO: 29411 - DNA, 23 bp, Artificial Sequence
  Synthetic
aaagacccagagcutcaccttut

SEQ ID NO: 29412 - DNA, 28 bp, Artificial Sequence
  Synthetic
ctcttctctagcutatgtagccatauct

SEQ ID NO: 29413 - DNA, 28 bp, Artificial Sequence
  Synthetic
agttatcaaggcuatatcctggaatcug

SEQ ID NO: 29414 - DNA, 26 bp, Artificial Sequence
  Synthetic
cataaaactgccuacagtagcgtcua

SEQ ID NO: 29415 - DNA, 23 bp, Artificial Sequence
  Synthetic
ccauatgcatccuaggacagcag

SEQ ID NO: 29416 - DNA, 29 bp, Artificial Sequence
  Synthetic
tccttggaatugagagaatttgttacugt

SEQ ID NO: 29417 - DNA, 28 bp, Artificial Sequence
  Synthetic
gcggctgaaugaaactctcttaatttut

SEQ ID NO: 29418 - DNA, 20 bp, Artificial Sequence
  Synthetic
cggcaaucacgagtgttugg

SEQ ID NO: 29419 - DNA, 26 bp, Artificial Sequence
  Synthetic
ctcctggctatugtgcctaatttcua

SEQ ID NO: 29420 - DNA, 29 bp, Artificial Sequence
  Synthetic
tcttatcttcatagutgagcctcttccut

SEQ ID NO: 29421 - DNA, 28 bp, Artificial Sequence
  Synthetic
gcatgucatctctaactuccaagaggat

SEQ ID NO: 29422 - DNA, 31 bp, Artificial Sequence
  Synthetic
gaaaggauagagagagaguaaatagaaacug

SEQ ID NO: 29423 - DNA, 25 bp, Artificial Sequence
  Synthetic
accgatgaacauacactccattgug

SEQ ID NO: 29424 - DNA, 29 bp, Artificial Sequence
  Synthetic
tcactaacatctcuatccagaactctucc

SEQ ID NO: 29425 - DNA, 25 bp, Artificial Sequence
  Synthetic
caggtacaautctgguggacaacat

SEQ ID NO: 29426 - DNA, 21 bp, Artificial Sequence
  Synthetic
ctggctcgcuctaaaggucaa

SEQ ID NO: 29427 - DNA, 31 bp, Artificial Sequence
  Synthetic
tgtgacaattgtguttacctataacagatua

SEQ ID NO: 29428 - DNA, 23 bp, Artificial Sequence
  Synthetic
cctcacccugtgtcaccttauag

SEQ ID NO: 29429 - DNA, 23 bp, Artificial Sequence
  Synthetic
ccttcacttgugggaagggatug

SEQ ID NO: 29430 - DNA, 18 bp, Artificial Sequence
  Synthetic
accucagcaccgccuaac

SEQ ID NO: 29431 - DNA, 20 bp, Artificial Sequence
  Synthetic
ctctggccucttccacccua

SEQ ID NO: 29432 - DNA, 21 bp, Artificial Sequence
  Synthetic
ggctcacccutgtacttgcut

SEQ ID NO: 29433 - DNA, 21 bp, Artificial Sequence
  Synthetic
cggatcacugtgacgauaccg

SEQ ID NO: 29434 - DNA, 22 bp, Artificial Sequence
  Synthetic
cactcaaccuaaggctgtgugt

SEQ ID NO: 29435 - DNA, 22 bp, Artificial Sequence
  Synthetic
ccctcugagaagggacttcuga

SEQ ID NO: 29436 - DNA, 22 bp, Artificial Sequence
  Synthetic
ctggtcacaccugaatgctuct

SEQ ID NO: 29437 - DNA, 20 bp, Artificial Sequence
  Synthetic
gaggttggcauccgaguagg

SEQ ID NO: 29438 - DNA, 23 bp, Artificial Sequence
  Synthetic
gagttcaacagcuccgaguacag

SEQ ID NO: 29439 - DNA, 30 bp, Artificial Sequence
  Synthetic
gtttctattttauagctgaggaccugaaca

SEQ ID NO: 29440 - DNA, 23 bp, Artificial Sequence
  Synthetic
gcaaaggcauggagaggactuac

SEQ ID NO: 29441 - DNA, 23 bp, Artificial Sequence
  Synthetic
ggccggtugtcattttcatugat

SEQ ID NO: 29442 - DNA, 22 bp, Artificial Sequence
  Synthetic
acccagagggautttguccaag

SEQ ID NO: 29443 - DNA, 22 bp, Artificial Sequence
  Synthetic
ggcagaaaaccagugtccucag

SEQ ID NO: 29444 - DNA, 25 bp, Artificial Sequence
  Synthetic
cccaucaacaagcctgtttuaaacc

SEQ ID NO: 29445 - DNA, 20 bp, Artificial Sequence
  Synthetic
gcacgttgucgttgacaucc

SEQ ID NO: 29446 - DNA, 20 bp, Artificial Sequence
  Synthetic
gtgaacagggccaguctucc

SEQ ID NO: 29447 - DNA, 20 bp, Artificial Sequence
  Synthetic
gagttcugccccacaccuac

SEQ ID NO: 29448 - DNA, 20 bp, Artificial Sequence
  Synthetic
ctcctgcaaccugtctgugt

SEQ ID NO: 29449 - DNA, 21 bp, Artificial Sequence
  Synthetic
cccacaauttgtgugcagagc

SEQ ID NO: 29450 - DNA, 20 bp, Artificial Sequence
  Synthetic
acccactuctctctcuggca

SEQ ID NO: 29451 - DNA, 19 bp, Artificial Sequence
  Synthetic
ggguccagagguacaagca

SEQ ID NO: 29452 - DNA, 19 bp, Artificial Sequence
  Synthetic
ccuccccaggaccaacguc

SEQ ID NO: 29453 - DNA, 22 bp, Artificial Sequence
  Synthetic
ctgtagaacutgttggguggct

SEQ ID NO: 29454 - DNA, 22 bp, Artificial Sequence
  Synthetic
tctctugcacccatctuaccct

SEQ ID NO: 29455 - DNA, 28 bp, Artificial Sequence
  Synthetic
tggtaggaaugagatgatagagacucac

SEQ ID NO: 29456 - DNA, 21 bp, Artificial Sequence
  Synthetic
acutcctcaucaacagcagca

SEQ ID NO: 29457 - DNA, 19 bp, Artificial Sequence
  Synthetic
gacatgggcucccctcuac

SEQ ID NO: 29458 - DNA, 23 bp, Artificial Sequence
  Synthetic
gtgtacaaugtgtctgtguccga

SEQ ID NO: 29459 - DNA, 21 bp, Artificial Sequence
  Synthetic
acctagtcuggctgtccauct

SEQ ID NO: 29460 - DNA, 21 bp, Artificial Sequence
  Synthetic
ggagtgugcaaagucacagga

SEQ ID NO: 29461 - DNA, 24 bp, Artificial Sequence
  Synthetic
tcatagctgcuctgcagaaagaug

SEQ ID NO: 29462 - DNA, 28 bp, Artificial Sequence
  Synthetic
ggaaggaaaggaacuctaaaaacctcut

SEQ ID NO: 29463 - DNA, 21 bp, Artificial Sequence
  Synthetic
cttuggcagccuagagaagct

SEQ ID NO: 29464 - DNA, 17 bp, Artificial Sequence
  Synthetic
ggctucccagccuccac

SEQ ID NO: 29465 - DNA, 18 bp, Artificial Sequence
  Synthetic
aatgggauccccggctuc

SEQ ID NO: 29466 - DNA, 25 bp, Artificial Sequence
  Synthetic
gaautacctggacuacgagaccaag

SEQ ID NO: 29467 - DNA, 23 bp, Artificial Sequence
  Synthetic
gttgaggttgucgatggaguagg

SEQ ID NO: 29468 - DNA, 21 bp, Artificial Sequence
  Synthetic
cagggtuaacaagggugcgat

SEQ ID NO: 29469 - DNA, 23 bp, Artificial Sequence
  Synthetic
aggacatgggutaggaagtguca

SEQ ID NO: 29470 - DNA, 19 bp, Artificial Sequence
  Synthetic
cttgaccuggccacctcuc

SEQ ID NO: 29471 - DNA, 20 bp, Artificial Sequence
  Synthetic
ccagtgguctctcaguccaa

SEQ ID NO: 29472 - DNA, 21 bp, Artificial Sequence
  Synthetic
cagaatgacugctctccugct

SEQ ID NO: 29473 - DNA, 21 bp, Artificial Sequence
  Synthetic
caccagguggtagaagctcug

SEQ ID NO: 29474 - DNA, 22 bp, Artificial Sequence
  Synthetic
aaggacgugacccactctttuc

SEQ ID NO: 29475 - DNA, 20 bp, Artificial Sequence
  Synthetic
aggtgtugacgatgtugcct

SEQ ID NO: 29476 - DNA, 22 bp, Artificial Sequence
  Synthetic
ctaccaccccuagatccaucct

SEQ ID NO: 29477 - DNA, 21 bp, Artificial Sequence
  Synthetic
gctttctgggucccatcctuc

SEQ ID NO: 29478 - DNA, 19 bp, Artificial Sequence
  Synthetic
ctacctucccccgggacua

SEQ ID NO: 29479 - DNA, 22 bp, Artificial Sequence
  Synthetic
tcccttcttaucctccccugag

SEQ ID NO: 29480 - DNA, 23 bp, Artificial Sequence
  Synthetic
gagtttgtgauctctcctgugga

SEQ ID NO: 29481 - DNA, 22 bp, Artificial Sequence
  Synthetic
cctctctuggcacaaggguaac

SEQ ID NO: 29482 - DNA, 21 bp, Artificial Sequence
  Synthetic
gaaccugcccatgaacaucac

SEQ ID NO: 29483 - DNA, 24 bp, Artificial Sequence
  Synthetic
gtccuctttttcacuggaaaccct

SEQ ID NO: 29484 - DNA, 18 bp, Artificial Sequence
  Synthetic
gccuacaacgugccccat

SEQ ID NO: 29485 - DNA, 22 bp, Artificial Sequence
  Synthetic
ttaggcauaagggaggtccuca

SEQ ID NO: 29486 - DNA, 22 bp, Artificial Sequence
  Synthetic
gcacccctuttctgtgtgttuc

SEQ ID NO: 29487 - DNA, 19 bp, Artificial Sequence
  Synthetic
ctaaaggugggccggtugt

SEQ ID NO: 29488 - DNA, 23 bp, Artificial Sequence
  Synthetic
agauctttcuggaagaggccact

SEQ ID NO: 29489 - DNA, 21 bp, Artificial Sequence
  Synthetic
tgtaggacucctgctcctcuc

SEQ ID NO: 29490 - DNA, 20 bp, Artificial Sequence
  Synthetic
ctgagccaggcacugtcaut

SEQ ID NO: 29491 - DNA, 18 bp, Artificial Sequence
  Synthetic
gggugcaggcccttguac

SEQ ID NO: 29492 - DNA, 21 bp, Artificial Sequence
  Synthetic
gcttggcugaggcuaaggaag

SEQ ID NO: 29493 - DNA, 19 bp, Artificial Sequence
  Synthetic
cctccaggauccgcuccat

SEQ ID NO: 29494 - DNA, 19 bp, Artificial Sequence
  Synthetic
agtgggagccuctgtguct

SEQ ID NO: 29495 - DNA, 17 bp, Artificial Sequence
  Synthetic
cuggacccagcctgugg

SEQ ID NO: 29496 - DNA, 28 bp, Artificial Sequence
  Synthetic
cttttgaatgautgaaggaccuaaagcc

SEQ ID NO: 29497 - DNA, 21 bp, Artificial Sequence
  Synthetic
ctttgctugttgccuccacaa

SEQ ID NO: 29498 - DNA, 24 bp, Artificial Sequence
  Synthetic
ggaaggatgtcucaaccagagcua

SEQ ID NO: 29499 - DNA, 22 bp, Artificial Sequence
  Synthetic
tgtcattgacgucgatgaccuc

SEQ ID NO: 29500 - DNA, 23 bp, Artificial Sequence
  Synthetic
ctcaggaccuaggagctgagaut

SEQ ID NO: 29501 - DNA, 20 bp, Artificial Sequence
  Synthetic
gctgagcaguctggaugagg

SEQ ID NO: 29502 - DNA, 23 bp, Artificial Sequence
  Synthetic
gtcttttccuctgactgtgcuct

SEQ ID NO: 29503 - DNA, 27 bp, Artificial Sequence
  Synthetic
cagtgtatauaggagagtgtgtgctug

SEQ ID NO: 29504 - DNA, 20 bp, Artificial Sequence
  Synthetic
gggcuagagaugacccacat

SEQ ID NO: 29505 - DNA, 19 bp, Artificial Sequence
  Synthetic
aggtguccagctgcgatug

SEQ ID NO: 29506 - DNA, 21 bp, Artificial Sequence
  Synthetic
cacttacaccaccugcctcut

SEQ ID NO: 29507 - DNA, 20 bp, Artificial Sequence
  Synthetic
tggcuagaggccactcaugt

SEQ ID NO: 29508 - DNA, 22 bp, Artificial Sequence
  Synthetic
cauctacatccugagggacgac

SEQ ID NO: 29509 - DNA, 20 bp, Artificial Sequence
  Synthetic
ctttgcacaaugccctguct

SEQ ID NO: 29510 - DNA, 22 bp, Artificial Sequence
  Synthetic
gggtugttgaacttuggaggct

SEQ ID NO: 29511 - DNA, 21 bp, Artificial Sequence
  Synthetic
cacguccaggacgttgtagut

SEQ ID NO: 29512 - DNA, 18 bp, Artificial Sequence
  Synthetic
ggccugagacgtcagcut

SEQ ID NO: 29513 - DNA, 19 bp, Artificial Sequence
  Synthetic
gcccagugaagggccugag

SEQ ID NO: 29514 - DNA, 20 bp, Artificial Sequence
  Synthetic
ctggaagggcaccugtcuac

SEQ ID NO: 29515 - DNA, 19 bp, Artificial Sequence
  Synthetic
gcccctugtgatgccugac

SEQ ID NO: 29516 - DNA, 21 bp, Artificial Sequence
  Synthetic
tcagatgtccgugtaccccut

SEQ ID NO: 29517 - DNA, 20 bp, Artificial Sequence
  Synthetic
ctttttgcaccauccgcugt

SEQ ID NO: 29518 - DNA, 17 bp, Artificial Sequence
  Synthetic
ggcauggcccugagcat

SEQ ID NO: 29519 - DNA, 19 bp, Artificial Sequence
  Synthetic
ggcccttcuggtcttccuc

SEQ ID NO: 29520 - DNA, 21 bp, Artificial Sequence
  Synthetic
ccctggagaucacagagcugt

SEQ ID NO: 29521 - DNA, 24 bp, Artificial Sequence
  Synthetic
tgaaggtagaggucagatgcugaa

SEQ ID NO: 29522 - DNA, 22 bp, Artificial Sequence
  Synthetic
tggctacaaautggacugcaac

SEQ ID NO: 29523 - DNA, 25 bp, Artificial Sequence
  Synthetic
caaagattgatgugcccttcctuac

SEQ ID NO: 29524 - DNA, 24 bp, Artificial Sequence
  Synthetic
cgacagtgccuaagacagaaatuc

SEQ ID NO: 29525 - DNA, 28 bp, Artificial Sequence
  Synthetic
gctgatcaacaaaugaaaagacaccuac

SEQ ID NO: 29526 - DNA, 27 bp, Artificial Sequence
  Synthetic
tgcacttaaaugcagattatttuggag

SEQ ID NO: 29527 - DNA, 27 bp, Artificial Sequence
  Synthetic
caccaaggaguctagtgatctacauga

SEQ ID NO: 29528 - DNA, 24 bp, Artificial Sequence
  Synthetic
gactattctcuccttcccgcttut

SEQ ID NO: 29529 - DNA, 23 bp, Artificial Sequence
  Synthetic
caccugtaaatactugccacagc

SEQ ID NO: 29530 - DNA, 19 bp, Artificial Sequence
  Synthetic
ccctguggacggtgactug

SEQ ID NO: 29531 - DNA, 22 bp, Artificial Sequence
  Synthetic
caucctcagaaaugcagcaagg

SEQ ID NO: 29532 - DNA, 25 bp, Artificial Sequence
  Synthetic
gtcttucaggagtcguaagaaagca

SEQ ID NO: 29533 - DNA, 26 bp, Artificial Sequence
  Synthetic
acctugaacacgagaaatgaugaaca

SEQ ID NO: 29534 - DNA, 27 bp, Artificial Sequence
  Synthetic
tgaaaattgucacgaaacaatgagcut

SEQ ID NO: 29535 - DNA, 20 bp, Artificial Sequence
  Synthetic
cagtgcccugagcaauagca

SEQ ID NO: 29536 - DNA, 26 bp, Artificial Sequence
  Synthetic
ctgtacctgtucacattcagacucaa

SEQ ID NO: 29537 - DNA, 22 bp, Artificial Sequence
  Synthetic
ctcccttcuttgtctcaugggt

SEQ ID NO: 29538 - DNA, 25 bp, Artificial Sequence
  Synthetic
gctacctagaautgaacacgucaga

SEQ ID NO: 29539 - DNA, 29 bp, Artificial Sequence
  Synthetic
cagcggtugacatctaatattugacaaaa

SEQ ID NO: 29540 - DNA, 21 bp, Artificial Sequence
  Synthetic
gcagacgucgttacaatcgug

SEQ ID NO: 29541 - DNA, 24 bp, Artificial Sequence
  Synthetic
ccattattgtuccctgatcugcaa

SEQ ID NO: 29542 - DNA, 21 bp, Artificial Sequence
  Synthetic
attcagatgguccggcaagut

SEQ ID NO: 29543 - DNA, 28 bp, Artificial Sequence
  Synthetic
cctcactagccutgtcaaaaatgaaaut

SEQ ID NO: 29544 - DNA, 22 bp, Artificial Sequence
  Synthetic
aaatgugctacacuggacacca

SEQ ID NO: 29545 - DNA, 21 bp, Artificial Sequence
  Synthetic
ggcaaagaaccacucaccugt

SEQ ID NO: 29546 - DNA, 27 bp, Artificial Sequence
  Synthetic
tggtatatcttguccagcaaccattut

SEQ ID NO: 29547 - DNA, 25 bp, Artificial Sequence
  Synthetic
ggcatttacgaaucacttctucagg

SEQ ID NO: 29548 - DNA, 29 bp, Artificial Sequence
  Synthetic
caagatggttgaaucccaagatguaaaaa

SEQ ID NO: 29549 - DNA, 28 bp, Artificial Sequence
  Synthetic
agttcccagcutgtatcctaauaagagt

SEQ ID NO: 29550 - DNA, 20 bp, Artificial Sequence
  Synthetic
gccaagaagugccccttcuc

SEQ ID NO: 29551 - DNA, 17 bp, Artificial Sequence
  Synthetic
cggcgcgugctguagat

SEQ ID NO: 29552 - DNA, 21 bp, Artificial Sequence
  Synthetic
tctggagugtaggauggcact

SEQ ID NO: 29553 - DNA, 22 bp, Artificial Sequence
  Synthetic
ccttcctcugcctatctgucca

SEQ ID NO: 29554 - DNA, 20 bp, Artificial Sequence
  Synthetic
cagggtcugaagccacucaa

SEQ ID NO: 29555 - DNA, 18 bp, Artificial Sequence
  Synthetic
gaaaccugggcgugacct

SEQ ID NO: 29556 - DNA, 19 bp, Artificial Sequence
  Synthetic
cucagcccuacaccatcuc

SEQ ID NO: 29557 - DNA, 19 bp, Artificial Sequence
  Synthetic
gtcctagtgugggctgcuc

SEQ ID NO: 29558 - DNA, 17 bp, Artificial Sequence
  Synthetic
ccgtggcugaccacugt

SEQ ID NO: 29559 - DNA, 18 bp, Artificial Sequence
  Synthetic
tggguctgcucacaggga

SEQ ID NO: 29560 - DNA, 22 bp, Artificial Sequence
  Synthetic
gggagctguagcttccauaagg

SEQ ID NO: 29561 - DNA, 18 bp, Artificial Sequence
  Synthetic
tggcaggugggctacuca

SEQ ID NO: 29562 - DNA, 22 bp, Artificial Sequence
  Synthetic
agatgctcacagucccccauat

SEQ ID NO: 29563 - DNA, 22 bp, Artificial Sequence
  Synthetic
aagggagaaacucactggctug

SEQ ID NO: 29564 - DNA, 19 bp, Artificial Sequence
  Synthetic
caggguggccacucacaat

SEQ ID NO: 29565 - DNA, 21 bp, Artificial Sequence
  Synthetic
cuccactaugggcaggagaga

SEQ ID NO: 29566 - DNA, 21 bp, Artificial Sequence
  Synthetic
ccaggtgugaactggtgtcug

SEQ ID NO: 29567 - DNA, 22 bp, Artificial Sequence
  Synthetic
caatggcccautctgacaucat

SEQ ID NO: 29568 - DNA, 18 bp, Artificial Sequence
  Synthetic
tcccutctcuggccccaa

SEQ ID NO: 29569 - DNA, 18 bp, Artificial Sequence
  Synthetic
gcagggcugggtgatgug

SEQ ID NO: 29570 - DNA, 17 bp, Artificial Sequence
  Synthetic
cugaccgugcccaggag

SEQ ID NO: 29571 - DNA, 17 bp, Artificial Sequence
  Synthetic
tgcugagcccccaagug

SEQ ID NO: 29572 - DNA, 31 bp, Artificial Sequence
  Synthetic
gaaccuttaatagaaatuggacagcaagaaa

SEQ ID NO: 29573 - DNA, 21 bp, Artificial Sequence
  Synthetic
agtccaagcuaggccctttug

SEQ ID NO: 29574 - DNA, 21 bp, Artificial Sequence
  Synthetic
cuaaaggcacugagcacttuc

SEQ ID NO: 29575 - DNA, 22 bp, Artificial Sequence
  Synthetic
ggcactgacuctctctgccuat

SEQ ID NO: 29576 - DNA, 21 bp, Artificial Sequence
  Synthetic
ccaccagacutagggcctcua

SEQ ID NO: 29577 - DNA, 23 bp, Artificial Sequence
  Synthetic
agttcgauaagccagagaagcug

SEQ ID NO: 29578 - DNA, 18 bp, Artificial Sequence
  Synthetic
tguccctcugcaccccat

SEQ ID NO: 29579 - DNA, 17 bp, Artificial Sequence
  Synthetic
gctgtugcccccactug

SEQ ID NO: 29580 - DNA, 23 bp, Artificial Sequence
  Synthetic
ccatcctuacagggtcctugagt

SEQ ID NO: 29581 - DNA, 19 bp, Artificial Sequence
  Synthetic
gggctttcugtgccactuc

SEQ ID NO: 29582 - DNA, 20 bp, Artificial Sequence
  Synthetic
tcatctgguggctgtgggua

SEQ ID NO: 29583 - DNA, 20 bp, Artificial Sequence
  Synthetic
cggtgccugcttctctctut

SEQ ID NO: 29584 - DNA, 22 bp, Artificial Sequence
  Synthetic
cacactccuccttggactctuc

SEQ ID NO: 29585 - DNA, 22 bp, Artificial Sequence
  Synthetic
tggtggcugaggacagaacuaa

SEQ ID NO: 29586 - DNA, 21 bp, Artificial Sequence
  Synthetic
cctaucagaggccaggguaga

SEQ ID NO: 29587 - DNA, 23 bp, Artificial Sequence
  Synthetic
gagctatguggaccaacactgut

SEQ ID NO: 29588 - DNA, 24 bp, Artificial Sequence
  Synthetic
gtacaccaaacugcacatugcaaa

SEQ ID NO: 29589 - DNA, 23 bp, Artificial Sequence
  Synthetic
cctatgtcacaccugtgttccuc

SEQ ID NO: 29590 - DNA, 20 bp, Artificial Sequence
  Synthetic
ggtccgaggugtctcuggaa

SEQ ID NO: 29591 - DNA, 25 bp, Artificial Sequence
  Synthetic
caaatgaguaactcttcctcuggct

SEQ ID NO: 29592 - DNA, 21 bp, Artificial Sequence
  Synthetic
cagtctctuggccacctucag

SEQ ID NO: 29593 - DNA, 23 bp, Artificial Sequence
  Synthetic
ccaaatcacuctctgcctgugaa

SEQ ID NO: 29594 - DNA, 21 bp, Artificial Sequence
  Synthetic
cugugagaagaucagcaacga

SEQ ID NO: 29595 - DNA, 21 bp, Artificial Sequence
  Synthetic
cugattcacccucagagggat

SEQ ID NO: 29596 - DNA, 23 bp, Artificial Sequence
  Synthetic
ttctagcagaaccuttgcaucca

SEQ ID NO: 29597 - DNA, 21 bp, Artificial Sequence
  Synthetic
cgtttgtugctgccttuccag

SEQ ID NO: 29598 - DNA, 20 bp, Artificial Sequence
  Synthetic
cccaagggaacutgcacuca

SEQ ID NO: 29599 - DNA, 23 bp, Artificial Sequence
  Synthetic
gtgttccucctctttggugacag

SEQ ID NO: 29600 - DNA, 20 bp, Artificial Sequence
  Synthetic
agacagtucctccccuccac

SEQ ID NO: 29601 - DNA, 23 bp, Artificial Sequence
  Synthetic
tcugagaacaagccccugagaat

SEQ ID NO: 29602 - DNA, 21 bp, Artificial Sequence
  Synthetic
cctaccccutccctttgtuga

SEQ ID NO: 29603 - DNA, 22 bp, Artificial Sequence
  Synthetic
tgttggtcugtcccatttgugt

SEQ ID NO: 29604 - DNA, 25 bp, Artificial Sequence
  Synthetic
ctctatgttatucagtgggacaugg

SEQ ID NO: 29605 - DNA, 19 bp, Artificial Sequence
  Synthetic
cggugggacacgcctaaug

SEQ ID NO: 29606 - DNA, 22 bp, Artificial Sequence
  Synthetic
gutttgggcctuagaggaccat

SEQ ID NO: 29607 - DNA, 18 bp, Artificial Sequence
  Synthetic
cctctccccucccctcug

SEQ ID NO: 29608 - DNA, 21 bp, Artificial Sequence
  Synthetic
ccuacccccaagagauggaga

SEQ ID NO: 29609 - DNA, 21 bp, Artificial Sequence
  Synthetic
gtcacgcucctcccacuaaac

SEQ ID NO: 29610 - DNA, 21 bp, Artificial Sequence
  Synthetic
gaagatgttcucccaggcgua

SEQ ID NO: 29611 - DNA, 20 bp, Artificial Sequence
  Synthetic
cagaagccuctcccctcuga

SEQ ID NO: 29612 - DNA, 22 bp, Artificial Sequence
  Synthetic
cttccccucagcccatctagua

SEQ ID NO: 29613 - DNA, 27 bp, Artificial Sequence
  Synthetic
gaatgtgaaacacuctgctctcattuc

SEQ ID NO: 29614 - DNA, 24 bp, Artificial Sequence
  Synthetic
caagtacctguattgctcctcuca

SEQ ID NO: 29615 - DNA, 23 bp, Artificial Sequence
  Synthetic
attttgcuggcaatgacagucac

SEQ ID NO: 29616 - DNA, 21 bp, Artificial Sequence
  Synthetic
gaagacgucgttctcctuccc

SEQ ID NO: 29617 - DNA, 21 bp, Artificial Sequence
  Synthetic
gaattagcccucaggcacuct

SEQ ID NO: 29618 - DNA, 20 bp, Artificial Sequence
  Synthetic
catccaccaguaggtgccut

SEQ ID NO: 29619 - DNA, 22 bp, Artificial Sequence
  Synthetic
ggtagggaguggtgagaagtug

SEQ ID NO: 29620 - DNA, 20 bp, Artificial Sequence
  Synthetic
gauggcgtgguccaagaact

SEQ ID NO: 29621 - DNA, 21 bp, Artificial Sequence
  Synthetic
cacatgaugcacacacgtcuc

SEQ ID NO: 29622 - DNA, 23 bp, Artificial Sequence
  Synthetic
cactttccugagtccucagacag

SEQ ID NO: 29623 - DNA, 20 bp, Artificial Sequence
  Synthetic
accctcutcctccuccaagt

SEQ ID NO: 29624 - DNA, 24 bp, Artificial Sequence
  Synthetic
ggtgatgaagaguaggaagacgug

SEQ ID NO: 29625 - DNA, 17 bp, Artificial Sequence
  Synthetic
atgccccuggccttcug

SEQ ID NO: 29626 - DNA, 20 bp, Artificial Sequence
  Synthetic
ccgaggcuttgtgtucacga

SEQ ID NO: 29627 - DNA, 20 bp, Artificial Sequence
  Synthetic
agagtggguactccccctug

SEQ ID NO: 29628 - DNA, 22 bp, Artificial Sequence
  Synthetic
ctggagaaagguggctgagaut

SEQ ID NO: 29629 - DNA, 21 bp, Artificial Sequence
  Synthetic
tgcaccauccaactgagtgug

SEQ ID NO: 29630 - DNA, 21 bp, Artificial Sequence
  Synthetic
cactccaaguggtcacctgut

SEQ ID NO: 29631 - DNA, 24 bp, Artificial Sequence
  Synthetic
tccctaaggccugttttcctcuaa

SEQ ID NO: 29632 - DNA, 21 bp, Artificial Sequence
  Synthetic
gcccagaaugcaccactauca

SEQ ID NO: 29633 - DNA, 22 bp, Artificial Sequence
  Synthetic
ttggatuccgaccattcauccc

SEQ ID NO: 29634 - DNA, 23 bp, Artificial Sequence
  Synthetic
tggtcugctcctcuagagacaac

SEQ ID NO: 29635 - DNA, 26 bp, Artificial Sequence
  Synthetic
tgggtccctgutaaactaactcctua

SEQ ID NO: 29636 - DNA, 20 bp, Artificial Sequence
  Synthetic
cagtccuccactggatugcc

SEQ ID NO: 29637 - DNA, 22 bp, Artificial Sequence
  Synthetic
cttcccttauctggccatguga

SEQ ID NO: 29638 - DNA, 27 bp, Artificial Sequence
  Synthetic
ggatagtagaacaugtccaaagggaug

SEQ ID NO: 29639 - DNA, 28 bp, Artificial Sequence
  Synthetic
ctctaagcagagugacaatuacagaact

SEQ ID NO: 29640 - DNA, 20 bp, Artificial Sequence
  Synthetic
attgtgucccagggttgcut

SEQ ID NO: 29641 - DNA, 30 bp, Artificial Sequence
  Synthetic
tgtcatataaacaaugccacatctacucag

SEQ ID NO: 29642 - DNA, 19 bp, Artificial Sequence
  Synthetic
ctgaagcugggtgtcugca

SEQ ID NO: 29643 - DNA, 23 bp, Artificial Sequence
  Synthetic
ttcaccagctucctcctctttuc

SEQ ID NO: 29644 - DNA, 22 bp, Artificial Sequence
  Synthetic
gcacacugatgttcaugcacag

SEQ ID NO: 29645 - DNA, 29 bp, Artificial Sequence
  Synthetic
ccaacttttcuccaaatcaagaatucaca

SEQ ID NO: 29646 - DNA, 21 bp, Artificial Sequence
  Synthetic
ggagtgtguggcagagaucaa

SEQ ID NO: 29647 - DNA, 20 bp, Artificial Sequence
  Synthetic
ctggactgcugtggtctguc

SEQ ID NO: 29648 - DNA, 21 bp, Artificial Sequence
  Synthetic
gggaucacagtcugacccaat

SEQ ID NO: 29649 - DNA, 22 bp, Artificial Sequence
  Synthetic
ctgaaucccgagcacacattuc

SEQ ID NO: 29650 - DNA, 21 bp, Artificial Sequence
  Synthetic
gggugcatctcuagagcaagc

SEQ ID NO: 29651 - DNA, 23 bp, Artificial Sequence
  Synthetic
gttcctcaaacguctctcgcuaa

SEQ ID NO: 29652 - DNA, 19 bp, Artificial Sequence
  Synthetic
ctcccccggacuctgttug

SEQ ID NO: 29653 - DNA, 20 bp, Artificial Sequence
  Synthetic
catcaccgaccuctcctgug

SEQ ID NO: 29654 - DNA, 23 bp, Artificial Sequence
  Synthetic
gagcucctctgtcucagaacaac

SEQ ID NO: 29655 - DNA, 27 bp, Artificial Sequence
  Synthetic
gagctgtgattcugctattggatttuc

SEQ ID NO: 29656 - DNA, 21 bp, Artificial Sequence
  Synthetic
ggaattcucgggccactttuc

SEQ ID NO: 29657 - DNA, 19 bp, Artificial Sequence
  Synthetic
acgacucagcacctucgac

SEQ ID NO: 29658 - DNA, 28 bp, Artificial Sequence
  Synthetic
gctgcaaatauagggaagtaagtucaca

SEQ ID NO: 29659 - DNA, 27 bp, Artificial Sequence
  Synthetic
gcaatttcttttuccttgtggtcugat

SEQ ID NO: 29660 - DNA, 27 bp, Artificial Sequence
  Synthetic
ccagcuaacctggatauggacaaaaat

SEQ ID NO: 29661 - DNA, 26 bp, Artificial Sequence
  Synthetic
gtgtgtaggaaccuagttgtgtuagt

SEQ ID NO: 29662 - DNA, 18 bp, Artificial Sequence
  Synthetic
gtggccccaaggutguga

SEQ ID NO: 29663 - DNA, 19 bp, Artificial Sequence
  Synthetic
gccaggcuggtcucaaaca

SEQ ID NO: 29664 - DNA, 23 bp, Artificial Sequence
  Synthetic
gctgagucagaattgcttgaucc

SEQ ID NO: 29665 - DNA, 28 bp, Artificial Sequence
  Synthetic
accacatagtatguccctttaaagcaut

SEQ ID NO: 29666 - DNA, 24 bp, Artificial Sequence
  Synthetic
ctaggtuaacaaggccaaacucca

SEQ ID NO: 29667 - DNA, 28 bp, Artificial Sequence
  Synthetic
gaaggcccauttgtaagaatgtugaaaa

SEQ ID NO: 29668 - DNA, 31 bp, Artificial Sequence
  Synthetic
gaaggcatatattuggtgagaacattguaat

SEQ ID NO: 29669 - DNA, 23 bp, Artificial Sequence
  Synthetic
tgtaaagcgcaggauggagatut

SEQ ID NO: 29670 - DNA, 22 bp, Artificial Sequence
  Synthetic
tcagtuccaacccaaatgccut

SEQ ID NO: 29671 - DNA, 21 bp, Artificial Sequence
  Synthetic
caagtgctaguccactggcut

SEQ ID NO: 29672 - DNA, 20 bp, Artificial Sequence
  Synthetic
gccaccgcuatcacctucag

SEQ ID NO: 29673 - DNA, 25 bp, Artificial Sequence
  Synthetic
cutcaatggctauagagagaaccca

SEQ ID NO: 29674 - DNA, 20 bp, Artificial Sequence
  Synthetic
ggaaagagutgcugcaccag

SEQ ID NO: 29675 - DNA, 19 bp, Artificial Sequence
  Synthetic
cacatccaucggcgcttug

SEQ ID NO: 29676 - DNA, 27 bp, Artificial Sequence
  Synthetic
gatatcgugccttctgtauacaaaggt

SEQ ID NO: 29677 - DNA, 28 bp, Artificial Sequence
  Synthetic
gtctcaatacuggccaagattacaguaa

SEQ ID NO: 29678 - DNA, 25 bp, Artificial Sequence
  Synthetic
cttctagugaagagagatcgccuct

SEQ ID NO: 29679 - DNA, 21 bp, Artificial Sequence
  Synthetic
aggtttgccuctctccucaca

SEQ ID NO: 29680 - DNA, 26 bp, Artificial Sequence
  Synthetic
cggagcaaacagguttaaagacatug

SEQ ID NO: 29681 - DNA, 22 bp, Artificial Sequence
  Synthetic
gctaacctgucccacctgatut

SEQ ID NO: 29682 - DNA, 24 bp, Artificial Sequence
  Synthetic
gctctttguactgaagatguggca

SEQ ID NO: 29683 - DNA, 24 bp, Artificial Sequence
  Synthetic
ccaacggagaagautcagaugagg

SEQ ID NO: 29684 - DNA, 21 bp, Artificial Sequence
  Synthetic
tggatggcugcttgggtttua

SEQ ID NO: 29685 - DNA, 28 bp, Artificial Sequence
  Synthetic
gacactaccattuggtttgattttggut

SEQ ID NO: 29686 - DNA, 22 bp, Artificial Sequence
  Synthetic
actcccgcutatactgggcuat

SEQ ID NO: 29687 - DNA, 30 bp, Artificial Sequence
  Synthetic
tattaataatgtggutttctgtccactucc

SEQ ID NO: 29688 - DNA, 25 bp, Artificial Sequence
  Synthetic
cagtaagaaaugaagagagggcgut

SEQ ID NO: 29689 - DNA, 22 bp, Artificial Sequence
  Synthetic
cctctcctcuccctttccucag

SEQ ID NO: 29690 - DNA, 25 bp, Artificial Sequence
  Synthetic
ggcctgtgagucaactaaaaguagg

SEQ ID NO: 29691 - DNA, 17 bp, Artificial Sequence
  Synthetic
tccagcuggcgcttuga

SEQ ID NO: 29692 - DNA, 30 bp, Artificial Sequence
  Synthetic
agaacttttacacuagtcttttccaauccc

SEQ ID NO: 29693 - DNA, 25 bp, Artificial Sequence
  Synthetic
aggctagaccutctctgtccattua

SEQ ID NO: 29694 - DNA, 22 bp, Artificial Sequence
  Synthetic
cttgaaccaugttugcccaaga

SEQ ID NO: 29695 - DNA, 24 bp, Artificial Sequence
  Synthetic
cttaaagccucccttcctctuact

SEQ ID NO: 29696 - DNA, 23 bp, Artificial Sequence
  Synthetic
agagagatucttcccauccacca

SEQ ID NO: 29697 - DNA, 25 bp, Artificial Sequence
  Synthetic
actccccaccucttcttcttttcua

SEQ ID NO: 29698 - DNA, 17 bp, Artificial Sequence
  Synthetic
caaguccgccggcucat

SEQ ID NO: 29699 - DNA, 22 bp, Artificial Sequence
  Synthetic
cagctgtctucggttctctcug

SEQ ID NO: 29700 - DNA, 18 bp, Artificial Sequence
  Synthetic
cgcuccccggcctactua

SEQ ID NO: 29701 - DNA, 18 bp, Artificial Sequence
  Synthetic
tgagcgccutcactgucc

SEQ ID NO: 29702 - DNA, 17 bp, Artificial Sequence
  Synthetic
ttcaggucccgcacguc

SEQ ID NO: 29703 - DNA, 17 bp, Artificial Sequence
  Synthetic
ggctuccacgtgtgucc

SEQ ID NO: 29704 - DNA, 22 bp, Artificial Sequence
  Synthetic
cccctacagccucccattuact

SEQ ID NO: 29705 - DNA, 23 bp, Artificial Sequence
  Synthetic
cagaugggcaatagctuccagaa

SEQ ID NO: 29706 - DNA, 21 bp, Artificial Sequence
  Synthetic
agagtcaacacuccctgctug

SEQ ID NO: 29707 - DNA, 24 bp, Artificial Sequence
  Synthetic
ccgaguagaaacacagatgtguct

SEQ ID NO: 29708 - DNA, 20 bp, Artificial Sequence
  Synthetic
agccccuggttggaagaaug

SEQ ID NO: 29709 - DNA, 18 bp, Artificial Sequence
  Synthetic
gagatgccuccccuccct

SEQ ID NO: 29710 - DNA, 18 bp, Artificial Sequence
  Synthetic
gtgagcugtgggtugggt

SEQ ID NO: 29711 - DNA, 22 bp, Artificial Sequence
  Synthetic
cattcaggcacutaccagguga

SEQ ID NO: 29712 - DNA, 23 bp, Artificial Sequence
  Synthetic
cctgagacaucagtccacuggat

SEQ ID NO: 29713 - DNA, 25 bp, Artificial Sequence
  Synthetic
cttagcuacccactctauacccaca

SEQ ID NO: 29714 - DNA, 20 bp, Artificial Sequence
  Synthetic
caggcccugccatattgugt

SEQ ID NO: 29715 - DNA, 26 bp, Artificial Sequence
  Synthetic
aatccuggagattcctaucagaggag

SEQ ID NO: 29716 - DNA, 21 bp, Artificial Sequence
  Synthetic
atgtgagugtctagcauggct

SEQ ID NO: 29717 - DNA, 24 bp, Artificial Sequence
  Synthetic
ctgattcaggagcugagtcaugaa

SEQ ID NO: 29718 - DNA, 21 bp, Artificial Sequence
  Synthetic
ccttcccucggatctgttugg

SEQ ID NO: 29719 - DNA, 21 bp, Artificial Sequence
  Synthetic
ggacgagcaacgutacucaag

SEQ ID NO: 29720 - DNA, 22 bp, Artificial Sequence
  Synthetic
ccttgactgugaggttgaccug

SEQ ID NO: 29721 - DNA, 22 bp, Artificial Sequence
  Synthetic
tctgacutggatcucaccccaa

SEQ ID NO: 29722 - DNA, 23 bp, Artificial Sequence
  Synthetic
ctggtuccacacacccatctuat

SEQ ID NO: 29723 - DNA, 26 bp, Artificial Sequence
  Synthetic
ctctgaactacautgtgtcttcugca

SEQ ID NO: 29724 - DNA, 18 bp, Artificial Sequence
  Synthetic
gacccacccuacccugga

SEQ ID NO: 29725 - DNA, 17 bp, Artificial Sequence
  Synthetic
gggtgtguggcccagug

SEQ ID NO: 29726 - DNA, 21 bp, Artificial Sequence
  Synthetic
gtccaagcccuaaagccucat

SEQ ID NO: 29727 - DNA, 25 bp, Artificial Sequence
  Synthetic
cttcaaauaccggtucaagaaggac

SEQ ID NO: 29728 - DNA, 19 bp, Artificial Sequence
  Synthetic
gcaagtgcugtggcctcut

SEQ ID NO: 29729 - DNA, 19 bp, Artificial Sequence
  Synthetic
agccaacccucatgcucac

SEQ ID NO: 29730 - DNA, 20 bp, Artificial Sequence
  Synthetic
gccacaccgagucagagaua

SEQ ID NO: 29731 - DNA, 20 bp, Artificial Sequence
  Synthetic
tggaacuggctgaccaugac

SEQ ID NO: 29732 - DNA, 19 bp, Artificial Sequence
  Synthetic
cctctccuctcccctcuga

SEQ ID NO: 29733 - DNA, 18 bp, Artificial Sequence
  Synthetic
ccuagacugcgggacaca

SEQ ID NO: 29734 - DNA, 20 bp, Artificial Sequence
  Synthetic
cagtgttgugctcaggguca

SEQ ID NO: 29735 - DNA, 23 bp, Artificial Sequence
  Synthetic
ctaatcccttuccagtcccucac

SEQ ID NO: 29736 - DNA, 19 bp, Artificial Sequence
  Synthetic
ccccagucgagacccugaa

SEQ ID NO: 29737 - DNA, 24 bp, Artificial Sequence
  Synthetic
ggcaagtcugtgaatacucagagg

SEQ ID NO: 29738 - DNA, 19 bp, Artificial Sequence
  Synthetic
tgccttcuagggctcucca

SEQ ID NO: 29739 - DNA, 17 bp, Artificial Sequence
  Synthetic
ctgtcgccccugcctut

SEQ ID NO: 29740 - DNA, 20 bp, Artificial Sequence
  Synthetic
ttttgagaccugcccuggac

SEQ ID NO: 29741 - DNA, 20 bp, Artificial Sequence
  Synthetic
cacgacucccatctgauccc

SEQ ID NO: 29742 - DNA, 19 bp, Artificial Sequence
  Synthetic
cttgttgcuggcgctgaug

SEQ ID NO: 29743 - DNA, 25 bp, Artificial Sequence
  Synthetic
tgctagcacaguatttacugagagg

SEQ ID NO: 29744 - DNA, 19 bp, Artificial Sequence
  Synthetic
aaggcctuggctatgguga

SEQ ID NO: 29745 - DNA, 18 bp, Artificial Sequence
  Synthetic
aguggacagggcccttug

SEQ ID NO: 29746 - DNA, 20 bp, Artificial Sequence
  Synthetic
cagtagagcuccgtctccuc

SEQ ID NO: 29747 - DNA, 21 bp, Artificial Sequence
  Synthetic
gagcctaccugcactgactut

SEQ ID NO: 29748 - DNA, 21 bp, Artificial Sequence
  Synthetic
gaaagagccggcuaaccuact

SEQ ID NO: 29749 - DNA, 20 bp, Artificial Sequence
  Synthetic
ctgattccaucccccaccug

SEQ ID NO: 29750 - DNA, 23 bp, Artificial Sequence
  Synthetic
ccaugggctgattuggaagaagg

SEQ ID NO: 29751 - DNA, 23 bp, Artificial Sequence
  Synthetic
tgucaacaactauggcaaaggct

SEQ ID NO: 29752 - DNA, 24 bp, Artificial Sequence
  Synthetic
ctaaaaggagggcugaatgaggua

SEQ ID NO: 29753 - DNA, 20 bp, Artificial Sequence
  Synthetic
cuggagagctucgagaaggc

SEQ ID NO: 29754 - DNA, 21 bp, Artificial Sequence
  Synthetic
ccaaggcaggucttgcaguag

SEQ ID NO: 29755 - DNA, 20 bp, Artificial Sequence
  Synthetic
gtccaaggcucagaguccag

SEQ ID NO: 29756 - DNA, 21 bp, Artificial Sequence
  Synthetic
cctttguccacacctgcaaug

SEQ ID NO: 29757 - DNA, 20 bp, Artificial Sequence
  Synthetic
tgattccugccccatgagug

SEQ ID NO: 29758 - DNA, 17 bp, Artificial Sequence
  Synthetic
ccatcucctcgcugcgt

SEQ ID NO: 29759 - DNA, 19 bp, Artificial Sequence
  Synthetic
gcagctccucgtgatccuc

SEQ ID NO: 29760 - DNA, 18 bp, Artificial Sequence
  Synthetic
cucatccgcuacgccaac

SEQ ID NO: 29761 - DNA, 20 bp, Artificial Sequence
  Synthetic
ggactttggcuccacccauc

SEQ ID NO: 29762 - DNA, 22 bp, Artificial Sequence
  Synthetic
cctaccacacaacaugttcugg

SEQ ID NO: 29763 - DNA, 23 bp, Artificial Sequence
  Synthetic
cccaaggcutctctttguaggaa

SEQ ID NO: 29764 - DNA, 23 bp, Artificial Sequence
  Synthetic
ctgatttcagggutcccaccuag

SEQ ID NO: 29765 - DNA, 23 bp, Artificial Sequence
  Synthetic
aagaagaacugcaggaacgugaa

SEQ ID NO: 29766 - DNA, 22 bp, Artificial Sequence
  Synthetic
tgtggaaauagcagcagcugag

SEQ ID NO: 29767 - DNA, 22 bp, Artificial Sequence
  Synthetic
gggaagguccatggtatggtut

SEQ ID NO: 29768 - DNA, 22 bp, Artificial Sequence
  Synthetic
cctgttggcugtggatgagaug

SEQ ID NO: 29769 - DNA, 26 bp, Artificial Sequence
  Synthetic
agtgctatuctaagttccuaggcaga

SEQ ID NO: 29770 - DNA, 21 bp, Artificial Sequence
  Synthetic
ctgcagucccatgaucaccat

SEQ ID NO: 29771 - DNA, 23 bp, Artificial Sequence
  Synthetic
gtagtagccuggcctctgauaca

SEQ ID NO: 29772 - DNA, 23 bp, Artificial Sequence
  Synthetic
gucacaggcauagacaccaaaga

SEQ ID NO: 29773 - DNA, 24 bp, Artificial Sequence
  Synthetic
tggttggtgautgttccaaaggut

SEQ ID NO: 29774 - DNA, 21 bp, Artificial Sequence
  Synthetic
cttcccttgcuctgagccuac

SEQ ID NO: 29775 - DNA, 21 bp, Artificial Sequence
  Synthetic
cagcautctggucagcacaac

SEQ ID NO: 29776 - DNA, 22 bp, Artificial Sequence
  Synthetic
tctcaacctutgccctccuact

SEQ ID NO: 29777 - DNA, 22 bp, Artificial Sequence
  Synthetic
gatcagtgucctgctggtguac

SEQ ID NO: 29778 - DNA, 20 bp, Artificial Sequence
  Synthetic
cagtgcuggacacucggaat

SEQ ID NO: 29779 - DNA, 22 bp, Artificial Sequence
  Synthetic
cctgctgccuggaatcttcuaa

SEQ ID NO: 29780 - DNA, 21 bp, Artificial Sequence
  Synthetic
cagcaggauggccatguagat

SEQ ID NO: 29781 - DNA, 19 bp, Artificial Sequence
  Synthetic
gcccaaggucatcgagugc

SEQ ID NO: 29782 - DNA, 23 bp, Artificial Sequence
  Synthetic
cgcttcugcaaggagaaagctua

SEQ ID NO: 29783 - DNA, 25 bp, Artificial Sequence
  Synthetic
ctggtaccugaagaccattgacauc

SEQ ID NO: 29784 - DNA, 25 bp, Artificial Sequence
  Synthetic
attaaggtcaugggaatacgctcug

SEQ ID NO: 29785 - DNA, 26 bp, Artificial Sequence
  Synthetic
tttgacttcaagcugttcttcaaugg

SEQ ID NO: 29786 - DNA, 23 bp, Artificial Sequence
  Synthetic
gggtgaaguttgcactttcuaca

SEQ ID NO: 29787 - DNA, 23 bp, Artificial Sequence
  Synthetic
ccaccatcaucttcgacaacugg

SEQ ID NO: 29788 - DNA, 22 bp, Artificial Sequence
  Synthetic
ccccugagagaaagggaugaga

SEQ ID NO: 29789 - DNA, 21 bp, Artificial Sequence
  Synthetic
caggctgcutgtgtgttucag

SEQ ID NO: 29790 - DNA, 23 bp, Artificial Sequence
  Synthetic
ctgtactggucacaagccaugat

SEQ ID NO: 29791 - DNA, 22 bp, Artificial Sequence
  Synthetic
tcucccauacagagcctctuag

SEQ ID NO: 29792 - DNA, 23 bp, Artificial Sequence
  Synthetic
ccagaagcaugacatggtctcuc

SEQ ID NO: 29793 - DNA, 21 bp, Artificial Sequence
  Synthetic
gtgtcccacggguaagcauat

SEQ ID NO: 29794 - DNA, 17 bp, Artificial Sequence
  Synthetic
ccugaagugcgcagcct

SEQ ID NO: 29795 - DNA, 17 bp, Artificial Sequence
  Synthetic
ggcggcacucacguaga

SEQ ID NO: 29796 - DNA, 20 bp, Artificial Sequence
  Synthetic
cagagcacauccgccaguat

SEQ ID NO: 29797 - DNA, 21 bp, Artificial Sequence
  Synthetic
tggagcuctaggtccuaagcc

SEQ ID NO: 29798 - DNA, 21 bp, Artificial Sequence
  Synthetic
gctttgccagugacacccuac

SEQ ID NO: 29799 - DNA, 21 bp, Artificial Sequence
  Synthetic
tgggtctautcctgcauccct

SEQ ID NO: 29800 - DNA, 20 bp, Artificial Sequence
  Synthetic
gggtacacugacgtcctcut

SEQ ID NO: 29801 - DNA, 22 bp, Artificial Sequence
  Synthetic
ctcaccctcauactgcaggtug

SEQ ID NO: 29802 - DNA, 22 bp, Artificial Sequence
  Synthetic
agtggcagccuagtcctctuag

SEQ ID NO: 29803 - DNA, 23 bp, Artificial Sequence
  Synthetic
cctucagagggauagaagtcaug

SEQ ID NO: 29804 - DNA, 19 bp, Artificial Sequence
  Synthetic
gtgccaguggctgaucact

SEQ ID NO: 29805 - DNA, 23 bp, Artificial Sequence
  Synthetic
ggaaggaaautcccaugagcaga

SEQ ID NO: 29806 - DNA, 25 bp, Artificial Sequence
  Synthetic
aatatgaccuggagagcattgacug

SEQ ID NO: 29807 - DNA, 28 bp, Artificial Sequence
  Synthetic
tcattagtccuattttgcagaugaggaa

SEQ ID NO: 29808 - DNA, 22 bp, Artificial Sequence
  Synthetic
acaagcucaacgccaacuacat

SEQ ID NO: 29809 - DNA, 24 bp, Artificial Sequence
  Synthetic
ggatatcttautcctgggcuggag

SEQ ID NO: 29810 - DNA, 17 bp, Artificial Sequence
  Synthetic
gcacagccccucccauc

SEQ ID NO: 29811 - DNA, 18 bp, Artificial Sequence
  Synthetic
ctccacgucacccuagcc

SEQ ID NO: 29812 - DNA, 24 bp, Artificial Sequence
  Synthetic
ggaatgauggagaccatccgaauc

SEQ ID NO: 29813 - DNA, 22 bp, Artificial Sequence
  Synthetic
cgcccauggtcctgauaagaaa

SEQ ID NO: 29814 - DNA, 21 bp, Artificial Sequence
  Synthetic
ggtggtccuagaggagaccut

SEQ ID NO: 29815 - DNA, 22 bp, Artificial Sequence
  Synthetic
acaccacacguacacctgtaug

SEQ ID NO: 29816 - DNA, 20 bp, Artificial Sequence
  Synthetic
ggtcaguctggaaugggaca

SEQ ID NO: 29817 - DNA, 19 bp, Artificial Sequence
  Synthetic
gcctugcgcaccagauagg

SEQ ID NO: 29818 - DNA, 22 bp, Artificial Sequence
  Synthetic
ggaatcccugcaacaacagcua

SEQ ID NO: 29819 - DNA, 21 bp, Artificial Sequence
  Synthetic
gccagcaaguggacaccuaag

SEQ ID NO: 29820 - DNA, 21 bp, Artificial Sequence
  Synthetic
ctccuggagcagauggaaagg

SEQ ID NO: 29821 - DNA, 20 bp, Artificial Sequence
  Synthetic
aggaucaacacaagcggugt

SEQ ID NO: 29822 - DNA, 29 bp, Artificial Sequence
  Synthetic
gacctctctgaguataaatttgccaagut

SEQ ID NO: 29823 - DNA, 20 bp, Artificial Sequence
  Synthetic
caccacccucatcacuacgg

SEQ ID NO: 29824 - DNA, 23 bp, Artificial Sequence
  Synthetic
ccatgagugatggcagugagaag

SEQ ID NO: 29825 - DNA, 26 bp, Artificial Sequence
  Synthetic
tataggaucctttttcugcagaggag

SEQ ID NO: 29826 - DNA, 22 bp, Artificial Sequence
  Synthetic
gggaacaccccuaacttuacct

SEQ ID NO: 29827 - DNA, 23 bp, Artificial Sequence
  Synthetic
acucagccaucaaaagacttuca

SEQ ID NO: 29828 - DNA, 18 bp, Artificial Sequence
  Synthetic
gggtgautcccccuccct

SEQ ID NO: 29829 - DNA, 20 bp, Artificial Sequence
  Synthetic
cctagcuccccttcccacuc

SEQ ID NO: 29830 - DNA, 19 bp, Artificial Sequence
  Synthetic
actuccaggccaccaaguc

SEQ ID NO: 29831 - DNA, 23 bp, Artificial Sequence
  Synthetic
accttgucaaacagggcaatgua

SEQ ID NO: 29832 - DNA, 23 bp, Artificial Sequence
  Synthetic
tccgttttcugtctgaacugacc

SEQ ID NO: 29833 - DNA, 23 bp, Artificial Sequence
  Synthetic
gtgaagaccucttugcggaagaa

SEQ ID NO: 29834 - DNA, 18 bp, Artificial Sequence
  Synthetic
ctgggccaaugcaugacc

SEQ ID NO: 29835 - DNA, 22 bp, Artificial Sequence
  Synthetic
ggactcctcucagcccttcuac

SEQ ID NO: 29836 - DNA, 20 bp, Artificial Sequence
  Synthetic
ctctcagugccttggtcucg

SEQ ID NO: 29837 - DNA, 22 bp, Artificial Sequence
  Synthetic
ctctgtcugtctgcatcuccat

SEQ ID NO: 29838 - DNA, 20 bp, Artificial Sequence
  Synthetic
ctgttcuccgtgttggucct

SEQ ID NO: 29839 - DNA, 19 bp, Artificial Sequence
  Synthetic
cagugccaggcagtccaua

SEQ ID NO: 29840 - DNA, 22 bp, Artificial Sequence
  Synthetic
ctcatcaucctggaccaugaca

SEQ ID NO: 29841 - DNA, 23 bp, Artificial Sequence
  Synthetic
cctattguacagctgugggaagt

SEQ ID NO: 29842 - DNA, 18 bp, Artificial Sequence
  Synthetic
ttgctgacgguccctgug

SEQ ID NO: 29843 - DNA, 18 bp, Artificial Sequence
  Synthetic
gcccaguggcacggauat

SEQ ID NO: 29844 - DNA, 19 bp, Artificial Sequence
  Synthetic
aggtccugtgacucccgat

SEQ ID NO: 29845 - DNA, 21 bp, Artificial Sequence
  Synthetic
gtaccucagggctttcuggag

SEQ ID NO: 29846 - DNA, 20 bp, Artificial Sequence
  Synthetic
gggttgtcugcctccaagug

SEQ ID NO: 29847 - DNA, 20 bp, Artificial Sequence
  Synthetic
gggcacugcagaccuagaag

SEQ ID NO: 29848 - DNA, 23 bp, Artificial Sequence
  Synthetic
ccaaggactuctgccagaacauc

SEQ ID NO: 29849 - DNA, 21 bp, Artificial Sequence
  Synthetic
cccagtucctctctctuccgt

SEQ ID NO: 29850 - DNA, 19 bp, Artificial Sequence
  Synthetic
ggacgugagcactcctcug

SEQ ID NO: 29851 - DNA, 21 bp, Artificial Sequence
  Synthetic
ggccaaaguacagcaacgcua

SEQ ID NO: 29852 - DNA, 20 bp, Artificial Sequence
  Synthetic
ggactcugagctctgagcug

SEQ ID NO: 29853 - DNA, 21 bp, Artificial Sequence
  Synthetic
ctctgagaagcccauggtgua

SEQ ID NO: 29854 - DNA, 19 bp, Artificial Sequence
  Synthetic
gccttctgugagggcaugt

SEQ ID NO: 29855 - DNA, 19 bp, Artificial Sequence
  Synthetic
cacuaggcccagcaggaug

SEQ ID NO: 29856 - DNA, 21 bp, Artificial Sequence
  Synthetic
cucacagccaugagcaaacag

SEQ ID NO: 29857 - DNA, 20 bp, Artificial Sequence
  Synthetic
catcccagagagaugccuca

SEQ ID NO: 29858 - DNA, 18 bp, Artificial Sequence
  Synthetic
cacgtguccccggtacuc

SEQ ID NO: 29859 - DNA, 21 bp, Artificial Sequence
  Synthetic
ccgttcugaccaauagacgac

SEQ ID NO: 29860 - DNA, 23 bp, Artificial Sequence
  Synthetic
ggaaatuccagtccctucaggat

SEQ ID NO: 29861 - DNA, 25 bp, Artificial Sequence
  Synthetic
cttccactccuttccagaaaacuca

SEQ ID NO: 29862 - DNA, 24 bp, Artificial Sequence
  Synthetic
actgcacuctctaagguaacaaca

SEQ ID NO: 29863 - DNA, 27 bp, Artificial Sequence
  Synthetic
gcaccacactcucctatctttactuac

SEQ ID NO: 29864 - DNA, 28 bp, Artificial Sequence
  Synthetic
gaggtgatcugaacttaaatctctuccc

SEQ ID NO: 29865 - DNA, 22 bp, Artificial Sequence
  Synthetic
acactaggcagucactgtucct

SEQ ID NO: 29866 - DNA, 22 bp, Artificial Sequence
  Synthetic
cgacacugtggtcctuagcaac

SEQ ID NO: 29867 - DNA, 24 bp, Artificial Sequence
  Synthetic
guaaggcagaaaggagaugcagat

SEQ ID NO: 29868 - DNA, 21 bp, Artificial Sequence
  Synthetic
aggcctgaugtcctaggaugt

SEQ ID NO: 29869 - DNA, 23 bp, Artificial Sequence
  Synthetic
agaaatcttcccugccaccttuc

SEQ ID NO: 29870 - DNA, 22 bp, Artificial Sequence
  Synthetic
ctgtgcaucccaggtttcuagg

SEQ ID NO: 29871 - DNA, 25 bp, Artificial Sequence
  Synthetic
tgggatttggugagaacaagagaut

SEQ ID NO: 29872 - DNA, 20 bp, Artificial Sequence
  Synthetic
ggcagcutaacgaugcccat

SEQ ID NO: 29873 - DNA, 23 bp, Artificial Sequence
  Synthetic
tcuaaagagaugaagcccccaca

SEQ ID NO: 29874 - DNA, 20 bp, Artificial Sequence
  Synthetic
ctucggcaggagggatugag

SEQ ID NO: 29875 - DNA, 18 bp, Artificial Sequence
  Synthetic
cagccccuccaccucaga

SEQ ID NO: 29876 - DNA, 23 bp, Artificial Sequence
  Synthetic
tcccaagccuatgggttcattuc

SEQ ID NO: 29877 - DNA, 23 bp, Artificial Sequence
  Synthetic
cctggctacauggaaaacgauct

SEQ ID NO: 29878 - DNA, 24 bp, Artificial Sequence
  Synthetic
ctggagatgcugtggatgtaacuc

SEQ ID NO: 29879 - DNA, 31 bp, Artificial Sequence
  Synthetic
gagaccagaaaaaucgtaatcacactauaac

SEQ ID NO: 29880 - DNA, 21 bp, Artificial Sequence
  Synthetic
gggagggugatggcagacuaa

SEQ ID NO: 29881 - DNA, 25 bp, Artificial Sequence
  Synthetic
caagautcttgcctuccaaaaccag

SEQ ID NO: 29882 - DNA, 24 bp, Artificial Sequence
  Synthetic
gttggtggtggutagtgggtatut

SEQ ID NO: 29883 - DNA, 21 bp, Artificial Sequence
  Synthetic
ggtgtctgcucctgcactauc

SEQ ID NO: 29884 - DNA, 22 bp, Artificial Sequence
  Synthetic
cacctctcaguccatctcucac

SEQ ID NO: 29885 - DNA, 27 bp, Artificial Sequence
  Synthetic
cagaaatgagacuatggagtcacucac

SEQ ID NO: 29886 - DNA, 23 bp, Artificial Sequence
  Synthetic
gcatttcaaagcutggctuggat

SEQ ID NO: 29887 - DNA, 22 bp, Artificial Sequence
  Synthetic
cagtctcguagggttucacagg

SEQ ID NO: 29888 - DNA, 26 bp, Artificial Sequence
  Synthetic
gggatgggaauagagacattcatcua

SEQ ID NO: 29889 - DNA, 22 bp, Artificial Sequence
  Synthetic
ccccacucaggtugaaaaggac

SEQ ID NO: 29890 - DNA, 22 bp, Artificial Sequence
  Synthetic
ccatccgttcugcatccctauc

SEQ ID NO: 29891 - DNA, 29 bp, Artificial Sequence
  Synthetic
cagggagaaaaagcucattcattcattuc

SEQ ID NO: 29892 - DNA, 21 bp, Artificial Sequence
  Synthetic
gtgccatgucggagaacauct

SEQ ID NO: 29893 - DNA, 23 bp, Artificial Sequence
  Synthetic
ggagagggaaucacauccaaagc

SEQ ID NO: 29894 - DNA, 33 bp, Artificial Sequence
  Synthetic
aattaccacttguactagtatgcctuaagaaaa

SEQ ID NO: 29895 - DNA, 22 bp, Artificial Sequence
  Synthetic
cctgtacacaugaagccaucgt

SEQ ID NO: 29896 - DNA, 31 bp, Artificial Sequence
  Synthetic
tcctagtatagcauaattgagagaaaaacug

SEQ ID NO: 29897 - DNA, 28 bp, Artificial Sequence
  Synthetic
ccutctagaacaguagacacaaaacagg

SEQ ID NO: 29898 - DNA, 23 bp, Artificial Sequence
  Synthetic
tgcatggcautagcaaagacuca

SEQ ID NO: 29899 - DNA, 22 bp, Artificial Sequence
  Synthetic
gaguacagtgcaaugagggacc

SEQ ID NO: 29900 - DNA, 28 bp, Artificial Sequence
  Synthetic
gtacucatgaaaatggucagagaaacct

SEQ ID NO: 29901 - DNA, 22 bp, Artificial Sequence
  Synthetic
aacttgtgguagttggagcugg

SEQ ID NO: 29902 - DNA, 19 bp, Artificial Sequence
  Synthetic
ccggtauctactgguggca

SEQ ID NO: 29903 - DNA, 24 bp, Artificial Sequence
  Synthetic
gcctaccacucccttaaagacuga

SEQ ID NO: 29904 - DNA, 23 bp, Artificial Sequence
  Synthetic
cgatttctucccagggtcaaguc

SEQ ID NO: 29905 - DNA, 29 bp, Artificial Sequence
  Synthetic
cctgatctcagaaugtccttttctttuca

SEQ ID NO: 29906 - DNA, 21 bp, Artificial Sequence
  Synthetic
tgtttagaaggucgcgugcat

SEQ ID NO: 29907 - DNA, 29 bp, Artificial Sequence
  Synthetic
ttgggatcttgggautaagaaacaatcut

SEQ ID NO: 29908 - DNA, 24 bp, Artificial Sequence
  Synthetic
gatggctguctttttcacactugg

SEQ ID NO: 29909 - DNA, 28 bp, Artificial Sequence
  Synthetic
tcttcatcaaccuctggtaatcuacaga

SEQ ID NO: 29910 - DNA, 27 bp, Artificial Sequence
  Synthetic
tgccgatatauaccaagtactuagaca

SEQ ID NO: 29911 - DNA, 25 bp, Artificial Sequence
  Synthetic
ccggaauatccagacugacaacaac

SEQ ID NO: 29912 - DNA, 29 bp, Artificial Sequence
  Synthetic
cugaagcatcttaguaagacaaaacagga

SEQ ID NO: 29913 - DNA, 28 bp, Artificial Sequence
  Synthetic
gttggatacacagccuagacttacttut

SEQ ID NO: 29914 - DNA, 19 bp, Artificial Sequence
  Synthetic
cugggatuacaggcgcaga

SEQ ID NO: 29915 - DNA, 27 bp, Artificial Sequence
  Synthetic
cctatgcttccuctttcctttguacag

SEQ ID NO: 29916 - DNA, 20 bp, Artificial Sequence
  Synthetic
cagccgagguaccccattua

SEQ ID NO: 29917 - DNA, 26 bp, Artificial Sequence
  Synthetic
gtattacatugaatgccttgaugcca

SEQ ID NO: 29918 - DNA, 22 bp, Artificial Sequence
  Synthetic
ggcaaugactgaacugcagagt

SEQ ID NO: 29919 - DNA, 20 bp, Artificial Sequence
  Synthetic
cagaacagggcutccagguc

SEQ ID NO: 29920 - DNA, 21 bp, Artificial Sequence
  Synthetic
tgccgtcagguagttctccut

SEQ ID NO: 29921 - DNA, 21 bp, Artificial Sequence
  Synthetic
cctagugccaccgagataugc

SEQ ID NO: 29922 - DNA, 29 bp, Artificial Sequence
  Synthetic
atggtagtaatcugatcactagggtuaca

SEQ ID NO: 29923 - DNA, 25 bp, Artificial Sequence
  Synthetic
ttgcttgatugcaggaaatctucac

SEQ ID NO: 29924 - DNA, 18 bp, Artificial Sequence
  Synthetic
gggctccacucaccgtug

SEQ ID NO: 29925 - DNA, 19 bp, Artificial Sequence
  Synthetic
ccccagcugagtacggcua

SEQ ID NO: 29926 - DNA, 23 bp, Artificial Sequence
  Synthetic
cggattgtgtugtttctgggtuc

SEQ ID NO: 29927 - DNA, 22 bp, Artificial Sequence
  Synthetic
aactggguagcaaggcatcuac

SEQ ID NO: 29928 - DNA, 22 bp, Artificial Sequence
  Synthetic
gtccagauaggcaatgctgtuc

SEQ ID NO: 29929 - DNA, 23 bp, Artificial Sequence
  Synthetic
ccttgaaccaugaactctuggca

SEQ ID NO: 29930 - DNA, 23 bp, Artificial Sequence
  Synthetic
gttcttctugggaacgtttgcug

SEQ ID NO: 29931 - DNA, 24 bp, Artificial Sequence
  Synthetic
gtctctcaagcutttgtgtctgug

SEQ ID NO: 29932 - DNA, 22 bp, Artificial Sequence
  Synthetic
ttgttgagggacutgagtgugg

SEQ ID NO: 29933 - DNA, 23 bp, Artificial Sequence
  Synthetic
acaatcctggcugatctctcugt

SEQ ID NO: 29934 - DNA, 21 bp, Artificial Sequence
  Synthetic
cccctccaucttccaacucca

SEQ ID NO: 29935 - DNA, 20 bp, Artificial Sequence
  Synthetic
gggcugggacataaagcugt

SEQ ID NO: 29936 - DNA, 21 bp, Artificial Sequence
  Synthetic
ctcagugcaggacactuggat

SEQ ID NO: 29937 - DNA, 21 bp, Artificial Sequence
  Synthetic
cgcagtcuctggacuaaggag

SEQ ID NO: 29938 - DNA, 21 bp, Artificial Sequence
  Synthetic
gagacttgutccaaccugcca

SEQ ID NO: 29939 - DNA, 25 bp, Artificial Sequence
  Synthetic
gtgcattctugtttcactttgucca

SEQ ID NO: 29940 - DNA, 21 bp, Artificial Sequence
  Synthetic
gctgagggagguagaagccut

SEQ ID NO: 29941 - DNA, 23 bp, Artificial Sequence
  Synthetic
ccactgtcagutctcatctccug

SEQ ID NO: 29942 - DNA, 22 bp, Artificial Sequence
  Synthetic
ctcaugccaggagcatcactua

SEQ ID NO: 29943 - DNA, 22 bp, Artificial Sequence
  Synthetic
tttccauaccaggctcugagac

SEQ ID NO: 29944 - DNA, 23 bp, Artificial Sequence
  Synthetic
gcccttcctugagggaacaatuc

SEQ ID NO: 29945 - DNA, 24 bp, Artificial Sequence
  Synthetic
acctgcttccuccttcccattaua

SEQ ID NO: 29946 - DNA, 18 bp, Artificial Sequence
  Synthetic
catgagggccugcacuga

SEQ ID NO: 29947 - DNA, 21 bp, Artificial Sequence
  Synthetic
caccttctuaccccagctcut

SEQ ID NO: 29948 - DNA, 21 bp, Artificial Sequence
  Synthetic
ggatcctaaugcccagcaguc

SEQ ID NO: 29949 - DNA, 19 bp, Artificial Sequence
  Synthetic
actgggcuttcccuagcac

SEQ ID NO: 29950 - DNA, 24 bp, Artificial Sequence
  Synthetic
acttctgttcutcattcctccuga

SEQ ID NO: 29951 - DNA, 24 bp, Artificial Sequence
  Synthetic
ggttgatcacutcttggtgtcuct

SEQ ID NO: 29952 - DNA, 19 bp, Artificial Sequence
  Synthetic
cccuccaccgatagugcct

SEQ ID NO: 29953 - DNA, 23 bp, Artificial Sequence
  Synthetic
ggctcagcucaccttttctttuc

SEQ ID NO: 29954 - DNA, 17 bp, Artificial Sequence
  Synthetic
gaggccgutcccctguc

SEQ ID NO: 29955 - DNA, 19 bp, Artificial Sequence
  Synthetic
cccaaaccauccgccucat

SEQ ID NO: 29956 - DNA, 22 bp, Artificial Sequence
  Synthetic
cctcccuaacccaaactccauc

SEQ ID NO: 29957 - DNA, 22 bp, Artificial Sequence
  Synthetic
ccaccctcutctctctccugaa

SEQ ID NO: 29958 - DNA, 21 bp, Artificial Sequence
  Synthetic
cccuacaaggguacacaggga

SEQ ID NO: 29959 - DNA, 21 bp, Artificial Sequence
  Synthetic
ggttggtgggutagtgggaug

SEQ ID NO: 29960 - DNA, 21 bp, Artificial Sequence
  Synthetic
ccugtgcctcauagaacagca

SEQ ID NO: 29961 - DNA, 21 bp, Artificial Sequence
  Synthetic
cauccgagggcatctugaaca

SEQ ID NO: 29962 - DNA, 21 bp, Artificial Sequence
  Synthetic
ccugtgggcaugagaagaagg

SEQ ID NO: 29963 - DNA, 29 bp, Artificial Sequence
  Synthetic
ggttcattctutgctgcttattugacaat

SEQ ID NO: 29964 - DNA, 21 bp, Artificial Sequence
  Synthetic
gagcaaugagcaagggtuacg

SEQ ID NO: 29965 - DNA, 23 bp, Artificial Sequence
  Synthetic
gaactggcautcacctctctuct

SEQ ID NO: 29966 - DNA, 21 bp, Artificial Sequence
  Synthetic
gggttgtutcgagggucaaga

SEQ ID NO: 29967 - DNA, 22 bp, Artificial Sequence
  Synthetic
caactcatgcutaggctgucct

SEQ ID NO: 29968 - DNA, 21 bp, Artificial Sequence
  Synthetic
gctagtuccactgagcuccac

SEQ ID NO: 29969 - DNA, 28 bp, Artificial Sequence
  Synthetic
cccagaagtcugattgaacattttcuct

SEQ ID NO: 29970 - DNA, 25 bp, Artificial Sequence
  Synthetic
atctcagaagugacctcatugaact

SEQ ID NO: 29971 - DNA, 25 bp, Artificial Sequence
  Synthetic
tgggatatctcuctctctccctuca

SEQ ID NO: 29972 - DNA, 21 bp, Artificial Sequence
  Synthetic
gctgcggucctagtggtcuat

SEQ ID NO: 29973 - DNA, 29 bp, Artificial Sequence
  Synthetic
tgttttagcagttuatagggattgaccug

SEQ ID NO: 29974 - DNA, 27 bp, Artificial Sequence
  Synthetic
ctaagcaautatctguaaagcagaggt

SEQ ID NO: 29975 - DNA, 25 bp, Artificial Sequence
  Synthetic
ctcctaacgtugttgggtttcttug

SEQ ID NO: 29976 - DNA, 22 bp, Artificial Sequence
  Synthetic
tggctgcuctttaagaggugac

SEQ ID NO: 29977 - DNA, 27 bp, Artificial Sequence
  Synthetic
gtcatcttaccaugttcttcacctuca

SEQ ID NO: 29978 - DNA, 23 bp, Artificial Sequence
  Synthetic
gccccacaggauggtaagtuaga

SEQ ID NO: 29979 - DNA, 24 bp, Artificial Sequence
  Synthetic
cttagtgggcutactcggctuaat

SEQ ID NO: 29980 - DNA, 21 bp, Artificial Sequence
  Synthetic
agcatctaugggagcgtgtut

SEQ ID NO: 29981 - DNA, 23 bp, Artificial Sequence
  Synthetic
cctctgcgacgacauaatctgug

SEQ ID NO: 29982 - DNA, 17 bp, Artificial Sequence
  Synthetic
cuccagagcuggagcgg

SEQ ID NO: 29983 - DNA, 18 bp, Artificial Sequence
  Synthetic
ccgcggugagccatgaut

SEQ ID NO: 29984 - DNA, 18 bp, Artificial Sequence
  Synthetic
gggcuctccugggaacca

SEQ ID NO: 29985 - DNA, 19 bp, Artificial Sequence
  Synthetic
tccucccggaagagctuca

SEQ ID NO: 29986 - DNA, 22 bp, Artificial Sequence
  Synthetic
gctggagtaguagcttccacug

SEQ ID NO: 29987 - DNA, 21 bp, Artificial Sequence
  Synthetic
gcuccaacaccagcagaucaa

SEQ ID NO: 29988 - DNA, 27 bp, Artificial Sequence
  Synthetic
agtcactgatcucatgtatgtgtgtug

SEQ ID NO: 29989 - DNA, 21 bp, Artificial Sequence
  Synthetic
gagctcaugaacaccaagcug

SEQ ID NO: 29990 - DNA, 25 bp, Artificial Sequence
  Synthetic
gtttcttttagaacucaggccccut

SEQ ID NO: 29991 - DNA, 24 bp, Artificial Sequence
  Synthetic
cagaatcttucctctttccuggct

SEQ ID NO: 29992 - DNA, 28 bp, Artificial Sequence
  Synthetic
tgtcagttccautcaaatctttcacuca

SEQ ID NO: 29993 - DNA, 22 bp, Artificial Sequence
  Synthetic
agtgccaaucatccctgttucc

SEQ ID NO: 29994 - DNA, 23 bp, Artificial Sequence
  Synthetic
cccaaaggaaggcauggtaguag

SEQ ID NO: 29995 - DNA, 20 bp, Artificial Sequence
  Synthetic
gagccgttgutcgagcagua

SEQ ID NO: 29996 - DNA, 27 bp, Artificial Sequence
  Synthetic
gccaaaacatcutccttctttctcuct

SEQ ID NO: 29997 - DNA, 22 bp, Artificial Sequence
  Synthetic
ctccuggaggtauccaagaggt

SEQ ID NO: 29998 - DNA, 21 bp, Artificial Sequence
  Synthetic
gcaccaccuccaaagccauag

SEQ ID NO: 29999 - DNA, 17 bp, Artificial Sequence
  Synthetic
ggctucggcagggucag

SEQ ID NO: 30000 - DNA, 20 bp, Artificial Sequence
  Synthetic
cacacutgacuggcgagaca

SEQ ID NO: 30001 - DNA, 22 bp, Artificial Sequence
  Synthetic
tgcccagcccacutaatcatuc

SEQ ID NO: 30002 - DNA, 21 bp, Artificial Sequence
  Synthetic
gagttgcgccgutttccuaac

SEQ ID NO: 30003 - DNA, 23 bp, Artificial Sequence
  Synthetic
ggcctccacuatgtttcgaauga

SEQ ID NO: 30004 - DNA, 26 bp, Artificial Sequence
  Synthetic
attgacgtaaacaugtaaggtgcuct

SEQ ID NO: 30005 - DNA, 27 bp, Artificial Sequence
  Synthetic
gattcctgacuactttgctgtgaatug

SEQ ID NO: 30006 - DNA, 24 bp, Artificial Sequence
  Synthetic
acatcagtttgugagaggatggug

SEQ ID NO: 30007 - DNA, 28 bp, Artificial Sequence
  Synthetic
tggcacagauacacttaacatgcaauat

SEQ ID NO: 30008 - DNA, 29 bp, Artificial Sequence
  Synthetic
gctgaggtagauggttttcaaaugaagat

SEQ ID NO: 30009 - DNA, 27 bp, Artificial Sequence
  Synthetic
tggaaatgatuaaggtcatatggcuct

SEQ ID NO: 30010 - DNA, 26 bp, Artificial Sequence
  Synthetic
catatgcaugtatacacucacccaca

SEQ ID NO: 30011 - DNA, 22 bp, Artificial Sequence
  Synthetic
gctcagacagugaaggctgtuc

SEQ ID NO: 30012 - DNA, 28 bp, Artificial Sequence
  Synthetic
ggtctgttccauacagaaataagcuact

SEQ ID NO: 30013 - DNA, 26 bp, Artificial Sequence
  Synthetic
atuatgggagaagaagaaaucgctut

SEQ ID NO: 30014 - DNA, 30 bp, Artificial Sequence
  Synthetic
ttctgttgtacauaaaagtaacccatucca

SEQ ID NO: 30015 - DNA, 27 bp, Artificial Sequence
  Synthetic
cagtcattactuacaatgcgcauaaca

SEQ ID NO: 30016 - DNA, 28 bp, Artificial Sequence
  Synthetic
gacaccagatugatctgtatcaactuca

SEQ ID NO: 30017 - DNA, 28 bp, Artificial Sequence
  Synthetic
catctctgcaaaugttagatacgguaca

SEQ ID NO: 30018 - DNA, 30 bp, Artificial Sequence
  Synthetic
cgatgtgaauccaaacttgctattuagaat

SEQ ID NO: 30019 - DNA, 28 bp, Artificial Sequence
  Synthetic
gtaacaaaguacacttgtgcacuaaaca

SEQ ID NO: 30020 - DNA, 28 bp, Artificial Sequence
  Synthetic
actgttctcttttuctttccctgtgaut

SEQ ID NO: 30021 - DNA, 24 bp, Artificial Sequence
  Synthetic
gattgcagaggutgacttttccug

SEQ ID NO: 30022 - DNA, 25 bp, Artificial Sequence
  Synthetic
tttagcatgcugtgagttcaucaga

SEQ ID NO: 30023 - DNA, 26 bp, Artificial Sequence
  Synthetic
gcttcccgaaguttaagagacaugat

SEQ ID NO: 30024 - DNA, 26 bp, Artificial Sequence
  Synthetic
cctccactgutatctgcatttugaac

SEQ ID NO: 30025 - DNA, 25 bp, Artificial Sequence
  Synthetic
ttgaaggtgccuatagtgacaaucc

SEQ ID NO: 30026 - DNA, 27 bp, Artificial Sequence
  Synthetic
aaaagccatucaaaactctctcuacct

SEQ ID NO: 30027 - DNA, 28 bp, Artificial Sequence
  Synthetic
gtggaggaauaaacagtgtctcttacug

SEQ ID NO: 30028 - DNA, 30 bp, Artificial Sequence
  Synthetic
tgtttggttaaguctatagcacatgtucaa

SEQ ID NO: 30029 - DNA, 22 bp, Artificial Sequence
  Synthetic
cccaggutcctggatuaaggat

SEQ ID NO: 30030 - DNA, 25 bp, Artificial Sequence
  Synthetic
atgtctggccugatatttgacuaca

SEQ ID NO: 30031 - DNA, 27 bp, Artificial Sequence
  Synthetic
ggctgtcccagaaguttatttaccuaa

SEQ ID NO: 30032 - DNA, 28 bp, Artificial Sequence
  Synthetic
ggaatgaaattauggaaatccctguacc

SEQ ID NO: 30033 - DNA, 21 bp, Artificial Sequence
  Synthetic
ctaucgagaggcaugcaccat

SEQ ID NO: 30034 - DNA, 22 bp, Artificial Sequence
  Synthetic
ggctguaaaagcttctgugcat

SEQ ID NO: 30035 - DNA, 29 bp, Artificial Sequence
  Synthetic
tcagtcttttcatgugtaatcctcttgut

SEQ ID NO: 30036 - DNA, 21 bp, Artificial Sequence
  Synthetic
acataccaaguagccccucca

SEQ ID NO: 30037 - DNA, 29 bp, Artificial Sequence
  Synthetic
gctgctttaatagcuctcagaatgtttuc

SEQ ID NO: 30038 - DNA, 25 bp, Artificial Sequence
  Synthetic
caacatugaaaatgtcacuggcaga

SEQ ID NO: 30039 - DNA, 27 bp, Artificial Sequence
  Synthetic
agtatgacaagcutctcattgctgaut

SEQ ID NO: 30040 - DNA, 23 bp, Artificial Sequence
  Synthetic
atgctcataugtgagatgugcca

SEQ ID NO: 30041 - DNA, 23 bp, Artificial Sequence
  Synthetic
ggaggatttgutggtttgcccua

SEQ ID NO: 30042 - DNA, 17 bp, Artificial Sequence
  Synthetic
ggcagugcagggucgag

SEQ ID NO: 30043 - DNA, 21 bp, Artificial Sequence
  Synthetic
gtgatgctgutcaagctccug

SEQ ID NO: 30044 - DNA, 28 bp, Artificial Sequence
  Synthetic
tgctcttgagtaugtactcatatccugt

SEQ ID NO: 30045 - DNA, 26 bp, Artificial Sequence
  Synthetic
gcagtgcccuccagaaaataaaguaa

SEQ ID NO: 30046 - DNA, 22 bp, Artificial Sequence
  Synthetic
ctauggcgatgguagggaaaga

SEQ ID NO: 30047 - DNA, 23 bp, Artificial Sequence
  Synthetic
cttcactcaagccugtggtttug

SEQ ID NO: 30048 - DNA, 28 bp, Artificial Sequence
  Synthetic
gaaagcacaauaatggttttctguaccc

SEQ ID NO: 30049 - DNA, 25 bp, Artificial Sequence
  Synthetic
gctctcagautgactttccatucca

SEQ ID NO: 30050 - DNA, 22 bp, Artificial Sequence
  Synthetic
cctgggcucaactcattugaga

SEQ ID NO: 30051 - DNA, 22 bp, Artificial Sequence
  Synthetic
gagtcuggcttggctuaaacct

SEQ ID NO: 30052 - DNA, 25 bp, Artificial Sequence
  Synthetic
tttcatacttgccuccacatactug

SEQ ID NO: 30053 - DNA, 30 bp, Artificial Sequence
  Synthetic
gagtacaatcacauttttccacttctugaa

SEQ ID NO: 30054 - DNA, 24 bp, Artificial Sequence
  Synthetic
tcatgctgguattttccatccuca

SEQ ID NO: 30055 - DNA, 26 bp, Artificial Sequence
  Synthetic
gccttgaaaaaucaggtgtctcttut

SEQ ID NO: 30056 - DNA, 28 bp, Artificial Sequence
  Synthetic
tgctgttattttaugaagacagtgugga

SEQ ID NO: 30057 - DNA, 23 bp, Artificial Sequence
  Synthetic
atttggauaaacgtagccugcct

SEQ ID NO: 30058 - DNA, 27 bp, Artificial Sequence
  Synthetic
agaaaagaacauggaagtttgcuacga

SEQ ID NO: 30059 - DNA, 29 bp, Artificial Sequence
  Synthetic
ggaatgaattgcuaaactgtggaaaaugt

SEQ ID NO: 30060 - DNA, 19 bp, Artificial Sequence
  Synthetic
gtttuccaggaccgcagug

SEQ ID NO: 30061 - DNA, 18 bp, Artificial Sequence
  Synthetic
ccucctgcgucaggacaa

SEQ ID NO: 30062 - DNA, 23 bp, Artificial Sequence
  Synthetic
ccaagctcccacuttctgtgaut

SEQ ID NO: 30063 - DNA, 26 bp, Artificial Sequence
  Synthetic
caaaccattctguttgcttctctcuc

SEQ ID NO: 30064 - DNA, 20 bp, Artificial Sequence
  Synthetic
cccatctccgucctcctcuc

SEQ ID NO: 30065 - DNA, 23 bp, Artificial Sequence
  Synthetic
ggcaatguccctttctccttuca

SEQ ID NO: 30066 - DNA, 21 bp, Artificial Sequence
  Synthetic
ggatcccagauggtgacccua

SEQ ID NO: 30067 - DNA, 28 bp, Artificial Sequence
  Synthetic
acatagatcttgacugtcactttctguc

SEQ ID NO: 30068 - DNA, 23 bp, Artificial Sequence
  Synthetic
tgcgtgagagcutcacattcaut

SEQ ID NO: 30069 - DNA, 29 bp, Artificial Sequence
  Synthetic
cagaatcttaattugggtggctaaacaut

SEQ ID NO: 30070 - DNA, 19 bp, Artificial Sequence
  Synthetic
aggtgtucgagttgcccut

SEQ ID NO: 30071 - DNA, 18 bp, Artificial Sequence
  Synthetic
tcaggucccgucaagcag

SEQ ID NO: 30072 - DNA, 22 bp, Artificial Sequence
  Synthetic
tgcctctacucggtccaaguat

SEQ ID NO: 30073 - DNA, 24 bp, Artificial Sequence
  Synthetic
cuttttacaguacaagcccaccac

SEQ ID NO: 30074 - DNA, 20 bp, Artificial Sequence
  Synthetic
gtgcgagcagaaugcttugg

SEQ ID NO: 30075 - DNA, 24 bp, Artificial Sequence
  Synthetic
ccaaugatgctaaugacgacacag

SEQ ID NO: 30076 - DNA, 22 bp, Artificial Sequence
  Synthetic
ggagagccuctagctgctuact

SEQ ID NO: 30077 - DNA, 23 bp, Artificial Sequence
  Synthetic
acagaauagttucccagcagcac

SEQ ID NO: 30078 - DNA, 28 bp, Artificial Sequence
  Synthetic
tcagatactaggauaaagaagccacucc

SEQ ID NO: 30079 - DNA, 28 bp, Artificial Sequence
  Synthetic
gtgtacatgcucctttttctttcactut

SEQ ID NO: 30080 - DNA, 23 bp, Artificial Sequence
  Synthetic
gaagagucacacacacuggaaga

SEQ ID NO: 30081 - DNA, 31 bp, Artificial Sequence
  Synthetic
ctctatttgcagtgutaatgtgctttcttua

SEQ ID NO: 30082 - DNA, 23 bp, Artificial Sequence
  Synthetic
catattgcguggagtaagcuggt

SEQ ID NO: 30083 - DNA, 23 bp, Artificial Sequence
  Synthetic
cagggucaaatcatucagagcct

SEQ ID NO: 30084 - DNA, 26 bp, Artificial Sequence
  Synthetic
gcttggtgucagatacaaacaatugg

SEQ ID NO: 30085 - DNA, 26 bp, Artificial Sequence
  Synthetic
attgttgtttttguagccaaagccut

SEQ ID NO: 30086 - DNA, 24 bp, Artificial Sequence
  Synthetic
aagtccagauggattctucacagt

SEQ ID NO: 30087 - DNA, 27 bp, Artificial Sequence
  Synthetic
aauacttaguaacacggaguacaagag

SEQ ID NO: 30088 - DNA, 28 bp, Artificial Sequence
  Synthetic
ctgctgctatuttcaatgaaagaaucct

SEQ ID NO: 30089 - DNA, 23 bp, Artificial Sequence
  Synthetic
gtagctugtgctcauggcaaaaa

SEQ ID NO: 30090 - DNA, 28 bp, Artificial Sequence
  Synthetic
tgggcatgaaautagacatacttctucc

SEQ ID NO: 30091 - DNA, 28 bp, Artificial Sequence
  Synthetic
attgttttcuagctaaagatuccaggct

SEQ ID NO: 30092 - DNA, 21 bp, Artificial Sequence
  Synthetic
gcatggcaacagcutcagtug

SEQ ID NO: 30093 - DNA, 29 bp, Artificial Sequence
  Synthetic
cctgaagcctcutttaggaagtaacatut

SEQ ID NO: 30094 - DNA, 22 bp, Artificial Sequence
  Synthetic
ctaggccacuggatauggaacc

SEQ ID NO: 30095 - DNA, 25 bp, Artificial Sequence
  Synthetic
tgtgtgtgaaugggtgtattuagca

SEQ ID NO: 30096 - DNA, 21 bp, Artificial Sequence
  Synthetic
gcuggagaaccaugagcagag

SEQ ID NO: 30097 - DNA, 28 bp, Artificial Sequence
  Synthetic
tccttcatatcatutgttctgtcaggug

SEQ ID NO: 30098 - DNA, 23 bp, Artificial Sequence
  Synthetic
gtgaattctguctcccactuccc

SEQ ID NO: 30099 - DNA, 24 bp, Artificial Sequence
  Synthetic
tttgtaacaagcautcccttcugt

SEQ ID NO: 30100 - DNA, 22 bp, Artificial Sequence
  Synthetic
tcatcatttuccagggccacuc

SEQ ID NO: 30101 - DNA, 28 bp, Artificial Sequence
  Synthetic
acataaactguggctttaaaggacucat

SEQ ID NO: 30102 - DNA, 26 bp, Artificial Sequence
  Synthetic
caggatgtcatacugaccagagtcua

SEQ ID NO: 30103 - DNA, 27 bp, Artificial Sequence
  Synthetic
acttucaaccaaaaccattcttugcag

SEQ ID NO: 30104 - DNA, 29 bp, Artificial Sequence
  Synthetic
cacaacaaaguctgaacattugaacaaaa

SEQ ID NO: 30105 - DNA, 27 bp, Artificial Sequence
  Synthetic
ggtaccttgaugagctaaagaatucct

SEQ ID NO: 30106 - DNA, 29 bp, Artificial Sequence
  Synthetic
catggaautactttattcuacccccaagg

SEQ ID NO: 30107 - DNA, 28 bp, Artificial Sequence
  Synthetic
ccaagcatttuagatgaggaagatucag

SEQ ID NO: 30108 - DNA, 17 bp, Artificial Sequence
  Synthetic
cgggctugcggacatug

SEQ ID NO: 30109 - DNA, 18 bp, Artificial Sequence
  Synthetic
cgttccggcguctcctug

SEQ ID NO: 30110 - DNA, 17 bp, Artificial Sequence
  Synthetic
gccgtugccgttgcuac

SEQ ID NO: 30111 - DNA, 17 bp, Artificial Sequence
  Synthetic
ccgagtcucgccgctuc

SEQ ID NO: 30112 - DNA, 24 bp, Artificial Sequence
  Synthetic
gtcttagcugtgttgttguggaaa

SEQ ID NO: 30113 - DNA, 28 bp, Artificial Sequence
  Synthetic
aggatcctctcutttcattccaactuac

SEQ ID NO: 30114 - DNA, 26 bp, Artificial Sequence
  Synthetic
cacatcaagatucagaacactgguga

SEQ ID NO: 30115 - DNA, 29 bp, Artificial Sequence
  Synthetic
gcagactttguggtcactaaaatgtuact

SEQ ID NO: 30116 - DNA, 29 bp, Artificial Sequence
  Synthetic
ctctcugggaaagaaguagagaaattaut

SEQ ID NO: 30117 - DNA, 25 bp, Artificial Sequence
  Synthetic
catctugccagacccattttucaac

SEQ ID NO: 30118 - DNA, 31 bp, Artificial Sequence
  Synthetic
ttctttattttacaucaactgctgtacucga

SEQ ID NO: 30119 - DNA, 25 bp, Artificial Sequence
  Synthetic
caagagcaacutctcctccacuaaa

SEQ ID NO: 30120 - DNA, 24 bp, Artificial Sequence
  Synthetic
aatgaacaaaacutggacuaggct

SEQ ID NO: 30121 - DNA, 28 bp, Artificial Sequence
  Synthetic
agaaaacactgugaaaagcaaagctuac

SEQ ID NO: 30122 - DNA, 22 bp, Artificial Sequence
  Synthetic
tgaatgactuttggcggauggt

SEQ ID NO: 30123 - DNA, 33 bp, Artificial Sequence
  Synthetic
aattcatttatucaattcctaaacauggccaat

SEQ ID NO: 30124 - DNA, 27 bp, Artificial Sequence
  Synthetic
ctcttcctcuccattggattuaggaaa

SEQ ID NO: 30125 - DNA, 23 bp, Artificial Sequence
  Synthetic
atgatgctcucctgcttatggug

SEQ ID NO: 30126 - DNA, 30 bp, Artificial Sequence
  Synthetic
acattgtttctgtugatattaatggctugg

SEQ ID NO: 30127 - DNA, 28 bp, Artificial Sequence
  Synthetic
cgtgagcacttuccttccataaacuaaa

SEQ ID NO: 30128 - DNA, 26 bp, Artificial Sequence
  Synthetic
ccccttaaaauaaccattgtcccuca

SEQ ID NO: 30129 - DNA, 31 bp, Artificial Sequence; identical to SEQ ID NO: 21019
  Synthetic

SEQ ID NO: 30130 - DNA, 30 bp, Artificial Sequence
  Synthetic
aattgtggttucaagctactgattagauca

SEQ ID NO: 30131 - DNA, 20 bp, Artificial Sequence
  Synthetic
gccagaguggagcgacaaua

SEQ ID NO: 30132 - DNA, 17 bp, Artificial Sequence
  Synthetic
gccacggagguctggug

SEQ ID NO: 30133 - DNA, 18 bp, Artificial Sequence
  Synthetic
cugcaacacguggccaag

SEQ ID NO: 30134 - DNA, 25 bp, Artificial Sequence
  Synthetic
gaatcttcttcacugggtgatguct

SEQ ID NO: 30135 - DNA, 27 bp, Artificial Sequence
  Synthetic
ctcaggacttautcttcagtacttugg

SEQ ID NO: 30136 - DNA, 19 bp, Artificial Sequence
  Synthetic
gggcagugggtatgggtug

SEQ ID NO: 30137 - DNA, 24 bp, Artificial Sequence
  Synthetic
actgataggcgutatctcccauct

SEQ ID NO: 30138 - DNA, 22 bp, Artificial Sequence
  Synthetic
gccatucagaggagcaaagtuc

SEQ ID NO: 30139 - DNA, 29 bp, Artificial Sequence
  Synthetic
cggatgaaaauaatggatttggcucaaaa

SEQ ID NO: 30140 - DNA, 19 bp, Artificial Sequence
  Synthetic
ggaauccaggccacgguac

SEQ ID NO: 30141 - DNA, 20 bp, Artificial Sequence
  Synthetic
tgagccaggccuctaguaca

SEQ ID NO: 30142 - DNA, 23 bp, Artificial Sequence
  Synthetic
cttcttctctuccaagccaccut

SEQ ID NO: 30143 - DNA, 21 bp, Artificial Sequence
  Synthetic
cactacugccagggcttgtua

SEQ ID NO: 30144 - DNA, 22 bp, Artificial Sequence
  Synthetic
caactgggcaaugcgtuaaact

SEQ ID NO: 30145 - DNA, 22 bp, Artificial Sequence
  Synthetic
caacactguggactgctttgug

SEQ ID NO: 30146 - DNA, 23 bp, Artificial Sequence
  Synthetic
ggaagaagaugctgcttgtguag

SEQ ID NO: 30147 - DNA, 21 bp, Artificial Sequence
  Synthetic
catctcccacauccggctaug

SEQ ID NO: 30148 - DNA, 26 bp, Artificial Sequence
  Synthetic
cauaatgcgaaaaaugaagaggacgg

SEQ ID NO: 30149 - DNA, 25 bp, Artificial Sequence
  Synthetic
tgtcctagctagugattcctgtgut

SEQ ID NO: 30150 - DNA, 25 bp, Artificial Sequence
  Synthetic
ctcttgutttcagagauggaccaca

SEQ ID NO: 30151 - DNA, 24 bp, Artificial Sequence
  Synthetic
gcaatcacagguttcccaagcuaa

SEQ ID NO: 30152 - DNA, 21 bp, Artificial Sequence
  Synthetic
acttucagcagcagguagcac

SEQ ID NO: 30153 - DNA, 29 bp, Artificial Sequence
  Synthetic
ctttgaagcagccuttatgtatgtgttut

SEQ ID NO: 30154 - DNA, 21 bp, Artificial Sequence
  Synthetic
gaacttgcgaguggtttcgug

SEQ ID NO: 30155 - DNA, 23 bp, Artificial Sequence
  Synthetic
ttttccgagucatgatcctcgug

SEQ ID NO: 30156 - DNA, 27 bp, Artificial Sequence
  Synthetic
actaatataugcaaactgcucacagca

SEQ ID NO: 30157 - DNA, 28 bp, Artificial Sequence
  Synthetic
ctgagtgtuaggaaggaaaagaaguaca

SEQ ID NO: 30158 - DNA, 20 bp, Artificial Sequence
  Synthetic
cctggtugcaggtcccuaac

SEQ ID NO: 30159 - DNA, 28 bp, Artificial Sequence
  Synthetic
agcgtggacgacaguaattaaaaguaat

SEQ ID NO: 30160 - DNA, 29 bp, Artificial Sequence
  Synthetic
gatagatttatgcuctctggacaagaugt

SEQ ID NO: 30161 - DNA, 23 bp, Artificial Sequence
  Synthetic
cgaagucgaaagaaactgtccuc

SEQ ID NO: 30162 - DNA, 19 bp, Artificial Sequence
  Synthetic
ggagaagccacgugctcua

SEQ ID NO: 30163 - DNA, 18 bp, Artificial Sequence
  Synthetic
cgacgcaguggaaaugcc

SEQ ID NO: 30164 - DNA, 22 bp, Artificial Sequence
  Synthetic
cagcccttcaugttccagttuc

SEQ ID NO: 30165 - DNA, 29 bp, Artificial Sequence
  Synthetic
acaacatgggauaaatgagaagaacucac

SEQ ID NO: 30166 - DNA, 25 bp, Artificial Sequence
  Synthetic
tttcagcagugtcataagtauggct

SEQ ID NO: 30167 - DNA, 22 bp, Artificial Sequence
  Synthetic
gcatggagugccacactctuac

SEQ ID NO: 30168 - DNA, 23 bp, Artificial Sequence
  Synthetic
gaccatucccagaggtacttucc

SEQ ID NO: 30169 - DNA, 29 bp, Artificial Sequence
  Synthetic
ccctgaagttgaaaugtagatggtatcut

SEQ ID NO: 30170 - DNA, 22 bp, Artificial Sequence
  Synthetic
gggtatccauctgagagctugc

SEQ ID NO: 30171 - DNA, 23 bp, Artificial Sequence
  Synthetic
atgccacattugagagagctcut

SEQ ID NO: 30172 - DNA, 28 bp, Artificial Sequence
  Synthetic
caccaacatacutcagaagcauaaacag

SEQ ID NO: 30173 - DNA, 28 bp, Artificial Sequence
  Synthetic
ctgcagaguggactagtttgttuaaaga

SEQ ID NO: 30174 - DNA, 26 bp, Artificial Sequence
  Synthetic
ctttggtttuaggccactgagauaga

SEQ ID NO: 30175 - DNA, 25 bp, Artificial Sequence
  Synthetic
aggagaacaaaggacuaagactugc

SEQ ID NO: 30176 - DNA, 21 bp, Artificial Sequence
  Synthetic
ctgctgcaucagggugagaat

SEQ ID NO: 30177 - DNA, 28 bp, Artificial Sequence
  Synthetic
ttgaaggtagtguaagaaaagcgaauct

SEQ ID NO: 30178 - DNA, 23 bp, Artificial Sequence
  Synthetic
ccatctgtatuccccctgcttuc

SEQ ID NO: 30179 - DNA, 22 bp, Artificial Sequence
  Synthetic
agatgccucggcacatctttut

SEQ ID NO: 30180 - DNA, 22 bp, Artificial Sequence
  Synthetic
tcatuccagccaguaacaaccc

SEQ ID NO: 30181 - DNA, 27 bp, Artificial Sequence
  Synthetic
tgaagatgtaauaacctcgaacuccca

SEQ ID NO: 30182 - DNA, 25 bp, Artificial Sequence
  Synthetic
ggattggaaguttccctacauaccc

SEQ ID NO: 30183 - DNA, 25 bp, Artificial Sequence
  Synthetic
ccataggatuggcagagatctgcua

SEQ ID NO: 30184 - DNA, 21 bp, Artificial Sequence
  Synthetic
cattgaagcuggccagtaucg

SEQ ID NO: 30185 - DNA, 27 bp, Artificial Sequence
  Synthetic
cccacaatttagugcttcagagtttut

SEQ ID NO: 30186 - DNA, 26 bp, Artificial Sequence
  Synthetic
gagtggaagutctcagagacuaacag

SEQ ID NO: 30187 - DNA, 23 bp, Artificial Sequence
  Synthetic
gccucccaaagtgcuaggaaaaa

SEQ ID NO: 30188 - DNA, 28 bp, Artificial Sequence
  Synthetic
ctagagagtaccguaatgggttaatugg

SEQ ID NO: 30189 - DNA, 30 bp, Artificial Sequence
  Synthetic
atacacctgtuttatgttctcaucagacat

SEQ ID NO: 30190 - DNA, 22 bp, Artificial Sequence
  Synthetic
gggctcacacugcaacagtaua

SEQ ID NO: 30191 - DNA, 26 bp, Artificial Sequence
  Synthetic
atcaguacaaaaccaaacucaaacut

SEQ ID NO: 30192 - DNA, 25 bp, Artificial Sequence
  Synthetic
cattcatttagcauccccaguacct

SEQ ID NO: 30193 - DNA, 30 bp, Artificial Sequence
  Synthetic
tcatgaaaacaaatcutcagtcatctccut

SEQ ID NO: 30194 - DNA, 22 bp, Artificial Sequence
  Synthetic
gcaggcagcutgactaaugagt

SEQ ID NO: 30195 - DNA, 17 bp, Artificial Sequence
  Synthetic
ggccgtucccgtagucc

SEQ ID NO: 30196 - DNA, 23 bp, Artificial Sequence
  Synthetic
cctccatacccuccccacttaua

SEQ ID NO: 30197 - DNA, 24 bp, Artificial Sequence
  Synthetic
gtatctaaccccacautccccauc

SEQ ID NO: 30198 - DNA, 21 bp, Artificial Sequence
  Synthetic
tuggtgtatgauggcccagac

SEQ ID NO: 30199 - DNA, 24 bp, Artificial Sequence
  Synthetic
cacagtatgguaacacggtugact

SEQ ID NO: 30200 - DNA, 25 bp, Artificial Sequence
  Synthetic
tauaactgcattguagcccaaaacg

SEQ ID NO: 30201 - DNA, 26 bp, Artificial Sequence
  Synthetic
ctagaacagcaauggacataggctua

SEQ ID NO: 30202 - DNA, 26 bp, Artificial Sequence
  Synthetic
gggcttgtacugaactatctagugat

SEQ ID NO: 30203 - DNA, 30 bp, Artificial Sequence
  Synthetic
tttttccatcaaggucatcttctgttttuc

SEQ ID NO: 30204 - DNA, 21 bp, Artificial Sequence
  Synthetic
cctacugccctgauccaggat

SEQ ID NO: 30205 - DNA, 23 bp, Artificial Sequence
  Synthetic
ggatttguccccacacacttcuc

SEQ ID NO: 30206 - DNA, 28 bp, Artificial Sequence
  Synthetic
attggttctcacaaauagtaggtgtgut

SEQ ID NO: 30207 - DNA, 24 bp, Artificial Sequence
  Synthetic
aaaatgauggaggagggaaaggug

SEQ ID NO: 30208 - DNA, 20 bp, Artificial Sequence
  Synthetic
agcttcugcagctgcttcut

SEQ ID NO: 30209 - DNA, 21 bp, Artificial Sequence
  Synthetic
ccatgttccutgccacctcuc

SEQ ID NO: 30210 - DNA, 23 bp, Artificial Sequence
  Synthetic
cttttctagaugtcctgggcuct

SEQ ID NO: 30211 - DNA, 21 bp, Artificial Sequence
  Synthetic
gaaggagaacaucgccaucgt

SEQ ID NO: 30212 - DNA, 17 bp, Artificial Sequence
  Synthetic
ggaggccaguccccuga

SEQ ID NO: 30213 - DNA, 18 bp, Artificial Sequence
  Synthetic
ggtggacucgcugcagac

SEQ ID NO: 30214 - DNA, 20 bp, Artificial Sequence
  Synthetic
gugagggagaagugggagac

SEQ ID NO: 30215 - DNA, 24 bp, Artificial Sequence
  Synthetic
gggaacauaggctttgagcttuct

SEQ ID NO: 30216 - DNA, 21 bp, Artificial Sequence
  Synthetic
cctccaaggaggutgccttug

SEQ ID NO: 30217 - DNA, 22 bp, Artificial Sequence
  Synthetic
gcaccggcuacagaatgagaua

SEQ ID NO: 30218 - DNA, 20 bp, Artificial Sequence
  Synthetic
gccccutcctctcugagagt

SEQ ID NO: 30219 - DNA, 18 bp, Artificial Sequence
  Synthetic
gcatgacugcgaccugct

SEQ ID NO: 30220 - DNA, 21 bp, Artificial Sequence
  Synthetic
gctccattuctggcacugaga

SEQ ID NO: 30221 - DNA, 20 bp, Artificial Sequence
  Synthetic
cacaagccccucattucacc

SEQ ID NO: 30222 - DNA, 25 bp, Artificial Sequence
  Synthetic
agaatgagaaugacaagggagaugg

SEQ ID NO: 30223 - DNA, 17 bp, Artificial Sequence
  Synthetic
aaccugcagcgggugaa

SEQ ID NO: 30224 - DNA, 19 bp, Artificial Sequence
  Synthetic
cucccgagacaggtcugag

SEQ ID NO: 30225 - DNA, 24 bp, Artificial Sequence
  Synthetic
ggaacctaagtucctggtagctut

SEQ ID NO: 30226 - DNA, 21 bp, Artificial Sequence
  Synthetic
caggccagacaccuccatuag

SEQ ID NO: 30227 - DNA, 27 bp, Artificial Sequence
  Synthetic
ctttgcttautttcttcccuccaacag

SEQ ID NO: 30228 - DNA, 23 bp, Artificial Sequence
  Synthetic
gggcctctugtagagctttctuc

SEQ ID NO: 30229 - DNA, 23 bp, Artificial Sequence
  Synthetic
ccagactagagugttgtccuggt

SEQ ID NO: 30230 - DNA, 21 bp, Artificial Sequence
  Synthetic
ttcttgagcuctgagcacucg

SEQ ID NO: 30231 - DNA, 25 bp, Artificial Sequence
  Synthetic
ccctagguctcctctcttuaaccat

SEQ ID NO: 30232 - DNA, 22 bp, Artificial Sequence
  Synthetic
ggacttcuccagcgtctcttug

SEQ ID NO: 30233 - DNA, 23 bp, Artificial Sequence
  Synthetic
tcucttttatagugccccaccct

SEQ ID NO: 30234 - DNA, 22 bp, Artificial Sequence
  Synthetic
tcctctcugctccacucaacat

SEQ ID NO: 30235 - DNA, 22 bp, Artificial Sequence
  Synthetic
catgggtgacuctggacactuc

SEQ ID NO: 30236 - DNA, 24 bp, Artificial Sequence
  Synthetic
gtcagcctuagggtaaagtggaug

SEQ ID NO: 30237 - DNA, 22 bp, Artificial Sequence
  Synthetic
cctaacuccccaccttcatcug

SEQ ID NO: 30238 - DNA, 22 bp, Artificial Sequence
  Synthetic
ctggcccuttgtgtctucagaa

SEQ ID NO: 30239 - DNA, 21 bp, Artificial Sequence
  Synthetic
cttctcccugatccacuacgc

SEQ ID NO: 30240 - DNA, 19 bp, Artificial Sequence
  Synthetic
gcauaggtggugaggccaa

SEQ ID NO: 30241 - DNA, 17 bp, Artificial Sequence
  Synthetic
ctcccaccccucaugcc

SEQ ID NO: 30242 - DNA, 24 bp, Artificial Sequence
  Synthetic
acatcttctcauacactgcctugg

SEQ ID NO: 30243 - DNA, 24 bp, Artificial Sequence
  Synthetic
agtgctcactuatcctttcccuct

SEQ ID NO: 30244 - DNA, 19 bp, Artificial Sequence
  Synthetic
cactcacaucgguggccat

SEQ ID NO: 30245 - DNA, 22 bp, Artificial Sequence
  Synthetic
ctcccttucccaactctaccug

SEQ ID NO: 30246 - DNA, 24 bp, Artificial Sequence
  Synthetic
aaaacaggagauggcaggaaugat

SEQ ID NO: 30247 - DNA, 23 bp, Artificial Sequence
  Synthetic
caggatttcacuctgtcctuccc

SEQ ID NO: 30248 - DNA, 18 bp, Artificial Sequence
  Synthetic
ggtaacucgggucagcct

SEQ ID NO: 30249 - DNA, 25 bp, Artificial Sequence
  Synthetic
cctgagttttgautggtctctgugg

SEQ ID NO: 30250 - DNA, 17 bp, Artificial Sequence
  Synthetic
tgggugggtgtcuggga

SEQ ID NO: 30251 - DNA, 19 bp, Artificial Sequence
  Synthetic
gccttguctcctgcuccag

SEQ ID NO: 30252 - DNA, 23 bp, Artificial Sequence
  Synthetic
cctctgcaucttcttucccagac

SEQ ID NO: 30253 - DNA, 21 bp, Artificial Sequence
  Synthetic
gcccttugacattcgcacuga

SEQ ID NO: 30254 - DNA, 22 bp, Artificial Sequence
  Synthetic
ctcagggcagugaagaagaguc

SEQ ID NO: 30255 - DNA, 27 bp, Artificial Sequence
  Synthetic
gactgattggacuttgtttccttucaa

SEQ ID NO: 30256 - DNA, 19 bp, Artificial Sequence
  Synthetic
gggacgagcuctcctaugc

SEQ ID NO: 30257 - DNA, 25 bp, Artificial Sequence
  Synthetic
ccttctatgacugtgccatctucac

SEQ ID NO: 30258 - DNA, 20 bp, Artificial Sequence
  Synthetic
cttctgcagcugcttctugc

SEQ ID NO: 30259 - DNA, 22 bp, Artificial Sequence
  Synthetic
tgugaggactugaccagaccat

SEQ ID NO: 30260 - DNA, 23 bp, Artificial Sequence
  Synthetic
gagcaggaaaagcautgagcauc

SEQ ID NO: 30261 - DNA, 18 bp, Artificial Sequence
  Synthetic
gagcuggaggagtugcgt

SEQ ID NO: 30262 - DNA, 19 bp, Artificial Sequence
  Synthetic
cagtccccuctgggugagt

SEQ ID NO: 30263 - DNA, 18 bp, Artificial Sequence
  Synthetic
ggactcgcugcagaccuc

SEQ ID NO: 30264 - DNA, 20 bp, Artificial Sequence
  Synthetic
gaccaaaagccuggagcuca

SEQ ID NO: 30265 - DNA, 22 bp, Artificial Sequence
  Synthetic
cctcaaccgagutaccgtgtuc

SEQ ID NO: 30266 - DNA, 20 bp, Artificial Sequence
  Synthetic
gctctggccuctcacugaac

SEQ ID NO: 30267 - DNA, 22 bp, Artificial Sequence
  Synthetic
gcaccggcuacagaatgagauc

SEQ ID NO: 30268 - DNA, 20 bp, Artificial Sequence
  Synthetic
tagctaagcaucgcctgugt

SEQ ID NO: 30269 - DNA, 20 bp, Artificial Sequence
  Synthetic
tccttuccaaggccaacucg

SEQ ID NO: 30270 - DNA, 23 bp, Artificial Sequence
  Synthetic
gctgggaagggaagugattugat

SEQ ID NO: 30271 - DNA, 24 bp, Artificial Sequence
  Synthetic
agtgctgatcuagaatggtgctuc

SEQ ID NO: 30272 - DNA, 21 bp, Artificial Sequence
  Synthetic
gggaagugggaaaaugaacca

SEQ ID NO: 30273 - DNA, 17 bp, Artificial Sequence
  Synthetic
agcugggcgagcagauc

SEQ ID NO: 30274 - DNA, 19 bp, Artificial Sequence
  Synthetic
cucccgagacaggtcugag

SEQ ID NO: 30275 - DNA, 22 bp, Artificial Sequence
  Synthetic
aactgacutgctgtuccagaga

SEQ ID NO: 30276 - DNA, 23 bp, Artificial Sequence
  Synthetic
gggtctgcutgtactgttauggg

SEQ ID NO: 30277 - DNA, 21 bp, Artificial Sequence
  Synthetic
cctggcuccttctctcuacca

SEQ ID NO: 30278 - DNA, 23 bp, Artificial Sequence
  Synthetic
gcctctugcagagctttcttcuc

SEQ ID NO: 30279 - DNA, 20 bp, Artificial Sequence
  Synthetic
agcagcauggacctugacat

SEQ ID NO: 30280 - DNA, 24 bp, Artificial Sequence
  Synthetic
ctcagcattcauctcctcctcauc

SEQ ID NO: 30281 - DNA, 26 bp, Artificial Sequence
  Synthetic
gagttacccucctatttgagtgaugt

SEQ ID NO: 30282 - DNA, 22 bp, Artificial Sequence
  Synthetic
gtgtgaacucctccttcaugga

SEQ ID NO: 30283 - DNA, 22 bp, Artificial Sequence
  Synthetic
caaggttucaggacctcaggua

SEQ ID NO: 30284 - DNA, 24 bp, Artificial Sequence
  Synthetic
caggaaaagcaucagaggagucaa

SEQ ID NO: 30285 - DNA, 22 bp, Artificial Sequence
  Synthetic
catgggtgacuctggacactuc

SEQ ID NO: 30286 - DNA, 22 bp, Artificial Sequence
  Synthetic
gtggtgguaggtagggagaugt

SEQ ID NO: 30287 - DNA, 26 bp, Artificial Sequence
  Synthetic
tttctcuattgcattttuggccacag

SEQ ID NO: 30288 - DNA, 22 bp, Artificial Sequence
  Synthetic
cagaatcccugctcctctguac

SEQ ID NO: 30289 - DNA, 23 bp, Artificial Sequence
  Synthetic
cccacttcuccctgatccacuat

SEQ ID NO: 30290 - DNA, 24 bp, Artificial Sequence
  Synthetic
gagaautcaggtgguaaggccaaa

SEQ ID NO: 30291 - DNA, 17 bp, Artificial Sequence
  Synthetic
gcucccacccctcaugc

SEQ ID NO: 30292 - DNA, 26 bp, Artificial Sequence
  Synthetic
gttgggaagagugaacttgaaaacuc

SEQ ID NO: 30293 - DNA, 23 bp, Artificial Sequence
  Synthetic
ttgctactugccttttcctucca

SEQ ID NO: 30294 - DNA, 21 bp, Artificial Sequence
  Synthetic
gatggcgccugtcagcttaua

SEQ ID NO: 30295 - DNA, 27 bp, Artificial Sequence
  Synthetic
cagggatuaaggagacaagttttcuct

SEQ ID NO: 30296 - DNA, 21 bp, Artificial Sequence
  Synthetic
ccaggtugccatggagauagt

SEQ ID NO: 30297 - DNA, 29 bp, Artificial Sequence
  Synthetic
ccctaacttttctutctctccttcttcuc

SEQ ID NO: 30298 - DNA, 23 bp, Artificial Sequence
  Synthetic
gggaaggcucatatcugagacca

SEQ ID NO: 30299 - DNA, 20 bp, Artificial Sequence
  Synthetic
gucctguaccgcagaaaggg

SEQ ID NO: 30300 - DNA, 21 bp, Artificial Sequence
  Synthetic
ggctgggaucagggagatuct

SEQ ID NO: 30301 - DNA, 17 bp, Artificial Sequence
  Synthetic
acugggauaggccggga

SEQ ID NO: 30302 - DNA, 25 bp, Artificial Sequence
  Synthetic
ccuagacacaaauagaagacacuct

SEQ ID NO: 30303 - DNA, 23 bp, Artificial Sequence
  Synthetic
gttcgacaaaaucgaggacaugg

SEQ ID NO: 30304 - DNA, 21 bp, Artificial Sequence
  Synthetic
ctctctguccacccaggtgua

SEQ ID NO: 30305 - DNA, 25 bp, Artificial Sequence
  Synthetic
tttgaccucaagaaggatgtctucg

SEQ ID NO: 30306 - DNA, 26 bp, Artificial Sequence
  Synthetic
tggagagaagaggagautaagctuga

SEQ ID NO: 30307 - DNA, 19 bp, Artificial Sequence
  Synthetic
ccagtcuggtggactuggg

SEQ ID NO: 30308 - DNA, 24 bp, Artificial Sequence
  Synthetic
gggagagaauagtttgagctccug

SEQ ID NO: 30309 - DNA, 28 bp, Artificial Sequence
  Synthetic
ccatatggtgtugtcctctatttctuag

SEQ ID NO: 30310 - DNA, 19 bp, Artificial Sequence
  Synthetic
ggacaccccucgacttcuc

SEQ ID NO: 30311 - DNA, 22 bp, Artificial Sequence
  Synthetic
tccgtgagcuctacaagaucct

SEQ ID NO: 30312 - DNA, 19 bp, Artificial Sequence
  Synthetic
cttgcucctgcguaaagcc

SEQ ID NO: 30313 - DNA, 18 bp, Artificial Sequence
  Synthetic
cccctacucctccgccut

SEQ ID NO: 30314 - DNA, 22 bp, Artificial Sequence
  Synthetic
gcagcuacagaagtuggaacga

SEQ ID NO: 30315 - DNA, 24 bp, Artificial Sequence
  Synthetic
tctcttcttucagcagcugagaac

SEQ ID NO: 30316 - DNA, 27 bp, Artificial Sequence
  Synthetic
agcctaggataugaacatactgctcut

SEQ ID NO: 30317 - DNA, 21 bp, Artificial Sequence
  Synthetic
acctacccaucaggaccucac

SEQ ID NO: 30318 - DNA, 24 bp, Artificial Sequence
  Synthetic
gtgagctaacacugaagtcctcut

SEQ ID NO: 30319 - DNA, 22 bp, Artificial Sequence
  Synthetic
gaatctugccaatgtggugagc

SEQ ID NO: 30320 - DNA, 24 bp, Artificial Sequence
  Synthetic
ccctgatctaautgtgccctctut

SEQ ID NO: 30321 - DNA, 22 bp, Artificial Sequence
  Synthetic
cacacaccugaagtactugcca

SEQ ID NO: 30322 - DNA, 26 bp, Artificial Sequence
  Synthetic
ggaccataaagauttccagactgcua

SEQ ID NO: 30323 - DNA, 22 bp, Artificial Sequence
  Synthetic
tggattgggccugataaagcug

SEQ ID NO: 30324 - DNA, 30 bp, Artificial Sequence
  Synthetic
aattgtagtgcacaaagutctgtttttcut

SEQ ID NO: 30325 - DNA, 22 bp, Artificial Sequence
  Synthetic
agtgaauccagtcuggcaaagg

SEQ ID NO: 30326 - DNA, 24 bp, Artificial Sequence
  Synthetic
guggagcaagaugaggaagaagat

SEQ ID NO: 30327 - DNA, 31 bp, Artificial Sequence
  Synthetic
cacactggcuttgagaataauaaaacaaaac

SEQ ID NO: 30328 - DNA, 25 bp, Artificial Sequence
  Synthetic
gtacttttuaagggttgugggacct

SEQ ID NO: 30329 - DNA, 29 bp, Artificial Sequence
  Synthetic
agcacaaagguagttaattcugaaagaca

SEQ ID NO: 30330 - DNA, 26 bp, Artificial Sequence
  Synthetic
ctacattactgtugcactcctgauct

SEQ ID NO: 30331 - DNA, 28 bp, Artificial Sequence
  Synthetic
gtgacaaacaaatuatcagtcttgggut

SEQ ID NO: 30332 - DNA, 23 bp, Artificial Sequence
  Synthetic
tgtgtggagaaaugatggctugt

SEQ ID NO: 30333 - DNA, 30 bp, Artificial Sequence
  Synthetic
gcttataacagugaccctgaaaaaucaaga

SEQ ID NO: 30334 - DNA, 29 bp, Artificial Sequence
  Synthetic
gaattgtgaaaucatagcaaagagugacc

SEQ ID NO: 30335 - DNA, 28 bp, Artificial Sequence
  Synthetic
ttgacattaagagcuctgacacattcut

SEQ ID NO: 30336 - DNA, 29 bp, Artificial Sequence
  Synthetic
ccttttatggaccaautagcattccauca

SEQ ID NO: 30337 - DNA, 24 bp, Artificial Sequence
  Synthetic
tctauaggcacctcctuccaaagt

SEQ ID NO: 30338 - DNA, 22 bp, Artificial Sequence
  Synthetic
tgggtgggautcaccactttuc

SEQ ID NO: 30339 - DNA, 24 bp, Artificial Sequence
  Synthetic
ttacaacgtguctctgcttctcuc

SEQ ID NO: 30340 - DNA, 21 bp, Artificial Sequence
  Synthetic
ttcttggucaccctcaggtug

SEQ ID NO: 30341 - DNA, 28 bp, Artificial Sequence
  Synthetic
ctatgatgaagcguttaggcatgttuaa

SEQ ID NO: 30342 - DNA, 21 bp, Artificial Sequence
  Synthetic
caggctggutgagcaacctua

SEQ ID NO: 30343 - DNA, 27 bp, Artificial Sequence
  Synthetic
gctagtggauaagtttttggaggaugt

SEQ ID NO: 30344 - DNA, 22 bp, Artificial Sequence
  Synthetic
gaaattcaggcccuccaggaut

SEQ ID NO: 30345 - DNA, 23 bp, Artificial Sequence
  Synthetic
catcccaccaugatcaggaucac

SEQ ID NO: 30346 - DNA, 29 bp, Artificial Sequence
  Synthetic
gtgtgtctttccutcaagatgtaaatguc

SEQ ID NO: 30347 - DNA, 23 bp, Artificial Sequence
  Synthetic
caacatagugagacccccacaua

SEQ ID NO: 30348 - DNA, 24 bp, Artificial Sequence
  Synthetic
agctttttctuccaaagccactug

SEQ ID NO: 30349 - DNA, 24 bp, Artificial Sequence
  Synthetic
tgtgaagttgcucgaatgtctuct

SEQ ID NO: 30350 - DNA, 31 bp, Artificial Sequence
  Synthetic
tgtctatctactgutattcttacctggucat

SEQ ID NO: 30351 - DNA, 23 bp, Artificial Sequence
  Synthetic
cacaccttguaatcacccctuga

SEQ ID NO: 30352 - DNA, 24 bp, Artificial Sequence
  Synthetic
tgtggaggaaggauacauttccua

SEQ ID NO: 30353 - DNA, 27 bp, Artificial Sequence
  Synthetic
cacctcacatuctaaagtgttgctuac

SEQ ID NO: 30354 - DNA, 23 bp, Artificial Sequence
  Synthetic
ttgagatcagggaugctccuagt

SEQ ID NO: 30355 - DNA, 23 bp, Artificial Sequence
  Synthetic
aaaagctctaugctgccctucat

SEQ ID NO: 30356 - DNA, 28 bp, Artificial Sequence
  Synthetic
aaatgaactagtaugaactttgccucca

SEQ ID NO: 30357 - DNA, 24 bp, Artificial Sequence
  Synthetic
gacutcatgaggtuaacccaggag

SEQ ID NO: 30358 - DNA, 24 bp, Artificial Sequence
  Synthetic
agcagctgcaacuctttgtattuc

SEQ ID NO: 30359 - DNA, 22 bp, Artificial Sequence
  Synthetic
ccttacccutctgggtctucct

SEQ ID NO: 30360 - DNA, 21 bp, Artificial Sequence
  Synthetic
ctgtgaatgcgugcttcctut

SEQ ID NO: 30361 - DNA, 20 bp, Artificial Sequence
  Synthetic
gagccaaucaggacugcaca

SEQ ID NO: 30362 - DNA, 22 bp, Artificial Sequence
  Synthetic
aggactucttcctguacaacgc

SEQ ID NO: 30363 - DNA, 23 bp, Artificial Sequence
  Synthetic
ggccatgugagctttuagaaaca

SEQ ID NO: 30364 - DNA, 24 bp, Artificial Sequence
  Synthetic
aagcuaaagaccaggauacaggga

SEQ ID NO: 30365 - DNA, 28 bp, Artificial Sequence
  Synthetic
cacatacauatgcatgaguacacacact

SEQ ID NO: 30366 - DNA, 22 bp, Artificial Sequence
  Synthetic
tgacccctgugaaccagtttuc

SEQ ID NO: 30367 - DNA, 31 bp, Artificial Sequence
  Synthetic
agtgacctcuaccaaacaataatgaaauaat

SEQ ID NO: 30368 - DNA, 24 bp, Artificial Sequence
  Synthetic
aaacgugagttgcucaaaccaaat

SEQ ID NO: 30369 - DNA, 20 bp, Artificial Sequence
  Synthetic
caccctguatgttgcctugg

SEQ ID NO: 30370 - DNA, 25 bp, Artificial Sequence
  Synthetic
gggttgattuggagattcagtgugt

SEQ ID NO: 30371 - DNA, 21 bp, Artificial Sequence
  Synthetic
gtagcctagucccctcccaut

SEQ ID NO: 30372 - DNA, 24 bp, Artificial Sequence
  Synthetic
aagutacagtaguagaggcggagt

SEQ ID NO: 30373 - DNA, 26 bp, Artificial Sequence
  Synthetic
tccacctugagttttaatgtguaggg

SEQ ID NO: 30374 - DNA, 20 bp, Artificial Sequence
  Synthetic
gcagcucaccatgtaugcct

SEQ ID NO: 30375 - DNA, 25 bp, Artificial Sequence
  Synthetic
cattgcttuactaaagggucaggct

SEQ ID NO: 30376 - DNA, 18 bp, Artificial Sequence
  Synthetic
ccaccauggacgccauca

SEQ ID NO: 30377 - DNA, 17 bp, Artificial Sequence
  Synthetic
gtgccaggcucgagucc

SEQ ID NO: 30378 - DNA, 19 bp, Artificial Sequence
  Synthetic
ccagcucgaggaggacauc

SEQ ID NO: 30379 - DNA, 27 bp, Artificial Sequence
  Synthetic
gagaaagagaaagagutagccatucgt

SEQ ID NO: 30380 - DNA, 21 bp, Artificial Sequence
  Synthetic
gcaccgaagaugaacuggaca

SEQ ID NO: 30381 - DNA, 25 bp, Artificial Sequence
  Synthetic
ggtaaacttccutcattgctcucca

SEQ ID NO: 30382 - DNA, 17 bp, Artificial Sequence
  Synthetic
gggaguagctcgcugga

SEQ ID NO: 30383 - DNA, 17 bp, Artificial Sequence
  Synthetic
gggaggaugcgcctcug

SEQ ID NO: 30384 - DNA, 25 bp, Artificial Sequence
  Synthetic
cttgggttttcutgcttgtcttuct

SEQ ID NO: 30385 - DNA, 25 bp, Artificial Sequence
  Synthetic
gaatcaagacugtacattgcuccct

SEQ ID NO: 30386 - DNA, 23 bp, Artificial Sequence
  Synthetic
gggtgtcutatgtatgaaugcgt

SEQ ID NO: 30387 - DNA, 23 bp, Artificial Sequence
  Synthetic
ccuaaaaaccauacgagccauca

SEQ ID NO: 30388 - DNA, 23 bp, Artificial Sequence
  Synthetic
ccttaacauctgttggcugagct

SEQ ID NO: 30389 - DNA, 27 bp, Artificial Sequence
  Synthetic
tggcttcauccacaactctcatatuac

SEQ ID NO: 30390 - DNA, 22 bp, Artificial Sequence
  Synthetic
cctcacucaccctccatttcut

SEQ ID NO: 30391 - DNA, 25 bp, Artificial Sequence
  Synthetic
gaaggcatgguggtgagtttatuac

SEQ ID NO: 30392 - DNA, 28 bp, Artificial Sequence
  Synthetic
tgaggtctctutgtgttctctatuaact

SEQ ID NO: 30393 - DNA, 24 bp, Artificial Sequence
  Synthetic
gcctagaatucagcccaagtttut

SEQ ID NO: 30394 - DNA, 24 bp, Artificial Sequence
  Synthetic
tgtgattgatguttgcctgccuaa

SEQ ID NO: 30395 - DNA, 23 bp, Artificial Sequence
  Synthetic
gcagcuaaggaggttttcacaug

SEQ ID NO: 30396 - DNA, 18 bp, Artificial Sequence
  Synthetic
gcugccccgggagaaauc

SEQ ID NO: 30397 - DNA, 20 bp, Artificial Sequence
  Synthetic
gctgttgguctggtcuccat

SEQ ID NO: 30398 - DNA, 20 bp, Artificial Sequence
  Synthetic
ccugaggacugggaaaggga

SEQ ID NO: 30399 - DNA, 20 bp, Artificial Sequence
  Synthetic
acgcucctctugaagaagcc

SEQ ID NO: 30400 - DNA, 21 bp, Artificial Sequence
  Synthetic
ggctugggcaaaaatguccaa

SEQ ID NO: 30401 - DNA, 21 bp, Artificial Sequence
  Synthetic
ctgcccattucttgtcaccuc

SEQ ID NO: 30402 - DNA, 18 bp, Artificial Sequence
  Synthetic
cagguccaccuggacagc

SEQ ID NO: 30403 - DNA, 19 bp, Artificial Sequence
  Synthetic
tcagctgcuctcccacuca

SEQ ID NO: 30404 - DNA, 22 bp, Artificial Sequence
  Synthetic
gagttccccucctctccauact

SEQ ID NO: 30405 - DNA, 19 bp, Artificial Sequence
  Synthetic
ccctgtcuggttgacucga

SEQ ID NO: 30406 - DNA, 18 bp, Artificial Sequence
  Synthetic
cauggagacgcgtgucct

SEQ ID NO: 30407 - DNA, 22 bp, Artificial Sequence
  Synthetic
ctacacacauctgcacacaugg

SEQ ID NO: 30408 - DNA, 19 bp, Artificial Sequence
  Synthetic
cccaagugatgcugagcca

SEQ ID NO: 30409 - DNA, 17 bp, Artificial Sequence
  Synthetic
acugtgccugggacacc

SEQ ID NO: 30410 - DNA, 23 bp, Artificial Sequence
  Synthetic
gcaagaccauagggaatacucca

SEQ ID NO: 30411 - DNA, 27 bp, Artificial Sequence
  Synthetic
gggctattatgaauaaagctgctauga

SEQ ID NO: 30412 - DNA, 22 bp, Artificial Sequence
  Synthetic
cactaccautcaccuacagcca

SEQ ID NO: 30413 - DNA, 24 bp, Artificial Sequence
  Synthetic
gagagactgutgactggtgugaaa

SEQ ID NO: 30414 - DNA, 25 bp, Artificial Sequence
  Synthetic
caaacgttcauaggcaaatgucagg

SEQ ID NO: 30415 - DNA, 22 bp, Artificial Sequence
  Synthetic
agggtgccuagacaagagguag

SEQ ID NO: 30416 - DNA, 21 bp, Artificial Sequence
  Synthetic
cagccucctttggtuagcaag

SEQ ID NO: 30417 - DNA, 22 bp, Artificial Sequence
  Synthetic
tggcgagaggauattccaguga

SEQ ID NO: 30418 - DNA, 23 bp, Artificial Sequence
  Synthetic
tccaaaccaggaggaucagtcuc

SEQ ID NO: 30419 - DNA, 25 bp, Artificial Sequence
  Synthetic
cttactagacacucctctcctcucc

SEQ ID NO: 30420 - DNA, 22 bp, Artificial Sequence
  Synthetic
cccctcgggugctaacttcuat

SEQ ID NO: 30421 - DNA, 27 bp, Artificial Sequence
  Synthetic
cctatgagttcaugagcacattctuct

SEQ ID NO: 30422 - DNA, 23 bp, Artificial Sequence
  Synthetic
gaagcttcacuctgagcauaaca

SEQ ID NO: 30423 - DNA, 22 bp, Artificial Sequence
  Synthetic
aagtgtgaaccugaagggtguc

SEQ ID NO: 30424 - DNA, 22 bp, Artificial Sequence
  Synthetic
cgttgcuccatcacccuagaac

SEQ ID NO: 30425 - DNA, 27 bp, Artificial Sequence
  Synthetic
gcttccttugaaactgacatgtucaat

SEQ ID NO: 30426 - DNA, 24 bp, Artificial Sequence
  Synthetic
accttcccacaucatcctttcuct

SEQ ID NO: 30427 - DNA, 31 bp, Artificial Sequence
  Synthetic
aatctgagaauagaaaaccttaaccaacuaa

SEQ ID NO: 30428 - DNA, 18 bp, Artificial Sequence
  Synthetic
cgggacaaguccgacuca

SEQ ID NO: 30429 - DNA, 20 bp, Artificial Sequence
  Synthetic
gaccagcgcuacgtccttua

SEQ ID NO: 30430 - DNA, 20 bp, Artificial Sequence
  Synthetic
ccaaagccuggagcttguca

SEQ ID NO: 30431 - DNA, 17 bp, Artificial Sequence
  Synthetic
ggcacaauccgcugcac

SEQ ID NO: 30432 - DNA, 22 bp, Artificial Sequence
  Synthetic
cuccacgggagcaaauacagag

SEQ ID NO: 30433 - DNA, 26 bp, Artificial Sequence
  Synthetic
cactctcctttugaccttagcatuaa

SEQ ID NO: 30434 - DNA, 27 bp, Artificial Sequence
  Synthetic
ggatgaaaagucaaaactgaccaguct

SEQ ID NO: 30435 - DNA, 26 bp, Artificial Sequence
  Synthetic
gctgtttgaagaguttgccatagaug

SEQ ID NO: 30436 - DNA, 21 bp, Artificial Sequence
  Synthetic
ccatgcuccaaagguagcaag

SEQ ID NO: 30437 - DNA, 23 bp, Artificial Sequence
  Synthetic
aaagacaaagtcugccctctgut

SEQ ID NO: 30438 - DNA, 26 bp, Artificial Sequence
  Synthetic
ggcaggagauagaacagatggtagua

SEQ ID NO: 30439 - DNA, 21 bp, Artificial Sequence
  Synthetic
tcaacuacggccgcatctaug

SEQ ID NO: 30440 - DNA, 23 bp, Artificial Sequence
  Synthetic
gcccaatgtucatcagaactguc

SEQ ID NO: 30441 - DNA, 22 bp, Artificial Sequence
  Synthetic
tgggtauctcactctucccaca

SEQ ID NO: 30442 - DNA, 22 bp, Artificial Sequence
  Synthetic
gggaaggaaaugggtctuagca

SEQ ID NO: 30443 - DNA, 23 bp, Artificial Sequence
  Synthetic
gatagattcugcttcccauggct

SEQ ID NO: 30444 - DNA, 22 bp, Artificial Sequence
  Synthetic
agtctcaggugtgtcactcuga

SEQ ID NO: 30445 - DNA, 22 bp, Artificial Sequence
  Synthetic
cagggccugatataggtgtgug

SEQ ID NO: 30446 - DNA, 20 bp, Artificial Sequence
  Synthetic
ctccccaaagcucaggtuca

SEQ ID NO: 30447 - DNA, 22 bp, Artificial Sequence
  Synthetic
cagagtgggcauctggtaauca

SEQ ID NO: 30448 - DNA, 21 bp, Artificial Sequence
  Synthetic
tgacgcuctgagtagugcaga

SEQ ID NO: 30449 - DNA, 25 bp, Artificial Sequence
  Synthetic
gacattgugagagagagaacctucc

SEQ ID NO: 30450 - DNA, 21 bp, Artificial Sequence
  Synthetic
cctucccagagauaaccccua

SEQ ID NO: 30451 - DNA, 20 bp, Artificial Sequence
  Synthetic
ccctaguggactggctcugt

SEQ ID NO: 30452 - DNA, 25 bp, Artificial Sequence
  Synthetic
atccatcaacgacutcttcatcucc

SEQ ID NO: 30453 - DNA, 22 bp, Artificial Sequence
  Synthetic
cttgcuaaaccagcucagggat

SEQ ID NO: 30454 - DNA, 17 bp, Artificial Sequence
  Synthetic
tgugccacagcccaugt

SEQ ID NO: 30455 - DNA, 19 bp, Artificial Sequence
  Synthetic
gtccctugctctggtuccc

SEQ ID NO: 30456 - DNA, 22 bp, Artificial Sequence
  Synthetic
caggaaaggaguacctccccua

SEQ ID NO: 30457 - DNA, 20 bp, Artificial Sequence
  Synthetic
cctggagguccctactggug

SEQ ID NO: 30458 - DNA, 19 bp, Artificial Sequence
  Synthetic
cagcccguaacaggaccuc

SEQ ID NO: 30459 - DNA, 17 bp, Artificial Sequence
  Synthetic
ccgtacccguggccauc

SEQ ID NO: 30460 - DNA, 19 bp, Artificial Sequence
  Synthetic
gtagggcaggcuctgctuc

SEQ ID NO: 30461 - DNA, 20 bp, Artificial Sequence
  Synthetic
ggcugcacgagcaaatctuc

SEQ ID NO: 30462 - DNA, 17 bp, Artificial Sequence
  Synthetic
ggccaccutccuccaga

SEQ ID NO: 30463 - DNA, 21 bp, Artificial Sequence
  Synthetic
caggcatggucaaacccatut

SEQ ID NO: 30464 - DNA, 20 bp, Artificial Sequence
  Synthetic
caccccucactctgcttcuc

SEQ ID NO: 30465 - DNA, 18 bp, Artificial Sequence
  Synthetic
gguccacccgaagctugt

SEQ ID NO: 30466 - DNA, 18 bp, Artificial Sequence
  Synthetic
agaggaucacgcgggtug

SEQ ID NO: 30467 - DNA, 21 bp, Artificial Sequence
  Synthetic
guatttggaggucagcacggt

SEQ ID NO: 30468 - DNA, 22 bp, Artificial Sequence
  Synthetic
gtgttgctcagaugtccccaut

SEQ ID NO: 30469 - DNA, 23 bp, Artificial Sequence
  Synthetic
aaagacacagguagctcacucac

SEQ ID NO: 30470 - DNA, 21 bp, Artificial Sequence
  Synthetic
agggttctuggagagcacauc

SEQ ID NO: 30471 - DNA, 18 bp, Artificial Sequence
  Synthetic
ctgacgucacccauccca

SEQ ID NO: 30472 - DNA, 23 bp, Artificial Sequence
  Synthetic
ggaggtgagugggagatguagat

SEQ ID NO: 30473 - DNA, 31 bp, Artificial Sequence
  Synthetic
accattatuagaacaggauctcaattcttut

SEQ ID NO: 30474 - DNA, 19 bp, Artificial Sequence
  Synthetic
cctgggtgucctctccugt

SEQ ID NO: 30475 - DNA, 24 bp, Artificial Sequence
  Synthetic
aacctuccagagcagttucagaaa

SEQ ID NO: 30476 - DNA, 18 bp, Artificial Sequence
  Synthetic
agggcccugctcacatuc

SEQ ID NO: 30477 - DNA, 17 bp, Artificial Sequence
  Synthetic
tgccagcucacugcaca

SEQ ID NO: 30478 - DNA, 23 bp, Artificial Sequence
  Synthetic
tgtcctatgagaucgtcctgucc

SEQ ID NO: 30479 - DNA, 22 bp, Artificial Sequence
  Synthetic
cccaagguaccatcttcugagt

SEQ ID NO: 30480 - DNA, 21 bp, Artificial Sequence
  Synthetic
cgtccaugacctgtugaccac

SEQ ID NO: 30481 - DNA, 21 bp, Artificial Sequence
  Synthetic
ctcagaaagcugcactucacc

SEQ ID NO: 30482 - DNA, 17 bp, Artificial Sequence
  Synthetic
gcagacgggcuggtgug

SEQ ID NO: 30483 - DNA, 21 bp, Artificial Sequence
  Synthetic
ccacggagaaauagcccugag

SEQ ID NO: 30484 - DNA, 23 bp, Artificial Sequence
  Synthetic
gtaagtccuggccttctctucaa

SEQ ID NO: 30485 - DNA, 21 bp, Artificial Sequence
  Synthetic
gacuccaacacaacgcagaug

SEQ ID NO: 30486 - DNA, 22 bp, Artificial Sequence
  Synthetic
ctctggcttucaccatcctcut

SEQ ID NO: 30487 - DNA, 23 bp, Artificial Sequence
  Synthetic
acatcccucagacaugcaaacag

SEQ ID NO: 30488 - DNA, 18 bp, Artificial Sequence
  Synthetic
gaaggcccugtccugacg

SEQ ID NO: 30489 - DNA, 20 bp, Artificial Sequence
  Synthetic
cagaggcucgcagtctttug

SEQ ID NO: 30490 - DNA, 20 bp, Artificial Sequence
  Synthetic
ctgaggtgucctgtctccug

SEQ ID NO: 30491 - DNA, 20 bp, Artificial Sequence
  Synthetic
gctgagatgugcgtgagcut

SEQ ID NO: 30492 - DNA, 21 bp, Artificial Sequence
  Synthetic
cctgaccacccuctccatuac

SEQ ID NO: 30493 - DNA, 18 bp, Artificial Sequence
  Synthetic
tttcugccgcaaggccua

SEQ ID NO: 30494 - DNA, 18 bp, Artificial Sequence
  Synthetic
ccatugccaccccucact

SEQ ID NO: 30495 - DNA, 19 bp, Artificial Sequence
  Synthetic
ccacagccccaugtcctuc

SEQ ID NO: 30496 - DNA, 21 bp, Artificial Sequence
  Synthetic
ctttggcccutggtgauaggt

SEQ ID NO: 30497 - DNA, 22 bp, Artificial Sequence
  Synthetic
atcatguccagacaggttuccg

SEQ ID NO: 30498 - DNA, 22 bp, Artificial Sequence
  Synthetic
gtttcacgcuccctgtcttcua

SEQ ID NO: 30499 - DNA, 21 bp, Artificial Sequence
  Synthetic
gaggaaaggaaggugcaguca

SEQ ID NO: 30500 - DNA, 20 bp, Artificial Sequence
  Synthetic
gaggctgguggttttgcauc

SEQ ID NO: 30501 - DNA, 21 bp, Artificial Sequence
  Synthetic
gucttctccugcacaggaacc

SEQ ID NO: 30502 - DNA, 19 bp, Artificial Sequence
  Synthetic
guactggccucaggccaaa

SEQ ID NO: 30503 - DNA, 22 bp, Artificial Sequence
  Synthetic
caccgacagugacttguacagg

SEQ ID NO: 30504 - DNA, 21 bp, Artificial Sequence
  Synthetic
tctctgcucgacctgtgtgua

SEQ ID NO: 30505 - DNA, 21 bp, Artificial Sequence
  Synthetic
cagcacctaugaggcagagug

SEQ ID NO: 30506 - DNA, 21 bp, Artificial Sequence
  Synthetic
ggttctctutgggatggucct

SEQ ID NO: 30507 - DNA, 20 bp, Artificial Sequence
  Synthetic
agaggagcuggacttgcuca

SEQ ID NO: 30508 - DNA, 19 bp, Artificial Sequence
  Synthetic
gaggtuaaggcccggucac

SEQ ID NO: 30509 - DNA, 23 bp, Artificial Sequence
  Synthetic
tttaaggcguccctctctacuct

SEQ ID NO: 30510 - DNA, 19 bp, Artificial Sequence
  Synthetic
gatggccaggcuctgtgut

SEQ ID NO: 30511 - DNA, 18 bp, Artificial Sequence
  Synthetic
acacagcuccagcggaug

SEQ ID NO: 30512 - DNA, 17 bp, Artificial Sequence
  Synthetic
gtgaugccacccugcct

SEQ ID NO: 30513 - DNA, 18 bp, Artificial Sequence
  Synthetic
ccucaccacacacgucca

SEQ ID NO: 30514 - DNA, 21 bp, Artificial Sequence
  Synthetic
ccagagccccuggagtaauca

SEQ ID NO: 30515 - DNA, 23 bp, Artificial Sequence
  Synthetic
accggagucattgtagacaaugg

SEQ ID NO: 30516 - DNA, 19 bp, Artificial Sequence
  Synthetic
caguagccgagaucagcct

SEQ ID NO: 30517 - DNA, 17 bp, Artificial Sequence
  Synthetic
ctctuggcgccacacug

SEQ ID NO: 30518 - DNA, 19 bp, Artificial Sequence
  Synthetic
ccugcacgcaaatgugagt

SEQ ID NO: 30519 - DNA, 21 bp, Artificial Sequence
  Synthetic
gagggagccccauattcccua

SEQ ID NO: 30520 - DNA, 19 bp, Artificial Sequence
  Synthetic
tcctcgguggaggactuca

SEQ ID NO: 30521 - DNA, 21 bp, Artificial Sequence
  Synthetic
gtgtaccacutctgugggcat

SEQ ID NO: 30522 - DNA, 23 bp, Artificial Sequence
  Synthetic
cttgtaaggugcggcuagaaact

SEQ ID NO: 30523 - DNA, 20 bp, Artificial Sequence
  Synthetic
cctacccugggtggtcgaua

SEQ ID NO: 30524 - DNA, 27 bp, Artificial Sequence
  Synthetic
tcaaggaguaaaaacacaggtttugat

SEQ ID NO: 30525 - DNA, 28 bp, Artificial Sequence
  Synthetic
tcttcctagaggcautcattgtgaaaug

SEQ ID NO: 30526 - DNA, 27 bp, Artificial Sequence
  Synthetic
tttaggctguttatctatgtugcccaa

SEQ ID NO: 30527 - DNA, 28 bp, Artificial Sequence
  Synthetic
cagccatucaccaaagatattucagaaa

SEQ ID NO: 30528 - DNA, 28 bp, Artificial Sequence
  Synthetic
tttttcagtgacauatcattagccccut

SEQ ID NO: 30529 - DNA, 26 bp, Artificial Sequence
  Synthetic
aggtgcacaaacacutctctactuac

SEQ ID NO: 30530 - DNA, 24 bp, Artificial Sequence
  Synthetic
gatctgtgaacugctgttctccua

SEQ ID NO: 30531 - DNA, 24 bp, Artificial Sequence
  Synthetic
gggccattcutgacaagagtttuc

SEQ ID NO: 30532 - DNA, 24 bp, Artificial Sequence
  Synthetic
ggtgcaaaacugtagaaagtugct

SEQ ID NO: 30533 - DNA, 27 bp, Artificial Sequence
  Synthetic
tcccaaccaugaagatttctttgcuaa

SEQ ID NO: 30534 - DNA, 21 bp, Artificial Sequence
  Synthetic
tgcttttcuctggccugagag

SEQ ID NO: 30535 - DNA, 20 bp, Artificial Sequence
  Synthetic
cagggucaagcagcucaaga

SEQ ID NO: 30536 - DNA, 24 bp, Artificial Sequence
  Synthetic
ggaagaggtuccctgacttcacua

SEQ ID NO: 30537 - DNA, 20 bp, Artificial Sequence
  Synthetic
ggagcaagcuccacgagaug

SEQ ID NO: 30538 - DNA, 17 bp, Artificial Sequence
  Synthetic
ggcccucacctgctgug

SEQ ID NO: 30539 - DNA, 19 bp, Artificial Sequence
  Synthetic
cccugaggcatgacuccaa

SEQ ID NO: 30540 - DNA, 21 bp, Artificial Sequence
  Synthetic
catctgaggcuctccuagcaa

SEQ ID NO: 30541 - DNA, 23 bp, Artificial Sequence
  Synthetic
cttgtcctcccugttgactcaug

SEQ ID NO: 30542 - DNA, 23 bp, Artificial Sequence
  Synthetic
cgaagttuccacaccaaccauga

SEQ ID NO: 30543 - DNA, 19 bp, Artificial Sequence
  Synthetic
caacaugcaggcgcucaag

SEQ ID NO: 30544 - DNA, 21 bp, Artificial Sequence
  Synthetic
cctcgcauggactggtgaaua

SEQ ID NO: 30545 - DNA, 23 bp, Artificial Sequence
  Synthetic
cctuggaagucaaagaggaacuc

SEQ ID NO: 30546 - DNA, 19 bp, Artificial Sequence
  Synthetic
gagccacgcgucatacuct

SEQ ID NO: 30547 - DNA, 22 bp, Artificial Sequence
  Synthetic
cggccgcutatgataaacugga

SEQ ID NO: 30548 - DNA, 23 bp, Artificial Sequence
  Synthetic
agagaagtugagaggacccauga

SEQ ID NO: 30549 - DNA, 22 bp, Artificial Sequence
  Synthetic
acctcttugcatccctttugca

SEQ ID NO: 30550 - DNA, 19 bp, Artificial Sequence
  Synthetic
ctccuccccacagaacugg

SEQ ID NO: 30551 - DNA, 26 bp, Artificial Sequence
  Synthetic
aggtggaacauaagaagaagaagcug

SEQ ID NO: 30552 - DNA, 25 bp, Artificial Sequence
  Synthetic
ctgctgatgucactcttatgtguca

SEQ ID NO: 30553 - DNA, 22 bp, Artificial Sequence
  Synthetic
actgccatucactgtgttccuc

SEQ ID NO: 30554 - DNA, 21 bp, Artificial Sequence
  Synthetic
ctcctggagguctgagatgug

SEQ ID NO: 30555 - DNA, 25 bp, Artificial Sequence
  Synthetic
cauaactgtctggucccagaaaagt

SEQ ID NO: 30556 - DNA, 28 bp, Artificial Sequence
  Synthetic
caacagagcaagaccucatctcuaaaaa

SEQ ID NO: 30557 - DNA, 23 bp, Artificial Sequence
  Synthetic
ggaacgaaaacucctugaggaga

SEQ ID NO: 30558 - DNA, 23 bp, Artificial Sequence
  Synthetic
ctgtggtgagggucaagtgatut

SEQ ID NO: 30559 - DNA, 22 bp, Artificial Sequence
  Synthetic
gtatgcagaggcugaggagaug

SEQ ID NO: 30560 - DNA, 21 bp, Artificial Sequence
  Synthetic
cccagccaugcatccauacag

SEQ ID NO: 30561 - DNA, 21 bp, Artificial Sequence
  Synthetic
aatgatgggcuaaccgtgugt

SEQ ID NO: 30562 - DNA, 25 bp, Artificial Sequence
  Synthetic
tgtgattcgcguttgaggtatuagg

SEQ ID NO: 30563 - DNA, 24 bp, Artificial Sequence
  Synthetic
ctcttccttuccttcctttugcag

SEQ ID NO: 30564 - DNA, 20 bp, Artificial Sequence
  Synthetic
gggtaccuccagcatccaut

SEQ ID NO: 30565 - DNA, 20 bp, Artificial Sequence
  Synthetic
gggatccacugccctcttug

SEQ ID NO: 30566 - DNA, 20 bp, Artificial Sequence
  Synthetic
cgtagcguggtcatcagcut

SEQ ID NO: 30567 - DNA, 22 bp, Artificial Sequence
  Synthetic
gctgagccuctggcctattuag

SEQ ID NO: 30568 - DNA, 21 bp, Artificial Sequence
  Synthetic
tgccactcucagactgtcuct

SEQ ID NO: 30569 - DNA, 20 bp, Artificial Sequence
  Synthetic
gaaugctggtuccccaaagc

SEQ ID NO: 30570 - DNA, 21 bp, Artificial Sequence
  Synthetic
acacacgtguacaaggtguga

SEQ ID NO: 30571 - DNA, 24 bp, Artificial Sequence
  Synthetic
gctctucaaccacaccatgtucat

SEQ ID NO: 30572 - DNA, 23 bp, Artificial Sequence
  Synthetic
gccatctacaugcctttcuccaa

SEQ ID NO: 30573 - DNA, 22 bp, Artificial Sequence
  Synthetic
gcaacataugagcgcctttucc

SEQ ID NO: 30574 - DNA, 24 bp, Artificial Sequence
  Synthetic
gggtgcatggauggataagtgaua

SEQ ID NO: 30575 - DNA, 26 bp, Artificial Sequence
  Synthetic
tcacgatgttucttttctccauccag

SEQ ID NO: 30576 - DNA, 25 bp, Artificial Sequence
  Synthetic
tcttaacaggutccactggtaucca

SEQ ID NO: 30577 - DNA, 24 bp, Artificial Sequence
  Synthetic
tgacctgtctucctctccttcuag

SEQ ID NO: 30578 - DNA, 23 bp, Artificial Sequence
  Synthetic
ctggaaagauagaggtggctcut

SEQ ID NO: 30579 - DNA, 23 bp, Artificial Sequence
  Synthetic
cctgaactgugttttcctgtugg

SEQ ID NO: 30580 - DNA, 22 bp, Artificial Sequence
  Synthetic
ggugcaagaggatcaugcagat

SEQ ID NO: 30581 - DNA, 25 bp, Artificial Sequence
  Synthetic
catatattcuccagcccctgatguc

SEQ ID NO: 30582 - DNA, 25 bp, Artificial Sequence
  Synthetic
ctgcactcauggatcttttcttuca

SEQ ID NO: 30583 - DNA, 28 bp, Artificial Sequence
  Synthetic
cccttagcucagagctcattttaatuca

SEQ ID NO: 30584 - DNA, 21 bp, Artificial Sequence
  Synthetic
gcccutgtacatgucgacgat

SEQ ID NO: 30585 - DNA, 30 bp, Artificial Sequence
  Synthetic
ccatctctaacaugagaatattgagtgcut

SEQ ID NO: 30586 - DNA, 24 bp, Artificial Sequence
  Synthetic
ttctggaugtcatcttucccaacc

SEQ ID NO: 30587 - DNA, 26 bp, Artificial Sequence
  Synthetic
tgagaagtucctctttguggacaaaa

SEQ ID NO: 30588 - DNA, 17 bp, Artificial Sequence
  Synthetic
ggacggucagagcugca

SEQ ID NO: 30589 - DNA, 21 bp, Artificial Sequence
  Synthetic
ggugaagaugccggaggaaag

SEQ ID NO: 30590 - DNA, 17 bp, Artificial Sequence
  Synthetic
cggccccucctcctcuc

SEQ ID NO: 30591 - DNA, 20 bp, Artificial Sequence
  Synthetic
agagtcugtgccucacgagt

SEQ ID NO: 30592 - DNA, 20 bp, Artificial Sequence
  Synthetic
agcaagttugccgcctttug

SEQ ID NO: 30593 - DNA, 20 bp, Artificial Sequence
  Synthetic
ggcugcagaagcgagtctut

SEQ ID NO: 30594 - DNA, 25 bp, Artificial Sequence
  Synthetic
aggtccttcutatccaggaugaaga

SEQ ID NO: 30595 - DNA, 22 bp, Artificial Sequence
  Synthetic
tgtcctccacacaugggaaaug

SEQ ID NO: 30596 - DNA, 22 bp, Artificial Sequence
  Synthetic
cctccagcucagttcctugaaa

SEQ ID NO: 30597 - DNA, 27 bp, Artificial Sequence
  Synthetic
ctctaaaaagtucctttcccttccuca

SEQ ID NO: 30598 - DNA, 19 bp, Artificial Sequence
  Synthetic
ccagggcgugaccatctua

SEQ ID NO: 30599 - DNA, 22 bp, Artificial Sequence
  Synthetic
cttcctugacctcccauaaccc

SEQ ID NO: 30600 - DNA, 26 bp, Artificial Sequence
  Synthetic
agctggaagacaauttcaaagagugt

SEQ ID NO: 30601 - DNA, 24 bp, Artificial Sequence
  Synthetic
tttgcacaacaugcatctaucaga

SEQ ID NO: 30602 - DNA, 23 bp, Artificial Sequence
  Synthetic
gtgttgtgtguttgtgagtguca

SEQ ID NO: 30603 - DNA, 20 bp, Artificial Sequence
  Synthetic
gggagcagcaugctaccuat

SEQ ID NO: 30604 - DNA, 23 bp, Artificial Sequence
  Synthetic
cagaaaccacauctcaugaacgc

SEQ ID NO: 30605 - DNA, 27 bp, Artificial Sequence
  Synthetic
ttcaccatcaucattccctttcttuca

SEQ ID NO: 30606 - DNA, 24 bp, Artificial Sequence
  Synthetic
caggaagtagaugaggtcgcauag

SEQ ID NO: 30607 - DNA, 22 bp, Artificial Sequence
  Synthetic
gatccaactggugaagagccut

SEQ ID NO: 30608 - DNA, 22 bp, Artificial Sequence
  Synthetic
gccatgagtugacagggaacut

SEQ ID NO: 30609 - DNA, 23 bp, Artificial Sequence
  Synthetic
caaauagcgccatcaucaacgac

SEQ ID NO: 30610 - DNA, 24 bp, Artificial Sequence
  Synthetic
ttgcgguagaaggttcuaaaagca

SEQ ID NO: 30611 - DNA, 23 bp, Artificial Sequence
  Synthetic
cttccacauctgtgtcttugcag

SEQ ID NO: 30612 - DNA, 21 bp, Artificial Sequence
  Synthetic
cucagacattctugcgcaacc

SEQ ID NO: 30613 - DNA, 26 bp, Artificial Sequence
  Synthetic
ttcactttattcuctgcagaagcugt

SEQ ID NO: 30614 - DNA, 23 bp, Artificial Sequence
  Synthetic
aaaacuccccctguaagcaaagt

SEQ ID NO: 30615 - DNA, 24 bp, Artificial Sequence
  Synthetic
ccctaacccaguccttttatccuc

SEQ ID NO: 30616 - DNA, 29 bp, Artificial Sequence
  Synthetic
actaatcttttagggucttctcagacucc

SEQ ID NO: 30617 - DNA, 24 bp, Artificial Sequence
  Synthetic
ccataaatggcucttcctgtgtuc

SEQ ID NO: 30618 - DNA, 22 bp, Artificial Sequence
  Synthetic
catgtgtccauctgagctcucc

SEQ ID NO: 30619 - DNA, 25 bp, Artificial Sequence
  Synthetic
cttaccttccccautcattcacuca

SEQ ID NO: 30620 - DNA, 22 bp, Artificial Sequence
  Synthetic
ccatccucctcctuacccaagt

SEQ ID NO: 30621 - DNA, 23 bp, Artificial Sequence
  Synthetic
cctcagttuacccatgaccctuc

SEQ ID NO: 30622 - DNA, 18 bp, Artificial Sequence
  Synthetic
ggcccagutgatcccuga

SEQ ID NO: 30623 - DNA, 19 bp, Artificial Sequence
  Synthetic
cgcacagagcutgctaugg

SEQ ID NO: 30624 - DNA, 21 bp, Artificial Sequence
  Synthetic
cacccugaggtgguaacagac

SEQ ID NO: 30625 - DNA, 25 bp, Artificial Sequence
  Synthetic
ctgccttuctgtattttcugaccct

SEQ ID NO: 30626 - DNA, 20 bp, Artificial Sequence
  Synthetic
ccctagcugggagggtagut

SEQ ID NO: 30627 - DNA, 30 bp, Artificial Sequence
  Synthetic
cctagatctgaaggaugagagattctttuc

SEQ ID NO: 30628 - DNA, 24 bp, Artificial Sequence
  Synthetic
ccttttctgcugtagaaaguccct

SEQ ID NO: 30629 - DNA, 21 bp, Artificial Sequence
  Synthetic
guggaaccagagucagagaug

SEQ ID NO: 30630 - DNA, 19 bp, Artificial Sequence
  Synthetic
gttcggtgucgccgaagua

SEQ ID NO: 30631 - DNA, 17 bp, Artificial Sequence
  Synthetic
guggucacccgcagact

SEQ ID NO: 30632 - DNA, 30 bp, Artificial Sequence
  Synthetic
ggcatatatcttgauctctacagaccugat

SEQ ID NO: 30633 - DNA, 25 bp, Artificial Sequence
  Synthetic
acccattaucaccactctgtttcug

SEQ ID NO: 30634 - DNA, 26 bp, Artificial Sequence
  Synthetic
acagaatgacuaaaagttcccugcaa

SEQ ID NO: 30635 - DNA, 25 bp, Artificial Sequence
  Synthetic
agcacttcctcucttaggtcctuac

SEQ ID NO: 30636 - DNA, 20 bp, Artificial Sequence
  Synthetic
guctctggcugcagagcaat

SEQ ID NO: 30637 - DNA, 24 bp, Artificial Sequence
  Synthetic
aggugatggacatauggcaaacag

SEQ ID NO: 30638 - DNA, 28 bp, Artificial Sequence
  Synthetic
cgcatctttcaguaatcattttggtuct

SEQ ID NO: 30639 - DNA, 23 bp, Artificial Sequence
  Synthetic
tcgtacagugactgtccttcugt

SEQ ID NO: 30640 - DNA, 25 bp, Artificial Sequence
  Synthetic
tcagacagtguatgtttggagtuca

SEQ ID NO: 30641 - DNA, 20 bp, Artificial Sequence
  Synthetic
cugcttgatcauggccaagg

SEQ ID NO: 30642 - DNA, 21 bp, Artificial Sequence
  Synthetic
ccaggacacucccacatucac

SEQ ID NO: 30643 - DNA, 24 bp, Artificial Sequence
  Synthetic
tggccucaaagctttcctuaacaa

SEQ ID NO: 30644 - DNA, 22 bp, Artificial Sequence
  Synthetic
aagagaggauggagguccagag

SEQ ID NO: 30645 - DNA, 20 bp, Artificial Sequence
  Synthetic
cttcacaggcggugacagua

SEQ ID NO: 30646 - DNA, 20 bp, Artificial Sequence
  Synthetic
tgccugccgtgtgtuaaact

SEQ ID NO: 30647 - DNA, 26 bp, Artificial Sequence
  Synthetic
ctcctttgtcuccagtctaatggtut

SEQ ID NO: 30648 - DNA, 20 bp, Artificial Sequence
  Synthetic
tcagaacgutgacagugcgt

SEQ ID NO: 30649 - DNA, 26 bp, Artificial Sequence
  Synthetic
gcctgtgggaaaauggtttctaauga

SEQ ID NO: 30650 - DNA, 26 bp, Artificial Sequence
  Synthetic
gtgccctucacagacatcttuaaaaa

SEQ ID NO: 30651 - DNA, 17 bp, Artificial Sequence
  Synthetic
cggccccacgcuctuac

SEQ ID NO: 30652 - DNA, 21 bp, Artificial Sequence
  Synthetic
aggaataaucgcccccgatug

SEQ ID NO: 30653 - DNA, 17 bp, Artificial Sequence
  Synthetic
cugcccccacuggacat

SEQ ID NO: 30654 - DNA, 18 bp, Artificial Sequence
  Synthetic
gcgaauacaccggcucgt

SEQ ID NO: 30655 - DNA, 22 bp, Artificial Sequence
  Synthetic
ctccaggucccttcgtattugg

SEQ ID NO: 30656 - DNA, 19 bp, Artificial Sequence
  Synthetic
ctgctucaaccctguccgt

SEQ ID NO: 30657 - DNA, 20 bp, Artificial Sequence
  Synthetic
gggagttgauggacgtccuc

SEQ ID NO: 30658 - DNA, 22 bp, Artificial Sequence
  Synthetic
cagtgacuccgagatccucaag

SEQ ID NO: 30659 - DNA, 21 bp, Artificial Sequence
  Synthetic
ctgatgguggagtggatgucg

SEQ ID NO: 30660 - DNA, 18 bp, Artificial Sequence
  Synthetic
ctcggacgggcucaagua

SEQ ID NO: 30661 - DNA, 20 bp, Artificial Sequence
  Synthetic
ccaccttcucgcggatctug

SEQ ID NO: 30662 - DNA, 19 bp, Artificial Sequence
  Synthetic
ccucaacccagaccccugt

SEQ ID NO: 30663 - DNA, 20 bp, Artificial Sequence
  Synthetic
cccacgaugccagtaucagg

SEQ ID NO: 30664 - DNA, 19 bp, Artificial Sequence
  Synthetic
gacatcgaggugctgucca

SEQ ID NO: 30665 - DNA, 18 bp, Artificial Sequence
  Synthetic
cucctcguccaccgacac

SEQ ID NO: 30666 - DNA, 18 bp, Artificial Sequence
  Synthetic
ggcctgcucgtggaugac

SEQ ID NO: 30667 - DNA, 23 bp, Artificial Sequence
  Synthetic
catccucagcaagggtttcauct

SEQ ID NO: 30668 - DNA, 19 bp, Artificial Sequence
  Synthetic
gcagagacugcgguccaag

SEQ ID NO: 30669 - DNA, 22 bp, Artificial Sequence
  Synthetic
ccattctccucgtcggactcua

SEQ ID NO: 30670 - DNA, 22 bp, Artificial Sequence
  Synthetic
gggtctgcuagcttggugaaaa

SEQ ID NO: 30671 - DNA, 28 bp, Artificial Sequence
  Synthetic
gcgacatctcaucagatgaaaaagtuaa

SEQ ID NO: 30672 - DNA, 19 bp, Artificial Sequence
  Synthetic
ggcttucaggccaacaugg

SEQ ID NO: 30673 - DNA, 17 bp, Artificial Sequence
  Synthetic
cagagcucggccuccag

SEQ ID NO: 30674 - DNA, 30 bp, Artificial Sequence
  Synthetic
tgttttgcttuggttatttaggaguacact

SEQ ID NO: 30675 - DNA, 28 bp, Artificial Sequence
  Synthetic
gctactgacugaagaacatcagaugaat

SEQ ID NO: 30676 - DNA, 20 bp, Artificial Sequence
  Synthetic
gaggcagcauttccuggaac

SEQ ID NO: 30677 - DNA, 19 bp, Artificial Sequence
  Synthetic
ccacagccucactcucaca

SEQ ID NO: 30678 - DNA, 22 bp, Artificial Sequence
  Synthetic
ccagcaguggttctgattugga

SEQ ID NO: 30679 - DNA, 29 bp, Artificial Sequence
  Synthetic
gttcagagagcuctgatttacagaactua

SEQ ID NO: 30680 - DNA, 24 bp, Artificial Sequence
  Synthetic
acggaauccccaagtagttagugt

SEQ ID NO: 30681 - DNA, 21 bp, Artificial Sequence
  Synthetic
aatgaccuccacgaactcugg

SEQ ID NO: 30682 - DNA, 26 bp, Artificial Sequence
  Synthetic
gttgtccttggugtagaactttguct

SEQ ID NO: 30683 - DNA, 24 bp, Artificial Sequence
  Synthetic
gatctcatcgaugtagacgaugca

SEQ ID NO: 30684 - DNA, 22 bp, Artificial Sequence
  Synthetic
caaggtcttcgucctgtgaguc

SEQ ID NO: 30685 - DNA, 24 bp, Artificial Sequence
  Synthetic
cuatcttcagugcaaaaggcaacc

SEQ ID NO: 30686 - DNA, 21 bp, Artificial Sequence
  Synthetic
tctgttgtgucaggaccccua

SEQ ID NO: 30687 - DNA, 19 bp, Artificial Sequence
  Synthetic
gctgggaucctggctcuga

SEQ ID NO: 30688 - DNA, 23 bp, Artificial Sequence
  Synthetic
tcctctuaagccctgauagcaga

SEQ ID NO: 30689 - DNA, 21 bp, Artificial Sequence
  Synthetic
ggtucaagccctgcuaaggag

SEQ ID NO: 30690 - DNA, 21 bp, Artificial Sequence
  Synthetic
cctgggtcaucttgacctugt

SEQ ID NO: 30691 - DNA, 21 bp, Artificial Sequence
  Synthetic
ggaaaagcgcuctgaaaccuc

SEQ ID NO: 30692 - DNA, 22 bp, Artificial Sequence
  Synthetic
catcgccuactccatggugaag

SEQ ID NO: 30693 - DNA, 20 bp, Artificial Sequence
  Synthetic
acccutgtgtgguagaccca

SEQ ID NO: 30694 - DNA, 22 bp, Artificial Sequence
  Synthetic
caccuccccaggacauagagat

SEQ ID NO: 30695 - DNA, 22 bp, Artificial Sequence
  Synthetic
caagtcctguttctccctcugg

SEQ ID NO: 30696 - DNA, 18 bp, Artificial Sequence
  Synthetic
gccgactuggcccaagua

SEQ ID NO: 30697 - DNA, 21 bp, Artificial Sequence
  Synthetic
cucacaaacacaggacuccgt

SEQ ID NO: 30698 - DNA, 23 bp, Artificial Sequence
  Synthetic
caagagcuccatgttatgctugt

SEQ ID NO: 30699 - DNA, 20 bp, Artificial Sequence
  Synthetic
ctgaggaccugctcctcuct

SEQ ID NO: 30700 - DNA, 22 bp, Artificial Sequence
  Synthetic
ccggaacautcttuggcagaag

SEQ ID NO: 30701 - DNA, 23 bp, Artificial Sequence
  Synthetic
ctgtggacaugtacttgaagcug

SEQ ID NO: 30702 - DNA, 21 bp, Artificial Sequence
  Synthetic
cacagacaacccutcccauct

SEQ ID NO: 30703 - DNA, 20 bp, Artificial Sequence
  Synthetic
agccactucttggtgtugca

SEQ ID NO: 30704 - DNA, 21 bp, Artificial Sequence
  Synthetic
agaggacaccutggctgguaa

SEQ ID NO: 30705 - DNA, 29 bp, Artificial Sequence
  Synthetic
gaggaatgtgucagccttatttagaauga

SEQ ID NO: 30706 - DNA, 23 bp, Artificial Sequence
  Synthetic
cagggtgttuaggagatgaccut

SEQ ID NO: 30707 - DNA, 20 bp, Artificial Sequence
  Synthetic
atctgtgtgcuggtgctcuc

SEQ ID NO: 30708 - DNA, 23 bp, Artificial Sequence
  Synthetic
cccacaacuagtagagugaagga

SEQ ID NO: 30709 - DNA, 22 bp, Artificial Sequence
  Synthetic
cctgcctugaactctttugcag

SEQ ID NO: 30710 - DNA, 19 bp, Artificial Sequence
  Synthetic
cctgcccagguggtaguag

SEQ ID NO: 30711 - DNA, 22 bp, Artificial Sequence
  Synthetic
tgtgccagcauactgctcttut

SEQ ID NO: 30712 - DNA, 24 bp, Artificial Sequence
  Synthetic
cccuccagagaaccctaauacagt

SEQ ID NO: 30713 - DNA, 28 bp, Artificial Sequence
  Synthetic
agaattgatagcagugtttgctgttcua

SEQ ID NO: 30714 - DNA, 19 bp, Artificial Sequence
  Synthetic
gaacggucacctacgugct

SEQ ID NO: 30715 - DNA, 20 bp, Artificial Sequence
  Synthetic
gcaccutccttcugcagact

SEQ ID NO: 30716 - DNA, 20 bp, Artificial Sequence
  Synthetic
ggtccgaaagcugcguaaac

SEQ ID NO: 30717 - DNA, 29 bp, Artificial Sequence
  Synthetic
ttttcagattttguacagcagcaattuct

SEQ ID NO: 30718 - DNA, 23 bp, Artificial Sequence
  Synthetic
tggtatgtcugcatgtctgtcuc

SEQ ID NO: 30719 - DNA, 19 bp, Artificial Sequence
  Synthetic
gatgtgggucctccugcac

SEQ ID NO: 30720 - DNA, 23 bp, Artificial Sequence
  Synthetic
ggaatttuccagggcacugaaga

SEQ ID NO: 30721 - DNA, 26 bp, Artificial Sequence
  Synthetic
tgaatggctaguactgatggttucac

SEQ ID NO: 30722 - DNA, 25 bp, Artificial Sequence
  Synthetic
gtctaatgccuctgcctaauggaaa

SEQ ID NO: 30723 - DNA, 24 bp, Artificial Sequence
  Synthetic
ccctaacuagtttcttcctucgca

SEQ ID NO: 30724 - DNA, 22 bp, Artificial Sequence
  Synthetic
ggtguagcacaacagacacuca

SEQ ID NO: 30725 - DNA, 30 bp, Artificial Sequence; identical to SEQ ID NO: 15103
  Synthetic

SEQ ID NO: 30726 - DNA, 24 bp, Artificial Sequence
  Synthetic
tgagagacugacaaggaaagucct

SEQ ID NO: 30727 - DNA, 21 bp, Artificial Sequence
  Synthetic
ggtcaccguctgtgggaatug

SEQ ID NO: 30728 - DNA, 22 bp, Artificial Sequence
  Synthetic
ctgggaaggcugaaaaacucaa

SEQ ID NO: 30729 - DNA, 25 bp, Artificial Sequence
  Synthetic
gttctcattcugtgtcttcccugaa

SEQ ID NO: 30730 - DNA, 22 bp, Artificial Sequence
  Synthetic
accagaaaucatggatguggca

SEQ ID NO: 30731 - DNA, 22 bp, Artificial Sequence
  Synthetic
tcutctcuccacacaggacact

SEQ ID NO: 30732 - DNA, 22 bp, Artificial Sequence
  Synthetic
cccuacacacactctugaccag

SEQ ID NO: 30733 - DNA, 24 bp, Artificial Sequence
  Synthetic
tgaagggagcggaugcttttatut

SEQ ID NO: 30734 - DNA, 20 bp, Artificial Sequence
  Synthetic
ggcatcuccagtcagcgtua

SEQ ID NO: 30735 - DNA, 20 bp, Artificial Sequence
  Synthetic
ctctttcugctgcatuggca

SEQ ID NO: 30736 - DNA, 22 bp, Artificial Sequence
  Synthetic
tgctgaagcuctggaagtgtut

SEQ ID NO: 30737 - DNA, 25 bp, Artificial Sequence
  Synthetic
gtgtgctgacauctgttttctgtuc

SEQ ID NO: 30738 - DNA, 26 bp, Artificial Sequence
  Synthetic
aaacagcacguttcaauagagagaca

SEQ ID NO: 30739 - DNA, 29 bp, Artificial Sequence
  Synthetic
agaccatgatguccataaataacttuggt

SEQ ID NO: 30740 - DNA, 27 bp, Artificial Sequence
  Synthetic
actagacugcaaaaacagtaacacuga

SEQ ID NO: 30741 - DNA, 29 bp, Artificial Sequence
  Synthetic
aggaaaatgcautcataaaggacucagaa

SEQ ID NO: 30742 - DNA, 22 bp, Artificial Sequence
  Synthetic
ggcaggttucctcatcttugct

SEQ ID NO: 30743 - DNA, 30 bp, Artificial Sequence
  Synthetic
tcatgtgtuaagagaaagctatggtttugt

SEQ ID NO: 30744 - DNA, 21 bp, Artificial Sequence
  Synthetic
gcctcgggugttttctuagga

SEQ ID NO: 30745 - DNA, 21 bp, Artificial Sequence
  Synthetic
tcgaaccgacutctctccgua

SEQ ID NO: 30746 - DNA, 21 bp, Artificial Sequence
  Synthetic
ttccuggacaggactauggct

SEQ ID NO: 30747 - DNA, 19 bp, Artificial Sequence
  Synthetic
ggtuccggttctuggcgat

SEQ ID NO: 30748 - DNA, 19 bp, Artificial Sequence
  Synthetic
tgcagcagcuggacaaugt

SEQ ID NO: 30749 - DNA, 21 bp, Artificial Sequence
  Synthetic
guagtaggcgaugaagagcgt

SEQ ID NO: 30750 - DNA, 21 bp, Artificial Sequence
  Synthetic
accagggcuttggcctuaaag

SEQ ID NO: 30751 - DNA, 21 bp, Artificial Sequence
  Synthetic
gctguggaaggcgtagaugag

SEQ ID NO: 30752 - DNA, 20 bp, Artificial Sequence
  Synthetic
gacccugggcagttcctuac

SEQ ID NO: 30753 - DNA, 20 bp, Artificial Sequence
  Synthetic
cacaaccuccccatgtccuc

SEQ ID NO: 30754 - DNA, 20 bp, Artificial Sequence
  Synthetic
atctttgcugccagctcuca

SEQ ID NO: 30755 - DNA, 20 bp, Artificial Sequence
  Synthetic
tcagccccauaccacuaggg

SEQ ID NO: 30756 - DNA, 21 bp, Artificial Sequence
  Synthetic
gggaaacggucaggcauacag

SEQ ID NO: 30757 - DNA, 21 bp, Artificial Sequence
  Synthetic
caggagcccugttaacatugg

SEQ ID NO: 30758 - DNA, 24 bp, Artificial Sequence
  Synthetic
ctctcatagtgugaaggcagguag

SEQ ID NO: 30759 - DNA, 22 bp, Artificial Sequence
  Synthetic
gctcctugggaggaagtauggt

SEQ ID NO: 30760 - DNA, 21 bp, Artificial Sequence
  Synthetic
ccauccacagacaggaaucgc

SEQ ID NO: 30761 - DNA, 21 bp, Artificial Sequence
  Synthetic
ttggttccugacccctttguc

SEQ ID NO: 30762 - DNA, 22 bp, Artificial Sequence
  Synthetic
cccuaaaaacaggcagggagug

SEQ ID NO: 30763 - DNA, 21 bp, Artificial Sequence
  Synthetic
acagacucgcactgucaacaa

SEQ ID NO: 30764 - DNA, 22 bp, Artificial Sequence
  Synthetic
gcctggccutcttgagaaacut

SEQ ID NO: 30765 - DNA, 23 bp, Artificial Sequence
  Synthetic
acgaagaauggatcaaggucgag

SEQ ID NO: 30766 - DNA, 25 bp, Artificial Sequence
  Synthetic
cgatcttctctucccgaggttcaua

SEQ ID NO: 30767 - DNA, 28 bp, Artificial Sequence
  Synthetic
tttctcatcttggacutgatcttgtcut

SEQ ID NO: 30768 - DNA, 27 bp, Artificial Sequence
  Synthetic
guaaatattaccaaguccaccccaaga

SEQ ID NO: 30769 - DNA, 20 bp, Artificial Sequence
  Synthetic
ctaacgaaugccgtccucct

SEQ ID NO: 30770 - DNA, 23 bp, Artificial Sequence
  Synthetic
tggttggagaagagcucaccaua

SEQ ID NO: 30771 - DNA, 28 bp, Artificial Sequence
  Synthetic
acttttctugacccttttatccucacag

SEQ ID NO: 30772 - DNA, 24 bp, Artificial Sequence
  Synthetic
tcaatgtcgugggaatcatagucc

SEQ ID NO: 30773 - DNA, 25 bp, Artificial Sequence
  Synthetic
ggatggtttugggatttaagtggut

SEQ ID NO: 30774 - DNA, 26 bp, Artificial Sequence
  Synthetic
acttauaggagguaaagagcaggaua

SEQ ID NO: 30775 - DNA, 31 bp, Artificial Sequence
  Synthetic
ttaattgggcttccutaacaagtcttaauct

SEQ ID NO: 30776 - DNA, 23 bp, Artificial Sequence
  Synthetic
gcaagaagcagcaacugtcttua

SEQ ID NO: 30777 - DNA, 24 bp, Artificial Sequence
  Synthetic
ggatatcaccucacctgcttcuct

SEQ ID NO: 30778 - DNA, 25 bp, Artificial Sequence
  Synthetic
ggatagccauggattttcctgacuc

SEQ ID NO: 30779 - DNA, 29 bp, Artificial Sequence
  Synthetic
gagatcacgtttugacttgaatctttcut

SEQ ID NO: 30780 - DNA, 23 bp, Artificial Sequence
  Synthetic
gaatcaaugaactcgctcuccca

SEQ ID NO: 30781 - DNA, 28 bp, Artificial Sequence
  Synthetic
aacgtatttcuaaaccctattgcucagg

SEQ ID NO: 30782 - DNA, 21 bp, Artificial Sequence
  Synthetic
ccgacttggcaucttggagut

SEQ ID NO: 30783 - DNA, 28 bp, Artificial Sequence
  Synthetic
cccctggctcauctgtaatttactttut

SEQ ID NO: 30784 - DNA, 22 bp, Artificial Sequence
  Synthetic
ccacucaagtcttuccacccaa

SEQ ID NO: 30785 - DNA, 22 bp, Artificial Sequence
  Synthetic
caguaaggacaaucccaaccug

SEQ ID NO: 30786 - DNA, 21 bp, Artificial Sequence
  Synthetic
cctctcugggcccttagctua

SEQ ID NO: 30787 - DNA, 22 bp, Artificial Sequence
  Synthetic
gcagtgtaccuggtctggtgua

SEQ ID NO: 30788 - DNA, 21 bp, Artificial Sequence
  Synthetic
ccggugcaatcccaauacaag

SEQ ID NO: 30789 - DNA, 29 bp, Artificial Sequence
  Synthetic
gagaacaaaagaggutaactcuggagaat

SEQ ID NO: 30790 - DNA, 22 bp, Artificial Sequence
  Synthetic
gcctgtugagcagagtcaaguc

SEQ ID NO: 30791 - DNA, 29 bp, Artificial Sequence
  Synthetic
tggttatggaagguaatgatagttccugt

SEQ ID NO: 30792 - DNA, 21 bp, Artificial Sequence
  Synthetic
gcttgucggcttcauaccaca

SEQ ID NO: 30793 - DNA, 23 bp, Artificial Sequence
  Synthetic
ggtagcagtugcctttggttcua

SEQ ID NO: 30794 - DNA, 23 bp, Artificial Sequence
  Synthetic
cctucccaguaggaacctatcua

SEQ ID NO: 30795 - DNA, 26 bp, Artificial Sequence
  Synthetic
aggctaatttcaugtccacctuacag

SEQ ID NO: 30796 - DNA, 21 bp, Artificial Sequence
  Synthetic
aggcggcccagautcttttua

SEQ ID NO: 30797 - DNA, 27 bp, Artificial Sequence
  Synthetic
gcttgattgtgcuttttggactttuag

SEQ ID NO: 30798 - DNA, 22 bp, Artificial Sequence
  Synthetic
cttgttctgcutgatccccuca

SEQ ID NO: 30799 - DNA, 25 bp, Artificial Sequence
  Synthetic
ggaatcttccutgtaatcccctugg

SEQ ID NO: 30800 - DNA, 30 bp, Artificial Sequence
  Synthetic
aaaaagaaagtcaguaaagtcaaggtcuca

SEQ ID NO: 30801 - DNA, 23 bp, Artificial Sequence
  Synthetic
ctggtttaagcuccaggtcugat

SEQ ID NO: 30802 - DNA, 22 bp, Artificial Sequence
  Synthetic
cgatacugcacgtgactaucca

SEQ ID NO: 30803 - DNA, 22 bp, Artificial Sequence
  Synthetic
cggacagtugttttcctcuggt

SEQ ID NO: 30804 - DNA, 25 bp, Artificial Sequence
  Synthetic
gcttgaggtugaagttgtaguccag

SEQ ID NO: 30805 - DNA, 24 bp, Artificial Sequence
  Synthetic
tgactcttacuctccatgtuccca

SEQ ID NO: 30806 - DNA, 22 bp, Artificial Sequence
  Synthetic
aaaaggctacaugcccaccuag

SEQ ID NO: 30807 - DNA, 24 bp, Artificial Sequence
  Synthetic
tgaaggacacaccccuctauacag

SEQ ID NO: 30808 - DNA, 20 bp, Artificial Sequence
  Synthetic
ccctccaccugagcgttuag

SEQ ID NO: 30809 - DNA, 28 bp, Artificial Sequence
  Synthetic
ctttggctgacucttcctttcatttuag

SEQ ID NO: 30810 - DNA, 30 bp, Artificial Sequence
  Synthetic
tcaggactttaaggaucaagattacgttuc

SEQ ID NO: 30811 - DNA, 25 bp, Artificial Sequence
  Synthetic
gacttggtggaugacaactactuct

SEQ ID NO: 30812 - DNA, 24 bp, Artificial Sequence
  Synthetic
gtaagcagcuagacaaacccauac

SEQ ID NO: 30813 - DNA, 24 bp, Artificial Sequence
  Synthetic
ccttggactaugctgacaacaucc

SEQ ID NO: 30814 - DNA, 23 bp, Artificial Sequence
  Synthetic
ccacccaccauatttcagcctut

SEQ ID NO: 30815 - DNA, 25 bp, Artificial Sequence
  Synthetic
agccttctcuttttctaatgugcca

SEQ ID NO: 30816 - DNA, 22 bp, Artificial Sequence
  Synthetic
cggaacttccugttggtcaugt

SEQ ID NO: 30817 - DNA, 23 bp, Artificial Sequence
  Synthetic
ggcctttaaacugaggtgcctut

SEQ ID NO: 30818 - DNA, 28 bp, Artificial Sequence
  Synthetic
tctctttctcctuaggtggaatgaauct

SEQ ID NO: 30819 - DNA, 20 bp, Artificial Sequence
  Synthetic
cgutgtctcugggacagcac

SEQ ID NO: 30820 - DNA, 30 bp, Artificial Sequence
  Synthetic
tttctttcagaaaucgagctatagcagaut

SEQ ID NO: 30821 - DNA, 27 bp, Artificial Sequence
  Synthetic
acaaatgacaaaautgtgcgtaacugt

SEQ ID NO: 30822 - DNA, 30 bp, Artificial Sequence
  Synthetic
tcctacatacauagttgcaaaauaaaggca

SEQ ID NO: 30823 - DNA, 25 bp, Artificial Sequence
  Synthetic
ccattctttugggtctcgtttcuga

SEQ ID NO: 30824 - DNA, 28 bp, Artificial Sequence
  Synthetic
gttggtgtuaaccaattttctgtucact

SEQ ID NO: 30825 - DNA, 27 bp, Artificial Sequence
  Synthetic
gttaaagcactaucctctacccctuac

SEQ ID NO: 30826 - DNA, 24 bp, Artificial Sequence
  Synthetic
tggtaccautctcttcaucccagt

SEQ ID NO: 30827 - DNA, 23 bp, Artificial Sequence
  Synthetic
ggtcatuggaacagctggctauc

SEQ ID NO: 30828 - DNA, 25 bp, Artificial Sequence
  Synthetic
tccataccuaacttcttgtguggga

SEQ ID NO: 30829 - DNA, 29 bp, Artificial Sequence
  Synthetic
cagtgaagaugcaaaagaaatgguaagat

SEQ ID NO: 30830 - DNA, 26 bp, Artificial Sequence
  Synthetic
ctcactatgtttgutgtccaggctua

SEQ ID NO: 30831 - DNA, 24 bp, Artificial Sequence
  Synthetic
caucagagtgcauccagaggaaaa

SEQ ID NO: 30832 - DNA, 22 bp, Artificial Sequence
  Synthetic
cctttatgagccauccatgcuc

SEQ ID NO: 30833 - DNA, 28 bp, Artificial Sequence
  Synthetic
ctctttacaaagutgacgtgtcattuct

SEQ ID NO: 30834 - DNA, 23 bp, Artificial Sequence
  Synthetic
gcttgagagtugaaggccagaug

SEQ ID NO: 30835 - DNA, 28 bp, Artificial Sequence
  Synthetic
ctacccatccgutaagattggttactua

SEQ ID NO: 30836 - DNA, 20 bp, Artificial Sequence
  Synthetic
cacgtgggaguctcctucag

SEQ ID NO: 30837 - DNA, 20 bp, Artificial Sequence
  Synthetic
gagagagccugcacauacgg

SEQ ID NO: 30838 - DNA, 21 bp, Artificial Sequence
  Synthetic
cctacatcaagguacggccut

SEQ ID NO: 30839 - DNA, 22 bp, Artificial Sequence
  Synthetic
tgaugatcagcgugaggacaac

SEQ ID NO: 30840 - DNA, 20 bp, Artificial Sequence
  Synthetic
cctctcuaagcccgcccuat

SEQ ID NO: 30841 - DNA, 27 bp, Artificial Sequence
  Synthetic
gatguaggagaaguagaagagaaacug

SEQ ID NO: 30842 - DNA, 17 bp, Artificial Sequence
  Synthetic
cgcccuccgtctgtcug

SEQ ID NO: 30843 - DNA, 17 bp, Artificial Sequence
  Synthetic
cuggaaggucccgggaa

SEQ ID NO: 30844 - DNA, 26 bp, Artificial Sequence
  Synthetic
ttcttcatccagcacutctgtttgua

SEQ ID NO: 30845 - DNA, 21 bp, Artificial Sequence
  Synthetic
aggctattgaauggcctcugg

SEQ ID NO: 30846 - DNA, 26 bp, Artificial Sequence
  Synthetic
atctcttttcuttaaggctucaggca

SEQ ID NO: 30847 - DNA, 21 bp, Artificial Sequence
  Synthetic
ggctgcutgatctcugggaat

SEQ ID NO: 30848 - DNA, 21 bp, Artificial Sequence
  Synthetic
gggaaatugaagtcggugcga

SEQ ID NO: 30849 - DNA, 22 bp, Artificial Sequence
  Synthetic
cagctgccuctttactgacugt

SEQ ID NO: 30850 - DNA, 18 bp, Artificial Sequence
  Synthetic
ggugggcctuaggagcct

SEQ ID NO: 30851 - DNA, 19 bp, Artificial Sequence
  Synthetic
gtcggugggcttattgcuc

SEQ ID NO: 30852 - DNA, 19 bp, Artificial Sequence
  Synthetic
gcagcuccaggagaaccug

SEQ ID NO: 30853 - DNA, 24 bp, Artificial Sequence
  Synthetic
cattgtcaugaattgcgtcaucgt

SEQ ID NO: 30854 - DNA, 18 bp, Artificial Sequence
  Synthetic
cccutcacacuggccaca

SEQ ID NO: 30855 - DNA, 19 bp, Artificial Sequence
  Synthetic
tcactggcuctcccuccag

SEQ ID NO: 30856 - DNA, 21 bp, Artificial Sequence
  Synthetic
acacagggcacgaugatgtua

SEQ ID NO: 30857 - DNA, 19 bp, Artificial Sequence
  Synthetic
ctcugacagccagcugacc

SEQ ID NO: 30858 - DNA, 20 bp, Artificial Sequence
  Synthetic
cctcggaguagctctuccca

SEQ ID NO: 30859 - DNA, 21 bp, Artificial Sequence
  Synthetic
tgtgcaaaaagcucggttucc

SEQ ID NO: 30860 - DNA, 22 bp, Artificial Sequence
  Synthetic
ctggacaagaccucacaccaut

SEQ ID NO: 30861 - DNA, 21 bp, Artificial Sequence
  Synthetic
agccaaaaaucccacttcugg

SEQ ID NO: 30862 - DNA, 24 bp, Artificial Sequence
  Synthetic
ctgtgtctaaguctccatctuggt

SEQ ID NO: 30863 - DNA, 24 bp, Artificial Sequence
  Synthetic
cagagcucagaataacccugagaa

SEQ ID NO: 30864 - DNA, 18 bp, Artificial Sequence
  Synthetic
ggcacugaacccccacuc

SEQ ID NO: 30865 - DNA, 18 bp, Artificial Sequence
  Synthetic
ggcugcggtgactuacct

SEQ ID NO: 30866 - DNA, 21 bp, Artificial Sequence
  Synthetic
cccaaccagagcccugaaaut

SEQ ID NO: 30867 - DNA, 25 bp, Artificial Sequence
  Synthetic
cagctctgatuatcccttccctuac

SEQ ID NO: 30868 - DNA, 23 bp, Artificial Sequence
  Synthetic
ggtgtttggagaugttaagcuca

SEQ ID NO: 30869 - DNA, 22 bp, Artificial Sequence
  Synthetic
gcatactgggaugtggcgauag

SEQ ID NO: 30870 - DNA, 24 bp, Artificial Sequence
  Synthetic
gggacttugaagctcaucagaact

SEQ ID NO: 30871 - DNA, 21 bp, Artificial Sequence
  Synthetic
ggagaaaugggaggcaggtug

SEQ ID NO: 30872 - DNA, 22 bp, Artificial Sequence
  Synthetic
tgacaaccugtugaacacacct

SEQ ID NO: 30873 - DNA, 21 bp, Artificial Sequence
  Synthetic
gcacccguactccaucaaaga

SEQ ID NO: 30874 - DNA, 21 bp, Artificial Sequence
  Synthetic
ccuagggagacugcagaacca

SEQ ID NO: 30875 - DNA, 21 bp, Artificial Sequence
  Synthetic
cugacccgacugggaagaaag

SEQ ID NO: 30876 - DNA, 20 bp, Artificial Sequence
  Synthetic
agtccagtutgggtgcucag

SEQ ID NO: 30877 - DNA, 21 bp, Artificial Sequence
  Synthetic
tctgcagaagaccgucctgua

SEQ ID NO: 30878 - DNA, 20 bp, Artificial Sequence
  Synthetic
gacagtgagucctgacugct

SEQ ID NO: 30879 - DNA, 25 bp, Artificial Sequence
  Synthetic
gaatgactggutagttgccauacac

SEQ ID NO: 30880 - DNA, 21 bp, Artificial Sequence
  Synthetic
cgcactguccccatctctuaa

SEQ ID NO: 30881 - DNA, 24 bp, Artificial Sequence
  Synthetic
cggaatggtguagagctcactuac

SEQ ID NO: 30882 - DNA, 20 bp, Artificial Sequence
  Synthetic
ccagccgguccagauttaut

SEQ ID NO: 30883 - DNA, 17 bp, Artificial Sequence
  Synthetic
gcagccccgagucucac

SEQ ID NO: 30884 - DNA, 20 bp, Artificial Sequence
  Synthetic
ccagcaacaggugcacatuc

SEQ ID NO: 30885 - DNA, 21 bp, Artificial Sequence
  Synthetic
gagaataagugcagcccuggt

SEQ ID NO: 30886 - DNA, 24 bp, Artificial Sequence
  Synthetic
ccctcatttcuctccaccctacut

SEQ ID NO: 30887 - DNA, 28 bp, Artificial Sequence
  Synthetic
cttactgggcuggatattcaaggaaaut

SEQ ID NO: 30888 - DNA, 21 bp, Artificial Sequence
  Synthetic
ggcctgauccctgatgagauc

SEQ ID NO: 30889 - DNA, 26 bp, Artificial Sequence
  Synthetic
gatgtcuaaggaaagggaggattugt

SEQ ID NO: 30890 - DNA, 22 bp, Artificial Sequence
  Synthetic
acuaaccaggacagctcucaca

SEQ ID NO: 30891 - DNA, 23 bp, Artificial Sequence
  Synthetic
agaagagtgaugaggatgcaugg

SEQ ID NO: 30892 - DNA, 24 bp, Artificial Sequence
  Synthetic
aatctgtcttugaatggccuggaa

SEQ ID NO: 30893 - DNA, 31 bp, Artificial Sequence
  Synthetic
acatgaggtactugataataatgggtacuga

SEQ ID NO: 30894 - DNA, 22 bp, Artificial Sequence
  Synthetic
cccaccaauacgcctcttcuac

SEQ ID NO: 30895 - DNA, 19 bp, Artificial Sequence
  Synthetic
gtggguaacgggcgtaguc

SEQ ID NO: 30896 - DNA, 23 bp, Artificial Sequence
  Synthetic
ccagagcucaggaagtttcctut

SEQ ID NO: 30897 - DNA, 21 bp, Artificial Sequence
  Synthetic
ggtctcaacccuccagtctuc

SEQ ID NO: 30898 - DNA, 17 bp, Artificial Sequence
  Synthetic
cccaucctccuccccac

SEQ ID NO: 30899 - DNA, 21 bp, Artificial Sequence
  Synthetic
gtucaagacagaagggccuga

SEQ ID NO: 30900 - DNA, 32 bp, Artificial Sequence
  Synthetic
atgatgttccttagautaggtgtattaaaucc

SEQ ID NO: 30901 - DNA, 28 bp, Artificial Sequence
  Synthetic
guagctaactaactucagaacaccaact

SEQ ID NO: 30902 - DNA, 25 bp, Artificial Sequence
  Synthetic
aaagtgaatcugaggcataacugca

SEQ ID NO: 30903 - DNA, 26 bp, Artificial Sequence
  Synthetic
cttgcttctcutttcctatccugagt

SEQ ID NO: 30904 - DNA, 21 bp, Artificial Sequence
  Synthetic
accuggagggccacugacaac

SEQ ID NO: 30905 - DNA, 29 bp, Artificial Sequence
  Synthetic
gcctctgattccucactgattgctctuag

SEQ ID NO: 30906 - DNA, 22 bp, Artificial Sequence
  Synthetic
gcctcacaaccuccgtcatgug

SEQ ID NO: 30907 - DNA, 29 bp, Artificial Sequence
  Synthetic
tctgtctccttccucttcctacagtacuc

SEQ ID NO: 30908 - DNA, 21 bp, Artificial Sequence
  Synthetic
ctcauggaagccagccccuca

SEQ ID NO: 30909 - DNA, 21 bp, Artificial Sequence
  Synthetic
ctgcaccagcagcuccuacac

SEQ ID NO: 30910 - DNA, 23 bp, Artificial Sequence
  Synthetic
ccttgtcctuaccagaacgtugt

SEQ ID NO: 30911 - DNA, 26 bp, Artificial Sequence
  Synthetic
tttcagacctauggaaactgtgagug

SEQ ID NO: 30912 - DNA, 17 bp, Artificial Sequence
  Synthetic
ctcgtggguccggugaa

SEQ ID NO: 30913 - DNA, 17 bp, Artificial Sequence
  Synthetic
gccuccacccacagguc

SEQ ID NO: 30914 - DNA, 20 bp, Artificial Sequence
  Synthetic
ggtcacagguaggctcccut

SEQ ID NO: 30915 - DNA, 20 bp, Artificial Sequence
  Synthetic
gacaaggcguagtggaucgt

SEQ ID NO: 30916 - DNA, 21 bp, Artificial Sequence
  Synthetic
ctctgagccccuactctccut

SEQ ID NO: 30917 - DNA, 17 bp, Artificial Sequence
  Synthetic
gccgcguccgtgtcuag

SEQ ID NO: 30918 - DNA, 20 bp, Artificial Sequence
  Synthetic
ctggcaucgctcctcaguat

SEQ ID NO: 30919 - DNA, 23 bp, Artificial Sequence
  Synthetic
catttcuggcacaagctcactuc

SEQ ID NO: 30920 - DNA, 23 bp, Artificial Sequence
  Synthetic
gacctctugcattgacctcuacc

SEQ ID NO: 30921 - DNA, 24 bp, Artificial Sequence
  Synthetic
atgactacaugtcctccugagagt

SEQ ID NO: 30922 - DNA, 22 bp, Artificial Sequence
  Synthetic
tgggcagaaaaugcaagucaac

SEQ ID NO: 30923 - DNA, 23 bp, Artificial Sequence
  Synthetic
acttgaacauccagtccagctut

SEQ ID NO: 30924 - DNA, 21 bp, Artificial Sequence
  Synthetic
gctgccucttacccuacccat

SEQ ID NO: 30925 - DNA, 19 bp, Artificial Sequence
  Synthetic
gtggaucctcgtcugcaca

SEQ ID NO: 30926 - DNA, 24 bp, Artificial Sequence
  Synthetic
gtctttagctuggccatcatcaug

SEQ ID NO: 30927 - DNA, 22 bp, Artificial Sequence
  Synthetic
actgggcuttgcttuagaggaa

SEQ ID NO: 30928 - DNA, 21 bp, Artificial Sequence
  Synthetic
cccaggtcutcagcagcttua

SEQ ID NO: 30929 - DNA, 17 bp, Artificial Sequence
  Synthetic
cutcccacuggcaccca

SEQ ID NO: 30930 - DNA, 21 bp, Artificial Sequence
  Synthetic
agtgagcccautgaggttgug

SEQ ID NO: 30931 - DNA, 21 bp, Artificial Sequence
  Synthetic
ttgattgggcagguaggcuag

SEQ ID NO: 30932 - DNA, 22 bp, Artificial Sequence
  Synthetic
catgtcacuggacatccucagt

SEQ ID NO: 30933 - DNA, 23 bp, Artificial Sequence
  Synthetic
tgagtugcctcctcuacaggaaa

SEQ ID NO: 30934 - DNA, 18 bp, Artificial Sequence
  Synthetic
gccacagcutaccgcauc

SEQ ID NO: 30935 - DNA, 21 bp, Artificial Sequence
  Synthetic
cagaagggugagctgaggtut

SEQ ID NO: 30936 - DNA, 19 bp, Artificial Sequence
  Synthetic
ccccatuccccttcccuga

SEQ ID NO: 30937 - DNA, 18 bp, Artificial Sequence
  Synthetic
gcttgggugggacgtuct

SEQ ID NO: 30938 - DNA, 23 bp, Artificial Sequence
  Synthetic
ttcgagaaaggugtggttuccat

SEQ ID NO: 30939 - DNA, 21 bp, Artificial Sequence
  Synthetic
cctcauagctcggguaaggct

SEQ ID NO: 30940 - DNA, 18 bp, Artificial Sequence
  Synthetic
ggcttuccctggcuacgg

SEQ ID NO: 30941 - DNA, 22 bp, Artificial Sequence
  Synthetic
ggcactgcugtctttttcauca

SEQ ID NO: 30942 - DNA, 19 bp, Artificial Sequence
  Synthetic
cgacattgccucccctcug

SEQ ID NO: 30943 - DNA, 24 bp, Artificial Sequence
  Synthetic
actggtaggcaugaagattcugga

SEQ ID NO: 30944 - DNA, 25 bp, Artificial Sequence
  Synthetic
ggaaaccctccautaccaaaaccuc

SEQ ID NO: 30945 - DNA, 23 bp, Artificial Sequence
  Synthetic
gaaagttcuccaggtttggcauc

SEQ ID NO: 30946 - DNA, 20 bp, Artificial Sequence
  Synthetic
aacugcaagcccctucagaa

SEQ ID NO: 30947 - DNA, 18 bp, Artificial Sequence
  Synthetic
gagtagccgcuccctucg

SEQ ID NO: 30948 - DNA, 21 bp, Artificial Sequence
  Synthetic
agcutcctctacugcaaccag

SEQ ID NO: 30949 - DNA, 22 bp, Artificial Sequence
  Synthetic
cgaactuggagaagctgucgag

SEQ ID NO: 30950 - DNA, 19 bp, Artificial Sequence
  Synthetic
ccgacaaagcutgggcuga

SEQ ID NO: 30951 - DNA, 21 bp, Artificial Sequence
  Synthetic
ccacggaaggguctucaaaca

SEQ ID NO: 30952 - DNA, 21 bp, Artificial Sequence
  Synthetic
accccacuacagcagctttug

SEQ ID NO: 30953 - DNA, 21 bp, Artificial Sequence
  Synthetic
ctttgctgaugccatcugagg

SEQ ID NO: 30954 - DNA, 21 bp, Artificial Sequence
  Synthetic
gactucaagcaggaggaggug

SEQ ID NO: 30955 - DNA, 21 bp, Artificial Sequence
  Synthetic
aggagcucacauagggaggag

SEQ ID NO: 30956 - DNA, 18 bp, Artificial Sequence
  Synthetic
catcctgcugggcccuac

SEQ ID NO: 30957 - DNA, 19 bp, Artificial Sequence
  Synthetic
ggctccguaagctttugcc

SEQ ID NO: 30958 - DNA, 21 bp, Artificial Sequence
  Synthetic
cctcttgcuccctgaatccug

SEQ ID NO: 30959 - DNA, 18 bp, Artificial Sequence
  Synthetic
ccgctugcccgactugaa

SEQ ID NO: 30960 - DNA, 20 bp, Artificial Sequence
  Synthetic
tccucgacaacagccactug

SEQ ID NO: 30961 - DNA, 19 bp, Artificial Sequence
  Synthetic
caggttccgcutcttggug

SEQ ID NO: 30962 - DNA, 23 bp, Artificial Sequence
  Synthetic
ggaugtcttcucccaagaaagcc

SEQ ID NO: 30963 - DNA, 23 bp, Artificial Sequence
  Synthetic
cgctttacaugcgaacttctuga

SEQ ID NO: 30964 - DNA, 23 bp, Artificial Sequence
  Synthetic
gtggaagaaggccuggtaaaugt

SEQ ID NO: 30965 - DNA, 22 bp, Artificial Sequence
  Synthetic
ctttccggcucctcttctuagg

SEQ ID NO: 30966 - DNA, 21 bp, Artificial Sequence
  Synthetic
ccagugaggacaactctggug

SEQ ID NO: 30967 - DNA, 17 bp, Artificial Sequence
  Synthetic
ctgtcgucgtcgctugg

SEQ ID NO: 30968 - DNA, 18 bp, Artificial Sequence
  Synthetic
ttcgugcggguggagaag

SEQ ID NO: 30969 - DNA, 17 bp, Artificial Sequence
  Synthetic
gccuccagggagtgugg

SEQ ID NO: 30970 - DNA, 22 bp, Artificial Sequence
  Synthetic
gtacctctugccttgtttgcug

SEQ ID NO: 30971 - DNA, 19 bp, Artificial Sequence
  Synthetic
ctgcacacucgggacctut

SEQ ID NO: 30972 - DNA, 18 bp, Artificial Sequence
  Synthetic
gtgauggccgggaggaug

SEQ ID NO: 30973 - DNA, 17 bp, Artificial Sequence
  Synthetic
gctgggcuggcctctua

SEQ ID NO: 30974 - DNA, 20 bp, Artificial Sequence
  Synthetic
ccucctggcugcagacaaaa

SEQ ID NO: 30975 - DNA, 19 bp, Artificial Sequence
  Synthetic
ctcctcucccgctugacac

SEQ ID NO: 30976 - DNA, 19 bp, Artificial Sequence
  Synthetic
ttttgcagaggcugccgua

SEQ ID NO: 30977 - DNA, 18 bp, Artificial Sequence
  Synthetic
gcuccggaacgggtttuc

SEQ ID NO: 30978 - DNA, 22 bp, Artificial Sequence
  Synthetic
gggatctuccagtgggatcugt

SEQ ID NO: 30979 - DNA, 22 bp, Artificial Sequence
  Synthetic
cacctctgguaacgtcctctuc

SEQ ID NO: 30980 - DNA, 26 bp, Artificial Sequence
  Synthetic
ggcugtgaaaauagaaaaggacagga

SEQ ID NO: 30981 - DNA, 17 bp, Artificial Sequence
  Synthetic
ctccgcugcgagaugga

SEQ ID NO: 30982 - DNA, 21 bp, Artificial Sequence
  Synthetic
cacccttccuggcactatucc

SEQ ID NO: 30983 - DNA, 23 bp, Artificial Sequence
  Synthetic
ccttctggugtgaatggcatuct

SEQ ID NO: 30984 - DNA, 22 bp, Artificial Sequence
  Synthetic
ggtcacgcauctcgtucagaat

SEQ ID NO: 30985 - DNA, 23 bp, Artificial Sequence
  Synthetic
ggcagtautcaggccuaaggaac

SEQ ID NO: 30986 - DNA, 23 bp, Artificial Sequence
  Synthetic
ctcgtggtucttcttcagguagg

SEQ ID NO: 30987 - DNA, 24 bp, Artificial Sequence
  Synthetic
tgtgatcaggaugggtgtctcaua

SEQ ID NO: 30988 - DNA, 22 bp, Artificial Sequence
  Synthetic
gaaggagcuagctggaatggug

SEQ ID NO: 30989 - DNA, 21 bp, Artificial Sequence
  Synthetic
gtgagaaggugaccaugcaga

SEQ ID NO: 30990 - DNA, 18 bp, Artificial Sequence
  Synthetic
gcugaagccaccgccaua

SEQ ID NO: 30991 - DNA, 18 bp, Artificial Sequence
  Synthetic
gcaccaugaccaccugca

SEQ ID NO: 30992 - DNA, 23 bp, Artificial Sequence
  Synthetic
gcagattuccaagggagactuca

SEQ ID NO: 30993 - DNA, 19 bp, Artificial Sequence
  Synthetic
gaucccccacagccacuac

SEQ ID NO: 30994 - DNA, 22 bp, Artificial Sequence
  Synthetic
tgtgccaagaacugtgctacuc

SEQ ID NO: 30995 - DNA, 25 bp, Artificial Sequence
  Synthetic
acactttgaaugctctttcctucct

SEQ ID NO: 30996 - DNA, 21 bp, Artificial Sequence
  Synthetic
caatcugaggaacccccaucg

SEQ ID NO: 30997 - DNA, 25 bp, Artificial Sequence
  Synthetic
cctctctctucctctcttctuccag

SEQ ID NO: 30998 - DNA, 24 bp, Artificial Sequence
  Synthetic
ttgttaaggaaaguggtgcatuga

SEQ ID NO: 30999 - DNA, 33 bp, Artificial Sequence
  Synthetic
gtatgtaacctgtcutttctatgatctcttuag

SEQ ID NO: 31000 - DNA, 22 bp, Artificial Sequence
  Synthetic
gcctcgccucatgtggtttuat

SEQ ID NO: 31001 - DNA, 29 bp, Artificial Sequence
  Synthetic
gtgctagagguaactcatgataauggaat

SEQ ID NO: 31002 - DNA, 22 bp, Artificial Sequence
  Synthetic
ctgggcagautctgcaacttuc

SEQ ID NO: 31003 - DNA, 30 bp, Artificial Sequence; identical to SEQ ID NO: 4777
  Synthetic

SEQ ID NO: 31004 - DNA, 22 bp, Artificial Sequence
  Synthetic
tgttgcucctccacaucaacaa

SEQ ID NO: 31005 - DNA, 22 bp, Artificial Sequence
  Synthetic
cacaattgguggcgatggttut

SEQ ID NO: 31006 - DNA, 29 bp, Artificial Sequence
  Synthetic
caaacacagctautaaaaagtcattccuc

SEQ ID NO: 31007 - DNA, 28 bp, Artificial Sequence
  Synthetic
ttcccttgatguctacaatttcacctut

SEQ ID NO: 31008 - DNA, 24 bp, Artificial Sequence
  Synthetic
caaagagaugatgucagcaaacct

SEQ ID NO: 31009 - DNA, 32 bp, Artificial Sequence
  Synthetic
gcttttacatcugaacctctgtttttgttaut

SEQ ID NO: 31010 - DNA, 23 bp, Artificial Sequence
  Synthetic
ccaaucaagaaaggatccugggt

SEQ ID NO: 31011 - DNA, 19 bp, Artificial Sequence
  Synthetic
catagcaccgutgcuaccg

SEQ ID NO: 31012 - DNA, 22 bp, Artificial Sequence
  Synthetic
cttcgguaacccugagccaaat

SEQ ID NO: 31013 - DNA, 25 bp, Artificial Sequence
  Synthetic
cctatgggaaguagtcatgcatcuc

SEQ ID NO: 31014 - DNA, 25 bp, Artificial Sequence
  Synthetic
gttgcaaaaccccuaatcuaagcat

SEQ ID NO: 31015 - DNA, 27 bp, Artificial Sequence
  Synthetic
ggaaatgagaacautccaagtacagug

SEQ ID NO: 31016 - DNA, 28 bp, Artificial Sequence
  Synthetic
cgatatgggtttugtaaaagtccatgut

SEQ ID NO: 31017 - DNA, 29 bp, Artificial Sequence
  Synthetic
ggaaagaatgaguctaatatcaagccugt

SEQ ID NO: 31018 - DNA, 22 bp, Artificial Sequence
  Synthetic
gcaaatgacuggcgcttugaaa

SEQ ID NO: 31019 - DNA, 30 bp, Artificial Sequence
  Synthetic
caaaaacagaaccaaauaaatgtgtgaguc

SEQ ID NO: 31020 - DNA, 25 bp, Artificial Sequence
  Synthetic
tgcaaaacccuttctccactuaaca

SEQ ID NO: 31021 - DNA, 26 bp, Artificial Sequence
  Synthetic
agacaaguaaaagacaugacagcgat

SEQ ID NO: 31022 - DNA, 28 bp, Artificial Sequence
  Synthetic
tcactgcuagaacaactatcaattugca

SEQ ID NO: 31023 - DNA, 28 bp, Artificial Sequence
  Synthetic
ctcgaaaaagaauctgcttucaaaacga

SEQ ID NO: 31024 - DNA, 22 bp, Artificial Sequence
  Synthetic
accattctgcuccgtttggtua

SEQ ID NO: 31025 - DNA, 32 bp, Artificial Sequence; identical to SEQ ID NO: 9083
  Synthetic

SEQ ID NO: 31026 - DNA, 28 bp, Artificial Sequence
  Synthetic
tggccagtaaguctattttctcugaaga

SEQ ID NO: 31027 - DNA, 31 bp, Artificial Sequence; identical to SEQ ID NO: 6943
  Synthetic

SEQ ID NO: 31028 - DNA, 27 bp, Artificial Sequence
  Synthetic
ccgcctatcautacatgtttcctuact

SEQ ID NO: 31029 - DNA, 27 bp, Artificial Sequence
  Synthetic
gcatccagaaaaguatcagggtagtuc

SEQ ID NO: 31030 - DNA, 24 bp, Artificial Sequence
  Synthetic
ttgtaaaggucccaaatggtctuc

SEQ ID NO: 31031 - DNA, 29 bp, Artificial Sequence
  Synthetic
gtttcttatuaggactctgtctttuccct

SEQ ID NO: 31032 - DNA, 32 bp, Artificial Sequence
  Synthetic
acaaatacaaattaugaccaagattttuggca

SEQ ID NO: 31033 - DNA, 28 bp, Artificial Sequence
  Synthetic
tgcttgactgtuctttaccatactgtut

SEQ ID NO: 31034 - DNA, 23 bp, Artificial Sequence
  Synthetic
tctguagaagtctttuggcacgg

SEQ ID NO: 31035 - DNA, 28 bp, Artificial Sequence
  Synthetic
caacaaagagcauacatagggtttcuct

SEQ ID NO: 31036 - DNA, 28 bp, Artificial Sequence
  Synthetic
atttctacttttucctactgtggtugct

SEQ ID NO: 31037 - DNA, 30 bp, Artificial Sequence
  Synthetic
ggctatttgcctuttgagtattctttcuac

SEQ ID NO: 31038 - DNA, 27 bp, Artificial Sequence
  Synthetic
ggtcaattcugttcatttgcauaggag

SEQ ID NO: 31039 - DNA, 31 bp, Artificial Sequence
  Synthetic
tgttaaagttcatuggaacagaaagaaaugg

SEQ ID NO: 31040 - DNA, 22 bp, Artificial Sequence
  Synthetic
tctgatccucctgtgtgtguga

SEQ ID NO: 31041 - DNA, 19 bp, Artificial Sequence
  Synthetic
tctccatutcggctugcgt

SEQ ID NO: 31042 - DNA, 22 bp, Artificial Sequence
  Synthetic
ccaucaacatcgucaccaccaa

SEQ ID NO: 31043 - DNA, 20 bp, Artificial Sequence
  Synthetic
gccccatccuctcagtccut

SEQ ID NO: 31044 - DNA, 21 bp, Artificial Sequence
  Synthetic
ccauaccaggccaaacagtug

SEQ ID NO: 31045 - DNA, 22 bp, Artificial Sequence
  Synthetic
gacctaugaagggcctggacua

SEQ ID NO: 31046 - DNA, 19 bp, Artificial Sequence
  Synthetic
cccccagaucgggagaaug

SEQ ID NO: 31047 - DNA, 21 bp, Artificial Sequence
  Synthetic
cccutcctttgugggaggaat

SEQ ID NO: 31048 - DNA, 21 bp, Artificial Sequence
  Synthetic
ctgaggcacuacttccgcuac

SEQ ID NO: 31049 - DNA, 22 bp, Artificial Sequence
  Synthetic
ctgtatccugagggacctcuga

SEQ ID NO: 31050 - DNA, 19 bp, Artificial Sequence
  Synthetic
gcgcacggugataaagucc

SEQ ID NO: 31051 - DNA, 27 bp, Artificial Sequence
  Synthetic
attttaatcaugcctaaagucccacct

SEQ ID NO: 31052 - DNA, 23 bp, Artificial Sequence
  Synthetic
cgtatgaatcucctggaccccut

SEQ ID NO: 31053 - DNA, 21 bp, Artificial Sequence
  Synthetic
cgctctccutcttcagaucgg

SEQ ID NO: 31054 - DNA, 19 bp, Artificial Sequence
  Synthetic
gucaacggcuccagcaaga

SEQ ID NO: 31055 - DNA, 19 bp, Artificial Sequence
  Synthetic
ggcaaaucagcccugacca

SEQ ID NO: 31056 - DNA, 21 bp, Artificial Sequence
  Synthetic
ccacccggautacaaguacca

SEQ ID NO: 31057 - DNA, 20 bp, Artificial Sequence
  Synthetic
cgggacggagauagcttguc

SEQ ID NO: 31058 - DNA, 21 bp, Artificial Sequence
  Synthetic
agcgacgucatctccaacauc

SEQ ID NO: 31059 - DNA, 19 bp, Artificial Sequence
  Synthetic
tgcutggacauccacacgt

SEQ ID NO: 31060 - DNA, 20 bp, Artificial Sequence
  Synthetic
caucaagacggagcagcuga

SEQ ID NO: 31061 - DNA, 23 bp, Artificial Sequence
  Synthetic
tgtaggugaaggtggaguagagg

SEQ ID NO: 31062 - DNA, 20 bp, Artificial Sequence
  Synthetic
acacagcucactcgacctug

SEQ ID NO: 31063 - DNA, 25 bp, Artificial Sequence
  Synthetic
ggataggtcaugtttgtgtctugga

SEQ ID NO: 31064 - DNA, 21 bp, Artificial Sequence
  Synthetic
gtgggaaagugcttgccttug

SEQ ID NO: 31065 - DNA, 26 bp, Artificial Sequence
  Synthetic
ccctagattcatutccaccagctaut

SEQ ID NO: 31066 - DNA, 20 bp, Artificial Sequence
  Synthetic
cctccggagugaccctcuag

SEQ ID NO: 31067 - DNA, 23 bp, Artificial Sequence
  Synthetic
catcggacauggagtuggagaag

SEQ ID NO: 31068 - DNA, 22 bp, Artificial Sequence
  Synthetic
gctcagctaucccctctctguc

SEQ ID NO: 31069 - DNA, 27 bp, Artificial Sequence
  Synthetic
attutaagttgtgggugaaagaggagt

SEQ ID NO: 31070 - DNA, 19 bp, Artificial Sequence
  Synthetic
ccuacacgacgccgtgaug

SEQ ID NO: 31071 - DNA, 20 bp, Artificial Sequence
  Synthetic
tcatcgtugcggctcaugat

SEQ ID NO: 31072 - DNA, 23 bp, Artificial Sequence
  Synthetic
tcatggagaugcttagccugaga

SEQ ID NO: 31073 - DNA, 23 bp, Artificial Sequence
  Synthetic
atttcuccaccgtgauccaagac

SEQ ID NO: 31074 - DNA, 17 bp, Artificial Sequence
  Synthetic
gggccutcaggcaucga

SEQ ID NO: 31075 - DNA, 19 bp, Artificial Sequence
  Synthetic
ctugaggccgucggagaag

SEQ ID NO: 31076 - DNA, 21 bp, Artificial Sequence
  Synthetic
cccaccauggtctctctcaut

SEQ ID NO: 31077 - DNA, 19 bp, Artificial Sequence
  Synthetic
ggugtacaaggugcaccca

SEQ ID NO: 31078 - DNA, 19 bp, Artificial Sequence
  Synthetic
ccgcuacgagggtcagtuc

SEQ ID NO: 31079 - DNA, 20 bp, Artificial Sequence
  Synthetic
ccaagtcuggctcucccaac

SEQ ID NO: 31080 - DNA, 21 bp, Artificial Sequence
  Synthetic
ccctcuccagagagaacccua

SEQ ID NO: 31081 - DNA, 22 bp, Artificial Sequence
  Synthetic
acctcgtaggucttagccucac

SEQ ID NO: 31082 - DNA, 17 bp, Artificial Sequence
  Synthetic
gggtgcccugctgacug

SEQ ID NO: 31083 - DNA, 17 bp, Artificial Sequence
  Synthetic
ccuccccaccgagcuct

SEQ ID NO: 31084 - DNA, 20 bp, Artificial Sequence
  Synthetic
ggtcccaccugaagaggtug

SEQ ID NO: 31085 - DNA, 22 bp, Artificial Sequence
  Synthetic
catgttgtuggtgacctuccag

SEQ ID NO: 31086 - DNA, 20 bp, Artificial Sequence
  Synthetic
cccctgaucctagcatggut

SEQ ID NO: 31087 - DNA, 21 bp, Artificial Sequence
  Synthetic
ggcctagtucctgggtcctua

SEQ ID NO: 31088 - DNA, 22 bp, Artificial Sequence
  Synthetic
gcctccactucagggctatcua

SEQ ID NO: 31089 - DNA, 23 bp, Artificial Sequence
  Synthetic
ctatgggauggagatggaguagg

SEQ ID NO: 31090 - DNA, 23 bp, Artificial Sequence
  Synthetic
tgaagctuacagagaagcaggug

SEQ ID NO: 31091 - DNA, 19 bp, Artificial Sequence
  Synthetic
gggtucggaggtggucaga

SEQ ID NO: 31092 - DNA, 22 bp, Artificial Sequence
  Synthetic
ctttatccggccugaggaugac

SEQ ID NO: 31093 - DNA, 22 bp, Artificial Sequence
  Synthetic
gccaggucgcaattccactuaa

SEQ ID NO: 31094 - DNA, 21 bp, Artificial Sequence
  Synthetic
tggtctcugcagtgtccauga

SEQ ID NO: 31095 - DNA, 21 bp, Artificial Sequence
  Synthetic
gggagucaacttctugcagct

SEQ ID NO: 31096 - DNA, 18 bp, Artificial Sequence
  Synthetic
ccccaaccugacccgtua

SEQ ID NO: 31097 - DNA, 19 bp, Artificial Sequence
  Synthetic
cacctgucgtgacccucag

SEQ ID NO: 31098 - DNA, 25 bp, Artificial Sequence
  Synthetic
gtaaagtacuggattcagggugact

SEQ ID NO: 31099 - DNA, 21 bp, Artificial Sequence
  Synthetic
ggacaaauggacagacauggc

SEQ ID NO: 31100 - DNA, 21 bp, Artificial Sequence
  Synthetic
tgaccctcugaagcactcuct

SEQ ID NO: 31101 - DNA, 17 bp, Artificial Sequence
  Synthetic
cccugcccaccacucac

SEQ ID NO: 31102 - DNA, 23 bp, Artificial Sequence
  Synthetic
atcatcccugacatccctaucgt

SEQ ID NO: 31103 - DNA, 22 bp, Artificial Sequence
  Synthetic
gacucactctguacccaagacc

SEQ ID NO: 31104 - DNA, 20 bp, Artificial Sequence
  Synthetic
gggugaccaggaatgugcag

SEQ ID NO: 31105 - DNA, 19 bp, Artificial Sequence
  Synthetic
ctcaggugggtgccauagg

SEQ ID NO: 31106 - DNA, 24 bp, Artificial Sequence
  Synthetic
cctgctcctcucactcttgtttug

SEQ ID NO: 31107 - DNA, 20 bp, Artificial Sequence
  Synthetic
ggatggccaccccugtacua

SEQ ID NO: 31108 - DNA, 22 bp, Artificial Sequence
  Synthetic
cccacatcuctcagagugagct

SEQ ID NO: 31109 - DNA, 21 bp, Artificial Sequence
  Synthetic
gttccugacacagctgaggua

SEQ ID NO: 31110 - DNA, 19 bp, Artificial Sequence
  Synthetic
tggtgguggaagaccucct

SEQ ID NO: 31111 - DNA, 22 bp, Artificial Sequence
  Synthetic
aguagaggaagagcaucagcct

SEQ ID NO: 31112 - DNA, 17 bp, Artificial Sequence
  Synthetic
cugagcccagacucgct

SEQ ID NO: 31113 - DNA, 20 bp, Artificial Sequence
  Synthetic
gagcagggaagaugcctuca

SEQ ID NO: 31114 - DNA, 20 bp, Artificial Sequence
  Synthetic
ccaccctcugactggccuat

SEQ ID NO: 31115 - DNA, 18 bp, Artificial Sequence
  Synthetic
gagagccgggauccccua

SEQ ID NO: 31116 - DNA, 21 bp, Artificial Sequence
  Synthetic
ctuagcacccacauggaccaa

SEQ ID NO: 31117 - DNA, 21 bp, Artificial Sequence
  Synthetic
aauaggttugggcccacagag

SEQ ID NO: 31118 - DNA, 21 bp, Artificial Sequence
  Synthetic
gcctcuactcccauagcccaa

SEQ ID NO: 31119 - DNA, 19 bp, Artificial Sequence
  Synthetic
gcccagacucctgcctuac

SEQ ID NO: 31120 - DNA, 18 bp, Artificial Sequence
  Synthetic
ctctgcgugcguggagat

SEQ ID NO: 31121 - DNA, 18 bp, Artificial Sequence
  Synthetic
ccuggcgacuccaagacc

SEQ ID NO: 31122 - DNA, 29 bp, Artificial Sequence
  Synthetic
aaaacctcacaaggucctttatacttugt

SEQ ID NO: 31123 - DNA, 22 bp, Artificial Sequence
  Synthetic
ccataggacacagccucctcut

SEQ ID NO: 31124 - DNA, 20 bp, Artificial Sequence
  Synthetic
ccuggagaggaggcauacga

SEQ ID NO: 31125 - DNA, 24 bp, Artificial Sequence
  Synthetic
aaaacagaagucagggctacucac

SEQ ID NO: 31126 - DNA, 21 bp, Artificial Sequence
  Synthetic
tcaatggtgucgctgtctcuc

SEQ ID NO: 31127 - DNA, 22 bp, Artificial Sequence
  Synthetic
aaaccugggaaggcttcctuac

SEQ ID NO: 31128 - DNA, 21 bp, Artificial Sequence
  Synthetic
acctccaagagcuggtgtgua

SEQ ID NO: 31129 - DNA, 20 bp, Artificial Sequence
  Synthetic
cggtcgugactcttcuccag

SEQ ID NO: 31130 - DNA, 25 bp, Artificial Sequence
  Synthetic
ccactcactcuctctctctttcucc

SEQ ID NO: 31131 - DNA, 29 bp, Artificial Sequence
  Synthetic
attaaacatgtgucgagtttgcagaauac

SEQ ID NO: 31132 - DNA, 20 bp, Artificial Sequence
  Synthetic
gaggctcuggtgttctuggg

SEQ ID NO: 31133 - DNA, 18 bp, Artificial Sequence
  Synthetic
cacatccucgctgccugt

SEQ ID NO: 31134 - DNA, 21 bp, Artificial Sequence
  Synthetic
acggcgagautgaggcctaua

SEQ ID NO: 31135 - DNA, 20 bp, Artificial Sequence
  Synthetic
ctgagggcaucctctgtguc

SEQ ID NO: 31136 - DNA, 19 bp, Artificial Sequence
  Synthetic
caccctguggctccttguc

SEQ ID NO: 31137 - DNA, 26 bp, Artificial Sequence
  Synthetic
tggttgaagtatutggtggtcttgut

SEQ ID NO: 31138 - DNA, 27 bp, Artificial Sequence
  Synthetic
gggcaatatucacaggtatttctttuc

SEQ ID NO: 31139 - DNA, 22 bp, Artificial Sequence
  Synthetic
gcttcctcucgatcaggaucgt

SEQ ID NO: 31140 - DNA, 27 bp, Artificial Sequence
  Synthetic
ccagccctaautttgctttttgaugaa

SEQ ID NO: 31141 - DNA, 22 bp, Artificial Sequence
  Synthetic
cctgtgtcaccutgaccatcuc

SEQ ID NO: 31142 - DNA, 24 bp, Artificial Sequence
  Synthetic
ggtctctcccugagtctctgttut

SEQ ID NO: 31143 - DNA, 21 bp, Artificial Sequence
  Synthetic
ttctctgucacccggttgtuc

SEQ ID NO: 31144 - DNA, 18 bp, Artificial Sequence
  Synthetic
cctcggugccgggauaga

SEQ ID NO: 31145 - DNA, 20 bp, Artificial Sequence
  Synthetic
gaccttcaugacccacgugt

SEQ ID NO: 31146 - DNA, 18 bp, Artificial Sequence
  Synthetic
cccctcugtcctgtcucc

SEQ ID NO: 31147 - DNA, 19 bp, Artificial Sequence
  Synthetic
cctttccgcugctcccuac

SEQ ID NO: 31148 - DNA, 25 bp, Artificial Sequence
  Synthetic
catttcctggaauctgagtttgugg

SEQ ID NO: 31149 - DNA, 20 bp, Artificial Sequence
  Synthetic
gatgagagccagucgctugt

SEQ ID NO: 31150 - DNA, 21 bp, Artificial Sequence
  Synthetic
cagatgaucgccaacaagcuc

SEQ ID NO: 31151 - DNA, 26 bp, Artificial Sequence
  Synthetic
ctggtttatuaaattgctgaguggct

SEQ ID NO: 31152 - DNA, 21 bp, Artificial Sequence
  Synthetic
gatggctuctcatcgtcugct

SEQ ID NO: 31153 - DNA, 26 bp, Artificial Sequence
  Synthetic
ccctagtaauaaaagctggtuggcaa

SEQ ID NO: 31154 - DNA, 22 bp, Artificial Sequence
  Synthetic
gggtgtatuactttgccaugcc

SEQ ID NO: 31155 - DNA, 24 bp, Artificial Sequence
  Synthetic
accctcgaagguctgtatacucac

SEQ ID NO: 31156 - DNA, 22 bp, Artificial Sequence
  Synthetic
tcgtcaccaaucccaaggaaug

SEQ ID NO: 31157 - DNA, 27 bp, Artificial Sequence
  Synthetic
caagttaaaguggaatgaaaagugcct

SEQ ID NO: 31158 - DNA, 17 bp, Artificial Sequence
  Synthetic
tgtccgcgauggaggug

SEQ ID NO: 31159 - DNA, 18 bp, Artificial Sequence
  Synthetic
ggaggcuacacgggacug

SEQ ID NO: 31160 - DNA, 26 bp, Artificial Sequence
  Synthetic
gggctcttttgauaaaccaagagaut

SEQ ID NO: 31161 - DNA, 22 bp, Artificial Sequence
  Synthetic
agcgatctcacucttccggaua

SEQ ID NO: 31162 - DNA, 28 bp, Artificial Sequence
  Synthetic
tgtttctcgaugaaatggagtttuacct

SEQ ID NO: 31163 - DNA, 21 bp, Artificial Sequence
  Synthetic
ccgtagatgcugactgcacuc

SEQ ID NO: 31164 - DNA, 25 bp, Artificial Sequence
  Synthetic
aaaacattcaaggcutcaccatgug

SEQ ID NO: 31165 - DNA, 24 bp, Artificial Sequence
  Synthetic
gaaatgaacagcgagguctttgug

SEQ ID NO: 31166 - DNA, 26 bp, Artificial Sequence
  Synthetic
tgatgaucgagaagatgtcuggaagt

SEQ ID NO: 31167 - DNA, 30 bp, Artificial Sequence
  Synthetic
atcttgaauttatagcagucaaaacagaga

SEQ ID NO: 31168 - DNA, 17 bp, Artificial Sequence
  Synthetic
ccugcacgggagcugaa

SEQ ID NO: 31169 - DNA, 25 bp, Artificial Sequence
  Synthetic
tggataagucaaagtccaggucagt

SEQ ID NO: 31170 - DNA, 19 bp, Artificial Sequence
  Synthetic
ccuctgauggcgaaagcga

SEQ ID NO: 31171 - DNA, 19 bp, Artificial Sequence
  Synthetic
cagctcaggcuccttgucc

SEQ ID NO: 31172 - DNA, 19 bp, Artificial Sequence
  Synthetic
ggugagtcccuggaccaga

SEQ ID NO: 31173 - DNA, 19 bp, Artificial Sequence
  Synthetic
ggcacgaucttgcggaugt

SEQ ID NO: 31174 - DNA, 17 bp, Artificial Sequence
  Synthetic
gcccugagcctccagug

SEQ ID NO: 31175 - DNA, 18 bp, Artificial Sequence
  Synthetic
ccugagcgggaagagcug

SEQ ID NO: 31176 - DNA, 21 bp, Artificial Sequence
  Synthetic
gctggacagcugttggtucat

SEQ ID NO: 31177 - DNA, 22 bp, Artificial Sequence
  Synthetic
tggagtcguagatccgaaccuc

SEQ ID NO: 31178 - DNA, 21 bp, Artificial Sequence
  Synthetic
agtcugattcggugcggaaaa

SEQ ID NO: 31179 - DNA, 21 bp, Artificial Sequence
  Synthetic
tgggctgucgctttcttcuag

SEQ ID NO: 31180 - DNA, 19 bp, Artificial Sequence
  Synthetic
gaaggagguctgtcgcuga

SEQ ID NO: 31181 - DNA, 18 bp, Artificial Sequence
  Synthetic
cucagaccccgcacucac

SEQ ID NO: 31182 - DNA, 21 bp, Artificial Sequence
  Synthetic
ggagcucaacgacctcatgug

SEQ ID NO: 31183 - DNA, 29 bp, Artificial Sequence
  Synthetic
ctgtcacttacaaaaguagacattccugt

SEQ ID NO: 31184 - DNA, 19 bp, Artificial Sequence
  Synthetic
gccugagaaccggaugagg

SEQ ID NO: 31185 - DNA, 19 bp, Artificial Sequence
  Synthetic
gaaggcgucctgcagttug

SEQ ID NO: 31186 - DNA, 27 bp, Artificial Sequence
  Synthetic
gctctttctcautttcagcatctcuct

SEQ ID NO: 31187 - DNA, 21 bp, Artificial Sequence
  Synthetic
accagaaacggucagtgaugg

SEQ ID NO: 31188 - DNA, 20 bp, Artificial Sequence
  Synthetic
gcctccagacaucgaguacc

SEQ ID NO: 31189 - DNA, 22 bp, Artificial Sequence
  Synthetic
ccagugactuggaaccaaggat

SEQ ID NO: 31190 - DNA, 19 bp, Artificial Sequence
  Synthetic
cacctagcuttgccccuga

SEQ ID NO: 31191 - DNA, 21 bp, Artificial Sequence
  Synthetic
cacactacgugcaaaccctug

SEQ ID NO: 31192 - DNA, 23 bp, Artificial Sequence
  Synthetic
gccctacguagcaaacuacagag

SEQ ID NO: 31193 - DNA, 22 bp, Artificial Sequence
  Synthetic
atgagtggacgagugatgagug

SEQ ID NO: 31194 - DNA, 21 bp, Artificial Sequence
  Synthetic
aggagatcagguggacacuct

SEQ ID NO: 31195 - DNA, 23 bp, Artificial Sequence
  Synthetic
gtaggagctugagaccttatugc

SEQ ID NO: 31196 - DNA, 25 bp, Artificial Sequence
  Synthetic
atgaaattgcugaccatgctttgut

SEQ ID NO: 31197 - DNA, 19 bp, Artificial Sequence
  Synthetic
ccugccgagggagcaauac

SEQ ID NO: 31198 - DNA, 22 bp, Artificial Sequence
  Synthetic
ctccgcattutctacctgtgug

SEQ ID NO: 31199 - DNA, 27 bp, Artificial Sequence
  Synthetic
cccaauaaagaagauaaaaggccagua

SEQ ID NO: 31200 - DNA, 21 bp, Artificial Sequence
  Synthetic
cattcgccucttccccttcut

SEQ ID NO: 31201 - DNA, 23 bp, Artificial Sequence
  Synthetic
cttagctgtcacutagcgtccuc

SEQ ID NO: 31202 - DNA, 21 bp, Artificial Sequence
  Synthetic
catcctgagutgtcacgugga

SEQ ID NO: 31203 - DNA, 22 bp, Artificial Sequence
  Synthetic
tgaatgaggccautggtctuca

SEQ ID NO: 31204 - DNA, 19 bp, Artificial Sequence
  Synthetic
cacagucaccccucagcac

SEQ ID NO: 31205 - DNA, 28 bp, Artificial Sequence
  Synthetic
tccttctcatttutagttctccacucac

SEQ ID NO: 31206 - DNA, 22 bp, Artificial Sequence
  Synthetic
catgtaccaugcccucaaggag

SEQ ID NO: 31207 - DNA, 20 bp, Artificial Sequence
  Synthetic
gggctgtgucctgtttccug

SEQ ID NO: 31208 - DNA, 17 bp, Artificial Sequence
  Synthetic
gcgcccccaaucccauc

SEQ ID NO: 31209 - DNA, 17 bp, Artificial Sequence
  Synthetic
gcagcugggcacguagt

SEQ ID NO: 31210 - DNA, 19 bp, Artificial Sequence
  Synthetic
agccatcccugctcgacua

SEQ ID NO: 31211 - DNA, 17 bp, Artificial Sequence
  Synthetic
gcuccagggccccttug

SEQ ID NO: 31212 - DNA, 28 bp, Artificial Sequence
  Synthetic
gaaattgatugaagtaatgttcgugcct

SEQ ID NO: 31213 - DNA, 21 bp, Artificial Sequence
  Synthetic
gacttcgugatccatcugcct

SEQ ID NO: 31214 - DNA, 23 bp, Artificial Sequence
  Synthetic
cctaggugacagaaugagaccct

SEQ ID NO: 31215 - DNA, 24 bp, Artificial Sequence
  Synthetic
accgactattugacgcagtaugac

SEQ ID NO: 31216 - DNA, 22 bp, Artificial Sequence
  Synthetic
ggcatcccuggcatcauacaaa

SEQ ID NO: 31217 - DNA, 31 bp, Artificial Sequence
  Synthetic
agcatctgactgautttactttttcctuaca

SEQ ID NO: 31218 - DNA, 21 bp, Artificial Sequence
  Synthetic
gggacgttuccttcttgagug

SEQ ID NO: 31219 - DNA, 28 bp, Artificial Sequence
  Synthetic
gatttaattgtuacgcttttcccccuaa

SEQ ID NO: 31220 - DNA, 27 bp, Artificial Sequence
  Synthetic
accttcactacautagcaaagtctuag

SEQ ID NO: 31221 - DNA, 28 bp, Artificial Sequence
  Synthetic
ctacattaaggtcuttcctgcagacaut

SEQ ID NO: 31222 - DNA, 23 bp, Artificial Sequence
  Synthetic
gggaataaaagcgutttggcugt

SEQ ID NO: 31223 - DNA, 25 bp, Artificial Sequence
  Synthetic
ctctaaccggugttatttcccctuc

SEQ ID NO: 31224 - DNA, 20 bp, Artificial Sequence
  Synthetic
cgtgtacucctcgcagtucc

SEQ ID NO: 31225 - DNA, 21 bp, Artificial Sequence
  Synthetic
ccccuaacccagagauacgca

SEQ ID NO: 31226 - DNA, 22 bp, Artificial Sequence
  Synthetic
gggtcttcugacccctcactua

SEQ ID NO: 31227 - DNA, 18 bp, Artificial Sequence
  Synthetic
caccgugcccuaaacgac

SEQ ID NO: 31228 - DNA, 22 bp, Artificial Sequence
  Synthetic
ctgacctcccuctacaacccua

SEQ ID NO: 31229 - DNA, 22 bp, Artificial Sequence
  Synthetic
agaccttcuaccccctgaaucc

SEQ ID NO: 31230 - DNA, 20 bp, Artificial Sequence
  Synthetic
cccctgcaaucgtctcugac

SEQ ID NO: 31231 - DNA, 24 bp, Artificial Sequence
  Synthetic
agggcaacatuaagggtctgttut

SEQ ID NO: 31232 - DNA, 26 bp, Artificial Sequence
  Synthetic
ccuatgagtaggatuagggaccagat

SEQ ID NO: 31233 - DNA, 22 bp, Artificial Sequence
  Synthetic
caagacctuttctgtccuccca

SEQ ID NO: 31234 - DNA, 19 bp, Artificial Sequence
  Synthetic
agaggaggcugacctgugt

SEQ ID NO: 31235 - DNA, 22 bp, Artificial Sequence
  Synthetic
cctgaguagctgggatuacacc

SEQ ID NO: 31236 - DNA, 19 bp, Artificial Sequence
  Synthetic
gtgacgtugcggcagtuag

SEQ ID NO: 31237 - DNA, 24 bp, Artificial Sequence
  Synthetic
ctcgaagtagaugatgaggtccug

SEQ ID NO: 31238 - DNA, 22 bp, Artificial Sequence
  Synthetic
tgggtcucctattgtgaugcct

SEQ ID NO: 31239 - DNA, 19 bp, Artificial Sequence
  Synthetic
tcaggacugggaccccuac

SEQ ID NO: 31240 - DNA, 20 bp, Artificial Sequence
  Synthetic
ggccgctucacctctcatuc

SEQ ID NO: 31241 - DNA, 21 bp, Artificial Sequence
  Synthetic
gaggccagcautcagagtuca

SEQ ID NO: 31242 - DNA, 19 bp, Artificial Sequence
  Synthetic
cuctctggctucccaccac

SEQ ID NO: 31243 - DNA, 18 bp, Artificial Sequence
  Synthetic
gggtguagccctcgguga

SEQ ID NO: 31244 - DNA, 22 bp, Artificial Sequence
  Synthetic
atctccacaggagccuccaaua

SEQ ID NO: 31245 - DNA, 21 bp, Artificial Sequence
  Synthetic
ttgaugcggaaggagauggac

SEQ ID NO: 31246 - DNA, 22 bp, Artificial Sequence
  Synthetic
ccattgaucccaggactgctuc

SEQ ID NO: 31247 - DNA, 25 bp, Artificial Sequence
  Synthetic
cgatactccutgatgggtucaagat

SEQ ID NO: 31248 - DNA, 22 bp, Artificial Sequence
  Synthetic
ggtcatgauggaggaggguaga

SEQ ID NO: 31249 - DNA, 19 bp, Artificial Sequence
  Synthetic
ccuggcaccgcaagtcuag

SEQ ID NO: 31250 - DNA, 18 bp, Artificial Sequence
  Synthetic
gtgaccugtcgccuccac

SEQ ID NO: 31251 - DNA, 20 bp, Artificial Sequence
  Synthetic
ccagccctuagcacagcauc

SEQ ID NO: 31252 - DNA, 19 bp, Artificial Sequence
  Synthetic
gacactgguggaccgtcug

SEQ ID NO: 31253 - DNA, 21 bp, Artificial Sequence
  Synthetic
ggctcgatgutgtagccguag

SEQ ID NO: 31254 - DNA, 22 bp, Artificial Sequence
  Synthetic
cccaaagccugtcttcuaccaa

SEQ ID NO: 31255 - DNA, 24 bp, Artificial Sequence
  Synthetic
tgactgctucaaactcgaaguacc

SEQ ID NO: 31256 - DNA, 26 bp, Artificial Sequence
  Synthetic
ctgtcttcatauatctctcccuccct

SEQ ID NO: 31257 - DNA, 26 bp, Artificial Sequence
  Synthetic
gggtgaagataauggtgttctctgug

SEQ ID NO: 31258 - DNA, 22 bp, Artificial Sequence
  Synthetic
ccaactctcccauccctaccuc

SEQ ID NO: 31259 - DNA, 21 bp, Artificial Sequence
  Synthetic
gttgauggcaaatggcucgaa

SEQ ID NO: 31260 - DNA, 21 bp, Artificial Sequence
  Synthetic
tgugaccaggtguaggaccaa

SEQ ID NO: 31261 - DNA, 20 bp, Artificial Sequence
  Synthetic
cggaagtgcuggtggaacug

SEQ ID NO: 31262 - DNA, 22 bp, Artificial Sequence
  Synthetic
cgaccctgacuacgaaaaccug

SEQ ID NO: 31263 - DNA, 18 bp, Artificial Sequence
  Synthetic
gcccccaauccccacuct

SEQ ID NO: 31264 - DNA, 21 bp, Artificial Sequence
  Synthetic
ctgaccacuagttccccucct

SEQ ID NO: 31265 - DNA, 17 bp, Artificial Sequence
  Synthetic
cctgcaccucccaccuc

SEQ ID NO: 31266 - DNA, 21 bp, Artificial Sequence
  Synthetic
gaccuacaaatuggccccaga

SEQ ID NO: 31267 - DNA, 21 bp, Artificial Sequence
  Synthetic
ccattagugcccccatcacug

SEQ ID NO: 31268 - DNA, 20 bp, Artificial Sequence
  Synthetic
ctgatgccagugtccuggag

SEQ ID NO: 31269 - DNA, 18 bp, Artificial Sequence
  Synthetic
ctgcccaccccugcauag

SEQ ID NO: 31270 - DNA, 19 bp, Artificial Sequence
  Synthetic
tctgugcagccacguagac

SEQ ID NO: 31271 - DNA, 23 bp, Artificial Sequence
  Synthetic
gtgaccatttuctgtgctcctuc

SEQ ID NO: 31272 - DNA, 17 bp, Artificial Sequence
  Synthetic
gcctcagcccugccauc

SEQ ID NO: 31273 - DNA, 25 bp, Artificial Sequence
  Synthetic
gcatgtatcuctggagtttugggaa

SEQ ID NO: 31274 - DNA, 24 bp, Artificial Sequence
  Synthetic
gugaagaggaagaugaggaggaga

SEQ ID NO: 31275 - DNA, 21 bp, Artificial Sequence
  Synthetic
cagcccaccugtaactucaca

SEQ ID NO: 31276 - DNA, 20 bp, Artificial Sequence
  Synthetic
agcgctatguggacaagcuc

SEQ ID NO: 31277 - DNA, 23 bp, Artificial Sequence
  Synthetic
tttagaggtugagggtccucagt

SEQ ID NO: 31278 - DNA, 28 bp, Artificial Sequence
  Synthetic
gcatgcacauatgcacaaataaaugagt

SEQ ID NO: 31279 - DNA, 26 bp, Artificial Sequence
  Synthetic
ggtttctctuccttcttctucaccag

SEQ ID NO: 31280 - DNA, 20 bp, Artificial Sequence
  Synthetic
gctccaagccutgcattguc

SEQ ID NO: 31281 - DNA, 20 bp, Artificial Sequence
  Synthetic
aggctcauggtgtctuccac

SEQ ID NO: 31282 - DNA, 18 bp, Artificial Sequence
  Synthetic
gctgucacagtgguggct

SEQ ID NO: 31283 - DNA, 17 bp, Artificial Sequence
  Synthetic
ccugagcuccccagcac

SEQ ID NO: 31284 - DNA, 22 bp, Artificial Sequence
  Synthetic
gagacaagcaggagugagaugt

SEQ ID NO: 31285 - DNA, 23 bp, Artificial Sequence
  Synthetic
tgagtttggaaucagcaggtguc

SEQ ID NO: 31286 - DNA, 21 bp, Artificial Sequence
  Synthetic
aggtctcugatggtggcucat

SEQ ID NO: 31287 - DNA, 19 bp, Artificial Sequence
  Synthetic
gatggccucttcgauggca

SEQ ID NO: 31288 - DNA, 18 bp, Artificial Sequence
  Synthetic
ccggcccccucctcaaua

SEQ ID NO: 31289 - DNA, 18 bp, Artificial Sequence
  Synthetic
cctggcucagggtcucac

SEQ ID NO: 31290 - DNA, 21 bp, Artificial Sequence
  Synthetic
ggauggaactuggcgaaggag

SEQ ID NO: 31291 - DNA, 22 bp, Artificial Sequence
  Synthetic
gcaagaagucctggttcucgat

SEQ ID NO: 31292 - DNA, 21 bp, Artificial Sequence
  Synthetic
cutggatccttuggccacagt

SEQ ID NO: 31293 - DNA, 21 bp, Artificial Sequence
  Synthetic
gcagcauagagtccaccauga

SEQ ID NO: 31294 - DNA, 24 bp, Artificial Sequence
  Synthetic
gggattctacaucttgtgcatugt

SEQ ID NO: 31295 - DNA, 20 bp, Artificial Sequence
  Synthetic
acaaaugagccccgcaguag

SEQ ID NO: 31296 - DNA, 19 bp, Artificial Sequence
  Synthetic
cctgctucacccggtttuc

SEQ ID NO: 31297 - DNA, 24 bp, Artificial Sequence
  Synthetic
tgaaatcttccuctctgtcuccca

SEQ ID NO: 31298 - DNA, 20 bp, Artificial Sequence
  Synthetic
cccccaggautctctgucct

SEQ ID NO: 31299 - DNA, 24 bp, Artificial Sequence
  Synthetic
ggtttcatttugaccctcaaugct

SEQ ID NO: 31300 - DNA, 21 bp, Artificial Sequence
  Synthetic
gagtcccugaaggccatgaut

SEQ ID NO: 31301 - DNA, 21 bp, Artificial Sequence
  Synthetic
gccaugccccttgttcuagac

SEQ ID NO: 31302 - DNA, 22 bp, Artificial Sequence
  Synthetic
ggctggcaucctctgaatcuag

SEQ ID NO: 31303 - DNA, 23 bp, Artificial Sequence
  Synthetic
caugaaggcaaucagcaaaacca

SEQ ID NO: 31304 - DNA, 23 bp, Artificial Sequence
  Synthetic
ggctgatccutctctccacauct

SEQ ID NO: 31305 - DNA, 22 bp, Artificial Sequence
  Synthetic
aacaggtgucctaggtgaguct

SEQ ID NO: 31306 - DNA, 21 bp, Artificial Sequence
  Synthetic
cacccctcautggacccttua

SEQ ID NO: 31307 - DNA, 24 bp, Artificial Sequence
  Synthetic
ggattacaaucctgtgaggucagg

SEQ ID NO: 31308 - DNA, 22 bp, Artificial Sequence
  Synthetic
actgtccuctgtcctctuagcc

SEQ ID NO: 31309 - DNA, 22 bp, Artificial Sequence
  Synthetic
gaacatcagcuctggaaucgga

SEQ ID NO: 31310 - DNA, 18 bp, Artificial Sequence
  Synthetic
cgugggccagaaccucac

SEQ ID NO: 31311 - DNA, 22 bp, Artificial Sequence
  Synthetic
atucaaacacucagggactcuc

SEQ ID NO: 31312 - DNA, 20 bp, Artificial Sequence
  Synthetic
gacacguggcagcuaaacac

SEQ ID NO: 31313 - DNA, 21 bp, Artificial Sequence
  Synthetic
ggagauttggacucccagcac

SEQ ID NO: 31314 - DNA, 21 bp, Artificial Sequence
  Synthetic
ctacacagagaugccgcaugt

SEQ ID NO: 31315 - DNA, 24 bp, Artificial Sequence
  Synthetic
gautctcaggatatuccccagcag

SEQ ID NO: 31316 - DNA, 22 bp, Artificial Sequence
  Synthetic
tgctaggtuggagatgctgtut

SEQ ID NO: 31317 - DNA, 22 bp, Artificial Sequence
  Synthetic
cccgatagtugggatgaagugg

SEQ ID NO: 31318 - DNA, 21 bp, Artificial Sequence
  Synthetic
ggacgagtuctctgtgctcug

SEQ ID NO: 31319 - DNA, 24 bp, Artificial Sequence
  Synthetic
gaagaagttuctagccagucagga

SEQ ID NO: 31320 - DNA, 19 bp, Artificial Sequence
  Synthetic
cctguccggtcugcaacac

SEQ ID NO: 31321 - DNA, 21 bp, Artificial Sequence
  Synthetic
ggccagguaggaagtccuaga

SEQ ID NO: 31322 - DNA, 21 bp, Artificial Sequence
  Synthetic
tgaagaagaugctgcccaucg

SEQ ID NO: 31323 - DNA, 22 bp, Artificial Sequence
  Synthetic
tggcattguggttgttcccuaa

SEQ ID NO: 31324 - DNA, 23 bp, Artificial Sequence
  Synthetic
acccautgagtccucccaaaaac

SEQ ID NO: 31325 - DNA, 21 bp, Artificial Sequence
  Synthetic
ggactcugcgcacgatttuct

SEQ ID NO: 31326 - DNA, 21 bp, Artificial Sequence
  Synthetic
gggatgtgacugtcctgcuat

SEQ ID NO: 31327 - DNA, 23 bp, Artificial Sequence
  Synthetic
cctccattcuccagactcuccag

SEQ ID NO: 31328 - DNA, 21 bp, Artificial Sequence
  Synthetic
gggactcuagaaaccctcucc

SEQ ID NO: 31329 - DNA, 20 bp, Artificial Sequence
  Synthetic
gcccuggcaagagtctucac

SEQ ID NO: 31330 - DNA, 22 bp, Artificial Sequence
  Synthetic
tgcagugcttguccacaaaaag

SEQ ID NO: 31331 - DNA, 24 bp, Artificial Sequence
  Synthetic
tgctgaatgaaugggagatgacug

SEQ ID NO: 31332 - DNA, 21 bp, Artificial Sequence
  Synthetic
ggaacacacugcctuccaact

SEQ ID NO: 31333 - DNA, 24 bp, Artificial Sequence
  Synthetic
cttgccttctuctgaagtccctut

SEQ ID NO: 31334 - DNA, 22 bp, Artificial Sequence
  Synthetic
aggcttcaucacatacccccua

SEQ ID NO: 31335 - DNA, 25 bp, Artificial Sequence
  Synthetic
ggaaucccaaaggaagatgtcucag

SEQ ID NO: 31336 - DNA, 19 bp, Artificial Sequence
  Synthetic
gtgtctuggcgcatcugac

SEQ ID NO: 31337 - DNA, 25 bp, Artificial Sequence
  Synthetic
ctaattcagucaacccttccguacc

SEQ ID NO: 31338 - DNA, 21 bp, Artificial Sequence
  Synthetic
gagacggtucaggtgtgacut

SEQ ID NO: 31339 - DNA, 23 bp, Artificial Sequence
  Synthetic
gacatggcuttggagaagtucct

SEQ ID NO: 31340 - DNA, 21 bp, Artificial Sequence
  Synthetic
catcgtgauccctgatcccut

SEQ ID NO: 31341 - DNA, 22 bp, Artificial Sequence
  Synthetic
cctgagcgagcutcatcaucat

SEQ ID NO: 31342 - DNA, 19 bp, Artificial Sequence
  Synthetic
gtttaggcccugctgggua

SEQ ID NO: 31343 - DNA, 23 bp, Artificial Sequence
  Synthetic
ctttactgtuccctcacccucac

SEQ ID NO: 31344 - DNA, 25 bp, Artificial Sequence
  Synthetic
catccaatguggagatgatccucaa

SEQ ID NO: 31345 - DNA, 21 bp, Artificial Sequence
  Synthetic
gcagagatguctcttgccuga

SEQ ID NO: 31346 - DNA, 18 bp, Artificial Sequence
  Synthetic
cgacaucggctucaacgt

SEQ ID NO: 31347 - DNA, 21 bp, Artificial Sequence
  Synthetic
ctcgaaguagatgcgcucgat

SEQ ID NO: 31348 - DNA, 23 bp, Artificial Sequence
  Synthetic
gacaccaucttcgagaugcagat

SEQ ID NO: 31349 - DNA, 17 bp, Artificial Sequence
  Synthetic
caggcugcggtagcuga

SEQ ID NO: 31350 - DNA, 17 bp, Artificial Sequence
  Synthetic
ggtggccgugaccgaug

SEQ ID NO: 31351 - DNA, 23 bp, Artificial Sequence
  Synthetic
tccaaucccccatcttuccaaaa

SEQ ID NO: 31352 - DNA, 21 bp, Artificial Sequence
  Synthetic
ctcctgaccuctctctgucct

SEQ ID NO: 31353 - DNA, 21 bp, Artificial Sequence
  Synthetic
gtgacctggcuggatcctuac

SEQ ID NO: 31354 - DNA, 23 bp, Artificial Sequence
  Synthetic
cacagaugaatctctguccccat

SEQ ID NO: 31355 - DNA, 23 bp, Artificial Sequence
  Synthetic
ctgtgctttccuccaggaaguag

SEQ ID NO: 31356 - DNA, 21 bp, Artificial Sequence
  Synthetic
cctttggccucctcccacuat

(The sequence listing continues in the following parts.)
